United States Patent Application Publication US 2007/0042381 A1 - sequence listing, part 31

SEQ ID NO: 1369635 - RNA, 21 nt, Human
cuccccagcauuccagccccu

SEQ ID NO: 1369636 - RNA, 17 nt, Human
cuccccacucugcucug

SEQ ID NO: 1369637 - RNA, 16 nt, Human
cuccccacucugcucu

SEQ ID NO: 1369638 - RNA, 14 nt, Human
cuccccacucugcu

SEQ ID NO: 1369639 - RNA, 13 nt, Human
cuccccacucugc

SEQ ID NO: 1369640 - RNA, 12 nt, Human
cuccccacucug

SEQ ID NO: 1369641 - RNA, 16 nt, Human
cuccccacgagggcug

SEQ ID NO: 1369642 - RNA, 20 nt, Human
cuccccacgucagcugggac

SEQ ID NO: 1369643 - RNA, 16 nt, Human
cuccccucuccuuccu

SEQ ID NO: 1369644 - RNA, 17 nt, Human
cuccccagcccagagac

SEQ ID NO: 1369645 - RNA, 16 nt, Human
cuccccagcccagaga

SEQ ID NO: 1369646 - RNA, 15 nt, Human
cuccccagcccagag

SEQ ID NO: 1369647 - RNA, 14 nt, Human
cuccccagcccaga

SEQ ID NO: 1369648 - RNA, 18 nt, Human
cuccccagcccagagaca

SEQ ID NO: 1369649 - RNA, 21 nt, Human
cuccccugcacuguaaaaugu

SEQ ID NO: 1369650 - RNA, 18 nt, Human
cuccccugcacuguaaaa

SEQ ID NO: 1369651 - RNA, 17 nt, Human
cuccccugcacuguaaa

SEQ ID NO: 1369652 - RNA, 16 nt, Human
cuccccugcacuguaa

SEQ ID NO: 1369653 - RNA, 15 nt, Human
cuccccugcacugua

SEQ ID NO: 1369654 - RNA, 14 nt, Human
cuccccugcacugu

SEQ ID NO: 1369655 - RNA, 13 nt, Human
cuccccugcacug

SEQ ID NO: 1369656 - RNA, 12 nt, Human
cuccccugcacu

SEQ ID NO: 1369657 - RNA, 22 nt, Human
cuccccugaccugugagcccag

SEQ ID NO: 1369658 - RNA, 17 nt, Human
cuccccugaccugugag

SEQ ID NO: 1369659 - RNA, 16 nt, Human
cuccccugaccuguga

SEQ ID NO: 1369660 - RNA, 16 nt, Human
cuccccugccagggca

SEQ ID NO: 1369661 - RNA, 15 nt, Human
cuccccugccagggc

SEQ ID NO: 1369662 - RNA, 23 nt, Human
cuccccugccaccaggccaccuc

SEQ ID NO: 1369663 - RNA, 18 nt, Human
cuccccugccaccaggcc

SEQ ID NO: 1369664 - RNA, 13 nt, Human
cuccccugccacc

SEQ ID NO: 1369665 - RNA, 12 nt, Human
cuccccugccac

SEQ ID NO: 1369666 - RNA, 12 nt, Human
cucccuggaaug

SEQ ID NO: 1369667 - RNA, 23 nt, Human
cucccuggaaugaguugaggcca

SEQ ID NO: 1369668 - RNA, 12 nt, Human
cucccuggauga

SEQ ID NO: 1369669 - RNA, 23 nt, Human
cucccuggaucagaacaggagcu

SEQ ID NO: 1369670 - RNA, 18 nt, Human
cucccuggaucagaacag

SEQ ID NO: 1369671 - RNA, 14 nt, Human
cuccccuguaccuu

SEQ ID NO: 1369672 - RNA, 21 nt, Human
cuccccuggagggggaauggc

SEQ ID NO: 1369673 - RNA, 19 nt, Human
cuccccugcacuguaaaau

SEQ ID NO: 1369674 - RNA, 22 nt, Human
cuccccuggaacugucucucau

SEQ ID NO: 1369675 - RNA, 21 nt, Human
cuccccugccagggcagggcc

SEQ ID NO: 1369676 - RNA, 19 nt, Human
cucccgagcuccucuucca

SEQ ID NO: 1369677 - RNA, 18 nt, Human
cucccgagcuccucuucc

SEQ ID NO: 1369678 - RNA, 14 nt, Human
cucccgagcuccuc

SEQ ID NO: 1369679 - RNA, 12 nt, Human
cucccgagcucc

SEQ ID NO: 1369680 - RNA, 24 nt, Human
cucccgagcuccucuuccaugcug

SEQ ID NO: 1369681 - RNA, 13 nt, Human
cucccucaaccuc

SEQ ID NO: 1369682 - RNA, 17 nt, Human
cucccucaaccucaucc

SEQ ID NO: 1369683 - RNA, 15 nt, Human
cuauuuaacugacua

SEQ ID NO: 1369684 - RNA, 14 nt, Human
cuauuuaacugacu

SEQ ID NO: 1369685 - RNA, 13 nt, Human
cuauuuaacugac

SEQ ID NO: 1369686 - RNA, 15 nt, Human
cuauuuaaagccucc

SEQ ID NO: 1369687 - RNA, 17 nt, Human
cuauuuaaaacuuguaa

SEQ ID NO: 1369688 - RNA, 16 nt, Human
cuauuuaaaacuugua

SEQ ID NO: 1369689 - RNA, 21 nt, Human
cuauugcuagagcuccucccu

SEQ ID NO: 1369690 - RNA, 19 nt, Human
cuauugcuagagcuccucc

SEQ ID NO: 1369691 - RNA, 18 nt, Human
cuauugcuagagcuccuc

SEQ ID NO: 1369692 - RNA, 17 nt, Human
cuauugcuagagcuccu

SEQ ID NO: 1369693 - RNA, 14 nt, Human
cuauugcauuuaua

SEQ ID NO: 1369694 - RNA, 17 nt, Human
cuauugcauuuauaugu

SEQ ID NO: 1369695 - RNA, 19 nt, Human
cuauugcauuuauauguac

SEQ ID NO: 1369696 - RNA, 19 nt, Human
cucacacuggucugcuguc

SEQ ID NO: 1369697 - RNA, 18 nt, Human
cucacacuggucugcugu

SEQ ID NO: 1369698 - RNA, 15 nt, Human
cucacaccugaacug

SEQ ID NO: 1369699 - RNA, 23 nt, Human
cucaagguuuuagguucuaaagu

SEQ ID NO: 1369700 - RNA, 22 nt, Human
cucaagguuuuagguucuaaag

SEQ ID NO: 1369701 - RNA, 20 nt, Human
cucaagguuuuagguucuaa

SEQ ID NO: 1369702 - RNA, 19 nt, Human
cucaagguuuuagguucua

SEQ ID NO: 1369703 - RNA, 14 nt, Human
cucaagguuuuagg

SEQ ID NO: 1369704 - RNA, 23 nt, Human
cucaaggcggugcuugauagaaa

SEQ ID NO: 1369705 - RNA, 17 nt, Human
cucaaggcggugcuuga

SEQ ID NO: 1369706 - RNA, 12 nt, Human
cucaagcccugc

SEQ ID NO: 1369707 - RNA, 13 nt, Human
cucaagcccugca

SEQ ID NO: 1369708 - RNA, 23 nt, Human
cucaagcagcgaccgcccccucc

SEQ ID NO: 1369709 - RNA, 22 nt, Human
cucaagcagcgaccgcccccuc

SEQ ID NO: 1369710 - RNA, 18 nt, Human
cuauuucuuaaacacuug

SEQ ID NO: 1369711 - RNA, 16 nt, Human
cuauuucuccuccaug

SEQ ID NO: 1369712 - RNA, 15 nt, Human
cuauuucuccuccau

SEQ ID NO: 1369713 - RNA, 16 nt, Human
cuauuugauguaauac

SEQ ID NO: 1369714 - RNA, 19 nt, Human
cuauuugauguaauacuuc

SEQ ID NO: 1369715 - RNA, 16 nt, Human
cuauuucuuaaacacu

SEQ ID NO: 1369716 - RNA, 14 nt, Human
cucaaauuucuaaa

SEQ ID NO: 1369717 - RNA, 14 nt, Human
cuauuucacuggag

SEQ ID NO: 1369718 - RNA, 13 nt, Human
cuauuucacugga

SEQ ID NO: 1369719 - RNA, 21 nt, Human
cucaacaggccucagggcucc

SEQ ID NO: 1369720 - RNA, 22 nt, Human
cucaacaggccucagggcuccu

SEQ ID NO: 1369721 - RNA, 15 nt, Human
cucaaauuucuaaau

SEQ ID NO: 1369722 - RNA, 17 nt, Human
cucaaauuucuaaaucu

SEQ ID NO: 1369723 - RNA, 23 nt, Human
cucaaccccuccccuccaucccu

SEQ ID NO: 1369724 - RNA, 21 nt, Human
cucaaccccuccccuccaucc

SEQ ID NO: 1369725 - RNA, 19 nt, Human
cucaaccccuccccuccau

SEQ ID NO: 1369726 - RNA, 23 nt, Human
cucaacuccgugcuuaaccaaag

SEQ ID NO: 1369727 - RNA, 12 nt, Human
cuauaauuuaaa

SEQ ID NO: 1369728 - RNA, 13 nt, Human
cuauaauuuaaau

SEQ ID NO: 1369729 - RNA, 23 nt, Human
cuauacugcuuggagcugagcaa

SEQ ID NO: 1369730 - RNA, 21 nt, Human
cuauacugcauacuuuuuaaa

SEQ ID NO: 1369731 - RNA, 19 nt, Human
cuauacugcauacuuuuua

SEQ ID NO: 1369732 - RNA, 17 nt, Human
cuauacugcauacuuuu

SEQ ID NO: 1369733 - RNA, 19 nt, Human
cuauacgcagcgugcuuua

SEQ ID NO: 1369734 - RNA, 13 nt, Human
cuauaccuguguu

SEQ ID NO: 1369735 - RNA, 15 nt, Human
cuauaccaauaaagu

SEQ ID NO: 1369736 - RNA, 16 nt, Human
cuauaccaauaaagug

SEQ ID NO: 1369737 - RNA, 15 nt, Human
cuauacccacccaga

SEQ ID NO: 1369738 - RNA, 16 nt, Human
cuauacccacccagaa

SEQ ID NO: 1369739 - RNA, 19 nt, Human
cuauauagcugaucaguuu

SEQ ID NO: 1369740 - RNA, 19 nt, Human
cuauauaccaaagcacauu

SEQ ID NO: 1369741 - RNA, 19 nt, Human
cuaugaaauauuauguuaa

SEQ ID NO: 1369742 - RNA, 14 nt, Human
cuauauaccaaagc

SEQ ID NO: 1369743 - RNA, 14 nt, Human
cuauaguucuagac

SEQ ID NO: 1369744 - RNA, 13 nt, Human
cuauaguucuaga

SEQ ID NO: 1369745 - RNA, 20 nt, Human
cuauaguuauuaaguucuuu

SEQ ID NO: 1369746 - RNA, 19 nt, Human
cuauauaagacaagaacuc

SEQ ID NO: 1369747 - RNA, 15 nt, Human
cuauaguucuagaca

SEQ ID NO: 1369748 - RNA, 12 nt, Human
cuauacugcuug

SEQ ID NO: 1369749 - RNA, 23 nt, Human
cuauaccuguguuucuugccuca

SEQ ID NO: 1369750 - RNA, 15 nt, Human
cuauagcuaaguaca

SEQ ID NO: 1369751 - RNA, 17 nt, Human
cuauagcuaaguacaca

SEQ ID NO: 1369752 - RNA, 16 nt, Human
cuaugccucucuacag

SEQ ID NO: 1369753 - RNA, 15 nt, Human
cuaugccucucuaca

SEQ ID NO: 1369754 - RNA, 20 nt, Human
cuaugauuuaauuugaaaua

SEQ ID NO: 1369755 - RNA, 19 nt, Human
cuaugauuuaauuugaaau

SEQ ID NO: 1369756 - RNA, 14 nt, Human
cuaugauuauuaac

SEQ ID NO: 1369757 - RNA, 13 nt, Human
cuaugaaggcugu

SEQ ID NO: 1369758 - RNA, 22 nt, Human
cuaugaaguuuuuuuuauacag

SEQ ID NO: 1369759 - RNA, 22 nt, Human
cuauucuuuaacucccauuacc

SEQ ID NO: 1369760 - RNA, 22 nt, Human
cuauucuugauguaaaaucuug

SEQ ID NO: 1369761 - RNA, 20 nt, Human
cuauucuugauguaaaaucu

SEQ ID NO: 1369762 - RNA, 19 nt, Human
cuauucuugauguaaaauc

SEQ ID NO: 1369763 - RNA, 18 nt, Human
cuauucuugauguaaaau

SEQ ID NO: 1369764 - RNA, 17 nt, Human
cuauucuugauguaaaa

SEQ ID NO: 1369765 - RNA, 16 nt, Human
cuauucuugauguaaa

SEQ ID NO: 1369766 - RNA, 14 nt, Human
cuauucuugaugua

SEQ ID NO: 1369767 - RNA, 20 nt, Human
cuauucugucccuagguguu

SEQ ID NO: 1369768 - RNA, 16 nt, Human
cuauucugucccuagg

SEQ ID NO: 1369769 - RNA, 15 nt, Human
cuauucugucccuag

SEQ ID NO: 1369770 - RNA, 14 nt, Human
cuauucugucccua

SEQ ID NO: 1369771 - RNA, 12 nt, Human
cuauucuguccc

SEQ ID NO: 1369772 - RNA, 23 nt, Human
cuauucagcuucguuuauuuuca

SEQ ID NO: 1369773 - RNA, 22 nt, Human
cuauuauuuucacuguagaaug

SEQ ID NO: 1369774 - RNA, 20 nt, Human
cuauuauuuucacuguagaa

SEQ ID NO: 1369775 - RNA, 23 nt, Human
cuauuaugaaugugaagccuucc

SEQ ID NO: 1369776 - RNA, 22 nt, Human
cuauuaugaaugugaagccuuc

SEQ ID NO: 1369777 - RNA, 21 nt, Human
cuauuaugaaugugaagccuu

SEQ ID NO: 1369778 - RNA, 19 nt, Human
cuauuaucugucagcugca

SEQ ID NO: 1369779 - RNA, 17 nt, Human
cuauuauccccauuucu

SEQ ID NO: 1369780 - RNA, 16 nt, Human
cuauuauccccauuuc

SEQ ID NO: 1369781 - RNA, 19 nt, Human
cuauuaucccagcugccua

SEQ ID NO: 1369782 - RNA, 18 nt, Human
cuauuaucccagcugccu

SEQ ID NO: 1369783 - RNA, 22 nt, Human
cuauguaacauguaggaaguag

SEQ ID NO: 1369784 - RNA, 23 nt, Human
cuauggggaagguuaucagugcu

SEQ ID NO: 1369785 - RNA, 17 nt, Human
cuaugcucaggggcccu

SEQ ID NO: 1369786 - RNA, 22 nt, Human
cuaugcucaggggcccuggagc

SEQ ID NO: 1369787 - RNA, 19 nt, Human
cuagcgggauggggcuccc

SEQ ID NO: 1369788 - RNA, 16 nt, Human
cuagcgggauggggcu

SEQ ID NO: 1369789 - RNA, 20 nt, Human
cuagcgcuaucucccugccu

SEQ ID NO: 1369790 - RNA, 17 nt, Human
cuagcgcuaucucccug

SEQ ID NO: 1369791 - RNA, 22 nt, Human
cuagcgcaguuuuuuuuuucuu

SEQ ID NO: 1369792 - RNA, 21 nt, Human
cuagcgcaguuuuuuuuuucu

SEQ ID NO: 1369793 - RNA, 14 nt, Human
cuagcgcaguuuuu

SEQ ID NO: 1369794 - RNA, 15 nt, Human
cuagccuugcuuguu

SEQ ID NO: 1369795 - RNA, 22 nt, Human
cuagccuuggccucuuuccuca

SEQ ID NO: 1369796 - RNA, 14 nt, Human
cuagccuugcuugu

SEQ ID NO: 1369797 - RNA, 13 nt, Human
cuagccuugcuug

SEQ ID NO: 1369798 - RNA, 11 nt, Human
cuagccuugcu

SEQ ID NO: 1369799 - RNA, 22 nt, Human
cuagccuuaaucagguccucag

SEQ ID NO: 1369800 - RNA, 21 nt, Human
cuagauaucgacuuguuuuug

SEQ ID NO: 1369801 - RNA, 14 nt, Human
cuagauaucgacuu

SEQ ID NO: 1369802 - RNA, 24 nt, Human
cuagauacuguaucaugacaaaga

SEQ ID NO: 1369803 - RNA, 13 nt, Human
cuagauacuguau

SEQ ID NO: 1369804 - RNA, 16 nt, Human
cuagauacuguaucau

SEQ ID NO: 1369805 - RNA, 14 nt, Human
cuagcugugggggu

SEQ ID NO: 1369806 - RNA, 17 nt, Human
cuagcuguccuuuuucc

SEQ ID NO: 1369807 - RNA, 20 nt, Human
cuagcugaauguuuuucuaa

SEQ ID NO: 1369808 - RNA, 19 nt, Human
cuagcugaauguuuuucua

SEQ ID NO: 1369809 - RNA, 18 nt, Human
cuagcugaauguuuuucu

SEQ ID NO: 1369810 - RNA, 17 nt, Human
cuagcugaauguuuuuc

SEQ ID NO: 1369811 - RNA, 21 nt, Human
cuagcucuuguugagccgugg

SEQ ID NO: 1369812 - RNA, 15 nt, Human
cuaggaaaauaaaac

SEQ ID NO: 1369813 - RNA, 14 nt, Human
cuaggaaaauaaaa

SEQ ID NO: 1369814 - RNA, 23 nt, Human
cuagcugugugaauaccugcuca

SEQ ID NO: 1369815 - RNA, 23 nt, Human
cuagcuguccuuuuuccucucca

SEQ ID NO: 1369816 - RNA, 20 nt, Human
cuaggaaauauuuauuuuaa

SEQ ID NO: 1369817 - RNA, 19 nt, Human
cuaggaaauauuuauuuua

SEQ ID NO: 1369818 - RNA, 15 nt, Human
cuaggaaauauuuau

SEQ ID NO: 1369819 - RNA, 14 nt, Human
cuaggaaauauuua

SEQ ID NO: 1369820 - RNA, 21 nt, Human
cuacucuccccacgagggcug

SEQ ID NO: 1369821 - RNA, 20 nt, Human
cuacucuccccacgagggcu

SEQ ID NO: 1369822 - RNA, 19 nt, Human
cuacucuccccacgagggc

SEQ ID NO: 1369823 - RNA, 17 nt, Human
cuacucuccccacgagg

SEQ ID NO: 1369824 - RNA, 20 nt, Human
cuacucugugccagagccug

SEQ ID NO: 1369825 - RNA, 19 nt, Human
cuacucugugccagagccu

SEQ ID NO: 1369826 - RNA, 18 nt, Human
cuacucugugccagagcc

SEQ ID NO: 1369827 - RNA, 17 nt, Human
cuacucugugccagagc

SEQ ID NO: 1369828 - RNA, 13 nt, Human
cuacucugugcca

SEQ ID NO: 1369829 - RNA, 22 nt, Human
cuacucuccccacgagggcugg

SEQ ID NO: 1369830 - RNA, 23 nt, Human
cuacucuccccacgagggcuggc

SEQ ID NO: 1369831 - RNA, 14 nt, Human
cuacugauuccgca

SEQ ID NO: 1369832 - RNA, 22 nt, Human
cuacucugugccagagccuggg

SEQ ID NO: 1369833 - RNA, 21 nt, Human
cuacucugugccagagccugg

SEQ ID NO: 1369834 - RNA, 21 nt, Human
cuacugcccaggcacugcaaa

SEQ ID NO: 1369835 - RNA, 15 nt, Human
cuacugcccaggcac

SEQ ID NO: 1369836 - RNA, 21 nt, Human
cuacugccgucagugcugugc

SEQ ID NO: 1369837 - RNA, 20 nt, Human
cuacuggggaaacuggccau

SEQ ID NO: 1369838 - RNA, 22 nt, Human
cuacuggggaaacuggccaugg

SEQ ID NO: 1369839 - RNA, 19 nt, Human
cuacuggggaaacuggcca

SEQ ID NO: 1369840 - RNA, 17 nt, Human
cuacuggggaaacuggc

SEQ ID NO: 1369841 - RNA, 16 nt, Human
cuacuggggaaacugg

SEQ ID NO: 1369842 - RNA, 15 nt, Human
cuacuggggaaacug

SEQ ID NO: 1369843 - RNA, 14 nt, Human
cuacugggaaggcu

SEQ ID NO: 1369844 - RNA, 20 nt, Human
cuacuggucucucuaugccu

SEQ ID NO: 1369845 - RNA, 15 nt, Human
cuacuggucucucua

SEQ ID NO: 1369846 - RNA, 13 nt, Human
cuacuggucucuc

SEQ ID NO: 1369847 - RNA, 18 nt, Human
cuaccucaggcagcucaa

SEQ ID NO: 1369848 - RNA, 17 nt, Human
cuaccucaggcagcuca

SEQ ID NO: 1369849 - RNA, 16 nt, Human
cuaccgucuuuuccug

SEQ ID NO: 1369850 - RNA, 14 nt, Human
cuaccgaguucaag

SEQ ID NO: 1369851 - RNA, 13 nt, Human
cuaccgaguucaa

SEQ ID NO: 1369852 - RNA, 18 nt, Human
cuaccgaaugugucuuua

SEQ ID NO: 1369853 - RNA, 17 nt, Human
cuaccgaaugugucuuu

SEQ ID NO: 1369854 - RNA, 19 nt, Human
cuacccuuuuucuccagcu

SEQ ID NO: 1369855 - RNA, 18 nt, Human
cuacccuuuuucuccagc

SEQ ID NO: 1369856 - RNA, 22 nt, Human
cuaccuccaaagcuucccacgg

SEQ ID NO: 1369857 - RNA, 20 nt, Human
cuagaaacaacacuguagua

SEQ ID NO: 1369858 - RNA, 18 nt, Human
cuagaaacaacacuguag

SEQ ID NO: 1369859 - RNA, 17 nt, Human
cuagaaacaacacugua

SEQ ID NO: 1369860 - RNA, 14 nt, Human
cuagaaacaacacu

SEQ ID NO: 1369861 - RNA, 16 nt, Human
cuagaaaaacaggcac

SEQ ID NO: 1369862 - RNA, 17 nt, Human
cuagaaaaacaggcacu

SEQ ID NO: 1369863 - RNA, 15 nt, Human
cuagaaaaacaggca

SEQ ID NO: 1369864 - RNA, 14 nt, Human
cuagaaaaacaggc

SEQ ID NO: 1369865 - RNA, 11 nt, Human
cuagaaaaaca

SEQ ID NO: 1369866 - RNA, 22 nt, Human
cuacuuacaugcauuacugcau

SEQ ID NO: 1369867 - RNA, 22 nt, Human
cuacuguucuaaagcucugaca

SEQ ID NO: 1369868 - RNA, 20 nt, Human
cuacuguucuaaagcucuga

SEQ ID NO: 1369869 - RNA, 18 nt, Human
cuacuguucuaaagcucu

SEQ ID NO: 1369870 - RNA, 15 nt, Human
cuacuguucuaaagc

SEQ ID NO: 1369871 - RNA, 14 nt, Human
cuacuguucuaaag

SEQ ID NO: 1369872 - RNA, 12 nt, Human
cuacuguucuaa

SEQ ID NO: 1369873 - RNA, 19 nt, Human
cuagaaacaacacuguagu

SEQ ID NO: 1369874 - RNA, 16 nt, Human
cuagaaacuuccaaau

SEQ ID NO: 1369875 - RNA, 14 nt, Human
cuagaaacuuccaa

SEQ ID NO: 1369876 - RNA, 18 nt, Human
cuagagaagacaggcugg

SEQ ID NO: 1369877 - RNA, 22 nt, Human
cuagagaagacaggcuggaaga

SEQ ID NO: 1369878 - RNA, 17 nt, Human
cuagagaagacaggcug

SEQ ID NO: 1369879 - RNA, 15 nt, Human
cuagagaagacaggc

SEQ ID NO: 1369880 - RNA, 21 nt, Human
cuagagaaauaagaucuuuuu

SEQ ID NO: 1369881 - RNA, 19 nt, Human
cuagagaaauaagaucuuu

SEQ ID NO: 1369882 - RNA, 23 nt, Human
cuagaggcuuccuucauuuccuc

SEQ ID NO: 1369883 - RNA, 21 nt, Human
cuagaggcuuccuucauuucc

SEQ ID NO: 1369884 - RNA, 19 nt, Human
cuagaggcuuccuucauuu

SEQ ID NO: 1369885 - RNA, 18 nt, Human
cuagaggcuuccuucauu

SEQ ID NO: 1369886 - RNA, 15 nt, Human
cuagagcagggauua

SEQ ID NO: 1369887 - RNA, 14 nt, Human
cuagagcagggauu

SEQ ID NO: 1369888 - RNA, 18 nt, Human
cuagagcacugccaccag

SEQ ID NO: 1369889 - RNA, 20 nt, Human
cuagagcagacuacagcugg

SEQ ID NO: 1369890 - RNA, 15 nt, Human
cuagagcacugccac

SEQ ID NO: 1369891 - RNA, 14 nt, Human
cuagagcacugcca

SEQ ID NO: 1369892 - RNA, 24 nt, Human
cuagagugacucacuaauucauua

SEQ ID NO: 1369893 - RNA, 19 nt, Human
cuagaguuuagcuggaaaa

SEQ ID NO: 1369894 - RNA, 18 nt, Human
cuagaguuuagcuggaaa

SEQ ID NO: 1369895 - RNA, 17 nt, Human
cuagagguucaaagaua

SEQ ID NO: 1369896 - RNA, 18 nt, Human
cuagagguucaaagauau

SEQ ID NO: 1369897 - RNA, 21 nt, Human
cuagagguucaaagauauuuu

SEQ ID NO: 1369898 - RNA, 17 nt, Human
cugccuuggccucccaa

SEQ ID NO: 1369899 - RNA, 14 nt, Human
cugccuuggccucc

SEQ ID NO: 1369900 - RNA, 22 nt, Human
cugccucuucugggagggcagc

SEQ ID NO: 1369901 - RNA, 17 nt, Human
cugccucuucugggagg

SEQ ID NO: 1369902 - RNA, 16 nt, Human
cugccucuucugggag

SEQ ID NO: 1369903 - RNA, 22 nt, Human
cugccucucugcaggucccuaa

SEQ ID NO: 1369904 - RNA, 20 nt, Human
cugccucucugcaggucccu

SEQ ID NO: 1369905 - RNA, 21 nt, Human
cugccucucugcaggucccua

SEQ ID NO: 1369906 - RNA, 13 nt, Human
cugccuaagcccu

SEQ ID NO: 1369907 - RNA, 23 nt, Human
cugcccuuguuuggggcaggagu

SEQ ID NO: 1369908 - RNA, 22 nt, Human
cugcccuuguuuggggcaggag

SEQ ID NO: 1369909 - RNA, 21 nt, Human
cugcccuuguuuggggcagga

SEQ ID NO: 1369910 - RNA, 17 nt, Human
cugcccuugaucagccc

SEQ ID NO: 1369911 - RNA, 16 nt, Human
cugcccuugaucagcc

SEQ ID NO: 1369912 - RNA, 20 nt, Human
cugcccuuguuuggggcagg

SEQ ID NO: 1369913 - RNA, 12 nt, Human
cugcccuuguuu

SEQ ID NO: 1369914 - RNA, 14 nt, Human
cugccgagcaaccg

SEQ ID NO: 1369915 - RNA, 23 nt, Human
cugccgagaguccaucagccucc

SEQ ID NO: 1369916 - RNA, 22 nt, Human
cugccgagaguccaucagccuc

SEQ ID NO: 1369917 - RNA, 17 nt, Human
cugccgcaacaguuuuu

SEQ ID NO: 1369918 - RNA, 21 nt, Human
cugccgagcaaccguggcccu

SEQ ID NO: 1369919 - RNA, 16 nt, Human
cugccgagcaaccgug

SEQ ID NO: 1369920 - RNA, 21 nt, Human
cugccguggggccgccgccuc

SEQ ID NO: 1369921 - RNA, 20 nt, Human
cugccguggggccgccgccu

SEQ ID NO: 1369922 - RNA, 13 nt, Human
cugccguggggcc

SEQ ID NO: 1369923 - RNA, 21 nt, Human
cugccguccccuagaguccca

SEQ ID NO: 1369924 - RNA, 22 nt, Human
cugccguccccuagagucccag

SEQ ID NO: 1369925 - RNA, 20 nt, Human
cugccgucagugcugugcug

SEQ ID NO: 1369926 - RNA, 19 nt, Human
cugccgucagugcugugcu

SEQ ID NO: 1369927 - RNA, 13 nt, Human
cugccgucagugc

SEQ ID NO: 1369928 - RNA, 23 nt, Human
cugccgguucuuaaauccauccu

SEQ ID NO: 1369929 - RNA, 15 nt, Human
cugccguaauuuaac

SEQ ID NO: 1369930 - RNA, 23 nt, Human
cugccggggcagcccccucacag

SEQ ID NO: 1369931 - RNA, 20 nt, Human
cugccggggcagcccccuca

SEQ ID NO: 1369932 - RNA, 19 nt, Human
cugccggggcagcccccuc

SEQ ID NO: 1369933 - RNA, 17 nt, Human
cugccggggcagccccc

SEQ ID NO: 1369934 - RNA, 13 nt, Human
cugccggggcagc

SEQ ID NO: 1369935 - RNA, 12 nt, Human
cugcccucaugg

SEQ ID NO: 1369936 - RNA, 19 nt, Human
cugcccucauggccccucu

SEQ ID NO: 1369937 - RNA, 19 nt, Human
cucccuucaugcauggaaa

SEQ ID NO: 1369938 - RNA, 17 nt, Human
cugcugccacugagggg

SEQ ID NO: 1369939 - RNA, 16 nt, Human
cugcugccacugaggg

SEQ ID NO: 1369940 - RNA, 15 nt, Human
cugcugccacugagg

SEQ ID NO: 1369941 - RNA, 14 nt, Human
cugcugccacugag

SEQ ID NO: 1369942 - RNA, 13 nt, Human
cugcugccacuga

SEQ ID NO: 1369943 - RNA, 12 nt, Human
cugcugccacug

SEQ ID NO: 1369944 - RNA, 11 nt, Human
cugcugccacu

SEQ ID NO: 1369945 - RNA, 17 nt, Human
cugcugcccauguuuca

SEQ ID NO: 1369946 - RNA, 17 nt, Human
cugcucccaccuccuga

SEQ ID NO: 1369947 - RNA, 16 nt, Human
cugcucccaccuccug

SEQ ID NO: 1369948 - RNA, 22 nt, Human
cugcucccaaggggccugagca

SEQ ID NO: 1369949 - RNA, 23 nt, Human
cugcucccaaggggccugagcag

SEQ ID NO: 1369950 - RNA, 21 nt, Human
cugcucccaaggggccugagc

SEQ ID NO: 1369951 - RNA, 20 nt, Human
cugcucccaaggggccugag

SEQ ID NO: 1369952 - RNA, 18 nt, Human
cugcucccaaggggccug

SEQ ID NO: 1369953 - RNA, 17 nt, Human
cugcucccaaggggccu

SEQ ID NO: 1369954 - RNA, 12 nt, Human
cugcucccaagg

SEQ ID NO: 1369955 - RNA, 18 nt, Human
cugcucuccucuucuacu

SEQ ID NO: 1369956 - RNA, 17 nt, Human
cugcucuccucuucuac

SEQ ID NO: 1369957 - RNA, 14 nt, Human
cugcucuccucuuc

SEQ ID NO: 1369958 - RNA, 13 nt, Human
cugcucuccucuu

SEQ ID NO: 1369959 - RNA, 11 nt, Human
cugcucuccuc

SEQ ID NO: 1369960 - RNA, 15 nt, Human
cugcgagugguuucu

SEQ ID NO: 1369961 - RNA, 20 nt, Human
cugcgacuuucugccuggag

SEQ ID NO: 1369962 - RNA, 19 nt, Human
cugcgacuuucugccugga

SEQ ID NO: 1369963 - RNA, 18 nt, Human
cugcgacuuucugccugg

SEQ ID NO: 1369964 - RNA, 17 nt, Human
cugcgacuuucugccug

SEQ ID NO: 1369965 - RNA, 16 nt, Human
cugcgacuuucugccu

SEQ ID NO: 1369966 - RNA, 14 nt, Human
cugcgacuuucugc

SEQ ID NO: 1369967 - RNA, 15 nt, Human
cugccuuuauugugu

SEQ ID NO: 1369968 - RNA, 17 nt, Human
cugccuuuauuguguuu

SEQ ID NO: 1369969 - RNA, 18 nt, Human
cugccuuuauuguguuug

SEQ ID NO: 1369970 - RNA, 14 nt, Human
cugccuuguguaca

SEQ ID NO: 1369971 - RNA, 12 nt, Human
cugccuuuauug

SEQ ID NO: 1369972 - RNA, 19 nt, Human
cugcuggggaagacagugg

SEQ ID NO: 1369973 - RNA, 18 nt, Human
cugcuggggaagacagug

SEQ ID NO: 1369974 - RNA, 17 nt, Human
cugcuggggaagacagu

SEQ ID NO: 1369975 - RNA, 15 nt, Human
cugcuggggaagaca

SEQ ID NO: 1369976 - RNA, 14 nt, Human
cugcuggggaagac

SEQ ID NO: 1369977 - RNA, 22 nt, Human
cugcuggggaagacaguggccc

SEQ ID NO: 1369978 - RNA, 21 nt, Human
cugcuggggaagacaguggcc

SEQ ID NO: 1369979 - RNA, 20 nt, Human
cugcuggggaagacaguggc

SEQ ID NO: 1369980 - RNA, 16 nt, Human
cugcuggccucugcga

SEQ ID NO: 1369981 - RNA, 21 nt, Human
cugcuggccucugcgaguggu

SEQ ID NO: 1369982 - RNA, 15 nt, Human
cugcuggccucugcg

SEQ ID NO: 1369983 - RNA, 14 nt, Human
cugcuggccucugc

SEQ ID NO: 1369984 - RNA, 19 nt, Human
cugcuggagaggccccagc

SEQ ID NO: 1369985 - RNA, 21 nt, Human
cugcuggaguuucauguacaa

SEQ ID NO: 1369986 - RNA, 20 nt, Human
cugcuggaguuucauguaca

SEQ ID NO: 1369987 - RNA, 21 nt, Human
cugcuggagaggccccagccg

SEQ ID NO: 1369988 - RNA, 18 nt, Human
cugcuggagaggccccag

SEQ ID NO: 1369989 - RNA, 15 nt, Human
cugcuggagaggccc

SEQ ID NO: 1369990 - RNA, 17 nt, Human
cugcugcugucugggug

SEQ ID NO: 1369991 - RNA, 18 nt, Human
cugcugcugucugggugc

SEQ ID NO: 1369992 - RNA, 16 nt, Human
cugcugcugucugggu

SEQ ID NO: 1369993 - RNA, 17 nt, Human
cugcugcugggcucagu

SEQ ID NO: 1369994 - RNA, 14 nt, Human
cugcugcugucccu

SEQ ID NO: 1369995 - RNA, 16 nt, Human
cugcugcugggcucag

SEQ ID NO: 1369996 - RNA, 15 nt, Human
cugcugcugggcuca

SEQ ID NO: 1369997 - RNA, 14 nt, Human
cugcugcugggcuc

SEQ ID NO: 1369998 - RNA, 13 nt, Human
cugcugcugggcu

SEQ ID NO: 1369999 - RNA, 12 nt, Human
cugcugcugggc

SEQ ID NO: 1370000 - RNA, 23 nt, Human
cugcugcugagaaccuggccuuc

SEQ ID NO: 1370001 - RNA, 20 nt, Human
cugcugcugagaaccuggcc

SEQ ID NO: 1370002 - RNA, 19 nt, Human
cugcugcugagaaccuggc

SEQ ID NO: 1370003 - RNA, 17 nt, Human
cugcugcugagaaccug

SEQ ID NO: 1370004 - RNA, 16 nt, Human
cugcugcugagaaccu

SEQ ID NO: 1370005 - RNA, 14 nt, Human
cugcugcugagaac

SEQ ID NO: 1370006 - RNA, 13 nt, Human
cugcugcugagaa

SEQ ID NO: 1370007 - RNA, 11 nt, Human
cugcugcugag

SEQ ID NO: 1370008 - RNA, 23 nt, Human
cugcugcucuuggcuggacccag

SEQ ID NO: 1370009 - RNA, 22 nt, Human
cugcugcugagaaccuggccuu

SEQ ID NO: 1370010 - RNA, 21 nt, Human
cugcugcugagaaccuggccu

SEQ ID NO: 1370011 - RNA, 14 nt, Human
cugcugcugccugc

SEQ ID NO: 1370012 - RNA, 15 nt, Human
cugcugcugccugcc

SEQ ID NO: 1370013 - RNA, 22 nt, Human
cugcugcucuuggcuggaccca

SEQ ID NO: 1370014 - RNA, 21 nt, Human
cugcugcucuuggcuggaccc

SEQ ID NO: 1370015 - RNA, 15 nt, Human
cugcugcucuuggcu

SEQ ID NO: 1370016 - RNA, 23 nt, Human
cugcugcucccucagacuggggc

SEQ ID NO: 1370017 - RNA, 21 nt, Human
cugcugcucccucagacuggg

SEQ ID NO: 1370018 - RNA, 17 nt, Human
cugcugcucccucagac

SEQ ID NO: 1370019 - RNA, 16 nt, Human
cugcugcucccucaga

SEQ ID NO: 1370020 - RNA, 15 nt, Human
cugcugcucccucag

SEQ ID NO: 1370021 - RNA, 14 nt, Human
cugcugcucccuca

SEQ ID NO: 1370022 - RNA, 13 nt, Human
cugcugcucccuc

SEQ ID NO: 1370023 - RNA, 12 nt, Human
cugcugcucccu

SEQ ID NO: 1370024 - RNA, 16 nt, Human
cugcugcuacaauguc

SEQ ID NO: 1370025 - RNA, 17 nt, Human
cuggaccucugacagca

SEQ ID NO: 1370026 - RNA, 15 nt, Human
cuggaccucugacag

SEQ ID NO: 1370027 - RNA, 13 nt, Human
cuggaccucugac

SEQ ID NO: 1370028 - RNA, 13 nt, Human
cuggaccucacca

SEQ ID NO: 1370029 - RNA, 15 nt, Human
cuggacccuguugcu

SEQ ID NO: 1370030 - RNA, 16 nt, Human
cuggacccuguugcua

SEQ ID NO: 1370031 - RNA, 17 nt, Human
cuggacccuguugcuaa

SEQ ID NO: 1370032 - RNA, 18 nt, Human
cuggacccuguugcuaag

SEQ ID NO: 1370033 - RNA, 21 nt, Human
cuggaccucugacagcagcau

SEQ ID NO: 1370034 - RNA, 14 nt, Human
cuggaccucugggu

SEQ ID NO: 1370035 - RNA, 19 nt, Human
cuggaccucugacagcagc

SEQ ID NO: 1370036 - RNA, 18 nt, Human
cuggaccucugacagcag

SEQ ID NO: 1370037 - RNA, 23 nt, Human
cuggaccccugcauuggaacugg

SEQ ID NO: 1370038 - RNA, 18 nt, Human
cuggaccccugcauugga

SEQ ID NO: 1370039 - RNA, 15 nt, Human
cuggaccccugcauu

SEQ ID NO: 1370040 - RNA, 14 nt, Human
cuggaccccugcau

SEQ ID NO: 1370041 - RNA, 13 nt, Human
cuggaccccugca

SEQ ID NO: 1370042 - RNA, 23 nt, Human
cuggaccccccuuucacaggcag

SEQ ID NO: 1370043 - RNA, 22 nt, Human
cuggaccccccuuucacaggca

SEQ ID NO: 1370044 - RNA, 19 nt, Human
cuggaccccccuuucacag

SEQ ID NO: 1370045 - RNA, 21 nt, Human
cuggacccugaccagcucccc

SEQ ID NO: 1370046 - RNA, 20 nt, Human
cuggacccugaccagcuccc

SEQ ID NO: 1370047 - RNA, 14 nt, Human
cuggacccuguugc

SEQ ID NO: 1370048 - RNA, 13 nt, Human
cuggacccugacc

SEQ ID NO: 1370049 - RNA, 12 nt, Human
cuggacccugac

SEQ ID NO: 1370050 - RNA, 23 nt, Human
cuggacccguucaugggggaggg

SEQ ID NO: 1370051 - RNA, 20 nt, Human
cuggacccguucauggggga

SEQ ID NO: 1370052 - RNA, 15 nt, Human
cuggagaucaccagu

SEQ ID NO: 1370053 - RNA, 22 nt, Human
cuggacccagccaggcccagcc

SEQ ID NO: 1370054 - RNA, 21 nt, Human
cuggacccagccaggcccagc

SEQ ID NO: 1370055 - RNA, 20 nt, Human
cuggacccagccaggcccag

SEQ ID NO: 1370056 - RNA, 19 nt, Human
cuggacccagccaggccca

SEQ ID NO: 1370057 - RNA, 18 nt, Human
cuggacccagccaggccc

SEQ ID NO: 1370058 - RNA, 17 nt, Human
cuggacccagccaggcc

SEQ ID NO: 1370059 - RNA, 17 nt, Human
cuggacccagccagaac

SEQ ID NO: 1370060 - RNA, 14 nt, Human
cuggacccagccag

SEQ ID NO: 1370061 - RNA, 13 nt, Human
cuggacccagcca

SEQ ID NO: 1370062 - RNA, 12 nt, Human
cuggacccagcc

SEQ ID NO: 1370063 - RNA, 11 nt, Human
cuggacccagc

SEQ ID NO: 1370064 - RNA, 18 nt, Human
cuggaccagccucuccac

SEQ ID NO: 1370065 - RNA, 14 nt, Human
cuggaccagccucu

SEQ ID NO: 1370066 - RNA, 17 nt, Human
cuggacacucagaccug

SEQ ID NO: 1370067 - RNA, 16 nt, Human
cuggacacucagaccu

SEQ ID NO: 1370068 - RNA, 15 nt, Human
cuggacacucagacc

SEQ ID NO: 1370069 - RNA, 14 nt, Human
cugcuuccuccugg

SEQ ID NO: 1370070 - RNA, 13 nt, Human
cugcuuccuccug

SEQ ID NO: 1370071 - RNA, 12 nt, Human
cugcuuccuccu

SEQ ID NO: 1370072 - RNA, 15 nt, Human
cugcuucccugaagc

SEQ ID NO: 1370073 - RNA, 16 nt, Human
cugcuucccugaagcu

SEQ ID NO: 1370074 - RNA, 14 nt, Human
cugcuuccagugua

SEQ ID NO: 1370075 - RNA, 18 nt, Human
cugcuuccuccuggaaau

SEQ ID NO: 1370076 - RNA, 16 nt, Human
cugcuuccuccuggaa

SEQ ID NO: 1370077 - RNA, 15 nt, Human
cugcuuccuccugga

SEQ ID NO: 1370078 - RNA, 13 nt, Human
cuggaauuugaaa

SEQ ID NO: 1370079 - RNA, 15 nt, Human
cuggagucaaaacac

SEQ ID NO: 1370080 - RNA, 20 nt, Human
cuggagggggaauggcagca

SEQ ID NO: 1370081 - RNA, 19 nt, Human
cuggagggggaauggcagc

SEQ ID NO: 1370082 - RNA, 15 nt, Human
cuggagggggaaugg

SEQ ID NO: 1370083 - RNA, 13 nt, Human
cuggaggggaggg

SEQ ID NO: 1370084 - RNA, 20 nt, Human
cuggagggguguggcuccuu

SEQ ID NO: 1370085 - RNA, 16 nt, Human
cuggagggguguggcu

SEQ ID NO: 1370086 - RNA, 22 nt, Human
cuggagggggaauggcagcagg

SEQ ID NO: 1370087 - RNA, 21 nt, Human
cuggagggggaauggcagcag

SEQ ID NO: 1370088 - RNA, 14 nt, Human
cuggaggccccaac

SEQ ID NO: 1370089 - RNA, 21 nt, Human
cuggaggcccaguucacccug

SEQ ID NO: 1370090 - RNA, 15 nt, Human
cuggaggcccaguuc

SEQ ID NO: 1370091 - RNA, 14 nt, Human
cuggaggcccaguu

SEQ ID NO: 1370092 - RNA, 13 nt, Human
cuggaggcccagu

SEQ ID NO: 1370093 - RNA, 19 nt, Human
cuggaggcccaggcuggga

SEQ ID NO: 1370094 - RNA, 18 nt, Human
cuggaggcccaggcuggg

SEQ ID NO: 1370095 - RNA, 17 nt, Human
cuggaggcccaggcugg

SEQ ID NO: 1370096 - RNA, 15 nt, Human
cuggaggcccaggcu

SEQ ID NO: 1370097 - RNA, 14 nt, Human
cuggaggcccaggc

SEQ ID NO: 1370098 - RNA, 13 nt, Human
cuggaggcccagg

SEQ ID NO: 1370099 - RNA, 12 nt, Human
cuggaggcccag

SEQ ID NO: 1370100 - RNA, 22 nt, Human
cuggaggcaggggcuuccuggu

SEQ ID NO: 1370101 - RNA, 21 nt, Human
cuggaggcaggggcuuccugg

SEQ ID NO: 1370102 - RNA, 20 nt, Human
cuggaggcaggggcuuccug

SEQ ID NO: 1370103 - RNA, 19 nt, Human
cuggaggcaggggcuuccu

SEQ ID NO: 1370104 - RNA, 18 nt, Human
cuggaggcaggggcuucc

SEQ ID NO: 1370105 - RNA, 15 nt, Human
cuggaggcagggaac

SEQ ID NO: 1370106 - RNA, 24 nt, Human
cuggaggcaccugguggccaugcu

SEQ ID NO: 1370107 - RNA, 22 nt, Human
cuggagcacaauaaauggcugu

SEQ ID NO: 1370108 - RNA, 13 nt, Human
cuggagccccauc

SEQ ID NO: 1370109 - RNA, 15 nt, Human
cuggagcccuggaga

SEQ ID NO: 1370110 - RNA, 17 nt, Human
cuggagauccuccugca

SEQ ID NO: 1370111 - RNA, 16 nt, Human
cuggagauccuccugc

SEQ ID NO: 1370112 - RNA, 15 nt, Human
cuggagauccuccug

SEQ ID NO: 1370113 - RNA, 14 nt, Human
cuggagauccuccu

SEQ ID NO: 1370114 - RNA, 20 nt, Human
cuggagauccuccugcagac

SEQ ID NO: 1370115 - RNA, 18 nt, Human
cuggagauccuccugcag

SEQ ID NO: 1370116 - RNA, 23 nt, Human
cuggagauccuccugcagaccac

SEQ ID NO: 1370117 - RNA, 16 nt, Human
cuggagaugaggccag

SEQ ID NO: 1370118 - RNA, 17 nt, Human
cuggagaugaggccaga

SEQ ID NO: 1370119 - RNA, 18 nt, Human
cuggagaugaggccagac

SEQ ID NO: 1370120 - RNA, 20 nt, Human
cuggagaugaggccagacca

SEQ ID NO: 1370121 - RNA, 23 nt, Human
cuggagcacaaagacccuggcuu

SEQ ID NO: 1370122 - RNA, 22 nt, Human
cuggagcacaaagacccuggcu

SEQ ID NO: 1370123 - RNA, 19 nt, Human
cuggagcacaaagacccug

SEQ ID NO: 1370124 - RNA, 16 nt, Human
cuggagcacaaagacc

SEQ ID NO: 1370125 - RNA, 13 nt, Human
cuggagcacaaag

SEQ ID NO: 1370126 - RNA, 19 nt, Human
cuggagaugaggccagacc

SEQ ID NO: 1370127 - RNA, 15 nt, Human
cuggcugagggcagu

SEQ ID NO: 1370128 - RNA, 23 nt, Human
cuggcugagggcaguucgcagcc

SEQ ID NO: 1370129 - RNA, 13 nt, Human
cuggcugagggca

SEQ ID NO: 1370130 - RNA, 12 nt, Human
cuggcugagggc

SEQ ID NO: 1370131 - RNA, 13 nt, Human
cuggcuaaagcuc

SEQ ID NO: 1370132 - RNA, 15 nt, Human
cuggcggggggccca

SEQ ID NO: 1370133 - RNA, 16 nt, Human
cuggcggggggcccau

SEQ ID NO: 1370134 - RNA, 20 nt, Human
cuggcggcuggggucccagc

SEQ ID NO: 1370135 - RNA, 22 nt, Human
cuggcggcuggggucccagcag

SEQ ID NO: 1370136 - RNA, 19 nt, Human
cuggcggcuggggucccag

SEQ ID NO: 1370137 - RNA, 18 nt, Human
cuggcggcugggguccca

SEQ ID NO: 1370138 - RNA, 18 nt, Human
cuggccuugccacacucu

SEQ ID NO: 1370139 - RNA, 19 nt, Human
cuggccuggccauacugug

SEQ ID NO: 1370140 - RNA, 19 nt, Human
cuggccuggccagugcccu

SEQ ID NO: 1370141 - RNA, 12 nt, Human
cuggccucugcg

SEQ ID NO: 1370142 - RNA, 22 nt, Human
cuggccuggacuguuuucucuc

SEQ ID NO: 1370143 - RNA, 17 nt, Human
cuggccuggccagugcc

SEQ ID NO: 1370144 - RNA, 15 nt, Human
cuggccuggccagug

SEQ ID NO: 1370145 - RNA, 14 nt, Human
cuggccuggccagu

SEQ ID NO: 1370146 - RNA, 13 nt, Human
cuggccuggccag

SEQ ID NO: 1370147 - RNA, 18 nt, Human
cuggccuggacuguuuuc

SEQ ID NO: 1370148 - RNA, 14 nt, Human
cuggccucugcuuu

SEQ ID NO: 1370149 - RNA, 23 nt, Human
cuggcccagggcccagagcccag

SEQ ID NO: 1370150 - RNA, 22 nt, Human
cuggcccagggcccagagccca

SEQ ID NO: 1370151 - RNA, 21 nt, Human
cuggcccagggcccagagccc

SEQ ID NO: 1370152 - RNA, 20 nt, Human
cuggcccagggcccagagcc

SEQ ID NO: 1370153 - RNA, 19 nt, Human
cuggcccagggcccagagc

SEQ ID NO: 1370154 - RNA, 18 nt, Human
cuggcccagggcccagag

SEQ ID NO: 1370155 - RNA, 17 nt, Human
cuggcccagggcccaga

SEQ ID NO: 1370156 - RNA, 22 nt, Human
cuggcccaucaggguaggcugg

SEQ ID NO: 1370157 - RNA, 13 nt, Human
cuggcccaucagg

SEQ ID NO: 1370158 - RNA, 23 nt, Human
cuggccccacccucguggacacc

SEQ ID NO: 1370159 - RNA, 13 nt, Human
cuggccccaggac

SEQ ID NO: 1370160 - RNA, 12 nt, Human
cuggccccaccc

SEQ ID NO: 1370161 - RNA, 11 nt, Human
cuggcccagcc

SEQ ID NO: 1370162 - RNA, 16 nt, Human
cuggccauggagaaag

SEQ ID NO: 1370163 - RNA, 15 nt, Human
cuggccauggagaaa

SEQ ID NO: 1370164 - RNA, 12 nt, Human
cuggccauggag

SEQ ID NO: 1370165 - RNA, 16 nt, Human
cuggcccagggcccag

SEQ ID NO: 1370166 - RNA, 21 nt, Human
cuggccagugcccugauccca

SEQ ID NO: 1370167 - RNA, 20 nt, Human
cuggccagugcccugauccc

SEQ ID NO: 1370168 - RNA, 17 nt, Human
cuggccagugcccugau

SEQ ID NO: 1370169 - RNA, 23 nt, Human
cuggccaguccaggcugccgugg

SEQ ID NO: 1370170 - RNA, 22 nt, Human
cuggccaguccaggcugccgug

SEQ ID NO: 1370171 - RNA, 20 nt, Human
cuggccaguguuuaaaacuu

SEQ ID NO: 1370172 - RNA, 13 nt, Human
cuggccaguguuu

SEQ ID NO: 1370173 - RNA, 22 nt, Human
cuggccagugcccugaucccag

SEQ ID NO: 1370174 - RNA, 15 nt, Human
cuggccaguguuuaa

SEQ ID NO: 1370175 - RNA, 16 nt, Human
cuggccauacuguguc

SEQ ID NO: 1370176 - RNA, 23 nt, Human
cuggcaucgcaccauucugacuc

SEQ ID NO: 1370177 - RNA, 22 nt, Human
cuggcaucgcaccauucugacu

SEQ ID NO: 1370178 - RNA, 20 nt, Human
cuggcaucgcaccauucuga

SEQ ID NO: 1370179 - RNA, 19 nt, Human
cuggcaucgcaccauucug

SEQ ID NO: 1370180 - RNA, 18 nt, Human
cuggcaucgcaccauucu

SEQ ID NO: 1370181 - RNA, 17 nt, Human
cuggcaucgcaccauuc

SEQ ID NO: 1370182 - RNA, 19 nt, Human
cuggcauacuauguggaug

SEQ ID NO: 1370183 - RNA, 22 nt, Human
cuggcaguuuauauuuaacucu

SEQ ID NO: 1370184 - RNA, 20 nt, Human
cuggcaguuuauauuuaacu

SEQ ID NO: 1370185 - RNA, 19 nt, Human
cuggcaguccgugggacgg

SEQ ID NO: 1370186 - RNA, 22 nt, Human
cuggcaguccuggaagccagcu

SEQ ID NO: 1370187 - RNA, 16 nt, Human
cuggcaguccguggga

SEQ ID NO: 1370188 - RNA, 19 nt, Human
cuggcaguggaacuaagaa

SEQ ID NO: 1370189 - RNA, 19 nt, Human
cuggccagacacaggcccu

SEQ ID NO: 1370190 - RNA, 18 nt, Human
cuggccagacacaggccc

SEQ ID NO: 1370191 - RNA, 17 nt, Human
cuggccagacacaggcc

SEQ ID NO: 1370192 - RNA, 15 nt, Human
cuggccagacacagg

SEQ ID NO: 1370193 - RNA, 13 nt, Human
cuggccagacaca

SEQ ID NO: 1370194 - RNA, 21 nt, Human
cuggccaguccaggcugccgu

SEQ ID NO: 1370195 - RNA, 19 nt, Human
cuggccaguccaggcugcc

SEQ ID NO: 1370196 - RNA, 21 nt, Human
cuggccagacacaggcccucc

SEQ ID NO: 1370197 - RNA, 14 nt, Human
cuggagugcagugg

SEQ ID NO: 1370198 - RNA, 20 nt, Human
cugguacucccucucaggau

SEQ ID NO: 1370199 - RNA, 19 nt, Human
cugguacucccucucagga

SEQ ID NO: 1370200 - RNA, 18 nt, Human
cugguacucccucucagg

SEQ ID NO: 1370201 - RNA, 16 nt, Human
cugguacccuccuggc

SEQ ID NO: 1370202 - RNA, 15 nt, Human
cugguacccuccugg

SEQ ID NO: 1370203 - RNA, 14 nt, Human
cugguacccuccug

SEQ ID NO: 1370204 - RNA, 23 nt, Human
cugguacaguauggggguuguaa

SEQ ID NO: 1370205 - RNA, 21 nt, Human
cuggggugcagggaugugggu

SEQ ID NO: 1370206 - RNA, 21 nt, Human
cuggggugacccggcaccccc

SEQ ID NO: 1370207 - RNA, 22 nt, Human
cuggggucuggaguugaucugg

SEQ ID NO: 1370208 - RNA, 13 nt, Human
cuggggucuggag

SEQ ID NO: 1370209 - RNA, 22 nt, Human
cuggggucccagcagcugccag

SEQ ID NO: 1370210 - RNA, 20 nt, Human
cuggggucccagcagcugcc

SEQ ID NO: 1370211 - RNA, 18 nt, Human
cuggggucccagcagcug

SEQ ID NO: 1370212 - RNA, 16 nt, Human
cuggggucccagcagc

SEQ ID NO: 1370213 - RNA, 15 nt, Human
cuggggucccagcag

SEQ ID NO: 1370214 - RNA, 14 nt, Human
cuggggucccagca

SEQ ID NO: 1370215 - RNA, 13 nt, Human
cuggggucccagc

SEQ ID NO: 1370216 - RNA, 15 nt, Human
cugggggguggccag

SEQ ID NO: 1370217 - RNA, 23 nt, Human
cuggguacuucuugaaggugcug

SEQ ID NO: 1370218 - RNA, 20 nt, Human
cuggguacuucuugaaggug

SEQ ID NO: 1370219 - RNA, 17 nt, Human
cuggguacuucuugaag

SEQ ID NO: 1370220 - RNA, 15 nt, Human
cuggguacuucuuga

SEQ ID NO: 1370221 - RNA, 16 nt, Human
cuggguaauaaaagug

SEQ ID NO: 1370222 - RNA, 18 nt, Human
cuggguaaugaaacaaag

SEQ ID NO: 1370223 - RNA, 20 nt, Human
cuggggugcagggauguggg

SEQ ID NO: 1370224 - RNA, 15 nt, Human
cuggggugcagggau

SEQ ID NO: 1370225 - RNA, 12 nt, Human
cuggggugcagg

SEQ ID NO: 1370226 - RNA, 13 nt, Human
cugggggguggcc

SEQ ID NO: 1370227 - RNA, 12 nt, Human
cugggggguggc

SEQ ID NO: 1370228 - RNA, 20 nt, Human
cugggggcacaagacugacg

SEQ ID NO: 1370229 - RNA, 22 nt, Human
cugggggcacaagacugacgcc

SEQ ID NO: 1370230 - RNA, 18 nt, Human
cugggggcacaagacuga

SEQ ID NO: 1370231 - RNA, 15 nt, Human
cuggggcuggccucc

SEQ ID NO: 1370232 - RNA, 18 nt, Human
cuggggcuggccucccaa

SEQ ID NO: 1370233 - RNA, 14 nt, Human
cuggggcuggccuc

SEQ ID NO: 1370234 - RNA, 19 nt, Human
cugggcuuccuggagcaga

SEQ ID NO: 1370235 - RNA, 22 nt, Human
cugggcuuccuggagcagaagc

SEQ ID NO: 1370236 - RNA, 17 nt, Human
cugggcuuccuggagca

SEQ ID NO: 1370237 - RNA, 16 nt, Human
cugggcuuccuggagc

SEQ ID NO: 1370238 - RNA, 15 nt, Human
cugggcuuccuggag

SEQ ID NO: 1370239 - RNA, 14 nt, Human
cugggcuuccugga

SEQ ID NO: 1370240 - RNA, 13 nt, Human
cugggcuuccugg

SEQ ID NO: 1370241 - RNA, 12 nt, Human
cugggcuuccug

SEQ ID NO: 1370242 - RNA, 19 nt, Human
cugggcuucaucuggcaac

SEQ ID NO: 1370243 - RNA, 15 nt, Human
cugggcuucaucugg

SEQ ID NO: 1370244 - RNA, 22 nt, Human
cugguggcccucuccccugccc

SEQ ID NO: 1370245 - RNA, 20 nt, Human
cugguggcccucuccccugc

SEQ ID NO: 1370246 - RNA, 18 nt, Human
cugguggcccucuccccu

SEQ ID NO: 1370247 - RNA, 17 nt, Human
cugguggcccucucccc

SEQ ID NO: 1370248 - RNA, 21 nt, Human
cugguucccguuucuccaccu

SEQ ID NO: 1370249 - RNA, 18 nt, Human
cugguucccguuucucca

SEQ ID NO: 1370250 - RNA, 14 nt, Human
cuguaauguuaaua

SEQ ID NO: 1370251 - RNA, 18 nt, Human
cuguaaugguacugacuu

SEQ ID NO: 1370252 - RNA, 14 nt, Human
cuguaaucuaugaa

SEQ ID NO: 1370253 - RNA, 19 nt, Human
cuguaaucauauaauaaau

SEQ ID NO: 1370254 - RNA, 19 nt, Human
cuguaauguuaauauugau

SEQ ID NO: 1370255 - RNA, 18 nt, Human
cuguaauguuaauauuga

SEQ ID NO: 1370256 - RNA, 17 nt, Human
cuguaauguuaauauug

SEQ ID NO: 1370257 - RNA, 15 nt, Human
cuguaauguuaauau

SEQ ID NO: 1370258 - RNA, 22 nt, Human
cuguaaugugcgagggacccag

SEQ ID NO: 1370259 - RNA, 21 nt, Human
cugguccuauggccucauguu

SEQ ID NO: 1370260 - RNA, 17 nt, Human
cugguccuauggccuca

SEQ ID NO: 1370261 - RNA, 21 nt, Human
cugguccgugggacggugccc

SEQ ID NO: 1370262 - RNA, 19 nt, Human
cugguccgugggacggugc

SEQ ID NO: 1370263 - RNA, 16 nt, Human
cugguccgugggacgg

SEQ ID NO: 1370264 - RNA, 15 nt, Human
cugguccgugggacg

SEQ ID NO: 1370265 - RNA, 22 nt, Human
cuggucccuuguauccccugca

SEQ ID NO: 1370266 - RNA, 24 nt, Human
cuggucccuuguauccccugcagg

SEQ ID NO: 1370267 - RNA, 19 nt, Human
cuggucccuuguauccccu

SEQ ID NO: 1370268 - RNA, 23 nt, Human
cuggucccuguuuucccacgagg

SEQ ID NO: 1370269 - RNA, 17 nt, Human
cugguauuguucucaca

SEQ ID NO: 1370270 - RNA, 21 nt, Human
cugguacucccucucaggauc

SEQ ID NO: 1370271 - RNA, 20 nt, Human
cuggucaacuugagcauguu

SEQ ID NO: 1370272 - RNA, 19 nt, Human
cuggucaacuugagcaugu

SEQ ID NO: 1370273 - RNA, 9 nt, Human
cuggucccu

SEQ ID NO: 1370274 - RNA, 19 nt, Human
cuggugcugccucuaccug

SEQ ID NO: 1370275 - RNA, 14 nt, Human
cuggugcugccucu

SEQ ID NO: 1370276 - RNA, 21 nt, Human
cuguccccugcuacaccuauu

SEQ ID NO: 1370277 - RNA, 15 nt, Human
cuguccccugcuaca

SEQ ID NO: 1370278 - RNA, 21 nt, Human
cugucccuccgggaccuggug

SEQ ID NO: 1370279 - RNA, 17 nt, Human
cugucccuccgggaccu

SEQ ID NO: 1370280 - RNA, 19 nt, Human
cuguccaggcacugagaua

SEQ ID NO: 1370281 - RNA, 22 nt, Human
cuguccucagccuugccagaga

SEQ ID NO: 1370282 - RNA, 21 nt, Human
cuguccucagccuugccagag

SEQ ID NO: 1370283 - RNA, 20 nt, Human
cuguccucagccuugccaga

SEQ ID NO: 1370284 - RNA, 18 nt, Human
cuguccucagccuugcca

SEQ ID NO: 1370285 - RNA, 14 nt, Human
cuguccucagccuu

SEQ ID NO: 1370286 - RNA, 21 nt, Human
cuguccguucacauguguggu

SEQ ID NO: 1370287 - RNA, 18 nt, Human
cugucuacuugcucaggu

SEQ ID NO: 1370288 - RNA, 20 nt, Human
cugucuacuugcucagguac

SEQ ID NO: 1370289 - RNA, 23 nt, Human
cuguccuccaacaccaagcacag

SEQ ID NO: 1370290 - RNA, 15 nt, Human
cuguccuccaacacc

SEQ ID NO: 1370291 - RNA, 14 nt, Human
cuguccagcuccaa

SEQ ID NO: 1370292 - RNA, 13 nt, Human
cuguccagcucca

SEQ ID NO: 1370293 - RNA, 12 nt, Human
cuguccagcucc

SEQ ID NO: 1370294 - RNA, 16 nt, Human
cuguccaggcacugag

SEQ ID NO: 1370295 - RNA, 21 nt, Human
cuguccagcuccaaccugcaa

SEQ ID NO: 1370296 - RNA, 18 nt, Human
cuguccagcuccaaccug

SEQ ID NO: 1370297 - RNA, 17 nt, Human
cuguccagcuccaaccu

SEQ ID NO: 1370298 - RNA, 14 nt, Human
cugucaaggcucag

SEQ ID NO: 1370299 - RNA, 13 nt, Human
cugucaaggcuca

SEQ ID NO: 1370300 - RNA, 23 nt, Human
cuguauccagguucccucccaga

SEQ ID NO: 1370301 - RNA, 20 nt, Human
cuguauuuuaaaagaaugau

SEQ ID NO: 1370302 - RNA, 22 nt, Human
cuguauuuuaaaagaaugauua

SEQ ID NO: 1370303 - RNA, 20 nt, Human
cuguagugucacucaaggcg

SEQ ID NO: 1370304 - RNA, 20 nt, Human
cuguagugcuacagggucca

SEQ ID NO: 1370305 - RNA, 16 nt, Human
cuguagugcuacaggg

SEQ ID NO: 1370306 - RNA, 15 nt, Human
cuguacacugcacga

SEQ ID NO: 1370307 - RNA, 13 nt, Human
cuguacacugcac

SEQ ID NO: 1370308 - RNA, 22 nt, Human
cuguacacaacucacuccuuuu

SEQ ID NO: 1370309 - RNA, 20 nt, Human
cuguacacaacucacuccuu

SEQ ID NO: 1370310 - RNA, 17 nt, Human
cuguacacaacucacuc

SEQ ID NO: 1370311 - RNA, 16 nt, Human
cuguacacaacucacu

SEQ ID NO: 1370312 - RNA, 14 nt, Human
cuguauaaaugucu

SEQ ID NO: 1370313 - RNA, 15 nt, Human
cuguauaaaugucuu

SEQ ID NO: 1370314 - RNA, 23 nt, Human
cuguaucaggacccagaggaagg

SEQ ID NO: 1370315 - RNA, 22 nt, Human
cuguaucaggacccagaggaag

SEQ ID NO: 1370316 - RNA, 16 nt, Human
cuguaucaggacccag

SEQ ID NO: 1370317 - RNA, 22 nt, Human
cuguauauuacagauauuuguc

SEQ ID NO: 1370318 - RNA, 14 nt, Human
cuguauauucagga

SEQ ID NO: 1370319 - RNA, 15 nt, Human
cuguauauacuuuuu

SEQ ID NO: 1370320 - RNA, 14 nt, Human
cuguauauacuuuu

SEQ ID NO: 1370321 - RNA, 18 nt, Human
cuguggcaggccagcugu

SEQ ID NO: 1370322 - RNA, 23 nt, Human
cuguggcaggccagcugugguuu

SEQ ID NO: 1370323 - RNA, 23 nt, Human
cuguggcagaguuacaguucugu

SEQ ID NO: 1370324 - RNA, 22 nt, Human
cuguggcagaguuacaguucug

SEQ ID NO: 1370325 - RNA, 19 nt, Human
cuguggcagaguuacaguu

SEQ ID NO: 1370326 - RNA, 18 nt, Human
cuguggcagaguuacagu

SEQ ID NO: 1370327 - RNA, 17 nt, Human
cuguggcagaguuacag

SEQ ID NO: 1370328 - RNA, 23 nt, Human
cuguggauuuuuuccuucaaagu

SEQ ID NO: 1370329 - RNA, 20 nt, Human
cuguggcgccgucuccaggg

SEQ ID NO: 1370330 - RNA, 19 nt, Human
cuguggcgccgucuccagg

SEQ ID NO: 1370331 - RNA, 17 nt, Human
cuguggcgccgucucca

SEQ ID NO: 1370332 - RNA, 18 nt, Human
cuguggcaugggugaaga

SEQ ID NO: 1370333 - RNA, 19 nt, Human
cuguggcaggccagcugug

SEQ ID NO: 1370334 - RNA, 24 nt, Human
cuguggcgccgucuccaggggcug

SEQ ID NO: 1370335 - RNA, 21 nt, Human
cuguggcgccgucuccagggg

SEQ ID NO: 1370336 - RNA, 17 nt, Human
cugugcuuuuaaaugca

SEQ ID NO: 1370337 - RNA, 21 nt, Human
cugugcuucgggcccuuccca

SEQ ID NO: 1370338 - RNA, 20 nt, Human
cugugcuucgggcccuuccc

SEQ ID NO: 1370339 - RNA, 16 nt, Human
cugugccucagagacc

SEQ ID NO: 1370340 - RNA, 13 nt, Human
cugugcugugugu

SEQ ID NO: 1370341 - RNA, 11 nt, Human
cugugcugugu

SEQ ID NO: 1370342 - RNA, 14 nt, Human
cugugcuggccagc

SEQ ID NO: 1370343 - RNA, 16 nt, Human
cugugcuuaugguacc

SEQ ID NO: 1370344 - RNA, 18 nt, Human
cugugcugugugugacgu

SEQ ID NO: 1370345 - RNA, 19 nt, Human
cugugcuucgggcccuucc

SEQ ID NO: 1370346 - RNA, 17 nt, Human
cugugcuucgggcccuu

SEQ ID NO: 1370347 - RNA, 13 nt, Human
cugugcuggccag

SEQ ID NO: 1370348 - RNA, 12 nt, Human
cugugcuggcca

SEQ ID NO: 1370349 - RNA, 24 nt, Human
cugugccucgcuccccacucugcu

SEQ ID NO: 1370350 - RNA, 23 nt, Human
cugugccucgcuccccacucugc

SEQ ID NO: 1370351 - RNA, 22 nt, Human
cugugccucgcuccccacucug

SEQ ID NO: 1370352 - RNA, 17 nt, Human
cugugccucgcucccca

SEQ ID NO: 1370353 - RNA, 21 nt, Human
cugugccuccucccucccucu

SEQ ID NO: 1370354 - RNA, 18 nt, Human
cugugccuccucccuccc

SEQ ID NO: 1370355 - RNA, 17 nt, Human
cugugccuccucccucc

SEQ ID NO: 1370356 - RNA, 16 nt, Human
cugugccuccucccuc

SEQ ID NO: 1370357 - RNA, 15 nt, Human
cugugccuccucccu

SEQ ID NO: 1370358 - RNA, 14 nt, Human
cugugccuccuccc

SEQ ID NO: 1370359 - RNA, 19 nt, Human
cugugccucagagaccagg

SEQ ID NO: 1370360 - RNA, 16 nt, Human
cugugccuccucaccc

SEQ ID NO: 1370361 - RNA, 15 nt, Human
cugugccuccucacc

SEQ ID NO: 1370362 - RNA, 13 nt, Human
cugugccuccuca

SEQ ID NO: 1370363 - RNA, 22 nt, Human
cugugccucagagaccagggcu

SEQ ID NO: 1370364 - RNA, 18 nt, Human
cugugccucagagaccag

SEQ ID NO: 1370365 - RNA, 15 nt, Human
cugugccauguguuu

SEQ ID NO: 1370366 - RNA, 21 nt, Human
cugugcacaucugugucuugu

SEQ ID NO: 1370367 - RNA, 20 nt, Human
cugugcacaucugugucuug

SEQ ID NO: 1370368 - RNA, 21 nt, Human
cugugcacaccccacucccac

SEQ ID NO: 1370369 - RNA, 17 nt, Human
cugugcacaccccacuc

SEQ ID NO: 1370370 - RNA, 22 nt, Human
cugugcacaaaacccagaccug

SEQ ID NO: 1370371 - RNA, 19 nt, Human
cugugcacaucugugucuu

SEQ ID NO: 1370372 - RNA, 18 nt, Human
cugugcacaucugugucu

SEQ ID NO: 1370373 - RNA, 22 nt, Human
cugugcacaccccacucccaca

SEQ ID NO: 1370374 - RNA, 18 nt, Human
cugugaguucucccugua

SEQ ID NO: 1370375 - RNA, 20 nt, Human
cugugcacaaaacccagacc

SEQ ID NO: 1370376 - RNA, 19 nt, Human
cugugcacaaaacccagac

SEQ ID NO: 1370377 - RNA, 20 nt, Human
cugugcaagguauuacacuc

SEQ ID NO: 1370378 - RNA, 16 nt, Human
cugugcaaggccuggu

SEQ ID NO: 1370379 - RNA, 17 nt, Human
cugugaguucucccugu

SEQ ID NO: 1370380 - RNA, 16 nt, Human
cugugaguucucccug

SEQ ID NO: 1370381 - RNA, 22 nt, Human
cugugaguucucccuguacagu

SEQ ID NO: 1370382 - RNA, 15 nt, Human
cugugaguucucccu

SEQ ID NO: 1370383 - RNA, 23 nt, Human
cugugagucuuugguucuaagga

SEQ ID NO: 1370384 - RNA, 22 nt, Human
cugugagucuuugguucuaagg

SEQ ID NO: 1370385 - RNA, 21 nt, Human
cugugagucuuugguucuaag

SEQ ID NO: 1370386 - RNA, 20 nt, Human
cugugagucuuugguucuaa

SEQ ID NO: 1370387 - RNA, 17 nt, Human
cugucuccucucucugu

SEQ ID NO: 1370388 - RNA, 17 nt, Human
cugucucaccuggacuu

SEQ ID NO: 1370389 - RNA, 14 nt, Human
cugucucaccugga

SEQ ID NO: 1370390 - RNA, 12 nt, Human
cugucucaccug

SEQ ID NO: 1370391 - RNA, 20 nt, Human
cugucucaagcucuuccuua

SEQ ID NO: 1370392 - RNA, 18 nt, Human
cugucucaagcucuuccu

SEQ ID NO: 1370393 - RNA, 13 nt, Human
cugucucagggug

SEQ ID NO: 1370394 - RNA, 20 nt, Human
cugucuccauggcccugcaa

SEQ ID NO: 1370395 - RNA, 21 nt, Human
cugucucccuccucugcccgg

SEQ ID NO: 1370396 - RNA, 13 nt, Human
cugucuccuagga

SEQ ID NO: 1370397 - RNA, 19 nt, Human
cugucuccuaccucugcuc

SEQ ID NO: 1370398 - RNA, 22 nt, Human
cugucuccuaagcuggagugca

SEQ ID NO: 1370399 - RNA, 15 nt, Human
cuguucucuugggaa

SEQ ID NO: 1370400 - RNA, 19 nt, Human
cuguucuaguuuuuuacuu

SEQ ID NO: 1370401 - RNA, 14 nt, Human
cuguucuaguuuuu

SEQ ID NO: 1370402 - RNA, 12 nt, Human
cuguucuaguuu

SEQ ID NO: 1370403 - RNA, 16 nt, Human
cuguucuaaagcucug

SEQ ID NO: 1370404 - RNA, 19 nt, Human
cuguucuacauagaugcuu

SEQ ID NO: 1370405 - RNA, 16 nt, Human
cuguuccugcugcugu

SEQ ID NO: 1370406 - RNA, 15 nt, Human
cuguuccugcugcug

SEQ ID NO: 1370407 - RNA, 14 nt, Human
cuguuccugcugcu

SEQ ID NO: 1370408 - RNA, 13 nt, Human
cuguuccugcugc

SEQ ID NO: 1370409 - RNA, 12 nt, Human
cuguuccugcug

SEQ ID NO: 1370410 - RNA, 17 nt, Human
cuguucccccugugcag

SEQ ID NO: 1370411 - RNA, 16 nt, Human
cuguucccccugugca

SEQ ID NO: 1370412 - RNA, 15 nt, Human
cuguucccccugugc

SEQ ID NO: 1370413 - RNA, 12 nt, Human
cuguucccccug

SEQ ID NO: 1370414 - RNA, 14 nt, Human
cuguuccuuuuaua

SEQ ID NO: 1370415 - RNA, 22 nt, Human
cuguuccuucccugugccuccu

SEQ ID NO: 1370416 - RNA, 13 nt, Human
cuguuccuucccu

SEQ ID NO: 1370417 - RNA, 21 nt, Human
cuguuccugcugcugucuggg

SEQ ID NO: 1370418 - RNA, 18 nt, Human
cuguuccugcugcugucu

SEQ ID NO: 1370419 - RNA, 17 nt, Human
cuguuccugcugcuguc

SEQ ID NO: 1370420 - RNA, 20 nt, Human
cuguucuacauagaugcuua

SEQ ID NO: 1370421 - RNA, 17 nt, Human
cuguucuaaagcucuga

SEQ ID NO: 1370422 - RNA, 12 nt, Human
cuguucuaaagc

SEQ ID NO: 1370423 - RNA, 12 nt, Human
cuguuccuuuua

SEQ ID NO: 1370424 - RNA, 18 nt, Human
cuguuacacuuuuuggaa

SEQ ID NO: 1370425 - RNA, 19 nt, Human
cuguuacacuuuuuggaag

SEQ ID NO: 1370426 - RNA, 20 nt, Human
cuguuccagugguaagcuau

SEQ ID NO: 1370427 - RNA, 22 nt, Human
cuguuccaaauucaguuucaua

SEQ ID NO: 1370428 - RNA, 21 nt, Human
cuguuccaaauucaguuucau

SEQ ID NO: 1370429 - RNA, 20 nt, Human
cuguuccaaauucaguuuca

SEQ ID NO: 1370430 - RNA, 18 nt, Human
cuguuccaaauucaguuu

SEQ ID NO: 1370431 - RNA, 17 nt, Human
cuguuccaaauucaguu

SEQ ID NO: 1370432 - RNA, 14 nt, Human
cuguuccaaauuca

SEQ ID NO: 1370433 - RNA, 11 nt, Human
cuguuccaaau

SEQ ID NO: 1370434 - RNA, 23 nt, Human
cuguucauggcagauguaggagg

SEQ ID NO: 1370435 - RNA, 16 nt, Human
cuguuccccagagaaa

SEQ ID NO: 1370436 - RNA, 15 nt, Human
cuguuccccagagaa

SEQ ID NO: 1370437 - RNA, 14 nt, Human
cuguuccccagaga

SEQ ID NO: 1370438 - RNA, 13 nt, Human
cuguuccccagag

SEQ ID NO: 1370439 - RNA, 23 nt, Human
cuguucaugaaagauucaaugcc

SEQ ID NO: 1370440 - RNA, 18 nt, Human
cuguucaugaaagauuca

SEQ ID NO: 1370441 - RNA, 17 nt, Human
cuguucaugaaagauuc

SEQ ID NO: 1370442 - RNA, 14 nt, Human
cuguucauggcaga

SEQ ID NO: 1370443 - RNA, 15 nt, Human
cuguucauuccucca

SEQ ID NO: 1370444 - RNA, 16 nt, Human
cuguucauuccuccag

SEQ ID NO: 1370445 - RNA, 17 nt, Human
cuguucauuccuccagg

SEQ ID NO: 1370446 - RNA, 17 nt, Human
cuguucauuuccucaaa

SEQ ID NO: 1370447 - RNA, 14 nt, Human
cuguucauuuccuc

SEQ ID NO: 1370448 - RNA, 22 nt, Human
cuguucauuccuccagguauuc

SEQ ID NO: 1370449 - RNA, 16 nt, Human
cuguguuuugaaagaa

SEQ ID NO: 1370450 - RNA, 22 nt, Human
cuguguuuggcuuucagggagg

SEQ ID NO: 1370451 - RNA, 23 nt, Human
cuguguuuggcuuucagggaggc

SEQ ID NO: 1370452 - RNA, 18 nt, Human
cuguguuuggcuuucagg

SEQ ID NO: 1370453 - RNA, 17 nt, Human
cuguguuuggcuuucag

SEQ ID NO: 1370454 - RNA, 16 nt, Human
cuguguuuggcuuuca

SEQ ID NO: 1370455 - RNA, 18 nt, Human
cuguguuucuugccucau

SEQ ID NO: 1370456 - RNA, 17 nt, Human
cuguguuucuugccuca

SEQ ID NO: 1370457 - RNA, 15 nt, Human
cuguguuucuugccu

SEQ ID NO: 1370458 - RNA, 13 nt, Human
cuguguuucuugc

SEQ ID NO: 1370459 - RNA, 23 nt, Human
cuguguuuccaucucaaagaagg

SEQ ID NO: 1370460 - RNA, 15 nt, Human
cuguguuuccaucuc

SEQ ID NO: 1370461 - RNA, 20 nt, Human
cuguguguuaagcucugcua

SEQ ID NO: 1370462 - RNA, 19 nt, Human
cuguguguuaagcucugcu

SEQ ID NO: 1370463 - RNA, 18 nt, Human
cuguguguuaagcucugc

SEQ ID NO: 1370464 - RNA, 17 nt, Human
cuguguguuaagcucug

SEQ ID NO: 1370465 - RNA, 21 nt, Human
cugugugugugaaugaacacu

SEQ ID NO: 1370466 - RNA, 23 nt, Human
cugugugugugaaugaacacucu

SEQ ID NO: 1370467 - RNA, 18 nt, Human
cugugugugugaaugaac

SEQ ID NO: 1370468 - RNA, 17 nt, Human
cugugugugugaaugaa

SEQ ID NO: 1370469 - RNA, 16 nt, Human
cugugugugugaauga

SEQ ID NO: 1370470 - RNA, 14 nt, Human
cugugugugugaau

SEQ ID NO: 1370471 - RNA, 12 nt, Human
cuguguguguga

SEQ ID NO: 1370472 - RNA, 15 nt, Human
cugugggcuggcagu

SEQ ID NO: 1370473 - RNA, 21 nt, Human
cugugggggguaaucccugcu

SEQ ID NO: 1370474 - RNA, 19 nt, Human
cugugugcucaggagcccu

SEQ ID NO: 1370475 - RNA, 16 nt, Human
cugugugcucaggagc

SEQ ID NO: 1370476 - RNA, 20 nt, Human
cugugugcucaggagcccug

SEQ ID NO: 1370477 - RNA, 21 nt, Human
cugugugcucaggagcccugg

SEQ ID NO: 1370478 - RNA, 13 nt, Human
cugugugcuuuuu

SEQ ID NO: 1370479 - RNA, 23 nt, Human
cugugugcucaggagcccuggga

SEQ ID NO: 1370480 - RNA, 23 nt, Human
cuguguggagagggaaugugaaa

SEQ ID NO: 1370481 - RNA, 22 nt, Human
cuguguggagagggaaugugaa

SEQ ID NO: 1370482 - RNA, 16 nt, Human
cuguguggagagggaa

SEQ ID NO: 1370483 - RNA, 15 nt, Human
cuguguggagaggga

SEQ ID NO: 1370484 - RNA, 12 nt, Human
cuguguggagag

SEQ ID NO: 1370485 - RNA, 20 nt, Human
cugugugcuuuuuuugugug

SEQ ID NO: 1370486 - RNA, 15 nt, Human
cuguguggcagucug

SEQ ID NO: 1370487 - RNA, 21 nt, Human
cuucuggggcaggcugggcca

SEQ ID NO: 1370488 - RNA, 22 nt, Human
cuucuggggcaggcugggccau

SEQ ID NO: 1370489 - RNA, 20 nt, Human
cuucuggggcaggcugggcc

SEQ ID NO: 1370490 - RNA, 19 nt, Human
cuucuggggcaggcugggc

SEQ ID NO: 1370491 - RNA, 16 nt, Human
cuucuggggcaggcug

SEQ ID NO: 1370492 - RNA, 15 nt, Human
cuucuggggcaggcu

SEQ ID NO: 1370493 - RNA, 14 nt, Human
cuucuggggcaggc

SEQ ID NO: 1370494 - RNA, 22 nt, Human
cuucugggcuucaucuggcaac

SEQ ID NO: 1370495 - RNA, 21 nt, Human
cuucugggcuucaucuggcaa

SEQ ID NO: 1370496 - RNA, 16 nt, Human
cuucugggccugacca

SEQ ID NO: 1370497 - RNA, 23 nt, Human
cuucugggagggcagcagggcua

SEQ ID NO: 1370498 - RNA, 22 nt, Human
cuucugggagggcagcagggcu

SEQ ID NO: 1370499 - RNA, 18 nt, Human
cuucugccuuagucucag

SEQ ID NO: 1370500 - RNA, 16 nt, Human
cuucugccuggagacu

SEQ ID NO: 1370501 - RNA, 15 nt, Human
cuucugccuggagac

SEQ ID NO: 1370502 - RNA, 14 nt, Human
cuucugccuggaga

SEQ ID NO: 1370503 - RNA, 13 nt, Human
cuucugccuggag

SEQ ID NO: 1370504 - RNA, 17 nt, Human
cuucugcccccugcaga

SEQ ID NO: 1370505 - RNA, 16 nt, Human
cuucugcccccugcag

SEQ ID NO: 1370506 - RNA, 15 nt, Human
cuucugcccccugca

SEQ ID NO: 1370507 - RNA, 21 nt, Human
cuucucugacuucugccugga

SEQ ID NO: 1370508 - RNA, 19 nt, Human
cuucugcuggggccuggga

SEQ ID NO: 1370509 - RNA, 21 nt, Human
cuucugcuggggccugggaca

SEQ ID NO: 1370510 - RNA, 18 nt, Human
cuucugcuggggccuggg

SEQ ID NO: 1370511 - RNA, 15 nt, Human
cuucugcuggggccu

SEQ ID NO: 1370512 - RNA, 13 nt, Human
cuucugcuggggc

SEQ ID NO: 1370513 - RNA, 20 nt, Human
cuucuguaauuguguggauu

SEQ ID NO: 1370514 - RNA, 15 nt, Human
cuucuguaauugugu

SEQ ID NO: 1370515 - RNA, 16 nt, Human
cuucucucugugggau

SEQ ID NO: 1370516 - RNA, 13 nt, Human
cuucucucucccu

SEQ ID NO: 1370517 - RNA, 14 nt, Human
cuucucuccagugc

SEQ ID NO: 1370518 - RNA, 19 nt, Human
cuucucuccagcugacuaa

SEQ ID NO: 1370519 - RNA, 18 nt, Human
cuucucuccagcugacua

SEQ ID NO: 1370520 - RNA, 17 nt, Human
cuucucuccagcugacu

SEQ ID NO: 1370521 - RNA, 16 nt, Human
cuucucuccagcugac

SEQ ID NO: 1370522 - RNA, 15 nt, Human
cuucucuccagcuga

SEQ ID NO: 1370523 - RNA, 14 nt, Human
cuucucuccagcug

SEQ ID NO: 1370524 - RNA, 20 nt, Human
cuucucugacuucugccugg

SEQ ID NO: 1370525 - RNA, 17 nt, Human
cuucucugacuucugcc

SEQ ID NO: 1370526 - RNA, 16 nt, Human
cuucucugacuucugc

SEQ ID NO: 1370527 - RNA, 15 nt, Human
cuucucugacuucug

SEQ ID NO: 1370528 - RNA, 14 nt, Human
cuucucugacuucu

SEQ ID NO: 1370529 - RNA, 12 nt, Human
cuucucugacuu

SEQ ID NO: 1370530 - RNA, 13 nt, Human
cuucucucugugg

SEQ ID NO: 1370531 - RNA, 16 nt, Human
cuucuccucuccuagc

SEQ ID NO: 1370532 - RNA, 16 nt, Human
cuucucccuggaauga

SEQ ID NO: 1370533 - RNA, 13 nt, Human
cuucucccuggaa

SEQ ID NO: 1370534 - RNA, 22 nt, Human
cuucuccccugcacuguaaaau

SEQ ID NO: 1370535 - RNA, 23 nt, Human
cuucuccccugcacuguaaaaug

SEQ ID NO: 1370536 - RNA, 21 nt, Human
cuucuccccugcacuguaaaa

SEQ ID NO: 1370537 - RNA, 20 nt, Human
cuucuccccugcacuguaaa

SEQ ID NO: 1370538 - RNA, 19 nt, Human
cuucuccccugcacuguaa

SEQ ID NO: 1370539 - RNA, 18 nt, Human
cuucuccccugcacugua

SEQ ID NO: 1370540 - RNA, 17 nt, Human
cuucuccccugcacugu

SEQ ID NO: 1370541 - RNA, 16 nt, Human
cuucuccccugcacug

SEQ ID NO: 1370542 - RNA, 14 nt, Human
cuucuccccugcac

SEQ ID NO: 1370543 - RNA, 13 nt, Human
cuucuccccugca

SEQ ID NO: 1370544 - RNA, 15 nt, Human
cuuccuggugcugga

SEQ ID NO: 1370545 - RNA, 23 nt, Human
cuuccugguagaccacugccaua

SEQ ID NO: 1370546 - RNA, 23 nt, Human
cuuccuggggcaucuggcgaauc

SEQ ID NO: 1370547 - RNA, 20 nt, Human
cuuccuggggcaucuggcga

SEQ ID NO: 1370548 - RNA, 11 nt, Human
cuuccuggccg

SEQ ID NO: 1370549 - RNA, 19 nt, Human
cuuccuggccgccuggguc

SEQ ID NO: 1370550 - RNA, 22 nt, Human
cuuccuggagcagaagcagcaa

SEQ ID NO: 1370551 - RNA, 16 nt, Human
cuuccuguccagcucc

SEQ ID NO: 1370552 - RNA, 18 nt, Human
cuugagcucuauuaugaa

SEQ ID NO: 1370553 - RNA, 16 nt, Human
cuugagcucuauuaug

SEQ ID NO: 1370554 - RNA, 15 nt, Human
cuugagcucuauuau

SEQ ID NO: 1370555 - RNA, 14 nt, Human
cuugagcucuauua

SEQ ID NO: 1370556 - RNA, 12 nt, Human
cuugagcucuau

SEQ ID NO: 1370557 - RNA, 11 nt, Human
cuugagcucua

SEQ ID NO: 1370558 - RNA, 15 nt, Human
cuugaggucucagcc

SEQ ID NO: 1370559 - RNA, 14 nt, Human
cuugaggucucagc

SEQ ID NO: 1370560 - RNA, 23 nt, Human
cuugaccugaggcuguggucaca

SEQ ID NO: 1370561 - RNA, 20 nt, Human
cuugaccugaggcugugguc

SEQ ID NO: 1370562 - RNA, 17 nt, Human
cuugaccugaggcugug

SEQ ID NO: 1370563 - RNA, 14 nt, Human
cuugaccugaggcu

SEQ ID NO: 1370564 - RNA, 14 nt, Human
cuugacccugagcu

SEQ ID NO: 1370565 - RNA, 15 nt, Human
cuugacccugagcug

SEQ ID NO: 1370566 - RNA, 12 nt, Human
cuugaccuccua

SEQ ID NO: 1370567 - RNA, 15 nt, Human
cuugagccuugaacu

SEQ ID NO: 1370568 - RNA, 17 nt, Human
cuugagccuugaacuuu

SEQ ID NO: 1370569 - RNA, 18 nt, Human
cuugagccuugaacuuug

SEQ ID NO: 1370570 - RNA, 13 nt, Human
cuugacccugagc

SEQ ID NO: 1370571 - RNA, 22 nt, Human
cuugaacguuuucuaauugcuu

SEQ ID NO: 1370572 - RNA, 22 nt, Human
cuugaagaacugcaggcccugg

SEQ ID NO: 1370573 - RNA, 20 nt, Human
cuugaagaacugcaggcccu

SEQ ID NO: 1370574 - RNA, 18 nt, Human
cuugaagaacugcaggcc

SEQ ID NO: 1370575 - RNA, 17 nt, Human
cuugaagaacugcaggc

SEQ ID NO: 1370576 - RNA, 12 nt, Human
cuugaagaacug

SEQ ID NO: 1370577 - RNA, 21 nt, Human
cuugaacguuuucuaauugcu

SEQ ID NO: 1370578 - RNA, 19 nt, Human
cuugaacguuuucuaauug

SEQ ID NO: 1370579 - RNA, 17 nt, Human
cuugaacuuugaccucu

SEQ ID NO: 1370580 - RNA, 21 nt, Human
cuugaacuuugaccucugcag

SEQ ID NO: 1370581 - RNA, 18 nt, Human
cuugaacguuuucuaauu

SEQ ID NO: 1370582 - RNA, 17 nt, Human
cuugaacguuuucuaau

SEQ ID NO: 1370583 - RNA, 16 nt, Human
cuugaacguuuucuaa

SEQ ID NO: 1370584 - RNA, 23 nt, Human
cuugaacccaggucucccuggau

SEQ ID NO: 1370585 - RNA, 21 nt, Human
cuucuugcuucuuucuagaaa

SEQ ID NO: 1370586 - RNA, 20 nt, Human
cuucuugcuucuuucuagaa

SEQ ID NO: 1370587 - RNA, 18 nt, Human
cuucuugccucugugcug

SEQ ID NO: 1370588 - RNA, 17 nt, Human
cuucuugccucugugcu

SEQ ID NO: 1370589 - RNA, 16 nt, Human
cuucuugccucugugc

SEQ ID NO: 1370590 - RNA, 15 nt, Human
cuucuugccucugug

SEQ ID NO: 1370591 - RNA, 13 nt, Human
cuucuugccucug

SEQ ID NO: 1370592 - RNA, 16 nt, Human
cuucuuguguguaugc

SEQ ID NO: 1370593 - RNA, 16 nt, Human
cuugaaaauaagaaua

SEQ ID NO: 1370594 - RNA, 20 nt, Human
cuugaaaaaaaacaguggau

SEQ ID NO: 1370595 - RNA, 15 nt, Human
cuugaaaaagacauu

SEQ ID NO: 1370596 - RNA, 18 nt, Human
cuugaaaaaaaacagugg

SEQ ID NO: 1370597 - RNA, 16 nt, Human
cuugaaaaaaaacagu

SEQ ID NO: 1370598 - RNA, 14 nt, Human
cuugaaaaaaaaca

SEQ ID NO: 1370599 - RNA, 14 nt, Human
cuucuuuagaacag

SEQ ID NO: 1370600 - RNA, 12 nt, Human
cuugaaaaaugc

SEQ ID NO: 1370601 - RNA, 18 nt, Human
cuugaaaaaugcauguug

SEQ ID NO: 1370602 - RNA, 17 nt, Human
cuugaaauuuuaaccua

SEQ ID NO: 1370603 - RNA, 16 nt, Human
cuugaaauuuuaaccu

SEQ ID NO: 1370604 - RNA, 15 nt, Human
cuugaaauuuuaacc

SEQ ID NO: 1370605 - RNA, 19 nt, Human
cuugaaagaagaaaagguu

SEQ ID NO: 1370606 - RNA, 21 nt, Human
cuugaaagaagaaaagguucu

SEQ ID NO: 1370607 - RNA, 12 nt, Human
cuugaaaauuaa

SEQ ID NO: 1370608 - RNA, 13 nt, Human
cuugaaaauuaac

SEQ ID NO: 1370609 - RNA, 13 nt, Human
cuugaaagaaaug

SEQ ID NO: 1370610 - RNA, 22 nt, Human
cuugaaaauaagaauagaaaua

SEQ ID NO: 1370611 - RNA, 18 nt, Human
cuugaaaauuaacaugaa

SEQ ID NO: 1370612 - RNA, 23 nt, Human
cuucaguacccucucagcuccag

SEQ ID NO: 1370613 - RNA, 22 nt, Human
cuucaguacccucucagcucca

SEQ ID NO: 1370614 - RNA, 19 nt, Human
cuucaguacccucucagcu

SEQ ID NO: 1370615 - RNA, 21 nt, Human
cuucaccauuuggcaaugcca

SEQ ID NO: 1370616 - RNA, 12 nt, Human
cuucauuucaga

SEQ ID NO: 1370617 - RNA, 19 nt, Human
cuucauugccuuaacugga

SEQ ID NO: 1370618 - RNA, 21 nt, Human
cuucauucaagucagcucuuc

SEQ ID NO: 1370619 - RNA, 15 nt, Human
cuuccacugagggca

SEQ ID NO: 1370620 - RNA, 14 nt, Human
cuuccacugagggc

SEQ ID NO: 1370621 - RNA, 20 nt, Human
cuuccacguacugcagccuc

SEQ ID NO: 1370622 - RNA, 19 nt, Human
cuuccacguacugcagccu

SEQ ID NO: 1370623 - RNA, 13 nt, Human
cuuccacccaggg

SEQ ID NO: 1370624 - RNA, 12 nt, Human
cuuccacccagu

SEQ ID NO: 1370625 - RNA, 14 nt, Human
cuuccacccagugc

SEQ ID NO: 1370626 - RNA, 21 nt, Human
cuuccccuuauccucccugua

SEQ ID NO: 1370627 - RNA, 20 nt, Human
cuuccccuuauccucccugu

SEQ ID NO: 1370628 - RNA, 18 nt, Human
cuuccccuuauccucccu

SEQ ID NO: 1370629 - RNA, 17 nt, Human
cuucccccucucccagu

SEQ ID NO: 1370630 - RNA, 16 nt, Human
cuucccccucucccag

SEQ ID NO: 1370631 - RNA, 18 nt, Human
cuucccccucucccaguu

SEQ ID NO: 1370632 - RNA, 15 nt, Human
cuucccaucgcuguc

SEQ ID NO: 1370633 - RNA, 17 nt, Human
cuucccauccccagcga

SEQ ID NO: 1370634 - RNA, 15 nt, Human
cuucccauccccagc

SEQ ID NO: 1370635 - RNA, 14 nt, Human
cuucccauccccag

SEQ ID NO: 1370636 - RNA, 21 nt, Human
cuuccaggggagguucaguga

SEQ ID NO: 1370637 - RNA, 23 nt, Human
cuucccuguuuuccccccaaggg

SEQ ID NO: 1370638 - RNA, 15 nt, Human
cuucccugugccucc

SEQ ID NO: 1370639 - RNA, 14 nt, Human
cuucccugugccuc

SEQ ID NO: 1370640 - RNA, 12 nt, Human
cuucccuaaucu

SEQ ID NO: 1370641 - RNA, 22 nt, Human
cuucccuguaugauuccuugau

SEQ ID NO: 1370642 - RNA, 22 nt, Human
cuucccuguguaguuugugcug

SEQ ID NO: 1370643 - RNA, 21 nt, Human
cuucccugugccuccucccuc

SEQ ID NO: 1370644 - RNA, 16 nt, Human
cuucccugugccuccu

SEQ ID NO: 1370645 - RNA, 16 nt, Human
cuucccuugagcccuc

SEQ ID NO: 1370646 - RNA, 20 nt, Human
cuucccuuuccugaguccca

SEQ ID NO: 1370647 - RNA, 23 nt, Human
cuuccucauccaccccaucccuc

SEQ ID NO: 1370648 - RNA, 22 nt, Human
cuuccucauccaccccaucccu

SEQ ID NO: 1370649 - RNA, 18 nt, Human
cuuccucauccaccccau

SEQ ID NO: 1370650 - RNA, 17 nt, Human
cuuccucagccagccuc

SEQ ID NO: 1370651 - RNA, 16 nt, Human
cuuccucagccagccu

SEQ ID NO: 1370652 - RNA, 15 nt, Human
cuuccucagccagcc

SEQ ID NO: 1370653 - RNA, 21 nt, Human
cuuccuaaauuuuccuguccu

SEQ ID NO: 1370654 - RNA, 20 nt, Human
cuuccuaaauuuuccugucc

SEQ ID NO: 1370655 - RNA, 19 nt, Human
cuuccuaaauuuuccuguc

SEQ ID NO: 1370656 - RNA, 16 nt, Human
cuuccuaaauuuuccu

SEQ ID NO: 1370657 - RNA, 22 nt, Human
cuuccuaaauauuaugagaugc

SEQ ID NO: 1370658 - RNA, 19 nt, Human
cuuccuaaauauuaugaga

SEQ ID NO: 1370659 - RNA, 14 nt, Human
cuucccuuuccuga

SEQ ID NO: 1370660 - RNA, 15 nt, Human
cuucccuugagcccu

SEQ ID NO: 1370661 - RNA, 17 nt, Human
cuucaccauuuggcaau

SEQ ID NO: 1370662 - RNA, 19 nt, Human
cuucacaccuacccuccuu

SEQ ID NO: 1370663 - RNA, 20 nt, Human
cuucaagcucugagggaaag

SEQ ID NO: 1370664 - RNA, 18 nt, Human
cuucaagcucugagggaa

SEQ ID NO: 1370665 - RNA, 15 nt, Human
cuuaucgaaacucau

SEQ ID NO: 1370666 - RNA, 19 nt, Human
cuuauccucccuguaacuu

SEQ ID NO: 1370667 - RNA, 20 nt, Human
cuuauccucccuguaacuug

SEQ ID NO: 1370668 - RNA, 18 nt, Human
cuuauccucccuguaacu

SEQ ID NO: 1370669 - RNA, 17 nt, Human
cuuauccucccuguaac

SEQ ID NO: 1370670 - RNA, 16 nt, Human
cuuauccucccuguaa

SEQ ID NO: 1370671 - RNA, 15 nt, Human
cuuauccucccugua

SEQ ID NO: 1370672 - RNA, 18 nt, Human
cuuaucuacuuccaaacu

SEQ ID NO: 1370673 - RNA, 23 nt, Human
cuuaucuaaucaugaaacucccu

SEQ ID NO: 1370674 - RNA, 16 nt, Human
cuuauuuauuguauuc

SEQ ID NO: 1370675 - RNA, 14 nt, Human
cuuauuuauuguau

SEQ ID NO: 1370676 - RNA, 19 nt, Human
cuuauuuauuguauucugg

SEQ ID NO: 1370677 - RNA, 17 nt, Human
cuuauuuauuguauucu

SEQ ID NO: 1370678 - RNA, 21 nt, Human
cuucaaaaguuuguuugcuua

SEQ ID NO: 1370679 - RNA, 16 nt, Human
cuuauuuguauauggu

SEQ ID NO: 1370680 - RNA, 15 nt, Human
cuuauuuccucauuu

SEQ ID NO: 1370681 - RNA, 11 nt, Human
cuucaaacuac

SEQ ID NO: 1370682 - RNA, 23 nt, Human
cuucaaaauguuaucuucucaag

SEQ ID NO: 1370683 - RNA, 22 nt, Human
cuucaaaauguuaucuucucaa

SEQ ID NO: 1370684 - RNA, 20 nt, Human
cuucaaaauguuaucuucuc

SEQ ID NO: 1370685 - RNA, 14 nt, Human
cuucaaacuacuuu

SEQ ID NO: 1370686 - RNA, 23 nt, Human
cuucaaacuagggccaagcccag

SEQ ID NO: 1370687 - RNA, 16 nt, Human
cuucaaaguuuaauaa

SEQ ID NO: 1370688 - RNA, 15 nt, Human
cuucaaaguuuaaua

SEQ ID NO: 1370689 - RNA, 15 nt, Human
cuuaguguaugauua

SEQ ID NO: 1370690 - RNA, 11 nt, Human
cuuaguguaug

SEQ ID NO: 1370691 - RNA, 21 nt, Human
cuuagucuagguccuuguugu

SEQ ID NO: 1370692 - RNA, 23 nt, Human
cuuagucucaguuugugugucuu

SEQ ID NO: 1370693 - RNA, 20 nt, Human
cuuagucucaguuugugugu

SEQ ID NO: 1370694 - RNA, 19 nt, Human
cuuagucucaguuugugug

SEQ ID NO: 1370695 - RNA, 18 nt, Human
cuuagucucaguuugugu

SEQ ID NO: 1370696 - RNA, 13 nt, Human
cuuagucucaguu

SEQ ID NO: 1370697 - RNA, 12 nt, Human
cuuagucucagu

SEQ ID NO: 1370698 - RNA, 15 nt, Human
cuuagucuagguccu

SEQ ID NO: 1370699 - RNA, 21 nt, Human
cuguucucuugggaacugaac

SEQ ID NO: 1370700 - RNA, 22 nt, Human
cuuagaugcaguucugaagaag

SEQ ID NO: 1370701 - RNA, 22 nt, Human
cuuauacgaaauaauuguuguu

SEQ ID NO: 1370702 - RNA, 21 nt, Human
cuuauacgaaauaauuguugu

SEQ ID NO: 1370703 - RNA, 20 nt, Human
cuuauacgaaauaauuguug

SEQ ID NO: 1370704 - RNA, 18 nt, Human
cuuauacgaaauaauugu

SEQ ID NO: 1370705 - RNA, 17 nt, Human
cuuauacgaaauaauug

SEQ ID NO: 1370706 - RNA, 16 nt, Human
cuuauacgaaauaauu

SEQ ID NO: 1370707 - RNA, 23 nt, Human
cuuaguuuguguguugucucuug

SEQ ID NO: 1370708 - RNA, 22 nt, Human
cuuaguuuguguguugucucuu

SEQ ID NO: 1370709 - RNA, 17 nt, Human
cuuaguuuguguguugu

SEQ ID NO: 1370710 - RNA, 23 nt, Human
cuuaguucaaguccugccucuua

SEQ ID NO: 1370711 - RNA, 16 nt, Human
cuuauacgaguaauau

SEQ ID NO: 1370712 - RNA, 15 nt, Human
cuuauauaauugcca

SEQ ID NO: 1370713 - RNA, 16 nt, Human
cuuauagccucugucu

SEQ ID NO: 1370714 - RNA, 14 nt, Human
cuuauccucccugu

SEQ ID NO: 1370715 - RNA, 12 nt, Human
cuuauccucccu

SEQ ID NO: 1370716 - RNA, 15 nt, Human
cuuauccuccaccgu

SEQ ID NO: 1370717 - RNA, 21 nt, Human
cuuauaucuggccucugcuuu

SEQ ID NO: 1370718 - RNA, 22 nt, Human
cuuauaucuggccucugcuuuc

SEQ ID NO: 1370719 - RNA, 16 nt, Human
cuuauaucuggccucu

SEQ ID NO: 1370720 - RNA, 19 nt, Human
cuuauaucuauauuuuaca

SEQ ID NO: 1370721 - RNA, 13 nt, Human
cuuauauuaugga

SEQ ID NO: 1370722 - RNA, 14 nt, Human
cuuugaccucugca

SEQ ID NO: 1370723 - RNA, 15 nt, Human
cuuugaccucugcag

SEQ ID NO: 1370724 - RNA, 17 nt, Human
cuuugaccucugcagca

SEQ ID NO: 1370725 - RNA, 18 nt, Human
cuuugaccucugcagcaa

SEQ ID NO: 1370726 - RNA, 20 nt, Human
cuuugaccucugcagcaaua

SEQ ID NO: 1370727 - RNA, 24 nt, Human
cuuugaccucugcagcaauaaagc

SEQ ID NO: 1370728 - RNA, 22 nt, Human
cuuugcagccggcacagggucu

SEQ ID NO: 1370729 - RNA, 14 nt, Human
cuuugaccugccuc

SEQ ID NO: 1370730 - RNA, 15 nt, Human
cuuugaccugccucc

SEQ ID NO: 1370731 - RNA, 12 nt, Human
cuuugccucaaa

SEQ ID NO: 1370732 - RNA, 18 nt, Human
cuuugaccugccucccuu

SEQ ID NO: 1370733 - RNA, 22 nt, Human
cuuugcauaacguauaaaagcc

SEQ ID NO: 1370734 - RNA, 22 nt, Human
cuuugugaauagaacucugaaa

SEQ ID NO: 1370735 - RNA, 23 nt, Human
cuuugucuacuucaaaaguuugu

SEQ ID NO: 1370736 - RNA, 13 nt, Human
cuuugugcauucu

SEQ ID NO: 1370737 - RNA, 23 nt, Human
cuuugugcacauuuauuuccucc

SEQ ID NO: 1370738 - RNA, 18 nt, Human
cuuugugcacauuuauuu

SEQ ID NO: 1370739 - RNA, 16 nt, Human
cuuugugcacauuuau

SEQ ID NO: 1370740 - RNA, 18 nt, Human
cuuugugcccuaucaccc

SEQ ID NO: 1370741 - RNA, 13 nt, Human
cuuugugcccuau

SEQ ID NO: 1370742 - RNA, 14 nt, Human
cuuugugcauucug

SEQ ID NO: 1370743 - RNA, 20 nt, Human
cuuugcgcuccuggcccagc

SEQ ID NO: 1370744 - RNA, 17 nt, Human
cuuugcgcuccuggccc

SEQ ID NO: 1370745 - RNA, 15 nt, Human
cuuugcgcuccuggc

SEQ ID NO: 1370746 - RNA, 13 nt, Human
cuuugcgcuccug

SEQ ID NO: 1370747 - RNA, 18 nt, Human
cuuugcuaaagacaugaa

SEQ ID NO: 1370748 - RNA, 21 nt, Human
cuuugcgcuccuggcccagcc

SEQ ID NO: 1370749 - RNA, 22 nt, Human
cuuugcgcuccuggcccagccu

SEQ ID NO: 1370750 - RNA, 14 nt, Human
cuuugucagggagu

SEQ ID NO: 1370751 - RNA, 15 nt, Human
cuuuggcuccccugu

SEQ ID NO: 1370752 - RNA, 13 nt, Human
cuuuggcuccccu

SEQ ID NO: 1370753 - RNA, 14 nt, Human
cuuuggcugcaugc

SEQ ID NO: 1370754 - RNA, 16 nt, Human
cuuuggcugcaugcga

SEQ ID NO: 1370755 - RNA, 18 nt, Human
cuuucccuacccucuaga

SEQ ID NO: 1370756 - RNA, 16 nt, Human
cuuucccuacccucua

SEQ ID NO: 1370757 - RNA, 15 nt, Human
cuuucccuacccucu

SEQ ID NO: 1370758 - RNA, 13 nt, Human
cuuucccuacccu

SEQ ID NO: 1370759 - RNA, 22 nt, Human
cuuuccauccauggccagcagc

SEQ ID NO: 1370760 - RNA, 21 nt, Human
cuuuccauccauggccagcag

SEQ ID NO: 1370761 - RNA, 20 nt, Human
cuuuccauccauggccagca

SEQ ID NO: 1370762 - RNA, 18 nt, Human
cuuuccauccauggccag

SEQ ID NO: 1370763 - RNA, 15 nt, Human
cuuuccauccauggc

SEQ ID NO: 1370764 - RNA, 12 nt, Human
cuuuccauuaca

SEQ ID NO: 1370765 - RNA, 18 nt, Human
cuuuccauuggaucucau

SEQ ID NO: 1370766 - RNA, 13 nt, Human
cuuucccaacacc

SEQ ID NO: 1370767 - RNA, 21 nt, Human
cuuuaugucuguggauuuuuu

SEQ ID NO: 1370768 - RNA, 19 nt, Human
cuuuauguaguuuuuauau

SEQ ID NO: 1370769 - RNA, 13 nt, Human
cuuuaugcuugca

SEQ ID NO: 1370770 - RNA, 20 nt, Human
cuuuccauaaauccuugaug

SEQ ID NO: 1370771 - RNA, 20 nt, Human
cuuuauguaguuuuuauaug

SEQ ID NO: 1370772 - RNA, 17 nt, Human
cuuucccuucaguaccc

SEQ ID NO: 1370773 - RNA, 13 nt, Human
cuuucccuggucc

SEQ ID NO: 1370774 - RNA, 13 nt, Human
cuuucccugccuc

SEQ ID NO: 1370775 - RNA, 18 nt, Human
cuuucuguauauacuuuu

SEQ ID NO: 1370776 - RNA, 13 nt, Human
cuuucuguauaua

SEQ ID NO: 1370777 - RNA, 20 nt, Human
cuuucuuccggccccucccc

SEQ ID NO: 1370778 - RNA, 16 nt, Human
cuuucuguaaccauaa

SEQ ID NO: 1370779 - RNA, 17 nt, Human
cuuucuggcuaugcauu

SEQ ID NO: 1370780 - RNA, 18 nt, Human
cuuucuggcuaugcauuu

SEQ ID NO: 1370781 - RNA, 19 nt, Human
cuuucuggcuaugcauuug

SEQ ID NO: 1370782 - RNA, 20 nt, Human
cuuucuggcuaugcauuuga

SEQ ID NO: 1370783 - RNA, 12 nt, Human
cuuucucugagg

SEQ ID NO: 1370784 - RNA, 22 nt, Human
cuuucucucuuuauacagcugu

SEQ ID NO: 1370785 - RNA, 22 nt, Human
cuuuccugaauccaaacuaauc

SEQ ID NO: 1370786 - RNA, 15 nt, Human
cuuuccugaauccaa

SEQ ID NO: 1370787 - RNA, 18 nt, Human
cuuucucugccagugaca

SEQ ID NO: 1370788 - RNA, 16 nt, Human
cuuucucugccaguga

SEQ ID NO: 1370789 - RNA, 14 nt, Human
cuuucucugccagu

SEQ ID NO: 1370790 - RNA, 13 nt, Human
cuuucucugccag

SEQ ID NO: 1370791 - RNA, 15 nt, Human
cuuucucugaggaca

SEQ ID NO: 1370792 - RNA, 14 nt, Human
cuuucucugaggac

SEQ ID NO: 1370793 - RNA, 23 nt, Human
cuuucuggauuauucugggggcu

SEQ ID NO: 1370794 - RNA, 21 nt, Human
cuuucucuuucccuggucccu

SEQ ID NO: 1370795 - RNA, 18 nt, Human
cuuucucuuucccugguc

SEQ ID NO: 1370796 - RNA, 16 nt, Human
cuuucucuuucccugg

SEQ ID NO: 1370797 - RNA, 16 nt, Human
cuuuagaucucugaag

SEQ ID NO: 1370798 - RNA, 15 nt, Human
cuuuagaucucugaa

SEQ ID NO: 1370799 - RNA, 21 nt, Human
cuuuagauagcccuguccugg

SEQ ID NO: 1370800 - RNA, 20 nt, Human
cuuuagauagcccuguccug

SEQ ID NO: 1370801 - RNA, 19 nt, Human
cuuuagauagcccuguccu

SEQ ID NO: 1370802 - RNA, 15 nt, Human
cuuuagauagcccug

SEQ ID NO: 1370803 - RNA, 18 nt, Human
cuuuaaaauuuuuuuaga

SEQ ID NO: 1370804 - RNA, 21 nt, Human
cuuuaaaauguaaagccaugc

SEQ ID NO: 1370805 - RNA, 21 nt, Human
cuuuaaaauuuuuuuagaaag

SEQ ID NO: 1370806 - RNA, 23 nt, Human
cuuuaaaauuuuuuuagaaagca

SEQ ID NO: 1370807 - RNA, 22 nt, Human
cuuuaccuuuuuuauacauaaa

SEQ ID NO: 1370808 - RNA, 13 nt, Human
cuuuacuauggcc

SEQ ID NO: 1370809 - RNA, 14 nt, Human
cuugugucccauga

SEQ ID NO: 1370810 - RNA, 15 nt, Human
cuugugucucugugc

SEQ ID NO: 1370811 - RNA, 18 nt, Human
cuuuaaaagaugcuuuua

SEQ ID NO: 1370812 - RNA, 16 nt, Human
cuuuaaaaggaaagaa

SEQ ID NO: 1370813 - RNA, 18 nt, Human
cuuuaaaaggaaagaaaa

SEQ ID NO: 1370814 - RNA, 17 nt, Human
cuuuaaaauaucuacau

SEQ ID NO: 1370815 - RNA, 17 nt, Human
cuuuaaaaggaaagaaa

SEQ ID NO: 1370816 - RNA, 19 nt, Human
cuuuaaaauguaaagccau

SEQ ID NO: 1370817 - RNA, 16 nt, Human
cuuuaaaauguaaagc

SEQ ID NO: 1370818 - RNA, 17 nt, Human
cuuuaaaauuacaacua

SEQ ID NO: 1370819 - RNA, 19 nt, Human
cuuuaaaauuacaacuaag

SEQ ID NO: 1370820 - RNA, 20 nt, Human
cuuuaaaauuacaacuaagu

SEQ ID NO: 1370821 - RNA, 22 nt, Human
cuuuauaugaagaaaaucacuu

SEQ ID NO: 1370822 - RNA, 13 nt, Human
cuuuauaugaaga

SEQ ID NO: 1370823 - RNA, 15 nt, Human
cuuuauagaucagcc

SEQ ID NO: 1370824 - RNA, 14 nt, Human
cuuuauacagcugu

SEQ ID NO: 1370825 - RNA, 23 nt, Human
cuuuauacagcuguauugucuga

SEQ ID NO: 1370826 - RNA, 19 nt, Human
cuuuaugauaauagauucu

SEQ ID NO: 1370827 - RNA, 20 nt, Human
cuuuaugauaauagauucuc

SEQ ID NO: 1370828 - RNA, 23 nt, Human
cuuuaucuugaauaauguaagac

SEQ ID NO: 1370829 - RNA, 18 nt, Human
cuuuaucuugaauaaugu

SEQ ID NO: 1370830 - RNA, 21 nt, Human
cuuuaucuugaauaauguaag

SEQ ID NO: 1370831 - RNA, 14 nt, Human
cuuuauccucuuua

SEQ ID NO: 1370832 - RNA, 16 nt, Human
cuuuauccucuuuaga

SEQ ID NO: 1370833 - RNA, 22 nt, Human
cuuggggguccuccuccaggga

SEQ ID NO: 1370834 - RNA, 21 nt, Human
cuuggggguccuccuccaggg

SEQ ID NO: 1370835 - RNA, 22 nt, Human
cuuguacauaaugcgugcauac

SEQ ID NO: 1370836 - RNA, 19 nt, Human
cuuguacauaaugcgugca

SEQ ID NO: 1370837 - RNA, 21 nt, Human
cuuguacauaaugcgugcaua

SEQ ID NO: 1370838 - RNA, 15 nt, Human
cuuguacauaaugcg

SEQ ID NO: 1370839 - RNA, 12 nt, Human
cuuguacauaau

SEQ ID NO: 1370840 - RNA, 23 nt, Human
cuuggggguccuccuccagggac

SEQ ID NO: 1370841 - RNA, 20 nt, Human
cuuggggguccuccuccagg

SEQ ID NO: 1370842 - RNA, 24 nt, Human
cuuggggggugaugagggcagcag

SEQ ID NO: 1370843 - RNA, 22 nt, Human
cuuggggggugaugagggcagc

SEQ ID NO: 1370844 - RNA, 20 nt, Human
cuuggggggugaugagggca

SEQ ID NO: 1370845 - RNA, 13 nt, Human
cuuggggggugau

SEQ ID NO: 1370846 - RNA, 22 nt, Human
cuuggggggguggccgcugagu

SEQ ID NO: 1370847 - RNA, 19 nt, Human
cuuggggggguggccgcug

SEQ ID NO: 1370848 - RNA, 18 nt, Human
cuuggggggguggccgcu

SEQ ID NO: 1370849 - RNA, 16 nt, Human
cuuggggggguggccg

SEQ ID NO: 1370850 - RNA, 14 nt, Human
cuuggggggguggc

SEQ ID NO: 1370851 - RNA, 13 nt, Human
cuugaguuugucg

SEQ ID NO: 1370852 - RNA, 16 nt, Human
cuugaguuugucgcuc

SEQ ID NO: 1370853 - RNA, 12 nt, Human
cuugaguuuguc

SEQ ID NO: 1370854 - RNA, 19 nt, Human
cuugaguuuaaauuguaau

SEQ ID NO: 1370855 - RNA, 19 nt, Human
cuugucauguguauaaaaa

SEQ ID NO: 1370856 - RNA, 18 nt, Human
cuugucauuuuuuuucuu

SEQ ID NO: 1370857 - RNA, 20 nt, Human
cuuguccaacccgaggcccg

SEQ ID NO: 1370858 - RNA, 22 nt, Human
cuugucauuguuauauaaucau

SEQ ID NO: 1370859 - RNA, 18 nt, Human
cuugucauguguauaaaa

SEQ ID NO: 1370860 - RNA, 17 nt, Human
cuugucauguguauaaa

SEQ ID NO: 1370861 - RNA, 16 nt, Human
cuugucauguguauaa

SEQ ID NO: 1370862 - RNA, 15 nt, Human
cuugucauguguaua

SEQ ID NO: 1370863 - RNA, 14 nt, Human
cuugucauguguau

SEQ ID NO: 1370864 - RNA, 13 nt, Human
cuugucaugugua

SEQ ID NO: 1370865 - RNA, 12 nt, Human
cuugucaugugu

SEQ ID NO: 1370866 - RNA, 18 nt, Human
cuugucacgccagacuuc

SEQ ID NO: 1370867 - RNA, 16 nt, Human
cuugucacgccagacu

SEQ ID NO: 1370868 - RNA, 13 nt, Human
cuugucacgccag

SEQ ID NO: 1370869 - RNA, 13 nt, Human
cuuguccagcuga

SEQ ID NO: 1370870 - RNA, 12 nt, Human
cuuguccagcug

SEQ ID NO: 1370871 - RNA, 19 nt, Human
cuuguauaagauccuagau

SEQ ID NO: 1370872 - RNA, 23 nt, Human
cuuguauauuuuaagaaauaaca

SEQ ID NO: 1370873 - RNA, 17 nt, Human
cuuguauauuuuaagaa

SEQ ID NO: 1370874 - RNA, 23 nt, Human
cuugucaauaaaauccauacauu

SEQ ID NO: 1370875 - RNA, 23 nt, Human
cuuguaggggaggggcuccuuuc

SEQ ID NO: 1370876 - RNA, 22 nt, Human
cuuguaggggaggggcuccuuu

SEQ ID NO: 1370877 - RNA, 17 nt, Human
cuuguacuuuauuuucu

SEQ ID NO: 1370878 - RNA, 23 nt, Human
gaaaccagcuuccuucagagagc

SEQ ID NO: 1370879 - RNA, 22 nt, Human
gaaaccagcuuccuucagagag

SEQ ID NO: 1370880 - RNA, 21 nt, Human
gaaaccagcuuccuucagaga

SEQ ID NO: 1370881 - RNA, 19 nt, Human
gaaaccagcuuccuucaga

SEQ ID NO: 1370882 - RNA, 17 nt, Human
gaaaccagcuuccuuca

SEQ ID NO: 1370883 - RNA, 13 nt, Human
gaaaccagcuucc

SEQ ID NO: 1370884 - RNA, 17 nt, Human
gaaaaugauacagcaga

SEQ ID NO: 1370885 - RNA, 15 nt, Human
gaaaaugauacagca

SEQ ID NO: 1370886 - RNA, 16 nt, Human
gaaaaugaaucccucu

SEQ ID NO: 1370887 - RNA, 13 nt, Human
gaaacacagaaac

SEQ ID NO: 1370888 - RNA, 16 nt, Human
gaaacacaacuauauu

SEQ ID NO: 1370889 - RNA, 19 nt, Human
gaaaccccuguaggccuca

SEQ ID NO: 1370890 - RNA, 19 nt, Human
gaaaccuacugcccaggca

SEQ ID NO: 1370891 - RNA, 13 nt, Human
gaaaccuacugcc

SEQ ID NO: 1370892 - RNA, 21 nt, Human
gaaacccugcacccauuagca

SEQ ID NO: 1370893 - RNA, 15 nt, Human
gaaacuccagaugcc

SEQ ID NO: 1370894 - RNA, 23 nt, Human
gaaacucguuaauuuguaguguu

SEQ ID NO: 1370895 - RNA, 19 nt, Human
gaaacuaggugcauauuua

SEQ ID NO: 1370896 - RNA, 16 nt, Human
gaaacgucuucuaaac

SEQ ID NO: 1370897 - RNA, 14 nt, Human
gaaaccuuccaccc

SEQ ID NO: 1370898 - RNA, 17 nt, Human
gaaagagaacuuccaga

SEQ ID NO: 1370899 - RNA, 18 nt, Human
gaaagagaaacaguuggu

SEQ ID NO: 1370900 - RNA, 13 nt, Human
gaaagagaaacac

SEQ ID NO: 1370901 - RNA, 21 nt, Human
gaaagaggcaccaggaagccg

SEQ ID NO: 1370902 - RNA, 20 nt, Human
gaaagaggcaccaggaagcc

SEQ ID NO: 1370903 - RNA, 17 nt, Human
gaaagaggcaccaggaa

SEQ ID NO: 1370904 - RNA, 16 nt, Human
gaaagaggcaccagga

SEQ ID NO: 1370905 - RNA, 13 nt, Human
gaaagaggaagca

SEQ ID NO: 1370906 - RNA, 20 nt, Human
gaaagaggugaccccagggc

SEQ ID NO: 1370907 - RNA, 19 nt, Human
gaaagaggugaccccaggg

SEQ ID NO: 1370908 - RNA, 14 nt, Human
gaaagaggugaccc

SEQ ID NO: 1370909 - RNA, 21 nt, Human
gaaagaggugaccccagggca

SEQ ID NO: 1370910 - RNA, 23 nt, Human
gaaagaggugaccccagggcaca

SEQ ID NO: 1370911 - RNA, 22 nt, Human
gaaagaggcugaggccuggacu

SEQ ID NO: 1370912 - RNA, 21 nt, Human
gaaagaggcugaggccuggac

SEQ ID NO: 1370913 - RNA, 20 nt, Human
gaaagaggcugaggccugga

SEQ ID NO: 1370914 - RNA, 21 nt, Human
gaaagaguacucuuguuuccu

SEQ ID NO: 1370915 - RNA, 18 nt, Human
gaaagcaguugagacaag

SEQ ID NO: 1370916 - RNA, 21 nt, Human
gaaagccccacccaggccagg

SEQ ID NO: 1370917 - RNA, 16 nt, Human
gaaagccccacccagg

SEQ ID NO: 1370918 - RNA, 13 nt, Human
gaaagccccaccc

SEQ ID NO: 1370919 - RNA, 17 nt, Human
gaaagcugccugguaua

SEQ ID NO: 1370920 - RNA, 21 nt, Human
gaaagcugacuuggcuggugu

SEQ ID NO: 1370921 - RNA, 18 nt, Human
gaaagcuucagugcugcc

SEQ ID NO: 1370922 - RNA, 16 nt, Human
gaaagcuucagugcug

SEQ ID NO: 1370923 - RNA, 17 nt, Human
gaaagcuucaaacugca

SEQ ID NO: 1370924 - RNA, 22 nt, Human
gaaagcugacuuggcuggugug

SEQ ID NO: 1370925 - RNA, 20 nt, Human
gaaagcugacuuggcuggug

SEQ ID NO: 1370926 - RNA, 19 nt, Human
gaaagcugacuuggcuggu

SEQ ID NO: 1370927 - RNA, 18 nt, Human
gaaagcugacuuggcugg

SEQ ID NO: 1370928 - RNA, 16 nt, Human
gaaagcugacuuggcu

SEQ ID NO: 1370929 - RNA, 15 nt, Human
gaaagcugacuuggc

SEQ ID NO: 1370930 - RNA, 12 nt, Human
gaaagcucuaga

SEQ ID NO: 1370931 - RNA, 13 nt, Human
gaaagcucuagaa

SEQ ID NO: 1370932 - RNA, 19 nt, Human
gaaagcuauauaagacaag

SEQ ID NO: 1370933 - RNA, 12 nt, Human
gaaagccugagu

SEQ ID NO: 1370934 - RNA, 10 nt, Human
gaaagccuga

SEQ ID NO: 1370935 - RNA, 23 nt, Human
gaaagccccugccccuccucucc

SEQ ID NO: 1370936 - RNA, 14 nt, Human
gaaagccccugccc

SEQ ID NO: 1370937 - RNA, 18 nt, Human
gaaagccccacccaggcc

SEQ ID NO: 1370938 - RNA, 14 nt, Human
gaaagccuucuuuu

SEQ ID NO: 1370939 - RNA, 17 nt, Human
gaaagcgccuccaaccc

SEQ ID NO: 1370940 - RNA, 22 nt, Human
gaaagcgccuccaacccuagca

SEQ ID NO: 1370941 - RNA, 18 nt, Human
gaaaacaggcacugcccu

SEQ ID NO: 1370942 - RNA, 12 nt, Human
gaaaacaggcac

SEQ ID NO: 1370943 - RNA, 15 nt, Human
gaaaacagaacacuu

SEQ ID NO: 1370944 - RNA, 16 nt, Human
gaaaacagaacacuua

SEQ ID NO: 1370945 - RNA, 14 nt, Human
gaaaaggccugggg

SEQ ID NO: 1370946 - RNA, 13 nt, Human
gaaaaggccuggg

SEQ ID NO: 1370947 - RNA, 16 nt, Human
gaaaaggccuggggug

SEQ ID NO: 1370948 - RNA, 12 nt, Human
gaaaaggccugg

SEQ ID NO: 1370949 - RNA, 22 nt, Human
gaaaaggcacccccgucaagag

SEQ ID NO: 1370950 - RNA, 23 nt, Human
gaaaagcuuagcuuuagaaacag

SEQ ID NO: 1370951 - RNA, 15 nt, Human
gaaaaguugaauuuu

SEQ ID NO: 1370952 - RNA, 14 nt, Human
gaaaaguugaauuu

SEQ ID NO: 1370953 - RNA, 11 nt, Human
gaaaaucauau

SEQ ID NO: 1370954 - RNA, 13 nt, Human
gaaaaugaaagcu

SEQ ID NO: 1370955 - RNA, 19 nt, Human
gaaaaucuuuauaaaugua

SEQ ID NO: 1370956 - RNA, 18 nt, Human
gaaaaucuuauaauuuaa

SEQ ID NO: 1370957 - RNA, 22 nt, Human
gaaaauauuguuuuacaauagu

SEQ ID NO: 1370958 - RNA, 15 nt, Human
gaaaauauuguuuua

SEQ ID NO: 1370959 - RNA, 23 nt, Human
gaaaaguuuagccccugaaagcc

SEQ ID NO: 1370960 - RNA, 21 nt, Human
gaaaacacugugcacaucugu

SEQ ID NO: 1370961 - RNA, 14 nt, Human
gaaaacacugugca

SEQ ID NO: 1370962 - RNA, 19 nt, Human
gaaaacacauuuuucuuag

SEQ ID NO: 1370963 - RNA, 17 nt, Human
gaaaaaggaugcacaga

SEQ ID NO: 1370964 - RNA, 18 nt, Human
gaaaacacauuuuucuua

SEQ ID NO: 1370965 - RNA, 13 nt, Human
gaaaaagcgaaaa

SEQ ID NO: 1370966 - RNA, 21 nt, Human
cuuuuuguucugguccuuuuu

SEQ ID NO: 1370967 - RNA, 15 nt, Human
cuuuuuguguuuuuu

SEQ ID NO: 1370968 - RNA, 22 nt, Human
cuuuuugugauaugcacaaugu

SEQ ID NO: 1370969 - RNA, 13 nt, Human
cuuuuuguauaaa

SEQ ID NO: 1370970 - RNA, 18 nt, Human
cuuuuuguauaaaauaga

SEQ ID NO: 1370971 - RNA, 19 nt, Human
cuuuuugggagagacuugu

SEQ ID NO: 1370972 - RNA, 23 nt, Human
cuuuuuggucgaggaguaacaau

SEQ ID NO: 1370973 - RNA, 20 nt, Human
cuuuuugggagagacuuguu

SEQ ID NO: 1370974 - RNA, 17 nt, Human
cuuuuugggagagacuu

SEQ ID NO: 1370975 - RNA, 17 nt, Human
cuuugugugcucuccau

SEQ ID NO: 1370976 - RNA, 14 nt, Human
cuuuguggcacugg

SEQ ID NO: 1370977 - RNA, 18 nt, Human
cuuuguuaagacugcuga

SEQ ID NO: 1370978 - RNA, 11 nt, Human
cuuuuguucuu

SEQ ID NO: 1370979 - RNA, 12 nt, Human
cuuuuguucuug

SEQ ID NO: 1370980 - RNA, 20 nt, Human
cuuuuucucuuuccaugaca

SEQ ID NO: 1370981 - RNA, 13 nt, Human
cuuuuguucgcau

SEQ ID NO: 1370982 - RNA, 20 nt, Human
cuuuuguucuugguuuguaa

SEQ ID NO: 1370983 - RNA, 17 nt, Human
cuuuuuauggccuguga

SEQ ID NO: 1370984 - RNA, 24 nt, Human
gacaugauuuccuugaauguggcu

SEQ ID NO: 1370985 - RNA, 22 nt, Human
gacaugauuuccuugaaugugg

SEQ ID NO: 1370986 - RNA, 20 nt, Human
gacaugauuuccuugaaugu

SEQ ID NO: 1370987 - RNA, 19 nt, Human
gacaugauuuccuugaaug

SEQ ID NO: 1370988 - RNA, 17 nt, Human
gacaugauuuccuugaa

SEQ ID NO: 1370989 - RNA, 16 nt, Human
gacaugauuuccuuga

SEQ ID NO: 1370990 - RNA, 14 nt, Human
gacaugauuuccuu

SEQ ID NO: 1370991 - RNA, 17 nt, Human
gacaugaauuuuagcuu

SEQ ID NO: 1370992 - RNA, 21 nt, Human
gacaugaauuuuagcuuuugu

SEQ ID NO: 1370993 - RNA, 11 nt, Human
gacaugaauuu

SEQ ID NO: 1370994 - RNA, 15 nt, Human
gacaucggaaaaaua

SEQ ID NO: 1370995 - RNA, 18 nt, Human
gacauccuccucccaccc

SEQ ID NO: 1370996 - RNA, 15 nt, Human
gacauccuccuccca

SEQ ID NO: 1370997 - RNA, 23 nt, Human
gacauacuugaagggccagagcc

SEQ ID NO: 1370998 - RNA, 22 nt, Human
gacauacuugaagggccagagc

SEQ ID NO: 1370999 - RNA, 20 nt, Human
gacauacuugaagggccaga

SEQ ID NO: 1371000 - RNA, 19 nt, Human
gacauacuugaagggccag

SEQ ID NO: 1371001 - RNA, 18 nt, Human
gacauacuugaagggcca

SEQ ID NO: 1371002 - RNA, 17 nt, Human
gacauacuugaagggcc

SEQ ID NO: 1371003 - RNA, 15 nt, Human
gacauacuugaaggg

SEQ ID NO: 1371004 - RNA, 14 nt, Human
gacauacuugaagg

SEQ ID NO: 1371005 - RNA, 23 nt, Human
gacaguguugaaaauguucagaa

SEQ ID NO: 1371006 - RNA, 21 nt, Human
gacaguguuccccgauaccau

SEQ ID NO: 1371007 - RNA, 20 nt, Human
gacaguguuccccgauacca

SEQ ID NO: 1371008 - RNA, 20 nt, Human
gacagggaauuaggccccca

SEQ ID NO: 1371009 - RNA, 20 nt, Human
gacagcuuguaggggagggg

SEQ ID NO: 1371010 - RNA, 21 nt, Human
gacagcuuguggcaagugaau

SEQ ID NO: 1371011 - RNA, 16 nt, Human
gacagaguugauuuuu

SEQ ID NO: 1371012 - RNA, 15 nt, Human
gacagagccaggaga

SEQ ID NO: 1371013 - RNA, 16 nt, Human
gacagagccaggagaa

SEQ ID NO: 1371014 - RNA, 13 nt, Human
gacagagccagga

SEQ ID NO: 1371015 - RNA, 19 nt, Human
gacagagaggacuguaggg

SEQ ID NO: 1371016 - RNA, 19 nt, Human
gacagagccccacccucag

SEQ ID NO: 1371017 - RNA, 14 nt, Human
gacacccaggacuu

SEQ ID NO: 1371018 - RNA, 13 nt, Human
gacacccaggacu

SEQ ID NO: 1371019 - RNA, 16 nt, Human
gacagagaggacugua

SEQ ID NO: 1371020 - RNA, 15 nt, Human
gacagagaggacugu

SEQ ID NO: 1371021 - RNA, 17 nt, Human
gaccggacuuuucugca

SEQ ID NO: 1371022 - RNA, 23 nt, Human
gaccgcuacaccacucuggcagc

SEQ ID NO: 1371023 - RNA, 21 nt, Human
gaccgcuacaccacucuggca

SEQ ID NO: 1371024 - RNA, 20 nt, Human
gaccgcuacaccacucuggc

SEQ ID NO: 1371025 - RNA, 19 nt, Human
gaccgcuacaccacucugg

SEQ ID NO: 1371026 - RNA, 15 nt, Human
gaccgcccccugucu

SEQ ID NO: 1371027 - RNA, 16 nt, Human
gaccgcccccuccucu

SEQ ID NO: 1371028 - RNA, 15 nt, Human
gaccgcccccuccuc

SEQ ID NO: 1371029 - RNA, 14 nt, Human
gaccgcccccuccu

SEQ ID NO: 1371030 - RNA, 12 nt, Human
gaccgcccccuc

SEQ ID NO: 1371031 - RNA, 18 nt, Human
gacccuuuuggguuucug

SEQ ID NO: 1371032 - RNA, 12 nt, Human
gacccuuuucau

SEQ ID NO: 1371033 - RNA, 18 nt, Human
gaccgaggagggagaguc

SEQ ID NO: 1371034 - RNA, 22 nt, Human
gaccgcuacaccacucuggcag

SEQ ID NO: 1371035 - RNA, 15 nt, Human
gacccuggcuuucau

SEQ ID NO: 1371036 - RNA, 23 nt, Human
gacccuggcuccuugugccagag

SEQ ID NO: 1371037 - RNA, 13 nt, Human
gacccuggcuccu

SEQ ID NO: 1371038 - RNA, 16 nt, Human
gacccuggaggcccca

SEQ ID NO: 1371039 - RNA, 11 nt, Human
gacccugcccu

SEQ ID NO: 1371040 - RNA, 14 nt, Human
gaccagccucucca

SEQ ID NO: 1371041 - RNA, 16 nt, Human
gaccauugucucagag

SEQ ID NO: 1371042 - RNA, 20 nt, Human
gaccagaagcucccccagca

SEQ ID NO: 1371043 - RNA, 17 nt, Human
gaccagaagcuccccca

SEQ ID NO: 1371044 - RNA, 14 nt, Human
gaccacuguuauca

SEQ ID NO: 1371045 - RNA, 13 nt, Human
gaccacggcucga

SEQ ID NO: 1371046 - RNA, 16 nt, Human
gaccacguuucuaaag

SEQ ID NO: 1371047 - RNA, 22 nt, Human
gaccaccuuuguuucuccccca

SEQ ID NO: 1371048 - RNA, 22 nt, Human
gaccacgcccguccugccugug

SEQ ID NO: 1371049 - RNA, 14 nt, Human
gaccacguuucuaa

SEQ ID NO: 1371050 - RNA, 16 nt, Human
gacaugggacauuugc

SEQ ID NO: 1371051 - RNA, 20 nt, Human
gaccaccccgccugcccuca

SEQ ID NO: 1371052 - RNA, 19 nt, Human
gaccaccccgccugcccuc

SEQ ID NO: 1371053 - RNA, 18 nt, Human
gaccaccccgccugcccu

SEQ ID NO: 1371054 - RNA, 17 nt, Human
gacaugcgguagccagc

SEQ ID NO: 1371055 - RNA, 16 nt, Human
gacaugcgguagccag

SEQ ID NO: 1371056 - RNA, 17 nt, Human
gacaugggacauuugcu

SEQ ID NO: 1371057 - RNA, 15 nt, Human
gaccacccugagccg

SEQ ID NO: 1371058 - RNA, 14 nt, Human
gaccacccugagcc

SEQ ID NO: 1371059 - RNA, 19 nt, Human
gaccacccucacuggcucu

SEQ ID NO: 1371060 - RNA, 14 nt, Human
gaccacccucacug

SEQ ID NO: 1371061 - RNA, 21 nt, Human
gaccacgcccguccugccugu

SEQ ID NO: 1371062 - RNA, 19 nt, Human
gaccacgcccguccugccu

SEQ ID NO: 1371063 - RNA, 17 nt, Human
gaccacgcccguccugc

SEQ ID NO: 1371064 - RNA, 16 nt, Human
gaccaccucucaauau

SEQ ID NO: 1371065 - RNA, 14 nt, Human
gacaccaaaguucu

SEQ ID NO: 1371066 - RNA, 15 nt, Human
gacaccaaaguucua

SEQ ID NO: 1371067 - RNA, 23 nt, Human
gacacauuuuuuaggaaauguuu

SEQ ID NO: 1371068 - RNA, 20 nt, Human
gacacauuuuuuaggaaaug

SEQ ID NO: 1371069 - RNA, 19 nt, Human
gacacauuuuuuaggaaau

SEQ ID NO: 1371070 - RNA, 19 nt, Human
gacacaugcaaggucauuu

SEQ ID NO: 1371071 - RNA, 21 nt, Human
gacacaugaagguaaauaaaa

SEQ ID NO: 1371072 - RNA, 20 nt, Human
gacacaugaagguaaauaaa

SEQ ID NO: 1371073 - RNA, 19 nt, Human
gacacaugaagguaaauaa

SEQ ID NO: 1371074 - RNA, 17 nt, Human
gacacaggcccucccug

SEQ ID NO: 1371075 - RNA, 13 nt, Human
gacacaggcccuc

SEQ ID NO: 1371076 - RNA, 14 nt, Human
gacacaugcaaggu

SEQ ID NO: 1371077 - RNA, 15 nt, Human
gacacaaacacacac

SEQ ID NO: 1371078 - RNA, 19 nt, Human
gacacaaacacacacaaaa

SEQ ID NO: 1371079 - RNA, 16 nt, Human
gacaauggaccggaga

SEQ ID NO: 1371080 - RNA, 14 nt, Human
gacaauggaccgga

SEQ ID NO: 1371081 - RNA, 22 nt, Human
gacaauugagguaaguuuuuug

SEQ ID NO: 1371082 - RNA, 13 nt, Human
gacaagcuucuga

SEQ ID NO: 1371083 - RNA, 12 nt, Human
gacaagcuucug

SEQ ID NO: 1371084 - RNA, 15 nt, Human
gacaagacccccagc

SEQ ID NO: 1371085 - RNA, 16 nt, Human
gacaaggaaaaaauaa

SEQ ID NO: 1371086 - RNA, 16 nt, Human
gacaagacccccagca

SEQ ID NO: 1371087 - RNA, 21 nt, Human
gacaacuucuaauugccaugu

SEQ ID NO: 1371088 - RNA, 17 nt, Human
gacaacuggcaggcagg

SEQ ID NO: 1371089 - RNA, 18 nt, Human
gacaacuggcaggcaggc

SEQ ID NO: 1371090 - RNA, 16 nt, Human
gacaacuggcaggcag

SEQ ID NO: 1371091 - RNA, 15 nt, Human
gacaacuggcaggca

SEQ ID NO: 1371092 - RNA, 13 nt, Human
gacaacuggcagg

SEQ ID NO: 1371093 - RNA, 12 nt, Human
gacaacuggcag

SEQ ID NO: 1371094 - RNA, 22 nt, Human
gacaacugcucccaccuccuga

SEQ ID NO: 1371095 - RNA, 21 nt, Human
gacaacugcucccaccuccug

SEQ ID NO: 1371096 - RNA, 19 nt, Human
gacaacugcucccaccucc

SEQ ID NO: 1371097 - RNA, 17 nt, Human
gacaacugcucccaccu

SEQ ID NO: 1371098 - RNA, 15 nt, Human
gacaacgugcucuuu

SEQ ID NO: 1371099 - RNA, 17 nt, Human
gacaacguuucagcgac

SEQ ID NO: 1371100 - RNA, 19 nt, Human
gacaaccacuggucuguag

SEQ ID NO: 1371101 - RNA, 17 nt, Human
gacaaccacuggucugu

SEQ ID NO: 1371102 - RNA, 15 nt, Human
gacaaccacuggucu

SEQ ID NO: 1371103 - RNA, 22 nt, Human
gacaacauuucuauagccaaaa

SEQ ID NO: 1371104 - RNA, 20 nt, Human
gacaaaucacauauuuuaaa

SEQ ID NO: 1371105 - RNA, 18 nt, Human
gacaaaucacauauuuua

SEQ ID NO: 1371106 - RNA, 16 nt, Human
gacaaaucacauauuu

SEQ ID NO: 1371107 - RNA, 16 nt, Human
gacaacacccauuuuu

SEQ ID NO: 1371108 - RNA, 16 nt, Human
gaauugggagcuuggg

SEQ ID NO: 1371109 - RNA, 24 nt, Human
gaauugcuuguuugcuucaacugu

SEQ ID NO: 1371110 - RNA, 17 nt, Human
gaauugggagcuuggga

SEQ ID NO: 1371111 - RNA, 18 nt, Human
gaauuucuuaacuucuug

SEQ ID NO: 1371112 - RNA, 17 nt, Human
gaauuucuuaacuucuu

SEQ ID NO: 1371113 - RNA, 16 nt, Human
gaauuucuuaacuucu

SEQ ID NO: 1371114 - RNA, 15 nt, Human
gaauuucuuaacuuc

SEQ ID NO: 1371115 - RNA, 14 nt, Human
gaauuucuuaacuu

SEQ ID NO: 1371116 - RNA, 13 nt, Human
gaauuucuuaacu

SEQ ID NO: 1371117 - RNA, 14 nt, Human
gaauuucccucucu

SEQ ID NO: 1371118 - RNA, 16 nt, Human
gaauuguaacuguucu

SEQ ID NO: 1371119 - RNA, 20 nt, Human
gaauuucuaggacugaauua

SEQ ID NO: 1371120 - RNA, 19 nt, Human
gaauuucuaggacugaauu

SEQ ID NO: 1371121 - RNA, 21 nt, Human
gaauuucuuaacuucuugcuu

SEQ ID NO: 1371122 - RNA, 19 nt, Human
gaauuucuuaacuucuugc

SEQ ID NO: 1371123 - RNA, 22 nt, Human
gaauuucuuuugccguuauuaa

SEQ ID NO: 1371124 - RNA, 20 nt, Human
gaauuugauaugugaacagu

SEQ ID NO: 1371125 - RNA, 20 nt, Human
gaauuugccugcugggauuc

SEQ ID NO: 1371126 - RNA, 17 nt, Human
gaauuugagugcucuga

SEQ ID NO: 1371127 - RNA, 19 nt, Human
gaauuuggggcuuccaagu

SEQ ID NO: 1371128 - RNA, 18 nt, Human
gaauuuggggcuuccaag

SEQ ID NO: 1371129 - RNA, 14 nt, Human
gaauuugccugcug

SEQ ID NO: 1371130 - RNA, 20 nt, Human
gaauuuguaaugucuugagc

SEQ ID NO: 1371131 - RNA, 20 nt, Human
gaauuugugaagguggaaau

SEQ ID NO: 1371132 - RNA, 13 nt, Human
gaaucuauauuua

SEQ ID NO: 1371133 - RNA, 15 nt, Human
gaaucuacuaauucc

SEQ ID NO: 1371134 - RNA, 22 nt, Human
gaaucuacccccagauccaagc

SEQ ID NO: 1371135 - RNA, 18 nt, Human
gaaucuacccccagaucc

SEQ ID NO: 1371136 - RNA, 20 nt, Human
gaaucgcuccugcagcccca

SEQ ID NO: 1371137 - RNA, 16 nt, Human
gaaucgcuccugcagc

SEQ ID NO: 1371138 - RNA, 12 nt, Human
gaauccuuucag

SEQ ID NO: 1371139 - RNA, 22 nt, Human
gaauccugucgauuagacugga

SEQ ID NO: 1371140 - RNA, 19 nt, Human
gaaucccaaauuugauuga

SEQ ID NO: 1371141 - RNA, 17 nt, Human
gaaucccaaauuugauu

SEQ ID NO: 1371142 - RNA, 16 nt, Human
gaaucccaaauuugau

SEQ ID NO: 1371143 - RNA, 17 nt, Human
gaaucaguuuaaaagca

SEQ ID NO: 1371144 - RNA, 17 nt, Human
gaaucaucaggacccug

SEQ ID NO: 1371145 - RNA, 23 nt, Human
gaaucaggaauauuuuccaaaga

SEQ ID NO: 1371146 - RNA, 21 nt, Human
gaaucaggaauauuuuccaaa

SEQ ID NO: 1371147 - RNA, 16 nt, Human
gaaaggccagcacucg

SEQ ID NO: 1371148 - RNA, 15 nt, Human
gaaaggccagcacuc

SEQ ID NO: 1371149 - RNA, 14 nt, Human
gaaaggccagcacu

SEQ ID NO: 1371150 - RNA, 14 nt, Human
gaaaggccuuuaaa

SEQ ID NO: 1371151 - RNA, 15 nt, Human
gaaaggccuuuaaaa

SEQ ID NO: 1371152 - RNA, 18 nt, Human
gaaaggccuuuaaaauuu

SEQ ID NO: 1371153 - RNA, 22 nt, Human
gaaucugcaauucaaaaguucc

SEQ ID NO: 1371154 - RNA, 21 nt, Human
gaaucugcaauucaaaaguuc

SEQ ID NO: 1371155 - RNA, 15 nt, Human
gaaucugcaauucaa

SEQ ID NO: 1371156 - RNA, 18 nt, Human
gaaucucuuuuugcuuuc

SEQ ID NO: 1371157 - RNA, 15 nt, Human
gaaucucugugccuu

SEQ ID NO: 1371158 - RNA, 14 nt, Human
gaaucucugugccu

SEQ ID NO: 1371159 - RNA, 13 nt, Human
gaaucucugugcc

SEQ ID NO: 1371160 - RNA, 17 nt, Human
gaaucuauauuuaacaa

SEQ ID NO: 1371161 - RNA, 18 nt, Human
gaaucucugaauuugaga

SEQ ID NO: 1371162 - RNA, 23 nt, Human
gaaugaaauccugcuucagugua

SEQ ID NO: 1371163 - RNA, 20 nt, Human
gaaugaacacucuuuugcuu

SEQ ID NO: 1371164 - RNA, 11 nt, Human
gaauggcagca

SEQ ID NO: 1371165 - RNA, 23 nt, Human
gaaugcuucuaaguaaauacaau

SEQ ID NO: 1371166 - RNA, 22 nt, Human
gaaugcuucuaaguaaauacaa

SEQ ID NO: 1371167 - RNA, 14 nt, Human
gaaugcuucuaagu

SEQ ID NO: 1371168 - RNA, 20 nt, Human
gaaugcacaagaauggauca

SEQ ID NO: 1371169 - RNA, 21 nt, Human
gaaugcacaagaauggaucac

SEQ ID NO: 1371170 - RNA, 19 nt, Human
gaaugcacaagaauggauc

SEQ ID NO: 1371171 - RNA, 18 nt, Human
gaaugcacaagaauggau

SEQ ID NO: 1371172 - RNA, 23 nt, Human
gaauguugggacugcuaaauaaa

SEQ ID NO: 1371173 - RNA, 20 nt, Human
gaauguugauuacagugcag

SEQ ID NO: 1371174 - RNA, 14 nt, Human
gaauguucucagau

SEQ ID NO: 1371175 - RNA, 16 nt, Human
gaauguuaaauaaauu

SEQ ID NO: 1371176 - RNA, 18 nt, Human
gaauguuaaauaaauugu

SEQ ID NO: 1371177 - RNA, 21 nt, Human
gaauguuaaauaaauuguaua

SEQ ID NO: 1371178 - RNA, 21 nt, Human
gaauguuuacacucuuuguaa

SEQ ID NO: 1371179 - RNA, 20 nt, Human
gaauguuuacacucuuugua

SEQ ID NO: 1371180 - RNA, 14 nt, Human
gaauguugggacug

SEQ ID NO: 1371181 - RNA, 13 nt, Human
gaauugcauugac

SEQ ID NO: 1371182 - RNA, 12 nt, Human
gaauugcauuga

SEQ ID NO: 1371183 - RNA, 14 nt, Human
gaauugcagaguac

SEQ ID NO: 1371184 - RNA, 22 nt, Human
gaauugauuugcauugaacaca

SEQ ID NO: 1371185 - RNA, 16 nt, Human
gaauuggagcucgugg

SEQ ID NO: 1371186 - RNA, 20 nt, Human
gaauguuaagacuugacagu

SEQ ID NO: 1371187 - RNA, 22 nt, Human
gaauguguuucacaguuugaaa

SEQ ID NO: 1371188 - RNA, 21 nt, Human
gaauguguuucacaguuugaa

SEQ ID NO: 1371189 - RNA, 20 nt, Human
gaauguguuucacaguuuga

SEQ ID NO: 1371190 - RNA, 13 nt, Human
gaauguuaaauaa

SEQ ID NO: 1371191 - RNA, 14 nt, Human
gaauguuaaauaaa

SEQ ID NO: 1371192 - RNA, 14 nt, Human
gaauguguuucaca

SEQ ID NO: 1371193 - RNA, 13 nt, Human
gaauguguuucac

SEQ ID NO: 1371194 - RNA, 15 nt, Human
gaaugugucuuuaga

SEQ ID NO: 1371195 - RNA, 14 nt, Human
gaaugugucuuuag

SEQ ID NO: 1371196 - RNA, 13 nt, Human
gaaugugucuuua

SEQ ID NO: 1371197 - RNA, 12 nt, Human
gaaugugucuuu

SEQ ID NO: 1371198 - RNA, 22 nt, Human
gaauguggccccugaacaagaa

SEQ ID NO: 1371199 - RNA, 18 nt, Human
gaauguggcuugagaaau

SEQ ID NO: 1371200 - RNA, 18 nt, Human
gaaugugauaaggaaauc

SEQ ID NO: 1371201 - RNA, 19 nt, Human
gaaugugauaaggaaauca

SEQ ID NO: 1371202 - RNA, 20 nt, Human
gaaugugaagccuuccccuu

SEQ ID NO: 1371203 - RNA, 16 nt, Human
gaaugugaagccuucc

SEQ ID NO: 1371204 - RNA, 15 nt, Human
gaaugugaagccuuc

SEQ ID NO: 1371205 - RNA, 14 nt, Human
gaaugugaagccuu

SEQ ID NO: 1371206 - RNA, 13 nt, Human
gaaugugaagccu

SEQ ID NO: 1371207 - RNA, 19 nt, Human
gaauggcuauguuuuuaau

SEQ ID NO: 1371208 - RNA, 17 nt, Human
gaauggcuauguuuuua

SEQ ID NO: 1371209 - RNA, 19 nt, Human
gaauguaaucaauguuucu

SEQ ID NO: 1371210 - RNA, 18 nt, Human
gaauguaaucaauguuuc

SEQ ID NO: 1371211 - RNA, 16 nt, Human
gaauguaaucaauguu

SEQ ID NO: 1371212 - RNA, 13 nt, Human
gaauguaaucaau

SEQ ID NO: 1371213 - RNA, 11 nt, Human
gaauguaauca

SEQ ID NO: 1371214 - RNA, 18 nt, Human
gacucagacauuggcacc

SEQ ID NO: 1371215 - RNA, 18 nt, Human
gacuagauguaguauuuu

SEQ ID NO: 1371216 - RNA, 17 nt, Human
gacuagauguaguauuu

SEQ ID NO: 1371217 - RNA, 17 nt, Human
gacuagauggaccugcc

SEQ ID NO: 1371218 - RNA, 21 nt, Human
gacuagaugauggaugccaau

SEQ ID NO: 1371219 - RNA, 16 nt, Human
gacuagaugauggaug

SEQ ID NO: 1371220 - RNA, 14 nt, Human
gacuagaugaugga

SEQ ID NO: 1371221 - RNA, 20 nt, Human
gacucagccuucagacagag

SEQ ID NO: 1371222 - RNA, 19 nt, Human
gacucagccuucagacaga

SEQ ID NO: 1371223 - RNA, 15 nt, Human
gacucagccuucaga

SEQ ID NO: 1371224 - RNA, 14 nt, Human
gacucagccuucag

SEQ ID NO: 1371225 - RNA, 12 nt, Human
gacucagccuuc

SEQ ID NO: 1371226 - RNA, 12 nt, Human
gacucagcucug

SEQ ID NO: 1371227 - RNA, 16 nt, Human
gaccuauaccuguguu

SEQ ID NO: 1371228 - RNA, 20 nt, Human
gaccuauaccuguguuucuu

SEQ ID NO: 1371229 - RNA, 18 nt, Human
gaccuacuguucuaaagc

SEQ ID NO: 1371230 - RNA, 17 nt, Human
gaccuacuguucuaaag

SEQ ID NO: 1371231 - RNA, 15 nt, Human
gaccuacuguucuaa

SEQ ID NO: 1371232 - RNA, 18 nt, Human
gacuacagucaggaaagg

SEQ ID NO: 1371233 - RNA, 17 nt, Human
gaccucaagugaucugc

SEQ ID NO: 1371234 - RNA, 15 nt, Human
gacuccuagcugucc

SEQ ID NO: 1371235 - RNA, 19 nt, Human
gacuccuagcuguccuuuu

SEQ ID NO: 1371236 - RNA, 14 nt, Human
gacuccuagcuguc

SEQ ID NO: 1371237 - RNA, 16 nt, Human
gacuccguuggccacu

SEQ ID NO: 1371238 - RNA, 17 nt, Human
gacuccguuggccacuc

SEQ ID NO: 1371239 - RNA, 17 nt, Human
gacuccuccuuuuucca

SEQ ID NO: 1371240 - RNA, 13 nt, Human
gacuccuccuuuu

SEQ ID NO: 1371241 - RNA, 16 nt, Human
gacuccuccuuuuucc

SEQ ID NO: 1371242 - RNA, 20 nt, Human
gacucucagucucugagcag

SEQ ID NO: 1371243 - RNA, 18 nt, Human
gacucucagucucugagc

SEQ ID NO: 1371244 - RNA, 16 nt, Human
gacucucagucucuga

SEQ ID NO: 1371245 - RNA, 14 nt, Human
gacucucagucucu

SEQ ID NO: 1371246 - RNA, 14 nt, Human
gacucuauucuuua

SEQ ID NO: 1371247 - RNA, 21 nt, Human
gacugaguacguugugcauuu

SEQ ID NO: 1371248 - RNA, 22 nt, Human
gacugaguacguugugcauuug

SEQ ID NO: 1371249 - RNA, 18 nt, Human
gacucuauucuuuaacuc

SEQ ID NO: 1371250 - RNA, 19 nt, Human
gacucuagaguccaagguu

SEQ ID NO: 1371251 - RNA, 18 nt, Human
gacucuagaguccaaggu

SEQ ID NO: 1371252 - RNA, 16 nt, Human
gacucuagaguccaag

SEQ ID NO: 1371253 - RNA, 15 nt, Human
gacugagugggaagc

SEQ ID NO: 1371254 - RNA, 14 nt, Human
gacugagugggaag

SEQ ID NO: 1371255 - RNA, 15 nt, Human
gacucuauucuuuaa

SEQ ID NO: 1371256 - RNA, 23 nt, Human
gacugaguacguugugcauuugg

SEQ ID NO: 1371257 - RNA, 16 nt, Human
gacugcauuauauuua

SEQ ID NO: 1371258 - RNA, 14 nt, Human
gacugcauuauauu

SEQ ID NO: 1371259 - RNA, 24 nt, Human
gacugcauuauauuuauuacugua

SEQ ID NO: 1371260 - RNA, 18 nt, Human
gacugcuugcccuaagca

SEQ ID NO: 1371261 - RNA, 17 nt, Human
gacugcuugcccuaagc

SEQ ID NO: 1371262 - RNA, 15 nt, Human
gacugcuugcccuaa

SEQ ID NO: 1371263 - RNA, 13 nt, Human
gacugcuugcccu

SEQ ID NO: 1371264 - RNA, 12 nt, Human
gacugcuugccc

SEQ ID NO: 1371265 - RNA, 19 nt, Human
gacugcuguggccaggagg

SEQ ID NO: 1371266 - RNA, 20 nt, Human
gacugcuguggccaggaggu

SEQ ID NO: 1371267 - RNA, 18 nt, Human
gacugcuguggccaggag

SEQ ID NO: 1371268 - RNA, 17 nt, Human
gacugcuguggccagga

SEQ ID NO: 1371269 - RNA, 16 nt, Human
gacugcuguggccagg

SEQ ID NO: 1371270 - RNA, 15 nt, Human
gacugcuguggccag

SEQ ID NO: 1371271 - RNA, 12 nt, Human
gacugcuguggc

SEQ ID NO: 1371272 - RNA, 16 nt, Human
gacugcugguuuguag

SEQ ID NO: 1371273 - RNA, 15 nt, Human
gacugcugguuugua

SEQ ID NO: 1371274 - RNA, 15 nt, Human
gacuggaacacuaga

SEQ ID NO: 1371275 - RNA, 21 nt, Human
gacugcuuuggaccuaaaugg

SEQ ID NO: 1371276 - RNA, 23 nt, Human
gacugcuugcccuaagcagaaag

SEQ ID NO: 1371277 - RNA, 22 nt, Human
gacugcuugcccuaagcagaaa

SEQ ID NO: 1371278 - RNA, 21 nt, Human
gacugcuugcccuaagcagaa

SEQ ID NO: 1371279 - RNA, 20 nt, Human
gacugcuugcccuaagcaga

SEQ ID NO: 1371280 - RNA, 15 nt, Human
gacuggacagcuugu

SEQ ID NO: 1371281 - RNA, 16 nt, Human
gacuggauaguccguc

SEQ ID NO: 1371282 - RNA, 21 nt, Human
gacuggacagcuuguggcaag

SEQ ID NO: 1371283 - RNA, 14 nt, Human
gacuggacagcuug

SEQ ID NO: 1371284 - RNA, 13 nt, Human
gacuggacagcuu

SEQ ID NO: 1371285 - RNA, 20 nt, Human
gacuggaagcuaauuugcau

SEQ ID NO: 1371286 - RNA, 21 nt, Human
gacuggaagcuaauuugcauu

SEQ ID NO: 1371287 - RNA, 21 nt, Human
gacugggcugagggagccugg

SEQ ID NO: 1371288 - RNA, 16 nt, Human
gacugggcugagggag

SEQ ID NO: 1371289 - RNA, 15 nt, Human
gacugggcugaggga

SEQ ID NO: 1371290 - RNA, 14 nt, Human
gacugggcugaggg

SEQ ID NO: 1371291 - RNA, 22 nt, Human
gacugggagcccccagccuguc

SEQ ID NO: 1371292 - RNA, 23 nt, Human
gacugggagcccccagccuguca

SEQ ID NO: 1371293 - RNA, 13 nt, Human
gacuggggcaggg

SEQ ID NO: 1371294 - RNA, 11 nt, Human
gacuggggcag

SEQ ID NO: 1371295 - RNA, 14 nt, Human
gacuggggcagggu

SEQ ID NO: 1371296 - RNA, 17 nt, Human
gacuggguaggaaagag

SEQ ID NO: 1371297 - RNA, 13 nt, Human
gacuucuggggua

SEQ ID NO: 1371298 - RNA, 13 nt, Human
gacuucugagauc

SEQ ID NO: 1371299 - RNA, 17 nt, Human
gacuucugccuggagac

SEQ ID NO: 1371300 - RNA, 16 nt, Human
gacuucugccuggaga

SEQ ID NO: 1371301 - RNA, 15 nt, Human
gacuucugccuggag

SEQ ID NO: 1371302 - RNA, 14 nt, Human
gacuucugccugga

SEQ ID NO: 1371303 - RNA, 13 nt, Human
gacuucugccugg

SEQ ID NO: 1371304 - RNA, 12 nt, Human
gacuucugagau

SEQ ID NO: 1371305 - RNA, 18 nt, Human
gacuucucuuugccucaa

SEQ ID NO: 1371306 - RNA, 14 nt, Human
gacuucucuuugcc

SEQ ID NO: 1371307 - RNA, 17 nt, Human
gacuucuauuuuaaaga

SEQ ID NO: 1371308 - RNA, 21 nt, Human
gacuuaagcccagugcacuga

SEQ ID NO: 1371309 - RNA, 22 nt, Human
gacuuaagcaucuggcucuaau

SEQ ID NO: 1371310 - RNA, 20 nt, Human
gacuuaagcaucuggcucua

SEQ ID NO: 1371311 - RNA, 20 nt, Human
gacuugguugguaggguggg

SEQ ID NO: 1371312 - RNA, 17 nt, Human
gacuugguugguagggu

SEQ ID NO: 1371313 - RNA, 15 nt, Human
gacuugguugguagg

SEQ ID NO: 1371314 - RNA, 22 nt, Human
gacuugggcacccccagccugg

SEQ ID NO: 1371315 - RNA, 23 nt, Human
gacuugggcacccccagccuggg

SEQ ID NO: 1371316 - RNA, 21 nt, Human
gacuugggcacccccagccug

SEQ ID NO: 1371317 - RNA, 20 nt, Human
gacuugggcacccccagccu

SEQ ID NO: 1371318 - RNA, 19 nt, Human
gacuugggcacccccagcc

SEQ ID NO: 1371319 - RNA, 18 nt, Human
gacuugggcacccccagc

SEQ ID NO: 1371320 - RNA, 14 nt, Human
gacuugggcacccc

SEQ ID NO: 1371321 - RNA, 23 nt, Human
gacuuggcuggugugguacagag

SEQ ID NO: 1371322 - RNA, 22 nt, Human
gacuuggcuggugugguacaga

SEQ ID NO: 1371323 - RNA, 14 nt, Human
gacuuggcuggugu

SEQ ID NO: 1371324 - RNA, 16 nt, Human
gacuugacaguggaac

SEQ ID NO: 1371325 - RNA, 15 nt, Human
gacuuggccucucuc

SEQ ID NO: 1371326 - RNA, 14 nt, Human
gacuuggccucucu

SEQ ID NO: 1371327 - RNA, 13 nt, Human
gacuuggccucuc

SEQ ID NO: 1371328 - RNA, 12 nt, Human
gacuuggccucu

SEQ ID NO: 1371329 - RNA, 15 nt, Human
gacuuggccccugcc

SEQ ID NO: 1371330 - RNA, 13 nt, Human
gacuugaaagaaa

SEQ ID NO: 1371331 - RNA, 21 nt, Human
gagaaagggcccugggccugc

SEQ ID NO: 1371332 - RNA, 21 nt, Human
gagaaagcugacuuggcuggu

SEQ ID NO: 1371333 - RNA, 22 nt, Human
gagaaagcugacuuggcuggug

SEQ ID NO: 1371334 - RNA, 20 nt, Human
gagaaagcugacuuggcugg

SEQ ID NO: 1371335 - RNA, 15 nt, Human
gagaaagcugacuug

SEQ ID NO: 1371336 - RNA, 13 nt, Human
gagaaagcugacu

SEQ ID NO: 1371337 - RNA, 14 nt, Human
gagaaagcucaaag

SEQ ID NO: 1371338 - RNA, 19 nt, Human
gagaaagaggcaccaggaa

SEQ ID NO: 1371339 - RNA, 18 nt, Human
gagaaaggggagcccacu

SEQ ID NO: 1371340 - RNA, 17 nt, Human
gagaaaggggagcccac

SEQ ID NO: 1371341 - RNA, 19 nt, Human
gagaaauucguguguuuuu

SEQ ID NO: 1371342 - RNA, 17 nt, Human
gagaaauucguguguuu

SEQ ID NO: 1371343 - RNA, 21 nt, Human
gagaaaugaaaaaauauauau

SEQ ID NO: 1371344 - RNA, 22 nt, Human
gagaaccuagggugauauuaac

SEQ ID NO: 1371345 - RNA, 21 nt, Human
gagaaccuagggugauauuaa

SEQ ID NO: 1371346 - RNA, 23 nt, Human
gagaaccuggguugcagacagga

SEQ ID NO: 1371347 - RNA, 16 nt, Human
gagaaccuggccuuca

SEQ ID NO: 1371348 - RNA, 15 nt, Human
gagaaccuggccuuc

SEQ ID NO: 1371349 - RNA, 14 nt, Human
gagaaccuggccuu

SEQ ID NO: 1371350 - RNA, 13 nt, Human
gagaaccuggccu

SEQ ID NO: 1371351 - RNA, 12 nt, Human
gagaaccuggcc

SEQ ID NO: 1371352 - RNA, 14 nt, Human
gagaaauuuauaaa

SEQ ID NO: 1371353 - RNA, 13 nt, Human
gagaagaacugaa

SEQ ID NO: 1371354 - RNA, 16 nt, Human
gagaagaaagaacgga

SEQ ID NO: 1371355 - RNA, 21 nt, Human
gagaagaaagaacggaagaag

SEQ ID NO: 1371356 - RNA, 21 nt, Human
gagaaccuggguugcagacag

SEQ ID NO: 1371357 - RNA, 23 nt, Human
gagaacuuccagauccuggaaau

SEQ ID NO: 1371358 - RNA, 22 nt, Human
gagaacuuccagauccuggaaa

SEQ ID NO: 1371359 - RNA, 22 nt, Human
gagaagaaagaggugaccccag

SEQ ID NO: 1371360 - RNA, 18 nt, Human
gagaagcauucucauugg

SEQ ID NO: 1371361 - RNA, 18 nt, Human
gagaagccaaaagauugg

SEQ ID NO: 1371362 - RNA, 14 nt, Human
gagaagccagcuug

SEQ ID NO: 1371363 - RNA, 13 nt, Human
gagaagccagcuu

SEQ ID NO: 1371364 - RNA, 11 nt, Human
gagaagccagc

SEQ ID NO: 1371365 - RNA, 17 nt, Human
gagaaugagagacacac

SEQ ID NO: 1371366 - RNA, 16 nt, Human
gagagcagaggucucc

SEQ ID NO: 1371367 - RNA, 22 nt, Human
gagagcaagggaagugguucuu

SEQ ID NO: 1371368 - RNA, 22 nt, Human
gagagauguguguugauacugu

SEQ ID NO: 1371369 - RNA, 14 nt, Human
gagagauguguguu

SEQ ID NO: 1371370 - RNA, 13 nt, Human
gagagaugugugu

SEQ ID NO: 1371371 - RNA, 12 nt, Human
gagagaugugug

SEQ ID NO: 1371372 - RNA, 15 nt, Human
gagagaucaaagaug

SEQ ID NO: 1371373 - RNA, 14 nt, Human
gagagaucaaagau

SEQ ID NO: 1371374 - RNA, 13 nt, Human
gagagagcuggag

SEQ ID NO: 1371375 - RNA, 23 nt, Human
gagagcccgaggaggugucucag

SEQ ID NO: 1371376 - RNA, 18 nt, Human
gagagccccucacacagc

SEQ ID NO: 1371377 - RNA, 20 nt, Human
gagagcccaggagcuccccu

SEQ ID NO: 1371378 - RNA, 16 nt, Human
gagagcccaggagcuc

SEQ ID NO: 1371379 - RNA, 15 nt, Human
gagagcccaggagcu

SEQ ID NO: 1371380 - RNA, 14 nt, Human
gagagcccaggagc

SEQ ID NO: 1371381 - RNA, 17 nt, Human
gagagccugcaggaucu

SEQ ID NO: 1371382 - RNA, 14 nt, Human
gagagccugcagga

SEQ ID NO: 1371383 - RNA, 15 nt, Human
gagagcccugggacc

SEQ ID NO: 1371384 - RNA, 14 nt, Human
gagagcccugggac

SEQ ID NO: 1371385 - RNA, 13 nt, Human
gagagcccuggga

SEQ ID NO: 1371386 - RNA, 16 nt, Human
gagagacacugguggg

SEQ ID NO: 1371387 - RNA, 18 nt, Human
gagagacacuggugggga

SEQ ID NO: 1371388 - RNA, 21 nt, Human
gagagaaauaagugcccucuc

SEQ ID NO: 1371389 - RNA, 20 nt, Human
gagagacuuguuuuggaugc

SEQ ID NO: 1371390 - RNA, 12 nt, Human
gagagacuuguu

SEQ ID NO: 1371391 - RNA, 13 nt, Human
gagagacgggccc

SEQ ID NO: 1371392 - RNA, 17 nt, Human
gagagaccgaggaggga

SEQ ID NO: 1371393 - RNA, 19 nt, Human
gagagaccgaggagggaga

SEQ ID NO: 1371394 - RNA, 17 nt, Human
gagaguaaugaggcuug

SEQ ID NO: 1371395 - RNA, 19 nt, Human
gagagggggcuggugggug

SEQ ID NO: 1371396 - RNA, 13 nt, Human
gagagggggcugg

SEQ ID NO: 1371397 - RNA, 21 nt, Human
gagaggggccgaugcccagag

SEQ ID NO: 1371398 - RNA, 20 nt, Human
gagaggggccgaugcccaga

SEQ ID NO: 1371399 - RNA, 13 nt, Human
gagagucuagauu

SEQ ID NO: 1371400 - RNA, 15 nt, Human
gagagucucccaggg

SEQ ID NO: 1371401 - RNA, 16 nt, Human
gagagucucccaggga

SEQ ID NO: 1371402 - RNA, 16 nt, Human
gagagucuagauucuc

SEQ ID NO: 1371403 - RNA, 15 nt, Human
gagaguggggguggg

SEQ ID NO: 1371404 - RNA, 12 nt, Human
gagagugggggu

SEQ ID NO: 1371405 - RNA, 15 nt, Human
gagauaccagcgagg

SEQ ID NO: 1371406 - RNA, 11 nt, Human
gagagugugac

SEQ ID NO: 1371407 - RNA, 16 nt, Human
gagagaaaggacuccu

SEQ ID NO: 1371408 - RNA, 14 nt, Human
gagagaaaggacuc

SEQ ID NO: 1371409 - RNA, 14 nt, Human
gagacugggcugag

SEQ ID NO: 1371410 - RNA, 13 nt, Human
gagacugggcuga

SEQ ID NO: 1371411 - RNA, 22 nt, Human
gagacugggaaggcuugggauu

SEQ ID NO: 1371412 - RNA, 17 nt, Human
gagacugggaaggcuug

SEQ ID NO: 1371413 - RNA, 14 nt, Human
gagacugggaaggc

SEQ ID NO: 1371414 - RNA, 21 nt, Human
gagacugggcugagggagccu

SEQ ID NO: 1371415 - RNA, 20 nt, Human
gagacugggcugagggagcc

SEQ ID NO: 1371416 - RNA, 17 nt, Human
gagacugggcugaggga

SEQ ID NO: 1371417 - RNA, 15 nt, Human
gagacugggcugagg

SEQ ID NO: 1371418 - RNA, 15 nt, Human
gagacuggguaggaa

SEQ ID NO: 1371419 - RNA, 18 nt, Human
gagacaguucaagaaagc

SEQ ID NO: 1371420 - RNA, 16 nt, Human
gagacaguucaagaaa

SEQ ID NO: 1371421 - RNA, 19 nt, Human
gagacaggguuucaccaug

SEQ ID NO: 1371422 - RNA, 19 nt, Human
gagaauggcuuuggucucu

SEQ ID NO: 1371423 - RNA, 19 nt, Human
gagacagcuugaucaaagg

SEQ ID NO: 1371424 - RNA, 20 nt, Human
gagaaugcccuucuccuuau

SEQ ID NO: 1371425 - RNA, 15 nt, Human
gagaagccagcuugu

SEQ ID NO: 1371426 - RNA, 21 nt, Human
gagaaugagagacacacugaa

SEQ ID NO: 1371427 - RNA, 20 nt, Human
gagaaugagagacacacuga

SEQ ID NO: 1371428 - RNA, 23 nt, Human
gagcccaggccaggacucugcag

SEQ ID NO: 1371429 - RNA, 21 nt, Human
gagcccaggccaggacucugc

SEQ ID NO: 1371430 - RNA, 18 nt, Human
gagcccaggccaggacuc

SEQ ID NO: 1371431 - RNA, 17 nt, Human
gagcccaggccaggacu

SEQ ID NO: 1371432 - RNA, 16 nt, Human
gagcccaggccaggac

SEQ ID NO: 1371433 - RNA, 13 nt, Human
gagcccaggccag

SEQ ID NO: 1371434 - RNA, 21 nt, Human
gagcccaggagcuccccuccc

SEQ ID NO: 1371435 - RNA, 17 nt, Human
gagcccaggagcucccc

SEQ ID NO: 1371436 - RNA, 13 nt, Human
gagcccaggagcu

SEQ ID NO: 1371437 - RNA, 12 nt, Human
gagcccaggagc

SEQ ID NO: 1371438 - RNA, 22 nt, Human
gagcccagcugggucaggcagg

SEQ ID NO: 1371439 - RNA, 21 nt, Human
gagcccagcugggucaggcag

SEQ ID NO: 1371440 - RNA, 19 nt, Human
gagcccagcugggucaggc

SEQ ID NO: 1371441 - RNA, 13 nt, Human
gagcccagcuggg

SEQ ID NO: 1371442 - RNA, 21 nt, Human
gagcccagcucugaaaccagu

SEQ ID NO: 1371443 - RNA, 14 nt, Human
gagcccagcucuga

SEQ ID NO: 1371444 - RNA, 12 nt, Human
gagcccagcucu

SEQ ID NO: 1371445 - RNA, 14 nt, Human
gagcccagcuccaa

SEQ ID NO: 1371446 - RNA, 13 nt, Human
gagcccagcucca

SEQ ID NO: 1371447 - RNA, 12 nt, Human
gagcccagcucc

SEQ ID NO: 1371448 - RNA, 24 nt, Human
gagcccacuguccugggccugcag

SEQ ID NO: 1371449 - RNA, 19 nt, Human
gagcccacuguccugggcc

SEQ ID NO: 1371450 - RNA, 17 nt, Human
gagccagggucuccaga

SEQ ID NO: 1371451 - RNA, 22 nt, Human
gagccagggucuccagaaagcc

SEQ ID NO: 1371452 - RNA, 13 nt, Human
gagccaccaguuc

SEQ ID NO: 1371453 - RNA, 21 nt, Human
gagccagcagccuggcucucc

SEQ ID NO: 1371454 - RNA, 22 nt, Human
gagcauguuuagacuuuaacau

SEQ ID NO: 1371455 - RNA, 20 nt, Human
gagcaggacuccaggcccaa

SEQ ID NO: 1371456 - RNA, 15 nt, Human
gagcaugucguggac

SEQ ID NO: 1371457 - RNA, 19 nt, Human
gagcaggacuccaggccca

SEQ ID NO: 1371458 - RNA, 16 nt, Human
gagcaggacuccaggc

SEQ ID NO: 1371459 - RNA, 15 nt, Human
gagcaggacuccagg

SEQ ID NO: 1371460 - RNA, 14 nt, Human
gagcaggaauggga

SEQ ID NO: 1371461 - RNA, 20 nt, Human
gagcagcugagcagggccgg

SEQ ID NO: 1371462 - RNA, 19 nt, Human
gagcagcugagcagggccg

SEQ ID NO: 1371463 - RNA, 18 nt, Human
gagcagcugagcagggcc

SEQ ID NO: 1371464 - RNA, 17 nt, Human
gagcagcugagcagggc

SEQ ID NO: 1371465 - RNA, 16 nt, Human
gagcagcugagcaggg

SEQ ID NO: 1371466 - RNA, 15 nt, Human
gagcagcugagcagg

SEQ ID NO: 1371467 - RNA, 14 nt, Human
gagcagcugagcag

SEQ ID NO: 1371468 - RNA, 17 nt, Human
gagcagcgagccugcua

SEQ ID NO: 1371469 - RNA, 13 nt, Human
gagcagcugagca

SEQ ID NO: 1371470 - RNA, 15 nt, Human
gagcagcgagccugc

SEQ ID NO: 1371471 - RNA, 16 nt, Human
gagccaagggauggac

SEQ ID NO: 1371472 - RNA, 15 nt, Human
gagccaagggaugga

SEQ ID NO: 1371473 - RNA, 14 nt, Human
gagccaagggaugg

SEQ ID NO: 1371474 - RNA, 20 nt, Human
gagcauuucucaucaguagu

SEQ ID NO: 1371475 - RNA, 19 nt, Human
gagcauuucucaucaguag

SEQ ID NO: 1371476 - RNA, 15 nt, Human
gagcauuucucauca

SEQ ID NO: 1371477 - RNA, 12 nt, Human
gagccaccaguu

SEQ ID NO: 1371478 - RNA, 18 nt, Human
gagccaaggggcuucagg

SEQ ID NO: 1371479 - RNA, 22 nt, Human
gagccaagggauggacaucuug

SEQ ID NO: 1371480 - RNA, 19 nt, Human
gagccaagggauggacauc

SEQ ID NO: 1371481 - RNA, 18 nt, Human
gagccaagggauggacau

SEQ ID NO: 1371482 - RNA, 17 nt, Human
gagccaagggauggaca

SEQ ID NO: 1371483 - RNA, 18 nt, Human
gagcaagcaggaaucaga

SEQ ID NO: 1371484 - RNA, 16 nt, Human
gagcacaaagacccug

SEQ ID NO: 1371485 - RNA, 22 nt, Human
gagcaaccguggcccuuccugg

SEQ ID NO: 1371486 - RNA, 21 nt, Human
gagcaaccguggcccuuccug

SEQ ID NO: 1371487 - RNA, 20 nt, Human
gagcaaccguggcccuuccu

SEQ ID NO: 1371488 - RNA, 16 nt, Human
gagcaaccguggcccu

SEQ ID NO: 1371489 - RNA, 15 nt, Human
gagcaaccguggccc

SEQ ID NO: 1371490 - RNA, 23 nt, Human
gagcaaccguggcccuuccugga

SEQ ID NO: 1371491 - RNA, 20 nt, Human
gagcaagaccccaucucaaa

SEQ ID NO: 1371492 - RNA, 20 nt, Human
gagcacaaagacccuggcuu

SEQ ID NO: 1371493 - RNA, 23 nt, Human
gagcacggcucuguccccagccu

SEQ ID NO: 1371494 - RNA, 22 nt, Human
gagcacggcucuguccccagcc

SEQ ID NO: 1371495 - RNA, 13 nt, Human
gagcacggcucug

SEQ ID NO: 1371496 - RNA, 17 nt, Human
gagcacugccaggaggg

SEQ ID NO: 1371497 - RNA, 16 nt, Human
gagcacugccaggagg

SEQ ID NO: 1371498 - RNA, 15 nt, Human
gagcacugccaggag

SEQ ID NO: 1371499 - RNA, 14 nt, Human
gagcacugccagga

SEQ ID NO: 1371500 - RNA, 13 nt, Human
gagcacugccagg

SEQ ID NO: 1371501 - RNA, 12 nt, Human
gagcacugccag

SEQ ID NO: 1371502 - RNA, 23 nt, Human
gagcagacuggcggggggcccau

SEQ ID NO: 1371503 - RNA, 19 nt, Human
gagcacugccaggagggac

SEQ ID NO: 1371504 - RNA, 18 nt, Human
gagcacugccaggaggga

SEQ ID NO: 1371505 - RNA, 20 nt, Human
gagcacugccaggagggaca

SEQ ID NO: 1371506 - RNA, 14 nt, Human
gagcagacuacagc

SEQ ID NO: 1371507 - RNA, 22 nt, Human
gagauccaaaagaagcccccag

SEQ ID NO: 1371508 - RNA, 21 nt, Human
gagauccaaaagaagccccca

SEQ ID NO: 1371509 - RNA, 21 nt, Human
gagaucaccaguguguggcuu

SEQ ID NO: 1371510 - RNA, 12 nt, Human
gagauccuccug

SEQ ID NO: 1371511 - RNA, 18 nt, Human
gagauccagggcaaggcc

SEQ ID NO: 1371512 - RNA, 20 nt, Human
gagaucccaacacugccagc

SEQ ID NO: 1371513 - RNA, 19 nt, Human
gagaucccaacacugccag

SEQ ID NO: 1371514 - RNA, 18 nt, Human
gagaucccaacacugcca

SEQ ID NO: 1371515 - RNA, 22 nt, Human
gagaugauacauccaaagcaga

SEQ ID NO: 1371516 - RNA, 15 nt, Human
gagaugaggccagac

SEQ ID NO: 1371517 - RNA, 13 nt, Human
gagaugaggccag

SEQ ID NO: 1371518 - RNA, 14 nt, Human
gagaugaggccaga

SEQ ID NO: 1371519 - RNA, 12 nt, Human
gagcccugucuc

SEQ ID NO: 1371520 - RNA, 22 nt, Human
gagcccaggccaggacucugca

SEQ ID NO: 1371521 - RNA, 21 nt, Human
gagcccuucuauacccaccca

SEQ ID NO: 1371522 - RNA, 22 nt, Human
gagcccuucuauacccacccag

SEQ ID NO: 1371523 - RNA, 22 nt, Human
gaggcaaugggagcugaggcca

SEQ ID NO: 1371524 - RNA, 13 nt, Human
gaggcaaaagaag

SEQ ID NO: 1371525 - RNA, 16 nt, Human
gaggcagagaagaaag

SEQ ID NO: 1371526 - RNA, 23 nt, Human
gaggcagggaacauggggaggag

SEQ ID NO: 1371527 - RNA, 14 nt, Human
gaggcagggaagga

SEQ ID NO: 1371528 - RNA, 18 nt, Human
gaggcagagaagaaagaa

SEQ ID NO: 1371529 - RNA, 14 nt, Human
gaggcccccagccc

SEQ ID NO: 1371530 - RNA, 22 nt, Human
gaggccccagccucccugaagc

SEQ ID NO: 1371531 - RNA, 19 nt, Human
gaggccccagccucccuga

SEQ ID NO: 1371532 - RNA, 13 nt, Human
gaggccccagccu

SEQ ID NO: 1371533 - RNA, 12 nt, Human
gaggccccagcc

SEQ ID NO: 1371534 - RNA, 15 nt, Human
gaggccccaacccug

SEQ ID NO: 1371535 - RNA, 20 nt, Human
gaggcccaguucacccugau

SEQ ID NO: 1371536 - RNA, 18 nt, Human
gaggcccaguucacccug

SEQ ID NO: 1371537 - RNA, 13 nt, Human
gaggcccaguuca

SEQ ID NO: 1371538 - RNA, 23 nt, Human
gaggcccaggcugggaacucauc

SEQ ID NO: 1371539 - RNA, 17 nt, Human
gaggcccaggcugggaa

SEQ ID NO: 1371540 - RNA, 16 nt, Human
gaggcccaggcuggga

SEQ ID NO: 1371541 - RNA, 15 nt, Human
gaggcccaggcuggg

SEQ ID NO: 1371542 - RNA, 18 nt, Human
gaggcccaggcugccguc

SEQ ID NO: 1371543 - RNA, 13 nt, Human
gaggccccagccg

SEQ ID NO: 1371544 - RNA, 23 nt, Human
gaggccccagccucccugaagcc

SEQ ID NO: 1371545 - RNA, 17 nt, Human
gaggcccaggcugccgu

SEQ ID NO: 1371546 - RNA, 16 nt, Human
gaggcccaggcugccg

SEQ ID NO: 1371547 - RNA, 15 nt, Human
gaggcccaggcugcc

SEQ ID NO: 1371548 - RNA, 14 nt, Human
gaggcccaggcugc

SEQ ID NO: 1371549 - RNA, 13 nt, Human
gaggcccaggcug

SEQ ID NO: 1371550 - RNA, 20 nt, Human
gaggcccacauuggaagagc

SEQ ID NO: 1371551 - RNA, 18 nt, Human
gaggcccacauuggaaga

SEQ ID NO: 1371552 - RNA, 19 nt, Human
gaggccauugugugagccu

SEQ ID NO: 1371553 - RNA, 22 nt, Human
gaggccauggacucuguccuga

SEQ ID NO: 1371554 - RNA, 20 nt, Human
gaggccauggacucuguccu

SEQ ID NO: 1371555 - RNA, 19 nt, Human
gaggccauggacucugucc

SEQ ID NO: 1371556 - RNA, 18 nt, Human
gaggccuaggaggguccu

SEQ ID NO: 1371557 - RNA, 18 nt, Human
gaggccuaccccgcagac

SEQ ID NO: 1371558 - RNA, 15 nt, Human
gaggccuaggagggu

SEQ ID NO: 1371559 - RNA, 20 nt, Human
gaggcgaagcguuguccuca

SEQ ID NO: 1371560 - RNA, 22 nt, Human
gaggcugcucggggugcacagg

SEQ ID NO: 1371561 - RNA, 21 nt, Human
gaggcugcucggggugcacag

SEQ ID NO: 1371562 - RNA, 18 nt, Human
gaggcugcucggggugca

SEQ ID NO: 1371563 - RNA, 13 nt, Human
gaggcugcucggg

SEQ ID NO: 1371564 - RNA, 21 nt, Human
gaggcgccccaacccguggag

SEQ ID NO: 1371565 - RNA, 22 nt, Human
gaggcgccccaacccguggagg

SEQ ID NO: 1371566 - RNA, 20 nt, Human
gaggcgccccaacccgugga

SEQ ID NO: 1371567 - RNA, 17 nt, Human
gaggcgccccaacccgu

SEQ ID NO: 1371568 - RNA, 21 nt, Human
gaggcgaagcguuguccucag

SEQ ID NO: 1371569 - RNA, 21 nt, Human
gaggcgcaugaauuugugaag

SEQ ID NO: 1371570 - RNA, 13 nt, Human
gaggcuggcacag

SEQ ID NO: 1371571 - RNA, 23 nt, Human
gaggcugcucggggugcacagga

SEQ ID NO: 1371572 - RNA, 24 nt, Human
gaggcugcucggggugcacaggag

SEQ ID NO: 1371573 - RNA, 23 nt, Human
gaggcugggaauggaggggcaga

SEQ ID NO: 1371574 - RNA, 23 nt, Human
gagggcaguucgcagccacccug

SEQ ID NO: 1371575 - RNA, 20 nt, Human
gagggcaguucgcagccacc

SEQ ID NO: 1371576 - RNA, 19 nt, Human
gagggcaguucgcagccac

SEQ ID NO: 1371577 - RNA, 18 nt, Human
gagggcaguucgcagcca

SEQ ID NO: 1371578 - RNA, 19 nt, Human
gagggcagcagggcuaccc

SEQ ID NO: 1371579 - RNA, 16 nt, Human
gagggcagcagggcua

SEQ ID NO: 1371580 - RNA, 16 nt, Human
gagggccacaugggag

SEQ ID NO: 1371581 - RNA, 14 nt, Human
gagggggagagggc

SEQ ID NO: 1371582 - RNA, 21 nt, Human
gagggauucugguuccagggu

SEQ ID NO: 1371583 - RNA, 18 nt, Human
gagggauucugguuccag

SEQ ID NO: 1371584 - RNA, 15 nt, Human
gagggcagcagggcu

SEQ ID NO: 1371585 - RNA, 14 nt, Human
gagggcagcagggc

SEQ ID NO: 1371586 - RNA, 12 nt, Human
gagggcagcagg

SEQ ID NO: 1371587 - RNA, 23 nt, Human
gagggcagcagccagcccugccu

SEQ ID NO: 1371588 - RNA, 22 nt, Human
gagggcagcagccagcccugcc

SEQ ID NO: 1371589 - RNA, 21 nt, Human
gagggcagcagccagcccugc

SEQ ID NO: 1371590 - RNA, 20 nt, Human
gagggcagcagccagcccug

SEQ ID NO: 1371591 - RNA, 17 nt, Human
gagggcagcagccagcc

SEQ ID NO: 1371592 - RNA, 16 nt, Human
gagggcagcagccagc

SEQ ID NO: 1371593 - RNA, 15 nt, Human
gagggcagcagccag

SEQ ID NO: 1371594 - RNA, 14 nt, Human
gagggcagcagcca

SEQ ID NO: 1371595 - RNA, 21 nt, Human
gagggguguggcuccuuccca

SEQ ID NO: 1371596 - RNA, 15 nt, Human
gaggggugggcuggu

SEQ ID NO: 1371597 - RNA, 19 nt, Human
gagggguaggggcugggaa

SEQ ID NO: 1371598 - RNA, 17 nt, Human
gagggguaggggcuggg

SEQ ID NO: 1371599 - RNA, 23 nt, Human
gagggguuccuccccuccagcuc

SEQ ID NO: 1371600 - RNA, 22 nt, Human
gagggguuccuccccuccagcu

SEQ ID NO: 1371601 - RNA, 15 nt, Human
gagggguuccucccc

SEQ ID NO: 1371602 - RNA, 13 nt, Human
gagggcagcagcc

SEQ ID NO: 1371603 - RNA, 17 nt, Human
gagggggaauggcagca

SEQ ID NO: 1371604 - RNA, 15 nt, Human
gagggguaggggcug

SEQ ID NO: 1371605 - RNA, 16 nt, Human
gagggaugaugaagag

SEQ ID NO: 1371606 - RNA, 18 nt, Human
gagggagugaguggcccu

SEQ ID NO: 1371607 - RNA, 21 nt, Human
gagggagacacuggccccuca

SEQ ID NO: 1371608 - RNA, 23 nt, Human
gaggcuguggucacagcggaggu

SEQ ID NO: 1371609 - RNA, 14 nt, Human
gaggcuguccugua

SEQ ID NO: 1371610 - RNA, 12 nt, Human
gaggcuguccug

SEQ ID NO: 1371611 - RNA, 16 nt, Human
gaggcugguccuaugg

SEQ ID NO: 1371612 - RNA, 18 nt, Human
gaggcugguccuauggcc

SEQ ID NO: 1371613 - RNA, 15 nt, Human
gaggcugguccuaug

SEQ ID NO: 1371614 - RNA, 22 nt, Human
gaggcugggaauggaggggcag

SEQ ID NO: 1371615 - RNA, 16 nt, Human
gagggagagucuccca

SEQ ID NO: 1371616 - RNA, 22 nt, Human
gagggagcaaguccuucccuuu

SEQ ID NO: 1371617 - RNA, 18 nt, Human
gaggguaggcaggauugg

SEQ ID NO: 1371618 - RNA, 22 nt, Human
gaggguaggcaggauuggggaa

SEQ ID NO: 1371619 - RNA, 15 nt, Human
gaggguaggcaggau

SEQ ID NO: 1371620 - RNA, 14 nt, Human
gaggguaggcagga

SEQ ID NO: 1371621 - RNA, 13 nt, Human
gaggguaggcagg

SEQ ID NO: 1371622 - RNA, 21 nt, Human
gaggguaggagggugggaagg

SEQ ID NO: 1371623 - RNA, 15 nt, Human
gagggucggugccuu

SEQ ID NO: 1371624 - RNA, 17 nt, Human
gagggucugggggcaca

SEQ ID NO: 1371625 - RNA, 13 nt, Human
gagggugggaagg

SEQ ID NO: 1371626 - RNA, 16 nt, Human
gagggugaguuggcuu

SEQ ID NO: 1371627 - RNA, 21 nt, Human
gagggugaagugaagacaaug

SEQ ID NO: 1371628 - RNA, 19 nt, Human
gagguauuuaucuuuacuu

SEQ ID NO: 1371629 - RNA, 13 nt, Human
gaggguguccugc

SEQ ID NO: 1371630 - RNA, 20 nt, Human
gagggugguucaacaaagaa

SEQ ID NO: 1371631 - RNA, 12 nt, Human
gagguaaguuuu

SEQ ID NO: 1371632 - RNA, 16 nt, Human
gaguaacauuugcugu

SEQ ID NO: 1371633 - RNA, 15 nt, Human
gaguaacauuugcug

SEQ ID NO: 1371634 - RNA, 13 nt, Human
gaguaacauuugc

SEQ ID NO: 1371635 - RNA, 21 nt, Human
gaguaacaauacaaauggauu

SEQ ID NO: 1371636 - RNA, 20 nt, Human
gaguaacaauacaaauggau

SEQ ID NO: 1371637 - RNA, 19 nt, Human
gaguaacaauacaaaugga

SEQ ID NO: 1371638 - RNA, 15 nt, Human
gaguaacaauacaaa

SEQ ID NO: 1371639 - RNA, 14 nt, Human
gagguugggugggc

SEQ ID NO: 1371640 - RNA, 14 nt, Human
gagguucuaaggcc

SEQ ID NO: 1371641 - RNA, 19 nt, Human
gaggugggccguggcccuu

SEQ ID NO: 1371642 - RNA, 23 nt, Human
gaggucagcaugucuauucagcu

SEQ ID NO: 1371643 - RNA, 21 nt, Human
gaggugggccagucuguggau

SEQ ID NO: 1371644 - RNA, 21 nt, Human
gaggucagcacaucucaacag

SEQ ID NO: 1371645 - RNA, 16 nt, Human
gagguguccaacuggc

SEQ ID NO: 1371646 - RNA, 15 nt, Human
gagguguccaacugg

SEQ ID NO: 1371647 - RNA, 14 nt, Human
gaggugggccgugg

SEQ ID NO: 1371648 - RNA, 16 nt, Human
gagguguggagccgag

SEQ ID NO: 1371649 - RNA, 19 nt, Human
gaggugucucaggcugccu

SEQ ID NO: 1371650 - RNA, 17 nt, Human
gaggugucucaggcugc

SEQ ID NO: 1371651 - RNA, 16 nt, Human
gaggugucucaggcug

SEQ ID NO: 1371652 - RNA, 15 nt, Human
gaggugucucaggcu

SEQ ID NO: 1371653 - RNA, 14 nt, Human
gaggugucucaggc

SEQ ID NO: 1371654 - RNA, 13 nt, Human
gaggugucucagg

SEQ ID NO: 1371655 - RNA, 20 nt, Human
gaggugucucaggcugccug

SEQ ID NO: 1371656 - RNA, 18 nt, Human
gagguugaaaaacaaaau

SEQ ID NO: 1371657 - RNA, 17 nt, Human
gaguagaauugcauuga

SEQ ID NO: 1371658 - RNA, 14 nt, Human
gaguagaauugcau

SEQ ID NO: 1371659 - RNA, 20 nt, Human
gaguacuccacacugcacaa

SEQ ID NO: 1371660 - RNA, 15 nt, Human
gaguagaaaggccuu

SEQ ID NO: 1371661 - RNA, 17 nt, Human
gaguagaaaggccuuua

SEQ ID NO: 1371662 - RNA, 23 nt, Human
gaguagaaaggccuuuaaaauuu

SEQ ID NO: 1371663 - RNA, 19 nt, Human
gaguagaaacugcagggaa

SEQ ID NO: 1371664 - RNA, 17 nt, Human
gaguacuccacacugca

SEQ ID NO: 1371665 - RNA, 16 nt, Human
gaguacuccacacugc

SEQ ID NO: 1371666 - RNA, 21 nt, Human
gaguacuccacacugcacaau

SEQ ID NO: 1371667 - RNA, 22 nt, Human
gaguaaugguguagaacacuaa

SEQ ID NO: 1371668 - RNA, 19 nt, Human
gaguaaugguguagaacac

SEQ ID NO: 1371669 - RNA, 17 nt, Human
gaguaaugguguagaac

SEQ ID NO: 1371670 - RNA, 14 nt, Human
gaguaaugguguag

SEQ ID NO: 1371671 - RNA, 13 nt, Human
gaguaaucaaucu

SEQ ID NO: 1371672 - RNA, 16 nt, Human
gaguaauaugccugcu

SEQ ID NO: 1371673 - RNA, 17 nt, Human
gaguaacauuugcuguu

SEQ ID NO: 1371674 - RNA, 22 nt, Human
gaguaauccaagcaaaugugaa

SEQ ID NO: 1371675 - RNA, 23 nt, Human
gaguauuaaaauguaugcauguu

SEQ ID NO: 1371676 - RNA, 22 nt, Human
gaguauuaaaauguaugcaugu

SEQ ID NO: 1371677 - RNA, 14 nt, Human
gaguauuaaaaugu

SEQ ID NO: 1371678 - RNA, 23 nt, Human
gagucccugccuggaccagccuc

SEQ ID NO: 1371679 - RNA, 21 nt, Human
gagucccugccuggaccagcc

SEQ ID NO: 1371680 - RNA, 11 nt, Human
gagucuagauu

SEQ ID NO: 1371681 - RNA, 16 nt, Human
gagucuagauguuuau

SEQ ID NO: 1371682 - RNA, 11 nt, Human
gagucuagaug

SEQ ID NO: 1371683 - RNA, 22 nt, Human
gagucuaaagauggaguuucua

SEQ ID NO: 1371684 - RNA, 21 nt, Human
gagucuaaagauggaguuucu

SEQ ID NO: 1371685 - RNA, 13 nt, Human
gagucuaaagaug

SEQ ID NO: 1371686 - RNA, 12 nt, Human
gagucuaaagau

SEQ ID NO: 1371687 - RNA, 11 nt, Human
gagucuaaaga

SEQ ID NO: 1371688 - RNA, 22 nt, Human
gagucguggggugugcugggag

SEQ ID NO: 1371689 - RNA, 14 nt, Human
gaguccuuaaaaug

SEQ ID NO: 1371690 - RNA, 19 nt, Human
gaguccuggaugauacuaa

SEQ ID NO: 1371691 - RNA, 15 nt, Human
gagugaauaaauguc

SEQ ID NO: 1371692 - RNA, 14 nt, Human
gagugaauaaaugu

SEQ ID NO: 1371693 - RNA, 22 nt, Human
gagucuuugguucuaaggaccu

SEQ ID NO: 1371694 - RNA, 18 nt, Human
gagucuuugguucuaagg

SEQ ID NO: 1371695 - RNA, 17 nt, Human
gagucuuugguucuaag

SEQ ID NO: 1371696 - RNA, 16 nt, Human
gagucuuugguucuaa

SEQ ID NO: 1371697 - RNA, 15 nt, Human
gagucuuugguucua

SEQ ID NO: 1371698 - RNA, 14 nt, Human
gagucuuugguucu

SEQ ID NO: 1371699 - RNA, 20 nt, Human
gagucuugcucugucgccca

SEQ ID NO: 1371700 - RNA, 23 nt, Human
gagucuggugaagcucacuucug

SEQ ID NO: 1371701 - RNA, 14 nt, Human
gagucuagauucuc

SEQ ID NO: 1371702 - RNA, 13 nt, Human
gagucuagauucu

SEQ ID NO: 1371703 - RNA, 23 nt, Human
gagucuagauucaaagguucuag

SEQ ID NO: 1371704 - RNA, 22 nt, Human
gagucuagauucaaagguucua

SEQ ID NO: 1371705 - RNA, 21 nt, Human
gagucuagauucaaagguucu

SEQ ID NO: 1371706 - RNA, 17 nt, Human
gagucuagauucaaagg

SEQ ID NO: 1371707 - RNA, 13 nt, Human
gagucuagauuca

SEQ ID NO: 1371708 - RNA, 21 nt, Human
gagucuauuuacggaacucaa

SEQ ID NO: 1371709 - RNA, 22 nt, Human
gauagauuuucugcuacuuugc

SEQ ID NO: 1371710 - RNA, 21 nt, Human
gauaacugaaaauuauuuaaa

SEQ ID NO: 1371711 - RNA, 20 nt, Human
gauaacugaaaauuauuuaa

SEQ ID NO: 1371712 - RNA, 13 nt, Human
gauagcugugacu

SEQ ID NO: 1371713 - RNA, 17 nt, Human
gauagcccuguccuggu

SEQ ID NO: 1371714 - RNA, 14 nt, Human
gauauaagugcugu

SEQ ID NO: 1371715 - RNA, 16 nt, Human
gauauaagugcuguau

SEQ ID NO: 1371716 - RNA, 21 nt, Human
gauagcccuguccugguggua

SEQ ID NO: 1371717 - RNA, 16 nt, Human
gauagcccuguccugg

SEQ ID NO: 1371718 - RNA, 15 nt, Human
gauagcccuguccug

SEQ ID NO: 1371719 - RNA, 23 nt, Human
gauagcaaagcgacguuagucgu

SEQ ID NO: 1371720 - RNA, 22 nt, Human
gaucacuuucucaguuuucaua

SEQ ID NO: 1371721 - RNA, 14 nt, Human
gaucagaaauacag

SEQ ID NO: 1371722 - RNA, 15 nt, Human
gaucagaaauacaga

SEQ ID NO: 1371723 - RNA, 17 nt, Human
gaucacaagauggaauu

SEQ ID NO: 1371724 - RNA, 14 nt, Human
gaucacaagaugga

SEQ ID NO: 1371725 - RNA, 13 nt, Human
gaucacaagaugg

SEQ ID NO: 1371726 - RNA, 12 nt, Human
gaucacaagaug

SEQ ID NO: 1371727 - RNA, 20 nt, Human
gaucacaacgugcauugugc

SEQ ID NO: 1371728 - RNA, 21 nt, Human
gaucacaacgugcauugugcu

SEQ ID NO: 1371729 - RNA, 22 nt, Human
gaucacaacgugcauugugcuu

SEQ ID NO: 1371730 - RNA, 23 nt, Human
gaucacaacgugcauugugcuuc

SEQ ID NO: 1371731 - RNA, 13 nt, Human
gaucacaaaaaca

SEQ ID NO: 1371732 - RNA, 21 nt, Human
gaucaauuauaguuucugagg

SEQ ID NO: 1371733 - RNA, 20 nt, Human
gaucaauuauaguuucugag

SEQ ID NO: 1371734 - RNA, 15 nt, Human
gaucacaacgugcau

SEQ ID NO: 1371735 - RNA, 16 nt, Human
gaucacaacgugcauu

SEQ ID NO: 1371736 - RNA, 17 nt, Human
gaucacaacgugcauug

SEQ ID NO: 1371737 - RNA, 18 nt, Human
gaucacaacgugcauugu

SEQ ID NO: 1371738 - RNA, 24 nt, Human
gauaugauucaaaugucuauaaac

SEQ ID NO: 1371739 - RNA, 22 nt, Human
gauaugauucaaaugucuauaa

SEQ ID NO: 1371740 - RNA, 14 nt, Human
gauaugauucaaau

SEQ ID NO: 1371741 - RNA, 15 nt, Human
gauauaagugugugu

SEQ ID NO: 1371742 - RNA, 18 nt, Human
gauauaagugcuguauaa

SEQ ID NO: 1371743 - RNA, 19 nt, Human
gauauaagugcuguauaaa

SEQ ID NO: 1371744 - RNA, 21 nt, Human
gauauaagugcuguauaaaau

SEQ ID NO: 1371745 - RNA, 22 nt, Human
gauauaagugcuguauaaaauc

SEQ ID NO: 1371746 - RNA, 15 nt, Human
gauaugaaagcugau

SEQ ID NO: 1371747 - RNA, 20 nt, Human
gauaucuuggacaaaucaca

SEQ ID NO: 1371748 - RNA, 23 nt, Human
gauauaagugcuguauaaaauca

SEQ ID NO: 1371749 - RNA, 17 nt, Human
gauauaaguguguguuu

SEQ ID NO: 1371750 - RNA, 17 nt, Human
gaguuacaguucugugg

SEQ ID NO: 1371751 - RNA, 16 nt, Human
gaguuacaguucugug

SEQ ID NO: 1371752 - RNA, 15 nt, Human
gaguuacaguucugu

SEQ ID NO: 1371753 - RNA, 14 nt, Human
gaguuacaguucug

SEQ ID NO: 1371754 - RNA, 13 nt, Human
gaguuacaguucu

SEQ ID NO: 1371755 - RNA, 21 nt, Human
gaguuaagaccuggcagcucu

SEQ ID NO: 1371756 - RNA, 17 nt, Human
gaguuaagaccuggcag

SEQ ID NO: 1371757 - RNA, 22 nt, Human
gauaaauggcuuccuggcaaua

SEQ ID NO: 1371758 - RNA, 15 nt, Human
gauaaaugauagaca

SEQ ID NO: 1371759 - RNA, 19 nt, Human
gaguguccucuucccucuc

SEQ ID NO: 1371760 - RNA, 18 nt, Human
gaguguagcaacuacagu

SEQ ID NO: 1371761 - RNA, 13 nt, Human
gaguguacaagua

SEQ ID NO: 1371762 - RNA, 21 nt, Human
gagugguuuaggcuauuugua

SEQ ID NO: 1371763 - RNA, 15 nt, Human
gaguggguggggagu

SEQ ID NO: 1371764 - RNA, 14 nt, Human
gaguggguggggag

SEQ ID NO: 1371765 - RNA, 13 nt, Human
gaguggggguggg

SEQ ID NO: 1371766 - RNA, 21 nt, Human
gagugggguuaucucuguguu

SEQ ID NO: 1371767 - RNA, 18 nt, Human
gagugaauucccucacuc

SEQ ID NO: 1371768 - RNA, 16 nt, Human
gagugaauucccucac

SEQ ID NO: 1371769 - RNA, 15 nt, Human
gagugaauucccuca

SEQ ID NO: 1371770 - RNA, 15 nt, Human
gaguguggacucugg

SEQ ID NO: 1371771 - RNA, 23 nt, Human
gagugugcgugguggucccuggg

SEQ ID NO: 1371772 - RNA, 18 nt, Human
gagugugcggcugugugu

SEQ ID NO: 1371773 - RNA, 14 nt, Human
gaguuaagaccugg

SEQ ID NO: 1371774 - RNA, 13 nt, Human
gaguuaagaccug

SEQ ID NO: 1371775 - RNA, 12 nt, Human
gaguuaagaccu

SEQ ID NO: 1371776 - RNA, 16 nt, Human
gcacagagagucugga

SEQ ID NO: 1371777 - RNA, 15 nt, Human
gcacagaguuguuac

SEQ ID NO: 1371778 - RNA, 14 nt, Human
gcacacuuugccau

SEQ ID NO: 1371779 - RNA, 13 nt, Human
gcacacuuugcca

SEQ ID NO: 1371780 - RNA, 20 nt, Human
gcacacuuugcacugauaua

SEQ ID NO: 1371781 - RNA, 13 nt, Human
gcacacugucugc

SEQ ID NO: 1371782 - RNA, 21 nt, Human
gcacacuuugguaccagauaa

SEQ ID NO: 1371783 - RNA, 22 nt, Human
gcacacuuugccauauuuucac

SEQ ID NO: 1371784 - RNA, 19 nt, Human
gcacaagacugacgccagg

SEQ ID NO: 1371785 - RNA, 12 nt, Human
gcacaagacuga

SEQ ID NO: 1371786 - RNA, 20 nt, Human
gcacaagacugacgccaggg

SEQ ID NO: 1371787 - RNA, 16 nt, Human
gcacaagaauggauca

SEQ ID NO: 1371788 - RNA, 15 nt, Human
gcacaagaauggauc

SEQ ID NO: 1371789 - RNA, 14 nt, Human
gcacaagaauggau

SEQ ID NO: 1371790 - RNA, 19 nt, Human
gcacaaauuaguuauauau

SEQ ID NO: 1371791 - RNA, 16 nt, Human
gcacaaauauuuauuu

SEQ ID NO: 1371792 - RNA, 15 nt, Human
gcacaaauauuuauu

SEQ ID NO: 1371793 - RNA, 14 nt, Human
gcacaaauauuuau

SEQ ID NO: 1371794 - RNA, 23 nt, Human
gcacaaauucugucucuggauua

SEQ ID NO: 1371795 - RNA, 13 nt, Human
gcacaaauauuua

SEQ ID NO: 1371796 - RNA, 18 nt, Human
gcacaaagacccuggcuu

SEQ ID NO: 1371797 - RNA, 17 nt, Human
gcacaaagacccuggcu

SEQ ID NO: 1371798 - RNA, 12 nt, Human
gcaauuuugugg

SEQ ID NO: 1371799 - RNA, 14 nt, Human
gcaauuuuguaacg

SEQ ID NO: 1371800 - RNA, 23 nt, Human
gcacaaaacccagaccuguuagc

SEQ ID NO: 1371801 - RNA, 13 nt, Human
gcacaaaacccag

SEQ ID NO: 1371802 - RNA, 14 nt, Human
gcaauuuugugguu

SEQ ID NO: 1371803 - RNA, 16 nt, Human
gcaauuuuuauauuaa

SEQ ID NO: 1371804 - RNA, 19 nt, Human
gcaauuucuaauuuuuaag

SEQ ID NO: 1371805 - RNA, 22 nt, Human
gcaauuucuaauuuuuaagaau

SEQ ID NO: 1371806 - RNA, 17 nt, Human
gcaauuucuaauuuuua

SEQ ID NO: 1371807 - RNA, 18 nt, Human
gcaauuuccuuuuuuguu

SEQ ID NO: 1371808 - RNA, 18 nt, Human
gcaauuucaagguucuaa

SEQ ID NO: 1371809 - RNA, 13 nt, Human
gcaauuucaaggu

SEQ ID NO: 1371810 - RNA, 13 nt, Human
gcaauugccuuuu

SEQ ID NO: 1371811 - RNA, 12 nt, Human
gcaauugccuuu

SEQ ID NO: 1371812 - RNA, 23 nt, Human
gcaauuggcaccgaagcccagag

SEQ ID NO: 1371813 - RNA, 13 nt, Human
gcaauuuaaaugu

SEQ ID NO: 1371814 - RNA, 12 nt, Human
gcaauugucuga

SEQ ID NO: 1371815 - RNA, 18 nt, Human
gcaauuuaaauguuauga

SEQ ID NO: 1371816 - RNA, 18 nt, Human
gcaauguguguauaugga

SEQ ID NO: 1371817 - RNA, 16 nt, Human
gcaauguguguauaug

SEQ ID NO: 1371818 - RNA, 14 nt, Human
gcaauguguguaua

SEQ ID NO: 1371819 - RNA, 23 nt, Human
gcaauguguauaaacaagaaaaa

SEQ ID NO: 1371820 - RNA, 20 nt, Human
gcaauguguauaaacaagaa

SEQ ID NO: 1371821 - RNA, 17 nt, Human
gcaauguguauaaacaa

SEQ ID NO: 1371822 - RNA, 16 nt, Human
gcaauguguauaaaca

SEQ ID NO: 1371823 - RNA, 23 nt, Human
gcaauguaaauauuuuaaagaau

SEQ ID NO: 1371824 - RNA, 20 nt, Human
gcaauguuaauuuaguggaa

SEQ ID NO: 1371825 - RNA, 20 nt, Human
gcaauguguguauauggaca

SEQ ID NO: 1371826 - RNA, 19 nt, Human
gcaauguguguauauggac

SEQ ID NO: 1371827 - RNA, 16 nt, Human
gcaauuaauuccuuca

SEQ ID NO: 1371828 - RNA, 20 nt, Human
gcaauuacaacggagucaaa

SEQ ID NO: 1371829 - RNA, 21 nt, Human
gcaauuccccucugcugcugu

SEQ ID NO: 1371830 - RNA, 18 nt, Human
gcaauuccccucugcugc

SEQ ID NO: 1371831 - RNA, 14 nt, Human
gcaauuccccucug

SEQ ID NO: 1371832 - RNA, 22 nt, Human
gcaauucaaaaguuccaagagu

SEQ ID NO: 1371833 - RNA, 16 nt, Human
gcaauucaaaaguucc

SEQ ID NO: 1371834 - RNA, 19 nt, Human
gcaauuaauuccuucagca

SEQ ID NO: 1371835 - RNA, 18 nt, Human
gcaacgcuauuccagcug

SEQ ID NO: 1371836 - RNA, 22 nt, Human
gcaacucaaggacuuugcagcc

SEQ ID NO: 1371837 - RNA, 23 nt, Human
gcaacuaucagacuaagccagca

SEQ ID NO: 1371838 - RNA, 22 nt, Human
gcaacuaucagacuaagccagc

SEQ ID NO: 1371839 - RNA, 19 nt, Human
gcaacuaucagacuaagcc

SEQ ID NO: 1371840 - RNA, 17 nt, Human
gcaacgcuauuccagcu

SEQ ID NO: 1371841 - RNA, 19 nt, Human
gcaauguaaauauuuuaaa

SEQ ID NO: 1371842 - RNA, 18 nt, Human
gcaauguaaauauuuuaa

SEQ ID NO: 1371843 - RNA, 15 nt, Human
gcaauguaaauauuu

SEQ ID NO: 1371844 - RNA, 13 nt, Human
gcaauguaaauau

SEQ ID NO: 1371845 - RNA, 20 nt, Human
gcaaugggagcugaggccac

SEQ ID NO: 1371846 - RNA, 19 nt, Human
gcaaugggagcugaggcca

SEQ ID NO: 1371847 - RNA, 13 nt, Human
gcaacucugaagg

SEQ ID NO: 1371848 - RNA, 18 nt, Human
gcaccaaaagaaguaaaa

SEQ ID NO: 1371849 - RNA, 16 nt, Human
gcaccaaaagaaguaa

SEQ ID NO: 1371850 - RNA, 15 nt, Human
gcaccaaaagaagua

SEQ ID NO: 1371851 - RNA, 14 nt, Human
gcaccaggaagccg

SEQ ID NO: 1371852 - RNA, 14 nt, Human
gcaccaaaagaagu

SEQ ID NO: 1371853 - RNA, 18 nt, Human
gcaccagggguuucucgc

SEQ ID NO: 1371854 - RNA, 16 nt, Human
gcaccagggguuucuc

SEQ ID NO: 1371855 - RNA, 18 nt, Human
gcaccaggaagccguccu

SEQ ID NO: 1371856 - RNA, 23 nt, Human
gcaccaggguugaccccagagga

SEQ ID NO: 1371857 - RNA, 19 nt, Human
gcaccagggguuucucgca

SEQ ID NO: 1371858 - RNA, 12 nt, Human
gcacauguuucc

SEQ ID NO: 1371859 - RNA, 19 nt, Human
gcacagugacuucugagau

SEQ ID NO: 1371860 - RNA, 18 nt, Human
gcacagugacuucugaga

SEQ ID NO: 1371861 - RNA, 17 nt, Human
gcacagugacuucugag

SEQ ID NO: 1371862 - RNA, 16 nt, Human
gcacagugacuucuga

SEQ ID NO: 1371863 - RNA, 16 nt, Human
gcacagucacugcucu

SEQ ID NO: 1371864 - RNA, 15 nt, Human
gcacaguauuuguaa

SEQ ID NO: 1371865 - RNA, 22 nt, Human
gcacagaguuguuacauuuuua

SEQ ID NO: 1371866 - RNA, 16 nt, Human
gcacagaguuguuaca

SEQ ID NO: 1371867 - RNA, 18 nt, Human
gcacagaguuguuacauu

SEQ ID NO: 1371868 - RNA, 19 nt, Human
gcacagaguuguuacauuu

SEQ ID NO: 1371869 - RNA, 21 nt, Human
gcacagaguuguuacauuuuu

SEQ ID NO: 1371870 - RNA, 22 nt, Human
gcaccugucccagaaaaagcau

SEQ ID NO: 1371871 - RNA, 19 nt, Human
gcaccugucccagaaaaag

SEQ ID NO: 1371872 - RNA, 15 nt, Human
gcaccugucccagaa

SEQ ID NO: 1371873 - RNA, 13 nt, Human
gcacgauuucugu

SEQ ID NO: 1371874 - RNA, 15 nt, Human
gcacgauuucuguuu

SEQ ID NO: 1371875 - RNA, 18 nt, Human
gcaccuguaaugugcgag

SEQ ID NO: 1371876 - RNA, 22 nt, Human
gcaccugguggccaugcuccuc

SEQ ID NO: 1371877 - RNA, 22 nt, Human
gcaccugggcccuggggccugu

SEQ ID NO: 1371878 - RNA, 23 nt, Human
gcaccugggcccuggggccugua

SEQ ID NO: 1371879 - RNA, 20 nt, Human
gcaccugggcccuggggccu

SEQ ID NO: 1371880 - RNA, 19 nt, Human
gcaccugggcccuggggcc

SEQ ID NO: 1371881 - RNA, 18 nt, Human
gcaccugggcccuggggc

SEQ ID NO: 1371882 - RNA, 23 nt, Human
gcacccccagccugggccuaugg

SEQ ID NO: 1371883 - RNA, 14 nt, Human
gcaccccccaagcu

SEQ ID NO: 1371884 - RNA, 21 nt, Human
gcacccccagccugggccuau

SEQ ID NO: 1371885 - RNA, 20 nt, Human
gcacccccagccugggccua

SEQ ID NO: 1371886 - RNA, 19 nt, Human
gcacccccagccugggccu

SEQ ID NO: 1371887 - RNA, 18 nt, Human
gcacccccagccugggcc

SEQ ID NO: 1371888 - RNA, 17 nt, Human
gcacccccagccugggc

SEQ ID NO: 1371889 - RNA, 16 nt, Human
gcacccccagccuggg

SEQ ID NO: 1371890 - RNA, 15 nt, Human
gcacccccagccugg

SEQ ID NO: 1371891 - RNA, 14 nt, Human
gcacccccagccug

SEQ ID NO: 1371892 - RNA, 13 nt, Human
gcacccccagccu

SEQ ID NO: 1371893 - RNA, 12 nt, Human
gcacccccagcc

SEQ ID NO: 1371894 - RNA, 22 nt, Human
gcaccccagcuggggccaggcu

SEQ ID NO: 1371895 - RNA, 23 nt, Human
gcagacagagccaggagaagcuc

SEQ ID NO: 1371896 - RNA, 22 nt, Human
gcagacagagccaggagaagcu

SEQ ID NO: 1371897 - RNA, 21 nt, Human
gcagacagagccaggagaagc

SEQ ID NO: 1371898 - RNA, 18 nt, Human
gcagacagagccaggaga

SEQ ID NO: 1371899 - RNA, 17 nt, Human
gcagacagagccaggag

SEQ ID NO: 1371900 - RNA, 16 nt, Human
gcagacagagccagga

SEQ ID NO: 1371901 - RNA, 15 nt, Human
gcagacagagccagg

SEQ ID NO: 1371902 - RNA, 14 nt, Human
gcagacagagccag

SEQ ID NO: 1371903 - RNA, 13 nt, Human
gcagacagagcca

SEQ ID NO: 1371904 - RNA, 12 nt, Human
gcagacagagcc

SEQ ID NO: 1371905 - RNA, 15 nt, Human
gcagacaccuuggac

SEQ ID NO: 1371906 - RNA, 18 nt, Human
gcacugugaaggacccuu

SEQ ID NO: 1371907 - RNA, 17 nt, Human
gcacugugaaggacccu

SEQ ID NO: 1371908 - RNA, 16 nt, Human
gcacugugaaggaccc

SEQ ID NO: 1371909 - RNA, 14 nt, Human
gcacugugaaggac

SEQ ID NO: 1371910 - RNA, 11 nt, Human
gcacugugaag

SEQ ID NO: 1371911 - RNA, 16 nt, Human
gcacugucuuaaggca

SEQ ID NO: 1371912 - RNA, 19 nt, Human
gcacugugacccccagcuc

SEQ ID NO: 1371913 - RNA, 19 nt, Human
gcacuguggguagacacac

SEQ ID NO: 1371914 - RNA, 16 nt, Human
gcagaaguguuuuuua

SEQ ID NO: 1371915 - RNA, 23 nt, Human
gcagaagggggucucuucuucca

SEQ ID NO: 1371916 - RNA, 12 nt, Human
gcagaaggaagg

SEQ ID NO: 1371917 - RNA, 13 nt, Human
gcagaaggaaggc

SEQ ID NO: 1371918 - RNA, 15 nt, Human
gcagaaggaaggcag

SEQ ID NO: 1371919 - RNA, 22 nt, Human
gcagaaggaaggcagggaggag

SEQ ID NO: 1371920 - RNA, 16 nt, Human
gcagaaggaaggcagg

SEQ ID NO: 1371921 - RNA, 21 nt, Human
gcacugagauaccagcgagga

SEQ ID NO: 1371922 - RNA, 16 nt, Human
gcacgauuucuguuua

SEQ ID NO: 1371923 - RNA, 17 nt, Human
gcacugcuugaggaaaa

SEQ ID NO: 1371924 - RNA, 16 nt, Human
gcacugcuugaggaaa

SEQ ID NO: 1371925 - RNA, 23 nt, Human
gcacuggggcaggggccgggggc

SEQ ID NO: 1371926 - RNA, 18 nt, Human
gcacuggggcaggggccg

SEQ ID NO: 1371927 - RNA, 15 nt, Human
gcacuggggcagggg

SEQ ID NO: 1371928 - RNA, 14 nt, Human
gcacuggccccacc

SEQ ID NO: 1371929 - RNA, 22 nt, Human
gauuuugggagugacucaagaa

SEQ ID NO: 1371930 - RNA, 17 nt, Human
gauuuucuuuugccuuu

SEQ ID NO: 1371931 - RNA, 18 nt, Human
gauuuugauagcaaagcg

SEQ ID NO: 1371932 - RNA, 23 nt, Human
gauuuugaaccugaugaaaauaa

SEQ ID NO: 1371933 - RNA, 14 nt, Human
gauuuuuacacaug

SEQ ID NO: 1371934 - RNA, 16 nt, Human
gauuuuuaaaauguac

SEQ ID NO: 1371935 - RNA, 13 nt, Human
gauuuuuaaaaug

SEQ ID NO: 1371936 - RNA, 19 nt, Human
gauuuuaggagcuaaggcu

SEQ ID NO: 1371937 - RNA, 16 nt, Human
gauuuuacaugaagua

SEQ ID NO: 1371938 - RNA, 13 nt, Human
gauuuuacaugaa

SEQ ID NO: 1371939 - RNA, 12 nt, Human
gauuuuacauga

SEQ ID NO: 1371940 - RNA, 20 nt, Human
gauuuuacaugaaguauuuu

SEQ ID NO: 1371941 - RNA, 18 nt, Human
gauuuuacauguggccca

SEQ ID NO: 1371942 - RNA, 21 nt, Human
gauuuuaaguuucucugcaga

SEQ ID NO: 1371943 - RNA, 17 nt, Human
gauuugcauugaacaca

SEQ ID NO: 1371944 - RNA, 15 nt, Human
gauuugcauugaaca

SEQ ID NO: 1371945 - RNA, 15 nt, Human
gauuuucuuuugccu

SEQ ID NO: 1371946 - RNA, 21 nt, Human
gauuuuaggagcuaaggcucu

SEQ ID NO: 1371947 - RNA, 20 nt, Human
gcaaaggaagguggauggcc

SEQ ID NO: 1371948 - RNA, 20 nt, Human
gcaaagccuguucauggcag

SEQ ID NO: 1371949 - RNA, 15 nt, Human
gcaaaggaaggugga

SEQ ID NO: 1371950 - RNA, 21 nt, Human
gcaaagccuguucauggcaga

SEQ ID NO: 1371951 - RNA, 14 nt, Human
gcaaagcgacguua

SEQ ID NO: 1371952 - RNA, 13 nt, Human
gcaaagcacagag

SEQ ID NO: 1371953 - RNA, 14 nt, Human
gcaaagcacagaga

SEQ ID NO: 1371954 - RNA, 12 nt, Human
gcaaagcacaga

SEQ ID NO: 1371955 - RNA, 16 nt, Human
gcaaagauuuaaucug

SEQ ID NO: 1371956 - RNA, 22 nt, Human
gcaaagaucuguccucagccuu

SEQ ID NO: 1371957 - RNA, 21 nt, Human
gcaaagaucuguccucagccu

SEQ ID NO: 1371958 - RNA, 20 nt, Human
gcaaagaucuguccucagcc

SEQ ID NO: 1371959 - RNA, 19 nt, Human
gcaaagaucuguccucagc

SEQ ID NO: 1371960 - RNA, 16 nt, Human
gcaaagauaucucauc

SEQ ID NO: 1371961 - RNA, 16 nt, Human
gcaaauugucacagga

SEQ ID NO: 1371962 - RNA, 19 nt, Human
gcaaauuugcauuaaauua

SEQ ID NO: 1371963 - RNA, 14 nt, Human
gcaacaauuuauga

SEQ ID NO: 1371964 - RNA, 20 nt, Human
gcaacaagguccucugucag

SEQ ID NO: 1371965 - RNA, 13 nt, Human
gcaacaauaaaua

SEQ ID NO: 1371966 - RNA, 17 nt, Human
gauugguguuuuuuucu

SEQ ID NO: 1371967 - RNA, 20 nt, Human
gauugguguuuuuuucuaug

SEQ ID NO: 1371968 - RNA, 21 nt, Human
gauuggguuuuuggacuucug

SEQ ID NO: 1371969 - RNA, 21 nt, Human
gauugcgagagauguguguug

SEQ ID NO: 1371970 - RNA, 22 nt, Human
gauugcgagagauguguguuga

SEQ ID NO: 1371971 - RNA, 22 nt, Human
gauuggggaagagagccugcag

SEQ ID NO: 1371972 - RNA, 13 nt, Human
gauuuaacagaaa

SEQ ID NO: 1371973 - RNA, 14 nt, Human
gauuuaacagaaau

SEQ ID NO: 1371974 - RNA, 13 nt, Human
gauuugacauugc

SEQ ID NO: 1371975 - RNA, 20 nt, Human
gauuugaagaacaugugaga

SEQ ID NO: 1371976 - RNA, 19 nt, Human
gauuugaagaacaugugag

SEQ ID NO: 1371977 - RNA, 18 nt, Human
gauuucuagguaggaaau

SEQ ID NO: 1371978 - RNA, 22 nt, Human
gauuuccuugaauguggcuuga

SEQ ID NO: 1371979 - RNA, 17 nt, Human
gauuuccuugaaugugg

SEQ ID NO: 1371980 - RNA, 13 nt, Human
gauuuccuugaau

SEQ ID NO: 1371981 - RNA, 12 nt, Human
gauuuccuucuu

SEQ ID NO: 1371982 - RNA, 22 nt, Human
gauuuccugcuuugggaagccg

SEQ ID NO: 1371983 - RNA, 13 nt, Human
gauuuccuaauac

SEQ ID NO: 1371984 - RNA, 15 nt, Human
gauuuaacagaaaug

SEQ ID NO: 1371985 - RNA, 22 nt, Human
gauuuccguuaaaauaccagcc

SEQ ID NO: 1371986 - RNA, 20 nt, Human
gauugcgagagauguguguu

SEQ ID NO: 1371987 - RNA, 19 nt, Human
gauugcgagagaugugugu

SEQ ID NO: 1371988 - RNA, 18 nt, Human
gauugcgagagaugugug

SEQ ID NO: 1371989 - RNA, 17 nt, Human
gauugcgagagaugugu

SEQ ID NO: 1371990 - RNA, 16 nt, Human
gauugcgagagaugug

SEQ ID NO: 1371991 - RNA, 15 nt, Human
gauugcgagagaugu

SEQ ID NO: 1371992 - RNA, 14 nt, Human
gauugcgagagaug

SEQ ID NO: 1371993 - RNA, 13 nt, Human
gauugcgagagau

SEQ ID NO: 1371994 - RNA, 17 nt, Human
gauugauuugaagaaca

SEQ ID NO: 1371995 - RNA, 15 nt, Human
gauugauuugaagaa

SEQ ID NO: 1371996 - RNA, 19 nt, Human
gauugauagaguguuauca

SEQ ID NO: 1371997 - RNA, 22 nt, Human
gauugaucggagccuccucucu

SEQ ID NO: 1371998 - RNA, 16 nt, Human
gauugagucugugcca

SEQ ID NO: 1371999 - RNA, 17 nt, Human
gauugagcucucugccc

SEQ ID NO: 1372000 - RNA, 22 nt, Human
gauucaaucuguaaacugugua

SEQ ID NO: 1372001 - RNA, 21 nt, Human
gauucaaucuguaaacugugu

SEQ ID NO: 1372002 - RNA, 20 nt, Human
gauucaaucuguaaacugug

SEQ ID NO: 1372003 - RNA, 20 nt, Human
gauucaaugccccugaauuu

SEQ ID NO: 1372004 - RNA, 19 nt, Human
gauucaaugccccugaauu

SEQ ID NO: 1372005 - RNA, 13 nt, Human
gauucucauaacu

SEQ ID NO: 1372006 - RNA, 18 nt, Human
gauucucaaaggagcgag

SEQ ID NO: 1372007 - RNA, 21 nt, Human
gauucuauuuauauguacaug

SEQ ID NO: 1372008 - RNA, 20 nt, Human
gauucuauuuauauguacau

SEQ ID NO: 1372009 - RNA, 15 nt, Human
gauucuauuuauaug

SEQ ID NO: 1372010 - RNA, 21 nt, Human
gauucaaugccccugaauuua

SEQ ID NO: 1372011 - RNA, 20 nt, Human
gauuaaagaugagcuuuguc

SEQ ID NO: 1372012 - RNA, 15 nt, Human
gauuaaacuuaaucu

SEQ ID NO: 1372013 - RNA, 14 nt, Human
gauuacaggcguga

SEQ ID NO: 1372014 - RNA, 20 nt, Human
gauuacaggcaugagccacu

SEQ ID NO: 1372015 - RNA, 18 nt, Human
gauuaaauaagauucuaa

SEQ ID NO: 1372016 - RNA, 17 nt, Human
gauuaaauaagauucua

SEQ ID NO: 1372017 - RNA, 16 nt, Human
gauuaaauaagauucu

SEQ ID NO: 1372018 - RNA, 14 nt, Human
gauuacacacguga

SEQ ID NO: 1372019 - RNA, 12 nt, Human
gauguucuaagg

SEQ ID NO: 1372020 - RNA, 22 nt, Human
gauguucagcacugucccuugc

SEQ ID NO: 1372021 - RNA, 20 nt, Human
gauguucagcacugucccuu

SEQ ID NO: 1372022 - RNA, 19 nt, Human
gauguucagcacugucccu

SEQ ID NO: 1372023 - RNA, 17 nt, Human
gauguucagcacugucc

SEQ ID NO: 1372024 - RNA, 18 nt, Human
gauguuuauucuucuaga

SEQ ID NO: 1372025 - RNA, 14 nt, Human
gauguuuauucuuc

SEQ ID NO: 1372026 - RNA, 16 nt, Human
gauguuuaguaaucau

SEQ ID NO: 1372027 - RNA, 21 nt, Human
gauggucuuacagcaggcagu

SEQ ID NO: 1372028 - RNA, 17 nt, Human
gauggucuuacagcagg

SEQ ID NO: 1372029 - RNA, 16 nt, Human
gauggucuuacagcag

SEQ ID NO: 1372030 - RNA, 17 nt, Human
gaugguaguuuuuucau

SEQ ID NO: 1372031 - RNA, 18 nt, Human
gauguggucacagcugua

SEQ ID NO: 1372032 - RNA, 17 nt, Human
gauguggucacagcugu

SEQ ID NO: 1372033 - RNA, 16 nt, Human
gauguggucacagcug

SEQ ID NO: 1372034 - RNA, 18 nt, Human
gauguggguuccacagac

SEQ ID NO: 1372035 - RNA, 16 nt, Human
gauguggguuccacag

SEQ ID NO: 1372036 - RNA, 22 nt, Human
gaugguucccuugaugaagaag

SEQ ID NO: 1372037 - RNA, 21 nt, Human
gaugcugacauucaccugccc

SEQ ID NO: 1372038 - RNA, 20 nt, Human
gaugcugacauucaccugcc

SEQ ID NO: 1372039 - RNA, 17 nt, Human
gaugcugaaaauguccu

SEQ ID NO: 1372040 - RNA, 21 nt, Human
gaugcuccuugggcccuuuga

SEQ ID NO: 1372041 - RNA, 16 nt, Human
gaugcuccuugggccc

SEQ ID NO: 1372042 - RNA, 14 nt, Human
gaugcuccuugggc

SEQ ID NO: 1372043 - RNA, 13 nt, Human
gaugcuccuuggg

SEQ ID NO: 1372044 - RNA, 23 nt, Human
gaugcccccuaauccccuucucc

SEQ ID NO: 1372045 - RNA, 11 nt, Human
gaugcccagag

SEQ ID NO: 1372046 - RNA, 17 nt, Human
gaugcccaaauccuuag

SEQ ID NO: 1372047 - RNA, 18 nt, Human
gaugccagccaagcucug

SEQ ID NO: 1372048 - RNA, 15 nt, Human
gaugccagccaagcu

SEQ ID NO: 1372049 - RNA, 23 nt, Human
gaucagagccgugguccuuuggg

SEQ ID NO: 1372050 - RNA, 16 nt, Human
gaucagagccgugguc

SEQ ID NO: 1372051 - RNA, 16 nt, Human
gaucagaccauaaugu

SEQ ID NO: 1372052 - RNA, 13 nt, Human
gaucagaacaaau

SEQ ID NO: 1372053 - RNA, 22 nt, Human
gaugccagccaagcucugcagu

SEQ ID NO: 1372054 - RNA, 20 nt, Human
gaugggagggaggcucaggu

SEQ ID NO: 1372055 - RNA, 18 nt, Human
gauggccggagaggaccg

SEQ ID NO: 1372056 - RNA, 12 nt, Human
gauggccccagc

SEQ ID NO: 1372057 - RNA, 14 nt, Human
gauggcccauccug

SEQ ID NO: 1372058 - RNA, 19 nt, Human
gauggccagccccuuagac

SEQ ID NO: 1372059 - RNA, 14 nt, Human
gauggccagccccu

SEQ ID NO: 1372060 - RNA, 13 nt, Human
gauggccagcccc

SEQ ID NO: 1372061 - RNA, 15 nt, Human
gauggccccagcaca

SEQ ID NO: 1372062 - RNA, 14 nt, Human
gauggccccagcac

SEQ ID NO: 1372063 - RNA, 12 nt, Human
gauggggcuccc

SEQ ID NO: 1372064 - RNA, 17 nt, Human
gaugggauucuggacag

SEQ ID NO: 1372065 - RNA, 13 nt, Human
gaugggauucugg

SEQ ID NO: 1372066 - RNA, 20 nt, Human
gaugggaugguggagggcca

SEQ ID NO: 1372067 - RNA, 19 nt, Human
gaugggaugguggagggcc

SEQ ID NO: 1372068 - RNA, 17 nt, Human
gaugggguuucaccaug

SEQ ID NO: 1372069 - RNA, 23 nt, Human
gcccgagcagcugagcagggccg

SEQ ID NO: 1372070 - RNA, 22 nt, Human
gcccgagcagcugagcagggcc

SEQ ID NO: 1372071 - RNA, 20 nt, Human
gcccgagcagcugagcaggg

SEQ ID NO: 1372072 - RNA, 19 nt, Human
gcccgagcagcugagcagg

SEQ ID NO: 1372073 - RNA, 18 nt, Human
gcccgagcagcugagcag

SEQ ID NO: 1372074 - RNA, 17 nt, Human
gcccgagcagcugagca

SEQ ID NO: 1372075 - RNA, 16 nt, Human
gcccgagcagcugagc

SEQ ID NO: 1372076 - RNA, 14 nt, Human
gcccgagcagcuga

SEQ ID NO: 1372077 - RNA, 13 nt, Human
gcccgagcagcug

SEQ ID NO: 1372078 - RNA, 12 nt, Human
gcccgagcagcu

SEQ ID NO: 1372079 - RNA, 17 nt, Human
gcccgcaugcggcccag

SEQ ID NO: 1372080 - RNA, 19 nt, Human
gcccgcaugcggcccagga

SEQ ID NO: 1372081 - RNA, 17 nt, Human
gccccuuagacagaggc

SEQ ID NO: 1372082 - RNA, 22 nt, Human
gccccuuagacagaggcccuca

SEQ ID NO: 1372083 - RNA, 16 nt, Human
gccccuuagacagagg

SEQ ID NO: 1372084 - RNA, 15 nt, Human
gcccggcagggcggg

SEQ ID NO: 1372085 - RNA, 21 nt, Human
gcccgcgauguggaacugcug

SEQ ID NO: 1372086 - RNA, 24 nt, Human
gcccgcgauguggaacugcugcca

SEQ ID NO: 1372087 - RNA, 17 nt, Human
gcccggcagggcgggca

SEQ ID NO: 1372088 - RNA, 18 nt, Human
gcccggcuaauuuuugua

SEQ ID NO: 1372089 - RNA, 12 nt, Human
gccccucucccu

SEQ ID NO: 1372090 - RNA, 18 nt, Human
gccccucuccccagggaa

SEQ ID NO: 1372091 - RNA, 20 nt, Human
gccccucucagcccucacac

SEQ ID NO: 1372092 - RNA, 16 nt, Human
gccccucucagcccuc

SEQ ID NO: 1372093 - RNA, 15 nt, Human
gccccucucagcccu

SEQ ID NO: 1372094 - RNA, 14 nt, Human
gccccucucagccc

SEQ ID NO: 1372095 - RNA, 13 nt, Human
gccccucucagcc

SEQ ID NO: 1372096 - RNA, 15 nt, Human
gccccucucaccaaa

SEQ ID NO: 1372097 - RNA, 14 nt, Human
gccccucucaccaa

SEQ ID NO: 1372098 - RNA, 17 nt, Human
gccccucuccuucuuag

SEQ ID NO: 1372099 - RNA, 23 nt, Human
gccccucucccuugggcucugau

SEQ ID NO: 1372100 - RNA, 21 nt, Human
gccccucucccuugggcucug

SEQ ID NO: 1372101 - RNA, 20 nt, Human
gccccucucccuugggcucu

SEQ ID NO: 1372102 - RNA, 14 nt, Human
gcagacguccauca

SEQ ID NO: 1372103 - RNA, 17 nt, Human
gcagaccuuuuuuagga

SEQ ID NO: 1372104 - RNA, 15 nt, Human
gcagacucagcucug

SEQ ID NO: 1372105 - RNA, 13 nt, Human
gcagacucacugu

SEQ ID NO: 1372106 - RNA, 16 nt, Human
gcagacucagcucuga

SEQ ID NO: 1372107 - RNA, 22 nt, Human
gcccucuccccugcccccugca

SEQ ID NO: 1372108 - RNA, 23 nt, Human
gcccucuccccugcccccugcag

SEQ ID NO: 1372109 - RNA, 21 nt, Human
gcccugaggacagaugccucc

SEQ ID NO: 1372110 - RNA, 22 nt, Human
gcccucugcauccucuggagcc

SEQ ID NO: 1372111 - RNA, 21 nt, Human
gcccucugcauccucuggagc

SEQ ID NO: 1372112 - RNA, 20 nt, Human
gcccucugcauccucuggag

SEQ ID NO: 1372113 - RNA, 19 nt, Human
gcccucugcauccucugga

SEQ ID NO: 1372114 - RNA, 18 nt, Human
gcccucugcauccucugg

SEQ ID NO: 1372115 - RNA, 17 nt, Human
gcccucugcauccucug

SEQ ID NO: 1372116 - RNA, 16 nt, Human
gcccucucugcucugc

SEQ ID NO: 1372117 - RNA, 20 nt, Human
gcccucuccccugcccccug

SEQ ID NO: 1372118 - RNA, 18 nt, Human
gcccucuccccugccccc

SEQ ID NO: 1372119 - RNA, 17 nt, Human
gcccucuccccugcccc

SEQ ID NO: 1372120 - RNA, 16 nt, Human
gcccucuccccugccc

SEQ ID NO: 1372121 - RNA, 15 nt, Human
gcccucuccccugcc

SEQ ID NO: 1372122 - RNA, 14 nt, Human
gcccucuccccugc

SEQ ID NO: 1372123 - RNA, 20 nt, Human
gcccucuccccucagccucu

SEQ ID NO: 1372124 - RNA, 17 nt, Human
gcccucuccccucagcc

SEQ ID NO: 1372125 - RNA, 20 nt, Human
gcccucucccacccucuucc

SEQ ID NO: 1372126 - RNA, 19 nt, Human
gcccucucccacccucuuc

SEQ ID NO: 1372127 - RNA, 16 nt, Human
gcccucucccacccuc

SEQ ID NO: 1372128 - RNA, 13 nt, Human
gcccucucccacc

SEQ ID NO: 1372129 - RNA, 17 nt, Human
gcccucgugguggaaac

SEQ ID NO: 1372130 - RNA, 23 nt, Human
gcccucgugguggaaacuuuucu

SEQ ID NO: 1372131 - RNA, 17 nt, Human
gcccucgcugccagcuc

SEQ ID NO: 1372132 - RNA, 15 nt, Human
gcccucgcugccagc

SEQ ID NO: 1372133 - RNA, 14 nt, Human
gcccucgcugccag

SEQ ID NO: 1372134 - RNA, 13 nt, Human
gcccggcuccugg

SEQ ID NO: 1372135 - RNA, 14 nt, Human
gcccggcuccuggu

SEQ ID NO: 1372136 - RNA, 22 nt, Human
gcccugcaccaugcugcugggg

SEQ ID NO: 1372137 - RNA, 21 nt, Human
gcccugcaccaugcugcuggg

SEQ ID NO: 1372138 - RNA, 17 nt, Human
gcccugcaccaugcugc

SEQ ID NO: 1372139 - RNA, 21 nt, Human
gcccugcaaaaggacucucag

SEQ ID NO: 1372140 - RNA, 15 nt, Human
gcccugcagacccug

SEQ ID NO: 1372141 - RNA, 14 nt, Human
gcccugcagacccu

SEQ ID NO: 1372142 - RNA, 13 nt, Human
gcccugcagaccc

SEQ ID NO: 1372143 - RNA, 17 nt, Human
gcccugaggacagaugc

SEQ ID NO: 1372144 - RNA, 18 nt, Human
gcccugcaaaaggacucu

SEQ ID NO: 1372145 - RNA, 14 nt, Human
gcccugcaaaagga

SEQ ID NO: 1372146 - RNA, 13 nt, Human
gcccugaucccag

SEQ ID NO: 1372147 - RNA, 15 nt, Human
gcccugaucccagag

SEQ ID NO: 1372148 - RNA, 23 nt, Human
gcccuggaucagcguggccuugu

SEQ ID NO: 1372149 - RNA, 21 nt, Human
gcccuggaucagcguggccuu

SEQ ID NO: 1372150 - RNA, 20 nt, Human
gcccuggaucagcguggccu

SEQ ID NO: 1372151 - RNA, 19 nt, Human
gcccuggaucagcguggcc

SEQ ID NO: 1372152 - RNA, 18 nt, Human
gcccuggaucagcguggc

SEQ ID NO: 1372153 - RNA, 17 nt, Human
gcccuggaucagcgugg

SEQ ID NO: 1372154 - RNA, 22 nt, Human
gcccuggagaccccaccagccu

SEQ ID NO: 1372155 - RNA, 15 nt, Human
gcccuggagcagcca

SEQ ID NO: 1372156 - RNA, 12 nt, Human
gcccuggacugu

SEQ ID NO: 1372157 - RNA, 16 nt, Human
gcccuggacugugugc

SEQ ID NO: 1372158 - RNA, 22 nt, Human
gcccuggacugugugcucagga

SEQ ID NO: 1372159 - RNA, 22 nt, Human
gcccugucagcaugaauuugua

SEQ ID NO: 1372160 - RNA, 20 nt, Human
gcccugucagcaugaauuug

SEQ ID NO: 1372161 - RNA, 15 nt, Human
gcccugguggcccuc

SEQ ID NO: 1372162 - RNA, 14 nt, Human
gcccugguggcccu

SEQ ID NO: 1372163 - RNA, 13 nt, Human
gcccugguggccc

SEQ ID NO: 1372164 - RNA, 20 nt, Human
gcccugguggcccucucccc

SEQ ID NO: 1372165 - RNA, 19 nt, Human
gcccugguggcccucuccc

SEQ ID NO: 1372166 - RNA, 18 nt, Human
gcccugguggcccucucc

SEQ ID NO: 1372167 - RNA, 23 nt, Human
gcccuggugguggcucgggaggc

SEQ ID NO: 1372168 - RNA, 18 nt, Human
gcccuuugagugcagucc

SEQ ID NO: 1372169 - RNA, 19 nt, Human
gcccuuucggauccaggga

SEQ ID NO: 1372170 - RNA, 22 nt, Human
gcccuuucggauccagggaggc

SEQ ID NO: 1372171 - RNA, 16 nt, Human
gcccuuuccuccucag

SEQ ID NO: 1372172 - RNA, 15 nt, Human
gcccuuuccuccuca

SEQ ID NO: 1372173 - RNA, 23 nt, Human
gcccuuguuuggggcaggaguag

SEQ ID NO: 1372174 - RNA, 22 nt, Human
gcccuuguuuggggcaggagua

SEQ ID NO: 1372175 - RNA, 17 nt, Human
gcccuggccuccccugc

SEQ ID NO: 1372176 - RNA, 16 nt, Human
gcccuggccuccccug

SEQ ID NO: 1372177 - RNA, 14 nt, Human
gcccuggccucccc

SEQ ID NO: 1372178 - RNA, 12 nt, Human
gcccuggccucc

SEQ ID NO: 1372179 - RNA, 15 nt, Human
gcccuggcaugucaa

SEQ ID NO: 1372180 - RNA, 22 nt, Human
gcccuggaucagcguggccuug

SEQ ID NO: 1372181 - RNA, 24 nt, Human
gcccuggccuccccugccaccagg

SEQ ID NO: 1372182 - RNA, 21 nt, Human
gcccuggccuccccugccacc

SEQ ID NO: 1372183 - RNA, 20 nt, Human
gcccuggccuccccugccac

SEQ ID NO: 1372184 - RNA, 19 nt, Human
gcccuggccuccccugcca

SEQ ID NO: 1372185 - RNA, 20 nt, Human
gcccugggaccgcuacacca

SEQ ID NO: 1372186 - RNA, 14 nt, Human
gcccugggaccgcu

SEQ ID NO: 1372187 - RNA, 13 nt, Human
gcccugggaggcu

SEQ ID NO: 1372188 - RNA, 14 nt, Human
gcccugggaggcuc

SEQ ID NO: 1372189 - RNA, 15 nt, Human
gcccugggaggcucu

SEQ ID NO: 1372190 - RNA, 16 nt, Human
gcccugggaggcucug

SEQ ID NO: 1372191 - RNA, 22 nt, Human
gcccuggggccuguacugccug

SEQ ID NO: 1372192 - RNA, 21 nt, Human
gcccuggggccuguacugccu

SEQ ID NO: 1372193 - RNA, 23 nt, Human
gcccuggggccuguacugccugc

SEQ ID NO: 1372194 - RNA, 19 nt, Human
gcccuggggccuguacugc

SEQ ID NO: 1372195 - RNA, 18 nt, Human
gcccuggggccuguacug

SEQ ID NO: 1372196 - RNA, 15 nt, Human
gcccuggggccugua

SEQ ID NO: 1372197 - RNA, 14 nt, Human
gcccuggggccugu

SEQ ID NO: 1372198 - RNA, 13 nt, Human
gcccuggggccug

SEQ ID NO: 1372199 - RNA, 12 nt, Human
gcccuggggccu

SEQ ID NO: 1372200 - RNA, 18 nt, Human
gcccugggcuggaaucag

SEQ ID NO: 1372201 - RNA, 16 nt, Human
gcccugggcuggaauc

SEQ ID NO: 1372202 - RNA, 14 nt, Human
gcccugggcuggaa

SEQ ID NO: 1372203 - RNA, 13 nt, Human
gcccugggcugga

SEQ ID NO: 1372204 - RNA, 12 nt, Human
gcccugggcugg

SEQ ID NO: 1372205 - RNA, 11 nt, Human
gcccugggcug

SEQ ID NO: 1372206 - RNA, 22 nt, Human
gcccugggccugccucaccacg

SEQ ID NO: 1372207 - RNA, 20 nt, Human
gcccugggccugccucacca

SEQ ID NO: 1372208 - RNA, 16 nt, Human
gcccugggccugccuc

SEQ ID NO: 1372209 - RNA, 15 nt, Human
gcccugggccugccu

SEQ ID NO: 1372210 - RNA, 13 nt, Human
gcccugggccugc

SEQ ID NO: 1372211 - RNA, 23 nt, Human
gcccugggagaaucgcuccugca

SEQ ID NO: 1372212 - RNA, 22 nt, Human
gcccugggaccgcuacaccacu

SEQ ID NO: 1372213 - RNA, 23 nt, Human
gcccugggaggcucuggagccca

SEQ ID NO: 1372214 - RNA, 17 nt, Human
gcccugggaggcucugg

SEQ ID NO: 1372215 - RNA, 18 nt, Human
gcccugggaggcucugga

SEQ ID NO: 1372216 - RNA, 19 nt, Human
gcccugggaggcucuggag

SEQ ID NO: 1372217 - RNA, 21 nt, Human
gcccugggaggcucuggagcc

SEQ ID NO: 1372218 - RNA, 15 nt, Human
gccgagcaggaggcc

SEQ ID NO: 1372219 - RNA, 14 nt, Human
gccgagcaggaggc

SEQ ID NO: 1372220 - RNA, 20 nt, Human
gccgagcaaccguggcccuu

SEQ ID NO: 1372221 - RNA, 19 nt, Human
gccgagcaaccguggcccu

SEQ ID NO: 1372222 - RNA, 14 nt, Human
gccgagcaaccgug

SEQ ID NO: 1372223 - RNA, 18 nt, Human
gccuaugacuugggcacc

SEQ ID NO: 1372224 - RNA, 17 nt, Human
gccuaugacuugggcac

SEQ ID NO: 1372225 - RNA, 16 nt, Human
gccuaugacuugggca

SEQ ID NO: 1372226 - RNA, 20 nt, Human
gccuaucagaguugcugcaa

SEQ ID NO: 1372227 - RNA, 14 nt, Human
gccucagggcuccu

SEQ ID NO: 1372228 - RNA, 18 nt, Human
gccucaggacugggagcc

SEQ ID NO: 1372229 - RNA, 16 nt, Human
gccucaggggucugag

SEQ ID NO: 1372230 - RNA, 23 nt, Human
gccucaggacugggagcccccag

SEQ ID NO: 1372231 - RNA, 17 nt, Human
gccucaggacugggagc

SEQ ID NO: 1372232 - RNA, 16 nt, Human
gccucaggacugggag

SEQ ID NO: 1372233 - RNA, 15 nt, Human
gccucaggacuggga

SEQ ID NO: 1372234 - RNA, 21 nt, Human
gccucagcucccacaagccuc

SEQ ID NO: 1372235 - RNA, 17 nt, Human
gccucagcucccacaag

SEQ ID NO: 1372236 - RNA, 16 nt, Human
gccucagcucccacaa

SEQ ID NO: 1372237 - RNA, 15 nt, Human
gccucagcucccaca

SEQ ID NO: 1372238 - RNA, 13 nt, Human
gccucagaagugc

SEQ ID NO: 1372239 - RNA, 16 nt, Human
gccucagccucccaag

SEQ ID NO: 1372240 - RNA, 17 nt, Human
gccucagaaaccagacu

SEQ ID NO: 1372241 - RNA, 23 nt, Human
gccucacuuuuaaugaacaaaug

SEQ ID NO: 1372242 - RNA, 19 nt, Human
gccucagaagugcaucugg

SEQ ID NO: 1372243 - RNA, 22 nt, Human
gccucacuuuuaaugaacaaau

SEQ ID NO: 1372244 - RNA, 15 nt, Human
gccucaaccucccaa

SEQ ID NO: 1372245 - RNA, 20 nt, Human
gccucacccaccccugcaca

SEQ ID NO: 1372246 - RNA, 19 nt, Human
gccucacccaccccugcac

SEQ ID NO: 1372247 - RNA, 18 nt, Human
gccucacccaccccugca

SEQ ID NO: 1372248 - RNA, 17 nt, Human
gccucacccaccccugc

SEQ ID NO: 1372249 - RNA, 15 nt, Human
gccucacccaccccu

SEQ ID NO: 1372250 - RNA, 19 nt, Human
gccucaccagcccuggcaa

SEQ ID NO: 1372251 - RNA, 20 nt, Human
gccuccccuuaaaggggaga

SEQ ID NO: 1372252 - RNA, 18 nt, Human
gccuccccugccagggca

SEQ ID NO: 1372253 - RNA, 17 nt, Human
gccuccccugccagggc

SEQ ID NO: 1372254 - RNA, 15 nt, Human
gccuccccugccagg

SEQ ID NO: 1372255 - RNA, 14 nt, Human
gccuccccugccag

SEQ ID NO: 1372256 - RNA, 19 nt, Human
gccuccccugccaccaggc

SEQ ID NO: 1372257 - RNA, 16 nt, Human
gccuccccugccacca

SEQ ID NO: 1372258 - RNA, 15 nt, Human
gccuccccugccacc

SEQ ID NO: 1372259 - RNA, 14 nt, Human
gccuccccugccac

SEQ ID NO: 1372260 - RNA, 21 nt, Human
gccuccccucuccuuccugug

SEQ ID NO: 1372261 - RNA, 19 nt, Human
gccuccccucuccuuccug

SEQ ID NO: 1372262 - RNA, 18 nt, Human
gccuccccucuccuuccu

SEQ ID NO: 1372263 - RNA, 20 nt, Human
gccucagugacccuggcucc

SEQ ID NO: 1372264 - RNA, 17 nt, Human
gccucagugacccuggc

SEQ ID NO: 1372265 - RNA, 17 nt, Human
gccucggccucccaaag

SEQ ID NO: 1372266 - RNA, 19 nt, Human
gccuccccuuaaaggggag

SEQ ID NO: 1372267 - RNA, 22 nt, Human
gccucucccuccuccaggaagc

SEQ ID NO: 1372268 - RNA, 23 nt, Human
gccucucccuccuccaggaagcc

SEQ ID NO: 1372269 - RNA, 14 nt, Human
gccucucccuccuc

SEQ ID NO: 1372270 - RNA, 22 nt, Human
gccucuagagcagacuacagcu

SEQ ID NO: 1372271 - RNA, 18 nt, Human
gccucuacugggaaggcu

SEQ ID NO: 1372272 - RNA, 17 nt, Human
gccucuacugggaaggc

SEQ ID NO: 1372273 - RNA, 16 nt, Human
gccucuacugggaagg

SEQ ID NO: 1372274 - RNA, 15 nt, Human
gccucuacugggaag

SEQ ID NO: 1372275 - RNA, 23 nt, Human
gccucuaccugacacucccuugg

SEQ ID NO: 1372276 - RNA, 19 nt, Human
gccucucgcuccucaaccc

SEQ ID NO: 1372277 - RNA, 19 nt, Human
gccucucugcaggucccua

SEQ ID NO: 1372278 - RNA, 21 nt, Human
gccuggccagacacaggcccu

SEQ ID NO: 1372279 - RNA, 20 nt, Human
gccuggccagacacaggccc

SEQ ID NO: 1372280 - RNA, 15 nt, Human
gccuggccagugccc

SEQ ID NO: 1372281 - RNA, 17 nt, Human
gccuggccagacacagg

SEQ ID NO: 1372282 - RNA, 16 nt, Human
gccuggccagacacag

SEQ ID NO: 1372283 - RNA, 14 nt, Human
gccuggccagacac

SEQ ID NO: 1372284 - RNA, 13 nt, Human
gccuggccagaca

SEQ ID NO: 1372285 - RNA, 20 nt, Human
gccuggcaguccgugggacg

SEQ ID NO: 1372286 - RNA, 20 nt, Human
gccuggaugcggauggccgg

SEQ ID NO: 1372287 - RNA, 24 nt, Human
gccuggaguguaugacugcacaug

SEQ ID NO: 1372288 - RNA, 22 nt, Human
gccuggaggaccugagccugcc

SEQ ID NO: 1372289 - RNA, 21 nt, Human
gccuggaggaccugagccugc

SEQ ID NO: 1372290 - RNA, 20 nt, Human
gccuggaggaccugagccug

SEQ ID NO: 1372291 - RNA, 19 nt, Human
gccuggaggaccugagccu

SEQ ID NO: 1372292 - RNA, 18 nt, Human
gccuggaggaccugagcc

SEQ ID NO: 1372293 - RNA, 21 nt, Human
gccuguagccccagugacagc

SEQ ID NO: 1372294 - RNA, 20 nt, Human
gccuguagccccagugacag

SEQ ID NO: 1372295 - RNA, 17 nt, Human
gccuguagaguugcuga

SEQ ID NO: 1372296 - RNA, 19 nt, Human
gccuguagaguugcugaga

SEQ ID NO: 1372297 - RNA, 16 nt, Human
gccuguagaguugcug

SEQ ID NO: 1372298 - RNA, 15 nt, Human
gccuguagaguugcu

SEQ ID NO: 1372299 - RNA, 13 nt, Human
gccuguagaguug

SEQ ID NO: 1372300 - RNA, 19 nt, Human
gccuguacugccugcuugg

SEQ ID NO: 1372301 - RNA, 20 nt, Human
gccuguacugccugcuuggg

SEQ ID NO: 1372302 - RNA, 18 nt, Human
gccuguacugccugcuug

SEQ ID NO: 1372303 - RNA, 17 nt, Human
gccuguacugccugcuu

SEQ ID NO: 1372304 - RNA, 15 nt, Human
gccugggucuccuaa

SEQ ID NO: 1372305 - RNA, 20 nt, Human
gccuggggcucuaacgccug

SEQ ID NO: 1372306 - RNA, 13 nt, Human
gccuggaggaccu

SEQ ID NO: 1372307 - RNA, 14 nt, Human
gccuggcccacccc

SEQ ID NO: 1372308 - RNA, 17 nt, Human
gccuggccagugcccug

SEQ ID NO: 1372309 - RNA, 18 nt, Human
gccuggccauacuguguc

SEQ ID NO: 1372310 - RNA, 20 nt, Human
gccugggggccuggcuggcu

SEQ ID NO: 1372311 - RNA, 19 nt, Human
gccugggggccuggcuggc

SEQ ID NO: 1372312 - RNA, 18 nt, Human
gccugggggccuggcugg

SEQ ID NO: 1372313 - RNA, 17 nt, Human
gccugggggccuggcug

SEQ ID NO: 1372314 - RNA, 16 nt, Human
gccugggggccuggcu

SEQ ID NO: 1372315 - RNA, 15 nt, Human
gccugggggccuggc

SEQ ID NO: 1372316 - RNA, 14 nt, Human
gccugggggccugg

SEQ ID NO: 1372317 - RNA, 13 nt, Human
gccugggggccug

SEQ ID NO: 1372318 - RNA, 23 nt, Human
gccuggggcucuaacgccugagc

SEQ ID NO: 1372319 - RNA, 14 nt, Human
gccuggggcuggcc

SEQ ID NO: 1372320 - RNA, 17 nt, Human
gccuggggcuggccucc

SEQ ID NO: 1372321 - RNA, 22 nt, Human
gccuggggcucuaacgccugag

SEQ ID NO: 1372322 - RNA, 21 nt, Human
gccuggggcucuaacgccuga

SEQ ID NO: 1372323 - RNA, 22 nt, Human
gccuggggcugaggcugaggca

SEQ ID NO: 1372324 - RNA, 18 nt, Human
gccugcuuuuuauggccu

SEQ ID NO: 1372325 - RNA, 19 nt, Human
gccugcuuuuuauggccug

SEQ ID NO: 1372326 - RNA, 17 nt, Human
gccuggaggaccugagc

SEQ ID NO: 1372327 - RNA, 16 nt, Human
gccuggaggaccugag

SEQ ID NO: 1372328 - RNA, 15 nt, Human
gccuggaggaccuga

SEQ ID NO: 1372329 - RNA, 14 nt, Human
gccuggaggaccug

SEQ ID NO: 1372330 - RNA, 22 nt, Human
gccugcuuuuuauggccuguga

SEQ ID NO: 1372331 - RNA, 16 nt, Human
gccugcagacucacug

SEQ ID NO: 1372332 - RNA, 16 nt, Human
gccugcagaauuuggg

SEQ ID NO: 1372333 - RNA, 16 nt, Human
gccugcacaauaaaaa

SEQ ID NO: 1372334 - RNA, 19 nt, Human
gccucugcgagugguuucu

SEQ ID NO: 1372335 - RNA, 22 nt, Human
gccucucgcuccucaaccccuc

SEQ ID NO: 1372336 - RNA, 23 nt, Human
gccucucugcaggucccuaauaa

SEQ ID NO: 1372337 - RNA, 20 nt, Human
gccucucugcaggucccuaa

SEQ ID NO: 1372338 - RNA, 21 nt, Human
gccucucugcaggucccuaau

SEQ ID NO: 1372339 - RNA, 15 nt, Human
gccugaccaaacagc

SEQ ID NO: 1372340 - RNA, 22 nt, Human
gccugacauuuggaguguuccc

SEQ ID NO: 1372341 - RNA, 15 nt, Human
gccugacacacuaac

SEQ ID NO: 1372342 - RNA, 22 nt, Human
gccugacacacuaaccaagcug

SEQ ID NO: 1372343 - RNA, 21 nt, Human
gccugacaaccacuggucugu

SEQ ID NO: 1372344 - RNA, 20 nt, Human
gccugacaaccacuggucug

SEQ ID NO: 1372345 - RNA, 22 nt, Human
gccugagucgugaccugcuagg

SEQ ID NO: 1372346 - RNA, 23 nt, Human
gccugagucgugaccugcuaggc

SEQ ID NO: 1372347 - RNA, 20 nt, Human
gccugagucgugaccugcua

SEQ ID NO: 1372348 - RNA, 18 nt, Human
gccugagucgugaccugc

SEQ ID NO: 1372349 - RNA, 23 nt, Human
gccugacccuacuucuuuugcuc

SEQ ID NO: 1372350 - RNA, 17 nt, Human
gccugacccucaucuuu

SEQ ID NO: 1372351 - RNA, 20 nt, Human
gccugaucagaccacggcuc

SEQ ID NO: 1372352 - RNA, 16 nt, Human
gccugaucagaccacg

SEQ ID NO: 1372353 - RNA, 20 nt, Human
gccugagugacagagcaaga

SEQ ID NO: 1372354 - RNA, 22 nt, Human
gcucugcuauuaggccagcaag

SEQ ID NO: 1372355 - RNA, 22 nt, Human
gcucugcuccccuaaagccuca

SEQ ID NO: 1372356 - RNA, 22 nt, Human
gcucugcgugucaccugugcuu

SEQ ID NO: 1372357 - RNA, 19 nt, Human
gcucuggacagccccaccc

SEQ ID NO: 1372358 - RNA, 16 nt, Human
gcucuggacagcccca

SEQ ID NO: 1372359 - RNA, 17 nt, Human
gcucugcgugucaccug

SEQ ID NO: 1372360 - RNA, 21 nt, Human
gcucuccauucugcuccuucc

SEQ ID NO: 1372361 - RNA, 19 nt, Human
gcucuccauucugcuccuu

SEQ ID NO: 1372362 - RNA, 18 nt, Human
gcucuccauucugcuccu

SEQ ID NO: 1372363 - RNA, 17 nt, Human
gcucuccauucugcucc

SEQ ID NO: 1372364 - RNA, 14 nt, Human
gcucuccauucugc

SEQ ID NO: 1372365 - RNA, 12 nt, Human
gcucuccauucu

SEQ ID NO: 1372366 - RNA, 11 nt, Human
gcuccuugggc

SEQ ID NO: 1372367 - RNA, 19 nt, Human
gcucgaaucucugugccuu

SEQ ID NO: 1372368 - RNA, 16 nt, Human
gcucgaaucucugugc

SEQ ID NO: 1372369 - RNA, 15 nt, Human
gcucgaaucucugug

SEQ ID NO: 1372370 - RNA, 12 nt, Human
gcucccuggggg

SEQ ID NO: 1372371 - RNA, 16 nt, Human
gcucccugugccccca

SEQ ID NO: 1372372 - RNA, 21 nt, Human
gcucccuguaaccucuucaga

SEQ ID NO: 1372373 - RNA, 20 nt, Human
gcucucuccaggcaggucug

SEQ ID NO: 1372374 - RNA, 19 nt, Human
gcucucucauugucugugu

SEQ ID NO: 1372375 - RNA, 19 nt, Human
gcucucggguugugugucu

SEQ ID NO: 1372376 - RNA, 19 nt, Human
gcucucgcacaccucugca

SEQ ID NO: 1372377 - RNA, 23 nt, Human
gcucuccuggcuucccaucccca

SEQ ID NO: 1372378 - RNA, 17 nt, Human
gcucuccuggcuuccca

SEQ ID NO: 1372379 - RNA, 15 nt, Human
gcucuccuggcuucc

SEQ ID NO: 1372380 - RNA, 14 nt, Human
gcucuccuggcuuc

SEQ ID NO: 1372381 - RNA, 13 nt, Human
gcucuccuggcuu

SEQ ID NO: 1372382 - RNA, 12 nt, Human
gcucuccuggcu

SEQ ID NO: 1372383 - RNA, 14 nt, Human
gcucuccuggcccu

SEQ ID NO: 1372384 - RNA, 23 nt, Human
gcucuccucuucuacucacuuuu

SEQ ID NO: 1372385 - RNA, 20 nt, Human
gcucuccauucugcuccuuc

SEQ ID NO: 1372386 - RNA, 15 nt, Human
gcucuccucuucuac

SEQ ID NO: 1372387 - RNA, 13 nt, Human
gcucuccucuucu

SEQ ID NO: 1372388 - RNA, 17 nt, Human
gcucuccuccaccucaa

SEQ ID NO: 1372389 - RNA, 15 nt, Human
gcucuuccuuacucc

SEQ ID NO: 1372390 - RNA, 22 nt, Human
gcucuggacagccccacccugg

SEQ ID NO: 1372391 - RNA, 20 nt, Human
gcucuggacagccccacccu

SEQ ID NO: 1372392 - RNA, 14 nt, Human
gcucuugaugccug

SEQ ID NO: 1372393 - RNA, 15 nt, Human
gcucuugaugccugg

SEQ ID NO: 1372394 - RNA, 16 nt, Human
gcucuugaugccuggc

SEQ ID NO: 1372395 - RNA, 22 nt, Human
gcugaccaugcucaucugcugg

SEQ ID NO: 1372396 - RNA, 21 nt, Human
gcugaccaugcucaucugcug

SEQ ID NO: 1372397 - RNA, 17 nt, Human
gcugacucacaccugaa

SEQ ID NO: 1372398 - RNA, 17 nt, Human
gcucuuucucugccagu

SEQ ID NO: 1372399 - RNA, 15 nt, Human
gcucuuucucugcca

SEQ ID NO: 1372400 - RNA, 14 nt, Human
gcucuuucucugcc

SEQ ID NO: 1372401 - RNA, 16 nt, Human
gcucuuucucugccag

SEQ ID NO: 1372402 - RNA, 21 nt, Human
gcucuuguugagccgugggca

SEQ ID NO: 1372403 - RNA, 17 nt, Human
gcucuugugaggaaagu

SEQ ID NO: 1372404 - RNA, 19 nt, Human
gcucuugugaggaaaguca

SEQ ID NO: 1372405 - RNA, 20 nt, Human
gcucuugugaggaaagucau

SEQ ID NO: 1372406 - RNA, 23 nt, Human
gcucuugauaccccccucugucu

SEQ ID NO: 1372407 - RNA, 22 nt, Human
gcucuugauaccccccucuguc

SEQ ID NO: 1372408 - RNA, 16 nt, Human
gcucuugugaggaaag

SEQ ID NO: 1372409 - RNA, 17 nt, Human
gcucuugaugccuggcg

SEQ ID NO: 1372410 - RNA, 20 nt, Human
gcugcauugaaaagagcuga

SEQ ID NO: 1372411 - RNA, 19 nt, Human
gcugcauugaaaagagcug

SEQ ID NO: 1372412 - RNA, 22 nt, Human
gcugcauggcagggggcugcug

SEQ ID NO: 1372413 - RNA, 17 nt, Human
gcugcauggcagggggc

SEQ ID NO: 1372414 - RNA, 17 nt, Human
gcugcauuuaaaagaua

SEQ ID NO: 1372415 - RNA, 23 nt, Human
gcugaugucaauuucuguguugc

SEQ ID NO: 1372416 - RNA, 20 nt, Human
gcugaugucaauuucugugu

SEQ ID NO: 1372417 - RNA, 17 nt, Human
gcugaugucaauuucug

SEQ ID NO: 1372418 - RNA, 20 nt, Human
gcugauguagcaugcuuguu

SEQ ID NO: 1372419 - RNA, 14 nt, Human
gcugacuguagcuu

SEQ ID NO: 1372420 - RNA, 12 nt, Human
gcugaguuuccu

SEQ ID NO: 1372421 - RNA, 11 nt, Human
gcugaguuucc

SEQ ID NO: 1372422 - RNA, 21 nt, Human
gcugaguggcaggggacagga

SEQ ID NO: 1372423 - RNA, 19 nt, Human
gcugaguggcaggggacag

SEQ ID NO: 1372424 - RNA, 17 nt, Human
gcugaguggcaggggac

SEQ ID NO: 1372425 - RNA, 15 nt, Human
gcugaguuuccuaug

SEQ ID NO: 1372426 - RNA, 13 nt, Human
gcugaguuuccua

SEQ ID NO: 1372427 - RNA, 16 nt, Human
gcugauggagaaggaa

SEQ ID NO: 1372428 - RNA, 17 nt, Human
gcugauggagaaggaag

SEQ ID NO: 1372429 - RNA, 20 nt, Human
gcuaacagggaaggcaggca

SEQ ID NO: 1372430 - RNA, 18 nt, Human
gcuaacagggaaggcagg

SEQ ID NO: 1372431 - RNA, 16 nt, Human
gcuaacagggaaggca

SEQ ID NO: 1372432 - RNA, 15 nt, Human
gcuaacagggaaggc

SEQ ID NO: 1372433 - RNA, 19 nt, Human
gcuaaauccuuuacuguua

SEQ ID NO: 1372434 - RNA, 21 nt, Human
gcuaaauaaaauuuguugcau

SEQ ID NO: 1372435 - RNA, 20 nt, Human
gcuaaauaaaauuuguugca

SEQ ID NO: 1372436 - RNA, 19 nt, Human
gcuaaauaaaauuuguugc

SEQ ID NO: 1372437 - RNA, 12 nt, Human
gcgugagcuuaa

SEQ ID NO: 1372438 - RNA, 23 nt, Human
gcgugagcuuaaaauacaagacu

SEQ ID NO: 1372439 - RNA, 16 nt, Human
gcuaaagcccagagac

SEQ ID NO: 1372440 - RNA, 14 nt, Human
gcgugagcugagca

SEQ ID NO: 1372441 - RNA, 13 nt, Human
gcgugacaauaaa

SEQ ID NO: 1372442 - RNA, 21 nt, Human
gcgucuuccugaguggugcca

SEQ ID NO: 1372443 - RNA, 14 nt, Human
gcgucuuccugagu

SEQ ID NO: 1372444 - RNA, 13 nt, Human
gcgucuuccugag

SEQ ID NO: 1372445 - RNA, 12 nt, Human
gcgucuuccuga

SEQ ID NO: 1372446 - RNA, 19 nt, Human
gcguauuauaccaaaaugu

SEQ ID NO: 1372447 - RNA, 20 nt, Human
gcguaggcuacagagaagcc

SEQ ID NO: 1372448 - RNA, 19 nt, Human
gcguaggcuacagagaagc

SEQ ID NO: 1372449 - RNA, 18 nt, Human
gcguaggcuacagagaag

SEQ ID NO: 1372450 - RNA, 17 nt, Human
gcguaggcuacagagaa

SEQ ID NO: 1372451 - RNA, 16 nt, Human
gcguaggcuacagaga

SEQ ID NO: 1372452 - RNA, 14 nt, Human
gcguaggcuacaga

SEQ ID NO: 1372453 - RNA, 13 nt, Human
gccugugccaggu

SEQ ID NO: 1372454 - RNA, 10 nt, Human
gccugugcca

SEQ ID NO: 1372455 - RNA, 15 nt, Human
gccugugcaaugcau

SEQ ID NO: 1372456 - RNA, 21 nt, Human
gccugugacauacccccuccc

SEQ ID NO: 1372457 - RNA, 23 nt, Human
gccugugacauacccccuccccc

SEQ ID NO: 1372458 - RNA, 21 nt, Human
gccugugaacccaggacaagc

SEQ ID NO: 1372459 - RNA, 19 nt, Human
gccugugaacccaggacaa

SEQ ID NO: 1372460 - RNA, 18 nt, Human
gccugugaacccaggaca

SEQ ID NO: 1372461 - RNA, 21 nt, Human
gccugggucucaccggcucuc

SEQ ID NO: 1372462 - RNA, 23 nt, Human
gccugugagcuaggaauuguguu

SEQ ID NO: 1372463 - RNA, 20 nt, Human
gcuaucucugugugcacaaa

SEQ ID NO: 1372464 - RNA, 16 nt, Human
gcuaucucugugugca

SEQ ID NO: 1372465 - RNA, 13 nt, Human
gcuaucucugugu

SEQ ID NO: 1372466 - RNA, 12 nt, Human
gcuaucucccug

SEQ ID NO: 1372467 - RNA, 20 nt, Human
gcuagcaguggcaggcagag

SEQ ID NO: 1372468 - RNA, 18 nt, Human
gcuagcaguggcaggcag

SEQ ID NO: 1372469 - RNA, 16 nt, Human
gcuagcaguggcaggc

SEQ ID NO: 1372470 - RNA, 14 nt, Human
gcuagcaguggcag

SEQ ID NO: 1372471 - RNA, 22 nt, Human
gcuacuaugauuuaauuugaaa

SEQ ID NO: 1372472 - RNA, 20 nt, Human
gcuacuaugauuuaauuuga

SEQ ID NO: 1372473 - RNA, 18 nt, Human
gcuagagguucaaagaua

SEQ ID NO: 1372474 - RNA, 19 nt, Human
gcuagagguucaaagauau

SEQ ID NO: 1372475 - RNA, 21 nt, Human
gcuagagguucaaagauauuu

SEQ ID NO: 1372476 - RNA, 14 nt, Human
gcuacguauuuaau

SEQ ID NO: 1372477 - RNA, 22 nt, Human
gcuacccgcagaguucucagaa

SEQ ID NO: 1372478 - RNA, 22 nt, Human
gcuaacagggaaggcaggcagg

SEQ ID NO: 1372479 - RNA, 17 nt, Human
gcuaagccccagcaagc

SEQ ID NO: 1372480 - RNA, 14 nt, Human
gcuaagcauuccaa

SEQ ID NO: 1372481 - RNA, 19 nt, Human
gcuaagcuaggaaugaaau

SEQ ID NO: 1372482 - RNA, 15 nt, Human
gcuaagcuaggaaug

SEQ ID NO: 1372483 - RNA, 18 nt, Human
gcuaagccccagcaagca

SEQ ID NO: 1372484 - RNA, 20 nt, Human
gcuaagccccagcaagcaau

SEQ ID NO: 1372485 - RNA, 22 nt, Human
gcuaagcucacguccugagaaa

SEQ ID NO: 1372486 - RNA, 20 nt, Human
gcuaagcucacguccugaga

SEQ ID NO: 1372487 - RNA, 16 nt, Human
gcuacccgcagaguuc

SEQ ID NO: 1372488 - RNA, 16 nt, Human
gcucacccccuucucc

SEQ ID NO: 1372489 - RNA, 13 nt, Human
gcucacccagugc

SEQ ID NO: 1372490 - RNA, 19 nt, Human
gcucacccagugcccucuc

SEQ ID NO: 1372491 - RNA, 20 nt, Human
gcucacccccuucuccaucc

SEQ ID NO: 1372492 - RNA, 18 nt, Human
gcucacccccuucuccau

SEQ ID NO: 1372493 - RNA, 21 nt, Human
gcucagaggguguccugcacc

SEQ ID NO: 1372494 - RNA, 22 nt, Human
gcucacccccuucuccauccac

SEQ ID NO: 1372495 - RNA, 14 nt, Human
gcucagccagcacu

SEQ ID NO: 1372496 - RNA, 13 nt, Human
gcucagccagcac

SEQ ID NO: 1372497 - RNA, 12 nt, Human
gcucagccagca

SEQ ID NO: 1372498 - RNA, 22 nt, Human
gcucagcacugccugcucccau

SEQ ID NO: 1372499 - RNA, 20 nt, Human
gcucagcacugccugcuccc

SEQ ID NO: 1372500 - RNA, 19 nt, Human
gcucagcacugccugcucc

SEQ ID NO: 1372501 - RNA, 18 nt, Human
gcucagcacugccugcuc

SEQ ID NO: 1372502 - RNA, 17 nt, Human
gcucagcacugccugcu

SEQ ID NO: 1372503 - RNA, 15 nt, Human
gcucagauagaauga

SEQ ID NO: 1372504 - RNA, 19 nt, Human
gcucagauagaaugacagu

SEQ ID NO: 1372505 - RNA, 19 nt, Human
gcucauauggggcugggag

SEQ ID NO: 1372506 - RNA, 17 nt, Human
gcucaguggggcagagg

SEQ ID NO: 1372507 - RNA, 19 nt, Human
gcucagugaaguugcugcu

SEQ ID NO: 1372508 - RNA, 18 nt, Human
gcucauaacggaucagaa

SEQ ID NO: 1372509 - RNA, 20 nt, Human
gcucagugaaguugcugcuu

SEQ ID NO: 1372510 - RNA, 17 nt, Human
gcucagugaaguugcug

SEQ ID NO: 1372511 - RNA, 21 nt, Human
gcucaguaauuugaggacaac

SEQ ID NO: 1372512 - RNA, 16 nt, Human
gcucaguaauuugagg

SEQ ID NO: 1372513 - RNA, 23 nt, Human
gcuccaguguccugagcucagcg

SEQ ID NO: 1372514 - RNA, 22 nt, Human
gcuccaguguccugagcucagc

SEQ ID NO: 1372515 - RNA, 16 nt, Human
gcuccagcugccccgg

SEQ ID NO: 1372516 - RNA, 21 nt, Human
gcuccagcugcucugucuucu

SEQ ID NO: 1372517 - RNA, 18 nt, Human
gcucccugacugggaguu

SEQ ID NO: 1372518 - RNA, 16 nt, Human
gcucccugacugggag

SEQ ID NO: 1372519 - RNA, 19 nt, Human
gcucccuccgcccccaggu

SEQ ID NO: 1372520 - RNA, 18 nt, Human
gcucccuccgcccccagg

SEQ ID NO: 1372521 - RNA, 16 nt, Human
gcucccuccgccccca

SEQ ID NO: 1372522 - RNA, 12 nt, Human
gcucccucagac

SEQ ID NO: 1372523 - RNA, 22 nt, Human
gcucccucagacuggggcaaug

SEQ ID NO: 1372524 - RNA, 11 nt, Human
gcucccucaga

SEQ ID NO: 1372525 - RNA, 10 nt, Human
gcucccucag

SEQ ID NO: 1372526 - RNA, 20 nt, Human
gcuccaguguccugagcuca

SEQ ID NO: 1372527 - RNA, 20 nt, Human
gcuccauuuuuagugaaaua

SEQ ID NO: 1372528 - RNA, 21 nt, Human
gcuccagcugccccggccccu

SEQ ID NO: 1372529 - RNA, 20 nt, Human
gcuccagcugcucugucuuc

SEQ ID NO: 1372530 - RNA, 13 nt, Human
gcuccagcugccc

SEQ ID NO: 1372531 - RNA, 12 nt, Human
gcuccagcugcc

SEQ ID NO: 1372532 - RNA, 18 nt, Human
gcuccaagauucuagaug

SEQ ID NO: 1372533 - RNA, 23 nt, Human
gcuccaaggggaaucagaacuca

SEQ ID NO: 1372534 - RNA, 21 nt, Human
gcuccaaggggaaucagaacu

SEQ ID NO: 1372535 - RNA, 20 nt, Human
gcuccaaggggaaucagaac

SEQ ID NO: 1372536 - RNA, 19 nt, Human
gcuccaagccccaucuucu

SEQ ID NO: 1372537 - RNA, 16 nt, Human
gcuccaagccccaucu

SEQ ID NO: 1372538 - RNA, 17 nt, Human
gcuccaagauucuagau

SEQ ID NO: 1372539 - RNA, 16 nt, Human
gcuccaagauucuaga

SEQ ID NO: 1372540 - RNA, 15 nt, Human
gcuccaagauucuag

SEQ ID NO: 1372541 - RNA, 14 nt, Human
gcuccaagauucua

SEQ ID NO: 1372542 - RNA, 20 nt, Human
gcuccaaagucauaauugca

SEQ ID NO: 1372543 - RNA, 19 nt, Human
gcuccaaagucauaauugc

SEQ ID NO: 1372544 - RNA, 17 nt, Human
gcuccaaagucauaauu

SEQ ID NO: 1372545 - RNA, 21 nt, Human
gcuccaaccugcaaagaucug

SEQ ID NO: 1372546 - RNA, 18 nt, Human
gcuccaaccugcaaagau

SEQ ID NO: 1372547 - RNA, 15 nt, Human
gcuccaaccugcaaa

SEQ ID NO: 1372548 - RNA, 14 nt, Human
gcuccaagaauuuc

SEQ ID NO: 1372549 - RNA, 14 nt, Human
gcuucucccaggca

SEQ ID NO: 1372550 - RNA, 13 nt, Human
gcuucucccaggc

SEQ ID NO: 1372551 - RNA, 11 nt, Human
gcuucucccag

SEQ ID NO: 1372552 - RNA, 22 nt, Human
gcuucucauccugcaggcagcu

SEQ ID NO: 1372553 - RNA, 23 nt, Human
gcuucugagcagcgagccugcua

SEQ ID NO: 1372554 - RNA, 21 nt, Human
gcuucugagcagcgagccugc

SEQ ID NO: 1372555 - RNA, 18 nt, Human
gcuucugagcagcgagcc

SEQ ID NO: 1372556 - RNA, 22 nt, Human
gcuucucccaggcaaggcugug

SEQ ID NO: 1372557 - RNA, 20 nt, Human
gcuucucccaggcaaggcug

SEQ ID NO: 1372558 - RNA, 23 nt, Human
gcuucucccaggcaaggcugugg

SEQ ID NO: 1372559 - RNA, 18 nt, Human
gcuucucccaggcaaggc

SEQ ID NO: 1372560 - RNA, 17 nt, Human
gcuucucccaggcaagg

SEQ ID NO: 1372561 - RNA, 16 nt, Human
gcuucucccaggcaag

SEQ ID NO: 1372562 - RNA, 15 nt, Human
gcuucucccaggcaa

SEQ ID NO: 1372563 - RNA, 22 nt, Human
gcuucugagcagcgagccugcu

SEQ ID NO: 1372564 - RNA, 17 nt, Human
gcuucugcccccugcag

SEQ ID NO: 1372565 - RNA, 16 nt, Human
gcuucugcccccugca

SEQ ID NO: 1372566 - RNA, 19 nt, Human
gcuucugcccccugcagaa

SEQ ID NO: 1372567 - RNA, 15 nt, Human
gcuuaugguaccaga

SEQ ID NO: 1372568 - RNA, 15 nt, Human
gcuuaugcucuuaau

SEQ ID NO: 1372569 - RNA, 21 nt, Human
gcuuaguuuguguguugucuc

SEQ ID NO: 1372570 - RNA, 20 nt, Human
gcuuaguuuguguguugucu

SEQ ID NO: 1372571 - RNA, 23 nt, Human
gcuuaugauagcaaauggccuca

SEQ ID NO: 1372572 - RNA, 18 nt, Human
gcuuaugcuuaaauucaa

SEQ ID NO: 1372573 - RNA, 23 nt, Human
gcuuaugacaucacuuguacaaa

SEQ ID NO: 1372574 - RNA, 22 nt, Human
gcuuaugacaucacuuguacaa

SEQ ID NO: 1372575 - RNA, 18 nt, Human
gcuuaugacaucacuugu

SEQ ID NO: 1372576 - RNA, 15 nt, Human
gcuuaugaaaagaau

SEQ ID NO: 1372577 - RNA, 16 nt, Human
gcuuauaauucuuuca

SEQ ID NO: 1372578 - RNA, 17 nt, Human
gcuuauaauaaaggacu

SEQ ID NO: 1372579 - RNA, 20 nt, Human
gcuuagcucaauuagugugg

SEQ ID NO: 1372580 - RNA, 23 nt, Human
gcuuagcuuuagaaacagugcaa

SEQ ID NO: 1372581 - RNA, 19 nt, Human
gcuuagcaguccccuuccc

SEQ ID NO: 1372582 - RNA, 13 nt, Human
gcuuagauuucau

SEQ ID NO: 1372583 - RNA, 15 nt, Human
gcuuagauuucauag

SEQ ID NO: 1372584 - RNA, 16 nt, Human
gcuuagaguuggccau

SEQ ID NO: 1372585 - RNA, 12 nt, Human
gcuguugcugaa

SEQ ID NO: 1372586 - RNA, 13 nt, Human
gcuguugcugaau

SEQ ID NO: 1372587 - RNA, 16 nt, Human
gcuuaguuuguguguu

SEQ ID NO: 1372588 - RNA, 14 nt, Human
gcuuaguuugugug

SEQ ID NO: 1372589 - RNA, 12 nt, Human
gcuuaguuugug

SEQ ID NO: 1372590 - RNA, 19 nt, Human
gcuguccuuuuuccucucc

SEQ ID NO: 1372591 - RNA, 14 nt, Human
gcuguccuuuuucc

SEQ ID NO: 1372592 - RNA, 14 nt, Human
gcuguccuuucuag

SEQ ID NO: 1372593 - RNA, 20 nt, Human
gcugucuacacuaagagaga

SEQ ID NO: 1372594 - RNA, 19 nt, Human
gcuguggugagggaagacg

SEQ ID NO: 1372595 - RNA, 23 nt, Human
gcuguggugugucccccucuguc

SEQ ID NO: 1372596 - RNA, 12 nt, Human
gcuguucaugaa

SEQ ID NO: 1372597 - RNA, 21 nt, Human
gcuguucaugaaagauucaau

SEQ ID NO: 1372598 - RNA, 22 nt, Human
ggaaagggcccuccuuccuaaa

SEQ ID NO: 1372599 - RNA, 21 nt, Human
ggaaagggcccuccuuccuaa

SEQ ID NO: 1372600 - RNA, 20 nt, Human
ggaaagggcccuccuuccua

SEQ ID NO: 1372601 - RNA, 21 nt, Human
ggaaaggggcaggccagagcu

SEQ ID NO: 1372602 - RNA, 23 nt, Human
ggaaagggauuuucagcccucag

SEQ ID NO: 1372603 - RNA, 15 nt, Human
ggaaaauucauuuuu

SEQ ID NO: 1372604 - RNA, 14 nt, Human
ggaaaauucauuuu

SEQ ID NO: 1372605 - RNA, 12 nt, Human
ggaaaauuauuu

SEQ ID NO: 1372606 - RNA, 23 nt, Human
ggaaauauauauuauacuuguaa

SEQ ID NO: 1372607 - RNA, 16 nt, Human
ggaaauauauauuaua

SEQ ID NO: 1372608 - RNA, 18 nt, Human
ggaaauacaguucugcuc

SEQ ID NO: 1372609 - RNA, 19 nt, Human
ggaaauacaguucugcucu

SEQ ID NO: 1372610 - RNA, 16 nt, Human
ggaaaucaacuugcuu

SEQ ID NO: 1372611 - RNA, 21 nt, Human
ggaaccccggggugcccacag

SEQ ID NO: 1372612 - RNA, 15 nt, Human
ggaacccagacucag

SEQ ID NO: 1372613 - RNA, 14 nt, Human
ggaacccagacuca

SEQ ID NO: 1372614 - RNA, 13 nt, Human
ggaacccagacuc

SEQ ID NO: 1372615 - RNA, 11 nt, Human
ggaacccagac

SEQ ID NO: 1372616 - RNA, 13 nt, Human
ggaaccagacucu

SEQ ID NO: 1372617 - RNA, 19 nt, Human
ggaaccagacucuugccug

SEQ ID NO: 1372618 - RNA, 12 nt, Human
ggaaccagacuc

SEQ ID NO: 1372619 - RNA, 11 nt, Human
ggaaccagacu

SEQ ID NO: 1372620 - RNA, 14 nt, Human
ggaacauggggagg

SEQ ID NO: 1372621 - RNA, 13 nt, Human
ggaacauggggag

SEQ ID NO: 1372622 - RNA, 19 nt, Human
ggaacagugugcaaggcag

SEQ ID NO: 1372623 - RNA, 18 nt, Human
ggaacagugugcaaggca

SEQ ID NO: 1372624 - RNA, 13 nt, Human
ggaacauaaaaag

SEQ ID NO: 1372625 - RNA, 17 nt, Human
ggaacauggggaggagg

SEQ ID NO: 1372626 - RNA, 18 nt, Human
ggaacauaaaaaggacau

SEQ ID NO: 1372627 - RNA, 23 nt, Human
gcuuuguuuugcacacuuugcca

SEQ ID NO: 1372628 - RNA, 14 nt, Human
gcuuuguuuugcac

SEQ ID NO: 1372629 - RNA, 15 nt, Human
ggaaaaauguaggag

SEQ ID NO: 1372630 - RNA, 18 nt, Human
ggaaaacaugcuacacac

SEQ ID NO: 1372631 - RNA, 18 nt, Human
gcuuuucaugcaaacucu

SEQ ID NO: 1372632 - RNA, 16 nt, Human
gcuuuucccaaaagcc

SEQ ID NO: 1372633 - RNA, 17 nt, Human
ggaaaaggccuggggug

SEQ ID NO: 1372634 - RNA, 22 nt, Human
ggaaaaggccuggggugacccg

SEQ ID NO: 1372635 - RNA, 16 nt, Human
ggaaaaggccuggggu

SEQ ID NO: 1372636 - RNA, 14 nt, Human
ggaaaaggccuggg

SEQ ID NO: 1372637 - RNA, 13 nt, Human
ggaaaaggccugg

SEQ ID NO: 1372638 - RNA, 12 nt, Human
ggaaaaggccug

SEQ ID NO: 1372639 - RNA, 10 nt, Human
ggaaaagcuu

SEQ ID NO: 1372640 - RNA, 15 nt, Human
ggaaaacagaacacu

SEQ ID NO: 1372641 - RNA, 15 nt, Human
ggaaaacauuccauc

SEQ ID NO: 1372642 - RNA, 16 nt, Human
gcuuuagaaucccagc

SEQ ID NO: 1372643 - RNA, 21 nt, Human
gcuuuagaaucccagcccccu

SEQ ID NO: 1372644 - RNA, 20 nt, Human
gcuuuagaaacagugcaaca

SEQ ID NO: 1372645 - RNA, 12 nt, Human
gcuuuagaaaca

SEQ ID NO: 1372646 - RNA, 18 nt, Human
gcuucugcccccugcaga

SEQ ID NO: 1372647 - RNA, 22 nt, Human
gcuuuguggcacuggggcaggg

SEQ ID NO: 1372648 - RNA, 18 nt, Human
gcuuugucuacuucaaaa

SEQ ID NO: 1372649 - RNA, 14 nt, Human
gcuuuguggcacug

SEQ ID NO: 1372650 - RNA, 15 nt, Human
gcuuugugauuuuug

SEQ ID NO: 1372651 - RNA, 13 nt, Human
gcuuucagggagg

SEQ ID NO: 1372652 - RNA, 13 nt, Human
gcuuucagagccu

SEQ ID NO: 1372653 - RNA, 15 nt, Human
gcuuucagaauaugu

SEQ ID NO: 1372654 - RNA, 19 nt, Human
ggaaugcccuucacuguca

SEQ ID NO: 1372655 - RNA, 16 nt, Human
ggaauggcagcagggg

SEQ ID NO: 1372656 - RNA, 14 nt, Human
ggaauggcagcagg

SEQ ID NO: 1372657 - RNA, 12 nt, Human
ggaauggcagca

SEQ ID NO: 1372658 - RNA, 22 nt, Human
ggaauggauuuuucuuuaacug

SEQ ID NO: 1372659 - RNA, 20 nt, Human
ggaauggauuuuucuuuaac

SEQ ID NO: 1372660 - RNA, 14 nt, Human
ggaauggaggggca

SEQ ID NO: 1372661 - RNA, 16 nt, Human
ggaauggaggggcaga

SEQ ID NO: 1372662 - RNA, 17 nt, Human
ggaauggaggggcagag

SEQ ID NO: 1372663 - RNA, 19 nt, Human
ggaauggauuuuucuuuaa

SEQ ID NO: 1372664 - RNA, 21 nt, Human
ggaauggaggggcagagccag

SEQ ID NO: 1372665 - RNA, 19 nt, Human
ggaauuacgugcucugugg

SEQ ID NO: 1372666 - RNA, 19 nt, Human
ggaauugauuugcauugaa

SEQ ID NO: 1372667 - RNA, 18 nt, Human
ggaauugauuugcauuga

SEQ ID NO: 1372668 - RNA, 17 nt, Human
ggaauugauuugcauug

SEQ ID NO: 1372669 - RNA, 15 nt, Human
ggaauugauuugcau

SEQ ID NO: 1372670 - RNA, 13 nt, Human
ggacaaaggagcc

SEQ ID NO: 1372671 - RNA, 13 nt, Human
ggacaaagaaccu

SEQ ID NO: 1372672 - RNA, 14 nt, Human
ggacaaagaaccuu

SEQ ID NO: 1372673 - RNA, 17 nt, Human
ggacaaaauggaauacu

SEQ ID NO: 1372674 - RNA, 16 nt, Human
ggacaaaauggaauac

SEQ ID NO: 1372675 - RNA, 20 nt, Human
ggacaaaaccccccagauau

SEQ ID NO: 1372676 - RNA, 19 nt, Human
ggaauuuucaucuaggauu

SEQ ID NO: 1372677 - RNA, 18 nt, Human
ggacaaaucacauauuuu

SEQ ID NO: 1372678 - RNA, 21 nt, Human
ggacaaaucacauauuuuaaa

SEQ ID NO: 1372679 - RNA, 18 nt, Human
ggacaaaggagccuguga

SEQ ID NO: 1372680 - RNA, 17 nt, Human
ggacaaaggagccugug

SEQ ID NO: 1372681 - RNA, 16 nt, Human
ggacaaaggagccugu

SEQ ID NO: 1372682 - RNA, 15 nt, Human
ggacaaaggagccug

SEQ ID NO: 1372683 - RNA, 14 nt, Human
ggacaaaggagccu

SEQ ID NO: 1372684 - RNA, 15 nt, Human
ggacacuacacccag

SEQ ID NO: 1372685 - RNA, 16 nt, Human
ggacacuacacccagc

SEQ ID NO: 1372686 - RNA, 17 nt, Human
ggacacuacacccagca

SEQ ID NO: 1372687 - RNA, 18 nt, Human
ggacacuacacccagcaa

SEQ ID NO: 1372688 - RNA, 19 nt, Human
ggacacuacacccagcaau

SEQ ID NO: 1372689 - RNA, 20 nt, Human
ggacacuacacccagcaaua

SEQ ID NO: 1372690 - RNA, 21 nt, Human
ggacacuacacccagcaauag

SEQ ID NO: 1372691 - RNA, 16 nt, Human
ggaauuugccugcugg

SEQ ID NO: 1372692 - RNA, 22 nt, Human
ggaauuucuuaacuucuugcuu

SEQ ID NO: 1372693 - RNA, 18 nt, Human
ggaauuucuuaacuucuu

SEQ ID NO: 1372694 - RNA, 19 nt, Human
ggaauuucccaggacccug

SEQ ID NO: 1372695 - RNA, 18 nt, Human
ggaauuucccaggacccu

SEQ ID NO: 1372696 - RNA, 17 nt, Human
ggaauuucccaggaccc

SEQ ID NO: 1372697 - RNA, 16 nt, Human
ggaauuucccaggacc

SEQ ID NO: 1372698 - RNA, 15 nt, Human
ggaauuucccaggac

SEQ ID NO: 1372699 - RNA, 14 nt, Human
ggaauuucccagga

SEQ ID NO: 1372700 - RNA, 12 nt, Human
ggaauuguguuu

SEQ ID NO: 1372701 - RNA, 22 nt, Human
ggaauuggagcucgugggacag

SEQ ID NO: 1372702 - RNA, 16 nt, Human
ggaauuggagcucgug

SEQ ID NO: 1372703 - RNA, 14 nt, Human
ggaaggggacccuc

SEQ ID NO: 1372704 - RNA, 17 nt, Human
ggaaggggccagaggcu

SEQ ID NO: 1372705 - RNA, 15 nt, Human
ggaaggggccagagg

SEQ ID NO: 1372706 - RNA, 14 nt, Human
ggaaggguaaacaa

SEQ ID NO: 1372707 - RNA, 15 nt, Human
ggaaggguaaacaau

SEQ ID NO: 1372708 - RNA, 16 nt, Human
ggaaguaggaaguaaa

SEQ ID NO: 1372709 - RNA, 14 nt, Human
ggaaguagaaacaa

SEQ ID NO: 1372710 - RNA, 20 nt, Human
ggaagugaagacuggaagcu

SEQ ID NO: 1372711 - RNA, 23 nt, Human
ggaagucguccuuacuccugugg

SEQ ID NO: 1372712 - RNA, 22 nt, Human
ggaagucguccuuacuccugug

SEQ ID NO: 1372713 - RNA, 21 nt, Human
ggaagucguccuuacuccugu

SEQ ID NO: 1372714 - RNA, 16 nt, Human
ggaaguccggccccag

SEQ ID NO: 1372715 - RNA, 17 nt, Human
ggaaguccaauguggca

SEQ ID NO: 1372716 - RNA, 16 nt, Human
ggaaguccaauguggc

SEQ ID NO: 1372717 - RNA, 15 nt, Human
ggaaguccaaugugg

SEQ ID NO: 1372718 - RNA, 13 nt, Human
ggaagucaaagca

SEQ ID NO: 1372719 - RNA, 22 nt, Human
ggaaguggcugagucaggacuu

SEQ ID NO: 1372720 - RNA, 18 nt, Human
ggaagugcuaauuuugaa

SEQ ID NO: 1372721 - RNA, 21 nt, Human
ggaagggagccaagggaugga

SEQ ID NO: 1372722 - RNA, 17 nt, Human
ggaagggagccaaggga

SEQ ID NO: 1372723 - RNA, 15 nt, Human
ggaagggagccaagg

SEQ ID NO: 1372724 - RNA, 13 nt, Human
ggaagggagccaa

SEQ ID NO: 1372725 - RNA, 11 nt, Human
ggaagggagcc

SEQ ID NO: 1372726 - RNA, 21 nt, Human
ggaaggcuuguugugcuuuua

SEQ ID NO: 1372727 - RNA, 19 nt, Human
ggaaggcuuguugugcuuu

SEQ ID NO: 1372728 - RNA, 22 nt, Human
ggaaggcuacuucggggcuggg

SEQ ID NO: 1372729 - RNA, 23 nt, Human
ggaaggcuacuucggggcuggga

SEQ ID NO: 1372730 - RNA, 20 nt, Human
ggaaggcuacuucggggcug

SEQ ID NO: 1372731 - RNA, 19 nt, Human
ggaaggcuacuucggggcu

SEQ ID NO: 1372732 - RNA, 17 nt, Human
ggaaggcagggaggagg

SEQ ID NO: 1372733 - RNA, 21 nt, Human
ggaaggcagggaggaggcaga

SEQ ID NO: 1372734 - RNA, 17 nt, Human
ggaaggcaggcagggcu

SEQ ID NO: 1372735 - RNA, 16 nt, Human
ggaaggcaggcagggc

SEQ ID NO: 1372736 - RNA, 15 nt, Human
ggaaggcaggcaggg

SEQ ID NO: 1372737 - RNA, 14 nt, Human
ggaaggcaggcagg

SEQ ID NO: 1372738 - RNA, 12 nt, Human
ggaaggcaggca

SEQ ID NO: 1372739 - RNA, 11 nt, Human
ggaaggcaggc

SEQ ID NO: 1372740 - RNA, 22 nt, Human
ggaaggcaggcagggcucuccu

SEQ ID NO: 1372741 - RNA, 21 nt, Human
ggaaggcaggcagggcucucc

SEQ ID NO: 1372742 - RNA, 19 nt, Human
ggaaggcaggcagggcucu

SEQ ID NO: 1372743 - RNA, 18 nt, Human
ggaaggcaggcagggcuc

SEQ ID NO: 1372744 - RNA, 22 nt, Human
ggaaggauucugcuggccucug

SEQ ID NO: 1372745 - RNA, 20 nt, Human
ggaaggauucugcuggccuc

SEQ ID NO: 1372746 - RNA, 19 nt, Human
ggaaggauucugcuggccu

SEQ ID NO: 1372747 - RNA, 22 nt, Human
ggaaggaucccaugagcuccuu

SEQ ID NO: 1372748 - RNA, 16 nt, Human
ggaaggauucugcugg

SEQ ID NO: 1372749 - RNA, 19 nt, Human
ggacgccugggggugccag

SEQ ID NO: 1372750 - RNA, 14 nt, Human
ggacgccugggggu

SEQ ID NO: 1372751 - RNA, 17 nt, Human
ggacgcccaggacccca

SEQ ID NO: 1372752 - RNA, 20 nt, Human
ggaccuucgggcugugcccg

SEQ ID NO: 1372753 - RNA, 19 nt, Human
ggaccuucgggcugugccc

SEQ ID NO: 1372754 - RNA, 18 nt, Human
ggaccuucgggcugugcc

SEQ ID NO: 1372755 - RNA, 21 nt, Human
ggaccagaagcucccccagca

SEQ ID NO: 1372756 - RNA, 18 nt, Human
ggaccagaagcuccccca

SEQ ID NO: 1372757 - RNA, 15 nt, Human
ggaccagaagcuccc

SEQ ID NO: 1372758 - RNA, 14 nt, Human
ggaccacaggcuca

SEQ ID NO: 1372759 - RNA, 15 nt, Human
ggaccacaggcucag

SEQ ID NO: 1372760 - RNA, 20 nt, Human
ggaccacaacuauuuucaga

SEQ ID NO: 1372761 - RNA, 18 nt, Human
ggaccacccugagccggc

SEQ ID NO: 1372762 - RNA, 16 nt, Human
ggaccacccugagccg

SEQ ID NO: 1372763 - RNA, 15 nt, Human
ggaccacccugagcc

SEQ ID NO: 1372764 - RNA, 22 nt, Human
ggaccacccucacuggcucucc

SEQ ID NO: 1372765 - RNA, 21 nt, Human
ggacagaugccuccuuccucu

SEQ ID NO: 1372766 - RNA, 15 nt, Human
ggacagaugccuccu

SEQ ID NO: 1372767 - RNA, 22 nt, Human
ggacacuacacccagcaauaga

SEQ ID NO: 1372768 - RNA, 20 nt, Human
ggacagaugccuccuuccuc

SEQ ID NO: 1372769 - RNA, 19 nt, Human
ggacagcaacuaucagacu

SEQ ID NO: 1372770 - RNA, 16 nt, Human
ggaccaagcaucuugg

SEQ ID NO: 1372771 - RNA, 22 nt, Human
ggaccaaagggagucugccagg

SEQ ID NO: 1372772 - RNA, 12 nt, Human
ggaccaaagcaa

SEQ ID NO: 1372773 - RNA, 14 nt, Human
ggacauuucucuaa

SEQ ID NO: 1372774 - RNA, 16 nt, Human
ggacauuugcucaugg

SEQ ID NO: 1372775 - RNA, 15 nt, Human
ggagaagccaggaau

SEQ ID NO: 1372776 - RNA, 13 nt, Human
ggagaagccagga

SEQ ID NO: 1372777 - RNA, 12 nt, Human
ggagaagccagg

SEQ ID NO: 1372778 - RNA, 17 nt, Human
ggacugugugcucagga

SEQ ID NO: 1372779 - RNA, 16 nt, Human
ggacugcucaggaaac

SEQ ID NO: 1372780 - RNA, 20 nt, Human
ggacgccugggggugccagg

SEQ ID NO: 1372781 - RNA, 20 nt, Human
ggacugggagcccccagccu

SEQ ID NO: 1372782 - RNA, 19 nt, Human
ggacugggagcccccagcc

SEQ ID NO: 1372783 - RNA, 18 nt, Human
ggacugggagcccccagc

SEQ ID NO: 1372784 - RNA, 21 nt, Human
ggacugggagcccccagccug

SEQ ID NO: 1372785 - RNA, 18 nt, Human
ggagacagcaucaggguu

SEQ ID NO: 1372786 - RNA, 17 nt, Human
ggagacagcaucagggu

SEQ ID NO: 1372787 - RNA, 14 nt, Human
ggagacagcaucag

SEQ ID NO: 1372788 - RNA, 20 nt, Human
ggagacacuggccccucaaa

SEQ ID NO: 1372789 - RNA, 17 nt, Human
ggagacacuggccccuc

SEQ ID NO: 1372790 - RNA, 18 nt, Human
ggagaagcccgugugaga

SEQ ID NO: 1372791 - RNA, 15 nt, Human
ggagaaucaucagga

SEQ ID NO: 1372792 - RNA, 17 nt, Human
ggagaaucaucaggacc

SEQ ID NO: 1372793 - RNA, 22 nt, Human
ggagaaucaucaggacccugga

SEQ ID NO: 1372794 - RNA, 19 nt, Human
ggagaaucgcuccugcagc

SEQ ID NO: 1372795 - RNA, 18 nt, Human
ggagaguuuccugaaaca

SEQ ID NO: 1372796 - RNA, 13 nt, Human
ggagagugggggu

SEQ ID NO: 1372797 - RNA, 17 nt, Human
ggagagucucccaggga

SEQ ID NO: 1372798 - RNA, 16 nt, Human
ggagagguugucugug

SEQ ID NO: 1372799 - RNA, 17 nt, Human
ggagaggccccagccgc

SEQ ID NO: 1372800 - RNA, 15 nt, Human
ggagauccuccugca

SEQ ID NO: 1372801 - RNA, 13 nt, Human
ggagauccuccug

SEQ ID NO: 1372802 - RNA, 14 nt, Human
ggagaugaggccag

SEQ ID NO: 1372803 - RNA, 15 nt, Human
ggagaugaggccaga

SEQ ID NO: 1372804 - RNA, 16 nt, Human
ggagaugaggccagac

SEQ ID NO: 1372805 - RNA, 14 nt, Human
ggccaggccucucc

SEQ ID NO: 1372806 - RNA, 18 nt, Human
ggccagcugugguuuucu

SEQ ID NO: 1372807 - RNA, 23 nt, Human
ggccauguccaaagaggcugccc

SEQ ID NO: 1372808 - RNA, 22 nt, Human
ggccauguccaaagaggcugcc

SEQ ID NO: 1372809 - RNA, 16 nt, Human
ggccauguccaaagag

SEQ ID NO: 1372810 - RNA, 15 nt, Human
ggccauguccaaaga

SEQ ID NO: 1372811 - RNA, 13 nt, Human
ggccauguccaaa

SEQ ID NO: 1372812 - RNA, 20 nt, Human
ggccauucuccacagcaacc

SEQ ID NO: 1372813 - RNA, 20 nt, Human
ggccauucuuucccaacacc

SEQ ID NO: 1372814 - RNA, 15 nt, Human
ggccagcuuuucaaa

SEQ ID NO: 1372815 - RNA, 18 nt, Human
ggccagcuggaggcaggg

SEQ ID NO: 1372816 - RNA, 15 nt, Human
ggccagcuggaggca

SEQ ID NO: 1372817 - RNA, 13 nt, Human
ggccagcuggagg

SEQ ID NO: 1372818 - RNA, 22 nt, Human
ggccagcgagcgcccagcuccu

SEQ ID NO: 1372819 - RNA, 21 nt, Human
ggccagccuggccuccugccu

SEQ ID NO: 1372820 - RNA, 22 nt, Human
ggccagccuggccuccugccuc

SEQ ID NO: 1372821 - RNA, 20 nt, Human
ggccagccuggccuccugcc

SEQ ID NO: 1372822 - RNA, 19 nt, Human
ggccagccuggccuccugc

SEQ ID NO: 1372823 - RNA, 18 nt, Human
ggccagccuggccuccug

SEQ ID NO: 1372824 - RNA, 17 nt, Human
ggccagccuggccuccu

SEQ ID NO: 1372825 - RNA, 18 nt, Human
ggccacgcuccagcugcc

SEQ ID NO: 1372826 - RNA, 16 nt, Human
ggccagccuggccucc

SEQ ID NO: 1372827 - RNA, 15 nt, Human
ggccagccuggccuc

SEQ ID NO: 1372828 - RNA, 14 nt, Human
ggccagccuggccu

SEQ ID NO: 1372829 - RNA, 13 nt, Human
ggccagccuggcc

SEQ ID NO: 1372830 - RNA, 12 nt, Human
ggccagccuggc

SEQ ID NO: 1372831 - RNA, 11 nt, Human
ggccagccucu

SEQ ID NO: 1372832 - RNA, 11 nt, Human
ggccagccugg

SEQ ID NO: 1372833 - RNA, 20 nt, Human
ggccacuccuuccugcccca

SEQ ID NO: 1372834 - RNA, 19 nt, Human
ggccacuccuuccugcccc

SEQ ID NO: 1372835 - RNA, 17 nt, Human
ggccacuccuuccugcc

SEQ ID NO: 1372836 - RNA, 16 nt, Human
ggccacuccuuccugc

SEQ ID NO: 1372837 - RNA, 15 nt, Human
ggccacuccuuccug

SEQ ID NO: 1372838 - RNA, 14 nt, Human
ggccacuccuuccu

SEQ ID NO: 1372839 - RNA, 13 nt, Human
ggccacuccgaga

SEQ ID NO: 1372840 - RNA, 19 nt, Human
ggccacaugggaggcucac

SEQ ID NO: 1372841 - RNA, 18 nt, Human
ggccacaugggaggcuca

SEQ ID NO: 1372842 - RNA, 15 nt, Human
ggcagcucuggacag

SEQ ID NO: 1372843 - RNA, 18 nt, Human
ggcagcuccucugucucg

SEQ ID NO: 1372844 - RNA, 21 nt, Human
ggcagcuccucugucucgagc

SEQ ID NO: 1372845 - RNA, 16 nt, Human
ggcagcuccucugucu

SEQ ID NO: 1372846 - RNA, 13 nt, Human
ggcagcuccucug

SEQ ID NO: 1372847 - RNA, 20 nt, Human
ggcagcucuggacagcccca

SEQ ID NO: 1372848 - RNA, 16 nt, Human
ggcagcuucugccccc

SEQ ID NO: 1372849 - RNA, 23 nt, Human
ggcacuaacguugagccccugga

SEQ ID NO: 1372850 - RNA, 22 nt, Human
ggcaccugguggccaugcuccu

SEQ ID NO: 1372851 - RNA, 23 nt, Human
ggcaccugggcccuggggccugu

SEQ ID NO: 1372852 - RNA, 16 nt, Human
ggcaccuaauccaggc

SEQ ID NO: 1372853 - RNA, 15 nt, Human
ggcaccuaauccagg

SEQ ID NO: 1372854 - RNA, 22 nt, Human
ggcaccgaagcccagagggucu

SEQ ID NO: 1372855 - RNA, 22 nt, Human
ggcagcgccaggcugaccacag

SEQ ID NO: 1372856 - RNA, 14 nt, Human
ggcagggugacccu

SEQ ID NO: 1372857 - RNA, 23 nt, Human
ggcagcuucugcccccugcagaa

SEQ ID NO: 1372858 - RNA, 22 nt, Human
ggcagcuucugcccccugcaga

SEQ ID NO: 1372859 - RNA, 21 nt, Human
ggcagcuucugcccccugcag

SEQ ID NO: 1372860 - RNA, 20 nt, Human
ggcagcuucugcccccugca

SEQ ID NO: 1372861 - RNA, 17 nt, Human
ggcagcuucugcccccu

SEQ ID NO: 1372862 - RNA, 12 nt, Human
ggcauggaaauu

SEQ ID NO: 1372863 - RNA, 17 nt, Human
ggcaucuuuuguauuaa

SEQ ID NO: 1372864 - RNA, 21 nt, Human
ggcaucuuuuguauuaagaaa

SEQ ID NO: 1372865 - RNA, 16 nt, Human
ggcaucuuuuguauua

SEQ ID NO: 1372866 - RNA, 14 nt, Human
ggcaucuuuuguau

SEQ ID NO: 1372867 - RNA, 11 nt, Human
ggcaucuuuug

SEQ ID NO: 1372868 - RNA, 16 nt, Human
ggcacccccagccugg

SEQ ID NO: 1372869 - RNA, 15 nt, Human
ggcacccccagccug

SEQ ID NO: 1372870 - RNA, 14 nt, Human
ggcacccccagccu

SEQ ID NO: 1372871 - RNA, 13 nt, Human
ggcacccccagcc

SEQ ID NO: 1372872 - RNA, 18 nt, Human
ggcaaugccacagcccug

SEQ ID NO: 1372873 - RNA, 21 nt, Human
ggcaaugggagcugaggccac

SEQ ID NO: 1372874 - RNA, 20 nt, Human
ggcaaugggagcugaggcca

SEQ ID NO: 1372875 - RNA, 15 nt, Human
ggcacccccugcagc

SEQ ID NO: 1372876 - RNA, 23 nt, Human
ggcaccgaagcccagagggucug

SEQ ID NO: 1372877 - RNA, 16 nt, Human
ggcaccgaagcccaga

SEQ ID NO: 1372878 - RNA, 15 nt, Human
ggcaccgaagcccag

SEQ ID NO: 1372879 - RNA, 14 nt, Human
ggcacccccugcag

SEQ ID NO: 1372880 - RNA, 13 nt, Human
ggcacccccugca

SEQ ID NO: 1372881 - RNA, 17 nt, Human
ggcacccccgucaagag

SEQ ID NO: 1372882 - RNA, 21 nt, Human
ggcacccccagccugggccua

SEQ ID NO: 1372883 - RNA, 20 nt, Human
ggcacccccagccugggccu

SEQ ID NO: 1372884 - RNA, 19 nt, Human
ggcacccccagccugggcc

SEQ ID NO: 1372885 - RNA, 18 nt, Human
ggcacccccagccugggc

SEQ ID NO: 1372886 - RNA, 17 nt, Human
ggcacccccagccuggg

SEQ ID NO: 1372887 - RNA, 17 nt, Human
ggcaaugccacagcccu

SEQ ID NO: 1372888 - RNA, 15 nt, Human
ggcaaugauggcaau

SEQ ID NO: 1372889 - RNA, 19 nt, Human
ggcaaucauggugcucaga

SEQ ID NO: 1372890 - RNA, 19 nt, Human
ggauugcgagagaugugug

SEQ ID NO: 1372891 - RNA, 18 nt, Human
ggauugcgagagaugugu

SEQ ID NO: 1372892 - RNA, 17 nt, Human
ggauugcgagagaugug

SEQ ID NO: 1372893 - RNA, 13 nt, Human
ggauggacaucuu

SEQ ID NO: 1372894 - RNA, 16 nt, Human
ggauugcgagagaugu

SEQ ID NO: 1372895 - RNA, 19 nt, Human
ggauugcaauaucugaagc

SEQ ID NO: 1372896 - RNA, 18 nt, Human
ggauugcacguggccucu

SEQ ID NO: 1372897 - RNA, 17 nt, Human
ggauugcacguggccuc

SEQ ID NO: 1372898 - RNA, 15 nt, Human
ggauugcacguggcc

SEQ ID NO: 1372899 - RNA, 16 nt, Human
ggauucuuccaucuga

SEQ ID NO: 1372900 - RNA, 14 nt, Human
ggauggacaucuug

SEQ ID NO: 1372901 - RNA, 16 nt, Human
ggaugcuaacaucuaa

SEQ ID NO: 1372902 - RNA, 16 nt, Human
ggaugcggauggccgg

SEQ ID NO: 1372903 - RNA, 15 nt, Human
ggaugcuuguacaua

SEQ ID NO: 1372904 - RNA, 22 nt, Human
ggaugccaauauuaaaucugcu

SEQ ID NO: 1372905 - RNA, 14 nt, Human
ggaugcagugcucg

SEQ ID NO: 1372906 - RNA, 22 nt, Human
ggaugcagugcucgcuguugcu

SEQ ID NO: 1372907 - RNA, 21 nt, Human
ggauccgacugcuuuggaccu

SEQ ID NO: 1372908 - RNA, 19 nt, Human
ggauccgacugcuuuggac

SEQ ID NO: 1372909 - RNA, 17 nt, Human
ggauccgacugcuuugg

SEQ ID NO: 1372910 - RNA, 23 nt, Human
ggaugcacagaguuguuacauuu

SEQ ID NO: 1372911 - RNA, 20 nt, Human
ggauauaguuuuacuuuuaa

SEQ ID NO: 1372912 - RNA, 16 nt, Human
ggauauaguuuuacuu

SEQ ID NO: 1372913 - RNA, 21 nt, Human
ggauaggccuucauuaacaaa

SEQ ID NO: 1372914 - RNA, 15 nt, Human
ggauaggccagccgc

SEQ ID NO: 1372915 - RNA, 14 nt, Human
ggauaggccagccg

SEQ ID NO: 1372916 - RNA, 16 nt, Human
ggauauguaaaacauu

SEQ ID NO: 1372917 - RNA, 18 nt, Human
ggaucacaagauggaauu

SEQ ID NO: 1372918 - RNA, 14 nt, Human
ggaucacaagaugg

SEQ ID NO: 1372919 - RNA, 17 nt, Human
ggaucccucccccccau

SEQ ID NO: 1372920 - RNA, 22 nt, Human
ggaucccucaucugucccuccg

SEQ ID NO: 1372921 - RNA, 18 nt, Human
ggaucccucaucuguccc

SEQ ID NO: 1372922 - RNA, 13 nt, Human
ggaucccucaucu

SEQ ID NO: 1372923 - RNA, 18 nt, Human
ggauagaugcuggcccag

SEQ ID NO: 1372924 - RNA, 14 nt, Human
ggauagaugcuggc

SEQ ID NO: 1372925 - RNA, 13 nt, Human
ggauagaugcugg

SEQ ID NO: 1372926 - RNA, 12 nt, Human
ggauagaggggu

SEQ ID NO: 1372927 - RNA, 18 nt, Human
ggauacuuauauggaaau

SEQ ID NO: 1372928 - RNA, 18 nt, Human
ggauacaaaagcauguga

SEQ ID NO: 1372929 - RNA, 21 nt, Human
ggauacgcaucagacagaugg

SEQ ID NO: 1372930 - RNA, 18 nt, Human
ggagaugaggccagacca

SEQ ID NO: 1372931 - RNA, 15 nt, Human
ggccuaggauucuaa

SEQ ID NO: 1372932 - RNA, 13 nt, Human
ggccuaggauucu

SEQ ID NO: 1372933 - RNA, 23 nt, Human
ggccuaggaggguccucugagac

SEQ ID NO: 1372934 - RNA, 21 nt, Human
ggccuaggaggguccucugag

SEQ ID NO: 1372935 - RNA, 19 nt, Human
ggccuaggaggguccucug

SEQ ID NO: 1372936 - RNA, 17 nt, Human
ggccuaggaggguccuc

SEQ ID NO: 1372937 - RNA, 24 nt, Human
ggccuacuagagucugaacagcug

SEQ ID NO: 1372938 - RNA, 23 nt, Human
ggccuaccccgcagacaccuugg

SEQ ID NO: 1372939 - RNA, 20 nt, Human
ggccuaccccgcagacaccu

SEQ ID NO: 1372940 - RNA, 16 nt, Human
ggccuaccccgcagac

SEQ ID NO: 1372941 - RNA, 20 nt, Human
ggccuaagaggcugcccucc

SEQ ID NO: 1372942 - RNA, 18 nt, Human
ggccuaagaggcugcccu

SEQ ID NO: 1372943 - RNA, 22 nt, Human
ggccuaagaggcugcccuccug

SEQ ID NO: 1372944 - RNA, 15 nt, Human
ggccuaagaggcugc

SEQ ID NO: 1372945 - RNA, 20 nt, Human
ggccgugacgucuggguggc

SEQ ID NO: 1372946 - RNA, 16 nt, Human
ggccgugacgucuggg

SEQ ID NO: 1372947 - RNA, 21 nt, Human
ggccgugaaugggugcccaca

SEQ ID NO: 1372948 - RNA, 21 nt, Human
ggccgugacgucuggguggcc

SEQ ID NO: 1372949 - RNA, 22 nt, Human
ggccuaaccugccgagagucca

SEQ ID NO: 1372950 - RNA, 19 nt, Human
ggcccugucauccagcuca

SEQ ID NO: 1372951 - RNA, 23 nt, Human
ggcccuggggccuguacugccug

SEQ ID NO: 1372952 - RNA, 18 nt, Human
ggcccuggggccuguacu

SEQ ID NO: 1372953 - RNA, 17 nt, Human
ggcccuggggccuguac

SEQ ID NO: 1372954 - RNA, 16 nt, Human
ggcccuggggccugua

SEQ ID NO: 1372955 - RNA, 15 nt, Human
ggcccuggggccugu

SEQ ID NO: 1372956 - RNA, 14 nt, Human
ggcccuggggccug

SEQ ID NO: 1372957 - RNA, 13 nt, Human
ggcccuggggccu

SEQ ID NO: 1372958 - RNA, 15 nt, Human
ggcccugggcuggaa

SEQ ID NO: 1372959 - RNA, 14 nt, Human
ggcccugggcugga

SEQ ID NO: 1372960 - RNA, 13 nt, Human
ggcccugggcugg

SEQ ID NO: 1372961 - RNA, 12 nt, Human
ggcccugggcug

SEQ ID NO: 1372962 - RNA, 18 nt, Human
ggcccugggccugccuca

SEQ ID NO: 1372963 - RNA, 23 nt, Human
ggcccugggccugccucaccacg

SEQ ID NO: 1372964 - RNA, 19 nt, Human
ggccucaaaggcccgcucu

SEQ ID NO: 1372965 - RNA, 18 nt, Human
ggccucaaaggcccgcuc

SEQ ID NO: 1372966 - RNA, 23 nt, Human
ggccucaaagcaagcauucagaa

SEQ ID NO: 1372967 - RNA, 22 nt, Human
ggccuauggagagcccugggac

SEQ ID NO: 1372968 - RNA, 21 nt, Human
ggccuauggagagcccuggga

SEQ ID NO: 1372969 - RNA, 19 nt, Human
ggccuauggagagcccugg

SEQ ID NO: 1372970 - RNA, 18 nt, Human
ggccuauggagagcccug

SEQ ID NO: 1372971 - RNA, 17 nt, Human
ggccuauggagagcccu

SEQ ID NO: 1372972 - RNA, 16 nt, Human
ggccuauggagagccc

SEQ ID NO: 1372973 - RNA, 15 nt, Human
ggccuauggagagcc

SEQ ID NO: 1372974 - RNA, 18 nt, Human
ggccuaugacuugggcac

SEQ ID NO: 1372975 - RNA, 13 nt, Human
ggccuaggcugca

SEQ ID NO: 1372976 - RNA, 14 nt, Human
ggccuaggcugcau

SEQ ID NO: 1372977 - RNA, 12 nt, Human
ggccuaggcugc

SEQ ID NO: 1372978 - RNA, 19 nt, Human
ggccucaaaugcaccaugu

SEQ ID NO: 1372979 - RNA, 20 nt, Human
ggccucaaaggcccgcucua

SEQ ID NO: 1372980 - RNA, 19 nt, Human
ggccucuuccgugacguca

SEQ ID NO: 1372981 - RNA, 21 nt, Human
ggcccucucugcucugcgugu

SEQ ID NO: 1372982 - RNA, 21 nt, Human
ggcccaauccaagguggggug

SEQ ID NO: 1372983 - RNA, 23 nt, Human
ggcccaacacaauucuucuucca

SEQ ID NO: 1372984 - RNA, 15 nt, Human
ggcccucucugcucu

SEQ ID NO: 1372985 - RNA, 14 nt, Human
ggcccucucugcuc

SEQ ID NO: 1372986 - RNA, 23 nt, Human
ggcccucuccccugcccccugca

SEQ ID NO: 1372987 - RNA, 16 nt, Human
ggcccucuccccugcc

SEQ ID NO: 1372988 - RNA, 15 nt, Human
ggcccucuccccugc

SEQ ID NO: 1372989 - RNA, 12 nt, Human
ggcccucucccc

SEQ ID NO: 1372990 - RNA, 23 nt, Human
ggcccacugugccucagagacca

SEQ ID NO: 1372991 - RNA, 15 nt, Human
ggcccagagaagcca

SEQ ID NO: 1372992 - RNA, 21 nt, Human
ggcccacugugccucagagac

SEQ ID NO: 1372993 - RNA, 18 nt, Human
ggcccacugugccucaga

SEQ ID NO: 1372994 - RNA, 17 nt, Human
ggcccacugugccucag

SEQ ID NO: 1372995 - RNA, 13 nt, Human
ggcccacugugcc

SEQ ID NO: 1372996 - RNA, 17 nt, Human
ggcccuggccuccccug

SEQ ID NO: 1372997 - RNA, 14 nt, Human
ggcccuggccuccc

SEQ ID NO: 1372998 - RNA, 13 nt, Human
ggcccuggccucc

SEQ ID NO: 1372999 - RNA, 23 nt, Human
ggcccuggaucagcguggccuug

SEQ ID NO: 1373000 - RNA, 22 nt, Human
ggcccuggaucagcguggccuu

SEQ ID NO: 1373001 - RNA, 20 nt, Human
ggcccuggaucagcguggcc

SEQ ID NO: 1373002 - RNA, 18 nt, Human
ggcccuggaucagcgugg

SEQ ID NO: 1373003 - RNA, 17 nt, Human
ggcccuggaucagcgug

SEQ ID NO: 1373004 - RNA, 18 nt, Human
ggcccugcuuccugcuug

SEQ ID NO: 1373005 - RNA, 16 nt, Human
ggcccuggagcagcca

SEQ ID NO: 1373006 - RNA, 21 nt, Human
ggcccuggagcagccacccca

SEQ ID NO: 1373007 - RNA, 16 nt, Human
ggcccugcuuccugcu

SEQ ID NO: 1373008 - RNA, 15 nt, Human
ggcccugcuuccugc

SEQ ID NO: 1373009 - RNA, 14 nt, Human
ggcccugcuuccug

SEQ ID NO: 1373010 - RNA, 22 nt, Human
ggcccugcaaaaggacucucag

SEQ ID NO: 1373011 - RNA, 19 nt, Human
ggcccugcaaaaggacucu

SEQ ID NO: 1373012 - RNA, 11 nt, Human
ggcccugagcg

SEQ ID NO: 1373013 - RNA, 23 nt, Human
ggcccugagcgaguggagucugc

SEQ ID NO: 1373014 - RNA, 19 nt, Human
ggcucaagcgauucuccug

SEQ ID NO: 1373015 - RNA, 21 nt, Human
ggcuauuuuguuugcuucaug

SEQ ID NO: 1373016 - RNA, 16 nt, Human
ggcuauuuguaaaucu

SEQ ID NO: 1373017 - RNA, 18 nt, Human
ggcuauagaugucuuuuc

SEQ ID NO: 1373018 - RNA, 15 nt, Human
ggcuaugcauuugaa

SEQ ID NO: 1373019 - RNA, 19 nt, Human
ggcuauagaugucuuuucc

SEQ ID NO: 1373020 - RNA, 17 nt, Human
ggcuauagaugucuuuu

SEQ ID NO: 1373021 - RNA, 14 nt, Human
ggcuagggggagcc

SEQ ID NO: 1373022 - RNA, 16 nt, Human
ggcuaggguggggaga

SEQ ID NO: 1373023 - RNA, 20 nt, Human
ggcuagagugcgguggcgcg

SEQ ID NO: 1373024 - RNA, 18 nt, Human
ggcggcuggggucccagc

SEQ ID NO: 1373025 - RNA, 18 nt, Human
ggcggcucggaggaagcc

SEQ ID NO: 1373026 - RNA, 17 nt, Human
ggcuagagguucaaaga

SEQ ID NO: 1373027 - RNA, 22 nt, Human
ggcuagagguucaaagauauuu

SEQ ID NO: 1373028 - RNA, 23 nt, Human
ggcuccagccccucuuggagaag

SEQ ID NO: 1373029 - RNA, 22 nt, Human
ggcuccagccccucuuggagaa

SEQ ID NO: 1373030 - RNA, 19 nt, Human
ggcuccagaugcagggcag

SEQ ID NO: 1373031 - RNA, 18 nt, Human
ggcuccagaugcagggca

SEQ ID NO: 1373032 - RNA, 17 nt, Human
ggcuccagaugcagggc

SEQ ID NO: 1373033 - RNA, 16 nt, Human
ggcuccagaugcaggg

SEQ ID NO: 1373034 - RNA, 18 nt, Human
ggcucacacaccuguagc

SEQ ID NO: 1373035 - RNA, 21 nt, Human
ggcuccagccccucuuggaga

SEQ ID NO: 1373036 - RNA, 15 nt, Human
ggcuccagccccucu

SEQ ID NO: 1373037 - RNA, 23 nt, Human
ggccugaaagaggcugaggccug

SEQ ID NO: 1373038 - RNA, 17 nt, Human
ggccugaaagaggcuga

SEQ ID NO: 1373039 - RNA, 22 nt, Human
ggccucuugagcaguggcuggu

SEQ ID NO: 1373040 - RNA, 18 nt, Human
ggccucuugagcaguggc

SEQ ID NO: 1373041 - RNA, 16 nt, Human
ggccucuugagcagug

SEQ ID NO: 1373042 - RNA, 13 nt, Human
ggccucuugagca

SEQ ID NO: 1373043 - RNA, 17 nt, Human
ggccuggcuggcugagg

SEQ ID NO: 1373044 - RNA, 15 nt, Human
ggccuggcuggcuga

SEQ ID NO: 1373045 - RNA, 14 nt, Human
ggccuggcuggcug

SEQ ID NO: 1373046 - RNA, 12 nt, Human
ggccuggcuggc

SEQ ID NO: 1373047 - RNA, 11 nt, Human
ggccuggcugg

SEQ ID NO: 1373048 - RNA, 21 nt, Human
ggccugggacaacugcuccca

SEQ ID NO: 1373049 - RNA, 19 nt, Human
ggccuggcuggcugagggc

SEQ ID NO: 1373050 - RNA, 13 nt, Human
ggccugggcagga

SEQ ID NO: 1373051 - RNA, 18 nt, Human
ggccugggcuccuggacc

SEQ ID NO: 1373052 - RNA, 17 nt, Human
ggccugggcuccuggac

SEQ ID NO: 1373053 - RNA, 11 nt, Human
ggccugggagg

SEQ ID NO: 1373054 - RNA, 14 nt, Human
ggccugggcaggag

SEQ ID NO: 1373055 - RNA, 14 nt, Human
ggccuguccuccaa

SEQ ID NO: 1373056 - RNA, 22 nt, Human
ggccuguccacaggcuucugag

SEQ ID NO: 1373057 - RNA, 15 nt, Human
ggccuguccacaggc

SEQ ID NO: 1373058 - RNA, 18 nt, Human
ggccuguacugccugcuu

SEQ ID NO: 1373059 - RNA, 18 nt, Human
ggccuguccaacacaucu

SEQ ID NO: 1373060 - RNA, 17 nt, Human
ggccuguagaguugcug

SEQ ID NO: 1373061 - RNA, 17 nt, Human
ggccuguacugccugcu

SEQ ID NO: 1373062 - RNA, 22 nt, Human
ggccugucucaagcucuuccuu

SEQ ID NO: 1373063 - RNA, 11 nt, Human
ggccugugagc

SEQ ID NO: 1373064 - RNA, 22 nt, Human
ggcggccuaugacuugggcacc

SEQ ID NO: 1373065 - RNA, 18 nt, Human
ggcggcaggggccuggag

SEQ ID NO: 1373066 - RNA, 17 nt, Human
ggcggcaggggccugga

SEQ ID NO: 1373067 - RNA, 20 nt, Human
ggcggauguugaagugagcu

SEQ ID NO: 1373068 - RNA, 16 nt, Human
ggcgcggcugggagga

SEQ ID NO: 1373069 - RNA, 16 nt, Human
ggcgccugugguucug

SEQ ID NO: 1373070 - RNA, 15 nt, Human
ggcgccugugguucu

SEQ ID NO: 1373071 - RNA, 22 nt, Human
ggcgcgaucucggcucacugca

SEQ ID NO: 1373072 - RNA, 21 nt, Human
ggcgccgucuccaggggcugc

SEQ ID NO: 1373073 - RNA, 20 nt, Human
ggcgccgucuccaggggcug

SEQ ID NO: 1373074 - RNA, 20 nt, Human
ggccuguggaucaaauccag

SEQ ID NO: 1373075 - RNA, 13 nt, Human
guacuaaagccaa

SEQ ID NO: 1373076 - RNA, 17 nt, Human
guacggauuuucaguua

SEQ ID NO: 1373077 - RNA, 15 nt, Human
guacgaugacagugu

SEQ ID NO: 1373078 - RNA, 17 nt, Human
guacguugugcauuugg

SEQ ID NO: 1373079 - RNA, 23 nt, Human
guacgaaccuacaguuuuaacug

SEQ ID NO: 1373080 - RNA, 23 nt, Human
guaccuuuugaggagccccagcu

SEQ ID NO: 1373081 - RNA, 21 nt, Human
guaccuuuugaggagccccag

SEQ ID NO: 1373082 - RNA, 14 nt, Human
guacguugugcauu

SEQ ID NO: 1373083 - RNA, 15 nt, Human
guacguugugcauuu

SEQ ID NO: 1373084 - RNA, 16 nt, Human
guacguugugcauuug

SEQ ID NO: 1373085 - RNA, 15 nt, Human
guaccuggggccaaa

SEQ ID NO: 1373086 - RNA, 16 nt, Human
guaccugggcaagcug

SEQ ID NO: 1373087 - RNA, 15 nt, Human
guaccugggcaagcu

SEQ ID NO: 1373088 - RNA, 15 nt, Human
guaccugagggucug

SEQ ID NO: 1373089 - RNA, 17 nt, Human
guaccugcccccaaucc

SEQ ID NO: 1373090 - RNA, 14 nt, Human
guaccugagggucu

SEQ ID NO: 1373091 - RNA, 12 nt, Human
guaccugagggu

SEQ ID NO: 1373092 - RNA, 20 nt, Human
guaccgcgucuacccuggga

SEQ ID NO: 1373093 - RNA, 13 nt, Human
guaccucuugagc

SEQ ID NO: 1373094 - RNA, 21 nt, Human
guaccucuugagccuugaacu

SEQ ID NO: 1373095 - RNA, 22 nt, Human
guaccucuugagccuugaacuu

SEQ ID NO: 1373096 - RNA, 19 nt, Human
guacccucucagcuccagg

SEQ ID NO: 1373097 - RNA, 18 nt, Human
guacccucucagcuccag

SEQ ID NO: 1373098 - RNA, 17 nt, Human
guacccucucagcucca

SEQ ID NO: 1373099 - RNA, 17 nt, Human
guacccuccuggcucuu

SEQ ID NO: 1373100 - RNA, 18 nt, Human
guaccgcgucuacccugg

SEQ ID NO: 1373101 - RNA, 15 nt, Human
guacccucuggaggg

SEQ ID NO: 1373102 - RNA, 16 nt, Human
guacccucugaaauac

SEQ ID NO: 1373103 - RNA, 15 nt, Human
guacccccaggacca

SEQ ID NO: 1373104 - RNA, 16 nt, Human
guacccccaggaccag

SEQ ID NO: 1373105 - RNA, 14 nt, Human
guacccccaggacc

SEQ ID NO: 1373106 - RNA, 13 nt, Human
guacccccaggac

SEQ ID NO: 1373107 - RNA, 22 nt, Human
guacuuucauauuuuaaacaga

SEQ ID NO: 1373108 - RNA, 23 nt, Human
guacuuuauuuucuauaauuuaa

SEQ ID NO: 1373109 - RNA, 14 nt, Human
guagaaaggccuuu

SEQ ID NO: 1373110 - RNA, 16 nt, Human
guagaaaggccuuuaa

SEQ ID NO: 1373111 - RNA, 17 nt, Human
guagaaaggccuuuaaa

SEQ ID NO: 1373112 - RNA, 19 nt, Human
guagaaacugcagggaaaa

SEQ ID NO: 1373113 - RNA, 15 nt, Human
guagaaacugcaggg

SEQ ID NO: 1373114 - RNA, 13 nt, Human
guagaaaagcuau

SEQ ID NO: 1373115 - RNA, 20 nt, Human
guagaaaaaaaaauucacau

SEQ ID NO: 1373116 - RNA, 22 nt, Human
guacuugccuuauuagaguguc

SEQ ID NO: 1373117 - RNA, 14 nt, Human
guacuugcucuuga

SEQ ID NO: 1373118 - RNA, 12 nt, Human
guacuuguaguu

SEQ ID NO: 1373119 - RNA, 21 nt, Human
guacuuggaguauuggggucu

SEQ ID NO: 1373120 - RNA, 22 nt, Human
guacuugcucuugaugccuggc

SEQ ID NO: 1373121 - RNA, 15 nt, Human
guacuugcucuugau

SEQ ID NO: 1373122 - RNA, 16 nt, Human
guacuugcucuugaug

SEQ ID NO: 1373123 - RNA, 18 nt, Human
guacuugcucuugaugcc

SEQ ID NO: 1373124 - RNA, 19 nt, Human
guacuugcucuugaugccu

SEQ ID NO: 1373125 - RNA, 20 nt, Human
guacaguuaucuaaguuaau

SEQ ID NO: 1373126 - RNA, 14 nt, Human
guacaguuaucuaa

SEQ ID NO: 1373127 - RNA, 21 nt, Human
guacaguuauuuaugccucug

SEQ ID NO: 1373128 - RNA, 12 nt, Human
guacaguguuac

SEQ ID NO: 1373129 - RNA, 22 nt, Human
guacagugucuuuuuuuguaua

SEQ ID NO: 1373130 - RNA, 21 nt, Human
guacagugucuuuuuuuguau

SEQ ID NO: 1373131 - RNA, 20 nt, Human
guacagugucuuuuuuugua

SEQ ID NO: 1373132 - RNA, 15 nt, Human
guacagugucuuuuu

SEQ ID NO: 1373133 - RNA, 14 nt, Human
guacagugucuuuu

SEQ ID NO: 1373134 - RNA, 13 nt, Human
guacagugucuuu

SEQ ID NO: 1373135 - RNA, 24 nt, Human
guacaguauggggguuguaaauug

SEQ ID NO: 1373136 - RNA, 23 nt, Human
guacaguauggggguuguaaauu

SEQ ID NO: 1373137 - RNA, 22 nt, Human
guacaguauggggguuguaaau

SEQ ID NO: 1373138 - RNA, 21 nt, Human
guacaguauggggguuguaaa

SEQ ID NO: 1373139 - RNA, 16 nt, Human
guacaggguuaucugc

SEQ ID NO: 1373140 - RNA, 14 nt, Human
guacauaacugaaa

SEQ ID NO: 1373141 - RNA, 22 nt, Human
guacauacccuggccgcccccu

SEQ ID NO: 1373142 - RNA, 19 nt, Human
guacauacccuggccgccc

SEQ ID NO: 1373143 - RNA, 20 nt, Human
guacauaaugcgugcauacc

SEQ ID NO: 1373144 - RNA, 18 nt, Human
guacauaguuauuuauuu

SEQ ID NO: 1373145 - RNA, 17 nt, Human
guacauaguuauuuauu

SEQ ID NO: 1373146 - RNA, 14 nt, Human
guacauaugugcug

SEQ ID NO: 1373147 - RNA, 16 nt, Human
guacauaugugcugga

SEQ ID NO: 1373148 - RNA, 15 nt, Human
guacagcuggcucua

SEQ ID NO: 1373149 - RNA, 14 nt, Human
guacagcuggcucu

SEQ ID NO: 1373150 - RNA, 12 nt, Human
guacagcuggcu

SEQ ID NO: 1373151 - RNA, 21 nt, Human
guacagaguguggacucuggu

SEQ ID NO: 1373152 - RNA, 17 nt, Human
guacagagaagccauca

SEQ ID NO: 1373153 - RNA, 18 nt, Human
guacagagaagccaucac

SEQ ID NO: 1373154 - RNA, 16 nt, Human
guacagagaagccauc

SEQ ID NO: 1373155 - RNA, 15 nt, Human
guacagagaagccau

SEQ ID NO: 1373156 - RNA, 23 nt, Human
guacagagaagccagcuuguuua

SEQ ID NO: 1373157 - RNA, 21 nt, Human
guacagagaagccagcuuguu

SEQ ID NO: 1373158 - RNA, 20 nt, Human
guacagcaaggagauuuaca

SEQ ID NO: 1373159 - RNA, 19 nt, Human
guacagagaagccagcuug

SEQ ID NO: 1373160 - RNA, 18 nt, Human
guacagagaagccagcuu

SEQ ID NO: 1373161 - RNA, 16 nt, Human
guacagagaagccagc

SEQ ID NO: 1373162 - RNA, 15 nt, Human
guacagagaagccag

SEQ ID NO: 1373163 - RNA, 14 nt, Human
guacagagaagcca

SEQ ID NO: 1373164 - RNA, 13 nt, Human
guacagagaagcc

SEQ ID NO: 1373165 - RNA, 12 nt, Human
guacagagaagc

SEQ ID NO: 1373166 - RNA, 11 nt, Human
guacagagaag

SEQ ID NO: 1373167 - RNA, 18 nt, Human
guaauuguacuaaagcca

SEQ ID NO: 1373168 - RNA, 21 nt, Human
guacacuguuucaaacuuuac

SEQ ID NO: 1373169 - RNA, 19 nt, Human
guacacuguuucaaacuuu

SEQ ID NO: 1373170 - RNA, 20 nt, Human
guacacuguuucaaacuuua

SEQ ID NO: 1373171 - RNA, 13 nt, Human
guacagaaagcug

SEQ ID NO: 1373172 - RNA, 14 nt, Human
guacagaaagcugc

SEQ ID NO: 1373173 - RNA, 15 nt, Human
guacagacagaaaaa

SEQ ID NO: 1373174 - RNA, 15 nt, Human
guaauuaguaacaug

SEQ ID NO: 1373175 - RNA, 21 nt, Human
guaauuaaaagcaaaucauuu

SEQ ID NO: 1373176 - RNA, 20 nt, Human
guaauuaaaagcaaaucauu

SEQ ID NO: 1373177 - RNA, 19 nt, Human
guaauuaaaagcaaaucau

SEQ ID NO: 1373178 - RNA, 18 nt, Human
guaauuaaaagcaaauca

SEQ ID NO: 1373179 - RNA, 13 nt, Human
guaauuauggagu

SEQ ID NO: 1373180 - RNA, 21 nt, Human
guaauuagugccacuuaaugu

SEQ ID NO: 1373181 - RNA, 20 nt, Human
guaauuagugccacuuaaug

SEQ ID NO: 1373182 - RNA, 23 nt, Human
guaauuaguaacauguguuaagu

SEQ ID NO: 1373183 - RNA, 23 nt, Human
guaauuguacuaaagccaaacau

SEQ ID NO: 1373184 - RNA, 18 nt, Human
guacacuguuucaaacuu

SEQ ID NO: 1373185 - RNA, 15 nt, Human
guaauugacaugugc

SEQ ID NO: 1373186 - RNA, 15 nt, Human
guaauuggaaaggca

SEQ ID NO: 1373187 - RNA, 19 nt, Human
guaauuauuuauguauggu

SEQ ID NO: 1373188 - RNA, 23 nt, Human
guaauuauuuauguauggugcaa

SEQ ID NO: 1373189 - RNA, 15 nt, Human
guaauucuaaaugaa

SEQ ID NO: 1373190 - RNA, 14 nt, Human
guaauucuaaauga

SEQ ID NO: 1373191 - RNA, 12 nt, Human
guaauucuaaau

SEQ ID NO: 1373192 - RNA, 17 nt, Human
guaauucagguuuuucc

SEQ ID NO: 1373193 - RNA, 22 nt, Human
guaauucuaaaugaauguuuac

SEQ ID NO: 1373194 - RNA, 18 nt, Human
guaauucuaaaugaaugu

SEQ ID NO: 1373195 - RNA, 23 nt, Human
guaauucuaccaaggucuucuua

SEQ ID NO: 1373196 - RNA, 22 nt, Human
guaaucugaauaaaguguaaca

SEQ ID NO: 1373197 - RNA, 22 nt, Human
guaaucuaugaauucuaaguga

SEQ ID NO: 1373198 - RNA, 11 nt, Human
guaaugaaaac

SEQ ID NO: 1373199 - RNA, 13 nt, Human
guaaugaaaacca

SEQ ID NO: 1373200 - RNA, 18 nt, Human
guaauguuaauauugauu

SEQ ID NO: 1373201 - RNA, 22 nt, Human
guaauguuaauauugauuuauu

SEQ ID NO: 1373202 - RNA, 17 nt, Human
guaauguuaauauugau

SEQ ID NO: 1373203 - RNA, 17 nt, Human
guaaugucuugagcucu

SEQ ID NO: 1373204 - RNA, 19 nt, Human
guaaugucuugagcucuau

SEQ ID NO: 1373205 - RNA, 19 nt, Human
guaauguaucaaauacauu

SEQ ID NO: 1373206 - RNA, 17 nt, Human
guaaugguguagaacac

SEQ ID NO: 1373207 - RNA, 16 nt, Human
guaaugguguagaaca

SEQ ID NO: 1373208 - RNA, 15 nt, Human
guaaugguguagaac

SEQ ID NO: 1373209 - RNA, 14 nt, Human
guaaugguguagaa

SEQ ID NO: 1373210 - RNA, 23 nt, Human
guaaugguacugacuuugcuugc

SEQ ID NO: 1373211 - RNA, 19 nt, Human
guaaugguacugacuuugc

SEQ ID NO: 1373212 - RNA, 23 nt, Human
guaauggcaguuauauuuugcag

SEQ ID NO: 1373213 - RNA, 16 nt, Human
guaauggcaguuauau

SEQ ID NO: 1373214 - RNA, 19 nt, Human
guaaugauaacuggaaacu

SEQ ID NO: 1373215 - RNA, 22 nt, Human
gguuuaaaugaacaagagaagc

SEQ ID NO: 1373216 - RNA, 12 nt, Human
gguuuaaaugaa

SEQ ID NO: 1373217 - RNA, 22 nt, Human
gguuuaaagagucuagauucaa

SEQ ID NO: 1373218 - RNA, 20 nt, Human
gguuuaaagagucuagauuc

SEQ ID NO: 1373219 - RNA, 15 nt, Human
gguuuaaagagucua

SEQ ID NO: 1373220 - RNA, 18 nt, Human
gguuuaaagaaaguguau

SEQ ID NO: 1373221 - RNA, 14 nt, Human
gguuguuucuguuc

SEQ ID NO: 1373222 - RNA, 19 nt, Human
gguuguuucuguuccaaau

SEQ ID NO: 1373223 - RNA, 12 nt, Human
gguuguuucugu

SEQ ID NO: 1373224 - RNA, 13 nt, Human
gguuguuauguga

SEQ ID NO: 1373225 - RNA, 17 nt, Human
gguuuaagaaauagaau

SEQ ID NO: 1373226 - RNA, 17 nt, Human
gguuuaaaugaacaaga

SEQ ID NO: 1373227 - RNA, 18 nt, Human
gguuguauuagauguucu

SEQ ID NO: 1373228 - RNA, 19 nt, Human
gguuguauuagauguucuc

SEQ ID NO: 1373229 - RNA, 16 nt, Human
gguugcuccgccuggc

SEQ ID NO: 1373230 - RNA, 18 nt, Human
gguugcuccgccuggccu

SEQ ID NO: 1373231 - RNA, 16 nt, Human
gguugaccccagagga

SEQ ID NO: 1373232 - RNA, 15 nt, Human
gguugaccccagagg

SEQ ID NO: 1373233 - RNA, 16 nt, Human
gguugaacucuggugg

SEQ ID NO: 1373234 - RNA, 22 nt, Human
gguugaacucugguggcacagg

SEQ ID NO: 1373235 - RNA, 16 nt, Human
gguugguaggguggga

SEQ ID NO: 1373236 - RNA, 13 nt, Human
gguugguagggug

SEQ ID NO: 1373237 - RNA, 18 nt, Human
gguucagaauuaaacuuu

SEQ ID NO: 1373238 - RNA, 14 nt, Human
gguucaacuuauua

SEQ ID NO: 1373239 - RNA, 23 nt, Human
gguucaacaaagaaacaaagaug

SEQ ID NO: 1373240 - RNA, 19 nt, Human
gguucagaauuaaacuuuu

SEQ ID NO: 1373241 - RNA, 21 nt, Human
gguggcccucuccccugcccc

SEQ ID NO: 1373242 - RNA, 22 nt, Human
gguggcccucuccccugccccc

SEQ ID NO: 1373243 - RNA, 20 nt, Human
gguggcccucuccccugccc

SEQ ID NO: 1373244 - RNA, 19 nt, Human
gguggcccucuccccugcc

SEQ ID NO: 1373245 - RNA, 18 nt, Human
gguggcccucuccccugc

SEQ ID NO: 1373246 - RNA, 15 nt, Human
gguggcccucucccc

SEQ ID NO: 1373247 - RNA, 21 nt, Human
gguggccgcugaguggcaggg

SEQ ID NO: 1373248 - RNA, 20 nt, Human
gguggccgcugaguggcagg

SEQ ID NO: 1373249 - RNA, 23 nt, Human
gguggcccuuaugacugccaaga

SEQ ID NO: 1373250 - RNA, 20 nt, Human
gguggcccuuaugacugcca

SEQ ID NO: 1373251 - RNA, 23 nt, Human
guaaaaaaaaaaaaaauguucuu

SEQ ID NO: 1373252 - RNA, 13 nt, Human
gguuuuuuuccuu

SEQ ID NO: 1373253 - RNA, 14 nt, Human
gguuuuuuaguuga

SEQ ID NO: 1373254 - RNA, 20 nt, Human
gguuuuuggacuucuggggu

SEQ ID NO: 1373255 - RNA, 23 nt, Human
gguuuuuguuuguuuccuuuguu

SEQ ID NO: 1373256 - RNA, 12 nt, Human
gguuuuucccug

SEQ ID NO: 1373257 - RNA, 19 nt, Human
gguuuuuacugcucugaga

SEQ ID NO: 1373258 - RNA, 20 nt, Human
gguuuuuacugcucugagaa

SEQ ID NO: 1373259 - RNA, 16 nt, Human
gguuuuuaaaacccag

SEQ ID NO: 1373260 - RNA, 19 nt, Human
gguuuuguauucucugagc

SEQ ID NO: 1373261 - RNA, 18 nt, Human
gguuuuguauucucugag

SEQ ID NO: 1373262 - RNA, 17 nt, Human
gguuuuguauucucuga

SEQ ID NO: 1373263 - RNA, 18 nt, Human
gguuuacucacugcugca

SEQ ID NO: 1373264 - RNA, 13 nt, Human
gguuuaauguuuu

SEQ ID NO: 1373265 - RNA, 19 nt, Human
gguuuaauguuuuggccaa

SEQ ID NO: 1373266 - RNA, 19 nt, Human
gguuuaauccccaguaaaa

SEQ ID NO: 1373267 - RNA, 22 nt, Human
gguuuaauccccaguaaaauug

SEQ ID NO: 1373268 - RNA, 13 nt, Human
gguuuucgagauu

SEQ ID NO: 1373269 - RNA, 20 nt, Human
gguuuucacauuggaaacaa

SEQ ID NO: 1373270 - RNA, 12 nt, Human
gguuuucuguuc

SEQ ID NO: 1373271 - RNA, 13 nt, Human
gguuuucuguucu

SEQ ID NO: 1373272 - RNA, 15 nt, Human
gguuuucuguucuuu

SEQ ID NO: 1373273 - RNA, 20 nt, Human
guaaaacauuuauuuugaca

SEQ ID NO: 1373274 - RNA, 18 nt, Human
guaaaagcaaaaaagaaa

SEQ ID NO: 1373275 - RNA, 12 nt, Human
guaaaagcaaaa

SEQ ID NO: 1373276 - RNA, 18 nt, Human
guaaaacauuuauuuuga

SEQ ID NO: 1373277 - RNA, 11 nt, Human
guaaaacauuu

SEQ ID NO: 1373278 - RNA, 15 nt, Human
guaaaaaugauuuca

SEQ ID NO: 1373279 - RNA, 17 nt, Human
guaaaaauggaaacuau

SEQ ID NO: 1373280 - RNA, 22 nt, Human
gguuuuuuuucaguuguucuuu

SEQ ID NO: 1373281 - RNA, 18 nt, Human
guaaaaacaaagaaauua

SEQ ID NO: 1373282 - RNA, 13 nt, Human
guaaaaaauuuau

SEQ ID NO: 1373283 - RNA, 20 nt, Human
guaaaaacaaagaaauuaug

SEQ ID NO: 1373284 - RNA, 16 nt, Human
guaagauuuguuuuua

SEQ ID NO: 1373285 - RNA, 18 nt, Human
guaagauuuccuucuuuu

SEQ ID NO: 1373286 - RNA, 13 nt, Human
guaagauuuccuu

SEQ ID NO: 1373287 - RNA, 23 nt, Human
guaagauuauagauucuaaagau

SEQ ID NO: 1373288 - RNA, 22 nt, Human
guaagauuauagauucuaaaga

SEQ ID NO: 1373289 - RNA, 21 nt, Human
guaagauuauagauucuaaag

SEQ ID NO: 1373290 - RNA, 20 nt, Human
guaagauuauagauucuaaa

SEQ ID NO: 1373291 - RNA, 18 nt, Human
guaagauuauagauucua

SEQ ID NO: 1373292 - RNA, 15 nt, Human
guaagagcaaaagaa

SEQ ID NO: 1373293 - RNA, 15 nt, Human
guaagacaaagguuu

SEQ ID NO: 1373294 - RNA, 16 nt, Human
guaagaaauacagacu

SEQ ID NO: 1373295 - RNA, 13 nt, Human
guaagaaauacag

SEQ ID NO: 1373296 - RNA, 20 nt, Human
guaagaaaccuacugcccag

SEQ ID NO: 1373297 - RNA, 14 nt, Human
guaacuuuugugaa

SEQ ID NO: 1373298 - RNA, 17 nt, Human
guaacuuuuguaagaca

SEQ ID NO: 1373299 - RNA, 15 nt, Human
guaacuuuuguaaga

SEQ ID NO: 1373300 - RNA, 14 nt, Human
guaacuuuuguaag

SEQ ID NO: 1373301 - RNA, 22 nt, Human
guaacuugauccauuucuaauu

SEQ ID NO: 1373302 - RNA, 23 nt, Human
guaacuugauccauuucuaauua

SEQ ID NO: 1373303 - RNA, 21 nt, Human
guaacuugauccauuucuaau

SEQ ID NO: 1373304 - RNA, 21 nt, Human
guaacuucuuauggaauugau

SEQ ID NO: 1373305 - RNA, 20 nt, Human
guaacuucuuauggaauuga

SEQ ID NO: 1373306 - RNA, 18 nt, Human
guaacuucuuauggaauu

SEQ ID NO: 1373307 - RNA, 16 nt, Human
guaacuguuuuuuaag

SEQ ID NO: 1373308 - RNA, 13 nt, Human
guaacuguucuug

SEQ ID NO: 1373309 - RNA, 23 nt, Human
guaaauuaacuuuuauaaacuuu

SEQ ID NO: 1373310 - RNA, 19 nt, Human
guaaggcuguguaagauuu

SEQ ID NO: 1373311 - RNA, 14 nt, Human
guaaggcuguguaa

SEQ ID NO: 1373312 - RNA, 13 nt, Human
guaaggcugugua

SEQ ID NO: 1373313 - RNA, 16 nt, Human
guaaggcucuagauca

SEQ ID NO: 1373314 - RNA, 14 nt, Human
guaaggcucuagau

SEQ ID NO: 1373315 - RNA, 13 nt, Human
guaaggcucuaga

SEQ ID NO: 1373316 - RNA, 19 nt, Human
guaaggauccggaaagaag

SEQ ID NO: 1373317 - RNA, 18 nt, Human
guaaggauccggaaagaa

SEQ ID NO: 1373318 - RNA, 18 nt, Human
guaaguacagagaagcca

SEQ ID NO: 1373319 - RNA, 17 nt, Human
guaaguacagagaagcc

SEQ ID NO: 1373320 - RNA, 16 nt, Human
guaaguacagagaagc

SEQ ID NO: 1373321 - RNA, 15 nt, Human
guaaguacagagaag

SEQ ID NO: 1373322 - RNA, 14 nt, Human
guaaguacagagaa

SEQ ID NO: 1373323 - RNA, 13 nt, Human
guaaguacagaga

SEQ ID NO: 1373324 - RNA, 19 nt, Human
guaaguacagagaagccau

SEQ ID NO: 1373325 - RNA, 16 nt, Human
guaagcacugacuggg

SEQ ID NO: 1373326 - RNA, 17 nt, Human
guaagauuuguuuuuaa

SEQ ID NO: 1373327 - RNA, 21 nt, Human
guaagauuuguuuuuaaacug

SEQ ID NO: 1373328 - RNA, 20 nt, Human
guaagcacugacugggacca

SEQ ID NO: 1373329 - RNA, 23 nt, Human
guaagcauaagcuuaugcuuaaa

SEQ ID NO: 1373330 - RNA, 16 nt, Human
guaaaugguaugucau

SEQ ID NO: 1373331 - RNA, 15 nt, Human
guaaaucugccacaa

SEQ ID NO: 1373332 - RNA, 15 nt, Human
guaaauuaacuuuua

SEQ ID NO: 1373333 - RNA, 16 nt, Human
guaaauuaacuuuuau

SEQ ID NO: 1373334 - RNA, 17 nt, Human
guaaauuaacuuuuaua

SEQ ID NO: 1373335 - RNA, 21 nt, Human
guaaauuaacuuuuauaaacu

SEQ ID NO: 1373336 - RNA, 22 nt, Human
guaaauuaacuuuuauaaacuu

SEQ ID NO: 1373337 - RNA, 14 nt, Human
guaaaucuuuuaca

SEQ ID NO: 1373338 - RNA, 14 nt, Human
guaaaucugccaca

SEQ ID NO: 1373339 - RNA, 13 nt, Human
guaaaucugccac

SEQ ID NO: 1373340 - RNA, 12 nt, Human
guaaaucugcca

SEQ ID NO: 1373341 - RNA, 13 nt, Human
guaaaucuacaca

SEQ ID NO: 1373342 - RNA, 18 nt, Human
guaaaugggggugcauuu

SEQ ID NO: 1373343 - RNA, 19 nt, Human
guaaaugggggugcauuug

SEQ ID NO: 1373344 - RNA, 20 nt, Human
guaaaugggggugcauuuga

SEQ ID NO: 1373345 - RNA, 21 nt, Human
guaaaucaguaagagguguua

SEQ ID NO: 1373346 - RNA, 17 nt, Human
guaaaucaguaagaggu

SEQ ID NO: 1373347 - RNA, 14 nt, Human
guaaauaaaaagaa

SEQ ID NO: 1373348 - RNA, 15 nt, Human
guaaauaaaaagaaa

SEQ ID NO: 1373349 - RNA, 16 nt, Human
guaaauaaugcuuuga

SEQ ID NO: 1373350 - RNA, 12 nt, Human
guaaauaaugcu

SEQ ID NO: 1373351 - RNA, 16 nt, Human
guaaauaauacauuau

SEQ ID NO: 1373352 - RNA, 14 nt, Human
guaaauaauacauu

SEQ ID NO: 1373353 - RNA, 20 nt, Human
guaaauaacuggaaaacaga

SEQ ID NO: 1373354 - RNA, 21 nt, Human
guaaauaacuggaaaacagaa

SEQ ID NO: 1373355 - RNA, 13 nt, Human
guaaauacaauuu

SEQ ID NO: 1373356 - RNA, 13 nt, Human
guaaauaaaaaga

SEQ ID NO: 1373357 - RNA, 17 nt, Human
guaaaagguauuaaauu

SEQ ID NO: 1373358 - RNA, 16 nt, Human
guaaaagcauuuugua

SEQ ID NO: 1373359 - RNA, 19 nt, Human
guaaaagcaaaaaagaaaa

SEQ ID NO: 1373360 - RNA, 16 nt, Human
guaaaauaaaaggucg

SEQ ID NO: 1373361 - RNA, 14 nt, Human
guaaauaggaauug

SEQ ID NO: 1373362 - RNA, 16 nt, Human
guaaauacccauaugu

SEQ ID NO: 1373363 - RNA, 19 nt, Human
guaaauacaauuuuuuuua

SEQ ID NO: 1373364 - RNA, 21 nt, Human
guaaauacaauuuuuuuuauu

SEQ ID NO: 1373365 - RNA, 23 nt, Human
guaaauauaaagacguuuuauaa

SEQ ID NO: 1373366 - RNA, 19 nt, Human
guaaauauaaagacguuuu

SEQ ID NO: 1373367 - RNA, 15 nt, Human
guaaauauaaagacg

SEQ ID NO: 1373368 - RNA, 14 nt, Human
guaaauauaaagac

SEQ ID NO: 1373369 - RNA, 13 nt, Human
guaaauauaaaga

SEQ ID NO: 1373370 - RNA, 12 nt, Human
guaaauauaaag

SEQ ID NO: 1373371 - RNA, 11 nt, Human
guaaauauaaa

SEQ ID NO: 1373372 - RNA, 23 nt, Human
guaaauauuuuaaagaauugugu

SEQ ID NO: 1373373 - RNA, 13 nt, Human
guaaauauuuuaa

SEQ ID NO: 1373374 - RNA, 14 nt, Human
guaaaucaguaaga

SEQ ID NO: 1373375 - RNA, 14 nt, Human
guaaauauuuuaaa

SEQ ID NO: 1373376 - RNA, 21 nt, Human
guaaaucacgcuuuuugaaaa

SEQ ID NO: 1373377 - RNA, 22 nt, Human
ggugaagaggaggggaagaggc

SEQ ID NO: 1373378 - RNA, 16 nt, Human
ggucugagcuccagcu

SEQ ID NO: 1373379 - RNA, 15 nt, Human
ggucugagcuccagc

SEQ ID NO: 1373380 - RNA, 21 nt, Human
ggugaagcucacuucugggcu

SEQ ID NO: 1373381 - RNA, 18 nt, Human
ggugaagugaagacaaug

SEQ ID NO: 1373382 - RNA, 17 nt, Human
ggucccuccccuucucu

SEQ ID NO: 1373383 - RNA, 14 nt, Human
ggucccucugugua

SEQ ID NO: 1373384 - RNA, 12 nt, Human
gguccccuccuu

SEQ ID NO: 1373385 - RNA, 21 nt, Human
ggucccccacucuaaagcaaa

SEQ ID NO: 1373386 - RNA, 13 nt, Human
gguccccuccuuc

SEQ ID NO: 1373387 - RNA, 18 nt, Human
ggucccuaauaaagcugu

SEQ ID NO: 1373388 - RNA, 12 nt, Human
ggucccuaauaa

SEQ ID NO: 1373389 - RNA, 13 nt, Human
ggucccuaauaaa

SEQ ID NO: 1373390 - RNA, 16 nt, Human
ggucccuaauaaagcu

SEQ ID NO: 1373391 - RNA, 17 nt, Human
ggucccuaauaaagcug

SEQ ID NO: 1373392 - RNA, 20 nt, Human
ggucccuggguagcggggga

SEQ ID NO: 1373393 - RNA, 11 nt, Human
ggucccugggu

SEQ ID NO: 1373394 - RNA, 19 nt, Human
ggucccuuguauccccugc

SEQ ID NO: 1373395 - RNA, 17 nt, Human
gguccgguguucuaaga

SEQ ID NO: 1373396 - RNA, 16 nt, Human
gguccgguguucuaag

SEQ ID NO: 1373397 - RNA, 18 nt, Human
gguccggcagcuucugcc

SEQ ID NO: 1373398 - RNA, 21 nt, Human
gguccgguguucuaagaugug

SEQ ID NO: 1373399 - RNA, 13 nt, Human
gguccgugggacg

SEQ ID NO: 1373400 - RNA, 16 nt, Human
ggugcucucuuucugu

SEQ ID NO: 1373401 - RNA, 14 nt, Human
ggugcucagggggc

SEQ ID NO: 1373402 - RNA, 17 nt, Human
ggugcggcuggccaugg

SEQ ID NO: 1373403 - RNA, 23 nt, Human
ggugaguuggcuuaccuggccca

SEQ ID NO: 1373404 - RNA, 23 nt, Human
ggugaggucuguuccuuuuauau

SEQ ID NO: 1373405 - RNA, 16 nt, Human
ggugaggucagcacau

SEQ ID NO: 1373406 - RNA, 23 nt, Human
ggugacccggcacccccugcagc

SEQ ID NO: 1373407 - RNA, 22 nt, Human
ggugacccggcacccccugcag

SEQ ID NO: 1373408 - RNA, 21 nt, Human
ggugacccggcacccccugca

SEQ ID NO: 1373409 - RNA, 20 nt, Human
ggugacccggcacccccugc

SEQ ID NO: 1373410 - RNA, 22 nt, Human
ggugaccccagggcacaggagc

SEQ ID NO: 1373411 - RNA, 23 nt, Human
ggugaccccagggcacaggagcu

SEQ ID NO: 1373412 - RNA, 21 nt, Human
ggugaccccagggcacaggag

SEQ ID NO: 1373413 - RNA, 20 nt, Human
ggugaccccagggcacagga

SEQ ID NO: 1373414 - RNA, 17 nt, Human
ggugaccccagggcaca

SEQ ID NO: 1373415 - RNA, 22 nt, Human
ggugccccaggaccagcucagg

SEQ ID NO: 1373416 - RNA, 21 nt, Human
ggugccccaggaccagcucag

SEQ ID NO: 1373417 - RNA, 20 nt, Human
ggugccccaggaccagcuca

SEQ ID NO: 1373418 - RNA, 17 nt, Human
ggugccccaggaccagc

SEQ ID NO: 1373419 - RNA, 16 nt, Human
ggugccccaggaccag

SEQ ID NO: 1373420 - RNA, 15 nt, Human
ggugccccaggacca

SEQ ID NO: 1373421 - RNA, 14 nt, Human
ggugccccaggacc

SEQ ID NO: 1373422 - RNA, 13 nt, Human
ggugccccaggac

SEQ ID NO: 1373423 - RNA, 14 nt, Human
ggugcccaggagaa

SEQ ID NO: 1373424 - RNA, 13 nt, Human
ggugcccaggaga

SEQ ID NO: 1373425 - RNA, 12 nt, Human
ggugcccaggag

SEQ ID NO: 1373426 - RNA, 16 nt, Human
ggugccuaggccuggg

SEQ ID NO: 1373427 - RNA, 23 nt, Human
ggugccccaggaccagcucagga

SEQ ID NO: 1373428 - RNA, 21 nt, Human
ggucagcaugucuauucagcu

SEQ ID NO: 1373429 - RNA, 18 nt, Human
ggucagcacaucucaaca

SEQ ID NO: 1373430 - RNA, 15 nt, Human
ggucccagcagcugc

SEQ ID NO: 1373431 - RNA, 12 nt, Human
ggucccagcagc

SEQ ID NO: 1373432 - RNA, 14 nt, Human
ggucccagcagcug

SEQ ID NO: 1373433 - RNA, 22 nt, Human
ggucccccacucuaaagcaaau

SEQ ID NO: 1373434 - RNA, 15 nt, Human
ggucacagcggaggu

SEQ ID NO: 1373435 - RNA, 14 nt, Human
ggucacacacugau

SEQ ID NO: 1373436 - RNA, 18 nt, Human
ggucaaguuauuaauuuc

SEQ ID NO: 1373437 - RNA, 15 nt, Human
gguagaauguaaagc

SEQ ID NO: 1373438 - RNA, 22 nt, Human
gguagacacacaugaaguccaa

SEQ ID NO: 1373439 - RNA, 19 nt, Human
gguagaauguaaagcuugu

SEQ ID NO: 1373440 - RNA, 20 nt, Human
gguagaaagagauacagagg

SEQ ID NO: 1373441 - RNA, 15 nt, Human
gguagacacacauga

SEQ ID NO: 1373442 - RNA, 15 nt, Human
ggguugugugucugu

SEQ ID NO: 1373443 - RNA, 19 nt, Human
ggguuuaauccccaguaaa

SEQ ID NO: 1373444 - RNA, 22 nt, Human
ggguuuaauccccaguaaaauu

SEQ ID NO: 1373445 - RNA, 23 nt, Human
ggguuuaauccccaguaaaauug

SEQ ID NO: 1373446 - RNA, 23 nt, Human
ggguuguaaauuggcauggaaau

SEQ ID NO: 1373447 - RNA, 20 nt, Human
ggguuucaccauguuagcca

SEQ ID NO: 1373448 - RNA, 15 nt, Human
ggguuuauucacuga

SEQ ID NO: 1373449 - RNA, 20 nt, Human
ggguuucaccauguuggcca

SEQ ID NO: 1373450 - RNA, 13 nt, Human
gguacccucugga

SEQ ID NO: 1373451 - RNA, 14 nt, Human
gguacccuccuggc

SEQ ID NO: 1373452 - RNA, 15 nt, Human
gguacuguacagcug

SEQ ID NO: 1373453 - RNA, 18 nt, Human
gguacugacuuugcuugc

SEQ ID NO: 1373454 - RNA, 20 nt, Human
gguacuguacagcuggcucu

SEQ ID NO: 1373455 - RNA, 18 nt, Human
gguacuguacagcuggcu

SEQ ID NO: 1373456 - RNA, 21 nt, Human
gguacuguacagcuggcucua

SEQ ID NO: 1373457 - RNA, 22 nt, Human
gguacuucaaauccuugaagau

SEQ ID NO: 1373458 - RNA, 19 nt, Human
ggguuccuccccuccagcu

SEQ ID NO: 1373459 - RNA, 18 nt, Human
ggguuccuccccuccagc

SEQ ID NO: 1373460 - RNA, 15 nt, Human
ggguucucacagugg

SEQ ID NO: 1373461 - RNA, 17 nt, Human
ggguuccuccccuccag

SEQ ID NO: 1373462 - RNA, 21 nt, Human
ggguuccguguccacccccau

SEQ ID NO: 1373463 - RNA, 21 nt, Human
ggguucugccugccagcugca

SEQ ID NO: 1373464 - RNA, 20 nt, Human
ggguucugccugccagcugc

SEQ ID NO: 1373465 - RNA, 12 nt, Human
ggguggaagcuu

SEQ ID NO: 1373466 - RNA, 13 nt, Human
ggguucauuugug

SEQ ID NO: 1373467 - RNA, 14 nt, Human
ggguucauuugugu

SEQ ID NO: 1373468 - RNA, 16 nt, Human
ggguagcgggggaggg

SEQ ID NO: 1373469 - RNA, 19 nt, Human
gggugcugggccccugccu

SEQ ID NO: 1373470 - RNA, 21 nt, Human
ggguagccacuggacugacga

SEQ ID NO: 1373471 - RNA, 23 nt, Human
gggcucugcaauuccccucugcu

SEQ ID NO: 1373472 - RNA, 21 nt, Human
gggcucugcaauuccccucug

SEQ ID NO: 1373473 - RNA, 20 nt, Human
gggcucugcaauuccccucu

SEQ ID NO: 1373474 - RNA, 10 nt, Human
gggcucugau

SEQ ID NO: 1373475 - RNA, 16 nt, Human
gggcucugaguacccc

SEQ ID NO: 1373476 - RNA, 11 nt, Human
gggcucugagu

SEQ ID NO: 1373477 - RNA, 15 nt, Human
gggcucugaggcgcc

SEQ ID NO: 1373478 - RNA, 12 nt, Human
gggcucugaggc

SEQ ID NO: 1373479 - RNA, 11 nt, Human
gggcucugagg

SEQ ID NO: 1373480 - RNA, 22 nt, Human
gggcucuccuggcuucccaucc

SEQ ID NO: 1373481 - RNA, 13 nt, Human
gggcucuccuggc

SEQ ID NO: 1373482 - RNA, 12 nt, Human
gggcucuccugg

SEQ ID NO: 1373483 - RNA, 22 nt, Human
gggcucuaacgccugagcccag

SEQ ID NO: 1373484 - RNA, 23 nt, Human
gggcucuaacgccugagcccagg

SEQ ID NO: 1373485 - RNA, 21 nt, Human
gggcucuaacgccugagccca

SEQ ID NO: 1373486 - RNA, 20 nt, Human
gggcucuaacgccugagccc

SEQ ID NO: 1373487 - RNA, 19 nt, Human
gggcucuaacgccugagcc

SEQ ID NO: 1373488 - RNA, 18 nt, Human
gggcucuaacgccugagc

SEQ ID NO: 1373489 - RNA, 17 nt, Human
gggcucuaacgccugag

SEQ ID NO: 1373490 - RNA, 16 nt, Human
gggcucuaacgccuga

SEQ ID NO: 1373491 - RNA, 15 nt, Human
gggcucuaacgccug

SEQ ID NO: 1373492 - RNA, 20 nt, Human
gggcucgaggggugggcugg

SEQ ID NO: 1373493 - RNA, 18 nt, Human
gggcucgaggggugggcu

SEQ ID NO: 1373494 - RNA, 12 nt, Human
gggcuccuuucc

SEQ ID NO: 1373495 - RNA, 23 nt, Human
gggcuccuugugggccugggcuc

SEQ ID NO: 1373496 - RNA, 22 nt, Human
gggcuccuugugggccugggcu

SEQ ID NO: 1373497 - RNA, 20 nt, Human
gggcuccuugugggccuggg

SEQ ID NO: 1373498 - RNA, 19 nt, Human
gggcuccuugugggccugg

SEQ ID NO: 1373499 - RNA, 18 nt, Human
gggcuccuugugggccug

SEQ ID NO: 1373500 - RNA, 13 nt, Human
gggcuccuggacc

SEQ ID NO: 1373501 - RNA, 22 nt, Human
gggcuccugcacuuacuugcuu

SEQ ID NO: 1373502 - RNA, 18 nt, Human
gggcuccugcacuuacuu

SEQ ID NO: 1373503 - RNA, 11 nt, Human
gggcuccugca

SEQ ID NO: 1373504 - RNA, 18 nt, Human
gggcuccgugugggagac

SEQ ID NO: 1373505 - RNA, 17 nt, Human
gggcuccgugugggaga

SEQ ID NO: 1373506 - RNA, 22 nt, Human
gggcuccuccaggguggcagca

SEQ ID NO: 1373507 - RNA, 23 nt, Human
gggcuccuccaggguggcagcaa

SEQ ID NO: 1373508 - RNA, 13 nt, Human
gggcugagggagc

SEQ ID NO: 1373509 - RNA, 12 nt, Human
gggcugagggag

SEQ ID NO: 1373510 - RNA, 23 nt, Human
gggcugagcuggggaccugguac

SEQ ID NO: 1373511 - RNA, 16 nt, Human
gggcugucaucugugc

SEQ ID NO: 1373512 - RNA, 19 nt, Human
gggcuguaacugccaggcu

SEQ ID NO: 1373513 - RNA, 18 nt, Human
gggcuguaacugccaggc

SEQ ID NO: 1373514 - RNA, 17 nt, Human
gggcuguaacugccagg

SEQ ID NO: 1373515 - RNA, 16 nt, Human
gggcuguaacugccag

SEQ ID NO: 1373516 - RNA, 18 nt, Human
gggcugaggagcagcagg

SEQ ID NO: 1373517 - RNA, 14 nt, Human
gggcugagggagcc

SEQ ID NO: 1373518 - RNA, 23 nt, Human
gggcugguucuguaauugugugu

SEQ ID NO: 1373519 - RNA, 22 nt, Human
gggcuguccugccacccagccc

SEQ ID NO: 1373520 - RNA, 22 nt, Human
gggcuguaacugccaggcucuc

SEQ ID NO: 1373521 - RNA, 17 nt, Human
gggcugucaucugugca

SEQ ID NO: 1373522 - RNA, 19 nt, Human
gggcuuauaucuggccucu

SEQ ID NO: 1373523 - RNA, 14 nt, Human
gggcuuauaucugg

SEQ ID NO: 1373524 - RNA, 20 nt, Human
gggcuuauaauaaaggacug

SEQ ID NO: 1373525 - RNA, 21 nt, Human
gggccuggagauccuccugca

SEQ ID NO: 1373526 - RNA, 12 nt, Human
gggccuggagau

SEQ ID NO: 1373527 - RNA, 13 nt, Human
gggcccuccuucc

SEQ ID NO: 1373528 - RNA, 22 nt, Human
gggccugcugcugagaaccugg

SEQ ID NO: 1373529 - RNA, 23 nt, Human
gggccugcugcugagaaccuggc

SEQ ID NO: 1373530 - RNA, 16 nt, Human
gggcccucucugcucu

SEQ ID NO: 1373531 - RNA, 12 nt, Human
gggcccggacgc

SEQ ID NO: 1373532 - RNA, 11 nt, Human
gggcccggacg

SEQ ID NO: 1373533 - RNA, 23 nt, Human
gggccuggucucacccuggaggc

SEQ ID NO: 1373534 - RNA, 21 nt, Human
gggccuggucucacccuggag

SEQ ID NO: 1373535 - RNA, 20 nt, Human
gggccuggucucacccugga

SEQ ID NO: 1373536 - RNA, 19 nt, Human
gggccuggucucacccugg

SEQ ID NO: 1373537 - RNA, 14 nt, Human
gggcgcggcuggga

SEQ ID NO: 1373538 - RNA, 21 nt, Human
gggcucccuguaaccucuuca

SEQ ID NO: 1373539 - RNA, 18 nt, Human
gggcucccugacugggag

SEQ ID NO: 1373540 - RNA, 14 nt, Human
gggcucccugacug

SEQ ID NO: 1373541 - RNA, 17 nt, Human
gggccuuggccuggagc

SEQ ID NO: 1373542 - RNA, 16 nt, Human
gggccuuggccuggag

SEQ ID NO: 1373543 - RNA, 15 nt, Human
gggccuuggccugga

SEQ ID NO: 1373544 - RNA, 14 nt, Human
gggccuuggccugg

SEQ ID NO: 1373545 - RNA, 18 nt, Human
gggccuuaggaagagccu

SEQ ID NO: 1373546 - RNA, 20 nt, Human
gggccuuaggaagagccuuc

SEQ ID NO: 1373547 - RNA, 23 nt, Human
gggccuguccacaggcuucugag

SEQ ID NO: 1373548 - RNA, 16 nt, Human
gggccuguccacaggc

SEQ ID NO: 1373549 - RNA, 20 nt, Human
gggccuguacugccugcuug

SEQ ID NO: 1373550 - RNA, 18 nt, Human
gggccuguacugccugcu

SEQ ID NO: 1373551 - RNA, 17 nt, Human
gggccuguacugccugc

SEQ ID NO: 1373552 - RNA, 16 nt, Human
gggccuguacugccug

SEQ ID NO: 1373553 - RNA, 15 nt, Human
gggccuguacugccu

SEQ ID NO: 1373554 - RNA, 23 nt, Human
gggccugguuaaauaaggcaggg

SEQ ID NO: 1373555 - RNA, 22 nt, Human
gggccugguuaaauaaggcagg

SEQ ID NO: 1373556 - RNA, 13 nt, Human
gggcgccuguggu

SEQ ID NO: 1373557 - RNA, 12 nt, Human
gggcgcaggccg

SEQ ID NO: 1373558 - RNA, 24 nt, Human
gggccuugggcuccgugugggaga

SEQ ID NO: 1373559 - RNA, 14 nt, Human
gggccuugggcucc

SEQ ID NO: 1373560 - RNA, 13 nt, Human
gggccuugggcuc

SEQ ID NO: 1373561 - RNA, 18 nt, Human
gggccuuggccuggagca

SEQ ID NO: 1373562 - RNA, 16 nt, Human
gggccuuuggcaggug

SEQ ID NO: 1373563 - RNA, 17 nt, Human
ggguacauggugcuggg

SEQ ID NO: 1373564 - RNA, 18 nt, Human
ggggugcagggauguggg

SEQ ID NO: 1373565 - RNA, 16 nt, Human
ggggugcccacaggcc

SEQ ID NO: 1373566 - RNA, 13 nt, Human
ggggugcagggau

SEQ ID NO: 1373567 - RNA, 16 nt, Human
ggggugcacaggaggg

SEQ ID NO: 1373568 - RNA, 15 nt, Human
ggggugcacaggagg

SEQ ID NO: 1373569 - RNA, 14 nt, Human
ggggugcacaggag

SEQ ID NO: 1373570 - RNA, 13 nt, Human
ggggugcacagga

SEQ ID NO: 1373571 - RNA, 17 nt, Human
ggggugaugagggcagc

SEQ ID NO: 1373572 - RNA, 23 nt, Human
ggggugaugagggcagcagccag

SEQ ID NO: 1373573 - RNA, 15 nt, Human
ggggugaggagcugg

SEQ ID NO: 1373574 - RNA, 14 nt, Human
ggggugaggagcug

SEQ ID NO: 1373575 - RNA, 23 nt, Human
ggggugacccggcacccccugca

SEQ ID NO: 1373576 - RNA, 21 nt, Human
gggguuccguguccaccccca

SEQ ID NO: 1373577 - RNA, 14 nt, Human
gggguucaggcccg

SEQ ID NO: 1373578 - RNA, 16 nt, Human
gggguuauuuucuggu

SEQ ID NO: 1373579 - RNA, 16 nt, Human
ggggcaggcugggcca

SEQ ID NO: 1373580 - RNA, 15 nt, Human
ggggcaggcugggcc

SEQ ID NO: 1373581 - RNA, 14 nt, Human
ggggcaggcugggc

SEQ ID NO: 1373582 - RNA, 13 nt, Human
ggggcaggcuggg

SEQ ID NO: 1373583 - RNA, 21 nt, Human
ggggcaggaguagcugagcuc

SEQ ID NO: 1373584 - RNA, 20 nt, Human
ggggcaggaguagcugagcu

SEQ ID NO: 1373585 - RNA, 19 nt, Human
ggggcaggaguagcugagc

SEQ ID NO: 1373586 - RNA, 17 nt, Human
ggggcaggaguagcuga

SEQ ID NO: 1373587 - RNA, 11 nt, Human
ggggcaggagu

SEQ ID NO: 1373588 - RNA, 13 nt, Human
ggggcuggaggag

SEQ ID NO: 1373589 - RNA, 12 nt, Human
ggggcugcugcu

SEQ ID NO: 1373590 - RNA, 19 nt, Human
ggggcugcuuccuccugga

SEQ ID NO: 1373591 - RNA, 18 nt, Human
ggggcugcuuccuccugg

SEQ ID NO: 1373592 - RNA, 16 nt, Human
ggggcugcuuccuccu

SEQ ID NO: 1373593 - RNA, 22 nt, Human
ggggcugcugcugggcucagug

SEQ ID NO: 1373594 - RNA, 21 nt, Human
ggggcuggaggagcccaggcc

SEQ ID NO: 1373595 - RNA, 17 nt, Human
ggggcuggaggagccca

SEQ ID NO: 1373596 - RNA, 16 nt, Human
ggggcuggaggagccc

SEQ ID NO: 1373597 - RNA, 23 nt, Human
ggggcuggaggagcccaggccag

SEQ ID NO: 1373598 - RNA, 17 nt, Human
gggggaacucagaucca

SEQ ID NO: 1373599 - RNA, 14 nt, Human
ggggcuugccuucu

SEQ ID NO: 1373600 - RNA, 21 nt, Human
ggggcuuccuggugcuggagg

SEQ ID NO: 1373601 - RNA, 13 nt, Human
ggggcuuccuggu

SEQ ID NO: 1373602 - RNA, 11 nt, Human
ggggcuuccug

SEQ ID NO: 1373603 - RNA, 23 nt, Human
ggggcuguccugccacccagccc

SEQ ID NO: 1373604 - RNA, 20 nt, Human
ggggcuuauaauaaaggacu

SEQ ID NO: 1373605 - RNA, 17 nt, Human
gggcuucagcugccagu

SEQ ID NO: 1373606 - RNA, 15 nt, Human
gggcuuccuggugcu

SEQ ID NO: 1373607 - RNA, 21 nt, Human
gggcuuccuggagcagaagca

SEQ ID NO: 1373608 - RNA, 16 nt, Human
gggcuuccuggagcag

SEQ ID NO: 1373609 - RNA, 15 nt, Human
gggcuuccuggagca

SEQ ID NO: 1373610 - RNA, 14 nt, Human
gggcuuccuggagc

SEQ ID NO: 1373611 - RNA, 13 nt, Human
gggcuuccuggag

SEQ ID NO: 1373612 - RNA, 12 nt, Human
gggcuuccugga

SEQ ID NO: 1373613 - RNA, 13 nt, Human
gggcuucccaagg

SEQ ID NO: 1373614 - RNA, 16 nt, Human
gggcuucccaagggcu

SEQ ID NO: 1373615 - RNA, 17 nt, Human
gggcuucagguccaggc

SEQ ID NO: 1373616 - RNA, 13 nt, Human
gggcuugccuucu

SEQ ID NO: 1373617 - RNA, 15 nt, Human
gggcuugggccuagg

SEQ ID NO: 1373618 - RNA, 11 nt, Human
gggcuugggcc

SEQ ID NO: 1373619 - RNA, 14 nt, Human
gggcuugccuucug

SEQ ID NO: 1373620 - RNA, 21 nt, Human
gggcuugcuauucugucccua

SEQ ID NO: 1373621 - RNA, 22 nt, Human
ggggaguaaagaauuauuuugu

SEQ ID NO: 1373622 - RNA, 13 nt, Human
ggggaggaggagg

SEQ ID NO: 1373623 - RNA, 15 nt, Human
ggggagcugggccug

SEQ ID NO: 1373624 - RNA, 19 nt, Human
ggggagcgggucugcuccc

SEQ ID NO: 1373625 - RNA, 22 nt, Human
ggggagccccuucugcucagcu

SEQ ID NO: 1373626 - RNA, 21 nt, Human
ggggaguuaagaccuggcagc

SEQ ID NO: 1373627 - RNA, 17 nt, Human
ggggaguuaagaccugg

SEQ ID NO: 1373628 - RNA, 19 nt, Human
ggggagcccacuguccugg

SEQ ID NO: 1373629 - RNA, 11 nt, Human
ggggagcccac

SEQ ID NO: 1373630 - RNA, 14 nt, Human
ggggagcaggcagc

SEQ ID NO: 1373631 - RNA, 18 nt, Human
ggggagacugggcugagg

SEQ ID NO: 1373632 - RNA, 17 nt, Human
ggggagacugggcugag

SEQ ID NO: 1373633 - RNA, 20 nt, Human
gggcuugggccuaggcugca

SEQ ID NO: 1373634 - RNA, 23 nt, Human
ggggaucccucccccccaugcac

SEQ ID NO: 1373635 - RNA, 21 nt, Human
ggggaucccucccccccaugc

SEQ ID NO: 1373636 - RNA, 18 nt, Human
ggggaguuuagggugggg

SEQ ID NO: 1373637 - RNA, 12 nt, Human
ggggcagccccc

SEQ ID NO: 1373638 - RNA, 13 nt, Human
ggggcagagccag

SEQ ID NO: 1373639 - RNA, 14 nt, Human
ggggcagagccagg

SEQ ID NO: 1373640 - RNA, 23 nt, Human
ggggcagaggcaguaccugggca

SEQ ID NO: 1373641 - RNA, 17 nt, Human
ggggcagaggcaguacc

SEQ ID NO: 1373642 - RNA, 15 nt, Human
ggggcagagccagga

SEQ ID NO: 1373643 - RNA, 16 nt, Human
ggggcagagccaggaa

SEQ ID NO: 1373644 - RNA, 22 nt, Human
gucaagcugaguauuaaaaugu

SEQ ID NO: 1373645 - RNA, 21 nt, Human
gucaagaauagcauuguaaaa

SEQ ID NO: 1373646 - RNA, 17 nt, Human
gucaacuugagcauguu

SEQ ID NO: 1373647 - RNA, 20 nt, Human
gucaagagugaauucccuca

SEQ ID NO: 1373648 - RNA, 19 nt, Human
gucaagagugaauucccuc

SEQ ID NO: 1373649 - RNA, 17 nt, Human
gucaagugcguccacga

SEQ ID NO: 1373650 - RNA, 20 nt, Human
gucaacuugagcauguuacu

SEQ ID NO: 1373651 - RNA, 22 nt, Human
guauuuguuaauuuagaaaacu

SEQ ID NO: 1373652 - RNA, 16 nt, Human
guauuuguucccaaga

SEQ ID NO: 1373653 - RNA, 18 nt, Human
guauuuuaaaagaaugau

SEQ ID NO: 1373654 - RNA, 23 nt, Human
guauuuguuaauuuagaaaacuu

SEQ ID NO: 1373655 - RNA, 18 nt, Human
guauuuguuaauuuagaa

SEQ ID NO: 1373656 - RNA, 17 nt, Human
guauuuguuaauuuaga

SEQ ID NO: 1373657 - RNA, 13 nt, Human
guauuuguaauua

SEQ ID NO: 1373658 - RNA, 20 nt, Human
guauuugggaagugaagacu

SEQ ID NO: 1373659 - RNA, 17 nt, Human
guauuuuaaaagaauga

SEQ ID NO: 1373660 - RNA, 16 nt, Human
guauuuuaaaagaaug

SEQ ID NO: 1373661 - RNA, 18 nt, Human
gucaaguuauuaauuucu

SEQ ID NO: 1373662 - RNA, 22 nt, Human
gucaaugcaguugucucuguuu

SEQ ID NO: 1373663 - RNA, 16 nt, Human
gucaaugcaguugucu

SEQ ID NO: 1373664 - RNA, 14 nt, Human
gucaaugcaguugu

SEQ ID NO: 1373665 - RNA, 21 nt, Human
gucaauaaaauccauacauuu

SEQ ID NO: 1373666 - RNA, 20 nt, Human
gucaaguuauuaauuucuuc

SEQ ID NO: 1373667 - RNA, 11 nt, Human
gucaaguuauu

SEQ ID NO: 1373668 - RNA, 15 nt, Human
gucaauaaaauccau

SEQ ID NO: 1373669 - RNA, 20 nt, Human
gucacccaggcuggacugca

SEQ ID NO: 1373670 - RNA, 20 nt, Human
gucacccaggcuggagugca

SEQ ID NO: 1373671 - RNA, 20 nt, Human
gucacccagguuggagugca

SEQ ID NO: 1373672 - RNA, 16 nt, Human
gucaccucagagacau

SEQ ID NO: 1373673 - RNA, 21 nt, Human
gucaccuaggaagccucagau

SEQ ID NO: 1373674 - RNA, 20 nt, Human
gucaccuaggaagccucaga

SEQ ID NO: 1373675 - RNA, 19 nt, Human
gucaccuaggaagccucag

SEQ ID NO: 1373676 - RNA, 14 nt, Human
gucaccucauggaa

SEQ ID NO: 1373677 - RNA, 13 nt, Human
guauuauauguac

SEQ ID NO: 1373678 - RNA, 18 nt, Human
guauuauaccaaaauguu

SEQ ID NO: 1373679 - RNA, 15 nt, Human
guauuauguguguuu

SEQ ID NO: 1373680 - RNA, 16 nt, Human
guauuaugucucuucu

SEQ ID NO: 1373681 - RNA, 16 nt, Human
guauuauuuacauuua

SEQ ID NO: 1373682 - RNA, 19 nt, Human
guauucaaaaauuaucuau

SEQ ID NO: 1373683 - RNA, 14 nt, Human
guauuauaccuuuu

SEQ ID NO: 1373684 - RNA, 12 nt, Human
guauuagauguu

SEQ ID NO: 1373685 - RNA, 13 nt, Human
guauuagauguuc

SEQ ID NO: 1373686 - RNA, 14 nt, Human
guauuagauguucu

SEQ ID NO: 1373687 - RNA, 15 nt, Human
guauuagauguucuc

SEQ ID NO: 1373688 - RNA, 17 nt, Human
guauuagauguucucua

SEQ ID NO: 1373689 - RNA, 18 nt, Human
guauuagauguucucuau

SEQ ID NO: 1373690 - RNA, 21 nt, Human
guauuagauguucucuaucau

SEQ ID NO: 1373691 - RNA, 22 nt, Human
guauuagauguucucuaucauu

SEQ ID NO: 1373692 - RNA, 22 nt, Human
guauuacaguggggaaugaaga

SEQ ID NO: 1373693 - RNA, 20 nt, Human
guauuacaguggggaaugaa

SEQ ID NO: 1373694 - RNA, 21 nt, Human
guauuuggaaauaaagucaga

SEQ ID NO: 1373695 - RNA, 20 nt, Human
guauuuggaaauaaagucag

SEQ ID NO: 1373696 - RNA, 19 nt, Human
guauuuggaaauaaaguca

SEQ ID NO: 1373697 - RNA, 22 nt, Human
guauuugcuuuuuuguuuuggc

SEQ ID NO: 1373698 - RNA, 12 nt, Human
guauuugcuuuu

SEQ ID NO: 1373699 - RNA, 12 nt, Human
guauuugcuaau

SEQ ID NO: 1373700 - RNA, 11 nt, Human
guauuugcuaa

SEQ ID NO: 1373701 - RNA, 15 nt, Human
guauuugaaucagcc

SEQ ID NO: 1373702 - RNA, 22 nt, Human
guauuucuaugaaauauuaugu

SEQ ID NO: 1373703 - RNA, 19 nt, Human
guauuuauuuuuucuuuuc

SEQ ID NO: 1373704 - RNA, 13 nt, Human
guauuucaaauug

SEQ ID NO: 1373705 - RNA, 17 nt, Human
guauuucuaugaaauau

SEQ ID NO: 1373706 - RNA, 17 nt, Human
guauuuauucaauaaag

SEQ ID NO: 1373707 - RNA, 19 nt, Human
guauuuauucaauaaagua

SEQ ID NO: 1373708 - RNA, 20 nt, Human
guauuuauucaauaaaguau

SEQ ID NO: 1373709 - RNA, 22 nt, Human
guauuuauucaauaaaguauuu

SEQ ID NO: 1373710 - RNA, 23 nt, Human
guauuuauucaauaaaguauuua

SEQ ID NO: 1373711 - RNA, 21 nt, Human
guauucccaaaaauuacuuug

SEQ ID NO: 1373712 - RNA, 19 nt, Human
guauuccagaccugaagaa

SEQ ID NO: 1373713 - RNA, 22 nt, Human
guauucauccaaguuaaaugua

SEQ ID NO: 1373714 - RNA, 21 nt, Human
guauucauccaaguuaaaugu

SEQ ID NO: 1373715 - RNA, 16 nt, Human
guauucguuaucuaau

SEQ ID NO: 1373716 - RNA, 19 nt, Human
guauucccauuagaccaag

SEQ ID NO: 1373717 - RNA, 13 nt, Human
guauuuauucaau

SEQ ID NO: 1373718 - RNA, 14 nt, Human
guauuuauucaaua

SEQ ID NO: 1373719 - RNA, 16 nt, Human
guauuuauucaauaaa

SEQ ID NO: 1373720 - RNA, 22 nt, Human
gucccagcagcugccaggagca

SEQ ID NO: 1373721 - RNA, 15 nt, Human
gucccagcagcugcc

SEQ ID NO: 1373722 - RNA, 14 nt, Human
gucccagcagcugc

SEQ ID NO: 1373723 - RNA, 12 nt, Human
gucccagcagcu

SEQ ID NO: 1373724 - RNA, 11 nt, Human
gucccagcagc

SEQ ID NO: 1373725 - RNA, 22 nt, Human
gucccagaaaaagcaucauggc

SEQ ID NO: 1373726 - RNA, 12 nt, Human
gucccagagcag

SEQ ID NO: 1373727 - RNA, 21 nt, Human
gucccagaagaugacugaggg

SEQ ID NO: 1373728 - RNA, 20 nt, Human
guccaggcugccguggggcc

SEQ ID NO: 1373729 - RNA, 16 nt, Human
guccaggcugccgugg

SEQ ID NO: 1373730 - RNA, 14 nt, Human
guccaggcugccgu

SEQ ID NO: 1373731 - RNA, 13 nt, Human
guccaggcugccg

SEQ ID NO: 1373732 - RNA, 15 nt, Human
guccaggcacugaga

SEQ ID NO: 1373733 - RNA, 21 nt, Human
guccaggaugcuaacaucuaa

SEQ ID NO: 1373734 - RNA, 13 nt, Human
guccaggagccug

SEQ ID NO: 1373735 - RNA, 17 nt, Human
guccagcugagcgccag

SEQ ID NO: 1373736 - RNA, 21 nt, Human
guccagcucuggaggggaggg

SEQ ID NO: 1373737 - RNA, 16 nt, Human
guccagcucuggaggg

SEQ ID NO: 1373738 - RNA, 14 nt, Human
guccagcucuggag

SEQ ID NO: 1373739 - RNA, 13 nt, Human
guccagcucugga

SEQ ID NO: 1373740 - RNA, 12 nt, Human
guccagcucugg

SEQ ID NO: 1373741 - RNA, 19 nt, Human
guccacuucugacagccuc

SEQ ID NO: 1373742 - RNA, 18 nt, Human
guccacuucugacagccu

SEQ ID NO: 1373743 - RNA, 17 nt, Human
guccacuucugacagcc

SEQ ID NO: 1373744 - RNA, 16 nt, Human
guccacuucugacagc

SEQ ID NO: 1373745 - RNA, 13 nt, Human
gucauguguauaa

SEQ ID NO: 1373746 - RNA, 12 nt, Human
gucauguguaua

SEQ ID NO: 1373747 - RNA, 15 nt, Human
gucaugugacaggua

SEQ ID NO: 1373748 - RNA, 11 nt, Human
gucaugugacc

SEQ ID NO: 1373749 - RNA, 23 nt, Human
gucaugggccacugcuuuucccu

SEQ ID NO: 1373750 - RNA, 14 nt, Human
gucaugcugccuua

SEQ ID NO: 1373751 - RNA, 13 nt, Human
gucaugcugccuu

SEQ ID NO: 1373752 - RNA, 14 nt, Human
gucauguguauaaa

SEQ ID NO: 1373753 - RNA, 24 nt, Human
gucaugcacaguauuuguaauuaa

SEQ ID NO: 1373754 - RNA, 19 nt, Human
gucaugcacaguauuugua

SEQ ID NO: 1373755 - RNA, 21 nt, Human
gucaugaggagauucugccuu

SEQ ID NO: 1373756 - RNA, 22 nt, Human
gucaugaggagauucugccuuu

SEQ ID NO: 1373757 - RNA, 20 nt, Human
gucaugaggagauucugccu

SEQ ID NO: 1373758 - RNA, 22 nt, Human
gucaucuugcuaccaguauuua

SEQ ID NO: 1373759 - RNA, 18 nt, Human
gucaucuugcuaccagua

SEQ ID NO: 1373760 - RNA, 15 nt, Human
gucaucuugcuacca

SEQ ID NO: 1373761 - RNA, 14 nt, Human
gucaucuugcuacc

SEQ ID NO: 1373762 - RNA, 12 nt, Human
gucaucuugcua

SEQ ID NO: 1373763 - RNA, 22 nt, Human
gucauccucaaagaaaguguau

SEQ ID NO: 1373764 - RNA, 19 nt, Human
gucauccucaaagaaagug

SEQ ID NO: 1373765 - RNA, 21 nt, Human
gucaucaucauggccagcugg

SEQ ID NO: 1373766 - RNA, 20 nt, Human
gucaucaucauggccagcug

SEQ ID NO: 1373767 - RNA, 18 nt, Human
gucaucaucauggccagc

SEQ ID NO: 1373768 - RNA, 17 nt, Human
gucaucaucauggccag

SEQ ID NO: 1373769 - RNA, 18 nt, Human
gucauccucacagugaac

SEQ ID NO: 1373770 - RNA, 23 nt, Human
gucaucaauuaaaggcaaaggca

SEQ ID NO: 1373771 - RNA, 15 nt, Human
gucauagguuaauau

SEQ ID NO: 1373772 - RNA, 22 nt, Human
gucauagaaauuacacccaaag

SEQ ID NO: 1373773 - RNA, 13 nt, Human
gucauagaaauua

SEQ ID NO: 1373774 - RNA, 16 nt, Human
gucauaccaaugaaaa

SEQ ID NO: 1373775 - RNA, 15 nt, Human
gucauaccaaugaaa

SEQ ID NO: 1373776 - RNA, 16 nt, Human
gucauacagagaaguc

SEQ ID NO: 1373777 - RNA, 15 nt, Human
gucauacagagaagu

SEQ ID NO: 1373778 - RNA, 14 nt, Human
gucauacagagaag

SEQ ID NO: 1373779 - RNA, 13 nt, Human
gucauacagagaa

SEQ ID NO: 1373780 - RNA, 12 nt, Human
gucauacagaga

SEQ ID NO: 1373781 - RNA, 18 nt, Human
gucauaauugcauugacu

SEQ ID NO: 1373782 - RNA, 16 nt, Human
gucauaauugcauuga

SEQ ID NO: 1373783 - RNA, 14 nt, Human
gucauaauugcauu

SEQ ID NO: 1373784 - RNA, 12 nt, Human
gucauaauugca

SEQ ID NO: 1373785 - RNA, 15 nt, Human
gucagcaugaauuug

SEQ ID NO: 1373786 - RNA, 13 nt, Human
gucagccacuguu

SEQ ID NO: 1373787 - RNA, 20 nt, Human
gucagcaugaauuuguaaug

SEQ ID NO: 1373788 - RNA, 14 nt, Human
gucagcaugaauuu

SEQ ID NO: 1373789 - RNA, 23 nt, Human
gucagcagccucccugaagacca

SEQ ID NO: 1373790 - RNA, 22 nt, Human
gucagcccuaggguggagagcc

SEQ ID NO: 1373791 - RNA, 13 nt, Human
gucagcccuaggg

SEQ ID NO: 1373792 - RNA, 13 nt, Human
gucaccugugcuu

SEQ ID NO: 1373793 - RNA, 21 nt, Human
gucaccucagagacauacacc

SEQ ID NO: 1373794 - RNA, 18 nt, Human
gucacggauuugugucug

SEQ ID NO: 1373795 - RNA, 20 nt, Human
gucacggcugcgcacugugu

SEQ ID NO: 1373796 - RNA, 14 nt, Human
gucacgccagacuu

SEQ ID NO: 1373797 - RNA, 20 nt, Human
gucagcagccucccugaaga

SEQ ID NO: 1373798 - RNA, 21 nt, Human
gucagcaaguccuaagccugu

SEQ ID NO: 1373799 - RNA, 19 nt, Human
gucacguuuggugcuucuc

SEQ ID NO: 1373800 - RNA, 14 nt, Human
guccuauggccuca

SEQ ID NO: 1373801 - RNA, 22 nt, Human
guccuaucugggcuuccuggag

SEQ ID NO: 1373802 - RNA, 21 nt, Human
guccuaucugggcuuccugga

SEQ ID NO: 1373803 - RNA, 20 nt, Human
guccuaucugggcuuccugg

SEQ ID NO: 1373804 - RNA, 24 nt, Human
guccuaucugggcuuccuggagca

SEQ ID NO: 1373805 - RNA, 19 nt, Human
guccuaucugggcuuccug

SEQ ID NO: 1373806 - RNA, 18 nt, Human
guccuaucugggcuuccu

SEQ ID NO: 1373807 - RNA, 17 nt, Human
guccuaucugggcuucc

SEQ ID NO: 1373808 - RNA, 15 nt, Human
guccuaucugggcuu

SEQ ID NO: 1373809 - RNA, 14 nt, Human
guccuaucugggcu

SEQ ID NO: 1373810 - RNA, 20 nt, Human
guccuaucuccagcggcccu

SEQ ID NO: 1373811 - RNA, 16 nt, Human
guccuaguuguucagc

SEQ ID NO: 1373812 - RNA, 17 nt, Human
guccuagcacagauggc

SEQ ID NO: 1373813 - RNA, 21 nt, Human
guccuagcacagauggccagc

SEQ ID NO: 1373814 - RNA, 15 nt, Human
guccuagcacagaug

SEQ ID NO: 1373815 - RNA, 16 nt, Human
guccuauggccucaug

SEQ ID NO: 1373816 - RNA, 15 nt, Human
guccuauggccucau

SEQ ID NO: 1373817 - RNA, 22 nt, Human
guccuccaacaccaagcacagc

SEQ ID NO: 1373818 - RNA, 21 nt, Human
guccuccaacaccaagcacag

SEQ ID NO: 1373819 - RNA, 21 nt, Human
guccucagccuugccagagau

SEQ ID NO: 1373820 - RNA, 20 nt, Human
guccucagccuugccagaga

SEQ ID NO: 1373821 - RNA, 16 nt, Human
guccucagccuugcca

SEQ ID NO: 1373822 - RNA, 20 nt, Human
guccucagagaauuucuacc

SEQ ID NO: 1373823 - RNA, 14 nt, Human
guccucagccuugc

SEQ ID NO: 1373824 - RNA, 12 nt, Human
guccucagccuu

SEQ ID NO: 1373825 - RNA, 12 nt, Human
guccucagcccc

SEQ ID NO: 1373826 - RNA, 15 nt, Human
gucccuggggcuagg

SEQ ID NO: 1373827 - RNA, 19 nt, Human
gucccugggagggacaugc

SEQ ID NO: 1373828 - RNA, 23 nt, Human
gucccugccuggaccagccucuc

SEQ ID NO: 1373829 - RNA, 22 nt, Human
gucccugccuggaccagccucu

SEQ ID NO: 1373830 - RNA, 14 nt, Human
gucccugccuggac

SEQ ID NO: 1373831 - RNA, 21 nt, Human
gucccugccuggaccagccuc

SEQ ID NO: 1373832 - RNA, 20 nt, Human
gucccugccuggaccagccu

SEQ ID NO: 1373833 - RNA, 21 nt, Human
gucccagguuggcucugccag

SEQ ID NO: 1373834 - RNA, 22 nt, Human
gucccagguuggcucugccagu

SEQ ID NO: 1373835 - RNA, 19 nt, Human
gucccagguuggcucugcc

SEQ ID NO: 1373836 - RNA, 18 nt, Human
gucccagguuggcucugc

SEQ ID NO: 1373837 - RNA, 17 nt, Human
gucccagguuggcucug

SEQ ID NO: 1373838 - RNA, 16 nt, Human
gucccagguuggcucu

SEQ ID NO: 1373839 - RNA, 17 nt, Human
gucccagcagcugccag

SEQ ID NO: 1373840 - RNA, 19 nt, Human
gucccaggaaucaguuuaa

SEQ ID NO: 1373841 - RNA, 20 nt, Human
gucccuggguagcgggggag

SEQ ID NO: 1373842 - RNA, 22 nt, Human
gucccuggggcuagggggagcc

SEQ ID NO: 1373843 - RNA, 22 nt, Human
guccucccgagcuccucuucca

SEQ ID NO: 1373844 - RNA, 21 nt, Human
guccucccgagcuccucuucc

SEQ ID NO: 1373845 - RNA, 16 nt, Human
guccucccgagcuccu

SEQ ID NO: 1373846 - RNA, 22 nt, Human
guccuggcgccuggcaguccgu

SEQ ID NO: 1373847 - RNA, 21 nt, Human
guccucccaauuucagacucc

SEQ ID NO: 1373848 - RNA, 19 nt, Human
guccugugaaugccacugc

SEQ ID NO: 1373849 - RNA, 18 nt, Human
guccugugaaugccacug

SEQ ID NO: 1373850 - RNA, 20 nt, Human
guccugucggagcccugucu

SEQ ID NO: 1373851 - RNA, 21 nt, Human
guccugucggagcccugucuc

SEQ ID NO: 1373852 - RNA, 23 nt, Human
guccugucaucaucauggccagc

SEQ ID NO: 1373853 - RNA, 21 nt, Human
guccugucaucaucauggcca

SEQ ID NO: 1373854 - RNA, 20 nt, Human
guccugucaucaucauggcc

SEQ ID NO: 1373855 - RNA, 18 nt, Human
guccugucggagcccugu

SEQ ID NO: 1373856 - RNA, 19 nt, Human
guccugucaucaucauggc

SEQ ID NO: 1373857 - RNA, 16 nt, Human
guccugucaucaucau

SEQ ID NO: 1373858 - RNA, 15 nt, Human
guccuguacauugug

SEQ ID NO: 1373859 - RNA, 20 nt, Human
guccuggugguauuuucaau

SEQ ID NO: 1373860 - RNA, 23 nt, Human
guccuggugguauuuucaauagc

SEQ ID NO: 1373861 - RNA, 22 nt, Human
guccugguggggcagcuccucu

SEQ ID NO: 1373862 - RNA, 20 nt, Human
guccugguggggcagcuccu

SEQ ID NO: 1373863 - RNA, 18 nt, Human
guccugguggggcagcuc

SEQ ID NO: 1373864 - RNA, 17 nt, Human
guccugguggggcagcu

SEQ ID NO: 1373865 - RNA, 16 nt, Human
guccugguggggcagc

SEQ ID NO: 1373866 - RNA, 17 nt, Human
guccugggccugcagaa

SEQ ID NO: 1373867 - RNA, 14 nt, Human
guccugggccugca

SEQ ID NO: 1373868 - RNA, 13 nt, Human
guccugggccugc

SEQ ID NO: 1373869 - RNA, 16 nt, Human
guccugggaggagaga

SEQ ID NO: 1373870 - RNA, 15 nt, Human
guccugggaggagag

SEQ ID NO: 1373871 - RNA, 21 nt, Human
gucucuuccaguuugcuuugc

SEQ ID NO: 1373872 - RNA, 23 nt, Human
gucucuuauggauguccccagca

SEQ ID NO: 1373873 - RNA, 22 nt, Human
gucucuuauggauguccccagc

SEQ ID NO: 1373874 - RNA, 15 nt, Human
gucucuuauggaugu

SEQ ID NO: 1373875 - RNA, 22 nt, Human
gucucuguuuuacaaguuggag

SEQ ID NO: 1373876 - RNA, 18 nt, Human
gucucucuaugccucucu

SEQ ID NO: 1373877 - RNA, 22 nt, Human
gucucucuaugccucucuacag

SEQ ID NO: 1373878 - RNA, 17 nt, Human
gucucucuaugccucuc

SEQ ID NO: 1373879 - RNA, 22 nt, Human
gucucucguaguguuaaguuau

SEQ ID NO: 1373880 - RNA, 15 nt, Human
gucucucaugaaccu

SEQ ID NO: 1373881 - RNA, 18 nt, Human
gucucucagggccaggcc

SEQ ID NO: 1373882 - RNA, 17 nt, Human
gucucucagggccaggc

SEQ ID NO: 1373883 - RNA, 16 nt, Human
gucucucaugaaccuc

SEQ ID NO: 1373884 - RNA, 15 nt, Human
gucucggccuucaca

SEQ ID NO: 1373885 - RNA, 14 nt, Human
gucucgucucuuuu

SEQ ID NO: 1373886 - RNA, 21 nt, Human
gucucuauaccaauaaaguga

SEQ ID NO: 1373887 - RNA, 14 nt, Human
gucugccacccagg

SEQ ID NO: 1373888 - RNA, 21 nt, Human
gucugccaaccuaaaacucuu

SEQ ID NO: 1373889 - RNA, 19 nt, Human
gucugccaaccuaaaacuc

SEQ ID NO: 1373890 - RNA, 21 nt, Human
gucugagguccugagcacugc

SEQ ID NO: 1373891 - RNA, 19 nt, Human
gucugagguccugagcacu

SEQ ID NO: 1373892 - RNA, 18 nt, Human
gucugagguccugagcac

SEQ ID NO: 1373893 - RNA, 17 nt, Human
gucugagguccugagca

SEQ ID NO: 1373894 - RNA, 16 nt, Human
gucugagguccugagc

SEQ ID NO: 1373895 - RNA, 15 nt, Human
gucugagguccugag

SEQ ID NO: 1373896 - RNA, 14 nt, Human
gucugagguccuga

SEQ ID NO: 1373897 - RNA, 13 nt, Human
gucugacuguuuc

SEQ ID NO: 1373898 - RNA, 11 nt, Human
gucuaaaacuc

SEQ ID NO: 1373899 - RNA, 16 nt, Human
gucguuuuuuuuuugu

SEQ ID NO: 1373900 - RNA, 21 nt, Human
gucguuuuuuuuuuguuuguu

SEQ ID NO: 1373901 - RNA, 15 nt, Human
gucguucccagugug

SEQ ID NO: 1373902 - RNA, 23 nt, Human
gucguuaaaaacagauuuggaaa

SEQ ID NO: 1373903 - RNA, 21 nt, Human
gucguggggugugcugggagc

SEQ ID NO: 1373904 - RNA, 19 nt, Human
gucguggggugugcuggga

SEQ ID NO: 1373905 - RNA, 14 nt, Human
gucuacccugggau

SEQ ID NO: 1373906 - RNA, 13 nt, Human
gucuacccuggga

SEQ ID NO: 1373907 - RNA, 23 nt, Human
gucuacacuaagagagaaugaga

SEQ ID NO: 1373908 - RNA, 18 nt, Human
gucuaagauucuagauca

SEQ ID NO: 1373909 - RNA, 16 nt, Human
gucuaagauucuagau

SEQ ID NO: 1373910 - RNA, 15 nt, Human
gucuaagauucuaga

SEQ ID NO: 1373911 - RNA, 14 nt, Human
gucuaagauucuag

SEQ ID NO: 1373912 - RNA, 13 nt, Human
gucuaagauucua

SEQ ID NO: 1373913 - RNA, 12 nt, Human
gucuaagauucu

SEQ ID NO: 1373914 - RNA, 21 nt, Human
gucuaaagauggaguuucuaa

SEQ ID NO: 1373915 - RNA, 20 nt, Human
gucuaaagauggaguuucua

SEQ ID NO: 1373916 - RNA, 22 nt, Human
gucuaaagauggaguuucuaag

SEQ ID NO: 1373917 - RNA, 17 nt, Human
gucuacacacccugcau

SEQ ID NO: 1373918 - RNA, 21 nt, Human
gucuaaucuagauaucgacuu

SEQ ID NO: 1373919 - RNA, 17 nt, Human
gucuacacuaagagaga

SEQ ID NO: 1373920 - RNA, 21 nt, Human
gucucgagcgcccugcagacc

SEQ ID NO: 1373921 - RNA, 23 nt, Human
gucucgagcgcccugcagacccu

SEQ ID NO: 1373922 - RNA, 20 nt, Human
gucucgagcgcccugcagac

SEQ ID NO: 1373923 - RNA, 19 nt, Human
gucucgagcgcccugcaga

SEQ ID NO: 1373924 - RNA, 18 nt, Human
gucucgagcgcccugcag

SEQ ID NO: 1373925 - RNA, 17 nt, Human
gucucgagcgcccugca

SEQ ID NO: 1373926 - RNA, 15 nt, Human
gucucgagcgcccug

SEQ ID NO: 1373927 - RNA, 14 nt, Human
gucucgagcgcccu

SEQ ID NO: 1373928 - RNA, 22 nt, Human
gucucacuugugcaguguugac

SEQ ID NO: 1373929 - RNA, 22 nt, Human
gucuacccugggauucaggaaa

SEQ ID NO: 1373930 - RNA, 13 nt, Human
gucucgagcgccc

SEQ ID NO: 1373931 - RNA, 17 nt, Human
gugaaaaugguccagga

SEQ ID NO: 1373932 - RNA, 15 nt, Human
gugaaaaugguccag

SEQ ID NO: 1373933 - RNA, 12 nt, Human
gugaaaagaaua

SEQ ID NO: 1373934 - RNA, 17 nt, Human
gucugccacccaggauc

SEQ ID NO: 1373935 - RNA, 20 nt, Human
gugaaacucguuaauuugua

SEQ ID NO: 1373936 - RNA, 12 nt, Human
gugaaacuggau

SEQ ID NO: 1373937 - RNA, 19 nt, Human
gugaaagaaaauaacaaua

SEQ ID NO: 1373938 - RNA, 14 nt, Human
gugaaacuuucauu

SEQ ID NO: 1373939 - RNA, 13 nt, Human
gugaaagaaguaa

SEQ ID NO: 1373940 - RNA, 22 nt, Human
gugaaauaccaaccugaagaca

SEQ ID NO: 1373941 - RNA, 13 nt, Human
gugaaaucauuca

SEQ ID NO: 1373942 - RNA, 19 nt, Human
gugaauacugcuacagcaa

SEQ ID NO: 1373943 - RNA, 15 nt, Human
gugaauaccugcuca

SEQ ID NO: 1373944 - RNA, 20 nt, Human
gugaaauuuacaucauuucu

SEQ ID NO: 1373945 - RNA, 22 nt, Human
gugaaauuuacaucauuucuuu

SEQ ID NO: 1373946 - RNA, 18 nt, Human
gugaaauuauucauaauu

SEQ ID NO: 1373947 - RNA, 20 nt, Human
gugaaauuauucauaauuau

SEQ ID NO: 1373948 - RNA, 21 nt, Human
gugaaucaagggucaggccuu

SEQ ID NO: 1373949 - RNA, 17 nt, Human
gugaaucaagggucagg

SEQ ID NO: 1373950 - RNA, 15 nt, Human
gugaaucaaggguca

SEQ ID NO: 1373951 - RNA, 13 nt, Human
gugaaucaagggu

SEQ ID NO: 1373952 - RNA, 23 nt, Human
gugaauagccauauuuguaaaau

SEQ ID NO: 1373953 - RNA, 19 nt, Human
gugaauagccauauuugua

SEQ ID NO: 1373954 - RNA, 18 nt, Human
gugaauagccauauuugu

SEQ ID NO: 1373955 - RNA, 21 nt, Human
gugaauacugcuacagcaauu

SEQ ID NO: 1373956 - RNA, 22 nt, Human
gugaauuaggcuguaacuacuu

SEQ ID NO: 1373957 - RNA, 21 nt, Human
gugaauuaggcuguaacuacu

SEQ ID NO: 1373958 - RNA, 18 nt, Human
gugaauuaggcuguaacu

SEQ ID NO: 1373959 - RNA, 12 nt, Human
gugaaugggugc

SEQ ID NO: 1373960 - RNA, 17 nt, Human
gugagcugagcaggcca

SEQ ID NO: 1373961 - RNA, 16 nt, Human
gugagcugagcaggcc

SEQ ID NO: 1373962 - RNA, 14 nt, Human
gugagcugagcagg

SEQ ID NO: 1373963 - RNA, 13 nt, Human
gugagcugagcag

SEQ ID NO: 1373964 - RNA, 19 nt, Human
gugagcauguuuggaaggg

SEQ ID NO: 1373965 - RNA, 16 nt, Human
gugagcuccuaagcca

SEQ ID NO: 1373966 - RNA, 15 nt, Human
gugaggaaagucauu

SEQ ID NO: 1373967 - RNA, 13 nt, Human
gugagcauguuug

SEQ ID NO: 1373968 - RNA, 20 nt, Human
gugagcauggaacacuucga

SEQ ID NO: 1373969 - RNA, 16 nt, Human
gugagcagucaggaaa

SEQ ID NO: 1373970 - RNA, 21 nt, Human
gugaccugcugagcucugaga

SEQ ID NO: 1373971 - RNA, 20 nt, Human
gugaccugcugagcucugag

SEQ ID NO: 1373972 - RNA, 19 nt, Human
gugaccugcugagcucuga

SEQ ID NO: 1373973 - RNA, 18 nt, Human
gugaccugcugagcucug

SEQ ID NO: 1373974 - RNA, 16 nt, Human
gugaccugcugagcuc

SEQ ID NO: 1373975 - RNA, 15 nt, Human
gugaccugcugagcu

SEQ ID NO: 1373976 - RNA, 14 nt, Human
gugaccugcugagc

SEQ ID NO: 1373977 - RNA, 13 nt, Human
gugaccugcugag

SEQ ID NO: 1373978 - RNA, 12 nt, Human
gugaccugcuga

SEQ ID NO: 1373979 - RNA, 18 nt, Human
gugaccugcuaggccaga

SEQ ID NO: 1373980 - RNA, 13 nt, Human
gugaccugcuagg

SEQ ID NO: 1373981 - RNA, 12 nt, Human
gugacucuuucc

SEQ ID NO: 1373982 - RNA, 15 nt, Human
gugacugaauuucuu

SEQ ID NO: 1373983 - RNA, 16 nt, Human
gugacugaauuucuuu

SEQ ID NO: 1373984 - RNA, 18 nt, Human
gugacugaauuucuuuug

SEQ ID NO: 1373985 - RNA, 19 nt, Human
gugaccggacuuuucugca

SEQ ID NO: 1373986 - RNA, 15 nt, Human
gugaccggacuuuuc

SEQ ID NO: 1373987 - RNA, 16 nt, Human
gugacccuggcuccuu

SEQ ID NO: 1373988 - RNA, 18 nt, Human
gugaccuauaccuguguu

SEQ ID NO: 1373989 - RNA, 21 nt, Human
gugaccggacuuuucugcaaa

SEQ ID NO: 1373990 - RNA, 20 nt, Human
gugacaaaaaauuaaagcau

SEQ ID NO: 1373991 - RNA, 23 nt, Human
gugacccggcacccccugcagcu

SEQ ID NO: 1373992 - RNA, 22 nt, Human
gugacccggcacccccugcagc

SEQ ID NO: 1373993 - RNA, 21 nt, Human
gugacccggcacccccugcag

SEQ ID NO: 1373994 - RNA, 18 nt, Human
gugacccggcacccccug

SEQ ID NO: 1373995 - RNA, 17 nt, Human
gugacccggcacccccu

SEQ ID NO: 1373996 - RNA, 13 nt, Human
gugacaaaaaauu

SEQ ID NO: 1373997 - RNA, 17 nt, Human
gugaauuuuuuuuuccu

SEQ ID NO: 1373998 - RNA, 16 nt, Human
gugacaagcucacaga

SEQ ID NO: 1373999 - RNA, 20 nt, Human
gugauuuuuaugccaccuga

SEQ ID NO: 1374000 - RNA, 19 nt, Human
gugauuuuuaugccaccug

SEQ ID NO: 1374001 - RNA, 17 nt, Human
gugauuuuuaugccacc

SEQ ID NO: 1374002 - RNA, 22 nt, Human
gugauuuaagggcccaggucag

SEQ ID NO: 1374003 - RNA, 17 nt, Human
gugauuuaagggcccag

SEQ ID NO: 1374004 - RNA, 16 nt, Human
gugauuuuuaugccac

SEQ ID NO: 1374005 - RNA, 23 nt, Human
gugauuguggaauggagauucag

SEQ ID NO: 1374006 - RNA, 19 nt, Human
gugauuguggaauggagau

SEQ ID NO: 1374007 - RNA, 14 nt, Human
gugauuguggaaug

SEQ ID NO: 1374008 - RNA, 24 nt, Human
gugauuggccuguagaguugcuga

SEQ ID NO: 1374009 - RNA, 13 nt, Human
gugauucugccuu

SEQ ID NO: 1374010 - RNA, 21 nt, Human
gugauucagaaaauguucugu

SEQ ID NO: 1374011 - RNA, 22 nt, Human
gugaucccuagcugugaccucu

SEQ ID NO: 1374012 - RNA, 21 nt, Human
gugaucccuagcugugaccuc

SEQ ID NO: 1374013 - RNA, 16 nt, Human
gugauccauguaacug

SEQ ID NO: 1374014 - RNA, 23 nt, Human
gugaggcaaugggagcugaggcc

SEQ ID NO: 1374015 - RNA, 15 nt, Human
gugcccucugggcuc

SEQ ID NO: 1374016 - RNA, 14 nt, Human
gugcccucugggcu

SEQ ID NO: 1374017 - RNA, 13 nt, Human
gugcccucugggc

SEQ ID NO: 1374018 - RNA, 22 nt, Human
gugcccucucccacccucuucc

SEQ ID NO: 1374019 - RNA, 21 nt, Human
gugcccucucccacccucuuc

SEQ ID NO: 1374020 - RNA, 20 nt, Human
gugcccucucccacccucuu

SEQ ID NO: 1374021 - RNA, 19 nt, Human
gugcccucucccacccucu

SEQ ID NO: 1374022 - RNA, 18 nt, Human
gugcccucucccacccuc

SEQ ID NO: 1374023 - RNA, 17 nt, Human
gugcccucucccacccu

SEQ ID NO: 1374024 - RNA, 15 nt, Human
gugcccucucccacc

SEQ ID NO: 1374025 - RNA, 13 nt, Human
gugcccucuccca

SEQ ID NO: 1374026 - RNA, 16 nt, Human
gugcccccaggguccu

SEQ ID NO: 1374027 - RNA, 22 nt, Human
gugcccccaggguccugggagg

SEQ ID NO: 1374028 - RNA, 14 nt, Human
gugcccccaggguc

SEQ ID NO: 1374029 - RNA, 22 nt, Human
gugcccccaaccauuuccucag

SEQ ID NO: 1374030 - RNA, 19 nt, Human
gugcccccacugaccagaa

SEQ ID NO: 1374031 - RNA, 18 nt, Human
gugcccccacugaccaga

SEQ ID NO: 1374032 - RNA, 15 nt, Human
gugcccccacugacc

SEQ ID NO: 1374033 - RNA, 13 nt, Human
gugcccccacuga

SEQ ID NO: 1374034 - RNA, 21 nt, Human
gugccccaggaccagcucagg

SEQ ID NO: 1374035 - RNA, 19 nt, Human
gugccccaggaccagcuca

SEQ ID NO: 1374036 - RNA, 15 nt, Human
gugccccaggaccag

SEQ ID NO: 1374037 - RNA, 14 nt, Human
gugccccaggacca

SEQ ID NO: 1374038 - RNA, 12 nt, Human
gugccccaggac

SEQ ID NO: 1374039 - RNA, 17 nt, Human
gugcccaguuaaucuug

SEQ ID NO: 1374040 - RNA, 16 nt, Human
gugcccaguuaaucuu

SEQ ID NO: 1374041 - RNA, 12 nt, Human
gugcccaggaga

SEQ ID NO: 1374042 - RNA, 13 nt, Human
gugcccaggagaa

SEQ ID NO: 1374043 - RNA, 20 nt, Human
gugcccaagccagaggcugg

SEQ ID NO: 1374044 - RNA, 19 nt, Human
gugcccaagccagaggcug

SEQ ID NO: 1374045 - RNA, 12 nt, Human
gugcccaagcca

SEQ ID NO: 1374046 - RNA, 18 nt, Human
gugccaguauuuuaaaau

SEQ ID NO: 1374047 - RNA, 16 nt, Human
gugccaguauuuuaaa

SEQ ID NO: 1374048 - RNA, 16 nt, Human
gugcccagaauaaguu

SEQ ID NO: 1374049 - RNA, 22 nt, Human
gugcccacagugucaggcacug

SEQ ID NO: 1374050 - RNA, 21 nt, Human
gugcccacaggccgcccugcg

SEQ ID NO: 1374051 - RNA, 13 nt, Human
gugcccacaggcc

SEQ ID NO: 1374052 - RNA, 16 nt, Human
gugcaguccugaucag

SEQ ID NO: 1374053 - RNA, 24 nt, Human
gugcaguggcaucaucucagcuca

SEQ ID NO: 1374054 - RNA, 22 nt, Human
gugcaguaucaugcccugugca

SEQ ID NO: 1374055 - RNA, 15 nt, Human
gugcaguacuuugug

SEQ ID NO: 1374056 - RNA, 15 nt, Human
gugcagguggggaga

SEQ ID NO: 1374057 - RNA, 15 nt, Human
gugcagggauguggg

SEQ ID NO: 1374058 - RNA, 14 nt, Human
gugcagggaugugg

SEQ ID NO: 1374059 - RNA, 23 nt, Human
gugcagggccuguaaucccagca

SEQ ID NO: 1374060 - RNA, 24 nt, Human
gugcaacaggguauggacuaucug

SEQ ID NO: 1374061 - RNA, 14 nt, Human
gugcaacaggguau

SEQ ID NO: 1374062 - RNA, 13 nt, Human
gugcaacacuggu

SEQ ID NO: 1374063 - RNA, 22 nt, Human
gugcaacaagguccucugucag

SEQ ID NO: 1374064 - RNA, 18 nt, Human
gugcaaauugucacagga

SEQ ID NO: 1374065 - RNA, 24 nt, Human
gugcaguggcgcgaucucagcuca

SEQ ID NO: 1374066 - RNA, 21 nt, Human
gugcauaccacuuuuguucuu

SEQ ID NO: 1374067 - RNA, 13 nt, Human
gugcauaccacuu

SEQ ID NO: 1374068 - RNA, 14 nt, Human
gugcauaccacuuu

SEQ ID NO: 1374069 - RNA, 24 nt, Human
gugcaguggcgugaucucagcuca

SEQ ID NO: 1374070 - RNA, 16 nt, Human
gugcuuaugguaccag

SEQ ID NO: 1374071 - RNA, 21 nt, Human
gugcuuaugcucuuaauugcc

SEQ ID NO: 1374072 - RNA, 22 nt, Human
gugcuucuaguucugccaggag

SEQ ID NO: 1374073 - RNA, 21 nt, Human
gugcuucuaguucugccagga

SEQ ID NO: 1374074 - RNA, 14 nt, Human
gugcuucgggcccu

SEQ ID NO: 1374075 - RNA, 20 nt, Human
gugcuucuaguucugccagg

SEQ ID NO: 1374076 - RNA, 17 nt, Human
gugcuucgggcccuucc

SEQ ID NO: 1374077 - RNA, 13 nt, Human
gugcuucuuucuu

SEQ ID NO: 1374078 - RNA, 11 nt, Human
gugcugugugu

SEQ ID NO: 1374079 - RNA, 16 nt, Human
gugcuguuuuguuaua

SEQ ID NO: 1374080 - RNA, 19 nt, Human
gugcuguuuauuaaucuua

SEQ ID NO: 1374081 - RNA, 15 nt, Human
gugcuguuuauuaau

SEQ ID NO: 1374082 - RNA, 21 nt, Human
gugcuuaucccauagccagga

SEQ ID NO: 1374083 - RNA, 21 nt, Human
gugcuguuuuguuauauaauu

SEQ ID NO: 1374084 - RNA, 19 nt, Human
gugcuguuuuguuauauaa

SEQ ID NO: 1374085 - RNA, 20 nt, Human
gugcuuuccauucgugaaaa

SEQ ID NO: 1374086 - RNA, 18 nt, Human
gugcuugauagaaaugcc

SEQ ID NO: 1374087 - RNA, 14 nt, Human
gugcuucuuucuuu

SEQ ID NO: 1374088 - RNA, 21 nt, Human
guggaaaacuuaugcugauuu

SEQ ID NO: 1374089 - RNA, 16 nt, Human
guggaaaacuuaugcu

SEQ ID NO: 1374090 - RNA, 16 nt, Human
gugcuuuuuuugugug

SEQ ID NO: 1374091 - RNA, 23 nt, Human
gugcuuuuggcggggaggaggaa

SEQ ID NO: 1374092 - RNA, 15 nt, Human
gugcuuuuaaaugca

SEQ ID NO: 1374093 - RNA, 17 nt, Human
gugcuuugagagagaaa

SEQ ID NO: 1374094 - RNA, 15 nt, Human
gugcuuugagagaga

SEQ ID NO: 1374095 - RNA, 23 nt, Human
gugcuuucuucucccaauucauc

SEQ ID NO: 1374096 - RNA, 18 nt, Human
gugccuuuauuuccacug

SEQ ID NO: 1374097 - RNA, 16 nt, Human
gugccuuucaggaucu

SEQ ID NO: 1374098 - RNA, 20 nt, Human
gugccuuuauuuccacugug

SEQ ID NO: 1374099 - RNA, 16 nt, Human
gugccuuuauuuccac

SEQ ID NO: 1374100 - RNA, 13 nt, Human
gugccuuguuuuu

SEQ ID NO: 1374101 - RNA, 19 nt, Human
gugccuugucacgccagac

SEQ ID NO: 1374102 - RNA, 13 nt, Human
gugcccugauccc

SEQ ID NO: 1374103 - RNA, 17 nt, Human
gugcccugagccagggu

SEQ ID NO: 1374104 - RNA, 15 nt, Human
gugcccugagccagg

SEQ ID NO: 1374105 - RNA, 12 nt, Human
gugcccugagcc

SEQ ID NO: 1374106 - RNA, 19 nt, Human
gugcccucugggcucugag

SEQ ID NO: 1374107 - RNA, 17 nt, Human
gugcccucugggcucug

SEQ ID NO: 1374108 - RNA, 16 nt, Human
gugcccucugggcucu

SEQ ID NO: 1374109 - RNA, 19 nt, Human
gugcugaauguugggacug

SEQ ID NO: 1374110 - RNA, 23 nt, Human
gugcucuuuguuuugugucucuu

SEQ ID NO: 1374111 - RNA, 21 nt, Human
gugcugaacaguggaggaaga

SEQ ID NO: 1374112 - RNA, 20 nt, Human
gugcucuuuucuccucacug

SEQ ID NO: 1374113 - RNA, 16 nt, Human
gugcucuuuucuccuc

SEQ ID NO: 1374114 - RNA, 14 nt, Human
gugcucuuuucucc

SEQ ID NO: 1374115 - RNA, 22 nt, Human
gugcucuuuguuuugugucucu

SEQ ID NO: 1374116 - RNA, 16 nt, Human
gugcucuuuguuuugu

SEQ ID NO: 1374117 - RNA, 15 nt, Human
gugcucuuuguuuug

SEQ ID NO: 1374118 - RNA, 18 nt, Human
gugcugacggccagggag

SEQ ID NO: 1374119 - RNA, 16 nt, Human
gugcugacggccaggg

SEQ ID NO: 1374120 - RNA, 15 nt, Human
gugcugacggccagg

SEQ ID NO: 1374121 - RNA, 22 nt, Human
gugcugacgggacccacaugcu

SEQ ID NO: 1374122 - RNA, 23 nt, Human
gugcugacggccagggagaagcu

SEQ ID NO: 1374123 - RNA, 21 nt, Human
gugcugacggccagggagaag

SEQ ID NO: 1374124 - RNA, 14 nt, Human
gugcugagauuaca

SEQ ID NO: 1374125 - RNA, 12 nt, Human
gugcugcauuua

SEQ ID NO: 1374126 - RNA, 19 nt, Human
gugcugcauuuaaaagaua

SEQ ID NO: 1374127 - RNA, 20 nt, Human
gugcugcauuuaaaagauac

SEQ ID NO: 1374128 - RNA, 19 nt, Human
guggagggguaggggcugg

SEQ ID NO: 1374129 - RNA, 22 nt, Human
guggagggguaggggcugggaa

SEQ ID NO: 1374130 - RNA, 12 nt, Human
guggagggccac

SEQ ID NO: 1374131 - RNA, 23 nt, Human
guggagggacaaguggacucagg

SEQ ID NO: 1374132 - RNA, 14 nt, Human
guggaggcugcucg

SEQ ID NO: 1374133 - RNA, 13 nt, Human
guggaggcugcuc

SEQ ID NO: 1374134 - RNA, 12 nt, Human
guggaggcugcu

SEQ ID NO: 1374135 - RNA, 19 nt, Human
guggaucuauuucauguuu

SEQ ID NO: 1374136 - RNA, 19 nt, Human
guggauccaaacugaucca

SEQ ID NO: 1374137 - RNA, 21 nt, Human
guggaucagagaugcaccacc

SEQ ID NO: 1374138 - RNA, 23 nt, Human
guggaucacaaaguggaacgaaa

SEQ ID NO: 1374139 - RNA, 16 nt, Human
guggauauuuguauaa

SEQ ID NO: 1374140 - RNA, 14 nt, Human
guggauauuguuac

SEQ ID NO: 1374141 - RNA, 17 nt, Human
guggagucugccaccca

SEQ ID NO: 1374142 - RNA, 16 nt, Human
guggagucugccaccc

SEQ ID NO: 1374143 - RNA, 18 nt, Human
guggagagggaaugugaa

SEQ ID NO: 1374144 - RNA, 15 nt, Human
guggagagggaaugu

SEQ ID NO: 1374145 - RNA, 14 nt, Human
guggagagggaaug

SEQ ID NO: 1374146 - RNA, 12 nt, Human
guggagagggaa

SEQ ID NO: 1374147 - RNA, 15 nt, Human
guggaacugcugcca

SEQ ID NO: 1374148 - RNA, 14 nt, Human
guggaacugcugcc

SEQ ID NO: 1374149 - RNA, 16 nt, Human
guggaacgaaaaugaa

SEQ ID NO: 1374150 - RNA, 23 nt, Human
guggaacuacauuaguacacagc

SEQ ID NO: 1374151 - RNA, 20 nt, Human
guggaaauuaagacuuuaug

SEQ ID NO: 1374152 - RNA, 19 nt, Human
guggaacauaaaaaggaca

SEQ ID NO: 1374153 - RNA, 20 nt, Human
guggaacauaaaaaggacau

SEQ ID NO: 1374154 - RNA, 21 nt, Human
guggaacauaaaaaggacauc

SEQ ID NO: 1374155 - RNA, 20 nt, Human
guggcaggggacaggagucc

SEQ ID NO: 1374156 - RNA, 18 nt, Human
guggcaggggacaggagu

SEQ ID NO: 1374157 - RNA, 16 nt, Human
guggcaggggacagga

SEQ ID NO: 1374158 - RNA, 23 nt, Human
guggcaggcagaggcccaggcug

SEQ ID NO: 1374159 - RNA, 24 nt, Human
guggcaggcagaggcccaggcugc

SEQ ID NO: 1374160 - RNA, 22 nt, Human
guggcaggcagaggcccaggcu

SEQ ID NO: 1374161 - RNA, 15 nt, Human
guggcaggcagaggc

SEQ ID NO: 1374162 - RNA, 13 nt, Human
guggcaggcagag

SEQ ID NO: 1374163 - RNA, 12 nt, Human
guggcaggcaga

SEQ ID NO: 1374164 - RNA, 11 nt, Human
guggcagucug

SEQ ID NO: 1374165 - RNA, 23 nt, Human
guggccaggccgggaaaaagccc

SEQ ID NO: 1374166 - RNA, 10 nt, Human
guggccaggc

SEQ ID NO: 1374167 - RNA, 13 nt, Human
guggccaggaggu

SEQ ID NO: 1374168 - RNA, 12 nt, Human
guggccaggagg

SEQ ID NO: 1374169 - RNA, 21 nt, Human
guggccagcgagggcgugucu

SEQ ID NO: 1374170 - RNA, 13 nt, Human
guggccaccagua

SEQ ID NO: 1374171 - RNA, 15 nt, Human
guggccccacccugg

SEQ ID NO: 1374172 - RNA, 19 nt, Human
guggccaugcuccucuucc

SEQ ID NO: 1374173 - RNA, 18 nt, Human
guggccaugcuccucuuc

SEQ ID NO: 1374174 - RNA, 13 nt, Human
guggccaugcucc

SEQ ID NO: 1374175 - RNA, 21 nt, Human
guggccaugacccugccucuc

SEQ ID NO: 1374176 - RNA, 20 nt, Human
guggccaugacccugccucu

SEQ ID NO: 1374177 - RNA, 18 nt, Human
guggccaugacccugccu

SEQ ID NO: 1374178 - RNA, 19 nt, Human
guggccccacccugggccc

SEQ ID NO: 1374179 - RNA, 18 nt, Human
guggccccacccugggcc

SEQ ID NO: 1374180 - RNA, 20 nt, Human
guggccccacccugggcccu

SEQ ID NO: 1374181 - RNA, 18 nt, Human
guggcucgggaggcgaag

SEQ ID NO: 1374182 - RNA, 14 nt, Human
guggcauccagagu

SEQ ID NO: 1374183 - RNA, 23 nt, Human
guggccaagaagcaguggccuua

SEQ ID NO: 1374184 - RNA, 22 nt, Human
guggccaagaagcaguggccuu

SEQ ID NO: 1374185 - RNA, 17 nt, Human
guggccaagaagcagug

SEQ ID NO: 1374186 - RNA, 15 nt, Human
guggccaagaagcag

SEQ ID NO: 1374187 - RNA, 19 nt, Human
guggcaucaucucagcuca

SEQ ID NO: 1374188 - RNA, 15 nt, Human
ucacccugccuuauc

SEQ ID NO: 1374189 - RNA, 13 nt, Human
ucacccugccuua

SEQ ID NO: 1374190 - RNA, 23 nt, Human
ucacccugauuuaggagaagcca

SEQ ID NO: 1374191 - RNA, 17 nt, Human
ucacccuaccugugccu

SEQ ID NO: 1374192 - RNA, 15 nt, Human
ucacccuaccugugc

SEQ ID NO: 1374193 - RNA, 18 nt, Human
ucacccuggaggcaccug

SEQ ID NO: 1374194 - RNA, 17 nt, Human
ucacccuggaggcaccu

SEQ ID NO: 1374195 - RNA, 13 nt, Human
ucacccuguccaa

SEQ ID NO: 1374196 - RNA, 21 nt, Human
ucacccuguccaaacugccua

SEQ ID NO: 1374197 - RNA, 22 nt, Human
ucacccuuugcugugaggcugu

SEQ ID NO: 1374198 - RNA, 15 nt, Human
ucacccuuugcugug

SEQ ID NO: 1374199 - RNA, 13 nt, Human
ucacccuuugcug

SEQ ID NO: 1374200 - RNA, 16 nt, Human
ucaccgagugggggca

SEQ ID NO: 1374201 - RNA, 22 nt, Human
ucaccgacugaaaauauuguuu

SEQ ID NO: 1374202 - RNA, 16 nt, Human
ucaccacugcccccug

SEQ ID NO: 1374203 - RNA, 18 nt, Human
ucaccacgacuggccagg

SEQ ID NO: 1374204 - RNA, 20 nt, Human
ucaccacgacuggccagggc

SEQ ID NO: 1374205 - RNA, 15 nt, Human
ucaccccuguuucug

SEQ ID NO: 1374206 - RNA, 14 nt, Human
ucaccagagacuuu

SEQ ID NO: 1374207 - RNA, 15 nt, Human
ucaccagagacuuua

SEQ ID NO: 1374208 - RNA, 19 nt, Human
ucaccagagacuuuagggg

SEQ ID NO: 1374209 - RNA, 17 nt, Human
ucacauuggaaacaagu

SEQ ID NO: 1374210 - RNA, 22 nt, Human
ucacauuguauucagaguugau

SEQ ID NO: 1374211 - RNA, 12 nt, Human
ucacauuuaaau

SEQ ID NO: 1374212 - RNA, 22 nt, Human
ucacaccaggcuugccugcagg

SEQ ID NO: 1374213 - RNA, 21 nt, Human
ucacaccaggcuugccugcag

SEQ ID NO: 1374214 - RNA, 20 nt, Human
ucacaccacuagccucaggg

SEQ ID NO: 1374215 - RNA, 12 nt, Human
ucacacaggcau

SEQ ID NO: 1374216 - RNA, 23 nt, Human
ucacaccaggcuugccugcaggc

SEQ ID NO: 1374217 - RNA, 15 nt, Human
ucacaccacuagccu

SEQ ID NO: 1374218 - RNA, 12 nt, Human
ucacacacugau

SEQ ID NO: 1374219 - RNA, 23 nt, Human
ucacagguagacaguauauaacu

SEQ ID NO: 1374220 - RNA, 12 nt, Human
ucacaggcagcc

SEQ ID NO: 1374221 - RNA, 14 nt, Human
ucacaguauugcuc

SEQ ID NO: 1374222 - RNA, 15 nt, Human
ucacaggucccaaau

SEQ ID NO: 1374223 - RNA, 15 nt, Human
ucacaguauugcuca

SEQ ID NO: 1374224 - RNA, 14 nt, Human
ucacauuggaaaca

SEQ ID NO: 1374225 - RNA, 12 nt, Human
ucacacaccugu

SEQ ID NO: 1374226 - RNA, 20 nt, Human
ucacaaguggguacccccag

SEQ ID NO: 1374227 - RNA, 22 nt, Human
ucacaaguggguacccccagga

SEQ ID NO: 1374228 - RNA, 22 nt, Human
ucacaaggcagcaaggcccgag

SEQ ID NO: 1374229 - RNA, 23 nt, Human
ucacaaggcagcaaggcccgagc

SEQ ID NO: 1374230 - RNA, 18 nt, Human
ucacaaggcagcaaggcc

SEQ ID NO: 1374231 - RNA, 16 nt, Human
ucacaaggcagcaagg

SEQ ID NO: 1374232 - RNA, 12 nt, Human
ucacaaggcagc

SEQ ID NO: 1374233 - RNA, 23 nt, Human
ucacaagauggaauuuaucaaac

SEQ ID NO: 1374234 - RNA, 14 nt, Human
ucaauuccaccugc

SEQ ID NO: 1374235 - RNA, 20 nt, Human
ucaauuccaacaguuuaaug

SEQ ID NO: 1374236 - RNA, 19 nt, Human
ucaauuccaacaguuuaau

SEQ ID NO: 1374237 - RNA, 18 nt, Human
ucaauuccaacaguuuaa

SEQ ID NO: 1374238 - RNA, 15 nt, Human
ucaauuccaacaguu

SEQ ID NO: 1374239 - RNA, 22 nt, Human
ucaauucaaagcuguguguuug

SEQ ID NO: 1374240 - RNA, 17 nt, Human
ucaauucaaagcugugu

SEQ ID NO: 1374241 - RNA, 15 nt, Human
ucaauucaaagcugu

SEQ ID NO: 1374242 - RNA, 18 nt, Human
ucaauuauaguuucugag

SEQ ID NO: 1374243 - RNA, 21 nt, Human
ucaauuccaacaguuuaauga

SEQ ID NO: 1374244 - RNA, 18 nt, Human
ucaauguuucuucuaggu

SEQ ID NO: 1374245 - RNA, 14 nt, Human
ucaauaaaauccau

SEQ ID NO: 1374246 - RNA, 19 nt, Human
ucaauuauaguuucugagg

SEQ ID NO: 1374247 - RNA, 17 nt, Human
ucaauuauaguuucuga

SEQ ID NO: 1374248 - RNA, 16 nt, Human
ucaauuauaguuucug

SEQ ID NO: 1374249 - RNA, 15 nt, Human
ucaauuauaguuucu

SEQ ID NO: 1374250 - RNA, 14 nt, Human
ucaauuauaguuuc

SEQ ID NO: 1374251 - RNA, 23 nt, Human
ucaauuaaaauagucucuuuaaa

SEQ ID NO: 1374252 - RNA, 23 nt, Human
ucaaccccuccccuccaucccug

SEQ ID NO: 1374253 - RNA, 21 nt, Human
ucaaccccuccccuccauccc

SEQ ID NO: 1374254 - RNA, 19 nt, Human
ucaaccccuccccuccauc

SEQ ID NO: 1374255 - RNA, 22 nt, Human
ucaaauguucuaaguuucuaag

SEQ ID NO: 1374256 - RNA, 21 nt, Human
ucaaauguucuaaguuucuaa

SEQ ID NO: 1374257 - RNA, 20 nt, Human
ucaaauguucuaaguuucua

SEQ ID NO: 1374258 - RNA, 19 nt, Human
ucaaauguucuaaguuucu

SEQ ID NO: 1374259 - RNA, 15 nt, Human
ucaaauguucuaagu

SEQ ID NO: 1374260 - RNA, 14 nt, Human
ucaaauguucuaag

SEQ ID NO: 1374261 - RNA, 13 nt, Human
ucaaauguucuaa

SEQ ID NO: 1374262 - RNA, 23 nt, Human
ucaaauguucuaaguuucuaaga

SEQ ID NO: 1374263 - RNA, 16 nt, Human
ucaaccccuccccucc

SEQ ID NO: 1374264 - RNA, 16 nt, Human
ucaacucuuuguuauu

SEQ ID NO: 1374265 - RNA, 22 nt, Human
ucaacucuuuguuauuugaaaa

SEQ ID NO: 1374266 - RNA, 14 nt, Human
ucaacucuuuguua

SEQ ID NO: 1374267 - RNA, 24 nt, Human
ucaacucucuuauugccucacuuc

SEQ ID NO: 1374268 - RNA, 23 nt, Human
ucaacucucuuauugccucacuu

SEQ ID NO: 1374269 - RNA, 21 nt, Human
ucaacucucuuauugccucac

SEQ ID NO: 1374270 - RNA, 20 nt, Human
ucaacucucuuauugccuca

SEQ ID NO: 1374271 - RNA, 17 nt, Human
ucaaccugggcaaagcc

SEQ ID NO: 1374272 - RNA, 13 nt, Human
ucaaccugccuga

SEQ ID NO: 1374273 - RNA, 22 nt, Human
ucaacuccaaacugacucuuaa

SEQ ID NO: 1374274 - RNA, 20 nt, Human
ucaaggaaguagaaacaaaa

SEQ ID NO: 1374275 - RNA, 21 nt, Human
ucaaggacacgggccugucca

SEQ ID NO: 1374276 - RNA, 23 nt, Human
ucaaggaauuucuuaacuucuug

SEQ ID NO: 1374277 - RNA, 21 nt, Human
ucaaggaauuucuuaacuucu

SEQ ID NO: 1374278 - RNA, 19 nt, Human
ucaaggaauuucuuaacuu

SEQ ID NO: 1374279 - RNA, 16 nt, Human
ucaaggaauuucuuaa

SEQ ID NO: 1374280 - RNA, 12 nt, Human
ucaaacuuggau

SEQ ID NO: 1374281 - RNA, 19 nt, Human
ucaaacuggggccucccug

SEQ ID NO: 1374282 - RNA, 21 nt, Human
ucaaagaggcugaggcuggca

SEQ ID NO: 1374283 - RNA, 22 nt, Human
ucaaacuuggauacuuggauuu

SEQ ID NO: 1374284 - RNA, 16 nt, Human
ucaaaugguaucuuuu

SEQ ID NO: 1374285 - RNA, 21 nt, Human
ucaaaugguaggcauuuccua

SEQ ID NO: 1374286 - RNA, 20 nt, Human
ucaaaugguaggcauuuccu

SEQ ID NO: 1374287 - RNA, 20 nt, Human
ucaaauggggccagauccag

SEQ ID NO: 1374288 - RNA, 23 nt, Human
ucaaaugaauggaggaacuuucc

SEQ ID NO: 1374289 - RNA, 15 nt, Human
ucaaaucuaccacug

SEQ ID NO: 1374290 - RNA, 20 nt, Human
ucaaaucuaccacuguauga

SEQ ID NO: 1374291 - RNA, 16 nt, Human
ucaaauccuugaagau

SEQ ID NO: 1374292 - RNA, 21 nt, Human
uauuugacaacguuucagcga

SEQ ID NO: 1374293 - RNA, 21 nt, Human
uauuugaaugauuuuucuuua

SEQ ID NO: 1374294 - RNA, 22 nt, Human
uauuugcauaacaauuccucua

SEQ ID NO: 1374295 - RNA, 21 nt, Human
uauuugcauaacaauuccucu

SEQ ID NO: 1374296 - RNA, 17 nt, Human
ucaaacauauauaacaa

SEQ ID NO: 1374297 - RNA, 19 nt, Human
ucaaacugaggaauuucac

SEQ ID NO: 1374298 - RNA, 21 nt, Human
ucaaacccuagccuugcuugu

SEQ ID NO: 1374299 - RNA, 20 nt, Human
ucaaacccuagccuugcuug

SEQ ID NO: 1374300 - RNA, 19 nt, Human
ucaaacccuagccuugcuu

SEQ ID NO: 1374301 - RNA, 18 nt, Human
ucaaacccuagccuugcu

SEQ ID NO: 1374302 - RNA, 17 nt, Human
ucaaacccuagccuugc

SEQ ID NO: 1374303 - RNA, 16 nt, Human
ucaaacccuagccuug

SEQ ID NO: 1374304 - RNA, 15 nt, Human
ucaaacccuagccuu

SEQ ID NO: 1374305 - RNA, 12 nt, Human
ucaaacauuuug

SEQ ID NO: 1374306 - RNA, 15 nt, Human
ucaaacauuuucugg

SEQ ID NO: 1374307 - RNA, 13 nt, Human
ucaaacauuuucu

SEQ ID NO: 1374308 - RNA, 18 nt, Human
ucaaacauuuugaaaguc

SEQ ID NO: 1374309 - RNA, 17 nt, Human
ucaaacauuuugaaagu

SEQ ID NO: 1374310 - RNA, 15 nt, Human
ucaaacauuuugaaa

SEQ ID NO: 1374311 - RNA, 20 nt, Human
ucaaaccaaaucacugaacu

SEQ ID NO: 1374312 - RNA, 15 nt, Human
uauuaacgaugucca

SEQ ID NO: 1374313 - RNA, 17 nt, Human
uauuaacuuuaauguuu

SEQ ID NO: 1374314 - RNA, 13 nt, Human
uauuaacauaccu

SEQ ID NO: 1374315 - RNA, 22 nt, Human
uauguuguaauauuucuucaaa

SEQ ID NO: 1374316 - RNA, 18 nt, Human
uauguugaauacuuuuua

SEQ ID NO: 1374317 - RNA, 18 nt, Human
uauguugguagauucuaa

SEQ ID NO: 1374318 - RNA, 15 nt, Human
uauguugaauacuuu

SEQ ID NO: 1374319 - RNA, 12 nt, Human
uauguugaauac

SEQ ID NO: 1374320 - RNA, 18 nt, Human
uauguucuaaccuuuaca

SEQ ID NO: 1374321 - RNA, 20 nt, Human
uauguuccauuaaacgauuu

SEQ ID NO: 1374322 - RNA, 16 nt, Human
uauguuccauuaaacg

SEQ ID NO: 1374323 - RNA, 15 nt, Human
uauguuccauuaaac

SEQ ID NO: 1374324 - RNA, 14 nt, Human
uauguuccauuaaa

SEQ ID NO: 1374325 - RNA, 21 nt, Human
uauguucaacuaggaucagaa

SEQ ID NO: 1374326 - RNA, 16 nt, Human
uauguucaaagucaaa

SEQ ID NO: 1374327 - RNA, 20 nt, Human
uauguuauauauaaauauau

SEQ ID NO: 1374328 - RNA, 16 nt, Human
uauguucagauuauug

SEQ ID NO: 1374329 - RNA, 18 nt, Human
uauguuacuacaugcacu

SEQ ID NO: 1374330 - RNA, 19 nt, Human
uauguuaagggaagaauuc

SEQ ID NO: 1374331 - RNA, 21 nt, Human
uauguuauauauaaauauauu

SEQ ID NO: 1374332 - RNA, 19 nt, Human
uauguuauauauaaauaua

SEQ ID NO: 1374333 - RNA, 15 nt, Human
uauguuauauauaaa

SEQ ID NO: 1374334 - RNA, 19 nt, Human
uauguuagugcaaauuguc

SEQ ID NO: 1374335 - RNA, 12 nt, Human
uauguuaaaacu

SEQ ID NO: 1374336 - RNA, 20 nt, Human
uauguuaaacuagcauaucu

SEQ ID NO: 1374337 - RNA, 21 nt, Human
uauguuaaacuagcauaucug

SEQ ID NO: 1374338 - RNA, 21 nt, Human
uauggacuaucugucuggugg

SEQ ID NO: 1374339 - RNA, 18 nt, Human
uauggacuaucugucugg

SEQ ID NO: 1374340 - RNA, 17 nt, Human
uauggacuaucugucug

SEQ ID NO: 1374341 - RNA, 13 nt, Human
uauggacuaucug

SEQ ID NO: 1374342 - RNA, 16 nt, Human
uauggagagcccuggg

SEQ ID NO: 1374343 - RNA, 15 nt, Human
uauggagagcccugg

SEQ ID NO: 1374344 - RNA, 14 nt, Human
uauggagagcccug

SEQ ID NO: 1374345 - RNA, 14 nt, Human
uauggaggcaggag

SEQ ID NO: 1374346 - RNA, 22 nt, Human
uauggagucauuuuuacaaugu

SEQ ID NO: 1374347 - RNA, 16 nt, Human
uauggagucauuuuua

SEQ ID NO: 1374348 - RNA, 13 nt, Human
uauguguguuuua

SEQ ID NO: 1374349 - RNA, 13 nt, Human
uauuauauggaaa

SEQ ID NO: 1374350 - RNA, 12 nt, Human
uauuauauggaa

SEQ ID NO: 1374351 - RNA, 17 nt, Human
uauuauacuuguaauua

SEQ ID NO: 1374352 - RNA, 18 nt, Human
uauuauacuuguaauuau

SEQ ID NO: 1374353 - RNA, 14 nt, Human
uauuauaccuuuuu

SEQ ID NO: 1374354 - RNA, 17 nt, Human
uauuauauguacccucu

SEQ ID NO: 1374355 - RNA, 21 nt, Human
uauuauauguacccucugaaa

SEQ ID NO: 1374356 - RNA, 17 nt, Human
uauuauauuuacaaaug

SEQ ID NO: 1374357 - RNA, 19 nt, Human
uauuauaaucuuauaauug

SEQ ID NO: 1374358 - RNA, 14 nt, Human
uauuauaaucuuau

SEQ ID NO: 1374359 - RNA, 12 nt, Human
uauuauaccuuu

SEQ ID NO: 1374360 - RNA, 13 nt, Human
uauuauaccuuuu

SEQ ID NO: 1374361 - RNA, 16 nt, Human
uauuaagguguggcuu

SEQ ID NO: 1374362 - RNA, 18 nt, Human
uauuaacuuuaauguuuu

SEQ ID NO: 1374363 - RNA, 15 nt, Human
uauuaagcaucagaa

SEQ ID NO: 1374364 - RNA, 14 nt, Human
uauuauuuguguuu

SEQ ID NO: 1374365 - RNA, 13 nt, Human
uauuauuuauaua

SEQ ID NO: 1374366 - RNA, 21 nt, Human
uauuaugucucuucugagcua

SEQ ID NO: 1374367 - RNA, 16 nt, Human
uauuauguuaaaacug

SEQ ID NO: 1374368 - RNA, 17 nt, Human
uauuaugucucuucuga

SEQ ID NO: 1374369 - RNA, 20 nt, Human
uauuauggaggcaggaguuu

SEQ ID NO: 1374370 - RNA, 19 nt, Human
uauuaugcauuauaucaaa

SEQ ID NO: 1374371 - RNA, 17 nt, Human
uauuaugagaugcuggc

SEQ ID NO: 1374372 - RNA, 15 nt, Human
uauuaugagaugcug

SEQ ID NO: 1374373 - RNA, 14 nt, Human
uauuaugagaugcu

SEQ ID NO: 1374374 - RNA, 22 nt, Human
uauuaugaaugugaagccuucc

SEQ ID NO: 1374375 - RNA, 21 nt, Human
uauuaugaaugugaagccuuc

SEQ ID NO: 1374376 - RNA, 20 nt, Human
uauuaugaaugugaagccuu

SEQ ID NO: 1374377 - RNA, 14 nt, Human
uauuaugaauguga

SEQ ID NO: 1374378 - RNA, 13 nt, Human
uauuaugaaugug

SEQ ID NO: 1374379 - RNA, 19 nt, Human
uauuaucuuuucauacauu

SEQ ID NO: 1374380 - RNA, 14 nt, Human
uauuaucuuuucau

SEQ ID NO: 1374381 - RNA, 15 nt, Human
uauuaucaacaauag

SEQ ID NO: 1374382 - RNA, 13 nt, Human
uauuaucugucag

SEQ ID NO: 1374383 - RNA, 14 nt, Human
uauuaucugggcuu

SEQ ID NO: 1374384 - RNA, 15 nt, Human
uauuaucccagcugc

SEQ ID NO: 1374385 - RNA, 16 nt, Human
uauuauccccauuucu

SEQ ID NO: 1374386 - RNA, 12 nt, Human
uauuaucuuuuc

SEQ ID NO: 1374387 - RNA, 14 nt, Human
uauuaucugucagc

SEQ ID NO: 1374388 - RNA, 16 nt, Human
uauucauuuucucuaa

SEQ ID NO: 1374389 - RNA, 14 nt, Human
uauucauuuucucu

SEQ ID NO: 1374390 - RNA, 18 nt, Human
uauucauuguggucauag

SEQ ID NO: 1374391 - RNA, 23 nt, Human
uauucauccaaguuaaauguaga

SEQ ID NO: 1374392 - RNA, 23 nt, Human
uauugauaagaucuuuuauuuug

SEQ ID NO: 1374393 - RNA, 19 nt, Human
uauugauaagaucuuuuau

SEQ ID NO: 1374394 - RNA, 18 nt, Human
uauugauaagaucuuuua

SEQ ID NO: 1374395 - RNA, 17 nt, Human
uauugauaagaucuuuu

SEQ ID NO: 1374396 - RNA, 15 nt, Human
uauucauuuucucua

SEQ ID NO: 1374397 - RNA, 17 nt, Human
uauuccaagacaugucu

SEQ ID NO: 1374398 - RNA, 15 nt, Human
uauugcaguuuauca

SEQ ID NO: 1374399 - RNA, 13 nt, Human
uauugcaguuuau

SEQ ID NO: 1374400 - RNA, 11 nt, Human
uauugcaguuu

SEQ ID NO: 1374401 - RNA, 17 nt, Human
uauugcacauuguaaaa

SEQ ID NO: 1374402 - RNA, 13 nt, Human
uauugcacauugu

SEQ ID NO: 1374403 - RNA, 23 nt, Human
uauugcacaugucuuaaugaagu

SEQ ID NO: 1374404 - RNA, 22 nt, Human
uauugcagcgauuaauaacagg

SEQ ID NO: 1374405 - RNA, 12 nt, Human
uauugcacaugu

SEQ ID NO: 1374406 - RNA, 14 nt, Human
uauugcacaugucu

SEQ ID NO: 1374407 - RNA, 16 nt, Human
uauugcacaugucuua

SEQ ID NO: 1374408 - RNA, 17 nt, Human
uauugcacaugucuuaa

SEQ ID NO: 1374409 - RNA, 20 nt, Human
uauugcacaugucuuaauga

SEQ ID NO: 1374410 - RNA, 22 nt, Human
uauugcacaugucuuaaugaag

SEQ ID NO: 1374411 - RNA, 19 nt, Human
uauugcaguuuaucauuca

SEQ ID NO: 1374412 - RNA, 20 nt, Human
uauugcaguuuaucauucaa

SEQ ID NO: 1374413 - RNA, 15 nt, Human
uauugcauuaauuuu

SEQ ID NO: 1374414 - RNA, 13 nt, Human
uauugcauuuaua

SEQ ID NO: 1374415 - RNA, 17 nt, Human
uauugcauuuauaugua

SEQ ID NO: 1374416 - RNA, 18 nt, Human
uauugugcaauguguaua

SEQ ID NO: 1374417 - RNA, 16 nt, Human
uauugugcaaugugua

SEQ ID NO: 1374418 - RNA, 14 nt, Human
uauugugcaaugug

SEQ ID NO: 1374419 - RNA, 19 nt, Human
uauugugcaauguaaauau

SEQ ID NO: 1374420 - RNA, 21 nt, Human
uauugcuugcacaaaccaauu

SEQ ID NO: 1374421 - RNA, 15 nt, Human
uauugcuugcacaaa

SEQ ID NO: 1374422 - RNA, 17 nt, Human
uauuguugcauugcuuu

SEQ ID NO: 1374423 - RNA, 17 nt, Human
uauuguugaaaaaguuu

SEQ ID NO: 1374424 - RNA, 14 nt, Human
uauuguugaaaaag

SEQ ID NO: 1374425 - RNA, 15 nt, Human
uauuguucucacacu

SEQ ID NO: 1374426 - RNA, 23 nt, Human
uauugugcaauguguauaaacaa

SEQ ID NO: 1374427 - RNA, 14 nt, Human
uauuuaacagaaau

SEQ ID NO: 1374428 - RNA, 13 nt, Human
uauuuaacagaaa

SEQ ID NO: 1374429 - RNA, 12 nt, Human
uauuuaacagaa

SEQ ID NO: 1374430 - RNA, 15 nt, Human
uauuuaacaagaucu

SEQ ID NO: 1374431 - RNA, 18 nt, Human
uauuuaaauguaaagaca

SEQ ID NO: 1374432 - RNA, 18 nt, Human
uauuguuucaauugcauc

SEQ ID NO: 1374433 - RNA, 12 nt, Human
uauuguuucaau

SEQ ID NO: 1374434 - RNA, 22 nt, Human
uauuguuguccuuuucauaggu

SEQ ID NO: 1374435 - RNA, 18 nt, Human
uauuguuguccuuuucau

SEQ ID NO: 1374436 - RNA, 16 nt, Human
uauuguuguccuuuuc

SEQ ID NO: 1374437 - RNA, 14 nt, Human
uauuguuguccuuu

SEQ ID NO: 1374438 - RNA, 13 nt, Human
uauuguuguccuu

SEQ ID NO: 1374439 - RNA, 17 nt, Human
uauuuauauguacauga

SEQ ID NO: 1374440 - RNA, 15 nt, Human
uauuuauauguacau

SEQ ID NO: 1374441 - RNA, 12 nt, Human
uauuuaucuuua

SEQ ID NO: 1374442 - RNA, 20 nt, Human
uauuuaugccucuguauuua

SEQ ID NO: 1374443 - RNA, 20 nt, Human
uauuuauguauugugcaaug

SEQ ID NO: 1374444 - RNA, 13 nt, Human
uauuuauguauug

SEQ ID NO: 1374445 - RNA, 12 nt, Human
uauuuauguauu

SEQ ID NO: 1374446 - RNA, 13 nt, Human
uauuuauguaugg

SEQ ID NO: 1374447 - RNA, 14 nt, Human
uauuuauuacugua

SEQ ID NO: 1374448 - RNA, 13 nt, Human
uauuucuaugaaa

SEQ ID NO: 1374449 - RNA, 16 nt, Human
uauuuauucaauaaag

SEQ ID NO: 1374450 - RNA, 18 nt, Human
uauuuauucaauaaagua

SEQ ID NO: 1374451 - RNA, 19 nt, Human
uauuuauucaauaaaguau

SEQ ID NO: 1374452 - RNA, 20 nt, Human
uauuuauucaauaaaguauu

SEQ ID NO: 1374453 - RNA, 12 nt, Human
uauuuauucaau

SEQ ID NO: 1374454 - RNA, 13 nt, Human
uauuuauucaaua

SEQ ID NO: 1374455 - RNA, 14 nt, Human
uauuuauucaauaa

SEQ ID NO: 1374456 - RNA, 20 nt, Human
uauuugaaaacauguuuauu

SEQ ID NO: 1374457 - RNA, 14 nt, Human
uauuugaacuuuuu

SEQ ID NO: 1374458 - RNA, 16 nt, Human
uauuugaaccaauaaa

SEQ ID NO: 1374459 - RNA, 19 nt, Human
uauuugaaucuugucucaa

SEQ ID NO: 1374460 - RNA, 20 nt, Human
uauuugaaucuugucucaau

SEQ ID NO: 1374461 - RNA, 12 nt, Human
uauuugaaucuu

SEQ ID NO: 1374462 - RNA, 14 nt, Human
uauuugaaucuugu

SEQ ID NO: 1374463 - RNA, 16 nt, Human
uauuugaaucuugucu

SEQ ID NO: 1374464 - RNA, 18 nt, Human
uauuugaaucuugucuca

SEQ ID NO: 1374465 - RNA, 22 nt, Human
uauuucuuccuaccaagucaaa

SEQ ID NO: 1374466 - RNA, 15 nt, Human
uauuucuaugaaaua

SEQ ID NO: 1374467 - RNA, 14 nt, Human
uauuucuaugaaau

SEQ ID NO: 1374468 - RNA, 14 nt, Human
uauaugcuuacuga

SEQ ID NO: 1374469 - RNA, 17 nt, Human
uauaugcuuacugauau

SEQ ID NO: 1374470 - RNA, 16 nt, Human
uauaugcuuacugaua

SEQ ID NO: 1374471 - RNA, 21 nt, Human
uauaugcuuacugauauauuu

SEQ ID NO: 1374472 - RNA, 13 nt, Human
uauaugcuucugu

SEQ ID NO: 1374473 - RNA, 14 nt, Human
uauauguguaugca

SEQ ID NO: 1374474 - RNA, 19 nt, Human
uauauaaauauauuauuac

SEQ ID NO: 1374475 - RNA, 17 nt, Human
uauaguuuuacuuuuaa

SEQ ID NO: 1374476 - RNA, 16 nt, Human
uauaguuuuacuuuua

SEQ ID NO: 1374477 - RNA, 22 nt, Human
uauauaaauauauuauuacuug

SEQ ID NO: 1374478 - RNA, 13 nt, Human
uauauaacaaugc

SEQ ID NO: 1374479 - RNA, 15 nt, Human
uauaguuuuacuuuu

SEQ ID NO: 1374480 - RNA, 22 nt, Human
uauaguuucugaggcuuuauga

SEQ ID NO: 1374481 - RNA, 14 nt, Human
uauaguuucugagg

SEQ ID NO: 1374482 - RNA, 13 nt, Human
uauaguucuaggc

SEQ ID NO: 1374483 - RNA, 12 nt, Human
uauaguucuagg

SEQ ID NO: 1374484 - RNA, 15 nt, Human
uauaguucuagacau

SEQ ID NO: 1374485 - RNA, 13 nt, Human
uauaguucuagac

SEQ ID NO: 1374486 - RNA, 12 nt, Human
uauaguucuaga

SEQ ID NO: 1374487 - RNA, 21 nt, Human
uauaguucaugucugcuauca

SEQ ID NO: 1374488 - RNA, 22 nt, Human
uauaguuauuaaguucuuuaaa

SEQ ID NO: 1374489 - RNA, 17 nt, Human
uauaguuaacacacuac

SEQ ID NO: 1374490 - RNA, 22 nt, Human
uauaguuacuguguaauuagug

SEQ ID NO: 1374491 - RNA, 20 nt, Human
uauaguuacuguguaauuag

SEQ ID NO: 1374492 - RNA, 18 nt, Human
uauaguuacuguguaauu

SEQ ID NO: 1374493 - RNA, 16 nt, Human
uauaguuacuguguaa

SEQ ID NO: 1374494 - RNA, 15 nt, Human
uauaguuacugugua

SEQ ID NO: 1374495 - RNA, 13 nt, Human
uauaguuacugug

SEQ ID NO: 1374496 - RNA, 18 nt, Human
uauaguuaacacacuacc

SEQ ID NO: 1374497 - RNA, 16 nt, Human
uauaguuaacacacua

SEQ ID NO: 1374498 - RNA, 15 nt, Human
uauaguuaacacacu

SEQ ID NO: 1374499 - RNA, 13 nt, Human
uauaguuaacaca

SEQ ID NO: 1374500 - RNA, 16 nt, Human
uauacugcauacuuuu

SEQ ID NO: 1374501 - RNA, 12 nt, Human
uauacugcauac

SEQ ID NO: 1374502 - RNA, 23 nt, Human
uauacugcuuggagcugagcaaa

SEQ ID NO: 1374503 - RNA, 17 nt, Human
uauacugcauacuuuuu

SEQ ID NO: 1374504 - RNA, 17 nt, Human
uauacgaaauaauuguu

SEQ ID NO: 1374505 - RNA, 16 nt, Human
uauacgaaauaauugu

SEQ ID NO: 1374506 - RNA, 22 nt, Human
uauaccuguguuucuugccuca

SEQ ID NO: 1374507 - RNA, 20 nt, Human
uauacgcagcgugcuuuaaa

SEQ ID NO: 1374508 - RNA, 20 nt, Human
uauacuagggagccauuuga

SEQ ID NO: 1374509 - RNA, 22 nt, Human
uauacuagggagccauuugaga

SEQ ID NO: 1374510 - RNA, 18 nt, Human
uauaaaugcaaauaacaa

SEQ ID NO: 1374511 - RNA, 17 nt, Human
uauaaaugcaaauaaca

SEQ ID NO: 1374512 - RNA, 16 nt, Human
uauaaaugcaaauaac

SEQ ID NO: 1374513 - RNA, 15 nt, Human
uauaaaugcaaauaa

SEQ ID NO: 1374514 - RNA, 12 nt, Human
uauaaagcagua

SEQ ID NO: 1374515 - RNA, 12 nt, Human
uauaaagcauuu

SEQ ID NO: 1374516 - RNA, 17 nt, Human
uauaaagacguuuuaua

SEQ ID NO: 1374517 - RNA, 14 nt, Human
uauaaagaauugug

SEQ ID NO: 1374518 - RNA, 21 nt, Human
uauaaagacguuuuauaagca

SEQ ID NO: 1374519 - RNA, 17 nt, Human
uaguugccuuaaaauaa

SEQ ID NO: 1374520 - RNA, 20 nt, Human
uauaauauacuauauuuaug

SEQ ID NO: 1374521 - RNA, 17 nt, Human
uauaauauacuauauuu

SEQ ID NO: 1374522 - RNA, 16 nt, Human
uauaauaaauguacau

SEQ ID NO: 1374523 - RNA, 19 nt, Human
uauaaaugucuuuaaugca

SEQ ID NO: 1374524 - RNA, 23 nt, Human
uauaaaugucuuuaaugcaauau

SEQ ID NO: 1374525 - RNA, 17 nt, Human
uauaaaugucuuuaaug

SEQ ID NO: 1374526 - RNA, 11 nt, Human
uauaaaugucu

SEQ ID NO: 1374527 - RNA, 14 nt, Human
uauaauaaaggacu

SEQ ID NO: 1374528 - RNA, 19 nt, Human
uauaauaaaggacuguaau

SEQ ID NO: 1374529 - RNA, 22 nt, Human
uauaauaaaggacuguaaucuu

SEQ ID NO: 1374530 - RNA, 19 nt, Human
uauaauguuguuauuuaaa

SEQ ID NO: 1374531 - RNA, 17 nt, Human
uauaauguuguuauuua

SEQ ID NO: 1374532 - RNA, 17 nt, Human
uauaaucuuauaauugu

SEQ ID NO: 1374533 - RNA, 16 nt, Human
uauaaucuuauaauug

SEQ ID NO: 1374534 - RNA, 17 nt, Human
uauaaucauuauuacuu

SEQ ID NO: 1374535 - RNA, 23 nt, Human
uauaaucauuauuacuuuugcug

SEQ ID NO: 1374536 - RNA, 22 nt, Human
uauaaucaucaaguaauacaaa

SEQ ID NO: 1374537 - RNA, 17 nt, Human
uauaaucaucaaguaau

SEQ ID NO: 1374538 - RNA, 16 nt, Human
uauaaucaucaaguaa

SEQ ID NO: 1374539 - RNA, 18 nt, Human
uauaauguuguuauuuaa

SEQ ID NO: 1374540 - RNA, 23 nt, Human
uauaccuguguuucuugccucau

SEQ ID NO: 1374541 - RNA, 12 nt, Human
uauaccuguguu

SEQ ID NO: 1374542 - RNA, 21 nt, Human
uauaauuguucucagaauccc

SEQ ID NO: 1374543 - RNA, 22 nt, Human
uauaauuggauuuccuaauacu

SEQ ID NO: 1374544 - RNA, 20 nt, Human
uauaauuggauuuccuaaua

SEQ ID NO: 1374545 - RNA, 19 nt, Human
uauaauuggauuuccuaau

SEQ ID NO: 1374546 - RNA, 18 nt, Human
uauaauuggauuuccuaa

SEQ ID NO: 1374547 - RNA, 17 nt, Human
uauaauuggauuuccua

SEQ ID NO: 1374548 - RNA, 17 nt, Human
uauaauugccaaaaagu

SEQ ID NO: 1374549 - RNA, 16 nt, Human
uauaauucuuucaaua

SEQ ID NO: 1374550 - RNA, 13 nt, Human
uauaauucuuuca

SEQ ID NO: 1374551 - RNA, 19 nt, Human
uauaauuauauguuguaag

SEQ ID NO: 1374552 - RNA, 13 nt, Human
uauaauuauaugu

SEQ ID NO: 1374553 - RNA, 15 nt, Human
uauaauucacauugu

SEQ ID NO: 1374554 - RNA, 17 nt, Human
uauaauuauauguugua

SEQ ID NO: 1374555 - RNA, 20 nt, Human
uauaauucacauuguauuca

SEQ ID NO: 1374556 - RNA, 18 nt, Human
uaguaucaucagauagca

SEQ ID NO: 1374557 - RNA, 22 nt, Human
uaggugcaauuucaagguucua

SEQ ID NO: 1374558 - RNA, 21 nt, Human
uaggugauccauguaacugcc

SEQ ID NO: 1374559 - RNA, 22 nt, Human
uaggugauccauguaacugccu

SEQ ID NO: 1374560 - RNA, 19 nt, Human
uaggugauccauguaacug

SEQ ID NO: 1374561 - RNA, 16 nt, Human
uaggugauccauguaa

SEQ ID NO: 1374562 - RNA, 15 nt, Human
uaggugauccaugua

SEQ ID NO: 1374563 - RNA, 18 nt, Human
uaguauuuuuuguauaau

SEQ ID NO: 1374564 - RNA, 15 nt, Human
uaguaugaggcauuu

SEQ ID NO: 1374565 - RNA, 19 nt, Human
uaguauuucuaugaaauau

SEQ ID NO: 1374566 - RNA, 18 nt, Human
uaguauuucuaugaaaua

SEQ ID NO: 1374567 - RNA, 19 nt, Human
uaguauuuuuuguauaauu

SEQ ID NO: 1374568 - RNA, 15 nt, Human
uagugcaaauuguca

SEQ ID NO: 1374569 - RNA, 14 nt, Human
uagugcaaauuguc

SEQ ID NO: 1374570 - RNA, 14 nt, Human
uagucaaauugugu

SEQ ID NO: 1374571 - RNA, 13 nt, Human
uagucaaauugug

SEQ ID NO: 1374572 - RNA, 22 nt, Human
uagugccacuuaauguauguua

SEQ ID NO: 1374573 - RNA, 13 nt, Human
uagugcuaagugu

SEQ ID NO: 1374574 - RNA, 13 nt, Human
uaguguucauaaa

SEQ ID NO: 1374575 - RNA, 20 nt, Human
uaguugcaacuuuguauaaa

SEQ ID NO: 1374576 - RNA, 23 nt, Human
uaggaauagcaugucacuaaagc

SEQ ID NO: 1374577 - RNA, 15 nt, Human
guggcugcagccuca

SEQ ID NO: 1374578 - RNA, 15 nt, Human
uaggaauagcauguc

SEQ ID NO: 1374579 - RNA, 17 nt, Human
guggcugcagccucagg

SEQ ID NO: 1374580 - RNA, 14 nt, Human
guggcugcagccuc

SEQ ID NO: 1374581 - RNA, 13 nt, Human
guggcugcagccu

SEQ ID NO: 1374582 - RNA, 17 nt, Human
guggcugaggccaccca

SEQ ID NO: 1374583 - RNA, 21 nt, Human
guggcucugaggugccugucc

SEQ ID NO: 1374584 - RNA, 16 nt, Human
uaggaauggaaaggau

SEQ ID NO: 1374585 - RNA, 17 nt, Human
uaggaccaagcaucuug

SEQ ID NO: 1374586 - RNA, 23 nt, Human
uaggaccaugguuaagaguccaa

SEQ ID NO: 1374587 - RNA, 19 nt, Human
uaggaccaugguuaagagu

SEQ ID NO: 1374588 - RNA, 18 nt, Human
uaggaccaagcaucuugg

SEQ ID NO: 1374589 - RNA, 22 nt, Human
uaggaccaagcaucuugggggg

SEQ ID NO: 1374590 - RNA, 13 nt, Human
uaggacccuuccc

SEQ ID NO: 1374591 - RNA, 21 nt, Human
uaggcccccacuugccucuuc

SEQ ID NO: 1374592 - RNA, 19 nt, Human
uaggcccccacuugccucu

SEQ ID NO: 1374593 - RNA, 14 nt, Human
uaggcccccacuug

SEQ ID NO: 1374594 - RNA, 20 nt, Human
uaggcuauuuguaaaucugc

SEQ ID NO: 1374595 - RNA, 18 nt, Human
uaggcuauuuguaaaucu

SEQ ID NO: 1374596 - RNA, 16 nt, Human
uaggcuauuuguaaau

SEQ ID NO: 1374597 - RNA, 20 nt, Human
uaggccuugcggcuccucag

SEQ ID NO: 1374598 - RNA, 16 nt, Human
uaggcuagggugggga

SEQ ID NO: 1374599 - RNA, 14 nt, Human
uagguacacagcuc

SEQ ID NO: 1374600 - RNA, 14 nt, Human
uagguaggguuuaa

SEQ ID NO: 1374601 - RNA, 16 nt, Human
uagguaguaccaaaau

SEQ ID NO: 1374602 - RNA, 14 nt, Human
uagguaggaaaugu

SEQ ID NO: 1374603 - RNA, 16 nt, Human
uaggucagugcaaaua

SEQ ID NO: 1374604 - RNA, 15 nt, Human
uaggucucaauaccu

SEQ ID NO: 1374605 - RNA, 20 nt, Human
uaucuaaguuaauuuaaagu

SEQ ID NO: 1374606 - RNA, 19 nt, Human
uaucuaaguuaauuuaaag

SEQ ID NO: 1374607 - RNA, 23 nt, Human
uaucuaaguuaauuuaaaguugu

SEQ ID NO: 1374608 - RNA, 16 nt, Human
uaucgucacugcuuaa

SEQ ID NO: 1374609 - RNA, 13 nt, Human
uaucuaauuuaua

SEQ ID NO: 1374610 - RNA, 13 nt, Human
uaucuaaucauga

SEQ ID NO: 1374611 - RNA, 22 nt, Human
uaucuaaguuaauuuaaaguug

SEQ ID NO: 1374612 - RNA, 22 nt, Human
uaucuaccccagacuagaugua

SEQ ID NO: 1374613 - RNA, 23 nt, Human
uaucugggaagcuauuuuuuuca

SEQ ID NO: 1374614 - RNA, 15 nt, Human
uaucuggccucugcu

SEQ ID NO: 1374615 - RNA, 13 nt, Human
uaucugccuuuau

SEQ ID NO: 1374616 - RNA, 14 nt, Human
uaucugccuuuauu

SEQ ID NO: 1374617 - RNA, 18 nt, Human
uaucugccuuuauugugu

SEQ ID NO: 1374618 - RNA, 20 nt, Human
uaucugccuuuauuguguuu

SEQ ID NO: 1374619 - RNA, 22 nt, Human
uaucugcaagugagguguguca

SEQ ID NO: 1374620 - RNA, 13 nt, Human
uaucugaucagaa

SEQ ID NO: 1374621 - RNA, 13 nt, Human
uaucugaggucac

SEQ ID NO: 1374622 - RNA, 23 nt, Human
uaucugaguuacagaaaugauua

SEQ ID NO: 1374623 - RNA, 21 nt, Human
uaucugaggcacaugucagca

SEQ ID NO: 1374624 - RNA, 17 nt, Human
uauccugaaauuucaga

SEQ ID NO: 1374625 - RNA, 16 nt, Human
uauccugaaauuucag

SEQ ID NO: 1374626 - RNA, 14 nt, Human
uauccugaaauuuc

SEQ ID NO: 1374627 - RNA, 23 nt, Human
uauccucuuuagaguuagacugu

SEQ ID NO: 1374628 - RNA, 14 nt, Human
uauccucuuuagag

SEQ ID NO: 1374629 - RNA, 16 nt, Human
uauccucuuuagaguu

SEQ ID NO: 1374630 - RNA, 17 nt, Human
uauccucuuuagaguua

SEQ ID NO: 1374631 - RNA, 22 nt, Human
uauccucuuuagaguuagacug

SEQ ID NO: 1374632 - RNA, 12 nt, Human
uauccucuguaa

SEQ ID NO: 1374633 - RNA, 18 nt, Human
uauccucucuuccucuuc

SEQ ID NO: 1374634 - RNA, 15 nt, Human
uauccucucuuccuc

SEQ ID NO: 1374635 - RNA, 14 nt, Human
uauccucucuuccu

SEQ ID NO: 1374636 - RNA, 17 nt, Human
uauccucccuguaacuu

SEQ ID NO: 1374637 - RNA, 16 nt, Human
uauccucccuguaacu

SEQ ID NO: 1374638 - RNA, 15 nt, Human
uauccucccuguaac

SEQ ID NO: 1374639 - RNA, 14 nt, Human
uauccucccuguaa

SEQ ID NO: 1374640 - RNA, 12 nt, Human
uauccucccugu

SEQ ID NO: 1374641 - RNA, 11 nt, Human
uauccucccug

SEQ ID NO: 1374642 - RNA, 18 nt, Human
uauccuuucauauaguua

SEQ ID NO: 1374643 - RNA, 15 nt, Human
uaucguaaaauuaag

SEQ ID NO: 1374644 - RNA, 18 nt, Human
uaucguaaaauuaagaaa

SEQ ID NO: 1374645 - RNA, 19 nt, Human
uaugacaucacuuguacaa

SEQ ID NO: 1374646 - RNA, 24 nt, Human
uaugacaucacuuguacaaaauaa

SEQ ID NO: 1374647 - RNA, 23 nt, Human
uaugacaucacuuguacaaaaua

SEQ ID NO: 1374648 - RNA, 20 nt, Human
uaugacaucacuuguacaaa

SEQ ID NO: 1374649 - RNA, 22 nt, Human
uaugacacaugcaaggucauuu

SEQ ID NO: 1374650 - RNA, 12 nt, Human
uaugacacaugc

SEQ ID NO: 1374651 - RNA, 15 nt, Human
uaugaauacuuugca

SEQ ID NO: 1374652 - RNA, 13 nt, Human
uaugaauacuuug

SEQ ID NO: 1374653 - RNA, 22 nt, Human
uaucuucucaaguucuaagauu

SEQ ID NO: 1374654 - RNA, 12 nt, Human
uaugaauaacau

SEQ ID NO: 1374655 - RNA, 18 nt, Human
uaugaauugaauuaucuu

SEQ ID NO: 1374656 - RNA, 19 nt, Human
uaugaauuauucaauuuau

SEQ ID NO: 1374657 - RNA, 18 nt, Human
uaugaauuauucaauuua

SEQ ID NO: 1374658 - RNA, 14 nt, Human
uaugaauuauucaa

SEQ ID NO: 1374659 - RNA, 19 nt, Human
uaugaaugugaagccuucc

SEQ ID NO: 1374660 - RNA, 23 nt, Human
uaugaauuacauuuguauaaaau

SEQ ID NO: 1374661 - RNA, 18 nt, Human
uaugaaugugaagccuuc

SEQ ID NO: 1374662 - RNA, 17 nt, Human
uaugaaugugaagccuu

SEQ ID NO: 1374663 - RNA, 16 nt, Human
uaugaaugugaagccu

SEQ ID NO: 1374664 - RNA, 15 nt, Human
uaugaaugugaagcc

SEQ ID NO: 1374665 - RNA, 17 nt, Human
uaugaauuacauuugua

SEQ ID NO: 1374666 - RNA, 15 nt, Human
uaucugucagcugca

SEQ ID NO: 1374667 - RNA, 13 nt, Human
uaucuguaauggu

SEQ ID NO: 1374668 - RNA, 20 nt, Human
uaucugggcuuccuggagca

SEQ ID NO: 1374669 - RNA, 18 nt, Human
uaucugggcuuccuggag

SEQ ID NO: 1374670 - RNA, 16 nt, Human
uaucugggcuuccugg

SEQ ID NO: 1374671 - RNA, 15 nt, Human
uaucugggcuuccug

SEQ ID NO: 1374672 - RNA, 14 nt, Human
uaucugggcuuccu

SEQ ID NO: 1374673 - RNA, 11 nt, Human
uaucugggcuu

SEQ ID NO: 1374674 - RNA, 22 nt, Human
uaucuguaaugguacugacuuu

SEQ ID NO: 1374675 - RNA, 21 nt, Human
uaucuguagacggcucaguau

SEQ ID NO: 1374676 - RNA, 17 nt, Human
uaucuuacuauuucaca

SEQ ID NO: 1374677 - RNA, 18 nt, Human
uaucuuacuauuucacaa

SEQ ID NO: 1374678 - RNA, 21 nt, Human
uaucuucucaaguucuaagau

SEQ ID NO: 1374679 - RNA, 20 nt, Human
uaucuucucaaguucuaaga

SEQ ID NO: 1374680 - RNA, 18 nt, Human
uaucuucucaaguucuaa

SEQ ID NO: 1374681 - RNA, 17 nt, Human
uaucuucucaaguucua

SEQ ID NO: 1374682 - RNA, 15 nt, Human
uaucuucucaaguuc

SEQ ID NO: 1374683 - RNA, 14 nt, Human
uaucuucacuuguc

SEQ ID NO: 1374684 - RNA, 20 nt, Human
uaugaaguuuuuuuuauaca

SEQ ID NO: 1374685 - RNA, 16 nt, Human
uauggaaauaaaugua

SEQ ID NO: 1374686 - RNA, 15 nt, Human
uaugcuuugaaacag

SEQ ID NO: 1374687 - RNA, 20 nt, Human
uaugcuuguaacuaaaauaa

SEQ ID NO: 1374688 - RNA, 18 nt, Human
uaugcuuguaacuaaaau

SEQ ID NO: 1374689 - RNA, 16 nt, Human
uaugcuugcaaaaacu

SEQ ID NO: 1374690 - RNA, 19 nt, Human
uauggaauugauuugcauu

SEQ ID NO: 1374691 - RNA, 11 nt, Human
uauggaauuga

SEQ ID NO: 1374692 - RNA, 16 nt, Human
uauggacaaaacaaga

SEQ ID NO: 1374693 - RNA, 15 nt, Human
uauggaauuuugcaa

SEQ ID NO: 1374694 - RNA, 18 nt, Human
uauggaauugauuugcau

SEQ ID NO: 1374695 - RNA, 14 nt, Human
uauggaaauauaua

SEQ ID NO: 1374696 - RNA, 15 nt, Human
uauggaaauauauau

SEQ ID NO: 1374697 - RNA, 13 nt, Human
uauggaaauauau

SEQ ID NO: 1374698 - RNA, 17 nt, Human
uauggaaauaaauguau

SEQ ID NO: 1374699 - RNA, 14 nt, Human
uaugcauauuuguu

SEQ ID NO: 1374700 - RNA, 13 nt, Human
uaugcaugaagua

SEQ ID NO: 1374701 - RNA, 18 nt, Human
uaugcaugaaguaauaug

SEQ ID NO: 1374702 - RNA, 16 nt, Human
uaugcuucuguuuuau

SEQ ID NO: 1374703 - RNA, 15 nt, Human
uaugcuucuguuuua

SEQ ID NO: 1374704 - RNA, 20 nt, Human
uaugcacuuauaauuuuccu

SEQ ID NO: 1374705 - RNA, 22 nt, Human
uaugcacuuauaauuuuccuaa

SEQ ID NO: 1374706 - RNA, 19 nt, Human
uaugcacuuauaauuuucc

SEQ ID NO: 1374707 - RNA, 16 nt, Human
uaugcacaugaacuua

SEQ ID NO: 1374708 - RNA, 19 nt, Human
uaugcacaugaacuuagau

SEQ ID NO: 1374709 - RNA, 15 nt, Human
uaugcacaugaacuu

SEQ ID NO: 1374710 - RNA, 15 nt, Human
uaugcauauuuguuu

SEQ ID NO: 1374711 - RNA, 20 nt, Human
uaugcauauuauuuuauguu

SEQ ID NO: 1374712 - RNA, 17 nt, Human
uaugauuuuuuuuucau

SEQ ID NO: 1374713 - RNA, 13 nt, Human
uaugauuuacauu

SEQ ID NO: 1374714 - RNA, 18 nt, Human
uaugauuuaauuugaaau

SEQ ID NO: 1374715 - RNA, 17 nt, Human
uaugauuuaauuugaaa

SEQ ID NO: 1374716 - RNA, 19 nt, Human
uaugauuuuuuuuucauac

SEQ ID NO: 1374717 - RNA, 14 nt, Human
uaugcaaaagcaag

SEQ ID NO: 1374718 - RNA, 16 nt, Human
uaugcaauuuccuuuu

SEQ ID NO: 1374719 - RNA, 13 nt, Human
uaugcacacauuu

SEQ ID NO: 1374720 - RNA, 14 nt, Human
uaugcacaguaaaa

SEQ ID NO: 1374721 - RNA, 14 nt, Human
uaugcacacauuuu

SEQ ID NO: 1374722 - RNA, 16 nt, Human
uaugacuauguaaacu

SEQ ID NO: 1374723 - RNA, 17 nt, Human
uaugacuauguaaacua

SEQ ID NO: 1374724 - RNA, 23 nt, Human
uaugacuugggcacccccagccu

SEQ ID NO: 1374725 - RNA, 22 nt, Human
uaugacuugggcacccccagcc

SEQ ID NO: 1374726 - RNA, 21 nt, Human
uaugacuugggcacccccagc

SEQ ID NO: 1374727 - RNA, 18 nt, Human
uaugacuauguaaacuac

SEQ ID NO: 1374728 - RNA, 16 nt, Human
uaugagcucuucaugu

SEQ ID NO: 1374729 - RNA, 15 nt, Human
uaugagcucuucaug

SEQ ID NO: 1374730 - RNA, 14 nt, Human
uaugagcucuucau

SEQ ID NO: 1374731 - RNA, 15 nt, Human
uaugauuacuggccu

SEQ ID NO: 1374732 - RNA, 21 nt, Human
uaugauuauuaacgaugucca

SEQ ID NO: 1374733 - RNA, 12 nt, Human
uaugauuauuaa

SEQ ID NO: 1374734 - RNA, 22 nt, Human
uaugauuacuggccuuuuucau

SEQ ID NO: 1374735 - RNA, 21 nt, Human
uaugauucaaaugucuauaaa

SEQ ID NO: 1374736 - RNA, 16 nt, Human
uaugauucaaaugucu

SEQ ID NO: 1374737 - RNA, 16 nt, Human
uaugauucccagccag

SEQ ID NO: 1374738 - RNA, 22 nt, Human
ucagcucuucuccauccuacca

SEQ ID NO: 1374739 - RNA, 19 nt, Human
ucagcucugggccauucuc

SEQ ID NO: 1374740 - RNA, 22 nt, Human
ucagcucugacauucugauucg

SEQ ID NO: 1374741 - RNA, 16 nt, Human
ucagcucugacauucu

SEQ ID NO: 1374742 - RNA, 21 nt, Human
ucagcucugaaagagaaacac

SEQ ID NO: 1374743 - RNA, 18 nt, Human
ucagcucugaaagagaaa

SEQ ID NO: 1374744 - RNA, 16 nt, Human
ucagcucugaaagaga

SEQ ID NO: 1374745 - RNA, 14 nt, Human
ucagcucugaaaga

SEQ ID NO: 1374746 - RNA, 18 nt, Human
ucagcucccacaagccuc

SEQ ID NO: 1374747 - RNA, 19 nt, Human
ucagcugucuuuuggagga

SEQ ID NO: 1374748 - RNA, 15 nt, Human
ucagcugucuuuugg

SEQ ID NO: 1374749 - RNA, 14 nt, Human
ucagcugucuuuug

SEQ ID NO: 1374750 - RNA, 13 nt, Human
ucagcugucuuuu

SEQ ID NO: 1374751 - RNA, 19 nt, Human
ucaccgugggcucccugac

SEQ ID NO: 1374752 - RNA, 18 nt, Human
ucaccgugggcucccuga

SEQ ID NO: 1374753 - RNA, 17 nt, Human
ucaccgugggcucccug

SEQ ID NO: 1374754 - RNA, 16 nt, Human
ucaccgugggcucccu

SEQ ID NO: 1374755 - RNA, 15 nt, Human
ucaccgugggcuccc

SEQ ID NO: 1374756 - RNA, 13 nt, Human
ucaccgugggcuc

SEQ ID NO: 1374757 - RNA, 22 nt, Human
ucaccggcucucaccuggcccu

SEQ ID NO: 1374758 - RNA, 18 nt, Human
ucaccggggugguuuagu

SEQ ID NO: 1374759 - RNA, 15 nt, Human
ucaccggcucucacc

SEQ ID NO: 1374760 - RNA, 16 nt, Human
ucagcucccacaagcc

SEQ ID NO: 1374761 - RNA, 13 nt, Human
ucagcucccacaa

SEQ ID NO: 1374762 - RNA, 19 nt, Human
ucagcuccagguggcucug

SEQ ID NO: 1374763 - RNA, 14 nt, Human
ucagcuccaggugg

SEQ ID NO: 1374764 - RNA, 13 nt, Human
ucagcuccagcug

SEQ ID NO: 1374765 - RNA, 18 nt, Human
ucaggccuuugagcucag

SEQ ID NO: 1374766 - RNA, 19 nt, Human
ucaggaugagggaaaagaa

SEQ ID NO: 1374767 - RNA, 18 nt, Human
ucaggaugagggaaaaga

SEQ ID NO: 1374768 - RNA, 14 nt, Human
ucaggaucuauuuu

SEQ ID NO: 1374769 - RNA, 22 nt, Human
ucaggauccaagcuaagcacug

SEQ ID NO: 1374770 - RNA, 20 nt, Human
ucaggauccaagcuaagcac

SEQ ID NO: 1374771 - RNA, 16 nt, Human
ucaggaguguguguga

SEQ ID NO: 1374772 - RNA, 19 nt, Human
ucaggacacaggccugugu

SEQ ID NO: 1374773 - RNA, 18 nt, Human
ucaggacacaggccugug

SEQ ID NO: 1374774 - RNA, 17 nt, Human
ucaggacacaggccugu

SEQ ID NO: 1374775 - RNA, 23 nt, Human
ucaggacacaggccuguguagcu

SEQ ID NO: 1374776 - RNA, 16 nt, Human
ucaggacacaggccug

SEQ ID NO: 1374777 - RNA, 15 nt, Human
ucaggacacaggccu

SEQ ID NO: 1374778 - RNA, 18 nt, Human
ucaggaauucuuggagaa

SEQ ID NO: 1374779 - RNA, 18 nt, Human
ucaggaauauuuuccaaa

SEQ ID NO: 1374780 - RNA, 17 nt, Human
ucaggaauauuuuccaa

SEQ ID NO: 1374781 - RNA, 19 nt, Human
ucaggaaucggaauccugu

SEQ ID NO: 1374782 - RNA, 16 nt, Human
ucaggaauucuuggag

SEQ ID NO: 1374783 - RNA, 11 nt, Human
ucaggagcccu

SEQ ID NO: 1374784 - RNA, 12 nt, Human
ucaggagcccug

SEQ ID NO: 1374785 - RNA, 14 nt, Human
ucaggagcccuggg

SEQ ID NO: 1374786 - RNA, 15 nt, Human
ucaggagcccuggga

SEQ ID NO: 1374787 - RNA, 16 nt, Human
ucaggugaaaggaaau

SEQ ID NO: 1374788 - RNA, 21 nt, Human
ucaggugaaacuccagaugcc

SEQ ID NO: 1374789 - RNA, 16 nt, Human
ucagguccucagagaa

SEQ ID NO: 1374790 - RNA, 23 nt, Human
ucaggucacauaaaacuuuguau

SEQ ID NO: 1374791 - RNA, 18 nt, Human
ucaggucacauaaaacuu

SEQ ID NO: 1374792 - RNA, 22 nt, Human
ucagggaaggaggagccugucc

SEQ ID NO: 1374793 - RNA, 23 nt, Human
ucagggaaggaggagccuguccu

SEQ ID NO: 1374794 - RNA, 21 nt, Human
ucagggaaggaggagccuguc

SEQ ID NO: 1374795 - RNA, 20 nt, Human
ucagggaaggaggagccugu

SEQ ID NO: 1374796 - RNA, 19 nt, Human
ucagggaaggaggagccug

SEQ ID NO: 1374797 - RNA, 17 nt, Human
ucagggaaggaggagcc

SEQ ID NO: 1374798 - RNA, 15 nt, Human
ucaggcugccugagu

SEQ ID NO: 1374799 - RNA, 13 nt, Human
ucaggcugccuga

SEQ ID NO: 1374800 - RNA, 12 nt, Human
ucaggcugccug

SEQ ID NO: 1374801 - RNA, 13 nt, Human
ucaggcuagaugu

SEQ ID NO: 1374802 - RNA, 15 nt, Human
ucagucacagccacc

SEQ ID NO: 1374803 - RNA, 14 nt, Human
ucagucacagccac

SEQ ID NO: 1374804 - RNA, 13 nt, Human
ucagucacagcca

SEQ ID NO: 1374805 - RNA, 16 nt, Human
ucagucaauauuuuua

SEQ ID NO: 1374806 - RNA, 19 nt, Human
ucagucucagaaugucauu

SEQ ID NO: 1374807 - RNA, 18 nt, Human
ucagucucagaaugucau

SEQ ID NO: 1374808 - RNA, 15 nt, Human
ucaguauuuaacuaa

SEQ ID NO: 1374809 - RNA, 20 nt, Human
ucaguauuuaacuaauuaua

SEQ ID NO: 1374810 - RNA, 14 nt, Human
ucaguauuuaacua

SEQ ID NO: 1374811 - RNA, 13 nt, Human
ucaguauuuaacu

SEQ ID NO: 1374812 - RNA, 15 nt, Human
ucagucucuauacca

SEQ ID NO: 1374813 - RNA, 18 nt, Human
ucagucucuauaccaaua

SEQ ID NO: 1374814 - RNA, 21 nt, Human
ucagucucuauaccaauaaag

SEQ ID NO: 1374815 - RNA, 18 nt, Human
ucagugacccuggcuccu

SEQ ID NO: 1374816 - RNA, 20 nt, Human
ucagugaaguugcugcuucu

SEQ ID NO: 1374817 - RNA, 18 nt, Human
ucagugaaguugcugcuu

SEQ ID NO: 1374818 - RNA, 17 nt, Human
ucagugaaguugcugcu

SEQ ID NO: 1374819 - RNA, 16 nt, Human
ucagugaaguugcugc

SEQ ID NO: 1374820 - RNA, 14 nt, Human
ucagugaaguugcu

SEQ ID NO: 1374821 - RNA, 13 nt, Human
ucagugaagacua

SEQ ID NO: 1374822 - RNA, 20 nt, Human
ucagucucuauaccaauaaa

SEQ ID NO: 1374823 - RNA, 22 nt, Human
uccaaaaccgccagcucuguuc

SEQ ID NO: 1374824 - RNA, 20 nt, Human
uccaaaaccgccagcucugu

SEQ ID NO: 1374825 - RNA, 19 nt, Human
uccaaaaccgccagcucug

SEQ ID NO: 1374826 - RNA, 18 nt, Human
uccaaaaccgccagcucu

SEQ ID NO: 1374827 - RNA, 21 nt, Human
ucauuuaucuauaauuuaccu

SEQ ID NO: 1374828 - RNA, 18 nt, Human
ucauuuaucuauaauuua

SEQ ID NO: 1374829 - RNA, 16 nt, Human
ucauuuaucuauaauu

SEQ ID NO: 1374830 - RNA, 12 nt, Human
ucauuuaucuau

SEQ ID NO: 1374831 - RNA, 18 nt, Human
uccaaaagaagcccccag

SEQ ID NO: 1374832 - RNA, 15 nt, Human
uccaaaagaagcccc

SEQ ID NO: 1374833 - RNA, 14 nt, Human
uccaaaagaagccc

SEQ ID NO: 1374834 - RNA, 21 nt, Human
uccaaaaccgccagcucuguu

SEQ ID NO: 1374835 - RNA, 13 nt, Human
uccaaaacugccu

SEQ ID NO: 1374836 - RNA, 12 nt, Human
uccaaaacugcc

SEQ ID NO: 1374837 - RNA, 21 nt, Human
uccaaaagaagcccccagcua

SEQ ID NO: 1374838 - RNA, 14 nt, Human
uccaaacaggcuca

SEQ ID NO: 1374839 - RNA, 18 nt, Human
uccaaagaggcugccccu

SEQ ID NO: 1374840 - RNA, 16 nt, Human
uccaaagaggcugccc

SEQ ID NO: 1374841 - RNA, 15 nt, Human
uccaaagaggcugcc

SEQ ID NO: 1374842 - RNA, 14 nt, Human
uccaaagaggcugc

SEQ ID NO: 1374843 - RNA, 13 nt, Human
uccaaagaggcug

SEQ ID NO: 1374844 - RNA, 16 nt, Human
uccaaacuaauuuuua

SEQ ID NO: 1374845 - RNA, 12 nt, Human
uccaaacuaauu

SEQ ID NO: 1374846 - RNA, 20 nt, Human
uccaaagaguagaauugcau

SEQ ID NO: 1374847 - RNA, 19 nt, Human
uccaaagaggcugccccuc

SEQ ID NO: 1374848 - RNA, 13 nt, Human
uccaaaguacacu

SEQ ID NO: 1374849 - RNA, 22 nt, Human
uccaaaccacuuuuugcagcuu

SEQ ID NO: 1374850 - RNA, 12 nt, Human
uccaaaccacuu

SEQ ID NO: 1374851 - RNA, 19 nt, Human
ucauuuaguuugauuauuc

SEQ ID NO: 1374852 - RNA, 18 nt, Human
ucauuuagucaugugacc

SEQ ID NO: 1374853 - RNA, 17 nt, Human
ucauuuagccuguccug

SEQ ID NO: 1374854 - RNA, 16 nt, Human
ucauuuagccuguccu

SEQ ID NO: 1374855 - RNA, 15 nt, Human
ucauuuagccugucc

SEQ ID NO: 1374856 - RNA, 23 nt, Human
ucauuuagcauguuguugaaagg

SEQ ID NO: 1374857 - RNA, 17 nt, Human
ucauuuagcauguuguu

SEQ ID NO: 1374858 - RNA, 22 nt, Human
ucauuuaauccucccuuccucc

SEQ ID NO: 1374859 - RNA, 21 nt, Human
ucauuuaauaauauacuugug

SEQ ID NO: 1374860 - RNA, 18 nt, Human
ucauuuaauaauauacuu

SEQ ID NO: 1374861 - RNA, 20 nt, Human
ucauuuaauaauauacuugu

SEQ ID NO: 1374862 - RNA, 18 nt, Human
ucauugucuguguagagu

SEQ ID NO: 1374863 - RNA, 14 nt, Human
ucauuguauguggu

SEQ ID NO: 1374864 - RNA, 11 nt, Human
ucauuuaauaa

SEQ ID NO: 1374865 - RNA, 14 nt, Human
ucauuuaauaauau

SEQ ID NO: 1374866 - RNA, 14 nt, Human
ucauuguagaaaag

SEQ ID NO: 1374867 - RNA, 20 nt, Human
ucauuagccugaguagaaag

SEQ ID NO: 1374868 - RNA, 18 nt, Human
ucauuagccugaguagaa

SEQ ID NO: 1374869 - RNA, 19 nt, Human
ucauuagccugaguagaaa

SEQ ID NO: 1374870 - RNA, 20 nt, Human
ucauuagacuggaacuugaa

SEQ ID NO: 1374871 - RNA, 15 nt, Human
ucauuagaaauauuu

SEQ ID NO: 1374872 - RNA, 14 nt, Human
ucauggugcucaga

SEQ ID NO: 1374873 - RNA, 20 nt, Human
ucauccaccccaucccuccc

SEQ ID NO: 1374874 - RNA, 19 nt, Human
ucaucauucucugucucau

SEQ ID NO: 1374875 - RNA, 18 nt, Human
ucaucauucucugucuca

SEQ ID NO: 1374876 - RNA, 14 nt, Human
ucaucauucucugu

SEQ ID NO: 1374877 - RNA, 13 nt, Human
ucaucauucucug

SEQ ID NO: 1374878 - RNA, 22 nt, Human
ucaucauggccagcuggaggca

SEQ ID NO: 1374879 - RNA, 18 nt, Human
ucaucauggccagcugga

SEQ ID NO: 1374880 - RNA, 17 nt, Human
ucaucauggccagcugg

SEQ ID NO: 1374881 - RNA, 14 nt, Human
ucaucauggccagc

SEQ ID NO: 1374882 - RNA, 19 nt, Human
ucaucaauggggccaguca

SEQ ID NO: 1374883 - RNA, 13 nt, Human
ucaucaauuaaag

SEQ ID NO: 1374884 - RNA, 22 nt, Human
ucaguguaccgcgucuacccug

SEQ ID NO: 1374885 - RNA, 22 nt, Human
ucaguguauggaaauaaaugua

SEQ ID NO: 1374886 - RNA, 21 nt, Human
ucaguguauggaaauaaaugu

SEQ ID NO: 1374887 - RNA, 22 nt, Human
ucaguguagaaccuaauucaau

SEQ ID NO: 1374888 - RNA, 19 nt, Human
ucaguguaccauuugccuc

SEQ ID NO: 1374889 - RNA, 18 nt, Human
ucaguguaccauuugccu

SEQ ID NO: 1374890 - RNA, 22 nt, Human
ucaucucagugaagaauacuuc

SEQ ID NO: 1374891 - RNA, 19 nt, Human
ucaucucagcucacugcaa

SEQ ID NO: 1374892 - RNA, 18 nt, Human
ucaucuccugccuuccuc

SEQ ID NO: 1374893 - RNA, 15 nt, Human
ucaucuccugccuuc

SEQ ID NO: 1374894 - RNA, 22 nt, Human
ucaucucccaccuagcagcacc

SEQ ID NO: 1374895 - RNA, 12 nt, Human
ucaucucccacc

SEQ ID NO: 1374896 - RNA, 21 nt, Human
ucaucucauuuaauccucccu

SEQ ID NO: 1374897 - RNA, 20 nt, Human
ucaucucauuuaauccuccc

SEQ ID NO: 1374898 - RNA, 16 nt, Human
ucaucuccccaucauu

SEQ ID NO: 1374899 - RNA, 22 nt, Human
ucaucuugcuaccaguauuuag

SEQ ID NO: 1374900 - RNA, 21 nt, Human
ucaucuugcuaccaguauuua

SEQ ID NO: 1374901 - RNA, 18 nt, Human
ucaucuugcuaccaguau

SEQ ID NO: 1374902 - RNA, 17 nt, Human
ucaucuugcuaccagua

SEQ ID NO: 1374903 - RNA, 11 nt, Human
ucaucuugcua

SEQ ID NO: 1374904 - RNA, 12 nt, Human
ucaucuuucuuc

SEQ ID NO: 1374905 - RNA, 20 nt, Human
ucaugcugggauuuccaacu

SEQ ID NO: 1374906 - RNA, 17 nt, Human
ucaugcuguucaugaaa

SEQ ID NO: 1374907 - RNA, 19 nt, Human
ucaugggccacugcuuuuc

SEQ ID NO: 1374908 - RNA, 19 nt, Human
ucccaccugacacaccagg

SEQ ID NO: 1374909 - RNA, 13 nt, Human
ucccaccugacac

SEQ ID NO: 1374910 - RNA, 22 nt, Human
uccauucacaguucuuugggcc

SEQ ID NO: 1374911 - RNA, 23 nt, Human
ucccaccugacacaccaggcgcu

SEQ ID NO: 1374912 - RNA, 19 nt, Human
uccauuaaacgauuuuuaa

SEQ ID NO: 1374913 - RNA, 23 nt, Human
uccaugggcagagcccaagggaa

SEQ ID NO: 1374914 - RNA, 11 nt, Human
ucccaggaccc

SEQ ID NO: 1374915 - RNA, 24 nt, Human
ucccaggaccacaggcucaggcag

SEQ ID NO: 1374916 - RNA, 23 nt, Human
ucccaggaccacaggcucaggca

SEQ ID NO: 1374917 - RNA, 19 nt, Human
ucccaggaccacaggcuca

SEQ ID NO: 1374918 - RNA, 18 nt, Human
ucccaggaccacaggcuc

SEQ ID NO: 1374919 - RNA, 17 nt, Human
ucccaggaccacaggcu

SEQ ID NO: 1374920 - RNA, 12 nt, Human
ucccaggacccu

SEQ ID NO: 1374921 - RNA, 16 nt, Human
ucccaggaacugggcc

SEQ ID NO: 1374922 - RNA, 11 nt, Human
ucccaggaacu

SEQ ID NO: 1374923 - RNA, 22 nt, Human
ucccaggccccaugaccuccag

SEQ ID NO: 1374924 - RNA, 21 nt, Human
ucccaggccccaugaccucca

SEQ ID NO: 1374925 - RNA, 18 nt, Human
ucccaggccccaugaccu

SEQ ID NO: 1374926 - RNA, 11 nt, Human
ucccaggcccc

SEQ ID NO: 1374927 - RNA, 20 nt, Human
ucccaggcccacugugccuc

SEQ ID NO: 1374928 - RNA, 19 nt, Human
ucccaggcccacugugccu

SEQ ID NO: 1374929 - RNA, 12 nt, Human
ucccaggcccac

SEQ ID NO: 1374930 - RNA, 23 nt, Human
ucccaggccccaugaccuccagc

SEQ ID NO: 1374931 - RNA, 18 nt, Human
uccccccacucccucaca

SEQ ID NO: 1374932 - RNA, 22 nt, Human
uccccccacaagugcccuccag

SEQ ID NO: 1374933 - RNA, 17 nt, Human
uccccccacaagugccc

SEQ ID NO: 1374934 - RNA, 22 nt, Human
uccccccaagggaggcugcugc

SEQ ID NO: 1374935 - RNA, 19 nt, Human
ucccccauguucugucccu

SEQ ID NO: 1374936 - RNA, 17 nt, Human
uccccagcccagagaca

SEQ ID NO: 1374937 - RNA, 16 nt, Human
uccccagcccagagac

SEQ ID NO: 1374938 - RNA, 15 nt, Human
uccccagcccagaga

SEQ ID NO: 1374939 - RNA, 14 nt, Human
uccccagcccagag

SEQ ID NO: 1374940 - RNA, 13 nt, Human
uccccagcccaga

SEQ ID NO: 1374941 - RNA, 12 nt, Human
uccccagcccag

SEQ ID NO: 1374942 - RNA, 20 nt, Human
uccccagcauuccagccccu

SEQ ID NO: 1374943 - RNA, 10 nt, Human
ucccaugugg

SEQ ID NO: 1374944 - RNA, 14 nt, Human
ucccauguucaagc

SEQ ID NO: 1374945 - RNA, 23 nt, Human
uccccagagaaaggggagcccac

SEQ ID NO: 1374946 - RNA, 22 nt, Human
uccccagagaaaggggagccca

SEQ ID NO: 1374947 - RNA, 19 nt, Human
uccagguagagggugugua

SEQ ID NO: 1374948 - RNA, 22 nt, Human
uccagguccugguggggcagcu

SEQ ID NO: 1374949 - RNA, 21 nt, Human
uccagguauucguuaucuaau

SEQ ID NO: 1374950 - RNA, 17 nt, Human
uccagggugugugcucg

SEQ ID NO: 1374951 - RNA, 21 nt, Human
uccagguccugguggggcagc

SEQ ID NO: 1374952 - RNA, 15 nt, Human
uccagguccuggugg

SEQ ID NO: 1374953 - RNA, 14 nt, Human
uccaguaaaauaau

SEQ ID NO: 1374954 - RNA, 14 nt, Human
uccauaacugaaca

SEQ ID NO: 1374955 - RNA, 13 nt, Human
uccauaaagaccc

SEQ ID NO: 1374956 - RNA, 17 nt, Human
uccauaaauccuugaug

SEQ ID NO: 1374957 - RNA, 19 nt, Human
uccaguucaugagaaucua

SEQ ID NO: 1374958 - RNA, 16 nt, Human
uccaguucaugagaau

SEQ ID NO: 1374959 - RNA, 22 nt, Human
uccaguuaaaaaaaauuuuaau

SEQ ID NO: 1374960 - RNA, 23 nt, Human
uccaguuggaguuuuuuguacca

SEQ ID NO: 1374961 - RNA, 19 nt, Human
uccaucacguuagcugucc

SEQ ID NO: 1374962 - RNA, 13 nt, Human
uccaucaucaugu

SEQ ID NO: 1374963 - RNA, 15 nt, Human
uccauacauuugugu

SEQ ID NO: 1374964 - RNA, 22 nt, Human
uccaugcguguuucugacucug

SEQ ID NO: 1374965 - RNA, 21 nt, Human
uccaugcguguuucugacucu

SEQ ID NO: 1374966 - RNA, 22 nt, Human
uccaugcugugcgcccagggcu

SEQ ID NO: 1374967 - RNA, 21 nt, Human
uccaugcugugcgcccagggc

SEQ ID NO: 1374968 - RNA, 20 nt, Human
uccaugcugugcgcccaggg

SEQ ID NO: 1374969 - RNA, 22 nt, Human
uccaugggcagagcccaaggga

SEQ ID NO: 1374970 - RNA, 18 nt, Human
uccaugggcagagcccaa

SEQ ID NO: 1374971 - RNA, 17 nt, Human
uccaugggcagagccca

SEQ ID NO: 1374972 - RNA, 16 nt, Human
uccaugggcagagccc

SEQ ID NO: 1374973 - RNA, 15 nt, Human
uccaugggcagagcc

SEQ ID NO: 1374974 - RNA, 18 nt, Human
uccaugggagaaaauaga

SEQ ID NO: 1374975 - RNA, 20 nt, Human
uccaugggccauaugaaaag

SEQ ID NO: 1374976 - RNA, 23 nt, Human
uccaggggcugcuuccuccugga

SEQ ID NO: 1374977 - RNA, 22 nt, Human
uccaggggcugcuuccuccugg

SEQ ID NO: 1374978 - RNA, 21 nt, Human
uccaggggcugcuuccuccug

SEQ ID NO: 1374979 - RNA, 13 nt, Human
uccagcugccccg

SEQ ID NO: 1374980 - RNA, 12 nt, Human
uccagcugcccc

SEQ ID NO: 1374981 - RNA, 22 nt, Human
uccagcugccccggccccuccc

SEQ ID NO: 1374982 - RNA, 16 nt, Human
uccagcugagcgccag

SEQ ID NO: 1374983 - RNA, 21 nt, Human
uccagcugacuaaacuuuuuu

SEQ ID NO: 1374984 - RNA, 14 nt, Human
uccagcugacuaaa

SEQ ID NO: 1374985 - RNA, 16 nt, Human
uccagcuccuuugggc

SEQ ID NO: 1374986 - RNA, 20 nt, Human
uccagcucuggaggggaggg

SEQ ID NO: 1374987 - RNA, 15 nt, Human
uccagcucuggaggg

SEQ ID NO: 1374988 - RNA, 13 nt, Human
uccagcucuggag

SEQ ID NO: 1374989 - RNA, 12 nt, Human
uccagcucugga

SEQ ID NO: 1374990 - RNA, 19 nt, Human
uccagcuccuuugggcuuc

SEQ ID NO: 1374991 - RNA, 15 nt, Human
uccagcuccuuuggg

SEQ ID NO: 1374992 - RNA, 14 nt, Human
uccagcuccuuugg

SEQ ID NO: 1374993 - RNA, 13 nt, Human
uccagcuccugua

SEQ ID NO: 1374994 - RNA, 17 nt, Human
uccaaagucauaauugc

SEQ ID NO: 1374995 - RNA, 15 nt, Human
uccaaagucauaauu

SEQ ID NO: 1374996 - RNA, 18 nt, Human
uccaaagucauaauugca

SEQ ID NO: 1374997 - RNA, 14 nt, Human
uccaaaguacacug

SEQ ID NO: 1374998 - RNA, 16 nt, Human
uccaaaguacacuguu

SEQ ID NO: 1374999 - RNA, 22 nt, Human
uccagauaguguagcugaggag

SEQ ID NO: 1375000 - RNA, 15 nt, Human
uccagauaguguagc

SEQ ID NO: 1375001 - RNA, 20 nt, Human
uccagaaagccccacccagg

SEQ ID NO: 1375002 - RNA, 21 nt, Human
uccagagucccugccuggacc

SEQ ID NO: 1375003 - RNA, 20 nt, Human
uccagagucccugccuggac

SEQ ID NO: 1375004 - RNA, 19 nt, Human
uccagagucccugccugga

SEQ ID NO: 1375005 - RNA, 23 nt, Human
uccagaaagccccacccaggcca

SEQ ID NO: 1375006 - RNA, 18 nt, Human
uccagagucccugccugg

SEQ ID NO: 1375007 - RNA, 16 nt, Human
uccagaaagccccacc

SEQ ID NO: 1375008 - RNA, 14 nt, Human
uccagaaagcccca

SEQ ID NO: 1375009 - RNA, 23 nt, Human
uccacuuuguuucguggggaggu

SEQ ID NO: 1375010 - RNA, 22 nt, Human
uccacuuuguuucguggggagg

SEQ ID NO: 1375011 - RNA, 19 nt, Human
uccacuuuguuucgugggg

SEQ ID NO: 1375012 - RNA, 18 nt, Human
uccacuuuguuucguggg

SEQ ID NO: 1375013 - RNA, 15 nt, Human
uccacuuuguuucgu

SEQ ID NO: 1375014 - RNA, 14 nt, Human
uccagaaaacaaaa

SEQ ID NO: 1375015 - RNA, 13 nt, Human
uccagaaaacaaa

SEQ ID NO: 1375016 - RNA, 23 nt, Human
uccagaaagaaaacuuguauuau

SEQ ID NO: 1375017 - RNA, 18 nt, Human
ucccccccaugcacugug

SEQ ID NO: 1375018 - RNA, 17 nt, Human
ucccccccaugcacugu

SEQ ID NO: 1375019 - RNA, 13 nt, Human
ucccccccaugca

SEQ ID NO: 1375020 - RNA, 22 nt, Human
uccccccaucuugcuucccuaa

SEQ ID NO: 1375021 - RNA, 15 nt, Human
uccccccaucuugcu

SEQ ID NO: 1375022 - RNA, 12 nt, Human
uccccccaucuu

SEQ ID NO: 1375023 - RNA, 21 nt, Human
ucccccuguuucagaggcuca

SEQ ID NO: 1375024 - RNA, 20 nt, Human
ucccuucacaaacccagugu

SEQ ID NO: 1375025 - RNA, 12 nt, Human
ucccuugccuca

SEQ ID NO: 1375026 - RNA, 18 nt, Human
ucccuugccccccuggcc

SEQ ID NO: 1375027 - RNA, 14 nt, Human
ucccuugccccccu

SEQ ID NO: 1375028 - RNA, 15 nt, Human
ucccuuccugccagc

SEQ ID NO: 1375029 - RNA, 10 nt, Human
ucccuucaua

SEQ ID NO: 1375030 - RNA, 23 nt, Human
ucccuucaguacccucucagcuc

SEQ ID NO: 1375031 - RNA, 21 nt, Human
ucccuucaguacccucucagc

SEQ ID NO: 1375032 - RNA, 20 nt, Human
ucccuucaguacccucucag

SEQ ID NO: 1375033 - RNA, 19 nt, Human
ucccuucaguacccucuca

SEQ ID NO: 1375034 - RNA, 18 nt, Human
ucccuucaguacccucuc

SEQ ID NO: 1375035 - RNA, 16 nt, Human
ucccuucaguacccuc

SEQ ID NO: 1375036 - RNA, 14 nt, Human
ucccuucauacuug

SEQ ID NO: 1375037 - RNA, 16 nt, Human
ucccuucauacuugaa

SEQ ID NO: 1375038 - RNA, 15 nt, Human
uccgcaggugcuggu

SEQ ID NO: 1375039 - RNA, 23 nt, Human
uccgcagcccccacccccaaggu

SEQ ID NO: 1375040 - RNA, 20 nt, Human
ucccuugccucaaugccagu

SEQ ID NO: 1375041 - RNA, 19 nt, Human
uccgccacuggggcucaga

SEQ ID NO: 1375042 - RNA, 21 nt, Human
uccgccacuggggcucagagc

SEQ ID NO: 1375043 - RNA, 15 nt, Human
uccgccacuggggcu

SEQ ID NO: 1375044 - RNA, 14 nt, Human
uccgccacuggggc

SEQ ID NO: 1375045 - RNA, 18 nt, Human
uccgcaggugcugguccc

SEQ ID NO: 1375046 - RNA, 16 nt, Human
uccgcaggugcugguc

SEQ ID NO: 1375047 - RNA, 20 nt, Human
uccgcuuggagcuauuuucc

SEQ ID NO: 1375048 - RNA, 16 nt, Human
uccgccuggccuggcc

SEQ ID NO: 1375049 - RNA, 15 nt, Human
uccgcuauccaccaa

SEQ ID NO: 1375050 - RNA, 19 nt, Human
uccucauuguaaacaaacu

SEQ ID NO: 1375051 - RNA, 22 nt, Human
uccucauuuuuauaaugucccu

SEQ ID NO: 1375052 - RNA, 22 nt, Human
uccuccaacaccaagcacagca

SEQ ID NO: 1375053 - RNA, 17 nt, Human
uccuccaacaccaagca

SEQ ID NO: 1375054 - RNA, 19 nt, Human
uccuccacguucugcucau

SEQ ID NO: 1375055 - RNA, 17 nt, Human
uccuccaccucaacucc

SEQ ID NO: 1375056 - RNA, 16 nt, Human
uccuccagggacagca

SEQ ID NO: 1375057 - RNA, 14 nt, Human
uccuccagggacag

SEQ ID NO: 1375058 - RNA, 15 nt, Human
uccuccaggaagccu

SEQ ID NO: 1375059 - RNA, 17 nt, Human
uccuccagccccuguag

SEQ ID NO: 1375060 - RNA, 13 nt, Human
uccuccagccccu

SEQ ID NO: 1375061 - RNA, 12 nt, Human
uccuccagcccc

SEQ ID NO: 1375062 - RNA, 12 nt, Human
uccuccacgccu

SEQ ID NO: 1375063 - RNA, 20 nt, Human
uccuccaggguggcagcaac

SEQ ID NO: 1375064 - RNA, 21 nt, Human
uccucccaauuucagacuccc

SEQ ID NO: 1375065 - RNA, 20 nt, Human
uccucccaauuucagacucc

SEQ ID NO: 1375066 - RNA, 12 nt, Human
uccuccauggga

SEQ ID NO: 1375067 - RNA, 21 nt, Human
uccuccaggguggcagcaaca

SEQ ID NO: 1375068 - RNA, 19 nt, Human
uccuaucaccuauuuccau

SEQ ID NO: 1375069 - RNA, 19 nt, Human
uccuacagaaaaaccuugg

SEQ ID NO: 1375070 - RNA, 17 nt, Human
uccuacagaaaaaccuu

SEQ ID NO: 1375071 - RNA, 20 nt, Human
uccuacagaaaaaccuuggg

SEQ ID NO: 1375072 - RNA, 15 nt, Human
uccuacagaaaaacc

SEQ ID NO: 1375073 - RNA, 14 nt, Human
uccuacagaaaaac

SEQ ID NO: 1375074 - RNA, 13 nt, Human
uccuacagaaaaa

SEQ ID NO: 1375075 - RNA, 17 nt, Human
uccuacccccugugccu

SEQ ID NO: 1375076 - RNA, 16 nt, Human
uccuacccccugugcc

SEQ ID NO: 1375077 - RNA, 15 nt, Human
uccuacccccugugc

SEQ ID NO: 1375078 - RNA, 13 nt, Human
uccuacccccugu

SEQ ID NO: 1375079 - RNA, 23 nt, Human
uccuaagggucgaaagcucuaga

SEQ ID NO: 1375080 - RNA, 21 nt, Human
uccuaagggucgaaagcucua

SEQ ID NO: 1375081 - RNA, 20 nt, Human
uccuaagggucgaaagcucu

SEQ ID NO: 1375082 - RNA, 18 nt, Human
uccuaagggucgaaagcu

SEQ ID NO: 1375083 - RNA, 16 nt, Human
uccuaagggucgaaag

SEQ ID NO: 1375084 - RNA, 22 nt, Human
uccgcuuggagcuauuuuccag

SEQ ID NO: 1375085 - RNA, 22 nt, Human
uccuaagcuggagugcaguggc

SEQ ID NO: 1375086 - RNA, 19 nt, Human
uccugagcucagcguggag

SEQ ID NO: 1375087 - RNA, 18 nt, Human
uccugagcucagcgugga

SEQ ID NO: 1375088 - RNA, 14 nt, Human
uccugagcucagcg

SEQ ID NO: 1375089 - RNA, 13 nt, Human
uccugagcucagc

SEQ ID NO: 1375090 - RNA, 12 nt, Human
uccugagcucag

SEQ ID NO: 1375091 - RNA, 17 nt, Human
uccugagccccagggag

SEQ ID NO: 1375092 - RNA, 16 nt, Human
uccugagccccaggga

SEQ ID NO: 1375093 - RNA, 14 nt, Human
uccugagccccagg

SEQ ID NO: 1375094 - RNA, 23 nt, Human
uccugagccagugucaggaggaa

SEQ ID NO: 1375095 - RNA, 18 nt, Human
uccugagaaagcucaaag

SEQ ID NO: 1375096 - RNA, 16 nt, Human
uccugagaaagcucaa

SEQ ID NO: 1375097 - RNA, 15 nt, Human
uccugagaaagcuca

SEQ ID NO: 1375098 - RNA, 24 nt, Human
uccugagaaaaaagguuccgcuug

SEQ ID NO: 1375099 - RNA, 19 nt, Human
uccugagaaaaaagguucc

SEQ ID NO: 1375100 - RNA, 23 nt, Human
uccucuguucaaagcugccuguc

SEQ ID NO: 1375101 - RNA, 19 nt, Human
uccucuguucaaagcugcc

SEQ ID NO: 1375102 - RNA, 20 nt, Human
uccucugugaccaaugucuu

SEQ ID NO: 1375103 - RNA, 21 nt, Human
uccucugugaccaaugucuug

SEQ ID NO: 1375104 - RNA, 19 nt, Human
uccucugugaccaaugucu

SEQ ID NO: 1375105 - RNA, 15 nt, Human
uccucugucucgagc

SEQ ID NO: 1375106 - RNA, 23 nt, Human
uccucugucucgagcgcccugca

SEQ ID NO: 1375107 - RNA, 12 nt, Human
uccuccucugug

SEQ ID NO: 1375108 - RNA, 13 nt, Human
uccuccucuguga

SEQ ID NO: 1375109 - RNA, 11 nt, Human
uccuccucugu

SEQ ID NO: 1375110 - RNA, 20 nt, Human
uccuccucccacccggcugc

SEQ ID NO: 1375111 - RNA, 14 nt, Human
uccuccucccaccc

SEQ ID NO: 1375112 - RNA, 17 nt, Human
uccuccuccagggacag

SEQ ID NO: 1375113 - RNA, 16 nt, Human
uccuccuccagggaca

SEQ ID NO: 1375114 - RNA, 15 nt, Human
uccuccuccagggac

SEQ ID NO: 1375115 - RNA, 14 nt, Human
uccuccuccaggga

SEQ ID NO: 1375116 - RNA, 13 nt, Human
uccuccuccaggg

SEQ ID NO: 1375117 - RNA, 12 nt, Human
uccuccuccagg

SEQ ID NO: 1375118 - RNA, 21 nt, Human
uccucccacccggcugcagag

SEQ ID NO: 1375119 - RNA, 20 nt, Human
uccucccacccggcugcaga

SEQ ID NO: 1375120 - RNA, 15 nt, Human
uccugccccaggccu

SEQ ID NO: 1375121 - RNA, 14 nt, Human
uccugccccaggcc

SEQ ID NO: 1375122 - RNA, 14 nt, Human
uccugccagccccu

SEQ ID NO: 1375123 - RNA, 13 nt, Human
uccugccagcccc

SEQ ID NO: 1375124 - RNA, 21 nt, Human
uccugccccaacuccuuccag

SEQ ID NO: 1375125 - RNA, 22 nt, Human
uccugccacccagccccagcca

SEQ ID NO: 1375126 - RNA, 20 nt, Human
uccugccacccagccccagc

SEQ ID NO: 1375127 - RNA, 16 nt, Human
uccugccacccagccc

SEQ ID NO: 1375128 - RNA, 19 nt, Human
uccuggagcagaagcagca

SEQ ID NO: 1375129 - RNA, 18 nt, Human
uccuggagcagaagcagc

SEQ ID NO: 1375130 - RNA, 16 nt, Human
uccuggagcagaagca

SEQ ID NO: 1375131 - RNA, 14 nt, Human
uccuggagcagaag

SEQ ID NO: 1375132 - RNA, 13 nt, Human
uccuggagcagaa

SEQ ID NO: 1375133 - RNA, 22 nt, Human
uccuggacaugaagauucuuuc

SEQ ID NO: 1375134 - RNA, 21 nt, Human
uccuggacaugaagauucuuu

SEQ ID NO: 1375135 - RNA, 22 nt, Human
uccuggacagcugugccucgcu

SEQ ID NO: 1375136 - RNA, 19 nt, Human
uccuggacagcugugccuc

SEQ ID NO: 1375137 - RNA, 18 nt, Human
uccuggacagcugugccu

SEQ ID NO: 1375138 - RNA, 14 nt, Human
uccuggaggcccag

SEQ ID NO: 1375139 - RNA, 13 nt, Human
uccuggaggccca

SEQ ID NO: 1375140 - RNA, 19 nt, Human
uccuggagcagaccacccc

SEQ ID NO: 1375141 - RNA, 18 nt, Human
uccuggagcagaccaccc

SEQ ID NO: 1375142 - RNA, 20 nt, Human
uccuggagcagaagcagcaa

SEQ ID NO: 1375143 - RNA, 18 nt, Human
uccuggaggcccaguuca

SEQ ID NO: 1375144 - RNA, 15 nt, Human
uccuggaggcccagu

SEQ ID NO: 1375145 - RNA, 17 nt, Human
uccugccggcuccuugg

SEQ ID NO: 1375146 - RNA, 14 nt, Human
uccugccggcuccu

SEQ ID NO: 1375147 - RNA, 23 nt, Human
uccugucucccuccucugcccgg

SEQ ID NO: 1375148 - RNA, 15 nt, Human
uccugucucccuccu

SEQ ID NO: 1375149 - RNA, 12 nt, Human
uccuggcgccug

SEQ ID NO: 1375150 - RNA, 14 nt, Human
uccuggccgccugg

SEQ ID NO: 1375151 - RNA, 22 nt, Human
uccuggaugauacuaauaaacu

SEQ ID NO: 1375152 - RNA, 17 nt, Human
uccuggcccagccuuug

SEQ ID NO: 1375153 - RNA, 17 nt, Human
uccuggcaauagucaaa

SEQ ID NO: 1375154 - RNA, 23 nt, Human
uccuuagccuggaccucugacag

SEQ ID NO: 1375155 - RNA, 22 nt, Human
uccuuagccuggaccucugaca

SEQ ID NO: 1375156 - RNA, 21 nt, Human
uccuuagccuggaccucugac

SEQ ID NO: 1375157 - RNA, 15 nt, Human
uccuuagccuggacc

SEQ ID NO: 1375158 - RNA, 14 nt, Human
uccuuagccuggac

SEQ ID NO: 1375159 - RNA, 13 nt, Human
uccuuagccugga

SEQ ID NO: 1375160 - RNA, 17 nt, Human
uccuuagaucuggcaug

SEQ ID NO: 1375161 - RNA, 18 nt, Human
uccuuagaucuggcaugu

SEQ ID NO: 1375162 - RNA, 18 nt, Human
uccuuagacucuuuuccu

SEQ ID NO: 1375163 - RNA, 19 nt, Human
uccuuagaaaaaaaauuau

SEQ ID NO: 1375164 - RNA, 18 nt, Human
ucggauccagggaggcug

SEQ ID NO: 1375165 - RNA, 14 nt, Human
ucggauuuuuucca

SEQ ID NO: 1375166 - RNA, 13 nt, Human
ucggauuuuuucc

SEQ ID NO: 1375167 - RNA, 10 nt, Human
ucggauuaga

SEQ ID NO: 1375168 - RNA, 17 nt, Human
ucggauuuuuuccaaaa

SEQ ID NO: 1375169 - RNA, 16 nt, Human
ucggauuuuuuccaaa

SEQ ID NO: 1375170 - RNA, 16 nt, Human
ucgugaaaacacauuu

SEQ ID NO: 1375171 - RNA, 20 nt, Human
ucgucuuucccauggggagg

SEQ ID NO: 1375172 - RNA, 18 nt, Human
ucgucuuucccaugggga

SEQ ID NO: 1375173 - RNA, 15 nt, Human
ucgucuuucccaugg

SEQ ID NO: 1375174 - RNA, 21 nt, Human
ucuaaaguucuaagauucuga

SEQ ID NO: 1375175 - RNA, 20 nt, Human
ucuaaaguucuaagauucug

SEQ ID NO: 1375176 - RNA, 19 nt, Human
ucuaaaguucuaagauucu

SEQ ID NO: 1375177 - RNA, 18 nt, Human
ucuaaaguucuaagauuc

SEQ ID NO: 1375178 - RNA, 17 nt, Human
ucuaaaguucuaagauu

SEQ ID NO: 1375179 - RNA, 16 nt, Human
ucuaaaguucuaagau

SEQ ID NO: 1375180 - RNA, 15 nt, Human
ucuaaaguucuaaga

SEQ ID NO: 1375181 - RNA, 14 nt, Human
ucuaaaguucuaag

SEQ ID NO: 1375182 - RNA, 13 nt, Human
ucuaaaguucuaa

SEQ ID NO: 1375183 - RNA, 12 nt, Human
ucuaaaguucua

SEQ ID NO: 1375184 - RNA, 11 nt, Human
ucuaaaguucu

SEQ ID NO: 1375185 - RNA, 23 nt, Human
ucuaaagguccacaggucuagac

SEQ ID NO: 1375186 - RNA, 22 nt, Human
ucuaaagguccacaggucuaga

SEQ ID NO: 1375187 - RNA, 17 nt, Human
ucuaaagguccacaggu

SEQ ID NO: 1375188 - RNA, 15 nt, Human
ucuaaagguccacag

SEQ ID NO: 1375189 - RNA, 14 nt, Human
ucuaaagguccaca

SEQ ID NO: 1375190 - RNA, 18 nt, Human
ucuaaaggcuaccuuugu

SEQ ID NO: 1375191 - RNA, 17 nt, Human
ucuaaaggcuaccuuug

SEQ ID NO: 1375192 - RNA, 19 nt, Human
ucuaaaggcuaccuuugua

SEQ ID NO: 1375193 - RNA, 20 nt, Human
ucuaaaggcuaccuuuguau

SEQ ID NO: 1375194 - RNA, 24 nt, Human
ucguggagagcuaggagcaaagcc

SEQ ID NO: 1375195 - RNA, 17 nt, Human
ucgugaccugcuaggcc

SEQ ID NO: 1375196 - RNA, 21 nt, Human
ucgugaccugcuaggccagag

SEQ ID NO: 1375197 - RNA, 18 nt, Human
ucguggacacacacagac

SEQ ID NO: 1375198 - RNA, 12 nt, Human
ucguggacaccu

SEQ ID NO: 1375199 - RNA, 13 nt, Human
ucguggacaccug

SEQ ID NO: 1375200 - RNA, 14 nt, Human
ucguggacaccugc

SEQ ID NO: 1375201 - RNA, 15 nt, Human
ucguggacaccugcc

SEQ ID NO: 1375202 - RNA, 16 nt, Human
ucguggacaccugccc

SEQ ID NO: 1375203 - RNA, 18 nt, Human
ucguggagagcuaggagc

SEQ ID NO: 1375204 - RNA, 16 nt, Human
ucguggagagcuagga

SEQ ID NO: 1375205 - RNA, 12 nt, Human
ucguggagagcu

SEQ ID NO: 1375206 - RNA, 10 nt, Human
ucguggagag

SEQ ID NO: 1375207 - RNA, 22 nt, Human
ucguggacugagugggaagccc

SEQ ID NO: 1375208 - RNA, 20 nt, Human
ucguggacugagugggaagc

SEQ ID NO: 1375209 - RNA, 22 nt, Human
ucguggacacacacagacuauu

SEQ ID NO: 1375210 - RNA, 17 nt, Human
ucguggacaccugcccu

SEQ ID NO: 1375211 - RNA, 18 nt, Human
ucguggacaccugcccug

SEQ ID NO: 1375212 - RNA, 19 nt, Human
ucguggacaccugcccugc

SEQ ID NO: 1375213 - RNA, 20 nt, Human
ucguggacaccugcccugcc

SEQ ID NO: 1375214 - RNA, 12 nt, Human
ucuaucauuuaa

SEQ ID NO: 1375215 - RNA, 13 nt, Human
ucuaucauuuaau

SEQ ID NO: 1375216 - RNA, 14 nt, Human
ucuaucauuuaaua

SEQ ID NO: 1375217 - RNA, 15 nt, Human
ucuaucauuuaauaa

SEQ ID NO: 1375218 - RNA, 16 nt, Human
ucuaucauuuaauaau

SEQ ID NO: 1375219 - RNA, 17 nt, Human
ucuaucauuuaauaaua

SEQ ID NO: 1375220 - RNA, 18 nt, Human
ucuaucauuuaauaauau

SEQ ID NO: 1375221 - RNA, 22 nt, Human
ucuaucauuuaauaauauacuu

SEQ ID NO: 1375222 - RNA, 17 nt, Human
ucuaugacacaugcaag

SEQ ID NO: 1375223 - RNA, 14 nt, Human
ucuaugacacaugc

SEQ ID NO: 1375224 - RNA, 19 nt, Human
ucuacuuccaaacuaauuu

SEQ ID NO: 1375225 - RNA, 14 nt, Human
ucuacuuccccaug

SEQ ID NO: 1375226 - RNA, 22 nt, Human
ucuacuuccaaacuaauuuuua

SEQ ID NO: 1375227 - RNA, 21 nt, Human
ucuacuuaauccaauggguuu

SEQ ID NO: 1375228 - RNA, 23 nt, Human
ucuacuggucuuguggaauuggg

SEQ ID NO: 1375229 - RNA, 20 nt, Human
ucuacuggucuuguggaauu

SEQ ID NO: 1375230 - RNA, 16 nt, Human
ucuacuggucuugugg

SEQ ID NO: 1375231 - RNA, 20 nt, Human
ucuacugggaaggcuacuuc

SEQ ID NO: 1375232 - RNA, 20 nt, Human
ucuaccuucuccccagcucc

SEQ ID NO: 1375233 - RNA, 23 nt, Human
ucuaccuucuccccagcucccag

SEQ ID NO: 1375234 - RNA, 18 nt, Human
ucuaccuucuccccagcu

SEQ ID NO: 1375235 - RNA, 16 nt, Human
ucuaccuucuccccag

SEQ ID NO: 1375236 - RNA, 15 nt, Human
ucuaccuucucccca

SEQ ID NO: 1375237 - RNA, 19 nt, Human
ucuacagagcuucccugac

SEQ ID NO: 1375238 - RNA, 18 nt, Human
ucuacagagcuucccuga

SEQ ID NO: 1375239 - RNA, 17 nt, Human
ucuacagagcuucccug

SEQ ID NO: 1375240 - RNA, 16 nt, Human
ucuacagagcuucccu

SEQ ID NO: 1375241 - RNA, 16 nt, Human
ucuacacauacaugua

SEQ ID NO: 1375242 - RNA, 21 nt, Human
ucuacaacucauacacucgua

SEQ ID NO: 1375243 - RNA, 17 nt, Human
ucuacaacucauacacu

SEQ ID NO: 1375244 - RNA, 17 nt, Human
ucuacacuaagagagaa

SEQ ID NO: 1375245 - RNA, 20 nt, Human
ucucaugccaguaacaggcu

SEQ ID NO: 1375246 - RNA, 12 nt, Human
ucucaugccagu

SEQ ID NO: 1375247 - RNA, 22 nt, Human
ucucaugaaccucaagcugcau

SEQ ID NO: 1375248 - RNA, 21 nt, Human
ucucaugccccuggcugggac

SEQ ID NO: 1375249 - RNA, 18 nt, Human
ucucaugccccuggcugg

SEQ ID NO: 1375250 - RNA, 14 nt, Human
ucucaugaaccuca

SEQ ID NO: 1375251 - RNA, 13 nt, Human
ucucaugaaccuc

SEQ ID NO: 1375252 - RNA, 11 nt, Human
ucucaucuggg

SEQ ID NO: 1375253 - RNA, 22 nt, Human
ucucaucuggggagcaggcagc

SEQ ID NO: 1375254 - RNA, 18 nt, Human
ucucaucucuucuuuuaa

SEQ ID NO: 1375255 - RNA, 20 nt, Human
ucucaucucagugaagaaua

SEQ ID NO: 1375256 - RNA, 19 nt, Human
ucucaucucagugaagaau

SEQ ID NO: 1375257 - RNA, 15 nt, Human
ucucauccugcaggc

SEQ ID NO: 1375258 - RNA, 13 nt, Human
ucucauccugcag

SEQ ID NO: 1375259 - RNA, 16 nt, Human
ucuaugagucuagaug

SEQ ID NO: 1375260 - RNA, 15 nt, Human
ucuaugagucuagau

SEQ ID NO: 1375261 - RNA, 14 nt, Human
ucuaugagucuaga

SEQ ID NO: 1375262 - RNA, 13 nt, Human
ucucagucucuga

SEQ ID NO: 1375263 - RNA, 11 nt, Human
ucucagucucu

SEQ ID NO: 1375264 - RNA, 17 nt, Human
ucucagucucugagcag

SEQ ID NO: 1375265 - RNA, 15 nt, Human
ucucagucucugagc

SEQ ID NO: 1375266 - RNA, 18 nt, Human
ucucagucucugagcagu

SEQ ID NO: 1375267 - RNA, 15 nt, Human
ucucagucugucacc

SEQ ID NO: 1375268 - RNA, 16 nt, Human
ucucagugaagaauac

SEQ ID NO: 1375269 - RNA, 16 nt, Human
ucucauacccucccuc

SEQ ID NO: 1375270 - RNA, 20 nt, Human
ucucccuggaaugaguugag

SEQ ID NO: 1375271 - RNA, 15 nt, Human
ucucccugccuccug

SEQ ID NO: 1375272 - RNA, 19 nt, Human
ucucccugcauggcauccu

SEQ ID NO: 1375273 - RNA, 15 nt, Human
ucucccugcauggca

SEQ ID NO: 1375274 - RNA, 21 nt, Human
ucucccuccuccaggaagccu

SEQ ID NO: 1375275 - RNA, 18 nt, Human
ucucccuccucugcccgg

SEQ ID NO: 1375276 - RNA, 14 nt, Human
ucuccccugccccc

SEQ ID NO: 1375277 - RNA, 12 nt, Human
ucuccccugccc

SEQ ID NO: 1375278 - RNA, 21 nt, Human
ucuccccugcacuguaaaaug

SEQ ID NO: 1375279 - RNA, 17 nt, Human
ucuccccugcacuguaa

SEQ ID NO: 1375280 - RNA, 16 nt, Human
ucuccccugcacugua

SEQ ID NO: 1375281 - RNA, 15 nt, Human
ucuccccugcacugu

SEQ ID NO: 1375282 - RNA, 14 nt, Human
ucuccccugcacug

SEQ ID NO: 1375283 - RNA, 13 nt, Human
ucuccccugcacu

SEQ ID NO: 1375284 - RNA, 12 nt, Human
ucuccccugcac

SEQ ID NO: 1375285 - RNA, 21 nt, Human
ucucccccaacagcuggaccc

SEQ ID NO: 1375286 - RNA, 17 nt, Human
ucucccccaacagcugg

SEQ ID NO: 1375287 - RNA, 12 nt, Human
ucucccccaaca

SEQ ID NO: 1375288 - RNA, 22 nt, Human
ucuccccagguccagcucugga

SEQ ID NO: 1375289 - RNA, 20 nt, Human
ucuccccagguccagcucug

SEQ ID NO: 1375290 - RNA, 19 nt, Human
ucuccccagguccagcucu

SEQ ID NO: 1375291 - RNA, 15 nt, Human
ucuccaggcaggucu

SEQ ID NO: 1375292 - RNA, 21 nt, Human
ucuccagcugggcucugcaau

SEQ ID NO: 1375293 - RNA, 17 nt, Human
ucuccagaggccaagga

SEQ ID NO: 1375294 - RNA, 18 nt, Human
ucuccagaaagccccacc

SEQ ID NO: 1375295 - RNA, 19 nt, Human
ucuccacuuucagcugucu

SEQ ID NO: 1375296 - RNA, 18 nt, Human
ucuccacuuucagcuguc

SEQ ID NO: 1375297 - RNA, 17 nt, Human
ucuccacuuucagcugu

SEQ ID NO: 1375298 - RNA, 16 nt, Human
ucuccacuuucagcug

SEQ ID NO: 1375299 - RNA, 15 nt, Human
ucuccacuuucagcu

SEQ ID NO: 1375300 - RNA, 14 nt, Human
ucuccacuuucagc

SEQ ID NO: 1375301 - RNA, 16 nt, Human
ucuccagccucagccu

SEQ ID NO: 1375302 - RNA, 19 nt, Human
ucuccagcugggcucugca

SEQ ID NO: 1375303 - RNA, 17 nt, Human
ucuccagcugggcucug

SEQ ID NO: 1375304 - RNA, 11 nt, Human
ucuccagcugg

SEQ ID NO: 1375305 - RNA, 15 nt, Human
ucuccagcugacuaa

SEQ ID NO: 1375306 - RNA, 14 nt, Human
ucuccagcugacua

SEQ ID NO: 1375307 - RNA, 12 nt, Human
ucuccagcugac

SEQ ID NO: 1375308 - RNA, 20 nt, Human
ucuccagcggcccugucauc

SEQ ID NO: 1375309 - RNA, 18 nt, Human
ucuccagcggcccuguca

SEQ ID NO: 1375310 - RNA, 16 nt, Human
ucuccagcggcccugu

SEQ ID NO: 1375311 - RNA, 19 nt, Human
ucuccagccucagccuccc

SEQ ID NO: 1375312 - RNA, 18 nt, Human
ucuccagccucagcucuc

SEQ ID NO: 1375313 - RNA, 15 nt, Human
ugaucuccguggcuu

SEQ ID NO: 1375314 - RNA, 18 nt, Human
ugaucuccguggcuuugg

SEQ ID NO: 1375315 - RNA, 19 nt, Human
ugaucuggaacccagacuc

SEQ ID NO: 1375316 - RNA, 18 nt, Human
ugaucuggaacccagacu

SEQ ID NO: 1375317 - RNA, 17 nt, Human
ugaucuggaacccagac

SEQ ID NO: 1375318 - RNA, 15 nt, Human
ugaucuggaacccag

SEQ ID NO: 1375319 - RNA, 17 nt, Human
ugaucugucuguggcaa

SEQ ID NO: 1375320 - RNA, 14 nt, Human
ugaucugucugugg

SEQ ID NO: 1375321 - RNA, 19 nt, Human
ugaucugucuguggcaaaa

SEQ ID NO: 1375322 - RNA, 14 nt, Human
ugauccaacuaaug

SEQ ID NO: 1375323 - RNA, 13 nt, Human
ugauccaacuaau

SEQ ID NO: 1375324 - RNA, 22 nt, Human
ugaucauguguggaaguuauua

SEQ ID NO: 1375325 - RNA, 14 nt, Human
ugauagauuuucug

SEQ ID NO: 1375326 - RNA, 13 nt, Human
ugauagcaaagcg

SEQ ID NO: 1375327 - RNA, 24 nt, Human
ugaucagcuuauugucuagugaaa

SEQ ID NO: 1375328 - RNA, 18 nt, Human
ugauagcaaauggccuca

SEQ ID NO: 1375329 - RNA, 16 nt, Human
ugaucagccccacccu

SEQ ID NO: 1375330 - RNA, 17 nt, Human
ugaucagcuuauugucu

SEQ ID NO: 1375331 - RNA, 14 nt, Human
ugaugccucugucu

SEQ ID NO: 1375332 - RNA, 23 nt, Human
ugaugcaugcacuguucccccug

SEQ ID NO: 1375333 - RNA, 18 nt, Human
ugaugcaugcacuguucc

SEQ ID NO: 1375334 - RNA, 17 nt, Human
ugaugcaugcacuguuc

SEQ ID NO: 1375335 - RNA, 22 nt, Human
ugaugcaucagaaagggagggc

SEQ ID NO: 1375336 - RNA, 21 nt, Human
ugaugcaucagaaagggaggg

SEQ ID NO: 1375337 - RNA, 21 nt, Human
ugaugcagcuuauacgaaaua

SEQ ID NO: 1375338 - RNA, 20 nt, Human
ugaugauuuagagugcuguc

SEQ ID NO: 1375339 - RNA, 21 nt, Human
ugaugccucugucuucuggac

SEQ ID NO: 1375340 - RNA, 23 nt, Human
ugaugcuacaggauuugaaauug

SEQ ID NO: 1375341 - RNA, 20 nt, Human
ugaugcuacaggauuugaaa

SEQ ID NO: 1375342 - RNA, 11 nt, Human
ugaugccuggc

SEQ ID NO: 1375343 - RNA, 19 nt, Human
ugaugucauacagagaagu

SEQ ID NO: 1375344 - RNA, 18 nt, Human
ugaugucauacagagaag

SEQ ID NO: 1375345 - RNA, 17 nt, Human
ugaugucauacagagaa

SEQ ID NO: 1375346 - RNA, 16 nt, Human
ugaugucauacagaga

SEQ ID NO: 1375347 - RNA, 15 nt, Human
ugaugucauacagag

SEQ ID NO: 1375348 - RNA, 14 nt, Human
ugaugucauacaga

SEQ ID NO: 1375349 - RNA, 23 nt, Human
ugaugucaauuucuguguugcca

SEQ ID NO: 1375350 - RNA, 19 nt, Human
ugaugucaauuucuguguu

SEQ ID NO: 1375351 - RNA, 18 nt, Human
ugaugucaauuucugugu

SEQ ID NO: 1375352 - RNA, 21 nt, Human
ugaugucauacagagaaguca

SEQ ID NO: 1375353 - RNA, 20 nt, Human
ugaugucauacagagaaguc

SEQ ID NO: 1375354 - RNA, 22 nt, Human
ugaugucauacagagaagucac

SEQ ID NO: 1375355 - RNA, 23 nt, Human
ugauguuaaaaaaauaagaagaa

SEQ ID NO: 1375356 - RNA, 14 nt, Human
ugauguuaaaaaaa

SEQ ID NO: 1375357 - RNA, 13 nt, Human
ugauguuaaaaaa

SEQ ID NO: 1375358 - RNA, 12 nt, Human
ugauguuaaaaa

SEQ ID NO: 1375359 - RNA, 13 nt, Human
ugaugguuguaca

SEQ ID NO: 1375360 - RNA, 14 nt, Human
ugaugguuguacau

SEQ ID NO: 1375361 - RNA, 17 nt, Human
ugaugucaauuucugug

SEQ ID NO: 1375362 - RNA, 21 nt, Human
ugaugguuguacauauaagug

SEQ ID NO: 1375363 - RNA, 22 nt, Human
ugauucagaaaauguucuguuu

SEQ ID NO: 1375364 - RNA, 21 nt, Human
ugauucagaaaauguucuguu

SEQ ID NO: 1375365 - RNA, 20 nt, Human
ugauucagaaaauguucugu

SEQ ID NO: 1375366 - RNA, 19 nt, Human
ugauucagaaaauguucug

SEQ ID NO: 1375367 - RNA, 18 nt, Human
ugauucagaaaauguucu

SEQ ID NO: 1375368 - RNA, 16 nt, Human
ugauucaccucuucuu

SEQ ID NO: 1375369 - RNA, 16 nt, Human
ugauucacaucucauu

SEQ ID NO: 1375370 - RNA, 23 nt, Human
ugauucaaucuguaaacugugua

SEQ ID NO: 1375371 - RNA, 22 nt, Human
ugauucaaucuguaaacugugu

SEQ ID NO: 1375372 - RNA, 21 nt, Human
ugauucaaucuguaaacugug

SEQ ID NO: 1375373 - RNA, 17 nt, Human
ugauucaaucuguaaac

SEQ ID NO: 1375374 - RNA, 16 nt, Human
ugauucaaucuguaaa

SEQ ID NO: 1375375 - RNA, 16 nt, Human
ugauuauucaguguca

SEQ ID NO: 1375376 - RNA, 14 nt, Human
ugauuauucagugu

SEQ ID NO: 1375377 - RNA, 20 nt, Human
ugauuauuaacgauguccaa

SEQ ID NO: 1375378 - RNA, 22 nt, Human
ugauuaugaauuacauuuguau

SEQ ID NO: 1375379 - RNA, 21 nt, Human
ugauuaugaauuacauuugua

SEQ ID NO: 1375380 - RNA, 17 nt, Human
ugauguucuaaggcucu

SEQ ID NO: 1375381 - RNA, 15 nt, Human
ugauguucuaaggcu

SEQ ID NO: 1375382 - RNA, 14 nt, Human
ugauguucuaaggc

SEQ ID NO: 1375383 - RNA, 12 nt, Human
ugauguucuaag

SEQ ID NO: 1375384 - RNA, 13 nt, Human
ugauguuccuucc

SEQ ID NO: 1375385 - RNA, 22 nt, Human
ugauguucuaaggcucugagag

SEQ ID NO: 1375386 - RNA, 21 nt, Human
ugauguucuaaggcucugaga

SEQ ID NO: 1375387 - RNA, 20 nt, Human
ugauguucuaaggcucugag

SEQ ID NO: 1375388 - RNA, 19 nt, Human
ugauguucuaaggcucuga

SEQ ID NO: 1375389 - RNA, 18 nt, Human
ugauguucuaaggcucug

SEQ ID NO: 1375390 - RNA, 22 nt, Human
ugauguuuagaaacacaacuau

SEQ ID NO: 1375391 - RNA, 16 nt, Human
ugauuagacagaacac

SEQ ID NO: 1375392 - RNA, 15 nt, Human
ugauuagacagaaca

SEQ ID NO: 1375393 - RNA, 13 nt, Human
ugauuagacagaa

SEQ ID NO: 1375394 - RNA, 23 nt, Human
ugauuagaaauuaccuguggaua

SEQ ID NO: 1375395 - RNA, 23 nt, Human
ugauuacuggccuuuuucauuua

SEQ ID NO: 1375396 - RNA, 21 nt, Human
ugauuacuggccuuuuucauu

SEQ ID NO: 1375397 - RNA, 20 nt, Human
ugauuacuggccuuuuucau

SEQ ID NO: 1375398 - RNA, 17 nt, Human
ugauuagacagaacacc

SEQ ID NO: 1375399 - RNA, 19 nt, Human
ugauuaugaauuacauuug

SEQ ID NO: 1375400 - RNA, 17 nt, Human
ugauuaugaauuacauu

SEQ ID NO: 1375401 - RNA, 13 nt, Human
ugauuauauguca

SEQ ID NO: 1375402 - RNA, 18 nt, Human
ugauuguggaauggagau

SEQ ID NO: 1375403 - RNA, 14 nt, Human
ugauuguggaaugg

SEQ ID NO: 1375404 - RNA, 14 nt, Human
ugauugucuuaaua

SEQ ID NO: 1375405 - RNA, 13 nt, Human
ugauugucuuaau

SEQ ID NO: 1375406 - RNA, 16 nt, Human
ugauuguauuguugaa

SEQ ID NO: 1375407 - RNA, 20 nt, Human
ugauuguaguaaucugcauu

SEQ ID NO: 1375408 - RNA, 18 nt, Human
ugauugucuuaauauugu

SEQ ID NO: 1375409 - RNA, 21 nt, Human
ugauuguggaauggagauuca

SEQ ID NO: 1375410 - RNA, 21 nt, Human
ugauuggccuguagaguugcu

SEQ ID NO: 1375411 - RNA, 15 nt, Human
ugauugaugacccuu

SEQ ID NO: 1375412 - RNA, 14 nt, Human
ugauugauuugaag

SEQ ID NO: 1375413 - RNA, 12 nt, Human
ugauugauuuga

SEQ ID NO: 1375414 - RNA, 13 nt, Human
ugauucugccuuu

SEQ ID NO: 1375415 - RNA, 12 nt, Human
ugauucugccuu

SEQ ID NO: 1375416 - RNA, 22 nt, Human
ugauucugcaguaaaucuuuua

SEQ ID NO: 1375417 - RNA, 16 nt, Human
ugauucugcaguaaau

SEQ ID NO: 1375418 - RNA, 18 nt, Human
ugagcuggaccucaccaa

SEQ ID NO: 1375419 - RNA, 20 nt, Human
ugagcucuauuaugaaugug

SEQ ID NO: 1375420 - RNA, 22 nt, Human
ugagcuccuguccccugcuaca

SEQ ID NO: 1375421 - RNA, 21 nt, Human
ugagcuccuguccccugcuac

SEQ ID NO: 1375422 - RNA, 21 nt, Human
ugagcuccuuaaggcucuuuu

SEQ ID NO: 1375423 - RNA, 19 nt, Human
ugagcuccuuaaggcucuu

SEQ ID NO: 1375424 - RNA, 20 nt, Human
ugagcuccuguccccugcua

SEQ ID NO: 1375425 - RNA, 18 nt, Human
ugagcuccuguccccugc

SEQ ID NO: 1375426 - RNA, 13 nt, Human
ugagccugccgag

SEQ ID NO: 1375427 - RNA, 15 nt, Human
ugagccccuggaggc

SEQ ID NO: 1375428 - RNA, 14 nt, Human
ugagccccagggag

SEQ ID NO: 1375429 - RNA, 15 nt, Human
ugagcaucacagaau

SEQ ID NO: 1375430 - RNA, 14 nt, Human
ugagcaucacagaa

SEQ ID NO: 1375431 - RNA, 13 nt, Human
ugagcaucacaga

SEQ ID NO: 1375432 - RNA, 18 nt, Human
ugagcaucacagaaugug

SEQ ID NO: 1375433 - RNA, 12 nt, Human
ugagcaucacag

SEQ ID NO: 1375434 - RNA, 23 nt, Human
ugagcauaggugauccauguaac

SEQ ID NO: 1375435 - RNA, 21 nt, Human
ugagcauaggugauccaugua

SEQ ID NO: 1375436 - RNA, 13 nt, Human
ugagcauagguga

SEQ ID NO: 1375437 - RNA, 15 nt, Human
ugagcaguggcuggu

SEQ ID NO: 1375438 - RNA, 14 nt, Human
ugagcaguggcugg

SEQ ID NO: 1375439 - RNA, 13 nt, Human
ugagcaguggcug

SEQ ID NO: 1375440 - RNA, 12 nt, Human
ugagcaguggcu

SEQ ID NO: 1375441 - RNA, 22 nt, Human
ugagcaguggcugguccagggc

SEQ ID NO: 1375442 - RNA, 18 nt, Human
ugagcaguggcuggucca

SEQ ID NO: 1375443 - RNA, 20 nt, Human
ugagcaguccuuggccugcu

SEQ ID NO: 1375444 - RNA, 19 nt, Human
ugagauauuaaugcccaga

SEQ ID NO: 1375445 - RNA, 20 nt, Human
ugagauauuaaugcccagac

SEQ ID NO: 1375446 - RNA, 13 nt, Human
ugagauauuaaug

SEQ ID NO: 1375447 - RNA, 12 nt, Human
ugagauauuaau

SEQ ID NO: 1375448 - RNA, 21 nt, Human
ugagauaguuuucauccauaa

SEQ ID NO: 1375449 - RNA, 18 nt, Human
ugagauaguuuucaucca

SEQ ID NO: 1375450 - RNA, 17 nt, Human
ugagauaguuuucaucc

SEQ ID NO: 1375451 - RNA, 16 nt, Human
ugagauaguuuucauc

SEQ ID NO: 1375452 - RNA, 13 nt, Human
ugagagugugacc

SEQ ID NO: 1375453 - RNA, 19 nt, Human
ugagaguuuuggaugcagu

SEQ ID NO: 1375454 - RNA, 17 nt, Human
ugagaguuuuggaugca

SEQ ID NO: 1375455 - RNA, 14 nt, Human
ugagagugugacca

SEQ ID NO: 1375456 - RNA, 15 nt, Human
ugagaguuuuggaug

SEQ ID NO: 1375457 - RNA, 12 nt, Human
ugagagugugac

SEQ ID NO: 1375458 - RNA, 16 nt, Human
ugagagucuagauucu

SEQ ID NO: 1375459 - RNA, 17 nt, Human
ugagagucuagauucuc

SEQ ID NO: 1375460 - RNA, 15 nt, Human
ugagagucuagauuc

SEQ ID NO: 1375461 - RNA, 14 nt, Human
ugagagucuagauu

SEQ ID NO: 1375462 - RNA, 13 nt, Human
ugagagucuagau

SEQ ID NO: 1375463 - RNA, 21 nt, Human
ugagacuaaucuuauucauuu

SEQ ID NO: 1375464 - RNA, 19 nt, Human
ugaccggacuuuucugcaa

SEQ ID NO: 1375465 - RNA, 16 nt, Human
ugaccggacuuuucug

SEQ ID NO: 1375466 - RNA, 19 nt, Human
ugaccgcgacuaauuucaa

SEQ ID NO: 1375467 - RNA, 21 nt, Human
ugaccucaggcaaucugcccg

SEQ ID NO: 1375468 - RNA, 16 nt, Human
ugagaaccuggccuuc

SEQ ID NO: 1375469 - RNA, 15 nt, Human
ugagaaccuggccuu

SEQ ID NO: 1375470 - RNA, 14 nt, Human
ugagaaccuggccu

SEQ ID NO: 1375471 - RNA, 12 nt, Human
ugagaaccuggc

SEQ ID NO: 1375472 - RNA, 20 nt, Human
ugagaaccguagaugauuuc

SEQ ID NO: 1375473 - RNA, 20 nt, Human
ugaccucaggcaaucugccc

SEQ ID NO: 1375474 - RNA, 18 nt, Human
ugagaaauuuaaacuaua

SEQ ID NO: 1375475 - RNA, 17 nt, Human
ugagaaauuuauaaacu

SEQ ID NO: 1375476 - RNA, 22 nt, Human
ugagacuaaucuuauucauuuu

SEQ ID NO: 1375477 - RNA, 17 nt, Human
ugagacuccagaccuga

SEQ ID NO: 1375478 - RNA, 22 nt, Human
ugagaaccuggguugcagacag

SEQ ID NO: 1375479 - RNA, 23 nt, Human
ugagaaccuggguugcagacagg

SEQ ID NO: 1375480 - RNA, 21 nt, Human
ugagaaccuggguugcagaca

SEQ ID NO: 1375481 - RNA, 12 nt, Human
ugagaaccuggg

SEQ ID NO: 1375482 - RNA, 14 nt, Human
ugagaccacuguua

SEQ ID NO: 1375483 - RNA, 12 nt, Human
ugagaccaccuc

SEQ ID NO: 1375484 - RNA, 15 nt, Human
ugagaccaccucuca

SEQ ID NO: 1375485 - RNA, 20 nt, Human
ugagacccagcccucauccc

SEQ ID NO: 1375486 - RNA, 18 nt, Human
ugagacccagcccucauc

SEQ ID NO: 1375487 - RNA, 19 nt, Human
ugagaccaccucucaauau

SEQ ID NO: 1375488 - RNA, 15 nt, Human
ugagugaauaaaugu

SEQ ID NO: 1375489 - RNA, 21 nt, Human
ugagucuuugguucuaaggac

SEQ ID NO: 1375490 - RNA, 20 nt, Human
ugagucuuugguucuaagga

SEQ ID NO: 1375491 - RNA, 18 nt, Human
ugagucuuugguucuaag

SEQ ID NO: 1375492 - RNA, 17 nt, Human
ugagucuuugguucuaa

SEQ ID NO: 1375493 - RNA, 16 nt, Human
ugagucuuugguucua

SEQ ID NO: 1375494 - RNA, 15 nt, Human
ugagucucucugggc

SEQ ID NO: 1375495 - RNA, 15 nt, Human
ugagucuagauguuu

SEQ ID NO: 1375496 - RNA, 17 nt, Human
ugagucgugaccugcua

SEQ ID NO: 1375497 - RNA, 19 nt, Human
ugagucguacagaaagcug

SEQ ID NO: 1375498 - RNA, 17 nt, Human
ugagucguacagaaagc

SEQ ID NO: 1375499 - RNA, 15 nt, Human
ugaguucucccugua

SEQ ID NO: 1375500 - RNA, 14 nt, Human
ugagugagcaugcc

SEQ ID NO: 1375501 - RNA, 18 nt, Human
ugaguuuuguguuuguug

SEQ ID NO: 1375502 - RNA, 21 nt, Human
ugaguuuuguguuuguuguag

SEQ ID NO: 1375503 - RNA, 17 nt, Human
ugaguuuuguguuuguu

SEQ ID NO: 1375504 - RNA, 13 nt, Human
ugaguuuuccaug

SEQ ID NO: 1375505 - RNA, 19 nt, Human
ugaguuuuccauggcagga

SEQ ID NO: 1375506 - RNA, 20 nt, Human
ugaguuugucgcucaugugu

SEQ ID NO: 1375507 - RNA, 19 nt, Human
ugaguuugucgcucaugug

SEQ ID NO: 1375508 - RNA, 16 nt, Human
ugauaacuggaaacuu

SEQ ID NO: 1375509 - RNA, 17 nt, Human
ugaggucucagccccuu

SEQ ID NO: 1375510 - RNA, 15 nt, Human
ugaggucucagcccc

SEQ ID NO: 1375511 - RNA, 14 nt, Human
ugaggucucagccc

SEQ ID NO: 1375512 - RNA, 13 nt, Human
ugaggucucagcc

SEQ ID NO: 1375513 - RNA, 22 nt, Human
ugagguccugagcacugccagg

SEQ ID NO: 1375514 - RNA, 21 nt, Human
ugagguccugagcacugccag

SEQ ID NO: 1375515 - RNA, 20 nt, Human
ugagguccugagcacugcca

SEQ ID NO: 1375516 - RNA, 23 nt, Human
ugagguccugagcacugccagga

SEQ ID NO: 1375517 - RNA, 19 nt, Human
ugagguccugagcacugcc

SEQ ID NO: 1375518 - RNA, 18 nt, Human
ugagguccugagcacugc

SEQ ID NO: 1375519 - RNA, 17 nt, Human
ugagguccugagcacug

SEQ ID NO: 1375520 - RNA, 16 nt, Human
ugagguccugagcacu

SEQ ID NO: 1375521 - RNA, 15 nt, Human
ugagguccugagcac

SEQ ID NO: 1375522 - RNA, 14 nt, Human
ugagguccugagca

SEQ ID NO: 1375523 - RNA, 13 nt, Human
ugagguccugagc

SEQ ID NO: 1375524 - RNA, 16 nt, Human
ugaggucucagccccu

SEQ ID NO: 1375525 - RNA, 14 nt, Human
ugagggagccuggc

SEQ ID NO: 1375526 - RNA, 17 nt, Human
ugagggagaacaagacc

SEQ ID NO: 1375527 - RNA, 12 nt, Human
ugaggcauuugu

SEQ ID NO: 1375528 - RNA, 19 nt, Human
ugaggcauuuguuugaacu

SEQ ID NO: 1375529 - RNA, 20 nt, Human
ugaggcauuuguuugaacug

SEQ ID NO: 1375530 - RNA, 21 nt, Human
ugaggcauuuguuugaacuga

SEQ ID NO: 1375531 - RNA, 23 nt, Human
ugaggcauuuguuugaacugaua

SEQ ID NO: 1375532 - RNA, 20 nt, Human
ugaggagcuggggaucccuc

SEQ ID NO: 1375533 - RNA, 13 nt, Human
ugaggagcugggg

SEQ ID NO: 1375534 - RNA, 12 nt, Human
ugaggagcuggg

SEQ ID NO: 1375535 - RNA, 22 nt, Human
ugagcuggggaccugguacccu

SEQ ID NO: 1375536 - RNA, 16 nt, Human
ugaggagcuugaaacc

SEQ ID NO: 1375537 - RNA, 23 nt, Human
ugaaagccaaggagucacugaga

SEQ ID NO: 1375538 - RNA, 13 nt, Human
ugaaagccaugga

SEQ ID NO: 1375539 - RNA, 16 nt, Human
ugaaagccauggagau

SEQ ID NO: 1375540 - RNA, 20 nt, Human
ugaaaccccuguaggccuca

SEQ ID NO: 1375541 - RNA, 21 nt, Human
ugaaagaggcugaggccugga

SEQ ID NO: 1375542 - RNA, 19 nt, Human
ugaaagaggcugaggccug

SEQ ID NO: 1375543 - RNA, 16 nt, Human
ugaaagaugaucauuu

SEQ ID NO: 1375544 - RNA, 15 nt, Human
ugaaagcuacucaua

SEQ ID NO: 1375545 - RNA, 15 nt, Human
ugaaagguacuucaa

SEQ ID NO: 1375546 - RNA, 16 nt, Human
ugaaagguaauuugag

SEQ ID NO: 1375547 - RNA, 16 nt, Human
ugaaagguacuucaaa

SEQ ID NO: 1375548 - RNA, 17 nt, Human
ugaaacaagaagccaca

SEQ ID NO: 1375549 - RNA, 16 nt, Human
ugaaacaacuuggaaa

SEQ ID NO: 1375550 - RNA, 15 nt, Human
ugaaacaacuuggaa

SEQ ID NO: 1375551 - RNA, 14 nt, Human
ugaaacaaagaguu

SEQ ID NO: 1375552 - RNA, 23 nt, Human
ugaaacaaagaguucaagaaaua

SEQ ID NO: 1375553 - RNA, 20 nt, Human
ugaaaccaguguuagggaag

SEQ ID NO: 1375554 - RNA, 20 nt, Human
ugaaaagcuccauuuuuagu

SEQ ID NO: 1375555 - RNA, 13 nt, Human
ugaaaauuuugau

SEQ ID NO: 1375556 - RNA, 19 nt, Human
ugaaaauuuugauguuuua

SEQ ID NO: 1375557 - RNA, 21 nt, Human
ugaaaauuuugauguuuuaag

SEQ ID NO: 1375558 - RNA, 18 nt, Human
ucuuuuauacucagcuuu

SEQ ID NO: 1375559 - RNA, 22 nt, Human
ucuuuuauaauucucauuaaaa

SEQ ID NO: 1375560 - RNA, 17 nt, Human
ugaaaagcuagaauuga

SEQ ID NO: 1375561 - RNA, 16 nt, Human
ugaaaagcagacauuu

SEQ ID NO: 1375562 - RNA, 20 nt, Human
ugaacauugguucuuucauu

SEQ ID NO: 1375563 - RNA, 12 nt, Human
ugaacaguggag

SEQ ID NO: 1375564 - RNA, 18 nt, Human
ugaacacaaacuguaaau

SEQ ID NO: 1375565 - RNA, 23 nt, Human
ugaacaagagaagcauucucauu

SEQ ID NO: 1375566 - RNA, 18 nt, Human
ugaacaagagaagcauuc

SEQ ID NO: 1375567 - RNA, 17 nt, Human
ugaacaagagaagcauu

SEQ ID NO: 1375568 - RNA, 16 nt, Human
ugaacaagagaagcau

SEQ ID NO: 1375569 - RNA, 14 nt, Human
ugaacaagagaagc

SEQ ID NO: 1375570 - RNA, 18 nt, Human
ugaacaagaauuggaagc

SEQ ID NO: 1375571 - RNA, 14 nt, Human
ugaacaagaauugg

SEQ ID NO: 1375572 - RNA, 12 nt, Human
ugaacaagaauu

SEQ ID NO: 1375573 - RNA, 11 nt, Human
ugaacaagaau

SEQ ID NO: 1375574 - RNA, 22 nt, Human
ugaacaggaaacuccugugacc

SEQ ID NO: 1375575 - RNA, 23 nt, Human
ugaacagcugguguagcuacaga

SEQ ID NO: 1375576 - RNA, 19 nt, Human
ugaacagcugguguagcua

SEQ ID NO: 1375577 - RNA, 18 nt, Human
ugaacagcugguguagcu

SEQ ID NO: 1375578 - RNA, 15 nt, Human
ugaacagcuggugua

SEQ ID NO: 1375579 - RNA, 14 nt, Human
ugaacagcuggugu

SEQ ID NO: 1375580 - RNA, 13 nt, Human
ugaacagcuggug

SEQ ID NO: 1375581 - RNA, 17 nt, Human
ugaacaggaaacuccug

SEQ ID NO: 1375582 - RNA, 19 nt, Human
ugaacaguuguguuugaag

SEQ ID NO: 1375583 - RNA, 19 nt, Human
ugaaauguaaggcugugua

SEQ ID NO: 1375584 - RNA, 15 nt, Human
ugaaauguaaggcug

SEQ ID NO: 1375585 - RNA, 20 nt, Human
ugaaauguaaggcuguguaa

SEQ ID NO: 1375586 - RNA, 12 nt, Human
ugaaauguaagg

SEQ ID NO: 1375587 - RNA, 17 nt, Human
ugaaauggauacuuaua

SEQ ID NO: 1375588 - RNA, 19 nt, Human
ugaaagguuagagaauaaa

SEQ ID NO: 1375589 - RNA, 16 nt, Human
ugaaauauugacuuuu

SEQ ID NO: 1375590 - RNA, 15 nt, Human
ugaaaucauucauuu

SEQ ID NO: 1375591 - RNA, 13 nt, Human
ugaaauuauguaa

SEQ ID NO: 1375592 - RNA, 15 nt, Human
ugaaauuauguaaau

SEQ ID NO: 1375593 - RNA, 23 nt, Human
ugaaauuaagaaggcaaaaaugu

SEQ ID NO: 1375594 - RNA, 21 nt, Human
ugaaauuaagaaggcaaaaau

SEQ ID NO: 1375595 - RNA, 19 nt, Human
ugaaauuaagaaggcaaaa

SEQ ID NO: 1375596 - RNA, 22 nt, Human
ugaaauuaacuggguaaugaaa

SEQ ID NO: 1375597 - RNA, 17 nt, Human
ugaaauuaaccucucac

SEQ ID NO: 1375598 - RNA, 14 nt, Human
ugaaauuaaccucu

SEQ ID NO: 1375599 - RNA, 15 nt, Human
ugaaauuccaaaguc

SEQ ID NO: 1375600 - RNA, 14 nt, Human
ugaaauuccaaagu

SEQ ID NO: 1375601 - RNA, 12 nt, Human
ugaaauuccaaa

SEQ ID NO: 1375602 - RNA, 17 nt, Human
ugaaauuccaaagucuc

SEQ ID NO: 1375603 - RNA, 16 nt, Human
ugaaauuccaaagucu

SEQ ID NO: 1375604 - RNA, 19 nt, Human
ugaaauuccaaagucucua

SEQ ID NO: 1375605 - RNA, 16 nt, Human
ugaaauucuccuggag

SEQ ID NO: 1375606 - RNA, 15 nt, Human
ugaaauucuccugga

SEQ ID NO: 1375607 - RNA, 14 nt, Human
ugaaauucuccugg

SEQ ID NO: 1375608 - RNA, 12 nt, Human
ugaaauuauuca

SEQ ID NO: 1375609 - RNA, 20 nt, Human
ugaaauuaugugacauuuua

SEQ ID NO: 1375610 - RNA, 22 nt, Human
ugaaauuaugugacauuuuaca

SEQ ID NO: 1375611 - RNA, 23 nt, Human
ucuuucaaaaccuuuugaaauua

SEQ ID NO: 1375612 - RNA, 21 nt, Human
ucuuucaaaaccuuuugaaau

SEQ ID NO: 1375613 - RNA, 20 nt, Human
ucuuucaaaaccuuuugaaa

SEQ ID NO: 1375614 - RNA, 11 nt, Human
ucuuucaaaac

SEQ ID NO: 1375615 - RNA, 21 nt, Human
ucuuucaagcagucgugccug

SEQ ID NO: 1375616 - RNA, 20 nt, Human
ucuuucaagcagucgugccu

SEQ ID NO: 1375617 - RNA, 16 nt, Human
ucuuguuggugcacag

SEQ ID NO: 1375618 - RNA, 14 nt, Human
ucuuguuucaauuc

SEQ ID NO: 1375619 - RNA, 17 nt, Human
ucuuguuggugcacagc

SEQ ID NO: 1375620 - RNA, 13 nt, Human
ucuuguugagccg

SEQ ID NO: 1375621 - RNA, 22 nt, Human
ucuuguguuuccacagccugca

SEQ ID NO: 1375622 - RNA, 13 nt, Human
ucuuguguuggcu

SEQ ID NO: 1375623 - RNA, 20 nt, Human
ucuugcuuggggaacuugug

SEQ ID NO: 1375624 - RNA, 18 nt, Human
ucuugcuucuuucuagaa

SEQ ID NO: 1375625 - RNA, 17 nt, Human
ucuugcuucuuucuaga

SEQ ID NO: 1375626 - RNA, 16 nt, Human
ucuugcuucuuucuag

SEQ ID NO: 1375627 - RNA, 19 nt, Human
ucuugcacagucacugcuc

SEQ ID NO: 1375628 - RNA, 23 nt, Human
ucuugcaccccaaagcuuuccug

SEQ ID NO: 1375629 - RNA, 22 nt, Human
ucuugcaccccaaagcuuuccu

SEQ ID NO: 1375630 - RNA, 23 nt, Human
ucuugcaggaaggacuaugaaaa

SEQ ID NO: 1375631 - RNA, 14 nt, Human
ucucccugcauggc

SEQ ID NO: 1375632 - RNA, 20 nt, Human
ucuugcacagucacugcucu

SEQ ID NO: 1375633 - RNA, 18 nt, Human
ucucccuguacaguguua

SEQ ID NO: 1375634 - RNA, 14 nt, Human
ucucccuguacagu

SEQ ID NO: 1375635 - RNA, 16 nt, Human
ucucccuggugcuuau

SEQ ID NO: 1375636 - RNA, 13 nt, Human
ucucccuggugcu

SEQ ID NO: 1375637 - RNA, 11 nt, Human
ucuugcuucuu

SEQ ID NO: 1375638 - RNA, 23 nt, Human
ucuugcuucccuaaucuaugguc

SEQ ID NO: 1375639 - RNA, 22 nt, Human
ucuugcuucccuaaucuauggu

SEQ ID NO: 1375640 - RNA, 18 nt, Human
ucuugcuucccuaaucua

SEQ ID NO: 1375641 - RNA, 22 nt, Human
ucuugcuggucuagucacgcau

SEQ ID NO: 1375642 - RNA, 20 nt, Human
ucuugcuaccaguauuuaga

SEQ ID NO: 1375643 - RNA, 14 nt, Human
ucuugcuaccagua

SEQ ID NO: 1375644 - RNA, 13 nt, Human
ucuugcuaccagu

SEQ ID NO: 1375645 - RNA, 14 nt, Human
ucuuuuauaggauu

SEQ ID NO: 1375646 - RNA, 13 nt, Human
ucuuuuauaauuc

SEQ ID NO: 1375647 - RNA, 16 nt, Human
ucuuuggaaaguacac

SEQ ID NO: 1375648 - RNA, 19 nt, Human
ucuuuggaaaguacacucu

SEQ ID NO: 1375649 - RNA, 14 nt, Human
ucuuugccacccuc

SEQ ID NO: 1375650 - RNA, 16 nt, Human
ucuuugccacccucau

SEQ ID NO: 1375651 - RNA, 17 nt, Human
ucuuugccacccucaug

SEQ ID NO: 1375652 - RNA, 18 nt, Human
ucuuugccacccucaugc

SEQ ID NO: 1375653 - RNA, 20 nt, Human
ucuuugccacccucaugcug

SEQ ID NO: 1375654 - RNA, 13 nt, Human
ucuuugaauaaau

SEQ ID NO: 1375655 - RNA, 12 nt, Human
ucuuugaauaaa

SEQ ID NO: 1375656 - RNA, 16 nt, Human
ucuuugaaauuaugua

SEQ ID NO: 1375657 - RNA, 15 nt, Human
ucuuugaaauuaugu

SEQ ID NO: 1375658 - RNA, 12 nt, Human
ucuuugaaauua

SEQ ID NO: 1375659 - RNA, 12 nt, Human
ucuuugccaagu

SEQ ID NO: 1375660 - RNA, 15 nt, Human
ucuuucagcuccuga

SEQ ID NO: 1375661 - RNA, 14 nt, Human
ucuuucagcuccug

SEQ ID NO: 1375662 - RNA, 13 nt, Human
ucuuucagcuccu

SEQ ID NO: 1375663 - RNA, 11 nt, Human
ucuuucagcuc

SEQ ID NO: 1375664 - RNA, 13 nt, Human
ucuuuccaaagua

SEQ ID NO: 1375665 - RNA, 14 nt, Human
ucuuuccaaaguac

SEQ ID NO: 1375666 - RNA, 23 nt, Human
ucuuuccacggagccacuccucu

SEQ ID NO: 1375667 - RNA, 22 nt, Human
ucuuuccacggagccacuccuc

SEQ ID NO: 1375668 - RNA, 19 nt, Human
ucuuuccacggagccacuc

SEQ ID NO: 1375669 - RNA, 21 nt, Human
ucuuucauuugcuuuggaagu

SEQ ID NO: 1375670 - RNA, 17 nt, Human
ucuuuccaaaguacacu

SEQ ID NO: 1375671 - RNA, 20 nt, Human
ucuuuccauuggaucucauu

SEQ ID NO: 1375672 - RNA, 16 nt, Human
ucuuucauuucuucua

SEQ ID NO: 1375673 - RNA, 13 nt, Human
ucuuucuuuauuu

SEQ ID NO: 1375674 - RNA, 16 nt, Human
ucuuucuuucaauaaa

SEQ ID NO: 1375675 - RNA, 15 nt, Human
ucuuucuuucuuaga

SEQ ID NO: 1375676 - RNA, 22 nt, Human
ucuuucuuugggaauauuugaa

SEQ ID NO: 1375677 - RNA, 23 nt, Human
ucuuucuuugggaauauuugaau

SEQ ID NO: 1375678 - RNA, 22 nt, Human
ugaaugaggucagcaugucuau

SEQ ID NO: 1375679 - RNA, 14 nt, Human
ugaaugagaaucua

SEQ ID NO: 1375680 - RNA, 11 nt, Human
ugaaugaacac

SEQ ID NO: 1375681 - RNA, 17 nt, Human
ugaaugaaaauguccau

SEQ ID NO: 1375682 - RNA, 23 nt, Human
ugaauguguuucacaguuugaaa

SEQ ID NO: 1375683 - RNA, 11 nt, Human
ugaauguuaaa

SEQ ID NO: 1375684 - RNA, 22 nt, Human
ugaauguguuucacaguuugaa

SEQ ID NO: 1375685 - RNA, 21 nt, Human
ugaauguguuucacaguuuga

SEQ ID NO: 1375686 - RNA, 13 nt, Human
ugaauguuaaaua

SEQ ID NO: 1375687 - RNA, 15 nt, Human
ugaauguuaaauaaa

SEQ ID NO: 1375688 - RNA, 16 nt, Human
ugaauguuaaauaaau

SEQ ID NO: 1375689 - RNA, 18 nt, Human
ugaauguuaaauaaauug

SEQ ID NO: 1375690 - RNA, 20 nt, Human
ugaauguuaaauaaauugua

SEQ ID NO: 1375691 - RNA, 21 nt, Human
ugaauguuaaauaaauuguau

SEQ ID NO: 1375692 - RNA, 16 nt, Human
ugaauccaaacuaauc

SEQ ID NO: 1375693 - RNA, 15 nt, Human
ugaauccaaacuaau

SEQ ID NO: 1375694 - RNA, 21 nt, Human
ugaaucauuguauguggucau

SEQ ID NO: 1375695 - RNA, 18 nt, Human
ugaaucauuguauguggu

SEQ ID NO: 1375696 - RNA, 22 nt, Human
ugaaucauuuuaccuuugacaa

SEQ ID NO: 1375697 - RNA, 23 nt, Human
ugaaucauuuuaccuuugacaaa

SEQ ID NO: 1375698 - RNA, 21 nt, Human
ugaauucuugguugaggaaac

SEQ ID NO: 1375699 - RNA, 22 nt, Human
ugaauucuugguugaggaaaca

SEQ ID NO: 1375700 - RNA, 20 nt, Human
ugaauucuugguugaggaaa

SEQ ID NO: 1375701 - RNA, 22 nt, Human
ugaauucccucacucgucuccc

SEQ ID NO: 1375702 - RNA, 14 nt, Human
ugaauucccucacu

SEQ ID NO: 1375703 - RNA, 13 nt, Human
ugaauucccucac

SEQ ID NO: 1375704 - RNA, 12 nt, Human
ugaauucccuca

SEQ ID NO: 1375705 - RNA, 13 nt, Human
ugaauuauucaau

SEQ ID NO: 1375706 - RNA, 17 nt, Human
ugaauuaugaaacuuuu

SEQ ID NO: 1375707 - RNA, 15 nt, Human
ugaauuaugaaacuu

SEQ ID NO: 1375708 - RNA, 21 nt, Human
ugaauuaucuugguugaaaau

SEQ ID NO: 1375709 - RNA, 13 nt, Human
ugaauuaugaaac

SEQ ID NO: 1375710 - RNA, 15 nt, Human
ugaauuauucaauuu

SEQ ID NO: 1375711 - RNA, 18 nt, Human
ugaauuauuacaguguuu

SEQ ID NO: 1375712 - RNA, 17 nt, Human
ugaauuauuacaguguu

SEQ ID NO: 1375713 - RNA, 16 nt, Human
ugaauuauuacagugu

SEQ ID NO: 1375714 - RNA, 14 nt, Human
ugaauuauuacagu

SEQ ID NO: 1375715 - RNA, 16 nt, Human
ugaauuauuuucucuc

SEQ ID NO: 1375716 - RNA, 18 nt, Human
ugaauuacauuuguauaa

SEQ ID NO: 1375717 - RNA, 16 nt, Human
ugaauuacauuuguau

SEQ ID NO: 1375718 - RNA, 15 nt, Human
ugaauuacauuugua

SEQ ID NO: 1375719 - RNA, 22 nt, Human
ugaauuaggcuguaacuacuuu

SEQ ID NO: 1375720 - RNA, 21 nt, Human
ugaauuaggcuguaacuacuu

SEQ ID NO: 1375721 - RNA, 20 nt, Human
ugaauuaggcuguaacuacu

SEQ ID NO: 1375722 - RNA, 17 nt, Human
ugaauuaggcuguaacu

SEQ ID NO: 1375723 - RNA, 15 nt, Human
ugaauuauauguuca

SEQ ID NO: 1375724 - RNA, 16 nt, Human
ugaauaaaaacucaag

SEQ ID NO: 1375725 - RNA, 18 nt, Human
ugaauaaaaacucaagga

SEQ ID NO: 1375726 - RNA, 15 nt, Human
ugaaguugcugcuuc

SEQ ID NO: 1375727 - RNA, 22 nt, Human
ugaaguugcugcuucucccagg

SEQ ID NO: 1375728 - RNA, 14 nt, Human
ugaaguugcugcuu

SEQ ID NO: 1375729 - RNA, 13 nt, Human
ugaaguugcugcu

SEQ ID NO: 1375730 - RNA, 18 nt, Human
ugaaguuagcuuuaacuu

SEQ ID NO: 1375731 - RNA, 23 nt, Human
ugaaguuagcuuuaacuuaaaua

SEQ ID NO: 1375732 - RNA, 11 nt, Human
ugaaguccaag

SEQ ID NO: 1375733 - RNA, 22 nt, Human
ugaagugcuguuuauuaaucuu

SEQ ID NO: 1375734 - RNA, 18 nt, Human
ugaagugcuguuuauuaa

SEQ ID NO: 1375735 - RNA, 23 nt, Human
ugaagugagcugagauugcacca

SEQ ID NO: 1375736 - RNA, 18 nt, Human
ugaagugagcacagccua

SEQ ID NO: 1375737 - RNA, 17 nt, Human
ugaagugagcacagccu

SEQ ID NO: 1375738 - RNA, 13 nt, Human
ugaaguccaagca

SEQ ID NO: 1375739 - RNA, 20 nt, Human
ugaaggacuaauagaaaagu

SEQ ID NO: 1375740 - RNA, 17 nt, Human
ugaaggacuaauagaaa

SEQ ID NO: 1375741 - RNA, 12 nt, Human
ugaaggacccuu

SEQ ID NO: 1375742 - RNA, 18 nt, Human
ugaaggcaaaauugcaaa

SEQ ID NO: 1375743 - RNA, 22 nt, Human
ugaaggacuaauagaaaaguau

SEQ ID NO: 1375744 - RNA, 14 nt, Human
ugaacucuuaauca

SEQ ID NO: 1375745 - RNA, 15 nt, Human
ugaacucuuaaucaa

SEQ ID NO: 1375746 - RNA, 14 nt, Human
ugaagauacugaaa

SEQ ID NO: 1375747 - RNA, 18 nt, Human
ugaagauacugaaauaaa

SEQ ID NO: 1375748 - RNA, 16 nt, Human
ugaagauacugaaaua

SEQ ID NO: 1375749 - RNA, 15 nt, Human
ugaagauacugaaau

SEQ ID NO: 1375750 - RNA, 15 nt, Human
ugacccuugcuguga

SEQ ID NO: 1375751 - RNA, 13 nt, Human
ugacccuuuucau

SEQ ID NO: 1375752 - RNA, 13 nt, Human
ugacccuggcucc

SEQ ID NO: 1375753 - RNA, 18 nt, Human
ugaccaguugcagucacu

SEQ ID NO: 1375754 - RNA, 17 nt, Human
ugaccaguugcagucac

SEQ ID NO: 1375755 - RNA, 16 nt, Human
ugaccaggcugccucc

SEQ ID NO: 1375756 - RNA, 16 nt, Human
ugaccaggcauccucc

SEQ ID NO: 1375757 - RNA, 22 nt, Human
ugaccagcucccccucccuccc

SEQ ID NO: 1375758 - RNA, 20 nt, Human
ugaccagcucccccucccuc

SEQ ID NO: 1375759 - RNA, 19 nt, Human
ugaccagcucccccucccu

SEQ ID NO: 1375760 - RNA, 18 nt, Human
ugaccagcucccccuccc

SEQ ID NO: 1375761 - RNA, 17 nt, Human
ugaccagcucccccucc

SEQ ID NO: 1375762 - RNA, 16 nt, Human
ugaccagcucccccuc

SEQ ID NO: 1375763 - RNA, 13 nt, Human
ugaccagcucccc

SEQ ID NO: 1375764 - RNA, 12 nt, Human
ugaccagcuccc

SEQ ID NO: 1375765 - RNA, 23 nt, Human
ugaccacuuuuuagaaagauaau

SEQ ID NO: 1375766 - RNA, 16 nt, Human
ugaccacucugucuug

SEQ ID NO: 1375767 - RNA, 15 nt, Human
ugaccacucugucuu

SEQ ID NO: 1375768 - RNA, 20 nt, Human
ugaccacucagagacaugca

SEQ ID NO: 1375769 - RNA, 18 nt, Human
ugaccacucagagacaug

SEQ ID NO: 1375770 - RNA, 16 nt, Human
ugaccacucagagaca

SEQ ID NO: 1375771 - RNA, 14 nt, Human
ugaccacucagaga

SEQ ID NO: 1375772 - RNA, 19 nt, Human
ugaccacagcacagccaac

SEQ ID NO: 1375773 - RNA, 17 nt, Human
ugaccacagcacagcca

SEQ ID NO: 1375774 - RNA, 16 nt, Human
ugaccacagcacagcc

SEQ ID NO: 1375775 - RNA, 15 nt, Human
ugaccacagcacagc

SEQ ID NO: 1375776 - RNA, 17 nt, Human
ugacauguccuucugag

SEQ ID NO: 1375777 - RNA, 14 nt, Human
ugacauguccuucu

SEQ ID NO: 1375778 - RNA, 18 nt, Human
ugacaugggacauuugcu

SEQ ID NO: 1375779 - RNA, 17 nt, Human
ugacaugggacauuugc

SEQ ID NO: 1375780 - RNA, 20 nt, Human
ugacauacccccucccccac

SEQ ID NO: 1375781 - RNA, 16 nt, Human
ugacauacccccuccc

SEQ ID NO: 1375782 - RNA, 15 nt, Human
ugacauacccccucc

SEQ ID NO: 1375783 - RNA, 22 nt, Human
ugacacuuuaauuaccaaccug

SEQ ID NO: 1375784 - RNA, 13 nt, Human
ugacacaaacaca

SEQ ID NO: 1375785 - RNA, 17 nt, Human
ugacacaaacacacaca

SEQ ID NO: 1375786 - RNA, 12 nt, Human
ugacacaaacac

SEQ ID NO: 1375787 - RNA, 17 nt, Human
ugacaaucauguguguu

SEQ ID NO: 1375788 - RNA, 18 nt, Human
ugacaaucauguguguua

SEQ ID NO: 1375789 - RNA, 16 nt, Human
ugacaaucaugugugu

SEQ ID NO: 1375790 - RNA, 15 nt, Human
ugacaaucaugugug

SEQ ID NO: 1375791 - RNA, 13 nt, Human
ugacaaucaugug

SEQ ID NO: 1375792 - RNA, 17 nt, Human
ugacaauaaaacauuaa

SEQ ID NO: 1375793 - RNA, 20 nt, Human
ugacaagcucacagaccuuu

SEQ ID NO: 1375794 - RNA, 15 nt, Human
ugacaagcucacaga

SEQ ID NO: 1375795 - RNA, 15 nt, Human
ugacaacuucuaauu

SEQ ID NO: 1375796 - RNA, 14 nt, Human
ugacaacuucuaau

SEQ ID NO: 1375797 - RNA, 18 nt, Human
ugaauuguaacuguucuu

SEQ ID NO: 1375798 - RNA, 22 nt, Human
ugacaacuucuaauugccaugu

SEQ ID NO: 1375799 - RNA, 19 nt, Human
ugacaacuucuaauugcca

SEQ ID NO: 1375800 - RNA, 12 nt, Human
ugacaagcucac

SEQ ID NO: 1375801 - RNA, 15 nt, Human
ugacagacaggcucu

SEQ ID NO: 1375802 - RNA, 14 nt, Human
ugacagacaggcuc

SEQ ID NO: 1375803 - RNA, 19 nt, Human
ugacagacaggcucuuagc

SEQ ID NO: 1375804 - RNA, 23 nt, Human
ugacauaaguauuuaauucaugu

SEQ ID NO: 1375805 - RNA, 15 nt, Human
ugauuuaauuugaaa

SEQ ID NO: 1375806 - RNA, 16 nt, Human
ugauuuaauguuuuca

SEQ ID NO: 1375807 - RNA, 13 nt, Human
ugauuuaauguuu

SEQ ID NO: 1375808 - RNA, 22 nt, Human
ugcagggaaaauuauuugcaua

SEQ ID NO: 1375809 - RNA, 21 nt, Human
ugcagggaaaauuauuugcau

SEQ ID NO: 1375810 - RNA, 20 nt, Human
ugcagggaaaauuauuugca

SEQ ID NO: 1375811 - RNA, 15 nt, Human
ugcagggaaaauuau

SEQ ID NO: 1375812 - RNA, 14 nt, Human
ugcagggcagucau

SEQ ID NO: 1375813 - RNA, 13 nt, Human
ugcagggcaguca

SEQ ID NO: 1375814 - RNA, 23 nt, Human
ugcagggauguggguuccacaga

SEQ ID NO: 1375815 - RNA, 22 nt, Human
ugcagggauguggguuccacag

SEQ ID NO: 1375816 - RNA, 18 nt, Human
ugcagggauguggguucc

SEQ ID NO: 1375817 - RNA, 16 nt, Human
ugcagggauguggguu

SEQ ID NO: 1375818 - RNA, 15 nt, Human
ugcagggaugugggu

SEQ ID NO: 1375819 - RNA, 14 nt, Human
ugcagggauguggg

SEQ ID NO: 1375820 - RNA, 23 nt, Human
ugcagggagcugggcuuccagaa

SEQ ID NO: 1375821 - RNA, 21 nt, Human
ugcagggcagucauuggcugu

SEQ ID NO: 1375822 - RNA, 21 nt, Human
ugcaguucccacauuaaagaa

SEQ ID NO: 1375823 - RNA, 21 nt, Human
ugcauaguaccaaucauuuua

SEQ ID NO: 1375824 - RNA, 20 nt, Human
ugcauaguaccaaucauuuu

SEQ ID NO: 1375825 - RNA, 19 nt, Human
ugcaguuuaucauucaagu

SEQ ID NO: 1375826 - RNA, 20 nt, Human
ugcauaggaguuuggaggaa

SEQ ID NO: 1375827 - RNA, 17 nt, Human
ugcaguuuaucauucaa

SEQ ID NO: 1375828 - RNA, 16 nt, Human
ugcaguuuaucauuca

SEQ ID NO: 1375829 - RNA, 12 nt, Human
ugcaguuuauca

SEQ ID NO: 1375830 - RNA, 10 nt, Human
ugcaguuuau

SEQ ID NO: 1375831 - RNA, 17 nt, Human
ugcaguugucucuguuu

SEQ ID NO: 1375832 - RNA, 15 nt, Human
ugcaguugucucugu

SEQ ID NO: 1375833 - RNA, 14 nt, Human
ugcaguugucucug

SEQ ID NO: 1375834 - RNA, 13 nt, Human
ugcaguugucucu

SEQ ID NO: 1375835 - RNA, 14 nt, Human
ugcaguucugaaga

SEQ ID NO: 1375836 - RNA, 12 nt, Human
ugcaguucugaa

SEQ ID NO: 1375837 - RNA, 22 nt, Human
ugcauaguaccaaucauuuuaa

SEQ ID NO: 1375838 - RNA, 19 nt, Human
ugcauauguugaauacuuu

SEQ ID NO: 1375839 - RNA, 18 nt, Human
ugcauauuauuuuauguu

SEQ ID NO: 1375840 - RNA, 19 nt, Human
ugccaaauuaaaaaagaua

SEQ ID NO: 1375841 - RNA, 18 nt, Human
ugccaaauuaaaaaagau

SEQ ID NO: 1375842 - RNA, 17 nt, Human
ugccaaauuaaaaaaga

SEQ ID NO: 1375843 - RNA, 13 nt, Human
ugccaaauuaaaa

SEQ ID NO: 1375844 - RNA, 18 nt, Human
ugccaaauauguccuggg

SEQ ID NO: 1375845 - RNA, 17 nt, Human
ugccaaauauguccugg

SEQ ID NO: 1375846 - RNA, 19 nt, Human
ugccaaaggaugugauaua

SEQ ID NO: 1375847 - RNA, 17 nt, Human
ugccaaaggaugugaua

SEQ ID NO: 1375848 - RNA, 16 nt, Human
ugccaaaggaugugau

SEQ ID NO: 1375849 - RNA, 15 nt, Human
ugccaaaggauguga

SEQ ID NO: 1375850 - RNA, 23 nt, Human
ugccaaacaaaaagguucucagg

SEQ ID NO: 1375851 - RNA, 17 nt, Human
ugccaaacaaaaagguu

SEQ ID NO: 1375852 - RNA, 19 nt, Human
ugcauuuggguccaggagg

SEQ ID NO: 1375853 - RNA, 20 nt, Human
ugcauuuggguccaggagga

SEQ ID NO: 1375854 - RNA, 18 nt, Human
ugcauuuggguccaggag

SEQ ID NO: 1375855 - RNA, 17 nt, Human
ugcauuuggguccagga

SEQ ID NO: 1375856 - RNA, 16 nt, Human
ugcauuuggguccagg

SEQ ID NO: 1375857 - RNA, 14 nt, Human
ugcauuugggucca

SEQ ID NO: 1375858 - RNA, 23 nt, Human
ugcauuuggugguuucagaaaug

SEQ ID NO: 1375859 - RNA, 23 nt, Human
ugcaucagaaagggagggcucug

SEQ ID NO: 1375860 - RNA, 22 nt, Human
ugcaucagaaagggagggcucu

SEQ ID NO: 1375861 - RNA, 21 nt, Human
ugcaucagaaagggagggcuc

SEQ ID NO: 1375862 - RNA, 20 nt, Human
ugcaucagaaagggagggcu

SEQ ID NO: 1375863 - RNA, 18 nt, Human
ugcaucagaaagggaggg

SEQ ID NO: 1375864 - RNA, 17 nt, Human
ugcaucagaaagggagg

SEQ ID NO: 1375865 - RNA, 20 nt, Human
ugcauggugccccaggacca

SEQ ID NO: 1375866 - RNA, 19 nt, Human
ugcauggugccccaggacc

SEQ ID NO: 1375867 - RNA, 18 nt, Human
ugcauggugccccaggac

SEQ ID NO: 1375868 - RNA, 17 nt, Human
ugcauggugccccagga

SEQ ID NO: 1375869 - RNA, 22 nt, Human
ugcauggugccccaggaccagc

SEQ ID NO: 1375870 - RNA, 21 nt, Human
ugcauggugccccaggaccag

SEQ ID NO: 1375871 - RNA, 20 nt, Human
ugcauuuggagggagugagu

SEQ ID NO: 1375872 - RNA, 16 nt, Human
ugcauuugauacauuu

SEQ ID NO: 1375873 - RNA, 21 nt, Human
ugcauuuggugguuucagaaa

SEQ ID NO: 1375874 - RNA, 15 nt, Human
ugccaggagcacggc

SEQ ID NO: 1375875 - RNA, 20 nt, Human
ugccaggaccagucaaccug

SEQ ID NO: 1375876 - RNA, 22 nt, Human
ugccacguuggagaagcccgug

SEQ ID NO: 1375877 - RNA, 17 nt, Human
ugccaggaggacccagg

SEQ ID NO: 1375878 - RNA, 13 nt, Human
ugccaggaggacc

SEQ ID NO: 1375879 - RNA, 20 nt, Human
ugccaggagcacggcucugu

SEQ ID NO: 1375880 - RNA, 19 nt, Human
ugccaggagcacggcucug

SEQ ID NO: 1375881 - RNA, 14 nt, Human
ugccaccugucugu

SEQ ID NO: 1375882 - RNA, 15 nt, Human
ugccaccugucuguc

SEQ ID NO: 1375883 - RNA, 16 nt, Human
ugccaccugucugucu

SEQ ID NO: 1375884 - RNA, 17 nt, Human
ugccaccuccccccaca

SEQ ID NO: 1375885 - RNA, 15 nt, Human
ugccaccucccccca

SEQ ID NO: 1375886 - RNA, 18 nt, Human
ugccaaccuaaaacucuu

SEQ ID NO: 1375887 - RNA, 16 nt, Human
ugccaaccuaaaacuc

SEQ ID NO: 1375888 - RNA, 12 nt, Human
ugccaaccuaaa

SEQ ID NO: 1375889 - RNA, 22 nt, Human
ugccaaauuaaaaaagauaaac

SEQ ID NO: 1375890 - RNA, 22 nt, Human
ugccaaauuauucuccuauguu

SEQ ID NO: 1375891 - RNA, 13 nt, Human
ugccaccuggacc

SEQ ID NO: 1375892 - RNA, 19 nt, Human
ugccaccucuaacagcacc

SEQ ID NO: 1375893 - RNA, 20 nt, Human
ugccaccucuaacagcacca

SEQ ID NO: 1375894 - RNA, 18 nt, Human
ugccaccucuaacagcac

SEQ ID NO: 1375895 - RNA, 14 nt, Human
ugccaccuccugcc

SEQ ID NO: 1375896 - RNA, 20 nt, Human
ugccaccuggaccccugcau

SEQ ID NO: 1375897 - RNA, 19 nt, Human
ugccaccuggaccccugca

SEQ ID NO: 1375898 - RNA, 18 nt, Human
ugccaccuggaccccugc

SEQ ID NO: 1375899 - RNA, 15 nt, Human
ugccaccuggacccc

SEQ ID NO: 1375900 - RNA, 14 nt, Human
ugccaccuggaccc

SEQ ID NO: 1375901 - RNA, 10 nt, Human
ugccaccugu

SEQ ID NO: 1375902 - RNA, 11 nt, Human
ugccaccuguc

SEQ ID NO: 1375903 - RNA, 12 nt, Human
ugccaccugucu

SEQ ID NO: 1375904 - RNA, 13 nt, Human
ugccaccugucug

SEQ ID NO: 1375905 - RNA, 20 nt, Human
ugcccgccugggucuccuaa

SEQ ID NO: 1375906 - RNA, 11 nt, Human
ugccccuuucu

SEQ ID NO: 1375907 - RNA, 14 nt, Human
ugccccuuucugga

SEQ ID NO: 1375908 - RNA, 19 nt, Human
ugccccuuuauaaauccaa

SEQ ID NO: 1375909 - RNA, 20 nt, Human
ugccccuuggacacgcucag

SEQ ID NO: 1375910 - RNA, 21 nt, Human
ugccccuugacaacuggcagg

SEQ ID NO: 1375911 - RNA, 20 nt, Human
ugccccuugacaacuggcag

SEQ ID NO: 1375912 - RNA, 15 nt, Human
ugccccucucaccaa

SEQ ID NO: 1375913 - RNA, 14 nt, Human
ugccccucucacca

SEQ ID NO: 1375914 - RNA, 12 nt, Human
ugccccucucac

SEQ ID NO: 1375915 - RNA, 20 nt, Human
ugccccucuccuucuuagcu

SEQ ID NO: 1375916 - RNA, 15 nt, Human
ugccccucuccuucu

SEQ ID NO: 1375917 - RNA, 19 nt, Human
ugccccacuuguccuuagc

SEQ ID NO: 1375918 - RNA, 18 nt, Human
ugccccacuuguccuuag

SEQ ID NO: 1375919 - RNA, 14 nt, Human
ugccccacuugucc

SEQ ID NO: 1375920 - RNA, 20 nt, Human
ugccccaacuccuuccagcu

SEQ ID NO: 1375921 - RNA, 22 nt, Human
ugccccaacuccuuccagcuag

SEQ ID NO: 1375922 - RNA, 19 nt, Human
ugccccaacuccuuccagc

SEQ ID NO: 1375923 - RNA, 18 nt, Human
ugccccaacuccuuccag

SEQ ID NO: 1375924 - RNA, 16 nt, Human
ugccccaacuccuucc

SEQ ID NO: 1375925 - RNA, 14 nt, Human
ugcccauuuugaau

SEQ ID NO: 1375926 - RNA, 15 nt, Human
ugcccauguuucaaa

SEQ ID NO: 1375927 - RNA, 13 nt, Human
ugcccauguuuca

SEQ ID NO: 1375928 - RNA, 20 nt, Human
ugcccagagacccagcggac

SEQ ID NO: 1375929 - RNA, 23 nt, Human
ugcccagagacccagcggacaca

SEQ ID NO: 1375930 - RNA, 17 nt, Human
ugccaggcuaauuuuuu

SEQ ID NO: 1375931 - RNA, 12 nt, Human
ugccaggcucuc

SEQ ID NO: 1375932 - RNA, 16 nt, Human
ugccaggcuaauuuuu

SEQ ID NO: 1375933 - RNA, 17 nt, Human
ugccaggcuggagugca

SEQ ID NO: 1375934 - RNA, 18 nt, Human
ugcccagagacccagcgg

SEQ ID NO: 1375935 - RNA, 17 nt, Human
ugcccagagacccagcg

SEQ ID NO: 1375936 - RNA, 16 nt, Human
ugcccagagacccagc

SEQ ID NO: 1375937 - RNA, 15 nt, Human
ugcccagagacccag

SEQ ID NO: 1375938 - RNA, 14 nt, Human
ugccaggcucucuu

SEQ ID NO: 1375939 - RNA, 10 nt, Human
ugcccagaca

SEQ ID NO: 1375940 - RNA, 19 nt, Human
ugccaggcuggagugcagu

SEQ ID NO: 1375941 - RNA, 14 nt, Human
ugccucaaccuccc

SEQ ID NO: 1375942 - RNA, 22 nt, Human
ugccucaaauaaaaagugcuuu

SEQ ID NO: 1375943 - RNA, 21 nt, Human
ugccucaaauaaaaagugcuu

SEQ ID NO: 1375944 - RNA, 12 nt, Human
ugccucaaauaa

SEQ ID NO: 1375945 - RNA, 20 nt, Human
ugccuauugcuagagcuccu

SEQ ID NO: 1375946 - RNA, 18 nt, Human
ugccuauugcuagagcuc

SEQ ID NO: 1375947 - RNA, 17 nt, Human
ugccuauugcuagagcu

SEQ ID NO: 1375948 - RNA, 21 nt, Human
ugccuauuaucugucagcugc

SEQ ID NO: 1375949 - RNA, 20 nt, Human
ugccucggccucccaaagug

SEQ ID NO: 1375950 - RNA, 21 nt, Human
ugccucgcuccccacucugcu

SEQ ID NO: 1375951 - RNA, 20 nt, Human
ugccuccugccggcuccuug

SEQ ID NO: 1375952 - RNA, 21 nt, Human
ugccuccugccggcuccuugg

SEQ ID NO: 1375953 - RNA, 14 nt, Human
ugccuccugccggc

SEQ ID NO: 1375954 - RNA, 15 nt, Human
ugccuccucccuccc

SEQ ID NO: 1375955 - RNA, 16 nt, Human
ugccucaaugccagua

SEQ ID NO: 1375956 - RNA, 15 nt, Human
ugccucaaugccagu

SEQ ID NO: 1375957 - RNA, 13 nt, Human
ugccucaaugcca

SEQ ID NO: 1375958 - RNA, 19 nt, Human
ugccuccucccucccucuc

SEQ ID NO: 1375959 - RNA, 13 nt, Human
ugccuccucccuc

SEQ ID NO: 1375960 - RNA, 12 nt, Human
ugccuccucccu

SEQ ID NO: 1375961 - RNA, 11 nt, Human
ugccuccuccc

SEQ ID NO: 1375962 - RNA, 20 nt, Human
ugcccggcuaauuuuuguaa

SEQ ID NO: 1375963 - RNA, 22 nt, Human
ugcugcugagaaccuggccuuc

SEQ ID NO: 1375964 - RNA, 20 nt, Human
ugcugcugagaaccuggccu

SEQ ID NO: 1375965 - RNA, 19 nt, Human
ugcugcugagaaccuggcc

SEQ ID NO: 1375966 - RNA, 21 nt, Human
ugcugcugagaaccuggccuu

SEQ ID NO: 1375967 - RNA, 13 nt, Human
ugcugcugccugc

SEQ ID NO: 1375968 - RNA, 14 nt, Human
ugcugcugccugcc

SEQ ID NO: 1375969 - RNA, 14 nt, Human
ugcugggauuucca

SEQ ID NO: 1375970 - RNA, 23 nt, Human
ugcugcuucucccaggcaaggcu

SEQ ID NO: 1375971 - RNA, 20 nt, Human
ugcugcuucucccaggcaag

SEQ ID NO: 1375972 - RNA, 19 nt, Human
ugcugcuucucccaggcaa

SEQ ID NO: 1375973 - RNA, 18 nt, Human
ugcugcuucucccaggca

SEQ ID NO: 1375974 - RNA, 15 nt, Human
ugcugcuucucccag

SEQ ID NO: 1375975 - RNA, 14 nt, Human
ugcugggccccugc

SEQ ID NO: 1375976 - RNA, 16 nt, Human
ugcugggccccugccu

SEQ ID NO: 1375977 - RNA, 17 nt, Human
ugcugggccccugccuc

SEQ ID NO: 1375978 - RNA, 18 nt, Human
ugcugggccccugccucu

SEQ ID NO: 1375979 - RNA, 19 nt, Human
ugcugggccccugccucuc

SEQ ID NO: 1375980 - RNA, 21 nt, Human
ugcugggccccugccucucug

SEQ ID NO: 1375981 - RNA, 22 nt, Human
ugcugggccccugccucucugc

SEQ ID NO: 1375982 - RNA, 23 nt, Human
ugcugggccccugccucucugca

SEQ ID NO: 1375983 - RNA, 24 nt, Human
ugcugggccccugccucucugcag

SEQ ID NO: 1375984 - RNA, 14 nt, Human
ugcucuuucucugc

SEQ ID NO: 1375985 - RNA, 13 nt, Human
ugcucuuucucug

SEQ ID NO: 1375986 - RNA, 12 nt, Human
ugcucuuucucu

SEQ ID NO: 1375987 - RNA, 17 nt, Human
ugcugcauuuaaaagau

SEQ ID NO: 1375988 - RNA, 18 nt, Human
ugcugcauuuaaaagaua

SEQ ID NO: 1375989 - RNA, 19 nt, Human
ugcugcauuuaaaagauac

SEQ ID NO: 1375990 - RNA, 23 nt, Human
ugcugcauuuaaaagauacaguu

SEQ ID NO: 1375991 - RNA, 18 nt, Human
ugcugcugagaaccuggc

SEQ ID NO: 1375992 - RNA, 17 nt, Human
ugcugcugagaaccugg

SEQ ID NO: 1375993 - RNA, 16 nt, Human
ugcugcugagaaccug

SEQ ID NO: 1375994 - RNA, 15 nt, Human
ugcugcugagaaccu

SEQ ID NO: 1375995 - RNA, 13 nt, Human
ugcugcugagaac

SEQ ID NO: 1375996 - RNA, 11 nt, Human
ugcugcugaga

SEQ ID NO: 1375997 - RNA, 23 nt, Human
ugcugcucuuggcuggacccagc

SEQ ID NO: 1375998 - RNA, 21 nt, Human
ugcugcucuuggcuggaccca

SEQ ID NO: 1375999 - RNA, 19 nt, Human
ugcugcucuuggcuggacc

SEQ ID NO: 1376000 - RNA, 18 nt, Human
ugcugcucuuggcuggac

SEQ ID NO: 1376001 - RNA, 17 nt, Human
ugcugcucuuggcugga

SEQ ID NO: 1376002 - RNA, 16 nt, Human
ugcugcucccucagac

SEQ ID NO: 1376003 - RNA, 17 nt, Human
ugcugcucccucagacu

SEQ ID NO: 1376004 - RNA, 15 nt, Human
ugcugcucccucaga

SEQ ID NO: 1376005 - RNA, 14 nt, Human
ugcugcucccucag

SEQ ID NO: 1376006 - RNA, 13 nt, Human
ugcugcucccuca

SEQ ID NO: 1376007 - RNA, 20 nt, Human
ugcugccuuauucagggaag

SEQ ID NO: 1376008 - RNA, 19 nt, Human
ugcugccuuauucagggaa

SEQ ID NO: 1376009 - RNA, 18 nt, Human
ugcugccuuauucaggga

SEQ ID NO: 1376010 - RNA, 16 nt, Human
ugcugccucccucugc

SEQ ID NO: 1376011 - RNA, 15 nt, Human
ugcucuuucucugcc

SEQ ID NO: 1376012 - RNA, 15 nt, Human
ugcugccugcuuuuu

SEQ ID NO: 1376013 - RNA, 17 nt, Human
ugcugccugcuuuuuau

SEQ ID NO: 1376014 - RNA, 17 nt, Human
ugcuggggccugggaca

SEQ ID NO: 1376015 - RNA, 14 nt, Human
ugcuggggccuggg

SEQ ID NO: 1376016 - RNA, 22 nt, Human
ugcuggggaagacaguggcccc

SEQ ID NO: 1376017 - RNA, 17 nt, Human
ugcuggggaagacagug

SEQ ID NO: 1376018 - RNA, 16 nt, Human
ugcuggggaagacagu

SEQ ID NO: 1376019 - RNA, 23 nt, Human
ugcuggggccugggacaacugcu

SEQ ID NO: 1376020 - RNA, 18 nt, Human
ugcuggggccugguuccc

SEQ ID NO: 1376021 - RNA, 17 nt, Human
ugcugggcucagugaag

SEQ ID NO: 1376022 - RNA, 15 nt, Human
ugcugggcucaguga

SEQ ID NO: 1376023 - RNA, 14 nt, Human
ugcugggcucagug

SEQ ID NO: 1376024 - RNA, 13 nt, Human
ugcugggcucagu

SEQ ID NO: 1376025 - RNA, 12 nt, Human
ugcugggcucag

SEQ ID NO: 1376026 - RNA, 16 nt, Human
ugcugggauuuccaac

SEQ ID NO: 1376027 - RNA, 22 nt, Human
ugcuggguccauaucacacaca

SEQ ID NO: 1376028 - RNA, 16 nt, Human
ugcugguccgugggac

SEQ ID NO: 1376029 - RNA, 13 nt, Human
ugcugguccgugg

SEQ ID NO: 1376030 - RNA, 19 nt, Human
ugcuggucccggggccagc

SEQ ID NO: 1376031 - RNA, 18 nt, Human
ugcuggugagccaagcag

SEQ ID NO: 1376032 - RNA, 20 nt, Human
ugcuguaaagaguugcuuuu

SEQ ID NO: 1376033 - RNA, 16 nt, Human
ugcugugguguguccc

SEQ ID NO: 1376034 - RNA, 15 nt, Human
ugcuguggugugucc

SEQ ID NO: 1376035 - RNA, 22 nt, Human
ugcugguuuguaguugaauauu

SEQ ID NO: 1376036 - RNA, 13 nt, Human
ugcugguuuguag

SEQ ID NO: 1376037 - RNA, 13 nt, Human
ugcugguuuuagu

SEQ ID NO: 1376038 - RNA, 21 nt, Human
ugcugugugcuuuuuuugugu

SEQ ID NO: 1376039 - RNA, 12 nt, Human
ugcuguguaaaa

SEQ ID NO: 1376040 - RNA, 23 nt, Human
ugcuguggugugucccccucugu

SEQ ID NO: 1376041 - RNA, 17 nt, Human
ugcuguggugugucccc

SEQ ID NO: 1376042 - RNA, 15 nt, Human
ugcugugugcuuuuu

SEQ ID NO: 1376043 - RNA, 22 nt, Human
ugcuguucucuugggaacugaa

SEQ ID NO: 1376044 - RNA, 17 nt, Human
ugcuguucaugaaagau

SEQ ID NO: 1376045 - RNA, 16 nt, Human
ugcuguucaugaaaga

SEQ ID NO: 1376046 - RNA, 21 nt, Human
ugcucauauugugauucugcc

SEQ ID NO: 1376047 - RNA, 16 nt, Human
ugcucauaacggauca

SEQ ID NO: 1376048 - RNA, 14 nt, Human
ugcucauaacggau

SEQ ID NO: 1376049 - RNA, 23 nt, Human
ugcucauauugugauucugccuu

SEQ ID NO: 1376050 - RNA, 22 nt, Human
ugcucauauugugauucugccu

SEQ ID NO: 1376051 - RNA, 16 nt, Human
ugcucuaacagcccuc

SEQ ID NO: 1376052 - RNA, 15 nt, Human
ugcucuaacagcccu

SEQ ID NO: 1376053 - RNA, 21 nt, Human
ugcucggggugcacaggaggg

SEQ ID NO: 1376054 - RNA, 22 nt, Human
ugcucggggugcacaggagggg

SEQ ID NO: 1376055 - RNA, 20 nt, Human
ugcucggggugcacaggagg

SEQ ID NO: 1376056 - RNA, 19 nt, Human
ugcucggggugcacaggag

SEQ ID NO: 1376057 - RNA, 18 nt, Human
ugcucggggugcacagga

SEQ ID NO: 1376058 - RNA, 17 nt, Human
ugcucggggugcacagg

SEQ ID NO: 1376059 - RNA, 16 nt, Human
ugcucggggugcacag

SEQ ID NO: 1376060 - RNA, 15 nt, Human
ugcucggggugcaca

SEQ ID NO: 1376061 - RNA, 19 nt, Human
ugcucgcuguugcugaaua

SEQ ID NO: 1376062 - RNA, 21 nt, Human
ugcucuuggcuggacccagcc

SEQ ID NO: 1376063 - RNA, 20 nt, Human
ugcucuuggcuggacccagc

SEQ ID NO: 1376064 - RNA, 19 nt, Human
ugcucuuggcuggacccag

SEQ ID NO: 1376065 - RNA, 15 nt, Human
ugcucuuggcuggac

SEQ ID NO: 1376066 - RNA, 14 nt, Human
ugcucuuggcugga

SEQ ID NO: 1376067 - RNA, 15 nt, Human
ugcucuccucuucua

SEQ ID NO: 1376068 - RNA, 14 nt, Human
ugcucuccucuucu

SEQ ID NO: 1376069 - RNA, 13 nt, Human
ugcucuccucuuc

SEQ ID NO: 1376070 - RNA, 11 nt, Human
ugcucuccucu

SEQ ID NO: 1376071 - RNA, 12 nt, Human
ugcucuccucuu

SEQ ID NO: 1376072 - RNA, 10 nt, Human
ugcucuccuc

SEQ ID NO: 1376073 - RNA, 13 nt, Human
ugcucuccuccac

SEQ ID NO: 1376074 - RNA, 18 nt, Human
ugcuaggccagagcccac

SEQ ID NO: 1376075 - RNA, 19 nt, Human
ugcuaggccagagcccacu

SEQ ID NO: 1376076 - RNA, 17 nt, Human
ugcuaggccagagccca

SEQ ID NO: 1376077 - RNA, 14 nt, Human
ugcuaggccagagc

SEQ ID NO: 1376078 - RNA, 18 nt, Human
ugcuaggaagaggagugg

SEQ ID NO: 1376079 - RNA, 12 nt, Human
ugcuaggaagag

SEQ ID NO: 1376080 - RNA, 13 nt, Human
ugcucagacagaa

SEQ ID NO: 1376081 - RNA, 17 nt, Human
ugcucacgucaaaugca

SEQ ID NO: 1376082 - RNA, 19 nt, Human
ugcucacccagugcccucu

SEQ ID NO: 1376083 - RNA, 14 nt, Human
ugcucacccagugc

SEQ ID NO: 1376084 - RNA, 18 nt, Human
ugcucaggagcccuggga

SEQ ID NO: 1376085 - RNA, 19 nt, Human
ugcucaggagcccugggag

SEQ ID NO: 1376086 - RNA, 20 nt, Human
ugcucaggagcccugggagg

SEQ ID NO: 1376087 - RNA, 18 nt, Human
ugcuacuggggaaacugg

SEQ ID NO: 1376088 - RNA, 13 nt, Human
ugcuacuggggaa

SEQ ID NO: 1376089 - RNA, 15 nt, Human
ugcuagaacaugguu

SEQ ID NO: 1376090 - RNA, 16 nt, Human
ugcuacuuauauaauu

SEQ ID NO: 1376091 - RNA, 19 nt, Human
ugcuacuggggaaacuggc

SEQ ID NO: 1376092 - RNA, 22 nt, Human
ugcuacuggggaaacuggccau

SEQ ID NO: 1376093 - RNA, 19 nt, Human
ugcuaacggugcucagggg

SEQ ID NO: 1376094 - RNA, 18 nt, Human
ugcuaacggugcucaggg

SEQ ID NO: 1376095 - RNA, 22 nt, Human
ugcguguuuggguuuuuuuccu

SEQ ID NO: 1376096 - RNA, 17 nt, Human
ugccuuggccucccaag

SEQ ID NO: 1376097 - RNA, 17 nt, Human
ugccucuaccugacacu

SEQ ID NO: 1376098 - RNA, 15 nt, Human
ugccucuaccugaca

SEQ ID NO: 1376099 - RNA, 19 nt, Human
ugccucuacugggaaggcu

SEQ ID NO: 1376100 - RNA, 16 nt, Human
ugccucuacugggaag

SEQ ID NO: 1376101 - RNA, 23 nt, Human
ugccucuaccugacacucccuug

SEQ ID NO: 1376102 - RNA, 20 nt, Human
ugccuugcauaauggucaga

SEQ ID NO: 1376103 - RNA, 17 nt, Human
ugcgccaccgcccagag

SEQ ID NO: 1376104 - RNA, 18 nt, Human
ugcgcuccuggcccagcc

SEQ ID NO: 1376105 - RNA, 20 nt, Human
ugcgcuccuggcccagccuu

SEQ ID NO: 1376106 - RNA, 17 nt, Human
ugcgcuccuggcccagc

SEQ ID NO: 1376107 - RNA, 14 nt, Human
ugcgcuccuggccc

SEQ ID NO: 1376108 - RNA, 13 nt, Human
ugcgcuccuggcc

SEQ ID NO: 1376109 - RNA, 23 nt, Human
ugcgcucagggccaugcugaggc

SEQ ID NO: 1376110 - RNA, 22 nt, Human
ugcgcucagggccaugcugagg

SEQ ID NO: 1376111 - RNA, 21 nt, Human
ugcgcucagggccaugcugag

SEQ ID NO: 1376112 - RNA, 19 nt, Human
ugcgcucagggccaugcug

SEQ ID NO: 1376113 - RNA, 15 nt, Human
ugcgcucagggccau

SEQ ID NO: 1376114 - RNA, 14 nt, Human
ugcgcucagggcca

SEQ ID NO: 1376115 - RNA, 13 nt, Human
ugcgcucagggcc

SEQ ID NO: 1376116 - RNA, 15 nt, Human
uggccucaaagcaag

SEQ ID NO: 1376117 - RNA, 21 nt, Human
uggccccucaaaucguccagc

SEQ ID NO: 1376118 - RNA, 16 nt, Human
uggccccguuucuggu

SEQ ID NO: 1376119 - RNA, 15 nt, Human
uggccccguuucugg

SEQ ID NO: 1376120 - RNA, 11 nt, Human
uggcccccucc

SEQ ID NO: 1376121 - RNA, 15 nt, Human
uggccccccuggucc

SEQ ID NO: 1376122 - RNA, 21 nt, Human
uggccccccugguccccuccu

SEQ ID NO: 1376123 - RNA, 22 nt, Human
uggcccaucaggguaggcugga

SEQ ID NO: 1376124 - RNA, 12 nt, Human
uggcccaucagg

SEQ ID NO: 1376125 - RNA, 23 nt, Human
uggcccagggcccagagcccagc

SEQ ID NO: 1376126 - RNA, 22 nt, Human
uggcccagggcccagagcccag

SEQ ID NO: 1376127 - RNA, 21 nt, Human
uggcccagggcccagagccca

SEQ ID NO: 1376128 - RNA, 20 nt, Human
uggcccagggcccagagccc

SEQ ID NO: 1376129 - RNA, 18 nt, Human
uggcccagggcccagagc

SEQ ID NO: 1376130 - RNA, 17 nt, Human
uggcccagggcccagag

SEQ ID NO: 1376131 - RNA, 13 nt, Human
uggccaggaagcu

SEQ ID NO: 1376132 - RNA, 21 nt, Human
uggccaggaagcuuuggugag

SEQ ID NO: 1376133 - RNA, 21 nt, Human
uggccagcuggaggcaggggc

SEQ ID NO: 1376134 - RNA, 23 nt, Human
uggccagcgagcgcccagcuccu

SEQ ID NO: 1376135 - RNA, 22 nt, Human
uggccagccccuuagacagagg

SEQ ID NO: 1376136 - RNA, 21 nt, Human
uggccagccccuuagacagag

SEQ ID NO: 1376137 - RNA, 20 nt, Human
uggccagccccuuagacaga

SEQ ID NO: 1376138 - RNA, 16 nt, Human
uggccagccccuuaga

SEQ ID NO: 1376139 - RNA, 12 nt, Human
uggccagccccu

SEQ ID NO: 1376140 - RNA, 20 nt, Human
uggcagaguuacaguucugu

SEQ ID NO: 1376141 - RNA, 19 nt, Human
uggcagaguuacaguucug

SEQ ID NO: 1376142 - RNA, 18 nt, Human
uggcagagaugccucccu

SEQ ID NO: 1376143 - RNA, 19 nt, Human
uggcagagaugccucccug

SEQ ID NO: 1376144 - RNA, 17 nt, Human
uggcagagaugccuccc

SEQ ID NO: 1376145 - RNA, 13 nt, Human
uggcagagaugcc

SEQ ID NO: 1376146 - RNA, 17 nt, Human
uggcagaguuacaguuc

SEQ ID NO: 1376147 - RNA, 12 nt, Human
uggcagaguuac

SEQ ID NO: 1376148 - RNA, 17 nt, Human
uggccuccccugccacc

SEQ ID NO: 1376149 - RNA, 15 nt, Human
uggccuccccugcca

SEQ ID NO: 1376150 - RNA, 14 nt, Human
uggccuccccugcc

SEQ ID NO: 1376151 - RNA, 15 nt, Human
uggccucccccacuu

SEQ ID NO: 1376152 - RNA, 21 nt, Human
uggccucauguggcuggaaga

SEQ ID NO: 1376153 - RNA, 20 nt, Human
uggccucauguggcuggaag

SEQ ID NO: 1376154 - RNA, 19 nt, Human
uggccucauguggcuggaa

SEQ ID NO: 1376155 - RNA, 18 nt, Human
uggccucauguggcugga

SEQ ID NO: 1376156 - RNA, 17 nt, Human
uggccucauguggcugg

SEQ ID NO: 1376157 - RNA, 15 nt, Human
uggccucauguggcu

SEQ ID NO: 1376158 - RNA, 13 nt, Human
uggccucaugugg

SEQ ID NO: 1376159 - RNA, 19 nt, Human
uggccucagcucccacaag

SEQ ID NO: 1376160 - RNA, 16 nt, Human
uggcgaugccagccaa

SEQ ID NO: 1376161 - RNA, 19 nt, Human
uggcgaugccagccaagcu

SEQ ID NO: 1376162 - RNA, 14 nt, Human
uggcgaugccagcc

SEQ ID NO: 1376163 - RNA, 13 nt, Human
uggcgaugccagc

SEQ ID NO: 1376164 - RNA, 23 nt, Human
uggccuccccugccaccaggcca

SEQ ID NO: 1376165 - RNA, 21 nt, Human
uggccuccccugccaccaggc

SEQ ID NO: 1376166 - RNA, 20 nt, Human
uggccuccccugccaccagg

SEQ ID NO: 1376167 - RNA, 19 nt, Human
uggccuccccugccaccag

SEQ ID NO: 1376168 - RNA, 21 nt, Human
uggcucccaggggcucccucc

SEQ ID NO: 1376169 - RNA, 19 nt, Human
uggcucccaggggcucccu

SEQ ID NO: 1376170 - RNA, 14 nt, Human
uggcucccaggggc

SEQ ID NO: 1376171 - RNA, 20 nt, Human
uggcugcugaucgccuuccc

SEQ ID NO: 1376172 - RNA, 17 nt, Human
uggcguaggcuacagag

SEQ ID NO: 1376173 - RNA, 16 nt, Human
uggcguaggcuacaga

SEQ ID NO: 1376174 - RNA, 23 nt, Human
uggcguaaguacagagaagccau

SEQ ID NO: 1376175 - RNA, 22 nt, Human
uggcguaaguacagagaagcca

SEQ ID NO: 1376176 - RNA, 21 nt, Human
uggcguaaguacagagaagcc

SEQ ID NO: 1376177 - RNA, 20 nt, Human
uggcguaaguacagagaagc

SEQ ID NO: 1376178 - RNA, 19 nt, Human
uggcguaaguacagagaag

SEQ ID NO: 1376179 - RNA, 18 nt, Human
uggcguaaguacagagaa

SEQ ID NO: 1376180 - RNA, 17 nt, Human
uggcguaaguacagaga

SEQ ID NO: 1376181 - RNA, 20 nt, Human
uggcggcuggggucccagca

SEQ ID NO: 1376182 - RNA, 21 nt, Human
uggcggcuggggucccagcag

SEQ ID NO: 1376183 - RNA, 16 nt, Human
uggcguaaguacagag

SEQ ID NO: 1376184 - RNA, 15 nt, Human
uggcguaaguacaga

SEQ ID NO: 1376185 - RNA, 18 nt, Human
uggcggggggcccauugg

SEQ ID NO: 1376186 - RNA, 19 nt, Human
uggcggggaggaggaaauc

SEQ ID NO: 1376187 - RNA, 17 nt, Human
uggcggggaggaggaaa

SEQ ID NO: 1376188 - RNA, 15 nt, Human
uggcgggguggggug

SEQ ID NO: 1376189 - RNA, 17 nt, Human
uggcaaaggaaggugga

SEQ ID NO: 1376190 - RNA, 21 nt, Human
uggcaaagccuucauugccuu

SEQ ID NO: 1376191 - RNA, 20 nt, Human
uggcaaaacucuacuuaauc

SEQ ID NO: 1376192 - RNA, 23 nt, Human
uggauuuuuuccuucaaaguuua

SEQ ID NO: 1376193 - RNA, 18 nt, Human
uggauuuuucuuuaacug

SEQ ID NO: 1376194 - RNA, 22 nt, Human
uggcacuaacguugagccccug

SEQ ID NO: 1376195 - RNA, 15 nt, Human
uggcacuaguauuuc

SEQ ID NO: 1376196 - RNA, 14 nt, Human
uggcaagugaauuu

SEQ ID NO: 1376197 - RNA, 17 nt, Human
uggcaaggguucaccug

SEQ ID NO: 1376198 - RNA, 20 nt, Human
uggcaauagucaaauugugu

SEQ ID NO: 1376199 - RNA, 14 nt, Human
uggaggaccugagc

SEQ ID NO: 1376200 - RNA, 15 nt, Human
uggaggaccugagcc

SEQ ID NO: 1376201 - RNA, 13 nt, Human
uggaggaccugag

SEQ ID NO: 1376202 - RNA, 18 nt, Human
uggaguuuuuuguaccaa

SEQ ID NO: 1376203 - RNA, 17 nt, Human
uggaguuuuuuguacca

SEQ ID NO: 1376204 - RNA, 16 nt, Human
uggaguuuuguuuccu

SEQ ID NO: 1376205 - RNA, 20 nt, Human
uggaguuuuguuuccucugu

SEQ ID NO: 1376206 - RNA, 17 nt, Human
uggaguuucuaaggucc

SEQ ID NO: 1376207 - RNA, 16 nt, Human
uggaguuucuaagguc

SEQ ID NO: 1376208 - RNA, 14 nt, Human
uggaguuucuaagg

SEQ ID NO: 1376209 - RNA, 13 nt, Human
uggaguuucuaag

SEQ ID NO: 1376210 - RNA, 21 nt, Human
uggaguuucauguacaagaug

SEQ ID NO: 1376211 - RNA, 21 nt, Human
uggauaacuuccacagggucc

SEQ ID NO: 1376212 - RNA, 22 nt, Human
uggaucucccugagaugggcuu

SEQ ID NO: 1376213 - RNA, 16 nt, Human
uggauaacuuccacag

SEQ ID NO: 1376214 - RNA, 15 nt, Human
uggauaacuuccaca

SEQ ID NO: 1376215 - RNA, 20 nt, Human
uggacucagggcagcgccag

SEQ ID NO: 1376216 - RNA, 18 nt, Human
uggacucagggcagcgcc

SEQ ID NO: 1376217 - RNA, 15 nt, Human
uggacucagggcagc

SEQ ID NO: 1376218 - RNA, 14 nt, Human
uggacucagggcag

SEQ ID NO: 1376219 - RNA, 19 nt, Human
uggaccacugggcaaugau

SEQ ID NO: 1376220 - RNA, 15 nt, Human
uggaccacugggcaa

SEQ ID NO: 1376221 - RNA, 15 nt, Human
uggaccagccucucc

SEQ ID NO: 1376222 - RNA, 19 nt, Human
uggacugagugggaagccc

SEQ ID NO: 1376223 - RNA, 17 nt, Human
uggacugagugggaagc

SEQ ID NO: 1376224 - RNA, 14 nt, Human
uggacuggaagggg

SEQ ID NO: 1376225 - RNA, 11 nt, Human
uggagaaggaa

SEQ ID NO: 1376226 - RNA, 12 nt, Human
uggagaaggaag

SEQ ID NO: 1376227 - RNA, 13 nt, Human
uggagaaggaagg

SEQ ID NO: 1376228 - RNA, 23 nt, Human
uggagaagucucagcuaagcuca

SEQ ID NO: 1376229 - RNA, 17 nt, Human
uggagaagucucagcua

SEQ ID NO: 1376230 - RNA, 16 nt, Human
uggagaagucucagcu

SEQ ID NO: 1376231 - RNA, 15 nt, Human
uggagaagucucagc

SEQ ID NO: 1376232 - RNA, 14 nt, Human
uggagaaggaaggc

SEQ ID NO: 1376233 - RNA, 14 nt, Human
ugcuguuccagugg

SEQ ID NO: 1376234 - RNA, 17 nt, Human
ugcuguuugacaccucu

SEQ ID NO: 1376235 - RNA, 23 nt, Human
ugcuguuuauuaaucuuagugua

SEQ ID NO: 1376236 - RNA, 17 nt, Human
ugcuguuuauuaaucuu

SEQ ID NO: 1376237 - RNA, 14 nt, Human
ugcuguuuauuaau

SEQ ID NO: 1376238 - RNA, 22 nt, Human
uggacacgcucaguggggcaga

SEQ ID NO: 1376239 - RNA, 15 nt, Human
uggacacgcucagug

SEQ ID NO: 1376240 - RNA, 18 nt, Human
uggacaccuuuagguucu

SEQ ID NO: 1376241 - RNA, 16 nt, Human
uggacacuacacccag

SEQ ID NO: 1376242 - RNA, 17 nt, Human
uggacacuacacccagc

SEQ ID NO: 1376243 - RNA, 18 nt, Human
uggacacuacacccagca

SEQ ID NO: 1376244 - RNA, 19 nt, Human
uggacacuacacccagcaa

SEQ ID NO: 1376245 - RNA, 15 nt, Human
uggacacucagaccu

SEQ ID NO: 1376246 - RNA, 20 nt, Human
uggacacuacacccagcaau

SEQ ID NO: 1376247 - RNA, 14 nt, Human
uggacaggcuggcu

SEQ ID NO: 1376248 - RNA, 23 nt, Human
uggacacuuaauacuaccuugaa

SEQ ID NO: 1376249 - RNA, 16 nt, Human
uggacacucagaccug

SEQ ID NO: 1376250 - RNA, 14 nt, Human
uggacauccuccuc

SEQ ID NO: 1376251 - RNA, 23 nt, Human
uggacaguuuaccaguugccuuu

SEQ ID NO: 1376252 - RNA, 21 nt, Human
uggaccaauagggcugagcuc

SEQ ID NO: 1376253 - RNA, 20 nt, Human
uggaccaauagggcugagcu

SEQ ID NO: 1376254 - RNA, 18 nt, Human
uggacauccuccucccac

SEQ ID NO: 1376255 - RNA, 18 nt, Human
uggugacaucagguuuuu

SEQ ID NO: 1376256 - RNA, 20 nt, Human
uggucgaggaguaacaauac

SEQ ID NO: 1376257 - RNA, 16 nt, Human
uggucgaggaguaaca

SEQ ID NO: 1376258 - RNA, 23 nt, Human
uggucgagaaagaggcaccagga

SEQ ID NO: 1376259 - RNA, 15 nt, Human
ugguccuuucuuccg

SEQ ID NO: 1376260 - RNA, 12 nt, Human
ugguccuuuggg

SEQ ID NO: 1376261 - RNA, 18 nt, Human
uggucuaaguccagucca

SEQ ID NO: 1376262 - RNA, 22 nt, Human
uggucguuuuuuuuuuguuugu

SEQ ID NO: 1376263 - RNA, 12 nt, Human
uggucuaaaacu

SEQ ID NO: 1376264 - RNA, 13 nt, Human
uggucguuuuuuu

SEQ ID NO: 1376265 - RNA, 17 nt, Human
uggucggaaaacaugcu

SEQ ID NO: 1376266 - RNA, 15 nt, Human
uggucgcuccugccc

SEQ ID NO: 1376267 - RNA, 13 nt, Human
uggucgcuccugc

SEQ ID NO: 1376268 - RNA, 17 nt, Human
uggucgaggaguaacaa

SEQ ID NO: 1376269 - RNA, 14 nt, Human
uggucggaaaacau

SEQ ID NO: 1376270 - RNA, 15 nt, Human
uggugccaauuucaa

SEQ ID NO: 1376271 - RNA, 23 nt, Human
uggugcacagcacaaauuaguua

SEQ ID NO: 1376272 - RNA, 22 nt, Human
uggugcaauguguguauaugga

SEQ ID NO: 1376273 - RNA, 17 nt, Human
uggugagggaagacgcc

SEQ ID NO: 1376274 - RNA, 16 nt, Human
uggugauuuagcagga

SEQ ID NO: 1376275 - RNA, 22 nt, Human
uggugauuuagcaggaagcugu

SEQ ID NO: 1376276 - RNA, 22 nt, Human
uggugacaucagguuuuucccg

SEQ ID NO: 1376277 - RNA, 18 nt, Human
uggucaacuugagcaugu

SEQ ID NO: 1376278 - RNA, 12 nt, Human
ugggucacagga

SEQ ID NO: 1376279 - RNA, 21 nt, Human
uggguaucaccacuggagauc

SEQ ID NO: 1376280 - RNA, 13 nt, Human
ugggucacaggaa

SEQ ID NO: 1376281 - RNA, 22 nt, Human
uggguaucaccacuggagauca

SEQ ID NO: 1376282 - RNA, 22 nt, Human
ugguauuuucaauagccacuaa

SEQ ID NO: 1376283 - RNA, 20 nt, Human
ugguauuuucaauagccacu

SEQ ID NO: 1376284 - RNA, 17 nt, Human
ugguauuuucaauagcc

SEQ ID NO: 1376285 - RNA, 13 nt, Human
ugguauuuucaau

SEQ ID NO: 1376286 - RNA, 23 nt, Human
ugguauuguauuuauucaauaaa

SEQ ID NO: 1376287 - RNA, 21 nt, Human
ugguauguuuucaggcuagau

SEQ ID NO: 1376288 - RNA, 13 nt, Human
ugguauguuuuca

SEQ ID NO: 1376289 - RNA, 20 nt, Human
ugguccgugggacggugccc

SEQ ID NO: 1376290 - RNA, 19 nt, Human
ugguccuauggccucaugu

SEQ ID NO: 1376291 - RNA, 16 nt, Human
ugguccuauggccuca

SEQ ID NO: 1376292 - RNA, 22 nt, Human
uggucccuuguauccccugcag

SEQ ID NO: 1376293 - RNA, 23 nt, Human
uggucccuuguauccccugcagg

SEQ ID NO: 1376294 - RNA, 22 nt, Human
uggucccuguuuucccacgagg

SEQ ID NO: 1376295 - RNA, 12 nt, Human
uggucccugggu

SEQ ID NO: 1376296 - RNA, 22 nt, Human
ugguccccuccuucccaaguga

SEQ ID NO: 1376297 - RNA, 18 nt, Human
ugguccccuccuucccaa

SEQ ID NO: 1376298 - RNA, 19 nt, Human
ugggaucagggguaggaau

SEQ ID NO: 1376299 - RNA, 16 nt, Human
uggcugcugugggaaa

SEQ ID NO: 1376300 - RNA, 14 nt, Human
uggcugcuguggga

SEQ ID NO: 1376301 - RNA, 20 nt, Human
ugggaucagggguaggaaug

SEQ ID NO: 1376302 - RNA, 22 nt, Human
ugggauguucagcacugucccu

SEQ ID NO: 1376303 - RNA, 21 nt, Human
ugggauguucagcacuguccc

SEQ ID NO: 1376304 - RNA, 20 nt, Human
ugggauguucagcacugucc

SEQ ID NO: 1376305 - RNA, 16 nt, Human
ugggauguucagcacu

SEQ ID NO: 1376306 - RNA, 13 nt, Human
ugggcagggagcg

SEQ ID NO: 1376307 - RNA, 18 nt, Human
ugggcaggagggaggugc

SEQ ID NO: 1376308 - RNA, 16 nt, Human
ugggcaggagggaggu

SEQ ID NO: 1376309 - RNA, 15 nt, Human
ugggcaggagggagg

SEQ ID NO: 1376310 - RNA, 14 nt, Human
ugggcagagcuggc

SEQ ID NO: 1376311 - RNA, 13 nt, Human
ugggcaggaggga

SEQ ID NO: 1376312 - RNA, 16 nt, Human
ugggcagagcuggcuc

SEQ ID NO: 1376313 - RNA, 12 nt, Human
ugggcagagcug

SEQ ID NO: 1376314 - RNA, 14 nt, Human
ugggcagagcccaa

SEQ ID NO: 1376315 - RNA, 13 nt, Human
ugggcagagccca

SEQ ID NO: 1376316 - RNA, 19 nt, Human
ugggccugggcuccuggac

SEQ ID NO: 1376317 - RNA, 18 nt, Human
ugggccugggcuccugga

SEQ ID NO: 1376318 - RNA, 17 nt, Human
ugggccugggcuccugg

SEQ ID NO: 1376319 - RNA, 16 nt, Human
ugggccugggcuccug

SEQ ID NO: 1376320 - RNA, 15 nt, Human
ugggccugggcuccu

SEQ ID NO: 1376321 - RNA, 13 nt, Human
ugggccugggcuc

SEQ ID NO: 1376322 - RNA, 23 nt, Human
ugggccugguuaaauaaggcagg

SEQ ID NO: 1376323 - RNA, 22 nt, Human
ugggccuggucucacccuggag

SEQ ID NO: 1376324 - RNA, 21 nt, Human
ugggccuggucucacccugga

SEQ ID NO: 1376325 - RNA, 20 nt, Human
ugggccugggcuccuggacc

SEQ ID NO: 1376326 - RNA, 18 nt, Human
ugggcccucucugcucug

SEQ ID NO: 1376327 - RNA, 16 nt, Human
ugggcccucucugcuc

SEQ ID NO: 1376328 - RNA, 13 nt, Human
ugggcccucucug

SEQ ID NO: 1376329 - RNA, 21 nt, Human
ugggccccugccucucugcag

SEQ ID NO: 1376330 - RNA, 23 nt, Human
ugggccccugccucucugcaggu

SEQ ID NO: 1376331 - RNA, 24 nt, Human
uggggggugaugagggcagcagcc

SEQ ID NO: 1376332 - RNA, 16 nt, Human
ugggggguggccaggc

SEQ ID NO: 1376333 - RNA, 20 nt, Human
uggggggugaugagggcagc

SEQ ID NO: 1376334 - RNA, 19 nt, Human
uggggggugaugagggcag

SEQ ID NO: 1376335 - RNA, 18 nt, Human
uggggggugaugagggca

SEQ ID NO: 1376336 - RNA, 23 nt, Human
uggggggguggccgcugaguggc

SEQ ID NO: 1376337 - RNA, 14 nt, Human
uggggggguggccg

SEQ ID NO: 1376338 - RNA, 13 nt, Human
uggggggguggcc

SEQ ID NO: 1376339 - RNA, 21 nt, Human
uggggguagggggcuggagga

SEQ ID NO: 1376340 - RNA, 21 nt, Human
uggggguccuccuccagggac

SEQ ID NO: 1376341 - RNA, 19 nt, Human
uggggguagggggcuggag

SEQ ID NO: 1376342 - RNA, 21 nt, Human
ugggggacuuacaugauucau

SEQ ID NO: 1376343 - RNA, 14 nt, Human
ugggggacuuacau

SEQ ID NO: 1376344 - RNA, 16 nt, Human
ugggggacuguaaguu

SEQ ID NO: 1376345 - RNA, 21 nt, Human
ugggggaguagaucuuucuag

SEQ ID NO: 1376346 - RNA, 15 nt, Human
uggguacccccagga

SEQ ID NO: 1376347 - RNA, 18 nt, Human
uggguaaugaaacaaaga

SEQ ID NO: 1376348 - RNA, 16 nt, Human
uggggguucaggcccg

SEQ ID NO: 1376349 - RNA, 16 nt, Human
uggggguggggguagg

SEQ ID NO: 1376350 - RNA, 10 nt, Human
uggggguggg

SEQ ID NO: 1376351 - RNA, 20 nt, Human
uggguauaguucaugucugc

SEQ ID NO: 1376352 - RNA, 17 nt, Human
uggguauaaaagauggg

SEQ ID NO: 1376353 - RNA, 19 nt, Human
uggguacuucuugaaggug

SEQ ID NO: 1376354 - RNA, 16 nt, Human
uggguacuucuugaag

SEQ ID NO: 1376355 - RNA, 15 nt, Human
uggguauaaaagaug

SEQ ID NO: 1376356 - RNA, 20 nt, Human
ugggcuuccuggagcagaag

SEQ ID NO: 1376357 - RNA, 17 nt, Human
ugggcuuccuggagcag

SEQ ID NO: 1376358 - RNA, 16 nt, Human
ugggcuuccuggagca

SEQ ID NO: 1376359 - RNA, 15 nt, Human
ugggcuuccuggagc

SEQ ID NO: 1376360 - RNA, 14 nt, Human
ugggcuuccuggag

SEQ ID NO: 1376361 - RNA, 13 nt, Human
ugggcuuccugga

SEQ ID NO: 1376362 - RNA, 13 nt, Human
ugggcuucccaag

SEQ ID NO: 1376363 - RNA, 14 nt, Human
ugggcuucccaagg

SEQ ID NO: 1376364 - RNA, 13 nt, Human
ugggcuucaucug

SEQ ID NO: 1376365 - RNA, 15 nt, Human
ugggccuuaggaaga

SEQ ID NO: 1376366 - RNA, 17 nt, Human
ugggcuugcuauucugu

SEQ ID NO: 1376367 - RNA, 14 nt, Human
ugggcuugcuauuc

SEQ ID NO: 1376368 - RNA, 14 nt, Human
ugggcuugauucug

SEQ ID NO: 1376369 - RNA, 13 nt, Human
ugggcuugauucu

SEQ ID NO: 1376370 - RNA, 21 nt, Human
ugggcuugcuauucugucccu

SEQ ID NO: 1376371 - RNA, 20 nt, Human
uggggaguuuaggguggggg

SEQ ID NO: 1376372 - RNA, 20 nt, Human
uggggaucccucccccccau

SEQ ID NO: 1376373 - RNA, 17 nt, Human
uggggauaggccagccg

SEQ ID NO: 1376374 - RNA, 18 nt, Human
uggggauaggccagccgc

SEQ ID NO: 1376375 - RNA, 15 nt, Human
uggggccaggucacc

SEQ ID NO: 1376376 - RNA, 22 nt, Human
uggggaugguaguuuuuucauc

SEQ ID NO: 1376377 - RNA, 21 nt, Human
uggggccaggcugggucgccc

SEQ ID NO: 1376378 - RNA, 22 nt, Human
uggggccaggcugggucgcccu

SEQ ID NO: 1376379 - RNA, 20 nt, Human
uuugugggggacuguaaguu

SEQ ID NO: 1376380 - RNA, 18 nt, Human
uuugugggggacuguaag

SEQ ID NO: 1376381 - RNA, 17 nt, Human
uuugugggggacuguaa

SEQ ID NO: 1376382 - RNA, 13 nt, Human
uucgggcugugcc

SEQ ID NO: 1376383 - RNA, 12 nt, Human
uucgggcugugc

SEQ ID NO: 1376384 - RNA, 20 nt, Human
uucgggccaaggaccugaga

SEQ ID NO: 1376385 - RNA, 18 nt, Human
uucgggccaaggaccuga

SEQ ID NO: 1376386 - RNA, 18 nt, Human
uucuaaaaauugugauca

SEQ ID NO: 1376387 - RNA, 12 nt, Human
uucguucugugg

SEQ ID NO: 1376388 - RNA, 14 nt, Human
uucgggcugugccc

SEQ ID NO: 1376389 - RNA, 15 nt, Human
uucguuuauuuucaa

SEQ ID NO: 1376390 - RNA, 23 nt, Human
uucuaaagauucuauaguucuag

SEQ ID NO: 1376391 - RNA, 22 nt, Human
uucuaaagauucuauaguucua

SEQ ID NO: 1376392 - RNA, 16 nt, Human
uucuaaagauucuaua

SEQ ID NO: 1376393 - RNA, 14 nt, Human
uucuaaagauucua

SEQ ID NO: 1376394 - RNA, 13 nt, Human
uucuaaagauucu

SEQ ID NO: 1376395 - RNA, 12 nt, Human
uucuaaagauuc

SEQ ID NO: 1376396 - RNA, 24 nt, Human
uuccuggacagcugugccucgcuc

SEQ ID NO: 1376397 - RNA, 21 nt, Human
uuccuggacagcugugccucg

SEQ ID NO: 1376398 - RNA, 20 nt, Human
uuccuggacagcugugccuc

SEQ ID NO: 1376399 - RNA, 19 nt, Human
uuccuggacagcugugccu

SEQ ID NO: 1376400 - RNA, 17 nt, Human
uuccuggacagcugugc

SEQ ID NO: 1376401 - RNA, 15 nt, Human
uuccuggacagcugu

SEQ ID NO: 1376402 - RNA, 16 nt, Human
uuccugccccaggccu

SEQ ID NO: 1376403 - RNA, 13 nt, Human
uuccugccccagg

SEQ ID NO: 1376404 - RNA, 23 nt, Human
uuccugccccaacuccuuccagc

SEQ ID NO: 1376405 - RNA, 20 nt, Human
uuccugccagccccugccau

SEQ ID NO: 1376406 - RNA, 22 nt, Human
uuccuggagcagaagcagcaac

SEQ ID NO: 1376407 - RNA, 15 nt, Human
uuccugccagccccu

SEQ ID NO: 1376408 - RNA, 16 nt, Human
uuccuaugcuuugaaa

SEQ ID NO: 1376409 - RNA, 11 nt, Human
uuccucagcca

SEQ ID NO: 1376410 - RNA, 22 nt, Human
uuccucaugaauguaaauuugu

SEQ ID NO: 1376411 - RNA, 18 nt, Human
uuccucagacucuaagaa

SEQ ID NO: 1376412 - RNA, 14 nt, Human
uuccucagacucua

SEQ ID NO: 1376413 - RNA, 21 nt, Human
uuccucacaccaggcuugccu

SEQ ID NO: 1376414 - RNA, 19 nt, Human
uuccuauacgcagcgugcu

SEQ ID NO: 1376415 - RNA, 13 nt, Human
uuccuauacgcag

SEQ ID NO: 1376416 - RNA, 12 nt, Human
uucccuuuguga

SEQ ID NO: 1376417 - RNA, 22 nt, Human
uucccuuugugagucaauacau

SEQ ID NO: 1376418 - RNA, 14 nt, Human
uuccuaugcuuuga

SEQ ID NO: 1376419 - RNA, 18 nt, Human
uucccuugaugaagaagu

SEQ ID NO: 1376420 - RNA, 14 nt, Human
uucccuugagcccu

SEQ ID NO: 1376421 - RNA, 15 nt, Human
uucccuugagcccuc

SEQ ID NO: 1376422 - RNA, 20 nt, Human
uucccucuuuggcuccccug

SEQ ID NO: 1376423 - RNA, 16 nt, Human
uucccucuuuggcucc

SEQ ID NO: 1376424 - RNA, 14 nt, Human
uucccucuuuggcu

SEQ ID NO: 1376425 - RNA, 13 nt, Human
uucccugaagcuc

SEQ ID NO: 1376426 - RNA, 16 nt, Human
uucccugacucauucu

SEQ ID NO: 1376427 - RNA, 13 nt, Human
uucccugacucau

SEQ ID NO: 1376428 - RNA, 15 nt, Human
uucccucucccaggc

SEQ ID NO: 1376429 - RNA, 14 nt, Human
uucccucucccagg

SEQ ID NO: 1376430 - RNA, 15 nt, Human
uucccucucuggaga

SEQ ID NO: 1376431 - RNA, 14 nt, Human
uucccucucucacu

SEQ ID NO: 1376432 - RNA, 16 nt, Human
uucccucucccaggcc

SEQ ID NO: 1376433 - RNA, 17 nt, Human
uucccucucccaggccc

SEQ ID NO: 1376434 - RNA, 13 nt, Human
uucccucucugga

SEQ ID NO: 1376435 - RNA, 21 nt, Human
uucccucucucauacccuccc

SEQ ID NO: 1376436 - RNA, 14 nt, Human
uucccuuccugcca

SEQ ID NO: 1376437 - RNA, 15 nt, Human
uucccuuccugccag

SEQ ID NO: 1376438 - RNA, 17 nt, Human
uucccuugaugaagaag

SEQ ID NO: 1376439 - RNA, 23 nt, Human
uucccugccucucaucaacugaa

SEQ ID NO: 1376440 - RNA, 14 nt, Human
uucccugccucuca

SEQ ID NO: 1376441 - RNA, 22 nt, Human
uucccugcugugaaagaaguaa

SEQ ID NO: 1376442 - RNA, 20 nt, Human
uucccuggaaaccuuccacc

SEQ ID NO: 1376443 - RNA, 23 nt, Human
uucccuggaaaccuuccacccag

SEQ ID NO: 1376444 - RNA, 22 nt, Human
uucccuggaaaccuuccaccca

SEQ ID NO: 1376445 - RNA, 13 nt, Human
uuccccccaaggg

SEQ ID NO: 1376446 - RNA, 15 nt, Human
uucccccacugauca

SEQ ID NO: 1376447 - RNA, 12 nt, Human
uucccccaccac

SEQ ID NO: 1376448 - RNA, 23 nt, Human
uucccccaccaccaaaacugcuc

SEQ ID NO: 1376449 - RNA, 19 nt, Human
uuccccauggcccugagcg

SEQ ID NO: 1376450 - RNA, 18 nt, Human
uuccccaucuucuaaacc

SEQ ID NO: 1376451 - RNA, 17 nt, Human
uuccccaucuucuaaac

SEQ ID NO: 1376452 - RNA, 19 nt, Human
uuccccaucucaggccaga

SEQ ID NO: 1376453 - RNA, 20 nt, Human
uuccccaucguugcccccau

SEQ ID NO: 1376454 - RNA, 15 nt, Human
uucccauuuaucuaa

SEQ ID NO: 1376455 - RNA, 15 nt, Human
uucccaucgcuguca

SEQ ID NO: 1376456 - RNA, 23 nt, Human
uucccauggggagggauucuggu

SEQ ID NO: 1376457 - RNA, 15 nt, Human
uucccauggggaggg

SEQ ID NO: 1376458 - RNA, 14 nt, Human
uucccauggggagg

SEQ ID NO: 1376459 - RNA, 15 nt, Human
uucccauuucagcug

SEQ ID NO: 1376460 - RNA, 14 nt, Human
uucccauuucagcu

SEQ ID NO: 1376461 - RNA, 13 nt, Human
uuccauuacaagu

SEQ ID NO: 1376462 - RNA, 23 nt, Human
uuccauuacaaguauuuuuaauu

SEQ ID NO: 1376463 - RNA, 23 nt, Human
uuccauuaaacgauuuuuaaaau

SEQ ID NO: 1376464 - RNA, 13 nt, Human
uuccauuaaacga

SEQ ID NO: 1376465 - RNA, 16 nt, Human
uuccaugugcccaguu

SEQ ID NO: 1376466 - RNA, 17 nt, Human
uuccaugugcccaguua

SEQ ID NO: 1376467 - RNA, 15 nt, Human
uuccaugugcccagu

SEQ ID NO: 1376468 - RNA, 14 nt, Human
uucccaucgcuguc

SEQ ID NO: 1376469 - RNA, 15 nt, Human
uucccauccccagcg

SEQ ID NO: 1376470 - RNA, 17 nt, Human
uucccauccccagcgau

SEQ ID NO: 1376471 - RNA, 14 nt, Human
uucccauccccagc

SEQ ID NO: 1376472 - RNA, 13 nt, Human
uucccauccccag

SEQ ID NO: 1376473 - RNA, 19 nt, Human
uuccauugguccaagauuc

SEQ ID NO: 1376474 - RNA, 17 nt, Human
uuccauugguccaagau

SEQ ID NO: 1376475 - RNA, 16 nt, Human
uuccauugguccaaga

SEQ ID NO: 1376476 - RNA, 17 nt, Human
uuccauuggaucucauu

SEQ ID NO: 1376477 - RNA, 16 nt, Human
uuccauuggaucucau

SEQ ID NO: 1376478 - RNA, 13 nt, Human
uuccauucuggaa

SEQ ID NO: 1376479 - RNA, 15 nt, Human
uuccauucuggaagu

SEQ ID NO: 1376480 - RNA, 12 nt, Human
uucauuugcuuu

SEQ ID NO: 1376481 - RNA, 18 nt, Human
uucauuugagaaguaaac

SEQ ID NO: 1376482 - RNA, 20 nt, Human
uucaugcaaacucuuugguc

SEQ ID NO: 1376483 - RNA, 16 nt, Human
uucaugcaaacucuuu

SEQ ID NO: 1376484 - RNA, 15 nt, Human
uucaugcaaacucuu

SEQ ID NO: 1376485 - RNA, 17 nt, Human
uucaugcaaacuuuauu

SEQ ID NO: 1376486 - RNA, 15 nt, Human
uucaugcagcugugg

SEQ ID NO: 1376487 - RNA, 14 nt, Human
uucaugcagcugug

SEQ ID NO: 1376488 - RNA, 13 nt, Human
uucaugcagcugu

SEQ ID NO: 1376489 - RNA, 13 nt, Human
uucaugcauggaa

SEQ ID NO: 1376490 - RNA, 18 nt, Human
uucaggaaaauugaaugc

SEQ ID NO: 1376491 - RNA, 19 nt, Human
uucaggaaaaggccugggg

SEQ ID NO: 1376492 - RNA, 18 nt, Human
uucaggaaaaggccuggg

SEQ ID NO: 1376493 - RNA, 17 nt, Human
uucaggaaaaggccugg

SEQ ID NO: 1376494 - RNA, 16 nt, Human
uucaggaaaaggccug

SEQ ID NO: 1376495 - RNA, 13 nt, Human
uucaggaaaauug

SEQ ID NO: 1376496 - RNA, 17 nt, Human
uucaugaaagauucaau

SEQ ID NO: 1376497 - RNA, 15 nt, Human
uucaugaaagauuca

SEQ ID NO: 1376498 - RNA, 15 nt, Human
uuccaaauacuaaug

SEQ ID NO: 1376499 - RNA, 14 nt, Human
uuccaaacuaauuu

SEQ ID NO: 1376500 - RNA, 21 nt, Human
uuccaaagaguagaauugcau

SEQ ID NO: 1376501 - RNA, 20 nt, Human
uuccaaacucuucccucucu

SEQ ID NO: 1376502 - RNA, 18 nt, Human
uuccaaaaucucccauuu

SEQ ID NO: 1376503 - RNA, 19 nt, Human
uuccaaaaucucccauuuu

SEQ ID NO: 1376504 - RNA, 16 nt, Human
uuccaaaaucucccau

SEQ ID NO: 1376505 - RNA, 16 nt, Human
uucauuugcuuuggaa

SEQ ID NO: 1376506 - RNA, 20 nt, Human
uuccaaauucaguuucauaa

SEQ ID NO: 1376507 - RNA, 19 nt, Human
uuccaaauucaguuucaua

SEQ ID NO: 1376508 - RNA, 18 nt, Human
uuccaaauucaguuucau

SEQ ID NO: 1376509 - RNA, 15 nt, Human
uuccaaauucaguuu

SEQ ID NO: 1376510 - RNA, 14 nt, Human
uuccaaauucaguu

SEQ ID NO: 1376511 - RNA, 21 nt, Human
uuccaaauguaauaaacuuua

SEQ ID NO: 1376512 - RNA, 13 nt, Human
uuccacugagacc

SEQ ID NO: 1376513 - RNA, 19 nt, Human
uuccacucguguguuucua

SEQ ID NO: 1376514 - RNA, 12 nt, Human
uuauuguacuug

SEQ ID NO: 1376515 - RNA, 15 nt, Human
uuauugucuagugaa

SEQ ID NO: 1376516 - RNA, 14 nt, Human
uuauuguauucugg

SEQ ID NO: 1376517 - RNA, 13 nt, Human
uuauuguauucug

SEQ ID NO: 1376518 - RNA, 15 nt, Human
uuauuguguuuguca

SEQ ID NO: 1376519 - RNA, 16 nt, Human
uuauuguguuugucau

SEQ ID NO: 1376520 - RNA, 17 nt, Human
uuauuguguuugucauu

SEQ ID NO: 1376521 - RNA, 18 nt, Human
uuauuguguuugucauua

SEQ ID NO: 1376522 - RNA, 16 nt, Human
uuauuuuaauaauguu

SEQ ID NO: 1376523 - RNA, 15 nt, Human
uuauuuuaauaaugu

SEQ ID NO: 1376524 - RNA, 14 nt, Human
uuauuggcugagau

SEQ ID NO: 1376525 - RNA, 16 nt, Human
uuauuggcugagauau

SEQ ID NO: 1376526 - RNA, 15 nt, Human
uuauuggcugagaua

SEQ ID NO: 1376527 - RNA, 18 nt, Human
uuauugguuuugcagaag

SEQ ID NO: 1376528 - RNA, 15 nt, Human
uuauugguuuugcag

SEQ ID NO: 1376529 - RNA, 22 nt, Human
uuauuggcugagauaugaacau

SEQ ID NO: 1376530 - RNA, 17 nt, Human
uuauuuuaauaauguuu

SEQ ID NO: 1376531 - RNA, 20 nt, Human
uuauuuuauguugcauagaa

SEQ ID NO: 1376532 - RNA, 21 nt, Human
uucaaagguucuagguuucaa

SEQ ID NO: 1376533 - RNA, 16 nt, Human
uucaaagguucuaggu

SEQ ID NO: 1376534 - RNA, 12 nt, Human
uucaaagguucu

SEQ ID NO: 1376535 - RNA, 22 nt, Human
uucaaagcuuuuuccagaggcu

SEQ ID NO: 1376536 - RNA, 23 nt, Human
uucaaagcuguguguuuggaaga

SEQ ID NO: 1376537 - RNA, 20 nt, Human
uucaaagcuguguguuugga

SEQ ID NO: 1376538 - RNA, 23 nt, Human
uucaaagccagcguccuccucug

SEQ ID NO: 1376539 - RNA, 16 nt, Human
uucaacggaaagugcu

SEQ ID NO: 1376540 - RNA, 17 nt, Human
uucaaauccuugaagau

SEQ ID NO: 1376541 - RNA, 19 nt, Human
uucaaaguuuaauaaauuu

SEQ ID NO: 1376542 - RNA, 14 nt, Human
uucaaaguuuaaua

SEQ ID NO: 1376543 - RNA, 13 nt, Human
uucaaaguguuau

SEQ ID NO: 1376544 - RNA, 19 nt, Human
uucaaauagggucuaacuc

SEQ ID NO: 1376545 - RNA, 18 nt, Human
uucaaauagggucuaacu

SEQ ID NO: 1376546 - RNA, 22 nt, Human
uucaaaucaaucuguaaaacua

SEQ ID NO: 1376547 - RNA, 23 nt, Human
uucaaaucaaucuguaaaacuaa

SEQ ID NO: 1376548 - RNA, 17 nt, Human
uucaauugcaucuccca

SEQ ID NO: 1376549 - RNA, 15 nt, Human
uucaauugcaucucc

SEQ ID NO: 1376550 - RNA, 19 nt, Human
uucaauugcaucucccaga

SEQ ID NO: 1376551 - RNA, 23 nt, Human
uucaauagccacuaaccuugccu

SEQ ID NO: 1376552 - RNA, 18 nt, Human
uucaccuguaaaccugag

SEQ ID NO: 1376553 - RNA, 17 nt, Human
uucaccuguaaaccuga

SEQ ID NO: 1376554 - RNA, 16 nt, Human
uucaccuguaaaccug

SEQ ID NO: 1376555 - RNA, 13 nt, Human
uucaccuguaaac

SEQ ID NO: 1376556 - RNA, 21 nt, Human
uucaccuggaagcauuuguuu

SEQ ID NO: 1376557 - RNA, 18 nt, Human
uucaccugccccaacucu

SEQ ID NO: 1376558 - RNA, 15 nt, Human
uucacaaacuuuuau

SEQ ID NO: 1376559 - RNA, 20 nt, Human
uucagauaaucacaauacau

SEQ ID NO: 1376560 - RNA, 21 nt, Human
uucagaguugaugguuguaca

SEQ ID NO: 1376561 - RNA, 22 nt, Human
uucagaguugaugguuguacau

SEQ ID NO: 1376562 - RNA, 23 nt, Human
uucagaguucuuuuugaaguauu

SEQ ID NO: 1376563 - RNA, 22 nt, Human
uucagaguucuuuuugaaguau

SEQ ID NO: 1376564 - RNA, 21 nt, Human
uucagaguucuuuuugaagua

SEQ ID NO: 1376565 - RNA, 22 nt, Human
uucagagccuccuuucuggcuu

SEQ ID NO: 1376566 - RNA, 15 nt, Human
uucagagaggccuuu

SEQ ID NO: 1376567 - RNA, 21 nt, Human
uucagagagcagugcuuuugg

SEQ ID NO: 1376568 - RNA, 22 nt, Human
uucagagagcagugcuuuuggc

SEQ ID NO: 1376569 - RNA, 19 nt, Human
uucagagagcagugcuuuu

SEQ ID NO: 1376570 - RNA, 18 nt, Human
uucagagagcagugcuuu

SEQ ID NO: 1376571 - RNA, 13 nt, Human
uucagagagcagu

SEQ ID NO: 1376572 - RNA, 20 nt, Human
uucagacaucugagguuuua

SEQ ID NO: 1376573 - RNA, 16 nt, Human
uuauugcaguuuauca

SEQ ID NO: 1376574 - RNA, 14 nt, Human
uuauugcaguuuau

SEQ ID NO: 1376575 - RNA, 19 nt, Human
uuauugcagcgauuaauaa

SEQ ID NO: 1376576 - RNA, 22 nt, Human
uuauugcaguuuaucauucaag

SEQ ID NO: 1376577 - RNA, 21 nt, Human
uuauugcaguuuaucauucaa

SEQ ID NO: 1376578 - RNA, 18 nt, Human
uuauugcaguuuaucauu

SEQ ID NO: 1376579 - RNA, 23 nt, Human
uuauugacacagaaaauguugag

SEQ ID NO: 1376580 - RNA, 19 nt, Human
uuauugacacagaaaaugu

SEQ ID NO: 1376581 - RNA, 14 nt, Human
uuauugacacagaa

SEQ ID NO: 1376582 - RNA, 12 nt, Human
uuauucuugguu

SEQ ID NO: 1376583 - RNA, 14 nt, Human
uuauucuucuagag

SEQ ID NO: 1376584 - RNA, 13 nt, Human
uuauucuucuaga

SEQ ID NO: 1376585 - RNA, 19 nt, Human
uuauucguagauauuggac

SEQ ID NO: 1376586 - RNA, 18 nt, Human
uuauuacuguaagaaaau

SEQ ID NO: 1376587 - RNA, 17 nt, Human
uuauuacuguaagaaaa

SEQ ID NO: 1376588 - RNA, 18 nt, Human
uuauuaaugcacuuucua

SEQ ID NO: 1376589 - RNA, 17 nt, Human
uuauuaaugcacuuucu

SEQ ID NO: 1376590 - RNA, 13 nt, Human
uuauuaaugcacu

SEQ ID NO: 1376591 - RNA, 20 nt, Human
uuauuaauuuuaguuuuuca

SEQ ID NO: 1376592 - RNA, 12 nt, Human
uuauuaauuuga

SEQ ID NO: 1376593 - RNA, 16 nt, Human
uuauuacuguaagaaa

SEQ ID NO: 1376594 - RNA, 11 nt, Human
uuauuaaugca

SEQ ID NO: 1376595 - RNA, 17 nt, Human
uuauuaaucuuagugua

SEQ ID NO: 1376596 - RNA, 23 nt, Human
uuauuaaagaaaaaaauguauuu

SEQ ID NO: 1376597 - RNA, 22 nt, Human
uuauuaaagaaaaaaauguauu

SEQ ID NO: 1376598 - RNA, 21 nt, Human
uuauuaaagaaaaaaauguau

SEQ ID NO: 1376599 - RNA, 20 nt, Human
uuauuaaagaaaaaaaugua

SEQ ID NO: 1376600 - RNA, 14 nt, Human
uuauuaaagaaaaa

SEQ ID NO: 1376601 - RNA, 13 nt, Human
uuauuaaagaaaa

SEQ ID NO: 1376602 - RNA, 12 nt, Human
uuauuaaagaaa

SEQ ID NO: 1376603 - RNA, 14 nt, Human
uuauuaaaccccuu

SEQ ID NO: 1376604 - RNA, 16 nt, Human
uuauuaaacaaauaau

SEQ ID NO: 1376605 - RNA, 20 nt, Human
uuaucuugaauaauguaaga

SEQ ID NO: 1376606 - RNA, 16 nt, Human
uuaucugucagcugca

SEQ ID NO: 1376607 - RNA, 14 nt, Human
uuaucugaucagaa

SEQ ID NO: 1376608 - RNA, 20 nt, Human
uuaucugaauuuuuaaacaa

SEQ ID NO: 1376609 - RNA, 18 nt, Human
uuaucugagucaacuccu

SEQ ID NO: 1376610 - RNA, 21 nt, Human
uuaucugaauuuuuaaacaag

SEQ ID NO: 1376611 - RNA, 18 nt, Human
uuaucugaauuuuuaaac

SEQ ID NO: 1376612 - RNA, 17 nt, Human
uuaucugaauuuuuaaa

SEQ ID NO: 1376613 - RNA, 12 nt, Human
uuaucugggcuu

SEQ ID NO: 1376614 - RNA, 18 nt, Human
uuaucugcaagugaggug

SEQ ID NO: 1376615 - RNA, 14 nt, Human
uuaucuauaauuua

SEQ ID NO: 1376616 - RNA, 17 nt, Human
uuaucuagauacuguau

SEQ ID NO: 1376617 - RNA, 22 nt, Human
uuaucuauaauuuaccuaagau

SEQ ID NO: 1376618 - RNA, 17 nt, Human
uuaucuauaauuuaccu

SEQ ID NO: 1376619 - RNA, 15 nt, Human
uuaucuauaauuuac

SEQ ID NO: 1376620 - RNA, 12 nt, Human
uuaucucugugu

SEQ ID NO: 1376621 - RNA, 13 nt, Human
uuaguugcaacuu

SEQ ID NO: 1376622 - RNA, 20 nt, Human
uuaguugcaacuuuguauaa

SEQ ID NO: 1376623 - RNA, 16 nt, Human
uuaucuagauacugua

SEQ ID NO: 1376624 - RNA, 17 nt, Human
uuaugaaaaagaagaau

SEQ ID NO: 1376625 - RNA, 15 nt, Human
uuaucuuuuuaccuu

SEQ ID NO: 1376626 - RNA, 12 nt, Human
uuaucuuuauau

SEQ ID NO: 1376627 - RNA, 16 nt, Human
uuaucuuuacuuuuaa

SEQ ID NO: 1376628 - RNA, 17 nt, Human
uuaucuugguugaaaau

SEQ ID NO: 1376629 - RNA, 13 nt, Human
uuaugccaccuga

SEQ ID NO: 1376630 - RNA, 22 nt, Human
uuaugcaugaaguaauaugcac

SEQ ID NO: 1376631 - RNA, 14 nt, Human
uuaugaaaaagaag

SEQ ID NO: 1376632 - RNA, 16 nt, Human
uuaugcaugaaguaau

SEQ ID NO: 1376633 - RNA, 18 nt, Human
uuaugcucuuaauugcca

SEQ ID NO: 1376634 - RNA, 21 nt, Human
uuaugcucuuaauugccaccu

SEQ ID NO: 1376635 - RNA, 17 nt, Human
uuaugcucuuaauugcc

SEQ ID NO: 1376636 - RNA, 19 nt, Human
uuaugcgguuaauuuugaa

SEQ ID NO: 1376637 - RNA, 16 nt, Human
uuaugcgguuaauuuu

SEQ ID NO: 1376638 - RNA, 17 nt, Human
uuaugccuuuuuugauc

SEQ ID NO: 1376639 - RNA, 16 nt, Human
uuaugccaccugaaua

SEQ ID NO: 1376640 - RNA, 21 nt, Human
uuauggcacuaguauuucuau

SEQ ID NO: 1376641 - RNA, 15 nt, Human
uuaugcugauuuauu

SEQ ID NO: 1376642 - RNA, 17 nt, Human
uuaugcugugacacaug

SEQ ID NO: 1376643 - RNA, 16 nt, Human
uuaugcuuaaauucaa

SEQ ID NO: 1376644 - RNA, 17 nt, Human
uuagagugucuuuccac

SEQ ID NO: 1376645 - RNA, 16 nt, Human
uuagagugucuuucca

SEQ ID NO: 1376646 - RNA, 12 nt, Human
uuagaguuagac

SEQ ID NO: 1376647 - RNA, 13 nt, Human
uuagaguuagacu

SEQ ID NO: 1376648 - RNA, 14 nt, Human
uuagaguugauacu

SEQ ID NO: 1376649 - RNA, 14 nt, Human
uuagaguuagacug

SEQ ID NO: 1376650 - RNA, 17 nt, Human
uuagaguuagacuguug

SEQ ID NO: 1376651 - RNA, 18 nt, Human
uuagaguuagacuguugg

SEQ ID NO: 1376652 - RNA, 18 nt, Human
uuagagggaggagaauga

SEQ ID NO: 1376653 - RNA, 15 nt, Human
uuagagauaagaguu

SEQ ID NO: 1376654 - RNA, 20 nt, Human
uuagauagcccuguccuggu

SEQ ID NO: 1376655 - RNA, 18 nt, Human
uuagauagcccuguccug

SEQ ID NO: 1376656 - RNA, 17 nt, Human
uuagauagcccuguccu

SEQ ID NO: 1376657 - RNA, 16 nt, Human
uuagauagcccugucc

SEQ ID NO: 1376658 - RNA, 15 nt, Human
uuagauaaauauuga

SEQ ID NO: 1376659 - RNA, 22 nt, Human
uuagauaauacaccacuacauu

SEQ ID NO: 1376660 - RNA, 22 nt, Human
uuagcuaauaaaaagcuuuugu

SEQ ID NO: 1376661 - RNA, 15 nt, Human
uuagcuaauaaaaag

SEQ ID NO: 1376662 - RNA, 21 nt, Human
uuagcuaaacggauuccaaag

SEQ ID NO: 1376663 - RNA, 15 nt, Human
uuagaucuggcaugu

SEQ ID NO: 1376664 - RNA, 21 nt, Human
uuagaugcaguucugaagaag

SEQ ID NO: 1376665 - RNA, 20 nt, Human
uuagaugcaguucugaagaa

SEQ ID NO: 1376666 - RNA, 13 nt, Human
uuagcuuuaacuu

SEQ ID NO: 1376667 - RNA, 23 nt, Human
uuaggaaauguuuuuaauaaaag

SEQ ID NO: 1376668 - RNA, 13 nt, Human
uuagcuccugugg

SEQ ID NO: 1376669 - RNA, 17 nt, Human
uuagcucaaugagcaug

SEQ ID NO: 1376670 - RNA, 18 nt, Human
uuagcucaaugagcaugu

SEQ ID NO: 1376671 - RNA, 14 nt, Human
uuagcucaaugagc

SEQ ID NO: 1376672 - RNA, 13 nt, Human
uuagcucaaugag

SEQ ID NO: 1376673 - RNA, 23 nt, Human
uuagcuaauaaaaagcuuuuguc

SEQ ID NO: 1376674 - RNA, 13 nt, Human
uuagcucugagaa

SEQ ID NO: 1376675 - RNA, 12 nt, Human
uuagcucugaga

SEQ ID NO: 1376676 - RNA, 11 nt, Human
uuagcucugag

SEQ ID NO: 1376677 - RNA, 14 nt, Human
uuagcuccuguggc

SEQ ID NO: 1376678 - RNA, 17 nt, Human
uuagcugucugcucaga

SEQ ID NO: 1376679 - RNA, 15 nt, Human
uuagcugucugcuca

SEQ ID NO: 1376680 - RNA, 16 nt, Human
uuagcuggcauuacag

SEQ ID NO: 1376681 - RNA, 13 nt, Human
uuagcuggaaaag

SEQ ID NO: 1376682 - RNA, 12 nt, Human
uuagcuggaaaa

SEQ ID NO: 1376683 - RNA, 22 nt, Human
uuaguccuguuauagacgagaa

SEQ ID NO: 1376684 - RNA, 13 nt, Human
uuagucgugagcu

SEQ ID NO: 1376685 - RNA, 17 nt, Human
uuagucccucaugcaaa

SEQ ID NO: 1376686 - RNA, 19 nt, Human
uuagucauguuuaucugcu

SEQ ID NO: 1376687 - RNA, 16 nt, Human
uuagucgugagcucuu

SEQ ID NO: 1376688 - RNA, 19 nt, Human
uuagucgugagcucuugug

SEQ ID NO: 1376689 - RNA, 21 nt, Human
uuagucgugagcucuugugag

SEQ ID NO: 1376690 - RNA, 24 nt, Human
uuagucgugagcucuugugaggaa

SEQ ID NO: 1376691 - RNA, 14 nt, Human
uuagucaugugacc

SEQ ID NO: 1376692 - RNA, 13 nt, Human
uuagucaugugac

SEQ ID NO: 1376693 - RNA, 22 nt, Human
uuaguauuguuguccuuuucau

SEQ ID NO: 1376694 - RNA, 23 nt, Human
uuaguauuguuguccuuuucaua

SEQ ID NO: 1376695 - RNA, 20 nt, Human
uuaguauuguuguccuuuuc

SEQ ID NO: 1376696 - RNA, 18 nt, Human
uuaguauuguuguccuuu

SEQ ID NO: 1376697 - RNA, 13 nt, Human
uuaguaucuuuug

SEQ ID NO: 1376698 - RNA, 16 nt, Human
uuaguaugaggcauuu

SEQ ID NO: 1376699 - RNA, 17 nt, Human
uuaguauuguuguccuu

SEQ ID NO: 1376700 - RNA, 16 nt, Human
uuaguauuguuguccu

SEQ ID NO: 1376701 - RNA, 12 nt, Human
uuaguauuguug

SEQ ID NO: 1376702 - RNA, 18 nt, Human
uuaguaugaggcauuugu

SEQ ID NO: 1376703 - RNA, 16 nt, Human
uuaguuccacugagac

SEQ ID NO: 1376704 - RNA, 15 nt, Human
uuaguuccacugaga

SEQ ID NO: 1376705 - RNA, 22 nt, Human
uuaguuaccuuauaguuacugu

SEQ ID NO: 1376706 - RNA, 21 nt, Human
uuaguuaccuuauaguuacug

SEQ ID NO: 1376707 - RNA, 20 nt, Human
uuaguuaccuuauaguuacu

SEQ ID NO: 1376708 - RNA, 19 nt, Human
uuaguuaccuuauaguuac

SEQ ID NO: 1376709 - RNA, 18 nt, Human
uuaguuaccuuauaguua

SEQ ID NO: 1376710 - RNA, 16 nt, Human
uuaguuaccuuauagu

SEQ ID NO: 1376711 - RNA, 13 nt, Human
uuaguuaccuuau

SEQ ID NO: 1376712 - RNA, 23 nt, Human
uuagucucaguuugugugucuua

SEQ ID NO: 1376713 - RNA, 22 nt, Human
uuagucucaguuugugugucuu

SEQ ID NO: 1376714 - RNA, 21 nt, Human
uuagucucaguuugugugucu

SEQ ID NO: 1376715 - RNA, 12 nt, Human
uuagucucaguu

SEQ ID NO: 1376716 - RNA, 14 nt, Human
uuaguguucauaaa

SEQ ID NO: 1376717 - RNA, 15 nt, Human
uuaggcagacucuuu

SEQ ID NO: 1376718 - RNA, 16 nt, Human
uuaggcagacucuuua

SEQ ID NO: 1376719 - RNA, 16 nt, Human
uuaggagcuaaggcuc

SEQ ID NO: 1376720 - RNA, 17 nt, Human
uuaggagcuaaggcucu

SEQ ID NO: 1376721 - RNA, 15 nt, Human
uuaggagcuaaggcu

SEQ ID NO: 1376722 - RNA, 15 nt, Human
uuaggacuugcccuc

SEQ ID NO: 1376723 - RNA, 21 nt, Human
uuaggagagaagguagggguu

SEQ ID NO: 1376724 - RNA, 17 nt, Human
uuaggagaagccaggaa

SEQ ID NO: 1376725 - RNA, 16 nt, Human
uuaggagaagccagga

SEQ ID NO: 1376726 - RNA, 13 nt, Human
uuaggagaagcca

SEQ ID NO: 1376727 - RNA, 12 nt, Human
uuaggagaagcc

SEQ ID NO: 1376728 - RNA, 18 nt, Human
uuaggaagcaagcuuaau

SEQ ID NO: 1376729 - RNA, 22 nt, Human
uuaggaagagccuuccacccag

SEQ ID NO: 1376730 - RNA, 11 nt, Human
uuaggaagagc

SEQ ID NO: 1376731 - RNA, 22 nt, Human
uuaggaaguugacuuauaguac

SEQ ID NO: 1376732 - RNA, 23 nt, Human
uuaggaaguugacuuauaguaca

SEQ ID NO: 1376733 - RNA, 22 nt, Human
uuaggcuauuuguaaaucugcc

SEQ ID NO: 1376734 - RNA, 20 nt, Human
uuaggcuauuuguaaaucug

SEQ ID NO: 1376735 - RNA, 19 nt, Human
uuaggcuauuuguaaaucu

SEQ ID NO: 1376736 - RNA, 16 nt, Human
uuaggcuauuuguaaa

SEQ ID NO: 1376737 - RNA, 19 nt, Human
uuaggcccccaucauccuc

SEQ ID NO: 1376738 - RNA, 14 nt, Human
uuaggcuguaacua

SEQ ID NO: 1376739 - RNA, 23 nt, Human
uuaggcuauuuguaaaucugcca

SEQ ID NO: 1376740 - RNA, 20 nt, Human
uuaggcuguaacuacuuuau

SEQ ID NO: 1376741 - RNA, 17 nt, Human
uuaggcuguaacuacuu

SEQ ID NO: 1376742 - RNA, 14 nt, Human
uuagggaaaacauu

SEQ ID NO: 1376743 - RNA, 21 nt, Human
uuacuuuggggcuaauuuaac

SEQ ID NO: 1376744 - RNA, 16 nt, Human
uuacuuuauguuacua

SEQ ID NO: 1376745 - RNA, 18 nt, Human
uuacuuuagaagccugca

SEQ ID NO: 1376746 - RNA, 23 nt, Human
uuacuuguaaauauaaagacguu

SEQ ID NO: 1376747 - RNA, 22 nt, Human
uuacuuguaaauauaaagacgu

SEQ ID NO: 1376748 - RNA, 21 nt, Human
uuacuuguaaauauaaagacg

SEQ ID NO: 1376749 - RNA, 19 nt, Human
uuacuuguaaauauaaaga

SEQ ID NO: 1376750 - RNA, 17 nt, Human
uuacuuguaaauauaaa

SEQ ID NO: 1376751 - RNA, 16 nt, Human
uuacuuguaaauauaa

SEQ ID NO: 1376752 - RNA, 13 nt, Human
uuacuuguaaaua

SEQ ID NO: 1376753 - RNA, 14 nt, Human
uuacuugaccuccu

SEQ ID NO: 1376754 - RNA, 14 nt, Human
uuacuuuugcugua

SEQ ID NO: 1376755 - RNA, 19 nt, Human
uuacuuuuaaacuguguac

SEQ ID NO: 1376756 - RNA, 16 nt, Human
uuacuuuuaaacugug

SEQ ID NO: 1376757 - RNA, 15 nt, Human
uuacuuuuaaacugu

SEQ ID NO: 1376758 - RNA, 14 nt, Human
uuacuuuuaaacug

SEQ ID NO: 1376759 - RNA, 17 nt, Human
uuacuuuuaaacaguga

SEQ ID NO: 1376760 - RNA, 13 nt, Human
uuacuuugugaau

SEQ ID NO: 1376761 - RNA, 14 nt, Human
uuagaaaacuuuaa

SEQ ID NO: 1376762 - RNA, 16 nt, Human
uuagaaaacuuuaaag

SEQ ID NO: 1376763 - RNA, 23 nt, Human
uuagaaaaccagcucagcacugc

SEQ ID NO: 1376764 - RNA, 21 nt, Human
uuagaaaacauaaucuucugc

SEQ ID NO: 1376765 - RNA, 19 nt, Human
uuagaaacacaacuauauu

SEQ ID NO: 1376766 - RNA, 18 nt, Human
uuagacuaaggccauuau

SEQ ID NO: 1376767 - RNA, 23 nt, Human
uuagaccuacagggggucuggcu

SEQ ID NO: 1376768 - RNA, 13 nt, Human
uuagaccuacagg

SEQ ID NO: 1376769 - RNA, 18 nt, Human
uuagacugugauucagaa

SEQ ID NO: 1376770 - RNA, 20 nt, Human
uuagacuguuggggugggua

SEQ ID NO: 1376771 - RNA, 19 nt, Human
uuagacuggacagcuugug

SEQ ID NO: 1376772 - RNA, 17 nt, Human
uuagacuggacagcuug

SEQ ID NO: 1376773 - RNA, 16 nt, Human
uuagacuggacagcuu

SEQ ID NO: 1376774 - RNA, 15 nt, Human
uuagacuggacagcu

SEQ ID NO: 1376775 - RNA, 22 nt, Human
uuagacuggaacuugaacugau

SEQ ID NO: 1376776 - RNA, 21 nt, Human
uuagacuggaacuugaacuga

SEQ ID NO: 1376777 - RNA, 17 nt, Human
uuagacuggaacuugaa

SEQ ID NO: 1376778 - RNA, 16 nt, Human
uuagacuggaacuuga

SEQ ID NO: 1376779 - RNA, 15 nt, Human
uuagacuggaacuug

SEQ ID NO: 1376780 - RNA, 17 nt, Human
uuagacucuuuuccuuc

SEQ ID NO: 1376781 - RNA, 16 nt, Human
uuagaccuguguuacu

SEQ ID NO: 1376782 - RNA, 12 nt, Human
uuagagaauaaa

SEQ ID NO: 1376783 - RNA, 21 nt, Human
uuagagaaguauacauaaguu

SEQ ID NO: 1376784 - RNA, 22 nt, Human
uuagacuuuaacauaagcuauu

SEQ ID NO: 1376785 - RNA, 21 nt, Human
uuagacuuuaacauaagcuau

SEQ ID NO: 1376786 - RNA, 16 nt, Human
uuagacuuuaacauaa

SEQ ID NO: 1376787 - RNA, 15 nt, Human
uuagacuuuaacaua

SEQ ID NO: 1376788 - RNA, 23 nt, Human
uuacuagggaucccucaucuguc

SEQ ID NO: 1376789 - RNA, 20 nt, Human
uuacuagggaucccucaucu

SEQ ID NO: 1376790 - RNA, 16 nt, Human
uuacuagggaucccuc

SEQ ID NO: 1376791 - RNA, 14 nt, Human
uuacuacaugcacu

SEQ ID NO: 1376792 - RNA, 13 nt, Human
uuacuacaugcac

SEQ ID NO: 1376793 - RNA, 20 nt, Human
uuacuaaggaagauuacuca

SEQ ID NO: 1376794 - RNA, 23 nt, Human
uuacuauaagaacuuugagcuac

SEQ ID NO: 1376795 - RNA, 20 nt, Human
uuacuauaagaacuuugagc

SEQ ID NO: 1376796 - RNA, 15 nt, Human
uuacuauaagaacuu

SEQ ID NO: 1376797 - RNA, 20 nt, Human
uuacaauuuuuuaucaugca

SEQ ID NO: 1376798 - RNA, 18 nt, Human
uuacaauuuuuuaucaug

SEQ ID NO: 1376799 - RNA, 17 nt, Human
uuacaauuuuuuaucau

SEQ ID NO: 1376800 - RNA, 15 nt, Human
uuacaauuuuuuauc

SEQ ID NO: 1376801 - RNA, 13 nt, Human
uuacuaaguuuuu

SEQ ID NO: 1376802 - RNA, 14 nt, Human
uuacuaaguuuuua

SEQ ID NO: 1376803 - RNA, 16 nt, Human
uuacuaauagacaauu

SEQ ID NO: 1376804 - RNA, 22 nt, Human
uuacuucguguccgacucuucu

SEQ ID NO: 1376805 - RNA, 11 nt, Human
uuacuucauau

SEQ ID NO: 1376806 - RNA, 16 nt, Human
uuacuuaaucaaaacu

SEQ ID NO: 1376807 - RNA, 18 nt, Human
uuacuuauuaucuucagg

SEQ ID NO: 1376808 - RNA, 18 nt, Human
uuacuguuagucauuugc

SEQ ID NO: 1376809 - RNA, 20 nt, Human
uuacuguguaauuagugcca

SEQ ID NO: 1376810 - RNA, 16 nt, Human
uuacuguguaauuagu

SEQ ID NO: 1376811 - RNA, 13 nt, Human
uuacuguguaauu

SEQ ID NO: 1376812 - RNA, 19 nt, Human
uuacugucuuuuuucuaaa

SEQ ID NO: 1376813 - RNA, 19 nt, Human
uuacuauggcccuggccua

SEQ ID NO: 1376814 - RNA, 17 nt, Human
uuaauauaaaugcaaau

SEQ ID NO: 1376815 - RNA, 14 nt, Human
uuaauauaaaugca

SEQ ID NO: 1376816 - RNA, 23 nt, Human
uuaauauaaaguuuuauauauua

SEQ ID NO: 1376817 - RNA, 22 nt, Human
uuaauauaaaguuuuauauauu

SEQ ID NO: 1376818 - RNA, 21 nt, Human
uuaauauaaaguuuuauauau

SEQ ID NO: 1376819 - RNA, 18 nt, Human
uuaagcucugagcuguca

SEQ ID NO: 1376820 - RNA, 17 nt, Human
uuaagcucugagcuguc

SEQ ID NO: 1376821 - RNA, 16 nt, Human
uuaagcucugagcugu

SEQ ID NO: 1376822 - RNA, 15 nt, Human
uuaagcucugagcug

SEQ ID NO: 1376823 - RNA, 14 nt, Human
uuaagcucugagcu

SEQ ID NO: 1376824 - RNA, 16 nt, Human
uuaaugcaauauacug

SEQ ID NO: 1376825 - RNA, 21 nt, Human
uuaaugauaugcuuguaacua

SEQ ID NO: 1376826 - RNA, 20 nt, Human
uuaauauauauuaucuuuuc

SEQ ID NO: 1376827 - RNA, 15 nt, Human
uuaauauaaaugcaa

SEQ ID NO: 1376828 - RNA, 19 nt, Human
uuacaaguaacaaaaauaa

SEQ ID NO: 1376829 - RNA, 20 nt, Human
uuacaaguaacaaaaauaaa

SEQ ID NO: 1376830 - RNA, 17 nt, Human
uuacaaguaacaaaaau

SEQ ID NO: 1376831 - RNA, 15 nt, Human
uuaauguuuaaaaca

SEQ ID NO: 1376832 - RNA, 18 nt, Human
uuaauguuuuuugccaca

SEQ ID NO: 1376833 - RNA, 15 nt, Human
uuaaugcacuuucua

SEQ ID NO: 1376834 - RNA, 14 nt, Human
uuaaugcacuuucu

SEQ ID NO: 1376835 - RNA, 13 nt, Human
uuaaugcacuuuc

SEQ ID NO: 1376836 - RNA, 12 nt, Human
uuaaugcacuuu

SEQ ID NO: 1376837 - RNA, 11 nt, Human
uuaaugcacuu

SEQ ID NO: 1376838 - RNA, 13 nt, Human
uuaaugcccagac

SEQ ID NO: 1376839 - RNA, 23 nt, Human
uuaaugccgauauacucuagaug

SEQ ID NO: 1376840 - RNA, 19 nt, Human
uuaauggugccuucauuug

SEQ ID NO: 1376841 - RNA, 17 nt, Human
uuaauggugccuucauu

SEQ ID NO: 1376842 - RNA, 20 nt, Human
uuaauggugccuucauuugg

SEQ ID NO: 1376843 - RNA, 18 nt, Human
uuaauguauguuaccaaa

SEQ ID NO: 1376844 - RNA, 17 nt, Human
uuaauguauguuaccaa

SEQ ID NO: 1376845 - RNA, 15 nt, Human
uuaauguauguuacc

SEQ ID NO: 1376846 - RNA, 13 nt, Human
uuaauguauguua

SEQ ID NO: 1376847 - RNA, 19 nt, Human
uuaauguauaguaaaucac

SEQ ID NO: 1376848 - RNA, 22 nt, Human
uuaaugucaauucuugccaaau

SEQ ID NO: 1376849 - RNA, 12 nt, Human
uuaaccuuugau

SEQ ID NO: 1376850 - RNA, 14 nt, Human
uuaacgauguccaa

SEQ ID NO: 1376851 - RNA, 15 nt, Human
uuaaccucugcacua

SEQ ID NO: 1376852 - RNA, 12 nt, Human
uuaaccucugca

SEQ ID NO: 1376853 - RNA, 21 nt, Human
uuaaccuaugauauuuucugu

SEQ ID NO: 1376854 - RNA, 20 nt, Human
uuaaccuaugauauuuucug

SEQ ID NO: 1376855 - RNA, 18 nt, Human
uuaaccccccuguacaca

SEQ ID NO: 1376856 - RNA, 20 nt, Human
uuaaccccccuguacacaac

SEQ ID NO: 1376857 - RNA, 17 nt, Human
uuaaccccccuguacac

SEQ ID NO: 1376858 - RNA, 14 nt, Human
uuaaccccccugua

SEQ ID NO: 1376859 - RNA, 22 nt, Human
uuaaccagaucuagucaaucaa

SEQ ID NO: 1376860 - RNA, 13 nt, Human
uuaaccagaucua

SEQ ID NO: 1376861 - RNA, 18 nt, Human
uuaaagaauaugaaacau

SEQ ID NO: 1376862 - RNA, 16 nt, Human
uuaaagaauaugaaac

SEQ ID NO: 1376863 - RNA, 14 nt, Human
uuaaagacuuuuau

SEQ ID NO: 1376864 - RNA, 13 nt, Human
uuaaauuacagaa

SEQ ID NO: 1376865 - RNA, 21 nt, Human
uuaaauguuuuuuuuuaaaga

SEQ ID NO: 1376866 - RNA, 23 nt, Human
uuaaauguuuuuuuuuaaagacu

SEQ ID NO: 1376867 - RNA, 21 nt, Human
uuaacuucuugcuucuuucua

SEQ ID NO: 1376868 - RNA, 18 nt, Human
uuaacuuuuauaaacuuu

SEQ ID NO: 1376869 - RNA, 16 nt, Human
uuaacuuuuauaaacu

SEQ ID NO: 1376870 - RNA, 17 nt, Human
uuaacuuuuauaaacuu

SEQ ID NO: 1376871 - RNA, 17 nt, Human
uuaacuucuugcuucuu

SEQ ID NO: 1376872 - RNA, 14 nt, Human
uuaacuucuugcuu

SEQ ID NO: 1376873 - RNA, 15 nt, Human
uuaacuuuuauaaac

SEQ ID NO: 1376874 - RNA, 13 nt, Human
uuaacuuaaauag

SEQ ID NO: 1376875 - RNA, 16 nt, Human
uuaacuucacauauug

SEQ ID NO: 1376876 - RNA, 15 nt, Human
uuaacuuaaauagua

SEQ ID NO: 1376877 - RNA, 15 nt, Human
uuaacuguggauauu

SEQ ID NO: 1376878 - RNA, 13 nt, Human
uuaacuguggaua

SEQ ID NO: 1376879 - RNA, 12 nt, Human
uuaacuguggau

SEQ ID NO: 1376880 - RNA, 17 nt, Human
uuaacuggguaaugaaa

SEQ ID NO: 1376881 - RNA, 21 nt, Human
uuaacuggguaaugaaacaaa

SEQ ID NO: 1376882 - RNA, 19 nt, Human
uuaacugccguaauuuaac

SEQ ID NO: 1376883 - RNA, 17 nt, Human
uuaacucucuuuauguc

SEQ ID NO: 1376884 - RNA, 19 nt, Human
uuaacucucuuuaugucug

SEQ ID NO: 1376885 - RNA, 15 nt, Human
uuaacucucuuuaug

SEQ ID NO: 1376886 - RNA, 22 nt, Human
uuaacucccauuaccauguaau

SEQ ID NO: 1376887 - RNA, 23 nt, Human
uuaacucccauuaccauguaaug

SEQ ID NO: 1376888 - RNA, 20 nt, Human
uuaacugaauaccacucugu

SEQ ID NO: 1376889 - RNA, 16 nt, Human
uuaacugaauaccacu

SEQ ID NO: 1376890 - RNA, 22 nt, Human
uuaacugaauaccacucuguaa

SEQ ID NO: 1376891 - RNA, 21 nt, Human
uuaacugaauaccacucugua

SEQ ID NO: 1376892 - RNA, 21 nt, Human
uuaacugacaagccaucuuga

SEQ ID NO: 1376893 - RNA, 17 nt, Human
uuaacucauuagacugg

SEQ ID NO: 1376894 - RNA, 16 nt, Human
uuaacucauuagacug

SEQ ID NO: 1376895 - RNA, 15 nt, Human
uuaacucauuagacu

SEQ ID NO: 1376896 - RNA, 14 nt, Human
uuaacuauugcauu

SEQ ID NO: 1376897 - RNA, 21 nt, Human
uuaacuauugcauuuauaugu

SEQ ID NO: 1376898 - RNA, 22 nt, Human
uuaacuauugcauuuauaugua

SEQ ID NO: 1376899 - RNA, 23 nt, Human
uguuuuuugccacagcuuuugca

SEQ ID NO: 1376900 - RNA, 19 nt, Human
uguuuuuugccacagcuuu

SEQ ID NO: 1376901 - RNA, 18 nt, Human
uguuuuuugccacagcuu

SEQ ID NO: 1376902 - RNA, 15 nt, Human
uguuuuuugccacag

SEQ ID NO: 1376903 - RNA, 16 nt, Human
uguuuuguuuuuacaa

SEQ ID NO: 1376904 - RNA, 15 nt, Human
uguuuuguuuuuaca

SEQ ID NO: 1376905 - RNA, 20 nt, Human
uguuuuguugacauucugaa

SEQ ID NO: 1376906 - RNA, 19 nt, Human
uguuuuguugacauucuga

SEQ ID NO: 1376907 - RNA, 15 nt, Human
uguuuuguugacauu

SEQ ID NO: 1376908 - RNA, 14 nt, Human
uguuuuguugacau

SEQ ID NO: 1376909 - RNA, 13 nt, Human
uguuuuguugaca

SEQ ID NO: 1376910 - RNA, 12 nt, Human
uguuuuguugac

SEQ ID NO: 1376911 - RNA, 21 nt, Human
uguuuuguugacauucugaau

SEQ ID NO: 1376912 - RNA, 22 nt, Human
uguuuuguucaccauuauaaug

SEQ ID NO: 1376913 - RNA, 19 nt, Human
uguuuuaaggaugcuugua

SEQ ID NO: 1376914 - RNA, 18 nt, Human
uguuuuaaggaugcuugu

SEQ ID NO: 1376915 - RNA, 23 nt, Human
uuaaaagaauaucuggcaaauua

SEQ ID NO: 1376916 - RNA, 14 nt, Human
uuaaaagauacagu

SEQ ID NO: 1376917 - RNA, 17 nt, Human
uuaaaagauacaguuac

SEQ ID NO: 1376918 - RNA, 15 nt, Human
uguuuuuuucuaaua

SEQ ID NO: 1376919 - RNA, 16 nt, Human
uguuuuuuuguuauua

SEQ ID NO: 1376920 - RNA, 15 nt, Human
uguuuuuuuguuugu

SEQ ID NO: 1376921 - RNA, 18 nt, Human
uguuuuuuuguuauuaaa

SEQ ID NO: 1376922 - RNA, 18 nt, Human
uguuuuuuuuuaaagacu

SEQ ID NO: 1376923 - RNA, 12 nt, Human
uuaaagaagacc

SEQ ID NO: 1376924 - RNA, 17 nt, Human
uuaaagaaaguguauuu

SEQ ID NO: 1376925 - RNA, 12 nt, Human
uuaaagaaagug

SEQ ID NO: 1376926 - RNA, 19 nt, Human
uuaaacuguguacauaacu

SEQ ID NO: 1376927 - RNA, 12 nt, Human
uuaaacugugua

SEQ ID NO: 1376928 - RNA, 21 nt, Human
uuaaacuguacagugucuuuu

SEQ ID NO: 1376929 - RNA, 20 nt, Human
uuaaacuguacagugucuuu

SEQ ID NO: 1376930 - RNA, 18 nt, Human
uuaaacuguacagugucu

SEQ ID NO: 1376931 - RNA, 17 nt, Human
uuaaacuguacaguguc

SEQ ID NO: 1376932 - RNA, 16 nt, Human
uuaaacuguacagugu

SEQ ID NO: 1376933 - RNA, 15 nt, Human
uuaaacuguacagug

SEQ ID NO: 1376934 - RNA, 14 nt, Human
uuaaacuguacagu

SEQ ID NO: 1376935 - RNA, 13 nt, Human
uuaaacuguacag

SEQ ID NO: 1376936 - RNA, 12 nt, Human
uuaaacuguaca

SEQ ID NO: 1376937 - RNA, 22 nt, Human
uuaaacucuguugcaagugcaa

SEQ ID NO: 1376938 - RNA, 21 nt, Human
uuaaaauagcguucuuguaau

SEQ ID NO: 1376939 - RNA, 22 nt, Human
uuaaaauagcguucuuguaauu

SEQ ID NO: 1376940 - RNA, 20 nt, Human
uuaaaauagcguucuuguaa

SEQ ID NO: 1376941 - RNA, 22 nt, Human
uuaaaauagcaaaagaagaagu

SEQ ID NO: 1376942 - RNA, 23 nt, Human
uuaaaauagcaaaagaagaaguu

SEQ ID NO: 1376943 - RNA, 21 nt, Human
uuaaaauagcaaaagaagaag

SEQ ID NO: 1376944 - RNA, 19 nt, Human
uuaaaauagcaaaagaaga

SEQ ID NO: 1376945 - RNA, 16 nt, Human
uuaaaagugucaagcu

SEQ ID NO: 1376946 - RNA, 18 nt, Human
uuaaaaguguauuuguua

SEQ ID NO: 1376947 - RNA, 13 nt, Human
uuaaaagccugcu

SEQ ID NO: 1376948 - RNA, 18 nt, Human
uuaaaagcaaaucauuug

SEQ ID NO: 1376949 - RNA, 21 nt, Human
uuaaaagcaaaucauuuguuu

SEQ ID NO: 1376950 - RNA, 14 nt, Human
uuaaaagcaaauca

SEQ ID NO: 1376951 - RNA, 13 nt, Human
uuaaaagauuuuu

SEQ ID NO: 1376952 - RNA, 21 nt, Human
uuaaaauaccagccaguaaau

SEQ ID NO: 1376953 - RNA, 22 nt, Human
uuaaaagaugcuuuuaacagag

SEQ ID NO: 1376954 - RNA, 20 nt, Human
uuaaaagaugcuuuuaacag

SEQ ID NO: 1376955 - RNA, 12 nt, Human
uuaaaagaauau

SEQ ID NO: 1376956 - RNA, 13 nt, Human
uuaaaagaaugau

SEQ ID NO: 1376957 - RNA, 18 nt, Human
uguuuggguuuuuuuccu

SEQ ID NO: 1376958 - RNA, 23 nt, Human
uguuuggggcaggaguagcugag

SEQ ID NO: 1376959 - RNA, 15 nt, Human
uguuuggggcaggag

SEQ ID NO: 1376960 - RNA, 17 nt, Human
uguuucuacuuugauau

SEQ ID NO: 1376961 - RNA, 15 nt, Human
uguuucguggggagg

SEQ ID NO: 1376962 - RNA, 16 nt, Human
uguuuccuuuuucaga

SEQ ID NO: 1376963 - RNA, 14 nt, Human
uguuucgcucuuug

SEQ ID NO: 1376964 - RNA, 18 nt, Human
uguuuccuuuuucagaua

SEQ ID NO: 1376965 - RNA, 14 nt, Human
uguuuccagcauuc

SEQ ID NO: 1376966 - RNA, 13 nt, Human
uguuuccagcauu

SEQ ID NO: 1376967 - RNA, 15 nt, Human
uguuugucauuagcc

SEQ ID NO: 1376968 - RNA, 17 nt, Human
uguuugucauuagccug

SEQ ID NO: 1376969 - RNA, 16 nt, Human
uguuugguauuguauu

SEQ ID NO: 1376970 - RNA, 17 nt, Human
uguuugguauuguauuu

SEQ ID NO: 1376971 - RNA, 22 nt, Human
uguuugguauuguauuuauuca

SEQ ID NO: 1376972 - RNA, 14 nt, Human
uguuugugcugugg

SEQ ID NO: 1376973 - RNA, 13 nt, Human
uguuugugcugug

SEQ ID NO: 1376974 - RNA, 13 nt, Human
uguuugugauuga

SEQ ID NO: 1376975 - RNA, 12 nt, Human
uguuucacaguu

SEQ ID NO: 1376976 - RNA, 13 nt, Human
uguuucacaaggu

SEQ ID NO: 1376977 - RNA, 16 nt, Human
uguuucacaaggucuu

SEQ ID NO: 1376978 - RNA, 16 nt, Human
uguuucaauugcaucu

SEQ ID NO: 1376979 - RNA, 21 nt, Human
uguuucaaggcacucuagauu

SEQ ID NO: 1376980 - RNA, 20 nt, Human
uguuucaaggcacucuagau

SEQ ID NO: 1376981 - RNA, 19 nt, Human
uguuucaaggcacucuaga

SEQ ID NO: 1376982 - RNA, 15 nt, Human
uguuucaaggcacuc

SEQ ID NO: 1376983 - RNA, 22 nt, Human
uguuucaagaggagcccccacc

SEQ ID NO: 1376984 - RNA, 19 nt, Human
uguuucaagaggagccccc

SEQ ID NO: 1376985 - RNA, 21 nt, Human
uguuucagaggcucagauugu

SEQ ID NO: 1376986 - RNA, 20 nt, Human
uguuucacaguuugaaauaa

SEQ ID NO: 1376987 - RNA, 19 nt, Human
uguuucacaguuugaaaua

SEQ ID NO: 1376988 - RNA, 17 nt, Human
uguuucacaguuugaaa

SEQ ID NO: 1376989 - RNA, 12 nt, Human
uguuucaagagg

SEQ ID NO: 1376990 - RNA, 19 nt, Human
uguuuagacuuuaacauaa

SEQ ID NO: 1376991 - RNA, 20 nt, Human
uguuuagauaauacaccacu

SEQ ID NO: 1376992 - RNA, 15 nt, Human
uguuucaaacuuuac

SEQ ID NO: 1376993 - RNA, 22 nt, Human
uguuucaaacauauauaacaau

SEQ ID NO: 1376994 - RNA, 21 nt, Human
uguuucaaacauauauaacaa

SEQ ID NO: 1376995 - RNA, 23 nt, Human
uguuuagacuuuaacauaagcua

SEQ ID NO: 1376996 - RNA, 18 nt, Human
uguuuagacuuuaacaua

SEQ ID NO: 1376997 - RNA, 13 nt, Human
uguuuagacuuua

SEQ ID NO: 1376998 - RNA, 23 nt, Human
uggugccccaggaccagcucagg

SEQ ID NO: 1376999 - RNA, 16 nt, Human
uguuuagauaauacac

SEQ ID NO: 1377000 - RNA, 14 nt, Human
uggugccccaggac

SEQ ID NO: 1377001 - RNA, 13 nt, Human
uggugccccagga

SEQ ID NO: 1377002 - RNA, 10 nt, Human
uggugccacc

SEQ ID NO: 1377003 - RNA, 19 nt, Human
uggugccccaggaccagcu

SEQ ID NO: 1377004 - RNA, 18 nt, Human
uggugccccaggaccagc

SEQ ID NO: 1377005 - RNA, 17 nt, Human
uggugccccaggaccag

SEQ ID NO: 1377006 - RNA, 16 nt, Human
uggugccccaggacca

SEQ ID NO: 1377007 - RNA, 21 nt, Human
uggugccccaggaccagcuca

SEQ ID NO: 1377008 - RNA, 20 nt, Human
uggugccccaggaccagcuc

SEQ ID NO: 1377009 - RNA, 15 nt, Human
uuugaggcaaaagaa

SEQ ID NO: 1377010 - RNA, 14 nt, Human
uuugaggcaaaaga

SEQ ID NO: 1377011 - RNA, 22 nt, Human
uuugagauauuaaugcccagac

SEQ ID NO: 1377012 - RNA, 17 nt, Human
uuugaggucuguucuuu

SEQ ID NO: 1377013 - RNA, 16 nt, Human
uuugaaguuagcuuua

SEQ ID NO: 1377014 - RNA, 23 nt, Human
uuugaaguuagcuuuaacuuaaa

SEQ ID NO: 1377015 - RNA, 13 nt, Human
uuugaaguguaau

SEQ ID NO: 1377016 - RNA, 20 nt, Human
uuugaagugcuguuuauuaa

SEQ ID NO: 1377017 - RNA, 16 nt, Human
uuugaagugcuguuua

SEQ ID NO: 1377018 - RNA, 15 nt, Human
uuugaagugcuguuu

SEQ ID NO: 1377019 - RNA, 22 nt, Human
uuugaagucauaccaaugaaaa

SEQ ID NO: 1377020 - RNA, 13 nt, Human
uuugaaguauuua

SEQ ID NO: 1377021 - RNA, 20 nt, Human
uuugaauaaaugucacuuuu

SEQ ID NO: 1377022 - RNA, 15 nt, Human
uuugaauaaauguca

SEQ ID NO: 1377023 - RNA, 17 nt, Human
uuugaaguuagcuuuaa

SEQ ID NO: 1377024 - RNA, 14 nt, Human
uuucuuaacuucuu

SEQ ID NO: 1377025 - RNA, 13 nt, Human
uuucuuaacuucu

SEQ ID NO: 1377026 - RNA, 20 nt, Human
uuucuuaaauaagaaacuuu

SEQ ID NO: 1377027 - RNA, 13 nt, Human
uuucuuaaauaag

SEQ ID NO: 1377028 - RNA, 21 nt, Human
uuucuuaaagugccaguauuu

SEQ ID NO: 1377029 - RNA, 17 nt, Human
uuucuuaaagugccagu

SEQ ID NO: 1377030 - RNA, 13 nt, Human
uuucuuaaagugc

SEQ ID NO: 1377031 - RNA, 12 nt, Human
uuucuuaaauaa

SEQ ID NO: 1377032 - RNA, 17 nt, Human
uuucugaucaaggccuu

SEQ ID NO: 1377033 - RNA, 15 nt, Human
uuucugaucaaggcc

SEQ ID NO: 1377034 - RNA, 19 nt, Human
uuucuuaaauaagaaacuu

SEQ ID NO: 1377035 - RNA, 18 nt, Human
uuucuuaaauaagaaacu

SEQ ID NO: 1377036 - RNA, 21 nt, Human
uuucuuaaauaagaaacuuuu

SEQ ID NO: 1377037 - RNA, 18 nt, Human
uuucuuaaccagaucauu

SEQ ID NO: 1377038 - RNA, 21 nt, Human
uuugaaauugaaccuuugugc

SEQ ID NO: 1377039 - RNA, 20 nt, Human
uuucuugugcacuggcacca

SEQ ID NO: 1377040 - RNA, 19 nt, Human
uuucuugugcacuggcacc

SEQ ID NO: 1377041 - RNA, 20 nt, Human
uuucuugucuauaaagcauu

SEQ ID NO: 1377042 - RNA, 18 nt, Human
uuucuugucuauaaagca

SEQ ID NO: 1377043 - RNA, 13 nt, Human
uuucuugucuaua

SEQ ID NO: 1377044 - RNA, 21 nt, Human
uuugaaauuguauuacaaauc

SEQ ID NO: 1377045 - RNA, 13 nt, Human
uuugaaggcaaaa

SEQ ID NO: 1377046 - RNA, 12 nt, Human
uuugaaggcaaa

SEQ ID NO: 1377047 - RNA, 18 nt, Human
uuugaagcuacugugugu

SEQ ID NO: 1377048 - RNA, 16 nt, Human
uuugaagcuacugugu

SEQ ID NO: 1377049 - RNA, 20 nt, Human
uuugaaccugaugaaaauaa

SEQ ID NO: 1377050 - RNA, 18 nt, Human
uuugaaccugaugaaaau

SEQ ID NO: 1377051 - RNA, 13 nt, Human
uuugaaccaauaa

SEQ ID NO: 1377052 - RNA, 17 nt, Human
uuuguaaaucugccaca

SEQ ID NO: 1377053 - RNA, 15 nt, Human
uuuguaaaucugcca

SEQ ID NO: 1377054 - RNA, 22 nt, Human
uuuguaaacucaaaauauuugu

SEQ ID NO: 1377055 - RNA, 17 nt, Human
uuuguaaacucaaaaua

SEQ ID NO: 1377056 - RNA, 16 nt, Human
uuuguaaacucaaaau

SEQ ID NO: 1377057 - RNA, 14 nt, Human
uuuguaaaaugaca

SEQ ID NO: 1377058 - RNA, 16 nt, Human
uuuguauuaagaaagg

SEQ ID NO: 1377059 - RNA, 13 nt, Human
uuuguauucaaaa

SEQ ID NO: 1377060 - RNA, 15 nt, Human
uuuguauucucuccu

SEQ ID NO: 1377061 - RNA, 23 nt, Human
uuuguaaaaugacaaucaugugu

SEQ ID NO: 1377062 - RNA, 19 nt, Human
uuugguuucccaagagcua

SEQ ID NO: 1377063 - RNA, 13 nt, Human
uuugguucuaagg

SEQ ID NO: 1377064 - RNA, 11 nt, Human
uuugguucuaa

SEQ ID NO: 1377065 - RNA, 16 nt, Human
uuugguaccagauaac

SEQ ID NO: 1377066 - RNA, 20 nt, Human
uuugguucauuaauucuaua

SEQ ID NO: 1377067 - RNA, 16 nt, Human
uuuggguuuuuuuccu

SEQ ID NO: 1377068 - RNA, 16 nt, Human
uuuggguuucugcccu

SEQ ID NO: 1377069 - RNA, 11 nt, Human
uuuggguuucu

SEQ ID NO: 1377070 - RNA, 16 nt, Human
uuuggguucugccugc

SEQ ID NO: 1377071 - RNA, 15 nt, Human
uuuggguucugccug

SEQ ID NO: 1377072 - RNA, 14 nt, Human
uuuggguucugccu

SEQ ID NO: 1377073 - RNA, 18 nt, Human
uuuggguuuuuuuccuuu

SEQ ID NO: 1377074 - RNA, 20 nt, Human
uuugguaaaauacuucuuga

SEQ ID NO: 1377075 - RNA, 18 nt, Human
uuugguaaggggaauuga

SEQ ID NO: 1377076 - RNA, 16 nt, Human
uuuggacuucuggggu

SEQ ID NO: 1377077 - RNA, 16 nt, Human
uuuggaccuaauccaa

SEQ ID NO: 1377078 - RNA, 19 nt, Human
uuuggaccuaaauggccuc

SEQ ID NO: 1377079 - RNA, 23 nt, Human
uuugcuuuaauauaaaugcaaau

SEQ ID NO: 1377080 - RNA, 18 nt, Human
uuugcuuuaauauaaaug

SEQ ID NO: 1377081 - RNA, 23 nt, Human
uuugcuugcuuugaaguagcucu

SEQ ID NO: 1377082 - RNA, 20 nt, Human
uuugcuucaugugucccaga

SEQ ID NO: 1377083 - RNA, 19 nt, Human
uuugcuucaugugucccag

SEQ ID NO: 1377084 - RNA, 17 nt, Human
uuugauaugugaacagu

SEQ ID NO: 1377085 - RNA, 15 nt, Human
uuugauaugugaaca

SEQ ID NO: 1377086 - RNA, 20 nt, Human
uuugauaugcauauuuguuu

SEQ ID NO: 1377087 - RNA, 14 nt, Human
uuugauaugugaac

SEQ ID NO: 1377088 - RNA, 22 nt, Human
uuugccaagggcauaaauuauu

SEQ ID NO: 1377089 - RNA, 23 nt, Human
uuugccaagggcauaaauuauug

SEQ ID NO: 1377090 - RNA, 21 nt, Human
uuugcauuuguuuauguaauu

SEQ ID NO: 1377091 - RNA, 23 nt, Human
uuugcauuuguuuauguaauuuc

SEQ ID NO: 1377092 - RNA, 20 nt, Human
uuugcauuuguuuauguaau

SEQ ID NO: 1377093 - RNA, 12 nt, Human
uuugcauuuguu

SEQ ID NO: 1377094 - RNA, 18 nt, Human
uuugccacagcuuuugca

SEQ ID NO: 1377095 - RNA, 16 nt, Human
uuugccacagcuuuug

SEQ ID NO: 1377096 - RNA, 15 nt, Human
uuugccacagcuuuu

SEQ ID NO: 1377097 - RNA, 13 nt, Human
uuugccacagcuu

SEQ ID NO: 1377098 - RNA, 19 nt, Human
uuugccacccucaugcugu

SEQ ID NO: 1377099 - RNA, 18 nt, Human
uuugccacccucaugcug

SEQ ID NO: 1377100 - RNA, 22 nt, Human
uuuccuccugaggcuuuggauu

SEQ ID NO: 1377101 - RNA, 21 nt, Human
uuuccuccugaggcuuuggau

SEQ ID NO: 1377102 - RNA, 18 nt, Human
uuuccuccucaggcacac

SEQ ID NO: 1377103 - RNA, 22 nt, Human
uuuccuccgucaccucagagac

SEQ ID NO: 1377104 - RNA, 12 nt, Human
uuuccuaauacu

SEQ ID NO: 1377105 - RNA, 24 nt, Human
uuuccuaauaaaguucuguacuca

SEQ ID NO: 1377106 - RNA, 23 nt, Human
uuuccuaauaaaguucuguacuc

SEQ ID NO: 1377107 - RNA, 21 nt, Human
uuuccuaauaaaguucuguac

SEQ ID NO: 1377108 - RNA, 12 nt, Human
uuuccucuccac

SEQ ID NO: 1377109 - RNA, 14 nt, Human
uuuccucuccacac

SEQ ID NO: 1377110 - RNA, 23 nt, Human
uuuccucuguucaaagcugccug

SEQ ID NO: 1377111 - RNA, 16 nt, Human
uuucuaauugcuuauu

SEQ ID NO: 1377112 - RNA, 23 nt, Human
uuucuaauugcuuauuuauugua

SEQ ID NO: 1377113 - RNA, 14 nt, Human
uuucuaauugcuua

SEQ ID NO: 1377114 - RNA, 13 nt, Human
uuucuaauugcuu

SEQ ID NO: 1377115 - RNA, 19 nt, Human
uuucuaauuauguagcucu

SEQ ID NO: 1377116 - RNA, 18 nt, Human
uuucuaauuauguagcuc

SEQ ID NO: 1377117 - RNA, 17 nt, Human
uuucuaauuauguagcu

SEQ ID NO: 1377118 - RNA, 14 nt, Human
uuucuaauuaugua

SEQ ID NO: 1377119 - RNA, 12 nt, Human
uuuccuguccuc

SEQ ID NO: 1377120 - RNA, 23 nt, Human
uuuccuguauuuguucccaagag

SEQ ID NO: 1377121 - RNA, 22 nt, Human
uuuccuggguggcuacucugug

SEQ ID NO: 1377122 - RNA, 22 nt, Human
uuucuaaaguaaaaacaaagaa

SEQ ID NO: 1377123 - RNA, 19 nt, Human
uuucuaaaucuccaaaaua

SEQ ID NO: 1377124 - RNA, 22 nt, Human
uuuccuggugccaauuucaagu

SEQ ID NO: 1377125 - RNA, 19 nt, Human
uuuccuggugccaauuuca

SEQ ID NO: 1377126 - RNA, 16 nt, Human
uuuccuggugccaauu

SEQ ID NO: 1377127 - RNA, 14 nt, Human
uuuccuggugccaa

SEQ ID NO: 1377128 - RNA, 17 nt, Human
uuucuaaaguaaaaaca

SEQ ID NO: 1377129 - RNA, 16 nt, Human
uuucuaccauuucaga

SEQ ID NO: 1377130 - RNA, 22 nt, Human
uuucucgcuguccuuucuagag

SEQ ID NO: 1377131 - RNA, 16 nt, Human
uuucucucaacaccau

SEQ ID NO: 1377132 - RNA, 14 nt, Human
uuucucucaacacc

SEQ ID NO: 1377133 - RNA, 12 nt, Human
uuucucuaggaa

SEQ ID NO: 1377134 - RNA, 15 nt, Human
uuucucugaacacau

SEQ ID NO: 1377135 - RNA, 21 nt, Human
uuucucucuuuauacagcugu

SEQ ID NO: 1377136 - RNA, 20 nt, Human
uuucucucuuuauacagcug

SEQ ID NO: 1377137 - RNA, 16 nt, Human
uuucugaaaauauaac

SEQ ID NO: 1377138 - RNA, 19 nt, Human
uuucugaaauuuccuggga

SEQ ID NO: 1377139 - RNA, 12 nt, Human
uuucugaaauuu

SEQ ID NO: 1377140 - RNA, 16 nt, Human
uuucauuuucucucag

SEQ ID NO: 1377141 - RNA, 19 nt, Human
uuucauuugguucauuaau

SEQ ID NO: 1377142 - RNA, 23 nt, Human
uuucauuucuucuacaacucaua

SEQ ID NO: 1377143 - RNA, 16 nt, Human
uuucauuucuucuaca

SEQ ID NO: 1377144 - RNA, 14 nt, Human
uuucauuucaacug

SEQ ID NO: 1377145 - RNA, 20 nt, Human
uuucauuuaucuauaauuua

SEQ ID NO: 1377146 - RNA, 18 nt, Human
uuucaguccccacagaua

SEQ ID NO: 1377147 - RNA, 14 nt, Human
uuucaguauuauau

SEQ ID NO: 1377148 - RNA, 16 nt, Human
uuucaguauuauaugu

SEQ ID NO: 1377149 - RNA, 16 nt, Human
uuucagcugucuuuug

SEQ ID NO: 1377150 - RNA, 15 nt, Human
uuucagcugucuuuu

SEQ ID NO: 1377151 - RNA, 20 nt, Human
uuucagcuccugaccaguug

SEQ ID NO: 1377152 - RNA, 21 nt, Human
uuucagcuccugaccaguugc

SEQ ID NO: 1377153 - RNA, 16 nt, Human
uuucagcuccugacca

SEQ ID NO: 1377154 - RNA, 12 nt, Human
uuucagcuccug

SEQ ID NO: 1377155 - RNA, 23 nt, Human
uuuccacggagccacuccucuga

SEQ ID NO: 1377156 - RNA, 23 nt, Human
uuuccaccacagccagcaccugg

SEQ ID NO: 1377157 - RNA, 17 nt, Human
uuucauuuucucucagg

SEQ ID NO: 1377158 - RNA, 18 nt, Human
uuucauuuucucucaggu

SEQ ID NO: 1377159 - RNA, 17 nt, Human
uuucacaguuugaaaua

SEQ ID NO: 1377160 - RNA, 18 nt, Human
uuucacaguuugaaauaa

SEQ ID NO: 1377161 - RNA, 16 nt, Human
uuucacaguuugaaau

SEQ ID NO: 1377162 - RNA, 17 nt, Human
uuucacagaaaauaagg

SEQ ID NO: 1377163 - RNA, 13 nt, Human
uuucacagcuccu

SEQ ID NO: 1377164 - RNA, 14 nt, Human
uuucacagaaaaua

SEQ ID NO: 1377165 - RNA, 17 nt, Human
uuucacaaggucuuuaa

SEQ ID NO: 1377166 - RNA, 20 nt, Human
uuucaauugcaucucccaga

SEQ ID NO: 1377167 - RNA, 18 nt, Human
uuucaauugcaucuccca

SEQ ID NO: 1377168 - RNA, 22 nt, Human
uuucaauuccaccugcaaucaa

SEQ ID NO: 1377169 - RNA, 21 nt, Human
uuucacauagcccacuuacau

SEQ ID NO: 1377170 - RNA, 22 nt, Human
uuucacauagcccacuuacauu

SEQ ID NO: 1377171 - RNA, 23 nt, Human
uuucagcgacuccguuggccacu

SEQ ID NO: 1377172 - RNA, 18 nt, Human
uuucagcgacuccguugg

SEQ ID NO: 1377173 - RNA, 13 nt, Human
uuuaugcuugcaa

SEQ ID NO: 1377174 - RNA, 14 nt, Human
uuuaugccaccuga

SEQ ID NO: 1377175 - RNA, 17 nt, Human
uuuaugagaaagccuuc

SEQ ID NO: 1377176 - RNA, 19 nt, Human
uuuaugauaauagauucuc

SEQ ID NO: 1377177 - RNA, 18 nt, Human
uuuaugauaauagauucu

SEQ ID NO: 1377178 - RNA, 17 nt, Human
uuuaugauaauagauuc

SEQ ID NO: 1377179 - RNA, 22 nt, Human
uuuaugauacuugaaaauuaac

SEQ ID NO: 1377180 - RNA, 17 nt, Human
uuuauggcacuaguauu

SEQ ID NO: 1377181 - RNA, 21 nt, Human
uuuaucccaaaguuguuguaa

SEQ ID NO: 1377182 - RNA, 16 nt, Human
uuuaucccucaccugu

SEQ ID NO: 1377183 - RNA, 18 nt, Human
uuuaucccaaaguuguug

SEQ ID NO: 1377184 - RNA, 16 nt, Human
uuuaucccaaaguugu

SEQ ID NO: 1377185 - RNA, 20 nt, Human
uuuauacuuucccuacccuc

SEQ ID NO: 1377186 - RNA, 20 nt, Human
uuuauacucuuucuguauau

SEQ ID NO: 1377187 - RNA, 18 nt, Human
uuuauacucuuucuguau

SEQ ID NO: 1377188 - RNA, 16 nt, Human
uuuauacucuuucugu

SEQ ID NO: 1377189 - RNA, 12 nt, Human
uuuauacauaaa

SEQ ID NO: 1377190 - RNA, 20 nt, Human
uuuauacauaaacaagacca

SEQ ID NO: 1377191 - RNA, 12 nt, Human
uuuaucuuuaua

SEQ ID NO: 1377192 - RNA, 14 nt, Human
uuuaugaaugggug

SEQ ID NO: 1377193 - RNA, 14 nt, Human
uuuaugagaaacuu

SEQ ID NO: 1377194 - RNA, 16 nt, Human
uuuaucugaauuuuua

SEQ ID NO: 1377195 - RNA, 20 nt, Human
uuuaucgcugggaaaugaga

SEQ ID NO: 1377196 - RNA, 19 nt, Human
uuuaucgcugggaaaugag

SEQ ID NO: 1377197 - RNA, 15 nt, Human
uuuaucgcugggaaa

SEQ ID NO: 1377198 - RNA, 18 nt, Human
uuuauccugaaauuucag

SEQ ID NO: 1377199 - RNA, 18 nt, Human
uuuauccucuuuagaguu

SEQ ID NO: 1377200 - RNA, 16 nt, Human
uuuauccuaucucucc

SEQ ID NO: 1377201 - RNA, 16 nt, Human
uuuaucgcagaccuuu

SEQ ID NO: 1377202 - RNA, 19 nt, Human
uuuauccugaaauuucaga

SEQ ID NO: 1377203 - RNA, 16 nt, Human
uuuaucgucacugcuu

SEQ ID NO: 1377204 - RNA, 22 nt, Human
uuuauacagcuguauugucuga

SEQ ID NO: 1377205 - RNA, 21 nt, Human
uuuauacagcuguauugucug

SEQ ID NO: 1377206 - RNA, 18 nt, Human
uuuauacagcuguauugu

SEQ ID NO: 1377207 - RNA, 14 nt, Human
uuuauacagcugua

SEQ ID NO: 1377208 - RNA, 13 nt, Human
uuuauacagcugu

SEQ ID NO: 1377209 - RNA, 12 nt, Human
uuuauacagcug

SEQ ID NO: 1377210 - RNA, 14 nt, Human
uuuauaacuaacau

SEQ ID NO: 1377211 - RNA, 13 nt, Human
uuuauaaauccaa

SEQ ID NO: 1377212 - RNA, 20 nt, Human
uuuauaaauacugcaaauca

SEQ ID NO: 1377213 - RNA, 17 nt, Human
uuuauaaauacugcaaa

SEQ ID NO: 1377214 - RNA, 23 nt, Human
uuuaguugaauuuuuuuuaacau

SEQ ID NO: 1377215 - RNA, 14 nt, Human
uuuaguugaauuuu

SEQ ID NO: 1377216 - RNA, 11 nt, Human
uuuaguugaau

SEQ ID NO: 1377217 - RNA, 19 nt, Human
uuuacccuggccccucucc

SEQ ID NO: 1377218 - RNA, 17 nt, Human
uuuacccuggccccucu

SEQ ID NO: 1377219 - RNA, 14 nt, Human
uuuacccuggcccc

SEQ ID NO: 1377220 - RNA, 20 nt, Human
uuuagacagucucacuuugu

SEQ ID NO: 1377221 - RNA, 16 nt, Human
uuuagacagucucacu

SEQ ID NO: 1377222 - RNA, 17 nt, Human
uuuaguugcaacuuugu

SEQ ID NO: 1377223 - RNA, 18 nt, Human
uuuaguugcaacuuugua

SEQ ID NO: 1377224 - RNA, 22 nt, Human
uuuaacauuccucaugaaugua

SEQ ID NO: 1377225 - RNA, 23 nt, Human
uuuaacauuccucaugaauguaa

SEQ ID NO: 1377226 - RNA, 12 nt, Human
uuuaacagaaau

SEQ ID NO: 1377227 - RNA, 13 nt, Human
uuuaacauuccuc

SEQ ID NO: 1377228 - RNA, 14 nt, Human
uuuaacagaaaugu

SEQ ID NO: 1377229 - RNA, 15 nt, Human
uuuaacagaaaugua

SEQ ID NO: 1377230 - RNA, 18 nt, Human
uuuaaccccccuguacac

SEQ ID NO: 1377231 - RNA, 17 nt, Human
uuuaaccccccuguaca

SEQ ID NO: 1377232 - RNA, 19 nt, Human
uuuaaccccccuguacaca

SEQ ID NO: 1377233 - RNA, 14 nt, Human
uuuaaccucuaaau

SEQ ID NO: 1377234 - RNA, 14 nt, Human
uuuaauaaacacuc

SEQ ID NO: 1377235 - RNA, 15 nt, Human
uuuaauaaacacucu

SEQ ID NO: 1377236 - RNA, 13 nt, Human
uuuaauauaaaug

SEQ ID NO: 1377237 - RNA, 23 nt, Human
uuuaauauaaaguuuuauauauu

SEQ ID NO: 1377238 - RNA, 22 nt, Human
uuuaauauaaaguuuuauauau

SEQ ID NO: 1377239 - RNA, 18 nt, Human
uuuaauauaaaguuuuau

SEQ ID NO: 1377240 - RNA, 16 nt, Human
uuuaauauaaaguuuu

SEQ ID NO: 1377241 - RNA, 13 nt, Human
uuuaauauaaagu

SEQ ID NO: 1377242 - RNA, 23 nt, Human
uuuaauauaaaguaguccuguga

SEQ ID NO: 1377243 - RNA, 19 nt, Human
uuuaauaauguuucaaaca

SEQ ID NO: 1377244 - RNA, 16 nt, Human
uuuaaccuaugauauu

SEQ ID NO: 1377245 - RNA, 15 nt, Human
uuuaauaauguuuca

SEQ ID NO: 1377246 - RNA, 22 nt, Human
uuuaauaaacacucuugaaaaa

SEQ ID NO: 1377247 - RNA, 17 nt, Human
uuuaaucaaauuuguag

SEQ ID NO: 1377248 - RNA, 13 nt, Human
uuuaaucaaauuu

SEQ ID NO: 1377249 - RNA, 20 nt, Human
uuuaauauaaaugcaaauaa

SEQ ID NO: 1377250 - RNA, 18 nt, Human
uuuaauauaaaugcaaau

SEQ ID NO: 1377251 - RNA, 15 nt, Human
uuuaauauaaaugca

SEQ ID NO: 1377252 - RNA, 21 nt, Human
uuuacaugaaguauuuuuuca

SEQ ID NO: 1377253 - RNA, 18 nt, Human
uuuacaugaauugcauuu

SEQ ID NO: 1377254 - RNA, 15 nt, Human
uuuacaugaaguauu

SEQ ID NO: 1377255 - RNA, 14 nt, Human
uuuacaugaaguau

SEQ ID NO: 1377256 - RNA, 13 nt, Human
uuuacaugaagua

SEQ ID NO: 1377257 - RNA, 17 nt, Human
uuuaccaguugccuuuu

SEQ ID NO: 1377258 - RNA, 20 nt, Human
uuuacaugcuuauuccauga

SEQ ID NO: 1377259 - RNA, 18 nt, Human
uuuacaugcuuauuccau

SEQ ID NO: 1377260 - RNA, 17 nt, Human
uuuacaugcuuauucca

SEQ ID NO: 1377261 - RNA, 16 nt, Human
uuuacaugcuuauucc

SEQ ID NO: 1377262 - RNA, 14 nt, Human
uuuacaugcuuauu

SEQ ID NO: 1377263 - RNA, 13 nt, Human
uuuacaugcuuau

SEQ ID NO: 1377264 - RNA, 12 nt, Human
uuuacaugcuua

SEQ ID NO: 1377265 - RNA, 16 nt, Human
uuuacaugaaguauuu

SEQ ID NO: 1377266 - RNA, 16 nt, Human
uuuacaugaggacucu

SEQ ID NO: 1377267 - RNA, 16 nt, Human
uuuacauggcuggagc

SEQ ID NO: 1377268 - RNA, 19 nt, Human
uuuaaaagcacgacagugg

SEQ ID NO: 1377269 - RNA, 13 nt, Human
uuuaaaagcacga

SEQ ID NO: 1377270 - RNA, 12 nt, Human
uuuaaaagauuu

SEQ ID NO: 1377271 - RNA, 13 nt, Human
uuuaaaagaugcu

SEQ ID NO: 1377272 - RNA, 17 nt, Human
uuuaaaagaugcuuuua

SEQ ID NO: 1377273 - RNA, 12 nt, Human
uuuaaaagacac

SEQ ID NO: 1377274 - RNA, 19 nt, Human
uuuaaaagacacacuuguc

SEQ ID NO: 1377275 - RNA, 13 nt, Human
uuuaaaagauaca

SEQ ID NO: 1377276 - RNA, 11 nt, Human
uuuaaaacuug

SEQ ID NO: 1377277 - RNA, 17 nt, Human
uuuaaaagaaugauuau

SEQ ID NO: 1377278 - RNA, 22 nt, Human
uuuaaaacuguuggaauggauu

SEQ ID NO: 1377279 - RNA, 15 nt, Human
uuuaaaacuguugga

SEQ ID NO: 1377280 - RNA, 21 nt, Human
uuuaaaacccauuuaaauuuu

SEQ ID NO: 1377281 - RNA, 14 nt, Human
uuuaaaacccauuu

SEQ ID NO: 1377282 - RNA, 14 nt, Human
uuuaaaagaaugau

SEQ ID NO: 1377283 - RNA, 15 nt, Human
uuuaaaaucugucac

SEQ ID NO: 1377284 - RNA, 19 nt, Human
uuuaaaaucaucagaaagg

SEQ ID NO: 1377285 - RNA, 22 nt, Human
uuuaaaaucagcuauuuuguga

SEQ ID NO: 1377286 - RNA, 18 nt, Human
uuuaaaaucagcuauuuu

SEQ ID NO: 1377287 - RNA, 16 nt, Human
uuuaaaauaucuacau

SEQ ID NO: 1377288 - RNA, 23 nt, Human
uuuaaaauagcguucuuguaauu

SEQ ID NO: 1377289 - RNA, 20 nt, Human
uuuaaaauagcguucuugua

SEQ ID NO: 1377290 - RNA, 17 nt, Human
uuuaaaauagcguucuu

SEQ ID NO: 1377291 - RNA, 12 nt, Human
uuuaaaauagca

SEQ ID NO: 1377292 - RNA, 23 nt, Human
uuuaaaagugccauuaacaaaug

SEQ ID NO: 1377293 - RNA, 18 nt, Human
uuuaaaagugucaagcug

SEQ ID NO: 1377294 - RNA, 14 nt, Human
uuuaaaagccugcu

SEQ ID NO: 1377295 - RNA, 13 nt, Human
uuuaaaagccugc

SEQ ID NO: 1377296 - RNA, 17 nt, Human
uuuaaaaggaaagaaaa

SEQ ID NO: 1377297 - RNA, 23 nt, Human
uuuaaaccgcuaaaagaaacuuu

SEQ ID NO: 1377298 - RNA, 22 nt, Human
uuuaaaccgcuaaaagaaacuu

SEQ ID NO: 1377299 - RNA, 21 nt, Human
uuuaaaccgcuaaaagaaacu

SEQ ID NO: 1377300 - RNA, 20 nt, Human
uuuaaaccgcuaaaagaaac

SEQ ID NO: 1377301 - RNA, 17 nt, Human
uuuaaaccgcuaaaaga

SEQ ID NO: 1377302 - RNA, 19 nt, Human
uuuaaacauuaauagcagc

SEQ ID NO: 1377303 - RNA, 19 nt, Human
uuuaaaccaauugcugcua

SEQ ID NO: 1377304 - RNA, 15 nt, Human
uuuaaacauuaauag

SEQ ID NO: 1377305 - RNA, 15 nt, Human
uuuaaacaaguauuu

SEQ ID NO: 1377306 - RNA, 14 nt, Human
uuuaaacaccuccu

SEQ ID NO: 1377307 - RNA, 18 nt, Human
uuuaaacuguacaguguc

SEQ ID NO: 1377308 - RNA, 15 nt, Human
uuuaaacuguacagu

SEQ ID NO: 1377309 - RNA, 13 nt, Human
uuuaaacuguaca

SEQ ID NO: 1377310 - RNA, 15 nt, Human
uuuaaacuauaagca

SEQ ID NO: 1377311 - RNA, 11 nt, Human
uuuaaaccuuu

SEQ ID NO: 1377312 - RNA, 18 nt, Human
uuuaaaccuauacucacu

SEQ ID NO: 1377313 - RNA, 16 nt, Human
uuuaaacuguacagug

SEQ ID NO: 1377314 - RNA, 14 nt, Human
uuuaaacuguguac

SEQ ID NO: 1377315 - RNA, 13 nt, Human
uuuaacagaaaug

SEQ ID NO: 1377316 - RNA, 16 nt, Human
uuuaaaauuuguucuu

SEQ ID NO: 1377317 - RNA, 12 nt, Human
uuuaaaauuugu

SEQ ID NO: 1377318 - RNA, 20 nt, Human
uuuaaaauuuauauuguaaa

SEQ ID NO: 1377319 - RNA, 18 nt, Human
uuuaaaauuuuuuuagaa

SEQ ID NO: 1377320 - RNA, 19 nt, Human
uuuaaaauuuuuuuagaaa

SEQ ID NO: 1377321 - RNA, 17 nt, Human
uuuaaaauuuauauugu

SEQ ID NO: 1377322 - RNA, 12 nt, Human
uuuaaaauguac

SEQ ID NO: 1377323 - RNA, 16 nt, Human
uuuaaaauuacaacua

SEQ ID NO: 1377324 - RNA, 12 nt, Human
uuuaaaaugucu

SEQ ID NO: 1377325 - RNA, 20 nt, Human
uuuaaaauguaaagccaugc

SEQ ID NO: 1377326 - RNA, 18 nt, Human
uuuaaaauguaaagccau

SEQ ID NO: 1377327 - RNA, 17 nt, Human
uuuaaaauguaaagcca

SEQ ID NO: 1377328 - RNA, 11 nt, Human
uuuaaaaugua

SEQ ID NO: 1377329 - RNA, 16 nt, Human
uuuaaaaugagaaauc

SEQ ID NO: 1377330 - RNA, 19 nt, Human
uuguuucuuucucugagga

SEQ ID NO: 1377331 - RNA, 16 nt, Human
uuguuucuuucucuga

SEQ ID NO: 1377332 - RNA, 15 nt, Human
uuguuucuuaaauaa

SEQ ID NO: 1377333 - RNA, 23 nt, Human
uuguuucuuaaauaagaaacuuu

SEQ ID NO: 1377334 - RNA, 14 nt, Human
uuguuucuuaaaua

SEQ ID NO: 1377335 - RNA, 12 nt, Human
uuguuucuuaaa

SEQ ID NO: 1377336 - RNA, 17 nt, Human
uuguuucuguuccaaau

SEQ ID NO: 1377337 - RNA, 17 nt, Human
uuguuuggggcaggagu

SEQ ID NO: 1377338 - RNA, 15 nt, Human
uuguuugguauugua

SEQ ID NO: 1377339 - RNA, 20 nt, Human
uuguuucuuucucugaggac

SEQ ID NO: 1377340 - RNA, 15 nt, Human
uuguuuauguaauuu

SEQ ID NO: 1377341 - RNA, 21 nt, Human
uuguuuagaaagaauauucau

SEQ ID NO: 1377342 - RNA, 16 nt, Human
uuguuucuguuccaaa

SEQ ID NO: 1377343 - RNA, 15 nt, Human
uuguuucuguuccaa

SEQ ID NO: 1377344 - RNA, 15 nt, Human
uuuaaaacagacacu

SEQ ID NO: 1377345 - RNA, 12 nt, Human
uuguuuuacaau

SEQ ID NO: 1377346 - RNA, 13 nt, Human
uuguuuuacaaua

SEQ ID NO: 1377347 - RNA, 16 nt, Human
uuguuugguauuguau

SEQ ID NO: 1377348 - RNA, 19 nt, Human
uuguuugguauuguauuua

SEQ ID NO: 1377349 - RNA, 21 nt, Human
uuguuugguauuguauuuauu

SEQ ID NO: 1377350 - RNA, 22 nt, Human
uuguuauuuugcaaccucgcug

SEQ ID NO: 1377351 - RNA, 15 nt, Human
uuguuauuuugcaac

SEQ ID NO: 1377352 - RNA, 23 nt, Human
uuguuauuugaaaacauguuuau

SEQ ID NO: 1377353 - RNA, 22 nt, Human
uuguuuaauuuuuauuucuucc

SEQ ID NO: 1377354 - RNA, 22 nt, Human
uuguuuacaugcuuauuccaug

SEQ ID NO: 1377355 - RNA, 23 nt, Human
uuguuuacaugcuuauuccauga

SEQ ID NO: 1377356 - RNA, 17 nt, Human
uuguuuacaugcuuauu

SEQ ID NO: 1377357 - RNA, 16 nt, Human
uuguuuacaugcuuau

SEQ ID NO: 1377358 - RNA, 15 nt, Human
uuguuuacaugcuua

SEQ ID NO: 1377359 - RNA, 14 nt, Human
uugucuuauucccu

SEQ ID NO: 1377360 - RNA, 12 nt, Human
uugucuuuauuu

SEQ ID NO: 1377361 - RNA, 15 nt, Human
uuguuauuaaacaaa

SEQ ID NO: 1377362 - RNA, 19 nt, Human
uugcagaaaauucugugcc

SEQ ID NO: 1377363 - RNA, 23 nt, Human
uugauucgguauccccccaucuu

SEQ ID NO: 1377364 - RNA, 19 nt, Human
uugauucauaguaacuucu

SEQ ID NO: 1377365 - RNA, 14 nt, Human
uugaucuggaaccc

SEQ ID NO: 1377366 - RNA, 18 nt, Human
uugcaguuuaucauucaa

SEQ ID NO: 1377367 - RNA, 13 nt, Human
uugcaguuuauca

SEQ ID NO: 1377368 - RNA, 21 nt, Human
uugcaguucccacauuaaaga

SEQ ID NO: 1377369 - RNA, 13 nt, Human
uugcagcuguuuu

SEQ ID NO: 1377370 - RNA, 12 nt, Human
uugcagcuguuu

SEQ ID NO: 1377371 - RNA, 9 nt, Human
uugcagcug

SEQ ID NO: 1377372 - RNA, 15 nt, Human
uugcagcgacuggca

SEQ ID NO: 1377373 - RNA, 18 nt, Human
uugcagcgauuaauaaca

SEQ ID NO: 1377374 - RNA, 20 nt, Human
uugcagccggcacagggucu

SEQ ID NO: 1377375 - RNA, 18 nt, Human
uugcagccggcacagggu

SEQ ID NO: 1377376 - RNA, 19 nt, Human
uugcagcgauuaauaacag

SEQ ID NO: 1377377 - RNA, 23 nt, Human
uugcagcucuccccuucucugua

SEQ ID NO: 1377378 - RNA, 17 nt, Human
uugcagaaaauucugug

SEQ ID NO: 1377379 - RNA, 16 nt, Human
uugcagaaaauucugu

SEQ ID NO: 1377380 - RNA, 17 nt, Human
uugcagcacagcugaga

SEQ ID NO: 1377381 - RNA, 22 nt, Human
uugcagcccugcugcugccugc

SEQ ID NO: 1377382 - RNA, 23 nt, Human
uugccaugacaacuucuaauugc

SEQ ID NO: 1377383 - RNA, 23 nt, Human
uugccaucugcgugacaauaaaa

SEQ ID NO: 1377384 - RNA, 19 nt, Human
uugccauauuuucaccauu

SEQ ID NO: 1377385 - RNA, 20 nt, Human
uugccaggugacugucuggg

SEQ ID NO: 1377386 - RNA, 19 nt, Human
uugccaggcuggagugcag

SEQ ID NO: 1377387 - RNA, 23 nt, Human
uugccaggcuggagugcaguggc

SEQ ID NO: 1377388 - RNA, 19 nt, Human
uugccagagauccaaaaga

SEQ ID NO: 1377389 - RNA, 19 nt, Human
uugcauaacaauuccucua

SEQ ID NO: 1377390 - RNA, 23 nt, Human
uugcaguuuaucauucaagugua

SEQ ID NO: 1377391 - RNA, 20 nt, Human
uugcaguuuaucauucaagu

SEQ ID NO: 1377392 - RNA, 19 nt, Human
uugcaguuuaucauucaag

SEQ ID NO: 1377393 - RNA, 16 nt, Human
uugcauaacguauaaa

SEQ ID NO: 1377394 - RNA, 15 nt, Human
uugaauuguaacugu

SEQ ID NO: 1377395 - RNA, 21 nt, Human
uugaauucuugguugaggaaa

SEQ ID NO: 1377396 - RNA, 22 nt, Human
uugaauuaucuugguugaaaau

SEQ ID NO: 1377397 - RNA, 20 nt, Human
uugaauuaucuugguugaaa

SEQ ID NO: 1377398 - RNA, 18 nt, Human
uugaauuaucuugguuga

SEQ ID NO: 1377399 - RNA, 13 nt, Human
uugaauuaucuug

SEQ ID NO: 1377400 - RNA, 23 nt, Human
uugaauuaauaucccuacaugua

SEQ ID NO: 1377401 - RNA, 20 nt, Human
uugaauguuaaauaaauugu

SEQ ID NO: 1377402 - RNA, 14 nt, Human
uugagccuugaacu

SEQ ID NO: 1377403 - RNA, 15 nt, Human
uugagccuugaacuu

SEQ ID NO: 1377404 - RNA, 16 nt, Human
uugagccuugaacuuu

SEQ ID NO: 1377405 - RNA, 16 nt, Human
uugaggcaaaagaagg

SEQ ID NO: 1377406 - RNA, 13 nt, Human
uugaggacuucuu

SEQ ID NO: 1377407 - RNA, 16 nt, Human
uugaggagccccagcu

SEQ ID NO: 1377408 - RNA, 12 nt, Human
uugaggagcccc

SEQ ID NO: 1377409 - RNA, 15 nt, Human
uugaggacuucuugc

SEQ ID NO: 1377410 - RNA, 15 nt, Human
uugagcucucugccc

SEQ ID NO: 1377411 - RNA, 18 nt, Human
uugagcucucucauuguc

SEQ ID NO: 1377412 - RNA, 15 nt, Human
uugagcuauugcugu

SEQ ID NO: 1377413 - RNA, 18 nt, Human
uugaauuguaacuguucu

SEQ ID NO: 1377414 - RNA, 19 nt, Human
uugagccuugaacuuugac

SEQ ID NO: 1377415 - RNA, 16 nt, Human
uugaucuccguggcuu

SEQ ID NO: 1377416 - RNA, 19 nt, Human
uugaucgccuuucccaggu

SEQ ID NO: 1377417 - RNA, 18 nt, Human
uugauccauuucuaauua

SEQ ID NO: 1377418 - RNA, 17 nt, Human
uugauccauuucuaauu

SEQ ID NO: 1377419 - RNA, 16 nt, Human
uugauccauuucuaau

SEQ ID NO: 1377420 - RNA, 15 nt, Human
uugauccauuucuaa

SEQ ID NO: 1377421 - RNA, 17 nt, Human
uugauccagaaagaaaa

SEQ ID NO: 1377422 - RNA, 18 nt, Human
uugaucaguuaagaaauu

SEQ ID NO: 1377423 - RNA, 12 nt, Human
uugaucaguuaa

SEQ ID NO: 1377424 - RNA, 21 nt, Human
uugaucagccccacccuggcc

SEQ ID NO: 1377425 - RNA, 20 nt, Human
uugaucagccccacccuggc

SEQ ID NO: 1377426 - RNA, 15 nt, Human
uugauauuucuagcu

SEQ ID NO: 1377427 - RNA, 15 nt, Human
uugauaugacuguuu

SEQ ID NO: 1377428 - RNA, 16 nt, Human
uugauaugugaacagu

SEQ ID NO: 1377429 - RNA, 22 nt, Human
uugaggcuugguuccuucccaa

SEQ ID NO: 1377430 - RNA, 20 nt, Human
uugauaugccuuuucccaac

SEQ ID NO: 1377431 - RNA, 12 nt, Human
uucuuguauuua

SEQ ID NO: 1377432 - RNA, 21 nt, Human
uucuucauaacaauuuuagga

SEQ ID NO: 1377433 - RNA, 18 nt, Human
uucuucauaacaauuuua

SEQ ID NO: 1377434 - RNA, 14 nt, Human
uucuugucuuuauu

SEQ ID NO: 1377435 - RNA, 21 nt, Human
uucuugucuauaaagcauuua

SEQ ID NO: 1377436 - RNA, 22 nt, Human
uucuugucuauaaagcauuuaa

SEQ ID NO: 1377437 - RNA, 18 nt, Human
uucuugucuauaaagcau

SEQ ID NO: 1377438 - RNA, 17 nt, Human
uucuugucuauaaagca

SEQ ID NO: 1377439 - RNA, 16 nt, Human
uucuugucuauaaagc

SEQ ID NO: 1377440 - RNA, 14 nt, Human
uucuugucuauaaa

SEQ ID NO: 1377441 - RNA, 13 nt, Human
uucuugucuauaa

SEQ ID NO: 1377442 - RNA, 11 nt, Human
uucuugucuau

SEQ ID NO: 1377443 - RNA, 12 nt, Human
uucuuuaacugc

SEQ ID NO: 1377444 - RNA, 20 nt, Human
uucuuuaaaguucuucuaag

SEQ ID NO: 1377445 - RNA, 22 nt, Human
uucuuguguguaugcacaugaa

SEQ ID NO: 1377446 - RNA, 18 nt, Human
uucuuguguguaugcaca

SEQ ID NO: 1377447 - RNA, 22 nt, Human
uucuuauggaauugauuugcau

SEQ ID NO: 1377448 - RNA, 18 nt, Human
uucuuauggaauugauuu

SEQ ID NO: 1377449 - RNA, 17 nt, Human
uucuuauggaauugauu

SEQ ID NO: 1377450 - RNA, 15 nt, Human
uucuuauggaauuga

SEQ ID NO: 1377451 - RNA, 18 nt, Human
uucuuaugccauauaauu

SEQ ID NO: 1377452 - RNA, 13 nt, Human
uucuuagugacuu

SEQ ID NO: 1377453 - RNA, 16 nt, Human
uucuuagcucaaugag

SEQ ID NO: 1377454 - RNA, 23 nt, Human
uucuuagcucaaugagcauguuu

SEQ ID NO: 1377455 - RNA, 19 nt, Human
uucuuaggguuaugauuaa

SEQ ID NO: 1377456 - RNA, 17 nt, Human
uucuuagggaaggauac

SEQ ID NO: 1377457 - RNA, 16 nt, Human
uucuaaguuucuaaga

SEQ ID NO: 1377458 - RNA, 14 nt, Human
uucuaaguuucuaa

SEQ ID NO: 1377459 - RNA, 13 nt, Human
uucuaaguuucua

SEQ ID NO: 1377460 - RNA, 12 nt, Human
uucuaaguuucu

SEQ ID NO: 1377461 - RNA, 20 nt, Human
uucuaaguaaauacaauuuu

SEQ ID NO: 1377462 - RNA, 17 nt, Human
uucuaagucuuuccauu

SEQ ID NO: 1377463 - RNA, 15 nt, Human
uucuaagucuuucca

SEQ ID NO: 1377464 - RNA, 12 nt, Human
uucuaagucuuu

SEQ ID NO: 1377465 - RNA, 21 nt, Human
uucuaaguaaauacaauuuuu

SEQ ID NO: 1377466 - RNA, 18 nt, Human
uucuaaguaaauacaauu

SEQ ID NO: 1377467 - RNA, 17 nt, Human
uucuaaguaaauacaau

SEQ ID NO: 1377468 - RNA, 16 nt, Human
uucuaaguaaauacaa

SEQ ID NO: 1377469 - RNA, 15 nt, Human
uucuaaguaaauaca

SEQ ID NO: 1377470 - RNA, 17 nt, Human
uucuaaagcucugacau

SEQ ID NO: 1377471 - RNA, 16 nt, Human
uucuaaagcucugaca

SEQ ID NO: 1377472 - RNA, 15 nt, Human
uucuaaagcucugac

SEQ ID NO: 1377473 - RNA, 22 nt, Human
uucuggccaguguuuaaaacuu

SEQ ID NO: 1377474 - RNA, 18 nt, Human
uucuggccaguguuuaaa

SEQ ID NO: 1377475 - RNA, 17 nt, Human
uucuggccaguguuuaa

SEQ ID NO: 1377476 - RNA, 16 nt, Human
uucuggccaguguuua

SEQ ID NO: 1377477 - RNA, 15 nt, Human
uucuggccaggaagc

SEQ ID NO: 1377478 - RNA, 21 nt, Human
uucuggccaguguuuaaaacu

SEQ ID NO: 1377479 - RNA, 16 nt, Human
uucuggcuaugcauuu

SEQ ID NO: 1377480 - RNA, 14 nt, Human
uucuggccaggaag

SEQ ID NO: 1377481 - RNA, 18 nt, Human
uucuaaguuucuaagauu

SEQ ID NO: 1377482 - RNA, 17 nt, Human
uucuaaguuucuaagau

SEQ ID NO: 1377483 - RNA, 15 nt, Human
uucuuagcucaauga

SEQ ID NO: 1377484 - RNA, 17 nt, Human
uucugugccugaauauu

SEQ ID NO: 1377485 - RNA, 16 nt, Human
uucugugccugaauau

SEQ ID NO: 1377486 - RNA, 15 nt, Human
uucugugccugaaua

SEQ ID NO: 1377487 - RNA, 13 nt, Human
uucugugccugaa

SEQ ID NO: 1377488 - RNA, 17 nt, Human
uucuguauauacuuuuu

SEQ ID NO: 1377489 - RNA, 16 nt, Human
uucuguauauacuuuu

SEQ ID NO: 1377490 - RNA, 15 nt, Human
uucuguauauacuuu

SEQ ID NO: 1377491 - RNA, 16 nt, Human
uucuuucccagucugu

SEQ ID NO: 1377492 - RNA, 15 nt, Human
uucuuuccauuugca

SEQ ID NO: 1377493 - RNA, 21 nt, Human
uugaaaaucuuauaauuuaaa

SEQ ID NO: 1377494 - RNA, 11 nt, Human
uucuuuagaac

SEQ ID NO: 1377495 - RNA, 22 nt, Human
uucuuuacaaaacaaacucauu

SEQ ID NO: 1377496 - RNA, 20 nt, Human
uucuuuacaaaacaaacuca

SEQ ID NO: 1377497 - RNA, 19 nt, Human
uucuuuaacugccguaauu

SEQ ID NO: 1377498 - RNA, 15 nt, Human
uugaaacagaaaaau

SEQ ID NO: 1377499 - RNA, 15 nt, Human
uugaacuuugaccuc

SEQ ID NO: 1377500 - RNA, 16 nt, Human
uugaaaauguccagga

SEQ ID NO: 1377501 - RNA, 21 nt, Human
uugaaaauaagaauagaaaua

SEQ ID NO: 1377502 - RNA, 13 nt, Human
uucuuucuagaaa

SEQ ID NO: 1377503 - RNA, 12 nt, Human
uucuuucuagaa

SEQ ID NO: 1377504 - RNA, 18 nt, Human
uugaaaauuaacaugaau

SEQ ID NO: 1377505 - RNA, 20 nt, Human
uugaauguguuucacaguuu

SEQ ID NO: 1377506 - RNA, 13 nt, Human
uugaauguuaaau

SEQ ID NO: 1377507 - RNA, 15 nt, Human
uugaauguuaaauaa

SEQ ID NO: 1377508 - RNA, 18 nt, Human
uugaauguuaaauaaauu

SEQ ID NO: 1377509 - RNA, 22 nt, Human
uugaauguggcuugagaaauau

SEQ ID NO: 1377510 - RNA, 21 nt, Human
uugaauguggcuugagaaaua

SEQ ID NO: 1377511 - RNA, 19 nt, Human
uugaauguggcuugagaaa

SEQ ID NO: 1377512 - RNA, 21 nt, Human
uugaaugauuuuucuuuacaa

SEQ ID NO: 1377513 - RNA, 20 nt, Human
uugaaugauuuuucuuuaca

SEQ ID NO: 1377514 - RNA, 16 nt, Human
uugaagagguuuuaaa

SEQ ID NO: 1377515 - RNA, 20 nt, Human
uugaacuuugaccucugcag

SEQ ID NO: 1377516 - RNA, 17 nt, Human
uugaacuuugaccucug

SEQ ID NO: 1377517 - RNA, 18 nt, Human
uugaacuuugaccucugc

SEQ ID NO: 1377518 - RNA, 18 nt, Human
uugaagcacguacauuuu

SEQ ID NO: 1377519 - RNA, 14 nt, Human
uugaagcacguaca

SEQ ID NO: 1377520 - RNA, 20 nt, Human
uugaagcaaaucgaaugaaa

SEQ ID NO: 1377521 - RNA, 20 nt, Human
uugaagcacagugaucaagu

SEQ ID NO: 1377522 - RNA, 21 nt, Human
uugaagagguuuuaaagcuuc

SEQ ID NO: 1377523 - RNA, 17 nt, Human
uuguaaaaugacaauca

SEQ ID NO: 1377524 - RNA, 15 nt, Human
uuguaaaaugacaau

SEQ ID NO: 1377525 - RNA, 13 nt, Human
uuguaaaaugaca

SEQ ID NO: 1377526 - RNA, 14 nt, Human
uugguaccagauaa

SEQ ID NO: 1377527 - RNA, 12 nt, Human
uugguaccagau

SEQ ID NO: 1377528 - RNA, 13 nt, Human
uuggucguuuuuu

SEQ ID NO: 1377529 - RNA, 15 nt, Human
uugggauaucuccug

SEQ ID NO: 1377530 - RNA, 13 nt, Human
uugggaguuuuua

SEQ ID NO: 1377531 - RNA, 19 nt, Human
uugggagcuugggaaugga

SEQ ID NO: 1377532 - RNA, 17 nt, Human
uugggagcuugggaaug

SEQ ID NO: 1377533 - RNA, 15 nt, Human
uugggagagggcgca

SEQ ID NO: 1377534 - RNA, 17 nt, Human
uugggcacccccagccu

SEQ ID NO: 1377535 - RNA, 14 nt, Human
uugggauuugcugu

SEQ ID NO: 1377536 - RNA, 13 nt, Human
uugggauuugcug

SEQ ID NO: 1377537 - RNA, 15 nt, Human
uugguaacuuuugug

SEQ ID NO: 1377538 - RNA, 14 nt, Human
uugguaacuuuugu

SEQ ID NO: 1377539 - RNA, 12 nt, Human
uugguaacuuuu

SEQ ID NO: 1377540 - RNA, 20 nt, Human
uugguaaggggaauugagga

SEQ ID NO: 1377541 - RNA, 14 nt, Human
uugggaauuuuauu

SEQ ID NO: 1377542 - RNA, 18 nt, Human
uugggaauggauccugga

SEQ ID NO: 1377543 - RNA, 17 nt, Human
uugggaauauuugaauc

SEQ ID NO: 1377544 - RNA, 19 nt, Human
uugggaauauuugaaucuu

SEQ ID NO: 1377545 - RNA, 21 nt, Human
uuggcuuuauccucuuuagag

SEQ ID NO: 1377546 - RNA, 22 nt, Human
uuggcuuuauccucuuuagagu

SEQ ID NO: 1377547 - RNA, 15 nt, Human
uugggaauauuugaa

SEQ ID NO: 1377548 - RNA, 16 nt, Human
uugggaauauuugaau

SEQ ID NO: 1377549 - RNA, 16 nt, Human
uugggagagggcgcag

SEQ ID NO: 1377550 - RNA, 23 nt, Human
uugggagagacuuguuuuggaug

SEQ ID NO: 1377551 - RNA, 13 nt, Human
uugggagagacuu

SEQ ID NO: 1377552 - RNA, 17 nt, Human
uugggagacaugugaca

SEQ ID NO: 1377553 - RNA, 14 nt, Human
uugggagacaugug

SEQ ID NO: 1377554 - RNA, 22 nt, Human
uugggacugcuaaauaaaauuu

SEQ ID NO: 1377555 - RNA, 19 nt, Human
uuggcuuauaauucuuuca

SEQ ID NO: 1377556 - RNA, 18 nt, Human
uuggcuuauaauucuuuc

SEQ ID NO: 1377557 - RNA, 17 nt, Human
uuggcuuauaauucuuu

SEQ ID NO: 1377558 - RNA, 14 nt, Human
uuggcuuauaauuc

SEQ ID NO: 1377559 - RNA, 16 nt, Human
uuggcauagcucuggg

SEQ ID NO: 1377560 - RNA, 14 nt, Human
uuggcuuuauccuc

SEQ ID NO: 1377561 - RNA, 20 nt, Human
uuggcuuuauccucuuuaga

SEQ ID NO: 1377562 - RNA, 14 nt, Human
uuggcagucugaau

SEQ ID NO: 1377563 - RNA, 14 nt, Human
uuggcaggcuggcc

SEQ ID NO: 1377564 - RNA, 13 nt, Human
uuggcaggcuggc

SEQ ID NO: 1377565 - RNA, 17 nt, Human
uugucuuaauauugugg

SEQ ID NO: 1377566 - RNA, 12 nt, Human
uugucuuaauau

SEQ ID NO: 1377567 - RNA, 23 nt, Human
uugucucuguuuuacaaguugga

SEQ ID NO: 1377568 - RNA, 21 nt, Human
uugucucugaugcagcuuaua

SEQ ID NO: 1377569 - RNA, 17 nt, Human
uugucucugaugcagcu

SEQ ID NO: 1377570 - RNA, 15 nt, Human
uugucucugaugcag

SEQ ID NO: 1377571 - RNA, 15 nt, Human
uugucugaacuugca

SEQ ID NO: 1377572 - RNA, 12 nt, Human
uugucucuguuu

SEQ ID NO: 1377573 - RNA, 22 nt, Human
uugucugaaaagugaagacaga

SEQ ID NO: 1377574 - RNA, 14 nt, Human
uugucucugaugca

SEQ ID NO: 1377575 - RNA, 13 nt, Human
uugucucugaugc

SEQ ID NO: 1377576 - RNA, 18 nt, Human
uugucuauaaagcauuua

SEQ ID NO: 1377577 - RNA, 18 nt, Human
uugucuauuaccuguuag

SEQ ID NO: 1377578 - RNA, 16 nt, Human
uugucuauaaagcauu

SEQ ID NO: 1377579 - RNA, 15 nt, Human
uugucuauaaagcau

SEQ ID NO: 1377580 - RNA, 22 nt, Human
uugucaagaauagcauuguaaa

SEQ ID NO: 1377581 - RNA, 16 nt, Human
uuguaugaaacuaaag

SEQ ID NO: 1377582 - RNA, 22 nt, Human
uuguaaacucaaaauauuugua

SEQ ID NO: 1377583 - RNA, 16 nt, Human
uuguaaacucaaaaua

SEQ ID NO: 1377584 - RNA, 23 nt, Human
uuguaaacaaacuguguaacugc

SEQ ID NO: 1377585 - RNA, 22 nt, Human
uuguaaacaaacuguguaacug

SEQ ID NO: 1377586 - RNA, 17 nt, Human
uuguaaaauuauuucau

SEQ ID NO: 1377587 - RNA, 22 nt, Human
uuguaaaaugacaaucaugugu

SEQ ID NO: 1377588 - RNA, 20 nt, Human
uuguaaaaugacaaucaugu

SEQ ID NO: 1377589 - RNA, 19 nt, Human
uuguaaaaugacaaucaug

SEQ ID NO: 1377590 - RNA, 15 nt, Human
uuguaccaacuuuua

SEQ ID NO: 1377591 - RNA, 20 nt, Human
uuguacauuugggaguuuuu

SEQ ID NO: 1377592 - RNA, 15 nt, Human
uuguagcauccugga

SEQ ID NO: 1377593 - RNA, 17 nt, Human
uuguagcauccucuuua

SEQ ID NO: 1377594 - RNA, 22 nt, Human
uuguagaagucacauuccugaa

SEQ ID NO: 1377595 - RNA, 17 nt, Human
uuguagaagucacauuc

SEQ ID NO: 1377596 - RNA, 18 nt, Human
uuguacuuuagggaagua

SEQ ID NO: 1377597 - RNA, 20 nt, Human
uugccaugacaacuucuaau

SEQ ID NO: 1377598 - RNA, 17 nt, Human
uugccuucuacuuuuaa

SEQ ID NO: 1377599 - RNA, 22 nt, Human
uugccuuccagaaaacaaaacu

SEQ ID NO: 1377600 - RNA, 19 nt, Human
uugccuguaacaagccaga

SEQ ID NO: 1377601 - RNA, 14 nt, Human
uugccuguaacaag

SEQ ID NO: 1377602 - RNA, 13 nt, Human
uugccuuaaaaua

SEQ ID NO: 1377603 - RNA, 16 nt, Human
uugccuuaacuggagc

SEQ ID NO: 1377604 - RNA, 19 nt, Human
uugccuuuugcaaccagga

SEQ ID NO: 1377605 - RNA, 15 nt, Human
uugcgcuccuggccc

SEQ ID NO: 1377606 - RNA, 19 nt, Human
uugcgauagagucucacug

SEQ ID NO: 1377607 - RNA, 19 nt, Human
uugcgagagauguguguug

SEQ ID NO: 1377608 - RNA, 17 nt, Human
uugcgagagaugugugu

SEQ ID NO: 1377609 - RNA, 16 nt, Human
uugcgagagaugugug

SEQ ID NO: 1377610 - RNA, 15 nt, Human
uugcgagagaugugu

SEQ ID NO: 1377611 - RNA, 14 nt, Human
uugcgagagaugug

SEQ ID NO: 1377612 - RNA, 12 nt, Human
uugcgagagaug

SEQ ID NO: 1377613 - RNA, 19 nt, Human
uugcugugaggcuguccug

SEQ ID NO: 1377614 - RNA, 18 nt, Human
uugcugugaggcuguccu

SEQ ID NO: 1377615 - RNA, 17 nt, Human
uugcugugaggcugucc

SEQ ID NO: 1377616 - RNA, 15 nt, Human
uugcugugaggcugu

SEQ ID NO: 1377617 - RNA, 14 nt, Human
uugcugugaggcug

SEQ ID NO: 1377618 - RNA, 23 nt, Human
uugcuggacugucauagaaauua

SEQ ID NO: 1377619 - RNA, 21 nt, Human
uugcuggaauaaguucaaauu

SEQ ID NO: 1377620 - RNA, 21 nt, Human
uugcuggaagacgcaagggcc

SEQ ID NO: 1377621 - RNA, 21 nt, Human
uugcugcuucucccaggcaag

SEQ ID NO: 1377622 - RNA, 17 nt, Human
uugcugcuucucccagg

SEQ ID NO: 1377623 - RNA, 16 nt, Human
uugcugcuucucccag

SEQ ID NO: 1377624 - RNA, 15 nt, Human
uugcugcuucuccca

SEQ ID NO: 1377625 - RNA, 15 nt, Human
uugcuggaguacuua

SEQ ID NO: 1377626 - RNA, 13 nt, Human
uugcugcuucucc

SEQ ID NO: 1377627 - RNA, 20 nt, Human
uugcugcuaauauuuuccuc

SEQ ID NO: 1377628 - RNA, 16 nt, Human
uugcugcuaauauuuu

SEQ ID NO: 1377629 - RNA, 21 nt, Human
uugcuaagccccagcaagcaa

SEQ ID NO: 1377630 - RNA, 18 nt, Human
uugcuaagcauuccaacu

SEQ ID NO: 1377631 - RNA, 21 nt, Human
uugcgcuccuggcccagccuu

SEQ ID NO: 1377632 - RNA, 20 nt, Human
uugcgcuccuggcccagccu

SEQ ID NO: 1377633 - RNA, 19 nt, Human
uugcgcuccuggcccagcc

SEQ ID NO: 1377634 - RNA, 16 nt, Human
uugcuaagcauuccaa

SEQ ID NO: 1377635 - RNA, 19 nt, Human
uuggcaccuaauccaggca

SEQ ID NO: 1377636 - RNA, 18 nt, Human
uuggcaccgaagcccaga

SEQ ID NO: 1377637 - RNA, 17 nt, Human
uuggcaccgaagcccag

SEQ ID NO: 1377638 - RNA, 23 nt, Human
uuggcaccagacacccaggacuu

SEQ ID NO: 1377639 - RNA, 21 nt, Human
uuggcaccagacacccaggac

SEQ ID NO: 1377640 - RNA, 20 nt, Human
uuggcaccagacacccagga

SEQ ID NO: 1377641 - RNA, 17 nt, Human
uuggcaccagacaccca

SEQ ID NO: 1377642 - RNA, 13 nt, Human
uuggcaccagaca

SEQ ID NO: 1377643 - RNA, 13 nt, Human
uuggcaauuuugu

SEQ ID NO: 1377644 - RNA, 14 nt, Human
uuggcaauuuugug

SEQ ID NO: 1377645 - RNA, 12 nt, Human
uuggcaauuuug

SEQ ID NO: 1377646 - RNA, 17 nt, Human
uuggcaaugccaucauc

SEQ ID NO: 1377647 - RNA, 20 nt, Human
uuggauuuugcaaggugcau

SEQ ID NO: 1377648 - RNA, 21 nt, Human
uuggcaccuaauccaggcaga

SEQ ID NO: 1377649 - RNA, 13 nt, Human
uuggcagccuugu

SEQ ID NO: 1377650 - RNA, 12 nt, Human
uuggcagccuug

SEQ ID NO: 1377651 - RNA, 12 nt, Human
uuggcaggcugg

SEQ ID NO: 1377652 - RNA, 16 nt, Human
uuggcagccuugugau

SEQ ID NO: 1377653 - RNA, 14 nt, Human
uuggcagccuugug

SEQ ID NO: 1377654 - RNA, 22 nt, Human
uuggauuugacauugcguuuga

SEQ ID NO: 1377655 - RNA, 14 nt, Human
uuggauuugacauu

SEQ ID NO: 1377656 - RNA, 21 nt, Human
uuggauuuccuaauacuguca

SEQ ID NO: 1377657 - RNA, 14 nt, Human
uuggauuuccuaau

SEQ ID NO: 1377658 - RNA, 12 nt, Human
uuggauuuccua

SEQ ID NO: 1377659 - RNA, 16 nt, Human
uuggauuuaguuucag

SEQ ID NO: 1377660 - RNA, 21 nt, Human
uuggauuuaaaagccugcuca

SEQ ID NO: 1377661 - RNA, 19 nt, Human
uuggauuuaaaagccugcu

SEQ ID NO: 1377662 - RNA, 20 nt, Human
uugcugugaggcuguccugu

SEQ ID NO: 1377663 - RNA, 21 nt, Human
uuggaagagcagcaccuccuc

SEQ ID NO: 1377664 - RNA, 22 nt, Human
uuggaagauggcauaaccuguc

SEQ ID NO: 1377665 - RNA, 22 nt, Human
uuggaagagcagcaccuccuca

SEQ ID NO: 1377666 - RNA, 20 nt, Human
uuggaagagcagcaccuccu

SEQ ID NO: 1377667 - RNA, 17 nt, Human
uuggaagagcagcaccu

SEQ ID NO: 1377668 - RNA, 16 nt, Human
uuggaagagcagcacc

SEQ ID NO: 1377669 - RNA, 15 nt, Human
uuggaagagcagcac

SEQ ID NO: 1377670 - RNA, 24 nt, Human
uuggaagacuaucuuacuauuuca

SEQ ID NO: 1377671 - RNA, 14 nt, Human
uuggacacgcucag

SEQ ID NO: 1377672 - RNA, 19 nt, Human
uuggacaccuuuagguucu

SEQ ID NO: 1377673 - RNA, 19 nt, Human
uuggacaagcuucugagac

SEQ ID NO: 1377674 - RNA, 17 nt, Human
uuggacaagcuucugag

SEQ ID NO: 1377675 - RNA, 15 nt, Human
uuggacaagcuucug

SEQ ID NO: 1377676 - RNA, 19 nt, Human
uuggacaaaucacauauuu

SEQ ID NO: 1377677 - RNA, 20 nt, Human
uuggacaaaucacauauuuu

SEQ ID NO: 1377678 - RNA, 14 nt, Human
uuggacaaaucaca

SEQ ID NO: 1377679 - RNA, 14 nt, Human
uuggacauccuccu

SEQ ID NO: 1377680 - RNA, 15 nt, Human
uuggacaguuuacca

SEQ ID NO: 1377681 - RNA, 17 nt, Human
uuggaauguucucagau

SEQ ID NO: 1377682 - RNA, 23 nt, Human
uuggaauauuguccauuguccaa

SEQ ID NO: 1377683 - RNA, 15 nt, Human
uuggaauauaauugu

SEQ ID NO: 1377684 - RNA, 13 nt, Human
uuggaauacuuuu

SEQ ID NO: 1377685 - RNA, 17 nt, Human
uuggaauucgcuuucua

SEQ ID NO: 1377686 - RNA, 18 nt, Human
uuggacaaaauggaauac

SEQ ID NO: 1377687 - RNA, 23 nt, Human
ggcaucggggagccgggagccug

SEQ ID NO: 1377688 - RNA, 11 nt, Human
ggcauuuccua

SEQ ID NO: 1377689 - RNA, 21 nt, Human
ggcauuugcaggguccucuuc

SEQ ID NO: 1377690 - RNA, 20 nt, Human
ggcauuugcaggguccucuu

SEQ ID NO: 1377691 - RNA, 16 nt, Human
ggcauuuccugggugg

SEQ ID NO: 1377692 - RNA, 18 nt, Human
ggcauuuccuggguggcu

SEQ ID NO: 1377693 - RNA, 15 nt, Human
ggcauuuccugggug

SEQ ID NO: 1377694 - RNA, 12 nt, Human
ggcauuuccugg

SEQ ID NO: 1377695 - RNA, 21 nt, Human
ggcaucgcaccauucugacuc

SEQ ID NO: 1377696 - RNA, 18 nt, Human
ggcaucgcaccauucuga

SEQ ID NO: 1377697 - RNA, 22 nt, Human
ggcaucggggagccgggagccu

SEQ ID NO: 1377698 - RNA, 18 nt, Human
ggcauccagagucccugc

SEQ ID NO: 1377699 - RNA, 16 nt, Human
ggcauccagagucccu

SEQ ID NO: 1377700 - RNA, 20 nt, Human
ggcaucaguguccuuggcag

SEQ ID NO: 1377701 - RNA, 17 nt, Human
ggcaucaucucagcuca

SEQ ID NO: 1377702 - RNA, 23 nt, Human
ggcaucaucucagcucacugcaa

SEQ ID NO: 1377703 - RNA, 15 nt, Human
ggccaagaagcagug

SEQ ID NO: 1377704 - RNA, 13 nt, Human
ggccaagaggcug

SEQ ID NO: 1377705 - RNA, 23 nt, Human
ggcauuuguuucuuucucugagg

SEQ ID NO: 1377706 - RNA, 17 nt, Human
ggcauuuguuucuuucu

SEQ ID NO: 1377707 - RNA, 18 nt, Human
ggcauuuuacuguacaga

SEQ ID NO: 1377708 - RNA, 17 nt, Human
ggcauuuguuugaacug

SEQ ID NO: 1377709 - RNA, 21 nt, Human
ggccagaggcccccagcccag

SEQ ID NO: 1377710 - RNA, 16 nt, Human
ggccaaggaccugaga

SEQ ID NO: 1377711 - RNA, 19 nt, Human
ggccaaggaccugagaccu

SEQ ID NO: 1377712 - RNA, 15 nt, Human
ggccaaggaccugag

SEQ ID NO: 1377713 - RNA, 23 nt, Human
ggccaagcugaggugcccaggag

SEQ ID NO: 1377714 - RNA, 22 nt, Human
ggccaagcugaggugcccagga

SEQ ID NO: 1377715 - RNA, 20 nt, Human
ggccaagcugaggugcccag

SEQ ID NO: 1377716 - RNA, 15 nt, Human
ggccaagcugaggug

SEQ ID NO: 1377717 - RNA, 16 nt, Human
ggccagaccauggaca

SEQ ID NO: 1377718 - RNA, 22 nt, Human
ggcagggggcugcugcugggcu

SEQ ID NO: 1377719 - RNA, 18 nt, Human
ggcagggggcugcugcug

SEQ ID NO: 1377720 - RNA, 17 nt, Human
ggcagggggcugcugcu

SEQ ID NO: 1377721 - RNA, 16 nt, Human
ggcagggggcugcugc

SEQ ID NO: 1377722 - RNA, 15 nt, Human
ggcagggggcugcug

SEQ ID NO: 1377723 - RNA, 14 nt, Human
ggcagggggcugcu

SEQ ID NO: 1377724 - RNA, 13 nt, Human
ggcagggggcugc

SEQ ID NO: 1377725 - RNA, 12 nt, Human
ggcagggggcug

SEQ ID NO: 1377726 - RNA, 15 nt, Human
ggcaggggcuuccug

SEQ ID NO: 1377727 - RNA, 14 nt, Human
ggcaggggcuuccu

SEQ ID NO: 1377728 - RNA, 13 nt, Human
ggcaggggcuucc

SEQ ID NO: 1377729 - RNA, 12 nt, Human
ggcaaaacucua

SEQ ID NO: 1377730 - RNA, 12 nt, Human
ggauuuuuucca

SEQ ID NO: 1377731 - RNA, 23 nt, Human
ggauuuuuguuuuguuuuuacaa

SEQ ID NO: 1377732 - RNA, 11 nt, Human
ggcaaaagcuu

SEQ ID NO: 1377733 - RNA, 23 nt, Human
ggauuuccugcuuugggaagccg

SEQ ID NO: 1377734 - RNA, 20 nt, Human
ggauuucaugauuucauuuc

SEQ ID NO: 1377735 - RNA, 19 nt, Human
ggauuuauuuaaaauagca

SEQ ID NO: 1377736 - RNA, 14 nt, Human
ggauuuauuuaaaa

SEQ ID NO: 1377737 - RNA, 14 nt, Human
ggcacacagcuacu

SEQ ID NO: 1377738 - RNA, 14 nt, Human
ggcacugcuaggcu

SEQ ID NO: 1377739 - RNA, 18 nt, Human
ggcacaucagcacgauuu

SEQ ID NO: 1377740 - RNA, 22 nt, Human
ggcagggagcggccggccagcc

SEQ ID NO: 1377741 - RNA, 16 nt, Human
ggcagggccccaggca

SEQ ID NO: 1377742 - RNA, 17 nt, Human
ggcaggggccuggagau

SEQ ID NO: 1377743 - RNA, 16 nt, Human
ggcaggggccuggaga

SEQ ID NO: 1377744 - RNA, 14 nt, Human
ggcaggggccugga

SEQ ID NO: 1377745 - RNA, 21 nt, Human
ggcaggggccuccaugggccc

SEQ ID NO: 1377746 - RNA, 12 nt, Human
ggcaggggccgg

SEQ ID NO: 1377747 - RNA, 14 nt, Human
ggcagggaccacac

SEQ ID NO: 1377748 - RNA, 20 nt, Human
ggcagggaacauggggagga

SEQ ID NO: 1377749 - RNA, 18 nt, Human
ggcagggaacauggggag

SEQ ID NO: 1377750 - RNA, 17 nt, Human
ggcagggaacaugggga

SEQ ID NO: 1377751 - RNA, 22 nt, Human
ggcaggcugggccauguccaaa

SEQ ID NO: 1377752 - RNA, 16 nt, Human
ggcaggcugggccaug

SEQ ID NO: 1377753 - RNA, 15 nt, Human
ggcaggcugggccau

SEQ ID NO: 1377754 - RNA, 14 nt, Human
ggcaggcugggcca

SEQ ID NO: 1377755 - RNA, 17 nt, Human
ggcaggauuggggaaga

SEQ ID NO: 1377756 - RNA, 22 nt, Human
ggcaggauuggggaagagagcc

SEQ ID NO: 1377757 - RNA, 15 nt, Human
ggcaggauuggggaa

SEQ ID NO: 1377758 - RNA, 19 nt, Human
ggcaggaguagcugagcuc

SEQ ID NO: 1377759 - RNA, 18 nt, Human
ggcaggaguagcugagcu

SEQ ID NO: 1377760 - RNA, 17 nt, Human
ggcaggaguagcugagc

SEQ ID NO: 1377761 - RNA, 14 nt, Human
ggcaggaguagcug

SEQ ID NO: 1377762 - RNA, 21 nt, Human
ggcagcgccaggcugaccaca

SEQ ID NO: 1377763 - RNA, 14 nt, Human
ggcagcgccaggcu

SEQ ID NO: 1377764 - RNA, 14 nt, Human
ggcaggagggaggu

SEQ ID NO: 1377765 - RNA, 14 nt, Human
ggcagccuugugau

SEQ ID NO: 1377766 - RNA, 14 nt, Human
ggcagcccagccag

SEQ ID NO: 1377767 - RNA, 13 nt, Human
ggcagcccagcca

SEQ ID NO: 1377768 - RNA, 12 nt, Human
ggcagcccagcc

SEQ ID NO: 1377769 - RNA, 11 nt, Human
ggcagcccagc

SEQ ID NO: 1377770 - RNA, 23 nt, Human
ggcagccagugcccugagccagg

SEQ ID NO: 1377771 - RNA, 22 nt, Human
ggcagccagugcccugagccag

SEQ ID NO: 1377772 - RNA, 20 nt, Human
ggcagccagugcccugagcc

SEQ ID NO: 1377773 - RNA, 19 nt, Human
ggcagccagugcccugagc

SEQ ID NO: 1377774 - RNA, 17 nt, Human
ggcagccagugcccuga

SEQ ID NO: 1377775 - RNA, 15 nt, Human
ggcagccagugcccu

SEQ ID NO: 1377776 - RNA, 20 nt, Human
ggcagccagcaucugggccu

SEQ ID NO: 1377777 - RNA, 21 nt, Human
ggcagccagggagagcccagg

SEQ ID NO: 1377778 - RNA, 19 nt, Human
ggcagccagcaucugggcc

SEQ ID NO: 1377779 - RNA, 16 nt, Human
ggcagccagcaucugg

SEQ ID NO: 1377780 - RNA, 21 nt, Human
ggcagccacacuucucaggac

SEQ ID NO: 1377781 - RNA, 20 nt, Human
ggcagccacacuucucagga

SEQ ID NO: 1377782 - RNA, 17 nt, Human
ggcagcauccccuugaa

SEQ ID NO: 1377783 - RNA, 22 nt, Human
ggcagcagugugaggccagggc

SEQ ID NO: 1377784 - RNA, 18 nt, Human
ggcagcccagccagcguc

SEQ ID NO: 1377785 - RNA, 16 nt, Human
ggcagcccagccagcg

SEQ ID NO: 1377786 - RNA, 15 nt, Human
ggcagcccagccagc

SEQ ID NO: 1377787 - RNA, 23 nt, Human
ggcagccucugggggguggccag

SEQ ID NO: 1377788 - RNA, 20 nt, Human
ggcagccucugggggguggc

SEQ ID NO: 1377789 - RNA, 19 nt, Human
ggcagccucuggggggugg

SEQ ID NO: 1377790 - RNA, 16 nt, Human
ggcagccucugggggg

SEQ ID NO: 1377791 - RNA, 18 nt, Human
ggcagccccaggccaaag

SEQ ID NO: 1377792 - RNA, 14 nt, Human
ggcagccccaggcc

SEQ ID NO: 1377793 - RNA, 13 nt, Human
ggcagccucuggg

SEQ ID NO: 1377794 - RNA, 24 nt, Human
ggaucucauuggacccuuccaugg

SEQ ID NO: 1377795 - RNA, 17 nt, Human
ggaucucauuggacccu

SEQ ID NO: 1377796 - RNA, 22 nt, Human
ggaucucaccaggcagccucug

SEQ ID NO: 1377797 - RNA, 17 nt, Human
ggaucucaccaggcagc

SEQ ID NO: 1377798 - RNA, 16 nt, Human
ggaucucaccaggcag

SEQ ID NO: 1377799 - RNA, 15 nt, Human
ggaucucaccaggca

SEQ ID NO: 1377800 - RNA, 21 nt, Human
ggaucuauuucauguuuuuga

SEQ ID NO: 1377801 - RNA, 14 nt, Human
ggaucuauuucaug

SEQ ID NO: 1377802 - RNA, 16 nt, Human
ggauccuguguggaga

SEQ ID NO: 1377803 - RNA, 21 nt, Human
ggaucucccugagaugggcuu

SEQ ID NO: 1377804 - RNA, 19 nt, Human
ggauggucuuacagcaggc

SEQ ID NO: 1377805 - RNA, 12 nt, Human
ggauuuaacaga

SEQ ID NO: 1377806 - RNA, 19 nt, Human
ggauuuaaaagccugcuca

SEQ ID NO: 1377807 - RNA, 18 nt, Human
ggauuuaaaagccugcuc

SEQ ID NO: 1377808 - RNA, 17 nt, Human
ggauuuaaaagccugcu

SEQ ID NO: 1377809 - RNA, 16 nt, Human
ggauuuaaaagccugc

SEQ ID NO: 1377810 - RNA, 22 nt, Human
ggauuuaacagaaauguacagc

SEQ ID NO: 1377811 - RNA, 16 nt, Human
ggauuuaacagaaaug

SEQ ID NO: 1377812 - RNA, 17 nt, Human
ggauuuaacagaaaugu

SEQ ID NO: 1377813 - RNA, 23 nt, Human
ggaugggggaacucagauccagg

SEQ ID NO: 1377814 - RNA, 22 nt, Human
ggaugggggaacucagauccag

SEQ ID NO: 1377815 - RNA, 21 nt, Human
ggaugggggaacucagaucca

SEQ ID NO: 1377816 - RNA, 17 nt, Human
ggaugggggaacucaga

SEQ ID NO: 1377817 - RNA, 15 nt, Human
ggaugggggaacuca

SEQ ID NO: 1377818 - RNA, 12 nt, Human
ggauggugucuc

SEQ ID NO: 1377819 - RNA, 21 nt, Human
ggauggucuuacagcaggcag

SEQ ID NO: 1377820 - RNA, 20 nt, Human
ggaugguaguuuuuucaucu

SEQ ID NO: 1377821 - RNA, 16 nt, Human
ggaugguaguuuuuuc

SEQ ID NO: 1377822 - RNA, 21 nt, Human
ggaugggguauggauucuaaa

SEQ ID NO: 1377823 - RNA, 14 nt, Human
ggauuguaguccca

SEQ ID NO: 1377824 - RNA, 19 nt, Human
ggaguuagggacugaccag

SEQ ID NO: 1377825 - RNA, 13 nt, Human
ggaguuagggacu

SEQ ID NO: 1377826 - RNA, 22 nt, Human
ggaguuagggacugaccagcag

SEQ ID NO: 1377827 - RNA, 23 nt, Human
ggaguuaagaccuggcagcucug

SEQ ID NO: 1377828 - RNA, 18 nt, Human
ggaguuaagaccuggcag

SEQ ID NO: 1377829 - RNA, 16 nt, Human
ggaguuaagaccuggc

SEQ ID NO: 1377830 - RNA, 15 nt, Human
ggaguuaagaccugg

SEQ ID NO: 1377831 - RNA, 20 nt, Human
ggaguguuccccuuccacug

SEQ ID NO: 1377832 - RNA, 12 nt, Human
ggaguguucccc

SEQ ID NO: 1377833 - RNA, 17 nt, Human
ggagugugugugagugu

SEQ ID NO: 1377834 - RNA, 20 nt, Human
ggaguguccucuucccucuc

SEQ ID NO: 1377835 - RNA, 13 nt, Human
ggaguguccucuu

SEQ ID NO: 1377836 - RNA, 20 nt, Human
ggaguguaugacugcacaug

SEQ ID NO: 1377837 - RNA, 20 nt, Human
ggagugguuuaggcuauuug

SEQ ID NO: 1377838 - RNA, 15 nt, Human
ggaguggguggggag

SEQ ID NO: 1377839 - RNA, 14 nt, Human
ggagugggugggga

SEQ ID NO: 1377840 - RNA, 23 nt, Human
ggagugggguggugucagacccu

SEQ ID NO: 1377841 - RNA, 24 nt, Human
ggaguguccucuucccucucugca

SEQ ID NO: 1377842 - RNA, 16 nt, Human
ggagugugcguggugg

SEQ ID NO: 1377843 - RNA, 15 nt, Human
ggaggugggccgugg

SEQ ID NO: 1377844 - RNA, 19 nt, Human
ggaggugggccguggcccu

SEQ ID NO: 1377845 - RNA, 13 nt, Human
ggagguggcuggg

SEQ ID NO: 1377846 - RNA, 14 nt, Human
ggagggugggaagg

SEQ ID NO: 1377847 - RNA, 13 nt, Human
ggagggugggaag

SEQ ID NO: 1377848 - RNA, 16 nt, Human
ggagggaagggagcca

SEQ ID NO: 1377849 - RNA, 15 nt, Human
ggagggaagggagcc

SEQ ID NO: 1377850 - RNA, 16 nt, Human
ggagggaagcucuugg

SEQ ID NO: 1377851 - RNA, 13 nt, Human
ggaggcugguccu

SEQ ID NO: 1377852 - RNA, 18 nt, Human
ggaggcugcugcugcucu

SEQ ID NO: 1377853 - RNA, 23 nt, Human
ggaggcugcucggggugcacagg

SEQ ID NO: 1377854 - RNA, 22 nt, Human
ggaggcugcucggggugcacag

SEQ ID NO: 1377855 - RNA, 14 nt, Human
ggaggcugcucggg

SEQ ID NO: 1377856 - RNA, 12 nt, Human
ggaggcugcucg

SEQ ID NO: 1377857 - RNA, 11 nt, Human
ggaggcugcuc

SEQ ID NO: 1377858 - RNA, 14 nt, Human
ggagggggauccga

SEQ ID NO: 1377859 - RNA, 14 nt, Human
ggagggggagaggg

SEQ ID NO: 1377860 - RNA, 16 nt, Human
ggaggggggagggaag

SEQ ID NO: 1377861 - RNA, 15 nt, Human
ggaggggggagggaa

SEQ ID NO: 1377862 - RNA, 21 nt, Human
ggaggcucacccccuucucca

SEQ ID NO: 1377863 - RNA, 16 nt, Human
ggaggcggugggccug

SEQ ID NO: 1377864 - RNA, 22 nt, Human
ggaggcuaugcucaggggcccu

SEQ ID NO: 1377865 - RNA, 20 nt, Human
ggaggcuaaagcccagagac

SEQ ID NO: 1377866 - RNA, 20 nt, Human
ggaggcggauguugaaguga

SEQ ID NO: 1377867 - RNA, 18 nt, Human
ggaggcuccagagggcac

SEQ ID NO: 1377868 - RNA, 16 nt, Human
ggaggcuccagagggc

SEQ ID NO: 1377869 - RNA, 15 nt, Human
ggaggcuccagaggg

SEQ ID NO: 1377870 - RNA, 15 nt, Human
ggaggcucagguccc

SEQ ID NO: 1377871 - RNA, 15 nt, Human
ggaggcucuggagcc

SEQ ID NO: 1377872 - RNA, 13 nt, Human
aaaaauacucaga

SEQ ID NO: 1377873 - RNA, 14 nt, Human
aaaaauacucagau

SEQ ID NO: 1377874 - RNA, 17 nt, Human
aaaaauaauuuuuauau

SEQ ID NO: 1377875 - RNA, 18 nt, Human
aaaaauaaucaaaagcua

SEQ ID NO: 1377876 - RNA, 12 nt, Human
aaaaauaaagaa

SEQ ID NO: 1377877 - RNA, 18 nt, Human
ggcugguaucucagaaag

SEQ ID NO: 1377878 - RNA, 16 nt, Human
ggcugguaucucagaa

SEQ ID NO: 1377879 - RNA, 17 nt, Human
aaaaagcccaccauuug

SEQ ID NO: 1377880 - RNA, 17 nt, Human
aaaaagccaguuugggu

SEQ ID NO: 1377881 - RNA, 21 nt, Human
aaaaaggaugcacagaguugu

SEQ ID NO: 1377882 - RNA, 13 nt, Human
aaaaaggcaguua

SEQ ID NO: 1377883 - RNA, 23 nt, Human
aaaaagccaguuuggguaaaaua

SEQ ID NO: 1377884 - RNA, 23 nt, Human
aaaaaguugcagcuguuuuguug

SEQ ID NO: 1377885 - RNA, 16 nt, Human
aaaaaguuuuaguuuu

SEQ ID NO: 1377886 - RNA, 13 nt, Human
aaaaaguuuguuu

SEQ ID NO: 1377887 - RNA, 14 nt, Human
aaaaauaaaaaaca

SEQ ID NO: 1377888 - RNA, 12 nt, Human
aaaaaaagauga

SEQ ID NO: 1377889 - RNA, 19 nt, Human
aaaaaaauugaaauguaag

SEQ ID NO: 1377890 - RNA, 13 nt, Human
aaaaaaauguauu

SEQ ID NO: 1377891 - RNA, 10 nt, Human
aaaaaacuac

SEQ ID NO: 1377892 - RNA, 14 nt, Human
aaaaaaagaucugu

SEQ ID NO: 1377893 - RNA, 19 nt, Human
aaaaaaaccugagauuuau

SEQ ID NO: 1377894 - RNA, 18 nt, Human
aaaaaaacaguggaucac

SEQ ID NO: 1377895 - RNA, 20 nt, Human
ggcuggccucccaaaugagc

SEQ ID NO: 1377896 - RNA, 23 nt, Human
ggcuggccucacccaccccugca

SEQ ID NO: 1377897 - RNA, 19 nt, Human
ggcuggccauggagaaagc

SEQ ID NO: 1377898 - RNA, 18 nt, Human
ggcuggccauggagaaag

SEQ ID NO: 1377899 - RNA, 13 nt, Human
ggcuggccaugga

SEQ ID NO: 1377900 - RNA, 22 nt, Human
ggcuggccaguccaggcugccg

SEQ ID NO: 1377901 - RNA, 23 nt, Human
ggcugcccuccugugcucagccc

SEQ ID NO: 1377902 - RNA, 22 nt, Human
ggcugcccuccugugcucagcc

SEQ ID NO: 1377903 - RNA, 20 nt, Human
ggcugcccuccugugcucag

SEQ ID NO: 1377904 - RNA, 18 nt, Human
ggcugcccuccugugcuc

SEQ ID NO: 1377905 - RNA, 14 nt, Human
ggcugcccuccugu

SEQ ID NO: 1377906 - RNA, 13 nt, Human
ggcugcccuccug

SEQ ID NO: 1377907 - RNA, 15 nt, Human
ggcugccccucucac

SEQ ID NO: 1377908 - RNA, 15 nt, Human
ggcugaccaugcuca

SEQ ID NO: 1377909 - RNA, 13 nt, Human
ggcugaaagacag

SEQ ID NO: 1377910 - RNA, 21 nt, Human
ggcuggccaguccaggcugcc

SEQ ID NO: 1377911 - RNA, 20 nt, Human
ggcuggccaguccaggcugc

SEQ ID NO: 1377912 - RNA, 16 nt, Human
ggcuggccaguccagg

SEQ ID NO: 1377913 - RNA, 15 nt, Human
ggcugccguccccua

SEQ ID NO: 1377914 - RNA, 23 nt, Human
ggcugccguggggccgccgccuc

SEQ ID NO: 1377915 - RNA, 16 nt, Human
ggcugccguggggccg

SEQ ID NO: 1377916 - RNA, 15 nt, Human
ggcugccggggcagc

SEQ ID NO: 1377917 - RNA, 21 nt, Human
ggcucuugauaccccccucug

SEQ ID NO: 1377918 - RNA, 20 nt, Human
ggcucuugauaccccccucu

SEQ ID NO: 1377919 - RNA, 19 nt, Human
ggcucuugauaccccccuc

SEQ ID NO: 1377920 - RNA, 19 nt, Human
ggcucuaauucacagugcu

SEQ ID NO: 1377921 - RNA, 17 nt, Human
ggcucuaauucacagug

SEQ ID NO: 1377922 - RNA, 23 nt, Human
ggcucuaacgccugagcccaggg

SEQ ID NO: 1377923 - RNA, 22 nt, Human
ggcucuaacgccugagcccagg

SEQ ID NO: 1377924 - RNA, 19 nt, Human
ggcucuaacgccugagccc

SEQ ID NO: 1377925 - RNA, 18 nt, Human
ggcucuaacgccugagcc

SEQ ID NO: 1377926 - RNA, 17 nt, Human
ggcucuaacgccugagc

SEQ ID NO: 1377927 - RNA, 16 nt, Human
ggcucuaacgccugag

SEQ ID NO: 1377928 - RNA, 15 nt, Human
ggcucuaacgccuga

SEQ ID NO: 1377929 - RNA, 14 nt, Human
ggcucuaacgccug

SEQ ID NO: 1377930 - RNA, 18 nt, Human
ggcucguugacuggcugu

SEQ ID NO: 1377931 - RNA, 23 nt, Human
ggcucguggacugagugggaagc

SEQ ID NO: 1377932 - RNA, 19 nt, Human
ggcucguggacugaguggg

SEQ ID NO: 1377933 - RNA, 13 nt, Human
ggcucguggacug

SEQ ID NO: 1377934 - RNA, 15 nt, Human
ggcucggccugcccc

SEQ ID NO: 1377935 - RNA, 18 nt, Human
ggcucggccugcccccac

SEQ ID NO: 1377936 - RNA, 14 nt, Human
ggcucggccugccc

SEQ ID NO: 1377937 - RNA, 16 nt, Human
ggcucccuggggggag

SEQ ID NO: 1377938 - RNA, 21 nt, Human
ggcucccuguaaccucuucag

SEQ ID NO: 1377939 - RNA, 17 nt, Human
ggcucccuccgccccca

SEQ ID NO: 1377940 - RNA, 15 nt, Human
ggcucccggaauucc

SEQ ID NO: 1377941 - RNA, 20 nt, Human
ggcucccuguaaccucuuca

SEQ ID NO: 1377942 - RNA, 13 nt, Human
ggcucccuccgcc

SEQ ID NO: 1377943 - RNA, 18 nt, Human
ggcucccugacugggagu

SEQ ID NO: 1377944 - RNA, 17 nt, Human
ggcucccugacugggag

SEQ ID NO: 1377945 - RNA, 23 nt, Human
ggcucacugcaaccuccaccucc

SEQ ID NO: 1377946 - RNA, 14 nt, Human
ggcucacucagcca

SEQ ID NO: 1377947 - RNA, 22 nt, Human
ggcucacucagcacuuggcccu

SEQ ID NO: 1377948 - RNA, 16 nt, Human
ggcucacucagcacuu

SEQ ID NO: 1377949 - RNA, 22 nt, Human
ggccuucccuguuuucccccca

SEQ ID NO: 1377950 - RNA, 18 nt, Human
ggcgaucacaacgugcau

SEQ ID NO: 1377951 - RNA, 20 nt, Human
ggcgaucacaacgugcauug

SEQ ID NO: 1377952 - RNA, 13 nt, Human
ggcguuuguaaug

SEQ ID NO: 1377953 - RNA, 20 nt, Human
ggcuaagcuucacuguaaaa

SEQ ID NO: 1377954 - RNA, 18 nt, Human
ggcgaugccagccaagcu

SEQ ID NO: 1377955 - RNA, 17 nt, Human
ggcgaugccagccaagc

SEQ ID NO: 1377956 - RNA, 17 nt, Human
ggcgugagccaccucgc

SEQ ID NO: 1377957 - RNA, 23 nt, Human
ggcgugaucucagcucacugcaa

SEQ ID NO: 1377958 - RNA, 13 nt, Human
ggcuaauuuaaca

SEQ ID NO: 1377959 - RNA, 12 nt, Human
ggcuaauuuaac

SEQ ID NO: 1377960 - RNA, 13 nt, Human
ggcuacagagaag

SEQ ID NO: 1377961 - RNA, 12 nt, Human
ggcuacagagaa

SEQ ID NO: 1377962 - RNA, 11 nt, Human
ggcuacagaga

SEQ ID NO: 1377963 - RNA, 13 nt, Human
ggcuaauuuuugu

SEQ ID NO: 1377964 - RNA, 17 nt, Human
ggcuacagagaagccuu

SEQ ID NO: 1377965 - RNA, 16 nt, Human
ggcuacagagaagccu

SEQ ID NO: 1377966 - RNA, 15 nt, Human
ggcuacagagaagcc

SEQ ID NO: 1377967 - RNA, 14 nt, Human
ggcuacagagaagc

SEQ ID NO: 1377968 - RNA, 19 nt, Human
ggcuacagagaagccuuca

SEQ ID NO: 1377969 - RNA, 18 nt, Human
ggcuacagagaagccuuc

SEQ ID NO: 1377970 - RNA, 14 nt, Human
ggcuaccaggaaag

SEQ ID NO: 1377971 - RNA, 13 nt, Human
ggcuaccuuugua

SEQ ID NO: 1377972 - RNA, 24 nt, Human
ggcuacucugugccagagccuggg

SEQ ID NO: 1377973 - RNA, 23 nt, Human
ggcuacucugugccagagccugg

SEQ ID NO: 1377974 - RNA, 22 nt, Human
ggcuacucugugccagagccug

SEQ ID NO: 1377975 - RNA, 21 nt, Human
ggcuacucugugccagagccu

SEQ ID NO: 1377976 - RNA, 20 nt, Human
ggcuacucugugccagagcc

SEQ ID NO: 1377977 - RNA, 19 nt, Human
ggcuacucugugccagagc

SEQ ID NO: 1377978 - RNA, 18 nt, Human
ggcuacucugugccagag

SEQ ID NO: 1377979 - RNA, 16 nt, Human
ggcuacucugugccag

SEQ ID NO: 1377980 - RNA, 15 nt, Human
ggcuacucugugcca

SEQ ID NO: 1377981 - RNA, 13 nt, Human
ggcuacucugugc

SEQ ID NO: 1377982 - RNA, 19 nt, Human
ggcuacccugagcugaggc

SEQ ID NO: 1377983 - RNA, 14 nt, Human
ggcuaccuuuguau

SEQ ID NO: 1377984 - RNA, 18 nt, Human
ggcuacuucggggcuggg

SEQ ID NO: 1377985 - RNA, 23 nt, Human
ggcuacuucggggcugggaaguc

SEQ ID NO: 1377986 - RNA, 17 nt, Human
ggcuagacuagucucaa

SEQ ID NO: 1377987 - RNA, 16 nt, Human
ggcuagagguucaaag

SEQ ID NO: 1377988 - RNA, 22 nt, Human
ggccuggagcacaaagacccug

SEQ ID NO: 1377989 - RNA, 20 nt, Human
ggccuggagauccuccugca

SEQ ID NO: 1377990 - RNA, 22 nt, Human
ggccugcugcugagaaccuggc

SEQ ID NO: 1377991 - RNA, 20 nt, Human
ggccugcugcugagaaccug

SEQ ID NO: 1377992 - RNA, 23 nt, Human
ggccugcugcugagaaccuggcc

SEQ ID NO: 1377993 - RNA, 19 nt, Human
ggccugcugcugagaaccu

SEQ ID NO: 1377994 - RNA, 18 nt, Human
ggccugcugcugagaacc

SEQ ID NO: 1377995 - RNA, 16 nt, Human
ggccugcugcugagaa

SEQ ID NO: 1377996 - RNA, 15 nt, Human
ggccugcugcugaga

SEQ ID NO: 1377997 - RNA, 14 nt, Human
ggccugcugcugag

SEQ ID NO: 1377998 - RNA, 13 nt, Human
ggccugcugcuga

SEQ ID NO: 1377999 - RNA, 11 nt, Human
ggccugcugcu

SEQ ID NO: 1378000 - RNA, 10 nt, Human
ggccugcugc

SEQ ID NO: 1378001 - RNA, 18 nt, Human
ggccugcuccagaccuga

SEQ ID NO: 1378002 - RNA, 17 nt, Human
ggccugcuccagaccug

SEQ ID NO: 1378003 - RNA, 16 nt, Human
ggccugcuccagaccu

SEQ ID NO: 1378004 - RNA, 15 nt, Human
ggccugcuccagacc

SEQ ID NO: 1378005 - RNA, 14 nt, Human
ggccugcuccagac

SEQ ID NO: 1378006 - RNA, 13 nt, Human
ggccugcuccaga

SEQ ID NO: 1378007 - RNA, 15 nt, Human
ggccugcuaaggucu

SEQ ID NO: 1378008 - RNA, 17 nt, Human
ggccuuauugcauccca

SEQ ID NO: 1378009 - RNA, 15 nt, Human
ggccuuaggaagagc

SEQ ID NO: 1378010 - RNA, 19 nt, Human
ggccuuacuuaaacccagc

SEQ ID NO: 1378011 - RNA, 20 nt, Human
ggccuucacaaucugucagu

SEQ ID NO: 1378012 - RNA, 12 nt, Human
ggccuucacaau

SEQ ID NO: 1378013 - RNA, 18 nt, Human
ggccuguuuggccucucu

SEQ ID NO: 1378014 - RNA, 17 nt, Human
ggccuguuuggccucuc

SEQ ID NO: 1378015 - RNA, 12 nt, Human
ggccugccccca

SEQ ID NO: 1378016 - RNA, 13 nt, Human
ggccugcccccac

SEQ ID NO: 1378017 - RNA, 15 nt, Human
ggccugcccaguugc

SEQ ID NO: 1378018 - RNA, 17 nt, Human
ggccugcccagugcacu

SEQ ID NO: 1378019 - RNA, 14 nt, Human
ggccugccaggagg

SEQ ID NO: 1378020 - RNA, 13 nt, Human
ggccugccaggag

SEQ ID NO: 1378021 - RNA, 12 nt, Human
ggccugccagga

SEQ ID NO: 1378022 - RNA, 22 nt, Human
ggccugccaccuggaccccugc

SEQ ID NO: 1378023 - RNA, 23 nt, Human
ggccugccaccuggaccccugca

SEQ ID NO: 1378024 - RNA, 19 nt, Human
ggccugccaccuggacccc

SEQ ID NO: 1378025 - RNA, 18 nt, Human
ggccugccaccuggaccc

SEQ ID NO: 1378026 - RNA, 17 nt, Human
ggccugccaccuggacc

SEQ ID NO: 1378027 - RNA, 14 nt, Human
ggccugccaccugg

SEQ ID NO: 1378028 - RNA, 18 nt, Human
ggccugcaaacugggaac

SEQ ID NO: 1378029 - RNA, 16 nt, Human
ggccugcaaacuggga

SEQ ID NO: 1378030 - RNA, 15 nt, Human
ggccugcaaacuggg

SEQ ID NO: 1378031 - RNA, 14 nt, Human
ggccugcaaacugg

SEQ ID NO: 1378032 - RNA, 19 nt, Human
ggccugaugggguggaagg

SEQ ID NO: 1378033 - RNA, 17 nt, Human
ggccucagggcuccuug

SEQ ID NO: 1378034 - RNA, 16 nt, Human
ggccucagggcuccuu

SEQ ID NO: 1378035 - RNA, 18 nt, Human
ggccucagggcuccuugu

SEQ ID NO: 1378036 - RNA, 15 nt, Human
ggccucagggcuccu

SEQ ID NO: 1378037 - RNA, 14 nt, Human
ggccucagggcucc

SEQ ID NO: 1378038 - RNA, 13 nt, Human
ggccucagggcuc

SEQ ID NO: 1378039 - RNA, 11 nt, Human
ggccucagggc

SEQ ID NO: 1378040 - RNA, 13 nt, Human
ggccgccuggguc

SEQ ID NO: 1378041 - RNA, 15 nt, Human
ggccgccugggucca

SEQ ID NO: 1378042 - RNA, 14 nt, Human
ggccgccgccucuu

SEQ ID NO: 1378043 - RNA, 22 nt, Human
ggccgcccccugccccccagcc

SEQ ID NO: 1378044 - RNA, 19 nt, Human
ggccgcccccugcccccca

SEQ ID NO: 1378045 - RNA, 18 nt, Human
ggccgcccccugcccccc

SEQ ID NO: 1378046 - RNA, 16 nt, Human
ggccgcccccugcccc

SEQ ID NO: 1378047 - RNA, 19 nt, Human
ggcccucaagucuuucucu

SEQ ID NO: 1378048 - RNA, 14 nt, Human
ggccucauguggcu

SEQ ID NO: 1378049 - RNA, 13 nt, Human
ggccccagccucc

SEQ ID NO: 1378050 - RNA, 18 nt, Human
ggccccagcacagcuuga

SEQ ID NO: 1378051 - RNA, 23 nt, Human
ggccagaugcacaucccuggaag

SEQ ID NO: 1378052 - RNA, 21 nt, Human
ggccagaugcacaucccugga

SEQ ID NO: 1378053 - RNA, 20 nt, Human
ggccagaugcacaucccugg

SEQ ID NO: 1378054 - RNA, 18 nt, Human
ggccagauccagccuggg

SEQ ID NO: 1378055 - RNA, 17 nt, Human
ggccagauccagccugg

SEQ ID NO: 1378056 - RNA, 11 nt, Human
ggccagaggcu

SEQ ID NO: 1378057 - RNA, 22 nt, Human
ggccagaggcccccagcccagg

SEQ ID NO: 1378058 - RNA, 17 nt, Human
ggccccugccucucugc

SEQ ID NO: 1378059 - RNA, 18 nt, Human
ggccccugccucucugca

SEQ ID NO: 1378060 - RNA, 19 nt, Human
ggccccugccucucugcag

SEQ ID NO: 1378061 - RNA, 21 nt, Human
ggccccugccucucugcaggu

SEQ ID NO: 1378062 - RNA, 13 nt, Human
gggccugccaccu

SEQ ID NO: 1378063 - RNA, 11 nt, Human
gggccugccac

SEQ ID NO: 1378064 - RNA, 20 nt, Human
gggccucaccgagugggggc

SEQ ID NO: 1378065 - RNA, 19 nt, Human
gggccugcugcugagaacc

SEQ ID NO: 1378066 - RNA, 18 nt, Human
gggccugcugcugagaac

SEQ ID NO: 1378067 - RNA, 17 nt, Human
gggccugcugcugagaa

SEQ ID NO: 1378068 - RNA, 16 nt, Human
gggccugcugcugaga

SEQ ID NO: 1378069 - RNA, 15 nt, Human
gggccugcugcugag

SEQ ID NO: 1378070 - RNA, 13 nt, Human
gggccugcugcug

SEQ ID NO: 1378071 - RNA, 12 nt, Human
gggccugcugcu

SEQ ID NO: 1378072 - RNA, 11 nt, Human
gggccugcugc

SEQ ID NO: 1378073 - RNA, 18 nt, Human
gggccugcuccagaccug

SEQ ID NO: 1378074 - RNA, 17 nt, Human
gggccugcuccagaccu

SEQ ID NO: 1378075 - RNA, 15 nt, Human
gggccugcuccagac

SEQ ID NO: 1378076 - RNA, 14 nt, Human
gggccugcuccaga

SEQ ID NO: 1378077 - RNA, 13 nt, Human
gggccugcuccag

SEQ ID NO: 1378078 - RNA, 15 nt, Human
gggccugccucacca

SEQ ID NO: 1378079 - RNA, 14 nt, Human
gggccugccucacc

SEQ ID NO: 1378080 - RNA, 12 nt, Human
gggccugccuca

SEQ ID NO: 1378081 - RNA, 14 nt, Human
gggccugcccagug

SEQ ID NO: 1378082 - RNA, 23 nt, Human
gggccugccaccuggaccccugc

SEQ ID NO: 1378083 - RNA, 19 nt, Human
gggccugccaccuggaccc

SEQ ID NO: 1378084 - RNA, 18 nt, Human
gggccugccaccuggacc

SEQ ID NO: 1378085 - RNA, 16 nt, Human
gggccugccaccugga

SEQ ID NO: 1378086 - RNA, 20 nt, Human
gggccugcugcugagaaccu

SEQ ID NO: 1378087 - RNA, 22 nt, Human
gggcuacccugagcugaggcag

SEQ ID NO: 1378088 - RNA, 23 nt, Human
gggccggggaacuggccaagcug

SEQ ID NO: 1378089 - RNA, 20 nt, Human
gggccggggaacuggccaag

SEQ ID NO: 1378090 - RNA, 19 nt, Human
gggccggggaacuggccaa

SEQ ID NO: 1378091 - RNA, 17 nt, Human
gggccggggaacuggcc

SEQ ID NO: 1378092 - RNA, 16 nt, Human
gggccggggaacuggc

SEQ ID NO: 1378093 - RNA, 12 nt, Human
gggccgcugcca

SEQ ID NO: 1378094 - RNA, 17 nt, Human
gggccgccgccucuuuc

SEQ ID NO: 1378095 - RNA, 18 nt, Human
gggccauucuccacagca

SEQ ID NO: 1378096 - RNA, 16 nt, Human
gggccauucuccacag

SEQ ID NO: 1378097 - RNA, 23 nt, Human
gggccauguccaaagaggcugcc

SEQ ID NO: 1378098 - RNA, 22 nt, Human
gggccauguccaaagaggcugc

SEQ ID NO: 1378099 - RNA, 21 nt, Human
gggccauguccaaagaggcug

SEQ ID NO: 1378100 - RNA, 17 nt, Human
gggccauguccaaagag

SEQ ID NO: 1378101 - RNA, 16 nt, Human
gggccauguccaaaga

SEQ ID NO: 1378102 - RNA, 15 nt, Human
gggccauguccaaag

SEQ ID NO: 1378103 - RNA, 14 nt, Human
gggccauguccaaa

SEQ ID NO: 1378104 - RNA, 21 nt, Human
gggccaugcugaggccugggc

SEQ ID NO: 1378105 - RNA, 23 nt, Human
gggccaugcugaggccugggccg

SEQ ID NO: 1378106 - RNA, 17 nt, Human
gggccagauccagccug

SEQ ID NO: 1378107 - RNA, 16 nt, Human
gggccagauccagccu

SEQ ID NO: 1378108 - RNA, 14 nt, Human
gggccagauccagc

SEQ ID NO: 1378109 - RNA, 13 nt, Human
gggccagauccag

SEQ ID NO: 1378110 - RNA, 12 nt, Human
gggccagaggcu

SEQ ID NO: 1378111 - RNA, 15 nt, Human
gggccagagccaggg

SEQ ID NO: 1378112 - RNA, 14 nt, Human
gggccagagccagg

SEQ ID NO: 1378113 - RNA, 13 nt, Human
gggccagagccag

SEQ ID NO: 1378114 - RNA, 12 nt, Human
gggccagagcca

SEQ ID NO: 1378115 - RNA, 11 nt, Human
gggccagagcc

SEQ ID NO: 1378116 - RNA, 18 nt, Human
gggccagauccagccugg

SEQ ID NO: 1378117 - RNA, 20 nt, Human
gggccaugcugaggccuggg

SEQ ID NO: 1378118 - RNA, 19 nt, Human
gggccaugcugaggccugg

SEQ ID NO: 1378119 - RNA, 10 nt, Human
gggccaggcc

SEQ ID NO: 1378120 - RNA, 13 nt, Human
gggccaggcuggg

SEQ ID NO: 1378121 - RNA, 23 nt, Human
gggcuccagccccucuuggagaa

SEQ ID NO: 1378122 - RNA, 22 nt, Human
gggcucaggucacauaaaacuu

SEQ ID NO: 1378123 - RNA, 14 nt, Human
gggcucccuccgcc

SEQ ID NO: 1378124 - RNA, 21 nt, Human
gggcugcugcugggcucagug

SEQ ID NO: 1378125 - RNA, 17 nt, Human
gggcugcugcugggcuc

SEQ ID NO: 1378126 - RNA, 17 nt, Human
gggcugcuuccuccugg

SEQ ID NO: 1378127 - RNA, 12 nt, Human
gggcugcuuccu

SEQ ID NO: 1378128 - RNA, 23 nt, Human
gggcucccuccgcccccagguag

SEQ ID NO: 1378129 - RNA, 20 nt, Human
gggcugccggggcagccccc

SEQ ID NO: 1378130 - RNA, 12 nt, Human
gggcucccugac

SEQ ID NO: 1378131 - RNA, 16 nt, Human
aaaaugggcacuuaaa

SEQ ID NO: 1378132 - RNA, 23 nt, Human
aaaauggccauuugcuuuuucac

SEQ ID NO: 1378133 - RNA, 15 nt, Human
aaaauggucucuaac

SEQ ID NO: 1378134 - RNA, 19 nt, Human
aaaagguucuuacugcuug

SEQ ID NO: 1378135 - RNA, 15 nt, Human
aaaagguauuaaauu

SEQ ID NO: 1378136 - RNA, 11 nt, Human
aaaaggccugg

SEQ ID NO: 1378137 - RNA, 12 nt, Human
aaaaggccuggg

SEQ ID NO: 1378138 - RNA, 13 nt, Human
aaaaggcaguuac

SEQ ID NO: 1378139 - RNA, 14 nt, Human
aaaaggauaaguga

SEQ ID NO: 1378140 - RNA, 13 nt, Human
ggcuggucucaaa

SEQ ID NO: 1378141 - RNA, 23 nt, Human
ggcugguccagggcuagugacuu

SEQ ID NO: 1378142 - RNA, 13 nt, Human
ggcugguccaggg

SEQ ID NO: 1378143 - RNA, 21 nt, Human
ggcugguccuauggccucaug

SEQ ID NO: 1378144 - RNA, 17 nt, Human
aaaaggacaucagcaaa

SEQ ID NO: 1378145 - RNA, 19 nt, Human
aaaaggacaucagcaaaca

SEQ ID NO: 1378146 - RNA, 13 nt, Human
aaaaggaugcaca

SEQ ID NO: 1378147 - RNA, 14 nt, Human
aaaaggaugcacag

SEQ ID NO: 1378148 - RNA, 15 nt, Human
aaaaggaugcacaga

SEQ ID NO: 1378149 - RNA, 19 nt, Human
aaaaggaugcacagaguug

SEQ ID NO: 1378150 - RNA, 22 nt, Human
aaaaggaugcacagaguuguua

SEQ ID NO: 1378151 - RNA, 10 nt, Human
aaaauacaug

SEQ ID NO: 1378152 - RNA, 17 nt, Human
aaaauacaagacugcca

SEQ ID NO: 1378153 - RNA, 15 nt, Human
aaaauacaagacugc

SEQ ID NO: 1378154 - RNA, 12 nt, Human
aaaauacauugu

SEQ ID NO: 1378155 - RNA, 14 nt, Human
aaaauaauuuugua

SEQ ID NO: 1378156 - RNA, 13 nt, Human
aaaauaauuuugu

SEQ ID NO: 1378157 - RNA, 20 nt, Human
aaaauaauuuuuauauuuga

SEQ ID NO: 1378158 - RNA, 17 nt, Human
aaaauaauuuuuauauu

SEQ ID NO: 1378159 - RNA, 16 nt, Human
aaaauaauuuuuauau

SEQ ID NO: 1378160 - RNA, 16 nt, Human
aaaauaagucaacagu

SEQ ID NO: 1378161 - RNA, 18 nt, Human
aaaauaagucaacaguaa

SEQ ID NO: 1378162 - RNA, 14 nt, Human
aaaauaagucaaca

SEQ ID NO: 1378163 - RNA, 19 nt, Human
aaaauaagcagguggaucu

SEQ ID NO: 1378164 - RNA, 14 nt, Human
aaaauaagcaggug

SEQ ID NO: 1378165 - RNA, 13 nt, Human
aaaauaagcaggu

SEQ ID NO: 1378166 - RNA, 16 nt, Human
aaaauaagaauagaaa

SEQ ID NO: 1378167 - RNA, 20 nt, Human
aaaauaauuauauaacugua

SEQ ID NO: 1378168 - RNA, 23 nt, Human
aaaauaauacugcugagauacau

SEQ ID NO: 1378169 - RNA, 23 nt, Human
aaaauaaucaaaagcuauuuaaa

SEQ ID NO: 1378170 - RNA, 16 nt, Human
aaaauaauacugcuga

SEQ ID NO: 1378171 - RNA, 20 nt, Human
aaaauaauuuuaaacaaagg

SEQ ID NO: 1378172 - RNA, 19 nt, Human
aaaauaauuuuaaacaaag

SEQ ID NO: 1378173 - RNA, 11 nt, Human
aaaauaauuuu

SEQ ID NO: 1378174 - RNA, 23 nt, Human
aaaaugccaugaugccucugucu

SEQ ID NO: 1378175 - RNA, 19 nt, Human
aaaaugcuuuuuauuucug

SEQ ID NO: 1378176 - RNA, 18 nt, Human
aaaaugcuuuuuauuucu

SEQ ID NO: 1378177 - RNA, 13 nt, Human
aaaaugcuuuuua

SEQ ID NO: 1378178 - RNA, 22 nt, Human
aaaaugcuuuuuauuucugcau

SEQ ID NO: 1378179 - RNA, 16 nt, Human
gggccagacaugccac

SEQ ID NO: 1378180 - RNA, 20 nt, Human
aaaaucugucacguagaacu

SEQ ID NO: 1378181 - RNA, 21 nt, Human
aaaaucucuccacuuucagcu

SEQ ID NO: 1378182 - RNA, 22 nt, Human
aaaaucucuccacuuucagcug

SEQ ID NO: 1378183 - RNA, 20 nt, Human
aaaaucucuccacuuucagc

SEQ ID NO: 1378184 - RNA, 19 nt, Human
aaaaucucuccacuuucag

SEQ ID NO: 1378185 - RNA, 18 nt, Human
aaaaucucuccacuuuca

SEQ ID NO: 1378186 - RNA, 16 nt, Human
aaaaucucuccacuuu

SEQ ID NO: 1378187 - RNA, 15 nt, Human
aaaaucucuccacuu

SEQ ID NO: 1378188 - RNA, 21 nt, Human
aaaaucucccauuuuggaauu

SEQ ID NO: 1378189 - RNA, 19 nt, Human
aaaaucucccauuuuggaa

SEQ ID NO: 1378190 - RNA, 13 nt, Human
aaaauauuuugaa

SEQ ID NO: 1378191 - RNA, 18 nt, Human
aaaaugacaaucaugugu

SEQ ID NO: 1378192 - RNA, 20 nt, Human
aaaaugacaaucaugugugu

SEQ ID NO: 1378193 - RNA, 17 nt, Human
aaaaugacaaucaugug

SEQ ID NO: 1378194 - RNA, 14 nt, Human
aaaaugacaaucau

SEQ ID NO: 1378195 - RNA, 11 nt, Human
aaaaugagaaa

SEQ ID NO: 1378196 - RNA, 12 nt, Human
aaaaugagaaau

SEQ ID NO: 1378197 - RNA, 22 nt, Human
aaaauagauaagaguagaaacu

SEQ ID NO: 1378198 - RNA, 13 nt, Human
aaaauagacacuc

SEQ ID NO: 1378199 - RNA, 15 nt, Human
aaaauagacaaauag

SEQ ID NO: 1378200 - RNA, 21 nt, Human
aaaauacuuuuacucugccua

SEQ ID NO: 1378201 - RNA, 22 nt, Human
aaaauacuuuuacucugccuac

SEQ ID NO: 1378202 - RNA, 16 nt, Human
aaaauacuuuuacucu

SEQ ID NO: 1378203 - RNA, 11 nt, Human
aaaauacuuuu

SEQ ID NO: 1378204 - RNA, 13 nt, Human
aaaauaucuacau

SEQ ID NO: 1378205 - RNA, 22 nt, Human
aaaauaucuacauuaauauacu

SEQ ID NO: 1378206 - RNA, 19 nt, Human
aaaauagacaaauagaaaa

SEQ ID NO: 1378207 - RNA, 12 nt, Human
aaaauauuuuga

SEQ ID NO: 1378208 - RNA, 20 nt, Human
aaaauauuguuuuacaauag

SEQ ID NO: 1378209 - RNA, 19 nt, Human
aaaauauuguuuuacaaua

SEQ ID NO: 1378210 - RNA, 15 nt, Human
aaaauauuuguacau

SEQ ID NO: 1378211 - RNA, 21 nt, Human
gggggcagcacaggagggcgg

SEQ ID NO: 1378212 - RNA, 22 nt, Human
gggggcagucugagagaggcca

SEQ ID NO: 1378213 - RNA, 16 nt, Human
gggggcuggaggagcc

SEQ ID NO: 1378214 - RNA, 16 nt, Human
gggggcugaggagcag

SEQ ID NO: 1378215 - RNA, 23 nt, Human
ggggcccggacgcccaggacccc

SEQ ID NO: 1378216 - RNA, 12 nt, Human
gggggcagaagu

SEQ ID NO: 1378217 - RNA, 16 nt, Human
gggggcacaagacuga

SEQ ID NO: 1378218 - RNA, 15 nt, Human
gggggcacaagacug

SEQ ID NO: 1378219 - RNA, 23 nt, Human
ggggguggccgcugaguggcagg

SEQ ID NO: 1378220 - RNA, 19 nt, Human
ggggguuccguguccaccc

SEQ ID NO: 1378221 - RNA, 14 nt, Human
ggggucccagcagc

SEQ ID NO: 1378222 - RNA, 12 nt, Human
ggggucccagca

SEQ ID NO: 1378223 - RNA, 13 nt, Human
gggguagggggcu

SEQ ID NO: 1378224 - RNA, 21 nt, Human
ggggcccgcgauguggaacug

SEQ ID NO: 1378225 - RNA, 18 nt, Human
ggggccccucucagcccu

SEQ ID NO: 1378226 - RNA, 19 nt, Human
ggggccccucucagcccuc

SEQ ID NO: 1378227 - RNA, 17 nt, Human
ggggccccucucagccc

SEQ ID NO: 1378228 - RNA, 15 nt, Human
ggggccccucucagc

SEQ ID NO: 1378229 - RNA, 17 nt, Human
ggggcccaugaaagagg

SEQ ID NO: 1378230 - RNA, 15 nt, Human
ggggacagguccuca

SEQ ID NO: 1378231 - RNA, 14 nt, Human
aaaauguccuugug

SEQ ID NO: 1378232 - RNA, 22 nt, Human
aaaauguauuuuauguuauaua

SEQ ID NO: 1378233 - RNA, 16 nt, Human
aaaauguaugcauguu

SEQ ID NO: 1378234 - RNA, 15 nt, Human
aaaauguaugcaugu

SEQ ID NO: 1378235 - RNA, 22 nt, Human
aaaauguaagauuauagauucu

SEQ ID NO: 1378236 - RNA, 19 nt, Human
aaaauguaaaggagucaaa

SEQ ID NO: 1378237 - RNA, 14 nt, Human
aaaauguaaagcca

SEQ ID NO: 1378238 - RNA, 22 nt, Human
aaaaugguccaauuaguuuccu

SEQ ID NO: 1378239 - RNA, 18 nt, Human
aaaauguauuuuauguua

SEQ ID NO: 1378240 - RNA, 17 nt, Human
aaaauguauuuuauguu

SEQ ID NO: 1378241 - RNA, 16 nt, Human
aaaauguauuuuaugu

SEQ ID NO: 1378242 - RNA, 15 nt, Human
aaaauguauuuuaug

SEQ ID NO: 1378243 - RNA, 13 nt, Human
aaaauguauuuua

SEQ ID NO: 1378244 - RNA, 11 nt, Human
aaaauguauuu

SEQ ID NO: 1378245 - RNA, 15 nt, Human
aaaauguaugucugg

SEQ ID NO: 1378246 - RNA, 20 nt, Human
aaaauguaugcauguugucu

SEQ ID NO: 1378247 - RNA, 21 nt, Human
gggucaggccuuugagcucag

SEQ ID NO: 1378248 - RNA, 23 nt, Human
gggucaaguuauuaauuucuuca

SEQ ID NO: 1378249 - RNA, 12 nt, Human
gggucacaggaa

SEQ ID NO: 1378250 - RNA, 13 nt, Human
gggucaaguuauu

SEQ ID NO: 1378251 - RNA, 13 nt, Human
ggguauggcguaa

SEQ ID NO: 1378252 - RNA, 22 nt, Human
ggguauggcguaaguacagaga

SEQ ID NO: 1378253 - RNA, 19 nt, Human
gggguccuggagcagacca

SEQ ID NO: 1378254 - RNA, 23 nt, Human
gggguccuccuccagggacagca

SEQ ID NO: 1378255 - RNA, 18 nt, Human
ggggucccagcagcugcc

SEQ ID NO: 1378256 - RNA, 19 nt, Human
ggguccucuucugggccug

SEQ ID NO: 1378257 - RNA, 13 nt, Human
ggguccucuucug

SEQ ID NO: 1378258 - RNA, 19 nt, Human
ggguccucugagacuccag

SEQ ID NO: 1378259 - RNA, 15 nt, Human
ggguccucugagacu

SEQ ID NO: 1378260 - RNA, 20 nt, Human
ggguccuccuccagggacag

SEQ ID NO: 1378261 - RNA, 18 nt, Human
ggguccuccuccagggac

SEQ ID NO: 1378262 - RNA, 16 nt, Human
ggguccuccuccaggg

SEQ ID NO: 1378263 - RNA, 15 nt, Human
ggguccuccuccagg

SEQ ID NO: 1378264 - RNA, 16 nt, Human
ggguccggcagcuucu

SEQ ID NO: 1378265 - RNA, 15 nt, Human
ggguccggcagcuuc

SEQ ID NO: 1378266 - RNA, 14 nt, Human
aaacauuugcugaa

SEQ ID NO: 1378267 - RNA, 20 nt, Human
aaacgauuuuuaaaauguac

SEQ ID NO: 1378268 - RNA, 17 nt, Human
aaacgagacuuuccauu

SEQ ID NO: 1378269 - RNA, 16 nt, Human
aaaccuuccacccagu

SEQ ID NO: 1378270 - RNA, 23 nt, Human
aaaccuuccacccagugcugaau

SEQ ID NO: 1378271 - RNA, 16 nt, Human
aaacauuuucuggcca

SEQ ID NO: 1378272 - RNA, 12 nt, Human
aaacauuuucug

SEQ ID NO: 1378273 - RNA, 18 nt, Human
aaaccacugaaaaaauau

SEQ ID NO: 1378274 - RNA, 17 nt, Human
aaaccacugaaaaaaua

SEQ ID NO: 1378275 - RNA, 16 nt, Human
aaaccacugaaaaaau

SEQ ID NO: 1378276 - RNA, 12 nt, Human
aaaccacugaaa

SEQ ID NO: 1378277 - RNA, 20 nt, Human
aaaccacuuuuugcagcuuu

SEQ ID NO: 1378278 - RNA, 20 nt, Human
aaaccagcuuccuucagaga

SEQ ID NO: 1378279 - RNA, 23 nt, Human
aaaccugagauuuauuaaagaaa

SEQ ID NO: 1378280 - RNA, 19 nt, Human
aaaccagcuuccuucagag

SEQ ID NO: 1378281 - RNA, 18 nt, Human
aaaccagcuuccuucaga

SEQ ID NO: 1378282 - RNA, 17 nt, Human
aaaccagcuuccuucag

SEQ ID NO: 1378283 - RNA, 16 nt, Human
aaaccagcuuccuuca

SEQ ID NO: 1378284 - RNA, 13 nt, Human
aaaccagcuuccu

SEQ ID NO: 1378285 - RNA, 12 nt, Human
aaaccagcuucc

SEQ ID NO: 1378286 - RNA, 13 nt, Human
aaaccagcucagc

SEQ ID NO: 1378287 - RNA, 10 nt, Human
aaaccacuuu

SEQ ID NO: 1378288 - RNA, 13 nt, Human
ggguggcugcagc

SEQ ID NO: 1378289 - RNA, 23 nt, Human
ggguggcuacucugugccagagc

SEQ ID NO: 1378290 - RNA, 20 nt, Human
ggguggcuacucugugccag

SEQ ID NO: 1378291 - RNA, 19 nt, Human
ggguggcuacucugugcca

SEQ ID NO: 1378292 - RNA, 18 nt, Human
ggguggcuacucugugcc

SEQ ID NO: 1378293 - RNA, 20 nt, Human
aaacuuaugcugauuuauuu

SEQ ID NO: 1378294 - RNA, 14 nt, Human
aaacuuaaucuaaa

SEQ ID NO: 1378295 - RNA, 21 nt, Human
aaacuuaaauguuauuaucug

SEQ ID NO: 1378296 - RNA, 17 nt, Human
aaacuuaaauguuauua

SEQ ID NO: 1378297 - RNA, 16 nt, Human
aaacuuaaauguuauu

SEQ ID NO: 1378298 - RNA, 19 nt, Human
aaacuguuggaauggauuu

SEQ ID NO: 1378299 - RNA, 14 nt, Human
aaacuaaaaacuag

SEQ ID NO: 1378300 - RNA, 17 nt, Human
aaacuaaaaaauuaaac

SEQ ID NO: 1378301 - RNA, 13 nt, Human
ggguggugucaga

SEQ ID NO: 1378302 - RNA, 21 nt, Human
ggguguccugcaccggggccu

SEQ ID NO: 1378303 - RNA, 17 nt, Human
ggguguccugcaccggg

SEQ ID NO: 1378304 - RNA, 15 nt, Human
gggugguggccuggu

SEQ ID NO: 1378305 - RNA, 17 nt, Human
ggguggcugcagccuca

SEQ ID NO: 1378306 - RNA, 15 nt, Human
ggguggcugcagccu

SEQ ID NO: 1378307 - RNA, 20 nt, Human
ggguguccccaacagcgccc

SEQ ID NO: 1378308 - RNA, 18 nt, Human
ggguuuuguauucucuga

SEQ ID NO: 1378309 - RNA, 19 nt, Human
gguaaauaaaaagaaaggc

SEQ ID NO: 1378310 - RNA, 15 nt, Human
gguaaauaaaaagaa

SEQ ID NO: 1378311 - RNA, 20 nt, Human
gguaaaguuaaguugagaua

SEQ ID NO: 1378312 - RNA, 16 nt, Human
gguaaagacuggcuuu

SEQ ID NO: 1378313 - RNA, 15 nt, Human
gguaaagacuggcuu

SEQ ID NO: 1378314 - RNA, 13 nt, Human
gguaaaaugccau

SEQ ID NO: 1378315 - RNA, 23 nt, Human
gguaaaauacuuuuacucugccu

SEQ ID NO: 1378316 - RNA, 13 nt, Human
gguaaaauacuuc

SEQ ID NO: 1378317 - RNA, 14 nt, Human
gguaaaaaauuuau

SEQ ID NO: 1378318 - RNA, 13 nt, Human
gguaaaacacuug

SEQ ID NO: 1378319 - RNA, 16 nt, Human
gguaaaaaauuuauaa

SEQ ID NO: 1378320 - RNA, 22 nt, Human
gguaaaaaaaaauuacuguuua

SEQ ID NO: 1378321 - RNA, 22 nt, Human
ggguuuuuuaguugaauuuuuu

SEQ ID NO: 1378322 - RNA, 15 nt, Human
gguaaaucaguaaga

SEQ ID NO: 1378323 - RNA, 22 nt, Human
gguaaaucagacuaugaaguuu

SEQ ID NO: 1378324 - RNA, 11 nt, Human
gguccaggaga

SEQ ID NO: 1378325 - RNA, 22 nt, Human
gguccagcucuggaggggaggg

SEQ ID NO: 1378326 - RNA, 16 nt, Human
gguccagcucuggagg

SEQ ID NO: 1378327 - RNA, 15 nt, Human
gguccagcucuggag

SEQ ID NO: 1378328 - RNA, 14 nt, Human
gguccagcucugga

SEQ ID NO: 1378329 - RNA, 13 nt, Human
gguccagcucugg

SEQ ID NO: 1378330 - RNA, 12 nt, Human
gguccagcucug

SEQ ID NO: 1378331 - RNA, 11 nt, Human
gguccagcucu

SEQ ID NO: 1378332 - RNA, 17 nt, Human
aaacuuccccaucuucu

SEQ ID NO: 1378333 - RNA, 15 nt, Human
aaacuuuaucacuua

SEQ ID NO: 1378334 - RNA, 19 nt, Human
gguaucucagaaagugccu

SEQ ID NO: 1378335 - RNA, 15 nt, Human
gguaucucagaaagu

SEQ ID NO: 1378336 - RNA, 18 nt, Human
gguauccccccaucuugc

SEQ ID NO: 1378337 - RNA, 20 nt, Human
gguaucucagaaagugccug

SEQ ID NO: 1378338 - RNA, 16 nt, Human
gguaugaacuugagga

SEQ ID NO: 1378339 - RNA, 19 nt, Human
gguaugaacuugaggacac

SEQ ID NO: 1378340 - RNA, 20 nt, Human
gguaugaacuugaggacaca

SEQ ID NO: 1378341 - RNA, 14 nt, Human
ggucagugcaaaua

SEQ ID NO: 1378342 - RNA, 16 nt, Human
gguauauccaaaagcu

SEQ ID NO: 1378343 - RNA, 13 nt, Human
gguauauacuuug

SEQ ID NO: 1378344 - RNA, 23 nt, Human
gguauaguucaugucugcuauca

SEQ ID NO: 1378345 - RNA, 19 nt, Human
gguagguucagccaagguu

SEQ ID NO: 1378346 - RNA, 18 nt, Human
gguagguucagccaaggu

SEQ ID NO: 1378347 - RNA, 12 nt, Human
gguauauuuucc

SEQ ID NO: 1378348 - RNA, 14 nt, Human
gguauaccucacuu

SEQ ID NO: 1378349 - RNA, 17 nt, Human
gguagguucagccaagg

SEQ ID NO: 1378350 - RNA, 16 nt, Human
gguagguucagccaag

SEQ ID NO: 1378351 - RNA, 15 nt, Human
gguagguucagccaa

SEQ ID NO: 1378352 - RNA, 16 nt, Human
gguaggguaaaucagu

SEQ ID NO: 1378353 - RNA, 15 nt, Human
gguaggguaaaucag

SEQ ID NO: 1378354 - RNA, 14 nt, Human
gguaggguaaauca

SEQ ID NO: 1378355 - RNA, 13 nt, Human
gguagggguuggg

SEQ ID NO: 1378356 - RNA, 23 nt, Human
gguagggggcuggaggagcccag

SEQ ID NO: 1378357 - RNA, 17 nt, Human
gguagggggcuggagga

SEQ ID NO: 1378358 - RNA, 13 nt, Human
gguagggggcugg

SEQ ID NO: 1378359 - RNA, 16 nt, Human
gguaggggcugggaac

SEQ ID NO: 1378360 - RNA, 14 nt, Human
gguaggggcuggga

SEQ ID NO: 1378361 - RNA, 13 nt, Human
gguaggggcuggg

SEQ ID NO: 1378362 - RNA, 11 nt, Human
gguaggggcug

SEQ ID NO: 1378363 - RNA, 21 nt, Human
gguaggggccccucucagccc

SEQ ID NO: 1378364 - RNA, 19 nt, Human
gguaggggccccucucagc

SEQ ID NO: 1378365 - RNA, 18 nt, Human
gguaggggccccucucag

SEQ ID NO: 1378366 - RNA, 14 nt, Human
gguaggggccccuc

SEQ ID NO: 1378367 - RNA, 24 nt, Human
gguaggccaagguguccuacagaa

SEQ ID NO: 1378368 - RNA, 23 nt, Human
gguaggccaagguguccuacaga

SEQ ID NO: 1378369 - RNA, 21 nt, Human
gguaggccaagguguccuaca

SEQ ID NO: 1378370 - RNA, 18 nt, Human
gguaggccaagguguccu

SEQ ID NO: 1378371 - RNA, 17 nt, Human
gguaggagggugggaag

SEQ ID NO: 1378372 - RNA, 21 nt, Human
gguaggaauagcaugucacua

SEQ ID NO: 1378373 - RNA, 17 nt, Human
gguaagcaacauggcuu

SEQ ID NO: 1378374 - RNA, 16 nt, Human
gguaagcaacauggcu

SEQ ID NO: 1378375 - RNA, 23 nt, Human
gguaagaaguuuuaaaaagccag

SEQ ID NO: 1378376 - RNA, 24 nt, Human
gguaacuuuugugaauuaggcugu

SEQ ID NO: 1378377 - RNA, 18 nt, Human
gguaacugcuuucuguuc

SEQ ID NO: 1378378 - RNA, 19 nt, Human
gguaagcaacauggcuuug

SEQ ID NO: 1378379 - RNA, 18 nt, Human
gguaaguuuuuugaaauu

SEQ ID NO: 1378380 - RNA, 15 nt, Human
guaauuugugauaca

SEQ ID NO: 1378381 - RNA, 17 nt, Human
guaauuugugauacaau

SEQ ID NO: 1378382 - RNA, 20 nt, Human
guaauuugugauacaaugcu

SEQ ID NO: 1378383 - RNA, 13 nt, Human
guaaucccugcuu

SEQ ID NO: 1378384 - RNA, 14 nt, Human
guaaucaauguuuc

SEQ ID NO: 1378385 - RNA, 22 nt, Human
guaauccucaagaaauaaaagg

SEQ ID NO: 1378386 - RNA, 18 nt, Human
guaaucccugcuuuuugu

SEQ ID NO: 1378387 - RNA, 21 nt, Human
guacaagaagcauuuuguaag

SEQ ID NO: 1378388 - RNA, 15 nt, Human
guacaagaagcauuu

SEQ ID NO: 1378389 - RNA, 23 nt, Human
guacaaccacacccacacucaga

SEQ ID NO: 1378390 - RNA, 15 nt, Human
guaauuuuuuucacc

SEQ ID NO: 1378391 - RNA, 22 nt, Human
guaauuugugauacaaugcugu

SEQ ID NO: 1378392 - RNA, 16 nt, Human
guacaaaauaaacaaa

SEQ ID NO: 1378393 - RNA, 14 nt, Human
guacaaaauaaaca

SEQ ID NO: 1378394 - RNA, 12 nt, Human
guacaaaauaaa

SEQ ID NO: 1378395 - RNA, 22 nt, Human
guaaucaaucuacucaaagcau

SEQ ID NO: 1378396 - RNA, 20 nt, Human
guaauauugacuuguauauu

SEQ ID NO: 1378397 - RNA, 19 nt, Human
guaauauugacuuguauau

SEQ ID NO: 1378398 - RNA, 16 nt, Human
guaauauugacuugua

SEQ ID NO: 1378399 - RNA, 23 nt, Human
guaauacuucuuguguguaugca

SEQ ID NO: 1378400 - RNA, 21 nt, Human
guaauaagguuuuaauuuagu

SEQ ID NO: 1378401 - RNA, 15 nt, Human
guaauaagguuuuaa

SEQ ID NO: 1378402 - RNA, 20 nt, Human
guaauaaaauucaacaaaca

SEQ ID NO: 1378403 - RNA, 21 nt, Human
guaauaaaauucaacaaacau

SEQ ID NO: 1378404 - RNA, 13 nt, Human
guaauaaacucau

SEQ ID NO: 1378405 - RNA, 16 nt, Human
guaauaauaaagaaua

SEQ ID NO: 1378406 - RNA, 12 nt, Human
guaauaauaaag

SEQ ID NO: 1378407 - RNA, 22 nt, Human
guaauacaaacuaauuuaguaa

SEQ ID NO: 1378408 - RNA, 18 nt, Human
guaauacuucuugugugu

SEQ ID NO: 1378409 - RNA, 17 nt, Human
guaauacuucuugugug

SEQ ID NO: 1378410 - RNA, 22 nt, Human
guaacuaaaauaauuuuguaau

SEQ ID NO: 1378411 - RNA, 20 nt, Human
guaacuaaaauaauuuugua

SEQ ID NO: 1378412 - RNA, 15 nt, Human
guaacuaaaauaauu

SEQ ID NO: 1378413 - RNA, 13 nt, Human
guaacuaaaauaa

SEQ ID NO: 1378414 - RNA, 17 nt, Human
guaacgcgucuuccuga

SEQ ID NO: 1378415 - RNA, 16 nt, Human
guaacgcgucuuccug

SEQ ID NO: 1378416 - RNA, 20 nt, Human
guaaccucuucagaggcccu

SEQ ID NO: 1378417 - RNA, 18 nt, Human
guaaccucuucagaggcc

SEQ ID NO: 1378418 - RNA, 13 nt, Human
guaacucaucugu

SEQ ID NO: 1378419 - RNA, 14 nt, Human
guaacuacuuuaua

SEQ ID NO: 1378420 - RNA, 12 nt, Human
guaacuacuuua

SEQ ID NO: 1378421 - RNA, 19 nt, Human
guaacuaacugcauacacu

SEQ ID NO: 1378422 - RNA, 23 nt, Human
guaaguugggcuugcuauucugu

SEQ ID NO: 1378423 - RNA, 18 nt, Human
guaaguugggcuugcuau

SEQ ID NO: 1378424 - RNA, 17 nt, Human
guaaguugggcuugcua

SEQ ID NO: 1378425 - RNA, 19 nt, Human
guaaguugggcuugcuauu

SEQ ID NO: 1378426 - RNA, 13 nt, Human
guaaguuuuuuga

SEQ ID NO: 1378427 - RNA, 19 nt, Human
guaaacagauggcacuuug

SEQ ID NO: 1378428 - RNA, 13 nt, Human
guaaaccuuuuau

SEQ ID NO: 1378429 - RNA, 11 nt, Human
guaaacaauau

SEQ ID NO: 1378430 - RNA, 20 nt, Human
guaaacaaacuguguaacug

SEQ ID NO: 1378431 - RNA, 19 nt, Human
guaaaauugccauauugca

SEQ ID NO: 1378432 - RNA, 20 nt, Human
guaaaauugccauauugcac

SEQ ID NO: 1378433 - RNA, 21 nt, Human
guaaaauugccauauugcaca

SEQ ID NO: 1378434 - RNA, 23 nt, Human
guaaaaugugggauuauggguca

SEQ ID NO: 1378435 - RNA, 14 nt, Human
guaaaauugccaua

SEQ ID NO: 1378436 - RNA, 15 nt, Human
guaaaauugccauau

SEQ ID NO: 1378437 - RNA, 16 nt, Human
guaaaauugccauauu

SEQ ID NO: 1378438 - RNA, 18 nt, Human
guaaaauugccauauugc

SEQ ID NO: 1378439 - RNA, 23 nt, Human
aaauaauuauauaacuguauuug

SEQ ID NO: 1378440 - RNA, 22 nt, Human
aaauaauuauauaacuguauuu

SEQ ID NO: 1378441 - RNA, 21 nt, Human
aaauaauuauauaacuguauu

SEQ ID NO: 1378442 - RNA, 21 nt, Human
aaauaauguguaguucaugua

SEQ ID NO: 1378443 - RNA, 13 nt, Human
aaaguuaaguuga

SEQ ID NO: 1378444 - RNA, 21 nt, Human
aaaguguuuucucugaacaca

SEQ ID NO: 1378445 - RNA, 17 nt, Human
aaaguguuuucucugaa

SEQ ID NO: 1378446 - RNA, 23 nt, Human
aaaguguuuucucugaacacauu

SEQ ID NO: 1378447 - RNA, 20 nt, Human
aaauaauguguaguucaugu

SEQ ID NO: 1378448 - RNA, 22 nt, Human
aaauaaugugaaacuggauuaa

SEQ ID NO: 1378449 - RNA, 14 nt, Human
aaaguguuuucucu

SEQ ID NO: 1378450 - RNA, 21 nt, Human
aaaguggguuuuuuaguugaa

SEQ ID NO: 1378451 - RNA, 18 nt, Human
aaagugucaacucuuugu

SEQ ID NO: 1378452 - RNA, 15 nt, Human
aaaguguauuuguua

SEQ ID NO: 1378453 - RNA, 22 nt, Human
aaaguguauuuuuuuacuaaua

SEQ ID NO: 1378454 - RNA, 22 nt, Human
guaacauuugcuguuuuaaaca

SEQ ID NO: 1378455 - RNA, 19 nt, Human
guaacauuugcuguuuuaa

SEQ ID NO: 1378456 - RNA, 14 nt, Human
guaacauuugcugu

SEQ ID NO: 1378457 - RNA, 23 nt, Human
guaacauguguuaaguauuuuca

SEQ ID NO: 1378458 - RNA, 23 nt, Human
guaacaagccagauuuuuuaaaa

SEQ ID NO: 1378459 - RNA, 16 nt, Human
guaacaagccagauuu

SEQ ID NO: 1378460 - RNA, 15 nt, Human
guaacaagccagauu

SEQ ID NO: 1378461 - RNA, 14 nt, Human
guaacaagccagau

SEQ ID NO: 1378462 - RNA, 13 nt, Human
guaacaagccaga

SEQ ID NO: 1378463 - RNA, 13 nt, Human
guaacaaaaauaa

SEQ ID NO: 1378464 - RNA, 22 nt, Human
guaaauuuguacuauuuaacug

SEQ ID NO: 1378465 - RNA, 20 nt, Human
guaaauuuguacuauuuaac

SEQ ID NO: 1378466 - RNA, 15 nt, Human
guaaauuuguacuau

SEQ ID NO: 1378467 - RNA, 13 nt, Human
guaaauuuguacu

SEQ ID NO: 1378468 - RNA, 15 nt, Human
guaaagucaaggaga

SEQ ID NO: 1378469 - RNA, 23 nt, Human
guaaaguauguauuauuuacauu

SEQ ID NO: 1378470 - RNA, 22 nt, Human
guaaaguauguauuauuuacau

SEQ ID NO: 1378471 - RNA, 17 nt, Human
guaaaguauguauuauu

SEQ ID NO: 1378472 - RNA, 15 nt, Human
guaaaguauguauua

SEQ ID NO: 1378473 - RNA, 17 nt, Human
guaaaguacuuguaguu

SEQ ID NO: 1378474 - RNA, 16 nt, Human
guaaaguacuuguagu

SEQ ID NO: 1378475 - RNA, 15 nt, Human
guaaaguacuuguag

SEQ ID NO: 1378476 - RNA, 14 nt, Human
guaaaguacuugua

SEQ ID NO: 1378477 - RNA, 15 nt, Human
guaaagcuaaaauaa

SEQ ID NO: 1378478 - RNA, 23 nt, Human
guaaacucaaaauauuuguacau

SEQ ID NO: 1378479 - RNA, 16 nt, Human
guaaacucaaaauauu

SEQ ID NO: 1378480 - RNA, 22 nt, Human
guaaacuaucuuggugaauuuu

SEQ ID NO: 1378481 - RNA, 16 nt, Human
guaaagcuugucugau

SEQ ID NO: 1378482 - RNA, 20 nt, Human
guaaagcuaaaauaaagaaa

SEQ ID NO: 1378483 - RNA, 24 nt, Human
guaaacugugcaccaagcaggaaa

SEQ ID NO: 1378484 - RNA, 21 nt, Human
guaaagcccauuuuuaaaaua

SEQ ID NO: 1378485 - RNA, 21 nt, Human
aaauaugauguuaaaaaaaua

SEQ ID NO: 1378486 - RNA, 15 nt, Human
aaauaugauguuaaa

SEQ ID NO: 1378487 - RNA, 20 nt, Human
aaauaugaagacauaaaccc

SEQ ID NO: 1378488 - RNA, 17 nt, Human
aaauaugaagaacugag

SEQ ID NO: 1378489 - RNA, 15 nt, Human
aaauaucuugaaagg

SEQ ID NO: 1378490 - RNA, 16 nt, Human
aaauauguccuggggu

SEQ ID NO: 1378491 - RNA, 13 nt, Human
aaauauguaccaa

SEQ ID NO: 1378492 - RNA, 19 nt, Human
aaauauggucuuuugguua

SEQ ID NO: 1378493 - RNA, 18 nt, Human
aaauauggacugcucagg

SEQ ID NO: 1378494 - RNA, 20 nt, Human
aaauauggacacuuaauacu

SEQ ID NO: 1378495 - RNA, 16 nt, Human
aaauauggacacuuaa

SEQ ID NO: 1378496 - RNA, 15 nt, Human
aaauauggacacuua

SEQ ID NO: 1378497 - RNA, 16 nt, Human
aaauaugccuuuuuga

SEQ ID NO: 1378498 - RNA, 18 nt, Human
aaaucagcuauuuuguga

SEQ ID NO: 1378499 - RNA, 16 nt, Human
guacacagcaccagaa

SEQ ID NO: 1378500 - RNA, 20 nt, Human
aaauaccagccaguaaaugg

SEQ ID NO: 1378501 - RNA, 21 nt, Human
aaauaccagccaguaaauggg

SEQ ID NO: 1378502 - RNA, 18 nt, Human
guacacaauaagcaaaaa

SEQ ID NO: 1378503 - RNA, 20 nt, Human
guacacaauaagcaaaaaca

SEQ ID NO: 1378504 - RNA, 19 nt, Human
aaauaccagccaguaaaug

SEQ ID NO: 1378505 - RNA, 16 nt, Human
aaauauauacuaaaca

SEQ ID NO: 1378506 - RNA, 12 nt, Human
aaauauauacua

SEQ ID NO: 1378507 - RNA, 15 nt, Human
aaauauaggaacuua

SEQ ID NO: 1378508 - RNA, 22 nt, Human
aaauauacuuuuacaaguaaca

SEQ ID NO: 1378509 - RNA, 18 nt, Human
aaauauagaucaguuaua

SEQ ID NO: 1378510 - RNA, 23 nt, Human
aaauauacuuuuacaaguaacaa

SEQ ID NO: 1378511 - RNA, 15 nt, Human
aaauacggugggggu

SEQ ID NO: 1378512 - RNA, 13 nt, Human
aaauauacuuuua

SEQ ID NO: 1378513 - RNA, 22 nt, Human
aaauacgugggcauucaaaugu

SEQ ID NO: 1378514 - RNA, 21 nt, Human
aaauacgugggcauucaaaug

SEQ ID NO: 1378515 - RNA, 20 nt, Human
aaauacgugggcauucaaau

SEQ ID NO: 1378516 - RNA, 23 nt, Human
aaauaucccuccuguugggagag

SEQ ID NO: 1378517 - RNA, 20 nt, Human
aaauaucccuccuguuggga

SEQ ID NO: 1378518 - RNA, 22 nt, Human
aaauaucacuugucaauaaaau

SEQ ID NO: 1378519 - RNA, 21 nt, Human
aaauauauuauuacuuguaaa

SEQ ID NO: 1378520 - RNA, 22 nt, Human
aaauauauuuaagauaauuaua

SEQ ID NO: 1378521 - RNA, 16 nt, Human
aaauauauuuuaagac

SEQ ID NO: 1378522 - RNA, 22 nt, Human
aaauauauuuuaagacgaaaca

SEQ ID NO: 1378523 - RNA, 21 nt, Human
aaauauauuuaagauaauuau

SEQ ID NO: 1378524 - RNA, 20 nt, Human
aaauauauuuaagauaauua

SEQ ID NO: 1378525 - RNA, 12 nt, Human
aaauauauuuaa

SEQ ID NO: 1378526 - RNA, 23 nt, Human
aaauauauuauuacuuguaaaua

SEQ ID NO: 1378527 - RNA, 19 nt, Human
aaauauauuauuacuugua

SEQ ID NO: 1378528 - RNA, 16 nt, Human
aaauauauuauuacuu

SEQ ID NO: 1378529 - RNA, 13 nt, Human
aaauauauuauua

SEQ ID NO: 1378530 - RNA, 12 nt, Human
aaauauauuauu

SEQ ID NO: 1378531 - RNA, 22 nt, Human
aaauauauauuauacuuguaau

SEQ ID NO: 1378532 - RNA, 17 nt, Human
aaauauauauuauacuu

SEQ ID NO: 1378533 - RNA, 14 nt, Human
aaauauauauuaua

SEQ ID NO: 1378534 - RNA, 13 nt, Human
aaauauauauuau

SEQ ID NO: 1378535 - RNA, 12 nt, Human
aaauauauauua

SEQ ID NO: 1378536 - RNA, 18 nt, Human
aaauauaugcuaagucuu

SEQ ID NO: 1378537 - RNA, 14 nt, Human
aaauauauaucaaa

SEQ ID NO: 1378538 - RNA, 16 nt, Human
aaagcagguucuuguu

SEQ ID NO: 1378539 - RNA, 15 nt, Human
aaagcagguucuugu

SEQ ID NO: 1378540 - RNA, 14 nt, Human
aaagcagguucuug

SEQ ID NO: 1378541 - RNA, 17 nt, Human
aaagcagguuucaagga

SEQ ID NO: 1378542 - RNA, 19 nt, Human
aaagcagguucuuguuggu

SEQ ID NO: 1378543 - RNA, 17 nt, Human
aaagcagguucuuguug

SEQ ID NO: 1378544 - RNA, 22 nt, Human
aaagcagguucuuguuggugca

SEQ ID NO: 1378545 - RNA, 15 nt, Human
aaagcagccacgagg

SEQ ID NO: 1378546 - RNA, 12 nt, Human
aaagcagccacg

SEQ ID NO: 1378547 - RNA, 19 nt, Human
aaagcagaauaguauuuuu

SEQ ID NO: 1378548 - RNA, 17 nt, Human
aaagcagccuggccaac

SEQ ID NO: 1378549 - RNA, 15 nt, Human
aaagcagcguuucua

SEQ ID NO: 1378550 - RNA, 18 nt, Human
aaagcugacuuggcuggu

SEQ ID NO: 1378551 - RNA, 20 nt, Human
aaagcuagaauugaguguuu

SEQ ID NO: 1378552 - RNA, 14 nt, Human
aaagcuagaauuga

SEQ ID NO: 1378553 - RNA, 13 nt, Human
aaagcuagaauug

SEQ ID NO: 1378554 - RNA, 16 nt, Human
aaagcaguauuuuucu

SEQ ID NO: 1378555 - RNA, 15 nt, Human
aaagcaguauuuuuc

SEQ ID NO: 1378556 - RNA, 18 nt, Human
aaagcugguuuaauguuu

SEQ ID NO: 1378557 - RNA, 16 nt, Human
aaagcugguuuaaugu

SEQ ID NO: 1378558 - RNA, 14 nt, Human
aaagcugauuuuuu

SEQ ID NO: 1378559 - RNA, 18 nt, Human
aaagcuguguguuuggaa

SEQ ID NO: 1378560 - RNA, 17 nt, Human
aaagcuguucugucuuc

SEQ ID NO: 1378561 - RNA, 14 nt, Human
aaagcuguguggca

SEQ ID NO: 1378562 - RNA, 19 nt, Human
ggugcugggagaggcagcc

SEQ ID NO: 1378563 - RNA, 18 nt, Human
ggugcugggagaggcagc

SEQ ID NO: 1378564 - RNA, 12 nt, Human
ggugcugggaga

SEQ ID NO: 1378565 - RNA, 23 nt, Human
ggugcuggagguuggaucuugau

SEQ ID NO: 1378566 - RNA, 17 nt, Human
ggugcugccucuaccug

SEQ ID NO: 1378567 - RNA, 15 nt, Human
gguggacucgccugu

SEQ ID NO: 1378568 - RNA, 14 nt, Human
aaagcagaggccaa

SEQ ID NO: 1378569 - RNA, 14 nt, Human
gguggcagcaacaa

SEQ ID NO: 1378570 - RNA, 13 nt, Human
gguggcagcaaca

SEQ ID NO: 1378571 - RNA, 19 nt, Human
aaagcuuaaaacuuugaag

SEQ ID NO: 1378572 - RNA, 15 nt, Human
aaagcuuaaaacuuu

SEQ ID NO: 1378573 - RNA, 14 nt, Human
aaagcuuaaaacuu

SEQ ID NO: 1378574 - RNA, 19 nt, Human
aaagggcccuccuuccuaa

SEQ ID NO: 1378575 - RNA, 16 nt, Human
aaagcuuaaaacuuug

SEQ ID NO: 1378576 - RNA, 11 nt, Human
aaaggggagac

SEQ ID NO: 1378577 - RNA, 17 nt, Human
aaagggcccuccuuccu

SEQ ID NO: 1378578 - RNA, 22 nt, Human
aaagggcuguuauaaucuuuca

SEQ ID NO: 1378579 - RNA, 20 nt, Human
aaagggcuguuauaaucuuu

SEQ ID NO: 1378580 - RNA, 23 nt, Human
aaaggugacaucggaaaaauaau

SEQ ID NO: 1378581 - RNA, 24 nt, Human
aaaggggucggcugaccaugcuca

SEQ ID NO: 1378582 - RNA, 23 nt, Human
aaaggggucggcugaccaugcuc

SEQ ID NO: 1378583 - RNA, 21 nt, Human
aaagguuuaaaugaacaagag

SEQ ID NO: 1378584 - RNA, 20 nt, Human
aaagguuuaaaugaacaaga

SEQ ID NO: 1378585 - RNA, 18 nt, Human
aaagguuuaaaugaacaa

SEQ ID NO: 1378586 - RNA, 16 nt, Human
aaagguuuaaaugaac

SEQ ID NO: 1378587 - RNA, 14 nt, Human
aaagguuuaaauga

SEQ ID NO: 1378588 - RNA, 13 nt, Human
aaagguuuaaaug

SEQ ID NO: 1378589 - RNA, 21 nt, Human
aaagguucuagguuucaaaga

SEQ ID NO: 1378590 - RNA, 20 nt, Human
aaagguucuagguuucaaag

SEQ ID NO: 1378591 - RNA, 13 nt, Human
aaagguucuaggu

SEQ ID NO: 1378592 - RNA, 19 nt, Human
aaagguuagagaauaaauu

SEQ ID NO: 1378593 - RNA, 17 nt, Human
aaaggugugagacuggg

SEQ ID NO: 1378594 - RNA, 19 nt, Human
aaaggugugagacugggaa

SEQ ID NO: 1378595 - RNA, 18 nt, Human
aaagguucaugcaaacuu

SEQ ID NO: 1378596 - RNA, 12 nt, Human
ggugggccuggu

SEQ ID NO: 1378597 - RNA, 16 nt, Human
ggugggcugguaucuc

SEQ ID NO: 1378598 - RNA, 14 nt, Human
gguggcuuuugcgg

SEQ ID NO: 1378599 - RNA, 23 nt, Human
gguggcuuuugcgguucaggaaa

SEQ ID NO: 1378600 - RNA, 14 nt, Human
aaagguuuuccucu

SEQ ID NO: 1378601 - RNA, 19 nt, Human
aaagguuuaugaaaaagaa

SEQ ID NO: 1378602 - RNA, 21 nt, Human
aaagguuuggaaggagcagaa

SEQ ID NO: 1378603 - RNA, 22 nt, Human
aaagguuuaugaaaaagaagaa

SEQ ID NO: 1378604 - RNA, 18 nt, Human
aaagguuuaugaaaaaga

SEQ ID NO: 1378605 - RNA, 16 nt, Human
aaagguuuaugaaaaa

SEQ ID NO: 1378606 - RNA, 16 nt, Human
aaagguuuacagaauu

SEQ ID NO: 1378607 - RNA, 15 nt, Human
aaagguuuacagaau

SEQ ID NO: 1378608 - RNA, 20 nt, Human
aaagguuuaagaaauagaau

SEQ ID NO: 1378609 - RNA, 22 nt, Human
aaagguuuaaaugaacaagaga

SEQ ID NO: 1378610 - RNA, 18 nt, Human
aaagguuuuuuuucaguu

SEQ ID NO: 1378611 - RNA, 12 nt, Human
aaagguuuuuuu

SEQ ID NO: 1378612 - RNA, 21 nt, Human
aaaguaaaaacaaagaaauua

SEQ ID NO: 1378613 - RNA, 15 nt, Human
gguucuagguuucaa

SEQ ID NO: 1378614 - RNA, 23 nt, Human
gguucuaaggccuaggauucuaa

SEQ ID NO: 1378615 - RNA, 12 nt, Human
gguucuaaggcc

SEQ ID NO: 1378616 - RNA, 11 nt, Human
gguucuaaggc

SEQ ID NO: 1378617 - RNA, 22 nt, Human
gguucuaaaguucuaagauucu

SEQ ID NO: 1378618 - RNA, 17 nt, Human
gguucuaaaguucuaag

SEQ ID NO: 1378619 - RNA, 15 nt, Human
gguucuaaaguucua

SEQ ID NO: 1378620 - RNA, 14 nt, Human
gguucuaaaguucu

SEQ ID NO: 1378621 - RNA, 13 nt, Human
gguucuaaaguuc

SEQ ID NO: 1378622 - RNA, 12 nt, Human
gguucuaaaguu

SEQ ID NO: 1378623 - RNA, 11 nt, Human
gguucuaaagu

SEQ ID NO: 1378624 - RNA, 14 nt, Human
gguucuaaaaggug

SEQ ID NO: 1378625 - RNA, 15 nt, Human
gguuccuuuuauuag

SEQ ID NO: 1378626 - RNA, 23 nt, Human
gguuccgcuuggagcagaggggc

SEQ ID NO: 1378627 - RNA, 22 nt, Human
gguuccgcuuggagcagagggg

SEQ ID NO: 1378628 - RNA, 21 nt, Human
gguuccgcuuggagcagaggg

SEQ ID NO: 1378629 - RNA, 15 nt, Human
gguuccgcuuggagc

SEQ ID NO: 1378630 - RNA, 16 nt, Human
gguucccaagcucaga

SEQ ID NO: 1378631 - RNA, 13 nt, Human
gguucccaagcuc

SEQ ID NO: 1378632 - RNA, 13 nt, Human
gguguucuaagau

SEQ ID NO: 1378633 - RNA, 22 nt, Human
gguguugccaaauauguccugg

SEQ ID NO: 1378634 - RNA, 21 nt, Human
gguguugccaaauauguccug

SEQ ID NO: 1378635 - RNA, 11 nt, Human
gguguucuaag

SEQ ID NO: 1378636 - RNA, 12 nt, Human
gguguuauuugg

SEQ ID NO: 1378637 - RNA, 22 nt, Human
gguguuauuuggaaccuuguuu

SEQ ID NO: 1378638 - RNA, 21 nt, Human
gguguuaucaccgugggcucc

SEQ ID NO: 1378639 - RNA, 14 nt, Human
gguguuaauuuuug

SEQ ID NO: 1378640 - RNA, 15 nt, Human
gguguuaacagaagg

SEQ ID NO: 1378641 - RNA, 13 nt, Human
gguguuaacagaa

SEQ ID NO: 1378642 - RNA, 12 nt, Human
ggugugucugcu

SEQ ID NO: 1378643 - RNA, 23 nt, Human
ggugugucccccucuguccaggc

SEQ ID NO: 1378644 - RNA, 21 nt, Human
ggugugguacagagaagccag

SEQ ID NO: 1378645 - RNA, 23 nt, Human
ggugugguacagagaagccagcu

SEQ ID NO: 1378646 - RNA, 20 nt, Human
ggugugguacagagaagcca

SEQ ID NO: 1378647 - RNA, 19 nt, Human
ggugugguacagagaagcc

SEQ ID NO: 1378648 - RNA, 17 nt, Human
ggugugguacagagaag

SEQ ID NO: 1378649 - RNA, 16 nt, Human
ggugugguacagagaa

SEQ ID NO: 1378650 - RNA, 15 nt, Human
ggugugguacagaga

SEQ ID NO: 1378651 - RNA, 14 nt, Human
ggugugguacagag

SEQ ID NO: 1378652 - RNA, 12 nt, Human
gguguggcuccu

SEQ ID NO: 1378653 - RNA, 16 nt, Human
gguguggagccgaggc

SEQ ID NO: 1378654 - RNA, 21 nt, Human
gguggggagagacgggcccug

SEQ ID NO: 1378655 - RNA, 22 nt, Human
gguggggggggggcgcggcugg

SEQ ID NO: 1378656 - RNA, 16 nt, Human
aaaguacuuguaguuc

SEQ ID NO: 1378657 - RNA, 15 nt, Human
aaaguacuuguaguu

SEQ ID NO: 1378658 - RNA, 14 nt, Human
aaaguacuuguagu

SEQ ID NO: 1378659 - RNA, 17 nt, Human
aaaguacacucugcugu

SEQ ID NO: 1378660 - RNA, 15 nt, Human
aaaguacacucugcu

SEQ ID NO: 1378661 - RNA, 19 nt, Human
aaaguacacuguuucaaac

SEQ ID NO: 1378662 - RNA, 19 nt, Human
aaaguacaaccauagagga

SEQ ID NO: 1378663 - RNA, 18 nt, Human
aaaguacacuguuucaaa

SEQ ID NO: 1378664 - RNA, 21 nt, Human
aaaguaucccuacuguaauuu

SEQ ID NO: 1378665 - RNA, 17 nt, Human
aaaguggguuuuuuagu

SEQ ID NO: 1378666 - RNA, 14 nt, Human
aaaguguauuuuuu

SEQ ID NO: 1378667 - RNA, 21 nt, Human
aaaguguauuuuuuuacuaau

SEQ ID NO: 1378668 - RNA, 19 nt, Human
aaaguauguauuauuuaca

SEQ ID NO: 1378669 - RNA, 17 nt, Human
aaaguauguauuauuua

SEQ ID NO: 1378670 - RNA, 16 nt, Human
aaaguauguauuauuu

SEQ ID NO: 1378671 - RNA, 22 nt, Human
aaaguggguuuuuuaguugaau

SEQ ID NO: 1378672 - RNA, 17 nt, Human
aaagugggcuugauucu

SEQ ID NO: 1378673 - RNA, 17 nt, Human
aaaguauguuagugcaa

SEQ ID NO: 1378674 - RNA, 16 nt, Human
gguuucauguuaguua

SEQ ID NO: 1378675 - RNA, 17 nt, Human
gguuucagcacuagcca

SEQ ID NO: 1378676 - RNA, 19 nt, Human
gguuucagcacuagccaaa

SEQ ID NO: 1378677 - RNA, 13 nt, Human
gguuucagcacua

SEQ ID NO: 1378678 - RNA, 21 nt, Human
gguucucaauuccaacaguuu

SEQ ID NO: 1378679 - RNA, 21 nt, Human
gguuucuaagcauaaaagaug

SEQ ID NO: 1378680 - RNA, 12 nt, Human
gguuucuagcau

SEQ ID NO: 1378681 - RNA, 19 nt, Human
gguuucccuacugaagccc

SEQ ID NO: 1378682 - RNA, 21 nt, Human
gguuuuaauuuaguaaaccaa

SEQ ID NO: 1378683 - RNA, 15 nt, Human
gguuuuaacuuuguu

SEQ ID NO: 1378684 - RNA, 14 nt, Human
gguuuuaacuuugu

SEQ ID NO: 1378685 - RNA, 22 nt, Human
gguuugguuugcagcgacuggc

SEQ ID NO: 1378686 - RNA, 15 nt, Human
gguuugguguauggu

SEQ ID NO: 1378687 - RNA, 20 nt, Human
gguuuguaaauuaacuuuua

SEQ ID NO: 1378688 - RNA, 17 nt, Human
gguuuuauaaggcugau

SEQ ID NO: 1378689 - RNA, 16 nt, Human
gguuuuagguucuaaa

SEQ ID NO: 1378690 - RNA, 15 nt, Human
gguuuuagguucuaa

SEQ ID NO: 1378691 - RNA, 17 nt, Human
gguuuuaauuuaguaaa

SEQ ID NO: 1378692 - RNA, 17 nt, Human
gguuuucacauuggaaa

SEQ ID NO: 1378693 - RNA, 16 nt, Human
gcuuugcuaccaaagc

SEQ ID NO: 1378694 - RNA, 17 nt, Human
gcuuugcccuucuuucu

SEQ ID NO: 1378695 - RNA, 14 nt, Human
gcuuuggaaguuuu

SEQ ID NO: 1378696 - RNA, 23 nt, Human
gcuuuggaaguuuagcucugaga

SEQ ID NO: 1378697 - RNA, 21 nt, Human
gcuuuggaaguuuagcucuga

SEQ ID NO: 1378698 - RNA, 14 nt, Human
gcuuuggaagccau

SEQ ID NO: 1378699 - RNA, 20 nt, Human
gcuuugauucauaguaacuu

SEQ ID NO: 1378700 - RNA, 15 nt, Human
gcuuugauucauagu

SEQ ID NO: 1378701 - RNA, 12 nt, Human
gcuuugauucau

SEQ ID NO: 1378702 - RNA, 21 nt, Human
gcuuugauguuccuuccagug

SEQ ID NO: 1378703 - RNA, 16 nt, Human
gcuuucgaacugcuag

SEQ ID NO: 1378704 - RNA, 19 nt, Human
gcuuuccugccccaggccu

SEQ ID NO: 1378705 - RNA, 17 nt, Human
gcuuuccugccccaggc

SEQ ID NO: 1378706 - RNA, 14 nt, Human
gcuuuccugcccca

SEQ ID NO: 1378707 - RNA, 12 nt, Human
gcuuuccugccc

SEQ ID NO: 1378708 - RNA, 11 nt, Human
gcuuuccugcc

SEQ ID NO: 1378709 - RNA, 22 nt, Human
gcuuuccugaauccaaacuaau

SEQ ID NO: 1378710 - RNA, 12 nt, Human
gcuuuccugaau

SEQ ID NO: 1378711 - RNA, 11 nt, Human
gcuuuccugaa

SEQ ID NO: 1378712 - RNA, 15 nt, Human
gcuuaaucuuugaaa

SEQ ID NO: 1378713 - RNA, 17 nt, Human
gcuuaaucagauagaua

SEQ ID NO: 1378714 - RNA, 19 nt, Human
gcuguuugagauucucaaa

SEQ ID NO: 1378715 - RNA, 17 nt, Human
gcuuaacuucacauauu

SEQ ID NO: 1378716 - RNA, 16 nt, Human
gcuguuuauuaaucuu

SEQ ID NO: 1378717 - RNA, 15 nt, Human
gcuguuuacuaggga

SEQ ID NO: 1378718 - RNA, 16 nt, Human
gcuuaacuucacauau

SEQ ID NO: 1378719 - RNA, 17 nt, Human
ggaaacuggccauggcc

SEQ ID NO: 1378720 - RNA, 17 nt, Human
ggaaacuccugugacca

SEQ ID NO: 1378721 - RNA, 16 nt, Human
ggaaacuccugugacc

SEQ ID NO: 1378722 - RNA, 17 nt, Human
ggaaacaguugcaugua

SEQ ID NO: 1378723 - RNA, 18 nt, Human
ggaaacaguugcauguag

SEQ ID NO: 1378724 - RNA, 21 nt, Human
ggaaacagcaucuccaagcag

SEQ ID NO: 1378725 - RNA, 23 nt, Human
gcuuuuguuuccuuuuucagaua

SEQ ID NO: 1378726 - RNA, 23 nt, Human
gcuuuugugggggacuguaaguu

SEQ ID NO: 1378727 - RNA, 11 nt, Human
gcuuuuggcaa

SEQ ID NO: 1378728 - RNA, 21 nt, Human
gcuuuugugggggacuguaag

SEQ ID NO: 1378729 - RNA, 13 nt, Human
gcuuuugugcauu

SEQ ID NO: 1378730 - RNA, 19 nt, Human
gcuuuugugcauuaucuag

SEQ ID NO: 1378731 - RNA, 15 nt, Human
gcuuuuuuuuccuuc

SEQ ID NO: 1378732 - RNA, 22 nt, Human
gcuuuuuuuguguguauuugcu

SEQ ID NO: 1378733 - RNA, 21 nt, Human
gcuuuuuuuguguguauuugc

SEQ ID NO: 1378734 - RNA, 17 nt, Human
gcuuuuuuuguguguau

SEQ ID NO: 1378735 - RNA, 21 nt, Human
gcuuuuguuuccuuuuucaga

SEQ ID NO: 1378736 - RNA, 16 nt, Human
ggaaaaaauaacaaug

SEQ ID NO: 1378737 - RNA, 21 nt, Human
ggaaagcaagaaucagagaag

SEQ ID NO: 1378738 - RNA, 21 nt, Human
ggaaagcaaagcacagagagu

SEQ ID NO: 1378739 - RNA, 20 nt, Human
ggaaagcaaagcacagagag

SEQ ID NO: 1378740 - RNA, 17 nt, Human
ggaaagcaaagcacaga

SEQ ID NO: 1378741 - RNA, 16 nt, Human
ggaaagcaaagcacag

SEQ ID NO: 1378742 - RNA, 13 nt, Human
ggaaagcaaagca

SEQ ID NO: 1378743 - RNA, 20 nt, Human
ggaaagcccauaugcuacca

SEQ ID NO: 1378744 - RNA, 11 nt, Human
ggaaagcaggu

SEQ ID NO: 1378745 - RNA, 16 nt, Human
ggaaagcaagaaucag

SEQ ID NO: 1378746 - RNA, 19 nt, Human
ggaaagcagccuggccaac

SEQ ID NO: 1378747 - RNA, 12 nt, Human
ggaaaggccagc

SEQ ID NO: 1378748 - RNA, 16 nt, Human
ggaaaggccagcacuc

SEQ ID NO: 1378749 - RNA, 23 nt, Human
ggaaagcgccuccaacccuagca

SEQ ID NO: 1378750 - RNA, 21 nt, Human
ggaaagcuuuucuauuuuaau

SEQ ID NO: 1378751 - RNA, 16 nt, Human
ggaaagccccugcccc

SEQ ID NO: 1378752 - RNA, 19 nt, Human
ggaaagcgccuccaacccu

SEQ ID NO: 1378753 - RNA, 21 nt, Human
gcuuuugcccauuuugaauca

SEQ ID NO: 1378754 - RNA, 20 nt, Human
gcuuuugcccauuuugaauc

SEQ ID NO: 1378755 - RNA, 23 nt, Human
gcuuuugcgguucaggaaaauug

SEQ ID NO: 1378756 - RNA, 16 nt, Human
gcuuuucccuuuguga

SEQ ID NO: 1378757 - RNA, 21 nt, Human
gcuuuucccuuuuuuuaagua

SEQ ID NO: 1378758 - RNA, 20 nt, Human
gcuuuucccuuuuuuuaagu

SEQ ID NO: 1378759 - RNA, 13 nt, Human
ggacaugcuuagc

SEQ ID NO: 1378760 - RNA, 21 nt, Human
ggacaugcgguagccagcaca

SEQ ID NO: 1378761 - RNA, 19 nt, Human
ggacaugcgguagccagca

SEQ ID NO: 1378762 - RNA, 16 nt, Human
ggacaugcgguagcca

SEQ ID NO: 1378763 - RNA, 16 nt, Human
ggacauccuccuccca

SEQ ID NO: 1378764 - RNA, 14 nt, Human
ggacaugcuuagca

SEQ ID NO: 1378765 - RNA, 23 nt, Human
ggacaguuuaccaguugccuuuu

SEQ ID NO: 1378766 - RNA, 20 nt, Human
ggacaguuuaccaguugccu

SEQ ID NO: 1378767 - RNA, 22 nt, Human
ggacaguuccagaagugugacu

SEQ ID NO: 1378768 - RNA, 13 nt, Human
ggacauccuccuc

SEQ ID NO: 1378769 - RNA, 12 nt, Human
ggacaucagcaa

SEQ ID NO: 1378770 - RNA, 14 nt, Human
ggacaucagcaaac

SEQ ID NO: 1378771 - RNA, 15 nt, Human
ggacaucagcaaaca

SEQ ID NO: 1378772 - RNA, 13 nt, Human
ggacaggcuggcu

SEQ ID NO: 1378773 - RNA, 14 nt, Human
ggacaccugcccug

SEQ ID NO: 1378774 - RNA, 15 nt, Human
ggacaccugcccugc

SEQ ID NO: 1378775 - RNA, 16 nt, Human
ggacaccugcccugcc

SEQ ID NO: 1378776 - RNA, 13 nt, Human
ggacaccugcccu

SEQ ID NO: 1378777 - RNA, 16 nt, Human
ggacaccuaggcuagg

SEQ ID NO: 1378778 - RNA, 10 nt, Human
ggacaccugc

SEQ ID NO: 1378779 - RNA, 11 nt, Human
ggacaccugcc

SEQ ID NO: 1378780 - RNA, 12 nt, Human
ggacaccugccc

SEQ ID NO: 1378781 - RNA, 23 nt, Human
ggacaggcuggcuccagaugcag

SEQ ID NO: 1378782 - RNA, 15 nt, Human
ggacaggcuggcucc

SEQ ID NO: 1378783 - RNA, 20 nt, Human
ggacagguccucaguguccu

SEQ ID NO: 1378784 - RNA, 21 nt, Human
ggacagucaccucauggaauu

SEQ ID NO: 1378785 - RNA, 18 nt, Human
ggacagucaccucaugga

SEQ ID NO: 1378786 - RNA, 17 nt, Human
ggacagucaccucaugg

SEQ ID NO: 1378787 - RNA, 20 nt, Human
ggaagcgcgagggccucaaa

SEQ ID NO: 1378788 - RNA, 22 nt, Human
ggaagccucagauuccuuccca

SEQ ID NO: 1378789 - RNA, 13 nt, Human
ggaagccucagau

SEQ ID NO: 1378790 - RNA, 20 nt, Human
ggaagccgugcucgccccag

SEQ ID NO: 1378791 - RNA, 15 nt, Human
ggaagccguccuggc

SEQ ID NO: 1378792 - RNA, 14 nt, Human
ggaagccugcaguc

SEQ ID NO: 1378793 - RNA, 15 nt, Human
ggaauauaauuguuu

SEQ ID NO: 1378794 - RNA, 11 nt, Human
ggaauauuuga

SEQ ID NO: 1378795 - RNA, 13 nt, Human
ggaauauuugaau

SEQ ID NO: 1378796 - RNA, 14 nt, Human
ggaauauuugaauc

SEQ ID NO: 1378797 - RNA, 16 nt, Human
ggaauauauaaccagu

SEQ ID NO: 1378798 - RNA, 17 nt, Human
ggaauagcaugucacua

SEQ ID NO: 1378799 - RNA, 14 nt, Human
ggaauagcauguca

SEQ ID NO: 1378800 - RNA, 19 nt, Human
ggaauacugaacaucugag

SEQ ID NO: 1378801 - RNA, 17 nt, Human
ggaauacuuuuuguuau

SEQ ID NO: 1378802 - RNA, 12 nt, Human
ggaauacuuuuu

SEQ ID NO: 1378803 - RNA, 19 nt, Human
ggaauacucuuauaucuau

SEQ ID NO: 1378804 - RNA, 23 nt, Human
ggacaauggaccggagagugggg

SEQ ID NO: 1378805 - RNA, 15 nt, Human
ggaauauuugaaucu

SEQ ID NO: 1378806 - RNA, 20 nt, Human
ggaauauuugaaucuugucu

SEQ ID NO: 1378807 - RNA, 12 nt, Human
ggacacaggccu

SEQ ID NO: 1378808 - RNA, 11 nt, Human
ggacacaggcc

SEQ ID NO: 1378809 - RNA, 23 nt, Human
ggacacaggccuguguagcugug

SEQ ID NO: 1378810 - RNA, 16 nt, Human
ggacacaggccugugu

SEQ ID NO: 1378811 - RNA, 14 nt, Human
ggacacaggccugu

SEQ ID NO: 1378812 - RNA, 13 nt, Human
ggacacaggccug

SEQ ID NO: 1378813 - RNA, 12 nt, Human
ggacacaugucc

SEQ ID NO: 1378814 - RNA, 13 nt, Human
ggacacaugucca

SEQ ID NO: 1378815 - RNA, 16 nt, Human
ggacaccccgacuuuu

SEQ ID NO: 1378816 - RNA, 19 nt, Human
ggacacauguccaguggga

SEQ ID NO: 1378817 - RNA, 14 nt, Human
ggaagcccauccug

SEQ ID NO: 1378818 - RNA, 17 nt, Human
ggaagcccauccugacc

SEQ ID NO: 1378819 - RNA, 16 nt, Human
ggaagccagcuuuccc

SEQ ID NO: 1378820 - RNA, 13 nt, Human
ggaaaucuuaaac

SEQ ID NO: 1378821 - RNA, 19 nt, Human
ggaaaucaggguuaguauu

SEQ ID NO: 1378822 - RNA, 15 nt, Human
ggaaaucccuucaua

SEQ ID NO: 1378823 - RNA, 22 nt, Human
gcugccugagucgugaccugcu

SEQ ID NO: 1378824 - RNA, 21 nt, Human
gcugccugagucgugaccugc

SEQ ID NO: 1378825 - RNA, 11 nt, Human
gcugccugagu

SEQ ID NO: 1378826 - RNA, 18 nt, Human
gcugccucccucugcugu

SEQ ID NO: 1378827 - RNA, 21 nt, Human
gcugccuccccucuccuuccu

SEQ ID NO: 1378828 - RNA, 21 nt, Human
gcugccucuaccugacacucc

SEQ ID NO: 1378829 - RNA, 21 nt, Human
gcugccucccuuguggcagca

SEQ ID NO: 1378830 - RNA, 18 nt, Human
gcugccucuucccucuuc

SEQ ID NO: 1378831 - RNA, 14 nt, Human
gcugccucuucccu

SEQ ID NO: 1378832 - RNA, 18 nt, Human
gcugccccucucaccaaa

SEQ ID NO: 1378833 - RNA, 16 nt, Human
gcugccccucucacca

SEQ ID NO: 1378834 - RNA, 15 nt, Human
gcugccccucucacc

SEQ ID NO: 1378835 - RNA, 14 nt, Human
gcugccccucucac

SEQ ID NO: 1378836 - RNA, 13 nt, Human
gcugccccucuca

SEQ ID NO: 1378837 - RNA, 22 nt, Human
gcugccccucaucucucugccc

SEQ ID NO: 1378838 - RNA, 23 nt, Human
gcugccccggccccucccccuga

SEQ ID NO: 1378839 - RNA, 22 nt, Human
gcugccccggccccucccccug

SEQ ID NO: 1378840 - RNA, 16 nt, Human
gcugccccggccccuc

SEQ ID NO: 1378841 - RNA, 15 nt, Human
gcugccccggccccu

SEQ ID NO: 1378842 - RNA, 13 nt, Human
gcugccccggccc

SEQ ID NO: 1378843 - RNA, 15 nt, Human
gcugcccccaccucu

SEQ ID NO: 1378844 - RNA, 16 nt, Human
gcugcagccugcgcca

SEQ ID NO: 1378845 - RNA, 23 nt, Human
gcugcagccucaggacugggagc

SEQ ID NO: 1378846 - RNA, 22 nt, Human
gcugcagccucaggacugggag

SEQ ID NO: 1378847 - RNA, 21 nt, Human
gcugcagccucaggacuggga

SEQ ID NO: 1378848 - RNA, 19 nt, Human
gcugcagccucaggacugg

SEQ ID NO: 1378849 - RNA, 18 nt, Human
gcugcagccucaggacug

SEQ ID NO: 1378850 - RNA, 16 nt, Human
gcugcagccucaggac

SEQ ID NO: 1378851 - RNA, 15 nt, Human
gcugcagccucagga

SEQ ID NO: 1378852 - RNA, 14 nt, Human
gcugcagccucagg

SEQ ID NO: 1378853 - RNA, 21 nt, Human
gcugcccuccugugcucagcc

SEQ ID NO: 1378854 - RNA, 12 nt, Human
gcugcccuccug

SEQ ID NO: 1378855 - RNA, 21 nt, Human
gcugcccuacagcacccugug

SEQ ID NO: 1378856 - RNA, 20 nt, Human
gcugccccuggugcacuggc

SEQ ID NO: 1378857 - RNA, 18 nt, Human
gcugcaagcacagcccuu

SEQ ID NO: 1378858 - RNA, 20 nt, Human
gcugcaagguacucugguga

SEQ ID NO: 1378859 - RNA, 12 nt, Human
gcugcaagguac

SEQ ID NO: 1378860 - RNA, 20 nt, Human
gcugaggugcccaggagaag

SEQ ID NO: 1378861 - RNA, 16 nt, Human
gcugagcagggccggg

SEQ ID NO: 1378862 - RNA, 14 nt, Human
gcugagcagggccg

SEQ ID NO: 1378863 - RNA, 13 nt, Human
gcugagcagggcc

SEQ ID NO: 1378864 - RNA, 14 nt, Human
gcugagcaggccac

SEQ ID NO: 1378865 - RNA, 12 nt, Human
gcugagcaggcc

SEQ ID NO: 1378866 - RNA, 18 nt, Human
gcugagcaaaucaccaca

SEQ ID NO: 1378867 - RNA, 23 nt, Human
gcugaggcagcagugugaggcca

SEQ ID NO: 1378868 - RNA, 13 nt, Human
gcugaggcagcag

SEQ ID NO: 1378869 - RNA, 18 nt, Human
gcugaggugcccaggaga

SEQ ID NO: 1378870 - RNA, 17 nt, Human
gcugaggugcccaggag

SEQ ID NO: 1378871 - RNA, 16 nt, Human
gcugaggugcccagga

SEQ ID NO: 1378872 - RNA, 15 nt, Human
gcugaggugcccagg

SEQ ID NO: 1378873 - RNA, 21 nt, Human
gcugaggccacacucagcaca

SEQ ID NO: 1378874 - RNA, 19 nt, Human
gcugaggccacacucagca

SEQ ID NO: 1378875 - RNA, 20 nt, Human
gcuggagagcauagggucug

SEQ ID NO: 1378876 - RNA, 16 nt, Human
gcuggcucugagcgcc

SEQ ID NO: 1378877 - RNA, 13 nt, Human
gcuggcucugagc

SEQ ID NO: 1378878 - RNA, 16 nt, Human
gcuggcugagggcagu

SEQ ID NO: 1378879 - RNA, 23 nt, Human
gcugcucuuggcuggacccagcc

SEQ ID NO: 1378880 - RNA, 22 nt, Human
gcugcucuuggcuggacccagc

SEQ ID NO: 1378881 - RNA, 21 nt, Human
gcugcucuuggcuggacccag

SEQ ID NO: 1378882 - RNA, 18 nt, Human
gcugcucuuggcuggacc

SEQ ID NO: 1378883 - RNA, 15 nt, Human
gcugcucuuggcugg

SEQ ID NO: 1378884 - RNA, 15 nt, Human
gcugguaucucagaa

SEQ ID NO: 1378885 - RNA, 14 nt, Human
gcugguagagcagg

SEQ ID NO: 1378886 - RNA, 18 nt, Human
gcugggccccugccucuc

SEQ ID NO: 1378887 - RNA, 20 nt, Human
gcugggccccugccucucug

SEQ ID NO: 1378888 - RNA, 12 nt, Human
gcugggccccug

SEQ ID NO: 1378889 - RNA, 13 nt, Human
gcugggccccugc

SEQ ID NO: 1378890 - RNA, 14 nt, Human
gcugggccccugcc

SEQ ID NO: 1378891 - RNA, 22 nt, Human
gcugggaacagugugcaaggca

SEQ ID NO: 1378892 - RNA, 15 nt, Human
gcuggcugagggcag

SEQ ID NO: 1378893 - RNA, 15 nt, Human
gcuggcuugggcagc

SEQ ID NO: 1378894 - RNA, 20 nt, Human
gcugggccauguccaaagag

SEQ ID NO: 1378895 - RNA, 19 nt, Human
gcugggccauguccaaaga

SEQ ID NO: 1378896 - RNA, 17 nt, Human
gcugggccauguccaaa

SEQ ID NO: 1378897 - RNA, 21 nt, Human
gcugggaauggaggggcagag

SEQ ID NO: 1378898 - RNA, 17 nt, Human
gcugugcuauggugcuc

SEQ ID NO: 1378899 - RNA, 16 nt, Human
gcugugcuauggugcu

SEQ ID NO: 1378900 - RNA, 18 nt, Human
gcugugcgcccagggcug

SEQ ID NO: 1378901 - RNA, 16 nt, Human
gcugugcgcccagggc

SEQ ID NO: 1378902 - RNA, 17 nt, Human
gcugugcgcccagggcu

SEQ ID NO: 1378903 - RNA, 23 nt, Human
gcuguaguaggcauuuuuaccau

SEQ ID NO: 1378904 - RNA, 16 nt, Human
gcuguaguaggcauuu

SEQ ID NO: 1378905 - RNA, 14 nt, Human
gcuguauaaaauca

SEQ ID NO: 1378906 - RNA, 18 nt, Human
gcuguauaaaaucagcca

SEQ ID NO: 1378907 - RNA, 20 nt, Human
gcugugauacgaugcuucaa

SEQ ID NO: 1378908 - RNA, 19 nt, Human
gcugugaguucucccugua

SEQ ID NO: 1378909 - RNA, 18 nt, Human
gcugugaguucucccugu

SEQ ID NO: 1378910 - RNA, 22 nt, Human
gcugugagucuuugguucuaag

SEQ ID NO: 1378911 - RNA, 20 nt, Human
gcugugagucuuugguucua

SEQ ID NO: 1378912 - RNA, 18 nt, Human
gcugugaggcuguccugu

SEQ ID NO: 1378913 - RNA, 17 nt, Human
gcugugaggcuguccug

SEQ ID NO: 1378914 - RNA, 16 nt, Human
gcugugaggcuguccu

SEQ ID NO: 1378915 - RNA, 15 nt, Human
gcugugaggcugucc

SEQ ID NO: 1378916 - RNA, 14 nt, Human
gcugugaggcuguc

SEQ ID NO: 1378917 - RNA, 13 nt, Human
gcugugaggcugu

SEQ ID NO: 1378918 - RNA, 12 nt, Human
gcugugaggcug

SEQ ID NO: 1378919 - RNA, 15 nt, Human
gcuguauagcugcuu

SEQ ID NO: 1378920 - RNA, 20 nt, Human
gcuguauaaaaucagccaau

SEQ ID NO: 1378921 - RNA, 22 nt, Human
gcuguauaaaaucagccaauua

SEQ ID NO: 1378922 - RNA, 21 nt, Human
gcuguauuuuaaaagaaugau

SEQ ID NO: 1378923 - RNA, 20 nt, Human
gcuguauuuuaaaagaauga

SEQ ID NO: 1378924 - RNA, 13 nt, Human
gcggcaucaggcu

SEQ ID NO: 1378925 - RNA, 19 nt, Human
gcggcaggggccuggagau

SEQ ID NO: 1378926 - RNA, 16 nt, Human
gcggcaggggccugga

SEQ ID NO: 1378927 - RNA, 15 nt, Human
gcggcaggggccugg

SEQ ID NO: 1378928 - RNA, 14 nt, Human
gcggcuccucaggg

SEQ ID NO: 1378929 - RNA, 12 nt, Human
gcggcuccucag

SEQ ID NO: 1378930 - RNA, 16 nt, Human
gcggcagauggggaga

SEQ ID NO: 1378931 - RNA, 13 nt, Human
gcggauggccgga

SEQ ID NO: 1378932 - RNA, 21 nt, Human
gcguggaacucgugucuggca

SEQ ID NO: 1378933 - RNA, 21 nt, Human
gcgggagccaugcgcccccuc

SEQ ID NO: 1378934 - RNA, 12 nt, Human
gcggcugugugu

SEQ ID NO: 1378935 - RNA, 22 nt, Human
gcggcuggggucccagcagcug

SEQ ID NO: 1378936 - RNA, 21 nt, Human
gcggcuggggucccagcagcu

SEQ ID NO: 1378937 - RNA, 20 nt, Human
gcggcuggggucccagcagc

SEQ ID NO: 1378938 - RNA, 19 nt, Human
gcggcuggggucccagcag

SEQ ID NO: 1378939 - RNA, 18 nt, Human
gcggcuggggucccagca

SEQ ID NO: 1378940 - RNA, 17 nt, Human
gcggcuggggucccagc

SEQ ID NO: 1378941 - RNA, 20 nt, Human
gcggcuggccauggagaaag

SEQ ID NO: 1378942 - RNA, 19 nt, Human
gcggcuggccauggagaaa

SEQ ID NO: 1378943 - RNA, 18 nt, Human
gcggcuggccauggagaa

SEQ ID NO: 1378944 - RNA, 16 nt, Human
gcggcuggccauggag

SEQ ID NO: 1378945 - RNA, 22 nt, Human
gcguuauuggucggcagccuuc

SEQ ID NO: 1378946 - RNA, 15 nt, Human
gcguuccuuucuuuu

SEQ ID NO: 1378947 - RNA, 13 nt, Human
gcguuccuuucuu

SEQ ID NO: 1378948 - RNA, 15 nt, Human
gcguucuuguaauuu

SEQ ID NO: 1378949 - RNA, 14 nt, Human
gcguucuuguaauu

SEQ ID NO: 1378950 - RNA, 11 nt, Human
gcguucuugua

SEQ ID NO: 1378951 - RNA, 16 nt, Human
gcguuccuuucuuuuc

SEQ ID NO: 1378952 - RNA, 11 nt, Human
gcuaaggcucu

SEQ ID NO: 1378953 - RNA, 22 nt, Human
gcguucuuguaauuuuacacgc

SEQ ID NO: 1378954 - RNA, 17 nt, Human
gcguucuuguaauuuua

SEQ ID NO: 1378955 - RNA, 16 nt, Human
gcguucuuguaauuuu

SEQ ID NO: 1378956 - RNA, 19 nt, Human
gcgcaggccgugacgucug

SEQ ID NO: 1378957 - RNA, 13 nt, Human
gccuugccagaga

SEQ ID NO: 1378958 - RNA, 12 nt, Human
gccuugccagag

SEQ ID NO: 1378959 - RNA, 23 nt, Human
gccuugaacuuugaccucugcag

SEQ ID NO: 1378960 - RNA, 20 nt, Human
gccuggcuggcugagggcag

SEQ ID NO: 1378961 - RNA, 18 nt, Human
gccuggcuggcugagggc

SEQ ID NO: 1378962 - RNA, 17 nt, Human
gccuggcuggcugaggg

SEQ ID NO: 1378963 - RNA, 16 nt, Human
gccuggcuggcugagg

SEQ ID NO: 1378964 - RNA, 15 nt, Human
gccuggcuggcugag

SEQ ID NO: 1378965 - RNA, 14 nt, Human
gccuggcuggcuga

SEQ ID NO: 1378966 - RNA, 12 nt, Human
gccuggcuggcu

SEQ ID NO: 1378967 - RNA, 21 nt, Human
gccuggcugcugaucgccuuc

SEQ ID NO: 1378968 - RNA, 16 nt, Human
gccuggcuccguccag

SEQ ID NO: 1378969 - RNA, 21 nt, Human
gccucugggggguggccaggc

SEQ ID NO: 1378970 - RNA, 23 nt, Human
gccucugggggguggccaggccg

SEQ ID NO: 1378971 - RNA, 20 nt, Human
gccucugggggguggccagg

SEQ ID NO: 1378972 - RNA, 17 nt, Human
gccucugggggguggcc

SEQ ID NO: 1378973 - RNA, 22 nt, Human
gccuguggccaugacccugccu

SEQ ID NO: 1378974 - RNA, 21 nt, Human
gccuggcuggcugagggcagu

SEQ ID NO: 1378975 - RNA, 17 nt, Human
gccuucucaugauccaa

SEQ ID NO: 1378976 - RNA, 19 nt, Human
gccuucgucuuucccaugg

SEQ ID NO: 1378977 - RNA, 23 nt, Human
gccuguggccaugacccugccuc

SEQ ID NO: 1378978 - RNA, 23 nt, Human
gccuucuuuugggggucaacagu

SEQ ID NO: 1378979 - RNA, 14 nt, Human
gccuugaacuuuga

SEQ ID NO: 1378980 - RNA, 19 nt, Human
gccuucugguguuggacaa

SEQ ID NO: 1378981 - RNA, 16 nt, Human
gccuucucuguucauu

SEQ ID NO: 1378982 - RNA, 14 nt, Human
gccuucucuguuca

SEQ ID NO: 1378983 - RNA, 19 nt, Human
gccuucucuaaacauuuca

SEQ ID NO: 1378984 - RNA, 23 nt, Human
gcuaggcucugucuggaagaugg

SEQ ID NO: 1378985 - RNA, 18 nt, Human
gcuaggaaugaaauccug

SEQ ID NO: 1378986 - RNA, 13 nt, Human
gcuaggaaugaaa

SEQ ID NO: 1378987 - RNA, 12 nt, Human
gcuaggaaugaa

SEQ ID NO: 1378988 - RNA, 21 nt, Human
gcuaggaauuguguuuauaau

SEQ ID NO: 1378989 - RNA, 17 nt, Human
gcuauuauuuucacugu

SEQ ID NO: 1378990 - RNA, 21 nt, Human
gcuauuauuuucacuguagaa

SEQ ID NO: 1378991 - RNA, 18 nt, Human
gcuauuauuuucacugua

SEQ ID NO: 1378992 - RNA, 23 nt, Human
gcucaaagguuuggaaggagcag

SEQ ID NO: 1378993 - RNA, 22 nt, Human
gcucaaagguuuggaaggagca

SEQ ID NO: 1378994 - RNA, 23 nt, Human
gcucaaacaaugacaaagcagau

SEQ ID NO: 1378995 - RNA, 22 nt, Human
gcucaaacaaugacaaagcaga

SEQ ID NO: 1378996 - RNA, 21 nt, Human
gcucaaacaaugacaaagcag

SEQ ID NO: 1378997 - RNA, 20 nt, Human
gcucaaacaaugacaaagca

SEQ ID NO: 1378998 - RNA, 18 nt, Human
gcuauguuuuuaauguau

SEQ ID NO: 1378999 - RNA, 16 nt, Human
gcuauguuuuuaaugu

SEQ ID NO: 1379000 - RNA, 18 nt, Human
gcuaggguggggagagac

SEQ ID NO: 1379001 - RNA, 17 nt, Human
gcuaggguggggagaga

SEQ ID NO: 1379002 - RNA, 22 nt, Human
gcuaguuauacuuauuuguaua

SEQ ID NO: 1379003 - RNA, 21 nt, Human
gcuaguaauuggaaaggcagc

SEQ ID NO: 1379004 - RNA, 15 nt, Human
gcuaagguucuaagg

SEQ ID NO: 1379005 - RNA, 14 nt, Human
gcuaagguucuaag

SEQ ID NO: 1379006 - RNA, 16 nt, Human
gcuaagggguggggcu

SEQ ID NO: 1379007 - RNA, 15 nt, Human
gcuaagggguggggc

SEQ ID NO: 1379008 - RNA, 17 nt, Human
gcuaagguucuaaggcc

SEQ ID NO: 1379009 - RNA, 16 nt, Human
gcuaagguucuaaggc

SEQ ID NO: 1379010 - RNA, 20 nt, Human
gcuaaguacacaauaagcaa

SEQ ID NO: 1379011 - RNA, 21 nt, Human
gcuaaguacacaauaagcaaa

SEQ ID NO: 1379012 - RNA, 22 nt, Human
gcuaaguacacaauaagcaaaa

SEQ ID NO: 1379013 - RNA, 19 nt, Human
gcucagaggguguccugca

SEQ ID NO: 1379014 - RNA, 18 nt, Human
gcucagaggguguccugc

SEQ ID NO: 1379015 - RNA, 22 nt, Human
gcucaggagcccugggaggcuc

SEQ ID NO: 1379016 - RNA, 23 nt, Human
gcucaggagcccugggaggcucu

SEQ ID NO: 1379017 - RNA, 23 nt, Human
gcucaagcagcgaccgcccccuc

SEQ ID NO: 1379018 - RNA, 22 nt, Human
gcucaagcagcgaccgcccccu

SEQ ID NO: 1379019 - RNA, 21 nt, Human
gcucaagcagcgaccgccccc

SEQ ID NO: 1379020 - RNA, 15 nt, Human
gcucaagcagcgacc

SEQ ID NO: 1379021 - RNA, 23 nt, Human
gcucaacucucuuauugccucac

SEQ ID NO: 1379022 - RNA, 23 nt, Human
gcucacuucugggcuucaucugg

SEQ ID NO: 1379023 - RNA, 15 nt, Human
gcucacuucugggcu

SEQ ID NO: 1379024 - RNA, 18 nt, Human
gcucagaaguuucuucuu

SEQ ID NO: 1379025 - RNA, 17 nt, Human
gcucagaaaauaucccu

SEQ ID NO: 1379026 - RNA, 21 nt, Human
gcucagaggcgcacugugacc

SEQ ID NO: 1379027 - RNA, 20 nt, Human
gcucagaggcgcacugugac

SEQ ID NO: 1379028 - RNA, 19 nt, Human
gcucagaggcgcacuguga

SEQ ID NO: 1379029 - RNA, 18 nt, Human
gcucagaggcgcacugug

SEQ ID NO: 1379030 - RNA, 16 nt, Human
gcucagagcaguguuu

SEQ ID NO: 1379031 - RNA, 16 nt, Human
gcucaggggcccugga

SEQ ID NO: 1379032 - RNA, 17 nt, Human
gcucaggggcccuggag

SEQ ID NO: 1379033 - RNA, 18 nt, Human
gcucaggggcccuggagc

SEQ ID NO: 1379034 - RNA, 19 nt, Human
gcucaggggcccuggagca

SEQ ID NO: 1379035 - RNA, 20 nt, Human
gcccuuauuuucaagaaacu

SEQ ID NO: 1379036 - RNA, 18 nt, Human
gcccuuauuuucaagaaa

SEQ ID NO: 1379037 - RNA, 17 nt, Human
gcccuuauuuucaagaa

SEQ ID NO: 1379038 - RNA, 19 nt, Human
gcccuuaugacugccaaga

SEQ ID NO: 1379039 - RNA, 22 nt, Human
gcccugccuggaggaccugagc

SEQ ID NO: 1379040 - RNA, 18 nt, Human
gcccugcgguagauggga

SEQ ID NO: 1379041 - RNA, 23 nt, Human
gcccugccuggaggaccugagcc

SEQ ID NO: 1379042 - RNA, 21 nt, Human
gcccugccuggaggaccugag

SEQ ID NO: 1379043 - RNA, 20 nt, Human
gcccugccuggaggaccuga

SEQ ID NO: 1379044 - RNA, 19 nt, Human
gcccugccuggaggaccug

SEQ ID NO: 1379045 - RNA, 18 nt, Human
gcccugccuggaggaccu

SEQ ID NO: 1379046 - RNA, 16 nt, Human
gcccugccuggaggac

SEQ ID NO: 1379047 - RNA, 15 nt, Human
gcccugccuggagga

SEQ ID NO: 1379048 - RNA, 14 nt, Human
gcccugccuggagg

SEQ ID NO: 1379049 - RNA, 13 nt, Human
gcccugccuggag

SEQ ID NO: 1379050 - RNA, 12 nt, Human
gcccugccugga

SEQ ID NO: 1379051 - RNA, 11 nt, Human
gcccugccugg

SEQ ID NO: 1379052 - RNA, 18 nt, Human
gcccugccaccugucugu

SEQ ID NO: 1379053 - RNA, 15 nt, Human
gcccuuccaaacucu

SEQ ID NO: 1379054 - RNA, 21 nt, Human
gccggcacagggucugcucuu

SEQ ID NO: 1379055 - RNA, 13 nt, Human
gccggcacagggu

SEQ ID NO: 1379056 - RNA, 15 nt, Human
gccggaucugaggga

SEQ ID NO: 1379057 - RNA, 17 nt, Human
gccggaucugagggaga

SEQ ID NO: 1379058 - RNA, 14 nt, Human
gcccgucucagugu

SEQ ID NO: 1379059 - RNA, 13 nt, Human
gcccgucucagug

SEQ ID NO: 1379060 - RNA, 18 nt, Human
gcccguccugccuguggc

SEQ ID NO: 1379061 - RNA, 17 nt, Human
gcccguccugccugugg

SEQ ID NO: 1379062 - RNA, 16 nt, Human
gcccguccugccugug

SEQ ID NO: 1379063 - RNA, 15 nt, Human
gcccguccugccugu

SEQ ID NO: 1379064 - RNA, 13 nt, Human
gcccccugccccc

SEQ ID NO: 1379065 - RNA, 23 nt, Human
gcccccugcaggaaggagcugcc

SEQ ID NO: 1379066 - RNA, 21 nt, Human
gcccugccacucacuaggccc

SEQ ID NO: 1379067 - RNA, 20 nt, Human
gcccugccacucacuaggcc

SEQ ID NO: 1379068 - RNA, 19 nt, Human
gcccugccacucacuaggc

SEQ ID NO: 1379069 - RNA, 13 nt, Human
gcccugccacuca

SEQ ID NO: 1379070 - RNA, 12 nt, Human
gcccugccacuc

SEQ ID NO: 1379071 - RNA, 11 nt, Human
gcccugccacu

SEQ ID NO: 1379072 - RNA, 20 nt, Human
gcccugccaccugucugucu

SEQ ID NO: 1379073 - RNA, 14 nt, Human
gccucauguggcug

SEQ ID NO: 1379074 - RNA, 13 nt, Human
gccucauguggcu

SEQ ID NO: 1379075 - RNA, 19 nt, Human
gccucaugucaaauauuua

SEQ ID NO: 1379076 - RNA, 17 nt, Human
gccucauguggcuggaa

SEQ ID NO: 1379077 - RNA, 16 nt, Human
gccucauguggcugga

SEQ ID NO: 1379078 - RNA, 15 nt, Human
gccucauguggcugg

SEQ ID NO: 1379079 - RNA, 16 nt, Human
gccucgaaacacagaa

SEQ ID NO: 1379080 - RNA, 23 nt, Human
gccuagaccagcagacagagcca

SEQ ID NO: 1379081 - RNA, 22 nt, Human
gccuagaccagcagacagagcc

SEQ ID NO: 1379082 - RNA, 16 nt, Human
gccuagaccagcagac

SEQ ID NO: 1379083 - RNA, 14 nt, Human
gccuagaccagcag

SEQ ID NO: 1379084 - RNA, 20 nt, Human
gccuagaaacaacacuguag

SEQ ID NO: 1379085 - RNA, 18 nt, Human
gccuagaaacaacacugu

SEQ ID NO: 1379086 - RNA, 16 nt, Human
gccuagaaacaacacu

SEQ ID NO: 1379087 - RNA, 12 nt, Human
gccuagaaacaa

SEQ ID NO: 1379088 - RNA, 21 nt, Human
gccuacagaacuucagaaaga

SEQ ID NO: 1379089 - RNA, 20 nt, Human
gccuacagaacuucagaaag

SEQ ID NO: 1379090 - RNA, 12 nt, Human
gccuagcauacg

SEQ ID NO: 1379091 - RNA, 19 nt, Human
gccuagcauacguacacau

SEQ ID NO: 1379092 - RNA, 23 nt, Human
gcccaggccaggacucugcagcc

SEQ ID NO: 1379093 - RNA, 24 nt, Human
gcccaggccaggacucugcagccu

SEQ ID NO: 1379094 - RNA, 22 nt, Human
gcccaggccaggacucugcagc

SEQ ID NO: 1379095 - RNA, 21 nt, Human
gcccaggccaggacucugcag

SEQ ID NO: 1379096 - RNA, 20 nt, Human
gcccaggccaggacucugca

SEQ ID NO: 1379097 - RNA, 19 nt, Human
gcccaggccaggacucugc

SEQ ID NO: 1379098 - RNA, 16 nt, Human
gcccaggccaggacuc

SEQ ID NO: 1379099 - RNA, 15 nt, Human
gcccaggccaggacu

SEQ ID NO: 1379100 - RNA, 11 nt, Human
gcccaggccag

SEQ ID NO: 1379101 - RNA, 16 nt, Human
gcccaggcacugcaaa

SEQ ID NO: 1379102 - RNA, 13 nt, Human
gcccaggacccca

SEQ ID NO: 1379103 - RNA, 21 nt, Human
gcccaggaccccauggcagug

SEQ ID NO: 1379104 - RNA, 21 nt, Human
gcccaggaagucucaucuggg

SEQ ID NO: 1379105 - RNA, 15 nt, Human
gcccaggcacugcaa

SEQ ID NO: 1379106 - RNA, 15 nt, Human
gcccaggauggcuuu

SEQ ID NO: 1379107 - RNA, 20 nt, Human
gcccaggaagucucaucugg

SEQ ID NO: 1379108 - RNA, 18 nt, Human
gcccaggaagucucaucu

SEQ ID NO: 1379109 - RNA, 11 nt, Human
gcccaggaagu

SEQ ID NO: 1379110 - RNA, 16 nt, Human
gcccacugugccucag

SEQ ID NO: 1379111 - RNA, 24 nt, Human
gcccacuguccugggccugcagaa

SEQ ID NO: 1379112 - RNA, 23 nt, Human
gcccacuguccugggccugcaga

SEQ ID NO: 1379113 - RNA, 21 nt, Human
gcccacuguccugggccugca

SEQ ID NO: 1379114 - RNA, 18 nt, Human
gcccacuguccugggccu

SEQ ID NO: 1379115 - RNA, 17 nt, Human
gcccacuguccugggcc

SEQ ID NO: 1379116 - RNA, 19 nt, Human
gcccacuuacauuuacaaa

SEQ ID NO: 1379117 - RNA, 23 nt, Human
gcccacugugccucagagaccag

SEQ ID NO: 1379118 - RNA, 22 nt, Human
gcccacugugccucagagacca

SEQ ID NO: 1379119 - RNA, 20 nt, Human
gcccacugugccucagagac

SEQ ID NO: 1379120 - RNA, 20 nt, Human
gccauuggcuauuuaaaacu

SEQ ID NO: 1379121 - RNA, 15 nt, Human
gcccacuguacuugc

SEQ ID NO: 1379122 - RNA, 20 nt, Human
gcccacuguacuugcucuug

SEQ ID NO: 1379123 - RNA, 15 nt, Human
gcccacuguccuggg

SEQ ID NO: 1379124 - RNA, 22 nt, Human
gcccacuguacuugcucuugau

SEQ ID NO: 1379125 - RNA, 12 nt, Human
gccauucuuucc

SEQ ID NO: 1379126 - RNA, 19 nt, Human
gccauucuuucccaacacc

SEQ ID NO: 1379127 - RNA, 12 nt, Human
gcauuuagaugu

SEQ ID NO: 1379128 - RNA, 13 nt, Human
gcauuuagaugua

SEQ ID NO: 1379129 - RNA, 14 nt, Human
gccauuaacaaaug

SEQ ID NO: 1379130 - RNA, 11 nt, Human
gcccccagagc

SEQ ID NO: 1379131 - RNA, 21 nt, Human
gcccccacuugccucuuccuu

SEQ ID NO: 1379132 - RNA, 17 nt, Human
gcccccacuugccucuu

SEQ ID NO: 1379133 - RNA, 16 nt, Human
gcccccacuugccucu

SEQ ID NO: 1379134 - RNA, 14 nt, Human
gcccccacuugccu

SEQ ID NO: 1379135 - RNA, 22 nt, Human
gccccaacccguggaggcugcu

SEQ ID NO: 1379136 - RNA, 23 nt, Human
gccccaacccguggaggcugcuc

SEQ ID NO: 1379137 - RNA, 21 nt, Human
gccccaacccguggaggcugc

SEQ ID NO: 1379138 - RNA, 19 nt, Human
gccccaacccguggaggcu

SEQ ID NO: 1379139 - RNA, 17 nt, Human
gccccaacccguggagg

SEQ ID NO: 1379140 - RNA, 15 nt, Human
gccccaacccgugga

SEQ ID NO: 1379141 - RNA, 15 nt, Human
gcccccagcuaagaa

SEQ ID NO: 1379142 - RNA, 22 nt, Human
gcccccagccugucagauccag

SEQ ID NO: 1379143 - RNA, 21 nt, Human
gcccccagccugucagaucca

SEQ ID NO: 1379144 - RNA, 16 nt, Human
gcccccagccugucag

SEQ ID NO: 1379145 - RNA, 14 nt, Human
gcccccagccuguc

SEQ ID NO: 1379146 - RNA, 13 nt, Human
gcccccagccugu

SEQ ID NO: 1379147 - RNA, 12 nt, Human
gcccccagccug

SEQ ID NO: 1379148 - RNA, 18 nt, Human
gcccccagcccccuccug

SEQ ID NO: 1379149 - RNA, 15 nt, Human
gcccccagcccccuc

SEQ ID NO: 1379150 - RNA, 18 nt, Human
gcccccagagcccaggcu

SEQ ID NO: 1379151 - RNA, 22 nt, Human
gcccccagcccagggcuccugc

SEQ ID NO: 1379152 - RNA, 21 nt, Human
gcccccagcccagggcuccug

SEQ ID NO: 1379153 - RNA, 18 nt, Human
gcccccagcccagggcuc

SEQ ID NO: 1379154 - RNA, 17 nt, Human
gcccccagcccagggcu

SEQ ID NO: 1379155 - RNA, 19 nt, Human
gcccccagagcccaggcuc

SEQ ID NO: 1379156 - RNA, 17 nt, Human
gcccccagagcccaggc

SEQ ID NO: 1379157 - RNA, 16 nt, Human
gcccccagagcccagg

SEQ ID NO: 1379158 - RNA, 13 nt, Human
gcccccagagccc

SEQ ID NO: 1379159 - RNA, 23 nt, Human
gcccccagcuaagaaccuggaac

SEQ ID NO: 1379160 - RNA, 22 nt, Human
gcccccagcuaagaaccuggaa

SEQ ID NO: 1379161 - RNA, 21 nt, Human
gcccccagcuaagaaccugga

SEQ ID NO: 1379162 - RNA, 13 nt, Human
gcccccugcagga

SEQ ID NO: 1379163 - RNA, 12 nt, Human
gcccccugcagg

SEQ ID NO: 1379164 - RNA, 12 nt, Human
gcccccugcaga

SEQ ID NO: 1379165 - RNA, 11 nt, Human
gcccccugcag

SEQ ID NO: 1379166 - RNA, 20 nt, Human
gcccccugaccacucagaga

SEQ ID NO: 1379167 - RNA, 19 nt, Human
gcccccugaccacucagag

SEQ ID NO: 1379168 - RNA, 18 nt, Human
gcccccugaccacucaga

SEQ ID NO: 1379169 - RNA, 17 nt, Human
gcccccugaccacucag

SEQ ID NO: 1379170 - RNA, 24 nt, Human
gcccccugcaggaaggagcugccu

SEQ ID NO: 1379171 - RNA, 22 nt, Human
gcccccugcaggaaggagcugc

SEQ ID NO: 1379172 - RNA, 21 nt, Human
gcccccugcaggaaggagcug

SEQ ID NO: 1379173 - RNA, 20 nt, Human
gcccccugcaggaaggagcu

SEQ ID NO: 1379174 - RNA, 18 nt, Human
gcccccugcaggaaggag

SEQ ID NO: 1379175 - RNA, 16 nt, Human
gcccccugcaggaagg

SEQ ID NO: 1379176 - RNA, 15 nt, Human
gcccccugcaggaag

SEQ ID NO: 1379177 - RNA, 17 nt, Human
gaauaugaaacauagau

SEQ ID NO: 1379178 - RNA, 14 nt, Human
gaauaugaaacaua

SEQ ID NO: 1379179 - RNA, 17 nt, Human
gaauaucuguaauggua

SEQ ID NO: 1379180 - RNA, 15 nt, Human
gaauaucuguaaugg

SEQ ID NO: 1379181 - RNA, 16 nt, Human
gaauauccaugaccua

SEQ ID NO: 1379182 - RNA, 22 nt, Human
gaauaucuccgucaacucauau

SEQ ID NO: 1379183 - RNA, 11 nt, Human
gaauaugccuu

SEQ ID NO: 1379184 - RNA, 15 nt, Human
gaauauauaaccagu

SEQ ID NO: 1379185 - RNA, 19 nt, Human
gaauauugccauuaugcuu

SEQ ID NO: 1379186 - RNA, 21 nt, Human
gacacagaaaauguugagaau

SEQ ID NO: 1379187 - RNA, 19 nt, Human
gacacagaaaauguugaga

SEQ ID NO: 1379188 - RNA, 18 nt, Human
gacaaauagaaaaugguc

SEQ ID NO: 1379189 - RNA, 17 nt, Human
gacaaauagaaaauggu

SEQ ID NO: 1379190 - RNA, 18 nt, Human
gacaaagguuuuccucuu

SEQ ID NO: 1379191 - RNA, 20 nt, Human
gaauuauucaauuuauuuga

SEQ ID NO: 1379192 - RNA, 23 nt, Human
gaauuaggcuguaacuacuuuau

SEQ ID NO: 1379193 - RNA, 19 nt, Human
gaauuaggcuguaacuacu

SEQ ID NO: 1379194 - RNA, 18 nt, Human
gaauuaggcuguaacuac

SEQ ID NO: 1379195 - RNA, 17 nt, Human
gaauuaggcuguaacua

SEQ ID NO: 1379196 - RNA, 16 nt, Human
gaauuaggcuguaacu

SEQ ID NO: 1379197 - RNA, 15 nt, Human
gaauuaggcuguaac

SEQ ID NO: 1379198 - RNA, 12 nt, Human
gaauuauuuugu

SEQ ID NO: 1379199 - RNA, 16 nt, Human
gaauuauucaauuuau

SEQ ID NO: 1379200 - RNA, 19 nt, Human
gaauuauuacaguguuuau

SEQ ID NO: 1379201 - RNA, 13 nt, Human
gacaaaggcaagc

SEQ ID NO: 1379202 - RNA, 18 nt, Human
gacaaaggagccugugaa

SEQ ID NO: 1379203 - RNA, 17 nt, Human
gacaaaggagccuguga

SEQ ID NO: 1379204 - RNA, 16 nt, Human
gacaaaggagccugug

SEQ ID NO: 1379205 - RNA, 15 nt, Human
gacaaaggagccugu

SEQ ID NO: 1379206 - RNA, 14 nt, Human
gacaaaggagccug

SEQ ID NO: 1379207 - RNA, 13 nt, Human
gacaaaggagccu

SEQ ID NO: 1379208 - RNA, 15 nt, Human
gacaaacuuugcauc

SEQ ID NO: 1379209 - RNA, 13 nt, Human
gacaaagaaccuu

SEQ ID NO: 1379210 - RNA, 18 nt, Human
gacaaaaaauuaaagcau

SEQ ID NO: 1379211 - RNA, 22 nt, Human
gaauuuuuuuuuccuagcccuc

SEQ ID NO: 1379212 - RNA, 21 nt, Human
gaauuuuuuuuaacauuccuc

SEQ ID NO: 1379213 - RNA, 20 nt, Human
gaauuuuuuuuaacauuccu

SEQ ID NO: 1379214 - RNA, 19 nt, Human
gaauuuuuuuuaacauucc

SEQ ID NO: 1379215 - RNA, 17 nt, Human
gaauuuuuuuuaacauu

SEQ ID NO: 1379216 - RNA, 16 nt, Human
gaauuuuuuuuaacau

SEQ ID NO: 1379217 - RNA, 15 nt, Human
gaauuuuuuuuaaca

SEQ ID NO: 1379218 - RNA, 16 nt, Human
gaauuauuuuuuuucu

SEQ ID NO: 1379219 - RNA, 22 nt, Human
gacaaacaccucccaggagaca

SEQ ID NO: 1379220 - RNA, 19 nt, Human
gacaaacaccucccaggag

SEQ ID NO: 1379221 - RNA, 14 nt, Human
gacaaaaagcuacu

SEQ ID NO: 1379222 - RNA, 20 nt, Human
gaauuaaauaaacccuuccu

SEQ ID NO: 1379223 - RNA, 12 nt, Human
gaauuaaauaaa

SEQ ID NO: 1379224 - RNA, 22 nt, Human
gaauuaaaguggaccaauaggg

SEQ ID NO: 1379225 - RNA, 14 nt, Human
gaauuaaaguacuu

SEQ ID NO: 1379226 - RNA, 20 nt, Human
gaauuaaacuuuuaauucau

SEQ ID NO: 1379227 - RNA, 13 nt, Human
gaauuaaacuuuu

SEQ ID NO: 1379228 - RNA, 14 nt, Human
gaauguuuuucuaa

SEQ ID NO: 1379229 - RNA, 18 nt, Human
gaaugauuuuucuuuaca

SEQ ID NO: 1379230 - RNA, 16 nt, Human
gaaugauuuuucuuua

SEQ ID NO: 1379231 - RNA, 14 nt, Human
gaaugauuuuucuu

SEQ ID NO: 1379232 - RNA, 20 nt, Human
gaauuacauuuguauaaaau

SEQ ID NO: 1379233 - RNA, 15 nt, Human
gaauuacgugcucug

SEQ ID NO: 1379234 - RNA, 19 nt, Human
gaauuacgugcucuguggg

SEQ ID NO: 1379235 - RNA, 18 nt, Human
gaauuacauuuguauaaa

SEQ ID NO: 1379236 - RNA, 15 nt, Human
gaauuacauuuguau

SEQ ID NO: 1379237 - RNA, 21 nt, Human
gaauuaauaucccuacaugua

SEQ ID NO: 1379238 - RNA, 22 nt, Human
gaauuaauaucccuacauguau

SEQ ID NO: 1379239 - RNA, 13 nt, Human
gaauuacauuugu

SEQ ID NO: 1379240 - RNA, 14 nt, Human
gaaugauuucaugc

SEQ ID NO: 1379241 - RNA, 15 nt, Human
gaaugauucaguguu

SEQ ID NO: 1379242 - RNA, 22 nt, Human
gaaugauuaugaauuacauuug

SEQ ID NO: 1379243 - RNA, 16 nt, Human
gaaugaguugaggcca

SEQ ID NO: 1379244 - RNA, 14 nt, Human
gaaugauuaugaau

SEQ ID NO: 1379245 - RNA, 17 nt, Human
gacccggcacccccugc

SEQ ID NO: 1379246 - RNA, 11 nt, Human
gaccccugcau

SEQ ID NO: 1379247 - RNA, 19 nt, Human
gacccggcacccccugcag

SEQ ID NO: 1379248 - RNA, 17 nt, Human
gacccugaccagcuccc

SEQ ID NO: 1379249 - RNA, 16 nt, Human
gacccugaaggggcca

SEQ ID NO: 1379250 - RNA, 20 nt, Human
gacccugagcugaccagccg

SEQ ID NO: 1379251 - RNA, 16 nt, Human
gacccugagcugacca

SEQ ID NO: 1379252 - RNA, 23 nt, Human
gacccugaccagcucccccuccc

SEQ ID NO: 1379253 - RNA, 18 nt, Human
gacccugaccagcucccc

SEQ ID NO: 1379254 - RNA, 12 nt, Human
gacgccuggggg

SEQ ID NO: 1379255 - RNA, 16 nt, Human
gacgccuggcugcuga

SEQ ID NO: 1379256 - RNA, 15 nt, Human
gacgccuggcugcug

SEQ ID NO: 1379257 - RNA, 14 nt, Human
gacgccuggcugcu

SEQ ID NO: 1379258 - RNA, 14 nt, Human
gacgccugaggaac

SEQ ID NO: 1379259 - RNA, 13 nt, Human
gacgccugaggaa

SEQ ID NO: 1379260 - RNA, 14 nt, Human
gacgccaggguaug

SEQ ID NO: 1379261 - RNA, 19 nt, Human
gaccuccagcuuuccugua

SEQ ID NO: 1379262 - RNA, 18 nt, Human
gaccuccagcuuuccugu

SEQ ID NO: 1379263 - RNA, 16 nt, Human
gaccuccagcuuuccu

SEQ ID NO: 1379264 - RNA, 14 nt, Human
gaccuccagcuguu

SEQ ID NO: 1379265 - RNA, 21 nt, Human
gaccucaguuuuaucauuuuc

SEQ ID NO: 1379266 - RNA, 20 nt, Human
gaccucaguuuuaucauuuu

SEQ ID NO: 1379267 - RNA, 16 nt, Human
gaccucugcagcaaua

SEQ ID NO: 1379268 - RNA, 17 nt, Human
gaccuccuaacaaguag

SEQ ID NO: 1379269 - RNA, 18 nt, Human
gaccucugcagcaauaaa

SEQ ID NO: 1379270 - RNA, 22 nt, Human
gaccucugcagcaauaaagcag

SEQ ID NO: 1379271 - RNA, 16 nt, Human
gacacugguuugaaga

SEQ ID NO: 1379272 - RNA, 14 nt, Human
gacacuggugggga

SEQ ID NO: 1379273 - RNA, 15 nt, Human
gacacuggccccuca

SEQ ID NO: 1379274 - RNA, 14 nt, Human
gacacuggccccuc

SEQ ID NO: 1379275 - RNA, 13 nt, Human
gacacuggccccu

SEQ ID NO: 1379276 - RNA, 12 nt, Human
gacacuggcaug

SEQ ID NO: 1379277 - RNA, 13 nt, Human
gacacugcuggag

SEQ ID NO: 1379278 - RNA, 21 nt, Human
gacacugcucuaacagcccuc

SEQ ID NO: 1379279 - RNA, 20 nt, Human
gacacugcucuaacagcccu

SEQ ID NO: 1379280 - RNA, 14 nt, Human
gacacugcucuaac

SEQ ID NO: 1379281 - RNA, 23 nt, Human
gacacuuuaauuaccaaccuguu

SEQ ID NO: 1379282 - RNA, 15 nt, Human
gacagccccacccug

SEQ ID NO: 1379283 - RNA, 14 nt, Human
gacagccccacccu

SEQ ID NO: 1379284 - RNA, 17 nt, Human
gacauguggggccaggu

SEQ ID NO: 1379285 - RNA, 20 nt, Human
gacaugugacauuuauauau

SEQ ID NO: 1379286 - RNA, 16 nt, Human
gacaugugacauuuau

SEQ ID NO: 1379287 - RNA, 12 nt, Human
gacaugugacau

SEQ ID NO: 1379288 - RNA, 21 nt, Human
gacaguccgucaaaacagauu

SEQ ID NO: 1379289 - RNA, 18 nt, Human
gacagucaccucauggaa

SEQ ID NO: 1379290 - RNA, 21 nt, Human
gacauugcguuugaccuuuua

SEQ ID NO: 1379291 - RNA, 14 nt, Human
gacauugcguuuga

SEQ ID NO: 1379292 - RNA, 23 nt, Human
gacauuggcaccuaauccaggca

SEQ ID NO: 1379293 - RNA, 23 nt, Human
gacauuugggagacaugugacau

SEQ ID NO: 1379294 - RNA, 22 nt, Human
gacauuugggagacaugugaca

SEQ ID NO: 1379295 - RNA, 20 nt, Human
gacauuuuaaaaaaugguca

SEQ ID NO: 1379296 - RNA, 13 nt, Human
gacauuuuacauu

SEQ ID NO: 1379297 - RNA, 14 nt, Human
gacauuuuacauua

SEQ ID NO: 1379298 - RNA, 15 nt, Human
gacauuuuacauuaa

SEQ ID NO: 1379299 - RNA, 21 nt, Human
gacauuuuacauuaaauuuuu

SEQ ID NO: 1379300 - RNA, 19 nt, Human
gaggcauggucugcccucu

SEQ ID NO: 1379301 - RNA, 21 nt, Human
gaggcauuuguuugaacugau

SEQ ID NO: 1379302 - RNA, 19 nt, Human
gaggcauuuguuugaacug

SEQ ID NO: 1379303 - RNA, 11 nt, Human
gaggggagggg

SEQ ID NO: 1379304 - RNA, 17 nt, Human
gaggggaccaggagugg

SEQ ID NO: 1379305 - RNA, 21 nt, Human
gaggggaccaggagugggugg

SEQ ID NO: 1379306 - RNA, 22 nt, Human
gagggccucaaaggcccgcucu

SEQ ID NO: 1379307 - RNA, 13 nt, Human
gaggggcagagcc

SEQ ID NO: 1379308 - RNA, 20 nt, Human
gaggggcagagccaggaaga

SEQ ID NO: 1379309 - RNA, 16 nt, Human
gaggggcagagccagg

SEQ ID NO: 1379310 - RNA, 18 nt, Human
gaggagauucugccuuug

SEQ ID NO: 1379311 - RNA, 17 nt, Human
gaggagaugcuccuugg

SEQ ID NO: 1379312 - RNA, 20 nt, Human
gaggagcagcaggagggggg

SEQ ID NO: 1379313 - RNA, 21 nt, Human
gaggagcagcaggagggggga

SEQ ID NO: 1379314 - RNA, 16 nt, Human
gaggagcagcaggagg

SEQ ID NO: 1379315 - RNA, 15 nt, Human
gaggagcagcaggag

SEQ ID NO: 1379316 - RNA, 22 nt, Human
gaggacuugugucucugugcuu

SEQ ID NO: 1379317 - RNA, 18 nt, Human
gaggacuugugucucugu

SEQ ID NO: 1379318 - RNA, 21 nt, Human
gaggacuguagggagggcggc

SEQ ID NO: 1379319 - RNA, 20 nt, Human
gaggacuguagggagggcgg

SEQ ID NO: 1379320 - RNA, 15 nt, Human
gaggacccagggcuc

SEQ ID NO: 1379321 - RNA, 14 nt, Human
gaggacccagggcu

SEQ ID NO: 1379322 - RNA, 20 nt, Human
gaggacccaggaaaggcagg

SEQ ID NO: 1379323 - RNA, 17 nt, Human
gaggacuugugucucug

SEQ ID NO: 1379324 - RNA, 16 nt, Human
gaggacuugugucucu

SEQ ID NO: 1379325 - RNA, 14 nt, Human
gaggacuugugucu

SEQ ID NO: 1379326 - RNA, 16 nt, Human
gaggacccagggcucu

SEQ ID NO: 1379327 - RNA, 12 nt, Human
gaggacccagga

SEQ ID NO: 1379328 - RNA, 11 nt, Human
gaggacccagg

SEQ ID NO: 1379329 - RNA, 14 nt, Human
gaggacccaggaca

SEQ ID NO: 1379330 - RNA, 15 nt, Human
gaggacccaggacag

SEQ ID NO: 1379331 - RNA, 20 nt, Human
gagcccagggaggccgaagc

SEQ ID NO: 1379332 - RNA, 14 nt, Human
gagcaugagaggag

SEQ ID NO: 1379333 - RNA, 17 nt, Human
gagcaugagaggaggca

SEQ ID NO: 1379334 - RNA, 23 nt, Human
gagcaugagaggaggcagcagga

SEQ ID NO: 1379335 - RNA, 17 nt, Human
gagcccagggaggccga

SEQ ID NO: 1379336 - RNA, 16 nt, Human
gagcaguccuuggccu

SEQ ID NO: 1379337 - RNA, 14 nt, Human
gagcaguccuuggc

SEQ ID NO: 1379338 - RNA, 13 nt, Human
gagcaguccuugg

SEQ ID NO: 1379339 - RNA, 14 nt, Human
gagcagucaggaaa

SEQ ID NO: 1379340 - RNA, 12 nt, Human
gagccccuccua

SEQ ID NO: 1379341 - RNA, 17 nt, Human
gagccccacccucagau

SEQ ID NO: 1379342 - RNA, 16 nt, Human
gagccccacccucaga

SEQ ID NO: 1379343 - RNA, 21 nt, Human
gagccccuucugcucagcucu

SEQ ID NO: 1379344 - RNA, 20 nt, Human
gagccccuucugcucagcuc

SEQ ID NO: 1379345 - RNA, 17 nt, Human
gagccccuucugcucag

SEQ ID NO: 1379346 - RNA, 22 nt, Human
gagccccuucugcucagcucug

SEQ ID NO: 1379347 - RNA, 12 nt, Human
gagcccugggag

SEQ ID NO: 1379348 - RNA, 16 nt, Human
gagcccugggaggcuc

SEQ ID NO: 1379349 - RNA, 18 nt, Human
gagcccugggaggcucug

SEQ ID NO: 1379350 - RNA, 19 nt, Human
gagcccugggaggcucugg

SEQ ID NO: 1379351 - RNA, 20 nt, Human
gagcccugggaggcucugga

SEQ ID NO: 1379352 - RNA, 12 nt, Human
gagcuggcucug

SEQ ID NO: 1379353 - RNA, 12 nt, Human
gagcccugggac

SEQ ID NO: 1379354 - RNA, 22 nt, Human
gagcuggagaugaggccagacc

SEQ ID NO: 1379355 - RNA, 23 nt, Human
gagcuggagaugaggccagacca

SEQ ID NO: 1379356 - RNA, 21 nt, Human
gagcuggagaugaggccagac

SEQ ID NO: 1379357 - RNA, 17 nt, Human
gagcuguuuacuaggga

SEQ ID NO: 1379358 - RNA, 22 nt, Human
gagaaucuauauuuaacaagau

SEQ ID NO: 1379359 - RNA, 15 nt, Human
gagaaucuauauuua

SEQ ID NO: 1379360 - RNA, 21 nt, Human
gagaaucuacccccagaucca

SEQ ID NO: 1379361 - RNA, 20 nt, Human
gagaauaaauugauuuuuau

SEQ ID NO: 1379362 - RNA, 16 nt, Human
gagaaguuguaaagua

SEQ ID NO: 1379363 - RNA, 19 nt, Human
gagaccggccugccaggag

SEQ ID NO: 1379364 - RNA, 18 nt, Human
gagaccggccugccagga

SEQ ID NO: 1379365 - RNA, 17 nt, Human
gagaccggccugccagg

SEQ ID NO: 1379366 - RNA, 15 nt, Human
gagaccggccugcca

SEQ ID NO: 1379367 - RNA, 20 nt, Human
gagaccggccugccaggagg

SEQ ID NO: 1379368 - RNA, 21 nt, Human
gagaccggccugccaggagga

SEQ ID NO: 1379369 - RNA, 23 nt, Human
gagacgggacugcggaggaagga

SEQ ID NO: 1379370 - RNA, 17 nt, Human
gagaagugugccuucuc

SEQ ID NO: 1379371 - RNA, 16 nt, Human
gagaaguauacauaag

SEQ ID NO: 1379372 - RNA, 22 nt, Human
gagaaggauaggccuucauuaa

SEQ ID NO: 1379373 - RNA, 13 nt, Human
gagaaggagcaga

SEQ ID NO: 1379374 - RNA, 16 nt, Human
gacuuuuugcauuuaa

SEQ ID NO: 1379375 - RNA, 19 nt, Human
gacuuuuuuuuuuuauaau

SEQ ID NO: 1379376 - RNA, 22 nt, Human
gacuuuuuauggcacuaguauu

SEQ ID NO: 1379377 - RNA, 19 nt, Human
gagacuccagaccugaggc

SEQ ID NO: 1379378 - RNA, 16 nt, Human
gagacgggcccuggug

SEQ ID NO: 1379379 - RNA, 19 nt, Human
gagagcuaggagcaaagcc

SEQ ID NO: 1379380 - RNA, 22 nt, Human
gagagcuaggagcaaagccugu

SEQ ID NO: 1379381 - RNA, 14 nt, Human
gagagcuaggagca

SEQ ID NO: 1379382 - RNA, 13 nt, Human
gagagcuaggagc

SEQ ID NO: 1379383 - RNA, 14 nt, Human
gagagggaauguga

SEQ ID NO: 1379384 - RNA, 15 nt, Human
gagagggaaugugaa

SEQ ID NO: 1379385 - RNA, 21 nt, Human
gagaggcccuggaucagcgug

SEQ ID NO: 1379386 - RNA, 18 nt, Human
gagaggccuuuuggaaug

SEQ ID NO: 1379387 - RNA, 15 nt, Human
gagaggccuuuugga

SEQ ID NO: 1379388 - RNA, 24 nt, Human
gagaggcccuggaucagcguggcc

SEQ ID NO: 1379389 - RNA, 13 nt, Human
gagaggcccugga

SEQ ID NO: 1379390 - RNA, 12 nt, Human
gagaggcccugg

SEQ ID NO: 1379391 - RNA, 17 nt, Human
gagaggaggcagcagga

SEQ ID NO: 1379392 - RNA, 20 nt, Human
gagaggacuguagggagggc

SEQ ID NO: 1379393 - RNA, 17 nt, Human
gagaggacaagaugggu

SEQ ID NO: 1379394 - RNA, 22 nt, Human
gagauguguguugauacuguug

SEQ ID NO: 1379395 - RNA, 23 nt, Human
gagauguguguugauacuguugc

SEQ ID NO: 1379396 - RNA, 21 nt, Human
gagauguguguugauacuguu

SEQ ID NO: 1379397 - RNA, 18 nt, Human
gagauguguguugauacu

SEQ ID NO: 1379398 - RNA, 17 nt, Human
gagauguguguugauac

SEQ ID NO: 1379399 - RNA, 17 nt, Human
gagauucaguuuucauu

SEQ ID NO: 1379400 - RNA, 14 nt, Human
gagauucagacugu

SEQ ID NO: 1379401 - RNA, 14 nt, Human
gagauuacaggcau

SEQ ID NO: 1379402 - RNA, 15 nt, Human
gagauuaccuccuga

SEQ ID NO: 1379403 - RNA, 14 nt, Human
gagaugccucccug

SEQ ID NO: 1379404 - RNA, 16 nt, Human
gagaugucuuggaaca

SEQ ID NO: 1379405 - RNA, 15 nt, Human
gagaugucuuggaac

SEQ ID NO: 1379406 - RNA, 15 nt, Human
gagaugccucccuga

SEQ ID NO: 1379407 - RNA, 22 nt, Human
gcagccacacuucucaggacac

SEQ ID NO: 1379408 - RNA, 21 nt, Human
gcagccacacuucucaggaca

SEQ ID NO: 1379409 - RNA, 20 nt, Human
gcagccacacuucucaggac

SEQ ID NO: 1379410 - RNA, 19 nt, Human
gcagccacacuucucagga

SEQ ID NO: 1379411 - RNA, 18 nt, Human
gcagccacacuucucagg

SEQ ID NO: 1379412 - RNA, 20 nt, Human
gcagcaucucuaccuucucc

SEQ ID NO: 1379413 - RNA, 22 nt, Human
gcagcaucucuaccuucucccc

SEQ ID NO: 1379414 - RNA, 14 nt, Human
gcagcaucucuacc

SEQ ID NO: 1379415 - RNA, 23 nt, Human
gcagcaucggacaagacccccag

SEQ ID NO: 1379416 - RNA, 23 nt, Human
gcagcagugugaggccagggcag

SEQ ID NO: 1379417 - RNA, 22 nt, Human
gcagcagugugaggccagggca

SEQ ID NO: 1379418 - RNA, 21 nt, Human
gcagcagugugaggccagggc

SEQ ID NO: 1379419 - RNA, 20 nt, Human
gcagcagugugaggccaggg

SEQ ID NO: 1379420 - RNA, 19 nt, Human
gcagcagugugaggccagg

SEQ ID NO: 1379421 - RNA, 15 nt, Human
gcagcagugugaggc

SEQ ID NO: 1379422 - RNA, 24 nt, Human
gcagagggcuggaggcccaggcug

SEQ ID NO: 1379423 - RNA, 23 nt, Human
gcagagggcuggaggcccaggcu

SEQ ID NO: 1379424 - RNA, 21 nt, Human
gcagagggcuggaggcccagg

SEQ ID NO: 1379425 - RNA, 20 nt, Human
gcagagggcuggaggcccag

SEQ ID NO: 1379426 - RNA, 19 nt, Human
gcagagggcuggaggccca

SEQ ID NO: 1379427 - RNA, 18 nt, Human
gcagagggcuggaggccc

SEQ ID NO: 1379428 - RNA, 17 nt, Human
gcagagggcuggaggcc

SEQ ID NO: 1379429 - RNA, 22 nt, Human
gcagaggccugggcugggaaaa

SEQ ID NO: 1379430 - RNA, 20 nt, Human
gcagaggccugggcugggaa

SEQ ID NO: 1379431 - RNA, 17 nt, Human
gcagaggccugggcugg

SEQ ID NO: 1379432 - RNA, 14 nt, Human
gcagaggccugggc

SEQ ID NO: 1379433 - RNA, 20 nt, Human
gcagaggcccaggcugccgu

SEQ ID NO: 1379434 - RNA, 21 nt, Human
gcagaggcccacauuggaaga

SEQ ID NO: 1379435 - RNA, 14 nt, Human
gcagaggcccacau

SEQ ID NO: 1379436 - RNA, 15 nt, Human
gcagaggccagaggc

SEQ ID NO: 1379437 - RNA, 16 nt, Human
gcagagggcuggaggc

SEQ ID NO: 1379438 - RNA, 14 nt, Human
gcagagggcuggag

SEQ ID NO: 1379439 - RNA, 13 nt, Human
gcagagggcugga

SEQ ID NO: 1379440 - RNA, 12 nt, Human
gcagagggcugg

SEQ ID NO: 1379441 - RNA, 12 nt, Human
gcagaggccaga

SEQ ID NO: 1379442 - RNA, 21 nt, Human
gcagaggcaguaccugggcaa

SEQ ID NO: 1379443 - RNA, 18 nt, Human
gcagaggcaguaccuggg

SEQ ID NO: 1379444 - RNA, 14 nt, Human
gcagagcuggugcg

SEQ ID NO: 1379445 - RNA, 21 nt, Human
gcagagcuggugcggcuggcc

SEQ ID NO: 1379446 - RNA, 21 nt, Human
gcagagcugauggagaaggaa

SEQ ID NO: 1379447 - RNA, 22 nt, Human
gcagagcugauggagaaggaag

SEQ ID NO: 1379448 - RNA, 13 nt, Human
gcagagcuggugc

SEQ ID NO: 1379449 - RNA, 12 nt, Human
gcagagcuggug

SEQ ID NO: 1379450 - RNA, 23 nt, Human
gcagagcuggcucugagcgccuc

SEQ ID NO: 1379451 - RNA, 17 nt, Human
gcagagcuggcucugag

SEQ ID NO: 1379452 - RNA, 15 nt, Human
gcagagcuggcucug

SEQ ID NO: 1379453 - RNA, 14 nt, Human
gcagagcuggcucu

SEQ ID NO: 1379454 - RNA, 13 nt, Human
gcagagcuggcuc

SEQ ID NO: 1379455 - RNA, 12 nt, Human
gcagagcuggcu

SEQ ID NO: 1379456 - RNA, 23 nt, Human
gcagagcugauggagaaggaagg

SEQ ID NO: 1379457 - RNA, 20 nt, Human
gcagaaccggagagccagcu

SEQ ID NO: 1379458 - RNA, 19 nt, Human
gcagaaccggagagccagc

SEQ ID NO: 1379459 - RNA, 19 nt, Human
gcagaaagcaucccucacc

SEQ ID NO: 1379460 - RNA, 17 nt, Human
gcagaaaauucugugcc

SEQ ID NO: 1379461 - RNA, 21 nt, Human
gcagaaaacccuugggccaga

SEQ ID NO: 1379462 - RNA, 22 nt, Human
gcagaaaacccuugggccagaa

SEQ ID NO: 1379463 - RNA, 17 nt, Human
gcagaaaacccuugggc

SEQ ID NO: 1379464 - RNA, 16 nt, Human
gcagaaaacccuuggg

SEQ ID NO: 1379465 - RNA, 20 nt, Human
gcagccagggagagcccagg

SEQ ID NO: 1379466 - RNA, 19 nt, Human
gcagccagggagagcccag

SEQ ID NO: 1379467 - RNA, 18 nt, Human
gcagccagggagagccca

SEQ ID NO: 1379468 - RNA, 17 nt, Human
gcagccagggagagccc

SEQ ID NO: 1379469 - RNA, 16 nt, Human
gcagccagggagagcc

SEQ ID NO: 1379470 - RNA, 15 nt, Human
gcagccagggagagc

SEQ ID NO: 1379471 - RNA, 14 nt, Human
gcagccagggagag

SEQ ID NO: 1379472 - RNA, 12 nt, Human
gcagccagggag

SEQ ID NO: 1379473 - RNA, 21 nt, Human
gcagccagcccugccuggagg

SEQ ID NO: 1379474 - RNA, 22 nt, Human
gcagccagcccugccuggagga

SEQ ID NO: 1379475 - RNA, 20 nt, Human
gcagccagcccugccuggag

SEQ ID NO: 1379476 - RNA, 19 nt, Human
gcagccagcccugccugga

SEQ ID NO: 1379477 - RNA, 18 nt, Human
gcagccagcccugccugg

SEQ ID NO: 1379478 - RNA, 17 nt, Human
gcagccagcccugccug

SEQ ID NO: 1379479 - RNA, 16 nt, Human
gcagccagcccugccu

SEQ ID NO: 1379480 - RNA, 15 nt, Human
gcagccagcccugcc

SEQ ID NO: 1379481 - RNA, 14 nt, Human
gcagccagcccugc

SEQ ID NO: 1379482 - RNA, 13 nt, Human
gcagccagcccug

SEQ ID NO: 1379483 - RNA, 17 nt, Human
gcagccagcaucugggc

SEQ ID NO: 1379484 - RNA, 11 nt, Human
gcagccagccc

SEQ ID NO: 1379485 - RNA, 19 nt, Human
gcagccagcaucugggccu

SEQ ID NO: 1379486 - RNA, 19 nt, Human
gcagccagugcccugagcc

SEQ ID NO: 1379487 - RNA, 18 nt, Human
gcagccagugcccugagc

SEQ ID NO: 1379488 - RNA, 17 nt, Human
gcagccagugcccugag

SEQ ID NO: 1379489 - RNA, 16 nt, Human
gcagccagugcccuga

SEQ ID NO: 1379490 - RNA, 21 nt, Human
gcagccagggagagcccagga

SEQ ID NO: 1379491 - RNA, 16 nt, Human
gcagcuccucugucuc

SEQ ID NO: 1379492 - RNA, 15 nt, Human
gcagcucuccccuuc

SEQ ID NO: 1379493 - RNA, 20 nt, Human
gcagcuccucugucucgagc

SEQ ID NO: 1379494 - RNA, 13 nt, Human
gcagcuccucugu

SEQ ID NO: 1379495 - RNA, 15 nt, Human
gcagcugagcagggc

SEQ ID NO: 1379496 - RNA, 14 nt, Human
gcagcugagcaggg

SEQ ID NO: 1379497 - RNA, 12 nt, Human
gcagcugagcag

SEQ ID NO: 1379498 - RNA, 20 nt, Human
gcagcucuggacagccccac

SEQ ID NO: 1379499 - RNA, 21 nt, Human
gcagcugccaggagcacggcu

SEQ ID NO: 1379500 - RNA, 20 nt, Human
gcagcugagcagggccgggg

SEQ ID NO: 1379501 - RNA, 21 nt, Human
gcagcugagcagggccgggga

SEQ ID NO: 1379502 - RNA, 19 nt, Human
gcagcugagcagggccggg

SEQ ID NO: 1379503 - RNA, 18 nt, Human
gcagcugagcagggccgg

SEQ ID NO: 1379504 - RNA, 17 nt, Human
gcagcugagcagggccg

SEQ ID NO: 1379505 - RNA, 16 nt, Human
gcagcugagcagggcc

SEQ ID NO: 1379506 - RNA, 19 nt, Human
gcagucgugccugugucca

SEQ ID NO: 1379507 - RNA, 18 nt, Human
gcagucgugccugugucc

SEQ ID NO: 1379508 - RNA, 17 nt, Human
gcagucgugccuguguc

SEQ ID NO: 1379509 - RNA, 16 nt, Human
gcagucgugccugugu

SEQ ID NO: 1379510 - RNA, 17 nt, Human
gcagcugccaggagcac

SEQ ID NO: 1379511 - RNA, 17 nt, Human
gcagucucuauaccaau

SEQ ID NO: 1379512 - RNA, 20 nt, Human
gcagugaaugauucaguguu

SEQ ID NO: 1379513 - RNA, 18 nt, Human
gcagucucuauaccaaua

SEQ ID NO: 1379514 - RNA, 20 nt, Human
gcagucucuauaccaauaaa

SEQ ID NO: 1379515 - RNA, 21 nt, Human
gcagucucuauaccaauaaag

SEQ ID NO: 1379516 - RNA, 22 nt, Human
gcagucucuauaccaauaaagu

SEQ ID NO: 1379517 - RNA, 23 nt, Human
gcagucucuauaccaauaaagug

SEQ ID NO: 1379518 - RNA, 16 nt, Human
gcaguugucucuguuu

SEQ ID NO: 1379519 - RNA, 15 nt, Human
gcaguugucucuguu

SEQ ID NO: 1379520 - RNA, 14 nt, Human
gcaguugucucugu

SEQ ID NO: 1379521 - RNA, 13 nt, Human
gcaguugucucug

SEQ ID NO: 1379522 - RNA, 15 nt, Human
gcauacguacacauu

SEQ ID NO: 1379523 - RNA, 16 nt, Human
gcauacguacacauuu

SEQ ID NO: 1379524 - RNA, 17 nt, Human
gcauacguacacauuuu

SEQ ID NO: 1379525 - RNA, 22 nt, Human
gcaguuguugcccacagcugua

SEQ ID NO: 1379526 - RNA, 15 nt, Human
gcaguuuaucauuca

SEQ ID NO: 1379527 - RNA, 14 nt, Human
gcaguuuaucauuc

SEQ ID NO: 1379528 - RNA, 18 nt, Human
gcaguuuauauuuaacuc

SEQ ID NO: 1379529 - RNA, 15 nt, Human
gcaguuuauauuuaa

SEQ ID NO: 1379530 - RNA, 18 nt, Human
gcauacguacacauuuua

SEQ ID NO: 1379531 - RNA, 22 nt, Human
gcauuuaaccccccuguacaca

SEQ ID NO: 1379532 - RNA, 21 nt, Human
gcauuuaaccccccuguacac

SEQ ID NO: 1379533 - RNA, 20 nt, Human
gcauuuaaccccccuguaca

SEQ ID NO: 1379534 - RNA, 18 nt, Human
gcauuuaaaagauacagu

SEQ ID NO: 1379535 - RNA, 22 nt, Human
gcauuuaaaagauacaguuacu

SEQ ID NO: 1379536 - RNA, 16 nt, Human
gcauuuaaaagauaca

SEQ ID NO: 1379537 - RNA, 17 nt, Human
gcauuuaaaagauacag

SEQ ID NO: 1379538 - RNA, 17 nt, Human
gcaugguuucagcacua

SEQ ID NO: 1379539 - RNA, 16 nt, Human
gcaugguuucagcacu

SEQ ID NO: 1379540 - RNA, 14 nt, Human
gcaugguuucagca

SEQ ID NO: 1379541 - RNA, 13 nt, Human
gcaugguuucagc

SEQ ID NO: 1379542 - RNA, 20 nt, Human
gcaugguguucuccugcugc

SEQ ID NO: 1379543 - RNA, 18 nt, Human
gcaugguguucuccugcu

SEQ ID NO: 1379544 - RNA, 17 nt, Human
gcaugguguucuccugc

SEQ ID NO: 1379545 - RNA, 21 nt, Human
gcauguaacgcaaguucccag

SEQ ID NO: 1379546 - RNA, 17 nt, Human
gcauguaacgcaaguuc

SEQ ID NO: 1379547 - RNA, 16 nt, Human
gcaugguguucuccug

SEQ ID NO: 1379548 - RNA, 15 nt, Human
gcaugguguucuccu

SEQ ID NO: 1379549 - RNA, 23 nt, Human
gcauggugccccaggaccagcuc

SEQ ID NO: 1379550 - RNA, 21 nt, Human
gcauggugccccaggaccagc

SEQ ID NO: 1379551 - RNA, 20 nt, Human
gcauggugccccaggaccag

SEQ ID NO: 1379552 - RNA, 19 nt, Human
gcauggugccccaggacca

SEQ ID NO: 1379553 - RNA, 18 nt, Human
gcauggugccccaggacc

SEQ ID NO: 1379554 - RNA, 17 nt, Human
gcauggugccccaggac

SEQ ID NO: 1379555 - RNA, 16 nt, Human
gcauggugccccagga

SEQ ID NO: 1379556 - RNA, 15 nt, Human
gcauggugccccagg

SEQ ID NO: 1379557 - RNA, 23 nt, Human
gcauggucccacaucccugggcc

SEQ ID NO: 1379558 - RNA, 21 nt, Human
gcauggucccacaucccuggg

SEQ ID NO: 1379559 - RNA, 20 nt, Human
gcauggucccacaucccugg

SEQ ID NO: 1379560 - RNA, 19 nt, Human
gcauggucccacaucccug

SEQ ID NO: 1379561 - RNA, 18 nt, Human
gcauggucacacacugau

SEQ ID NO: 1379562 - RNA, 15 nt, Human
gcauggucacacacu

SEQ ID NO: 1379563 - RNA, 17 nt, Human
gcaucggggagccggga

SEQ ID NO: 1379564 - RNA, 20 nt, Human
gcauccucuggagccagccg

SEQ ID NO: 1379565 - RNA, 18 nt, Human
gcauccucuggagccagc

SEQ ID NO: 1379566 - RNA, 16 nt, Human
gcauccucuggagcca

SEQ ID NO: 1379567 - RNA, 14 nt, Human
gcauccucuggagc

SEQ ID NO: 1379568 - RNA, 17 nt, Human
gcauccuccagccccug

SEQ ID NO: 1379569 - RNA, 15 nt, Human
gcauccuccagcccc

SEQ ID NO: 1379570 - RNA, 14 nt, Human
gcauccuccagccc

SEQ ID NO: 1379571 - RNA, 15 nt, Human
gcauggcuauuuuau

SEQ ID NO: 1379572 - RNA, 23 nt, Human
gcaucuagaggcuuccuucauuu

SEQ ID NO: 1379573 - RNA, 22 nt, Human
gcaucuagaggcuuccuucauu

SEQ ID NO: 1379574 - RNA, 21 nt, Human
gcaucuagaggcuuccuucau

SEQ ID NO: 1379575 - RNA, 22 nt, Human
gcaucuaaguuauaagacucuc

SEQ ID NO: 1379576 - RNA, 19 nt, Human
gcaucuaaguuauaagacu

SEQ ID NO: 1379577 - RNA, 23 nt, Human
gcaucgucaugcacaguauuugu

SEQ ID NO: 1379578 - RNA, 20 nt, Human
gcaucuagcaugucgucaaa

SEQ ID NO: 1379579 - RNA, 21 nt, Human
gcauccagagucccugccugg

SEQ ID NO: 1379580 - RNA, 23 nt, Human
gcauccagagucccugccuggac

SEQ ID NO: 1379581 - RNA, 22 nt, Human
gcauccagagucccugccugga

SEQ ID NO: 1379582 - RNA, 19 nt, Human
gcauccauucuccugagga

SEQ ID NO: 1379583 - RNA, 11 nt, Human
gcauccagccu

SEQ ID NO: 1379584 - RNA, 13 nt, Human
gcauccuccagcc

SEQ ID NO: 1379585 - RNA, 12 nt, Human
gcauccuccagc

SEQ ID NO: 1379586 - RNA, 18 nt, Human
gcauccuccacaauagca

SEQ ID NO: 1379587 - RNA, 18 nt, Human
gcauccgcaggugcuggu

SEQ ID NO: 1379588 - RNA, 20 nt, Human
gcauccgcaggugcuggucc

SEQ ID NO: 1379589 - RNA, 17 nt, Human
gcauccgcaggugcugg

SEQ ID NO: 1379590 - RNA, 16 nt, Human
gcauccgcaggugcug

SEQ ID NO: 1379591 - RNA, 15 nt, Human
gcauccgcaggugcu

SEQ ID NO: 1379592 - RNA, 19 nt, Human
gcaucccugggccuugggc

SEQ ID NO: 1379593 - RNA, 20 nt, Human
gcaucccugggccuugggcu

SEQ ID NO: 1379594 - RNA, 18 nt, Human
gcaucccugggccuuggg

SEQ ID NO: 1379595 - RNA, 17 nt, Human
gcaucccugggccuugg

SEQ ID NO: 1379596 - RNA, 15 nt, Human
gcaucccugggccuu

SEQ ID NO: 1379597 - RNA, 12 nt, Human
gcaucccugggc

SEQ ID NO: 1379598 - RNA, 17 nt, Human
gcauccauucuccugag

SEQ ID NO: 1379599 - RNA, 16 nt, Human
gcauccauucuccuga

SEQ ID NO: 1379600 - RNA, 21 nt, Human
gcaucccucacccauccuaga

SEQ ID NO: 1379601 - RNA, 15 nt, Human
gauauuucuagcuua

SEQ ID NO: 1379602 - RNA, 22 nt, Human
gauauuugucaugcugggauuu

SEQ ID NO: 1379603 - RNA, 12 nt, Human
gauagaaugaca

SEQ ID NO: 1379604 - RNA, 19 nt, Human
gauagaaaugccaagcacu

SEQ ID NO: 1379605 - RNA, 14 nt, Human
gauagaaaugccaa

SEQ ID NO: 1379606 - RNA, 13 nt, Human
gauagaaaugcca

SEQ ID NO: 1379607 - RNA, 23 nt, Human
gauacuuggauuuaguuucagua

SEQ ID NO: 1379608 - RNA, 13 nt, Human
gauacuuggauuu

SEQ ID NO: 1379609 - RNA, 20 nt, Human
gauacuuggauuuaguuuca

SEQ ID NO: 1379610 - RNA, 17 nt, Human
gaucaaaggcacacagc

SEQ ID NO: 1379611 - RNA, 18 nt, Human
gaucaaagaugaaaagua

SEQ ID NO: 1379612 - RNA, 15 nt, Human
gaucaaagaugaaaa

SEQ ID NO: 1379613 - RNA, 12 nt, Human
gaucaaagauga

SEQ ID NO: 1379614 - RNA, 16 nt, Human
gaucaaaaacuauuug

SEQ ID NO: 1379615 - RNA, 14 nt, Human
gauauuuucucuag

SEQ ID NO: 1379616 - RNA, 21 nt, Human
gauauuuucugugccugaaua

SEQ ID NO: 1379617 - RNA, 15 nt, Human
gauauuuucugugcc

SEQ ID NO: 1379618 - RNA, 15 nt, Human
gauauuuugcuuugu

SEQ ID NO: 1379619 - RNA, 20 nt, Human
gauccaacuaaugccuuacu

SEQ ID NO: 1379620 - RNA, 19 nt, Human
gauccaacuaaugccuuac

SEQ ID NO: 1379621 - RNA, 23 nt, Human
gauccaaaagaagcccccagcua

SEQ ID NO: 1379622 - RNA, 22 nt, Human
gauccaaaagaagcccccagcu

SEQ ID NO: 1379623 - RNA, 20 nt, Human
gauccaaaagaagcccccag

SEQ ID NO: 1379624 - RNA, 19 nt, Human
gauccaaaagaagccccca

SEQ ID NO: 1379625 - RNA, 16 nt, Human
gauccaaaagaagccc

SEQ ID NO: 1379626 - RNA, 13 nt, Human
gauccaaaagaag

SEQ ID NO: 1379627 - RNA, 22 nt, Human
gauccaagcuaagcacugccac

SEQ ID NO: 1379628 - RNA, 17 nt, Human
gauccaagcuaagcacu

SEQ ID NO: 1379629 - RNA, 15 nt, Human
gauccaagcuaagca

SEQ ID NO: 1379630 - RNA, 12 nt, Human
gauccacccgcc

SEQ ID NO: 1379631 - RNA, 13 nt, Human
gauaccagcugga

SEQ ID NO: 1379632 - RNA, 22 nt, Human
gauaccagcgaggaggcuccag

SEQ ID NO: 1379633 - RNA, 15 nt, Human
gauaccagcgaggag

SEQ ID NO: 1379634 - RNA, 23 nt, Human
gauacauccaaagcagacagcuc

SEQ ID NO: 1379635 - RNA, 21 nt, Human
gauacauccaaagcagacagc

SEQ ID NO: 1379636 - RNA, 20 nt, Human
gauacauccaaagcagacag

SEQ ID NO: 1379637 - RNA, 17 nt, Human
gauacauccaaagcaga

SEQ ID NO: 1379638 - RNA, 14 nt, Human
gauacauacagaau

SEQ ID NO: 1379639 - RNA, 16 nt, Human
gauacaguuacucaga

SEQ ID NO: 1379640 - RNA, 19 nt, Human
gauacaguuacucagaauu

SEQ ID NO: 1379641 - RNA, 23 nt, Human
gauacaguuacucagaauucucu

SEQ ID NO: 1379642 - RNA, 21 nt, Human
gauacuguaucaugacaaaga

SEQ ID NO: 1379643 - RNA, 17 nt, Human
gauacuguaucaugaca

SEQ ID NO: 1379644 - RNA, 23 nt, Human
gauacugcgacuuucugccugga

SEQ ID NO: 1379645 - RNA, 21 nt, Human
gauacugcgacuuucugccug

SEQ ID NO: 1379646 - RNA, 20 nt, Human
gauacugcgacuuucugccu

SEQ ID NO: 1379647 - RNA, 19 nt, Human
gauacugcgacuuucugcc

SEQ ID NO: 1379648 - RNA, 18 nt, Human
gauacugcgacuuucugc

SEQ ID NO: 1379649 - RNA, 17 nt, Human
gauacugcgacuuucug

SEQ ID NO: 1379650 - RNA, 18 nt, Human
gauaccauauacagcuca

SEQ ID NO: 1379651 - RNA, 12 nt, Human
gauacugaaaua

SEQ ID NO: 1379652 - RNA, 19 nt, Human
gaucucugaagccacaaau

SEQ ID NO: 1379653 - RNA, 14 nt, Human
gaucucugaagcca

SEQ ID NO: 1379654 - RNA, 11 nt, Human
gaucucugaag

SEQ ID NO: 1379655 - RNA, 19 nt, Human
gaucugauaggguuuguga

SEQ ID NO: 1379656 - RNA, 17 nt, Human
gaucugagucagagcca

SEQ ID NO: 1379657 - RNA, 22 nt, Human
gaucugagucagagccaugucu

SEQ ID NO: 1379658 - RNA, 13 nt, Human
gaucugagggaga

SEQ ID NO: 1379659 - RNA, 15 nt, Human
gaucccaugagcucc

SEQ ID NO: 1379660 - RNA, 17 nt, Human
gaucccagagagcccga

SEQ ID NO: 1379661 - RNA, 21 nt, Human
gaucccagagagcccgaggag

SEQ ID NO: 1379662 - RNA, 21 nt, Human
gaucccaaguagaaucucagu

SEQ ID NO: 1379663 - RNA, 19 nt, Human
gaucccaacacugccagca

SEQ ID NO: 1379664 - RNA, 18 nt, Human
gaucccaacacugccagc

SEQ ID NO: 1379665 - RNA, 12 nt, Human
gauccagccugg

SEQ ID NO: 1379666 - RNA, 17 nt, Human
gaucccaacacugccag

SEQ ID NO: 1379667 - RNA, 18 nt, Human
gauccacucgccucagcc

SEQ ID NO: 1379668 - RNA, 21 nt, Human
gauccacccgccucagccucc

SEQ ID NO: 1379669 - RNA, 17 nt, Human
gaucuggaaccucagcc

SEQ ID NO: 1379670 - RNA, 16 nt, Human
gaucuggaaccucagc

SEQ ID NO: 1379671 - RNA, 12 nt, Human
gaucuggaaccu

SEQ ID NO: 1379672 - RNA, 20 nt, Human
gaucuggaacccagacucag

SEQ ID NO: 1379673 - RNA, 18 nt, Human
gaucuggaacccagacuc

SEQ ID NO: 1379674 - RNA, 17 nt, Human
gaucuggaacccagacu

SEQ ID NO: 1379675 - RNA, 16 nt, Human
gaucuggaacccagac

SEQ ID NO: 1379676 - RNA, 15 nt, Human
gaucuggaacccaga

SEQ ID NO: 1379677 - RNA, 21 nt, Human
gaucuggaaccucagccuggc

SEQ ID NO: 1379678 - RNA, 20 nt, Human
gaucuggaaccucagccugg

SEQ ID NO: 1379679 - RNA, 19 nt, Human
gaucuggaaccucagccug

SEQ ID NO: 1379680 - RNA, 18 nt, Human
gaucuggaaccucagccu

SEQ ID NO: 1379681 - RNA, 20 nt, Human
gaucugcagggggugugucu

SEQ ID NO: 1379682 - RNA, 23 nt, Human
gaucugauaggguuugugacagg

SEQ ID NO: 1379683 - RNA, 14 nt, Human
gaucuggaacccag

SEQ ID NO: 1379684 - RNA, 12 nt, Human
gaucuggaaccc

SEQ ID NO: 1379685 - RNA, 22 nt, Human
gaugaucaauuauaguuucuga

SEQ ID NO: 1379686 - RNA, 20 nt, Human
gaugaucaauuauaguuucu

SEQ ID NO: 1379687 - RNA, 13 nt, Human
gaugaucaauuau

SEQ ID NO: 1379688 - RNA, 19 nt, Human
gaugauacuaauaaacuaa

SEQ ID NO: 1379689 - RNA, 19 nt, Human
gaugauugacaacacccau

SEQ ID NO: 1379690 - RNA, 17 nt, Human
gauggaacacggccaca

SEQ ID NO: 1379691 - RNA, 17 nt, Human
gauggaaaauucauuuu

SEQ ID NO: 1379692 - RNA, 23 nt, Human
gaugauuucaguucuaggaaaau

SEQ ID NO: 1379693 - RNA, 22 nt, Human
gaugauuucaguucuaggaaaa

SEQ ID NO: 1379694 - RNA, 19 nt, Human
gaugauuucaguucuagga

SEQ ID NO: 1379695 - RNA, 16 nt, Human
gaugauuucaguucua

SEQ ID NO: 1379696 - RNA, 19 nt, Human
gauuuaaucugccaagggc

SEQ ID NO: 1379697 - RNA, 23 nt, Human
gauuuaauauaaaguuuuauaua

SEQ ID NO: 1379698 - RNA, 21 nt, Human
gauuuaauauaaaguuuuaua

SEQ ID NO: 1379699 - RNA, 19 nt, Human
gauuuaacagaaauguaca

SEQ ID NO: 1379700 - RNA, 16 nt, Human
gauuuaacagaaaugu

SEQ ID NO: 1379701 - RNA, 17 nt, Human
gauuuaacagaaaugua

SEQ ID NO: 1379702 - RNA, 18 nt, Human
gauuuaacagaaauguac

SEQ ID NO: 1379703 - RNA, 12 nt, Human
gauuuauuuaaa

SEQ ID NO: 1379704 - RNA, 21 nt, Human
gauuuauuaauauauauuauc

SEQ ID NO: 1379705 - RNA, 16 nt, Human
gauuuaauuugaaaua

SEQ ID NO: 1379706 - RNA, 18 nt, Human
gauuuauuuaaaauagca

SEQ ID NO: 1379707 - RNA, 18 nt, Human
gcaaaaaagaaaaccuuu

SEQ ID NO: 1379708 - RNA, 15 nt, Human
gcaaaaaagaaaacc

SEQ ID NO: 1379709 - RNA, 17 nt, Human
gcaaaaaagaaaaccuu

SEQ ID NO: 1379710 - RNA, 17 nt, Human
gcaaaaaauguuuuugg

SEQ ID NO: 1379711 - RNA, 15 nt, Human
gcaaaaacaaaaaga

SEQ ID NO: 1379712 - RNA, 19 nt, Human
gcaaaagcuuacaaauacu

SEQ ID NO: 1379713 - RNA, 23 nt, Human
gcaaaaauaguuuggauauguaa

SEQ ID NO: 1379714 - RNA, 20 nt, Human
gcaaaaacaaaaagaaaaga

SEQ ID NO: 1379715 - RNA, 21 nt, Human
gcaaaaacaaaaagaaaagaa

SEQ ID NO: 1379716 - RNA, 23 nt, Human
gcaaccucuuggccugaucagac

SEQ ID NO: 1379717 - RNA, 16 nt, Human
gcaaccucuuggccug

SEQ ID NO: 1379718 - RNA, 20 nt, Human
gcaaccaggaacagcaaaug

SEQ ID NO: 1379719 - RNA, 17 nt, Human
gcaaccaggaacagcaa

SEQ ID NO: 1379720 - RNA, 15 nt, Human
gcaaccaggaacagc

SEQ ID NO: 1379721 - RNA, 11 nt, Human
gcaaccaggaa

SEQ ID NO: 1379722 - RNA, 19 nt, Human
gcaaccccaggcugaagca

SEQ ID NO: 1379723 - RNA, 14 nt, Human
gcaaccauuugaaa

SEQ ID NO: 1379724 - RNA, 22 nt, Human
gcaacaugaugagguaguaccu

SEQ ID NO: 1379725 - RNA, 13 nt, Human
gcaacauggcuuu

SEQ ID NO: 1379726 - RNA, 16 nt, Human
gcaacaugaugaggua

SEQ ID NO: 1379727 - RNA, 14 nt, Human
gcaacaugaugagg

SEQ ID NO: 1379728 - RNA, 17 nt, Human
gcaacauccaaaauagu

SEQ ID NO: 1379729 - RNA, 13 nt, Human
gcaacauccaaaa

SEQ ID NO: 1379730 - RNA, 22 nt, Human
gcaacaggguauggacuaucug

SEQ ID NO: 1379731 - RNA, 15 nt, Human
gcaaaauaauuuuaa

SEQ ID NO: 1379732 - RNA, 13 nt, Human
gcaaaauaauuuu

SEQ ID NO: 1379733 - RNA, 20 nt, Human
gcaaaauaauuuuaaacaaa

SEQ ID NO: 1379734 - RNA, 23 nt, Human
gcaaaauuauagaaguuuagauu

SEQ ID NO: 1379735 - RNA, 18 nt, Human
gcaaaauuauagaaguuu

SEQ ID NO: 1379736 - RNA, 21 nt, Human
cugccugucccuaccccaugg

SEQ ID NO: 1379737 - RNA, 24 nt, Human
cugccugucccuaccccauggugc

SEQ ID NO: 1379738 - RNA, 17 nt, Human
cugccucucccaggcag

SEQ ID NO: 1379739 - RNA, 15 nt, Human
cugccucucccaggc

SEQ ID NO: 1379740 - RNA, 14 nt, Human
cugccucucccagg

SEQ ID NO: 1379741 - RNA, 13 nt, Human
cugccucucccag

SEQ ID NO: 1379742 - RNA, 22 nt, Human
cugccucucaucaacugaauga

SEQ ID NO: 1379743 - RNA, 22 nt, Human
cugccucuacugggaaggcuac

SEQ ID NO: 1379744 - RNA, 19 nt, Human
cugccucuacugggaaggc

SEQ ID NO: 1379745 - RNA, 18 nt, Human
cugccucuacugggaagg

SEQ ID NO: 1379746 - RNA, 17 nt, Human
cugccucuacugggaag

SEQ ID NO: 1379747 - RNA, 15 nt, Human
cugccucuacuggga

SEQ ID NO: 1379748 - RNA, 19 nt, Human
cugccucgaaacacagaaa

SEQ ID NO: 1379749 - RNA, 18 nt, Human
cugccucgaaacacagaa

SEQ ID NO: 1379750 - RNA, 15 nt, Human
cugccucgaaacaca

SEQ ID NO: 1379751 - RNA, 23 nt, Human
cugccuccugccggcuccuuggu

SEQ ID NO: 1379752 - RNA, 15 nt, Human
cugccuccugccggc

SEQ ID NO: 1379753 - RNA, 22 nt, Human
cugccuccugccggcuccuugg

SEQ ID NO: 1379754 - RNA, 23 nt, Human
cugcugagcucugagaggcccug

SEQ ID NO: 1379755 - RNA, 21 nt, Human
cugcugagcucugagaggccc

SEQ ID NO: 1379756 - RNA, 19 nt, Human
cugcugagcucugagaggc

SEQ ID NO: 1379757 - RNA, 18 nt, Human
cugcugagcucugagagg

SEQ ID NO: 1379758 - RNA, 17 nt, Human
cugcugagcucugagag

SEQ ID NO: 1379759 - RNA, 16 nt, Human
cugcugagcucugaga

SEQ ID NO: 1379760 - RNA, 15 nt, Human
cugcugagcucugag

SEQ ID NO: 1379761 - RNA, 14 nt, Human
cugcugagcucuga

SEQ ID NO: 1379762 - RNA, 13 nt, Human
cugcugagcucug

SEQ ID NO: 1379763 - RNA, 19 nt, Human
cugcugagauacauacaga

SEQ ID NO: 1379764 - RNA, 20 nt, Human
cugcugagauacauacagaa

SEQ ID NO: 1379765 - RNA, 20 nt, Human
cugcugagaaccuggccuuc

SEQ ID NO: 1379766 - RNA, 19 nt, Human
cugcugagaaccuggccuu

SEQ ID NO: 1379767 - RNA, 18 nt, Human
cugcugagaaccuggccu

SEQ ID NO: 1379768 - RNA, 17 nt, Human
cugcugagaaccuggcc

SEQ ID NO: 1379769 - RNA, 16 nt, Human
cugcugagaaccuggc

SEQ ID NO: 1379770 - RNA, 22 nt, Human
cugcugagcucugagaggcccu

SEQ ID NO: 1379771 - RNA, 15 nt, Human
cugcugagaaccugg

SEQ ID NO: 1379772 - RNA, 21 nt, Human
cugcuauuaggccagcaagcg

SEQ ID NO: 1379773 - RNA, 21 nt, Human
cugcuaugguuuucuccaaga

SEQ ID NO: 1379774 - RNA, 15 nt, Human
cugcuaucauuauuc

SEQ ID NO: 1379775 - RNA, 14 nt, Human
cugcuauuugaagu

SEQ ID NO: 1379776 - RNA, 18 nt, Human
cugcuauuaggccagcaa

SEQ ID NO: 1379777 - RNA, 21 nt, Human
cugcuacuuauauaauugcca

SEQ ID NO: 1379778 - RNA, 13 nt, Human
cugcuacuuauau

SEQ ID NO: 1379779 - RNA, 15 nt, Human
cugcuagaacauggu

SEQ ID NO: 1379780 - RNA, 18 nt, Human
cugcccugguggcccucu

SEQ ID NO: 1379781 - RNA, 17 nt, Human
cugcccugguggcccuc

SEQ ID NO: 1379782 - RNA, 13 nt, Human
cugcccccugcug

SEQ ID NO: 1379783 - RNA, 18 nt, Human
cugcccccugcugccaug

SEQ ID NO: 1379784 - RNA, 23 nt, Human
cugcccccugcaggaaggagcug

SEQ ID NO: 1379785 - RNA, 22 nt, Human
cugcccccugcaggaaggagcu

SEQ ID NO: 1379786 - RNA, 16 nt, Human
cugcccccugcaggaa

SEQ ID NO: 1379787 - RNA, 15 nt, Human
cugcccccugcagga

SEQ ID NO: 1379788 - RNA, 14 nt, Human
cugcccccugcagg

SEQ ID NO: 1379789 - RNA, 15 nt, Human
cugcccccugcagaa

SEQ ID NO: 1379790 - RNA, 14 nt, Human
cugcccccugcaga

SEQ ID NO: 1379791 - RNA, 13 nt, Human
cugcccccugcag

SEQ ID NO: 1379792 - RNA, 12 nt, Human
cugcccccugca

SEQ ID NO: 1379793 - RNA, 17 nt, Human
cuggaguuagggacuga

SEQ ID NO: 1379794 - RNA, 19 nt, Human
cuggaucagcguggccuug

SEQ ID NO: 1379795 - RNA, 16 nt, Human
cuggaguuagggacug

SEQ ID NO: 1379796 - RNA, 18 nt, Human
cuggaucagcguggccuu

SEQ ID NO: 1379797 - RNA, 19 nt, Human
cuggagaagacccuccccg

SEQ ID NO: 1379798 - RNA, 23 nt, Human
cuggagaaagggcccugggccug

SEQ ID NO: 1379799 - RNA, 13 nt, Human
cuggagaaagggc

SEQ ID NO: 1379800 - RNA, 23 nt, Human
cuggacucucagucucugagcag

SEQ ID NO: 1379801 - RNA, 23 nt, Human
cuggaaagcuuuucuauuuuaau

SEQ ID NO: 1379802 - RNA, 11 nt, Human
cuggaaagaag

SEQ ID NO: 1379803 - RNA, 17 nt, Human
cuggacucucagucucu

SEQ ID NO: 1379804 - RNA, 14 nt, Human
cuggacucucaguc

SEQ ID NO: 1379805 - RNA, 23 nt, Human
cuggacucuaaagucuguugauu

SEQ ID NO: 1379806 - RNA, 21 nt, Human
cuggacucucagucucugagc

SEQ ID NO: 1379807 - RNA, 20 nt, Human
cuggacucucagucucugag

SEQ ID NO: 1379808 - RNA, 19 nt, Human
cuggacucucagucucuga

SEQ ID NO: 1379809 - RNA, 18 nt, Human
cuggacucucagucucug

SEQ ID NO: 1379810 - RNA, 21 nt, Human
cugcuucaguguauggaaaua

SEQ ID NO: 1379811 - RNA, 19 nt, Human
cugcuucaguguauggaaa

SEQ ID NO: 1379812 - RNA, 24 nt, Human
cugcuuccaauuuucuggaauaca

SEQ ID NO: 1379813 - RNA, 19 nt, Human
cuggaaaacagaacacuua

SEQ ID NO: 1379814 - RNA, 18 nt, Human
cuggaaaacagaacacuu

SEQ ID NO: 1379815 - RNA, 17 nt, Human
cuggaaaacagaacacu

SEQ ID NO: 1379816 - RNA, 16 nt, Human
cuggaaaacagaacac

SEQ ID NO: 1379817 - RNA, 14 nt, Human
cuggaaaacagaac

SEQ ID NO: 1379818 - RNA, 23 nt, Human
cuggaaaaguauguuagugcaaa

SEQ ID NO: 1379819 - RNA, 23 nt, Human
cuggaaaauaauacugcugagau

SEQ ID NO: 1379820 - RNA, 20 nt, Human
cuggaaaauaauacugcuga

SEQ ID NO: 1379821 - RNA, 17 nt, Human
cuggaaaauaauacugc

SEQ ID NO: 1379822 - RNA, 17 nt, Human
cuggaaaccuuccaccc

SEQ ID NO: 1379823 - RNA, 20 nt, Human
cuggaaaccuuccacccagu

SEQ ID NO: 1379824 - RNA, 17 nt, Human
cuggccgccugggucca

SEQ ID NO: 1379825 - RNA, 22 nt, Human
cuggccgcccccugccccccag

SEQ ID NO: 1379826 - RNA, 14 nt, Human
cuggccgcccccug

SEQ ID NO: 1379827 - RNA, 13 nt, Human
cuggccgcccccu

SEQ ID NO: 1379828 - RNA, 21 nt, Human
cuggccgcccccagcccccuc

SEQ ID NO: 1379829 - RNA, 23 nt, Human
cuggccgaguccaagcugggaga

SEQ ID NO: 1379830 - RNA, 20 nt, Human
cuggccgaguccaagcuggg

SEQ ID NO: 1379831 - RNA, 18 nt, Human
cuggccgaguccaagcug

SEQ ID NO: 1379832 - RNA, 17 nt, Human
cuggccgaguccaagcu

SEQ ID NO: 1379833 - RNA, 14 nt, Human
cuggcccuauuuag

SEQ ID NO: 1379834 - RNA, 17 nt, Human
cugguuuucacauuaga

SEQ ID NO: 1379835 - RNA, 16 nt, Human
cuguagcacuuacugg

SEQ ID NO: 1379836 - RNA, 17 nt, Human
cuguagaguugcugaga

SEQ ID NO: 1379837 - RNA, 23 nt, Human
cuguagaguugcugagagggcuc

SEQ ID NO: 1379838 - RNA, 16 nt, Human
cuguagaguugcugag

SEQ ID NO: 1379839 - RNA, 15 nt, Human
cuguagaguugcuga

SEQ ID NO: 1379840 - RNA, 13 nt, Human
cuguagaguugcu

SEQ ID NO: 1379841 - RNA, 21 nt, Human
cuguacuugcucuugaugccu

SEQ ID NO: 1379842 - RNA, 16 nt, Human
cuguacuugcucuuga

SEQ ID NO: 1379843 - RNA, 19 nt, Human
cuguacuugcucuugaugc

SEQ ID NO: 1379844 - RNA, 20 nt, Human
cuguacuugcucuugaugcc

SEQ ID NO: 1379845 - RNA, 16 nt, Human
cuguaacaagccagau

SEQ ID NO: 1379846 - RNA, 18 nt, Human
cuguaaaucuacacacgg

SEQ ID NO: 1379847 - RNA, 14 nt, Human
cuguaaaucuacac

SEQ ID NO: 1379848 - RNA, 18 nt, Human
cuguaaagcuaaaauaaa

SEQ ID NO: 1379849 - RNA, 21 nt, Human
cuguaaauaaugugcacugaa

SEQ ID NO: 1379850 - RNA, 23 nt, Human
cuguaaagcuaaaauaaagaaau

SEQ ID NO: 1379851 - RNA, 22 nt, Human
cuguaaagauguuuauuucagg

SEQ ID NO: 1379852 - RNA, 21 nt, Human
cuguaaagauguuuauuucag

SEQ ID NO: 1379853 - RNA, 16 nt, Human
cuguaaagauguuuau

SEQ ID NO: 1379854 - RNA, 12 nt, Human
cuguaaagaugu

SEQ ID NO: 1379855 - RNA, 14 nt, Human
cuguaaagaguugc

SEQ ID NO: 1379856 - RNA, 22 nt, Human
cuguaagaaaccuacugcccag

SEQ ID NO: 1379857 - RNA, 21 nt, Human
cuguaagaaaccuacugccca

SEQ ID NO: 1379858 - RNA, 13 nt, Human
cuguaagaaaccu

SEQ ID NO: 1379859 - RNA, 23 nt, Human
cuguaacuugauccauuucuaau

SEQ ID NO: 1379860 - RNA, 22 nt, Human
cuguaacuugauccauuucuaa

SEQ ID NO: 1379861 - RNA, 20 nt, Human
cuguaagaaaauaucacuug

SEQ ID NO: 1379862 - RNA, 15 nt, Human
cugucaucugugcac

SEQ ID NO: 1379863 - RNA, 21 nt, Human
cugucaucugugcacugccca

SEQ ID NO: 1379864 - RNA, 14 nt, Human
cugucaucugugca

SEQ ID NO: 1379865 - RNA, 18 nt, Human
cugucagucacagccacc

SEQ ID NO: 1379866 - RNA, 22 nt, Human
cugucaugguguccagacagag

SEQ ID NO: 1379867 - RNA, 21 nt, Human
cuguagccccagugacagcua

SEQ ID NO: 1379868 - RNA, 20 nt, Human
cuguagccccagugacagcu

SEQ ID NO: 1379869 - RNA, 18 nt, Human
cuguagccccagugacag

SEQ ID NO: 1379870 - RNA, 17 nt, Human
cuguagccccagugaca

SEQ ID NO: 1379871 - RNA, 14 nt, Human
cuguaggaaaccca

SEQ ID NO: 1379872 - RNA, 17 nt, Human
cugucagucacagccac

SEQ ID NO: 1379873 - RNA, 15 nt, Human
cugucagucacagcc

SEQ ID NO: 1379874 - RNA, 14 nt, Human
cugucagucacagc

SEQ ID NO: 1379875 - RNA, 13 nt, Human
cugucagucacag

SEQ ID NO: 1379876 - RNA, 23 nt, Human
cugucaggauugcgagagaugug

SEQ ID NO: 1379877 - RNA, 24 nt, Human
cugucaggauugcgagagaugugu

SEQ ID NO: 1379878 - RNA, 22 nt, Human
cugucaggauugcgagagaugu

SEQ ID NO: 1379879 - RNA, 21 nt, Human
cugucaggauugcgagagaug

SEQ ID NO: 1379880 - RNA, 19 nt, Human
cugucaggauugcgagaga

SEQ ID NO: 1379881 - RNA, 17 nt, Human
cugucaggauugcgaga

SEQ ID NO: 1379882 - RNA, 15 nt, Human
cugucaggauugcga

SEQ ID NO: 1379883 - RNA, 14 nt, Human
cugucaggauugcg

SEQ ID NO: 1379884 - RNA, 23 nt, Human
cuguccuuucuagagcacugcca

SEQ ID NO: 1379885 - RNA, 22 nt, Human
cuguccuuucuagagcacugcc

SEQ ID NO: 1379886 - RNA, 21 nt, Human
cuguccuuucuagagcacugc

SEQ ID NO: 1379887 - RNA, 20 nt, Human
cuguccuuucuagagcacug

SEQ ID NO: 1379888 - RNA, 13 nt, Human
cuguccuuucuag

SEQ ID NO: 1379889 - RNA, 20 nt, Human
cuguccuugaaggacuaaua

SEQ ID NO: 1379890 - RNA, 14 nt, Human
cuguccugucauca

SEQ ID NO: 1379891 - RNA, 17 nt, Human
cuguccuugaaggacua

SEQ ID NO: 1379892 - RNA, 21 nt, Human
cuguccugucaucaucauggc

SEQ ID NO: 1379893 - RNA, 20 nt, Human
cuguccugucaucaucaugg

SEQ ID NO: 1379894 - RNA, 23 nt, Human
cuguccugucaucaucauggcca

SEQ ID NO: 1379895 - RNA, 15 nt, Human
cugucguuaaaaaca

SEQ ID NO: 1379896 - RNA, 20 nt, Human
cugucuacacuaagagagaa

SEQ ID NO: 1379897 - RNA, 14 nt, Human
cuggucucuccuug

SEQ ID NO: 1379898 - RNA, 24 nt, Human
cuggucucucuaugccucucuaca

SEQ ID NO: 1379899 - RNA, 23 nt, Human
cuggucucucuaugccucucuac

SEQ ID NO: 1379900 - RNA, 21 nt, Human
cuggucucucuaugccucucu

SEQ ID NO: 1379901 - RNA, 17 nt, Human
cuggucucucuaugccu

SEQ ID NO: 1379902 - RNA, 19 nt, Human
cuggucugcuguuccagug

SEQ ID NO: 1379903 - RNA, 14 nt, Human
cuggucuguaggga

SEQ ID NO: 1379904 - RNA, 15 nt, Human
cuguugcugaauagg

SEQ ID NO: 1379905 - RNA, 16 nt, Human
cuguugcugaauaggc

SEQ ID NO: 1379906 - RNA, 19 nt, Human
cuguuggcaggcuggccag

SEQ ID NO: 1379907 - RNA, 18 nt, Human
cuguuggcaggcuggcca

SEQ ID NO: 1379908 - RNA, 16 nt, Human
cuguuggcaggcuggc

SEQ ID NO: 1379909 - RNA, 15 nt, Human
cuguuggcaggcugg

SEQ ID NO: 1379910 - RNA, 12 nt, Human
cuguugcuaagc

SEQ ID NO: 1379911 - RNA, 21 nt, Human
cuguugcuaagccccagcaag

SEQ ID NO: 1379912 - RNA, 22 nt, Human
cuguugcuaagccccagcaagc

SEQ ID NO: 1379913 - RNA, 23 nt, Human
cuguugcuaagccccagcaagca

SEQ ID NO: 1379914 - RNA, 18 nt, Human
cuuaaaauacaagacugc

SEQ ID NO: 1379915 - RNA, 19 nt, Human
cuuaaaauacaagacugcc

SEQ ID NO: 1379916 - RNA, 16 nt, Human
cuuaaaauacaagacu

SEQ ID NO: 1379917 - RNA, 14 nt, Human
cuuaaaauacaaga

SEQ ID NO: 1379918 - RNA, 15 nt, Human
cuuaaacuaaaugug

SEQ ID NO: 1379919 - RNA, 14 nt, Human
cuuaaacuaaaugu

SEQ ID NO: 1379920 - RNA, 23 nt, Human
cuuaaaccuucaguuaugauuuu

SEQ ID NO: 1379921 - RNA, 15 nt, Human
cuuaaaccuucaguu

SEQ ID NO: 1379922 - RNA, 14 nt, Human
cuuaaauaauguga

SEQ ID NO: 1379923 - RNA, 16 nt, Human
cuuaaauaaugugaaa

SEQ ID NO: 1379924 - RNA, 19 nt, Human
cuuaaauaaugugaaacug

SEQ ID NO: 1379925 - RNA, 12 nt, Human
cuuaaaacuuug

SEQ ID NO: 1379926 - RNA, 12 nt, Human
cuuaaaacuccu

SEQ ID NO: 1379927 - RNA, 15 nt, Human
cuuaaaauaagcagg

SEQ ID NO: 1379928 - RNA, 14 nt, Human
cuuaaaauaagcag

SEQ ID NO: 1379929 - RNA, 13 nt, Human
cuuaaaauaagca

SEQ ID NO: 1379930 - RNA, 12 nt, Human
cuuaaaauaagc

SEQ ID NO: 1379931 - RNA, 13 nt, Human
cuuaaaauacaag

SEQ ID NO: 1379932 - RNA, 12 nt, Human
cuuaaaauacaa

SEQ ID NO: 1379933 - RNA, 22 nt, Human
cuuaaaauaaugaauacauuuc

SEQ ID NO: 1379934 - RNA, 19 nt, Human
cuguuaugcugugacacau

SEQ ID NO: 1379935 - RNA, 19 nt, Human
cuguuaucaaaacuuucuu

SEQ ID NO: 1379936 - RNA, 23 nt, Human
cuguuaucaaacaccaacauaaa

SEQ ID NO: 1379937 - RNA, 14 nt, Human
cuguuaugcuguga

SEQ ID NO: 1379938 - RNA, 15 nt, Human
cuguuagcagacagg

SEQ ID NO: 1379939 - RNA, 13 nt, Human
cuguuagcagaca

SEQ ID NO: 1379940 - RNA, 21 nt, Human
cuguguccaugcgcucagggc

SEQ ID NO: 1379941 - RNA, 19 nt, Human
cuguguccaugcgcucagg

SEQ ID NO: 1379942 - RNA, 18 nt, Human
cuguguccaugcgcucag

SEQ ID NO: 1379943 - RNA, 13 nt, Human
cuguguccaugcg

SEQ ID NO: 1379944 - RNA, 22 nt, Human
cuguguccaaaaccgccagcuc

SEQ ID NO: 1379945 - RNA, 21 nt, Human
cuguguccaaaaccgccagcu

SEQ ID NO: 1379946 - RNA, 23 nt, Human
cuguguccaugcgcucagggcca

SEQ ID NO: 1379947 - RNA, 22 nt, Human
cuguguccaugcgcucagggcc

SEQ ID NO: 1379948 - RNA, 16 nt, Human
cuguguauuugcuuuu

SEQ ID NO: 1379949 - RNA, 15 nt, Human
cuguguauuugcuuu

SEQ ID NO: 1379950 - RNA, 14 nt, Human
cuguguauuugcuu

SEQ ID NO: 1379951 - RNA, 19 nt, Human
cuguguauuccaagacaug

SEQ ID NO: 1379952 - RNA, 15 nt, Human
cuguguauuccaaga

SEQ ID NO: 1379953 - RNA, 22 nt, Human
cuguguagcugugaccugcuga

SEQ ID NO: 1379954 - RNA, 23 nt, Human
cuguguagcugugaccugcugag

SEQ ID NO: 1379955 - RNA, 20 nt, Human
cuguguagcugugaccugcu

SEQ ID NO: 1379956 - RNA, 19 nt, Human
cuguguagcugugaccugc

SEQ ID NO: 1379957 - RNA, 18 nt, Human
cuguguagcugugaccug

SEQ ID NO: 1379958 - RNA, 17 nt, Human
cuguguagcugugaccu

SEQ ID NO: 1379959 - RNA, 16 nt, Human
cuguguagcugugacc

SEQ ID NO: 1379960 - RNA, 15 nt, Human
cuguguagcugugac

SEQ ID NO: 1379961 - RNA, 14 nt, Human
cugugagcccagcu

SEQ ID NO: 1379962 - RNA, 13 nt, Human
cugugaauuaagc

SEQ ID NO: 1379963 - RNA, 21 nt, Human
cugugaaugccacugccuucg

SEQ ID NO: 1379964 - RNA, 20 nt, Human
cugugaaugccacugccuuc

SEQ ID NO: 1379965 - RNA, 16 nt, Human
cugugaaugccacugc

SEQ ID NO: 1379966 - RNA, 15 nt, Human
cugugaaugccacug

SEQ ID NO: 1379967 - RNA, 15 nt, Human
cugugagcccagcug

SEQ ID NO: 1379968 - RNA, 19 nt, Human
cuuacaugcauuacugcau

SEQ ID NO: 1379969 - RNA, 18 nt, Human
cuuacaugcauuacugca

SEQ ID NO: 1379970 - RNA, 12 nt, Human
cuuacaugauuc

SEQ ID NO: 1379971 - RNA, 23 nt, Human
cuuacaguaggagcccagcucug

SEQ ID NO: 1379972 - RNA, 16 nt, Human
cuuacaguaggagccc

SEQ ID NO: 1379973 - RNA, 17 nt, Human
cuucccaagggcugccg

SEQ ID NO: 1379974 - RNA, 23 nt, Human
cuucccaagugagucucucuggg

SEQ ID NO: 1379975 - RNA, 13 nt, Human
cuuccauuugcaa

SEQ ID NO: 1379976 - RNA, 16 nt, Human
cuucccaaagcaagca

SEQ ID NO: 1379977 - RNA, 14 nt, Human
cuuccauuugcaag

SEQ ID NO: 1379978 - RNA, 23 nt, Human
cuucccaaaguccugggauuaca

SEQ ID NO: 1379979 - RNA, 13 nt, Human
cuucucuuugccu

SEQ ID NO: 1379980 - RNA, 22 nt, Human
cuucucuguauuccuagaaacu

SEQ ID NO: 1379981 - RNA, 22 nt, Human
cuucugaacucaaacugaggaa

SEQ ID NO: 1379982 - RNA, 18 nt, Human
cuucugaacucaaacuga

SEQ ID NO: 1379983 - RNA, 17 nt, Human
cuucugaacucaaacug

SEQ ID NO: 1379984 - RNA, 16 nt, Human
cuucucuuugccucaa

SEQ ID NO: 1379985 - RNA, 15 nt, Human
cuucuaauugccaug

SEQ ID NO: 1379986 - RNA, 23 nt, Human
cuucuacucacuuuucccacucc

SEQ ID NO: 1379987 - RNA, 19 nt, Human
cuucuacucacuuuuccca

SEQ ID NO: 1379988 - RNA, 18 nt, Human
cuucuacucacuuuuccc

SEQ ID NO: 1379989 - RNA, 20 nt, Human
cuucuacucacuuuucccac

SEQ ID NO: 1379990 - RNA, 15 nt, Human
cuucuauacccaccc

SEQ ID NO: 1379991 - RNA, 18 nt, Human
cuucuauacccacccaga

SEQ ID NO: 1379992 - RNA, 22 nt, Human
cuucucugacuucugccuggag

SEQ ID NO: 1379993 - RNA, 17 nt, Human
cuucuauacccacccag

SEQ ID NO: 1379994 - RNA, 19 nt, Human
cuuccucuccugucucccu

SEQ ID NO: 1379995 - RNA, 15 nt, Human
cuuccucuccugucu

SEQ ID NO: 1379996 - RNA, 16 nt, Human
cuucuaauugccaugu

SEQ ID NO: 1379997 - RNA, 17 nt, Human
cuuccucuucccccaag

SEQ ID NO: 1379998 - RNA, 12 nt, Human
cuucuugaaggu

SEQ ID NO: 1379999 - RNA, 22 nt, Human
cuucuugaaauuuuaaccuaug

SEQ ID NO: 1380000 - RNA, 22 nt, Human
cuucuuagcuaucauugcuucc

SEQ ID NO: 1380001 - RNA, 22 nt, Human
cuucuuauggaauugauuugca

SEQ ID NO: 1380002 - RNA, 23 nt, Human
cuucuuauggaauugauuugcau

SEQ ID NO: 1380003 - RNA, 19 nt, Human
cuucuuauggaauugauuu

SEQ ID NO: 1380004 - RNA, 22 nt, Human
cuucuuacuuggaacugaaggg

SEQ ID NO: 1380005 - RNA, 21 nt, Human
cuucuuacuuggaacugaagg

SEQ ID NO: 1380006 - RNA, 15 nt, Human
cuucucuuugccuca

SEQ ID NO: 1380007 - RNA, 13 nt, Human
cuugguuccccca

SEQ ID NO: 1380008 - RNA, 15 nt, Human
cuugguccuugauuu

SEQ ID NO: 1380009 - RNA, 23 nt, Human
cuugguucuugaggggaccagga

SEQ ID NO: 1380010 - RNA, 16 nt, Human
cuugguugaggaaaca

SEQ ID NO: 1380011 - RNA, 15 nt, Human
cuugguugaggaaac

SEQ ID NO: 1380012 - RNA, 14 nt, Human
cuugguugaggaaa

SEQ ID NO: 1380013 - RNA, 20 nt, Human
cuugucucccagcucagggc

SEQ ID NO: 1380014 - RNA, 22 nt, Human
cuugguucuugaggggaccagg

SEQ ID NO: 1380015 - RNA, 19 nt, Human
cuugguucuugaggggacc

SEQ ID NO: 1380016 - RNA, 16 nt, Human
cuugguuccuucccaa

SEQ ID NO: 1380017 - RNA, 19 nt, Human
cuugguucccccacugauc

SEQ ID NO: 1380018 - RNA, 16 nt, Human
cuugguucccccacug

SEQ ID NO: 1380019 - RNA, 20 nt, Human
cuugucuuauucccuuccug

SEQ ID NO: 1380020 - RNA, 20 nt, Human
cuuucaauacagauauauuu

SEQ ID NO: 1380021 - RNA, 19 nt, Human
cuuucaauacagauauauu

SEQ ID NO: 1380022 - RNA, 18 nt, Human
cuuucaauacagauauau

SEQ ID NO: 1380023 - RNA, 17 nt, Human
cuuucaauacagauaua

SEQ ID NO: 1380024 - RNA, 22 nt, Human
cuuuaaugauaugcuuguaacu

SEQ ID NO: 1380025 - RNA, 21 nt, Human
cuuuaaugauaugcuuguaac

SEQ ID NO: 1380026 - RNA, 16 nt, Human
cuuuaaugauaugcuu

SEQ ID NO: 1380027 - RNA, 20 nt, Human
cuuuaagaguuuaaaaucau

SEQ ID NO: 1380028 - RNA, 22 nt, Human
cuuuaagaguuuaaaaucauca

SEQ ID NO: 1380029 - RNA, 19 nt, Human
cuuuaagaguuuaaaauca

SEQ ID NO: 1380030 - RNA, 15 nt, Human
cuuuaagaguuuaaa

SEQ ID NO: 1380031 - RNA, 15 nt, Human
cuuuaacuuaaauag

SEQ ID NO: 1380032 - RNA, 23 nt, Human
cuuuaacugccguaauuuaacuu

SEQ ID NO: 1380033 - RNA, 21 nt, Human
cuuuaacugccguaauuuaac

SEQ ID NO: 1380034 - RNA, 15 nt, Human
cuuucacaggcagcc

SEQ ID NO: 1380035 - RNA, 14 nt, Human
cuuucacaggcagc

SEQ ID NO: 1380036 - RNA, 13 nt, Human
cuuucacaggcag

SEQ ID NO: 1380037 - RNA, 18 nt, Human
cuuucacagcuccuccca

SEQ ID NO: 1380038 - RNA, 15 nt, Human
cuuucacagcuccuc

SEQ ID NO: 1380039 - RNA, 14 nt, Human
cuuucacagcuccu

SEQ ID NO: 1380040 - RNA, 13 nt, Human
cuuucacagcucc

SEQ ID NO: 1380041 - RNA, 19 nt, Human
cuuucacaggcagccagug

SEQ ID NO: 1380042 - RNA, 13 nt, Human
cuugccucauuuu

SEQ ID NO: 1380043 - RNA, 23 nt, Human
cuugccucauuuuuuuccuugca

SEQ ID NO: 1380044 - RNA, 18 nt, Human
cuugccucaaugccagua

SEQ ID NO: 1380045 - RNA, 22 nt, Human
cuugauuuaucacacaaagcag

SEQ ID NO: 1380046 - RNA, 21 nt, Human
cuugauuuaucacacaaagca

SEQ ID NO: 1380047 - RNA, 22 nt, Human
cuugauucugcaguaaaucuuu

SEQ ID NO: 1380048 - RNA, 21 nt, Human
cuugauucugcaguaaaucuu

SEQ ID NO: 1380049 - RNA, 20 nt, Human
cuugauucugcaguaaaucu

SEQ ID NO: 1380050 - RNA, 17 nt, Human
cuugauucugcaguaaa

SEQ ID NO: 1380051 - RNA, 13 nt, Human
cuugauucugcag

SEQ ID NO: 1380052 - RNA, 22 nt, Human
cuugauguaaaaucuugucaug

SEQ ID NO: 1380053 - RNA, 21 nt, Human
cuugauguaaaaucuugucau

SEQ ID NO: 1380054 - RNA, 20 nt, Human
cuugauguaaaaucuuguca

SEQ ID NO: 1380055 - RNA, 18 nt, Human
cuugauguaaaaucuugu

SEQ ID NO: 1380056 - RNA, 17 nt, Human
cuugauguaaaaucuug

SEQ ID NO: 1380057 - RNA, 15 nt, Human
cuugauguaaaaucu

SEQ ID NO: 1380058 - RNA, 14 nt, Human
cuugauguaaaauc

SEQ ID NO: 1380059 - RNA, 13 nt, Human
cuugauguaaaau

SEQ ID NO: 1380060 - RNA, 19 nt, Human
cuugaugggauucuggaca

SEQ ID NO: 1380061 - RNA, 18 nt, Human
cuugaugggauucuggac

SEQ ID NO: 1380062 - RNA, 17 nt, Human
cuugaugggauucugga

SEQ ID NO: 1380063 - RNA, 21 nt, Human
cuugauguaaggaugggcaug

SEQ ID NO: 1380064 - RNA, 20 nt, Human
cuugaugucuuuguuaagac

SEQ ID NO: 1380065 - RNA, 19 nt, Human
cuugauguaaggaugggca

SEQ ID NO: 1380066 - RNA, 23 nt, Human
cuugauguaaaaucuugucaugu

SEQ ID NO: 1380067 - RNA, 16 nt, Human
gaacaagagaagcauu

SEQ ID NO: 1380068 - RNA, 15 nt, Human
gaacaagagaagcau

SEQ ID NO: 1380069 - RNA, 17 nt, Human
gaacaagagaagcauuc

SEQ ID NO: 1380070 - RNA, 15 nt, Human
gaaauuuuucuucuu

SEQ ID NO: 1380071 - RNA, 15 nt, Human
gaaaucaacuugcuu

SEQ ID NO: 1380072 - RNA, 13 nt, Human
gaaauauuuuaaa

SEQ ID NO: 1380073 - RNA, 20 nt, Human
gaaaguacacucugcuguuu

SEQ ID NO: 1380074 - RNA, 22 nt, Human
gaaaguacacucugcuguuuga

SEQ ID NO: 1380075 - RNA, 19 nt, Human
gaaaguacacucugcuguu

SEQ ID NO: 1380076 - RNA, 18 nt, Human
gaaaguacacucugcugu

SEQ ID NO: 1380077 - RNA, 17 nt, Human
gaaaguacacucugcug

SEQ ID NO: 1380078 - RNA, 13 nt, Human
gaaagguuuuuuu

SEQ ID NO: 1380079 - RNA, 20 nt, Human
gaaauauuuuaaaaucagcu

SEQ ID NO: 1380080 - RNA, 19 nt, Human
gaaauauuugugacaaaaa

SEQ ID NO: 1380081 - RNA, 19 nt, Human
gaaagaccaggccaauguc

SEQ ID NO: 1380082 - RNA, 17 nt, Human
gaaagacagcuucucau

SEQ ID NO: 1380083 - RNA, 16 nt, Human
gaaagacagcuucuca

SEQ ID NO: 1380084 - RNA, 19 nt, Human
gaaagacgcacuuuggcuu

SEQ ID NO: 1380085 - RNA, 17 nt, Human
gaaagacgcacuuuggc

SEQ ID NO: 1380086 - RNA, 15 nt, Human
gaaagacgcacuuug

SEQ ID NO: 1380087 - RNA, 21 nt, Human
gaaacuuaaauguuauuaucu

SEQ ID NO: 1380088 - RNA, 19 nt, Human
gaaacuuaaauguuauuau

SEQ ID NO: 1380089 - RNA, 23 nt, Human
gaaacuucagcgguuuauauaag

SEQ ID NO: 1380090 - RNA, 16 nt, Human
gaaagaagaaaagguu

SEQ ID NO: 1380091 - RNA, 13 nt, Human
gaaagaauagaac

SEQ ID NO: 1380092 - RNA, 20 nt, Human
gaaagaaguguggggauuuu

SEQ ID NO: 1380093 - RNA, 12 nt, Human
gaaacuuggcuc

SEQ ID NO: 1380094 - RNA, 16 nt, Human
gaaagaacggaagaag

SEQ ID NO: 1380095 - RNA, 18 nt, Human
gaaaauuagacugugauu

SEQ ID NO: 1380096 - RNA, 13 nt, Human
gaaacaaaauaca

SEQ ID NO: 1380097 - RNA, 23 nt, Human
gaaacaaaaacacuaaaaauaaa

SEQ ID NO: 1380098 - RNA, 19 nt, Human
gaaacaaaaacacuaaaaa

SEQ ID NO: 1380099 - RNA, 14 nt, Human
gaaacaaaaacacu

SEQ ID NO: 1380100 - RNA, 16 nt, Human
gaaaauuagacuguga

SEQ ID NO: 1380101 - RNA, 14 nt, Human
gaaaauuagacugu

SEQ ID NO: 1380102 - RNA, 13 nt, Human
gaaaauuuuugua

SEQ ID NO: 1380103 - RNA, 16 nt, Human
gaaaauuuuuguagua

SEQ ID NO: 1380104 - RNA, 18 nt, Human
gaaaauuuugauguuuua

SEQ ID NO: 1380105 - RNA, 16 nt, Human
gaaaacucuuugcugc

SEQ ID NO: 1380106 - RNA, 18 nt, Human
gaaaacuccaccuuccca

SEQ ID NO: 1380107 - RNA, 21 nt, Human
gaaaaaauauauguauauaca

SEQ ID NO: 1380108 - RNA, 18 nt, Human
gaaaacuuguauuaugug

SEQ ID NO: 1380109 - RNA, 14 nt, Human
gaaaauuacaaaaa

SEQ ID NO: 1380110 - RNA, 21 nt, Human
gaaaauguugagaaucccaaa

SEQ ID NO: 1380111 - RNA, 20 nt, Human
gaaaagccuggguuuggugu

SEQ ID NO: 1380112 - RNA, 14 nt, Human
gaaaauuaacauga

SEQ ID NO: 1380113 - RNA, 22 nt, Human
gaaaagccuggguuugguguau

SEQ ID NO: 1380114 - RNA, 23 nt, Human
gaaaagcauggcuugaauaagga

SEQ ID NO: 1380115 - RNA, 18 nt, Human
gaaaagcaucagaaagag

SEQ ID NO: 1380116 - RNA, 15 nt, Human
gaaaagcagacauuu

SEQ ID NO: 1380117 - RNA, 16 nt, Human
gaaaagcagacauuuu

SEQ ID NO: 1380118 - RNA, 15 nt, Human
cuuuuuuuucuuuaa

SEQ ID NO: 1380119 - RNA, 14 nt, Human
cuuuuuuuucuuua

SEQ ID NO: 1380120 - RNA, 18 nt, Human
cuuuuuuuucuauuucac

SEQ ID NO: 1380121 - RNA, 17 nt, Human
cuuuuuuuucuauuuca

SEQ ID NO: 1380122 - RNA, 15 nt, Human
cuuuuuuuuccuucu

SEQ ID NO: 1380123 - RNA, 22 nt, Human
cuuuuuuuguguguauuugcua

SEQ ID NO: 1380124 - RNA, 21 nt, Human
cuuuuuuuguguguauuugcu

SEQ ID NO: 1380125 - RNA, 13 nt, Human
cuuuuuuugugug

SEQ ID NO: 1380126 - RNA, 21 nt, Human
cuuuuuuuguauaguuaacac

SEQ ID NO: 1380127 - RNA, 16 nt, Human
cuuuuuuuguauaguu

SEQ ID NO: 1380128 - RNA, 13 nt, Human
cuuuuuuuguaua

SEQ ID NO: 1380129 - RNA, 12 nt, Human
cuuuuuuuguau

SEQ ID NO: 1380130 - RNA, 20 nt, Human
cuuuuuuucuguaccaguua

SEQ ID NO: 1380131 - RNA, 21 nt, Human
cuuuugugggggacuguaagu

SEQ ID NO: 1380132 - RNA, 19 nt, Human
cuuuugugggggacuguaa

SEQ ID NO: 1380133 - RNA, 19 nt, Human
cuuuugucuacacacccug

SEQ ID NO: 1380134 - RNA, 11 nt, Human
cuuuugucuac

SEQ ID NO: 1380135 - RNA, 17 nt, Human
cuuuuguauuaagaaag

SEQ ID NO: 1380136 - RNA, 14 nt, Human
cuuuugugcauuau

SEQ ID NO: 1380137 - RNA, 18 nt, Human
cuuuugugcauuaucuag

SEQ ID NO: 1380138 - RNA, 21 nt, Human
cuuuuuuuuuuuuuaauaaau

SEQ ID NO: 1380139 - RNA, 21 nt, Human
cuuuuuuuuuuuuuuugacaa

SEQ ID NO: 1380140 - RNA, 12 nt, Human
gaaaaaauauau

SEQ ID NO: 1380141 - RNA, 11 nt, Human
gaaaaaauaua

SEQ ID NO: 1380142 - RNA, 14 nt, Human
gaaaaaauauauau

SEQ ID NO: 1380143 - RNA, 11 nt, Human
cuuuugcuuuu

SEQ ID NO: 1380144 - RNA, 14 nt, Human
cuuuugcuuuauuc

SEQ ID NO: 1380145 - RNA, 22 nt, Human
cuuuugcucuuagcugucugcu

SEQ ID NO: 1380146 - RNA, 20 nt, Human
cuuuugccuuuugcaaccag

SEQ ID NO: 1380147 - RNA, 23 nt, Human
cuuuugcgguucaggaaaauuga

SEQ ID NO: 1380148 - RNA, 18 nt, Human
cuuuugccguuauuaaaa

SEQ ID NO: 1380149 - RNA, 14 nt, Human
cuuuuguauuaaga

SEQ ID NO: 1380150 - RNA, 13 nt, Human
cuuuuguauuaag

SEQ ID NO: 1380151 - RNA, 12 nt, Human
cuuuuguauuaa

SEQ ID NO: 1380152 - RNA, 11 nt, Human
cuuuuguauua

SEQ ID NO: 1380153 - RNA, 21 nt, Human
cuuuugguaaagacuggcuuu

SEQ ID NO: 1380154 - RNA, 20 nt, Human
cuuuugguaaagacuggcuu

SEQ ID NO: 1380155 - RNA, 20 nt, Human
cuuuuggguuucugcccugc

SEQ ID NO: 1380156 - RNA, 19 nt, Human
cuuuuggguuucugcccug

SEQ ID NO: 1380157 - RNA, 17 nt, Human
cuuuuggguuucugccc

SEQ ID NO: 1380158 - RNA, 18 nt, Human
cuuuugggggucaacagu

SEQ ID NO: 1380159 - RNA, 15 nt, Human
cuuuugcuuuuggca

SEQ ID NO: 1380160 - RNA, 18 nt, Human
cuuuugcuuuugcccauu

SEQ ID NO: 1380161 - RNA, 16 nt, Human
cuuuugcuuuugccca

SEQ ID NO: 1380162 - RNA, 17 nt, Human
cuuuugcuuuuggcaaa

SEQ ID NO: 1380163 - RNA, 18 nt, Human
cuuuuggaagguauuuaa

SEQ ID NO: 1380164 - RNA, 18 nt, Human
cuuuuauugacacagaaa

SEQ ID NO: 1380165 - RNA, 17 nt, Human
cuuuuauugacacagaa

SEQ ID NO: 1380166 - RNA, 19 nt, Human
cuuuuauuaaugcacuuuc

SEQ ID NO: 1380167 - RNA, 16 nt, Human
cuuuuauuaaugcacu

SEQ ID NO: 1380168 - RNA, 14 nt, Human
cuuuuauuaaugca

SEQ ID NO: 1380169 - RNA, 19 nt, Human
cuuuuaugugaaacauguu

SEQ ID NO: 1380170 - RNA, 17 nt, Human
cuccuaaaguacuggga

SEQ ID NO: 1380171 - RNA, 20 nt, Human
cuccguuggccacuccgaga

SEQ ID NO: 1380172 - RNA, 12 nt, Human
cuccguuggcca

SEQ ID NO: 1380173 - RNA, 22 nt, Human
cuccguuagcuccuguggcccc

SEQ ID NO: 1380174 - RNA, 21 nt, Human
cuccguuagcuccuguggccc

SEQ ID NO: 1380175 - RNA, 18 nt, Human
cuccguuagcuccugugg

SEQ ID NO: 1380176 - RNA, 17 nt, Human
cuccguuagcuccugug

SEQ ID NO: 1380177 - RNA, 22 nt, Human
cuccuaagcaccuguaaugugc

SEQ ID NO: 1380178 - RNA, 14 nt, Human
cuccuaagcaccug

SEQ ID NO: 1380179 - RNA, 22 nt, Human
cuccuaagcaacuaggccuuca

SEQ ID NO: 1380180 - RNA, 13 nt, Human
cuccucugugacc

SEQ ID NO: 1380181 - RNA, 22 nt, Human
cuccucugugaccaaugucuug

SEQ ID NO: 1380182 - RNA, 23 nt, Human
cuccucugugaccaaugucuuga

SEQ ID NO: 1380183 - RNA, 11 nt, Human
cuccucuucca

SEQ ID NO: 1380184 - RNA, 21 nt, Human
cuccuggcuucccauccccag

SEQ ID NO: 1380185 - RNA, 23 nt, Human
cuccuggcuucccauccccagcg

SEQ ID NO: 1380186 - RNA, 14 nt, Human
cuccuggcuuccca

SEQ ID NO: 1380187 - RNA, 19 nt, Human
cuccuggcugucugaggcu

SEQ ID NO: 1380188 - RNA, 18 nt, Human
cuccuggcugucugaggc

SEQ ID NO: 1380189 - RNA, 21 nt, Human
cuccuggaucucccugagaug

SEQ ID NO: 1380190 - RNA, 19 nt, Human
cuccuggaucucccugaga

SEQ ID NO: 1380191 - RNA, 16 nt, Human
cuccuggaucucccug

SEQ ID NO: 1380192 - RNA, 15 nt, Human
cuccuggaucucccu

SEQ ID NO: 1380193 - RNA, 22 nt, Human
cucccccagcaaagcccccaga

SEQ ID NO: 1380194 - RNA, 21 nt, Human
cucccccagcaaagcccccag

SEQ ID NO: 1380195 - RNA, 20 nt, Human
cucccccagcaaagccccca

SEQ ID NO: 1380196 - RNA, 12 nt, Human
cucccccagcaa

SEQ ID NO: 1380197 - RNA, 19 nt, Human
cucccccacuuucuuucuu

SEQ ID NO: 1380198 - RNA, 13 nt, Human
cucccccacuuuc

SEQ ID NO: 1380199 - RNA, 22 nt, Human
cucccccaccguugucucaugc

SEQ ID NO: 1380200 - RNA, 19 nt, Human
cucccccaccguugucuca

SEQ ID NO: 1380201 - RNA, 21 nt, Human
cucccccaacagcuggacccu

SEQ ID NO: 1380202 - RNA, 13 nt, Human
cucccccccaugc

SEQ ID NO: 1380203 - RNA, 15 nt, Human
cucccccccaugcac

SEQ ID NO: 1380204 - RNA, 20 nt, Human
cucccccaggggcugucccg

SEQ ID NO: 1380205 - RNA, 22 nt, Human
cuccuggguuuuguauucucug

SEQ ID NO: 1380206 - RNA, 21 nt, Human
cuccuggguuuuguauucucu

SEQ ID NO: 1380207 - RNA, 19 nt, Human
cuccuggguucaagcgauu

SEQ ID NO: 1380208 - RNA, 14 nt, Human
cuccugggcccucu

SEQ ID NO: 1380209 - RNA, 12 nt, Human
cuccugggcccu

SEQ ID NO: 1380210 - RNA, 15 nt, Human
cucgugucuggcaca

SEQ ID NO: 1380211 - RNA, 14 nt, Human
cucguuaauuugua

SEQ ID NO: 1380212 - RNA, 20 nt, Human
cucguugacuggcugugugu

SEQ ID NO: 1380213 - RNA, 14 nt, Human
cucguguguuucua

SEQ ID NO: 1380214 - RNA, 16 nt, Human
cucucaggauccaagc

SEQ ID NO: 1380215 - RNA, 14 nt, Human
cucucaggauccaa

SEQ ID NO: 1380216 - RNA, 13 nt, Human
cucucaggaucca

SEQ ID NO: 1380217 - RNA, 17 nt, Human
cucucaggaccaaagcu

SEQ ID NO: 1380218 - RNA, 15 nt, Human
cucucagcuccaggu

SEQ ID NO: 1380219 - RNA, 13 nt, Human
cucucagcuccag

SEQ ID NO: 1380220 - RNA, 12 nt, Human
cucucagcucca

SEQ ID NO: 1380221 - RNA, 23 nt, Human
cucucacggccacacagcugccg

SEQ ID NO: 1380222 - RNA, 14 nt, Human
cucucaccuggccc

SEQ ID NO: 1380223 - RNA, 14 nt, Human
cucucaccucuagg

SEQ ID NO: 1380224 - RNA, 16 nt, Human
cucucaccauuuggau

SEQ ID NO: 1380225 - RNA, 23 nt, Human
cucucaccauuuggauccugugu

SEQ ID NO: 1380226 - RNA, 21 nt, Human
cucucaauauucaauaaagcu

SEQ ID NO: 1380227 - RNA, 18 nt, Human
cucuauccucucuuccuc

SEQ ID NO: 1380228 - RNA, 14 nt, Human
cucuaucauuuaau

SEQ ID NO: 1380229 - RNA, 15 nt, Human
cucuaucauuuaaua

SEQ ID NO: 1380230 - RNA, 21 nt, Human
cucuaucauuuaauaauauac

SEQ ID NO: 1380231 - RNA, 23 nt, Human
cucuaucauuuaauaauauacuu

SEQ ID NO: 1380232 - RNA, 21 nt, Human
cucuauauaccaaagcacauu

SEQ ID NO: 1380233 - RNA, 22 nt, Human
cucuauauuguucagcaugcaa

SEQ ID NO: 1380234 - RNA, 12 nt, Human
cucuaaagcaaa

SEQ ID NO: 1380235 - RNA, 19 nt, Human
cucuauaccaauaaaguga

SEQ ID NO: 1380236 - RNA, 13 nt, Human
cucguuuguguuc

SEQ ID NO: 1380237 - RNA, 19 nt, Human
cucguuuguguucuguuuu

SEQ ID NO: 1380238 - RNA, 23 nt, Human
cucguugacuggcuguguguugg

SEQ ID NO: 1380239 - RNA, 17 nt, Human
cucuaaaauuauaaaug

SEQ ID NO: 1380240 - RNA, 15 nt, Human
cucuaaaauuauaaa

SEQ ID NO: 1380241 - RNA, 16 nt, Human
cucuaaagcaaauuua

SEQ ID NO: 1380242 - RNA, 18 nt, Human
cucuauaccaauaaagug

SEQ ID NO: 1380243 - RNA, 16 nt, Human
cucccccaacagcugg

SEQ ID NO: 1380244 - RNA, 21 nt, Human
cuccccauguguccugguucc

SEQ ID NO: 1380245 - RNA, 20 nt, Human
cuccccauguguccugguuc

SEQ ID NO: 1380246 - RNA, 18 nt, Human
cuccccauguguccuggu

SEQ ID NO: 1380247 - RNA, 14 nt, Human
cuccccaugugucc

SEQ ID NO: 1380248 - RNA, 21 nt, Human
cucccaccugacacaccaggc

SEQ ID NO: 1380249 - RNA, 20 nt, Human
cucccaccugacacaccagg

SEQ ID NO: 1380250 - RNA, 15 nt, Human
cucccaccugacaca

SEQ ID NO: 1380251 - RNA, 14 nt, Human
cucccaccugacac

SEQ ID NO: 1380252 - RNA, 21 nt, Human
cucccaccuccugacacccuu

SEQ ID NO: 1380253 - RNA, 15 nt, Human
cucccaccuccugac

SEQ ID NO: 1380254 - RNA, 14 nt, Human
cucccaccuccuga

SEQ ID NO: 1380255 - RNA, 13 nt, Human
cucccaccuccug

SEQ ID NO: 1380256 - RNA, 18 nt, Human
cucccaccuccccuuggg

SEQ ID NO: 1380257 - RNA, 22 nt, Human
cucccacaugggcccaggccuc

SEQ ID NO: 1380258 - RNA, 23 nt, Human
cucccacaugggcccaggccuca

SEQ ID NO: 1380259 - RNA, 21 nt, Human
cuccaggggcugcuuccuccu

SEQ ID NO: 1380260 - RNA, 18 nt, Human
cuccaggggcugcuuccu

SEQ ID NO: 1380261 - RNA, 15 nt, Human
cuccaggggcugcuu

SEQ ID NO: 1380262 - RNA, 14 nt, Human
cuccaggggcugcu

SEQ ID NO: 1380263 - RNA, 19 nt, Human
cuccacuuucagcugucuu

SEQ ID NO: 1380264 - RNA, 18 nt, Human
cuccacuuucagcugucu

SEQ ID NO: 1380265 - RNA, 20 nt, Human
cuccacuuucagcugucuuu

SEQ ID NO: 1380266 - RNA, 17 nt, Human
cuccacuuucagcuguc

SEQ ID NO: 1380267 - RNA, 16 nt, Human
cuccacuuucagcugu

SEQ ID NO: 1380268 - RNA, 15 nt, Human
cuccacuuucagcug

SEQ ID NO: 1380269 - RNA, 14 nt, Human
cuccacuuucagcu

SEQ ID NO: 1380270 - RNA, 13 nt, Human
cuccacuuucagc

SEQ ID NO: 1380271 - RNA, 14 nt, Human
cucaugccccuggc

SEQ ID NO: 1380272 - RNA, 22 nt, Human
cucaugccaguaacaggcucaa

SEQ ID NO: 1380273 - RNA, 18 nt, Human
cucaucugucccuccggg

SEQ ID NO: 1380274 - RNA, 17 nt, Human
cucaucugucccuccgg

SEQ ID NO: 1380275 - RNA, 15 nt, Human
cucaucugucccucc

SEQ ID NO: 1380276 - RNA, 13 nt, Human
cucaucugucccu

SEQ ID NO: 1380277 - RNA, 14 nt, Human
cucaucugucacca

SEQ ID NO: 1380278 - RNA, 12 nt, Human
cucaucugucac

SEQ ID NO: 1380279 - RNA, 21 nt, Human
cucaucuggggagcaggcagc

SEQ ID NO: 1380280 - RNA, 20 nt, Human
cucaucuggggagcaggcag

SEQ ID NO: 1380281 - RNA, 19 nt, Human
cucaucuggggagcaggca

SEQ ID NO: 1380282 - RNA, 12 nt, Human
cucaucugggga

SEQ ID NO: 1380283 - RNA, 20 nt, Human
cucaucugcugguccguggg

SEQ ID NO: 1380284 - RNA, 16 nt, Human
cucaucugcugguccg

SEQ ID NO: 1380285 - RNA, 15 nt, Human
cucaucugcuggucc

SEQ ID NO: 1380286 - RNA, 14 nt, Human
cucaucugcugguc

SEQ ID NO: 1380287 - RNA, 16 nt, Human
cucaguaaagcacuug

SEQ ID NO: 1380288 - RNA, 13 nt, Human
cucaguaccccau

SEQ ID NO: 1380289 - RNA, 13 nt, Human
cucaguaauuugu

SEQ ID NO: 1380290 - RNA, 22 nt, Human
cucaguaauuuagaaaucauuu

SEQ ID NO: 1380291 - RNA, 19 nt, Human
cucaguaauuuagaaauca

SEQ ID NO: 1380292 - RNA, 18 nt, Human
cucaguaauuuagaaauc

SEQ ID NO: 1380293 - RNA, 13 nt, Human
cucaguaauuuag

SEQ ID NO: 1380294 - RNA, 18 nt, Human
cucaguagucagacugga

SEQ ID NO: 1380295 - RNA, 18 nt, Human
cuccaagccccaucuucu

SEQ ID NO: 1380296 - RNA, 17 nt, Human
cuccaagccccaucuuc

SEQ ID NO: 1380297 - RNA, 19 nt, Human
cuccaagcagcuuagaguu

SEQ ID NO: 1380298 - RNA, 16 nt, Human
cuccaagcagcuuaga

SEQ ID NO: 1380299 - RNA, 13 nt, Human
cuccaagcagcuu

SEQ ID NO: 1380300 - RNA, 18 nt, Human
cuccaagauucuagauga

SEQ ID NO: 1380301 - RNA, 15 nt, Human
cuccaagccccaucu

SEQ ID NO: 1380302 - RNA, 17 nt, Human
cuccaagcccagcccau

SEQ ID NO: 1380303 - RNA, 13 nt, Human
cuccacuggcucc

SEQ ID NO: 1380304 - RNA, 22 nt, Human
cuccaagcccagcccauggaga

SEQ ID NO: 1380305 - RNA, 17 nt, Human
cuccaagauucuagaug

SEQ ID NO: 1380306 - RNA, 16 nt, Human
cuccaagauucuagau

SEQ ID NO: 1380307 - RNA, 15 nt, Human
cuccaagauucuaga

SEQ ID NO: 1380308 - RNA, 14 nt, Human
cuccaagauucuag

SEQ ID NO: 1380309 - RNA, 13 nt, Human
cuccaagauucua

SEQ ID NO: 1380310 - RNA, 12 nt, Human
cuccaagauucu

SEQ ID NO: 1380311 - RNA, 20 nt, Human
cuccaagagcuacauaauuu

SEQ ID NO: 1380312 - RNA, 14 nt, Human
cuccaagagcuaca

SEQ ID NO: 1380313 - RNA, 14 nt, Human
cuccaagaauuucu

SEQ ID NO: 1380314 - RNA, 17 nt, Human
cucaugccccuggcugg

SEQ ID NO: 1380315 - RNA, 16 nt, Human
cucaugccccuggcug

SEQ ID NO: 1380316 - RNA, 15 nt, Human
cucauguggcuggaa

SEQ ID NO: 1380317 - RNA, 14 nt, Human
cucauguggcugga

SEQ ID NO: 1380318 - RNA, 13 nt, Human
cucauguggcugg

SEQ ID NO: 1380319 - RNA, 12 nt, Human
cucauguggcug

SEQ ID NO: 1380320 - RNA, 18 nt, Human
cucaugugacucuuucca

SEQ ID NO: 1380321 - RNA, 23 nt, Human
cucauguuaaauaggcggggcuu

SEQ ID NO: 1380322 - RNA, 16 nt, Human
cucaugugugcaacag

SEQ ID NO: 1380323 - RNA, 21 nt, Human
cuccaaccugcaaagaucugu

SEQ ID NO: 1380324 - RNA, 12 nt, Human
cucauguucuua

SEQ ID NO: 1380325 - RNA, 13 nt, Human
cuccaagaauuuc

SEQ ID NO: 1380326 - RNA, 20 nt, Human
cucugggggguggccaggcc

SEQ ID NO: 1380327 - RNA, 15 nt, Human
cucuggggugggcag

SEQ ID NO: 1380328 - RNA, 21 nt, Human
cucugggggguggccaggccg

SEQ ID NO: 1380329 - RNA, 19 nt, Human
cucugggggguggccaggc

SEQ ID NO: 1380330 - RNA, 16 nt, Human
cucugggggguggcca

SEQ ID NO: 1380331 - RNA, 17 nt, Human
cucugguaauauugacu

SEQ ID NO: 1380332 - RNA, 15 nt, Human
cucugguaaccucuu

SEQ ID NO: 1380333 - RNA, 22 nt, Human
cucugcagacuucccagcuagg

SEQ ID NO: 1380334 - RNA, 19 nt, Human
cucugcagacuucccagcu

SEQ ID NO: 1380335 - RNA, 13 nt, Human
cucugcucugcgu

SEQ ID NO: 1380336 - RNA, 18 nt, Human
cucuggugccuccagagg

SEQ ID NO: 1380337 - RNA, 16 nt, Human
cucuggugccuccaga

SEQ ID NO: 1380338 - RNA, 14 nt, Human
cucuggugccucca

SEQ ID NO: 1380339 - RNA, 13 nt, Human
cucuggugccucc

SEQ ID NO: 1380340 - RNA, 23 nt, Human
cucuggugagucaccacuucagg

SEQ ID NO: 1380341 - RNA, 20 nt, Human
cucuggucgcuccugcccac

SEQ ID NO: 1380342 - RNA, 18 nt, Human
cucuggucgcuccugccc

SEQ ID NO: 1380343 - RNA, 17 nt, Human
cucuggucgcuccugcc

SEQ ID NO: 1380344 - RNA, 16 nt, Human
cucuggucgcuccugc

SEQ ID NO: 1380345 - RNA, 19 nt, Human
cucuguccaggcacugaga

SEQ ID NO: 1380346 - RNA, 14 nt, Human
cucuguccaggcac

SEQ ID NO: 1380347 - RNA, 20 nt, Human
cucugucagucacagccacc

SEQ ID NO: 1380348 - RNA, 19 nt, Human
cucugucagucacagccac

SEQ ID NO: 1380349 - RNA, 17 nt, Human
cucugucagucacagcc

SEQ ID NO: 1380350 - RNA, 16 nt, Human
cucugucagucacagc

SEQ ID NO: 1380351 - RNA, 14 nt, Human
cucugucagucaca

SEQ ID NO: 1380352 - RNA, 17 nt, Human
cucugguggcacaggag

SEQ ID NO: 1380353 - RNA, 21 nt, Human
cucuccccuggaacugucucu

SEQ ID NO: 1380354 - RNA, 14 nt, Human
cucuccccugccug

SEQ ID NO: 1380355 - RNA, 21 nt, Human
cucuccccugcccccugcagg

SEQ ID NO: 1380356 - RNA, 16 nt, Human
cucuccccuucucugu

SEQ ID NO: 1380357 - RNA, 22 nt, Human
cucuccccugcccccugcagga

SEQ ID NO: 1380358 - RNA, 20 nt, Human
cucuccccugcccccugcag

SEQ ID NO: 1380359 - RNA, 19 nt, Human
cucuccccugcccccugca

SEQ ID NO: 1380360 - RNA, 15 nt, Human
cucuccccugccccc

SEQ ID NO: 1380361 - RNA, 12 nt, Human
cucuccccugcc

SEQ ID NO: 1380362 - RNA, 17 nt, Human
cucuccccugaccugug

SEQ ID NO: 1380363 - RNA, 15 nt, Human
cucuccccugaccug

SEQ ID NO: 1380364 - RNA, 16 nt, Human
cucuccccugccugcc

SEQ ID NO: 1380365 - RNA, 23 nt, Human
cucucccggagguugggugggcc

SEQ ID NO: 1380366 - RNA, 13 nt, Human
cucugcagcaaua

SEQ ID NO: 1380367 - RNA, 18 nt, Human
cucugcagacuucccagc

SEQ ID NO: 1380368 - RNA, 17 nt, Human
cucugcagacuucccag

SEQ ID NO: 1380369 - RNA, 18 nt, Human
cucugcagaaacuacuga

SEQ ID NO: 1380370 - RNA, 18 nt, Human
cucugcaggucccuaaua

SEQ ID NO: 1380371 - RNA, 14 nt, Human
cucugcaggucccu

SEQ ID NO: 1380372 - RNA, 15 nt, Human
cucugcaggucccua

SEQ ID NO: 1380373 - RNA, 16 nt, Human
cucugcaggucccuaa

SEQ ID NO: 1380374 - RNA, 17 nt, Human
cucugcaggucccuaau

SEQ ID NO: 1380375 - RNA, 17 nt, Human
cucuucagaggcccucg

SEQ ID NO: 1380376 - RNA, 13 nt, Human
cucuucagaggcc

SEQ ID NO: 1380377 - RNA, 14 nt, Human
cucuuauugccuca

SEQ ID NO: 1380378 - RNA, 20 nt, Human
cucuuauugccucacuucag

SEQ ID NO: 1380379 - RNA, 17 nt, Human
cucuuauugccucacuu

SEQ ID NO: 1380380 - RNA, 22 nt, Human
cucuuauugccucacuucaggu

SEQ ID NO: 1380381 - RNA, 15 nt, Human
cucuucaaaugccug

SEQ ID NO: 1380382 - RNA, 18 nt, Human
cucuucacucuucaaaug

SEQ ID NO: 1380383 - RNA, 18 nt, Human
cucuucagaucucuaacu

SEQ ID NO: 1380384 - RNA, 19 nt, Human
cucuucagaucucuaacuu

SEQ ID NO: 1380385 - RNA, 19 nt, Human
cucuuagcagcuuccagau

SEQ ID NO: 1380386 - RNA, 18 nt, Human
cucuuagcagcuuccaga

SEQ ID NO: 1380387 - RNA, 17 nt, Human
cucuuagcagcuuccag

SEQ ID NO: 1380388 - RNA, 22 nt, Human
cucuuagaugcaguucugaaga

SEQ ID NO: 1380389 - RNA, 19 nt, Human
cugaaggccugagguuacu

SEQ ID NO: 1380390 - RNA, 15 nt, Human
cugaaggccugaggu

SEQ ID NO: 1380391 - RNA, 13 nt, Human
cugaaggccugag

SEQ ID NO: 1380392 - RNA, 21 nt, Human
cugaaggagccccauuccugg

SEQ ID NO: 1380393 - RNA, 22 nt, Human
cugaauuuuuaaacaaguauuu

SEQ ID NO: 1380394 - RNA, 13 nt, Human
cugaaggagcccc

SEQ ID NO: 1380395 - RNA, 12 nt, Human
cugaaggagccc

SEQ ID NO: 1380396 - RNA, 15 nt, Human
cugaagcucccacag

SEQ ID NO: 1380397 - RNA, 23 nt, Human
cugaagccuuugcauuuuggaga

SEQ ID NO: 1380398 - RNA, 13 nt, Human
cugaagcccuugu

SEQ ID NO: 1380399 - RNA, 21 nt, Human
cugaagcccucccagguguua

SEQ ID NO: 1380400 - RNA, 21 nt, Human
cugaagcuaucguaaaauuaa

SEQ ID NO: 1380401 - RNA, 22 nt, Human
cugaagcuaucguaaaauuaag

SEQ ID NO: 1380402 - RNA, 22 nt, Human
cugaaacucacacaacuaggaa

SEQ ID NO: 1380403 - RNA, 14 nt, Human
cugaaaccaguguu

SEQ ID NO: 1380404 - RNA, 20 nt, Human
cugaaacaacuuggaaagau

SEQ ID NO: 1380405 - RNA, 16 nt, Human
cugaaacaacuuggaa

SEQ ID NO: 1380406 - RNA, 15 nt, Human
cugaaacaacuugga

SEQ ID NO: 1380407 - RNA, 12 nt, Human
cucuuuuuccaa

SEQ ID NO: 1380408 - RNA, 21 nt, Human
cucuuuuuccaacuuggcugc

SEQ ID NO: 1380409 - RNA, 21 nt, Human
cucuuuugcuuuauuccagaa

SEQ ID NO: 1380410 - RNA, 22 nt, Human
cucuuuuccuuugguccuucaa

SEQ ID NO: 1380411 - RNA, 21 nt, Human
cucuugauuauccauauugag

SEQ ID NO: 1380412 - RNA, 13 nt, Human
cucuugaugccug

SEQ ID NO: 1380413 - RNA, 15 nt, Human
cucuugaugccuggc

SEQ ID NO: 1380414 - RNA, 16 nt, Human
cucuugaugccuggcg

SEQ ID NO: 1380415 - RNA, 21 nt, Human
cucuugaugccuggcggggug

SEQ ID NO: 1380416 - RNA, 16 nt, Human
cucuugagccuugaac

SEQ ID NO: 1380417 - RNA, 17 nt, Human
cucuugagccuugaacu

SEQ ID NO: 1380418 - RNA, 18 nt, Human
cucuugagccuugaacuu

SEQ ID NO: 1380419 - RNA, 23 nt, Human
cucuugagccuugaacuuugacc

SEQ ID NO: 1380420 - RNA, 18 nt, Human
cugacaaccacuggucug

SEQ ID NO: 1380421 - RNA, 20 nt, Human
cugacaaccacuggucugua

SEQ ID NO: 1380422 - RNA, 14 nt, Human
cugacaagccaucu

SEQ ID NO: 1380423 - RNA, 14 nt, Human
cugacaacauuucu

SEQ ID NO: 1380424 - RNA, 22 nt, Human
cugacaacauuucuauagccaa

SEQ ID NO: 1380425 - RNA, 14 nt, Human
cugagaggcugucu

SEQ ID NO: 1380426 - RNA, 15 nt, Human
cugagaggcccugga

SEQ ID NO: 1380427 - RNA, 14 nt, Human
cugagaggcccugg

SEQ ID NO: 1380428 - RNA, 13 nt, Human
cugagaggcccug

SEQ ID NO: 1380429 - RNA, 21 nt, Human
cugagaggacagagagaaaua

SEQ ID NO: 1380430 - RNA, 20 nt, Human
cugagaggacagagagaaau

SEQ ID NO: 1380431 - RNA, 16 nt, Human
cugagauaugaacaua

SEQ ID NO: 1380432 - RNA, 15 nt, Human
cugagauaugaacau

SEQ ID NO: 1380433 - RNA, 12 nt, Human
cugagauaugaa

SEQ ID NO: 1380434 - RNA, 18 nt, Human
cugagauaccagcgagga

SEQ ID NO: 1380435 - RNA, 19 nt, Human
cugagauacauacagaauu

SEQ ID NO: 1380436 - RNA, 17 nt, Human
cugagauacauacagaa

SEQ ID NO: 1380437 - RNA, 22 nt, Human
cugagagucuagauucucuggc

SEQ ID NO: 1380438 - RNA, 17 nt, Human
cugagagucuagauucu

SEQ ID NO: 1380439 - RNA, 15 nt, Human
cugagagucuagauu

SEQ ID NO: 1380440 - RNA, 14 nt, Human
cugagagucuagau

SEQ ID NO: 1380441 - RNA, 16 nt, Human
cugagaggcccuggau

SEQ ID NO: 1380442 - RNA, 17 nt, Human
cugagagggcucgaggg

SEQ ID NO: 1380443 - RNA, 17 nt, Human
cugagaggacagagaga

SEQ ID NO: 1380444 - RNA, 19 nt, Human
cugagagaugcagaaauau

SEQ ID NO: 1380445 - RNA, 22 nt, Human
cugagagaggccauucuuuccc

SEQ ID NO: 1380446 - RNA, 21 nt, Human
cugagagaggccauucuuucc

SEQ ID NO: 1380447 - RNA, 14 nt, Human
cugagagaggccau

SEQ ID NO: 1380448 - RNA, 13 nt, Human
cugagagaggcca

SEQ ID NO: 1380449 - RNA, 18 nt, Human
cugagacgucaugaggag

SEQ ID NO: 1380450 - RNA, 16 nt, Human
cugagacgucaugagg

SEQ ID NO: 1380451 - RNA, 21 nt, Human
cugagaccaaggcuuucucua

SEQ ID NO: 1380452 - RNA, 22 nt, Human
cugagaccaaggcuuucucuac

SEQ ID NO: 1380453 - RNA, 18 nt, Human
cugagacuaaucuuauuc

SEQ ID NO: 1380454 - RNA, 13 nt, Human
cugagaccugaag

SEQ ID NO: 1380455 - RNA, 20 nt, Human
cugaccuggcccccucagug

SEQ ID NO: 1380456 - RNA, 17 nt, Human
cugaccuggcccccuca

SEQ ID NO: 1380457 - RNA, 14 nt, Human
cugaccuggccccc

SEQ ID NO: 1380458 - RNA, 13 nt, Human
cugaccuggcccc

SEQ ID NO: 1380459 - RNA, 12 nt, Human
cugaccuggccc

SEQ ID NO: 1380460 - RNA, 10 nt, Human
cugaccuggc

SEQ ID NO: 1380461 - RNA, 20 nt, Human
cugaccugcugaccugugca

SEQ ID NO: 1380462 - RNA, 19 nt, Human
cugaccugcugaccugugc

SEQ ID NO: 1380463 - RNA, 15 nt, Human
cugaccugcugaccu

SEQ ID NO: 1380464 - RNA, 14 nt, Human
cugaccugcugacc

SEQ ID NO: 1380465 - RNA, 13 nt, Human
cugaccugcugac

SEQ ID NO: 1380466 - RNA, 14 nt, Human
cugaccugcacugg

SEQ ID NO: 1380467 - RNA, 22 nt, Human
cugaccccaaacaccuuccagc

SEQ ID NO: 1380468 - RNA, 21 nt, Human
cugaccccaaacaccuuccag

SEQ ID NO: 1380469 - RNA, 20 nt, Human
cugaccccaaacaccuucca

SEQ ID NO: 1380470 - RNA, 16 nt, Human
cugagucaaguuguuc

SEQ ID NO: 1380471 - RNA, 15 nt, Human
cugagucaaguuguu

SEQ ID NO: 1380472 - RNA, 23 nt, Human
cugaguauuaaaauguaugcaug

SEQ ID NO: 1380473 - RNA, 22 nt, Human
cugaguauuaaaauguaugcau

SEQ ID NO: 1380474 - RNA, 21 nt, Human
cugaguauuaaaauguaugca

SEQ ID NO: 1380475 - RNA, 16 nt, Human
cugaguauuaaaaugu

SEQ ID NO: 1380476 - RNA, 22 nt, Human
cugaggugccugucccaccccc

SEQ ID NO: 1380477 - RNA, 19 nt, Human
cugaggugccugucccacc

SEQ ID NO: 1380478 - RNA, 17 nt, Human
cugaggugccuguccca

SEQ ID NO: 1380479 - RNA, 19 nt, Human
cugaggugcccaggagaag

SEQ ID NO: 1380480 - RNA, 18 nt, Human
cugaggugcccaggagaa

SEQ ID NO: 1380481 - RNA, 17 nt, Human
cugaggugcccaggaga

SEQ ID NO: 1380482 - RNA, 16 nt, Human
cugaggugcccaggag

SEQ ID NO: 1380483 - RNA, 15 nt, Human
cugaggugcccagga

SEQ ID NO: 1380484 - RNA, 14 nt, Human
cugaggugcccagg

SEQ ID NO: 1380485 - RNA, 13 nt, Human
cugaggugcccag

SEQ ID NO: 1380486 - RNA, 18 nt, Human
cugaggugcacugggagg

SEQ ID NO: 1380487 - RNA, 17 nt, Human
cugaggugcacugggag

SEQ ID NO: 1380488 - RNA, 16 nt, Human
cugaggugcacuggga

SEQ ID NO: 1380489 - RNA, 18 nt, Human
cugaggagucugaggucc

SEQ ID NO: 1380490 - RNA, 17 nt, Human
cugaggagucugagguc

SEQ ID NO: 1380491 - RNA, 16 nt, Human
cugaggagucugaggu

SEQ ID NO: 1380492 - RNA, 15 nt, Human
cugaggagucugagg

SEQ ID NO: 1380493 - RNA, 12 nt, Human
cugaggagucug

SEQ ID NO: 1380494 - RNA, 23 nt, Human
cugaggagcagcaggagggggga

SEQ ID NO: 1380495 - RNA, 21 nt, Human
cugaggagcagcaggaggggg

SEQ ID NO: 1380496 - RNA, 14 nt, Human
cugaggagcagcag

SEQ ID NO: 1380497 - RNA, 22 nt, Human
cugaggacugauuucagaguga

SEQ ID NO: 1380498 - RNA, 14 nt, Human
cugaggacugauuu

SEQ ID NO: 1380499 - RNA, 18 nt, Human
cugaggacagaugccucc

SEQ ID NO: 1380500 - RNA, 23 nt, Human
cugaguacuccacacugcacaau

SEQ ID NO: 1380501 - RNA, 12 nt, Human
cugaguagaaag

SEQ ID NO: 1380502 - RNA, 19 nt, Human
cugaguacuccacacugca

SEQ ID NO: 1380503 - RNA, 18 nt, Human
cugaguacuccacacugc

SEQ ID NO: 1380504 - RNA, 14 nt, Human
cugaguagaaaggc

SEQ ID NO: 1380505 - RNA, 19 nt, Human
cugaguagaaaggccuuua

SEQ ID NO: 1380506 - RNA, 20 nt, Human
cugaguagaaaggccuuuaa

SEQ ID NO: 1380507 - RNA, 16 nt, Human
cugaguacuccacacu

SEQ ID NO: 1380508 - RNA, 15 nt, Human
cugaguacuccacac

SEQ ID NO: 1380509 - RNA, 13 nt, Human
cugaguacuccac

SEQ ID NO: 1380510 - RNA, 20 nt, Human
cugaggugcccaggagaaga

SEQ ID NO: 1380511 - RNA, 21 nt, Human
cugaguacguugugcauuugg

SEQ ID NO: 1380512 - RNA, 18 nt, Human
cugaguacguugugcauu

SEQ ID NO: 1380513 - RNA, 17 nt, Human
cugaguacguugugcau

SEQ ID NO: 1380514 - RNA, 19 nt, Human
cugaguacguugugcauuu

SEQ ID NO: 1380515 - RNA, 20 nt, Human
cugaguacguugugcauuug

SEQ ID NO: 1380516 - RNA, 23 nt, Human
cugagauaugaacauauuguuga

SEQ ID NO: 1380517 - RNA, 21 nt, Human
cugagauaugaacauauuguu

SEQ ID NO: 1380518 - RNA, 20 nt, Human
cugagaugggcuucccaagg

SEQ ID NO: 1380519 - RNA, 21 nt, Human
cugagauggcucccaggggcu

SEQ ID NO: 1380520 - RNA, 20 nt, Human
cugagauggcucccaggggc

SEQ ID NO: 1380521 - RNA, 18 nt, Human
cugagauggcucccaggg

SEQ ID NO: 1380522 - RNA, 17 nt, Human
cugagauggcucccagg

SEQ ID NO: 1380523 - RNA, 16 nt, Human
cugagauggcucccag

SEQ ID NO: 1380524 - RNA, 13 nt, Human
cugagauggcucc

SEQ ID NO: 1380525 - RNA, 20 nt, Human
cugaggacagaugccuccuu

SEQ ID NO: 1380526 - RNA, 15 nt, Human
cugaggacagaugcc

SEQ ID NO: 1380527 - RNA, 14 nt, Human
cugaggacagaugc

SEQ ID NO: 1380528 - RNA, 23 nt, Human
cugaggacaagagaaaaaagcca

SEQ ID NO: 1380529 - RNA, 11 nt, Human
cgguuucucca

SEQ ID NO: 1380530 - RNA, 21 nt, Human
cgguuauaaaaaaugguucag

SEQ ID NO: 1380531 - RNA, 20 nt, Human
cgguuauaaaaaaugguuca

SEQ ID NO: 1380532 - RNA, 18 nt, Human
cgguuauaaaaaaugguu

SEQ ID NO: 1380533 - RNA, 13 nt, Human
cgguguucuaaga

SEQ ID NO: 1380534 - RNA, 12 nt, Human
cguaaagauuug

SEQ ID NO: 1380535 - RNA, 16 nt, Human
cguaaaaaugauuuca

SEQ ID NO: 1380536 - RNA, 14 nt, Human
cguaaaauuaagaa

SEQ ID NO: 1380537 - RNA, 17 nt, Human
cgugguggucccugggu

SEQ ID NO: 1380538 - RNA, 15 nt, Human
cgugguggucccugg

SEQ ID NO: 1380539 - RNA, 13 nt, Human
cgugguggucccu

SEQ ID NO: 1380540 - RNA, 18 nt, Human
cguggugcgagugcguga

SEQ ID NO: 1380541 - RNA, 22 nt, Human
cguggugauuuagcaggaagcu

SEQ ID NO: 1380542 - RNA, 23 nt, Human
cgugaucaaguugaggggcuucc

SEQ ID NO: 1380543 - RNA, 13 nt, Human
cgugauccacccg

SEQ ID NO: 1380544 - RNA, 17 nt, Human
cgugauccacccgccuc

SEQ ID NO: 1380545 - RNA, 24 nt, Human
cgugauccacccgccucagccucc

SEQ ID NO: 1380546 - RNA, 14 nt, Human
cgugaucucagcuc

SEQ ID NO: 1380547 - RNA, 15 nt, Human
cgugaucucagcuca

SEQ ID NO: 1380548 - RNA, 20 nt, Human
cggggaacuggccaagcuga

SEQ ID NO: 1380549 - RNA, 22 nt, Human
cggggaacuggccaagcugagg

SEQ ID NO: 1380550 - RNA, 17 nt, Human
cggggaacuggccaagc

SEQ ID NO: 1380551 - RNA, 15 nt, Human
cggggaacuggccaa

SEQ ID NO: 1380552 - RNA, 22 nt, Human
cgggccuguccacaggcuucug

SEQ ID NO: 1380553 - RNA, 17 nt, Human
cgggccuguccacaggc

SEQ ID NO: 1380554 - RNA, 18 nt, Human
cgggccaaggaccugaga

SEQ ID NO: 1380555 - RNA, 15 nt, Human
cgggccaaggaccug

SEQ ID NO: 1380556 - RNA, 20 nt, Human
cggcuccccauguguccugg

SEQ ID NO: 1380557 - RNA, 17 nt, Human
cggcuccccaugugucc

SEQ ID NO: 1380558 - RNA, 15 nt, Human
cggcuccccaugugu

SEQ ID NO: 1380559 - RNA, 14 nt, Human
cgccuggccuggcc

SEQ ID NO: 1380560 - RNA, 20 nt, Human
cgccuggguccaaugcucag

SEQ ID NO: 1380561 - RNA, 19 nt, Human
cgcugccagcucuguauca

SEQ ID NO: 1380562 - RNA, 15 nt, Human
cgcugccagcucugu

SEQ ID NO: 1380563 - RNA, 14 nt, Human
cggaggacucacca

SEQ ID NO: 1380564 - RNA, 19 nt, Human
cggaggaaggaggacccag

SEQ ID NO: 1380565 - RNA, 20 nt, Human
cggaggaaggaggacccagg

SEQ ID NO: 1380566 - RNA, 21 nt, Human
cggaggaaggaggacccagga

SEQ ID NO: 1380567 - RNA, 23 nt, Human
cggaggaaggaggacccaggaca

SEQ ID NO: 1380568 - RNA, 19 nt, Human
cgcauggucacacacugau

SEQ ID NO: 1380569 - RNA, 16 nt, Human
cgcauggucacacacu

SEQ ID NO: 1380570 - RNA, 14 nt, Human
cgcaugcggcccag

SEQ ID NO: 1380571 - RNA, 16 nt, Human
cgcaugcggcccagga

SEQ ID NO: 1380572 - RNA, 22 nt, Human
cgaucacaacgugcauugugcu

SEQ ID NO: 1380573 - RNA, 23 nt, Human
cgaucacaacgugcauugugcuu

SEQ ID NO: 1380574 - RNA, 24 nt, Human
cgaucacaacgugcauugugcuuc

SEQ ID NO: 1380575 - RNA, 19 nt, Human
cgagucauucguucugugg

SEQ ID NO: 1380576 - RNA, 18 nt, Human
cgagucauucguucugug

SEQ ID NO: 1380577 - RNA, 15 nt, Human
cgauauacucuagau

SEQ ID NO: 1380578 - RNA, 12 nt, Human
cgauagagucuc

SEQ ID NO: 1380579 - RNA, 18 nt, Human
cgaucacaacgugcauug

SEQ ID NO: 1380580 - RNA, 15 nt, Human
cgaguccaagcuggg

SEQ ID NO: 1380581 - RNA, 14 nt, Human
cgaguccaagcugg

SEQ ID NO: 1380582 - RNA, 13 nt, Human
cgaguccaagcug

SEQ ID NO: 1380583 - RNA, 20 nt, Human
cgagucauucguucugugga

SEQ ID NO: 1380584 - RNA, 19 nt, Human
cgccuggcugcagccugcg

SEQ ID NO: 1380585 - RNA, 21 nt, Human
cgccuggcaguccgugggacg

SEQ ID NO: 1380586 - RNA, 20 nt, Human
cgccugagcccagggaggcc

SEQ ID NO: 1380587 - RNA, 17 nt, Human
cgccugaggcaauuaga

SEQ ID NO: 1380588 - RNA, 20 nt, Human
cgccugaggaacccuuacag

SEQ ID NO: 1380589 - RNA, 21 nt, Human
cgccugagcccagggaggccg

SEQ ID NO: 1380590 - RNA, 19 nt, Human
cgccugagcccagggaggc

SEQ ID NO: 1380591 - RNA, 18 nt, Human
cgccugagcccagggagg

SEQ ID NO: 1380592 - RNA, 17 nt, Human
cgccugagcccagggag

SEQ ID NO: 1380593 - RNA, 16 nt, Human
cgccugagcccaggga

SEQ ID NO: 1380594 - RNA, 15 nt, Human
cgccugagcccaggg

SEQ ID NO: 1380595 - RNA, 14 nt, Human
cgccugagcccagg

SEQ ID NO: 1380596 - RNA, 13 nt, Human
cgccugagcccag

SEQ ID NO: 1380597 - RNA, 11 nt, Human
cgccugagccc

SEQ ID NO: 1380598 - RNA, 23 nt, Human
cgccugacaaccacuggucugua

SEQ ID NO: 1380599 - RNA, 21 nt, Human
cgccugacaaccacuggucug

SEQ ID NO: 1380600 - RNA, 20 nt, Human
cgccugacaaccacuggucu

SEQ ID NO: 1380601 - RNA, 15 nt, Human
cgccucuuucaagca

SEQ ID NO: 1380602 - RNA, 17 nt, Human
cgccucuugaccaggcu

SEQ ID NO: 1380603 - RNA, 15 nt, Human
cgccucuugaccagg

SEQ ID NO: 1380604 - RNA, 18 nt, Human
cgccuccauccaaggcca

SEQ ID NO: 1380605 - RNA, 16 nt, Human
cgccuccauccaaggc

SEQ ID NO: 1380606 - RNA, 19 nt, Human
cgccacuggggcucagagc

SEQ ID NO: 1380607 - RNA, 15 nt, Human
cgccacuggggcuca

SEQ ID NO: 1380608 - RNA, 13 nt, Human
cgccacuggggcu

SEQ ID NO: 1380609 - RNA, 18 nt, Human
cgccacuggggcucagag

SEQ ID NO: 1380610 - RNA, 17 nt, Human
cgccacuggggcucaga

SEQ ID NO: 1380611 - RNA, 21 nt, Human
cgccucacugcaaccuucacc

SEQ ID NO: 1380612 - RNA, 16 nt, Human
cgccuccaacccuagc

SEQ ID NO: 1380613 - RNA, 17 nt, Human
cgccuccaacccuagca

SEQ ID NO: 1380614 - RNA, 21 nt, Human
ccuugccccccuggccucccc

SEQ ID NO: 1380615 - RNA, 16 nt, Human
ccuugccccccuggcc

SEQ ID NO: 1380616 - RNA, 17 nt, Human
ccuugcuuaccucucag

SEQ ID NO: 1380617 - RNA, 18 nt, Human
ccuugcuuaugacaucac

SEQ ID NO: 1380618 - RNA, 16 nt, Human
ccuugcuuaccucuca

SEQ ID NO: 1380619 - RNA, 12 nt, Human
ccuugcugugaa

SEQ ID NO: 1380620 - RNA, 22 nt, Human
ccuugcugcaagcacagcccuu

SEQ ID NO: 1380621 - RNA, 17 nt, Human
ccuugccccccuggccu

SEQ ID NO: 1380622 - RNA, 15 nt, Human
ccuuuugacacugcu

SEQ ID NO: 1380623 - RNA, 13 nt, Human
ccuuuugacacug

SEQ ID NO: 1380624 - RNA, 19 nt, Human
ccuuuccaccacagccagc

SEQ ID NO: 1380625 - RNA, 17 nt, Human
ccuuucaggaucuauuu

SEQ ID NO: 1380626 - RNA, 19 nt, Human
ccuuucaggaucuauuuuu

SEQ ID NO: 1380627 - RNA, 14 nt, Human
ccuuucaggaucua

SEQ ID NO: 1380628 - RNA, 19 nt, Human
ccuuuuuaauaugcuuaaa

SEQ ID NO: 1380629 - RNA, 11 nt, Human
ccuuuugcaaa

SEQ ID NO: 1380630 - RNA, 23 nt, Human
ccuuuugaggagccccagcuacc

SEQ ID NO: 1380631 - RNA, 21 nt, Human
ccuuuugaggagccccagcua

SEQ ID NO: 1380632 - RNA, 16 nt, Human
ccuuuugaggagcccc

SEQ ID NO: 1380633 - RNA, 18 nt, Human
ccuuuugacacugcucua

SEQ ID NO: 1380634 - RNA, 22 nt, Human
ccuuucacaggcagccagugcc

SEQ ID NO: 1380635 - RNA, 14 nt, Human
ccuuucacaggcag

SEQ ID NO: 1380636 - RNA, 18 nt, Human
ccuuuacaugaggacucu

SEQ ID NO: 1380637 - RNA, 12 nt, Human
ccuuuacaugag

SEQ ID NO: 1380638 - RNA, 18 nt, Human
ccuuuaauuguaaaguaa

SEQ ID NO: 1380639 - RNA, 15 nt, Human
ccuuuacuugaccuc

SEQ ID NO: 1380640 - RNA, 15 nt, Human
cgacuggccagggcc

SEQ ID NO: 1380641 - RNA, 14 nt, Human
cgacuggccagggc

SEQ ID NO: 1380642 - RNA, 20 nt, Human
cgacucugugcuggccagcg

SEQ ID NO: 1380643 - RNA, 20 nt, Human
cgacuggccagggccacgcu

SEQ ID NO: 1380644 - RNA, 17 nt, Human
cgacuggccagggccac

SEQ ID NO: 1380645 - RNA, 14 nt, Human
cgacugcaacagga

SEQ ID NO: 1380646 - RNA, 18 nt, Human
cgacugaaaauauuguuu

SEQ ID NO: 1380647 - RNA, 17 nt, Human
cgacugccaucuuggac

SEQ ID NO: 1380648 - RNA, 21 nt, Human
cgacucacaccacuagccuca

SEQ ID NO: 1380649 - RNA, 14 nt, Human
cgacuaauuucaaa

SEQ ID NO: 1380650 - RNA, 19 nt, Human
cgacuccguuggccacucc

SEQ ID NO: 1380651 - RNA, 16 nt, Human
cgacuccguuggccac

SEQ ID NO: 1380652 - RNA, 16 nt, Human
cgacucugugcuggcc

SEQ ID NO: 1380653 - RNA, 19 nt, Human
cgacucacaccacuagccu

SEQ ID NO: 1380654 - RNA, 22 nt, Human
cgacucugugcuggccagcgag

SEQ ID NO: 1380655 - RNA, 17 nt, Human
cgacugaaaauauuguu

SEQ ID NO: 1380656 - RNA, 23 nt, Human
cgacccccucucccugcauggca

SEQ ID NO: 1380657 - RNA, 21 nt, Human
cgacacugcagccccacccag

SEQ ID NO: 1380658 - RNA, 16 nt, Human
cgacacggucggggca

SEQ ID NO: 1380659 - RNA, 12 nt, Human
cgacaagugcug

SEQ ID NO: 1380660 - RNA, 14 nt, Human
ccuuuuuguauaaa

SEQ ID NO: 1380661 - RNA, 19 nt, Human
ccuuuuuguauaaaauaga

SEQ ID NO: 1380662 - RNA, 21 nt, Human
ccuuuuuuagaguugauacua

SEQ ID NO: 1380663 - RNA, 21 nt, Human
ccuuuuucaaugaauuuuaua

SEQ ID NO: 1380664 - RNA, 12 nt, Human
ccuuuuucaaug

SEQ ID NO: 1380665 - RNA, 17 nt, Human
ccuuuuuauuugcaugu

SEQ ID NO: 1380666 - RNA, 18 nt, Human
ccuuuuuauuugcaugug

SEQ ID NO: 1380667 - RNA, 13 nt, Human
cucaauggacugg

SEQ ID NO: 1380668 - RNA, 15 nt, Human
cucaaugcucauaac

SEQ ID NO: 1380669 - RNA, 21 nt, Human
cucaaugagcauguuuagacu

SEQ ID NO: 1380670 - RNA, 12 nt, Human
cucaaugcucau

SEQ ID NO: 1380671 - RNA, 13 nt, Human
cucaaugcucaua

SEQ ID NO: 1380672 - RNA, 23 nt, Human
cucaauuuuaucccucaccugua

SEQ ID NO: 1380673 - RNA, 22 nt, Human
cucacaaaccaugcaaaugcua

SEQ ID NO: 1380674 - RNA, 16 nt, Human
cucaauuucugaacac

SEQ ID NO: 1380675 - RNA, 14 nt, Human
cucaauucuucccu

SEQ ID NO: 1380676 - RNA, 19 nt, Human
cucaauucuucccuaucuu

SEQ ID NO: 1380677 - RNA, 14 nt, Human
cucaaacuccugac

SEQ ID NO: 1380678 - RNA, 19 nt, Human
cucaaacuccugaccucag

SEQ ID NO: 1380679 - RNA, 16 nt, Human
cucaauaaaugauucu

SEQ ID NO: 1380680 - RNA, 16 nt, Human
cucaauauucaauaaa

SEQ ID NO: 1380681 - RNA, 17 nt, Human
cucaauauucaauaaag

SEQ ID NO: 1380682 - RNA, 18 nt, Human
cucaauauucaauaaagc

SEQ ID NO: 1380683 - RNA, 19 nt, Human
cucaauauucaauaaagcu

SEQ ID NO: 1380684 - RNA, 22 nt, Human
cuauuaaagugcuaagguucua

SEQ ID NO: 1380685 - RNA, 21 nt, Human
cuauuaaagugcuaagguucu

SEQ ID NO: 1380686 - RNA, 20 nt, Human
cuauuaaagugcuaagguuc

SEQ ID NO: 1380687 - RNA, 23 nt, Human
cuauuaaagugcuaagguucuaa

SEQ ID NO: 1380688 - RNA, 19 nt, Human
cuauuaaagugcuaagguu

SEQ ID NO: 1380689 - RNA, 19 nt, Human
cuauuaaaagacucauccg

SEQ ID NO: 1380690 - RNA, 18 nt, Human
cuauuaaaagacucaucc

SEQ ID NO: 1380691 - RNA, 20 nt, Human
cuauuaaaagacucauccgu

SEQ ID NO: 1380692 - RNA, 18 nt, Human
cuauuuuuuuuuuuuugu

SEQ ID NO: 1380693 - RNA, 13 nt, Human
cucaaacaaugac

SEQ ID NO: 1380694 - RNA, 18 nt, Human
cucaaaauauuuguacau

SEQ ID NO: 1380695 - RNA, 13 nt, Human
cucaaaauauuug

SEQ ID NO: 1380696 - RNA, 21 nt, Human
cucaaacaaugacaaagcaga

SEQ ID NO: 1380697 - RNA, 20 nt, Human
cucaaacaaugacaaagcag

SEQ ID NO: 1380698 - RNA, 15 nt, Human
cucaaacaaugacaa

SEQ ID NO: 1380699 - RNA, 18 nt, Human
cucaaaccaaaucacuga

SEQ ID NO: 1380700 - RNA, 19 nt, Human
cucaaaccaaaucacugaa

SEQ ID NO: 1380701 - RNA, 22 nt, Human
cucaaaccaaaucacugaacuu

SEQ ID NO: 1380702 - RNA, 17 nt, Human
cuaguuuucuccuccca

SEQ ID NO: 1380703 - RNA, 16 nt, Human
cuaguuuucuccuccc

SEQ ID NO: 1380704 - RNA, 19 nt, Human
cuaguuuucuccucccagg

SEQ ID NO: 1380705 - RNA, 18 nt, Human
cuaguuuucuccucccag

SEQ ID NO: 1380706 - RNA, 22 nt, Human
cuaguuugauuaaauucuugca

SEQ ID NO: 1380707 - RNA, 16 nt, Human
cuagcaugaagacaga

SEQ ID NO: 1380708 - RNA, 13 nt, Human
cuaguuugauuaa

SEQ ID NO: 1380709 - RNA, 15 nt, Human
cuaguuugauuaaau

SEQ ID NO: 1380710 - RNA, 18 nt, Human
cuaucauugcuuccuccu

SEQ ID NO: 1380711 - RNA, 20 nt, Human
cuaucguucucucuuugcau

SEQ ID NO: 1380712 - RNA, 20 nt, Human
cuaucauugcuuccuccucc

SEQ ID NO: 1380713 - RNA, 19 nt, Human
cuaucauugcuuccuccuc

SEQ ID NO: 1380714 - RNA, 13 nt, Human
cuaucauuuaaua

SEQ ID NO: 1380715 - RNA, 15 nt, Human
cuaucauuuaauaau

SEQ ID NO: 1380716 - RNA, 17 nt, Human
cuaucauuuaauaauau

SEQ ID NO: 1380717 - RNA, 21 nt, Human
cuaucauuuaauaauauacuu

SEQ ID NO: 1380718 - RNA, 23 nt, Human
cuauccaaucaaucuugcaugua

SEQ ID NO: 1380719 - RNA, 20 nt, Human
cuauccaaucaaucuugcau

SEQ ID NO: 1380720 - RNA, 18 nt, Human
cuaucguaaaauuaagaa

SEQ ID NO: 1380721 - RNA, 14 nt, Human
cuagaacccucugu

SEQ ID NO: 1380722 - RNA, 14 nt, Human
cuagcauaucugcc

SEQ ID NO: 1380723 - RNA, 15 nt, Human
cuagcauaucugccu

SEQ ID NO: 1380724 - RNA, 17 nt, Human
cuagcauaucugccuuu

SEQ ID NO: 1380725 - RNA, 18 nt, Human
cuagcauaucugccuuua

SEQ ID NO: 1380726 - RNA, 21 nt, Human
cuagcauacguacacauuuua

SEQ ID NO: 1380727 - RNA, 23 nt, Human
cuagcauacguacacauuuuauu

SEQ ID NO: 1380728 - RNA, 17 nt, Human
cuagacaagccagaacu

SEQ ID NO: 1380729 - RNA, 16 nt, Human
cuagacaagccagaac

SEQ ID NO: 1380730 - RNA, 14 nt, Human
cuagacaagccaga

SEQ ID NO: 1380731 - RNA, 13 nt, Human
cuagacaagccag

SEQ ID NO: 1380732 - RNA, 21 nt, Human
cuagaauuugauuauuaacau

SEQ ID NO: 1380733 - RNA, 23 nt, Human
cuagaauuugauaugugaacagu

SEQ ID NO: 1380734 - RNA, 15 nt, Human
cuacaguuuuaacug

SEQ ID NO: 1380735 - RNA, 16 nt, Human
cuacagucucgucucu

SEQ ID NO: 1380736 - RNA, 22 nt, Human
cuaauuucaaaaugcuuuuuau

SEQ ID NO: 1380737 - RNA, 19 nt, Human
cuaauuucaaaaugcuuuu

SEQ ID NO: 1380738 - RNA, 18 nt, Human
cuaauuucaaaaugcuuu

SEQ ID NO: 1380739 - RNA, 17 nt, Human
cuaauuucaaaaugcuu

SEQ ID NO: 1380740 - RNA, 23 nt, Human
cuaauuuauccugaaauuucaga

SEQ ID NO: 1380741 - RNA, 21 nt, Human
cuaauuuauccugaaauuuca

SEQ ID NO: 1380742 - RNA, 17 nt, Human
cuaauuuauaaaaaggu

SEQ ID NO: 1380743 - RNA, 16 nt, Human
cuaccuggucucuccu

SEQ ID NO: 1380744 - RNA, 19 nt, Human
cuaccugcucagcccugca

SEQ ID NO: 1380745 - RNA, 21 nt, Human
cuaccugccccacuuguccuu

SEQ ID NO: 1380746 - RNA, 13 nt, Human
cuacaugaaacag

SEQ ID NO: 1380747 - RNA, 10 nt, Human
cuacaugaaa

SEQ ID NO: 1380748 - RNA, 16 nt, Human
cuacaucuucugccuu

SEQ ID NO: 1380749 - RNA, 15 nt, Human
cuacaucuucugccu

SEQ ID NO: 1380750 - RNA, 14 nt, Human
cuacaucuucugcc

SEQ ID NO: 1380751 - RNA, 16 nt, Human
cuacauaugaucuguc

SEQ ID NO: 1380752 - RNA, 14 nt, Human
cuacaugaaacaga

SEQ ID NO: 1380753 - RNA, 21 nt, Human
cuacucacuuuucccacucca

SEQ ID NO: 1380754 - RNA, 19 nt, Human
cuacucacuuuucccacuc

SEQ ID NO: 1380755 - RNA, 15 nt, Human
cuacucacuuuuccc

SEQ ID NO: 1380756 - RNA, 14 nt, Human
cuacucacuuuucc

SEQ ID NO: 1380757 - RNA, 14 nt, Human
cuacguauuuaaua

SEQ ID NO: 1380758 - RNA, 16 nt, Human
cuacgcuguccagaaa

SEQ ID NO: 1380759 - RNA, 22 nt, Human
cuaccuguugagcaucacagaa

SEQ ID NO: 1380760 - RNA, 17 nt, Human
cuaccuguguggacagg

SEQ ID NO: 1380761 - RNA, 11 nt, Human
cuaccugugug

SEQ ID NO: 1380762 - RNA, 13 nt, Human
cuaccugugccug

SEQ ID NO: 1380763 - RNA, 12 nt, Human
cuaccugugccu

SEQ ID NO: 1380764 - RNA, 21 nt, Human
cuaccuguugagcaucacaga

SEQ ID NO: 1380765 - RNA, 17 nt, Human
cuaccuuuguauucucu

SEQ ID NO: 1380766 - RNA, 23 nt, Human
cgugugggagaccggccugccag

SEQ ID NO: 1380767 - RNA, 20 nt, Human
cgugugugugcguccugucg

SEQ ID NO: 1380768 - RNA, 21 nt, Human
cuaaguuaauuuaaaguuguu

SEQ ID NO: 1380769 - RNA, 17 nt, Human
cuaaguuaauuuaaagu

SEQ ID NO: 1380770 - RNA, 15 nt, Human
cuaaguuaauuuaaa

SEQ ID NO: 1380771 - RNA, 17 nt, Human
cuaaguguuucauaaau

SEQ ID NO: 1380772 - RNA, 14 nt, Human
cuaagugugaacug

SEQ ID NO: 1380773 - RNA, 17 nt, Human
cuaaguaaauaggaauu

SEQ ID NO: 1380774 - RNA, 19 nt, Human
cuaaguaaauacaauuuuu

SEQ ID NO: 1380775 - RNA, 18 nt, Human
cuaaguaaauacaauuuu

SEQ ID NO: 1380776 - RNA, 17 nt, Human
cuaaguaaauacaauuu

SEQ ID NO: 1380777 - RNA, 16 nt, Human
cuaaguaaauacaauu

SEQ ID NO: 1380778 - RNA, 15 nt, Human
cuaaguaaauacaau

SEQ ID NO: 1380779 - RNA, 14 nt, Human
cuaaguaaauacaa

SEQ ID NO: 1380780 - RNA, 14 nt, Human
cuaauuuauaaaaa

SEQ ID NO: 1380781 - RNA, 13 nt, Human
cuaauuuauaaaa

SEQ ID NO: 1380782 - RNA, 13 nt, Human
cuaauugccaugu

SEQ ID NO: 1380783 - RNA, 20 nt, Human
cuaauucuauuaaagugcua

SEQ ID NO: 1380784 - RNA, 16 nt, Human
cuaauucuauuaaagu

SEQ ID NO: 1380785 - RNA, 15 nt, Human
cuaauucuaugccug

SEQ ID NO: 1380786 - RNA, 21 nt, Human
cuaaguuauaagacucucaca

SEQ ID NO: 1380787 - RNA, 17 nt, Human
cuaaguuauaagacucu

SEQ ID NO: 1380788 - RNA, 23 nt, Human
cuaaguuuuuauggcuuuugugc

SEQ ID NO: 1380789 - RNA, 22 nt, Human
cuaauaaaaagcuuuugucuac

SEQ ID NO: 1380790 - RNA, 20 nt, Human
cuaauaaaaagcuuuugucu

SEQ ID NO: 1380791 - RNA, 18 nt, Human
cuaauaaaaagcuuuugu

SEQ ID NO: 1380792 - RNA, 17 nt, Human
cuaauaaaaagcuuuug

SEQ ID NO: 1380793 - RNA, 14 nt, Human
cuaauucuaaugug

SEQ ID NO: 1380794 - RNA, 13 nt, Human
ccucuuucagcuc

SEQ ID NO: 1380795 - RNA, 12 nt, Human
ccucuuucagcu

SEQ ID NO: 1380796 - RNA, 23 nt, Human
ccucuuucaagcagucgugccug

SEQ ID NO: 1380797 - RNA, 23 nt, Human
ccugaccaguugcagucacucua

SEQ ID NO: 1380798 - RNA, 20 nt, Human
ccugaccaguugcagucacu

SEQ ID NO: 1380799 - RNA, 13 nt, Human
ccugaccaguugc

SEQ ID NO: 1380800 - RNA, 12 nt, Human
ccugaccaguug

SEQ ID NO: 1380801 - RNA, 22 nt, Human
ccugaccagcugcuccgaggac

SEQ ID NO: 1380802 - RNA, 21 nt, Human
ccugaccagcugcuccgagga

SEQ ID NO: 1380803 - RNA, 20 nt, Human
ccugaccagcugcuccgagg

SEQ ID NO: 1380804 - RNA, 15 nt, Human
ccugaccagcugcuc

SEQ ID NO: 1380805 - RNA, 14 nt, Human
ccugaccagcugcu

SEQ ID NO: 1380806 - RNA, 14 nt, Human
ccugaccagcuccc

SEQ ID NO: 1380807 - RNA, 20 nt, Human
ccugaccacucagagacaug

SEQ ID NO: 1380808 - RNA, 18 nt, Human
ccugaccacucagagaca

SEQ ID NO: 1380809 - RNA, 17 nt, Human
ccugaccacucagagac

SEQ ID NO: 1380810 - RNA, 16 nt, Human
ccugaccacucagaga

SEQ ID NO: 1380811 - RNA, 15 nt, Human
ccugaccacucagag

SEQ ID NO: 1380812 - RNA, 21 nt, Human
ccugaccaguugcagucacuc

SEQ ID NO: 1380813 - RNA, 13 nt, Human
ccugaccacucag

SEQ ID NO: 1380814 - RNA, 16 nt, Human
ccucuuucagcuccug

SEQ ID NO: 1380815 - RNA, 18 nt, Human
ccucuuucagcuccugac

SEQ ID NO: 1380816 - RNA, 15 nt, Human
ccucuuucagcuccu

SEQ ID NO: 1380817 - RNA, 14 nt, Human
ccucuuucagcucc

SEQ ID NO: 1380818 - RNA, 22 nt, Human
ccugagucgugaccugcuaggc

SEQ ID NO: 1380819 - RNA, 21 nt, Human
ccugagucgugaccugcuagg

SEQ ID NO: 1380820 - RNA, 18 nt, Human
ccugagucgugaccugcu

SEQ ID NO: 1380821 - RNA, 23 nt, Human
ccugagucacccuaccugugccu

SEQ ID NO: 1380822 - RNA, 11 nt, Human
ccugaguccca

SEQ ID NO: 1380823 - RNA, 22 nt, Human
ccugagucguacagaaagcugc

SEQ ID NO: 1380824 - RNA, 21 nt, Human
ccugagucguacagaaagcug

SEQ ID NO: 1380825 - RNA, 19 nt, Human
ccugagucguacagaaagc

SEQ ID NO: 1380826 - RNA, 16 nt, Human
ccugagucccaucccu

SEQ ID NO: 1380827 - RNA, 16 nt, Human
ccugcccccaauccau

SEQ ID NO: 1380828 - RNA, 15 nt, Human
ccugcccccaaucca

SEQ ID NO: 1380829 - RNA, 14 nt, Human
ccugccccaggccu

SEQ ID NO: 1380830 - RNA, 18 nt, Human
ccugccccaggccugaaa

SEQ ID NO: 1380831 - RNA, 16 nt, Human
ccugccccaggccuga

SEQ ID NO: 1380832 - RNA, 24 nt, Human
ccugccccaacucuccccugaccu

SEQ ID NO: 1380833 - RNA, 20 nt, Human
ccugcugcugagaaccuggc

SEQ ID NO: 1380834 - RNA, 19 nt, Human
ccugcugcugagaaccugg

SEQ ID NO: 1380835 - RNA, 17 nt, Human
ccugcugcugagaaccu

SEQ ID NO: 1380836 - RNA, 16 nt, Human
ccugcugcugagaacc

SEQ ID NO: 1380837 - RNA, 15 nt, Human
ccugcugcugagaac

SEQ ID NO: 1380838 - RNA, 14 nt, Human
ccugcugcugagaa

SEQ ID NO: 1380839 - RNA, 17 nt, Human
ccugcugcucccucaga

SEQ ID NO: 1380840 - RNA, 18 nt, Human
ccugcugcucccucagac

SEQ ID NO: 1380841 - RNA, 16 nt, Human
ccugcugcucccucag

SEQ ID NO: 1380842 - RNA, 15 nt, Human
ccugcugcucccuca

SEQ ID NO: 1380843 - RNA, 23 nt, Human
ccugcugcugagaaccuggccuu

SEQ ID NO: 1380844 - RNA, 22 nt, Human
ccugcugcugagaaccuggccu

SEQ ID NO: 1380845 - RNA, 21 nt, Human
ccugcugcugagaaccuggcc

SEQ ID NO: 1380846 - RNA, 14 nt, Human
ccugcugcucccuc

SEQ ID NO: 1380847 - RNA, 13 nt, Human
ccugcugcucccu

SEQ ID NO: 1380848 - RNA, 12 nt, Human
ccugcugcuccc

SEQ ID NO: 1380849 - RNA, 21 nt, Human
ccugccucuacugggaaggcu

SEQ ID NO: 1380850 - RNA, 20 nt, Human
ccugccucucaucaacugaa

SEQ ID NO: 1380851 - RNA, 12 nt, Human
ccugccucuacu

SEQ ID NO: 1380852 - RNA, 16 nt, Human
ccugccuccccugccu

SEQ ID NO: 1380853 - RNA, 11 nt, Human
ccugccuccug

SEQ ID NO: 1380854 - RNA, 16 nt, Human
ccugccucccuucaug

SEQ ID NO: 1380855 - RNA, 18 nt, Human
ccuggccgccugggucca

SEQ ID NO: 1380856 - RNA, 16 nt, Human
ccuggccgccuggguc

SEQ ID NO: 1380857 - RNA, 22 nt, Human
ccuggccgcccccugcccccca

SEQ ID NO: 1380858 - RNA, 21 nt, Human
ccuggccgcccccugcccccc

SEQ ID NO: 1380859 - RNA, 14 nt, Human
ccugggcccucucu

SEQ ID NO: 1380860 - RNA, 11 nt, Human
ccugggcccuc

SEQ ID NO: 1380861 - RNA, 20 nt, Human
ccuggccuagaccagcagac

SEQ ID NO: 1380862 - RNA, 17 nt, Human
ccuggccuagaccagca

SEQ ID NO: 1380863 - RNA, 16 nt, Human
ccuggccuagaccagc

SEQ ID NO: 1380864 - RNA, 22 nt, Human
ccuggccuagcauacguacaca

SEQ ID NO: 1380865 - RNA, 13 nt, Human
ccugguggggcag

SEQ ID NO: 1380866 - RNA, 23 nt, Human
ccuggugggccaacaaagaacac

SEQ ID NO: 1380867 - RNA, 14 nt, Human
ccuggugggccaac

SEQ ID NO: 1380868 - RNA, 23 nt, Human
ccugguggcccucuccccugccc

SEQ ID NO: 1380869 - RNA, 22 nt, Human
ccugguggcccucuccccugcc

SEQ ID NO: 1380870 - RNA, 21 nt, Human
ccugguggcccucuccccugc

SEQ ID NO: 1380871 - RNA, 18 nt, Human
ccugguggcccucucccc

SEQ ID NO: 1380872 - RNA, 16 nt, Human
ccugguggcccucucc

SEQ ID NO: 1380873 - RNA, 12 nt, Human
ccugguggcccu

SEQ ID NO: 1380874 - RNA, 24 nt, Human
ccugguggccaugcuccucuuccc

SEQ ID NO: 1380875 - RNA, 20 nt, Human
ccugguggccaugcuccucu

SEQ ID NO: 1380876 - RNA, 18 nt, Human
ccugguggccaugcuccu

SEQ ID NO: 1380877 - RNA, 16 nt, Human
ccugguggccaugcuc

SEQ ID NO: 1380878 - RNA, 14 nt, Human
ccugguggccaugc

SEQ ID NO: 1380879 - RNA, 16 nt, Human
ccugucgauuagacug

SEQ ID NO: 1380880 - RNA, 16 nt, Human
ccugucggagcccugu

SEQ ID NO: 1380881 - RNA, 17 nt, Human
ccugucggagcccuguc

SEQ ID NO: 1380882 - RNA, 21 nt, Human
ccugucggagcccugucuccu

SEQ ID NO: 1380883 - RNA, 21 nt, Human
ccuguccuuuaccaaagauga

SEQ ID NO: 1380884 - RNA, 15 nt, Human
ccuguccugguggua

SEQ ID NO: 1380885 - RNA, 19 nt, Human
ccuguccuuagccuaggcc

SEQ ID NO: 1380886 - RNA, 12 nt, Human
ccuguccugccu

SEQ ID NO: 1380887 - RNA, 22 nt, Human
ccuguccucuuucagcuccuga

SEQ ID NO: 1380888 - RNA, 19 nt, Human
ccuguccugaccugucuca

SEQ ID NO: 1380889 - RNA, 21 nt, Human
ccuguccucuuucagcuccug

SEQ ID NO: 1380890 - RNA, 11 nt, Human
ccuguccugcc

SEQ ID NO: 1380891 - RNA, 20 nt, Human
ccuguaaucauauaauaaau

SEQ ID NO: 1380892 - RNA, 17 nt, Human
ccugggccuugggcucc

SEQ ID NO: 1380893 - RNA, 13 nt, Human
ccugggccuuggg

SEQ ID NO: 1380894 - RNA, 20 nt, Human
ccugggccugcugcugagaa

SEQ ID NO: 1380895 - RNA, 19 nt, Human
ccugggccugcugcugaga

SEQ ID NO: 1380896 - RNA, 18 nt, Human
ccugggccugcugcugag

SEQ ID NO: 1380897 - RNA, 17 nt, Human
ccugggccugcugcuga

SEQ ID NO: 1380898 - RNA, 16 nt, Human
ccugggccugcugcug

SEQ ID NO: 1380899 - RNA, 15 nt, Human
ccugggccugcugcu

SEQ ID NO: 1380900 - RNA, 14 nt, Human
ccugggccugcugc

SEQ ID NO: 1380901 - RNA, 13 nt, Human
ccugggccugcug

SEQ ID NO: 1380902 - RNA, 15 nt, Human
ccugggccugccuca

SEQ ID NO: 1380903 - RNA, 13 nt, Human
ccugggccugccu

SEQ ID NO: 1380904 - RNA, 23 nt, Human
ccugggccuauggagagcccugg

SEQ ID NO: 1380905 - RNA, 12 nt, Human
ccugggccugca

SEQ ID NO: 1380906 - RNA, 22 nt, Human
ccugggccuauggagagcccug

SEQ ID NO: 1380907 - RNA, 21 nt, Human
ccugggccuauggagagcccu

SEQ ID NO: 1380908 - RNA, 20 nt, Human
ccugggccuauggagagccc

SEQ ID NO: 1380909 - RNA, 19 nt, Human
ccugggccuauggagagcc

SEQ ID NO: 1380910 - RNA, 18 nt, Human
ccugggccuauggagagc

SEQ ID NO: 1380911 - RNA, 17 nt, Human
ccugggccuauggagag

SEQ ID NO: 1380912 - RNA, 17 nt, Human
ccugggccgcugccacg

SEQ ID NO: 1380913 - RNA, 16 nt, Human
ccugggccgcugccac

SEQ ID NO: 1380914 - RNA, 13 nt, Human
ccugggccgcugc

SEQ ID NO: 1380915 - RNA, 22 nt, Human
ccugggcccuggggccuguacu

SEQ ID NO: 1380916 - RNA, 21 nt, Human
ccugggcccuggggccuguac

SEQ ID NO: 1380917 - RNA, 20 nt, Human
ccugggcccuggggccugua

SEQ ID NO: 1380918 - RNA, 18 nt, Human
ccugggcccuggggccug

SEQ ID NO: 1380919 - RNA, 17 nt, Human
ccugggcccuggggccu

SEQ ID NO: 1380920 - RNA, 16 nt, Human
ccugggcccuggggcc

SEQ ID NO: 1380921 - RNA, 15 nt, Human
ccugggcccuggggc

SEQ ID NO: 1380922 - RNA, 14 nt, Human
ccugggcccugggg

SEQ ID NO: 1380923 - RNA, 19 nt, Human
ccugggcccugggcuggaa

SEQ ID NO: 1380924 - RNA, 18 nt, Human
ccugggcccugggcugga

SEQ ID NO: 1380925 - RNA, 16 nt, Human
ccugggcccugggcug

SEQ ID NO: 1380926 - RNA, 15 nt, Human
ccugggcccugggcu

SEQ ID NO: 1380927 - RNA, 14 nt, Human
ccugggcccugggc

SEQ ID NO: 1380928 - RNA, 18 nt, Human
ccugggcccucucugcuc

SEQ ID NO: 1380929 - RNA, 15 nt, Human
ccugggcccucucug

SEQ ID NO: 1380930 - RNA, 22 nt, Human
ccuggggccuguacugccugcu

SEQ ID NO: 1380931 - RNA, 23 nt, Human
ccuggggccuguacugccugcuu

SEQ ID NO: 1380932 - RNA, 21 nt, Human
ccuggggccuguacugccugc

SEQ ID NO: 1380933 - RNA, 20 nt, Human
ccuggggccuguacugccug

SEQ ID NO: 1380934 - RNA, 19 nt, Human
ccuggggccuguacugccu

SEQ ID NO: 1380935 - RNA, 18 nt, Human
ccuggggccuguacugcc

SEQ ID NO: 1380936 - RNA, 16 nt, Human
ccuggggccuguacug

SEQ ID NO: 1380937 - RNA, 14 nt, Human
ccuggggccuguac

SEQ ID NO: 1380938 - RNA, 13 nt, Human
ccuggggccugua

SEQ ID NO: 1380939 - RNA, 19 nt, Human
ccugggggccuggcuggcu

SEQ ID NO: 1380940 - RNA, 17 nt, Human
ccugggggccuggcugg

SEQ ID NO: 1380941 - RNA, 15 nt, Human
ccugggggccuggcu

SEQ ID NO: 1380942 - RNA, 14 nt, Human
ccugggggccuggc

SEQ ID NO: 1380943 - RNA, 13 nt, Human
ccugggggccugg

SEQ ID NO: 1380944 - RNA, 12 nt, Human
ccugggggccug

SEQ ID NO: 1380945 - RNA, 23 nt, Human
ccugggggccuggcuggcugagg

SEQ ID NO: 1380946 - RNA, 22 nt, Human
ccugugaaugccacugccuucg

SEQ ID NO: 1380947 - RNA, 21 nt, Human
ccugugaaugccacugccuuc

SEQ ID NO: 1380948 - RNA, 19 nt, Human
ccugugaaugccacugccu

SEQ ID NO: 1380949 - RNA, 17 nt, Human
ccugugaaugccacugc

SEQ ID NO: 1380950 - RNA, 16 nt, Human
ccugugaaugccacug

SEQ ID NO: 1380951 - RNA, 18 nt, Human
ccugugaacccaggacaa

SEQ ID NO: 1380952 - RNA, 17 nt, Human
ccugugaacccaggaca

SEQ ID NO: 1380953 - RNA, 16 nt, Human
ccugugaacccaggac

SEQ ID NO: 1380954 - RNA, 15 nt, Human
ccugugaacccagga

SEQ ID NO: 1380955 - RNA, 14 nt, Human
ccugugaacccagg

SEQ ID NO: 1380956 - RNA, 19 nt, Human
ccugugaccacaacaugag

SEQ ID NO: 1380957 - RNA, 18 nt, Human
ccugugaccacaacauga

SEQ ID NO: 1380958 - RNA, 15 nt, Human
ccugugaccacaaca

SEQ ID NO: 1380959 - RNA, 20 nt, Human
ccugucucucagggccaggc

SEQ ID NO: 1380960 - RNA, 21 nt, Human
ccugucucucagggccaggcc

SEQ ID NO: 1380961 - RNA, 15 nt, Human
ccugucucaccugga

SEQ ID NO: 1380962 - RNA, 22 nt, Human
ccugucgauuagacuggacagc

SEQ ID NO: 1380963 - RNA, 22 nt, Human
ccugucggagcccugucuccuc

SEQ ID NO: 1380964 - RNA, 20 nt, Human
ccugucugucugucuguccc

SEQ ID NO: 1380965 - RNA, 21 nt, Human
ccugucugucugucuguccca

SEQ ID NO: 1380966 - RNA, 19 nt, Human
ccugucuucagagaaccca

SEQ ID NO: 1380967 - RNA, 17 nt, Human
ccugucuuauccuccac

SEQ ID NO: 1380968 - RNA, 22 nt, Human
ccugucugucugucugucccaa

SEQ ID NO: 1380969 - RNA, 22 nt, Human
ccugucuuauccuccaccgucu

SEQ ID NO: 1380970 - RNA, 17 nt, Human
ccgcagugggagcaaac

SEQ ID NO: 1380971 - RNA, 16 nt, Human
ccgcagugggagcaaa

SEQ ID NO: 1380972 - RNA, 23 nt, Human
ccgcaggauuugggcucuuggaa

SEQ ID NO: 1380973 - RNA, 16 nt, Human
ccgcaugcggcccagg

SEQ ID NO: 1380974 - RNA, 17 nt, Human
ccgcaugcggcccagga

SEQ ID NO: 1380975 - RNA, 18 nt, Human
ccggccccaguacacagg

SEQ ID NO: 1380976 - RNA, 22 nt, Human
cccugucucucagggccaggcc

SEQ ID NO: 1380977 - RNA, 21 nt, Human
cccugucucucagggccaggc

SEQ ID NO: 1380978 - RNA, 19 nt, Human
cccugucuccucucucugu

SEQ ID NO: 1380979 - RNA, 16 nt, Human
ccggccugccaggagg

SEQ ID NO: 1380980 - RNA, 18 nt, Human
ccggccugccaggaggac

SEQ ID NO: 1380981 - RNA, 15 nt, Human
ccggccugccaggag

SEQ ID NO: 1380982 - RNA, 14 nt, Human
ccggccugccagga

SEQ ID NO: 1380983 - RNA, 17 nt, Human
ccggccccucccccuga

SEQ ID NO: 1380984 - RNA, 19 nt, Human
ccuccaacccuagcaaaag

SEQ ID NO: 1380985 - RNA, 21 nt, Human
ccucauguacauacccuggcc

SEQ ID NO: 1380986 - RNA, 22 nt, Human
ccucauggccccucugaccugc

SEQ ID NO: 1380987 - RNA, 18 nt, Human
ccucauggccccucugac

SEQ ID NO: 1380988 - RNA, 22 nt, Human
ccuccaaaaugugccuauugcu

SEQ ID NO: 1380989 - RNA, 19 nt, Human
ccuccaaagcuucccacgg

SEQ ID NO: 1380990 - RNA, 17 nt, Human
ccuccaaaaugugccua

SEQ ID NO: 1380991 - RNA, 18 nt, Human
ccucauuuuuuuccuugc

SEQ ID NO: 1380992 - RNA, 19 nt, Human
ccuccaacaccaagcacag

SEQ ID NO: 1380993 - RNA, 18 nt, Human
ccuccaacccuagcaaaa

SEQ ID NO: 1380994 - RNA, 18 nt, Human
ccucccauguucaagcga

SEQ ID NO: 1380995 - RNA, 12 nt, Human
ccucagccuuaa

SEQ ID NO: 1380996 - RNA, 21 nt, Human
ccucagccugggcgcuggucc

SEQ ID NO: 1380997 - RNA, 20 nt, Human
ccucagccugggcgcugguc

SEQ ID NO: 1380998 - RNA, 17 nt, Human
ccucagccugggcgcug

SEQ ID NO: 1380999 - RNA, 16 nt, Human
ccucagccugggcgcu

SEQ ID NO: 1381000 - RNA, 14 nt, Human
ccucagccugggcg

SEQ ID NO: 1381001 - RNA, 13 nt, Human
ccucagccugggc

SEQ ID NO: 1381002 - RNA, 12 nt, Human
ccucagccuggg

SEQ ID NO: 1381003 - RNA, 22 nt, Human
ccucagccuggccagacacagg

SEQ ID NO: 1381004 - RNA, 21 nt, Human
ccucagccuggccagacacag

SEQ ID NO: 1381005 - RNA, 20 nt, Human
ccucagccuggccagacaca

SEQ ID NO: 1381006 - RNA, 16 nt, Human
ccucaaaggcccgcuc

SEQ ID NO: 1381007 - RNA, 21 nt, Human
ccucaaagcaagcauucagaa

SEQ ID NO: 1381008 - RNA, 16 nt, Human
ccucaaagaaagugua

SEQ ID NO: 1381009 - RNA, 14 nt, Human
ccucaaagaaagug

SEQ ID NO: 1381010 - RNA, 23 nt, Human
ccucaaaauuuaacaguuaccug

SEQ ID NO: 1381011 - RNA, 14 nt, Human
ccucaaaacaaagg

SEQ ID NO: 1381012 - RNA, 20 nt, Human
ccucaaaaagauuuccccau

SEQ ID NO: 1381013 - RNA, 13 nt, Human
ccucaggacuggg

SEQ ID NO: 1381014 - RNA, 21 nt, Human
ccucagccuugccagagaucc

SEQ ID NO: 1381015 - RNA, 20 nt, Human
ccucagccuugccagagauc

SEQ ID NO: 1381016 - RNA, 19 nt, Human
ccucagccuugccagagau

SEQ ID NO: 1381017 - RNA, 18 nt, Human
ccucagccuugccagaga

SEQ ID NO: 1381018 - RNA, 17 nt, Human
ccucagccuugccagag

SEQ ID NO: 1381019 - RNA, 15 nt, Human
ccucaggacugggag

SEQ ID NO: 1381020 - RNA, 14 nt, Human
ccucaggacuggga

SEQ ID NO: 1381021 - RNA, 17 nt, Human
ccucaggacugggagcc

SEQ ID NO: 1381022 - RNA, 16 nt, Human
ccucauggccccucug

SEQ ID NO: 1381023 - RNA, 15 nt, Human
ccucauggccccucu

SEQ ID NO: 1381024 - RNA, 16 nt, Human
ccucaggacugggagc

SEQ ID NO: 1381025 - RNA, 23 nt, Human
ccucauggaauuggagcucgugg

SEQ ID NO: 1381026 - RNA, 23 nt, Human
ccccauuccugggaaauauuccc

SEQ ID NO: 1381027 - RNA, 23 nt, Human
ccccaugcacugugaaggacccu

SEQ ID NO: 1381028 - RNA, 19 nt, Human
ccccaugcacugugaagga

SEQ ID NO: 1381029 - RNA, 13 nt, Human
ccccaugcacugu

SEQ ID NO: 1381030 - RNA, 15 nt, Human
ccccaugaccuccag

SEQ ID NO: 1381031 - RNA, 16 nt, Human
ccccaugaccuccagc

SEQ ID NO: 1381032 - RNA, 13 nt, Human
ccccaugaccucc

SEQ ID NO: 1381033 - RNA, 14 nt, Human
ccccaucuugcuuc

SEQ ID NO: 1381034 - RNA, 12 nt, Human
ccccaucuugcu

SEQ ID NO: 1381035 - RNA, 16 nt, Human
ccccauucccgcagug

SEQ ID NO: 1381036 - RNA, 15 nt, Human
ccccugaccugugag

SEQ ID NO: 1381037 - RNA, 22 nt, Human
ccccugaccacucagagacaug

SEQ ID NO: 1381038 - RNA, 18 nt, Human
ccccugaccacucagaga

SEQ ID NO: 1381039 - RNA, 17 nt, Human
ccccugaccacucagag

SEQ ID NO: 1381040 - RNA, 20 nt, Human
ccccugaccacucagagaca

SEQ ID NO: 1381041 - RNA, 20 nt, Human
ccccugaccugugagcccag

SEQ ID NO: 1381042 - RNA, 21 nt, Human
ccccugagacaaauggaggcc

SEQ ID NO: 1381043 - RNA, 15 nt, Human
ccccugcaggaagga

SEQ ID NO: 1381044 - RNA, 14 nt, Human
ccccugcaggaagg

SEQ ID NO: 1381045 - RNA, 23 nt, Human
ccccugcagcuuguagccagccg

SEQ ID NO: 1381046 - RNA, 22 nt, Human
ccccugcagcuuguagccagcc

SEQ ID NO: 1381047 - RNA, 17 nt, Human
ccccugcacuguaaaau

SEQ ID NO: 1381048 - RNA, 16 nt, Human
ccccugcacuguaaaa

SEQ ID NO: 1381049 - RNA, 14 nt, Human
ccccugcacuguaa

SEQ ID NO: 1381050 - RNA, 18 nt, Human
ccccugcacuguaaaaug

SEQ ID NO: 1381051 - RNA, 11 nt, Human
ccccugcacug

SEQ ID NO: 1381052 - RNA, 19 nt, Human
ccccuucuccccugcacug

SEQ ID NO: 1381053 - RNA, 12 nt, Human
ccccuucucccc

SEQ ID NO: 1381054 - RNA, 18 nt, Human
ccccuucuauuuggggcu

SEQ ID NO: 1381055 - RNA, 22 nt, Human
ccccugcauuggaacuggaggc

SEQ ID NO: 1381056 - RNA, 21 nt, Human
ccccugcauuggaacuggagg

SEQ ID NO: 1381057 - RNA, 22 nt, Human
ccccugcaggaaggagcugccu

SEQ ID NO: 1381058 - RNA, 23 nt, Human
ccccugcaggaaggagcugccug

SEQ ID NO: 1381059 - RNA, 21 nt, Human
ccccugcaggaaggagcugcc

SEQ ID NO: 1381060 - RNA, 20 nt, Human
ccccugcaggaaggagcugc

SEQ ID NO: 1381061 - RNA, 19 nt, Human
ccccugcaggaaggagcug

SEQ ID NO: 1381062 - RNA, 18 nt, Human
ccccugcaggaaggagcu

SEQ ID NO: 1381063 - RNA, 20 nt, Human
cccucacuggcucuccuggc

SEQ ID NO: 1381064 - RNA, 19 nt, Human
cccucacuggcucuccugg

SEQ ID NO: 1381065 - RNA, 16 nt, Human
cccucagacuggggca

SEQ ID NO: 1381066 - RNA, 15 nt, Human
cccucagacuggggc

SEQ ID NO: 1381067 - RNA, 22 nt, Human
ccccuugaggucucagccccuu

SEQ ID NO: 1381068 - RNA, 19 nt, Human
ccccuugaggucucagccc

SEQ ID NO: 1381069 - RNA, 23 nt, Human
ccccuugacaacuggcaggcagg

SEQ ID NO: 1381070 - RNA, 18 nt, Human
ccccuugacaacuggcag

SEQ ID NO: 1381071 - RNA, 21 nt, Human
ccccuucugcucagcucuggg

SEQ ID NO: 1381072 - RNA, 20 nt, Human
ccccuucugcucagcucugg

SEQ ID NO: 1381073 - RNA, 19 nt, Human
ccccuucugcucagcucug

SEQ ID NO: 1381074 - RNA, 14 nt, Human
ccccuucugcucag

SEQ ID NO: 1381075 - RNA, 18 nt, Human
ccccuucuccccugcacu

SEQ ID NO: 1381076 - RNA, 22 nt, Human
ccccuugaaggagaaucaucag

SEQ ID NO: 1381077 - RNA, 14 nt, Human
cccuaucuuugcca

SEQ ID NO: 1381078 - RNA, 16 nt, Human
cccuaucuuugccacc

SEQ ID NO: 1381079 - RNA, 19 nt, Human
cccuaucuuugccacccuc

SEQ ID NO: 1381080 - RNA, 14 nt, Human
cccuaucuguauuc

SEQ ID NO: 1381081 - RNA, 21 nt, Human
cccuaucuuugccacccucau

SEQ ID NO: 1381082 - RNA, 14 nt, Human
cccucacacacccu

SEQ ID NO: 1381083 - RNA, 23 nt, Human
cccucaagucuuucucuuucccu

SEQ ID NO: 1381084 - RNA, 15 nt, Human
cccucacacacccug

SEQ ID NO: 1381085 - RNA, 10 nt, Human
cccucacacu

SEQ ID NO: 1381086 - RNA, 12 nt, Human
cccucacacugg

SEQ ID NO: 1381087 - RNA, 13 nt, Human
cccucacacuggg

SEQ ID NO: 1381088 - RNA, 14 nt, Human
cccucacacuggga

SEQ ID NO: 1381089 - RNA, 22 nt, Human
cccaguuucuaaacuggagacu

SEQ ID NO: 1381090 - RNA, 21 nt, Human
cccaguuucuaaacuggagac

SEQ ID NO: 1381091 - RNA, 20 nt, Human
cccaguuucuaaacuggaga

SEQ ID NO: 1381092 - RNA, 19 nt, Human
cccaguuucuaaacuggag

SEQ ID NO: 1381093 - RNA, 19 nt, Human
cccaggggaacacugggga

SEQ ID NO: 1381094 - RNA, 23 nt, Human
cccagggcuguaacugccaggcu

SEQ ID NO: 1381095 - RNA, 21 nt, Human
cccagggcuguaacugccagg

SEQ ID NO: 1381096 - RNA, 21 nt, Human
cccagggcugggaggaaggac

SEQ ID NO: 1381097 - RNA, 20 nt, Human
cccagggcugggaggaagga

SEQ ID NO: 1381098 - RNA, 17 nt, Human
cccagggcugggaggaa

SEQ ID NO: 1381099 - RNA, 16 nt, Human
cccagggcugggagga

SEQ ID NO: 1381100 - RNA, 14 nt, Human
cccagggcugggag

SEQ ID NO: 1381101 - RNA, 16 nt, Human
cccagggcucuguaag

SEQ ID NO: 1381102 - RNA, 13 nt, Human
cccagggcucugu

SEQ ID NO: 1381103 - RNA, 15 nt, Human
cccagggcuccugca

SEQ ID NO: 1381104 - RNA, 14 nt, Human
cccagggcuccugc

SEQ ID NO: 1381105 - RNA, 23 nt, Human
cccaguuucuaaacuggagacug

SEQ ID NO: 1381106 - RNA, 24 nt, Human
ccccagcaaagcccccagagccca

SEQ ID NO: 1381107 - RNA, 22 nt, Human
ccccagcaaagcccccagagcc

SEQ ID NO: 1381108 - RNA, 14 nt, Human
ccccagcaaagccc

SEQ ID NO: 1381109 - RNA, 13 nt, Human
cccauuucagcug

SEQ ID NO: 1381110 - RNA, 12 nt, Human
cccauuucagcu

SEQ ID NO: 1381111 - RNA, 19 nt, Human
cccauuuauagauggggga

SEQ ID NO: 1381112 - RNA, 14 nt, Human
cccagcagcugcca

SEQ ID NO: 1381113 - RNA, 15 nt, Human
cccagcagcugccag

SEQ ID NO: 1381114 - RNA, 21 nt, Human
cccagcacugcuugaggaaaa

SEQ ID NO: 1381115 - RNA, 18 nt, Human
cccagcacuuguguuguc

SEQ ID NO: 1381116 - RNA, 13 nt, Human
cccagcccacccc

SEQ ID NO: 1381117 - RNA, 15 nt, Human
cccagcccacccccg

SEQ ID NO: 1381118 - RNA, 15 nt, Human
cccaggaacugggcc

SEQ ID NO: 1381119 - RNA, 22 nt, Human
cccagcugugcuuaugguacca

SEQ ID NO: 1381120 - RNA, 14 nt, Human
cccaggcugggaac

SEQ ID NO: 1381121 - RNA, 21 nt, Human
cccaggcugggaacucaucug

SEQ ID NO: 1381122 - RNA, 13 nt, Human
cccaggcugggaa

SEQ ID NO: 1381123 - RNA, 12 nt, Human
cccaggcuggga

SEQ ID NO: 1381124 - RNA, 16 nt, Human
cccaggacaagcaugg

SEQ ID NO: 1381125 - RNA, 21 nt, Human
cccaggacaagcaugguccca

SEQ ID NO: 1381126 - RNA, 22 nt, Human
cccaggaagucucaucugggga

SEQ ID NO: 1381127 - RNA, 23 nt, Human
cccaggaaucaguuuaaaagcac

SEQ ID NO: 1381128 - RNA, 20 nt, Human
ccacucugcuucucugacuu

SEQ ID NO: 1381129 - RNA, 19 nt, Human
ccacucugcuucucugacu

SEQ ID NO: 1381130 - RNA, 17 nt, Human
ccacucugcuucucuga

SEQ ID NO: 1381131 - RNA, 14 nt, Human
ccacucugcuucuc

SEQ ID NO: 1381132 - RNA, 13 nt, Human
ccacucugcuucu

SEQ ID NO: 1381133 - RNA, 18 nt, Human
ccacucugcucugaugca

SEQ ID NO: 1381134 - RNA, 15 nt, Human
ccacucugcucugau

SEQ ID NO: 1381135 - RNA, 14 nt, Human
ccacucugcucuga

SEQ ID NO: 1381136 - RNA, 13 nt, Human
ccacucugcucug

SEQ ID NO: 1381137 - RNA, 13 nt, Human
ccacucuccuagg

SEQ ID NO: 1381138 - RNA, 14 nt, Human
ccacucuccuaggc

SEQ ID NO: 1381139 - RNA, 23 nt, Human
ccacucuggagcauuucucauca

SEQ ID NO: 1381140 - RNA, 23 nt, Human
ccacucugcucugaugcaucaga

SEQ ID NO: 1381141 - RNA, 18 nt, Human
ccaggaacagcaaaugca

SEQ ID NO: 1381142 - RNA, 13 nt, Human
ccagcucagcacu

SEQ ID NO: 1381143 - RNA, 20 nt, Human
ccagcuuccuucagagagca

SEQ ID NO: 1381144 - RNA, 23 nt, Human
ccagcuuccuucagagagcagug

SEQ ID NO: 1381145 - RNA, 15 nt, Human
ccagcuuccuucaga

SEQ ID NO: 1381146 - RNA, 14 nt, Human
ccagcuuccuucag

SEQ ID NO: 1381147 - RNA, 13 nt, Human
ccagcuuccuuca

SEQ ID NO: 1381148 - RNA, 18 nt, Human
ccagccccuuagacagag

SEQ ID NO: 1381149 - RNA, 19 nt, Human
ccagccccuguagaacuca

SEQ ID NO: 1381150 - RNA, 23 nt, Human
ccagccccuggccccaggaccug

SEQ ID NO: 1381151 - RNA, 21 nt, Human
ccagccccuggccccaggacc

SEQ ID NO: 1381152 - RNA, 13 nt, Human
ccagccccuggcc

SEQ ID NO: 1381153 - RNA, 18 nt, Human
ccagcuaauaacugaucu

SEQ ID NO: 1381154 - RNA, 16 nt, Human
ccagcuaagggguggg

SEQ ID NO: 1381155 - RNA, 15 nt, Human
ccagcuaaggggugg

SEQ ID NO: 1381156 - RNA, 19 nt, Human
ccagcuaagaaccuggaac

SEQ ID NO: 1381157 - RNA, 18 nt, Human
ccagcuaagaaccuggaa

SEQ ID NO: 1381158 - RNA, 17 nt, Human
ccagcuaagaaccugga

SEQ ID NO: 1381159 - RNA, 15 nt, Human
ccagcuaagaaccug

SEQ ID NO: 1381160 - RNA, 14 nt, Human
ccagcuaagaaccu

SEQ ID NO: 1381161 - RNA, 13 nt, Human
ccagcuaagaacc

SEQ ID NO: 1381162 - RNA, 18 nt, Human
ccagcgucggucugugcc

SEQ ID NO: 1381163 - RNA, 19 nt, Human
ccagcgucggucugugccc

SEQ ID NO: 1381164 - RNA, 17 nt, Human
ccagcgucggucugugc

SEQ ID NO: 1381165 - RNA, 16 nt, Human
ccagcgucggucugug

SEQ ID NO: 1381166 - RNA, 19 nt, Human
ccagccccuuagacagagg

SEQ ID NO: 1381167 - RNA, 20 nt, Human
ccagcucaggacagaugcca

SEQ ID NO: 1381168 - RNA, 23 nt, Human
ccagcucaggacagaugccacac

SEQ ID NO: 1381169 - RNA, 19 nt, Human
ccagcucaggacagaugcc

SEQ ID NO: 1381170 - RNA, 13 nt, Human
ccagcucaggaca

SEQ ID NO: 1381171 - RNA, 15 nt, Human
ccagcucagcacugc

SEQ ID NO: 1381172 - RNA, 12 nt, Human
ccagcucagcac

SEQ ID NO: 1381173 - RNA, 11 nt, Human
ccagcucagca

SEQ ID NO: 1381174 - RNA, 15 nt, Human
ccagcuaauuuuugu

SEQ ID NO: 1381175 - RNA, 24 nt, Human
ccaggagggacaaaggagccugug

SEQ ID NO: 1381176 - RNA, 23 nt, Human
ccaggagggacaaaggagccugu

SEQ ID NO: 1381177 - RNA, 22 nt, Human
ccaggagggacaaaggagccug

SEQ ID NO: 1381178 - RNA, 21 nt, Human
ccaggagggacaaaggagccu

SEQ ID NO: 1381179 - RNA, 23 nt, Human
ccaggggcugcuuccuccuggaa

SEQ ID NO: 1381180 - RNA, 22 nt, Human
ccaggggcugcuuccuccugga

SEQ ID NO: 1381181 - RNA, 21 nt, Human
ccaggggcugcuuccuccugg

SEQ ID NO: 1381182 - RNA, 20 nt, Human
ccaggggcugcuuccuccug

SEQ ID NO: 1381183 - RNA, 16 nt, Human
ccaggggcucccuccg

SEQ ID NO: 1381184 - RNA, 15 nt, Human
ccaggggcucccucc

SEQ ID NO: 1381185 - RNA, 11 nt, Human
ccaggcuggga

SEQ ID NO: 1381186 - RNA, 16 nt, Human
ccaggcaaggcugugg

SEQ ID NO: 1381187 - RNA, 15 nt, Human
ccaggcaaggcugug

SEQ ID NO: 1381188 - RNA, 14 nt, Human
ccaggcaaggcugu

SEQ ID NO: 1381189 - RNA, 19 nt, Human
ccaggaggugccacuggag

SEQ ID NO: 1381190 - RNA, 21 nt, Human
ccaggaggugccacuggagug

SEQ ID NO: 1381191 - RNA, 18 nt, Human
ccaggaggugccacugga

SEQ ID NO: 1381192 - RNA, 19 nt, Human
ccaggaguggguggggagu

SEQ ID NO: 1381193 - RNA, 12 nt, Human
ccaggcaaggcu

SEQ ID NO: 1381194 - RNA, 14 nt, Human
ccaguauuuuaaaa

SEQ ID NO: 1381195 - RNA, 23 nt, Human
ccagggggagcugggccuggucu

SEQ ID NO: 1381196 - RNA, 15 nt, Human
ccaguccccccaccc

SEQ ID NO: 1381197 - RNA, 17 nt, Human
ccaguccccccacccuc

SEQ ID NO: 1381198 - RNA, 22 nt, Human
ccaggggcucccuccgccccca

SEQ ID NO: 1381199 - RNA, 15 nt, Human
ccagggggcaagagg

SEQ ID NO: 1381200 - RNA, 14 nt, Human
ccagucaaccuggg

SEQ ID NO: 1381201 - RNA, 18 nt, Human
ccaguauuuagaagccaa

SEQ ID NO: 1381202 - RNA, 17 nt, Human
ccaguauuuagaagcca

SEQ ID NO: 1381203 - RNA, 23 nt, Human
ccauuucuaauuauguagcucuu

SEQ ID NO: 1381204 - RNA, 21 nt, Human
ccauuucuaauuauguagcuc

SEQ ID NO: 1381205 - RNA, 14 nt, Human
ccauuucuaauuau

SEQ ID NO: 1381206 - RNA, 13 nt, Human
ccauuucuaauua

SEQ ID NO: 1381207 - RNA, 12 nt, Human
ccauuucuaauu

SEQ ID NO: 1381208 - RNA, 11 nt, Human
ccauuucuaau

SEQ ID NO: 1381209 - RNA, 21 nt, Human
ccauuuagguuucugaguucc

SEQ ID NO: 1381210 - RNA, 16 nt, Human
ccauuuagguuucuga

SEQ ID NO: 1381211 - RNA, 22 nt, Human
ccauuuacauguuuuaaagaaa

SEQ ID NO: 1381212 - RNA, 20 nt, Human
ccauuuacauguuuuaaaga

SEQ ID NO: 1381213 - RNA, 17 nt, Human
ccauuuacauguuuuaa

SEQ ID NO: 1381214 - RNA, 20 nt, Human
ccauuuaauggggaggacaa

SEQ ID NO: 1381215 - RNA, 19 nt, Human
ccauuuaaauuuuuuuccu

SEQ ID NO: 1381216 - RNA, 24 nt, Human
ccauugaggcuugguuccuuccca

SEQ ID NO: 1381217 - RNA, 22 nt, Human
ccauugaauucuugguugagga

SEQ ID NO: 1381218 - RNA, 13 nt, Human
ccauugaauucuu

SEQ ID NO: 1381219 - RNA, 21 nt, Human
ccauugaaggcuuaaacccau

SEQ ID NO: 1381220 - RNA, 17 nt, Human
ccauugaaggcuuaaac

SEQ ID NO: 1381221 - RNA, 12 nt, Human
ccauugaaggcu

SEQ ID NO: 1381222 - RNA, 11 nt, Human
ccauugaaggc

SEQ ID NO: 1381223 - RNA, 13 nt, Human
ccauaacugaaca

SEQ ID NO: 1381224 - RNA, 14 nt, Human
ccauacauuugugu

SEQ ID NO: 1381225 - RNA, 13 nt, Human
ccauacauuugug

SEQ ID NO: 1381226 - RNA, 14 nt, Human
ccaguuuuuauuaa

SEQ ID NO: 1381227 - RNA, 22 nt, Human
ccaguuuggguaaaauacuuuu

SEQ ID NO: 1381228 - RNA, 20 nt, Human
ccaguuuggguaaaauacuu

SEQ ID NO: 1381229 - RNA, 13 nt, Human
ccaguuugcuuug

SEQ ID NO: 1381230 - RNA, 17 nt, Human
ccauccuacccccugug

SEQ ID NO: 1381231 - RNA, 22 nt, Human
ccaucccuggcccccucccugg

SEQ ID NO: 1381232 - RNA, 23 nt, Human
ccaucccuggcccccucccugga

SEQ ID NO: 1381233 - RNA, 19 nt, Human
ccaucccuggcccccuccc

SEQ ID NO: 1381234 - RNA, 16 nt, Human
ccaucccuggcccccu

SEQ ID NO: 1381235 - RNA, 13 nt, Human
ccaucccuggccc

SEQ ID NO: 1381236 - RNA, 12 nt, Human
ccaucccugcgu

SEQ ID NO: 1381237 - RNA, 22 nt, Human
caaugcugugcccuaaagugua

SEQ ID NO: 1381238 - RNA, 21 nt, Human
caaugcuuugccccugagaca

SEQ ID NO: 1381239 - RNA, 18 nt, Human
caauuguguagccuuuuu

SEQ ID NO: 1381240 - RNA, 20 nt, Human
caauuguguagccuuuuugu

SEQ ID NO: 1381241 - RNA, 17 nt, Human
caauuguguagccuuuu

SEQ ID NO: 1381242 - RNA, 16 nt, Human
caauuguguagccuuu

SEQ ID NO: 1381243 - RNA, 20 nt, Human
caauucuucccuaucuuugc

SEQ ID NO: 1381244 - RNA, 15 nt, Human
caauuguguagccuu

SEQ ID NO: 1381245 - RNA, 17 nt, Human
caauucuucccuaucuu

SEQ ID NO: 1381246 - RNA, 14 nt, Human
caaugcuguauuuu

SEQ ID NO: 1381247 - RNA, 21 nt, Human
caauauuucagauaaucacaa

SEQ ID NO: 1381248 - RNA, 20 nt, Human
caauauuucagauaaucaca

SEQ ID NO: 1381249 - RNA, 12 nt, Human
caauauuucaga

SEQ ID NO: 1381250 - RNA, 20 nt, Human
cacaagccucugcccaggca

SEQ ID NO: 1381251 - RNA, 15 nt, Human
cacaagccucugccc

SEQ ID NO: 1381252 - RNA, 15 nt, Human
cacaagccugaggga

SEQ ID NO: 1381253 - RNA, 13 nt, Human
cacaagccugagg

SEQ ID NO: 1381254 - RNA, 12 nt, Human
cacaagccugag

SEQ ID NO: 1381255 - RNA, 22 nt, Human
cacaagccucugcccaggcacu

SEQ ID NO: 1381256 - RNA, 23 nt, Human
cacaagauugguguuuuuuucua

SEQ ID NO: 1381257 - RNA, 22 nt, Human
cacaagauugguguuuuuuucu

SEQ ID NO: 1381258 - RNA, 17 nt, Human
cacaagauugguguuuu

SEQ ID NO: 1381259 - RNA, 15 nt, Human
cacaagauugguguu

SEQ ID NO: 1381260 - RNA, 18 nt, Human
cacaagacugcacaucaa

SEQ ID NO: 1381261 - RNA, 20 nt, Human
cacaagacugacgccagggu

SEQ ID NO: 1381262 - RNA, 11 nt, Human
cacaagacuga

SEQ ID NO: 1381263 - RNA, 16 nt, Human
cacaagacugcacauc

SEQ ID NO: 1381264 - RNA, 22 nt, Human
caaguuguuccuuaagucagaa

SEQ ID NO: 1381265 - RNA, 21 nt, Human
caaguuguuccuuaagucaga

SEQ ID NO: 1381266 - RNA, 18 nt, Human
caaguugugccaaauuau

SEQ ID NO: 1381267 - RNA, 19 nt, Human
caaguugugccaaauuauu

SEQ ID NO: 1381268 - RNA, 13 nt, Human
caaguuggaguca

SEQ ID NO: 1381269 - RNA, 15 nt, Human
caaguuggagucacu

SEQ ID NO: 1381270 - RNA, 15 nt, Human
caaguugcuaauaca

SEQ ID NO: 1381271 - RNA, 19 nt, Human
caaguugaggacuucuugc

SEQ ID NO: 1381272 - RNA, 21 nt, Human
caaguucuaagauucuaauga

SEQ ID NO: 1381273 - RNA, 20 nt, Human
caaguucuaagauucuaaug

SEQ ID NO: 1381274 - RNA, 18 nt, Human
caaguucuaagauucuaa

SEQ ID NO: 1381275 - RNA, 17 nt, Human
caaguucuaagauucua

SEQ ID NO: 1381276 - RNA, 13 nt, Human
caaguauuauacc

SEQ ID NO: 1381277 - RNA, 20 nt, Human
caaguauuagaauaccacag

SEQ ID NO: 1381278 - RNA, 22 nt, Human
caagauuccggauccuaagcau

SEQ ID NO: 1381279 - RNA, 19 nt, Human
caagauuccggauccuaag

SEQ ID NO: 1381280 - RNA, 12 nt, Human
caagauucuaga

SEQ ID NO: 1381281 - RNA, 18 nt, Human
caagauuccggauccuaa

SEQ ID NO: 1381282 - RNA, 10 nt, Human
caagauuccg

SEQ ID NO: 1381283 - RNA, 15 nt, Human
caagacccccagcac

SEQ ID NO: 1381284 - RNA, 23 nt, Human
caaguagaaucucaguugauuuu

SEQ ID NO: 1381285 - RNA, 13 nt, Human
caaguagaaucuc

SEQ ID NO: 1381286 - RNA, 19 nt, Human
caaguacaaccacacccac

SEQ ID NO: 1381287 - RNA, 24 nt, Human
caaguacaaccacacccacacuca

SEQ ID NO: 1381288 - RNA, 22 nt, Human
caaguagauaggaagaaagaag

SEQ ID NO: 1381289 - RNA, 16 nt, Human
caaguagaaucucagu

SEQ ID NO: 1381290 - RNA, 14 nt, Human
caaguauuagaaua

SEQ ID NO: 1381291 - RNA, 17 nt, Human
caauaaaaauguuuaac

SEQ ID NO: 1381292 - RNA, 13 nt, Human
caauaaaaauguu

SEQ ID NO: 1381293 - RNA, 18 nt, Human
caccaggcagccucuggg

SEQ ID NO: 1381294 - RNA, 22 nt, Human
caccaggccaccuccccagcau

SEQ ID NO: 1381295 - RNA, 19 nt, Human
caccaggccaccuccccag

SEQ ID NO: 1381296 - RNA, 15 nt, Human
caccaggccaccucc

SEQ ID NO: 1381297 - RNA, 14 nt, Human
caccaggccaccuc

SEQ ID NO: 1381298 - RNA, 13 nt, Human
caccaggccaccu

SEQ ID NO: 1381299 - RNA, 15 nt, Human
caccaggcagccucu

SEQ ID NO: 1381300 - RNA, 14 nt, Human
caccaggcagccuc

SEQ ID NO: 1381301 - RNA, 15 nt, Human
caccagcugugucca

SEQ ID NO: 1381302 - RNA, 14 nt, Human
caccagcugugucc

SEQ ID NO: 1381303 - RNA, 21 nt, Human
caccaggcugagguccugauc

SEQ ID NO: 1381304 - RNA, 14 nt, Human
caccaggcugcuca

SEQ ID NO: 1381305 - RNA, 21 nt, Human
caccaggcugcucagggcugg

SEQ ID NO: 1381306 - RNA, 23 nt, Human
caccaggcgcuaauucaaggaau

SEQ ID NO: 1381307 - RNA, 17 nt, Human
caccaggcgcuaauuca

SEQ ID NO: 1381308 - RNA, 15 nt, Human
caccaaaacugcucc

SEQ ID NO: 1381309 - RNA, 17 nt, Human
cacauuuuuuaggaaau

SEQ ID NO: 1381310 - RNA, 13 nt, Human
cacauuuuucuua

SEQ ID NO: 1381311 - RNA, 14 nt, Human
cacauuuuucuuag

SEQ ID NO: 1381312 - RNA, 17 nt, Human
cacauuuuuuaaaugca

SEQ ID NO: 1381313 - RNA, 21 nt, Human
cacauuuuuuaaaugcaccug

SEQ ID NO: 1381314 - RNA, 15 nt, Human
cacauuuuaaaagug

SEQ ID NO: 1381315 - RNA, 18 nt, Human
cacauuuuccuuuucaaa

SEQ ID NO: 1381316 - RNA, 15 nt, Human
cacauuuuauuuuau

SEQ ID NO: 1381317 - RNA, 21 nt, Human
cacauuugcuuuuugugauau

SEQ ID NO: 1381318 - RNA, 19 nt, Human
cacauuuggaauacuuuuu

SEQ ID NO: 1381319 - RNA, 17 nt, Human
cacauuuggaauacuuu

SEQ ID NO: 1381320 - RNA, 16 nt, Human
cacauuuggaauacuu

SEQ ID NO: 1381321 - RNA, 19 nt, Human
cacauuugcuuuuugugau

SEQ ID NO: 1381322 - RNA, 17 nt, Human
cacauuucuaaaaucuu

SEQ ID NO: 1381323 - RNA, 13 nt, Human
cacauuucuaaaa

SEQ ID NO: 1381324 - RNA, 17 nt, Human
cacaucuaaccucaucu

SEQ ID NO: 1381325 - RNA, 19 nt, Human
cacaucgcagauucucccu

SEQ ID NO: 1381326 - RNA, 22 nt, Human
cacauccuccacguucugcuca

SEQ ID NO: 1381327 - RNA, 21 nt, Human
cacaucccugggccugcugcu

SEQ ID NO: 1381328 - RNA, 20 nt, Human
cacaucccugggccugcugc

SEQ ID NO: 1381329 - RNA, 18 nt, Human
cacaucccugggccugcu

SEQ ID NO: 1381330 - RNA, 17 nt, Human
cacaucccugggccugc

SEQ ID NO: 1381331 - RNA, 16 nt, Human
cacaucccugggccug

SEQ ID NO: 1381332 - RNA, 15 nt, Human
cacaucccugggccu

SEQ ID NO: 1381333 - RNA, 14 nt, Human
cacaucccugggcc

SEQ ID NO: 1381334 - RNA, 13 nt, Human
cacaucccugggc

SEQ ID NO: 1381335 - RNA, 22 nt, Human
cacaucccugggccugcugcug

SEQ ID NO: 1381336 - RNA, 12 nt, Human
cacaucccuggg

SEQ ID NO: 1381337 - RNA, 22 nt, Human
cacaucagcacgauuucuguuu

SEQ ID NO: 1381338 - RNA, 20 nt, Human
cacaucagcacgauuucugu

SEQ ID NO: 1381339 - RNA, 21 nt, Human
cacaucagcacgauuucuguu

SEQ ID NO: 1381340 - RNA, 16 nt, Human
cacaguagucuugaug

SEQ ID NO: 1381341 - RNA, 14 nt, Human
cacaggucuagacu

SEQ ID NO: 1381342 - RNA, 13 nt, Human
cacaggucuagac

SEQ ID NO: 1381343 - RNA, 14 nt, Human
cacaggucccaaau

SEQ ID NO: 1381344 - RNA, 13 nt, Human
cacaguagucuug

SEQ ID NO: 1381345 - RNA, 19 nt, Human
cacagaagugcuuucuucu

SEQ ID NO: 1381346 - RNA, 21 nt, Human
cacagcggagguguggagccg

SEQ ID NO: 1381347 - RNA, 18 nt, Human
cacagacauacuaaccag

SEQ ID NO: 1381348 - RNA, 19 nt, Human
cacagacagggucaaagug

SEQ ID NO: 1381349 - RNA, 16 nt, Human
cacagcuacucucccc

SEQ ID NO: 1381350 - RNA, 22 nt, Human
cacagcuaugaaggcuguacac

SEQ ID NO: 1381351 - RNA, 12 nt, Human
cacagcuaugaa

SEQ ID NO: 1381352 - RNA, 21 nt, Human
cacaggucccaaauggcccug

SEQ ID NO: 1381353 - RNA, 23 nt, Human
cacagggucugcucuuucucugc

SEQ ID NO: 1381354 - RNA, 19 nt, Human
cacagggucugcucuuucu

SEQ ID NO: 1381355 - RNA, 17 nt, Human
cacagggucugcucuuu

SEQ ID NO: 1381356 - RNA, 16 nt, Human
cacagggucugcucuu

SEQ ID NO: 1381357 - RNA, 15 nt, Human
cacagggcaguaccu

SEQ ID NO: 1381358 - RNA, 11 nt, Human
cacagggcagu

SEQ ID NO: 1381359 - RNA, 21 nt, Human
cacagggcaguaccugagggu

SEQ ID NO: 1381360 - RNA, 18 nt, Human
cacagggcaguaccugag

SEQ ID NO: 1381361 - RNA, 21 nt, Human
cacagggccuuuggcaggugc

SEQ ID NO: 1381362 - RNA, 13 nt, Human
cacuuucccaccc

SEQ ID NO: 1381363 - RNA, 18 nt, Human
cacuuucagcugucuuuu

SEQ ID NO: 1381364 - RNA, 17 nt, Human
cacuuucagcugucuuu

SEQ ID NO: 1381365 - RNA, 16 nt, Human
cacuuucagcugucuu

SEQ ID NO: 1381366 - RNA, 15 nt, Human
cacuuucagcugucu

SEQ ID NO: 1381367 - RNA, 14 nt, Human
cacuuucagcuguc

SEQ ID NO: 1381368 - RNA, 13 nt, Human
cacuuucagcugu

SEQ ID NO: 1381369 - RNA, 12 nt, Human
cacuuucagcug

SEQ ID NO: 1381370 - RNA, 11 nt, Human
cacuuucagcu

SEQ ID NO: 1381371 - RNA, 23 nt, Human
cacuggucacggauuugugucug

SEQ ID NO: 1381372 - RNA, 15 nt, Human
cacuggggcaggggc

SEQ ID NO: 1381373 - RNA, 13 nt, Human
cacuggggcaggg

SEQ ID NO: 1381374 - RNA, 20 nt, Human
cacuggucuguuugcauuug

SEQ ID NO: 1381375 - RNA, 21 nt, Human
cacuggucugcuguuccagug

SEQ ID NO: 1381376 - RNA, 16 nt, Human
cacuggucugcuguuc

SEQ ID NO: 1381377 - RNA, 15 nt, Human
cacuggucugcuguc

SEQ ID NO: 1381378 - RNA, 14 nt, Human
cacuggucugcugu

SEQ ID NO: 1381379 - RNA, 22 nt, Human
cacuggggagcccgucucagug

SEQ ID NO: 1381380 - RNA, 21 nt, Human
cacuggggagcccgucucagu

SEQ ID NO: 1381381 - RNA, 21 nt, Human
cacuggggacuuggccucucu

SEQ ID NO: 1381382 - RNA, 20 nt, Human
cacuggggacuuggccucuc

SEQ ID NO: 1381383 - RNA, 19 nt, Human
cacuggggacuuggccucu

SEQ ID NO: 1381384 - RNA, 18 nt, Human
cacuggggacuuggccuc

SEQ ID NO: 1381385 - RNA, 16 nt, Human
cacuggggaaaacucc

SEQ ID NO: 1381386 - RNA, 22 nt, Human
cacuuguccuuagccuggaccu

SEQ ID NO: 1381387 - RNA, 21 nt, Human
cacuuguccuuagccuggacc

SEQ ID NO: 1381388 - RNA, 20 nt, Human
cacuuguccuuagccuggac

SEQ ID NO: 1381389 - RNA, 19 nt, Human
cacuuguccuuagccugga

SEQ ID NO: 1381390 - RNA, 20 nt, Human
cacuuguaauuuuguaucuu

SEQ ID NO: 1381391 - RNA, 17 nt, Human
cacuuguacaaaauaaa

SEQ ID NO: 1381392 - RNA, 12 nt, Human
cacuuguacaaa

SEQ ID NO: 1381393 - RNA, 21 nt, Human
cacuuacugguaggaccaagc

SEQ ID NO: 1381394 - RNA, 15 nt, Human
cacuuacugguagga

SEQ ID NO: 1381395 - RNA, 21 nt, Human
cacuuacuuuuucuggucucu

SEQ ID NO: 1381396 - RNA, 16 nt, Human
cacuuacuugcuuauu

SEQ ID NO: 1381397 - RNA, 20 nt, Human
cacuguuuagaacacacaca

SEQ ID NO: 1381398 - RNA, 19 nt, Human
cacuguuuauacacugugu

SEQ ID NO: 1381399 - RNA, 21 nt, Human
cacuguuuauacacuguguaa

SEQ ID NO: 1381400 - RNA, 19 nt, Human
cacuguuucaaacuuuacu

SEQ ID NO: 1381401 - RNA, 19 nt, Human
cagaaauuguauauuguaa

SEQ ID NO: 1381402 - RNA, 18 nt, Human
cagaaauuguauauugua

SEQ ID NO: 1381403 - RNA, 16 nt, Human
cagaaauuguauauug

SEQ ID NO: 1381404 - RNA, 15 nt, Human
cagaaauuguauauu

SEQ ID NO: 1381405 - RNA, 14 nt, Human
cagaaauuguauau

SEQ ID NO: 1381406 - RNA, 13 nt, Human
cagaaauuguaua

SEQ ID NO: 1381407 - RNA, 12 nt, Human
cagaaauuguau

SEQ ID NO: 1381408 - RNA, 20 nt, Human
cagaaauucaauuuggauuu

SEQ ID NO: 1381409 - RNA, 16 nt, Human
cagaaauucaauuugg

SEQ ID NO: 1381410 - RNA, 14 nt, Human
cagaagugcaucug

SEQ ID NO: 1381411 - RNA, 12 nt, Human
cagaagugcauc

SEQ ID NO: 1381412 - RNA, 16 nt, Human
cagaaguuaguuugua

SEQ ID NO: 1381413 - RNA, 17 nt, Human
cagaagugugacuggcu

SEQ ID NO: 1381414 - RNA, 13 nt, Human
cagaagugugacu

SEQ ID NO: 1381415 - RNA, 18 nt, Human
cagaaguuaguuuguaua

SEQ ID NO: 1381416 - RNA, 19 nt, Human
cagaaguuaguuuguauau

SEQ ID NO: 1381417 - RNA, 17 nt, Human
cagaaauuuaauucaga

SEQ ID NO: 1381418 - RNA, 22 nt, Human
cagaaauuguauauuguaauuu

SEQ ID NO: 1381419 - RNA, 21 nt, Human
cagaaauuguauauuguaauu

SEQ ID NO: 1381420 - RNA, 13 nt, Human
cagaauaugucag

SEQ ID NO: 1381421 - RNA, 17 nt, Human
cagaauaucacagaaaa

SEQ ID NO: 1381422 - RNA, 14 nt, Human
cagaauaguauuuu

SEQ ID NO: 1381423 - RNA, 22 nt, Human
cagaauagccacauuuggaaua

SEQ ID NO: 1381424 - RNA, 21 nt, Human
cagaauagccacauuuggaau

SEQ ID NO: 1381425 - RNA, 15 nt, Human
cagaauagccacauu

SEQ ID NO: 1381426 - RNA, 15 nt, Human
cagaauacauacaaa

SEQ ID NO: 1381427 - RNA, 23 nt, Human
cagaauaaguuauugcaguuuau

SEQ ID NO: 1381428 - RNA, 21 nt, Human
cagaauaaguuauugcaguuu

SEQ ID NO: 1381429 - RNA, 20 nt, Human
cagaauaaguuauugcaguu

SEQ ID NO: 1381430 - RNA, 19 nt, Human
cagaauaaguuauugcagu

SEQ ID NO: 1381431 - RNA, 18 nt, Human
cagaauaaguuauugcag

SEQ ID NO: 1381432 - RNA, 17 nt, Human
cagaauaaguuauugca

SEQ ID NO: 1381433 - RNA, 15 nt, Human
cagaauaaguuauug

SEQ ID NO: 1381434 - RNA, 22 nt, Human
cagaaguuugcacuaucuuuca

SEQ ID NO: 1381435 - RNA, 18 nt, Human
cagaaguuugcacuaucu

SEQ ID NO: 1381436 - RNA, 16 nt, Human
cagaaguuugcacuau

SEQ ID NO: 1381437 - RNA, 21 nt, Human
caccuuggacauccuccuccc

SEQ ID NO: 1381438 - RNA, 18 nt, Human
caccuuggacauccuccu

SEQ ID NO: 1381439 - RNA, 17 nt, Human
caccuuggacauccucc

SEQ ID NO: 1381440 - RNA, 16 nt, Human
caccuuggacauccuc

SEQ ID NO: 1381441 - RNA, 22 nt, Human
caccuugcagcucuccccuucu

SEQ ID NO: 1381442 - RNA, 17 nt, Human
caccuuggcaccagaca

SEQ ID NO: 1381443 - RNA, 22 nt, Human
caccuuggacauccuccuccca

SEQ ID NO: 1381444 - RNA, 13 nt, Human
caccuugcagcuc

SEQ ID NO: 1381445 - RNA, 15 nt, Human
caccuugcagcucuc

SEQ ID NO: 1381446 - RNA, 23 nt, Human
caccuugugcuggggacaggucc

SEQ ID NO: 1381447 - RNA, 23 nt, Human
caccuugcuccuccuucugcugc

SEQ ID NO: 1381448 - RNA, 15 nt, Human
caccuuuagguucuu

SEQ ID NO: 1381449 - RNA, 14 nt, Human
caccuuuagguucu

SEQ ID NO: 1381450 - RNA, 13 nt, Human
caccguugucuca

SEQ ID NO: 1381451 - RNA, 15 nt, Human
caccguucugugcac

SEQ ID NO: 1381452 - RNA, 14 nt, Human
caccguucugugca

SEQ ID NO: 1381453 - RNA, 13 nt, Human
caccguucugugc

SEQ ID NO: 1381454 - RNA, 14 nt, Human
caccguucauucag

SEQ ID NO: 1381455 - RNA, 15 nt, Human
caccuaacucuucuu

SEQ ID NO: 1381456 - RNA, 17 nt, Human
caccuaaagaaaaacaa

SEQ ID NO: 1381457 - RNA, 13 nt, Human
caccuaaagaaaa

SEQ ID NO: 1381458 - RNA, 12 nt, Human
caccuaaagaaa

SEQ ID NO: 1381459 - RNA, 19 nt, Human
caccguugucucaugccag

SEQ ID NO: 1381460 - RNA, 14 nt, Human
caccguugucucau

SEQ ID NO: 1381461 - RNA, 17 nt, Human
caccuaauccaggcaga

SEQ ID NO: 1381462 - RNA, 13 nt, Human
caccuauuuccau

SEQ ID NO: 1381463 - RNA, 21 nt, Human
caccuauuaucccagcugccu

SEQ ID NO: 1381464 - RNA, 19 nt, Human
caccuauuaucccagcugc

SEQ ID NO: 1381465 - RNA, 18 nt, Human
caccuauuaucccagcug

SEQ ID NO: 1381466 - RNA, 17 nt, Human
caccuauuaucccagcu

SEQ ID NO: 1381467 - RNA, 15 nt, Human
caccuauuaucccag

SEQ ID NO: 1381468 - RNA, 17 nt, Human
caccuacucacacaggc

SEQ ID NO: 1381469 - RNA, 23 nt, Human
caccuaugucauuucauuuccua

SEQ ID NO: 1381470 - RNA, 20 nt, Human
caccuaugucauuucauuuc

SEQ ID NO: 1381471 - RNA, 19 nt, Human
caccuaugucauuucauuu

SEQ ID NO: 1381472 - RNA, 18 nt, Human
caccuacucacacaggca

SEQ ID NO: 1381473 - RNA, 18 nt, Human
caccuaccgaguucaagu

SEQ ID NO: 1381474 - RNA, 14 nt, Human
cacuacacccagca

SEQ ID NO: 1381475 - RNA, 15 nt, Human
cacuacacccagcaa

SEQ ID NO: 1381476 - RNA, 16 nt, Human
cacuacacccagcaau

SEQ ID NO: 1381477 - RNA, 17 nt, Human
cacuacacccagcaaua

SEQ ID NO: 1381478 - RNA, 18 nt, Human
cacuacacccagcaauag

SEQ ID NO: 1381479 - RNA, 23 nt, Human
cacuacgccuggcugauuuuugu

SEQ ID NO: 1381480 - RNA, 21 nt, Human
cacuaauauauuuaaaaauaa

SEQ ID NO: 1381481 - RNA, 20 nt, Human
cacuaauauauuuaaaaaua

SEQ ID NO: 1381482 - RNA, 19 nt, Human
cacuaauauauuuaaaaau

SEQ ID NO: 1381483 - RNA, 17 nt, Human
cacuaauauauuuaaaa

SEQ ID NO: 1381484 - RNA, 16 nt, Human
cacuaauauauuuaaa

SEQ ID NO: 1381485 - RNA, 22 nt, Human
cacggcaccugggcccuggggc

SEQ ID NO: 1381486 - RNA, 20 nt, Human
cacggcagccacagcuuggg

SEQ ID NO: 1381487 - RNA, 22 nt, Human
cacuaauucauuaaucugccuc

SEQ ID NO: 1381488 - RNA, 12 nt, Human
cacuaauucaua

SEQ ID NO: 1381489 - RNA, 11 nt, Human
cacuaauucau

SEQ ID NO: 1381490 - RNA, 14 nt, Human
cacuacaaccuccg

SEQ ID NO: 1381491 - RNA, 13 nt, Human
cacuacaaccucc

SEQ ID NO: 1381492 - RNA, 12 nt, Human
cacuacacccag

SEQ ID NO: 1381493 - RNA, 23 nt, Human
cacggagucguggggugugcugg

SEQ ID NO: 1381494 - RNA, 19 nt, Human
cacggcaccugggcccugg

SEQ ID NO: 1381495 - RNA, 17 nt, Human
cacggcaaaggaagacg

SEQ ID NO: 1381496 - RNA, 17 nt, Human
cacggauuugugucugu

SEQ ID NO: 1381497 - RNA, 21 nt, Human
cacggcaccugggcccugggg

SEQ ID NO: 1381498 - RNA, 20 nt, Human
cacggcaccugggcccuggg

SEQ ID NO: 1381499 - RNA, 13 nt, Human
cacggcagccaca

SEQ ID NO: 1381500 - RNA, 14 nt, Human
cacuccccacaucc

SEQ ID NO: 1381501 - RNA, 15 nt, Human
cacuccccaaccccc

SEQ ID NO: 1381502 - RNA, 12 nt, Human
cacuagcucuug

SEQ ID NO: 1381503 - RNA, 23 nt, Human
cacucccaccugacacaccaggc

SEQ ID NO: 1381504 - RNA, 22 nt, Human
cacucccaccugacacaccagg

SEQ ID NO: 1381505 - RNA, 23 nt, Human
cacuaggcccccacuugccucuu

SEQ ID NO: 1381506 - RNA, 22 nt, Human
cacuaggcccccacuugccucu

SEQ ID NO: 1381507 - RNA, 21 nt, Human
cacuaggcccccacuugccuc

SEQ ID NO: 1381508 - RNA, 20 nt, Human
cacuaggcccccacuugccu

SEQ ID NO: 1381509 - RNA, 17 nt, Human
cacuaggcccccacuug

SEQ ID NO: 1381510 - RNA, 22 nt, Human
cacuagcucuuguugagccgug

SEQ ID NO: 1381511 - RNA, 15 nt, Human
cacuacugacaugug

SEQ ID NO: 1381512 - RNA, 13 nt, Human
cacuacugacaug

SEQ ID NO: 1381513 - RNA, 19 nt, Human
cacuagccucaggggucug

SEQ ID NO: 1381514 - RNA, 15 nt, Human
cacuagccucagggg

SEQ ID NO: 1381515 - RNA, 19 nt, Human
cacuccccgaagucuuuug

SEQ ID NO: 1381516 - RNA, 18 nt, Human
cacuccccgaagucuuuu

SEQ ID NO: 1381517 - RNA, 21 nt, Human
cacucuuaugcuguacccagu

SEQ ID NO: 1381518 - RNA, 19 nt, Human
cacucuuaugcuguaccca

SEQ ID NO: 1381519 - RNA, 18 nt, Human
cacucuuaugcuguaccc

SEQ ID NO: 1381520 - RNA, 14 nt, Human
cacucuuaugcugu

SEQ ID NO: 1381521 - RNA, 17 nt, Human
cacucuugaaaaaugca

SEQ ID NO: 1381522 - RNA, 23 nt, Human
cacugaaaaaucuaagugauaua

SEQ ID NO: 1381523 - RNA, 20 nt, Human
cacugaaaaaucuaagugau

SEQ ID NO: 1381524 - RNA, 17 nt, Human
cacugaaaaaauauaug

SEQ ID NO: 1381525 - RNA, 16 nt, Human
cacugaaaaaauauau

SEQ ID NO: 1381526 - RNA, 11 nt, Human
cacugaagaag

SEQ ID NO: 1381527 - RNA, 20 nt, Human
cacugaacuuugcugagccu

SEQ ID NO: 1381528 - RNA, 17 nt, Human
auuuugacauaaaguug

SEQ ID NO: 1381529 - RNA, 24 nt, Human
auuuugacauaaaguugauaaaga

SEQ ID NO: 1381530 - RNA, 23 nt, Human
auuuucuuuguguagcuuugcuc

SEQ ID NO: 1381531 - RNA, 16 nt, Human
auuuucuuucuguaac

SEQ ID NO: 1381532 - RNA, 20 nt, Human
auuuuaucccucaccuguag

SEQ ID NO: 1381533 - RNA, 14 nt, Human
auuuugaguugcca

SEQ ID NO: 1381534 - RNA, 20 nt, Human
auuuguuucuuucucugagg

SEQ ID NO: 1381535 - RNA, 20 nt, Human
auuuguuugaacugauaaag

SEQ ID NO: 1381536 - RNA, 14 nt, Human
auuuguuugaacug

SEQ ID NO: 1381537 - RNA, 16 nt, Human
auuuguuugaacugau

SEQ ID NO: 1381538 - RNA, 15 nt, Human
auuuuauauuacacu

SEQ ID NO: 1381539 - RNA, 18 nt, Human
auuuuauauuacacuaca

SEQ ID NO: 1381540 - RNA, 23 nt, Human
auuuuauaugcuuacugauauau

SEQ ID NO: 1381541 - RNA, 17 nt, Human
auuuuauagcuacuaau

SEQ ID NO: 1381542 - RNA, 13 nt, Human
auuuguuugaacu

SEQ ID NO: 1381543 - RNA, 22 nt, Human
auuuuuacagaauugcuuguuu

SEQ ID NO: 1381544 - RNA, 16 nt, Human
auuuuuacagaauugc

SEQ ID NO: 1381545 - RNA, 14 nt, Human
auuuuuacagaauu

SEQ ID NO: 1381546 - RNA, 19 nt, Human
auuuuuacaauguaauuau

SEQ ID NO: 1381547 - RNA, 18 nt, Human
auuuuuacaauguaauua

SEQ ID NO: 1381548 - RNA, 17 nt, Human
auuuuuacaauguaauu

SEQ ID NO: 1381549 - RNA, 22 nt, Human
auuuuuaauuaauugggccagc

SEQ ID NO: 1381550 - RNA, 13 nt, Human
auuuuuaagugcu

SEQ ID NO: 1381551 - RNA, 21 nt, Human
caaaaaaaaauuuuaaagacc

SEQ ID NO: 1381552 - RNA, 22 nt, Human
caaaaaaaaauuuuaaagaccc

SEQ ID NO: 1381553 - RNA, 14 nt, Human
caaaaaaaaauaca

SEQ ID NO: 1381554 - RNA, 17 nt, Human
auuuuuuuuuccuagcc

SEQ ID NO: 1381555 - RNA, 23 nt, Human
caaaagcgugagcuuaaaauaca

SEQ ID NO: 1381556 - RNA, 21 nt, Human
caaaagcuauuuaaagcaucu

SEQ ID NO: 1381557 - RNA, 20 nt, Human
caaaagcccauucauuccau

SEQ ID NO: 1381558 - RNA, 22 nt, Human
caaaagcccauucauuccauuc

SEQ ID NO: 1381559 - RNA, 17 nt, Human
caaaccaaaucacugaa

SEQ ID NO: 1381560 - RNA, 19 nt, Human
caaaccacuuuuugcagcu

SEQ ID NO: 1381561 - RNA, 17 nt, Human
caaaccacgccucuuga

SEQ ID NO: 1381562 - RNA, 16 nt, Human
caaaaguuacauguuu

SEQ ID NO: 1381563 - RNA, 22 nt, Human
caaaccacgccucuugaccagg

SEQ ID NO: 1381564 - RNA, 19 nt, Human
caaaccacgccucuugacc

SEQ ID NO: 1381565 - RNA, 17 nt, Human
caaaccacuuuuugcag

SEQ ID NO: 1381566 - RNA, 22 nt, Human
caaccauuccagacugcuucca

SEQ ID NO: 1381567 - RNA, 16 nt, Human
caaccauuccagacug

SEQ ID NO: 1381568 - RNA, 14 nt, Human
caaccauuccagac

SEQ ID NO: 1381569 - RNA, 13 nt, Human
caaccauuccaga

SEQ ID NO: 1381570 - RNA, 22 nt, Human
caaccauuauaaccuuaauuua

SEQ ID NO: 1381571 - RNA, 18 nt, Human
caaccauuauaaccuuaa

SEQ ID NO: 1381572 - RNA, 22 nt, Human
caaccaugucauuucagaaguu

SEQ ID NO: 1381573 - RNA, 16 nt, Human
caaccaugucauuuca

SEQ ID NO: 1381574 - RNA, 14 nt, Human
caaccaugucauuu

SEQ ID NO: 1381575 - RNA, 23 nt, Human
caaccacuggucuguagggauuu

SEQ ID NO: 1381576 - RNA, 22 nt, Human
caaccacuggucuguagggauu

SEQ ID NO: 1381577 - RNA, 14 nt, Human
caaccacuggucug

SEQ ID NO: 1381578 - RNA, 14 nt, Human
caacccaaugggcu

SEQ ID NO: 1381579 - RNA, 18 nt, Human
caacccaaccucauccuc

SEQ ID NO: 1381580 - RNA, 17 nt, Human
caaccauuuccucagac

SEQ ID NO: 1381581 - RNA, 14 nt, Human
caaccauuugaaac

SEQ ID NO: 1381582 - RNA, 16 nt, Human
caaccauuuccucaga

SEQ ID NO: 1381583 - RNA, 13 nt, Human
caaccauuuccuc

SEQ ID NO: 1381584 - RNA, 16 nt, Human
caaccccagacacugg

SEQ ID NO: 1381585 - RNA, 20 nt, Human
caagaauaaucacgcuuucc

SEQ ID NO: 1381586 - RNA, 18 nt, Human
caagaauaaucacgcuuu

SEQ ID NO: 1381587 - RNA, 17 nt, Human
caagaauaaucacgcuu

SEQ ID NO: 1381588 - RNA, 16 nt, Human
caagaagggacugaga

SEQ ID NO: 1381589 - RNA, 14 nt, Human
caagaagugaagaa

SEQ ID NO: 1381590 - RNA, 18 nt, Human
caagaagggacugagaga

SEQ ID NO: 1381591 - RNA, 13 nt, Human
caagaagggacug

SEQ ID NO: 1381592 - RNA, 16 nt, Human
caagacccccagcacu

SEQ ID NO: 1381593 - RNA, 14 nt, Human
caagacccccagca

SEQ ID NO: 1381594 - RNA, 13 nt, Human
caagacccccagc

SEQ ID NO: 1381595 - RNA, 23 nt, Human
caagaauuucuaggacugaauua

SEQ ID NO: 1381596 - RNA, 13 nt, Human
caacacaaagauu

SEQ ID NO: 1381597 - RNA, 18 nt, Human
caacaccucuuggggagu

SEQ ID NO: 1381598 - RNA, 21 nt, Human
caaaugaguaacauuugcugu

SEQ ID NO: 1381599 - RNA, 19 nt, Human
caaaugaguaacauuugcu

SEQ ID NO: 1381600 - RNA, 18 nt, Human
caaaugaguaacauuugc

SEQ ID NO: 1381601 - RNA, 14 nt, Human
caaaugaguaacau

SEQ ID NO: 1381602 - RNA, 19 nt, Human
caaauuuugaguugccaca

SEQ ID NO: 1381603 - RNA, 19 nt, Human
caaaugcaaaaacucuuug

SEQ ID NO: 1381604 - RNA, 21 nt, Human
caaaugcaaaaacucuuugag

SEQ ID NO: 1381605 - RNA, 14 nt, Human
caaaucuaccacug

SEQ ID NO: 1381606 - RNA, 18 nt, Human
caaaucuaccacuguaug

SEQ ID NO: 1381607 - RNA, 21 nt, Human
caaaucguccagcgaccuucc

SEQ ID NO: 1381608 - RNA, 19 nt, Human
caaaucguccagcgaccuu

SEQ ID NO: 1381609 - RNA, 14 nt, Human
caaaucgaaugaaa

SEQ ID NO: 1381610 - RNA, 20 nt, Human
caacaauuucuacuuugaag

SEQ ID NO: 1381611 - RNA, 19 nt, Human
caacaauuucuacuuugaa

SEQ ID NO: 1381612 - RNA, 18 nt, Human
caacaauuucuacuuuga

SEQ ID NO: 1381613 - RNA, 13 nt, Human
caacaauuucuac

SEQ ID NO: 1381614 - RNA, 18 nt, Human
caacaauuuaugaauuga

SEQ ID NO: 1381615 - RNA, 17 nt, Human
caacaauuuaugaauug

SEQ ID NO: 1381616 - RNA, 16 nt, Human
caacaauuuaugaauu

SEQ ID NO: 1381617 - RNA, 14 nt, Human
caacaauuuaugaa

SEQ ID NO: 1381618 - RNA, 22 nt, Human
caacaaaagaagcccggcuccu

SEQ ID NO: 1381619 - RNA, 14 nt, Human
caacaaaagaagcc

SEQ ID NO: 1381620 - RNA, 15 nt, Human
caacaaagaaacaaa

SEQ ID NO: 1381621 - RNA, 20 nt, Human
caaagaugaaugaagcaaau

SEQ ID NO: 1381622 - RNA, 18 nt, Human
caaagaugaaugaagcaa

SEQ ID NO: 1381623 - RNA, 12 nt, Human
caaagaugaaaa

SEQ ID NO: 1381624 - RNA, 21 nt, Human
caaagaucuguccucagccuu

SEQ ID NO: 1381625 - RNA, 20 nt, Human
caaagaucuguccucagccu

SEQ ID NO: 1381626 - RNA, 21 nt, Human
caaaguacacuguuucaaacu

SEQ ID NO: 1381627 - RNA, 16 nt, Human
caaaguacacuguuuc

SEQ ID NO: 1381628 - RNA, 20 nt, Human
caaaguacacuguuucaaac

SEQ ID NO: 1381629 - RNA, 18 nt, Human
caaaucauuuguuuaaaa

SEQ ID NO: 1381630 - RNA, 17 nt, Human
caaaucauuuguuuaaa

SEQ ID NO: 1381631 - RNA, 16 nt, Human
caaaucauuuguuuaa

SEQ ID NO: 1381632 - RNA, 14 nt, Human
caaaucauuuguuu

SEQ ID NO: 1381633 - RNA, 13 nt, Human
caaaucauuuguu

SEQ ID NO: 1381634 - RNA, 13 nt, Human
caaaucaggcuuu

SEQ ID NO: 1381635 - RNA, 16 nt, Human
caaaucaggcuuuugu

SEQ ID NO: 1381636 - RNA, 22 nt, Human
caaauccagccugcugccugcu

SEQ ID NO: 1381637 - RNA, 14 nt, Human
auuuaauguuuuca

SEQ ID NO: 1381638 - RNA, 17 nt, Human
auuuaauggggaggaca

SEQ ID NO: 1381639 - RNA, 15 nt, Human
auuuaauuagugcua

SEQ ID NO: 1381640 - RNA, 16 nt, Human
auuuaauuagugcuaa

SEQ ID NO: 1381641 - RNA, 18 nt, Human
auuuaauuagugcuaagu

SEQ ID NO: 1381642 - RNA, 14 nt, Human
auuuaaugcugugg

SEQ ID NO: 1381643 - RNA, 13 nt, Human
auuucaagguucu

SEQ ID NO: 1381644 - RNA, 12 nt, Human
auuucaagguuc

SEQ ID NO: 1381645 - RNA, 17 nt, Human
auuuaucacacaaagca

SEQ ID NO: 1381646 - RNA, 14 nt, Human
auuuaucacacaaa

SEQ ID NO: 1381647 - RNA, 19 nt, Human
auuuaucacacaaagcaga

SEQ ID NO: 1381648 - RNA, 21 nt, Human
auuuaucaaacccuagccuug

SEQ ID NO: 1381649 - RNA, 20 nt, Human
auuuauauuguaaauauugu

SEQ ID NO: 1381650 - RNA, 21 nt, Human
auuuauauuguaaauauugug

SEQ ID NO: 1381651 - RNA, 18 nt, Human
auuuauauuguaaauauu

SEQ ID NO: 1381652 - RNA, 17 nt, Human
auuuauaccuaacugaa

SEQ ID NO: 1381653 - RNA, 23 nt, Human
auuucagagugacuacacacagu

SEQ ID NO: 1381654 - RNA, 22 nt, Human
auuucagagaggccuuuuggaa

SEQ ID NO: 1381655 - RNA, 16 nt, Human
auuucagagaggccuu

SEQ ID NO: 1381656 - RNA, 23 nt, Human
auuucagacucccauuccugaag

SEQ ID NO: 1381657 - RNA, 18 nt, Human
auuucagacucccauucc

SEQ ID NO: 1381658 - RNA, 23 nt, Human
auuucaaguuccaaguugcuaau

SEQ ID NO: 1381659 - RNA, 22 nt, Human
auuucaaguuccaaguugcuaa

SEQ ID NO: 1381660 - RNA, 16 nt, Human
auuucaaguuccaagu

SEQ ID NO: 1381661 - RNA, 11 nt, Human
auuucaaguuc

SEQ ID NO: 1381662 - RNA, 17 nt, Human
auuucaagguucuaacc

SEQ ID NO: 1381663 - RNA, 15 nt, Human
auuucaagguucuaa

SEQ ID NO: 1381664 - RNA, 14 nt, Human
auuucaagguucua

SEQ ID NO: 1381665 - RNA, 13 nt, Human
auuucaucuauuu

SEQ ID NO: 1381666 - RNA, 18 nt, Human
auuucagauucccagagc

SEQ ID NO: 1381667 - RNA, 15 nt, Human
auuucagauuuguga

SEQ ID NO: 1381668 - RNA, 16 nt, Human
auuucagcagcugcag

SEQ ID NO: 1381669 - RNA, 15 nt, Human
auuucuguguugcca

SEQ ID NO: 1381670 - RNA, 23 nt, Human
auuucuguguugccaagcuccaa

SEQ ID NO: 1381671 - RNA, 19 nt, Human
auuucuguuuagauaauac

SEQ ID NO: 1381672 - RNA, 12 nt, Human
auuucuguuuag

SEQ ID NO: 1381673 - RNA, 14 nt, Human
auuucuguuuagau

SEQ ID NO: 1381674 - RNA, 16 nt, Human
auuucuguuuagauaa

SEQ ID NO: 1381675 - RNA, 20 nt, Human
auuucuccuccaugggagaa

SEQ ID NO: 1381676 - RNA, 20 nt, Human
auuucuaugaaauauuaugu

SEQ ID NO: 1381677 - RNA, 14 nt, Human
auuucaucuauuuu

SEQ ID NO: 1381678 - RNA, 18 nt, Human
auuucuaugaaauauuau

SEQ ID NO: 1381679 - RNA, 15 nt, Human
auuucuaugaaauau

SEQ ID NO: 1381680 - RNA, 13 nt, Human
auuguaaaauaau

SEQ ID NO: 1381681 - RNA, 17 nt, Human
auuguaaaauaauucug

SEQ ID NO: 1381682 - RNA, 14 nt, Human
auuguaaauauugu

SEQ ID NO: 1381683 - RNA, 23 nt, Human
auuguaauaggcguaacuaauuu

SEQ ID NO: 1381684 - RNA, 23 nt, Human
auuguaaaagcauuuuguaauaa

SEQ ID NO: 1381685 - RNA, 21 nt, Human
auuguaaaagcauuuuguaau

SEQ ID NO: 1381686 - RNA, 20 nt, Human
auuguaaaagcauuuuguaa

SEQ ID NO: 1381687 - RNA, 19 nt, Human
auuguaaaagcauuuugua

SEQ ID NO: 1381688 - RNA, 13 nt, Human
auuguaaaagcau

SEQ ID NO: 1381689 - RNA, 14 nt, Human
auuguaaaacaggu

SEQ ID NO: 1381690 - RNA, 15 nt, Human
auuguaaaaauggca

SEQ ID NO: 1381691 - RNA, 19 nt, Human
auugaucggagccuccucu

SEQ ID NO: 1381692 - RNA, 18 nt, Human
auugaugggauuugguca

SEQ ID NO: 1381693 - RNA, 18 nt, Human
auugauccagaaagaaaa

SEQ ID NO: 1381694 - RNA, 19 nt, Human
auugauccagaaagaaaac

SEQ ID NO: 1381695 - RNA, 22 nt, Human
auugauccagaaagaaaacuug

SEQ ID NO: 1381696 - RNA, 23 nt, Human
auugaucggagccuccucucuca

SEQ ID NO: 1381697 - RNA, 13 nt, Human
auuguuucaauug

SEQ ID NO: 1381698 - RNA, 19 nt, Human
auuguugaaaaaguuuguu

SEQ ID NO: 1381699 - RNA, 20 nt, Human
auuguugaaaaaguuuguuu

SEQ ID NO: 1381700 - RNA, 18 nt, Human
auuguugaaaaaguuugu

SEQ ID NO: 1381701 - RNA, 17 nt, Human
auuguugaaaaaguuug

SEQ ID NO: 1381702 - RNA, 17 nt, Human
auuguucucagaauccc

SEQ ID NO: 1381703 - RNA, 14 nt, Human
auuguucucagaau

SEQ ID NO: 1381704 - RNA, 20 nt, Human
auuccucuacuaacaaucag

SEQ ID NO: 1381705 - RNA, 17 nt, Human
auuccaaagaacagccu

SEQ ID NO: 1381706 - RNA, 20 nt, Human
auuccaaagaguagaauugc

SEQ ID NO: 1381707 - RNA, 17 nt, Human
auucauuuuuuaaauuc

SEQ ID NO: 1381708 - RNA, 15 nt, Human
auucauuuucucuaa

SEQ ID NO: 1381709 - RNA, 16 nt, Human
auucauuuucucuaau

SEQ ID NO: 1381710 - RNA, 14 nt, Human
auucauuuucucua

SEQ ID NO: 1381711 - RNA, 21 nt, Human
auucauuuuaacaucugagaa

SEQ ID NO: 1381712 - RNA, 13 nt, Human
auucaugacuaug

SEQ ID NO: 1381713 - RNA, 19 nt, Human
auucauccaaguuaaaugu

SEQ ID NO: 1381714 - RNA, 18 nt, Human
auucauuuuaacaucuga

SEQ ID NO: 1381715 - RNA, 20 nt, Human
auucauccaaguuaaaugua

SEQ ID NO: 1381716 - RNA, 18 nt, Human
auucauccaaguuaaaug

SEQ ID NO: 1381717 - RNA, 17 nt, Human
auucauccaaguuaaau

SEQ ID NO: 1381718 - RNA, 17 nt, Human
auucacaaacuuuuaua

SEQ ID NO: 1381719 - RNA, 17 nt, Human
auuaaauuggaaagcag

SEQ ID NO: 1381720 - RNA, 15 nt, Human
auuaaauuggaaagc

SEQ ID NO: 1381721 - RNA, 17 nt, Human
auuaaauaagauucuaa

SEQ ID NO: 1381722 - RNA, 20 nt, Human
auuaaauucuugcaaaguau

SEQ ID NO: 1381723 - RNA, 14 nt, Human
auuaaauucuugca

SEQ ID NO: 1381724 - RNA, 18 nt, Human
auuaaauucuugcaaagu

SEQ ID NO: 1381725 - RNA, 16 nt, Human
auuaugugguuuuaga

SEQ ID NO: 1381726 - RNA, 14 nt, Human
auuaugugguuuua

SEQ ID NO: 1381727 - RNA, 15 nt, Human
auuauguguguuuua

SEQ ID NO: 1381728 - RNA, 20 nt, Human
auuauguguguuuuaaaaug

SEQ ID NO: 1381729 - RNA, 21 nt, Human
auuauguguguuuuaaaauga

SEQ ID NO: 1381730 - RNA, 18 nt, Human
auucaaggaauuucuuaa

SEQ ID NO: 1381731 - RNA, 17 nt, Human
auucaaggaauuucuua

SEQ ID NO: 1381732 - RNA, 19 nt, Human
auucaaggaauuucuuaac

SEQ ID NO: 1381733 - RNA, 20 nt, Human
auucaaggaauuucuuaacu

SEQ ID NO: 1381734 - RNA, 13 nt, Human
auucacaaacuuu

SEQ ID NO: 1381735 - RNA, 22 nt, Human
auucacaaacuuuuauacucuu

SEQ ID NO: 1381736 - RNA, 14 nt, Human
auucacaaacuuuu

SEQ ID NO: 1381737 - RNA, 16 nt, Human
auucaaggaauuucuu

SEQ ID NO: 1381738 - RNA, 17 nt, Human
auuaugugguuuuagau

SEQ ID NO: 1381739 - RNA, 11 nt, Human
auuauguuaaa

SEQ ID NO: 1381740 - RNA, 15 nt, Human
auuauguguguuuug

SEQ ID NO: 1381741 - RNA, 18 nt, Human
auucuugguugaggaaac

SEQ ID NO: 1381742 - RNA, 17 nt, Human
auucuugguugaggaaa

SEQ ID NO: 1381743 - RNA, 22 nt, Human
auucugauucgaaugacacugu

SEQ ID NO: 1381744 - RNA, 21 nt, Human
auucugauucgaaugacacug

SEQ ID NO: 1381745 - RNA, 20 nt, Human
auucugauucgaaugacacu

SEQ ID NO: 1381746 - RNA, 23 nt, Human
auucugaguuuuguguuuguugu

SEQ ID NO: 1381747 - RNA, 22 nt, Human
auucugaguuuuguguuuguug

SEQ ID NO: 1381748 - RNA, 17 nt, Human
auucugaguuuuguguu

SEQ ID NO: 1381749 - RNA, 11 nt, Human
auucucugagc

SEQ ID NO: 1381750 - RNA, 20 nt, Human
auucugacucgguuucucca

SEQ ID NO: 1381751 - RNA, 18 nt, Human
auucugacucgguuucuc

SEQ ID NO: 1381752 - RNA, 18 nt, Human
auucugaccuuaaaugca

SEQ ID NO: 1381753 - RNA, 18 nt, Human
auuccugaccuccgccau

SEQ ID NO: 1381754 - RNA, 19 nt, Human
auucucuccuguaccucuu

SEQ ID NO: 1381755 - RNA, 21 nt, Human
auucucuccuguaccucuuga

SEQ ID NO: 1381756 - RNA, 22 nt, Human
auuccugaccuccgccauccac

SEQ ID NO: 1381757 - RNA, 19 nt, Human
auuccugaagaaccagucc

SEQ ID NO: 1381758 - RNA, 16 nt, Human
auuccugaagaaccag

SEQ ID NO: 1381759 - RNA, 15 nt, Human
auuccugaagaacca

SEQ ID NO: 1381760 - RNA, 13 nt, Human
auuccugaacagg

SEQ ID NO: 1381761 - RNA, 20 nt, Human
auugagaaaaauauauacua

SEQ ID NO: 1381762 - RNA, 15 nt, Human
auugagcucucucau

SEQ ID NO: 1381763 - RNA, 11 nt, Human
auugagagaau

SEQ ID NO: 1381764 - RNA, 20 nt, Human
auugagcucucugcccuuga

SEQ ID NO: 1381765 - RNA, 16 nt, Human
auugauccagaaagaa

SEQ ID NO: 1381766 - RNA, 17 nt, Human
auugauccagaaagaaa

SEQ ID NO: 1381767 - RNA, 18 nt, Human
ccaaugcaccuaaagaaa

SEQ ID NO: 1381768 - RNA, 22 nt, Human
ccaaugucuggagaccaccagg

SEQ ID NO: 1381769 - RNA, 16 nt, Human
ccaaugucuggagacc

SEQ ID NO: 1381770 - RNA, 15 nt, Human
ccaaugucuggagac

SEQ ID NO: 1381771 - RNA, 14 nt, Human
ccaaugucuggaga

SEQ ID NO: 1381772 - RNA, 12 nt, Human
ccaaugucuuga

SEQ ID NO: 1381773 - RNA, 15 nt, Human
ccaauguacccaccg

SEQ ID NO: 1381774 - RNA, 20 nt, Human
ccaauggguuuuucccugua

SEQ ID NO: 1381775 - RNA, 22 nt, Human
ccaaugagcuuucugaacagcu

SEQ ID NO: 1381776 - RNA, 23 nt, Human
ccaaugagcuuucugaacagcug

SEQ ID NO: 1381777 - RNA, 21 nt, Human
ccaaugagcuuucugaacagc

SEQ ID NO: 1381778 - RNA, 20 nt, Human
ccaaugagcuuucugaacag

SEQ ID NO: 1381779 - RNA, 18 nt, Human
ccaaugagcuuucugaac

SEQ ID NO: 1381780 - RNA, 16 nt, Human
ccaaugagcuuucuga

SEQ ID NO: 1381781 - RNA, 15 nt, Human
ccaaugagcuuucug

SEQ ID NO: 1381782 - RNA, 14 nt, Human
ccaaugagcuuucu

SEQ ID NO: 1381783 - RNA, 22 nt, Human
ccaaucauuuuaauuauuauuc

SEQ ID NO: 1381784 - RNA, 12 nt, Human
ccaaugaaauga

SEQ ID NO: 1381785 - RNA, 14 nt, Human
ccaaucauuuuaau

SEQ ID NO: 1381786 - RNA, 12 nt, Human
ccaaucauuuua

SEQ ID NO: 1381787 - RNA, 16 nt, Human
ccaaucaaucuugcau

SEQ ID NO: 1381788 - RNA, 22 nt, Human
ccaacuccgugugguaagcaac

SEQ ID NO: 1381789 - RNA, 22 nt, Human
ccaaucaaucuugcauguaacg

SEQ ID NO: 1381790 - RNA, 23 nt, Human
ccaagcugccuccccucuccuuc

SEQ ID NO: 1381791 - RNA, 19 nt, Human
ccaagcugaguuuccuaug

SEQ ID NO: 1381792 - RNA, 18 nt, Human
ccaagcugaguuuccuau

SEQ ID NO: 1381793 - RNA, 17 nt, Human
ccaagcugaguuuccua

SEQ ID NO: 1381794 - RNA, 16 nt, Human
ccaagcugaguuuccu

SEQ ID NO: 1381795 - RNA, 15 nt, Human
ccaagcugaguuucc

SEQ ID NO: 1381796 - RNA, 23 nt, Human
ccaagcugaggugcccaggagaa

SEQ ID NO: 1381797 - RNA, 22 nt, Human
ccaagcugaggugcccaggaga

SEQ ID NO: 1381798 - RNA, 21 nt, Human
ccaagcugaggugcccaggag

SEQ ID NO: 1381799 - RNA, 20 nt, Human
ccaagcugaggugcccagga

SEQ ID NO: 1381800 - RNA, 19 nt, Human
ccaagcugaggugcccagg

SEQ ID NO: 1381801 - RNA, 17 nt, Human
ccaagcugaggugccca

SEQ ID NO: 1381802 - RNA, 15 nt, Human
ccaagcugaggugcc

SEQ ID NO: 1381803 - RNA, 13 nt, Human
ccaagcugaggug

SEQ ID NO: 1381804 - RNA, 12 nt, Human
ccaagcugaggu

SEQ ID NO: 1381805 - RNA, 15 nt, Human
ccaagcucugcaguc

SEQ ID NO: 1381806 - RNA, 14 nt, Human
ccaagcucugcagu

SEQ ID NO: 1381807 - RNA, 15 nt, Human
ccaacugaccaccuu

SEQ ID NO: 1381808 - RNA, 15 nt, Human
ccaacuccuuccagc

SEQ ID NO: 1381809 - RNA, 16 nt, Human
ccaacuccuuccagcu

SEQ ID NO: 1381810 - RNA, 14 nt, Human
ccaacuccuuccag

SEQ ID NO: 1381811 - RNA, 12 nt, Human
ccaacuccuucc

SEQ ID NO: 1381812 - RNA, 23 nt, Human
ccaacuccuaguucuagaaaaac

SEQ ID NO: 1381813 - RNA, 19 nt, Human
ccaacuccuaguucuagaa

SEQ ID NO: 1381814 - RNA, 15 nt, Human
ccaacuccuaguucu

SEQ ID NO: 1381815 - RNA, 22 nt, Human
ccaaaagauugcugaaauuuua

SEQ ID NO: 1381816 - RNA, 19 nt, Human
ccaaaagauugcugaaauu

SEQ ID NO: 1381817 - RNA, 16 nt, Human
ccaaaagauugcugaa

SEQ ID NO: 1381818 - RNA, 22 nt, Human
ccaaaagaagcccccagcuaag

SEQ ID NO: 1381819 - RNA, 23 nt, Human
ccaaaagauugcugaaauuuuau

SEQ ID NO: 1381820 - RNA, 12 nt, Human
ccaaaacugcuc

SEQ ID NO: 1381821 - RNA, 11 nt, Human
ccaaaacugcu

SEQ ID NO: 1381822 - RNA, 22 nt, Human
cauuuuuuuuaagaaaaaggau

SEQ ID NO: 1381823 - RNA, 15 nt, Human
cauuuuuuaggaaau

SEQ ID NO: 1381824 - RNA, 14 nt, Human
cauuuuuuaggaaa

SEQ ID NO: 1381825 - RNA, 20 nt, Human
cauuuguguugaagagguuu

SEQ ID NO: 1381826 - RNA, 18 nt, Human
cauuuuuuuccuugcaaa

SEQ ID NO: 1381827 - RNA, 18 nt, Human
cauuuuuugggcagcaau

SEQ ID NO: 1381828 - RNA, 19 nt, Human
cauuuuuugggcagcaauu

SEQ ID NO: 1381829 - RNA, 22 nt, Human
cauuuuuugggcagcaauuuaa

SEQ ID NO: 1381830 - RNA, 19 nt, Human
cauuuguguacacagucag

SEQ ID NO: 1381831 - RNA, 16 nt, Human
cauuuguguugaagag

SEQ ID NO: 1381832 - RNA, 20 nt, Human
cauuuguauaaaauaauuuu

SEQ ID NO: 1381833 - RNA, 19 nt, Human
cauuuguauaaaauaauuu

SEQ ID NO: 1381834 - RNA, 13 nt, Human
ccacuccucugac

SEQ ID NO: 1381835 - RNA, 23 nt, Human
ccacuccgagaggugggccaguc

SEQ ID NO: 1381836 - RNA, 19 nt, Human
ccacuccgagaggugggcc

SEQ ID NO: 1381837 - RNA, 17 nt, Human
ccacuccgagagguggg

SEQ ID NO: 1381838 - RNA, 16 nt, Human
ccacuccgagaggugg

SEQ ID NO: 1381839 - RNA, 20 nt, Human
ccacuccgagaggugggcca

SEQ ID NO: 1381840 - RNA, 12 nt, Human
ccacuccucuga

SEQ ID NO: 1381841 - RNA, 14 nt, Human
ccacagcacagcca

SEQ ID NO: 1381842 - RNA, 20 nt, Human
ccacagcaaccccaggcuga

SEQ ID NO: 1381843 - RNA, 19 nt, Human
ccacagcaaccccaggcug

SEQ ID NO: 1381844 - RNA, 15 nt, Human
ccacagccagcaccu

SEQ ID NO: 1381845 - RNA, 12 nt, Human
ccacagcaggcc

SEQ ID NO: 1381846 - RNA, 20 nt, Human
ccacagccuccccugccagg

SEQ ID NO: 1381847 - RNA, 19 nt, Human
ccacagccuccccugccag

SEQ ID NO: 1381848 - RNA, 16 nt, Human
ccacagccuccccugc

SEQ ID NO: 1381849 - RNA, 22 nt, Human
ccacagccagcaccuggcaucg

SEQ ID NO: 1381850 - RNA, 19 nt, Human
ccacagccagcaccuggca

SEQ ID NO: 1381851 - RNA, 18 nt, Human
ccacagccagcaccuggc

SEQ ID NO: 1381852 - RNA, 17 nt, Human
ccacagccagcaccugg

SEQ ID NO: 1381853 - RNA, 19 nt, Human
ccacccuguuccugcugcu

SEQ ID NO: 1381854 - RNA, 18 nt, Human
ccacccuguuccugcugc

SEQ ID NO: 1381855 - RNA, 17 nt, Human
ccacccuguuccugcug

SEQ ID NO: 1381856 - RNA, 16 nt, Human
ccacccuguuccugcu

SEQ ID NO: 1381857 - RNA, 15 nt, Human
ccacccuguuccugc

SEQ ID NO: 1381858 - RNA, 22 nt, Human
ccacccugggcccugggcugga

SEQ ID NO: 1381859 - RNA, 20 nt, Human
ccacccugggcccugggcug

SEQ ID NO: 1381860 - RNA, 17 nt, Human
ccacccugggcccuggg

SEQ ID NO: 1381861 - RNA, 16 nt, Human
ccacccugggcccugg

SEQ ID NO: 1381862 - RNA, 15 nt, Human
ccacccugggcccug

SEQ ID NO: 1381863 - RNA, 12 nt, Human
ccaccaguucuc

SEQ ID NO: 1381864 - RNA, 21 nt, Human
ccaccacagccagcaccuggc

SEQ ID NO: 1381865 - RNA, 20 nt, Human
ccaccacagccagcaccugg

SEQ ID NO: 1381866 - RNA, 18 nt, Human
ccaccacagccagcaccu

SEQ ID NO: 1381867 - RNA, 15 nt, Human
ccaccacagccagca

SEQ ID NO: 1381868 - RNA, 14 nt, Human
ccaccacagccagc

SEQ ID NO: 1381869 - RNA, 14 nt, Human
ccacagcugccucu

SEQ ID NO: 1381870 - RNA, 22 nt, Human
ccacgcccguccugccuguggc

SEQ ID NO: 1381871 - RNA, 21 nt, Human
ccacgcccguccugccugugg

SEQ ID NO: 1381872 - RNA, 20 nt, Human
ccacgcccguccugccugug

SEQ ID NO: 1381873 - RNA, 19 nt, Human
ccacgcccguccugccugu

SEQ ID NO: 1381874 - RNA, 23 nt, Human
ccacgcccguccugccuguggcg

SEQ ID NO: 1381875 - RNA, 18 nt, Human
ccacgacuggccagggcc

SEQ ID NO: 1381876 - RNA, 14 nt, Human
ccacgacugucucc

SEQ ID NO: 1381877 - RNA, 15 nt, Human
ccacgacuggccagg

SEQ ID NO: 1381878 - RNA, 17 nt, Human
ccacgacacugcagccc

SEQ ID NO: 1381879 - RNA, 16 nt, Human
ccacgacacugcagcc

SEQ ID NO: 1381880 - RNA, 14 nt, Human
ccacgaaggagccc

SEQ ID NO: 1381881 - RNA, 16 nt, Human
ccaccuuuguuucucc

SEQ ID NO: 1381882 - RNA, 20 nt, Human
ccaccuuuguuucuccccca

SEQ ID NO: 1381883 - RNA, 18 nt, Human
ccacgcccguccugccug

SEQ ID NO: 1381884 - RNA, 17 nt, Human
ccacgcccguccugccu

SEQ ID NO: 1381885 - RNA, 15 nt, Human
ccacgcccguccugc

SEQ ID NO: 1381886 - RNA, 15 nt, Human
ccacgacugucucca

SEQ ID NO: 1381887 - RNA, 16 nt, Human
ccacgacugucuccau

SEQ ID NO: 1381888 - RNA, 13 nt, Human
ccaccgcccagag

SEQ ID NO: 1381889 - RNA, 17 nt, Human
ccaccgcccagagaccc

SEQ ID NO: 1381890 - RNA, 18 nt, Human
ccaccgaagccgccugug

SEQ ID NO: 1381891 - RNA, 15 nt, Human
ccaccgcagaaggaa

SEQ ID NO: 1381892 - RNA, 16 nt, Human
ccaccgcagaaggaag

SEQ ID NO: 1381893 - RNA, 22 nt, Human
cauaugcuaccaccagcugugu

SEQ ID NO: 1381894 - RNA, 21 nt, Human
cauaugcuaccaccagcugug

SEQ ID NO: 1381895 - RNA, 23 nt, Human
cauaugcuaccaccagcuguguc

SEQ ID NO: 1381896 - RNA, 19 nt, Human
caguggugguuuucuguuc

SEQ ID NO: 1381897 - RNA, 20 nt, Human
caguggugguuuucuguucu

SEQ ID NO: 1381898 - RNA, 21 nt, Human
caguggugguuuucuguucuu

SEQ ID NO: 1381899 - RNA, 22 nt, Human
caguggugguuuucuguucuuu

SEQ ID NO: 1381900 - RNA, 14 nt, Human
cauauguuugguaa

SEQ ID NO: 1381901 - RNA, 16 nt, Human
cauauuaccacagaca

SEQ ID NO: 1381902 - RNA, 20 nt, Human
cauaugcuaccaccagcugu

SEQ ID NO: 1381903 - RNA, 16 nt, Human
caucccguguucuccu

SEQ ID NO: 1381904 - RNA, 14 nt, Human
caucccguguucuc

SEQ ID NO: 1381905 - RNA, 18 nt, Human
caucccgucuucuccaac

SEQ ID NO: 1381906 - RNA, 16 nt, Human
caucccgucuucucca

SEQ ID NO: 1381907 - RNA, 19 nt, Human
cauccccuugaacucuuca

SEQ ID NO: 1381908 - RNA, 17 nt, Human
caucccgagcaccucca

SEQ ID NO: 1381909 - RNA, 21 nt, Human
caucccguguucuccuuuucc

SEQ ID NO: 1381910 - RNA, 17 nt, Human
caucccguguucuccuu

SEQ ID NO: 1381911 - RNA, 22 nt, Human
cauccccuugaggucucagccc

SEQ ID NO: 1381912 - RNA, 15 nt, Human
caucacuuguacaaa

SEQ ID NO: 1381913 - RNA, 14 nt, Human
caucacuuguacaa

SEQ ID NO: 1381914 - RNA, 22 nt, Human
caucacuuaacggaccaaagca

SEQ ID NO: 1381915 - RNA, 19 nt, Human
caucugcugguccguggga

SEQ ID NO: 1381916 - RNA, 14 nt, Human
caucugcugguccg

SEQ ID NO: 1381917 - RNA, 20 nt, Human
caucggacaagacccccagc

SEQ ID NO: 1381918 - RNA, 21 nt, Human
caucggacaagacccccagca

SEQ ID NO: 1381919 - RNA, 19 nt, Human
caucggacaagacccccag

SEQ ID NO: 1381920 - RNA, 16 nt, Human
caucggaaaaauaauc

SEQ ID NO: 1381921 - RNA, 15 nt, Human
caucggaaaaauaau

SEQ ID NO: 1381922 - RNA, 14 nt, Human
caucggaaaaauaa

SEQ ID NO: 1381923 - RNA, 19 nt, Human
caucgcaccauucugacuc

SEQ ID NO: 1381924 - RNA, 18 nt, Human
caucgcaccauucugacu

SEQ ID NO: 1381925 - RNA, 16 nt, Human
caucgcaccauucuga

SEQ ID NO: 1381926 - RNA, 12 nt, Human
cauccuggaaua

SEQ ID NO: 1381927 - RNA, 14 nt, Human
caucugugucuugu

SEQ ID NO: 1381928 - RNA, 13 nt, Human
caucugugucuug

SEQ ID NO: 1381929 - RNA, 11 nt, Human
caucugugucu

SEQ ID NO: 1381930 - RNA, 21 nt, Human
caucugugcacugcccaugga

SEQ ID NO: 1381931 - RNA, 18 nt, Human
caucugugcacugcccau

SEQ ID NO: 1381932 - RNA, 17 nt, Human
caucugugcacugccca

SEQ ID NO: 1381933 - RNA, 17 nt, Human
caucuggagagaacagg

SEQ ID NO: 1381934 - RNA, 16 nt, Human
caucugcuucaggccc

SEQ ID NO: 1381935 - RNA, 12 nt, Human
caucuggaacca

SEQ ID NO: 1381936 - RNA, 17 nt, Human
caucuggaaccaucaga

SEQ ID NO: 1381937 - RNA, 19 nt, Human
caucuggaaccaucagaaa

SEQ ID NO: 1381938 - RNA, 18 nt, Human
cauguaggaaguaggaag

SEQ ID NO: 1381939 - RNA, 20 nt, Human
cauguagaaaauuuguuauu

SEQ ID NO: 1381940 - RNA, 16 nt, Human
cauguuagcccuuccu

SEQ ID NO: 1381941 - RNA, 13 nt, Human
cauguuagccagg

SEQ ID NO: 1381942 - RNA, 15 nt, Human
cauguccuguaaagg

SEQ ID NO: 1381943 - RNA, 14 nt, Human
cauguccuguaaag

SEQ ID NO: 1381944 - RNA, 22 nt, Human
cauguccugccuauuaucuguc

SEQ ID NO: 1381945 - RNA, 13 nt, Human
cauguccugccua

SEQ ID NO: 1381946 - RNA, 14 nt, Human
caugucaacagcgu

SEQ ID NO: 1381947 - RNA, 15 nt, Human
caugucaacagcguu

SEQ ID NO: 1381948 - RNA, 15 nt, Human
caugucaaacaaaua

SEQ ID NO: 1381949 - RNA, 14 nt, Human
caugucaaacaaau

SEQ ID NO: 1381950 - RNA, 15 nt, Human
cauguauuuggugau

SEQ ID NO: 1381951 - RNA, 20 nt, Human
cauguauuuggugauuacau

SEQ ID NO: 1381952 - RNA, 24 nt, Human
cauguuaguuaccuuauaguuacu

SEQ ID NO: 1381953 - RNA, 22 nt, Human
cauguuaguuaccuuauaguua

SEQ ID NO: 1381954 - RNA, 21 nt, Human
cauguuaguuaccuuauaguu

SEQ ID NO: 1381955 - RNA, 14 nt, Human
cauguuaguuaccu

SEQ ID NO: 1381956 - RNA, 21 nt, Human
cauguugggaaacuuggcucg

SEQ ID NO: 1381957 - RNA, 20 nt, Human
cauguugggaaacuuggcuc

SEQ ID NO: 1381958 - RNA, 19 nt, Human
cauguugggaaacuuggcu

SEQ ID NO: 1381959 - RNA, 15 nt, Human
cauguugggaaacuu

SEQ ID NO: 1381960 - RNA, 21 nt, Human
cauguuggccaggcuggucua

SEQ ID NO: 1381961 - RNA, 20 nt, Human
cauguuggccaggcuggucu

SEQ ID NO: 1381962 - RNA, 17 nt, Human
cauucuccacagcaacc

SEQ ID NO: 1381963 - RNA, 15 nt, Human
cauucuccacagcaa

SEQ ID NO: 1381964 - RNA, 18 nt, Human
cauucuccacagcaaccc

SEQ ID NO: 1381965 - RNA, 15 nt, Human
cauucuacugaaaag

SEQ ID NO: 1381966 - RNA, 13 nt, Human
cauucgugaaaac

SEQ ID NO: 1381967 - RNA, 14 nt, Human
cauucguucugugg

SEQ ID NO: 1381968 - RNA, 19 nt, Human
cauuauauuuauuacugua

SEQ ID NO: 1381969 - RNA, 15 nt, Human
cauguuuagacuuua

SEQ ID NO: 1381970 - RNA, 19 nt, Human
cauguugucuaagaaauug

SEQ ID NO: 1381971 - RNA, 15 nt, Human
cauuauaaugaauuu

SEQ ID NO: 1381972 - RNA, 14 nt, Human
cauuauaaugaauu

SEQ ID NO: 1381973 - RNA, 13 nt, Human
cauuauaaugaau

SEQ ID NO: 1381974 - RNA, 18 nt, Human
cauuauaaccuuaauuua

SEQ ID NO: 1381975 - RNA, 16 nt, Human
cauuauaaccuuaauu

SEQ ID NO: 1381976 - RNA, 13 nt, Human
cauuauaaaaaga

SEQ ID NO: 1381977 - RNA, 17 nt, Human
caugauuuccuugaaug

SEQ ID NO: 1381978 - RNA, 16 nt, Human
caugauuuccuugaau

SEQ ID NO: 1381979 - RNA, 14 nt, Human
caugauuuccuuga

SEQ ID NO: 1381980 - RNA, 12 nt, Human
caugauuuccuu

SEQ ID NO: 1381981 - RNA, 24 nt, Human
caugauuuuaaguuucucugcaga

SEQ ID NO: 1381982 - RNA, 22 nt, Human
caugauuuuaaguuucucugca

SEQ ID NO: 1381983 - RNA, 18 nt, Human
caugauuuccuugaaugu

SEQ ID NO: 1381984 - RNA, 21 nt, Human
caugauuuuaaguuucucugc

SEQ ID NO: 1381985 - RNA, 14 nt, Human
caugcuacacacug

SEQ ID NO: 1381986 - RNA, 20 nt, Human
caugcuacacacugcauguu

SEQ ID NO: 1381987 - RNA, 23 nt, Human
caugcuacacacugcauguuugu

SEQ ID NO: 1381988 - RNA, 14 nt, Human
caugauguuuagaa

SEQ ID NO: 1381989 - RNA, 17 nt, Human
cauggcuauuuuauauu

SEQ ID NO: 1381990 - RNA, 15 nt, Human
cauggcuauuuuaua

SEQ ID NO: 1381991 - RNA, 14 nt, Human
cauggcuauuuuau

SEQ ID NO: 1381992 - RNA, 12 nt, Human
cauggcuaucug

SEQ ID NO: 1381993 - RNA, 19 nt, Human
caugcugggauuuccaacu

SEQ ID NO: 1381994 - RNA, 14 nt, Human
caugcugggauuuc

SEQ ID NO: 1381995 - RNA, 13 nt, Human
caugcugggauuu

SEQ ID NO: 1381996 - RNA, 23 nt, Human
caugcuggaaaauaauacugcug

SEQ ID NO: 1381997 - RNA, 22 nt, Human
caugcuggaaaauaauacugcu

SEQ ID NO: 1381998 - RNA, 17 nt, Human
caugcuggaaaauaaua

SEQ ID NO: 1381999 - RNA, 21 nt, Human
caugcugcuggggaagacagu

SEQ ID NO: 1382000 - RNA, 17 nt, Human
caugcugcuggggaaga

SEQ ID NO: 1382001 - RNA, 22 nt, Human
caugcugcuggggaagacagug

SEQ ID NO: 1382002 - RNA, 15 nt, Human
caugcugaggccugg

SEQ ID NO: 1382003 - RNA, 19 nt, Human
caugcugaaggcugaaaga

SEQ ID NO: 1382004 - RNA, 12 nt, Human
caugcuccuuac

SEQ ID NO: 1382005 - RNA, 23 nt, Human
caugcuaucucugugugcacaaa

SEQ ID NO: 1382006 - RNA, 12 nt, Human
caugcaaacucu

SEQ ID NO: 1382007 - RNA, 16 nt, Human
caugcuaucucugugu

SEQ ID NO: 1382008 - RNA, 20 nt, Human
caugcucuccaaaccacuuu

SEQ ID NO: 1382009 - RNA, 13 nt, Human
cauggcugagcug

SEQ ID NO: 1382010 - RNA, 16 nt, Human
cauggcugagcugccc

SEQ ID NO: 1382011 - RNA, 17 nt, Human
cauggcugagcugccca

SEQ ID NO: 1382012 - RNA, 20 nt, Human
cauggcugagcugcccacag

SEQ ID NO: 1382013 - RNA, 19 nt, Human
cagccgcugagcgaggaga

SEQ ID NO: 1382014 - RNA, 22 nt, Human
cagccgacccccucucccugca

SEQ ID NO: 1382015 - RNA, 20 nt, Human
cagccgcugagcgaggagau

SEQ ID NO: 1382016 - RNA, 15 nt, Human
cagccgacccccucu

SEQ ID NO: 1382017 - RNA, 14 nt, Human
cagccgacccccuc

SEQ ID NO: 1382018 - RNA, 23 nt, Human
cagcccuuggggguccuccucca

SEQ ID NO: 1382019 - RNA, 20 nt, Human
cagcccuuggggguccuccu

SEQ ID NO: 1382020 - RNA, 21 nt, Human
cagcgcccaaaggacgcacug

SEQ ID NO: 1382021 - RNA, 22 nt, Human
cagcgccaggcugaccacagca

SEQ ID NO: 1382022 - RNA, 21 nt, Human
cagcgccaggcugaccacagc

SEQ ID NO: 1382023 - RNA, 20 nt, Human
cagcgccaggcugaccacag

SEQ ID NO: 1382024 - RNA, 19 nt, Human
cagcgccaggcugaccaca

SEQ ID NO: 1382025 - RNA, 18 nt, Human
cagcgccaggcugaccac

SEQ ID NO: 1382026 - RNA, 13 nt, Human
cagccucuggcau

SEQ ID NO: 1382027 - RNA, 13 nt, Human
cagccucuggggg

SEQ ID NO: 1382028 - RNA, 18 nt, Human
cagcgcccaaaggacgca

SEQ ID NO: 1382029 - RNA, 22 nt, Human
cagcucccugugcccccagggu

SEQ ID NO: 1382030 - RNA, 20 nt, Human
cagcucccugugcccccagg

SEQ ID NO: 1382031 - RNA, 19 nt, Human
cagcucccugugcccccag

SEQ ID NO: 1382032 - RNA, 18 nt, Human
cagcucccugugccccca

SEQ ID NO: 1382033 - RNA, 14 nt, Human
cagcucccugugcc

SEQ ID NO: 1382034 - RNA, 14 nt, Human
cagcuccucccaca

SEQ ID NO: 1382035 - RNA, 16 nt, Human
cagcuccggccugucc

SEQ ID NO: 1382036 - RNA, 21 nt, Human
cagcuccggccuguccuccaa

SEQ ID NO: 1382037 - RNA, 20 nt, Human
cagcucccccucccuccccu

SEQ ID NO: 1382038 - RNA, 18 nt, Human
cagcucccccucccuccc

SEQ ID NO: 1382039 - RNA, 16 nt, Human
cagcucccccucccuc

SEQ ID NO: 1382040 - RNA, 15 nt, Human
cagcucccccucccu

SEQ ID NO: 1382041 - RNA, 14 nt, Human
cagcucccccuccc

SEQ ID NO: 1382042 - RNA, 24 nt, Human
cagcucccaggaccacaggcucag

SEQ ID NO: 1382043 - RNA, 18 nt, Human
cagcucccaggaccacag

SEQ ID NO: 1382044 - RNA, 11 nt, Human
cagcucccagg

SEQ ID NO: 1382045 - RNA, 21 nt, Human
cagcucccaccuccccuuggg

SEQ ID NO: 1382046 - RNA, 15 nt, Human
cagcucccaccuccc

SEQ ID NO: 1382047 - RNA, 23 nt, Human
cagcuguuuuguugacauucuga

SEQ ID NO: 1382048 - RNA, 22 nt, Human
cagcuguuuuguugacauucug

SEQ ID NO: 1382049 - RNA, 19 nt, Human
cagcuguuuuguugacauu

SEQ ID NO: 1382050 - RNA, 17 nt, Human
cagcuguuuuguugaca

SEQ ID NO: 1382051 - RNA, 16 nt, Human
cagcuguuuuguugac

SEQ ID NO: 1382052 - RNA, 15 nt, Human
cagcuguuuuguuga

SEQ ID NO: 1382053 - RNA, 23 nt, Human
cagcuguugagccccuccuaguu

SEQ ID NO: 1382054 - RNA, 14 nt, Human
cagcugugcuuaug

SEQ ID NO: 1382055 - RNA, 16 nt, Human
cagcuguggcagaguu

SEQ ID NO: 1382056 - RNA, 17 nt, Human
cagcuguggcagaguua

SEQ ID NO: 1382057 - RNA, 12 nt, Human
cagcuguggcag

SEQ ID NO: 1382058 - RNA, 11 nt, Human
cagcugugcuu

SEQ ID NO: 1382059 - RNA, 12 nt, Human
cagcuccucugu

SEQ ID NO: 1382060 - RNA, 22 nt, Human
cagcugccuggaagagcagccc

SEQ ID NO: 1382061 - RNA, 23 nt, Human
cagccagcgucggucugugcccc

SEQ ID NO: 1382062 - RNA, 22 nt, Human
cagccagcgucggucugugccc

SEQ ID NO: 1382063 - RNA, 19 nt, Human
cagccagcgucggucugug

SEQ ID NO: 1382064 - RNA, 19 nt, Human
cagccagccucgcccaucc

SEQ ID NO: 1382065 - RNA, 11 nt, Human
cagccaggagc

SEQ ID NO: 1382066 - RNA, 23 nt, Human
cagccagccucgcccauccccuu

SEQ ID NO: 1382067 - RNA, 14 nt, Human
cagccagccucgcc

SEQ ID NO: 1382068 - RNA, 11 nt, Human
cagccagccuc

SEQ ID NO: 1382069 - RNA, 22 nt, Human
cagccagcccugccuggaggac

SEQ ID NO: 1382070 - RNA, 17 nt, Human
cagcauccgcaggugcu

SEQ ID NO: 1382071 - RNA, 12 nt, Human
cagcauccgcag

SEQ ID NO: 1382072 - RNA, 19 nt, Human
cagcauccccuugaacucu

SEQ ID NO: 1382073 - RNA, 20 nt, Human
cagcauccccuugaacucuu

SEQ ID NO: 1382074 - RNA, 23 nt, Human
cagcaucaggguuaagaagacuu

SEQ ID NO: 1382075 - RNA, 13 nt, Human
cagcaucaggguu

SEQ ID NO: 1382076 - RNA, 24 nt, Human
cagccagggagagcccaggagcuc

SEQ ID NO: 1382077 - RNA, 22 nt, Human
cagccagggagagcccaggagc

SEQ ID NO: 1382078 - RNA, 21 nt, Human
cagccagggagagcccaggag

SEQ ID NO: 1382079 - RNA, 20 nt, Human
cagccagggagagcccagga

SEQ ID NO: 1382080 - RNA, 19 nt, Human
cagccagggagagcccagg

SEQ ID NO: 1382081 - RNA, 18 nt, Human
cagccagggagagcccag

SEQ ID NO: 1382082 - RNA, 17 nt, Human
cagccagggagagccca

SEQ ID NO: 1382083 - RNA, 16 nt, Human
cagccagggagagccc

SEQ ID NO: 1382084 - RNA, 15 nt, Human
cagccagggagagcc

SEQ ID NO: 1382085 - RNA, 14 nt, Human
cagccagggagagc

SEQ ID NO: 1382086 - RNA, 15 nt, Human
cagccaggggagcag

SEQ ID NO: 1382087 - RNA, 16 nt, Human
cagccagggcucaauc

SEQ ID NO: 1382088 - RNA, 17 nt, Human
cagccaggggagcagag

SEQ ID NO: 1382089 - RNA, 23 nt, Human
cagccaggggagcagaggggcag

SEQ ID NO: 1382090 - RNA, 13 nt, Human
cagccaguaaaug

SEQ ID NO: 1382091 - RNA, 22 nt, Human
cagcagugugaggccagggcag

SEQ ID NO: 1382092 - RNA, 20 nt, Human
cagcagugugaggccagggc

SEQ ID NO: 1382093 - RNA, 19 nt, Human
cagcagugugaggccaggg

SEQ ID NO: 1382094 - RNA, 17 nt, Human
cagcagugugaggccag

SEQ ID NO: 1382095 - RNA, 13 nt, Human
cagcauaauacuu

SEQ ID NO: 1382096 - RNA, 16 nt, Human
cagcacgauuucuguu

SEQ ID NO: 1382097 - RNA, 18 nt, Human
cagcacgauuucuguuua

SEQ ID NO: 1382098 - RNA, 19 nt, Human
cagcacgauuucuguuuag

SEQ ID NO: 1382099 - RNA, 20 nt, Human
cagcacgauuucuguuuaga

SEQ ID NO: 1382100 - RNA, 16 nt, Human
cagagggucugggggc

SEQ ID NO: 1382101 - RNA, 18 nt, Human
cagaaucccuuaacaguu

SEQ ID NO: 1382102 - RNA, 13 nt, Human
cagaaucccuuaa

SEQ ID NO: 1382103 - RNA, 21 nt, Human
cagaaucgcuccaccuugcag

SEQ ID NO: 1382104 - RNA, 17 nt, Human
cagagggucugggggca

SEQ ID NO: 1382105 - RNA, 17 nt, Human
cagaggguguccugcac

SEQ ID NO: 1382106 - RNA, 15 nt, Human
cagaauaucacagaa

SEQ ID NO: 1382107 - RNA, 21 nt, Human
cagaguaauccaagcaaaugu

SEQ ID NO: 1382108 - RNA, 18 nt, Human
cagaucacagcuucagcc

SEQ ID NO: 1382109 - RNA, 22 nt, Human
cagaucacagcuucagccagga

SEQ ID NO: 1382110 - RNA, 16 nt, Human
cagauccuccucauuc

SEQ ID NO: 1382111 - RNA, 14 nt, Human
cagauccuccucau

SEQ ID NO: 1382112 - RNA, 13 nt, Human
cagauccuccuca

SEQ ID NO: 1382113 - RNA, 16 nt, Human
cagaucaguguaccau

SEQ ID NO: 1382114 - RNA, 16 nt, Human
cagaucaguaaagaac

SEQ ID NO: 1382115 - RNA, 15 nt, Human
cagaucaucuuggaa

SEQ ID NO: 1382116 - RNA, 18 nt, Human
cagaucaucuuggaacug

SEQ ID NO: 1382117 - RNA, 12 nt, Human
cagauccuggaa

SEQ ID NO: 1382118 - RNA, 13 nt, Human
cagauccuggaaa

SEQ ID NO: 1382119 - RNA, 16 nt, Human
caguaaaccacugaaa

SEQ ID NO: 1382120 - RNA, 14 nt, Human
caguaaaccacuga

SEQ ID NO: 1382121 - RNA, 23 nt, Human
caguaaagaacaucccuccuggg

SEQ ID NO: 1382122 - RNA, 20 nt, Human
caguaaaauugccauauugc

SEQ ID NO: 1382123 - RNA, 21 nt, Human
caguaaaauugccauauugca

SEQ ID NO: 1382124 - RNA, 20 nt, Human
cagucacucuagucaaugac

SEQ ID NO: 1382125 - RNA, 15 nt, Human
cagucacucuaguca

SEQ ID NO: 1382126 - RNA, 24 nt, Human
cagucacucuagucaaugacauga

SEQ ID NO: 1382127 - RNA, 21 nt, Human
cagucacucuagucaaugaca

SEQ ID NO: 1382128 - RNA, 16 nt, Human
cagucacagccacccc

SEQ ID NO: 1382129 - RNA, 14 nt, Human
cagucacagccacc

SEQ ID NO: 1382130 - RNA, 13 nt, Human
cagucacagccac

SEQ ID NO: 1382131 - RNA, 12 nt, Human
cagucacagcca

SEQ ID NO: 1382132 - RNA, 15 nt, Human
cagucaauauuuuua

SEQ ID NO: 1382133 - RNA, 15 nt, Human
caguaaagcacuugc

SEQ ID NO: 1382134 - RNA, 18 nt, Human
caguaaaccacugaaaaa

SEQ ID NO: 1382135 - RNA, 21 nt, Human
caguaaaccacugaaaaaaua

SEQ ID NO: 1382136 - RNA, 19 nt, Human
cagucaccucauggaauug

SEQ ID NO: 1382137 - RNA, 16 nt, Human
cagucaccucauggaa

SEQ ID NO: 1382138 - RNA, 15 nt, Human
caguggggcagucau

SEQ ID NO: 1382139 - RNA, 21 nt, Human
caguggggcagaggcaguacc

SEQ ID NO: 1382140 - RNA, 13 nt, Human
caguggggcagag

SEQ ID NO: 1382141 - RNA, 21 nt, Human
cagugggaggugagaccaccu

SEQ ID NO: 1382142 - RNA, 18 nt, Human
caguggugguuuucuguu

SEQ ID NO: 1382143 - RNA, 14 nt, Human
caguggggaaugaa

SEQ ID NO: 1382144 - RNA, 22 nt, Human
cagugggaggguaccagcagaa

SEQ ID NO: 1382145 - RNA, 22 nt, Human
cagugggaggugagaccaccuc

SEQ ID NO: 1382146 - RNA, 14 nt, Human
cagucucugagcag

SEQ ID NO: 1382147 - RNA, 12 nt, Human
cagucucugagc

SEQ ID NO: 1382148 - RNA, 17 nt, Human
cagucugagagaggcca

SEQ ID NO: 1382149 - RNA, 20 nt, Human
cagucugacuguuuccauca

SEQ ID NO: 1382150 - RNA, 21 nt, Human
caggggaacacuggggacuug

SEQ ID NO: 1382151 - RNA, 16 nt, Human
cagggcuccagccccu

SEQ ID NO: 1382152 - RNA, 13 nt, Human
cagggcuccagcc

SEQ ID NO: 1382153 - RNA, 22 nt, Human
cagggcuccagccccucuugga

SEQ ID NO: 1382154 - RNA, 15 nt, Human
cagggcucuguaagu

SEQ ID NO: 1382155 - RNA, 17 nt, Human
caggggaacacugggga

SEQ ID NO: 1382156 - RNA, 19 nt, Human
cagggauaaggccuguggg

SEQ ID NO: 1382157 - RNA, 12 nt, Human
cagggaguguuc

SEQ ID NO: 1382158 - RNA, 23 nt, Human
cagggagcggccggccagccccu

SEQ ID NO: 1382159 - RNA, 21 nt, Human
cagggagcggccggccagccc

SEQ ID NO: 1382160 - RNA, 19 nt, Human
cagggagcggccggccagc

SEQ ID NO: 1382161 - RNA, 17 nt, Human
cagggagcggccggcca

SEQ ID NO: 1382162 - RNA, 15 nt, Human
cagggagcggccggc

SEQ ID NO: 1382163 - RNA, 18 nt, Human
caggcuggcuccagaugc

SEQ ID NO: 1382164 - RNA, 17 nt, Human
caggcuggcuccagaug

SEQ ID NO: 1382165 - RNA, 20 nt, Human
caggcuggcuccagaugcag

SEQ ID NO: 1382166 - RNA, 12 nt, Human
caggcugggaac

SEQ ID NO: 1382167 - RNA, 16 nt, Human
caggcuggcuccagau

SEQ ID NO: 1382168 - RNA, 18 nt, Human
caggcugggaacucaucu

SEQ ID NO: 1382169 - RNA, 14 nt, Human
caggcagauccagg

SEQ ID NO: 1382170 - RNA, 13 nt, Human
caggccagagcca

SEQ ID NO: 1382171 - RNA, 21 nt, Human
caggcagaggcccaggcugcc

SEQ ID NO: 1382172 - RNA, 20 nt, Human
caggcagaggcccaggcugc

SEQ ID NO: 1382173 - RNA, 19 nt, Human
caggcagaggcccaggcug

SEQ ID NO: 1382174 - RNA, 18 nt, Human
caggcagaggcccaggcu

SEQ ID NO: 1382175 - RNA, 17 nt, Human
caggcagaggcccaggc

SEQ ID NO: 1382176 - RNA, 15 nt, Human
caggcagaggcccag

SEQ ID NO: 1382177 - RNA, 14 nt, Human
caggcagaggccca

SEQ ID NO: 1382178 - RNA, 14 nt, Human
caggcaccaggcag

SEQ ID NO: 1382179 - RNA, 19 nt, Human
caggcaccaaaagaaguaa

SEQ ID NO: 1382180 - RNA, 16 nt, Human
caggcaccaaaagaag

SEQ ID NO: 1382181 - RNA, 15 nt, Human
caggcaccaaaagaa

SEQ ID NO: 1382182 - RNA, 13 nt, Human
caggcagauccag

SEQ ID NO: 1382183 - RNA, 22 nt, Human
caggcagaggcccaggcugccg

SEQ ID NO: 1382184 - RNA, 20 nt, Human
caggcacacagcuacucucc

SEQ ID NO: 1382185 - RNA, 23 nt, Human
caggcacacagcuacucucccca

SEQ ID NO: 1382186 - RNA, 14 nt, Human
caggcacacagcua

SEQ ID NO: 1382187 - RNA, 13 nt, Human
caggcacacagcu

SEQ ID NO: 1382188 - RNA, 12 nt, Human
caggcacacagc

SEQ ID NO: 1382189 - RNA, 16 nt, Human
caggcacacaccacca

SEQ ID NO: 1382190 - RNA, 17 nt, Human
guauuuaacagaaauug

SEQ ID NO: 1382191 - RNA, 21 nt, Human
guauuguuguccuuuucauag

SEQ ID NO: 1382192 - RNA, 20 nt, Human
guauuguuguccuuuucaua

SEQ ID NO: 1382193 - RNA, 19 nt, Human
guauuguuguccuuuucau

SEQ ID NO: 1382194 - RNA, 18 nt, Human
guauuguuguccuuuuca

SEQ ID NO: 1382195 - RNA, 15 nt, Human
guauuguuguccuuu

SEQ ID NO: 1382196 - RNA, 13 nt, Human
guauuguuguccu

SEQ ID NO: 1382197 - RNA, 16 nt, Human
guauuguugaaaaagu

SEQ ID NO: 1382198 - RNA, 23 nt, Human
guauugugcaauguguauaaaca

SEQ ID NO: 1382199 - RNA, 22 nt, Human
guauugugcaauguguauaaac

SEQ ID NO: 1382200 - RNA, 19 nt, Human
guauugugcaauguguaua

SEQ ID NO: 1382201 - RNA, 17 nt, Human
guauugugcaaugugua

SEQ ID NO: 1382202 - RNA, 14 nt, Human
guauugugcaaugu

SEQ ID NO: 1382203 - RNA, 17 nt, Human
guauugucugaacuugc

SEQ ID NO: 1382204 - RNA, 16 nt, Human
guauugugauuaucaa

SEQ ID NO: 1382205 - RNA, 13 nt, Human
guauuuauaaaua

SEQ ID NO: 1382206 - RNA, 14 nt, Human
guauuuagaagcca

SEQ ID NO: 1382207 - RNA, 19 nt, Human
guauuuacgcuuugauuca

SEQ ID NO: 1382208 - RNA, 17 nt, Human
guauuuacgcuuugauu

SEQ ID NO: 1382209 - RNA, 16 nt, Human
guauuuacgcuuugau

SEQ ID NO: 1382210 - RNA, 13 nt, Human
guauuuaucuuua

SEQ ID NO: 1382211 - RNA, 22 nt, Human
aaauguaguauggccuguguca

SEQ ID NO: 1382212 - RNA, 11 nt, Human
guauuuauuca

SEQ ID NO: 1382213 - RNA, 12 nt, Human
aaaugucuugug

SEQ ID NO: 1382214 - RNA, 17 nt, Human
aaauguaucauagaaau

SEQ ID NO: 1382215 - RNA, 20 nt, Human
aaauguaucauagaaaugua

SEQ ID NO: 1382216 - RNA, 15 nt, Human
aaauguauaugcacu

SEQ ID NO: 1382217 - RNA, 14 nt, Human
aaauguauaugcac

SEQ ID NO: 1382218 - RNA, 20 nt, Human
aaauguaguucugcuccaga

SEQ ID NO: 1382219 - RNA, 11 nt, Human
aaauguauacu

SEQ ID NO: 1382220 - RNA, 20 nt, Human
aaaucaucagaaaggaaaaa

SEQ ID NO: 1382221 - RNA, 15 nt, Human
aaaucaucagaaagg

SEQ ID NO: 1382222 - RNA, 22 nt, Human
aaaucaucagaaaggaaaaaca

SEQ ID NO: 1382223 - RNA, 19 nt, Human
aaaucagcuauuuugugaa

SEQ ID NO: 1382224 - RNA, 16 nt, Human
aaaucauucauuuucu

SEQ ID NO: 1382225 - RNA, 18 nt, Human
guauucucuccuguaccu

SEQ ID NO: 1382226 - RNA, 21 nt, Human
guauucucuccuguaccucuu

SEQ ID NO: 1382227 - RNA, 12 nt, Human
guauuguauuua

SEQ ID NO: 1382228 - RNA, 13 nt, Human
guauuguauuuau

SEQ ID NO: 1382229 - RNA, 15 nt, Human
guauuguauuuauuc

SEQ ID NO: 1382230 - RNA, 16 nt, Human
guauuguauuuauuca

SEQ ID NO: 1382231 - RNA, 17 nt, Human
guauuguauuuauucaa

SEQ ID NO: 1382232 - RNA, 18 nt, Human
guauuguauuuauucaau

SEQ ID NO: 1382233 - RNA, 22 nt, Human
guauuguauuuauucaauaaag

SEQ ID NO: 1382234 - RNA, 22 nt, Human
aaauuccaaagucucuaauucu

SEQ ID NO: 1382235 - RNA, 21 nt, Human
aaauuccaaagucucuaauuc

SEQ ID NO: 1382236 - RNA, 18 nt, Human
aaauuccaaagucucuaa

SEQ ID NO: 1382237 - RNA, 17 nt, Human
aaauuccaaagucucua

SEQ ID NO: 1382238 - RNA, 14 nt, Human
aaauuccaaagucu

SEQ ID NO: 1382239 - RNA, 12 nt, Human
aaauuccaaagu

SEQ ID NO: 1382240 - RNA, 21 nt, Human
aaauucacaugaugcacuuca

SEQ ID NO: 1382241 - RNA, 19 nt, Human
aaauucacaugaugcacuu

SEQ ID NO: 1382242 - RNA, 15 nt, Human
aaauucguguguuuu

SEQ ID NO: 1382243 - RNA, 18 nt, Human
aaauucacaaacuuuuau

SEQ ID NO: 1382244 - RNA, 17 nt, Human
aaauucacaaacuuuua

SEQ ID NO: 1382245 - RNA, 15 nt, Human
aaauucacaaacuuu

SEQ ID NO: 1382246 - RNA, 14 nt, Human
aaauucacaaacuu

SEQ ID NO: 1382247 - RNA, 17 nt, Human
aaauuccaagugauuga

SEQ ID NO: 1382248 - RNA, 14 nt, Human
aaauuuaaacuaua

SEQ ID NO: 1382249 - RNA, 21 nt, Human
aaauugucccuuaaacaaaaa

SEQ ID NO: 1382250 - RNA, 15 nt, Human
aaauuguauauugua

SEQ ID NO: 1382251 - RNA, 13 nt, Human
aaauuguauauug

SEQ ID NO: 1382252 - RNA, 17 nt, Human
aaauuguauauucacuu

SEQ ID NO: 1382253 - RNA, 16 nt, Human
aaauucuccuggaggu

SEQ ID NO: 1382254 - RNA, 14 nt, Human
aaauucuccuggag

SEQ ID NO: 1382255 - RNA, 19 nt, Human
aaauuguauauuguaauuu

SEQ ID NO: 1382256 - RNA, 13 nt, Human
aaauucuccugga

SEQ ID NO: 1382257 - RNA, 17 nt, Human
aaauuguauuacaaauc

SEQ ID NO: 1382258 - RNA, 16 nt, Human
aaaugugcuuugagaa

SEQ ID NO: 1382259 - RNA, 22 nt, Human
aaaugugccuauugcuagagcu

SEQ ID NO: 1382260 - RNA, 19 nt, Human
aaaugugggauuauggguc

SEQ ID NO: 1382261 - RNA, 22 nt, Human
aaauuacacccaaagagguauu

SEQ ID NO: 1382262 - RNA, 16 nt, Human
aaauuacacccaaaga

SEQ ID NO: 1382263 - RNA, 12 nt, Human
aaauuacaacua

SEQ ID NO: 1382264 - RNA, 13 nt, Human
aaauuacaacuaa

SEQ ID NO: 1382265 - RNA, 15 nt, Human
aaauuauguaaauua

SEQ ID NO: 1382266 - RNA, 16 nt, Human
aaauuaucuauagcua

SEQ ID NO: 1382267 - RNA, 14 nt, Human
aaauucaacaaaca

SEQ ID NO: 1382268 - RNA, 16 nt, Human
aaauucaacaaacauu

SEQ ID NO: 1382269 - RNA, 11 nt, Human
aaauucaaaua

SEQ ID NO: 1382270 - RNA, 22 nt, Human
aaauuauguaaauuaucaggca

SEQ ID NO: 1382271 - RNA, 17 nt, Human
aaauuaugugacauuuu

SEQ ID NO: 1382272 - RNA, 20 nt, Human
aaauuaugugacauuuuaca

SEQ ID NO: 1382273 - RNA, 22 nt, Human
aaauuaugugacauuuuacauu

SEQ ID NO: 1382274 - RNA, 23 nt, Human
aaauuaugugccagauuuaugca

SEQ ID NO: 1382275 - RNA, 23 nt, Human
gucagugcugugcugugcuaugg

SEQ ID NO: 1382276 - RNA, 16 nt, Human
gucaguaccuucaaac

SEQ ID NO: 1382277 - RNA, 13 nt, Human
aaauuucuaaauc

SEQ ID NO: 1382278 - RNA, 15 nt, Human
aaauuucuaaaucuc

SEQ ID NO: 1382279 - RNA, 18 nt, Human
gucaggagugugugugag

SEQ ID NO: 1382280 - RNA, 17 nt, Human
gucagggaguguucccu

SEQ ID NO: 1382281 - RNA, 20 nt, Human
gucaggagugugugugagug

SEQ ID NO: 1382282 - RNA, 16 nt, Human
gucagaacagcagacu

SEQ ID NO: 1382283 - RNA, 17 nt, Human
gucacuguuccuuguca

SEQ ID NO: 1382284 - RNA, 21 nt, Human
gucacugguagaccaaaauaa

SEQ ID NO: 1382285 - RNA, 19 nt, Human
gucacuggaccacugggca

SEQ ID NO: 1382286 - RNA, 15 nt, Human
gucacugcuuaacuu

SEQ ID NO: 1382287 - RNA, 21 nt, Human
gucacugcuuaacuucacaua

SEQ ID NO: 1382288 - RNA, 18 nt, Human
gucacuuagguaguacca

SEQ ID NO: 1382289 - RNA, 18 nt, Human
gucacuuuuugaggcaaa

SEQ ID NO: 1382290 - RNA, 19 nt, Human
gucacuuuuugaggcaaaa

SEQ ID NO: 1382291 - RNA, 17 nt, Human
gucacuuuuugaggcaa

SEQ ID NO: 1382292 - RNA, 14 nt, Human
gucacuuuuucuga

SEQ ID NO: 1382293 - RNA, 19 nt, Human
gucagaacagcagacucag

SEQ ID NO: 1382294 - RNA, 14 nt, Human
gucaggaaagagaa

SEQ ID NO: 1382295 - RNA, 19 nt, Human
gucaccaauguacccaccg

SEQ ID NO: 1382296 - RNA, 22 nt, Human
gucaccaauguacccaccgggc

SEQ ID NO: 1382297 - RNA, 12 nt, Human
gucacugagacc

SEQ ID NO: 1382298 - RNA, 16 nt, Human
gucacugacacacacg

SEQ ID NO: 1382299 - RNA, 10 nt, Human
gucacugcuu

SEQ ID NO: 1382300 - RNA, 12 nt, Human
gucacagcugua

SEQ ID NO: 1382301 - RNA, 22 nt, Human
gucaauuucuguguugccaagc

SEQ ID NO: 1382302 - RNA, 17 nt, Human
gucaauuucuguguugc

SEQ ID NO: 1382303 - RNA, 21 nt, Human
aaauuuaaagcagguucuugu

SEQ ID NO: 1382304 - RNA, 18 nt, Human
aaauuuaaagcagguucu

SEQ ID NO: 1382305 - RNA, 13 nt, Human
aaauuuaaagcag

SEQ ID NO: 1382306 - RNA, 19 nt, Human
aaauuuaaacuauaagcaa

SEQ ID NO: 1382307 - RNA, 14 nt, Human
gucacauaaaacuu

SEQ ID NO: 1382308 - RNA, 23 nt, Human
gucacagggcaguaccugagggu

SEQ ID NO: 1382309 - RNA, 15 nt, Human
gucacaggaaaaagu

SEQ ID NO: 1382310 - RNA, 17 nt, Human
gucacagggcaguaccu

SEQ ID NO: 1382311 - RNA, 18 nt, Human
gucacagggccuggggag

SEQ ID NO: 1382312 - RNA, 18 nt, Human
gucacauuccugaacagg

SEQ ID NO: 1382313 - RNA, 19 nt, Human
guccgugggacggugccca

SEQ ID NO: 1382314 - RNA, 17 nt, Human
guccgguguucuaagau

SEQ ID NO: 1382315 - RNA, 16 nt, Human
guccgguguucuaaga

SEQ ID NO: 1382316 - RNA, 15 nt, Human
guccgguguucuaag

SEQ ID NO: 1382317 - RNA, 14 nt, Human
guccgguguucuaa

SEQ ID NO: 1382318 - RNA, 12 nt, Human
aacauagauaaa

SEQ ID NO: 1382319 - RNA, 21 nt, Human
aacauagacagaagaaacaag

SEQ ID NO: 1382320 - RNA, 14 nt, Human
aacauaaaaaugau

SEQ ID NO: 1382321 - RNA, 13 nt, Human
aacauaaaaauga

SEQ ID NO: 1382322 - RNA, 21 nt, Human
aacauauaauguuguuauuua

SEQ ID NO: 1382323 - RNA, 18 nt, Human
aacauauaauguuguuau

SEQ ID NO: 1382324 - RNA, 13 nt, Human
aacauauaauguu

SEQ ID NO: 1382325 - RNA, 12 nt, Human
aacauauauaac

SEQ ID NO: 1382326 - RNA, 21 nt, Human
aacaguuuuuuaugcuaauca

SEQ ID NO: 1382327 - RNA, 21 nt, Human
aacaguuuuccuaugcuuuga

SEQ ID NO: 1382328 - RNA, 20 nt, Human
aacaguuuuccuaugcuuug

SEQ ID NO: 1382329 - RNA, 18 nt, Human
aacaguuuuccuaugcuu

SEQ ID NO: 1382330 - RNA, 15 nt, Human
aacauaaaaaggaca

SEQ ID NO: 1382331 - RNA, 19 nt, Human
aacauaaaaaggacaucag

SEQ ID NO: 1382332 - RNA, 20 nt, Human
aacauaaaaaggacaucagc

SEQ ID NO: 1382333 - RNA, 22 nt, Human
aacauaaaaaggacaucagcaa

SEQ ID NO: 1382334 - RNA, 18 nt, Human
guccucguuuguguucug

SEQ ID NO: 1382335 - RNA, 14 nt, Human
guccuccucuguga

SEQ ID NO: 1382336 - RNA, 13 nt, Human
guccuccucugug

SEQ ID NO: 1382337 - RNA, 12 nt, Human
guccuccucugu

SEQ ID NO: 1382338 - RNA, 18 nt, Human
guccuccuccagggacag

SEQ ID NO: 1382339 - RNA, 20 nt, Human
guccuccuccagggacagca

SEQ ID NO: 1382340 - RNA, 17 nt, Human
guccuccuccagggaca

SEQ ID NO: 1382341 - RNA, 14 nt, Human
guccuccuccaggg

SEQ ID NO: 1382342 - RNA, 13 nt, Human
guccuccuccagg

SEQ ID NO: 1382343 - RNA, 14 nt, Human
aacauuguagccuc

SEQ ID NO: 1382344 - RNA, 16 nt, Human
aacauuggaauguucu

SEQ ID NO: 1382345 - RNA, 21 nt, Human
aacauuggaauguucucagau

SEQ ID NO: 1382346 - RNA, 15 nt, Human
aacauuggaauguuc

SEQ ID NO: 1382347 - RNA, 21 nt, Human
aacauuccucaugaauguaaa

SEQ ID NO: 1382348 - RNA, 22 nt, Human
aacauuccucaugaauguaaau

SEQ ID NO: 1382349 - RNA, 20 nt, Human
aacauguccugccuauuauc

SEQ ID NO: 1382350 - RNA, 19 nt, Human
aacauguccugccuauuau

SEQ ID NO: 1382351 - RNA, 15 nt, Human
aacauguaggaagua

SEQ ID NO: 1382352 - RNA, 22 nt, Human
aacauauaauguuguuauuuaa

SEQ ID NO: 1382353 - RNA, 17 nt, Human
aacaugugaaaagaaua

SEQ ID NO: 1382354 - RNA, 12 nt, Human
aacauuccaaga

SEQ ID NO: 1382355 - RNA, 16 nt, Human
aacauucauagucuuu

SEQ ID NO: 1382356 - RNA, 17 nt, Human
aacauuccaagacucua

SEQ ID NO: 1382357 - RNA, 10 nt, Human
aacauuccau

SEQ ID NO: 1382358 - RNA, 13 nt, Human
aacauuccauccu

SEQ ID NO: 1382359 - RNA, 14 nt, Human
aacauuccauccuu

SEQ ID NO: 1382360 - RNA, 20 nt, Human
aacauuccucaugaauguaa

SEQ ID NO: 1382361 - RNA, 19 nt, Human
aacauuccucaugaaugua

SEQ ID NO: 1382362 - RNA, 11 nt, Human
aacauuccaag

SEQ ID NO: 1382363 - RNA, 23 nt, Human
aacauuccauccuugagucaaaa

SEQ ID NO: 1382364 - RNA, 21 nt, Human
guccuggaagcgcgagggccu

SEQ ID NO: 1382365 - RNA, 19 nt, Human
guccugaaggccugagguu

SEQ ID NO: 1382366 - RNA, 14 nt, Human
guccugaaggccug

SEQ ID NO: 1382367 - RNA, 17 nt, Human
guccucuuucagcuccu

SEQ ID NO: 1382368 - RNA, 16 nt, Human
guccucuuucagcucc

SEQ ID NO: 1382369 - RNA, 15 nt, Human
guccucuuucagcuc

SEQ ID NO: 1382370 - RNA, 14 nt, Human
guccucuuucagcu

SEQ ID NO: 1382371 - RNA, 13 nt, Human
guccucuuucagc

SEQ ID NO: 1382372 - RNA, 14 nt, Human
guccucguuugugu

SEQ ID NO: 1382373 - RNA, 20 nt, Human
guccucuuucagcuccugac

SEQ ID NO: 1382374 - RNA, 19 nt, Human
guccucuuucagcuccuga

SEQ ID NO: 1382375 - RNA, 18 nt, Human
guccucuuucagcuccug

SEQ ID NO: 1382376 - RNA, 14 nt, Human
gucgauagagcugu

SEQ ID NO: 1382377 - RNA, 15 nt, Human
gucgaggaguaacaa

SEQ ID NO: 1382378 - RNA, 21 nt, Human
guccuuuugacacugcucuaa

SEQ ID NO: 1382379 - RNA, 20 nt, Human
guccuuuugacacugcucua

SEQ ID NO: 1382380 - RNA, 19 nt, Human
guccuuuugacacugcucu

SEQ ID NO: 1382381 - RNA, 17 nt, Human
guccuuuugacacugcu

SEQ ID NO: 1382382 - RNA, 16 nt, Human
guccuuuugacacugc

SEQ ID NO: 1382383 - RNA, 15 nt, Human
guccuuuugacacug

SEQ ID NO: 1382384 - RNA, 22 nt, Human
guccuuuucauaggucugaaau

SEQ ID NO: 1382385 - RNA, 21 nt, Human
guccuuuucauaggucugaaa

SEQ ID NO: 1382386 - RNA, 20 nt, Human
guccuuucuuccggccccuc

SEQ ID NO: 1382387 - RNA, 13 nt, Human
guccuuucuuccg

SEQ ID NO: 1382388 - RNA, 22 nt, Human
guccuuucuagagcacugccac

SEQ ID NO: 1382389 - RNA, 11 nt, Human
guccuuucccu

SEQ ID NO: 1382390 - RNA, 19 nt, Human
guccuggagcagaccaccc

SEQ ID NO: 1382391 - RNA, 17 nt, Human
guccuggaugauacuaa

SEQ ID NO: 1382392 - RNA, 19 nt, Human
guccuggaugauacuaaua

SEQ ID NO: 1382393 - RNA, 15 nt, Human
gucgcuccugcccac

SEQ ID NO: 1382394 - RNA, 11 nt, Human
gucgcuccugc

SEQ ID NO: 1382395 - RNA, 21 nt, Human
gucgcucaugugugcaacagg

SEQ ID NO: 1382396 - RNA, 16 nt, Human
gucgcucaugugugca

SEQ ID NO: 1382397 - RNA, 21 nt, Human
gucgcccuuugcugcauggca

SEQ ID NO: 1382398 - RNA, 17 nt, Human
gucgcccuuugcugcau

SEQ ID NO: 1382399 - RNA, 14 nt, Human
gucgauuagacugg

SEQ ID NO: 1382400 - RNA, 13 nt, Human
gucgauuagacug

SEQ ID NO: 1382401 - RNA, 22 nt, Human
gucgcccuuugcugcauggcag

SEQ ID NO: 1382402 - RNA, 22 nt, Human
gucuagucacgcaugcaguguu

SEQ ID NO: 1382403 - RNA, 12 nt, Human
gucuagauucuc

SEQ ID NO: 1382404 - RNA, 22 nt, Human
gucuagauucaaagguucuagg

SEQ ID NO: 1382405 - RNA, 21 nt, Human
gucuagauucaaagguucuag

SEQ ID NO: 1382406 - RNA, 20 nt, Human
gucuagauucaaagguucua

SEQ ID NO: 1382407 - RNA, 19 nt, Human
gucuagauucaaagguucu

SEQ ID NO: 1382408 - RNA, 15 nt, Human
gucuagauucaaagg

SEQ ID NO: 1382409 - RNA, 11 nt, Human
gucuagauuca

SEQ ID NO: 1382410 - RNA, 22 nt, Human
gucuagauguuuauucuucuag

SEQ ID NO: 1382411 - RNA, 13 nt, Human
gucuauucagcuu

SEQ ID NO: 1382412 - RNA, 20 nt, Human
gucuauuuacggaacucaaa

SEQ ID NO: 1382413 - RNA, 19 nt, Human
aacacagcaguucugcaga

SEQ ID NO: 1382414 - RNA, 23 nt, Human
aacacagcaguucugcagaggac

SEQ ID NO: 1382415 - RNA, 18 nt, Human
aacacagcaauuccucag

SEQ ID NO: 1382416 - RNA, 21 nt, Human
aacacacaggugcaacagacu

SEQ ID NO: 1382417 - RNA, 14 nt, Human
aacacacacaaaag

SEQ ID NO: 1382418 - RNA, 21 nt, Human
aacacaagauugguguuuuuu

SEQ ID NO: 1382419 - RNA, 23 nt, Human
aacacaagauugguguuuuuuuc

SEQ ID NO: 1382420 - RNA, 20 nt, Human
aacacaagauugguguuuuu

SEQ ID NO: 1382421 - RNA, 19 nt, Human
aacacaagauugguguuuu

SEQ ID NO: 1382422 - RNA, 18 nt, Human
aacacaagauugguguuu

SEQ ID NO: 1382423 - RNA, 18 nt, Human
aaauuucuguaaaacagg

SEQ ID NO: 1382424 - RNA, 19 nt, Human
aaauuucuaaaucuccaaa

SEQ ID NO: 1382425 - RNA, 19 nt, Human
aacacaaacuguaaauaaa

SEQ ID NO: 1382426 - RNA, 16 nt, Human
aacacaaacuguaaau

SEQ ID NO: 1382427 - RNA, 15 nt, Human
aacacaaacuguaaa

SEQ ID NO: 1382428 - RNA, 13 nt, Human
aacacaaacugua

SEQ ID NO: 1382429 - RNA, 18 nt, Human
aaauuugacuuuucugua

SEQ ID NO: 1382430 - RNA, 16 nt, Human
aaauuugacuuuucug

SEQ ID NO: 1382431 - RNA, 15 nt, Human
gucauuucauuuccu

SEQ ID NO: 1382432 - RNA, 23 nt, Human
aacacuggucugcuguuccagug

SEQ ID NO: 1382433 - RNA, 22 nt, Human
aacacaggcaaaauccuugcuu

SEQ ID NO: 1382434 - RNA, 15 nt, Human
aacacaggcaaaauc

SEQ ID NO: 1382435 - RNA, 20 nt, Human
aacacucagaagccuggggg

SEQ ID NO: 1382436 - RNA, 18 nt, Human
aacacucagaagccuggg

SEQ ID NO: 1382437 - RNA, 17 nt, Human
aacacucagaagccugg

SEQ ID NO: 1382438 - RNA, 16 nt, Human
aacacucagaagccug

SEQ ID NO: 1382439 - RNA, 12 nt, Human
aacacucaccau

SEQ ID NO: 1382440 - RNA, 22 nt, Human
aacacuggucugcuguuccagu

SEQ ID NO: 1382441 - RNA, 23 nt, Human
aacacuggggacuuggccucucu

SEQ ID NO: 1382442 - RNA, 19 nt, Human
aacacuggggacuuggccu

SEQ ID NO: 1382443 - RNA, 24 nt, Human
aacacucaguggcccauggcauuu

SEQ ID NO: 1382444 - RNA, 17 nt, Human
aacacucaguggcccau

SEQ ID NO: 1382445 - RNA, 19 nt, Human
aacacucagaagccugggg

SEQ ID NO: 1382446 - RNA, 21 nt, Human
aacacugggagaaaugaaaaa

SEQ ID NO: 1382447 - RNA, 18 nt, Human
guccauaucacacacauu

SEQ ID NO: 1382448 - RNA, 15 nt, Human
guccaucagccucca

SEQ ID NO: 1382449 - RNA, 20 nt, Human
guccaacccgaggcccgcau

SEQ ID NO: 1382450 - RNA, 23 nt, Human
guccaaaaccgccagcucuguuc

SEQ ID NO: 1382451 - RNA, 19 nt, Human
guccaaagaggcugccccu

SEQ ID NO: 1382452 - RNA, 16 nt, Human
guccaaagaggcugcc

SEQ ID NO: 1382453 - RNA, 18 nt, Human
guccaaaagauugcugaa

SEQ ID NO: 1382454 - RNA, 21 nt, Human
guccaaaaccgccagcucugu

SEQ ID NO: 1382455 - RNA, 14 nt, Human
guccaaacugccua

SEQ ID NO: 1382456 - RNA, 21 nt, Human
guccaaacugccuaagcccuc

SEQ ID NO: 1382457 - RNA, 22 nt, Human
gucccacaucccugggccugcu

SEQ ID NO: 1382458 - RNA, 23 nt, Human
gucccacaucccugggccugcug

SEQ ID NO: 1382459 - RNA, 15 nt, Human
gucccacagccacgu

SEQ ID NO: 1382460 - RNA, 14 nt, Human
gucccacagccacg

SEQ ID NO: 1382461 - RNA, 20 nt, Human
guccaaaaccgccagcucug

SEQ ID NO: 1382462 - RNA, 17 nt, Human
guccauaucacacacau

SEQ ID NO: 1382463 - RNA, 21 nt, Human
gucccacaucccugggccugc

SEQ ID NO: 1382464 - RNA, 20 nt, Human
gucccacaucccugggccug

SEQ ID NO: 1382465 - RNA, 19 nt, Human
gucccacaucccugggccu

SEQ ID NO: 1382466 - RNA, 18 nt, Human
gucccacaucccugggcc

SEQ ID NO: 1382467 - RNA, 17 nt, Human
gucccacaucccugggc

SEQ ID NO: 1382468 - RNA, 15 nt, Human
gucccacaucccugg

SEQ ID NO: 1382469 - RNA, 14 nt, Human
gucccacaucccug

SEQ ID NO: 1382470 - RNA, 13 nt, Human
gucccacaucccu

SEQ ID NO: 1382471 - RNA, 15 nt, Human
gucccuaauaaagcu

SEQ ID NO: 1382472 - RNA, 17 nt, Human
guccccuccuucccaag

SEQ ID NO: 1382473 - RNA, 12 nt, Human
guccccagcaga

SEQ ID NO: 1382474 - RNA, 14 nt, Human
guccccagcagaga

SEQ ID NO: 1382475 - RNA, 13 nt, Human
guccccugcuaca

SEQ ID NO: 1382476 - RNA, 15 nt, Human
guccccuccuuccca

SEQ ID NO: 1382477 - RNA, 17 nt, Human
gucccggggccagcacu

SEQ ID NO: 1382478 - RNA, 15 nt, Human
gucccggggccagca

SEQ ID NO: 1382479 - RNA, 18 nt, Human
guccccugcuacaccuau

SEQ ID NO: 1382480 - RNA, 22 nt, Human
gucccgggacaccuaggcuagg

SEQ ID NO: 1382481 - RNA, 21 nt, Human
gucccggggccagcacuucca

SEQ ID NO: 1382482 - RNA, 22 nt, Human
gucccggggccagcacuuccau

SEQ ID NO: 1382483 - RNA, 12 nt, Human
gucccuaauaaa

SEQ ID NO: 1382484 - RNA, 17 nt, Human
gugagggagggcuguca

SEQ ID NO: 1382485 - RNA, 16 nt, Human
gugaggcuguccugua

SEQ ID NO: 1382486 - RNA, 14 nt, Human
gugaggcuguccug

SEQ ID NO: 1382487 - RNA, 19 nt, Human
gugagagacauuaacucau

SEQ ID NO: 1382488 - RNA, 23 nt, Human
gugagagacauuaacucauuaga

SEQ ID NO: 1382489 - RNA, 23 nt, Human
gugagacugggaaggcuugggau

SEQ ID NO: 1382490 - RNA, 19 nt, Human
aacucuuuguuauuugaaa

SEQ ID NO: 1382491 - RNA, 15 nt, Human
aacucuuuguuauuu

SEQ ID NO: 1382492 - RNA, 23 nt, Human
aacucuuugcugcugcccauguu

SEQ ID NO: 1382493 - RNA, 13 nt, Human
aacucuuugcugc

SEQ ID NO: 1382494 - RNA, 14 nt, Human
aacucuuugagaaa

SEQ ID NO: 1382495 - RNA, 13 nt, Human
aacucuuucggua

SEQ ID NO: 1382496 - RNA, 13 nt, Human
aacucuuucaaaa

SEQ ID NO: 1382497 - RNA, 12 nt, Human
aacucuuucaaa

SEQ ID NO: 1382498 - RNA, 17 nt, Human
aacucuugauuauccau

SEQ ID NO: 1382499 - RNA, 11 nt, Human
aacucuugauu

SEQ ID NO: 1382500 - RNA, 23 nt, Human
aacucuucccccucucccaguug

SEQ ID NO: 1382501 - RNA, 23 nt, Human
aacucuucacucuucaaaugccu

SEQ ID NO: 1382502 - RNA, 17 nt, Human
aacucuucacucuucaa

SEQ ID NO: 1382503 - RNA, 15 nt, Human
aacucuucacucuuc

SEQ ID NO: 1382504 - RNA, 21 nt, Human
aacucucuuauugccucacuu

SEQ ID NO: 1382505 - RNA, 19 nt, Human
aacucucuuauugccucac

SEQ ID NO: 1382506 - RNA, 18 nt, Human
aacucucuuauugccuca

SEQ ID NO: 1382507 - RNA, 22 nt, Human
gugagucaauacauagugcugc

SEQ ID NO: 1382508 - RNA, 22 nt, Human
gugacagggcggggguggcggc

SEQ ID NO: 1382509 - RNA, 19 nt, Human
gugacagggcggggguggc

SEQ ID NO: 1382510 - RNA, 16 nt, Human
gugaauaaaugucuug

SEQ ID NO: 1382511 - RNA, 13 nt, Human
gugaauaaauguc

SEQ ID NO: 1382512 - RNA, 11 nt, Human
aacuccuccca

SEQ ID NO: 1382513 - RNA, 14 nt, Human
aacuccucccaggg

SEQ ID NO: 1382514 - RNA, 16 nt, Human
aacuccucauuguaaa

SEQ ID NO: 1382515 - RNA, 19 nt, Human
aacuccuaguucuagaaaa

SEQ ID NO: 1382516 - RNA, 21 nt, Human
aacuccuaguucuagaaaaac

SEQ ID NO: 1382517 - RNA, 15 nt, Human
aacuccaccuuccca

SEQ ID NO: 1382518 - RNA, 15 nt, Human
aacuccuaguucuag

SEQ ID NO: 1382519 - RNA, 14 nt, Human
aacuccuaguucua

SEQ ID NO: 1382520 - RNA, 23 nt, Human
gugaaguugcugcuucucccagg

SEQ ID NO: 1382521 - RNA, 15 nt, Human
gugaaguugcugcuu

SEQ ID NO: 1382522 - RNA, 14 nt, Human
gugaaguugcugcu

SEQ ID NO: 1382523 - RNA, 13 nt, Human
gugaaguugcugc

SEQ ID NO: 1382524 - RNA, 17 nt, Human
aacuccugaccucaggc

SEQ ID NO: 1382525 - RNA, 18 nt, Human
aacuccugaccucaggca

SEQ ID NO: 1382526 - RNA, 15 nt, Human
gugacugucugggga

SEQ ID NO: 1382527 - RNA, 16 nt, Human
gugacugucuggggag

SEQ ID NO: 1382528 - RNA, 22 nt, Human
gugacauuugggagacauguga

SEQ ID NO: 1382529 - RNA, 21 nt, Human
gugacauugcaucaaagcauc

SEQ ID NO: 1382530 - RNA, 13 nt, Human
gugacuucugaga

SEQ ID NO: 1382531 - RNA, 17 nt, Human
gugacuugugucccaug

SEQ ID NO: 1382532 - RNA, 11 nt, Human
gugacuucuga

SEQ ID NO: 1382533 - RNA, 23 nt, Human
gugacuugugucccaugaucccu

SEQ ID NO: 1382534 - RNA, 18 nt, Human
gugacuuuggcugcaugc

SEQ ID NO: 1382535 - RNA, 20 nt, Human
gugacuuuggcugcaugcga

SEQ ID NO: 1382536 - RNA, 13 nt, Human
gugagaccaccuc

SEQ ID NO: 1382537 - RNA, 14 nt, Human
gugagaccaccucu

SEQ ID NO: 1382538 - RNA, 20 nt, Human
gugagacccagcccucaucc

SEQ ID NO: 1382539 - RNA, 20 nt, Human
gugagaccaccucucaauau

SEQ ID NO: 1382540 - RNA, 21 nt, Human
aacguuuucuaauugcuuauu

SEQ ID NO: 1382541 - RNA, 17 nt, Human
aacguuuucuaauugcu

SEQ ID NO: 1382542 - RNA, 15 nt, Human
aacguuuucuaauug

SEQ ID NO: 1382543 - RNA, 13 nt, Human
aacguuuucuaau

SEQ ID NO: 1382544 - RNA, 17 nt, Human
aacuaaaauaauuuugu

SEQ ID NO: 1382545 - RNA, 19 nt, Human
aacuaaaauaauuuuguaa

SEQ ID NO: 1382546 - RNA, 15 nt, Human
aacuaaaauaauuuu

SEQ ID NO: 1382547 - RNA, 21 nt, Human
aacuaggugcauauuuauaaa

SEQ ID NO: 1382548 - RNA, 24 nt, Human
aacuauauauaaucaucaaguaau

SEQ ID NO: 1382549 - RNA, 17 nt, Human
aacuagggccaagccca

SEQ ID NO: 1382550 - RNA, 18 nt, Human
aacuauggaucagaauag

SEQ ID NO: 1382551 - RNA, 12 nt, Human
aacuauggccug

SEQ ID NO: 1382552 - RNA, 11 nt, Human
aaccuggccuu

SEQ ID NO: 1382553 - RNA, 12 nt, Human
aaccuggccuuc

SEQ ID NO: 1382554 - RNA, 16 nt, Human
gucuuucucuuucccu

SEQ ID NO: 1382555 - RNA, 21 nt, Human
gucuuucucuuucccuggucc

SEQ ID NO: 1382556 - RNA, 14 nt, Human
gucuuucucuuucc

SEQ ID NO: 1382557 - RNA, 14 nt, Human
gucuuucucucuca

SEQ ID NO: 1382558 - RNA, 16 nt, Human
gucuuuccuggcacua

SEQ ID NO: 1382559 - RNA, 20 nt, Human
gucuuucccauggggaggga

SEQ ID NO: 1382560 - RNA, 19 nt, Human
gucuuucccauggggaggg

SEQ ID NO: 1382561 - RNA, 20 nt, Human
gucuuuccauuggaucucau

SEQ ID NO: 1382562 - RNA, 17 nt, Human
aaccuggguugcagaca

SEQ ID NO: 1382563 - RNA, 20 nt, Human
aaccuggguugcagacagga

SEQ ID NO: 1382564 - RNA, 19 nt, Human
aaccuggguugcagacagg

SEQ ID NO: 1382565 - RNA, 19 nt, Human
aacgugcucuuuguuuugu

SEQ ID NO: 1382566 - RNA, 20 nt, Human
aacgugcucuuuguuuugug

SEQ ID NO: 1382567 - RNA, 13 nt, Human
aacguggcccaga

SEQ ID NO: 1382568 - RNA, 17 nt, Human
aacgugcucuuuguuuu

SEQ ID NO: 1382569 - RNA, 23 nt, Human
aacgugcauugugcuucuuucuu

SEQ ID NO: 1382570 - RNA, 14 nt, Human
aacgugcauugugc

SEQ ID NO: 1382571 - RNA, 16 nt, Human
aacgugcauugugcuu

SEQ ID NO: 1382572 - RNA, 15 nt, Human
aacgucuuaaauauu

SEQ ID NO: 1382573 - RNA, 11 nt, Human
aacgugcauug

SEQ ID NO: 1382574 - RNA, 13 nt, Human
aaccuucucuaug

SEQ ID NO: 1382575 - RNA, 14 nt, Human
aacgucuuaaauau

SEQ ID NO: 1382576 - RNA, 12 nt, Human
aacgucuuaaau

SEQ ID NO: 1382577 - RNA, 13 nt, Human
aaccuuccaccca

SEQ ID NO: 1382578 - RNA, 15 nt, Human
aaccuuccacccagu

SEQ ID NO: 1382579 - RNA, 14 nt, Human
gucuggaaguccaa

SEQ ID NO: 1382580 - RNA, 23 nt, Human
gucuggaagauggggaccagcag

SEQ ID NO: 1382581 - RNA, 14 nt, Human
gucuggaagauggg

SEQ ID NO: 1382582 - RNA, 22 nt, Human
gucucuuuuacccuggccccuc

SEQ ID NO: 1382583 - RNA, 21 nt, Human
gucucuuuuacccuggccccu

SEQ ID NO: 1382584 - RNA, 20 nt, Human
gucucuuuuacccuggcccc

SEQ ID NO: 1382585 - RNA, 23 nt, Human
gucucuuuuacccuggccccucu

SEQ ID NO: 1382586 - RNA, 18 nt, Human
gucucuuuuacccuggcc

SEQ ID NO: 1382587 - RNA, 14 nt, Human
gucucuuuuacccu

SEQ ID NO: 1382588 - RNA, 13 nt, Human
gucugaaauuuuu

SEQ ID NO: 1382589 - RNA, 15 nt, Human
gucugaacagcugua

SEQ ID NO: 1382590 - RNA, 22 nt, Human
gucuuaaacuaaaugugcaaua

SEQ ID NO: 1382591 - RNA, 17 nt, Human
gucuuaaacuaaaugug

SEQ ID NO: 1382592 - RNA, 14 nt, Human
gucuuaaugaaguu

SEQ ID NO: 1382593 - RNA, 16 nt, Human
gucuuaaugaaguuug

SEQ ID NO: 1382594 - RNA, 17 nt, Human
gucuuaaugaaguuuga

SEQ ID NO: 1382595 - RNA, 18 nt, Human
gucuuaaugaaguuugaa

SEQ ID NO: 1382596 - RNA, 19 nt, Human
gucuuaaugaaguuugaau

SEQ ID NO: 1382597 - RNA, 20 nt, Human
gucuuaaugaaguuugaaug

SEQ ID NO: 1382598 - RNA, 22 nt, Human
gucuuaaugaaguuugaauguu

SEQ ID NO: 1382599 - RNA, 23 nt, Human
gucuuguguuuccacagccugca

SEQ ID NO: 1382600 - RNA, 18 nt, Human
gucuuuccacggagccac

SEQ ID NO: 1382601 - RNA, 16 nt, Human
gucuuauucccuuccu

SEQ ID NO: 1382602 - RNA, 14 nt, Human
gucuuauuuccuca

SEQ ID NO: 1382603 - RNA, 20 nt, Human
aagaaaaacaaacucguuuu

SEQ ID NO: 1382604 - RNA, 18 nt, Human
gugccagagccuggggcu

SEQ ID NO: 1382605 - RNA, 17 nt, Human
gugccagagccuggggc

SEQ ID NO: 1382606 - RNA, 16 nt, Human
gugccagagccugggg

SEQ ID NO: 1382607 - RNA, 15 nt, Human
gugccagagccuggg

SEQ ID NO: 1382608 - RNA, 14 nt, Human
gugccagagccugg

SEQ ID NO: 1382609 - RNA, 13 nt, Human
gugccagagccug

SEQ ID NO: 1382610 - RNA, 12 nt, Human
gugccagagccu

SEQ ID NO: 1382611 - RNA, 18 nt, Human
gugccagagaacccagcc

SEQ ID NO: 1382612 - RNA, 19 nt, Human
gugccagauuuaugcauau

SEQ ID NO: 1382613 - RNA, 21 nt, Human
aacuuuaccuuuuuuauacau

SEQ ID NO: 1382614 - RNA, 22 nt, Human
aacuuuaccuuuuuuauacaua

SEQ ID NO: 1382615 - RNA, 23 nt, Human
aacuuuaccuuuuuuauacauaa

SEQ ID NO: 1382616 - RNA, 16 nt, Human
aagaaacaagguuuuc

SEQ ID NO: 1382617 - RNA, 19 nt, Human
aagaaacaacucuuugaga

SEQ ID NO: 1382618 - RNA, 15 nt, Human
aagaaacaaagaugu

SEQ ID NO: 1382619 - RNA, 14 nt, Human
aagaaacaaagaug

SEQ ID NO: 1382620 - RNA, 22 nt, Human
aagaaaauuuuuguaguagcgu

SEQ ID NO: 1382621 - RNA, 14 nt, Human
aagaaacauuuaua

SEQ ID NO: 1382622 - RNA, 11 nt, Human
aagaaacauuu

SEQ ID NO: 1382623 - RNA, 15 nt, Human
aagaaaauaguggug

SEQ ID NO: 1382624 - RNA, 21 nt, Human
aagaaaauaguggugugauuu

SEQ ID NO: 1382625 - RNA, 22 nt, Human
aagaaaauaguggugugauuug

SEQ ID NO: 1382626 - RNA, 22 nt, Human
aagaaagcuucaaacugcauga

SEQ ID NO: 1382627 - RNA, 22 nt, Human
aagaaagccugaguacuccaca

SEQ ID NO: 1382628 - RNA, 12 nt, Human
aagaaagccuga

SEQ ID NO: 1382629 - RNA, 23 nt, Human
aagaaagaggugaccccagggca

SEQ ID NO: 1382630 - RNA, 19 nt, Human
aagaaagcccuuaggaaga

SEQ ID NO: 1382631 - RNA, 14 nt, Human
aagaaagaacggaa

SEQ ID NO: 1382632 - RNA, 18 nt, Human
gugcuacuggggaaacug

SEQ ID NO: 1382633 - RNA, 13 nt, Human
gugcuacugggga

SEQ ID NO: 1382634 - RNA, 11 nt, Human
gugcuacuggg

SEQ ID NO: 1382635 - RNA, 21 nt, Human
gugcuacacccuuuuccagcu

SEQ ID NO: 1382636 - RNA, 23 nt, Human
aagaauaaucacgcuuuccugaa

SEQ ID NO: 1382637 - RNA, 21 nt, Human
gugcuauacugcauacuuuuu

SEQ ID NO: 1382638 - RNA, 19 nt, Human
gugcuacuggggaaacugg

SEQ ID NO: 1382639 - RNA, 22 nt, Human
aagaauaaucacgcuuuccuga

SEQ ID NO: 1382640 - RNA, 16 nt, Human
aagaauaaucacgcuu

SEQ ID NO: 1382641 - RNA, 18 nt, Human
aagaaguuuuaaaaagcc

SEQ ID NO: 1382642 - RNA, 23 nt, Human
aagaaguuuuaaaaagccaguuu

SEQ ID NO: 1382643 - RNA, 13 nt, Human
aagaaguuuuaaa

SEQ ID NO: 1382644 - RNA, 18 nt, Human
aagaaguuucaucauuuu

SEQ ID NO: 1382645 - RNA, 15 nt, Human
aagaaguuucaucau

SEQ ID NO: 1382646 - RNA, 21 nt, Human
aagaagcaaccucaguaauuu

SEQ ID NO: 1382647 - RNA, 23 nt, Human
aagaagagcgagagaucaaagau

SEQ ID NO: 1382648 - RNA, 22 nt, Human
aagaagagcgagagaucaaaga

SEQ ID NO: 1382649 - RNA, 19 nt, Human
aagaagagcgagagaucaa

SEQ ID NO: 1382650 - RNA, 13 nt, Human
aagaagacuuuuu

SEQ ID NO: 1382651 - RNA, 13 nt, Human
aagaaagccugag

SEQ ID NO: 1382652 - RNA, 22 nt, Human
aagaagcaccaaucaugaauua

SEQ ID NO: 1382653 - RNA, 13 nt, Human
gugcucuccauuc

SEQ ID NO: 1382654 - RNA, 22 nt, Human
gugcucgcuguugcugaauagg

SEQ ID NO: 1382655 - RNA, 18 nt, Human
gugcucaggagcccuggg

SEQ ID NO: 1382656 - RNA, 21 nt, Human
gugcucagggggcgccugugg

SEQ ID NO: 1382657 - RNA, 19 nt, Human
gugcucaggagcccuggga

SEQ ID NO: 1382658 - RNA, 14 nt, Human
gugcucgcccugcg

SEQ ID NO: 1382659 - RNA, 15 nt, Human
gugcucgcuguugcu

SEQ ID NO: 1382660 - RNA, 18 nt, Human
gugcucgcuguugcugaa

SEQ ID NO: 1382661 - RNA, 19 nt, Human
gugcucgcuguugcugaau

SEQ ID NO: 1382662 - RNA, 16 nt, Human
gugcucgccccagcag

SEQ ID NO: 1382663 - RNA, 14 nt, Human
gugcucgccccagc

SEQ ID NO: 1382664 - RNA, 16 nt, Human
gugcucauuucaggau

SEQ ID NO: 1382665 - RNA, 23 nt, Human
aacugucucgaugcaaugaacac

SEQ ID NO: 1382666 - RNA, 20 nt, Human
aacuguauuugaaauaagaa

SEQ ID NO: 1382667 - RNA, 13 nt, Human
aacuguauuugaa

SEQ ID NO: 1382668 - RNA, 20 nt, Human
aacugccuacuccaaaaugu

SEQ ID NO: 1382669 - RNA, 16 nt, Human
aacugccuacuccaaa

SEQ ID NO: 1382670 - RNA, 18 nt, Human
aacugccguaauuuaacu

SEQ ID NO: 1382671 - RNA, 17 nt, Human
aacugccguaauuuaac

SEQ ID NO: 1382672 - RNA, 16 nt, Human
aacugccguaauuuaa

SEQ ID NO: 1382673 - RNA, 14 nt, Human
aacugcccaaagca

SEQ ID NO: 1382674 - RNA, 14 nt, Human
aacugccaggcucu

SEQ ID NO: 1382675 - RNA, 23 nt, Human
aacuguguacauaacugaaaaug

SEQ ID NO: 1382676 - RNA, 21 nt, Human
aacuguguacauaacugaaaa

SEQ ID NO: 1382677 - RNA, 20 nt, Human
aacuguguacauaacugaaa

SEQ ID NO: 1382678 - RNA, 13 nt, Human
aacuguguaacug

SEQ ID NO: 1382679 - RNA, 18 nt, Human
aacuguggauauuguuac

SEQ ID NO: 1382680 - RNA, 14 nt, Human
aacuguggauauug

SEQ ID NO: 1382681 - RNA, 13 nt, Human
aacuguggauauu

SEQ ID NO: 1382682 - RNA, 11 nt, Human
aacuguggaua

SEQ ID NO: 1382683 - RNA, 21 nt, Human
aacugucuccuaccucugcuc

SEQ ID NO: 1382684 - RNA, 19 nt, Human
aacugucucucaugaaccu

SEQ ID NO: 1382685 - RNA, 14 nt, Human
aacuucacauauug

SEQ ID NO: 1382686 - RNA, 22 nt, Human
aacuucacauauugauuuccgu

SEQ ID NO: 1382687 - RNA, 22 nt, Human
aacuucaccauauuaccacaga

SEQ ID NO: 1382688 - RNA, 20 nt, Human
aacuucuugcuucuuucuag

SEQ ID NO: 1382689 - RNA, 17 nt, Human
aacuucuaauugccaug

SEQ ID NO: 1382690 - RNA, 22 nt, Human
aacuucuccccugguagaaaga

SEQ ID NO: 1382691 - RNA, 16 nt, Human
aacuucuaauugccau

SEQ ID NO: 1382692 - RNA, 15 nt, Human
aacuucuaauugcca

SEQ ID NO: 1382693 - RNA, 21 nt, Human
aacuucagcgguuuauauaag

SEQ ID NO: 1382694 - RNA, 14 nt, Human
aacuucagaaagac

SEQ ID NO: 1382695 - RNA, 22 nt, Human
aacuguguaacugcccaaagca

SEQ ID NO: 1382696 - RNA, 18 nt, Human
aacuucagcgguuuauau

SEQ ID NO: 1382697 - RNA, 22 nt, Human
aacuucuugcuucuuucuagaa

SEQ ID NO: 1382698 - RNA, 19 nt, Human
aacuucuugcuucuuucua

SEQ ID NO: 1382699 - RNA, 21 nt, Human
aacuugaaauauccugcuuga

SEQ ID NO: 1382700 - RNA, 14 nt, Human
aacuugaacugauu

SEQ ID NO: 1382701 - RNA, 21 nt, Human
aacuugaacugauucacaucu

SEQ ID NO: 1382702 - RNA, 18 nt, Human
aacuugacccugagcuga

SEQ ID NO: 1382703 - RNA, 19 nt, Human
aacuugacccugagcugac

SEQ ID NO: 1382704 - RNA, 15 nt, Human
aacuugacccugagc

SEQ ID NO: 1382705 - RNA, 15 nt, Human
aacuugagcauguua

SEQ ID NO: 1382706 - RNA, 12 nt, Human
aacuugaggaca

SEQ ID NO: 1382707 - RNA, 13 nt, Human
aacuugaggacac

SEQ ID NO: 1382708 - RNA, 14 nt, Human
aacuugaggacaca

SEQ ID NO: 1382709 - RNA, 15 nt, Human
aacuugaggacacau

SEQ ID NO: 1382710 - RNA, 16 nt, Human
aacuugaggacacaug

SEQ ID NO: 1382711 - RNA, 17 nt, Human
aacuugaggacacaugu

SEQ ID NO: 1382712 - RNA, 18 nt, Human
aacuugaggacacauguc

SEQ ID NO: 1382713 - RNA, 19 nt, Human
aacuugaggacacaugucc

SEQ ID NO: 1382714 - RNA, 20 nt, Human
aacuugaggacacaugucca

SEQ ID NO: 1382715 - RNA, 22 nt, Human
gugccaaacaaaaagguucuca

SEQ ID NO: 1382716 - RNA, 17 nt, Human
gugcauuuaugagcucu

SEQ ID NO: 1382717 - RNA, 20 nt, Human
gugcauuugaggucuguucu

SEQ ID NO: 1382718 - RNA, 11 nt, Human
gugcauugugc

SEQ ID NO: 1382719 - RNA, 13 nt, Human
gugcauugugcuu

SEQ ID NO: 1382720 - RNA, 21 nt, Human
gugcauuuggugguuucagaa

SEQ ID NO: 1382721 - RNA, 17 nt, Human
gugcauuugaggucugu

SEQ ID NO: 1382722 - RNA, 19 nt, Human
gugcauuugaggucuguuc

SEQ ID NO: 1382723 - RNA, 18 nt, Human
gugcacgcacacugucug

SEQ ID NO: 1382724 - RNA, 13 nt, Human
gugcaccugcccc

SEQ ID NO: 1382725 - RNA, 12 nt, Human
gugcaauagaag

SEQ ID NO: 1382726 - RNA, 23 nt, Human
gugcaauaaaucugacccagugc

SEQ ID NO: 1382727 - RNA, 22 nt, Human
gugcaauaaaucugacccagug

SEQ ID NO: 1382728 - RNA, 21 nt, Human
gugcaauaaaucugacccagu

SEQ ID NO: 1382729 - RNA, 19 nt, Human
gugcaauaaaucugaccca

SEQ ID NO: 1382730 - RNA, 20 nt, Human
gugcaaguugaggacuucuu

SEQ ID NO: 1382731 - RNA, 16 nt, Human
gugauucaaucuguaa

SEQ ID NO: 1382732 - RNA, 14 nt, Human
gugauucaaucugu

SEQ ID NO: 1382733 - RNA, 22 nt, Human
gugauuagagggaggagaauga

SEQ ID NO: 1382734 - RNA, 23 nt, Human
gugauucaaucuguaaacugugu

SEQ ID NO: 1382735 - RNA, 21 nt, Human
gugauucaaucuguaaacugu

SEQ ID NO: 1382736 - RNA, 21 nt, Human
gugaugucauacagagaaguc

SEQ ID NO: 1382737 - RNA, 15 nt, Human
gugaugugaagccaa

SEQ ID NO: 1382738 - RNA, 22 nt, Human
gugaugucauacagagaaguca

SEQ ID NO: 1382739 - RNA, 20 nt, Human
gugaugucauacagagaagu

SEQ ID NO: 1382740 - RNA, 19 nt, Human
gugaugucauacagagaag

SEQ ID NO: 1382741 - RNA, 18 nt, Human
gugaugucauacagagaa

SEQ ID NO: 1382742 - RNA, 17 nt, Human
gugaugucauacagaga

SEQ ID NO: 1382743 - RNA, 16 nt, Human
gugaugucauacagag

SEQ ID NO: 1382744 - RNA, 22 nt, Human
gugauguucuaaggcucugaga

SEQ ID NO: 1382745 - RNA, 19 nt, Human
gugauguucuaaggcucug

SEQ ID NO: 1382746 - RNA, 18 nt, Human
gugauguucuaaggcucu

SEQ ID NO: 1382747 - RNA, 16 nt, Human
gugauguucuaaggcu

SEQ ID NO: 1382748 - RNA, 13 nt, Human
gugauguucuaag

SEQ ID NO: 1382749 - RNA, 12 nt, Human
gugauguucuaa

SEQ ID NO: 1382750 - RNA, 15 nt, Human
gugauguucaugggu

SEQ ID NO: 1382751 - RNA, 15 nt, Human
gugaugugaguugca

SEQ ID NO: 1382752 - RNA, 14 nt, Human
gugaucucagauca

SEQ ID NO: 1382753 - RNA, 15 nt, Human
gugaucucagaucag

SEQ ID NO: 1382754 - RNA, 14 nt, Human
gugaucucagcuca

SEQ ID NO: 1382755 - RNA, 21 nt, Human
uaaaacuuugaaguuagcuuu

SEQ ID NO: 1382756 - RNA, 22 nt, Human
uaaaacuucaguuucacagaaa

SEQ ID NO: 1382757 - RNA, 12 nt, Human
uaaaacuuuuua

SEQ ID NO: 1382758 - RNA, 15 nt, Human
uaaaacuuuuuaaaa

SEQ ID NO: 1382759 - RNA, 21 nt, Human
uaaaaccauguagaaaauuug

SEQ ID NO: 1382760 - RNA, 23 nt, Human
uaaaaaucucaaauuucuaaauc

SEQ ID NO: 1382761 - RNA, 20 nt, Human
uaaaaagcuuccaugauucu

SEQ ID NO: 1382762 - RNA, 22 nt, Human
uaaaaaaaaaaaaaauguucuu

SEQ ID NO: 1382763 - RNA, 21 nt, Human
aagucaggcccuuauuuucaa

SEQ ID NO: 1382764 - RNA, 18 nt, Human
aagucagcucuucuccau

SEQ ID NO: 1382765 - RNA, 23 nt, Human
aagucagauggaaaauucauuuu

SEQ ID NO: 1382766 - RNA, 20 nt, Human
aagucagauggaaaauucau

SEQ ID NO: 1382767 - RNA, 19 nt, Human
uaaaaaguaauaaaauuca

SEQ ID NO: 1382768 - RNA, 16 nt, Human
uaaaaaggccuccugg

SEQ ID NO: 1382769 - RNA, 17 nt, Human
uaaaaagcuuuugucua

SEQ ID NO: 1382770 - RNA, 11 nt, Human
uaaaaaggaca

SEQ ID NO: 1382771 - RNA, 18 nt, Human
uaaaaaggacaucagcaa

SEQ ID NO: 1382772 - RNA, 19 nt, Human
uaaaaaggacaucagcaaa

SEQ ID NO: 1382773 - RNA, 21 nt, Human
uaaaaaggacaucagcaaaca

SEQ ID NO: 1382774 - RNA, 17 nt, Human
uaaaaaggcuaaaugga

SEQ ID NO: 1382775 - RNA, 17 nt, Human
aagugcagaaugcuccu

SEQ ID NO: 1382776 - RNA, 23 nt, Human
aagugcaauaaaucugacccagu

SEQ ID NO: 1382777 - RNA, 22 nt, Human
aagugcaauaaaucugacccag

SEQ ID NO: 1382778 - RNA, 16 nt, Human
uaaaauagcaaaagaa

SEQ ID NO: 1382779 - RNA, 13 nt, Human
uaaaauagcaaaa

SEQ ID NO: 1382780 - RNA, 16 nt, Human
uaaaauacagaauaca

SEQ ID NO: 1382781 - RNA, 21 nt, Human
uaaaauaccagccaguaaaug

SEQ ID NO: 1382782 - RNA, 17 nt, Human
uaaaauagcguucuugu

SEQ ID NO: 1382783 - RNA, 22 nt, Human
uaaaauagcaaaagaagaaguu

SEQ ID NO: 1382784 - RNA, 21 nt, Human
uaaaauagcaaaagaagaagu

SEQ ID NO: 1382785 - RNA, 17 nt, Human
uaaaauagcaaaagaag

SEQ ID NO: 1382786 - RNA, 21 nt, Human
uaaaauagcguucuuguaauu

SEQ ID NO: 1382787 - RNA, 20 nt, Human
uaaaauagcguucuuguaau

SEQ ID NO: 1382788 - RNA, 19 nt, Human
uaaaauagcguucuuguaa

SEQ ID NO: 1382789 - RNA, 18 nt, Human
uaaaauagucucuuuaaa

SEQ ID NO: 1382790 - RNA, 12 nt, Human
uaaaagaaaauu

SEQ ID NO: 1382791 - RNA, 16 nt, Human
uaaaagaaacccugca

SEQ ID NO: 1382792 - RNA, 17 nt, Human
uaaaagaaacuuucuuu

SEQ ID NO: 1382793 - RNA, 14 nt, Human
uaaaagaaacuuuc

SEQ ID NO: 1382794 - RNA, 13 nt, Human
uaaaagaaacuuu

SEQ ID NO: 1382795 - RNA, 17 nt, Human
uaaaagaaacccugcac

SEQ ID NO: 1382796 - RNA, 13 nt, Human
uaaaauaaagaaa

SEQ ID NO: 1382797 - RNA, 17 nt, Human
uaaaauaaagaaauaga

SEQ ID NO: 1382798 - RNA, 17 nt, Human
uaaaagugccauuaaca

SEQ ID NO: 1382799 - RNA, 19 nt, Human
uaaaagugggcuugauucu

SEQ ID NO: 1382800 - RNA, 15 nt, Human
uaaaauaaugggauu

SEQ ID NO: 1382801 - RNA, 21 nt, Human
uaaaauaagcagguggaucua

SEQ ID NO: 1382802 - RNA, 16 nt, Human
uaaaauaagcaggugg

SEQ ID NO: 1382803 - RNA, 18 nt, Human
uaaaauacaagacugcca

SEQ ID NO: 1382804 - RNA, 22 nt, Human
uaaaauaauuuuuauauuugaa

SEQ ID NO: 1382805 - RNA, 15 nt, Human
uaaaauuauuucaug

SEQ ID NO: 1382806 - RNA, 23 nt, Human
uaaaaugugggauuaugggucac

SEQ ID NO: 1382807 - RNA, 20 nt, Human
uaaaaugugggauuaugggu

SEQ ID NO: 1382808 - RNA, 18 nt, Human
uaaaaugugggauuaugg

SEQ ID NO: 1382809 - RNA, 22 nt, Human
uaaaaugugauguucuaaggcu

SEQ ID NO: 1382810 - RNA, 21 nt, Human
uaaaaugugauguucuaaggc

SEQ ID NO: 1382811 - RNA, 20 nt, Human
uaaaaugugauguucuaagg

SEQ ID NO: 1382812 - RNA, 19 nt, Human
uaaaaugugauguucuaag

SEQ ID NO: 1382813 - RNA, 17 nt, Human
uaaaaugugauguucua

SEQ ID NO: 1382814 - RNA, 12 nt, Human
uaaaauugccau

SEQ ID NO: 1382815 - RNA, 13 nt, Human
uaaaauugccaua

SEQ ID NO: 1382816 - RNA, 14 nt, Human
uaaaauugccauau

SEQ ID NO: 1382817 - RNA, 15 nt, Human
uaaaauugccauauu

SEQ ID NO: 1382818 - RNA, 16 nt, Human
uaaaauugccauauug

SEQ ID NO: 1382819 - RNA, 18 nt, Human
uaaaauugccauauugca

SEQ ID NO: 1382820 - RNA, 19 nt, Human
uaaaauugccauauugcac

SEQ ID NO: 1382821 - RNA, 17 nt, Human
uaaaauguaugcauguu

SEQ ID NO: 1382822 - RNA, 19 nt, Human
uaaaauguaugcauguugu

SEQ ID NO: 1382823 - RNA, 16 nt, Human
uaaaauguaugcaugu

SEQ ID NO: 1382824 - RNA, 14 nt, Human
uaaaauguaagauu

SEQ ID NO: 1382825 - RNA, 23 nt, Human
uaaaauguaaagccaugcuggaa

SEQ ID NO: 1382826 - RNA, 18 nt, Human
uaaaauguaaagccaugc

SEQ ID NO: 1382827 - RNA, 15 nt, Human
uaaaauguaaagcca

SEQ ID NO: 1382828 - RNA, 16 nt, Human
aaguuugauuucauua

SEQ ID NO: 1382829 - RNA, 15 nt, Human
aaguuugauuucauu

SEQ ID NO: 1382830 - RNA, 21 nt, Human
aaguuucuaagauucuaaagg

SEQ ID NO: 1382831 - RNA, 20 nt, Human
aaguuucuaagauucuaaag

SEQ ID NO: 1382832 - RNA, 19 nt, Human
aaguuucuaagauucuaaa

SEQ ID NO: 1382833 - RNA, 18 nt, Human
aaguuucuaagauucuaa

SEQ ID NO: 1382834 - RNA, 17 nt, Human
aaguuucuaagauucua

SEQ ID NO: 1382835 - RNA, 16 nt, Human
aaguuucuaagauucu

SEQ ID NO: 1382836 - RNA, 15 nt, Human
aaguuucuaagauuc

SEQ ID NO: 1382837 - RNA, 13 nt, Human
aaguuucuaagau

SEQ ID NO: 1382838 - RNA, 12 nt, Human
aaguuucuaaga

SEQ ID NO: 1382839 - RNA, 11 nt, Human
aaguuucuaag

SEQ ID NO: 1382840 - RNA, 15 nt, Human
aaguuucucugcaga

SEQ ID NO: 1382841 - RNA, 13 nt, Human
aaguuugaauguu

SEQ ID NO: 1382842 - RNA, 14 nt, Human
aaguuugaauguua

SEQ ID NO: 1382843 - RNA, 15 nt, Human
aaguuugaauguuaa

SEQ ID NO: 1382844 - RNA, 16 nt, Human
aaguuugaauguuaaa

SEQ ID NO: 1382845 - RNA, 18 nt, Human
aaguuugaauguuaaaua

SEQ ID NO: 1382846 - RNA, 22 nt, Human
aaguuugaauguuaaauaaauu

SEQ ID NO: 1382847 - RNA, 16 nt, Human
aaguucaacauguuau

SEQ ID NO: 1382848 - RNA, 23 nt, Human
aaguucaaauucuucugaacuca

SEQ ID NO: 1382849 - RNA, 19 nt, Human
aaguuauuuuuaauuuggu

SEQ ID NO: 1382850 - RNA, 17 nt, Human
aaguucccaguuggagc

SEQ ID NO: 1382851 - RNA, 13 nt, Human
aaguucccaguug

SEQ ID NO: 1382852 - RNA, 19 nt, Human
aaguuccaaguugcuaaua

SEQ ID NO: 1382853 - RNA, 22 nt, Human
aaguucaauauaagcuuuucuu

SEQ ID NO: 1382854 - RNA, 21 nt, Human
aaguucaccagacucuauaaa

SEQ ID NO: 1382855 - RNA, 19 nt, Human
aaguucccaguuggagcuc

SEQ ID NO: 1382856 - RNA, 18 nt, Human
aaguucccaguuggagcu

SEQ ID NO: 1382857 - RNA, 15 nt, Human
aaguucgucuguugu

SEQ ID NO: 1382858 - RNA, 12 nt, Human
aaguucgucugu

SEQ ID NO: 1382859 - RNA, 20 nt, Human
aaguuccuuggccaugcaga

SEQ ID NO: 1382860 - RNA, 11 nt, Human
aaguucuaaga

SEQ ID NO: 1382861 - RNA, 16 nt, Human
aaguuuccaucaucua

SEQ ID NO: 1382862 - RNA, 17 nt, Human
aagugucaacucuuugu

SEQ ID NO: 1382863 - RNA, 16 nt, Human
aagugucaacucuuug

SEQ ID NO: 1382864 - RNA, 16 nt, Human
aagugccauuaacaaa

SEQ ID NO: 1382865 - RNA, 17 nt, Human
aagugccauuaacaaau

SEQ ID NO: 1382866 - RNA, 23 nt, Human
aagugccaguauuuuaaaauagc

SEQ ID NO: 1382867 - RNA, 13 nt, Human
aagugugaacugg

SEQ ID NO: 1382868 - RNA, 21 nt, Human
aagugugaacuggacccuguu

SEQ ID NO: 1382869 - RNA, 21 nt, Human
aagugcaucuggagagaacag

SEQ ID NO: 1382870 - RNA, 15 nt, Human
aagugccaguauuuu

SEQ ID NO: 1382871 - RNA, 14 nt, Human
aagugccaguauuu

SEQ ID NO: 1382872 - RNA, 23 nt, Human
aaguguauuuuuuuacuaauaga

SEQ ID NO: 1382873 - RNA, 20 nt, Human
aaguguggggauuuucacug

SEQ ID NO: 1382874 - RNA, 12 nt, Human
aaguguguguuu

SEQ ID NO: 1382875 - RNA, 16 nt, Human
aaguuauuuaaaucug

SEQ ID NO: 1382876 - RNA, 15 nt, Human
aaguuauuaacuuua

SEQ ID NO: 1382877 - RNA, 17 nt, Human
aaguuauuaacuuuaau

SEQ ID NO: 1382878 - RNA, 17 nt, Human
aaguuauagugaauacu

SEQ ID NO: 1382879 - RNA, 15 nt, Human
aaguuauagugaaua

SEQ ID NO: 1382880 - RNA, 14 nt, Human
aaguuauaagacuc

SEQ ID NO: 1382881 - RNA, 15 nt, Human
aaguuauaagacucu

SEQ ID NO: 1382882 - RNA, 23 nt, Human
aaguuaguuuguauauauuauua

SEQ ID NO: 1382883 - RNA, 22 nt, Human
aaguuaguuuguauauauuauu

SEQ ID NO: 1382884 - RNA, 17 nt, Human
aaguuaguuuguauaua

SEQ ID NO: 1382885 - RNA, 15 nt, Human
aaguuaguuuguaua

SEQ ID NO: 1382886 - RNA, 19 nt, Human
aaguuaguuccacugagac

SEQ ID NO: 1382887 - RNA, 18 nt, Human
aaguuaguuccacugaga

SEQ ID NO: 1382888 - RNA, 19 nt, Human
aaguuaguaucuuuugaua

SEQ ID NO: 1382889 - RNA, 20 nt, Human
aaguuaguaucuuuugauau

SEQ ID NO: 1382890 - RNA, 16 nt, Human
aaguuaguaucuuuug

SEQ ID NO: 1382891 - RNA, 16 nt, Human
aaguuagcuuuaacuu

SEQ ID NO: 1382892 - RNA, 17 nt, Human
aaguuaauuuaaaguug

SEQ ID NO: 1382893 - RNA, 16 nt, Human
aaguuaauuuaaaguu

SEQ ID NO: 1382894 - RNA, 15 nt, Human
aaguuaauuuaaagu

SEQ ID NO: 1382895 - RNA, 12 nt, Human
aaguuaauuuaa

SEQ ID NO: 1382896 - RNA, 19 nt, Human
aaguuaauccacugugacu

SEQ ID NO: 1382897 - RNA, 16 nt, Human
aaguguguguuuuuca

SEQ ID NO: 1382898 - RNA, 21 nt, Human
aaguguguguuuuucauaaag

SEQ ID NO: 1382899 - RNA, 19 nt, Human
guuuaaagagucuagauuc

SEQ ID NO: 1382900 - RNA, 18 nt, Human
guuuaaagagucuagauu

SEQ ID NO: 1382901 - RNA, 19 nt, Human
guuuaaaugaacaagagaa

SEQ ID NO: 1382902 - RNA, 14 nt, Human
guuuaaaugaacaa

SEQ ID NO: 1382903 - RNA, 11 nt, Human
guuuaaaugaa

SEQ ID NO: 1382904 - RNA, 17 nt, Human
guuuaaagagucuagau

SEQ ID NO: 1382905 - RNA, 14 nt, Human
guuuaaagagucua

SEQ ID NO: 1382906 - RNA, 21 nt, Human
guuuaaagaaaguguauuugg

SEQ ID NO: 1382907 - RNA, 18 nt, Human
guuuaaagaaaguguauu

SEQ ID NO: 1382908 - RNA, 17 nt, Human
guuuaaagaaaguguau

SEQ ID NO: 1382909 - RNA, 16 nt, Human
guuuaaagaaagugua

SEQ ID NO: 1382910 - RNA, 15 nt, Human
guuuaaagaaagugu

SEQ ID NO: 1382911 - RNA, 14 nt, Human
guuuaaagaaagug

SEQ ID NO: 1382912 - RNA, 13 nt, Human
guuguuugugccu

SEQ ID NO: 1382913 - RNA, 19 nt, Human
guuucacaguuugaaauaa

SEQ ID NO: 1382914 - RNA, 18 nt, Human
guuucacaguuugaaaua

SEQ ID NO: 1382915 - RNA, 16 nt, Human
guuucacaguuugaaa

SEQ ID NO: 1382916 - RNA, 23 nt, Human
guuucacagccuauaaccagaca

SEQ ID NO: 1382917 - RNA, 14 nt, Human
guuucacagaaaau

SEQ ID NO: 1382918 - RNA, 19 nt, Human
guuucacaaggucuuuaaa

SEQ ID NO: 1382919 - RNA, 22 nt, Human
guuucaauugcaucucccagau

SEQ ID NO: 1382920 - RNA, 17 nt, Human
guuucaauugcaucucc

SEQ ID NO: 1382921 - RNA, 16 nt, Human
guuucaauugcaucuc

SEQ ID NO: 1382922 - RNA, 22 nt, Human
guuucaauuccaccugcaauca

SEQ ID NO: 1382923 - RNA, 19 nt, Human
guuucaaggcacucuagau

SEQ ID NO: 1382924 - RNA, 23 nt, Human
guuucaaggcacucuagauucca

SEQ ID NO: 1382925 - RNA, 18 nt, Human
guuucaaggcacucuaga

SEQ ID NO: 1382926 - RNA, 20 nt, Human
guuucaagaggagcccccac

SEQ ID NO: 1382927 - RNA, 13 nt, Human
guuucaagaggag

SEQ ID NO: 1382928 - RNA, 18 nt, Human
guuucaacggaaagugcu

SEQ ID NO: 1382929 - RNA, 20 nt, Human
guuucaaagaugcugugagu

SEQ ID NO: 1382930 - RNA, 19 nt, Human
guuucaaagaugcugugag

SEQ ID NO: 1382931 - RNA, 13 nt, Human
guuuauuacguau

SEQ ID NO: 1382932 - RNA, 20 nt, Human
guuuauucuucuagaguuca

SEQ ID NO: 1382933 - RNA, 19 nt, Human
guuuauucuucuagaguuc

SEQ ID NO: 1382934 - RNA, 16 nt, Human
guuuauucuucuagag

SEQ ID NO: 1382935 - RNA, 15 nt, Human
guuuauucuucuaga

SEQ ID NO: 1382936 - RNA, 23 nt, Human
guuuauuaaucuuaguguaugau

SEQ ID NO: 1382937 - RNA, 23 nt, Human
guuuauuacguaugucugguucu

SEQ ID NO: 1382938 - RNA, 19 nt, Human
aaggggacccuccgcucug

SEQ ID NO: 1382939 - RNA, 16 nt, Human
aagggcugcuucccug

SEQ ID NO: 1382940 - RNA, 17 nt, Human
aagggcuguuauaaucu

SEQ ID NO: 1382941 - RNA, 15 nt, Human
aaggcuuaaacccau

SEQ ID NO: 1382942 - RNA, 22 nt, Human
aaggcuguuaaauacaggaaac

SEQ ID NO: 1382943 - RNA, 21 nt, Human
aaggcuguuaaauacaggaaa

SEQ ID NO: 1382944 - RNA, 20 nt, Human
aaggcuguuaaauacaggaa

SEQ ID NO: 1382945 - RNA, 21 nt, Human
aaggcuguguaagauuuguuu

SEQ ID NO: 1382946 - RNA, 16 nt, Human
aaggcuguguaagauu

SEQ ID NO: 1382947 - RNA, 14 nt, Human
aaggcuguguaaga

SEQ ID NO: 1382948 - RNA, 13 nt, Human
aaggcuguguaag

SEQ ID NO: 1382949 - RNA, 21 nt, Human
aagggcugccggggcagcccc

SEQ ID NO: 1382950 - RNA, 19 nt, Human
aagggcugccggggcagcc

SEQ ID NO: 1382951 - RNA, 15 nt, Human
aagggcuguuauaau

SEQ ID NO: 1382952 - RNA, 11 nt, Human
guuucagaaau

SEQ ID NO: 1382953 - RNA, 13 nt, Human
guuucagaaaugu

SEQ ID NO: 1382954 - RNA, 14 nt, Human
guuucagaaaugug

SEQ ID NO: 1382955 - RNA, 22 nt, Human
aagggggcggccuaugacuugg

SEQ ID NO: 1382956 - RNA, 22 nt, Human
aaggggcuucagguccaggcug

SEQ ID NO: 1382957 - RNA, 17 nt, Human
aagguuuaugaaaaaga

SEQ ID NO: 1382958 - RNA, 22 nt, Human
aagguauuaaauugauguugcu

SEQ ID NO: 1382959 - RNA, 18 nt, Human
aagguauuaaauugaugu

SEQ ID NO: 1382960 - RNA, 19 nt, Human
aagguuuggaaggagcaga

SEQ ID NO: 1382961 - RNA, 23 nt, Human
aagguuuuagguucuaaaguucu

SEQ ID NO: 1382962 - RNA, 20 nt, Human
aagguuuuauaaggcugaug

SEQ ID NO: 1382963 - RNA, 20 nt, Human
aagguuuuagguucuaaagu

SEQ ID NO: 1382964 - RNA, 19 nt, Human
aagguuuuagguucuaaag

SEQ ID NO: 1382965 - RNA, 17 nt, Human
aagguuuuagguucuaa

SEQ ID NO: 1382966 - RNA, 16 nt, Human
aagguuuuagguucua

SEQ ID NO: 1382967 - RNA, 15 nt, Human
aagguuuuagguucu

SEQ ID NO: 1382968 - RNA, 23 nt, Human
aagguuuuaauuuaguaaaccaa

SEQ ID NO: 1382969 - RNA, 20 nt, Human
aagguuuuaauuuaguaaac

SEQ ID NO: 1382970 - RNA, 18 nt, Human
aagguuuggaaggagcag

SEQ ID NO: 1382971 - RNA, 16 nt, Human
aaguaacaaaaauaaa

SEQ ID NO: 1382972 - RNA, 13 nt, Human
aaguaacaaaaau

SEQ ID NO: 1382973 - RNA, 12 nt, Human
aaguaacaaaaa

SEQ ID NO: 1382974 - RNA, 23 nt, Human
aaguaacugggauuacaggcaug

SEQ ID NO: 1382975 - RNA, 20 nt, Human
guuuugauuuaauguuuuca

SEQ ID NO: 1382976 - RNA, 21 nt, Human
guuuugaaggcaaaauugcaa

SEQ ID NO: 1382977 - RNA, 19 nt, Human
guuuucuguucuuucuggc

SEQ ID NO: 1382978 - RNA, 12 nt, Human
guuuuauuucau

SEQ ID NO: 1382979 - RNA, 14 nt, Human
guuuucuguucuuu

SEQ ID NO: 1382980 - RNA, 15 nt, Human
guuuucuguucuuuc

SEQ ID NO: 1382981 - RNA, 16 nt, Human
guuuucuguucuuucu

SEQ ID NO: 1382982 - RNA, 17 nt, Human
guuuuauucuugguuuu

SEQ ID NO: 1382983 - RNA, 21 nt, Human
guuuuaugagaaagccuucuu

SEQ ID NO: 1382984 - RNA, 20 nt, Human
guuuuaauuuaguaaaccaa

SEQ ID NO: 1382985 - RNA, 21 nt, Human
guuuuaauuuaaacaccuccu

SEQ ID NO: 1382986 - RNA, 14 nt, Human
guuuuaauuuaaac

SEQ ID NO: 1382987 - RNA, 16 nt, Human
guuuuaacuguggaua

SEQ ID NO: 1382988 - RNA, 15 nt, Human
guuuuaacuguggau

SEQ ID NO: 1382989 - RNA, 22 nt, Human
guuuuaaggaugcuuguacaua

SEQ ID NO: 1382990 - RNA, 21 nt, Human
guuugcuucaugugucccaga

SEQ ID NO: 1382991 - RNA, 20 nt, Human
guuugcuucaugugucccag

SEQ ID NO: 1382992 - RNA, 15 nt, Human
guuugcuucaugugu

SEQ ID NO: 1382993 - RNA, 19 nt, Human
guuugcuucaacugucucc

SEQ ID NO: 1382994 - RNA, 21 nt, Human
aaguaauaugcacacauuuuu

SEQ ID NO: 1382995 - RNA, 18 nt, Human
aaguaauaugcacacauu

SEQ ID NO: 1382996 - RNA, 20 nt, Human
aaguaauaugcacacauuuu

SEQ ID NO: 1382997 - RNA, 21 nt, Human
guuuggauauguaaaacauuu

SEQ ID NO: 1382998 - RNA, 20 nt, Human
guuuggauauguaaaacauu

SEQ ID NO: 1382999 - RNA, 17 nt, Human
guuuggagagagcagac

SEQ ID NO: 1383000 - RNA, 21 nt, Human
guuuggagagagcagacuggc

SEQ ID NO: 1383001 - RNA, 23 nt, Human
guuuuaaacauuaauagcagccu

SEQ ID NO: 1383002 - RNA, 15 nt, Human
guuuuaaagcuucca

SEQ ID NO: 1383003 - RNA, 21 nt, Human
guuuggaaauugauuuugaac

SEQ ID NO: 1383004 - RNA, 21 nt, Human
guuugcuuucugaucaaggcc

SEQ ID NO: 1383005 - RNA, 11 nt, Human
guuugcuuucu

SEQ ID NO: 1383006 - RNA, 16 nt, Human
guuuggaaggagcaga

SEQ ID NO: 1383007 - RNA, 13 nt, Human
guuuggaaggagc

SEQ ID NO: 1383008 - RNA, 20 nt, Human
guuugcuuugcccuucuuuc

SEQ ID NO: 1383009 - RNA, 19 nt, Human
guuuggacaaaauggaaua

SEQ ID NO: 1383010 - RNA, 19 nt, Human
aaguacacucugcuguuug

SEQ ID NO: 1383011 - RNA, 16 nt, Human
aaguacacucugcugu

SEQ ID NO: 1383012 - RNA, 15 nt, Human
aaguacacucugcug

SEQ ID NO: 1383013 - RNA, 19 nt, Human
aaguacacaauaagcaaaa

SEQ ID NO: 1383014 - RNA, 22 nt, Human
guuuugcacagccaaauuuaaa

SEQ ID NO: 1383015 - RNA, 15 nt, Human
guuuugcacagccaa

SEQ ID NO: 1383016 - RNA, 19 nt, Human
guuuugauuuguacugaaa

SEQ ID NO: 1383017 - RNA, 16 nt, Human
aaguacacaauaagca

SEQ ID NO: 1383018 - RNA, 17 nt, Human
aaguacacaauaagcaa

SEQ ID NO: 1383019 - RNA, 18 nt, Human
aaguacacaauaagcaaa

SEQ ID NO: 1383020 - RNA, 19 nt, Human
aaguacuaagcgcuagagg

SEQ ID NO: 1383021 - RNA, 21 nt, Human
aaguauguuagugcaaauugu

SEQ ID NO: 1383022 - RNA, 15 nt, Human
aaguauuauaccuuu

SEQ ID NO: 1383023 - RNA, 19 nt, Human
aaguauguuagugcaaauu

SEQ ID NO: 1383024 - RNA, 18 nt, Human
aaguauguuagugcaaau

SEQ ID NO: 1383025 - RNA, 15 nt, Human
aaguauuuugcugga

SEQ ID NO: 1383026 - RNA, 15 nt, Human
aaguauuuuccuguu

SEQ ID NO: 1383027 - RNA, 15 nt, Human
aaguauuaugucucu

SEQ ID NO: 1383028 - RNA, 12 nt, Human
aaguauuauuag

SEQ ID NO: 1383029 - RNA, 13 nt, Human
aaguauuaucaga

SEQ ID NO: 1383030 - RNA, 16 nt, Human
aaguauuauaccuuuu

SEQ ID NO: 1383031 - RNA, 19 nt, Human
aaguauuauaccuuuuuua

SEQ ID NO: 1383032 - RNA, 15 nt, Human
aagucaaacuuggau

SEQ ID NO: 1383033 - RNA, 19 nt, Human
aaguauuuuuucaguauua

SEQ ID NO: 1383034 - RNA, 16 nt, Human
aaguauuuuuucagua

SEQ ID NO: 1383035 - RNA, 15 nt, Human
aaguauuuuuucagu

SEQ ID NO: 1383036 - RNA, 18 nt, Human
aaguauuuuuaauuaauu

SEQ ID NO: 1383037 - RNA, 15 nt, Human
aaguauuuuuaauua

SEQ ID NO: 1383038 - RNA, 20 nt, Human
aagucaaagcaaggaaacua

SEQ ID NO: 1383039 - RNA, 18 nt, Human
aagucagaacagcagacu

SEQ ID NO: 1383040 - RNA, 19 nt, Human
guucuuccucagccagccu

SEQ ID NO: 1383041 - RNA, 18 nt, Human
guucuuccucagccagcc

SEQ ID NO: 1383042 - RNA, 17 nt, Human
guucuuccucagccagc

SEQ ID NO: 1383043 - RNA, 16 nt, Human
guucuuccucagccag

SEQ ID NO: 1383044 - RNA, 15 nt, Human
guucuuccucagcca

SEQ ID NO: 1383045 - RNA, 14 nt, Human
guucuuccucagcc

SEQ ID NO: 1383046 - RNA, 13 nt, Human
guucuuccucagc

SEQ ID NO: 1383047 - RNA, 15 nt, Human
guucucucuuugcau

SEQ ID NO: 1383048 - RNA, 16 nt, Human
guucuguuuuguuucg

SEQ ID NO: 1383049 - RNA, 14 nt, Human
guucuuaauucuua

SEQ ID NO: 1383050 - RNA, 17 nt, Human
guucuuaauucuuagcu

SEQ ID NO: 1383051 - RNA, 13 nt, Human
guucuuaauucuu

SEQ ID NO: 1383052 - RNA, 22 nt, Human
guucuagguuucaaagaugcug

SEQ ID NO: 1383053 - RNA, 19 nt, Human
guucuagguuucaaagaug

SEQ ID NO: 1383054 - RNA, 16 nt, Human
guucuagguuucaaag

SEQ ID NO: 1383055 - RNA, 14 nt, Human
guucuagguuucaa

SEQ ID NO: 1383056 - RNA, 23 nt, Human
guucuaggcacuguaguucuaag

SEQ ID NO: 1383057 - RNA, 22 nt, Human
guucuaggcacuguaguucuaa

SEQ ID NO: 1383058 - RNA, 17 nt, Human
guucuaggaaaauaaaa

SEQ ID NO: 1383059 - RNA, 13 nt, Human
guucuaggaaaau

SEQ ID NO: 1383060 - RNA, 12 nt, Human
guucuaggaaaa

SEQ ID NO: 1383061 - RNA, 17 nt, Human
guucuagcgcaguuuuu

SEQ ID NO: 1383062 - RNA, 21 nt, Human
guucuugaggggaccaggagu

SEQ ID NO: 1383063 - RNA, 20 nt, Human
guucuugaggggaccaggag

SEQ ID NO: 1383064 - RNA, 16 nt, Human
guucuugaggggacca

SEQ ID NO: 1383065 - RNA, 19 nt, Human
guucuucuaccacccacca

SEQ ID NO: 1383066 - RNA, 20 nt, Human
guucuuccucagccagccuc

SEQ ID NO: 1383067 - RNA, 22 nt, Human
guucuugaggggaccaggagug

SEQ ID NO: 1383068 - RNA, 23 nt, Human
guucuugaggggaccaggagugg

SEQ ID NO: 1383069 - RNA, 14 nt, Human
guucuugguuugua

SEQ ID NO: 1383070 - RNA, 14 nt, Human
guugaccccagagg

SEQ ID NO: 1383071 - RNA, 15 nt, Human
guugaccccagagga

SEQ ID NO: 1383072 - RNA, 19 nt, Human
guugacuuauaguacauga

SEQ ID NO: 1383073 - RNA, 15 nt, Human
guucuugguuuguaa

SEQ ID NO: 1383074 - RNA, 18 nt, Human
guucuugguuuguaaauu

SEQ ID NO: 1383075 - RNA, 15 nt, Human
aaggaaaaacaaacu

SEQ ID NO: 1383076 - RNA, 19 nt, Human
guugauacuguugcacgug

SEQ ID NO: 1383077 - RNA, 21 nt, Human
guugauacuguugcacgugug

SEQ ID NO: 1383078 - RNA, 18 nt, Human
guugauacuguugcacgu

SEQ ID NO: 1383079 - RNA, 17 nt, Human
guugauacuguugcacg

SEQ ID NO: 1383080 - RNA, 16 nt, Human
guugauacuguugcac

SEQ ID NO: 1383081 - RNA, 15 nt, Human
guugauacuguugca

SEQ ID NO: 1383082 - RNA, 14 nt, Human
guugauacuguugc

SEQ ID NO: 1383083 - RNA, 13 nt, Human
guugauacuguug

SEQ ID NO: 1383084 - RNA, 12 nt, Human
guugauacuguu

SEQ ID NO: 1383085 - RNA, 15 nt, Human
guugagacaagaaaa

SEQ ID NO: 1383086 - RNA, 19 nt, Human
guugagaaucccaaauuug

SEQ ID NO: 1383087 - RNA, 16 nt, Human
guugagaaucccaaau

SEQ ID NO: 1383088 - RNA, 24 nt, Human
guugacuuauaguacaugauaaau

SEQ ID NO: 1383089 - RNA, 14 nt, Human
guuccggcauggac

SEQ ID NO: 1383090 - RNA, 18 nt, Human
guucccuugaugaagaag

SEQ ID NO: 1383091 - RNA, 18 nt, Human
guucccccuguuucagag

SEQ ID NO: 1383092 - RNA, 14 nt, Human
guuccccagagaaa

SEQ ID NO: 1383093 - RNA, 13 nt, Human
guuccccagagaa

SEQ ID NO: 1383094 - RNA, 12 nt, Human
guuccccagaga

SEQ ID NO: 1383095 - RNA, 20 nt, Human
guuccccacuguaucuaggc

SEQ ID NO: 1383096 - RNA, 17 nt, Human
guuccccacuggagcag

SEQ ID NO: 1383097 - RNA, 14 nt, Human
guuccccacuggag

SEQ ID NO: 1383098 - RNA, 13 nt, Human
guuccccacugga

SEQ ID NO: 1383099 - RNA, 23 nt, Human
aagcuuuuuauuccuccugcuca

SEQ ID NO: 1383100 - RNA, 22 nt, Human
aagcuuuugucuacacacccug

SEQ ID NO: 1383101 - RNA, 19 nt, Human
aagcuuuugucuacacacc

SEQ ID NO: 1383102 - RNA, 17 nt, Human
aagcuuuucuauuuuaa

SEQ ID NO: 1383103 - RNA, 13 nt, Human
aagcuuuucuauu

SEQ ID NO: 1383104 - RNA, 12 nt, Human
aagcuuggggaa

SEQ ID NO: 1383105 - RNA, 19 nt, Human
aagcuuuuaugugaaacau

SEQ ID NO: 1383106 - RNA, 21 nt, Human
aagcuuuuaugugaaacaugu

SEQ ID NO: 1383107 - RNA, 12 nt, Human
aagcucuuccuu

SEQ ID NO: 1383108 - RNA, 23 nt, Human
aagcucagaggcgcacugugacc

SEQ ID NO: 1383109 - RNA, 22 nt, Human
aagcucagaggcgcacugugac

SEQ ID NO: 1383110 - RNA, 19 nt, Human
aagcucacguccugagaaa

SEQ ID NO: 1383111 - RNA, 23 nt, Human
aagcucacuucugggcuucaucu

SEQ ID NO: 1383112 - RNA, 14 nt, Human
aagcucacuucugg

SEQ ID NO: 1383113 - RNA, 18 nt, Human
aagcucacguccugagaa

SEQ ID NO: 1383114 - RNA, 17 nt, Human
aagcucacguccugaga

SEQ ID NO: 1383115 - RNA, 15 nt, Human
aagcucacguccuga

SEQ ID NO: 1383116 - RNA, 20 nt, Human
aagcuauaaagcaguauuuu

SEQ ID NO: 1383117 - RNA, 15 nt, Human
aagcuauaaagcagu

SEQ ID NO: 1383118 - RNA, 13 nt, Human
aagcuauaaagca

SEQ ID NO: 1383119 - RNA, 21 nt, Human
aagcuuaauggcugauaauuu

SEQ ID NO: 1383120 - RNA, 19 nt, Human
aagcuuaauggcugauaau

SEQ ID NO: 1383121 - RNA, 17 nt, Human
aagcuuaaaacuuugaa

SEQ ID NO: 1383122 - RNA, 15 nt, Human
aagcuuaaaacuuug

SEQ ID NO: 1383123 - RNA, 14 nt, Human
aagcuuaaaacuuu

SEQ ID NO: 1383124 - RNA, 13 nt, Human
aagcuuaaaacuu

SEQ ID NO: 1383125 - RNA, 19 nt, Human
aagcucuuggagcugugag

SEQ ID NO: 1383126 - RNA, 23 nt, Human
aagcuuguauuccuuuuucucuc

SEQ ID NO: 1383127 - RNA, 23 nt, Human
aagcuucccacggccuuucuagc

SEQ ID NO: 1383128 - RNA, 21 nt, Human
aagcuuccaugauucuauuua

SEQ ID NO: 1383129 - RNA, 14 nt, Human
aagcuuaguauaaa

SEQ ID NO: 1383130 - RNA, 18 nt, Human
aagcuuaugcuuaaauuc

SEQ ID NO: 1383131 - RNA, 14 nt, Human
guuaauuuuuccua

SEQ ID NO: 1383132 - RNA, 20 nt, Human
guuaauuuuuccaacuacua

SEQ ID NO: 1383133 - RNA, 14 nt, Human
guuaauuuuuccaa

SEQ ID NO: 1383134 - RNA, 22 nt, Human
guuaauuuugaagugcuguuua

SEQ ID NO: 1383135 - RNA, 17 nt, Human
guuaauuuugaagugcu

SEQ ID NO: 1383136 - RNA, 22 nt, Human
guuaauuuaguggaaaaggcac

SEQ ID NO: 1383137 - RNA, 14 nt, Human
guuaauuuuugaua

SEQ ID NO: 1383138 - RNA, 12 nt, Human
guuaauuuuuga

SEQ ID NO: 1383139 - RNA, 19 nt, Human
guuaauuuagaaaacuuua

SEQ ID NO: 1383140 - RNA, 23 nt, Human
guuaauuuaaaguuguuugugcc

SEQ ID NO: 1383141 - RNA, 12 nt, Human
guuaauuuaaag

SEQ ID NO: 1383142 - RNA, 21 nt, Human
guuaauauugauuuauuaaua

SEQ ID NO: 1383143 - RNA, 18 nt, Human
guuaaucauuagguguga

SEQ ID NO: 1383144 - RNA, 23 nt, Human
aagcccagcacugcuugaggaaa

SEQ ID NO: 1383145 - RNA, 20 nt, Human
aagcccagcacugcuugagg

SEQ ID NO: 1383146 - RNA, 17 nt, Human
aagcccagagggucugg

SEQ ID NO: 1383147 - RNA, 16 nt, Human
aagcccagagggucug

SEQ ID NO: 1383148 - RNA, 16 nt, Human
aagcccaccauuuggc

SEQ ID NO: 1383149 - RNA, 18 nt, Human
aagcccagcccauggaga

SEQ ID NO: 1383150 - RNA, 15 nt, Human
guuaauauuuaagac

SEQ ID NO: 1383151 - RNA, 18 nt, Human
guuaauauugauuuauua

SEQ ID NO: 1383152 - RNA, 14 nt, Human
guuaauaguuccug

SEQ ID NO: 1383153 - RNA, 18 nt, Human
aagcccagagggucuggg

SEQ ID NO: 1383154 - RNA, 22 nt, Human
aagccauucuccugccucagcc

SEQ ID NO: 1383155 - RNA, 14 nt, Human
guuagaccuacagg

SEQ ID NO: 1383156 - RNA, 13 nt, Human
guuacuguguaau

SEQ ID NO: 1383157 - RNA, 19 nt, Human
guuacugugccauguguuu

SEQ ID NO: 1383158 - RNA, 13 nt, Human
guuacuguaauuc

SEQ ID NO: 1383159 - RNA, 15 nt, Human
guuagagaauaaauu

SEQ ID NO: 1383160 - RNA, 19 nt, Human
guuauuauauuuacaaaug

SEQ ID NO: 1383161 - RNA, 13 nt, Human
guuauuuaaagaa

SEQ ID NO: 1383162 - RNA, 22 nt, Human
guuauugguguaagguacuuuc

SEQ ID NO: 1383163 - RNA, 23 nt, Human
guuauugcaguuuaucauucaag

SEQ ID NO: 1383164 - RNA, 16 nt, Human
guuauugcaguuuauc

SEQ ID NO: 1383165 - RNA, 14 nt, Human
guuauugcaguuua

SEQ ID NO: 1383166 - RNA, 13 nt, Human
guuauugcaguuu

SEQ ID NO: 1383167 - RNA, 18 nt, Human
guuagagcaggacugaug

SEQ ID NO: 1383168 - RNA, 20 nt, Human
guuauuauauuuacaaaugg

SEQ ID NO: 1383169 - RNA, 20 nt, Human
guuauuuugauguaaagaug

SEQ ID NO: 1383170 - RNA, 18 nt, Human
guuauuuugauguaaaga

SEQ ID NO: 1383171 - RNA, 19 nt, Human
guucaggcccggcagggcg

SEQ ID NO: 1383172 - RNA, 14 nt, Human
guucaguaccacau

SEQ ID NO: 1383173 - RNA, 23 nt, Human
aagccuaaaagugggcuugauuc

SEQ ID NO: 1383174 - RNA, 22 nt, Human
aagccgugcucgccccagcagg

SEQ ID NO: 1383175 - RNA, 21 nt, Human
aagccucagauuccuucccau

SEQ ID NO: 1383176 - RNA, 15 nt, Human
aagccuguuuaagag

SEQ ID NO: 1383177 - RNA, 18 nt, Human
aagccuguucauggcaga

SEQ ID NO: 1383178 - RNA, 17 nt, Human
aagccuguucauggcag

SEQ ID NO: 1383179 - RNA, 18 nt, Human
aagccuguuuaagagaca

SEQ ID NO: 1383180 - RNA, 21 nt, Human
aagcuagucuuuugcuuuugc

SEQ ID NO: 1383181 - RNA, 20 nt, Human
aagcuagucuuuugcuuuug

SEQ ID NO: 1383182 - RNA, 19 nt, Human
aagcuagucuuuugcuuuu

SEQ ID NO: 1383183 - RNA, 17 nt, Human
aagcuagucuuuugcuu

SEQ ID NO: 1383184 - RNA, 16 nt, Human
aagcuagucuuuugcu

SEQ ID NO: 1383185 - RNA, 15 nt, Human
aagcuagucuuuugc

SEQ ID NO: 1383186 - RNA, 14 nt, Human
aagcuagucuuuug

SEQ ID NO: 1383187 - RNA, 12 nt, Human
aagcuagucuuu

SEQ ID NO: 1383188 - RNA, 23 nt, Human
aagcuaggugcuauuugucaucu

SEQ ID NO: 1383189 - RNA, 21 nt, Human
aagcuaggugcuauuugucau

SEQ ID NO: 1383190 - RNA, 20 nt, Human
aagccucagauuccuuccca

SEQ ID NO: 1383191 - RNA, 21 nt, Human
aagccuucaagcucugaggga

SEQ ID NO: 1383192 - RNA, 18 nt, Human
aagccuucaagcucugag

SEQ ID NO: 1383193 - RNA, 16 nt, Human
aagccuucaagcucug

SEQ ID NO: 1383194 - RNA, 16 nt, Human
aagccuucauugccuu

SEQ ID NO: 1383195 - RNA, 14 nt, Human
aagccuucaagcuc

SEQ ID NO: 1383196 - RNA, 13 nt, Human
aagccuucaagcu

SEQ ID NO: 1383197 - RNA, 22 nt, Human
aagccuuccccuuauccucccu

SEQ ID NO: 1383198 - RNA, 21 nt, Human
aagccuuccccuuauccuccc

SEQ ID NO: 1383199 - RNA, 20 nt, Human
aagccuuccccuuauccucc

SEQ ID NO: 1383200 - RNA, 12 nt, Human
aagccuuccccu

SEQ ID NO: 1383201 - RNA, 21 nt, Human
aagccuuggggcugaugcagu

SEQ ID NO: 1383202 - RNA, 12 nt, Human
aagcaugugaga

SEQ ID NO: 1383203 - RNA, 23 nt, Human
aagcauggucccacaucccuggg

SEQ ID NO: 1383204 - RNA, 22 nt, Human
aagcauggucccacaucccugg

SEQ ID NO: 1383205 - RNA, 17 nt, Human
aagcauggucccacauc

SEQ ID NO: 1383206 - RNA, 17 nt, Human
aagcaugggauuauuag

SEQ ID NO: 1383207 - RNA, 23 nt, Human
aagcauggcuugaauaaggaaau

SEQ ID NO: 1383208 - RNA, 15 nt, Human
aagcauggcuauuuu

SEQ ID NO: 1383209 - RNA, 20 nt, Human
aagcaucuuggggggguggc

SEQ ID NO: 1383210 - RNA, 23 nt, Human
aagcaugcacaaauucugucucu

SEQ ID NO: 1383211 - RNA, 12 nt, Human
aagcaugaaaug

SEQ ID NO: 1383212 - RNA, 14 nt, Human
aagcaucuugcauu

SEQ ID NO: 1383213 - RNA, 18 nt, Human
aagcaucauuauuuaugu

SEQ ID NO: 1383214 - RNA, 19 nt, Human
aagcaucauuauuuaugua

SEQ ID NO: 1383215 - RNA, 17 nt, Human
aagcaucauuauuuaug

SEQ ID NO: 1383216 - RNA, 15 nt, Human
aagcaucauuauuua

SEQ ID NO: 1383217 - RNA, 14 nt, Human
aagcaucauuauuu

SEQ ID NO: 1383218 - RNA, 13 nt, Human
aagcaucagaaag

SEQ ID NO: 1383219 - RNA, 12 nt, Human
aagccaaagagu

SEQ ID NO: 1383220 - RNA, 19 nt, Human
aagcauuuuguaaguugaa

SEQ ID NO: 1383221 - RNA, 13 nt, Human
aagcauuuuguaa

SEQ ID NO: 1383222 - RNA, 12 nt, Human
aagcauuuugua

SEQ ID NO: 1383223 - RNA, 23 nt, Human
aagcauuuguuucuacuuugaua

SEQ ID NO: 1383224 - RNA, 19 nt, Human
aagcauuuguuucuacuuu

SEQ ID NO: 1383225 - RNA, 18 nt, Human
aagcauuugaaugcauuu

SEQ ID NO: 1383226 - RNA, 21 nt, Human
aagcauuugaaugcauuuugu

SEQ ID NO: 1383227 - RNA, 21 nt, Human
aagcauuuaaccccccuguac

SEQ ID NO: 1383228 - RNA, 22 nt, Human
aagcauuuaaccccccuguaca

SEQ ID NO: 1383229 - RNA, 23 nt, Human
aagcauuuaaccccccuguacac

SEQ ID NO: 1383230 - RNA, 20 nt, Human
aagccaagggaaccuguguc

SEQ ID NO: 1383231 - RNA, 19 nt, Human
aagccaagggaaccugugu

SEQ ID NO: 1383232 - RNA, 18 nt, Human
aagccaagggaaccugug

SEQ ID NO: 1383233 - RNA, 18 nt, Human
aagcacauuuuaaaagug

SEQ ID NO: 1383234 - RNA, 22 nt, Human
aagcacugacugggaccaggca

SEQ ID NO: 1383235 - RNA, 21 nt, Human
aagcacgugguaaaacacuug

SEQ ID NO: 1383236 - RNA, 15 nt, Human
aagcacgaaauguua

SEQ ID NO: 1383237 - RNA, 19 nt, Human
aagcaccuuagcuggcauu

SEQ ID NO: 1383238 - RNA, 16 nt, Human
aagcaccuuagcuggc

SEQ ID NO: 1383239 - RNA, 13 nt, Human
aagcaccuguaau

SEQ ID NO: 1383240 - RNA, 16 nt, Human
aagcacuaaacaaaga

SEQ ID NO: 1383241 - RNA, 13 nt, Human
aagcacagcccuu

SEQ ID NO: 1383242 - RNA, 16 nt, Human
aagcacagcagccugg

SEQ ID NO: 1383243 - RNA, 11 nt, Human
aagcacagcag

SEQ ID NO: 1383244 - RNA, 16 nt, Human
guguuucuugccucau

SEQ ID NO: 1383245 - RNA, 18 nt, Human
guguuucuguaagaaacc

SEQ ID NO: 1383246 - RNA, 13 nt, Human
guguuucugacuc

SEQ ID NO: 1383247 - RNA, 13 nt, Human
gugugaaugaaca

SEQ ID NO: 1383248 - RNA, 13 nt, Human
guguuugcuuucu

SEQ ID NO: 1383249 - RNA, 15 nt, Human
guguuucuugccuca

SEQ ID NO: 1383250 - RNA, 14 nt, Human
guguuucuugccuc

SEQ ID NO: 1383251 - RNA, 12 nt, Human
guguuugaagca

SEQ ID NO: 1383252 - RNA, 23 nt, Human
aagauuuuuuuuuuuucucucaa

SEQ ID NO: 1383253 - RNA, 15 nt, Human
aagcaaaaaagaaaa

SEQ ID NO: 1383254 - RNA, 16 nt, Human
aagauuuuuuaauaau

SEQ ID NO: 1383255 - RNA, 14 nt, Human
aagauuuuuuaaua

SEQ ID NO: 1383256 - RNA, 17 nt, Human
aagauuuuuuaauaauu

SEQ ID NO: 1383257 - RNA, 20 nt, Human
aagcaacauucauagucuuu

SEQ ID NO: 1383258 - RNA, 15 nt, Human
aagcaacauggcuuu

SEQ ID NO: 1383259 - RNA, 14 nt, Human
aagcaacauggcuu

SEQ ID NO: 1383260 - RNA, 13 nt, Human
aagcaacauggcu

SEQ ID NO: 1383261 - RNA, 19 nt, Human
aagauggcauaaccugucu

SEQ ID NO: 1383262 - RNA, 20 nt, Human
aagauggaguuucuaagguc

SEQ ID NO: 1383263 - RNA, 18 nt, Human
aagauggaguuucuaagg

SEQ ID NO: 1383264 - RNA, 13 nt, Human
aagauuuuuuaau

SEQ ID NO: 1383265 - RNA, 15 nt, Human
aagauggcccauccu

SEQ ID NO: 1383266 - RNA, 17 nt, Human
aagauggaguuucuaag

SEQ ID NO: 1383267 - RNA, 16 nt, Human
aagauggaguuucuaa

SEQ ID NO: 1383268 - RNA, 19 nt, Human
aagauauuuuuaucuuuau

SEQ ID NO: 1383269 - RNA, 17 nt, Human
aagauauuuuuaucuuu

SEQ ID NO: 1383270 - RNA, 19 nt, Human
gugucuuaauuauuauuug

SEQ ID NO: 1383271 - RNA, 15 nt, Human
gugucuuaauuauua

SEQ ID NO: 1383272 - RNA, 14 nt, Human
gugugaacuggacc

SEQ ID NO: 1383273 - RNA, 17 nt, Human
gugugaacuggacccug

SEQ ID NO: 1383274 - RNA, 22 nt, Human
gugugaacuggacccuguugcu

SEQ ID NO: 1383275 - RNA, 14 nt, Human
gugucuuaauuauu

SEQ ID NO: 1383276 - RNA, 15 nt, Human
gugucacucaaggcg

SEQ ID NO: 1383277 - RNA, 14 nt, Human
gugucaccugugcu

SEQ ID NO: 1383278 - RNA, 20 nt, Human
guguauuccaagacaugucu

SEQ ID NO: 1383279 - RNA, 13 nt, Human
guguauuccaaga

SEQ ID NO: 1383280 - RNA, 15 nt, Human
aagcaaccucaguaa

SEQ ID NO: 1383281 - RNA, 14 nt, Human
aagauagcugugac

SEQ ID NO: 1383282 - RNA, 15 nt, Human
aagauauaagugcug

SEQ ID NO: 1383283 - RNA, 16 nt, Human
aagauauaagugcugu

SEQ ID NO: 1383284 - RNA, 17 nt, Human
aagauauaagugcugua

SEQ ID NO: 1383285 - RNA, 15 nt, Human
aagauagcugugacu

SEQ ID NO: 1383286 - RNA, 15 nt, Human
aagagguguuauuug

SEQ ID NO: 1383287 - RNA, 20 nt, Human
aagaggugaccccagggcac

SEQ ID NO: 1383288 - RNA, 19 nt, Human
aagaggugaccccagggca

SEQ ID NO: 1383289 - RNA, 18 nt, Human
aagaggugaccccagggc

SEQ ID NO: 1383290 - RNA, 17 nt, Human
aagaggugaccccaggg

SEQ ID NO: 1383291 - RNA, 16 nt, Human
aagaggugaccccagg

SEQ ID NO: 1383292 - RNA, 21 nt, Human
aagagguauuuaucuuuacuu

SEQ ID NO: 1383293 - RNA, 24 nt, Human
aagaggugaccccagggcacagga

SEQ ID NO: 1383294 - RNA, 22 nt, Human
aagaggugaccccagggcacag

SEQ ID NO: 1383295 - RNA, 21 nt, Human
aagaggugaccccagggcaca

SEQ ID NO: 1383296 - RNA, 13 nt, Human
aagagguguuauu

SEQ ID NO: 1383297 - RNA, 17 nt, Human
aagagggacgccugggg

SEQ ID NO: 1383298 - RNA, 16 nt, Human
aagagggacgccuggg

SEQ ID NO: 1383299 - RNA, 17 nt, Human
aagaggcugcccuccug

SEQ ID NO: 1383300 - RNA, 18 nt, Human
aagaggccguggcugcug

SEQ ID NO: 1383301 - RNA, 18 nt, Human
aagaggcaccaggaagcc

SEQ ID NO: 1383302 - RNA, 18 nt, Human
aagaggcaccugucccag

SEQ ID NO: 1383303 - RNA, 15 nt, Human
aagaggcaccugucc

SEQ ID NO: 1383304 - RNA, 19 nt, Human
guguaacugcccaaagcag

SEQ ID NO: 1383305 - RNA, 18 nt, Human
guguaagaaauacagacu

SEQ ID NO: 1383306 - RNA, 20 nt, Human
gugguucugagauggcuccc

SEQ ID NO: 1383307 - RNA, 15 nt, Human
gugguuucagaaaug

SEQ ID NO: 1383308 - RNA, 19 nt, Human
gugcugccucuaccugaca

SEQ ID NO: 1383309 - RNA, 12 nt, Human
gugcugccucua

SEQ ID NO: 1383310 - RNA, 11 nt, Human
gugcugccucu

SEQ ID NO: 1383311 - RNA, 13 nt, Human
gugcucucuuucu

SEQ ID NO: 1383312 - RNA, 22 nt, Human
gugcucuccauucugcuccuuc

SEQ ID NO: 1383313 - RNA, 18 nt, Human
gugcugccgcgcagugug

SEQ ID NO: 1383314 - RNA, 16 nt, Human
gugcucucuuucuguc

SEQ ID NO: 1383315 - RNA, 19 nt, Human
guguaaaauauuuugaauc

SEQ ID NO: 1383316 - RNA, 18 nt, Human
guguaaaauauuuugaau

SEQ ID NO: 1383317 - RNA, 17 nt, Human
guguaaaauauuuugaa

SEQ ID NO: 1383318 - RNA, 19 nt, Human
gugguuuucuuuugccaug

SEQ ID NO: 1383319 - RNA, 18 nt, Human
gugguuuaggcuauuugu

SEQ ID NO: 1383320 - RNA, 17 nt, Human
gugguuuauauauuuaa

SEQ ID NO: 1383321 - RNA, 20 nt, Human
guguaacugcccaaagcagc

SEQ ID NO: 1383322 - RNA, 23 nt, Human
guguaacaauuguguagccuuuu

SEQ ID NO: 1383323 - RNA, 19 nt, Human
guguaacaauuguguagcc

SEQ ID NO: 1383324 - RNA, 17 nt, Human
guguaacaauuguguag

SEQ ID NO: 1383325 - RNA, 22 nt, Human
uagaugcuggcccagggcccag

SEQ ID NO: 1383326 - RNA, 21 nt, Human
uagaugcuggcccagggccca

SEQ ID NO: 1383327 - RNA, 18 nt, Human
uagaugcuggcccagggc

SEQ ID NO: 1383328 - RNA, 16 nt, Human
uagaugcuggcccagg

SEQ ID NO: 1383329 - RNA, 18 nt, Human
uagaugauuucaguucua

SEQ ID NO: 1383330 - RNA, 22 nt, Human
uagaugauuucaguucuaggaa

SEQ ID NO: 1383331 - RNA, 23 nt, Human
uagaugauuaaauaagauucuaa

SEQ ID NO: 1383332 - RNA, 21 nt, Human
uagaugauuaaauaagauucu

SEQ ID NO: 1383333 - RNA, 20 nt, Human
uagaugauuaaauaagauuc

SEQ ID NO: 1383334 - RNA, 19 nt, Human
uagaugauuaaauaagauu

SEQ ID NO: 1383335 - RNA, 15 nt, Human
uagaugcaguucuga

SEQ ID NO: 1383336 - RNA, 15 nt, Human
uagaugcuggcccag

SEQ ID NO: 1383337 - RNA, 14 nt, Human
uagaugcuggccca

SEQ ID NO: 1383338 - RNA, 13 nt, Human
uagaugcuggccc

SEQ ID NO: 1383339 - RNA, 16 nt, Human
uagaugcaguucugaa

SEQ ID NO: 1383340 - RNA, 21 nt, Human
uagccaaaaauagcuaaauac

SEQ ID NO: 1383341 - RNA, 16 nt, Human
uagccaaaaauagcua

SEQ ID NO: 1383342 - RNA, 17 nt, Human
uagcaugucacuaaagc

SEQ ID NO: 1383343 - RNA, 18 nt, Human
uagcaugucgucaaagcu

SEQ ID NO: 1383344 - RNA, 19 nt, Human
acaagaccacguuucuaaa

SEQ ID NO: 1383345 - RNA, 23 nt, Human
acaacacuguaguaaauaaugcu

SEQ ID NO: 1383346 - RNA, 14 nt, Human
acaacacuguagua

SEQ ID NO: 1383347 - RNA, 17 nt, Human
uagccagaggcucuaau

SEQ ID NO: 1383348 - RNA, 20 nt, Human
uagccagcacacagggcagu

SEQ ID NO: 1383349 - RNA, 19 nt, Human
uagccagcacacagggcag

SEQ ID NO: 1383350 - RNA, 18 nt, Human
uagccagcacacagggca

SEQ ID NO: 1383351 - RNA, 16 nt, Human
uagccacauuuggaau

SEQ ID NO: 1383352 - RNA, 17 nt, Human
uagccacaccaggauag

SEQ ID NO: 1383353 - RNA, 15 nt, Human
uagccacaccaggau

SEQ ID NO: 1383354 - RNA, 14 nt, Human
uagccacaccagga

SEQ ID NO: 1383355 - RNA, 14 nt, Human
uagccaagugcagg

SEQ ID NO: 1383356 - RNA, 12 nt, Human
acaaagcagcca

SEQ ID NO: 1383357 - RNA, 21 nt, Human
acaaagaguucaagaaauaag

SEQ ID NO: 1383358 - RNA, 22 nt, Human
acaaagaguucaagaaauaagu

SEQ ID NO: 1383359 - RNA, 19 nt, Human
acaaagaguucaagaaaua

SEQ ID NO: 1383360 - RNA, 23 nt, Human
aauuguugcuaaucuucuuaugc

SEQ ID NO: 1383361 - RNA, 17 nt, Human
aauuguugagauacuuu

SEQ ID NO: 1383362 - RNA, 18 nt, Human
acaaaggcuuauuaauuu

SEQ ID NO: 1383363 - RNA, 11 nt, Human
acaaaggcaag

SEQ ID NO: 1383364 - RNA, 21 nt, Human
acaaagcagaauaguauuuuu

SEQ ID NO: 1383365 - RNA, 14 nt, Human
acaaagcagccacg

SEQ ID NO: 1383366 - RNA, 13 nt, Human
acaaagcagccac

SEQ ID NO: 1383367 - RNA, 18 nt, Human
acaaaaggauaaugaaua

SEQ ID NO: 1383368 - RNA, 11 nt, Human
acaaaagcaug

SEQ ID NO: 1383369 - RNA, 22 nt, Human
acaaaagcaugugagacugguu

SEQ ID NO: 1383370 - RNA, 20 nt, Human
aauuguguuuuaauuguaaa

SEQ ID NO: 1383371 - RNA, 20 nt, Human
aauugccuuuuuucuguaua

SEQ ID NO: 1383372 - RNA, 23 nt, Human
aauugccuuuuuucuguauaaau

SEQ ID NO: 1383373 - RNA, 21 nt, Human
aauuguguuuauaauuuuaaa

SEQ ID NO: 1383374 - RNA, 13 nt, Human
aauuguucucaga

SEQ ID NO: 1383375 - RNA, 16 nt, Human
aauuguuacaaauugu

SEQ ID NO: 1383376 - RNA, 22 nt, Human
uagaggauggucuuacagcagg

SEQ ID NO: 1383377 - RNA, 12 nt, Human
uagaugauaaag

SEQ ID NO: 1383378 - RNA, 15 nt, Human
uagauaugaaagcug

SEQ ID NO: 1383379 - RNA, 23 nt, Human
uagauaucgacuuguuuuugcac

SEQ ID NO: 1383380 - RNA, 20 nt, Human
uagauaucaugcaaauuuca

SEQ ID NO: 1383381 - RNA, 19 nt, Human
uagagauuaccuccugaga

SEQ ID NO: 1383382 - RNA, 18 nt, Human
uagagauuaccuccugag

SEQ ID NO: 1383383 - RNA, 17 nt, Human
uagagauuaccuccuga

SEQ ID NO: 1383384 - RNA, 11 nt, Human
uagagcacugc

SEQ ID NO: 1383385 - RNA, 21 nt, Human
uagagauuaccuccugagaaa

SEQ ID NO: 1383386 - RNA, 15 nt, Human
acaaucauguguguu

SEQ ID NO: 1383387 - RNA, 21 nt, Human
acaaucauguguguuaaccca

SEQ ID NO: 1383388 - RNA, 14 nt, Human
acaaucaugugugu

SEQ ID NO: 1383389 - RNA, 12 nt, Human
acaaugacuuac

SEQ ID NO: 1383390 - RNA, 16 nt, Human
acaaugacauuuauau

SEQ ID NO: 1383391 - RNA, 16 nt, Human
acaaugacaaagcaga

SEQ ID NO: 1383392 - RNA, 19 nt, Human
acaaugacuuacuguacau

SEQ ID NO: 1383393 - RNA, 19 nt, Human
uagcuaauaacaugugaaa

SEQ ID NO: 1383394 - RNA, 21 nt, Human
uagcuaauaaaaagcuuuugu

SEQ ID NO: 1383395 - RNA, 20 nt, Human
uagcuaauaaaaagcuuuug

SEQ ID NO: 1383396 - RNA, 15 nt, Human
uagcuaaguacacaa

SEQ ID NO: 1383397 - RNA, 22 nt, Human
uagcuaaguacacaauaagcaa

SEQ ID NO: 1383398 - RNA, 17 nt, Human
acaaugacuuacuguac

SEQ ID NO: 1383399 - RNA, 18 nt, Human
acaaugacuuacuguaca

SEQ ID NO: 1383400 - RNA, 10 nt, Human
uagcuguggg

SEQ ID NO: 1383401 - RNA, 24 nt, Human
uagcugugaccugcugagcucuga

SEQ ID NO: 1383402 - RNA, 22 nt, Human
uagcugugaccugcugagcucu

SEQ ID NO: 1383403 - RNA, 20 nt, Human
uagcugugaccugcugagcu

SEQ ID NO: 1383404 - RNA, 19 nt, Human
uagcugugaccugcugagc

SEQ ID NO: 1383405 - RNA, 18 nt, Human
uagcugugaccugcugag

SEQ ID NO: 1383406 - RNA, 17 nt, Human
uagcugugaccugcuga

SEQ ID NO: 1383407 - RNA, 15 nt, Human
uagcugugaccugcu

SEQ ID NO: 1383408 - RNA, 14 nt, Human
uagcugugaccugc

SEQ ID NO: 1383409 - RNA, 13 nt, Human
uagcugugaccug

SEQ ID NO: 1383410 - RNA, 17 nt, Human
uagcuacagagaaacca

SEQ ID NO: 1383411 - RNA, 14 nt, Human
uagcuacagagaaa

SEQ ID NO: 1383412 - RNA, 13 nt, Human
uagcuacagagaa

SEQ ID NO: 1383413 - RNA, 12 nt, Human
uagcuacagaga

SEQ ID NO: 1383414 - RNA, 11 nt, Human
uagcuacagag

SEQ ID NO: 1383415 - RNA, 22 nt, Human
uagcuaauaaaaagcuuuuguc

SEQ ID NO: 1383416 - RNA, 24 nt, Human
uagcuacagagaaaccagcuuccu

SEQ ID NO: 1383417 - RNA, 23 nt, Human
uagcuacagagaaaccagcuucc

SEQ ID NO: 1383418 - RNA, 22 nt, Human
uagcuacagagaaaccagcuuc

SEQ ID NO: 1383419 - RNA, 21 nt, Human
uagcuacagagaaaccagcuu

SEQ ID NO: 1383420 - RNA, 20 nt, Human
uagcuacagagaaaccagcu

SEQ ID NO: 1383421 - RNA, 16 nt, Human
acaauacaaauggauu

SEQ ID NO: 1383422 - RNA, 15 nt, Human
acaauacaaauggau

SEQ ID NO: 1383423 - RNA, 14 nt, Human
acaauacaaaugga

SEQ ID NO: 1383424 - RNA, 17 nt, Human
acaauacagaucaucuu

SEQ ID NO: 1383425 - RNA, 13 nt, Human
acaauacaaaugg

SEQ ID NO: 1383426 - RNA, 12 nt, Human
acaauacaaaug

SEQ ID NO: 1383427 - RNA, 14 nt, Human
acaauaauuuucua

SEQ ID NO: 1383428 - RNA, 23 nt, Human
acaauacaucccuuaccugggaa

SEQ ID NO: 1383429 - RNA, 16 nt, Human
acaauaaauggcugua

SEQ ID NO: 1383430 - RNA, 13 nt, Human
acaauaaauagac

SEQ ID NO: 1383431 - RNA, 19 nt, Human
acaauaacuccucccaggg

SEQ ID NO: 1383432 - RNA, 16 nt, Human
acaauaacuccuccca

SEQ ID NO: 1383433 - RNA, 15 nt, Human
acaauaacuccuccc

SEQ ID NO: 1383434 - RNA, 15 nt, Human
acaauaagcaaaaac

SEQ ID NO: 1383435 - RNA, 16 nt, Human
acaauaagcaaaaaca

SEQ ID NO: 1383436 - RNA, 21 nt, Human
acaaggauagaugcuggccca

SEQ ID NO: 1383437 - RNA, 18 nt, Human
acaaggauagaugcuggc

SEQ ID NO: 1383438 - RNA, 17 nt, Human
acaaggauagaugcugg

SEQ ID NO: 1383439 - RNA, 16 nt, Human
acaaggauagaugcug

SEQ ID NO: 1383440 - RNA, 15 nt, Human
acaaggacuuccugu

SEQ ID NO: 1383441 - RNA, 17 nt, Human
acaagagaagcauucuc

SEQ ID NO: 1383442 - RNA, 15 nt, Human
acaagagaagcauuc

SEQ ID NO: 1383443 - RNA, 14 nt, Human
acaagagaagcauu

SEQ ID NO: 1383444 - RNA, 14 nt, Human
acaagagaaaaagc

SEQ ID NO: 1383445 - RNA, 22 nt, Human
acaagacugacgccaggguaug

SEQ ID NO: 1383446 - RNA, 15 nt, Human
acaagacccccagca

SEQ ID NO: 1383447 - RNA, 14 nt, Human
acaagacugcacau

SEQ ID NO: 1383448 - RNA, 13 nt, Human
acaagacugcaca

SEQ ID NO: 1383449 - RNA, 17 nt, Human
uagggacugaccagcag

SEQ ID NO: 1383450 - RNA, 15 nt, Human
uagggacugaccagc

SEQ ID NO: 1383451 - RNA, 14 nt, Human
uagggacugaccag

SEQ ID NO: 1383452 - RNA, 14 nt, Human
uagggaagggccug

SEQ ID NO: 1383453 - RNA, 21 nt, Human
uaggcauuuuuaccaucacug

SEQ ID NO: 1383454 - RNA, 19 nt, Human
uaggcauuuuuaccaucac

SEQ ID NO: 1383455 - RNA, 12 nt, Human
uaggcauuuccu

SEQ ID NO: 1383456 - RNA, 22 nt, Human
uaggcaggaagcccaauugcug

SEQ ID NO: 1383457 - RNA, 21 nt, Human
uaggcacuguaguucuaagac

SEQ ID NO: 1383458 - RNA, 22 nt, Human
uaggcacuguaguucuaagacu

SEQ ID NO: 1383459 - RNA, 20 nt, Human
uaggcacuguaguucuaaga

SEQ ID NO: 1383460 - RNA, 19 nt, Human
uaggcacuguaguucuaag

SEQ ID NO: 1383461 - RNA, 18 nt, Human
uaggcacuguaguucuaa

SEQ ID NO: 1383462 - RNA, 13 nt, Human
uaggaggguccuc

SEQ ID NO: 1383463 - RNA, 16 nt, Human
uaggagggugggaagg

SEQ ID NO: 1383464 - RNA, 23 nt, Human
uaggagggacugucgcugcuucg

SEQ ID NO: 1383465 - RNA, 14 nt, Human
uaggagggagacac

SEQ ID NO: 1383466 - RNA, 14 nt, Human
uaggagggacuguc

SEQ ID NO: 1383467 - RNA, 12 nt, Human
uaggagggacug

SEQ ID NO: 1383468 - RNA, 23 nt, Human
uaggagcuuugacucaggagccu

SEQ ID NO: 1383469 - RNA, 22 nt, Human
uaggcagacucuuuaugcuugc

SEQ ID NO: 1383470 - RNA, 20 nt, Human
uaggaggaccagagcuacug

SEQ ID NO: 1383471 - RNA, 19 nt, Human
uaggagcuuugacucagga

SEQ ID NO: 1383472 - RNA, 16 nt, Human
uaggagcuaaggcucu

SEQ ID NO: 1383473 - RNA, 17 nt, Human
uaggagcuaaggcucua

SEQ ID NO: 1383474 - RNA, 14 nt, Human
uaggagcuaaggcu

SEQ ID NO: 1383475 - RNA, 13 nt, Human
uaggagcuaaggc

SEQ ID NO: 1383476 - RNA, 16 nt, Human
uaggagcaaagccugu

SEQ ID NO: 1383477 - RNA, 17 nt, Human
uaggagcaaagccuguu

SEQ ID NO: 1383478 - RNA, 12 nt, Human
uaggagcaugag

SEQ ID NO: 1383479 - RNA, 14 nt, Human
uaggagagaaggua

SEQ ID NO: 1383480 - RNA, 16 nt, Human
uaggagaagccaggaa

SEQ ID NO: 1383481 - RNA, 15 nt, Human
uaggagaagccagga

SEQ ID NO: 1383482 - RNA, 12 nt, Human
uaggagaagcca

SEQ ID NO: 1383483 - RNA, 20 nt, Human
uaggagaaccaaaucuggaa

SEQ ID NO: 1383484 - RNA, 17 nt, Human
uaggagaaccaaaucug

SEQ ID NO: 1383485 - RNA, 22 nt, Human
uagcugugugaauaccugcuca

SEQ ID NO: 1383486 - RNA, 14 nt, Human
uagcugugggggug

SEQ ID NO: 1383487 - RNA, 13 nt, Human
uagcugugggggu

SEQ ID NO: 1383488 - RNA, 18 nt, Human
uaggaaauauuuauuuua

SEQ ID NO: 1383489 - RNA, 22 nt, Human
uaggaccuuuccaccacagcca

SEQ ID NO: 1383490 - RNA, 21 nt, Human
uaggaccuuuccaccacagcc

SEQ ID NO: 1383491 - RNA, 19 nt, Human
uaggaccuuuccaccacag

SEQ ID NO: 1383492 - RNA, 20 nt, Human
uaggaaaucuagaaguaguc

SEQ ID NO: 1383493 - RNA, 19 nt, Human
uaggaaauauuuauuuuaa

SEQ ID NO: 1383494 - RNA, 23 nt, Human
uaguaccaaucauuuuaauuauu

SEQ ID NO: 1383495 - RNA, 16 nt, Human
uaguaccaaucauuuu

SEQ ID NO: 1383496 - RNA, 14 nt, Human
uaguaccaaaauaa

SEQ ID NO: 1383497 - RNA, 19 nt, Human
uaguaacuucuuauggaau

SEQ ID NO: 1383498 - RNA, 18 nt, Human
uaguaacuucuuauggaa

SEQ ID NO: 1383499 - RNA, 22 nt, Human
uaguaacacuaauauauuuaaa

SEQ ID NO: 1383500 - RNA, 15 nt, Human
uaguaacacuaauau

SEQ ID NO: 1383501 - RNA, 14 nt, Human
uaguaacacuaaua

SEQ ID NO: 1383502 - RNA, 22 nt, Human
uaguaaaucacgcuuuuugaaa

SEQ ID NO: 1383503 - RNA, 21 nt, Human
uaguaaaucacgcuuuuugaa

SEQ ID NO: 1383504 - RNA, 18 nt, Human
uaguaaaucacgcuuuuu

SEQ ID NO: 1383505 - RNA, 19 nt, Human
uaguaaauaaugcuuugaa

SEQ ID NO: 1383506 - RNA, 17 nt, Human
uaguaaauaaugcuuug

SEQ ID NO: 1383507 - RNA, 16 nt, Human
uaguaaauaaugcuuu

SEQ ID NO: 1383508 - RNA, 15 nt, Human
uaguaaauaaugcuu

SEQ ID NO: 1383509 - RNA, 14 nt, Human
uaguaaauaaugcu

SEQ ID NO: 1383510 - RNA, 17 nt, Human
uaguaaagucaaggaga

SEQ ID NO: 1383511 - RNA, 17 nt, Human
uaguaaaccaauccuau

SEQ ID NO: 1383512 - RNA, 22 nt, Human
uaguaaaccaauccuaugcaug

SEQ ID NO: 1383513 - RNA, 12 nt, Human
uaguaaaccaau

SEQ ID NO: 1383514 - RNA, 11 nt, Human
uaguaaaccaa

SEQ ID NO: 1383515 - RNA, 15 nt, Human
acacauacccucuuc

SEQ ID NO: 1383516 - RNA, 22 nt, Human
acacagugcugaccagacagcc

SEQ ID NO: 1383517 - RNA, 17 nt, Human
acacacugaugcuuaga

SEQ ID NO: 1383518 - RNA, 15 nt, Human
acacacugaugcuua

SEQ ID NO: 1383519 - RNA, 14 nt, Human
acacacuuacuuuu

SEQ ID NO: 1383520 - RNA, 21 nt, Human
uaguuaccuuauaguuacugu

SEQ ID NO: 1383521 - RNA, 19 nt, Human
uaguuaccuuauaguuacu

SEQ ID NO: 1383522 - RNA, 18 nt, Human
uaguuaccuuauaguuac

SEQ ID NO: 1383523 - RNA, 17 nt, Human
uaguuaccuuauaguua

SEQ ID NO: 1383524 - RNA, 14 nt, Human
uaguuaccuuauag

SEQ ID NO: 1383525 - RNA, 12 nt, Human
uaguuaccuuau

SEQ ID NO: 1383526 - RNA, 20 nt, Human
uaguuaaucaucaagagaau

SEQ ID NO: 1383527 - RNA, 16 nt, Human
uaguuaaucaucaaga

SEQ ID NO: 1383528 - RNA, 20 nt, Human
uaguuaacacacuaccgaau

SEQ ID NO: 1383529 - RNA, 23 nt, Human
uaguuaagacaugauuuccuuga

SEQ ID NO: 1383530 - RNA, 21 nt, Human
uaguuaagacaugauuuccuu

SEQ ID NO: 1383531 - RNA, 19 nt, Human
uaguuaagacaugauuucc

SEQ ID NO: 1383532 - RNA, 14 nt, Human
uaguuaagacauga

SEQ ID NO: 1383533 - RNA, 14 nt, Human
uaguuaacacacua

SEQ ID NO: 1383534 - RNA, 15 nt, Human
uagugacccacaugc

SEQ ID NO: 1383535 - RNA, 21 nt, Human
uagugaaggcuucucucugug

SEQ ID NO: 1383536 - RNA, 18 nt, Human
uagugaauacugcuacag

SEQ ID NO: 1383537 - RNA, 23 nt, Human
uaguguuggagaagaacugaaau

SEQ ID NO: 1383538 - RNA, 18 nt, Human
uagucccucaugcaaauc

SEQ ID NO: 1383539 - RNA, 20 nt, Human
uaguaccuuuuauaucccau

SEQ ID NO: 1383540 - RNA, 19 nt, Human
uagugaaggcuucucucug

SEQ ID NO: 1383541 - RNA, 14 nt, Human
uagugaacuugaaa

SEQ ID NO: 1383542 - RNA, 22 nt, Human
uagugaaacucguuaauuugua

SEQ ID NO: 1383543 - RNA, 18 nt, Human
uagggagggcggcagggg

SEQ ID NO: 1383544 - RNA, 12 nt, Human
uagggagccaug

SEQ ID NO: 1383545 - RNA, 17 nt, Human
uagggagccauuugaga

SEQ ID NO: 1383546 - RNA, 22 nt, Human
acaaugcuguauuuuaaaagaa

SEQ ID NO: 1383547 - RNA, 21 nt, Human
acaaugcugugcccuaaagug

SEQ ID NO: 1383548 - RNA, 19 nt, Human
acaauggauaggcacagga

SEQ ID NO: 1383549 - RNA, 24 nt, Human
acaaugcugugcccuaaaguguau

SEQ ID NO: 1383550 - RNA, 22 nt, Human
acaaugcugugcccuaaagugu

SEQ ID NO: 1383551 - RNA, 23 nt, Human
acaaugcugugcccuaaagugua

SEQ ID NO: 1383552 - RNA, 14 nt, Human
acacaaugugucug

SEQ ID NO: 1383553 - RNA, 22 nt, Human
acacacaaauuaucuuaaaacu

SEQ ID NO: 1383554 - RNA, 23 nt, Human
acaauggaccggagagugggggu

SEQ ID NO: 1383555 - RNA, 16 nt, Human
acaauggaccggagag

SEQ ID NO: 1383556 - RNA, 22 nt, Human
acaauguccuaacugaaagaug

SEQ ID NO: 1383557 - RNA, 22 nt, Human
acacacuaccgaaugugucuuu

SEQ ID NO: 1383558 - RNA, 23 nt, Human
acacacggugccuuuauuuccac

SEQ ID NO: 1383559 - RNA, 16 nt, Human
acacacggugccuuua

SEQ ID NO: 1383560 - RNA, 13 nt, Human
acacacugaugcu

SEQ ID NO: 1383561 - RNA, 20 nt, Human
acacacuaccgaaugugucu

SEQ ID NO: 1383562 - RNA, 21 nt, Human
acacacugcauguuugugauu

SEQ ID NO: 1383563 - RNA, 17 nt, Human
acacaccaccacgccug

SEQ ID NO: 1383564 - RNA, 20 nt, Human
acacaccaccacgccuggcu

SEQ ID NO: 1383565 - RNA, 18 nt, Human
uauaaaaagcuuccauga

SEQ ID NO: 1383566 - RNA, 17 nt, Human
uauaaaaaaugguucag

SEQ ID NO: 1383567 - RNA, 21 nt, Human
uauaaaaaaugguucagaauu

SEQ ID NO: 1383568 - RNA, 16 nt, Human
uauaaaaaaugguuca

SEQ ID NO: 1383569 - RNA, 15 nt, Human
uauaaaaaaugguuc

SEQ ID NO: 1383570 - RNA, 14 nt, Human
uauaaaaaaugguu

SEQ ID NO: 1383571 - RNA, 20 nt, Human
uaguuccacuuauagccucu

SEQ ID NO: 1383572 - RNA, 18 nt, Human
uaguuccacuuauagccu

SEQ ID NO: 1383573 - RNA, 17 nt, Human
uaguucaugucugcuau

SEQ ID NO: 1383574 - RNA, 14 nt, Human
uaguucauguaaau

SEQ ID NO: 1383575 - RNA, 23 nt, Human
uaguuaccuuauaguuacugugu

SEQ ID NO: 1383576 - RNA, 22 nt, Human
uaguuaccuuauaguuacugug

SEQ ID NO: 1383577 - RNA, 15 nt, Human
uaguuccacugagac

SEQ ID NO: 1383578 - RNA, 14 nt, Human
uaguuccacugaga

SEQ ID NO: 1383579 - RNA, 22 nt, Human
uaguucauguaaauaauacauu

SEQ ID NO: 1383580 - RNA, 21 nt, Human
uaguucauguaaauaauacau

SEQ ID NO: 1383581 - RNA, 16 nt, Human
uaguucauguaaauaa

SEQ ID NO: 1383582 - RNA, 15 nt, Human
uaguucauguaaaua

SEQ ID NO: 1383583 - RNA, 19 nt, Human
acacauacucauuuuucau

SEQ ID NO: 1383584 - RNA, 22 nt, Human
acacauacucauuuuucaugau

SEQ ID NO: 1383585 - RNA, 19 nt, Human
uauaaaaauaaaaaacacu

SEQ ID NO: 1383586 - RNA, 20 nt, Human
uauaaaagccuguuuaagag

SEQ ID NO: 1383587 - RNA, 20 nt, Human
uauaaaaauaaaaaacacug

SEQ ID NO: 1383588 - RNA, 22 nt, Human
uauaaaagggacugagaaauuu

SEQ ID NO: 1383589 - RNA, 15 nt, Human
acacaugaaguccaa

SEQ ID NO: 1383590 - RNA, 18 nt, Human
acacaugcaaggucauuu

SEQ ID NO: 1383591 - RNA, 14 nt, Human
acacauuuuauuuu

SEQ ID NO: 1383592 - RNA, 19 nt, Human
acacauuuuauuuuauuau

SEQ ID NO: 1383593 - RNA, 20 nt, Human
acacauuuuauuuuauuaug

SEQ ID NO: 1383594 - RNA, 15 nt, Human
acaccaugauuccuu

SEQ ID NO: 1383595 - RNA, 21 nt, Human
acaccauagguagaauguaaa

SEQ ID NO: 1383596 - RNA, 17 nt, Human
acaccauagguagaaug

SEQ ID NO: 1383597 - RNA, 21 nt, Human
acacauuuuauuuuauuaugc

SEQ ID NO: 1383598 - RNA, 20 nt, Human
acaccaugauuccuuuaaca

SEQ ID NO: 1383599 - RNA, 17 nt, Human
acaccauugaaggcuua

SEQ ID NO: 1383600 - RNA, 18 nt, Human
acaccaugauuccuuuaa

SEQ ID NO: 1383601 - RNA, 16 nt, Human
acaccaugauuccuuu

SEQ ID NO: 1383602 - RNA, 19 nt, Human
acacccaaagagguauuua

SEQ ID NO: 1383603 - RNA, 20 nt, Human
acacccaaagagguauuuau

SEQ ID NO: 1383604 - RNA, 16 nt, Human
acacccucacacuggg

SEQ ID NO: 1383605 - RNA, 13 nt, Human
acacccucacacu

SEQ ID NO: 1383606 - RNA, 16 nt, Human
acaccucuuggggagu

SEQ ID NO: 1383607 - RNA, 22 nt, Human
acacccuucucccacucuccua

SEQ ID NO: 1383608 - RNA, 21 nt, Human
acacccuucucccacucuccu

SEQ ID NO: 1383609 - RNA, 17 nt, Human
acacccuucucccacuc

SEQ ID NO: 1383610 - RNA, 23 nt, Human
acaccuuggacauccuccuccca

SEQ ID NO: 1383611 - RNA, 20 nt, Human
acaccuuccagcuccuguaa

SEQ ID NO: 1383612 - RNA, 16 nt, Human
acaccuuccagcuccu

SEQ ID NO: 1383613 - RNA, 14 nt, Human
acaccuuccagcuc

SEQ ID NO: 1383614 - RNA, 20 nt, Human
acaccuguagcacuuacugg

SEQ ID NO: 1383615 - RNA, 23 nt, Human
acaccugcccugcccugccaccu

SEQ ID NO: 1383616 - RNA, 16 nt, Human
acaccuuuagguucuu

SEQ ID NO: 1383617 - RNA, 15 nt, Human
acaccuuuagguucu

SEQ ID NO: 1383618 - RNA, 22 nt, Human
acaccuuggacauccuccuccc

SEQ ID NO: 1383619 - RNA, 21 nt, Human
acaccuuuuauugacacagaa

SEQ ID NO: 1383620 - RNA, 23 nt, Human
acaccuuuuauugacacagaaaa

SEQ ID NO: 1383621 - RNA, 14 nt, Human
acacuaagagagaa

SEQ ID NO: 1383622 - RNA, 13 nt, Human
acacuaagagaga

SEQ ID NO: 1383623 - RNA, 15 nt, Human
uauaaguguguguuu

SEQ ID NO: 1383624 - RNA, 18 nt, Human
uauuacuuguaaauauaa

SEQ ID NO: 1383625 - RNA, 23 nt, Human
uauuacuuauuuuugacaguguu

SEQ ID NO: 1383626 - RNA, 16 nt, Human
uauuaaaauguaugca

SEQ ID NO: 1383627 - RNA, 13 nt, Human
uauuaaaauguau

SEQ ID NO: 1383628 - RNA, 12 nt, Human
uauuaaaaugua

SEQ ID NO: 1383629 - RNA, 22 nt, Human
uauuacguaugucugguucuca

SEQ ID NO: 1383630 - RNA, 16 nt, Human
uauuacguaugucugg

SEQ ID NO: 1383631 - RNA, 16 nt, Human
uauuacgguuugcccc

SEQ ID NO: 1383632 - RNA, 14 nt, Human
uauuacuguaagaa

SEQ ID NO: 1383633 - RNA, 17 nt, Human
uauuaguauuguugucc

SEQ ID NO: 1383634 - RNA, 16 nt, Human
uauuaguauuguuguc

SEQ ID NO: 1383635 - RNA, 15 nt, Human
uauuaguauuguugu

SEQ ID NO: 1383636 - RNA, 13 nt, Human
uauuaguauuguu

SEQ ID NO: 1383637 - RNA, 21 nt, Human
uauuaggugcaauuucaaggu

SEQ ID NO: 1383638 - RNA, 17 nt, Human
uauuaggugcaauuuca

SEQ ID NO: 1383639 - RNA, 22 nt, Human
uauuacuuguaaauauaaagac

SEQ ID NO: 1383640 - RNA, 23 nt, Human
uauuacuuguaaauauaaagacg

SEQ ID NO: 1383641 - RNA, 21 nt, Human
uauuacuuguaaauauaaaga

SEQ ID NO: 1383642 - RNA, 19 nt, Human
uauuacuuguaaauauaaa

SEQ ID NO: 1383643 - RNA, 15 nt, Human
uauuagaauaccaca

SEQ ID NO: 1383644 - RNA, 21 nt, Human
uauuaguauuguuguccuuuu

SEQ ID NO: 1383645 - RNA, 20 nt, Human
uauuaguauuguuguccuuu

SEQ ID NO: 1383646 - RNA, 19 nt, Human
uauuaguauuguuguccuu

SEQ ID NO: 1383647 - RNA, 23 nt, Human
uauucaaaaauuaucuauagcua

SEQ ID NO: 1383648 - RNA, 20 nt, Human
acaggcucaaacaaugacaa

SEQ ID NO: 1383649 - RNA, 20 nt, Human
acaggcgugagccaccucgc

SEQ ID NO: 1383650 - RNA, 19 nt, Human
acaggcgugagccaccucg

SEQ ID NO: 1383651 - RNA, 16 nt, Human
acaggcucaggcaggg

SEQ ID NO: 1383652 - RNA, 15 nt, Human
acaggcucaggcagg

SEQ ID NO: 1383653 - RNA, 14 nt, Human
acaggcucaggcag

SEQ ID NO: 1383654 - RNA, 12 nt, Human
acaggcucaggc

SEQ ID NO: 1383655 - RNA, 15 nt, Human
uauucagugucacug

SEQ ID NO: 1383656 - RNA, 14 nt, Human
uauucauaauuauu

SEQ ID NO: 1383657 - RNA, 12 nt, Human
uauucaauaaag

SEQ ID NO: 1383658 - RNA, 13 nt, Human
uauucaauaaagc

SEQ ID NO: 1383659 - RNA, 21 nt, Human
uauucaauaaaguauuuaauu

SEQ ID NO: 1383660 - RNA, 19 nt, Human
uauucaauaaaguauuuaa

SEQ ID NO: 1383661 - RNA, 20 nt, Human
uauucaauaaaguauuuaau

SEQ ID NO: 1383662 - RNA, 14 nt, Human
uauucaauaaagcu

SEQ ID NO: 1383663 - RNA, 14 nt, Human
uauucaauaaagua

SEQ ID NO: 1383664 - RNA, 15 nt, Human
uauucaauaaaguau

SEQ ID NO: 1383665 - RNA, 17 nt, Human
uauucaauaaaguauuu

SEQ ID NO: 1383666 - RNA, 16 nt, Human
uauucaauucuuuuaa

SEQ ID NO: 1383667 - RNA, 21 nt, Human
uauucagcucauggacuucug

SEQ ID NO: 1383668 - RNA, 22 nt, Human
acagggaaggcaggcagggcuc

SEQ ID NO: 1383669 - RNA, 21 nt, Human
acagggaaggcaggcagggcu

SEQ ID NO: 1383670 - RNA, 20 nt, Human
acagggaaggcaggcagggc

SEQ ID NO: 1383671 - RNA, 19 nt, Human
acagggaaggcaggcaggg

SEQ ID NO: 1383672 - RNA, 17 nt, Human
acagggaaggcaggcag

SEQ ID NO: 1383673 - RNA, 15 nt, Human
acagggaaggcaggc

SEQ ID NO: 1383674 - RNA, 14 nt, Human
acagggaaggcagg

SEQ ID NO: 1383675 - RNA, 13 nt, Human
acagggaaggcag

SEQ ID NO: 1383676 - RNA, 12 nt, Human
acagggaaggca

SEQ ID NO: 1383677 - RNA, 16 nt, Human
acaggcuucugagcag

SEQ ID NO: 1383678 - RNA, 21 nt, Human
acaggcuggaagauagcugug

SEQ ID NO: 1383679 - RNA, 23 nt, Human
acaggcuucugagcagcgagccu

SEQ ID NO: 1383680 - RNA, 18 nt, Human
acaggcuucugagcagcg

SEQ ID NO: 1383681 - RNA, 17 nt, Human
acaggcuucugagcagc

SEQ ID NO: 1383682 - RNA, 22 nt, Human
acagggaauuaggcccccauca

SEQ ID NO: 1383683 - RNA, 23 nt, Human
acagggaaggcaggcagggcucu

SEQ ID NO: 1383684 - RNA, 20 nt, Human
acaggcucuuagcagcuucc

SEQ ID NO: 1383685 - RNA, 19 nt, Human
acaggcucuuagcagcuuc

SEQ ID NO: 1383686 - RNA, 15 nt, Human
acaggcucuuagcag

SEQ ID NO: 1383687 - RNA, 13 nt, Human
acaggcucuuagc

SEQ ID NO: 1383688 - RNA, 20 nt, Human
acaggcuggaagauagcugu

SEQ ID NO: 1383689 - RNA, 18 nt, Human
acaggcuggaagauagcu

SEQ ID NO: 1383690 - RNA, 13 nt, Human
acaguaggagccc

SEQ ID NO: 1383691 - RNA, 15 nt, Human
acaguacccaaacug

SEQ ID NO: 1383692 - RNA, 14 nt, Human
acaguacacuguca

SEQ ID NO: 1383693 - RNA, 22 nt, Human
acagggauaaggccuguggggg

SEQ ID NO: 1383694 - RNA, 18 nt, Human
acagggauaaggccugug

SEQ ID NO: 1383695 - RNA, 14 nt, Human
acagucacugcucu

SEQ ID NO: 1383696 - RNA, 18 nt, Human
acagucaccucauggaau

SEQ ID NO: 1383697 - RNA, 17 nt, Human
acagucaccucauggaa

SEQ ID NO: 1383698 - RNA, 16 nt, Human
acagucaccucaugga

SEQ ID NO: 1383699 - RNA, 14 nt, Human
acaguagucuugau

SEQ ID NO: 1383700 - RNA, 22 nt, Human
acaguaggagcccagcucugaa

SEQ ID NO: 1383701 - RNA, 14 nt, Human
acaguaggagccca

SEQ ID NO: 1383702 - RNA, 23 nt, Human
acaguagucuugaugaccaaagu

SEQ ID NO: 1383703 - RNA, 22 nt, Human
acagcuuuugcaacuuaauacu

SEQ ID NO: 1383704 - RNA, 15 nt, Human
acagcuuuugcaacu

SEQ ID NO: 1383705 - RNA, 14 nt, Human
acagcuuuugcaac

SEQ ID NO: 1383706 - RNA, 13 nt, Human
acagcuuuugcaa

SEQ ID NO: 1383707 - RNA, 12 nt, Human
acagcuuuugca

SEQ ID NO: 1383708 - RNA, 15 nt, Human
acagccugcaaguca

SEQ ID NO: 1383709 - RNA, 13 nt, Human
acagcguuccuag

SEQ ID NO: 1383710 - RNA, 22 nt, Human
acagcguuccuagagaagacag

SEQ ID NO: 1383711 - RNA, 21 nt, Human
acagcuuuugcaacuuaauac

SEQ ID NO: 1383712 - RNA, 12 nt, Human
acaggaaaaagu

SEQ ID NO: 1383713 - RNA, 24 nt, Human
acaggacuaacacucagaagccug

SEQ ID NO: 1383714 - RNA, 23 nt, Human
acaggacuaacacucagaagccu

SEQ ID NO: 1383715 - RNA, 22 nt, Human
acaggacuaacacucagaagcc

SEQ ID NO: 1383716 - RNA, 21 nt, Human
acaggacuaacacucagaagc

SEQ ID NO: 1383717 - RNA, 20 nt, Human
acaggacuaacacucagaag

SEQ ID NO: 1383718 - RNA, 19 nt, Human
acaggacuaacacucagaa

SEQ ID NO: 1383719 - RNA, 18 nt, Human
acaggacuaacacucaga

SEQ ID NO: 1383720 - RNA, 16 nt, Human
acaggacuaacacuca

SEQ ID NO: 1383721 - RNA, 22 nt, Human
acaggacaugcgguagccagca

SEQ ID NO: 1383722 - RNA, 21 nt, Human
acaggaguguccucuucccuc

SEQ ID NO: 1383723 - RNA, 17 nt, Human
acaggaguguccucuuc

SEQ ID NO: 1383724 - RNA, 20 nt, Human
acaggagggggucguggaga

SEQ ID NO: 1383725 - RNA, 23 nt, Human
acaggagggggucguggagagcu

SEQ ID NO: 1383726 - RNA, 20 nt, Human
acaggagggcggccuccuuc

SEQ ID NO: 1383727 - RNA, 19 nt, Human
acaggagggcggccuccuu

SEQ ID NO: 1383728 - RNA, 23 nt, Human
acaggaguguccucuucccucuc

SEQ ID NO: 1383729 - RNA, 16 nt, Human
acaggcaugugucacc

SEQ ID NO: 1383730 - RNA, 19 nt, Human
acaggcaugugucaccaug

SEQ ID NO: 1383731 - RNA, 18 nt, Human
acaggcauuuccugggug

SEQ ID NO: 1383732 - RNA, 20 nt, Human
acaggcauuuccuggguggc

SEQ ID NO: 1383733 - RNA, 17 nt, Human
acaggcauuuccugggu

SEQ ID NO: 1383734 - RNA, 14 nt, Human
uaugugaaacaugu

SEQ ID NO: 1383735 - RNA, 21 nt, Human
uaugugacauuuuacauuaaa

SEQ ID NO: 1383736 - RNA, 19 nt, Human
uaugugacauuuuacauua

SEQ ID NO: 1383737 - RNA, 22 nt, Human
uaugugaacaguuguguuugaa

SEQ ID NO: 1383738 - RNA, 12 nt, Human
uaugugaacagu

SEQ ID NO: 1383739 - RNA, 17 nt, Human
uaugugaaacauguuuc

SEQ ID NO: 1383740 - RNA, 14 nt, Human
uaugugacauuuua

SEQ ID NO: 1383741 - RNA, 18 nt, Human
uaugugacauuuuacauu

SEQ ID NO: 1383742 - RNA, 18 nt, Human
uauuaaaagacucauccg

SEQ ID NO: 1383743 - RNA, 16 nt, Human
uauuaaaagacucauc

SEQ ID NO: 1383744 - RNA, 15 nt, Human
uauuaaaagacucau

SEQ ID NO: 1383745 - RNA, 14 nt, Human
uauuaaaagacuca

SEQ ID NO: 1383746 - RNA, 13 nt, Human
uauuaaaagacuc

SEQ ID NO: 1383747 - RNA, 12 nt, Human
uauuaaaagacu

SEQ ID NO: 1383748 - RNA, 20 nt, Human
uauuaaaaagguuuacagaa

SEQ ID NO: 1383749 - RNA, 15 nt, Human
uauguuuuuguucaa

SEQ ID NO: 1383750 - RNA, 16 nt, Human
uauguuuuuguucaaa

SEQ ID NO: 1383751 - RNA, 13 nt, Human
uauguuuuuaaug

SEQ ID NO: 1383752 - RNA, 18 nt, Human
uauguuuucgaaaaucaa

SEQ ID NO: 1383753 - RNA, 23 nt, Human
uaugugggcagauuuucagcaaa

SEQ ID NO: 1383754 - RNA, 17 nt, Human
uaugugggcagauuuuc

SEQ ID NO: 1383755 - RNA, 20 nt, Human
uauguguaugcacaguaaaa

SEQ ID NO: 1383756 - RNA, 19 nt, Human
uauauuauauggaaauaua

SEQ ID NO: 1383757 - RNA, 13 nt, Human
uauauuauaugga

SEQ ID NO: 1383758 - RNA, 20 nt, Human
uauauuauacuuguaauuau

SEQ ID NO: 1383759 - RNA, 18 nt, Human
uauauuauacuuguaauu

SEQ ID NO: 1383760 - RNA, 17 nt, Human
uauauuauacuuguaau

SEQ ID NO: 1383761 - RNA, 12 nt, Human
uauauuacaaug

SEQ ID NO: 1383762 - RNA, 13 nt, Human
uauauuacaauga

SEQ ID NO: 1383763 - RNA, 17 nt, Human
uauauuacagauauuug

SEQ ID NO: 1383764 - RNA, 22 nt, Human
uauauuacacuacacacugugu

SEQ ID NO: 1383765 - RNA, 17 nt, Human
uauauuacaaugaucac

SEQ ID NO: 1383766 - RNA, 18 nt, Human
uauauuguguuuguguau

SEQ ID NO: 1383767 - RNA, 14 nt, Human
uauauuguaauuua

SEQ ID NO: 1383768 - RNA, 12 nt, Human
uauauuguaauu

SEQ ID NO: 1383769 - RNA, 14 nt, Human
uauauuauauggaa

SEQ ID NO: 1383770 - RNA, 19 nt, Human
uauauuguguuuguguauu

SEQ ID NO: 1383771 - RNA, 15 nt, Human
uauauuguuugcuaa

SEQ ID NO: 1383772 - RNA, 19 nt, Human
uauauuguucagcaugcaa

SEQ ID NO: 1383773 - RNA, 16 nt, Human
uauauuuaguaucuuu

SEQ ID NO: 1383774 - RNA, 18 nt, Human
uauaaguguacauaugug

SEQ ID NO: 1383775 - RNA, 15 nt, Human
uauaaguguacauau

SEQ ID NO: 1383776 - RNA, 17 nt, Human
uauaaguguguguuuuu

SEQ ID NO: 1383777 - RNA, 23 nt, Human
uauaaguguguguuuuucauaaa

SEQ ID NO: 1383778 - RNA, 14 nt, Human
acagaaauguacag

SEQ ID NO: 1383779 - RNA, 16 nt, Human
acagaaauguacagca

SEQ ID NO: 1383780 - RNA, 17 nt, Human
acagaaauguacagcaa

SEQ ID NO: 1383781 - RNA, 16 nt, Human
uauccuaaacaucauu

SEQ ID NO: 1383782 - RNA, 18 nt, Human
uauccggacagagcacgu

SEQ ID NO: 1383783 - RNA, 17 nt, Human
uauccauauugagucaa

SEQ ID NO: 1383784 - RNA, 24 nt, Human
uauccauaaugcauucuucucugu

SEQ ID NO: 1383785 - RNA, 19 nt, Human
uauccagguucccucccag

SEQ ID NO: 1383786 - RNA, 18 nt, Human
uauccagguaauccaaga

SEQ ID NO: 1383787 - RNA, 21 nt, Human
uauccagguaauccaagauau

SEQ ID NO: 1383788 - RNA, 18 nt, Human
uauccacuuugcacagcu

SEQ ID NO: 1383789 - RNA, 15 nt, Human
uauccacuuugcaca

SEQ ID NO: 1383790 - RNA, 13 nt, Human
uauccaaaagcuu

SEQ ID NO: 1383791 - RNA, 18 nt, Human
uaucauuuaauaauauac

SEQ ID NO: 1383792 - RNA, 19 nt, Human
uaucauuuaauaauauacu

SEQ ID NO: 1383793 - RNA, 20 nt, Human
uaucauuuaauaauauacuu

SEQ ID NO: 1383794 - RNA, 21 nt, Human
uaucauuuaauaauauacuug

SEQ ID NO: 1383795 - RNA, 22 nt, Human
uaucauuuaauaauauacuugu

SEQ ID NO: 1383796 - RNA, 19 nt, Human
uaucaacuuccuaaauauu

SEQ ID NO: 1383797 - RNA, 14 nt, Human
uaucaacuuccuaa

SEQ ID NO: 1383798 - RNA, 19 nt, Human
uaucaaccccagacacugg

SEQ ID NO: 1383799 - RNA, 21 nt, Human
uaucaaccccagacacugguu

SEQ ID NO: 1383800 - RNA, 18 nt, Human
uaucaaccccagacacug

SEQ ID NO: 1383801 - RNA, 17 nt, Human
uaucaaccccagacacu

SEQ ID NO: 1383802 - RNA, 21 nt, Human
uaucaaggucguuuuuuucau

SEQ ID NO: 1383803 - RNA, 18 nt, Human
uaucaaguauuauaccuu

SEQ ID NO: 1383804 - RNA, 19 nt, Human
acagagaagucacagggca

SEQ ID NO: 1383805 - RNA, 18 nt, Human
acagagaagucacagggc

SEQ ID NO: 1383806 - RNA, 17 nt, Human
acagagaagucacaggg

SEQ ID NO: 1383807 - RNA, 16 nt, Human
acagagaagucacagg

SEQ ID NO: 1383808 - RNA, 14 nt, Human
acagagaagucaca

SEQ ID NO: 1383809 - RNA, 13 nt, Human
acagagaagucac

SEQ ID NO: 1383810 - RNA, 12 nt, Human
acagagaaguca

SEQ ID NO: 1383811 - RNA, 22 nt, Human
acagagaagccuucaagcucug

SEQ ID NO: 1383812 - RNA, 23 nt, Human
acagagaagccuucaagcucuga

SEQ ID NO: 1383813 - RNA, 20 nt, Human
acagagaagccuucaagcuc

SEQ ID NO: 1383814 - RNA, 16 nt, Human
acagagaagccuucaa

SEQ ID NO: 1383815 - RNA, 15 nt, Human
acagagaagccuuca

SEQ ID NO: 1383816 - RNA, 14 nt, Human
acagagaagccuuc

SEQ ID NO: 1383817 - RNA, 13 nt, Human
acagagaagccuu

SEQ ID NO: 1383818 - RNA, 12 nt, Human
acagagaagccu

SEQ ID NO: 1383819 - RNA, 21 nt, Human
acagagaagccaucaccucag

SEQ ID NO: 1383820 - RNA, 20 nt, Human
acagagaagccaucaccuca

SEQ ID NO: 1383821 - RNA, 15 nt, Human
acagagaagccauca

SEQ ID NO: 1383822 - RNA, 14 nt, Human
acagagaagccauc

SEQ ID NO: 1383823 - RNA, 13 nt, Human
acagagaagccau

SEQ ID NO: 1383824 - RNA, 19 nt, Human
acagagaagccagcuuguu

SEQ ID NO: 1383825 - RNA, 18 nt, Human
acagagaagccagcuugu

SEQ ID NO: 1383826 - RNA, 17 nt, Human
acagagaagccagcuug

SEQ ID NO: 1383827 - RNA, 16 nt, Human
acagagaagccagcuu

SEQ ID NO: 1383828 - RNA, 15 nt, Human
acagagaagccagcu

SEQ ID NO: 1383829 - RNA, 14 nt, Human
acagagaagccagc

SEQ ID NO: 1383830 - RNA, 13 nt, Human
acagagaagccag

SEQ ID NO: 1383831 - RNA, 12 nt, Human
acagagaagcca

SEQ ID NO: 1383832 - RNA, 11 nt, Human
acagagaagcc

SEQ ID NO: 1383833 - RNA, 10 nt, Human
acagagaagc

SEQ ID NO: 1383834 - RNA, 9 nt, Human
acagagaag

SEQ ID NO: 1383835 - RNA, 23 nt, Human
acagagaaaccagcuuccuucag

SEQ ID NO: 1383836 - RNA, 22 nt, Human
acagagaaaccagcuuccuuca

SEQ ID NO: 1383837 - RNA, 20 nt, Human
acagagaaaccagcuuccuu

SEQ ID NO: 1383838 - RNA, 19 nt, Human
acagagaaaccagcuuccu

SEQ ID NO: 1383839 - RNA, 18 nt, Human
acagagaaaccagcuucc

SEQ ID NO: 1383840 - RNA, 17 nt, Human
acagagaaaccagcuuc

SEQ ID NO: 1383841 - RNA, 16 nt, Human
acagagaaaccagcuu

SEQ ID NO: 1383842 - RNA, 18 nt, Human
uaucuccagcggcccugu

SEQ ID NO: 1383843 - RNA, 16 nt, Human
uaucuccagcggcccu

SEQ ID NO: 1383844 - RNA, 11 nt, Human
uaucucaucuc

SEQ ID NO: 1383845 - RNA, 23 nt, Human
uaucuauauuuuacauaaauuua

SEQ ID NO: 1383846 - RNA, 18 nt, Human
acagaugccacacaagga

SEQ ID NO: 1383847 - RNA, 13 nt, Human
acagaugagucac

SEQ ID NO: 1383848 - RNA, 22 nt, Human
acagaucuggaaccucagccug

SEQ ID NO: 1383849 - RNA, 21 nt, Human
acagaucuggaaccucagccu

SEQ ID NO: 1383850 - RNA, 20 nt, Human
acagaucuggaaccucagcc

SEQ ID NO: 1383851 - RNA, 16 nt, Human
acagaucuggaaccuc

SEQ ID NO: 1383852 - RNA, 14 nt, Human
acagaucuggaacc

SEQ ID NO: 1383853 - RNA, 15 nt, Human
acagauuguuugcaa

SEQ ID NO: 1383854 - RNA, 14 nt, Human
acagauuguuugca

SEQ ID NO: 1383855 - RNA, 17 nt, Human
acagcaaggagauuuac

SEQ ID NO: 1383856 - RNA, 21 nt, Human
acagagaagucacagggcagu

SEQ ID NO: 1383857 - RNA, 12 nt, Human
acagaucuggaa

SEQ ID NO: 1383858 - RNA, 22 nt, Human
acagaucaucuuggaacugcau

SEQ ID NO: 1383859 - RNA, 23 nt, Human
acagaucgaaccguuuugaagcu

SEQ ID NO: 1383860 - RNA, 12 nt, Human
acagaucaguaa

SEQ ID NO: 1383861 - RNA, 12 nt, Human
acagauauauuu

SEQ ID NO: 1383862 - RNA, 21 nt, Human
acagcaaggagauuuacaacu

SEQ ID NO: 1383863 - RNA, 11 nt, Human
uaucuuugcca

SEQ ID NO: 1383864 - RNA, 14 nt, Human
uaucuuugccaccc

SEQ ID NO: 1383865 - RNA, 16 nt, Human
uaucuuugccacccuc

SEQ ID NO: 1383866 - RNA, 14 nt, Human
uaugaacauauugu

SEQ ID NO: 1383867 - RNA, 18 nt, Human
uaucuuuuuaccuuucau

SEQ ID NO: 1383868 - RNA, 21 nt, Human
uaucuuuucauacauuuucua

SEQ ID NO: 1383869 - RNA, 23 nt, Human
uaucuuuucauacauuuucuaag

SEQ ID NO: 1383870 - RNA, 22 nt, Human
uaucuuugccacccucaugcug

SEQ ID NO: 1383871 - RNA, 21 nt, Human
uaugauuaaguaaugauaacu

SEQ ID NO: 1383872 - RNA, 11 nt, Human
uaugcauuuga

SEQ ID NO: 1383873 - RNA, 23 nt, Human
uaugcauuugaaaauuuugaugu

SEQ ID NO: 1383874 - RNA, 24 nt, Human
uaugcauuugaaaauuuugauguu

SEQ ID NO: 1383875 - RNA, 20 nt, Human
uaugauuaaguaaugauaac

SEQ ID NO: 1383876 - RNA, 16 nt, Human
uaugauuaaguaauga

SEQ ID NO: 1383877 - RNA, 17 nt, Human
uaugaacauauuguuga

SEQ ID NO: 1383878 - RNA, 19 nt, Human
uaugaacauauuguugaaa

SEQ ID NO: 1383879 - RNA, 16 nt, Human
uaugaacuugaggaca

SEQ ID NO: 1383880 - RNA, 18 nt, Human
uaugaacuugaggacaca

SEQ ID NO: 1383881 - RNA, 19 nt, Human
uaugaacuugaggacacau

SEQ ID NO: 1383882 - RNA, 18 nt, Human
uaugccugcuauuugaag

SEQ ID NO: 1383883 - RNA, 15 nt, Human
uaugcuaccaccagc

SEQ ID NO: 1383884 - RNA, 14 nt, Human
uaugcuaccaccag

SEQ ID NO: 1383885 - RNA, 13 nt, Human
uaugcuaaucagg

SEQ ID NO: 1383886 - RNA, 13 nt, Human
uaugcgguuaauu

SEQ ID NO: 1383887 - RNA, 16 nt, Human
uaugccuuguuucaua

SEQ ID NO: 1383888 - RNA, 14 nt, Human
uaugccugcuauuu

SEQ ID NO: 1383889 - RNA, 16 nt, Human
uaugccucuguauuua

SEQ ID NO: 1383890 - RNA, 22 nt, Human
uaugcauuuaaauacagucuuc

SEQ ID NO: 1383891 - RNA, 21 nt, Human
uaugcauuuaaauacagucuu

SEQ ID NO: 1383892 - RNA, 19 nt, Human
uaugccccauucaacaucu

SEQ ID NO: 1383893 - RNA, 21 nt, Human
uaugcuuacugauauauuuua

SEQ ID NO: 1383894 - RNA, 16 nt, Human
uaugcuuacugauaua

SEQ ID NO: 1383895 - RNA, 19 nt, Human
uaugcuuaaaauaagcagg

SEQ ID NO: 1383896 - RNA, 17 nt, Human
uauggcuuuugugcauu

SEQ ID NO: 1383897 - RNA, 18 nt, Human
uauggcuuuugugcauua

SEQ ID NO: 1383898 - RNA, 21 nt, Human
uauggcuuuugugcauuaucu

SEQ ID NO: 1383899 - RNA, 15 nt, Human
uaugcugauuuauuu

SEQ ID NO: 1383900 - RNA, 19 nt, Human
uaugcuaccaccagcugug

SEQ ID NO: 1383901 - RNA, 18 nt, Human
uaugcuaccaccagcugu

SEQ ID NO: 1383902 - RNA, 17 nt, Human
uaugcuaccaccagcug

SEQ ID NO: 1383903 - RNA, 15 nt, Human
uaugcuuacugauau

SEQ ID NO: 1383904 - RNA, 16 nt, Human
uaugcuuaaaauaagc

SEQ ID NO: 1383905 - RNA, 13 nt, Human
uaugcuuaaaaua

SEQ ID NO: 1383906 - RNA, 15 nt, Human
uaugcuguacccagu

SEQ ID NO: 1383907 - RNA, 19 nt, Human
uaugguaacugcuuucugu

SEQ ID NO: 1383908 - RNA, 11 nt, Human
uaugguaaaaa

SEQ ID NO: 1383909 - RNA, 15 nt, Human
uaugggucacaggaa

SEQ ID NO: 1383910 - RNA, 14 nt, Human
uaugggucacagga

SEQ ID NO: 1383911 - RNA, 13 nt, Human
uaugggucacagg

SEQ ID NO: 1383912 - RNA, 11 nt, Human
uaugggucaca

SEQ ID NO: 1383913 - RNA, 19 nt, Human
uauggguaggguaaaucag

SEQ ID NO: 1383914 - RNA, 18 nt, Human
uauggguaggguaaauca

SEQ ID NO: 1383915 - RNA, 23 nt, Human
uauggggguuguaaauuggcaug

SEQ ID NO: 1383916 - RNA, 19 nt, Human
uauggggguuguaaauugg

SEQ ID NO: 1383917 - RNA, 17 nt, Human
uauggggaugguaguuu

SEQ ID NO: 1383918 - RNA, 23 nt, Human
uauggcuuuugugcauuaucuag

SEQ ID NO: 1383919 - RNA, 21 nt, Human
acagccugacaacauuucuau

SEQ ID NO: 1383920 - RNA, 20 nt, Human
acagccugacaacauuucua

SEQ ID NO: 1383921 - RNA, 17 nt, Human
acagccugacaacauuu

SEQ ID NO: 1383922 - RNA, 17 nt, Human
uaugguaccagaugcag

SEQ ID NO: 1383923 - RNA, 16 nt, Human
uaugguaccagaugca

SEQ ID NO: 1383924 - RNA, 15 nt, Human
uaugguaaaaaauuu

SEQ ID NO: 1383925 - RNA, 16 nt, Human
acagccucuuagaugc

SEQ ID NO: 1383926 - RNA, 22 nt, Human
aauuccuauacgcagcgugcuu

SEQ ID NO: 1383927 - RNA, 13 nt, Human
aauuccgucacca

SEQ ID NO: 1383928 - RNA, 20 nt, Human
aauucccucacucgucuccc

SEQ ID NO: 1383929 - RNA, 21 nt, Human
aauucccguuuugucacuuuu

SEQ ID NO: 1383930 - RNA, 20 nt, Human
aauucccguuuugucacuuu

SEQ ID NO: 1383931 - RNA, 19 nt, Human
uacgagagcagaggucucc

SEQ ID NO: 1383932 - RNA, 13 nt, Human
uacgaugcuucaa

SEQ ID NO: 1383933 - RNA, 22 nt, Human
uacgcagcgugcuuuaaaaaau

SEQ ID NO: 1383934 - RNA, 20 nt, Human
uacgguuugccccuuuauaa

SEQ ID NO: 1383935 - RNA, 13 nt, Human
uacggugggggua

SEQ ID NO: 1383936 - RNA, 12 nt, Human
uacggugggggu

SEQ ID NO: 1383937 - RNA, 12 nt, Human
uacguacacauu

SEQ ID NO: 1383938 - RNA, 13 nt, Human
uacguacacauuu

SEQ ID NO: 1383939 - RNA, 14 nt, Human
uacguacacauuuu

SEQ ID NO: 1383940 - RNA, 15 nt, Human
uacguugugcauuug

SEQ ID NO: 1383941 - RNA, 16 nt, Human
uacguugugcauuugg

SEQ ID NO: 1383942 - RNA, 23 nt, Human
uacuauggcccuggccuagcaua

SEQ ID NO: 1383943 - RNA, 19 nt, Human
uacguaauaagguuuuaau

SEQ ID NO: 1383944 - RNA, 16 nt, Human
uacguaauaagguuuu

SEQ ID NO: 1383945 - RNA, 18 nt, Human
uacuaaaaaaaagaugaa

SEQ ID NO: 1383946 - RNA, 16 nt, Human
uacuaaaaaaaagaug

SEQ ID NO: 1383947 - RNA, 14 nt, Human
uacuacuguguaag

SEQ ID NO: 1383948 - RNA, 14 nt, Human
uacuauauuuaugg

SEQ ID NO: 1383949 - RNA, 12 nt, Human
uacuauaguacc

SEQ ID NO: 1383950 - RNA, 13 nt, Human
uacuauaguacca

SEQ ID NO: 1383951 - RNA, 16 nt, Human
uacuauaguaccagua

SEQ ID NO: 1383952 - RNA, 19 nt, Human
uacucugugccagagccug

SEQ ID NO: 1383953 - RNA, 18 nt, Human
uacucugugccagagccu

SEQ ID NO: 1383954 - RNA, 17 nt, Human
uacucugugccagagcc

SEQ ID NO: 1383955 - RNA, 16 nt, Human
uacucugugccagagc

SEQ ID NO: 1383956 - RNA, 15 nt, Human
uacucugugccagag

SEQ ID NO: 1383957 - RNA, 14 nt, Human
uacucugugccaga

SEQ ID NO: 1383958 - RNA, 21 nt, Human
uacucugaaauuguaacuaaa

SEQ ID NO: 1383959 - RNA, 23 nt, Human
uacucugugccagagccuggggc

SEQ ID NO: 1383960 - RNA, 22 nt, Human
uacucugugccagagccugggg

SEQ ID NO: 1383961 - RNA, 21 nt, Human
uacucugugccagagccuggg

SEQ ID NO: 1383962 - RNA, 20 nt, Human
uacucugugccagagccugg

SEQ ID NO: 1383963 - RNA, 19 nt, Human
uacuguaaggcaaucaugg

SEQ ID NO: 1383964 - RNA, 18 nt, Human
uacuguaauuugugauac

SEQ ID NO: 1383965 - RNA, 19 nt, Human
uacuguaauuugugauaca

SEQ ID NO: 1383966 - RNA, 20 nt, Human
uacuguaauuugugauacaa

SEQ ID NO: 1383967 - RNA, 18 nt, Human
uacuggccuuuuucauuu

SEQ ID NO: 1383968 - RNA, 23 nt, Human
uacugggaaagggauuuucagcc

SEQ ID NO: 1383969 - RNA, 14 nt, Human
uacuguaagaaaau

SEQ ID NO: 1383970 - RNA, 18 nt, Human
uacuguaaggcaaucaug

SEQ ID NO: 1383971 - RNA, 15 nt, Human
uacuguauauucagg

SEQ ID NO: 1383972 - RNA, 14 nt, Human
uacuguaguauucu

SEQ ID NO: 1383973 - RNA, 14 nt, Human
aauugacugucacu

SEQ ID NO: 1383974 - RNA, 23 nt, Human
uacuguaauuugugauacaaugc

SEQ ID NO: 1383975 - RNA, 21 nt, Human
uacuguacaugaaaacacauu

SEQ ID NO: 1383976 - RNA, 22 nt, Human
uacuguacaugaaaacacauuu

SEQ ID NO: 1383977 - RNA, 23 nt, Human
aauugccugacgaacuccuugau

SEQ ID NO: 1383978 - RNA, 15 nt, Human
aauugccugacgaac

SEQ ID NO: 1383979 - RNA, 20 nt, Human
aauugccauguacaguaugu

SEQ ID NO: 1383980 - RNA, 16 nt, Human
aauugccauauugcac

SEQ ID NO: 1383981 - RNA, 17 nt, Human
aauugccauauugcaca

SEQ ID NO: 1383982 - RNA, 19 nt, Human
aauugccauauugcacaug

SEQ ID NO: 1383983 - RNA, 23 nt, Human
aauugccauauugcacaugucuu

SEQ ID NO: 1383984 - RNA, 23 nt, Human
aauugccaccucuaacagcacca

SEQ ID NO: 1383985 - RNA, 21 nt, Human
aauugccaaaaagugaaauaa

SEQ ID NO: 1383986 - RNA, 12 nt, Human
aauugccauauu

SEQ ID NO: 1383987 - RNA, 13 nt, Human
aauugccauauug

SEQ ID NO: 1383988 - RNA, 15 nt, Human
aauugccauauugca

SEQ ID NO: 1383989 - RNA, 23 nt, Human
aauugccaaaaagugaaauaaug

SEQ ID NO: 1383990 - RNA, 17 nt, Human
aauugaucgacuugcca

SEQ ID NO: 1383991 - RNA, 21 nt, Human
aauugaguaaugguguagaac

SEQ ID NO: 1383992 - RNA, 17 nt, Human
aauugaguuuucagugg

SEQ ID NO: 1383993 - RNA, 18 nt, Human
aauugaguguuuaaaguu

SEQ ID NO: 1383994 - RNA, 16 nt, Human
aauugaguaauggugu

SEQ ID NO: 1383995 - RNA, 19 nt, Human
aauugaugggauuugguca

SEQ ID NO: 1383996 - RNA, 18 nt, Human
aauuccaacaguuuaaug

SEQ ID NO: 1383997 - RNA, 20 nt, Human
aauuccaacaguuuaaugaa

SEQ ID NO: 1383998 - RNA, 18 nt, Human
aauuccaaagucucuaau

SEQ ID NO: 1383999 - RNA, 13 nt, Human
aauuccaaagucu

SEQ ID NO: 1384000 - RNA, 12 nt, Human
aauuccaaaguc

SEQ ID NO: 1384001 - RNA, 21 nt, Human
aauucacccccuuuccuggac

SEQ ID NO: 1384002 - RNA, 21 nt, Human
aauucacaugaugcacuucaa

SEQ ID NO: 1384003 - RNA, 22 nt, Human
aauucacaucuaaccucaucuu

SEQ ID NO: 1384004 - RNA, 21 nt, Human
aauucacaucuaaccucaucu

SEQ ID NO: 1384005 - RNA, 20 nt, Human
aauucacagugcucuuuucu

SEQ ID NO: 1384006 - RNA, 14 nt, Human
aauucacaaacuuu

SEQ ID NO: 1384007 - RNA, 19 nt, Human
aauucacaaacuuuuauac

SEQ ID NO: 1384008 - RNA, 15 nt, Human
aauucaacaaacauu

SEQ ID NO: 1384009 - RNA, 18 nt, Human
aauucauuuuuuaaauuc

SEQ ID NO: 1384010 - RNA, 23 nt, Human
aauucacuuagggucgagcaucc

SEQ ID NO: 1384011 - RNA, 15 nt, Human
aauucacuuaggguc

SEQ ID NO: 1384012 - RNA, 21 nt, Human
aauucacuguacuaucagguu

SEQ ID NO: 1384013 - RNA, 13 nt, Human
aauucacuguacu

SEQ ID NO: 1384014 - RNA, 23 nt, Human
aauucacucugaguguuuuauga

SEQ ID NO: 1384015 - RNA, 12 nt, Human
aauucacucuga

SEQ ID NO: 1384016 - RNA, 18 nt, Human
aauuccaagugauugaaa

SEQ ID NO: 1384017 - RNA, 17 nt, Human
aauucaaauaaaaaucc

SEQ ID NO: 1384018 - RNA, 22 nt, Human
aauucaaagcuguguguuugga

SEQ ID NO: 1384019 - RNA, 23 nt, Human
aauucaaaaguuccaagagucua

SEQ ID NO: 1384020 - RNA, 22 nt, Human
aauucaaaaguuccaagagucu

SEQ ID NO: 1384021 - RNA, 16 nt, Human
aauucaaaaguuccaa

SEQ ID NO: 1384022 - RNA, 16 nt, Human
aauuauuuuuuuucuu

SEQ ID NO: 1384023 - RNA, 19 nt, Human
aauuauuuuuuuucuuuua

SEQ ID NO: 1384024 - RNA, 11 nt, Human
aauuauuuugu

SEQ ID NO: 1384025 - RNA, 13 nt, Human
aauuauuuucauc

SEQ ID NO: 1384026 - RNA, 15 nt, Human
aauuagugccacuua

SEQ ID NO: 1384027 - RNA, 17 nt, Human
aauuaguaacauguguu

SEQ ID NO: 1384028 - RNA, 21 nt, Human
aauuaggcccccaucauccuc

SEQ ID NO: 1384029 - RNA, 23 nt, Human
aauuaggcuguaacuacuuuaua

SEQ ID NO: 1384030 - RNA, 12 nt, Human
aauuauuauuug

SEQ ID NO: 1384031 - RNA, 22 nt, Human
aauuauuauuuauauauguauu

SEQ ID NO: 1384032 - RNA, 20 nt, Human
aauuagugcuaagugugaac

SEQ ID NO: 1384033 - RNA, 21 nt, Human
aauuagugcuaagugugaacu

SEQ ID NO: 1384034 - RNA, 20 nt, Human
aauuagugccacuuaaugua

SEQ ID NO: 1384035 - RNA, 17 nt, Human
aauuagugccacuuaau

SEQ ID NO: 1384036 - RNA, 14 nt, Human
aauuagugcuaagu

SEQ ID NO: 1384037 - RNA, 18 nt, Human
aauuagugcuaaguguga

SEQ ID NO: 1384038 - RNA, 14 nt, Human
aauuauucaauuua

SEQ ID NO: 1384039 - RNA, 18 nt, Human
aauuauuauuuguguuuu

SEQ ID NO: 1384040 - RNA, 16 nt, Human
aauuauuauuuguguu

SEQ ID NO: 1384041 - RNA, 15 nt, Human
aauuauuauuugugu

SEQ ID NO: 1384042 - RNA, 16 nt, Human
aauuauuauuuggccc

SEQ ID NO: 1384043 - RNA, 21 nt, Human
uaccugcucacgucaaaugca

SEQ ID NO: 1384044 - RNA, 17 nt, Human
uaccugcucagcccugc

SEQ ID NO: 1384045 - RNA, 19 nt, Human
uaccuguagauucagguaa

SEQ ID NO: 1384046 - RNA, 14 nt, Human
uaccacucuguaau

SEQ ID NO: 1384047 - RNA, 13 nt, Human
uaccacucuguaa

SEQ ID NO: 1384048 - RNA, 20 nt, Human
uaccugccccacuuguccuu

SEQ ID NO: 1384049 - RNA, 19 nt, Human
uaccacucuguaauugcaa

SEQ ID NO: 1384050 - RNA, 18 nt, Human
uaccacucuguaauugca

SEQ ID NO: 1384051 - RNA, 17 nt, Human
uaccacucuguaauugc

SEQ ID NO: 1384052 - RNA, 16 nt, Human
uaccacucuguaauug

SEQ ID NO: 1384053 - RNA, 15 nt, Human
uaccacucuguaauu

SEQ ID NO: 1384054 - RNA, 22 nt, Human
aauuaggcuguaacuacuuuau

SEQ ID NO: 1384055 - RNA, 21 nt, Human
aauuaggcuguaacuacuuua

SEQ ID NO: 1384056 - RNA, 19 nt, Human
aauuaggcuguaacuacuu

SEQ ID NO: 1384057 - RNA, 18 nt, Human
aauuaggcuguaacuacu

SEQ ID NO: 1384058 - RNA, 17 nt, Human
aauuaggcuguaacuac

SEQ ID NO: 1384059 - RNA, 16 nt, Human
aauuaggcuguaacua

SEQ ID NO: 1384060 - RNA, 15 nt, Human
aauuaggcuguaacu

SEQ ID NO: 1384061 - RNA, 20 nt, Human
aauuaggcccccaucauccu

SEQ ID NO: 1384062 - RNA, 12 nt, Human
aauuagcaauug

SEQ ID NO: 1384063 - RNA, 23 nt, Human
aauuacuguuuauuaaaguacaa

SEQ ID NO: 1384064 - RNA, 14 nt, Human
aauuacugguccaa

SEQ ID NO: 1384065 - RNA, 18 nt, Human
aauuacaaaaaaaaauuu

SEQ ID NO: 1384066 - RNA, 14 nt, Human
aauuacaacuaagu

SEQ ID NO: 1384067 - RNA, 16 nt, Human
aauuacaacuaaguga

SEQ ID NO: 1384068 - RNA, 18 nt, Human
aauuacaacggagucaaa

SEQ ID NO: 1384069 - RNA, 21 nt, Human
aauuaccuugagccaguaauu

SEQ ID NO: 1384070 - RNA, 14 nt, Human
aauuaccuguggau

SEQ ID NO: 1384071 - RNA, 14 nt, Human
aauuaccuacucug

SEQ ID NO: 1384072 - RNA, 22 nt, Human
aauuacagaaauuuaauucaga

SEQ ID NO: 1384073 - RNA, 17 nt, Human
aauuacagaaauuuaau

SEQ ID NO: 1384074 - RNA, 14 nt, Human
aauuacacccaaag

SEQ ID NO: 1384075 - RNA, 14 nt, Human
aauuacgugcucug

SEQ ID NO: 1384076 - RNA, 17 nt, Human
aaugcuguacaucuauu

SEQ ID NO: 1384077 - RNA, 15 nt, Human
aaugcuguacaucua

SEQ ID NO: 1384078 - RNA, 13 nt, Human
aaugcuguacauc

SEQ ID NO: 1384079 - RNA, 12 nt, Human
aaugcuguacau

SEQ ID NO: 1384080 - RNA, 12 nt, Human
aaugcccagaca

SEQ ID NO: 1384081 - RNA, 11 nt, Human
aaugcccagac

SEQ ID NO: 1384082 - RNA, 23 nt, Human
aaugcuguacaucuauuuuggau

SEQ ID NO: 1384083 - RNA, 15 nt, Human
aaugcuuagaaauuc

SEQ ID NO: 1384084 - RNA, 16 nt, Human
aaugcuguauuuuaaa

SEQ ID NO: 1384085 - RNA, 20 nt, Human
aaugcuguauuuuaaaagaa

SEQ ID NO: 1384086 - RNA, 14 nt, Human
aaugcuuaaucaga

SEQ ID NO: 1384087 - RNA, 22 nt, Human
aaugcuuaaucagauagauauu

SEQ ID NO: 1384088 - RNA, 16 nt, Human
aaugcuucaucccuuu

SEQ ID NO: 1384089 - RNA, 14 nt, Human
aauggaaccacucu

SEQ ID NO: 1384090 - RNA, 14 nt, Human
uacaauguaauuau

SEQ ID NO: 1384091 - RNA, 15 nt, Human
uacaauguaauuauu

SEQ ID NO: 1384092 - RNA, 13 nt, Human
uacaauguaauua

SEQ ID NO: 1384093 - RNA, 15 nt, Human
aaugacaaucaugug

SEQ ID NO: 1384094 - RNA, 21 nt, Human
uacaaugcugugcccuaaagu

SEQ ID NO: 1384095 - RNA, 22 nt, Human
aaugccacugccuucgcuucuu

SEQ ID NO: 1384096 - RNA, 23 nt, Human
aaugccacagcccugucagcaug

SEQ ID NO: 1384097 - RNA, 22 nt, Human
aaugccacagcccugucagcau

SEQ ID NO: 1384098 - RNA, 19 nt, Human
aaugccacagcccugucag

SEQ ID NO: 1384099 - RNA, 18 nt, Human
aaugccacagcccuguca

SEQ ID NO: 1384100 - RNA, 16 nt, Human
aaugccacagcccugu

SEQ ID NO: 1384101 - RNA, 15 nt, Human
aaugccacagcccug

SEQ ID NO: 1384102 - RNA, 14 nt, Human
aaugccacagcccu

SEQ ID NO: 1384103 - RNA, 23 nt, Human
aaugccaguaacgcgucuuccug

SEQ ID NO: 1384104 - RNA, 21 nt, Human
aaugccaguaacgcgucuucc

SEQ ID NO: 1384105 - RNA, 22 nt, Human
aaugccaugaugccucugucuu

SEQ ID NO: 1384106 - RNA, 15 nt, Human
aaugccaucaucucc

SEQ ID NO: 1384107 - RNA, 14 nt, Human
aauggcuauguuuu

SEQ ID NO: 1384108 - RNA, 20 nt, Human
aauggcgucuggaaguccaa

SEQ ID NO: 1384109 - RNA, 17 nt, Human
aauggccuucauaucau

SEQ ID NO: 1384110 - RNA, 13 nt, Human
aauggccuuuauu

SEQ ID NO: 1384111 - RNA, 14 nt, Human
aauggccuucauau

SEQ ID NO: 1384112 - RNA, 22 nt, Human
aauggccucauguggcuggaag

SEQ ID NO: 1384113 - RNA, 20 nt, Human
aauggccucauguggcugga

SEQ ID NO: 1384114 - RNA, 15 nt, Human
aauggccucaugugg

SEQ ID NO: 1384115 - RNA, 21 nt, Human
aauggcccugggucccaggac

SEQ ID NO: 1384116 - RNA, 17 nt, Human
aauggccauuugcuuuu

SEQ ID NO: 1384117 - RNA, 20 nt, Human
aauggcaugagaaauacaaa

SEQ ID NO: 1384118 - RNA, 16 nt, Human
aauggcuauguuuuua

SEQ ID NO: 1384119 - RNA, 20 nt, Human
aauggcuauguuuuuaaugu

SEQ ID NO: 1384120 - RNA, 15 nt, Human
aauggcugauaauuu

SEQ ID NO: 1384121 - RNA, 22 nt, Human
aauguaaauauuuuaaagaauu

SEQ ID NO: 1384122 - RNA, 17 nt, Human
aauguaaauuuguacua

SEQ ID NO: 1384123 - RNA, 18 nt, Human
aauguaaauuuguacuau

SEQ ID NO: 1384124 - RNA, 16 nt, Human
aauguaaauuuguacu

SEQ ID NO: 1384125 - RNA, 15 nt, Human
aauguaaauuuguac

SEQ ID NO: 1384126 - RNA, 14 nt, Human
aauguaaauuugua

SEQ ID NO: 1384127 - RNA, 13 nt, Human
aauguaaauuugu

SEQ ID NO: 1384128 - RNA, 12 nt, Human
aauguaaauuug

SEQ ID NO: 1384129 - RNA, 23 nt, Human
aauggcaugagaaauacaaaaau

SEQ ID NO: 1384130 - RNA, 20 nt, Human
aauggcaguuauauuuugca

SEQ ID NO: 1384131 - RNA, 17 nt, Human
aauggcaguuauauuuu

SEQ ID NO: 1384132 - RNA, 19 nt, Human
aauggcagcagggguuggg

SEQ ID NO: 1384133 - RNA, 13 nt, Human
aauggcagcaggg

SEQ ID NO: 1384134 - RNA, 20 nt, Human
aauggauuuuucuuuaacug

SEQ ID NO: 1384135 - RNA, 18 nt, Human
aauggauuuuucuuuaac

SEQ ID NO: 1384136 - RNA, 17 nt, Human
aauggauuuuucuuuaa

SEQ ID NO: 1384137 - RNA, 13 nt, Human
aauggauuuuucu

SEQ ID NO: 1384138 - RNA, 23 nt, Human
aauggacuggaaggggaagggac

SEQ ID NO: 1384139 - RNA, 17 nt, Human
aauggacuggaagggga

SEQ ID NO: 1384140 - RNA, 19 nt, Human
uacagaguguggacucugg

SEQ ID NO: 1384141 - RNA, 17 nt, Human
uacagacgcugcuguca

SEQ ID NO: 1384142 - RNA, 21 nt, Human
uacagauauauuuucuuucuc

SEQ ID NO: 1384143 - RNA, 13 nt, Human
uacagauauauuu

SEQ ID NO: 1384144 - RNA, 23 nt, Human
uacacguauuugaauggccuuca

SEQ ID NO: 1384145 - RNA, 22 nt, Human
aauguaacuuuuguaagacaaa

SEQ ID NO: 1384146 - RNA, 16 nt, Human
aauguaacuuuuguaa

SEQ ID NO: 1384147 - RNA, 15 nt, Human
aauguaacuuuugua

SEQ ID NO: 1384148 - RNA, 21 nt, Human
uacacauuuuauuuuauuaug

SEQ ID NO: 1384149 - RNA, 22 nt, Human
uacacauuuuauuuuauuaugc

SEQ ID NO: 1384150 - RNA, 18 nt, Human
uacacuaagagagaauga

SEQ ID NO: 1384151 - RNA, 14 nt, Human
uacacuaagagaga

SEQ ID NO: 1384152 - RNA, 23 nt, Human
uacacauuuuauuuuauuaugca

SEQ ID NO: 1384153 - RNA, 19 nt, Human
aauguuaagacuugacagu

SEQ ID NO: 1384154 - RNA, 18 nt, Human
aauguuaaauaaauugua

SEQ ID NO: 1384155 - RNA, 20 nt, Human
aauguuaaauaaauuguaua

SEQ ID NO: 1384156 - RNA, 21 nt, Human
aauguuaaauaaauuguauau

SEQ ID NO: 1384157 - RNA, 22 nt, Human
aauguuaaauaaauuguauauu

SEQ ID NO: 1384158 - RNA, 23 nt, Human
aauguuaaauaaauuguauauuc

SEQ ID NO: 1384159 - RNA, 15 nt, Human
aauguuaaaaugugu

SEQ ID NO: 1384160 - RNA, 16 nt, Human
aauguuaaaauguguu

SEQ ID NO: 1384161 - RNA, 13 nt, Human
aauguuaaauaaa

SEQ ID NO: 1384162 - RNA, 15 nt, Human
aauguuaaauaaauu

SEQ ID NO: 1384163 - RNA, 12 nt, Human
aauguuaaaaug

SEQ ID NO: 1384164 - RNA, 13 nt, Human
aauguuaaaaugu

SEQ ID NO: 1384165 - RNA, 23 nt, Human
aauguguuucacaguuugaaaua

SEQ ID NO: 1384166 - RNA, 23 nt, Human
aauguguuguuccaaauacuaau

SEQ ID NO: 1384167 - RNA, 22 nt, Human
aauguucuuuggaaaguacacu

SEQ ID NO: 1384168 - RNA, 21 nt, Human
aauguucuuuggaaaguacac

SEQ ID NO: 1384169 - RNA, 20 nt, Human
aauguucuuuggaaaguaca

SEQ ID NO: 1384170 - RNA, 17 nt, Human
aauguucuuuggaaagu

SEQ ID NO: 1384171 - RNA, 14 nt, Human
aauguucuuuggaa

SEQ ID NO: 1384172 - RNA, 11 nt, Human
aauguucuuug

SEQ ID NO: 1384173 - RNA, 10 nt, Human
aauguucuuu

SEQ ID NO: 1384174 - RNA, 21 nt, Human
aauuaacuggguaaugaaaca

SEQ ID NO: 1384175 - RNA, 18 nt, Human
aauuaacuggguaaugaa

SEQ ID NO: 1384176 - RNA, 11 nt, Human
aauuaacuuuu

SEQ ID NO: 1384177 - RNA, 22 nt, Human
aauguugaaauaugauguuaaa

SEQ ID NO: 1384178 - RNA, 15 nt, Human
aauguugaaauauga

SEQ ID NO: 1384179 - RNA, 22 nt, Human
uacauguauugcacauuguaaa

SEQ ID NO: 1384180 - RNA, 21 nt, Human
uacauguauugcacauuguaa

SEQ ID NO: 1384181 - RNA, 20 nt, Human
uacauguauugcacauugua

SEQ ID NO: 1384182 - RNA, 19 nt, Human
uacauguauugcacauugu

SEQ ID NO: 1384183 - RNA, 16 nt, Human
uacauguggcccaaca

SEQ ID NO: 1384184 - RNA, 13 nt, Human
uacauucuguuaa

SEQ ID NO: 1384185 - RNA, 16 nt, Human
aauuaagaaggcaaaa

SEQ ID NO: 1384186 - RNA, 14 nt, Human
aauuaagaaggcaa

SEQ ID NO: 1384187 - RNA, 13 nt, Human
aauuaagaaggca

SEQ ID NO: 1384188 - RNA, 23 nt, Human
aauuaagaaggcaaaaauguaaa

SEQ ID NO: 1384189 - RNA, 19 nt, Human
aauuaagaaggcaaaaaug

SEQ ID NO: 1384190 - RNA, 15 nt, Human
aauuaagagagucua

SEQ ID NO: 1384191 - RNA, 22 nt, Human
aauuaacuggguaaugaaacaa

SEQ ID NO: 1384192 - RNA, 21 nt, Human
aauuaagaaaggauaaaguug

SEQ ID NO: 1384193 - RNA, 19 nt, Human
aauuaauaucccuacaugu

SEQ ID NO: 1384194 - RNA, 21 nt, Human
aauuaauaucccuacauguau

SEQ ID NO: 1384195 - RNA, 23 nt, Human
aauuaauuccuguuugucuacau

SEQ ID NO: 1384196 - RNA, 15 nt, Human
aauuaauuguaaucu

SEQ ID NO: 1384197 - RNA, 12 nt, Human
aauuaauuguaa

SEQ ID NO: 1384198 - RNA, 17 nt, Human
aauuaauuccuucagca

SEQ ID NO: 1384199 - RNA, 16 nt, Human
uacauaauucacucug

SEQ ID NO: 1384200 - RNA, 17 nt, Human
uacauaauucacucuga

SEQ ID NO: 1384201 - RNA, 15 nt, Human
uacauaauucacucu

SEQ ID NO: 1384202 - RNA, 24 nt, Human
uacauaaugcgugcauaccacuuu

SEQ ID NO: 1384203 - RNA, 23 nt, Human
uacauaaugcgugcauaccacuu

SEQ ID NO: 1384204 - RNA, 22 nt, Human
uacaggugugugccaccacacc

SEQ ID NO: 1384205 - RNA, 17 nt, Human
uacauaugaucugucug

SEQ ID NO: 1384206 - RNA, 23 nt, Human
uacauccaaagcagacagcucca

SEQ ID NO: 1384207 - RNA, 20 nt, Human
uacauccaaagcagacagcu

SEQ ID NO: 1384208 - RNA, 19 nt, Human
uacauccaaagcagacagc

SEQ ID NO: 1384209 - RNA, 20 nt, Human
uacaucauuucuuuuuggga

SEQ ID NO: 1384210 - RNA, 14 nt, Human
uacaucauuucuuu

SEQ ID NO: 1384211 - RNA, 13 nt, Human
uacaucauuucuu

SEQ ID NO: 1384212 - RNA, 12 nt, Human
uacaucauuucu

SEQ ID NO: 1384213 - RNA, 20 nt, Human
uacaucccuuaccugggaaa

SEQ ID NO: 1384214 - RNA, 22 nt, Human
aaugugaaaaugguccaggaga

SEQ ID NO: 1384215 - RNA, 17 nt, Human
aaugugauguucuaagg

SEQ ID NO: 1384216 - RNA, 16 nt, Human
aaugugauguucuaag

SEQ ID NO: 1384217 - RNA, 15 nt, Human
aaugugauguucuaa

SEQ ID NO: 1384218 - RNA, 15 nt, Human
aaugugaaacuggau

SEQ ID NO: 1384219 - RNA, 14 nt, Human
aaugugaaacugga

SEQ ID NO: 1384220 - RNA, 17 nt, Human
aaugugcaauagaaggu

SEQ ID NO: 1384221 - RNA, 15 nt, Human
aaugugcaauagaag

SEQ ID NO: 1384222 - RNA, 20 nt, Human
aaugugauuuacgcucauug

SEQ ID NO: 1384223 - RNA, 19 nt, Human
aaugugauguucuaaggcu

SEQ ID NO: 1384224 - RNA, 21 nt, Human
aaugugccuauugcuagagcu

SEQ ID NO: 1384225 - RNA, 18 nt, Human
aaugugcuauacugcaua

SEQ ID NO: 1384226 - RNA, 12 nt, Human
aaugugccuauu

SEQ ID NO: 1384227 - RNA, 13 nt, Human
aauguauguuacc

SEQ ID NO: 1384228 - RNA, 18 nt, Human
aauguaucaaauacauuu

SEQ ID NO: 1384229 - RNA, 21 nt, Human
aauguauguuaccaaaaauaa

SEQ ID NO: 1384230 - RNA, 17 nt, Human
aauguauguuaccaaaa

SEQ ID NO: 1384231 - RNA, 22 nt, Human
aauguauuacaguggggaauga

SEQ ID NO: 1384232 - RNA, 14 nt, Human
aauguauaugcacu

SEQ ID NO: 1384233 - RNA, 13 nt, Human
aauguauaugcac

SEQ ID NO: 1384234 - RNA, 13 nt, Human
aauguauaguaaa

SEQ ID NO: 1384235 - RNA, 19 nt, Human
aauguauacuauaguacca

SEQ ID NO: 1384236 - RNA, 17 nt, Human
aaucuaagugauauaaa

SEQ ID NO: 1384237 - RNA, 15 nt, Human
aaucuaagugauaua

SEQ ID NO: 1384238 - RNA, 23 nt, Human
aaucgcuccaccuugcagcucuc

SEQ ID NO: 1384239 - RNA, 20 nt, Human
aauccugucgauuagacugg

SEQ ID NO: 1384240 - RNA, 13 nt, Human
aauccuuuacugu

SEQ ID NO: 1384241 - RNA, 21 nt, Human
aauccugucgauuagacugga

SEQ ID NO: 1384242 - RNA, 19 nt, Human
aauccugucgauuagacug

SEQ ID NO: 1384243 - RNA, 21 nt, Human
aauccuggggaacauagaacu

SEQ ID NO: 1384244 - RNA, 14 nt, Human
aauccuggggaaca

SEQ ID NO: 1384245 - RNA, 12 nt, Human
aaucccuucaua

SEQ ID NO: 1384246 - RNA, 18 nt, Human
aaucccuucauacuugaa

SEQ ID NO: 1384247 - RNA, 11 nt, Human
aaucccuucau

SEQ ID NO: 1384248 - RNA, 21 nt, Human
aaucccuuaauauccuaaaca

SEQ ID NO: 1384249 - RNA, 22 nt, Human
aaucccuuaacaguuguauuua

SEQ ID NO: 1384250 - RNA, 18 nt, Human
aaucccuuaacaguugua

SEQ ID NO: 1384251 - RNA, 12 nt, Human
aauccgcccauc

SEQ ID NO: 1384252 - RNA, 15 nt, Human
aaucauuagguguga

SEQ ID NO: 1384253 - RNA, 17 nt, Human
aaucauuaggugugacu

SEQ ID NO: 1384254 - RNA, 23 nt, Human
aaucauuaggugugacugaauuu

SEQ ID NO: 1384255 - RNA, 20 nt, Human
aaucuuaagguguagccaca

SEQ ID NO: 1384256 - RNA, 19 nt, Human
aaucuuaagguguagccac

SEQ ID NO: 1384257 - RNA, 16 nt, Human
aaucuguuuuucuaac

SEQ ID NO: 1384258 - RNA, 15 nt, Human
aaucuguuuuucuaa

SEQ ID NO: 1384259 - RNA, 20 nt, Human
aaucugugugaaacuuucau

SEQ ID NO: 1384260 - RNA, 23 nt, Human
aaucugugugaaacuuucauucc

SEQ ID NO: 1384261 - RNA, 19 nt, Human
aaucugugggucugggagu

SEQ ID NO: 1384262 - RNA, 19 nt, Human
aaucuuauaauuuaaaaua

SEQ ID NO: 1384263 - RNA, 16 nt, Human
aaucuacacacggugc

SEQ ID NO: 1384264 - RNA, 23 nt, Human
aaucuggcuucuggccaggaagc

SEQ ID NO: 1384265 - RNA, 21 nt, Human
aaucuggcuucuggccaggaa

SEQ ID NO: 1384266 - RNA, 17 nt, Human
aaucugugggucuggga

SEQ ID NO: 1384267 - RNA, 21 nt, Human
uaaguauuaugucucuucuga

SEQ ID NO: 1384268 - RNA, 17 nt, Human
uaaguauuaugucucuu

SEQ ID NO: 1384269 - RNA, 19 nt, Human
uaaguaaugauaacuggaa

SEQ ID NO: 1384270 - RNA, 14 nt, Human
uaaguaaauacaau

SEQ ID NO: 1384271 - RNA, 16 nt, Human
uaaguaaauacaauuu

SEQ ID NO: 1384272 - RNA, 16 nt, Human
uaagcuuuucuuuucu

SEQ ID NO: 1384273 - RNA, 20 nt, Human
uaagcuuuucuuuucuuugu

SEQ ID NO: 1384274 - RNA, 16 nt, Human
uaagcuuguauuccuu

SEQ ID NO: 1384275 - RNA, 15 nt, Human
uaagcuuaugcuuaa

SEQ ID NO: 1384276 - RNA, 20 nt, Human
aaucauagcugguucacacu

SEQ ID NO: 1384277 - RNA, 19 nt, Human
uaauaaacuaauaauugca

SEQ ID NO: 1384278 - RNA, 21 nt, Human
aaucauauaauaaauguacau

SEQ ID NO: 1384279 - RNA, 18 nt, Human
aaucauauaauaaaugua

SEQ ID NO: 1384280 - RNA, 15 nt, Human
aaucaugaauuaguu

SEQ ID NO: 1384281 - RNA, 12 nt, Human
aaucaugaauua

SEQ ID NO: 1384282 - RNA, 22 nt, Human
uaaguugggcuugcuauucugu

SEQ ID NO: 1384283 - RNA, 19 nt, Human
uaaguugggcuugcuauuc

SEQ ID NO: 1384284 - RNA, 18 nt, Human
uaaguugggcuugcuauu

SEQ ID NO: 1384285 - RNA, 16 nt, Human
uaaguugggcuugcua

SEQ ID NO: 1384286 - RNA, 13 nt, Human
uaaguugggcuug

SEQ ID NO: 1384287 - RNA, 22 nt, Human
uaaguugagauaguuuucaucc

SEQ ID NO: 1384288 - RNA, 21 nt, Human
uaaguugagauaguuuucauc

SEQ ID NO: 1384289 - RNA, 20 nt, Human
uaaguugagauaguuuucau

SEQ ID NO: 1384290 - RNA, 20 nt, Human
uaauaaacuaauaauugcag

SEQ ID NO: 1384291 - RNA, 12 nt, Human
uaauaaacucau

SEQ ID NO: 1384292 - RNA, 13 nt, Human
uaauaaacuaaua

SEQ ID NO: 1384293 - RNA, 15 nt, Human
uaauaaaauucaaca

SEQ ID NO: 1384294 - RNA, 12 nt, Human
uaauaaacacuc

SEQ ID NO: 1384295 - RNA, 18 nt, Human
uaauaaacacucuugaaa

SEQ ID NO: 1384296 - RNA, 21 nt, Human
uaauagcagccuuucucucuu

SEQ ID NO: 1384297 - RNA, 15 nt, Human
uaauagcagccuuuc

SEQ ID NO: 1384298 - RNA, 14 nt, Human
uaauagcagccuuu

SEQ ID NO: 1384299 - RNA, 13 nt, Human
uaauagcaaagaa

SEQ ID NO: 1384300 - RNA, 15 nt, Human
uaauagcaaagaauu

SEQ ID NO: 1384301 - RNA, 12 nt, Human
uaauagauucuc

SEQ ID NO: 1384302 - RNA, 22 nt, Human
uaauagauguuugauagauuuu

SEQ ID NO: 1384303 - RNA, 21 nt, Human
uaauagauguuugauagauuu

SEQ ID NO: 1384304 - RNA, 16 nt, Human
uaauagauguuugaua

SEQ ID NO: 1384305 - RNA, 14 nt, Human
uaauagauguuuga

SEQ ID NO: 1384306 - RNA, 18 nt, Human
uaauagacaauuuauuau

SEQ ID NO: 1384307 - RNA, 22 nt, Human
uaauagacaauuuauuauggca

SEQ ID NO: 1384308 - RNA, 19 nt, Human
aaucuuauaguucuaggca

SEQ ID NO: 1384309 - RNA, 18 nt, Human
aaucuuauaguucuaggc

SEQ ID NO: 1384310 - RNA, 15 nt, Human
aaucuuauaguucua

SEQ ID NO: 1384311 - RNA, 14 nt, Human
aaucuuauaguucu

SEQ ID NO: 1384312 - RNA, 21 nt, Human
aaucuuaguguaugauuacug

SEQ ID NO: 1384313 - RNA, 18 nt, Human
aaucuuaguguaugauua

SEQ ID NO: 1384314 - RNA, 16 nt, Human
uaauacaccacuacau

SEQ ID NO: 1384315 - RNA, 18 nt, Human
uaauacaccacuacauuc

SEQ ID NO: 1384316 - RNA, 19 nt, Human
uaauacaccacuacauucu

SEQ ID NO: 1384317 - RNA, 21 nt, Human
uaauacaccacuacauucugu

SEQ ID NO: 1384318 - RNA, 16 nt, Human
uaauagacaauuuauu

SEQ ID NO: 1384319 - RNA, 16 nt, Human
uaaugaaacaaagagu

SEQ ID NO: 1384320 - RNA, 20 nt, Human
uaaugaaguuugaauguuaa

SEQ ID NO: 1384321 - RNA, 21 nt, Human
uaaugaaguuugaauguuaaa

SEQ ID NO: 1384322 - RNA, 22 nt, Human
uaaugaaguuugaauguuaaau

SEQ ID NO: 1384323 - RNA, 21 nt, Human
uaaugaaaacagaaugucucu

SEQ ID NO: 1384324 - RNA, 13 nt, Human
uaaugaaacaaag

SEQ ID NO: 1384325 - RNA, 17 nt, Human
uaauccccaguaaaauu

SEQ ID NO: 1384326 - RNA, 18 nt, Human
uaauccccaguaaaauug

SEQ ID NO: 1384327 - RNA, 20 nt, Human
uaauccccaguaaaauugcc

SEQ ID NO: 1384328 - RNA, 21 nt, Human
uaauccccaguaaaauugcca

SEQ ID NO: 1384329 - RNA, 20 nt, Human
uaaucacucuaauuaauugu

SEQ ID NO: 1384330 - RNA, 18 nt, Human
uaaucacgcuuuccugaa

SEQ ID NO: 1384331 - RNA, 23 nt, Human
uaaucaaauuuguaggguuucua

SEQ ID NO: 1384332 - RNA, 17 nt, Human
uaaucaaaagcuauuua

SEQ ID NO: 1384333 - RNA, 21 nt, Human
uaauauuuuccuccugagugc

SEQ ID NO: 1384334 - RNA, 20 nt, Human
uaauauuuuccuccugagug

SEQ ID NO: 1384335 - RNA, 22 nt, Human
uaauauuuuccuccugagugcu

SEQ ID NO: 1384336 - RNA, 19 nt, Human
uaauccaggcagauccagg

SEQ ID NO: 1384337 - RNA, 18 nt, Human
uaauccaggcagauccag

SEQ ID NO: 1384338 - RNA, 17 nt, Human
uaauccaggcagaucca

SEQ ID NO: 1384339 - RNA, 21 nt, Human
uaaucccagcaugcugagauu

SEQ ID NO: 1384340 - RNA, 23 nt, Human
uaauccaggcagauccaggacua

SEQ ID NO: 1384341 - RNA, 22 nt, Human
uaauccaggcagauccaggacu

SEQ ID NO: 1384342 - RNA, 12 nt, Human
uaauccaguaaa

SEQ ID NO: 1384343 - RNA, 16 nt, Human
aaugaaacaaagaguu

SEQ ID NO: 1384344 - RNA, 23 nt, Human
aaugaaacaaagaguucaagaaa

SEQ ID NO: 1384345 - RNA, 16 nt, Human
aaugaaaaugucuugu

SEQ ID NO: 1384346 - RNA, 16 nt, Human
aaugacaaucaugugu

SEQ ID NO: 1384347 - RNA, 23 nt, Human
aaugaauuuagugagcauaggug

SEQ ID NO: 1384348 - RNA, 17 nt, Human
aaugaauuaaauaaacc

SEQ ID NO: 1384349 - RNA, 23 nt, Human
aaugaauguuuacacucuuugua

SEQ ID NO: 1384350 - RNA, 21 nt, Human
aaugaauggaggaacuuucca

SEQ ID NO: 1384351 - RNA, 17 nt, Human
uaauguauguuaccaaa

SEQ ID NO: 1384352 - RNA, 16 nt, Human
uaauguauguuaccaa

SEQ ID NO: 1384353 - RNA, 19 nt, Human
uaauguaucaaauacauuu

SEQ ID NO: 1384354 - RNA, 16 nt, Human
uaauguuaauauugau

SEQ ID NO: 1384355 - RNA, 17 nt, Human
uaauguuaauauugauu

SEQ ID NO: 1384356 - RNA, 13 nt, Human
uaauguuaauauu

SEQ ID NO: 1384357 - RNA, 22 nt, Human
uaauguguaguucauguaaaua

SEQ ID NO: 1384358 - RNA, 20 nt, Human
uaauguguaguucauguaaa

SEQ ID NO: 1384359 - RNA, 19 nt, Human
uaauguguaguucauguaa

SEQ ID NO: 1384360 - RNA, 18 nt, Human
uaauguguaguucaugua

SEQ ID NO: 1384361 - RNA, 17 nt, Human
uaauguguaguucaugu

SEQ ID NO: 1384362 - RNA, 13 nt, Human
uaaugucuugagc

SEQ ID NO: 1384363 - RNA, 15 nt, Human
uaaugucuugagcuc

SEQ ID NO: 1384364 - RNA, 16 nt, Human
aaucuuuauaaaugua

SEQ ID NO: 1384365 - RNA, 22 nt, Human
aaucuuuagagaaguauacaua

SEQ ID NO: 1384366 - RNA, 21 nt, Human
aaucuuuagagaaguauacau

SEQ ID NO: 1384367 - RNA, 23 nt, Human
aaucuuuaaaccaauugcugcua

SEQ ID NO: 1384368 - RNA, 15 nt, Human
aaucuuuaaaccaau

SEQ ID NO: 1384369 - RNA, 15 nt, Human
aaucuuuaauuuuac

SEQ ID NO: 1384370 - RNA, 16 nt, Human
aaucuuuaauuuuaca

SEQ ID NO: 1384371 - RNA, 23 nt, Human
uaagauuuguuuuuaaacuguac

SEQ ID NO: 1384372 - RNA, 22 nt, Human
uaagauuuguuuuuaaacugua

SEQ ID NO: 1384373 - RNA, 20 nt, Human
uaagauuuguuuuuaaacug

SEQ ID NO: 1384374 - RNA, 19 nt, Human
uaagauuuguuuuuaaacu

SEQ ID NO: 1384375 - RNA, 18 nt, Human
uaagauuuguuuuuaaac

SEQ ID NO: 1384376 - RNA, 15 nt, Human
uaagauuuguuuuua

SEQ ID NO: 1384377 - RNA, 12 nt, Human
uaagauuuguuu

SEQ ID NO: 1384378 - RNA, 16 nt, Human
uaagauuuccuucuuu

SEQ ID NO: 1384379 - RNA, 15 nt, Human
uaagauuuccuucuu

SEQ ID NO: 1384380 - RNA, 14 nt, Human
uaagauucugauuu

SEQ ID NO: 1384381 - RNA, 13 nt, Human
uaagauucugauu

SEQ ID NO: 1384382 - RNA, 17 nt, Human
uaagauucugauuuuag

SEQ ID NO: 1384383 - RNA, 21 nt, Human
uaagauucuagaucagaugcu

SEQ ID NO: 1384384 - RNA, 14 nt, Human
uaagauucuagauc

SEQ ID NO: 1384385 - RNA, 13 nt, Human
uaagauucuagau

SEQ ID NO: 1384386 - RNA, 12 nt, Human
uaagauucuaga

SEQ ID NO: 1384387 - RNA, 11 nt, Human
uaagauucuag

SEQ ID NO: 1384388 - RNA, 15 nt, Human
uaagauucuaaugau

SEQ ID NO: 1384389 - RNA, 14 nt, Human
uaagauucuaauga

SEQ ID NO: 1384390 - RNA, 13 nt, Human
uaagauucuaaug

SEQ ID NO: 1384391 - RNA, 16 nt, Human
uaagcaacauggcuuu

SEQ ID NO: 1384392 - RNA, 14 nt, Human
uaagcaacauggcu

SEQ ID NO: 1384393 - RNA, 23 nt, Human
uaagcaaaaacaaaaagaaaaga

SEQ ID NO: 1384394 - RNA, 20 nt, Human
uaagcagaccacugauaaaa

SEQ ID NO: 1384395 - RNA, 17 nt, Human
uaagcagaccacugaua

SEQ ID NO: 1384396 - RNA, 22 nt, Human
uaagcagaaagugccuuucagg

SEQ ID NO: 1384397 - RNA, 21 nt, Human
uaagcagaaagugccuuucag

SEQ ID NO: 1384398 - RNA, 19 nt, Human
uaagcagaaagugccuuuc

SEQ ID NO: 1384399 - RNA, 16 nt, Human
uaagcagaaagugccu

SEQ ID NO: 1384400 - RNA, 15 nt, Human
uaagcagaaagugcc

SEQ ID NO: 1384401 - RNA, 13 nt, Human
uaagcagaaagug

SEQ ID NO: 1384402 - RNA, 22 nt, Human
uaagcaccuguaaugugcgagg

SEQ ID NO: 1384403 - RNA, 17 nt, Human
uaagcaacauggcuuug

SEQ ID NO: 1384404 - RNA, 14 nt, Human
uaagcaagaaggca

SEQ ID NO: 1384405 - RNA, 16 nt, Human
uaagcuggagugcagu

SEQ ID NO: 1384406 - RNA, 15 nt, Human
aauauuuuaaagaau

SEQ ID NO: 1384407 - RNA, 13 nt, Human
aauauuuuaaaga

SEQ ID NO: 1384408 - RNA, 16 nt, Human
aauauuuuaaaaucag

SEQ ID NO: 1384409 - RNA, 11 nt, Human
aauauuuuaaa

SEQ ID NO: 1384410 - RNA, 17 nt, Human
aauauuugugacaaaaa

SEQ ID NO: 1384411 - RNA, 14 nt, Human
aauauuuguacaua

SEQ ID NO: 1384412 - RNA, 12 nt, Human
aauauuuguaca

SEQ ID NO: 1384413 - RNA, 20 nt, Human
aauauuugaaucuugucuca

SEQ ID NO: 1384414 - RNA, 14 nt, Human
aauauuuuuagaua

SEQ ID NO: 1384415 - RNA, 21 nt, Human
aaucaggguuaguauugucca

SEQ ID NO: 1384416 - RNA, 16 nt, Human
aaucaggguuaguauu

SEQ ID NO: 1384417 - RNA, 12 nt, Human
uaagauucuaau

SEQ ID NO: 1384418 - RNA, 17 nt, Human
uaagauucuaacggucu

SEQ ID NO: 1384419 - RNA, 13 nt, Human
uaagauucuaacg

SEQ ID NO: 1384420 - RNA, 12 nt, Human
uaagauucuaac

SEQ ID NO: 1384421 - RNA, 17 nt, Human
uaagauucuaaaggucc

SEQ ID NO: 1384422 - RNA, 16 nt, Human
uaagauucuaaagguc

SEQ ID NO: 1384423 - RNA, 14 nt, Human
uaagauucuaaagg

SEQ ID NO: 1384424 - RNA, 13 nt, Human
uaagauucuaaag

SEQ ID NO: 1384425 - RNA, 12 nt, Human
uaagauucuaaa

SEQ ID NO: 1384426 - RNA, 11 nt, Human
uaagauucuaa

SEQ ID NO: 1384427 - RNA, 10 nt, Human
uaagauucua

SEQ ID NO: 1384428 - RNA, 21 nt, Human
uaagaugugauauucuaagac

SEQ ID NO: 1384429 - RNA, 20 nt, Human
uaagaugugauauucuaaga

SEQ ID NO: 1384430 - RNA, 19 nt, Human
uaagaugugauauucuaag

SEQ ID NO: 1384431 - RNA, 18 nt, Human
uaagaugugauauucuaa

SEQ ID NO: 1384432 - RNA, 14 nt, Human
uaagaugugauauu

SEQ ID NO: 1384433 - RNA, 23 nt, Human
uaagaugugauauucuaagacuu

SEQ ID NO: 1384434 - RNA, 22 nt, Human
uaagaugugauauucuaagacu

SEQ ID NO: 1384435 - RNA, 22 nt, Human
aaucaggguuaguauuguccag

SEQ ID NO: 1384436 - RNA, 15 nt, Human
uaagagaaguuguaa

SEQ ID NO: 1384437 - RNA, 22 nt, Human
aauaugcacacauuuuuuaaau

SEQ ID NO: 1384438 - RNA, 16 nt, Human
aauaugcacacauuuu

SEQ ID NO: 1384439 - RNA, 17 nt, Human
aauaugcacacauuuuu

SEQ ID NO: 1384440 - RNA, 17 nt, Human
uaagacuugacagugga

SEQ ID NO: 1384441 - RNA, 14 nt, Human
uaagacuugacagu

SEQ ID NO: 1384442 - RNA, 20 nt, Human
uaagacuuacucuaagaucu

SEQ ID NO: 1384443 - RNA, 19 nt, Human
uaagacaugauuuccuuga

SEQ ID NO: 1384444 - RNA, 17 nt, Human
uaagacaugauuuccuu

SEQ ID NO: 1384445 - RNA, 20 nt, Human
uaagagaaguagaaaucaua

SEQ ID NO: 1384446 - RNA, 18 nt, Human
uaagagaaguagaaauca

SEQ ID NO: 1384447 - RNA, 14 nt, Human
uaagagaaguagaa

SEQ ID NO: 1384448 - RNA, 12 nt, Human
uaagagaaguag

SEQ ID NO: 1384449 - RNA, 17 nt, Human
aauauucccuagaaacu

SEQ ID NO: 1384450 - RNA, 15 nt, Human
aauauucccuagaaa

SEQ ID NO: 1384451 - RNA, 18 nt, Human
aauauucauaguuuaauu

SEQ ID NO: 1384452 - RNA, 12 nt, Human
aauauuccagag

SEQ ID NO: 1384453 - RNA, 17 nt, Human
aauaugccuuuuugaag

SEQ ID NO: 1384454 - RNA, 21 nt, Human
aauaugccugcuauuugaagu

SEQ ID NO: 1384455 - RNA, 24 nt, Human
aauaugccccauucaacaucuagu

SEQ ID NO: 1384456 - RNA, 21 nt, Human
aauaugccccauucaacaucu

SEQ ID NO: 1384457 - RNA, 12 nt, Human
aauauuuaagac

SEQ ID NO: 1384458 - RNA, 9 nt, Human
aauauugug

SEQ ID NO: 1384459 - RNA, 13 nt, Human
aauauuguccauu

SEQ ID NO: 1384460 - RNA, 17 nt, Human
aauauugacuuguauau

SEQ ID NO: 1384461 - RNA, 14 nt, Human
aauauugacuugua

SEQ ID NO: 1384462 - RNA, 14 nt, Human
aauauuucagauaa

SEQ ID NO: 1384463 - RNA, 19 nt, Human
aauauuuauuuuaauaaug

SEQ ID NO: 1384464 - RNA, 18 nt, Human
aauauuuauuuuaauaau

SEQ ID NO: 1384465 - RNA, 12 nt, Human
aauauuuagugu

SEQ ID NO: 1384466 - RNA, 13 nt, Human
aauaguuccugcu

SEQ ID NO: 1384467 - RNA, 11 nt, Human
aauaguuccug

SEQ ID NO: 1384468 - RNA, 14 nt, Human
aauauauuuuaaga

SEQ ID NO: 1384469 - RNA, 15 nt, Human
aauauauuuuaagac

SEQ ID NO: 1384470 - RNA, 13 nt, Human
uaaaauuuguucu

SEQ ID NO: 1384471 - RNA, 23 nt, Human
aauagugucauccucacagugaa

SEQ ID NO: 1384472 - RNA, 22 nt, Human
aauaguggugugauuuggggau

SEQ ID NO: 1384473 - RNA, 19 nt, Human
aauagucaaauugugugaa

SEQ ID NO: 1384474 - RNA, 16 nt, Human
uaaaauuuauauugua

SEQ ID NO: 1384475 - RNA, 17 nt, Human
uaaaauuuauauuguaa

SEQ ID NO: 1384476 - RNA, 14 nt, Human
uaaaauuuauauug

SEQ ID NO: 1384477 - RNA, 16 nt, Human
aauagucaaauugugu

SEQ ID NO: 1384478 - RNA, 14 nt, Human
uaacaugaauauuu

SEQ ID NO: 1384479 - RNA, 13 nt, Human
uaacaucugagaa

SEQ ID NO: 1384480 - RNA, 20 nt, Human
uaacaucuaaaaauagacuu

SEQ ID NO: 1384481 - RNA, 14 nt, Human
uaacaucuaaaaau

SEQ ID NO: 1384482 - RNA, 23 nt, Human
uaacauauaauguuguuauuuaa

SEQ ID NO: 1384483 - RNA, 14 nt, Human
uaacauauaauguu

SEQ ID NO: 1384484 - RNA, 23 nt, Human
uaacaguuguauuuaacagaaau

SEQ ID NO: 1384485 - RNA, 19 nt, Human
uaacaguuguauuuaacag

SEQ ID NO: 1384486 - RNA, 18 nt, Human
uaacaguuguauuuaaca

SEQ ID NO: 1384487 - RNA, 14 nt, Human
uaacaguguuuaaa

SEQ ID NO: 1384488 - RNA, 17 nt, Human
uaacaguggacaaaguu

SEQ ID NO: 1384489 - RNA, 22 nt, Human
aauaucacuugucaauaaaauc

SEQ ID NO: 1384490 - RNA, 13 nt, Human
aauaucagacuuu

SEQ ID NO: 1384491 - RNA, 18 nt, Human
aauauauuuuaagacgaa

SEQ ID NO: 1384492 - RNA, 21 nt, Human
uaagaaguuuuaaaaagccag

SEQ ID NO: 1384493 - RNA, 15 nt, Human
uaagaaguuuuaaaa

SEQ ID NO: 1384494 - RNA, 13 nt, Human
uaacuuucugggu

SEQ ID NO: 1384495 - RNA, 23 nt, Human
uaagacacugaaaaaucuaagug

SEQ ID NO: 1384496 - RNA, 20 nt, Human
uaagacacugaaaaaucuaa

SEQ ID NO: 1384497 - RNA, 19 nt, Human
uaagaauaucuguaauggu

SEQ ID NO: 1384498 - RNA, 16 nt, Human
uaagacaugauuuccu

SEQ ID NO: 1384499 - RNA, 22 nt, Human
uaacuugauccauuucuaauua

SEQ ID NO: 1384500 - RNA, 20 nt, Human
uaacuugauccauuucuaau

SEQ ID NO: 1384501 - RNA, 19 nt, Human
uaacuugauccauuucuaa

SEQ ID NO: 1384502 - RNA, 20 nt, Human
uaacuucuugcuucuuucua

SEQ ID NO: 1384503 - RNA, 19 nt, Human
uaacuucuugcuucuuucu

SEQ ID NO: 1384504 - RNA, 15 nt, Human
uaacuucuugcuucu

SEQ ID NO: 1384505 - RNA, 13 nt, Human
uaacuucuugcuu

SEQ ID NO: 1384506 - RNA, 12 nt, Human
uaacuucuugcu

SEQ ID NO: 1384507 - RNA, 23 nt, Human
uaacuucuuauggaauugauuug

SEQ ID NO: 1384508 - RNA, 22 nt, Human
uaacuagacaccaaaguucuaa

SEQ ID NO: 1384509 - RNA, 21 nt, Human
uaacuagacaccaaaguucua

SEQ ID NO: 1384510 - RNA, 20 nt, Human
uaacuagacaccaaaguucu

SEQ ID NO: 1384511 - RNA, 18 nt, Human
uaacuagacaccaaaguu

SEQ ID NO: 1384512 - RNA, 17 nt, Human
uaacuagacaccaaagu

SEQ ID NO: 1384513 - RNA, 17 nt, Human
uaacuuaaauaguauuu

SEQ ID NO: 1384514 - RNA, 16 nt, Human
uaacuuaaauaguauu

SEQ ID NO: 1384515 - RNA, 14 nt, Human
uaacuuaaauagua

SEQ ID NO: 1384516 - RNA, 21 nt, Human
uaacuucacauauugauuucc

SEQ ID NO: 1384517 - RNA, 14 nt, Human
uaacuucaccauau

SEQ ID NO: 1384518 - RNA, 23 nt, Human
uaacuacuuuauaacuaacaugu

SEQ ID NO: 1384519 - RNA, 17 nt, Human
uaacuacuuuauaacua

SEQ ID NO: 1384520 - RNA, 16 nt, Human
uaacuacuuuauaacu

SEQ ID NO: 1384521 - RNA, 14 nt, Human
uaaccuuuacauga

SEQ ID NO: 1384522 - RNA, 21 nt, Human
uaaccuugccugguacaguau

SEQ ID NO: 1384523 - RNA, 19 nt, Human
uaaccuugccugguacagu

SEQ ID NO: 1384524 - RNA, 16 nt, Human
uaaccuugccugguac

SEQ ID NO: 1384525 - RNA, 21 nt, Human
uaaccuuaccagauuuuuaca

SEQ ID NO: 1384526 - RNA, 16 nt, Human
uaaccuuaauuuauua

SEQ ID NO: 1384527 - RNA, 18 nt, Human
uaacauggugugcuucuu

SEQ ID NO: 1384528 - RNA, 20 nt, Human
uaacgauaaaagacagugaa

SEQ ID NO: 1384529 - RNA, 13 nt, Human
ucauaguuuaauu

SEQ ID NO: 1384530 - RNA, 18 nt, Human
ucauaguucagaauuuag

SEQ ID NO: 1384531 - RNA, 16 nt, Human
ucauaguucagaauuu

SEQ ID NO: 1384532 - RNA, 14 nt, Human
ucauaguucagaau

SEQ ID NO: 1384533 - RNA, 16 nt, Human
ucauauaaaguaucau

SEQ ID NO: 1384534 - RNA, 13 nt, Human
ucauauaaaguau

SEQ ID NO: 1384535 - RNA, 18 nt, Human
ucauauaaaguaucauca

SEQ ID NO: 1384536 - RNA, 13 nt, Human
ucauaguucagaa

SEQ ID NO: 1384537 - RNA, 17 nt, Human
ucauauauaucacccag

SEQ ID NO: 1384538 - RNA, 22 nt, Human
ucauauauaucacccagacaua

SEQ ID NO: 1384539 - RNA, 14 nt, Human
ucauauauauacau

SEQ ID NO: 1384540 - RNA, 20 nt, Human
ucauauaguuagcuaauaaa

SEQ ID NO: 1384541 - RNA, 16 nt, Human
ucauauaauuauaugu

SEQ ID NO: 1384542 - RNA, 16 nt, Human
ucauauaauaaaugua

SEQ ID NO: 1384543 - RNA, 15 nt, Human
ucauauaauaaaugu

SEQ ID NO: 1384544 - RNA, 22 nt, Human
ucauaacggaucagaaauacag

SEQ ID NO: 1384545 - RNA, 23 nt, Human
ucauaacggaucagaaauacaga

SEQ ID NO: 1384546 - RNA, 14 nt, Human
ucauaacggaucag

SEQ ID NO: 1384547 - RNA, 16 nt, Human
ucauaacggaucagaa

SEQ ID NO: 1384548 - RNA, 18 nt, Human
ucauaacggaucagaaau

SEQ ID NO: 1384549 - RNA, 19 nt, Human
ucauaacggaucagaaaua

SEQ ID NO: 1384550 - RNA, 21 nt, Human
ucauaacggaucagaaauaca

SEQ ID NO: 1384551 - RNA, 14 nt, Human
ucauaucauccaca

SEQ ID NO: 1384552 - RNA, 16 nt, Human
ucauaucauccacaca

SEQ ID NO: 1384553 - RNA, 13 nt, Human
ucauaucauccac

SEQ ID NO: 1384554 - RNA, 22 nt, Human
ucauauguaccauguacaugaa

SEQ ID NO: 1384555 - RNA, 21 nt, Human
ucauauguaccauguacauga

SEQ ID NO: 1384556 - RNA, 21 nt, Human
ucauauugugauucugccuuu

SEQ ID NO: 1384557 - RNA, 20 nt, Human
ucauauuuuaaacagaggau

SEQ ID NO: 1384558 - RNA, 13 nt, Human
accgaggcaggga

SEQ ID NO: 1384559 - RNA, 15 nt, Human
ucauauuuucaugcu

SEQ ID NO: 1384560 - RNA, 15 nt, Human
accgaggagggagag

SEQ ID NO: 1384561 - RNA, 17 nt, Human
accgaggagggagaguc

SEQ ID NO: 1384562 - RNA, 21 nt, Human
accgaggagggagagucuccc

SEQ ID NO: 1384563 - RNA, 23 nt, Human
accgaggagggagagucucccag

SEQ ID NO: 1384564 - RNA, 12 nt, Human
accgcagaagga

SEQ ID NO: 1384565 - RNA, 13 nt, Human
accgcagaaggaa

SEQ ID NO: 1384566 - RNA, 14 nt, Human
accgcagaaggaag

SEQ ID NO: 1384567 - RNA, 17 nt, Human
ucaguaugaauuauuca

SEQ ID NO: 1384568 - RNA, 13 nt, Human
ucaguaugaauua

SEQ ID NO: 1384569 - RNA, 13 nt, Human
ucaguuuucauuu

SEQ ID NO: 1384570 - RNA, 12 nt, Human
ucaguuuucauu

SEQ ID NO: 1384571 - RNA, 17 nt, Human
ucaguuuuugugaaaag

SEQ ID NO: 1384572 - RNA, 19 nt, Human
ucaguuuuaucauuuucaa

SEQ ID NO: 1384573 - RNA, 17 nt, Human
ucaguuuuaucauuuuc

SEQ ID NO: 1384574 - RNA, 16 nt, Human
ucaguuuuaucauuuu

SEQ ID NO: 1384575 - RNA, 14 nt, Human
ucaguggggcaguc

SEQ ID NO: 1384576 - RNA, 15 nt, Human
ucaguuuuugugaaa

SEQ ID NO: 1384577 - RNA, 23 nt, Human
ucaucccaaaggacagccgccug

SEQ ID NO: 1384578 - RNA, 17 nt, Human
ucauccaucaucaugug

SEQ ID NO: 1384579 - RNA, 16 nt, Human
ucauccaucaucaugu

SEQ ID NO: 1384580 - RNA, 15 nt, Human
ucauccaucaucaug

SEQ ID NO: 1384581 - RNA, 14 nt, Human
ucauccaucaucau

SEQ ID NO: 1384582 - RNA, 12 nt, Human
ucauccaucauc

SEQ ID NO: 1384583 - RNA, 11 nt, Human
ucauccaucau

SEQ ID NO: 1384584 - RNA, 21 nt, Human
ucaucgaaucuacuaauucca

SEQ ID NO: 1384585 - RNA, 14 nt, Human
ucaucgaaucuacu

SEQ ID NO: 1384586 - RNA, 12 nt, Human
ucaucccacucc

SEQ ID NO: 1384587 - RNA, 15 nt, Human
ucauccauaacugaa

SEQ ID NO: 1384588 - RNA, 13 nt, Human
ucaucuaggauuu

SEQ ID NO: 1384589 - RNA, 22 nt, Human
ucaugaaccucaagcugcaucu

SEQ ID NO: 1384590 - RNA, 11 nt, Human
ucaugaaccuc

SEQ ID NO: 1384591 - RNA, 17 nt, Human
ucaugaaagauucaaug

SEQ ID NO: 1384592 - RNA, 16 nt, Human
ucaugaaagauucaau

SEQ ID NO: 1384593 - RNA, 20 nt, Human
ucaucuaccuagauuuaaua

SEQ ID NO: 1384594 - RNA, 22 nt, Human
ucaucuaccauuuucugguucu

SEQ ID NO: 1384595 - RNA, 20 nt, Human
ucaucuaccauuuucugguu

SEQ ID NO: 1384596 - RNA, 14 nt, Human
ucaucuaccuagau

SEQ ID NO: 1384597 - RNA, 22 nt, Human
ucaugauuuuaaguuucucugc

SEQ ID NO: 1384598 - RNA, 23 nt, Human
ucaugauuucauuucaacuguuu

SEQ ID NO: 1384599 - RNA, 17 nt, Human
ucaugauuucauuucaa

SEQ ID NO: 1384600 - RNA, 13 nt, Human
ucaugcaaacucu

SEQ ID NO: 1384601 - RNA, 14 nt, Human
ucaugcaaacuuua

SEQ ID NO: 1384602 - RNA, 14 nt, Human
ucauguguauaaaa

SEQ ID NO: 1384603 - RNA, 10 nt, Human
ucauguguau

SEQ ID NO: 1384604 - RNA, 21 nt, Human
ucauguggcuggaagauccug

SEQ ID NO: 1384605 - RNA, 16 nt, Human
ucauguggcuggaaga

SEQ ID NO: 1384606 - RNA, 13 nt, Human
ucauguggcugga

SEQ ID NO: 1384607 - RNA, 19 nt, Human
ucaugugacucuuuccaac

SEQ ID NO: 1384608 - RNA, 18 nt, Human
ucaugugacucuuuccaa

SEQ ID NO: 1384609 - RNA, 14 nt, Human
ucaugugucccaga

SEQ ID NO: 1384610 - RNA, 13 nt, Human
ucaugugucccag

SEQ ID NO: 1384611 - RNA, 15 nt, Human
ucauguguauaaaaa

SEQ ID NO: 1384612 - RNA, 17 nt, Human
ucaugugacucuuucca

SEQ ID NO: 1384613 - RNA, 14 nt, Human
ucaugugacucuuu

SEQ ID NO: 1384614 - RNA, 17 nt, Human
ucaugugaccacucugu

SEQ ID NO: 1384615 - RNA, 14 nt, Human
ucaugcauggaaau

SEQ ID NO: 1384616 - RNA, 17 nt, Human
ucaugugaaaucauuca

SEQ ID NO: 1384617 - RNA, 16 nt, Human
ucaugugaaaucauuc

SEQ ID NO: 1384618 - RNA, 14 nt, Human
ucaugcagcugugg

SEQ ID NO: 1384619 - RNA, 12 nt, Human
ucaugcagcugu

SEQ ID NO: 1384620 - RNA, 17 nt, Human
ucaugcacaguauuugu

SEQ ID NO: 1384621 - RNA, 20 nt, Human
ucaugcacaguauuuguaau

SEQ ID NO: 1384622 - RNA, 14 nt, Human
ucaugcaaacucuu

SEQ ID NO: 1384623 - RNA, 23 nt, Human
ucaugcaaacuuuauuuuguguu

SEQ ID NO: 1384624 - RNA, 18 nt, Human
accuccagcuuuccugua

SEQ ID NO: 1384625 - RNA, 16 nt, Human
accuccagcuuuccug

SEQ ID NO: 1384626 - RNA, 13 nt, Human
accuccagcuguu

SEQ ID NO: 1384627 - RNA, 17 nt, Human
accuccaccuccugggu

SEQ ID NO: 1384628 - RNA, 15 nt, Human
accuccaccuccugg

SEQ ID NO: 1384629 - RNA, 16 nt, Human
accuccacauccucca

SEQ ID NO: 1384630 - RNA, 14 nt, Human
accuccacauccuc

SEQ ID NO: 1384631 - RNA, 17 nt, Human
accuccagcuuuccugu

SEQ ID NO: 1384632 - RNA, 23 nt, Human
accuccccagcauuccagccccu

SEQ ID NO: 1384633 - RNA, 21 nt, Human
accuccccagcauuccagccc

SEQ ID NO: 1384634 - RNA, 15 nt, Human
accuccccagcauuc

SEQ ID NO: 1384635 - RNA, 13 nt, Human
accuccugagaaa

SEQ ID NO: 1384636 - RNA, 22 nt, Human
accuccugacacccuucuccca

SEQ ID NO: 1384637 - RNA, 21 nt, Human
accuccugacacccuucuccc

SEQ ID NO: 1384638 - RNA, 19 nt, Human
accuccugacacccuucuc

SEQ ID NO: 1384639 - RNA, 18 nt, Human
accuccugacacccuucu

SEQ ID NO: 1384640 - RNA, 17 nt, Human
accuccugacacccuuc

SEQ ID NO: 1384641 - RNA, 22 nt, Human
accuccccuugggcccacaccu

SEQ ID NO: 1384642 - RNA, 14 nt, Human
accuccccuugggc

SEQ ID NO: 1384643 - RNA, 13 nt, Human
accuccccuuggg

SEQ ID NO: 1384644 - RNA, 12 nt, Human
accuccccuugg

SEQ ID NO: 1384645 - RNA, 17 nt, Human
accucccuauacugcuu

SEQ ID NO: 1384646 - RNA, 17 nt, Human
accucccucaaccucau

SEQ ID NO: 1384647 - RNA, 21 nt, Human
accuacuuugacuuuuugcau

SEQ ID NO: 1384648 - RNA, 20 nt, Human
accuacuuugacuuuuugca

SEQ ID NO: 1384649 - RNA, 23 nt, Human
accuacuguucuaaagcucugac

SEQ ID NO: 1384650 - RNA, 21 nt, Human
accuacuguucuaaagcucug

SEQ ID NO: 1384651 - RNA, 20 nt, Human
accuacuguucuaaagcucu

SEQ ID NO: 1384652 - RNA, 18 nt, Human
accuacuguucuaaagcu

SEQ ID NO: 1384653 - RNA, 17 nt, Human
accuacuguucuaaagc

SEQ ID NO: 1384654 - RNA, 16 nt, Human
accuacuguucuaaag

SEQ ID NO: 1384655 - RNA, 15 nt, Human
accuacuguucuaaa

SEQ ID NO: 1384656 - RNA, 23 nt, Human
accuacugcccaggcacugcaaa

SEQ ID NO: 1384657 - RNA, 19 nt, Human
accuacugcccaggcacug

SEQ ID NO: 1384658 - RNA, 22 nt, Human
accuaggaagccucagauuccu

SEQ ID NO: 1384659 - RNA, 17 nt, Human
accuaggaagccucaga

SEQ ID NO: 1384660 - RNA, 17 nt, Human
accuaggcuaggguggg

SEQ ID NO: 1384661 - RNA, 12 nt, Human
accuaggcuagg

SEQ ID NO: 1384662 - RNA, 18 nt, Human
accuacucuggcuagaag

SEQ ID NO: 1384663 - RNA, 17 nt, Human
accuacucacacaggca

SEQ ID NO: 1384664 - RNA, 16 nt, Human
accuacucacacaggc

SEQ ID NO: 1384665 - RNA, 14 nt, Human
accuacucacacag

SEQ ID NO: 1384666 - RNA, 24 nt, Human
accuaccuguugagcaucacagaa

SEQ ID NO: 1384667 - RNA, 17 nt, Human
accuaccuguugagcau

SEQ ID NO: 1384668 - RNA, 15 nt, Human
accuaccuguugagc

SEQ ID NO: 1384669 - RNA, 15 nt, Human
accgcagaaggaagg

SEQ ID NO: 1384670 - RNA, 18 nt, Human
accuaggaagccucagau

SEQ ID NO: 1384671 - RNA, 16 nt, Human
accuagggugauauua

SEQ ID NO: 1384672 - RNA, 22 nt, Human
accuaugucauuucauuuccua

SEQ ID NO: 1384673 - RNA, 16 nt, Human
accuauuaucccagcu

SEQ ID NO: 1384674 - RNA, 16 nt, Human
accuauuuccagaaau

SEQ ID NO: 1384675 - RNA, 17 nt, Human
accuauuuccagaaaua

SEQ ID NO: 1384676 - RNA, 18 nt, Human
accuauuucuuaaacacu

SEQ ID NO: 1384677 - RNA, 23 nt, Human
accuauuucuuaaacacuugcaa

SEQ ID NO: 1384678 - RNA, 12 nt, Human
accuauuuccau

SEQ ID NO: 1384679 - RNA, 19 nt, Human
accuauuuccagaaauaca

SEQ ID NO: 1384680 - RNA, 16 nt, Human
ucaggggcccuggagc

SEQ ID NO: 1384681 - RNA, 18 nt, Human
ucaggggcccuggagcag

SEQ ID NO: 1384682 - RNA, 20 nt, Human
ucaggggcccuggagcagcc

SEQ ID NO: 1384683 - RNA, 23 nt, Human
ucagggcuccuugugggccuggg

SEQ ID NO: 1384684 - RNA, 21 nt, Human
ucagcuuucuuuaaaguucuu

SEQ ID NO: 1384685 - RNA, 14 nt, Human
acccggcugcagag

SEQ ID NO: 1384686 - RNA, 13 nt, Human
acccggcuaauuu

SEQ ID NO: 1384687 - RNA, 22 nt, Human
acccggcacccccugcagcuug

SEQ ID NO: 1384688 - RNA, 20 nt, Human
acccggcacccccugcagcu

SEQ ID NO: 1384689 - RNA, 19 nt, Human
acccggcacccccugcagc

SEQ ID NO: 1384690 - RNA, 18 nt, Human
acccggcacccccugcag

SEQ ID NO: 1384691 - RNA, 16 nt, Human
acccggcacccccugc

SEQ ID NO: 1384692 - RNA, 16 nt, Human
ucagguaauacaaacu

SEQ ID NO: 1384693 - RNA, 15 nt, Human
ucagguaauacaaac

SEQ ID NO: 1384694 - RNA, 17 nt, Human
acccuuuuucuccagcu

SEQ ID NO: 1384695 - RNA, 19 nt, Human
acccuuuuggguuucugcc

SEQ ID NO: 1384696 - RNA, 21 nt, Human
acccuuuuggguuucugcccu

SEQ ID NO: 1384697 - RNA, 17 nt, Human
acccuuucuucagcucu

SEQ ID NO: 1384698 - RNA, 11 nt, Human
acccuugacac

SEQ ID NO: 1384699 - RNA, 21 nt, Human
acccugcccuuguuuggggca

SEQ ID NO: 1384700 - RNA, 12 nt, Human
acccuucuuuuc

SEQ ID NO: 1384701 - RNA, 17 nt, Human
acccugaaggggccaug

SEQ ID NO: 1384702 - RNA, 12 nt, Human
acccugaagggg

SEQ ID NO: 1384703 - RNA, 18 nt, Human
acccugaaggggccauga

SEQ ID NO: 1384704 - RNA, 14 nt, Human
acccucugaaauac

SEQ ID NO: 1384705 - RNA, 16 nt, Human
acccucugaaauacau

SEQ ID NO: 1384706 - RNA, 16 nt, Human
acccucucagcuccag

SEQ ID NO: 1384707 - RNA, 15 nt, Human
acccucucagcucca

SEQ ID NO: 1384708 - RNA, 20 nt, Human
acccucggggauguguccug

SEQ ID NO: 1384709 - RNA, 19 nt, Human
acccucggggauguguccu

SEQ ID NO: 1384710 - RNA, 17 nt, Human
acccucggggauguguc

SEQ ID NO: 1384711 - RNA, 15 nt, Human
acccucguggacacc

SEQ ID NO: 1384712 - RNA, 17 nt, Human
acccucguggacaccug

SEQ ID NO: 1384713 - RNA, 18 nt, Human
acccucguggacaccugc

SEQ ID NO: 1384714 - RNA, 19 nt, Human
acccucguggacaccugcc

SEQ ID NO: 1384715 - RNA, 23 nt, Human
acccucggggauguguccugaca

SEQ ID NO: 1384716 - RNA, 20 nt, Human
acccucguggacaccugccc

SEQ ID NO: 1384717 - RNA, 22 nt, Human
acccucguggacaccugcccug

SEQ ID NO: 1384718 - RNA, 23 nt, Human
acccucguggacaccugcccugc

SEQ ID NO: 1384719 - RNA, 15 nt, Human
ucagccuuagcucuc

SEQ ID NO: 1384720 - RNA, 17 nt, Human
ucagccuuaagaaccau

SEQ ID NO: 1384721 - RNA, 15 nt, Human
ucagcuaagcucacg

SEQ ID NO: 1384722 - RNA, 17 nt, Human
ucagcguggccuuguuc

SEQ ID NO: 1384723 - RNA, 14 nt, Human
ucagcguggccuug

SEQ ID NO: 1384724 - RNA, 13 nt, Human
ucagcguggccuu

SEQ ID NO: 1384725 - RNA, 23 nt, Human
ucagcguggagggguaggggcug

SEQ ID NO: 1384726 - RNA, 14 nt, Human
ucagcuaagcucac

SEQ ID NO: 1384727 - RNA, 12 nt, Human
ucagcuccagcu

SEQ ID NO: 1384728 - RNA, 22 nt, Human
accccugcuuugggcuugggcc

SEQ ID NO: 1384729 - RNA, 22 nt, Human
accccugcauuggaacuggagg

SEQ ID NO: 1384730 - RNA, 23 nt, Human
accccugcauuggaacuggaggc

SEQ ID NO: 1384731 - RNA, 10 nt, Human
accccugcau

SEQ ID NO: 1384732 - RNA, 15 nt, Human
acccccucucccugc

SEQ ID NO: 1384733 - RNA, 17 nt, Human
accccauccaguucaug

SEQ ID NO: 1384734 - RNA, 23 nt, Human
accccaucaccuacucacacagg

SEQ ID NO: 1384735 - RNA, 17 nt, Human
accccaucccuccccag

SEQ ID NO: 1384736 - RNA, 16 nt, Human
accccaucugcauucc

SEQ ID NO: 1384737 - RNA, 17 nt, Human
accccaucugcauuccc

SEQ ID NO: 1384738 - RNA, 19 nt, Human
accccagacuagauguagu

SEQ ID NO: 1384739 - RNA, 18 nt, Human
accccacccacuucugca

SEQ ID NO: 1384740 - RNA, 13 nt, Human
ucagccagccucg

SEQ ID NO: 1384741 - RNA, 21 nt, Human
ucagccagccucgcccauccc

SEQ ID NO: 1384742 - RNA, 12 nt, Human
ucagccagccuc

SEQ ID NO: 1384743 - RNA, 12 nt, Human
ucagccaggagc

SEQ ID NO: 1384744 - RNA, 13 nt, Human
ucagccaggagcu

SEQ ID NO: 1384745 - RNA, 14 nt, Human
ucagcccucagaau

SEQ ID NO: 1384746 - RNA, 22 nt, Human
accaguguuagggaagggccug

SEQ ID NO: 1384747 - RNA, 23 nt, Human
accaguguguggcuuucagagcc

SEQ ID NO: 1384748 - RNA, 18 nt, Human
accaguguuguggauuua

SEQ ID NO: 1384749 - RNA, 18 nt, Human
accauaauguuacauuau

SEQ ID NO: 1384750 - RNA, 15 nt, Human
accauaauguuacau

SEQ ID NO: 1384751 - RNA, 13 nt, Human
accauaauguuac

SEQ ID NO: 1384752 - RNA, 19 nt, Human
ucagauuucugguuguuau

SEQ ID NO: 1384753 - RNA, 16 nt, Human
ucagauuucugaggaa

SEQ ID NO: 1384754 - RNA, 23 nt, Human
ucagccagcacuuguccagcuga

SEQ ID NO: 1384755 - RNA, 14 nt, Human
ucagccagcacuug

SEQ ID NO: 1384756 - RNA, 12 nt, Human
ucagccagcacu

SEQ ID NO: 1384757 - RNA, 16 nt, Human
ucagccacccugaguu

SEQ ID NO: 1384758 - RNA, 17 nt, Human
ucagccacccugaguug

SEQ ID NO: 1384759 - RNA, 18 nt, Human
ucagccaauuauguuaaa

SEQ ID NO: 1384760 - RNA, 13 nt, Human
ucagccaauuaug

SEQ ID NO: 1384761 - RNA, 15 nt, Human
ucagccaauuauguu

SEQ ID NO: 1384762 - RNA, 17 nt, Human
ucagccaauuauguuaa

SEQ ID NO: 1384763 - RNA, 14 nt, Human
ucagauuuuuuccu

SEQ ID NO: 1384764 - RNA, 23 nt, Human
accaaagaugaaugaagcaaaug

SEQ ID NO: 1384765 - RNA, 18 nt, Human
accaaagaugaaugaagc

SEQ ID NO: 1384766 - RNA, 15 nt, Human
accaaagaagaaagu

SEQ ID NO: 1384767 - RNA, 23 nt, Human
accaaaaguuacauguuugcacc

SEQ ID NO: 1384768 - RNA, 21 nt, Human
accaaaaguuacauguuugca

SEQ ID NO: 1384769 - RNA, 14 nt, Human
accaaaaguuacau

SEQ ID NO: 1384770 - RNA, 14 nt, Human
accaaaagaaguaa

SEQ ID NO: 1384771 - RNA, 21 nt, Human
accaaaagaaguaaaagcaaa

SEQ ID NO: 1384772 - RNA, 13 nt, Human
accaaaagaagua

SEQ ID NO: 1384773 - RNA, 13 nt, Human
accaaaacugcuc

SEQ ID NO: 1384774 - RNA, 14 nt, Human
accaaaacugcucc

SEQ ID NO: 1384775 - RNA, 16 nt, Human
accaaaacaguuaauc

SEQ ID NO: 1384776 - RNA, 21 nt, Human
acauuuuuaagugcugcauuu

SEQ ID NO: 1384777 - RNA, 22 nt, Human
acauuuuuaagugcugcauuua

SEQ ID NO: 1384778 - RNA, 23 nt, Human
acauuuuuaagugcugcauuuaa

SEQ ID NO: 1384779 - RNA, 14 nt, Human
acauuuuuuaaaug

SEQ ID NO: 1384780 - RNA, 16 nt, Human
acauuuuuuaaaugca

SEQ ID NO: 1384781 - RNA, 17 nt, Human
acauuuuuuaaaugcac

SEQ ID NO: 1384782 - RNA, 21 nt, Human
acauuuuuuaaaugcaccugg

SEQ ID NO: 1384783 - RNA, 17 nt, Human
acauuguugagcuauug

SEQ ID NO: 1384784 - RNA, 11 nt, Human
acauugugcca

SEQ ID NO: 1384785 - RNA, 18 nt, Human
acauugcaucaaagcauc

SEQ ID NO: 1384786 - RNA, 17 nt, Human
acauugcaucaaagcau

SEQ ID NO: 1384787 - RNA, 20 nt, Human
acauuuuguaacaaagaacu

SEQ ID NO: 1384788 - RNA, 21 nt, Human
acauuuugaaagucuguccuu

SEQ ID NO: 1384789 - RNA, 17 nt, Human
acauuuugaaagucugu

SEQ ID NO: 1384790 - RNA, 13 nt, Human
acauuuugaaagu

SEQ ID NO: 1384791 - RNA, 19 nt, Human
acauuuucuaagaaacauu

SEQ ID NO: 1384792 - RNA, 18 nt, Human
acauuuucuaagaaacau

SEQ ID NO: 1384793 - RNA, 19 nt, Human
acauuuuccuuuucaaaua

SEQ ID NO: 1384794 - RNA, 12 nt, Human
acauuuuccuuu

SEQ ID NO: 1384795 - RNA, 12 nt, Human
acauuuucagug

SEQ ID NO: 1384796 - RNA, 14 nt, Human
acauuguugagcua

SEQ ID NO: 1384797 - RNA, 18 nt, Human
acauuuuauuuuauuaug

SEQ ID NO: 1384798 - RNA, 14 nt, Human
acauuuuauuuuau

SEQ ID NO: 1384799 - RNA, 19 nt, Human
acauuuuauuuuauuaugc

SEQ ID NO: 1384800 - RNA, 20 nt, Human
acauuuuauuuuauuaugca

SEQ ID NO: 1384801 - RNA, 19 nt, Human
ucaacuuauuaacaauuag

SEQ ID NO: 1384802 - RNA, 22 nt, Human
ucaacugucuccuaccucugcu

SEQ ID NO: 1384803 - RNA, 16 nt, Human
ucaacuugagcauguu

SEQ ID NO: 1384804 - RNA, 20 nt, Human
ucaacuugagcauguuacug

SEQ ID NO: 1384805 - RNA, 14 nt, Human
ucaacuugcuuauc

SEQ ID NO: 1384806 - RNA, 15 nt, Human
ucaacuuuuccuuug

SEQ ID NO: 1384807 - RNA, 21 nt, Human
ucaacuuuuccuuugaauccu

SEQ ID NO: 1384808 - RNA, 20 nt, Human
ucaaguccugccucuuaaau

SEQ ID NO: 1384809 - RNA, 19 nt, Human
ucaaguccugccucuuaaa

SEQ ID NO: 1384810 - RNA, 18 nt, Human
ucaauauaagcuuuucuu

SEQ ID NO: 1384811 - RNA, 23 nt, Human
ucaagucuuucucuuucccuggu

SEQ ID NO: 1384812 - RNA, 22 nt, Human
ucaagucuuucucuuucccugg

SEQ ID NO: 1384813 - RNA, 21 nt, Human
ucaagucuuucucuuucccug

SEQ ID NO: 1384814 - RNA, 20 nt, Human
ucaagucuuucucuuucccu

SEQ ID NO: 1384815 - RNA, 18 nt, Human
ucaagucuuucucuuucc

SEQ ID NO: 1384816 - RNA, 15 nt, Human
ucaagucuuucucuu

SEQ ID NO: 1384817 - RNA, 19 nt, Human
ucaagucuguuuacugcaa

SEQ ID NO: 1384818 - RNA, 15 nt, Human
ucaauauucaauaaa

SEQ ID NO: 1384819 - RNA, 16 nt, Human
ucaauauucaauaaag

SEQ ID NO: 1384820 - RNA, 17 nt, Human
ucaauauucaauaaagc

SEQ ID NO: 1384821 - RNA, 17 nt, Human
ucaaugagguguccaac

SEQ ID NO: 1384822 - RNA, 16 nt, Human
ucaaugagguguccaa

SEQ ID NO: 1384823 - RNA, 21 nt, Human
ucaaugagcauguuuagacuu

SEQ ID NO: 1384824 - RNA, 19 nt, Human
ucaaugagcauguuuagac

SEQ ID NO: 1384825 - RNA, 17 nt, Human
ucaaugagcauguuuag

SEQ ID NO: 1384826 - RNA, 14 nt, Human
ucaaugagcauguu

SEQ ID NO: 1384827 - RNA, 13 nt, Human
ucaaugagcaugu

SEQ ID NO: 1384828 - RNA, 12 nt, Human
ucaaugagcaug

SEQ ID NO: 1384829 - RNA, 22 nt, Human
ucaaugacaugaauuuuagcuu

SEQ ID NO: 1384830 - RNA, 23 nt, Human
ucaaugacaugaauuuuagcuuu

SEQ ID NO: 1384831 - RNA, 21 nt, Human
ucaaugacaugaauuuuagcu

SEQ ID NO: 1384832 - RNA, 16 nt, Human
ucaaugacaugaauuu

SEQ ID NO: 1384833 - RNA, 15 nt, Human
ucaaugacaugaauu

SEQ ID NO: 1384834 - RNA, 14 nt, Human
ucaaugacaugaau

SEQ ID NO: 1384835 - RNA, 21 nt, Human
ucaaugaauuuuauaaucugc

SEQ ID NO: 1384836 - RNA, 20 nt, Human
ucaaucuugcauguaacgca

SEQ ID NO: 1384837 - RNA, 18 nt, Human
ucaaucuuuaaaccaauu

SEQ ID NO: 1384838 - RNA, 19 nt, Human
ucaaucucugggggcugag

SEQ ID NO: 1384839 - RNA, 16 nt, Human
ucaaucuguaaacugu

SEQ ID NO: 1384840 - RNA, 14 nt, Human
ucaaucuguaaacu

SEQ ID NO: 1384841 - RNA, 13 nt, Human
ucaaucuguaaac

SEQ ID NO: 1384842 - RNA, 18 nt, Human
ucaaucuugcauguaacg

SEQ ID NO: 1384843 - RNA, 17 nt, Human
ucaaucuugcauguaac

SEQ ID NO: 1384844 - RNA, 16 nt, Human
ucaaucuugcauguaa

SEQ ID NO: 1384845 - RNA, 15 nt, Human
ucaaucuugcaugua

SEQ ID NO: 1384846 - RNA, 17 nt, Human
ucaaucuguaaacugug

SEQ ID NO: 1384847 - RNA, 19 nt, Human
ucaauauuucagauaauca

SEQ ID NO: 1384848 - RNA, 15 nt, Human
ucaauauuucagaua

SEQ ID NO: 1384849 - RNA, 17 nt, Human
acaugaauuuuagcuuu

SEQ ID NO: 1384850 - RNA, 15 nt, Human
acaugaauuuuagcu

SEQ ID NO: 1384851 - RNA, 21 nt, Human
acaugaauuauuacaguguuu

SEQ ID NO: 1384852 - RNA, 18 nt, Human
acaugaauugcauuuuac

SEQ ID NO: 1384853 - RNA, 19 nt, Human
acaugaauuauuacagugu

SEQ ID NO: 1384854 - RNA, 17 nt, Human
acaugaauuauuacagu

SEQ ID NO: 1384855 - RNA, 18 nt, Human
acagucccuauggaaaga

SEQ ID NO: 1384856 - RNA, 18 nt, Human
acaugaauuuuagcuuuu

SEQ ID NO: 1384857 - RNA, 20 nt, Human
acaugaauauuuaguguuca

SEQ ID NO: 1384858 - RNA, 23 nt, Human
acaugcgguagccagcacacagg

SEQ ID NO: 1384859 - RNA, 22 nt, Human
acaugcgguagccagcacacag

SEQ ID NO: 1384860 - RNA, 20 nt, Human
acaugcgguagccagcacac

SEQ ID NO: 1384861 - RNA, 15 nt, Human
acaugcuacacacug

SEQ ID NO: 1384862 - RNA, 21 nt, Human
acaugcuacacacugcauguu

SEQ ID NO: 1384863 - RNA, 19 nt, Human
acaugcuuagcaguccccu

SEQ ID NO: 1384864 - RNA, 24 nt, Human
acaugcuaagagaaguagaaauca

SEQ ID NO: 1384865 - RNA, 19 nt, Human
acaugcuaagagaaguaga

SEQ ID NO: 1384866 - RNA, 18 nt, Human
acaugcuaagagaaguag

SEQ ID NO: 1384867 - RNA, 17 nt, Human
acaugcuaagagaagua

SEQ ID NO: 1384868 - RNA, 22 nt, Human
acaugcuacacacugcauguuu

SEQ ID NO: 1384869 - RNA, 23 nt, Human
acaugcuuauuccaugacugcuu

SEQ ID NO: 1384870 - RNA, 22 nt, Human
acaugcuuauuccaugacugcu

SEQ ID NO: 1384871 - RNA, 21 nt, Human
acaugcuuauuccaugacugc

SEQ ID NO: 1384872 - RNA, 18 nt, Human
acaugcuuauuccaugac

SEQ ID NO: 1384873 - RNA, 17 nt, Human
acaugcuuauuccauga

SEQ ID NO: 1384874 - RNA, 15 nt, Human
acaugcuuauuccau

SEQ ID NO: 1384875 - RNA, 23 nt, Human
acaugcuuagcaguccccuuccc

SEQ ID NO: 1384876 - RNA, 13 nt, Human
acaugcuucccuu

SEQ ID NO: 1384877 - RNA, 16 nt, Human
acaugcuucccuuucc

SEQ ID NO: 1384878 - RNA, 18 nt, Human
acaugcuucccuuuccug

SEQ ID NO: 1384879 - RNA, 19 nt, Human
acaugcuucccuuuccuga

SEQ ID NO: 1384880 - RNA, 13 nt, Human
acauggggaggag

SEQ ID NO: 1384881 - RNA, 15 nt, Human
acauggggaggagga

SEQ ID NO: 1384882 - RNA, 11 nt, Human
acauggggagg

SEQ ID NO: 1384883 - RNA, 23 nt, Human
acaugggagccgggucugccucu

SEQ ID NO: 1384884 - RNA, 14 nt, Human
acaugggacauuug

SEQ ID NO: 1384885 - RNA, 11 nt, Human
acaugggacau

SEQ ID NO: 1384886 - RNA, 20 nt, Human
acaugggagccgggucugcc

SEQ ID NO: 1384887 - RNA, 21 nt, Human
acaugggacauuugcucaugg

SEQ ID NO: 1384888 - RNA, 20 nt, Human
acaugggacauuugcucaug

SEQ ID NO: 1384889 - RNA, 15 nt, Human
acaugggacauuugc

SEQ ID NO: 1384890 - RNA, 14 nt, Human
ucaacauuucucaa

SEQ ID NO: 1384891 - RNA, 21 nt, Human
ucaacaaagaaacaaagaugu

SEQ ID NO: 1384892 - RNA, 20 nt, Human
ucaacaaagaaacaaagaug

SEQ ID NO: 1384893 - RNA, 14 nt, Human
ucaacaaagaaaca

SEQ ID NO: 1384894 - RNA, 12 nt, Human
ucaacaaacauu

SEQ ID NO: 1384895 - RNA, 18 nt, Human
ucaacaaaaauugucccu

SEQ ID NO: 1384896 - RNA, 15 nt, Human
ucaacaaaaauuguc

SEQ ID NO: 1384897 - RNA, 20 nt, Human
acauucugaaugcuucuaag

SEQ ID NO: 1384898 - RNA, 14 nt, Human
ucaaauuucuaaau

SEQ ID NO: 1384899 - RNA, 13 nt, Human
ucaaauuucuaaa

SEQ ID NO: 1384900 - RNA, 20 nt, Human
ucaacugccuacuccaaaau

SEQ ID NO: 1384901 - RNA, 18 nt, Human
ucaacugccuacuccaaa

SEQ ID NO: 1384902 - RNA, 14 nt, Human
ucaacugccuacuc

SEQ ID NO: 1384903 - RNA, 15 nt, Human
ucaaccccuccccuc

SEQ ID NO: 1384904 - RNA, 18 nt, Human
ucaaccccagacacuggu

SEQ ID NO: 1384905 - RNA, 17 nt, Human
ucaaccccagacacugg

SEQ ID NO: 1384906 - RNA, 16 nt, Human
ucaaccccagacacug

SEQ ID NO: 1384907 - RNA, 16 nt, Human
ucaaccaucgcuuuau

SEQ ID NO: 1384908 - RNA, 19 nt, Human
acauuccucaugaauguaa

SEQ ID NO: 1384909 - RNA, 18 nt, Human
acauuccucaugaaugua

SEQ ID NO: 1384910 - RNA, 17 nt, Human
acauuccucaugaaugu

SEQ ID NO: 1384911 - RNA, 21 nt, Human
acaugucaguaccuucaaacu

SEQ ID NO: 1384912 - RNA, 19 nt, Human
acaugucaguaccuucaaa

SEQ ID NO: 1384913 - RNA, 18 nt, Human
acaugucaguaccuucaa

SEQ ID NO: 1384914 - RNA, 15 nt, Human
acaugucaaucuguc

SEQ ID NO: 1384915 - RNA, 12 nt, Human
acaugucaaucu

SEQ ID NO: 1384916 - RNA, 17 nt, Human
acauguaggaaguagga

SEQ ID NO: 1384917 - RNA, 21 nt, Human
acauuccucaugaauguaaau

SEQ ID NO: 1384918 - RNA, 20 nt, Human
acauuccucaugaauguaaa

SEQ ID NO: 1384919 - RNA, 22 nt, Human
acauuccucaugaauguaaauu

SEQ ID NO: 1384920 - RNA, 15 nt, Human
acauuccugaacagg

SEQ ID NO: 1384921 - RNA, 14 nt, Human
acauuccugaacag

SEQ ID NO: 1384922 - RNA, 14 nt, Human
acauucugaaugcu

SEQ ID NO: 1384923 - RNA, 11 nt, Human
acauucugaau

SEQ ID NO: 1384924 - RNA, 23 nt, Human
acauucugauucgaaugacacug

SEQ ID NO: 1384925 - RNA, 21 nt, Human
acauucugaaugcuucuaagu

SEQ ID NO: 1384926 - RNA, 18 nt, Human
acauucugaaugcuucua

SEQ ID NO: 1384927 - RNA, 15 nt, Human
acauucugaaugcuu

SEQ ID NO: 1384928 - RNA, 18 nt, Human
ucaaauugugugaaaggu

SEQ ID NO: 1384929 - RNA, 17 nt, Human
ucacugugucacccagg

SEQ ID NO: 1384930 - RNA, 17 nt, Human
ucacuguuuagaacaca

SEQ ID NO: 1384931 - RNA, 20 nt, Human
ucacuguuuagaacacacac

SEQ ID NO: 1384932 - RNA, 20 nt, Human
accaguaggggcuuauaaua

SEQ ID NO: 1384933 - RNA, 17 nt, Human
accaguccccccacccu

SEQ ID NO: 1384934 - RNA, 15 nt, Human
accaguguuguggau

SEQ ID NO: 1384935 - RNA, 17 nt, Human
accaguguuguggauuu

SEQ ID NO: 1384936 - RNA, 15 nt, Human
accaguccccccacc

SEQ ID NO: 1384937 - RNA, 15 nt, Human
accagucccagagca

SEQ ID NO: 1384938 - RNA, 14 nt, Human
accagucugacugu

SEQ ID NO: 1384939 - RNA, 19 nt, Human
accaguauuuagaagccaa

SEQ ID NO: 1384940 - RNA, 18 nt, Human
accaguauuuagaagcca

SEQ ID NO: 1384941 - RNA, 14 nt, Human
accaguauuuagaa

SEQ ID NO: 1384942 - RNA, 11 nt, Human
accaguauuua

SEQ ID NO: 1384943 - RNA, 20 nt, Human
accaguaucgcucauagauc

SEQ ID NO: 1384944 - RNA, 12 nt, Human
accaggaagccg

SEQ ID NO: 1384945 - RNA, 13 nt, Human
accaggaacagca

SEQ ID NO: 1384946 - RNA, 22 nt, Human
accagcuuccuucagagagcag

SEQ ID NO: 1384947 - RNA, 23 nt, Human
accagcuuccuucagagagcagu

SEQ ID NO: 1384948 - RNA, 21 nt, Human
accagcuuccuucagagagca

SEQ ID NO: 1384949 - RNA, 20 nt, Human
accagcuuccuucagagagc

SEQ ID NO: 1384950 - RNA, 18 nt, Human
accagcuuccuucagaga

SEQ ID NO: 1384951 - RNA, 17 nt, Human
accagcuuccuucagag

SEQ ID NO: 1384952 - RNA, 15 nt, Human
accagcuuccuucag

SEQ ID NO: 1384953 - RNA, 22 nt, Human
accagcugcuccgaggacccag

SEQ ID NO: 1384954 - RNA, 19 nt, Human
accagcucccccucccucc

SEQ ID NO: 1384955 - RNA, 20 nt, Human
accagcucccccucccuccc

SEQ ID NO: 1384956 - RNA, 23 nt, Human
accagcucaggacagaugccaca

SEQ ID NO: 1384957 - RNA, 16 nt, Human
accacuagccucaggg

SEQ ID NO: 1384958 - RNA, 17 nt, Human
accacuacauucuguua

SEQ ID NO: 1384959 - RNA, 16 nt, Human
accacuacauucuguu

SEQ ID NO: 1384960 - RNA, 16 nt, Human
accagcucaggacaga

SEQ ID NO: 1384961 - RNA, 15 nt, Human
accagcucaggacag

SEQ ID NO: 1384962 - RNA, 14 nt, Human
accagcucaggaca

SEQ ID NO: 1384963 - RNA, 13 nt, Human
accagcucaggac

SEQ ID NO: 1384964 - RNA, 16 nt, Human
accagcucagcacugc

SEQ ID NO: 1384965 - RNA, 14 nt, Human
accagcucagcacu

SEQ ID NO: 1384966 - RNA, 13 nt, Human
accagcucagcac

SEQ ID NO: 1384967 - RNA, 19 nt, Human
accagcgcuugaagccuga

SEQ ID NO: 1384968 - RNA, 15 nt, Human
accacuagccucagg

SEQ ID NO: 1384969 - RNA, 14 nt, Human
ucaccucauggaau

SEQ ID NO: 1384970 - RNA, 13 nt, Human
ucaccucauggaa

SEQ ID NO: 1384971 - RNA, 12 nt, Human
ucaccucaugga

SEQ ID NO: 1384972 - RNA, 19 nt, Human
ucaccuguaaaccugaguc

SEQ ID NO: 1384973 - RNA, 17 nt, Human
ucaccuguaaaccugag

SEQ ID NO: 1384974 - RNA, 16 nt, Human
ucaccuguaaaccuga

SEQ ID NO: 1384975 - RNA, 14 nt, Human
ucaccugugcuucg

SEQ ID NO: 1384976 - RNA, 18 nt, Human
ucacuaauucauuaaucu

SEQ ID NO: 1384977 - RNA, 15 nt, Human
ucacuaauucauuaa

SEQ ID NO: 1384978 - RNA, 14 nt, Human
ucacuaauucauua

SEQ ID NO: 1384979 - RNA, 23 nt, Human
ucacuaggcccccacuugccucu

SEQ ID NO: 1384980 - RNA, 12 nt, Human
ucacuaaaucuu

SEQ ID NO: 1384981 - RNA, 17 nt, Human
ucacuaaaucuuuuaua

SEQ ID NO: 1384982 - RNA, 21 nt, Human
ucacguuuggugcuucucaga

SEQ ID NO: 1384983 - RNA, 20 nt, Human
ucacguccugagaaagcuca

SEQ ID NO: 1384984 - RNA, 20 nt, Human
ucacguuaccauuuacaugu

SEQ ID NO: 1384985 - RNA, 22 nt, Human
ucacguuucauguaauccucaa

SEQ ID NO: 1384986 - RNA, 17 nt, Human
ucacguuuggugcuucu

SEQ ID NO: 1384987 - RNA, 21 nt, Human
ucaccauguuagccaggcugg

SEQ ID NO: 1384988 - RNA, 20 nt, Human
ucacauagcccacuuacauu

SEQ ID NO: 1384989 - RNA, 19 nt, Human
ucacauagcccacuuacau

SEQ ID NO: 1384990 - RNA, 14 nt, Human
ucacauagcccacu

SEQ ID NO: 1384991 - RNA, 16 nt, Human
ucacaguuugaaauaa

SEQ ID NO: 1384992 - RNA, 15 nt, Human
ucacaguuugaaaua

SEQ ID NO: 1384993 - RNA, 17 nt, Human
ucacaguuugaaauaag

SEQ ID NO: 1384994 - RNA, 22 nt, Human
ucacaguucuuugggccagaca

SEQ ID NO: 1384995 - RNA, 20 nt, Human
ucacaguucuuugggccaga

SEQ ID NO: 1384996 - RNA, 19 nt, Human
ucacaguucuuugggccag

SEQ ID NO: 1384997 - RNA, 13 nt, Human
ucacagcggaggu

SEQ ID NO: 1384998 - RNA, 18 nt, Human
ucacccccagcuuugcua

SEQ ID NO: 1384999 - RNA, 13 nt, Human
ucacccccagcuu

SEQ ID NO: 1385000 - RNA, 20 nt, Human
ucacccagacauaaaggaaa

SEQ ID NO: 1385001 - RNA, 19 nt, Human
ucacccagacauaaaggaa

SEQ ID NO: 1385002 - RNA, 15 nt, Human
ucacccagacauaaa

SEQ ID NO: 1385003 - RNA, 14 nt, Human
ucacccaccccugc

SEQ ID NO: 1385004 - RNA, 13 nt, Human
ucacccaccccug

SEQ ID NO: 1385005 - RNA, 20 nt, Human
ucaccauuuggauccugugu

SEQ ID NO: 1385006 - RNA, 13 nt, Human
ucacccaacgcuc

SEQ ID NO: 1385007 - RNA, 23 nt, Human
ucaccauuuggcaaugccaucau

SEQ ID NO: 1385008 - RNA, 16 nt, Human
ucaccauuuggauccu

SEQ ID NO: 1385009 - RNA, 22 nt, Human
ucaccauuugauuauguagcaa

SEQ ID NO: 1385010 - RNA, 17 nt, Human
ucaccauuugauuaugu

SEQ ID NO: 1385011 - RNA, 23 nt, Human
ucaccauuauaaugaauuuagug

SEQ ID NO: 1385012 - RNA, 17 nt, Human
ucaccauguuagccagg

SEQ ID NO: 1385013 - RNA, 13 nt, Human
ucaccauucccag

SEQ ID NO: 1385014 - RNA, 20 nt, Human
ucaccauuauaaugaauuua

SEQ ID NO: 1385015 - RNA, 15 nt, Human
ucaccauuauaauga

SEQ ID NO: 1385016 - RNA, 20 nt, Human
accacagccagcaccuggca

SEQ ID NO: 1385017 - RNA, 19 nt, Human
accacagccagcaccuggc

SEQ ID NO: 1385018 - RNA, 18 nt, Human
ucacccccuucuccaucc

SEQ ID NO: 1385019 - RNA, 22 nt, Human
ucacccccuucuccauccacau

SEQ ID NO: 1385020 - RNA, 16 nt, Human
ucacccccuucuccau

SEQ ID NO: 1385021 - RNA, 13 nt, Human
ucacccccuucuc

SEQ ID NO: 1385022 - RNA, 17 nt, Human
accacaggcucaggcag

SEQ ID NO: 1385023 - RNA, 16 nt, Human
accacaggcucaggca

SEQ ID NO: 1385024 - RNA, 15 nt, Human
accacaggcucaggc

SEQ ID NO: 1385025 - RNA, 19 nt, Human
accaccaacuacuaccugu

SEQ ID NO: 1385026 - RNA, 13 nt, Human
accacauugcuuu

SEQ ID NO: 1385027 - RNA, 22 nt, Human
accacaugccccaucccaugcu

SEQ ID NO: 1385028 - RNA, 23 nt, Human
accacaugccccaucccaugcug

SEQ ID NO: 1385029 - RNA, 24 nt, Human
accacauuggagauguuuaguaau

SEQ ID NO: 1385030 - RNA, 15 nt, Human
accacauugcuuuuc

SEQ ID NO: 1385031 - RNA, 16 nt, Human
accaccaagccaaggg

SEQ ID NO: 1385032 - RNA, 16 nt, Human
accaccacgccuggcu

SEQ ID NO: 1385033 - RNA, 16 nt, Human
ucaauuuauuugaaug

SEQ ID NO: 1385034 - RNA, 20 nt, Human
ucaauuuauuugaaugauuu

SEQ ID NO: 1385035 - RNA, 14 nt, Human
ucaauuuauuugaa

SEQ ID NO: 1385036 - RNA, 15 nt, Human
ucaauuucugaacac

SEQ ID NO: 1385037 - RNA, 15 nt, Human
ucaauuucuguguug

SEQ ID NO: 1385038 - RNA, 23 nt, Human
ucaauuucuguguugccaagcuc

SEQ ID NO: 1385039 - RNA, 21 nt, Human
ucacaaacuuuuauacucuuu

SEQ ID NO: 1385040 - RNA, 17 nt, Human
ucacaaacuuuuauacu

SEQ ID NO: 1385041 - RNA, 15 nt, Human
ucacaaacuuuuaua

SEQ ID NO: 1385042 - RNA, 19 nt, Human
ucacaaacuucauuucaga

SEQ ID NO: 1385043 - RNA, 20 nt, Human
ucacaaaauauauuuuguuu

SEQ ID NO: 1385044 - RNA, 12 nt, Human
accaaaguucua

SEQ ID NO: 1385045 - RNA, 11 nt, Human
accaaaguucu

SEQ ID NO: 1385046 - RNA, 21 nt, Human
accaaaguccuuuuuuuccau

SEQ ID NO: 1385047 - RNA, 20 nt, Human
accaaagggagucugccagg

SEQ ID NO: 1385048 - RNA, 19 nt, Human
accaaagggagucugccag

SEQ ID NO: 1385049 - RNA, 17 nt, Human
accaaagggagucugcc

SEQ ID NO: 1385050 - RNA, 11 nt, Human
accaaagcaca

SEQ ID NO: 1385051 - RNA, 20 nt, Human
accaaagcaccuuagcuggc

SEQ ID NO: 1385052 - RNA, 22 nt, Human
ucaauugcaucucccagauaau

SEQ ID NO: 1385053 - RNA, 18 nt, Human
ucaauugcaucucccaga

SEQ ID NO: 1385054 - RNA, 17 nt, Human
ucaauugcaucucccag

SEQ ID NO: 1385055 - RNA, 16 nt, Human
ucaauugcaucuccca

SEQ ID NO: 1385056 - RNA, 16 nt, Human
ucaauucuugccaaau

SEQ ID NO: 1385057 - RNA, 13 nt, Human
ucacaaccaagaa

SEQ ID NO: 1385058 - RNA, 22 nt, Human
ucacaacagccugacaacauuu

SEQ ID NO: 1385059 - RNA, 14 nt, Human
ucacaacagccuga

SEQ ID NO: 1385060 - RNA, 16 nt, Human
ucacaacgugcauugu

SEQ ID NO: 1385061 - RNA, 17 nt, Human
ucacaacgugcauugug

SEQ ID NO: 1385062 - RNA, 18 nt, Human
ucacaacgugcauugugc

SEQ ID NO: 1385063 - RNA, 19 nt, Human
ucacaacgugcauugugcu

SEQ ID NO: 1385064 - RNA, 20 nt, Human
ucacaacgugcauugugcuu

SEQ ID NO: 1385065 - RNA, 21 nt, Human
ucacaacgugcauugugcuuc

SEQ ID NO: 1385066 - RNA, 18 nt, Human
ucacacuggucugcuguc

SEQ ID NO: 1385067 - RNA, 17 nt, Human
ucacacuggucugcugu

SEQ ID NO: 1385068 - RNA, 23 nt, Human
ucacacugggugguggccugguc

SEQ ID NO: 1385069 - RNA, 22 nt, Human
ucacacugggugguggccuggu

SEQ ID NO: 1385070 - RNA, 21 nt, Human
ucacacugggugguggccugg

SEQ ID NO: 1385071 - RNA, 16 nt, Human
ucacacuggguggugg

SEQ ID NO: 1385072 - RNA, 11 nt, Human
ucacacuggga

SEQ ID NO: 1385073 - RNA, 20 nt, Human
ucccagcuaggaagagcagg

SEQ ID NO: 1385074 - RNA, 23 nt, Human
ucccagcuaggaagagcaggacu

SEQ ID NO: 1385075 - RNA, 17 nt, Human
ucccagcucuacccugc

SEQ ID NO: 1385076 - RNA, 19 nt, Human
ucccagcucuacccugcau

SEQ ID NO: 1385077 - RNA, 16 nt, Human
ucccagcuaggaagag

SEQ ID NO: 1385078 - RNA, 18 nt, Human
ucccagcccccugaccac

SEQ ID NO: 1385079 - RNA, 17 nt, Human
ucccauuuaucuaaaua

SEQ ID NO: 1385080 - RNA, 13 nt, Human
ucccauuucagcu

SEQ ID NO: 1385081 - RNA, 16 nt, Human
ucccauuuaucgcaga

SEQ ID NO: 1385082 - RNA, 23 nt, Human
uccccagguccagcucuggaggg

SEQ ID NO: 1385083 - RNA, 17 nt, Human
uccccagguccagcucu

SEQ ID NO: 1385084 - RNA, 16 nt, Human
uccccagguccagcuc

SEQ ID NO: 1385085 - RNA, 15 nt, Human
uccccagguccagcu

SEQ ID NO: 1385086 - RNA, 23 nt, Human
uccccagggaagcagcagccucg

SEQ ID NO: 1385087 - RNA, 16 nt, Human
acuacuguguuaugca

SEQ ID NO: 1385088 - RNA, 22 nt, Human
acuacugacggaguccuguguu

SEQ ID NO: 1385089 - RNA, 23 nt, Human
acuacugacauguggggccaggu

SEQ ID NO: 1385090 - RNA, 18 nt, Human
acuacugacauguggggc

SEQ ID NO: 1385091 - RNA, 16 nt, Human
acuagagcaagcagga

SEQ ID NO: 1385092 - RNA, 16 nt, Human
acuagaccuccagcug

SEQ ID NO: 1385093 - RNA, 22 nt, Human
acuauauuguuugcuaagcauu

SEQ ID NO: 1385094 - RNA, 23 nt, Human
acuauauuugggccugcuccaga

SEQ ID NO: 1385095 - RNA, 22 nt, Human
acuauauuugggccugcuccag

SEQ ID NO: 1385096 - RNA, 22 nt, Human
acuauaggcaugcgccaccaug

SEQ ID NO: 1385097 - RNA, 17 nt, Human
acuauauuguuugcuaa

SEQ ID NO: 1385098 - RNA, 20 nt, Human
acuauaggcaugcgccacca

SEQ ID NO: 1385099 - RNA, 15 nt, Human
acuaucucauuucca

SEQ ID NO: 1385100 - RNA, 17 nt, Human
acuaucugucugguggc

SEQ ID NO: 1385101 - RNA, 14 nt, Human
acuaucugucuggu

SEQ ID NO: 1385102 - RNA, 20 nt, Human
acuaucucuacugaauguca

SEQ ID NO: 1385103 - RNA, 17 nt, Human
acuaucucauuuccaag

SEQ ID NO: 1385104 - RNA, 16 nt, Human
acuaucucauuuccaa

SEQ ID NO: 1385105 - RNA, 24 nt, Human
acuauggauaaacuaaacacguga

SEQ ID NO: 1385106 - RNA, 21 nt, Human
acuauggauaaacuaaacacg

SEQ ID NO: 1385107 - RNA, 23 nt, Human
acuauggagugcaccaaagagaa

SEQ ID NO: 1385108 - RNA, 22 nt, Human
acuauggagugcaccaaagaga

SEQ ID NO: 1385109 - RNA, 20 nt, Human
acuauggagugcaccaaaga

SEQ ID NO: 1385110 - RNA, 22 nt, Human
acuauggcccuggccuagcaua

SEQ ID NO: 1385111 - RNA, 17 nt, Human
acucaaggacuuugcag

SEQ ID NO: 1385112 - RNA, 18 nt, Human
acucaaggcggugcuuga

SEQ ID NO: 1385113 - RNA, 17 nt, Human
acucacaacagcugccu

SEQ ID NO: 1385114 - RNA, 15 nt, Human
acuaaaucuuuuaua

SEQ ID NO: 1385115 - RNA, 15 nt, Human
acuaaaugcccugcu

SEQ ID NO: 1385116 - RNA, 13 nt, Human
acuaaaucuuuua

SEQ ID NO: 1385117 - RNA, 20 nt, Human
acuaaagcaggccuuuugau

SEQ ID NO: 1385118 - RNA, 17 nt, Human
acuaaagcaggccuuuu

SEQ ID NO: 1385119 - RNA, 22 nt, Human
acuaaacuuuuuuucuguacca

SEQ ID NO: 1385120 - RNA, 20 nt, Human
acuaaacuuuuuuucuguac

SEQ ID NO: 1385121 - RNA, 19 nt, Human
acuaaacuuuuuuucugua

SEQ ID NO: 1385122 - RNA, 18 nt, Human
acuaaacuuuuuuucugu

SEQ ID NO: 1385123 - RNA, 17 nt, Human
acuaaacuuuuuuucug

SEQ ID NO: 1385124 - RNA, 22 nt, Human
acguuucuaaaggcuaccuuug

SEQ ID NO: 1385125 - RNA, 15 nt, Human
acuaauuuuuauuuu

SEQ ID NO: 1385126 - RNA, 21 nt, Human
acuaacacucagaagccuggg

SEQ ID NO: 1385127 - RNA, 20 nt, Human
acuaacacucagaagccugg

SEQ ID NO: 1385128 - RNA, 19 nt, Human
acuaacacucagaagccug

SEQ ID NO: 1385129 - RNA, 18 nt, Human
acuaacacucagaagccu

SEQ ID NO: 1385130 - RNA, 17 nt, Human
acuaacacucagaagcc

SEQ ID NO: 1385131 - RNA, 15 nt, Human
acuaacacucagaag

SEQ ID NO: 1385132 - RNA, 18 nt, Human
acuaacaaccaaagacua

SEQ ID NO: 1385133 - RNA, 15 nt, Human
acuaauuuuaaaaug

SEQ ID NO: 1385134 - RNA, 17 nt, Human
ucccagcccccugacca

SEQ ID NO: 1385135 - RNA, 16 nt, Human
ucccagcccccugacc

SEQ ID NO: 1385136 - RNA, 15 nt, Human
ucccagcccccugac

SEQ ID NO: 1385137 - RNA, 14 nt, Human
ucccagcccccuga

SEQ ID NO: 1385138 - RNA, 22 nt, Human
ucccagaggggccugccaccug

SEQ ID NO: 1385139 - RNA, 16 nt, Human
ucccagauaaugugaa

SEQ ID NO: 1385140 - RNA, 19 nt, Human
ucccagaggggccugccac

SEQ ID NO: 1385141 - RNA, 16 nt, Human
ucccagaggggccugc

SEQ ID NO: 1385142 - RNA, 21 nt, Human
ucccagaggagccaccaguuc

SEQ ID NO: 1385143 - RNA, 20 nt, Human
ucccagaggagccaccaguu

SEQ ID NO: 1385144 - RNA, 16 nt, Human
ucccagaggagccacc

SEQ ID NO: 1385145 - RNA, 12 nt, Human
ucccagagcagg

SEQ ID NO: 1385146 - RNA, 19 nt, Human
ucccagagcaccugcuguc

SEQ ID NO: 1385147 - RNA, 15 nt, Human
ucccagagcaccugc

SEQ ID NO: 1385148 - RNA, 23 nt, Human
ucccagaggggccugccaccugg

SEQ ID NO: 1385149 - RNA, 23 nt, Human
ucccagaggagccaccaguucuc

SEQ ID NO: 1385150 - RNA, 13 nt, Human
ucccagagcaccu

SEQ ID NO: 1385151 - RNA, 15 nt, Human
ucccagagagcccga

SEQ ID NO: 1385152 - RNA, 16 nt, Human
ucccagagcaaaauaa

SEQ ID NO: 1385153 - RNA, 14 nt, Human
ucccagagagcccg

SEQ ID NO: 1385154 - RNA, 20 nt, Human
ucccagaagaugacugaggg

SEQ ID NO: 1385155 - RNA, 17 nt, Human
ucccagaagaugacuga

SEQ ID NO: 1385156 - RNA, 13 nt, Human
ucccagaagauga

SEQ ID NO: 1385157 - RNA, 12 nt, Human
ucccacuuguca

SEQ ID NO: 1385158 - RNA, 13 nt, Human
acuacacccagca

SEQ ID NO: 1385159 - RNA, 14 nt, Human
acuacacccagcaa

SEQ ID NO: 1385160 - RNA, 16 nt, Human
acuacacccagcaaua

SEQ ID NO: 1385161 - RNA, 15 nt, Human
acuacacccagcaau

SEQ ID NO: 1385162 - RNA, 16 nt, Human
acguguuugugcugug

SEQ ID NO: 1385163 - RNA, 23 nt, Human
acguguguuuuucuauuaaaaga

SEQ ID NO: 1385164 - RNA, 18 nt, Human
acguguguuuuucuauua

SEQ ID NO: 1385165 - RNA, 17 nt, Human
acguguguuuuucuauu

SEQ ID NO: 1385166 - RNA, 16 nt, Human
acguguguuuuucuau

SEQ ID NO: 1385167 - RNA, 14 nt, Human
acguguguuuuucu

SEQ ID NO: 1385168 - RNA, 16 nt, Human
acguccugagaaagcu

SEQ ID NO: 1385169 - RNA, 20 nt, Human
acguccaucacguuagcugu

SEQ ID NO: 1385170 - RNA, 21 nt, Human
acgucacuggaccacugggca

SEQ ID NO: 1385171 - RNA, 16 nt, Human
acguauuuaauagcaa

SEQ ID NO: 1385172 - RNA, 17 nt, Human
acguuuaagccaaaaca

SEQ ID NO: 1385173 - RNA, 16 nt, Human
acguuucuaaaggcua

SEQ ID NO: 1385174 - RNA, 14 nt, Human
acguugugcauuug

SEQ ID NO: 1385175 - RNA, 15 nt, Human
acguugugcauuugg

SEQ ID NO: 1385176 - RNA, 22 nt, Human
acguguguuuuucuauuaaaag

SEQ ID NO: 1385177 - RNA, 16 nt, Human
acguuagucgugagcu

SEQ ID NO: 1385178 - RNA, 21 nt, Human
acguuagucgugagcucuugu

SEQ ID NO: 1385179 - RNA, 22 nt, Human
acguuagucgugagcucuugug

SEQ ID NO: 1385180 - RNA, 19 nt, Human
acguuggagaagcccgugu

SEQ ID NO: 1385181 - RNA, 13 nt, Human
acguugugcauuu

SEQ ID NO: 1385182 - RNA, 21 nt, Human
acguauuuaauagcaaagaau

SEQ ID NO: 1385183 - RNA, 15 nt, Human
acguaauaagguuuu

SEQ ID NO: 1385184 - RNA, 16 nt, Human
acguaaaguacuugua

SEQ ID NO: 1385185 - RNA, 19 nt, Human
acguaaaguacuuguaguu

SEQ ID NO: 1385186 - RNA, 17 nt, Human
acguaauaagguuuuaa

SEQ ID NO: 1385187 - RNA, 15 nt, Human
acggugcccaagcca

SEQ ID NO: 1385188 - RNA, 14 nt, Human
acggugcccaagcc

SEQ ID NO: 1385189 - RNA, 21 nt, Human
uccaguuaaaaaaaauuuuaa

SEQ ID NO: 1385190 - RNA, 21 nt, Human
uccaguguccugagcucagcg

SEQ ID NO: 1385191 - RNA, 22 nt, Human
uccaguguccugagcucagcgu

SEQ ID NO: 1385192 - RNA, 20 nt, Human
uccaguguccugagcucagc

SEQ ID NO: 1385193 - RNA, 19 nt, Human
uccaguguccugagcucag

SEQ ID NO: 1385194 - RNA, 17 nt, Human
uccaguguccugagcuc

SEQ ID NO: 1385195 - RNA, 16 nt, Human
uccaguguccugagcu

SEQ ID NO: 1385196 - RNA, 15 nt, Human
uccaguguccugagc

SEQ ID NO: 1385197 - RNA, 14 nt, Human
acgcugcugucaca

SEQ ID NO: 1385198 - RNA, 19 nt, Human
uccaguuaaaaaaaauuuu

SEQ ID NO: 1385199 - RNA, 22 nt, Human
acggucggggcaucuggccugg

SEQ ID NO: 1385200 - RNA, 21 nt, Human
acggucggggcaucuggccug

SEQ ID NO: 1385201 - RNA, 19 nt, Human
acgcuccagcugccccggc

SEQ ID NO: 1385202 - RNA, 17 nt, Human
acgcuccagcugccccg

SEQ ID NO: 1385203 - RNA, 16 nt, Human
acgcuccagcugcccc

SEQ ID NO: 1385204 - RNA, 14 nt, Human
acgcuccagcugcc

SEQ ID NO: 1385205 - RNA, 11 nt, Human
acgcuccagcu

SEQ ID NO: 1385206 - RNA, 21 nt, Human
acgcuccaaagucauaauugc

SEQ ID NO: 1385207 - RNA, 13 nt, Human
acgcuccaaaguc

SEQ ID NO: 1385208 - RNA, 13 nt, Human
acgcucagugggg

SEQ ID NO: 1385209 - RNA, 22 nt, Human
acgcuauuccagcugucccccc

SEQ ID NO: 1385210 - RNA, 14 nt, Human
acgcuauuccagcu

SEQ ID NO: 1385211 - RNA, 21 nt, Human
acgcugcugucacaaccaaga

SEQ ID NO: 1385212 - RNA, 19 nt, Human
acgcugcugucacaaccaa

SEQ ID NO: 1385213 - RNA, 21 nt, Human
acggagucucacucugucacc

SEQ ID NO: 1385214 - RNA, 16 nt, Human
acggaucagaaauaca

SEQ ID NO: 1385215 - RNA, 17 nt, Human
acggaucagaaauacag

SEQ ID NO: 1385216 - RNA, 19 nt, Human
acgccugaggcaauuagac

SEQ ID NO: 1385217 - RNA, 15 nt, Human
acgccugaggcaauu

SEQ ID NO: 1385218 - RNA, 21 nt, Human
acgccugaggaacccuuacag

SEQ ID NO: 1385219 - RNA, 13 nt, Human
acgccugaggaac

SEQ ID NO: 1385220 - RNA, 21 nt, Human
acgccugagcccagggaggcc

SEQ ID NO: 1385221 - RNA, 20 nt, Human
acgccugagcccagggaggc

SEQ ID NO: 1385222 - RNA, 19 nt, Human
acgccugagcccagggagg

SEQ ID NO: 1385223 - RNA, 18 nt, Human
acgccugagcccagggag

SEQ ID NO: 1385224 - RNA, 17 nt, Human
acgccugagcccaggga

SEQ ID NO: 1385225 - RNA, 16 nt, Human
acgccugagcccaggg

SEQ ID NO: 1385226 - RNA, 15 nt, Human
acgccugagcccagg

SEQ ID NO: 1385227 - RNA, 13 nt, Human
acgccugagccca

SEQ ID NO: 1385228 - RNA, 12 nt, Human
acgccugagccc

SEQ ID NO: 1385229 - RNA, 11 nt, Human
acgccugagcc

SEQ ID NO: 1385230 - RNA, 24 nt, Human
acgccucuugaccaggcugccucc

SEQ ID NO: 1385231 - RNA, 16 nt, Human
acgccucuugaccagg

SEQ ID NO: 1385232 - RNA, 15 nt, Human
acgccucuugaccag

SEQ ID NO: 1385233 - RNA, 18 nt, Human
acgccugggggugccagg

SEQ ID NO: 1385234 - RNA, 17 nt, Human
acgccuggcugcugauc

SEQ ID NO: 1385235 - RNA, 15 nt, Human
acgcgucuuccugag

SEQ ID NO: 1385236 - RNA, 13 nt, Human
acgcgucuuccug

SEQ ID NO: 1385237 - RNA, 15 nt, Human
acgcgguuugguuug

SEQ ID NO: 1385238 - RNA, 20 nt, Human
acgcgguuugguuugcagcg

SEQ ID NO: 1385239 - RNA, 23 nt, Human
acgcgccucgccggaucugaggg

SEQ ID NO: 1385240 - RNA, 19 nt, Human
uccaguaaucuaauauggc

SEQ ID NO: 1385241 - RNA, 15 nt, Human
uccaguaaucuaaua

SEQ ID NO: 1385242 - RNA, 21 nt, Human
acgggacccacaugcuccaga

SEQ ID NO: 1385243 - RNA, 19 nt, Human
acggcucgauuucuccagg

SEQ ID NO: 1385244 - RNA, 18 nt, Human
acggcucgauuucuccag

SEQ ID NO: 1385245 - RNA, 18 nt, Human
acggccacaucaaagagg

SEQ ID NO: 1385246 - RNA, 13 nt, Human
acggccacaucaa

SEQ ID NO: 1385247 - RNA, 20 nt, Human
acggccacacagcugccggu

SEQ ID NO: 1385248 - RNA, 19 nt, Human
acggccacacagcugccgg

SEQ ID NO: 1385249 - RNA, 16 nt, Human
acggcugcgcacugug

SEQ ID NO: 1385250 - RNA, 18 nt, Human
acggcugcgcacuguguc

SEQ ID NO: 1385251 - RNA, 20 nt, Human
acggcucuguccccagccug

SEQ ID NO: 1385252 - RNA, 19 nt, Human
acggcucuguccccagccu

SEQ ID NO: 1385253 - RNA, 18 nt, Human
acggccacacagcugccg

SEQ ID NO: 1385254 - RNA, 17 nt, Human
acggccacacagcugcc

SEQ ID NO: 1385255 - RNA, 16 nt, Human
acggccacacagcugc

SEQ ID NO: 1385256 - RNA, 15 nt, Human
acggccacacagcug

SEQ ID NO: 1385257 - RNA, 13 nt, Human
uccagucuauuca

SEQ ID NO: 1385258 - RNA, 23 nt, Human
uccaguccuaucugggcuuccug

SEQ ID NO: 1385259 - RNA, 22 nt, Human
uccaguccuaucugggcuuccu

SEQ ID NO: 1385260 - RNA, 19 nt, Human
uccaguccuaucugggcuu

SEQ ID NO: 1385261 - RNA, 18 nt, Human
uccaguccuaucugggcu

SEQ ID NO: 1385262 - RNA, 21 nt, Human
uccaguauaagacuacugaau

SEQ ID NO: 1385263 - RNA, 16 nt, Human
uccaguaggauccagu

SEQ ID NO: 1385264 - RNA, 23 nt, Human
uccaguggacuucgcaguccacu

SEQ ID NO: 1385265 - RNA, 23 nt, Human
uccagugggaggugagaccaccu

SEQ ID NO: 1385266 - RNA, 18 nt, Human
uccagaaugcuguacauc

SEQ ID NO: 1385267 - RNA, 19 nt, Human
uccacugugcagguuccca

SEQ ID NO: 1385268 - RNA, 21 nt, Human
uccagaaugcuguacaucuau

SEQ ID NO: 1385269 - RNA, 16 nt, Human
uccacucguguguuuc

SEQ ID NO: 1385270 - RNA, 18 nt, Human
uccacucguguguuucua

SEQ ID NO: 1385271 - RNA, 21 nt, Human
accuuuugaggagccccagcu

SEQ ID NO: 1385272 - RNA, 17 nt, Human
accuuuugaggagcccc

SEQ ID NO: 1385273 - RNA, 16 nt, Human
accuuuuauugacaca

SEQ ID NO: 1385274 - RNA, 20 nt, Human
accuuuuggucuggagggaa

SEQ ID NO: 1385275 - RNA, 20 nt, Human
accuuuuauugacacagaaa

SEQ ID NO: 1385276 - RNA, 20 nt, Human
accuuuuauguaguaauuga

SEQ ID NO: 1385277 - RNA, 15 nt, Human
accuuuuauguagua

SEQ ID NO: 1385278 - RNA, 19 nt, Human
accuuuuuauuugcaugug

SEQ ID NO: 1385279 - RNA, 13 nt, Human
accuuuuuuauac

SEQ ID NO: 1385280 - RNA, 14 nt, Human
uccacucguguguu

SEQ ID NO: 1385281 - RNA, 15 nt, Human
uccacucguguguuu

SEQ ID NO: 1385282 - RNA, 14 nt, Human
accuuuuuuauaca

SEQ ID NO: 1385283 - RNA, 20 nt, Human
accuugaaaauaagaauaga

SEQ ID NO: 1385284 - RNA, 23 nt, Human
accuugaaaaaaaacaguggauc

SEQ ID NO: 1385285 - RNA, 12 nt, Human
ucauuccuccag

SEQ ID NO: 1385286 - RNA, 13 nt, Human
ucauuccuccagg

SEQ ID NO: 1385287 - RNA, 14 nt, Human
ucauuccuccaggu

SEQ ID NO: 1385288 - RNA, 20 nt, Human
accuuucuucaccaaaucuu

SEQ ID NO: 1385289 - RNA, 17 nt, Human
accuuugacaaagguaa

SEQ ID NO: 1385290 - RNA, 18 nt, Human
accuuugacaaagguaaa

SEQ ID NO: 1385291 - RNA, 18 nt, Human
accuuugugcccuaucac

SEQ ID NO: 1385292 - RNA, 13 nt, Human
accuuugugcccu

SEQ ID NO: 1385293 - RNA, 17 nt, Human
accuuugugcccuauca

SEQ ID NO: 1385294 - RNA, 22 nt, Human
accuuuguuugcaucugaaaau

SEQ ID NO: 1385295 - RNA, 16 nt, Human
acgaaauguuauuuuu

SEQ ID NO: 1385296 - RNA, 23 nt, Human
acgaaauguuauuuuuuaauuau

SEQ ID NO: 1385297 - RNA, 13 nt, Human
acgaaauguuauu

SEQ ID NO: 1385298 - RNA, 12 nt, Human
acgaaauguuau

SEQ ID NO: 1385299 - RNA, 23 nt, Human
acgaaauaauuguuguucuguua

SEQ ID NO: 1385300 - RNA, 21 nt, Human
acgaaauaauuguuguucugu

SEQ ID NO: 1385301 - RNA, 17 nt, Human
acgaaauaauuguuguu

SEQ ID NO: 1385302 - RNA, 18 nt, Human
accuuuuuucaacaguga

SEQ ID NO: 1385303 - RNA, 23 nt, Human
accuuuuuucaacagugaagaca

SEQ ID NO: 1385304 - RNA, 23 nt, Human
uccaggagcuccaguguccugag

SEQ ID NO: 1385305 - RNA, 22 nt, Human
uccaggaugcuaacaucuaaaa

SEQ ID NO: 1385306 - RNA, 19 nt, Human
uccaggaugcuaacaucua

SEQ ID NO: 1385307 - RNA, 24 nt, Human
uccaggagcuccaguguccugagc

SEQ ID NO: 1385308 - RNA, 22 nt, Human
uccaggagcuccaguguccuga

SEQ ID NO: 1385309 - RNA, 21 nt, Human
uccaggagcuccaguguccug

SEQ ID NO: 1385310 - RNA, 20 nt, Human
uccaggagcuccaguguccu

SEQ ID NO: 1385311 - RNA, 17 nt, Human
uccaggagcuccagugu

SEQ ID NO: 1385312 - RNA, 15 nt, Human
uccaggagcuccagu

SEQ ID NO: 1385313 - RNA, 13 nt, Human
uccaggagcucca

SEQ ID NO: 1385314 - RNA, 18 nt, Human
uccaggagccugugccuc

SEQ ID NO: 1385315 - RNA, 19 nt, Human
uccagacagggaauuaggc

SEQ ID NO: 1385316 - RNA, 15 nt, Human
uccaggagccugugc

SEQ ID NO: 1385317 - RNA, 23 nt, Human
uccaggagccuggcuccguccag

SEQ ID NO: 1385318 - RNA, 14 nt, Human
uccaggagccuggc

SEQ ID NO: 1385319 - RNA, 13 nt, Human
uccaggagccugg

SEQ ID NO: 1385320 - RNA, 11 nt, Human
uccagccuggg

SEQ ID NO: 1385321 - RNA, 14 nt, Human
uccagccucagcuc

SEQ ID NO: 1385322 - RNA, 20 nt, Human
uccagccugcugccugcuuu

SEQ ID NO: 1385323 - RNA, 23 nt, Human
acucuccugccuugaaaaagaca

SEQ ID NO: 1385324 - RNA, 14 nt, Human
acucuccugccuug

SEQ ID NO: 1385325 - RNA, 12 nt, Human
acucuccugccu

SEQ ID NO: 1385326 - RNA, 23 nt, Human
acucuccuaggcauucuggaccu

SEQ ID NO: 1385327 - RNA, 20 nt, Human
acucuccuaggcauucugga

SEQ ID NO: 1385328 - RNA, 14 nt, Human
acuccuuccugccc

SEQ ID NO: 1385329 - RNA, 15 nt, Human
acuccuuccugcccc

SEQ ID NO: 1385330 - RNA, 23 nt, Human
uccuaggcauucuggaccucugg

SEQ ID NO: 1385331 - RNA, 19 nt, Human
uccuaggcauucuggaccu

SEQ ID NO: 1385332 - RNA, 14 nt, Human
acucugaguguuuu

SEQ ID NO: 1385333 - RNA, 20 nt, Human
acucucuuauugccucacuu

SEQ ID NO: 1385334 - RNA, 20 nt, Human
acucugaguguuuuaugaga

SEQ ID NO: 1385335 - RNA, 21 nt, Human
acucugaguguuuuaugagaa

SEQ ID NO: 1385336 - RNA, 19 nt, Human
acucugccuacagaacuuc

SEQ ID NO: 1385337 - RNA, 20 nt, Human
uccucagccuugccagagau

SEQ ID NO: 1385338 - RNA, 22 nt, Human
uccucaggcacacagcuacucu

SEQ ID NO: 1385339 - RNA, 17 nt, Human
uccucaggcacacagcu

SEQ ID NO: 1385340 - RNA, 16 nt, Human
uccucaggcacacagc

SEQ ID NO: 1385341 - RNA, 15 nt, Human
uccucaggcacacag

SEQ ID NO: 1385342 - RNA, 21 nt, Human
uccucagccuugccagagauc

SEQ ID NO: 1385343 - RNA, 15 nt, Human
uccucccucagugcc

SEQ ID NO: 1385344 - RNA, 17 nt, Human
uccucccgagcuccucu

SEQ ID NO: 1385345 - RNA, 20 nt, Human
uccucccgagcuccucuucc

SEQ ID NO: 1385346 - RNA, 23 nt, Human
uccucccaggguuuuaacuuugu

SEQ ID NO: 1385347 - RNA, 22 nt, Human
uccucccaggguuuuaacuuug

SEQ ID NO: 1385348 - RNA, 12 nt, Human
uccucccagggu

SEQ ID NO: 1385349 - RNA, 11 nt, Human
uccucccaggg

SEQ ID NO: 1385350 - RNA, 18 nt, Human
uccucauccaccccaucc

SEQ ID NO: 1385351 - RNA, 17 nt, Human
uccucauccaccccauc

SEQ ID NO: 1385352 - RNA, 15 nt, Human
uccucauccacccca

SEQ ID NO: 1385353 - RNA, 14 nt, Human
uccucauccacccc

SEQ ID NO: 1385354 - RNA, 12 nt, Human
uccucccagaaa

SEQ ID NO: 1385355 - RNA, 20 nt, Human
uccucccacuucagccuccc

SEQ ID NO: 1385356 - RNA, 18 nt, Human
acucuugccuguuuccca

SEQ ID NO: 1385357 - RNA, 14 nt, Human
acucuugccuguuu

SEQ ID NO: 1385358 - RNA, 22 nt, Human
acucuugcacagucacugcucu

SEQ ID NO: 1385359 - RNA, 16 nt, Human
acucuugauuauccau

SEQ ID NO: 1385360 - RNA, 16 nt, Human
acucuuauaaauuucu

SEQ ID NO: 1385361 - RNA, 19 nt, Human
acucuuauaucuauauuuu

SEQ ID NO: 1385362 - RNA, 22 nt, Human
acucuuauaucuauauuuuaca

SEQ ID NO: 1385363 - RNA, 18 nt, Human
acucuuauaucuauauuu

SEQ ID NO: 1385364 - RNA, 17 nt, Human
acucuuauaucuauauu

SEQ ID NO: 1385365 - RNA, 16 nt, Human
acucuuauaucuauau

SEQ ID NO: 1385366 - RNA, 22 nt, Human
acucuuaccauauguuugguaa

SEQ ID NO: 1385367 - RNA, 14 nt, Human
acucuuaaucaaau

SEQ ID NO: 1385368 - RNA, 15 nt, Human
acucuggcagccaca

SEQ ID NO: 1385369 - RNA, 14 nt, Human
acucuggcagccac

SEQ ID NO: 1385370 - RNA, 13 nt, Human
acucuggcagcca

SEQ ID NO: 1385371 - RNA, 17 nt, Human
acucuggcagccacacu

SEQ ID NO: 1385372 - RNA, 16 nt, Human
acucuggcagccacac

SEQ ID NO: 1385373 - RNA, 21 nt, Human
acucuuaagaagacugcauua

SEQ ID NO: 1385374 - RNA, 21 nt, Human
acuccucccaggguuuuaacu

SEQ ID NO: 1385375 - RNA, 19 nt, Human
acuccucccaggguuuuaa

SEQ ID NO: 1385376 - RNA, 22 nt, Human
acuccucccaggguuuuaacuu

SEQ ID NO: 1385377 - RNA, 15 nt, Human
acuccucccaggguu

SEQ ID NO: 1385378 - RNA, 13 nt, Human
acuccucccaggg

SEQ ID NO: 1385379 - RNA, 19 nt, Human
acuccucauuguaaacaaa

SEQ ID NO: 1385380 - RNA, 19 nt, Human
acuccuaguucuagaaaaa

SEQ ID NO: 1385381 - RNA, 16 nt, Human
acuccuaugaucugag

SEQ ID NO: 1385382 - RNA, 20 nt, Human
acuccuaguucuagaaaaac

SEQ ID NO: 1385383 - RNA, 18 nt, Human
acuccuaguucuagaaaa

SEQ ID NO: 1385384 - RNA, 19 nt, Human
acuccaucugguagaaggg

SEQ ID NO: 1385385 - RNA, 20 nt, Human
acuccaguuaaaaaaaauuu

SEQ ID NO: 1385386 - RNA, 18 nt, Human
acuccaguuaaaaaaaau

SEQ ID NO: 1385387 - RNA, 16 nt, Human
acucacagugcuuuua

SEQ ID NO: 1385388 - RNA, 21 nt, Human
acucacaccugaacugaacac

SEQ ID NO: 1385389 - RNA, 18 nt, Human
acucacaccacuagccuc

SEQ ID NO: 1385390 - RNA, 17 nt, Human
acucacaccacuagccu

SEQ ID NO: 1385391 - RNA, 23 nt, Human
acucacacaggcauuuccugggu

SEQ ID NO: 1385392 - RNA, 22 nt, Human
acucacacaggcauuuccuggg

SEQ ID NO: 1385393 - RNA, 20 nt, Human
acucacacaggcauuuccug

SEQ ID NO: 1385394 - RNA, 19 nt, Human
acucacacaggcauuuccu

SEQ ID NO: 1385395 - RNA, 14 nt, Human
acucacacaggcau

SEQ ID NO: 1385396 - RNA, 13 nt, Human
acucacacaggca

SEQ ID NO: 1385397 - RNA, 12 nt, Human
acucacacaggc

SEQ ID NO: 1385398 - RNA, 17 nt, Human
uccuagcugugugaaua

SEQ ID NO: 1385399 - RNA, 18 nt, Human
uccuagcuguccuuuuuc

SEQ ID NO: 1385400 - RNA, 15 nt, Human
uccuagcuguccuuu

SEQ ID NO: 1385401 - RNA, 13 nt, Human
uccguaaaaauga

SEQ ID NO: 1385402 - RNA, 15 nt, Human
uccguaaaaaugauu

SEQ ID NO: 1385403 - RNA, 16 nt, Human
uccgguguucuaagau

SEQ ID NO: 1385404 - RNA, 15 nt, Human
uccgguguucuaaga

SEQ ID NO: 1385405 - RNA, 14 nt, Human
uccgguguucuaag

SEQ ID NO: 1385406 - RNA, 16 nt, Human
ucccuuuuuuuaagua

SEQ ID NO: 1385407 - RNA, 21 nt, Human
ucccuuuuuuuaaguaaggaa

SEQ ID NO: 1385408 - RNA, 14 nt, Human
ucccuugggcucug

SEQ ID NO: 1385409 - RNA, 13 nt, Human
ucccuugggcucu

SEQ ID NO: 1385410 - RNA, 14 nt, Human
ucccuugggcuccc

SEQ ID NO: 1385411 - RNA, 12 nt, Human
ucccuugggcuc

SEQ ID NO: 1385412 - RNA, 21 nt, Human
ucccuugggcucugaugaaaa

SEQ ID NO: 1385413 - RNA, 17 nt, Human
ucccuugggcucugaug

SEQ ID NO: 1385414 - RNA, 16 nt, Human
ucccuugggcucugau

SEQ ID NO: 1385415 - RNA, 13 nt, Human
ucccuuuuuuuaa

SEQ ID NO: 1385416 - RNA, 17 nt, Human
uccucccucccucuccg

SEQ ID NO: 1385417 - RNA, 18 nt, Human
uccucuuucagcuccuga

SEQ ID NO: 1385418 - RNA, 17 nt, Human
uccucuuucagcuccug

SEQ ID NO: 1385419 - RNA, 14 nt, Human
uccugaaauuucag

SEQ ID NO: 1385420 - RNA, 15 nt, Human
uccugaaauuucaga

SEQ ID NO: 1385421 - RNA, 17 nt, Human
uccugaaacaacuugga

SEQ ID NO: 1385422 - RNA, 23 nt, Human
uccugaaaagguuuaugaaaaag

SEQ ID NO: 1385423 - RNA, 21 nt, Human
uccugaaaagguuuaugaaaa

SEQ ID NO: 1385424 - RNA, 20 nt, Human
acucuuuugcuuuauuccag

SEQ ID NO: 1385425 - RNA, 14 nt, Human
acucuuuugcuuua

SEQ ID NO: 1385426 - RNA, 12 nt, Human
acucuuuugcuu

SEQ ID NO: 1385427 - RNA, 18 nt, Human
acucuuuuccuucccuuu

SEQ ID NO: 1385428 - RNA, 19 nt, Human
acucuuuggucguuuuuuu

SEQ ID NO: 1385429 - RNA, 18 nt, Human
acucuuuguuauuugaaa

SEQ ID NO: 1385430 - RNA, 14 nt, Human
acucuuuguaagag

SEQ ID NO: 1385431 - RNA, 13 nt, Human
acucuuuguaaga

SEQ ID NO: 1385432 - RNA, 23 nt, Human
acucuuucgguagguggaagcua

SEQ ID NO: 1385433 - RNA, 18 nt, Human
acucuuuaugcuugcaaa

SEQ ID NO: 1385434 - RNA, 17 nt, Human
acucuuuaugcuugcaa

SEQ ID NO: 1385435 - RNA, 15 nt, Human
acucuuuaugcuugc

SEQ ID NO: 1385436 - RNA, 14 nt, Human
acucuuuaugcuug

SEQ ID NO: 1385437 - RNA, 18 nt, Human
acucuuuaugaucuggcc

SEQ ID NO: 1385438 - RNA, 13 nt, Human
acucuuucaaaac

SEQ ID NO: 1385439 - RNA, 11 nt, Human
acucuuucaaa

SEQ ID NO: 1385440 - RNA, 13 nt, Human
uccugacacuuua

SEQ ID NO: 1385441 - RNA, 17 nt, Human
uccugacacugcuggag

SEQ ID NO: 1385442 - RNA, 15 nt, Human
uccugacacugcugg

SEQ ID NO: 1385443 - RNA, 13 nt, Human
uccugacacugca

SEQ ID NO: 1385444 - RNA, 22 nt, Human
uccugacacccuucucccacuc

SEQ ID NO: 1385445 - RNA, 21 nt, Human
uccugacacccuucucccacu

SEQ ID NO: 1385446 - RNA, 20 nt, Human
uccugacacccuucucccac

SEQ ID NO: 1385447 - RNA, 19 nt, Human
uccugacacccuucuccca

SEQ ID NO: 1385448 - RNA, 15 nt, Human
acucuuguuuccuua

SEQ ID NO: 1385449 - RNA, 24 nt, Human
acugaacaucugaguccuggauga

SEQ ID NO: 1385450 - RNA, 23 nt, Human
acugaacaucugaguccuggaug

SEQ ID NO: 1385451 - RNA, 20 nt, Human
acugaacaucugaguccugg

SEQ ID NO: 1385452 - RNA, 19 nt, Human
acugaacaucugaguccug

SEQ ID NO: 1385453 - RNA, 15 nt, Human
acugaaaaaauauau

SEQ ID NO: 1385454 - RNA, 22 nt, Human
acugaacaccauugaaggcuua

SEQ ID NO: 1385455 - RNA, 21 nt, Human
acugaacaccauugaaggcuu

SEQ ID NO: 1385456 - RNA, 20 nt, Human
acugaacaccauugaaggcu

SEQ ID NO: 1385457 - RNA, 16 nt, Human
acugaaaaaauauaug

SEQ ID NO: 1385458 - RNA, 14 nt, Human
acugaaaaaauaua

SEQ ID NO: 1385459 - RNA, 13 nt, Human
acugaaaaaauau

SEQ ID NO: 1385460 - RNA, 21 nt, Human
acucuuuugcuuuauuccaga

SEQ ID NO: 1385461 - RNA, 18 nt, Human
acugaacucacuuuccuc

SEQ ID NO: 1385462 - RNA, 16 nt, Human
acugaacuuugcugag

SEQ ID NO: 1385463 - RNA, 19 nt, Human
acugaacuuugcugagccu

SEQ ID NO: 1385464 - RNA, 19 nt, Human
acugagauaccagcgagga

SEQ ID NO: 1385465 - RNA, 20 nt, Human
acugagauccuuccuuuuga

SEQ ID NO: 1385466 - RNA, 18 nt, Human
acugagauaccagcgagg

SEQ ID NO: 1385467 - RNA, 21 nt, Human
acugagaggacagagagaaau

SEQ ID NO: 1385468 - RNA, 22 nt, Human
acugagcaacgcuauuccagcu

SEQ ID NO: 1385469 - RNA, 21 nt, Human
acugagcaacgcuauuccagc

SEQ ID NO: 1385470 - RNA, 20 nt, Human
acugagcaacgcuauuccag

SEQ ID NO: 1385471 - RNA, 20 nt, Human
acugagagaugcagaaauau

SEQ ID NO: 1385472 - RNA, 16 nt, Human
acugagaccaaggcuu

SEQ ID NO: 1385473 - RNA, 23 nt, Human
acugagaccaaggcuuucucuac

SEQ ID NO: 1385474 - RNA, 16 nt, Human
acugagacaaugccuu

SEQ ID NO: 1385475 - RNA, 23 nt, Human
acugacuuugcuugcuuugaagu

SEQ ID NO: 1385476 - RNA, 17 nt, Human
acugacuuugcuugcuu

SEQ ID NO: 1385477 - RNA, 16 nt, Human
acugacuuugcuugcu

SEQ ID NO: 1385478 - RNA, 15 nt, Human
acugacuuugcuugc

SEQ ID NO: 1385479 - RNA, 13 nt, Human
acugacuuugcuu

SEQ ID NO: 1385480 - RNA, 12 nt, Human
acugagaaauuu

SEQ ID NO: 1385481 - RNA, 17 nt, Human
acugagaaauuuauaaa

SEQ ID NO: 1385482 - RNA, 21 nt, Human
acugagaaauuuauaaacuuu

SEQ ID NO: 1385483 - RNA, 24 nt, Human
acugacuauucuugauguaaaauc

SEQ ID NO: 1385484 - RNA, 23 nt, Human
acugacuauucuugauguaaaau

SEQ ID NO: 1385485 - RNA, 22 nt, Human
acugacuauucuugauguaaaa

SEQ ID NO: 1385486 - RNA, 20 nt, Human
acugacucuuaagaagacug

SEQ ID NO: 1385487 - RNA, 18 nt, Human
acugacucuuaagaagac

SEQ ID NO: 1385488 - RNA, 17 nt, Human
acugacucuuaagaaga

SEQ ID NO: 1385489 - RNA, 16 nt, Human
acugacucuuaagaag

SEQ ID NO: 1385490 - RNA, 15 nt, Human
acugacucuuaagaa

SEQ ID NO: 1385491 - RNA, 14 nt, Human
acugacucuuaaga

SEQ ID NO: 1385492 - RNA, 13 nt, Human
acugacucuuaag

SEQ ID NO: 1385493 - RNA, 20 nt, Human
acugacuauucuugauguaa

SEQ ID NO: 1385494 - RNA, 18 nt, Human
acugacuauucuugaugu

SEQ ID NO: 1385495 - RNA, 16 nt, Human
acugacggacucauga

SEQ ID NO: 1385496 - RNA, 13 nt, Human
acugacggacuca

SEQ ID NO: 1385497 - RNA, 14 nt, Human
acugacgccagggu

SEQ ID NO: 1385498 - RNA, 12 nt, Human
acugaagaagca

SEQ ID NO: 1385499 - RNA, 21 nt, Human
acugaacuuugcugagccugu

SEQ ID NO: 1385500 - RNA, 14 nt, Human
uccugaucagagcc

SEQ ID NO: 1385501 - RNA, 19 nt, Human
uccugcaccggggccuggg

SEQ ID NO: 1385502 - RNA, 18 nt, Human
uccugcaccggggccugg

SEQ ID NO: 1385503 - RNA, 15 nt, Human
uccugaucagagccg

SEQ ID NO: 1385504 - RNA, 16 nt, Human
acugauauauuuuaca

SEQ ID NO: 1385505 - RNA, 22 nt, Human
acugauauaucaugagugaaua

SEQ ID NO: 1385506 - RNA, 14 nt, Human
acugagccuuguaa

SEQ ID NO: 1385507 - RNA, 17 nt, Human
acugauauauuuuacaa

SEQ ID NO: 1385508 - RNA, 13 nt, Human
acugauaaagaug

SEQ ID NO: 1385509 - RNA, 21 nt, Human
acugauaaagaugagugagca

SEQ ID NO: 1385510 - RNA, 19 nt, Human
uccugccuuggccucccaa

SEQ ID NO: 1385511 - RNA, 21 nt, Human
uccugccuuggccucccaagu

SEQ ID NO: 1385512 - RNA, 16 nt, Human
uccugccuugaaaaag

SEQ ID NO: 1385513 - RNA, 23 nt, Human
uccugccuuccuccugggcccuc

SEQ ID NO: 1385514 - RNA, 22 nt, Human
uccugccuuccuccugggcccu

SEQ ID NO: 1385515 - RNA, 19 nt, Human
uccugccuuccuccugggc

SEQ ID NO: 1385516 - RNA, 16 nt, Human
uccugccuuccuccug

SEQ ID NO: 1385517 - RNA, 14 nt, Human
uccugccuuccucc

SEQ ID NO: 1385518 - RNA, 14 nt, Human
uccugccuguggcg

SEQ ID NO: 1385519 - RNA, 18 nt, Human
uccugccuguggccauga

SEQ ID NO: 1385520 - RNA, 15 nt, Human
uccugccuguggcca

SEQ ID NO: 1385521 - RNA, 14 nt, Human
uccugccuguggcc

SEQ ID NO: 1385522 - RNA, 18 nt, Human
uccugcugcucccucaga

SEQ ID NO: 1385523 - RNA, 17 nt, Human
uccugcugcucccucag

SEQ ID NO: 1385524 - RNA, 16 nt, Human
uccugcugcucccuca

SEQ ID NO: 1385525 - RNA, 15 nt, Human
uccugcugcucccuc

SEQ ID NO: 1385526 - RNA, 14 nt, Human
uccugcugcucccu

SEQ ID NO: 1385527 - RNA, 19 nt, Human
uccugcugcugucugggug

SEQ ID NO: 1385528 - RNA, 18 nt, Human
uccugcugcugucugggu

SEQ ID NO: 1385529 - RNA, 17 nt, Human
uccugcugcugucuggg

SEQ ID NO: 1385530 - RNA, 15 nt, Human
uccugcugcugucug

SEQ ID NO: 1385531 - RNA, 14 nt, Human
uccugcugcugucu

SEQ ID NO: 1385532 - RNA, 13 nt, Human
uccugcugcuguc

SEQ ID NO: 1385533 - RNA, 20 nt, Human
uccugcugcucccucagacu

SEQ ID NO: 1385534 - RNA, 19 nt, Human
uccugcugcucccucagac

SEQ ID NO: 1385535 - RNA, 22 nt, Human
uccugcuugaugggauucugga

SEQ ID NO: 1385536 - RNA, 20 nt, Human
uccugcugcugucugggugc

SEQ ID NO: 1385537 - RNA, 13 nt, Human
uccugccuguggc

SEQ ID NO: 1385538 - RNA, 12 nt, Human
uccugccugugg

SEQ ID NO: 1385539 - RNA, 22 nt, Human
uccugccucuacugggaaggcu

SEQ ID NO: 1385540 - RNA, 21 nt, Human
uccugccucuacugggaaggc

SEQ ID NO: 1385541 - RNA, 17 nt, Human
uccugccucuacuggga

SEQ ID NO: 1385542 - RNA, 16 nt, Human
uccugccucuacuggg

SEQ ID NO: 1385543 - RNA, 15 nt, Human
uccugccucuacugg

SEQ ID NO: 1385544 - RNA, 21 nt, Human
uccugggaaauauucccuaga

SEQ ID NO: 1385545 - RNA, 20 nt, Human
uccugggaaauauucccuag

SEQ ID NO: 1385546 - RNA, 16 nt, Human
uccugggaaauauucc

SEQ ID NO: 1385547 - RNA, 14 nt, Human
uccugggaaauauu

SEQ ID NO: 1385548 - RNA, 22 nt, Human
uccuggcuucccauccccagcg

SEQ ID NO: 1385549 - RNA, 20 nt, Human
uccuggcuucccauccccag

SEQ ID NO: 1385550 - RNA, 14 nt, Human
uccuggcuucccau

SEQ ID NO: 1385551 - RNA, 23 nt, Human
uccuggcucuugauaccccccuc

SEQ ID NO: 1385552 - RNA, 20 nt, Human
uccuggcgccuggcaguccg

SEQ ID NO: 1385553 - RNA, 16 nt, Human
uccuggacagcugugc

SEQ ID NO: 1385554 - RNA, 15 nt, Human
uccuggacagcugug

SEQ ID NO: 1385555 - RNA, 14 nt, Human
uccuggacagcugu

SEQ ID NO: 1385556 - RNA, 13 nt, Human
uccuggacagcug

SEQ ID NO: 1385557 - RNA, 11 nt, Human
uccuggacagc

SEQ ID NO: 1385558 - RNA, 19 nt, Human
uccuggacacucagaccug

SEQ ID NO: 1385559 - RNA, 15 nt, Human
uccugggagcuuuug

SEQ ID NO: 1385560 - RNA, 18 nt, Human
uccugcuuugggaagccg

SEQ ID NO: 1385561 - RNA, 19 nt, Human
uccugcuugccaaggcaga

SEQ ID NO: 1385562 - RNA, 17 nt, Human
uccugcuugccaaggca

SEQ ID NO: 1385563 - RNA, 16 nt, Human
uccugcuugccaaggc

SEQ ID NO: 1385564 - RNA, 12 nt, Human
uccugcuugcca

SEQ ID NO: 1385565 - RNA, 23 nt, Human
uccugcuugaugggauucuggac

SEQ ID NO: 1385566 - RNA, 22 nt, Human
uccuggaaauugacgaggggug

SEQ ID NO: 1385567 - RNA, 16 nt, Human
uccuggaaaucagggu

SEQ ID NO: 1385568 - RNA, 22 nt, Human
uccuggaagcgcgagggccuca

SEQ ID NO: 1385569 - RNA, 20 nt, Human
uccuggaagccagcuuuccc

SEQ ID NO: 1385570 - RNA, 18 nt, Human
uccuggaagccagcuuuc

SEQ ID NO: 1385571 - RNA, 14 nt, Human
uccuggaagccagc

SEQ ID NO: 1385572 - RNA, 17 nt, Human
uccuggacacucagacc

SEQ ID NO: 1385573 - RNA, 22 nt, Human
uccuggaauaucuccgucaacu

SEQ ID NO: 1385574 - RNA, 23 nt, Human
uccuggaagugcuaauuuugaaa

SEQ ID NO: 1385575 - RNA, 22 nt, Human
ucucauguugaagccacugccu

SEQ ID NO: 1385576 - RNA, 17 nt, Human
ucucauggguggcacuc

SEQ ID NO: 1385577 - RNA, 17 nt, Human
ucucaggccagagccaa

SEQ ID NO: 1385578 - RNA, 20 nt, Human
ucucauuuuuuaaaaaagcu

SEQ ID NO: 1385579 - RNA, 17 nt, Human
ucucauuuuuccguaaa

SEQ ID NO: 1385580 - RNA, 13 nt, Human
ucuccaaaauaaa

SEQ ID NO: 1385581 - RNA, 22 nt, Human
ucucauuuagccuguccuguca

SEQ ID NO: 1385582 - RNA, 18 nt, Human
ucucauuuagccuguccu

SEQ ID NO: 1385583 - RNA, 15 nt, Human
ucucauuuccaagca

SEQ ID NO: 1385584 - RNA, 23 nt, Human
ucucaggaccaaagcuuucaugu

SEQ ID NO: 1385585 - RNA, 21 nt, Human
ucucaggacacaggccugugu

SEQ ID NO: 1385586 - RNA, 20 nt, Human
ucucaggacacaggccugug

SEQ ID NO: 1385587 - RNA, 16 nt, Human
ucucaggauccaagcu

SEQ ID NO: 1385588 - RNA, 15 nt, Human
ucucaggauccaagc

SEQ ID NO: 1385589 - RNA, 14 nt, Human
ucucaggauccaag

SEQ ID NO: 1385590 - RNA, 13 nt, Human
ucucaggauccaa

SEQ ID NO: 1385591 - RNA, 19 nt, Human
ucucaggacacaggccugu

SEQ ID NO: 1385592 - RNA, 18 nt, Human
ucucaggacacaggccug

SEQ ID NO: 1385593 - RNA, 17 nt, Human
ucucaggacacaggccu

SEQ ID NO: 1385594 - RNA, 16 nt, Human
ucucaggacacaggcc

SEQ ID NO: 1385595 - RNA, 15 nt, Human
ucucaggacacaggc

SEQ ID NO: 1385596 - RNA, 20 nt, Human
ucucagccccuuucccuugu

SEQ ID NO: 1385597 - RNA, 12 nt, Human
ucucagcccuca

SEQ ID NO: 1385598 - RNA, 17 nt, Human
ucucagccccuuucccu

SEQ ID NO: 1385599 - RNA, 12 nt, Human
ucucagccccuu

SEQ ID NO: 1385600 - RNA, 19 nt, Human
acuugauccauuucuaauu

SEQ ID NO: 1385601 - RNA, 20 nt, Human
acuugauccauuucuaauua

SEQ ID NO: 1385602 - RNA, 18 nt, Human
acuugauccauuucuaau

SEQ ID NO: 1385603 - RNA, 17 nt, Human
acuugauccauuucuaa

SEQ ID NO: 1385604 - RNA, 21 nt, Human
acuugcaaccgucuguuaugc

SEQ ID NO: 1385605 - RNA, 23 nt, Human
acuugcaaaaagggucaguaugg

SEQ ID NO: 1385606 - RNA, 17 nt, Human
acuugcaaaaaggguca

SEQ ID NO: 1385607 - RNA, 16 nt, Human
acuugcucuugaugcc

SEQ ID NO: 1385608 - RNA, 17 nt, Human
acuugcucuugaugccu

SEQ ID NO: 1385609 - RNA, 18 nt, Human
acuugcucuugaugccug

SEQ ID NO: 1385610 - RNA, 14 nt, Human
acuugcaucacuua

SEQ ID NO: 1385611 - RNA, 20 nt, Human
acuugcucuugaugccuggc

SEQ ID NO: 1385612 - RNA, 19 nt, Human
acuuguggacuaaaagaua

SEQ ID NO: 1385613 - RNA, 20 nt, Human
acuuguggacuaaaagauau

SEQ ID NO: 1385614 - RNA, 15 nt, Human
acuuguggacuaaaa

SEQ ID NO: 1385615 - RNA, 18 nt, Human
acuuguggacuaaaagau

SEQ ID NO: 1385616 - RNA, 21 nt, Human
acuugcuuaucaacuuccuaa

SEQ ID NO: 1385617 - RNA, 15 nt, Human
acuugucaauaaaau

SEQ ID NO: 1385618 - RNA, 18 nt, Human
acuuguauuauguguguu

SEQ ID NO: 1385619 - RNA, 19 nt, Human
acuuguauuauguguguuu

SEQ ID NO: 1385620 - RNA, 16 nt, Human
acuugcuuauuugaca

SEQ ID NO: 1385621 - RNA, 19 nt, Human
acuugcuuaucaacuuccu

SEQ ID NO: 1385622 - RNA, 14 nt, Human
acuugcuuuuaaaa

SEQ ID NO: 1385623 - RNA, 14 nt, Human
acuuugaauguguu

SEQ ID NO: 1385624 - RNA, 12 nt, Human
acuuugaaugug

SEQ ID NO: 1385625 - RNA, 22 nt, Human
acuuugaauguguuucacaguu

SEQ ID NO: 1385626 - RNA, 17 nt, Human
acuuugaaguuagcuuu

SEQ ID NO: 1385627 - RNA, 14 nt, Human
acuuucugccugga

SEQ ID NO: 1385628 - RNA, 13 nt, Human
acuuucugccugg

SEQ ID NO: 1385629 - RNA, 18 nt, Human
acuuuacacaauagaauu

SEQ ID NO: 1385630 - RNA, 12 nt, Human
acuuuaccuuuu

SEQ ID NO: 1385631 - RNA, 13 nt, Human
acuuuacccauuu

SEQ ID NO: 1385632 - RNA, 20 nt, Human
acuuuacacaauagaauuau

SEQ ID NO: 1385633 - RNA, 22 nt, Human
acuuuaauuaccaaccuguuac

SEQ ID NO: 1385634 - RNA, 16 nt, Human
ucuccuccaugggaga

SEQ ID NO: 1385635 - RNA, 20 nt, Human
acuuuaauuaccaaccuguu

SEQ ID NO: 1385636 - RNA, 20 nt, Human
ucucccuugggcucugauga

SEQ ID NO: 1385637 - RNA, 15 nt, Human
ucucccuuuuccaug

SEQ ID NO: 1385638 - RNA, 22 nt, Human
ucucccuugggcucugaugaaa

SEQ ID NO: 1385639 - RNA, 18 nt, Human
ucucccuugggcucugau

SEQ ID NO: 1385640 - RNA, 17 nt, Human
ucucccuugggcucuga

SEQ ID NO: 1385641 - RNA, 16 nt, Human
ucucccuugggcucug

SEQ ID NO: 1385642 - RNA, 15 nt, Human
ucucccuugggcucu

SEQ ID NO: 1385643 - RNA, 14 nt, Human
ucucccuugggcuc

SEQ ID NO: 1385644 - RNA, 15 nt, Human
ucuccccagcuccca

SEQ ID NO: 1385645 - RNA, 15 nt, Human
ucuccccagguccag

SEQ ID NO: 1385646 - RNA, 18 nt, Human
ucuccccagcucccagga

SEQ ID NO: 1385647 - RNA, 14 nt, Human
ucuccccagcuccc

SEQ ID NO: 1385648 - RNA, 19 nt, Human
ucuccccagcccagagaca

SEQ ID NO: 1385649 - RNA, 18 nt, Human
ucuccccagcccagagac

SEQ ID NO: 1385650 - RNA, 17 nt, Human
ucuccccagcccagaga

SEQ ID NO: 1385651 - RNA, 16 nt, Human
ucuccccagcccagag

SEQ ID NO: 1385652 - RNA, 15 nt, Human
ucuccccagcccaga

SEQ ID NO: 1385653 - RNA, 14 nt, Human
ucuccccagcccag

SEQ ID NO: 1385654 - RNA, 15 nt, Human
ucuccucacuguauc

SEQ ID NO: 1385655 - RNA, 20 nt, Human
ucuccccacgagggcuggcu

SEQ ID NO: 1385656 - RNA, 19 nt, Human
ucuccccacgagggcuggc

SEQ ID NO: 1385657 - RNA, 19 nt, Human
ucuccacagcaaccccagg

SEQ ID NO: 1385658 - RNA, 14 nt, Human
ucuccacagcaacc

SEQ ID NO: 1385659 - RNA, 21 nt, Human
ucucauuuuuccguaaaaaug

SEQ ID NO: 1385660 - RNA, 23 nt, Human
acuuuggaaccagacucuugccu

SEQ ID NO: 1385661 - RNA, 22 nt, Human
acuuuggaaccagacucuugcc

SEQ ID NO: 1385662 - RNA, 21 nt, Human
acuuuggaaccagacucuugc

SEQ ID NO: 1385663 - RNA, 17 nt, Human
acuuuggaaccagacuc

SEQ ID NO: 1385664 - RNA, 16 nt, Human
acuuuggaaccagacu

SEQ ID NO: 1385665 - RNA, 15 nt, Human
acuuuggaaccagac

SEQ ID NO: 1385666 - RNA, 22 nt, Human
acuuugaccuaaauuauuuacu

SEQ ID NO: 1385667 - RNA, 20 nt, Human
acuuugaccuaaauuauuua

SEQ ID NO: 1385668 - RNA, 18 nt, Human
acuuugacaguguuuuua

SEQ ID NO: 1385669 - RNA, 14 nt, Human
acuuugacaguguu

SEQ ID NO: 1385670 - RNA, 14 nt, Human
acuuugaccucugc

SEQ ID NO: 1385671 - RNA, 12 nt, Human
acuuugaccucu

SEQ ID NO: 1385672 - RNA, 13 nt, Human
acuuugaccucug

SEQ ID NO: 1385673 - RNA, 22 nt, Human
acuuuggaguccccucaccucc

SEQ ID NO: 1385674 - RNA, 18 nt, Human
acuuuggaguccccucac

SEQ ID NO: 1385675 - RNA, 23 nt, Human
acuuuggaguccccucaccuccu

SEQ ID NO: 1385676 - RNA, 22 nt, Human
acuuugguaccagauaacuuuu

SEQ ID NO: 1385677 - RNA, 13 nt, Human
acuuuggcugcau

SEQ ID NO: 1385678 - RNA, 17 nt, Human
acuuuguacauuuggga

SEQ ID NO: 1385679 - RNA, 19 nt, Human
acuuugguaccagauaacu

SEQ ID NO: 1385680 - RNA, 12 nt, Human
acuuuuguucuu

SEQ ID NO: 1385681 - RNA, 13 nt, Human
acuuuuguucuug

SEQ ID NO: 1385682 - RNA, 13 nt, Human
ucuccuuguguua

SEQ ID NO: 1385683 - RNA, 21 nt, Human
ucuccuuguguuacuaaguuu

SEQ ID NO: 1385684 - RNA, 14 nt, Human
acuuuuuauauaua

SEQ ID NO: 1385685 - RNA, 13 nt, Human
acuuuuuauauau

SEQ ID NO: 1385686 - RNA, 12 nt, Human
acuuuuuauaua

SEQ ID NO: 1385687 - RNA, 11 nt, Human
acuuuuuacaa

SEQ ID NO: 1385688 - RNA, 18 nt, Human
acuuuuuaaauguaaaga

SEQ ID NO: 1385689 - RNA, 15 nt, Human
acuuuuguucuuggu

SEQ ID NO: 1385690 - RNA, 23 nt, Human
acuuuuguucuugguuuguaaau

SEQ ID NO: 1385691 - RNA, 15 nt, Human
acuuuuuauauauau

SEQ ID NO: 1385692 - RNA, 22 nt, Human
acuuuuuauggcacuaguauuu

SEQ ID NO: 1385693 - RNA, 21 nt, Human
acuguucuuagcucaaugagc

SEQ ID NO: 1385694 - RNA, 23 nt, Human
acuguucuuagcucaaugagcau

SEQ ID NO: 1385695 - RNA, 20 nt, Human
acuguucuuagcucaaugag

SEQ ID NO: 1385696 - RNA, 13 nt, Human
acuguucuugaau

SEQ ID NO: 1385697 - RNA, 18 nt, Human
acuguucccccugugcag

SEQ ID NO: 1385698 - RNA, 16 nt, Human
acuguucccccugugc

SEQ ID NO: 1385699 - RNA, 15 nt, Human
acuguucccccugug

SEQ ID NO: 1385700 - RNA, 15 nt, Human
ucuaccucaggcagc

SEQ ID NO: 1385701 - RNA, 22 nt, Human
ucuaccuagauuuaauauaaag

SEQ ID NO: 1385702 - RNA, 21 nt, Human
ucuaccuagauuuaauauaaa

SEQ ID NO: 1385703 - RNA, 19 nt, Human
ucuaccuagauuuaauaua

SEQ ID NO: 1385704 - RNA, 17 nt, Human
ucuaccuagauuuaaua

SEQ ID NO: 1385705 - RNA, 16 nt, Human
ucuaccuagauuuaau

SEQ ID NO: 1385706 - RNA, 13 nt, Human
ucuacccugggau

SEQ ID NO: 1385707 - RNA, 12 nt, Human
ucuacccuggga

SEQ ID NO: 1385708 - RNA, 13 nt, Human
ucuaaguuucuaa

SEQ ID NO: 1385709 - RNA, 21 nt, Human
uccuggcuucccauccccagc

SEQ ID NO: 1385710 - RNA, 15 nt, Human
ucuaauaauuucuaa

SEQ ID NO: 1385711 - RNA, 23 nt, Human
ucuaaguuucuaagauucuaaag

SEQ ID NO: 1385712 - RNA, 22 nt, Human
ucuaaguuucuaagauucuaaa

SEQ ID NO: 1385713 - RNA, 20 nt, Human
ucuaaguuucuaagauucua

SEQ ID NO: 1385714 - RNA, 18 nt, Human
ucuaaguuucuaagauuc

SEQ ID NO: 1385715 - RNA, 17 nt, Human
ucuaaguuucuaagauu

SEQ ID NO: 1385716 - RNA, 16 nt, Human
ucuaaguuucuaagau

SEQ ID NO: 1385717 - RNA, 15 nt, Human
ucuaaguuucuaaga

SEQ ID NO: 1385718 - RNA, 14 nt, Human
ucuaaguuucuaag

SEQ ID NO: 1385719 - RNA, 17 nt, Human
ucuaauaauuucuaaug

SEQ ID NO: 1385720 - RNA, 16 nt, Human
ucuaauaauuucuaau

SEQ ID NO: 1385721 - RNA, 18 nt, Human
ucuaauaauuucuaaugu

SEQ ID NO: 1385722 - RNA, 18 nt, Human
ucuacagaugagucacac

SEQ ID NO: 1385723 - RNA, 21 nt, Human
acuucaguuucacagaaaaua

SEQ ID NO: 1385724 - RNA, 20 nt, Human
acuucagguauaccucacuu

SEQ ID NO: 1385725 - RNA, 18 nt, Human
acuucagguauaccucac

SEQ ID NO: 1385726 - RNA, 16 nt, Human
acuuauuaucuucagg

SEQ ID NO: 1385727 - RNA, 12 nt, Human
acuuauuaacaa

SEQ ID NO: 1385728 - RNA, 21 nt, Human
acuuauuaacaauuaggcaga

SEQ ID NO: 1385729 - RNA, 14 nt, Human
acuuaugcugauuu

SEQ ID NO: 1385730 - RNA, 23 nt, Human
acuuagggcaccagggguuucuc

SEQ ID NO: 1385731 - RNA, 16 nt, Human
acuuagggcaccaggg

SEQ ID NO: 1385732 - RNA, 14 nt, Human
acuuacaugauuca

SEQ ID NO: 1385733 - RNA, 21 nt, Human
acuuacuguacaugaaaacac

SEQ ID NO: 1385734 - RNA, 15 nt, Human
acuuacaucaugugu

SEQ ID NO: 1385735 - RNA, 14 nt, Human
acuuacuugcuuau

SEQ ID NO: 1385736 - RNA, 13 nt, Human
acuuacuugcuua

SEQ ID NO: 1385737 - RNA, 12 nt, Human
acuuacaugauu

SEQ ID NO: 1385738 - RNA, 22 nt, Human
acuuacuguacaugaaaacaca

SEQ ID NO: 1385739 - RNA, 16 nt, Human
acuuaauguauguuac

SEQ ID NO: 1385740 - RNA, 15 nt, Human
acuuaauguauguua

SEQ ID NO: 1385741 - RNA, 13 nt, Human
acuuaauguaugu

SEQ ID NO: 1385742 - RNA, 17 nt, Human
acuuaagcaucuggcuc

SEQ ID NO: 1385743 - RNA, 22 nt, Human
acuuaaucuaaauggaaccacu

SEQ ID NO: 1385744 - RNA, 17 nt, Human
acuuaaucuaaauggaa

SEQ ID NO: 1385745 - RNA, 19 nt, Human
acuuaaucuaaauggaacc

SEQ ID NO: 1385746 - RNA, 18 nt, Human
acuguugcacguguguuu

SEQ ID NO: 1385747 - RNA, 16 nt, Human
acuguugcacgugugu

SEQ ID NO: 1385748 - RNA, 15 nt, Human
acuguugcacgugug

SEQ ID NO: 1385749 - RNA, 14 nt, Human
acuguugcacgugu

SEQ ID NO: 1385750 - RNA, 13 nt, Human
acuguugcacgug

SEQ ID NO: 1385751 - RNA, 12 nt, Human
acuguugcacgu

SEQ ID NO: 1385752 - RNA, 11 nt, Human
acuguugcacg

SEQ ID NO: 1385753 - RNA, 10 nt, Human
acuguugcac

SEQ ID NO: 1385754 - RNA, 16 nt, Human
acuuaaauaguauuuc

SEQ ID NO: 1385755 - RNA, 22 nt, Human
acuguugcacguguguuuuucu

SEQ ID NO: 1385756 - RNA, 17 nt, Human
acuuaacggaccaaagc

SEQ ID NO: 1385757 - RNA, 15 nt, Human
acuuaaauguuauua

SEQ ID NO: 1385758 - RNA, 18 nt, Human
acuuaaauguuauuaucu

SEQ ID NO: 1385759 - RNA, 13 nt, Human
acuuaaauuuuag

SEQ ID NO: 1385760 - RNA, 15 nt, Human
ucuauuuuggauugu

SEQ ID NO: 1385761 - RNA, 18 nt, Human
ucuauuuuauuaugaaga

SEQ ID NO: 1385762 - RNA, 16 nt, Human
ucuauuuuauuaugaa

SEQ ID NO: 1385763 - RNA, 20 nt, Human
ucuauuuuauuaugaagaag

SEQ ID NO: 1385764 - RNA, 12 nt, Human
ucuauuuuaauu

SEQ ID NO: 1385765 - RNA, 20 nt, Human
ucuauuuuaauaaaaauaau

SEQ ID NO: 1385766 - RNA, 14 nt, Human
ucuauuuuaaagac

SEQ ID NO: 1385767 - RNA, 18 nt, Human
ucuauuuggggcuugaug

SEQ ID NO: 1385768 - RNA, 13 nt, Human
ucuauuuggggcu

SEQ ID NO: 1385769 - RNA, 18 nt, Human
ucuauuuauauguacaug

SEQ ID NO: 1385770 - RNA, 13 nt, Human
ucuauuuauaugu

SEQ ID NO: 1385771 - RNA, 21 nt, Human
ucucaccggcucucaccuggc

SEQ ID NO: 1385772 - RNA, 18 nt, Human
ucucaccggcucucaccu

SEQ ID NO: 1385773 - RNA, 14 nt, Human
ucucaccggcucuc

SEQ ID NO: 1385774 - RNA, 18 nt, Human
ucucacccuggaggcacc

SEQ ID NO: 1385775 - RNA, 19 nt, Human
ucucacccuggaggcaccu

SEQ ID NO: 1385776 - RNA, 16 nt, Human
ucucacccuggaggca

SEQ ID NO: 1385777 - RNA, 14 nt, Human
ucucacccuggagg

SEQ ID NO: 1385778 - RNA, 13 nt, Human
ucucacccuggag

SEQ ID NO: 1385779 - RNA, 12 nt, Human
ucucacccugga

SEQ ID NO: 1385780 - RNA, 18 nt, Human
ucucaccauuuggauccu

SEQ ID NO: 1385781 - RNA, 16 nt, Human
ucucaccauuuggauc

SEQ ID NO: 1385782 - RNA, 15 nt, Human
ucucaccauuuggau

SEQ ID NO: 1385783 - RNA, 17 nt, Human
ucuauuuuguaaacuca

SEQ ID NO: 1385784 - RNA, 18 nt, Human
ucuauuuuggauuguaua

SEQ ID NO: 1385785 - RNA, 16 nt, Human
ucuauucuuuaacucc

SEQ ID NO: 1385786 - RNA, 13 nt, Human
ucuauucuuuaac

SEQ ID NO: 1385787 - RNA, 22 nt, Human
ucuauucgccacacaguauuuu

SEQ ID NO: 1385788 - RNA, 19 nt, Human
ucuauucgccacacaguau

SEQ ID NO: 1385789 - RNA, 18 nt, Human
ucuauucgccacacagua

SEQ ID NO: 1385790 - RNA, 23 nt, Human
ucuauuaugaaugugaagccuuc

SEQ ID NO: 1385791 - RNA, 22 nt, Human
ucuauuaugaaugugaagccuu

SEQ ID NO: 1385792 - RNA, 15 nt, Human
ucuauuaugaaugug

SEQ ID NO: 1385793 - RNA, 12 nt, Human
ucuauucagcuu

SEQ ID NO: 1385794 - RNA, 17 nt, Human
ucuauuacauuuucagu

SEQ ID NO: 1385795 - RNA, 23 nt, Human
ucuauuaaagugcuaagguucua

SEQ ID NO: 1385796 - RNA, 22 nt, Human
ucuauuaaagugcuaagguucu

SEQ ID NO: 1385797 - RNA, 22 nt, Human
ucuauuaaaagacucauccguc

SEQ ID NO: 1385798 - RNA, 21 nt, Human
ucuauuaaaagacucauccgu

SEQ ID NO: 1385799 - RNA, 20 nt, Human
ucuauuaaaagacucauccg

SEQ ID NO: 1385800 - RNA, 19 nt, Human
ucuauuaaaagacucaucc

SEQ ID NO: 1385801 - RNA, 18 nt, Human
ucuauuaaaagacucauc

SEQ ID NO: 1385802 - RNA, 17 nt, Human
ucuauuaaaagacucau

SEQ ID NO: 1385803 - RNA, 16 nt, Human
ucuauuaaaagacuca

SEQ ID NO: 1385804 - RNA, 15 nt, Human
ucuauuaaaagacuc

SEQ ID NO: 1385805 - RNA, 14 nt, Human
ucuauuaaaagacu

SEQ ID NO: 1385806 - RNA, 13 nt, Human
ucuauuaaaagac

SEQ ID NO: 1385807 - RNA, 12 nt, Human
ucuauuaaaaga

SEQ ID NO: 1385808 - RNA, 11 nt, Human
ucuauuaaaag

SEQ ID NO: 1385809 - RNA, 15 nt, Human
ucuauggguguuauc

SEQ ID NO: 1385810 - RNA, 14 nt, Human
ucuauaccaauaaa

SEQ ID NO: 1385811 - RNA, 15 nt, Human
ucuauaccaauaaag

SEQ ID NO: 1385812 - RNA, 16 nt, Human
ucuauaccaauaaagu

SEQ ID NO: 1385813 - RNA, 17 nt, Human
ucuauaccaauaaagug

SEQ ID NO: 1385814 - RNA, 18 nt, Human
ucuauaccaauaaaguga

SEQ ID NO: 1385815 - RNA, 15 nt, Human
ucuauacccacccag

SEQ ID NO: 1385816 - RNA, 17 nt, Human
ucuauacccacccagaa

SEQ ID NO: 1385817 - RNA, 17 nt, Human
ucuauagaacugaauga

SEQ ID NO: 1385818 - RNA, 16 nt, Human
ucuauacccacccaga

SEQ ID NO: 1385819 - RNA, 18 nt, Human
ucuagaguucagaguccu

SEQ ID NO: 1385820 - RNA, 14 nt, Human
ucuagaguucagag

SEQ ID NO: 1385821 - RNA, 20 nt, Human
ucuagaguccaagguuuaaa

SEQ ID NO: 1385822 - RNA, 15 nt, Human
ucuagaguccaaggu

SEQ ID NO: 1385823 - RNA, 13 nt, Human
ucuagaguccaag

SEQ ID NO: 1385824 - RNA, 21 nt, Human
ucuagaggcuuccuucauuuc

SEQ ID NO: 1385825 - RNA, 16 nt, Human
ucuagaggcuuccuuc

SEQ ID NO: 1385826 - RNA, 15 nt, Human
ucuagagcagggauu

SEQ ID NO: 1385827 - RNA, 15 nt, Human
ucuagagcacugcca

SEQ ID NO: 1385828 - RNA, 14 nt, Human
ucuagagcacugcc

SEQ ID NO: 1385829 - RNA, 13 nt, Human
ucuagauacugua

SEQ ID NO: 1385830 - RNA, 22 nt, Human
ucuagacauggagguucuaagg

SEQ ID NO: 1385831 - RNA, 14 nt, Human
ucuagaccaauaaa

SEQ ID NO: 1385832 - RNA, 20 nt, Human
ucuagacauggagguucuaa

SEQ ID NO: 1385833 - RNA, 19 nt, Human
ucuagacauggagguucua

SEQ ID NO: 1385834 - RNA, 18 nt, Human
ucuagacauggagguucu

SEQ ID NO: 1385835 - RNA, 14 nt, Human
ucuagacacugcca

SEQ ID NO: 1385836 - RNA, 12 nt, Human
acuucccugugu

SEQ ID NO: 1385837 - RNA, 18 nt, Human
acuucauauaugaggacu

SEQ ID NO: 1385838 - RNA, 22 nt, Human
acuucaguuucacagaaaauaa

SEQ ID NO: 1385839 - RNA, 22 nt, Human
ucuauaaggccauaaaacaggu

SEQ ID NO: 1385840 - RNA, 16 nt, Human
ucuauaaggccauaaa

SEQ ID NO: 1385841 - RNA, 14 nt, Human
ucuauaaggccaua

SEQ ID NO: 1385842 - RNA, 13 nt, Human
ucuauaaggccau

SEQ ID NO: 1385843 - RNA, 19 nt, Human
ucuauaaagcauuuaaccc

SEQ ID NO: 1385844 - RNA, 20 nt, Human
ucuauaaagcauuuaacccc

SEQ ID NO: 1385845 - RNA, 17 nt, Human
ucuauaaagcauuuaac

SEQ ID NO: 1385846 - RNA, 16 nt, Human
ucuauaaagcauuuaa

SEQ ID NO: 1385847 - RNA, 15 nt, Human
ucuauaaagcauuua

SEQ ID NO: 1385848 - RNA, 14 nt, Human
ucuauaaagcauuu

SEQ ID NO: 1385849 - RNA, 12 nt, Human
ucuauaaagcau

SEQ ID NO: 1385850 - RNA, 21 nt, Human
ucuauaaacuauaaccucucc

SEQ ID NO: 1385851 - RNA, 14 nt, Human
ucuauaaacuauaa

SEQ ID NO: 1385852 - RNA, 22 nt, Human
ucuaguuugauuaaauucuugc

SEQ ID NO: 1385853 - RNA, 21 nt, Human
ucuaguuugauuaaauucuug

SEQ ID NO: 1385854 - RNA, 19 nt, Human
ucuaguugaaaauaaagug

SEQ ID NO: 1385855 - RNA, 13 nt, Human
ucuaguucuuugu

SEQ ID NO: 1385856 - RNA, 17 nt, Human
ucuaguucugccaggag

SEQ ID NO: 1385857 - RNA, 16 nt, Human
ucuaguucugccagga

SEQ ID NO: 1385858 - RNA, 15 nt, Human
ucuaguucugccagg

SEQ ID NO: 1385859 - RNA, 16 nt, Human
ucuaggaaauauuuau

SEQ ID NO: 1385860 - RNA, 14 nt, Human
ucuaggaaaucuag

SEQ ID NO: 1385861 - RNA, 17 nt, Human
ucuaggaaauauuuauu

SEQ ID NO: 1385862 - RNA, 19 nt, Human
agaaauauuuuaaaaucag

SEQ ID NO: 1385863 - RNA, 21 nt, Human
agaaauauuuuaaaaucagcu

SEQ ID NO: 1385864 - RNA, 17 nt, Human
agaaauauuuuaaaauc

SEQ ID NO: 1385865 - RNA, 15 nt, Human
agaaauauuuuaaaa

SEQ ID NO: 1385866 - RNA, 20 nt, Human
agaaauauuugugacaaaaa

SEQ ID NO: 1385867 - RNA, 17 nt, Human
agaaauauggacacuua

SEQ ID NO: 1385868 - RNA, 14 nt, Human
agaaauauggacac

SEQ ID NO: 1385869 - RNA, 21 nt, Human
agaaauaugcacaauagcagu

SEQ ID NO: 1385870 - RNA, 20 nt, Human
agaaauaucuucacuuguca

SEQ ID NO: 1385871 - RNA, 13 nt, Human
agaaauaucuuca

SEQ ID NO: 1385872 - RNA, 12 nt, Human
agaaagccugag

SEQ ID NO: 1385873 - RNA, 18 nt, Human
agaaagccugggugacau

SEQ ID NO: 1385874 - RNA, 11 nt, Human
agaaagccuga

SEQ ID NO: 1385875 - RNA, 17 nt, Human
agaaagccccacccagg

SEQ ID NO: 1385876 - RNA, 18 nt, Human
agaaagccccacccaggc

SEQ ID NO: 1385877 - RNA, 20 nt, Human
agaaagcccuuaggaagaau

SEQ ID NO: 1385878 - RNA, 22 nt, Human
agaaagcccuuaggaagaauuu

SEQ ID NO: 1385879 - RNA, 17 nt, Human
ucuccuuuuccucucuc

SEQ ID NO: 1385880 - RNA, 15 nt, Human
agaaagcauuugaau

SEQ ID NO: 1385881 - RNA, 16 nt, Human
agaaagcauuugaaug

SEQ ID NO: 1385882 - RNA, 17 nt, Human
agaaagcauuugaaugc

SEQ ID NO: 1385883 - RNA, 18 nt, Human
agaaagcauuugaaugca

SEQ ID NO: 1385884 - RNA, 20 nt, Human
agaaagcauuugaaugcauu

SEQ ID NO: 1385885 - RNA, 21 nt, Human
agaaagcauuugaaugcauuu

SEQ ID NO: 1385886 - RNA, 22 nt, Human
agaaagcauuugaaugcauuuu

SEQ ID NO: 1385887 - RNA, 22 nt, Human
ucuccuuuaauuguaaaguaaa

SEQ ID NO: 1385888 - RNA, 16 nt, Human
ucuccuuguucugaua

SEQ ID NO: 1385889 - RNA, 14 nt, Human
ucuccuuguucuga

SEQ ID NO: 1385890 - RNA, 13 nt, Human
ucuccuuguucug

SEQ ID NO: 1385891 - RNA, 17 nt, Human
ucuccuuuaauuguaaa

SEQ ID NO: 1385892 - RNA, 15 nt, Human
ucuccuuuaauugua

SEQ ID NO: 1385893 - RNA, 18 nt, Human
ucuccuuguucugauaau

SEQ ID NO: 1385894 - RNA, 21 nt, Human
ucugaagcucaacucucuuau

SEQ ID NO: 1385895 - RNA, 17 nt, Human
ucugaagcucaacucuc

SEQ ID NO: 1385896 - RNA, 18 nt, Human
ucugaagcccucccaggu

SEQ ID NO: 1385897 - RNA, 11 nt, Human
agaaaugccaa

SEQ ID NO: 1385898 - RNA, 12 nt, Human
agaaaugcagaa

SEQ ID NO: 1385899 - RNA, 21 nt, Human
agaaaugccaagcacuucuuu

SEQ ID NO: 1385900 - RNA, 14 nt, Human
agaaaugccaagca

SEQ ID NO: 1385901 - RNA, 22 nt, Human
agaaaugccaagcacuucuuuu

SEQ ID NO: 1385902 - RNA, 19 nt, Human
ucugaaugcuucuaaguaa

SEQ ID NO: 1385903 - RNA, 17 nt, Human
ucugaaugcuucuaagu

SEQ ID NO: 1385904 - RNA, 13 nt, Human
ucugaaugcuucu

SEQ ID NO: 1385905 - RNA, 22 nt, Human
ucugaaugcuucuaaguaaaua

SEQ ID NO: 1385906 - RNA, 10 nt, Human
ucugaauuau

SEQ ID NO: 1385907 - RNA, 20 nt, Human
ucugacucgguuucuccaaa

SEQ ID NO: 1385908 - RNA, 19 nt, Human
ucugacucgguuucuccaa

SEQ ID NO: 1385909 - RNA, 18 nt, Human
ucugacucgguuucucca

SEQ ID NO: 1385910 - RNA, 16 nt, Human
ucugacucgguuucuc

SEQ ID NO: 1385911 - RNA, 20 nt, Human
ucugacucagggcuccuggg

SEQ ID NO: 1385912 - RNA, 15 nt, Human
ucugacucagggcuc

SEQ ID NO: 1385913 - RNA, 14 nt, Human
ucugacucagggcu

SEQ ID NO: 1385914 - RNA, 13 nt, Human
ucugacucagggc

SEQ ID NO: 1385915 - RNA, 15 nt, Human
ucugaauuauuuucu

SEQ ID NO: 1385916 - RNA, 13 nt, Human
ucugaguccugga

SEQ ID NO: 1385917 - RNA, 21 nt, Human
ucugaugaaaaauugcugacu

SEQ ID NO: 1385918 - RNA, 15 nt, Human
ucugaugaaaaauug

SEQ ID NO: 1385919 - RNA, 22 nt, Human
ucugaugaaaaauugcugacug

SEQ ID NO: 1385920 - RNA, 17 nt, Human
ucugaucagaacaaaug

SEQ ID NO: 1385921 - RNA, 21 nt, Human
ucugaucccucuacagagcuu

SEQ ID NO: 1385922 - RNA, 20 nt, Human
ucugagucagagccaugucu

SEQ ID NO: 1385923 - RNA, 15 nt, Human
ucugagucagagcca

SEQ ID NO: 1385924 - RNA, 16 nt, Human
ucugagucaacuccuu

SEQ ID NO: 1385925 - RNA, 13 nt, Human
ucugaguacagag

SEQ ID NO: 1385926 - RNA, 15 nt, Human
ucugagguuuuauuu

SEQ ID NO: 1385927 - RNA, 23 nt, Human
ucugaggugcacugggaggcucc

SEQ ID NO: 1385928 - RNA, 21 nt, Human
ucugaggugccugucccaccc

SEQ ID NO: 1385929 - RNA, 19 nt, Human
ucugaggugcacugggagg

SEQ ID NO: 1385930 - RNA, 16 nt, Human
ucugaggugcacuggg

SEQ ID NO: 1385931 - RNA, 22 nt, Human
ucugagaauuguugagauacuu

SEQ ID NO: 1385932 - RNA, 14 nt, Human
ucugacucugagcu

SEQ ID NO: 1385933 - RNA, 18 nt, Human
ucugcagcaauaaagcag

SEQ ID NO: 1385934 - RNA, 17 nt, Human
ucugcagcaauaaagca

SEQ ID NO: 1385935 - RNA, 11 nt, Human
ucugcaggucc

SEQ ID NO: 1385936 - RNA, 12 nt, Human
ucugcagguccc

SEQ ID NO: 1385937 - RNA, 13 nt, Human
ucugcaggucccu

SEQ ID NO: 1385938 - RNA, 19 nt, Human
ucugcagggggugugucug

SEQ ID NO: 1385939 - RNA, 14 nt, Human
ucugcaggucccua

SEQ ID NO: 1385940 - RNA, 14 nt, Human
agaaauguacagca

SEQ ID NO: 1385941 - RNA, 15 nt, Human
agaaauguacagcaa

SEQ ID NO: 1385942 - RNA, 18 nt, Human
agaaaugguuguauuaga

SEQ ID NO: 1385943 - RNA, 19 nt, Human
agaaaugguuguauuagau

SEQ ID NO: 1385944 - RNA, 20 nt, Human
agaaaugguuguauuagaug

SEQ ID NO: 1385945 - RNA, 21 nt, Human
agaaaugguuguauuagaugu

SEQ ID NO: 1385946 - RNA, 22 nt, Human
agaaaugguuguauuagauguu

SEQ ID NO: 1385947 - RNA, 23 nt, Human
agaaaugguuguauuagauguuc

SEQ ID NO: 1385948 - RNA, 12 nt, Human
ucugcucccaag

SEQ ID NO: 1385949 - RNA, 11 nt, Human
ucugcucccaa

SEQ ID NO: 1385950 - RNA, 15 nt, Human
ucugcuccagacagg

SEQ ID NO: 1385951 - RNA, 13 nt, Human
ucugcucccaagg

SEQ ID NO: 1385952 - RNA, 14 nt, Human
ucugcuccagacag

SEQ ID NO: 1385953 - RNA, 18 nt, Human
ucugcucagauagaauga

SEQ ID NO: 1385954 - RNA, 22 nt, Human
ucugcucagacagaaccccuac

SEQ ID NO: 1385955 - RNA, 20 nt, Human
ucugcgugucaccugugcuu

SEQ ID NO: 1385956 - RNA, 19 nt, Human
ucugcgugucaccugugcu

SEQ ID NO: 1385957 - RNA, 15 nt, Human
ucugcgugucaccug

SEQ ID NO: 1385958 - RNA, 16 nt, Human
ucugcgugacaauaaa

SEQ ID NO: 1385959 - RNA, 21 nt, Human
ucugccuggaguguaugacug

SEQ ID NO: 1385960 - RNA, 13 nt, Human
ucugccuggagug

SEQ ID NO: 1385961 - RNA, 12 nt, Human
ucugccuggagu

SEQ ID NO: 1385962 - RNA, 23 nt, Human
ucugccuggagacuuagggcacc

SEQ ID NO: 1385963 - RNA, 21 nt, Human
ucugcccucugcauccucugg

SEQ ID NO: 1385964 - RNA, 14 nt, Human
ucugcccugcccac

SEQ ID NO: 1385965 - RNA, 23 nt, Human
agaagccaacuaugauuauuaac

SEQ ID NO: 1385966 - RNA, 18 nt, Human
agaagccaacuaugauua

SEQ ID NO: 1385967 - RNA, 19 nt, Human
agaagcauuuuguaaguug

SEQ ID NO: 1385968 - RNA, 17 nt, Human
agaagccaaaagauugg

SEQ ID NO: 1385969 - RNA, 22 nt, Human
agaagcauucucauuggaaauu

SEQ ID NO: 1385970 - RNA, 16 nt, Human
agaagacaaacuuugc

SEQ ID NO: 1385971 - RNA, 18 nt, Human
agaacuucagaaagacuu

SEQ ID NO: 1385972 - RNA, 17 nt, Human
agaacuucagaaagacu

SEQ ID NO: 1385973 - RNA, 16 nt, Human
agaacuucagaaagac

SEQ ID NO: 1385974 - RNA, 15 nt, Human
agaacuucagaaaga

SEQ ID NO: 1385975 - RNA, 14 nt, Human
agaacuucagaaag

SEQ ID NO: 1385976 - RNA, 22 nt, Human
agaaauugaauacuuugaaugu

SEQ ID NO: 1385977 - RNA, 22 nt, Human
agaacugccuuuggcagaguuc

SEQ ID NO: 1385978 - RNA, 21 nt, Human
agaaauugaauacuuugaaug

SEQ ID NO: 1385979 - RNA, 18 nt, Human
agaaauugaauacuuuga

SEQ ID NO: 1385980 - RNA, 17 nt, Human
agaaauugaauacuuug

SEQ ID NO: 1385981 - RNA, 16 nt, Human
agaaauugaauacuuu

SEQ ID NO: 1385982 - RNA, 15 nt, Human
agaaauugaauacuu

SEQ ID NO: 1385983 - RNA, 23 nt, Human
agaaauucguguguuuuuuuaug

SEQ ID NO: 1385984 - RNA, 20 nt, Human
agaaauucguguguuuuuuu

SEQ ID NO: 1385985 - RNA, 18 nt, Human
agaaauucguguguuuuu

SEQ ID NO: 1385986 - RNA, 22 nt, Human
agaagaaguuucaucauuuuuu

SEQ ID NO: 1385987 - RNA, 14 nt, Human
agaagaacugaaau

SEQ ID NO: 1385988 - RNA, 16 nt, Human
agaagaaagaggugac

SEQ ID NO: 1385989 - RNA, 13 nt, Human
agaagaacugaaa

SEQ ID NO: 1385990 - RNA, 19 nt, Human
agaagaaugcuuaaucaga

SEQ ID NO: 1385991 - RNA, 22 nt, Human
agaagaaucucaucucagugaa

SEQ ID NO: 1385992 - RNA, 18 nt, Human
agaagaugguaccaccag

SEQ ID NO: 1385993 - RNA, 15 nt, Human
agaagacaaacuuug

SEQ ID NO: 1385994 - RNA, 12 nt, Human
agaagacaaaau

SEQ ID NO: 1385995 - RNA, 12 nt, Human
agacacugguuu

SEQ ID NO: 1385996 - RNA, 16 nt, Human
agacacuggccccuca

SEQ ID NO: 1385997 - RNA, 15 nt, Human
agacacuggccccuc

SEQ ID NO: 1385998 - RNA, 13 nt, Human
agacacuggcccc

SEQ ID NO: 1385999 - RNA, 20 nt, Human
agacacugccacacaggguc

SEQ ID NO: 1386000 - RNA, 21 nt, Human
agacagagccaggagaagcuc

SEQ ID NO: 1386001 - RNA, 22 nt, Human
agacagagccccacccucagau

SEQ ID NO: 1386002 - RNA, 14 nt, Human
agacagagccagga

SEQ ID NO: 1386003 - RNA, 13 nt, Human
agacagagccagg

SEQ ID NO: 1386004 - RNA, 20 nt, Human
agacagagaggacuguaggg

SEQ ID NO: 1386005 - RNA, 15 nt, Human
agacagagaggacug

SEQ ID NO: 1386006 - RNA, 19 nt, Human
agacagagcccugugaggc

SEQ ID NO: 1386007 - RNA, 20 nt, Human
agacagagccaggagaagcu

SEQ ID NO: 1386008 - RNA, 19 nt, Human
agacagagccaggagaagc

SEQ ID NO: 1386009 - RNA, 16 nt, Human
agacagagccaggaga

SEQ ID NO: 1386010 - RNA, 24 nt, Human
agacagagccccacccucagaugc

SEQ ID NO: 1386011 - RNA, 19 nt, Human
agacaccguucauucaggc

SEQ ID NO: 1386012 - RNA, 21 nt, Human
agacacaugaagguaaauaaa

SEQ ID NO: 1386013 - RNA, 23 nt, Human
agacacaugaagguaaauaaaaa

SEQ ID NO: 1386014 - RNA, 20 nt, Human
agacacaugaagguaaauaa

SEQ ID NO: 1386015 - RNA, 19 nt, Human
agacacaugaagguaaaua

SEQ ID NO: 1386016 - RNA, 13 nt, Human
agacacaugaagg

SEQ ID NO: 1386017 - RNA, 12 nt, Human
agacacaugaag

SEQ ID NO: 1386018 - RNA, 16 nt, Human
agacacauacucauuu

SEQ ID NO: 1386019 - RNA, 12 nt, Human
agacacaggccc

SEQ ID NO: 1386020 - RNA, 12 nt, Human
agacacagacug

SEQ ID NO: 1386021 - RNA, 15 nt, Human
agacacacaugaagu

SEQ ID NO: 1386022 - RNA, 12 nt, Human
agacacacauga

SEQ ID NO: 1386023 - RNA, 17 nt, Human
agaauugaguguuuaaa

SEQ ID NO: 1386024 - RNA, 14 nt, Human
agaauugaguguuu

SEQ ID NO: 1386025 - RNA, 18 nt, Human
agaauugaguaauggugu

SEQ ID NO: 1386026 - RNA, 17 nt, Human
agaauugaguaauggug

SEQ ID NO: 1386027 - RNA, 22 nt, Human
agaauuugauaugugaacaguu

SEQ ID NO: 1386028 - RNA, 16 nt, Human
ucuguugcaagugcaa

SEQ ID NO: 1386029 - RNA, 22 nt, Human
ucuguucuuuccaaaguacacu

SEQ ID NO: 1386030 - RNA, 13 nt, Human
ucuguucuuucca

SEQ ID NO: 1386031 - RNA, 15 nt, Human
ucuguuggcaggcug

SEQ ID NO: 1386032 - RNA, 23 nt, Human
ucuguugucguaaagauuugggu

SEQ ID NO: 1386033 - RNA, 20 nt, Human
ucuguuggcaggcuggccag

SEQ ID NO: 1386034 - RNA, 18 nt, Human
ucuguuggcaggcuggcc

SEQ ID NO: 1386035 - RNA, 16 nt, Human
ucuguuguauucauug

SEQ ID NO: 1386036 - RNA, 13 nt, Human
ucuguuuagauaa

SEQ ID NO: 1386037 - RNA, 21 nt, Human
ucugggccuuggccuggagca

SEQ ID NO: 1386038 - RNA, 23 nt, Human
ucuguauuugaaucagccuacag

SEQ ID NO: 1386039 - RNA, 22 nt, Human
ucugggccuuggccuggagcac

SEQ ID NO: 1386040 - RNA, 20 nt, Human
ucugggccuuggccuggagc

SEQ ID NO: 1386041 - RNA, 19 nt, Human
ucugggccuuggccuggag

SEQ ID NO: 1386042 - RNA, 18 nt, Human
ucugggccuuggccugga

SEQ ID NO: 1386043 - RNA, 15 nt, Human
ucugggccuuggccu

SEQ ID NO: 1386044 - RNA, 14 nt, Human
ucugggccuuggcc

SEQ ID NO: 1386045 - RNA, 12 nt, Human
ucugggccugac

SEQ ID NO: 1386046 - RNA, 21 nt, Human
ucugggccauucuccacagca

SEQ ID NO: 1386047 - RNA, 15 nt, Human
agaagggaaagccca

SEQ ID NO: 1386048 - RNA, 12 nt, Human
agaagggaaagc

SEQ ID NO: 1386049 - RNA, 13 nt, Human
agaaggccaagag

SEQ ID NO: 1386050 - RNA, 17 nt, Human
agaaggccaagaggcug

SEQ ID NO: 1386051 - RNA, 18 nt, Human
agaaggcauuugcagggu

SEQ ID NO: 1386052 - RNA, 15 nt, Human
agaaggcaaaaaugu

SEQ ID NO: 1386053 - RNA, 19 nt, Human
ucugcuuguuauuagagau

SEQ ID NO: 1386054 - RNA, 19 nt, Human
agaaggcaaaaauaguuug

SEQ ID NO: 1386055 - RNA, 17 nt, Human
ucugcuuucuccuuuaa

SEQ ID NO: 1386056 - RNA, 23 nt, Human
agaaguuucaucauuuuuuacuu

SEQ ID NO: 1386057 - RNA, 21 nt, Human
agaaguuucaucauuuuuuac

SEQ ID NO: 1386058 - RNA, 19 nt, Human
agaaguuucaucauuuuuu

SEQ ID NO: 1386059 - RNA, 18 nt, Human
agaaguuuagauuuuaau

SEQ ID NO: 1386060 - RNA, 19 nt, Human
agaaguucaauauaagcuu

SEQ ID NO: 1386061 - RNA, 19 nt, Human
agaaguuaguuuguauaua

SEQ ID NO: 1386062 - RNA, 18 nt, Human
agaaguuaguuuguauau

SEQ ID NO: 1386063 - RNA, 16 nt, Human
agaaguuaguuuguau

SEQ ID NO: 1386064 - RNA, 15 nt, Human
agaaguuaguuugua

SEQ ID NO: 1386065 - RNA, 22 nt, Human
agaaguguggggauuuucacug

SEQ ID NO: 1386066 - RNA, 21 nt, Human
agaagugugccuucucucucc

SEQ ID NO: 1386067 - RNA, 17 nt, Human
agaauagaacacaguuu

SEQ ID NO: 1386068 - RNA, 22 nt, Human
agaauagaaauaaaggauguga

SEQ ID NO: 1386069 - RNA, 15 nt, Human
agaauacuucucauu

SEQ ID NO: 1386070 - RNA, 19 nt, Human
agaauacuucucauuuuuu

SEQ ID NO: 1386071 - RNA, 16 nt, Human
agaauaucacagaaaa

SEQ ID NO: 1386072 - RNA, 17 nt, Human
agaauauccaugaccua

SEQ ID NO: 1386073 - RNA, 19 nt, Human
agaauagccacauuuggaa

SEQ ID NO: 1386074 - RNA, 17 nt, Human
agaauagccacauuugg

SEQ ID NO: 1386075 - RNA, 14 nt, Human
agaauaugucagug

SEQ ID NO: 1386076 - RNA, 13 nt, Human
agaauaugaaaca

SEQ ID NO: 1386077 - RNA, 12 nt, Human
agaauaugccuu

SEQ ID NO: 1386078 - RNA, 21 nt, Human
agaauaaguuauugcaguuua

SEQ ID NO: 1386079 - RNA, 20 nt, Human
agaauaaguuauugcaguuu

SEQ ID NO: 1386080 - RNA, 19 nt, Human
agaauaaguuauugcaguu

SEQ ID NO: 1386081 - RNA, 17 nt, Human
agaauaaguuauugcag

SEQ ID NO: 1386082 - RNA, 16 nt, Human
agaauaaguuauugca

SEQ ID NO: 1386083 - RNA, 14 nt, Human
agaauaaguuauug

SEQ ID NO: 1386084 - RNA, 13 nt, Human
agaauaaguuauu

SEQ ID NO: 1386085 - RNA, 12 nt, Human
agaauaaguuau

SEQ ID NO: 1386086 - RNA, 12 nt, Human
agaauaaaauuu

SEQ ID NO: 1386087 - RNA, 14 nt, Human
agaauaaaauuuuu

SEQ ID NO: 1386088 - RNA, 17 nt, Human
agaauaaaauuuuuaau

SEQ ID NO: 1386089 - RNA, 18 nt, Human
ucugggauaaguaaguuu

SEQ ID NO: 1386090 - RNA, 17 nt, Human
ucugggagucacacagu

SEQ ID NO: 1386091 - RNA, 18 nt, Human
ucugggagucacacagug

SEQ ID NO: 1386092 - RNA, 16 nt, Human
ucugggagucacacag

SEQ ID NO: 1386093 - RNA, 15 nt, Human
ucugggagucacaca

SEQ ID NO: 1386094 - RNA, 21 nt, Human
ucugggagggcagcagggcua

SEQ ID NO: 1386095 - RNA, 19 nt, Human
ucugggagggcagcagggc

SEQ ID NO: 1386096 - RNA, 13 nt, Human
ucugggagggcag

SEQ ID NO: 1386097 - RNA, 11 nt, Human
agaauuauuua

SEQ ID NO: 1386098 - RNA, 21 nt, Human
agaauuaucuaauuuauaaaa

SEQ ID NO: 1386099 - RNA, 20 nt, Human
agaauuaucuaauuuauaaa

SEQ ID NO: 1386100 - RNA, 18 nt, Human
agaauuaucuaauuuaua

SEQ ID NO: 1386101 - RNA, 13 nt, Human
agaauuauuuugu

SEQ ID NO: 1386102 - RNA, 15 nt, Human
agaauuauuuuguga

SEQ ID NO: 1386103 - RNA, 13 nt, Human
agaauucagacau

SEQ ID NO: 1386104 - RNA, 22 nt, Human
agaauuaaacuuuuaauucauu

SEQ ID NO: 1386105 - RNA, 21 nt, Human
agaauuaaacuuuuaauucau

SEQ ID NO: 1386106 - RNA, 20 nt, Human
agaauuaaacuuuuaauuca

SEQ ID NO: 1386107 - RNA, 18 nt, Human
agaauuaaacuuuuaauu

SEQ ID NO: 1386108 - RNA, 15 nt, Human
agaauuaaacuuuua

SEQ ID NO: 1386109 - RNA, 14 nt, Human
agaauuaaacuuuu

SEQ ID NO: 1386110 - RNA, 17 nt, Human
agaauuaucuaauuuau

SEQ ID NO: 1386111 - RNA, 15 nt, Human
agaauuaucuaauuu

SEQ ID NO: 1386112 - RNA, 14 nt, Human
agaauuaucuaauu

SEQ ID NO: 1386113 - RNA, 14 nt, Human
agaauguaucccca

SEQ ID NO: 1386114 - RNA, 21 nt, Human
agaauguauccccaaaagcgu

SEQ ID NO: 1386115 - RNA, 23 nt, Human
agaauguauauuaagguguggcu

SEQ ID NO: 1386116 - RNA, 17 nt, Human
agaauccacauuucuaa

SEQ ID NO: 1386117 - RNA, 16 nt, Human
agaauccacauuucua

SEQ ID NO: 1386118 - RNA, 15 nt, Human
agaaucauuuagcau

SEQ ID NO: 1386119 - RNA, 13 nt, Human
agaaucaucagga

SEQ ID NO: 1386120 - RNA, 20 nt, Human
agaaucccuuaacaguugua

SEQ ID NO: 1386121 - RNA, 21 nt, Human
agaaucccagcccccugacca

SEQ ID NO: 1386122 - RNA, 19 nt, Human
agaaucccaaauuugauug

SEQ ID NO: 1386123 - RNA, 18 nt, Human
agaaucccaaauuugauu

SEQ ID NO: 1386124 - RNA, 17 nt, Human
agaaucccaaauuugau

SEQ ID NO: 1386125 - RNA, 22 nt, Human
agaauccacauuucuaaaaucu

SEQ ID NO: 1386126 - RNA, 20 nt, Human
agaauccacauuucuaaaau

SEQ ID NO: 1386127 - RNA, 19 nt, Human
agaauccacauuucuaaaa

SEQ ID NO: 1386128 - RNA, 18 nt, Human
agaauccacauuucuaaa

SEQ ID NO: 1386129 - RNA, 15 nt, Human
agaaucccaaauuug

SEQ ID NO: 1386130 - RNA, 12 nt, Human
agaauguaaagc

SEQ ID NO: 1386131 - RNA, 23 nt, Human
agaauggugugggagagggauga

SEQ ID NO: 1386132 - RNA, 17 nt, Human
agaauguaaagcuuguc

SEQ ID NO: 1386133 - RNA, 16 nt, Human
agaauguaaagcuugu

SEQ ID NO: 1386134 - RNA, 13 nt, Human
agaauguaaagcu

SEQ ID NO: 1386135 - RNA, 22 nt, Human
ugaaguaaacuuuuuguucugg

SEQ ID NO: 1386136 - RNA, 16 nt, Human
ugaaguaaacuuuuug

SEQ ID NO: 1386137 - RNA, 14 nt, Human
ugaaguaaacuuuu

SEQ ID NO: 1386138 - RNA, 15 nt, Human
ugaaguaauaugcac

SEQ ID NO: 1386139 - RNA, 16 nt, Human
ugaaguaauaugcaca

SEQ ID NO: 1386140 - RNA, 20 nt, Human
ugaaguaauaugcacacauu

SEQ ID NO: 1386141 - RNA, 21 nt, Human
ugaaguaauaugcacacauuu

SEQ ID NO: 1386142 - RNA, 22 nt, Human
ugaaguaauaugcacacauuuu

SEQ ID NO: 1386143 - RNA, 17 nt, Human
ugaagggccagagccag

SEQ ID NO: 1386144 - RNA, 16 nt, Human
ugaagggccagagcca

SEQ ID NO: 1386145 - RNA, 15 nt, Human
ugaagggccagagcc

SEQ ID NO: 1386146 - RNA, 14 nt, Human
ugaagggccagagc

SEQ ID NO: 1386147 - RNA, 12 nt, Human
ugaagggccaga

SEQ ID NO: 1386148 - RNA, 19 nt, Human
ugaagggcaggugcuucag

SEQ ID NO: 1386149 - RNA, 15 nt, Human
ugaagggcaggugcu

SEQ ID NO: 1386150 - RNA, 20 nt, Human
ugaagauuuaccacuugugu

SEQ ID NO: 1386151 - RNA, 17 nt, Human
ugaagauuuaccacuug

SEQ ID NO: 1386152 - RNA, 21 nt, Human
ugaaguauuuuuucaguauua

SEQ ID NO: 1386153 - RNA, 17 nt, Human
ugaaguauuuuuucagu

SEQ ID NO: 1386154 - RNA, 20 nt, Human
ugaaguauuuugcuggaaua

SEQ ID NO: 1386155 - RNA, 15 nt, Human
ugaauaaaugucuug

SEQ ID NO: 1386156 - RNA, 23 nt, Human
ugaauaauguaagacaaauaugu

SEQ ID NO: 1386157 - RNA, 20 nt, Human
ugaaucaagggucaggccuu

SEQ ID NO: 1386158 - RNA, 18 nt, Human
ugaaucaagggucaggcc

SEQ ID NO: 1386159 - RNA, 21 nt, Human
ugaauauuuguuauguagaua

SEQ ID NO: 1386160 - RNA, 15 nt, Human
ugaauacauuuccaa

SEQ ID NO: 1386161 - RNA, 19 nt, Human
agagcuguauuaagccacu

SEQ ID NO: 1386162 - RNA, 17 nt, Human
agagcuguauuaagcca

SEQ ID NO: 1386163 - RNA, 21 nt, Human
agagcuggugcggcuggccau

SEQ ID NO: 1386164 - RNA, 22 nt, Human
agagcuggugcggcuggccaug

SEQ ID NO: 1386165 - RNA, 19 nt, Human
agagcuggugcggcuggcc

SEQ ID NO: 1386166 - RNA, 18 nt, Human
agagcuggugcggcuggc

SEQ ID NO: 1386167 - RNA, 17 nt, Human
agagcuggugcggcugg

SEQ ID NO: 1386168 - RNA, 15 nt, Human
agagcuggugcggcu

SEQ ID NO: 1386169 - RNA, 19 nt, Human
agaggccugggcugggaaa

SEQ ID NO: 1386170 - RNA, 18 nt, Human
agaggccugggcugggaa

SEQ ID NO: 1386171 - RNA, 14 nt, Human
agaggccugggcug

SEQ ID NO: 1386172 - RNA, 17 nt, Human
agaggccguggcugcug

SEQ ID NO: 1386173 - RNA, 22 nt, Human
agaggccguggcugcuguggga

SEQ ID NO: 1386174 - RNA, 15 nt, Human
agaggccguggcugc

SEQ ID NO: 1386175 - RNA, 14 nt, Human
agaggccguggcug

SEQ ID NO: 1386176 - RNA, 23 nt, Human
agaggcccuggaucagcguggcc

SEQ ID NO: 1386177 - RNA, 24 nt, Human
agaggcccuggaucagcguggccu

SEQ ID NO: 1386178 - RNA, 22 nt, Human
agaggcccuggaucagcguggc

SEQ ID NO: 1386179 - RNA, 21 nt, Human
agaggcccuggaucagcgugg

SEQ ID NO: 1386180 - RNA, 20 nt, Human
agaggcccuggaucagcgug

SEQ ID NO: 1386181 - RNA, 17 nt, Human
agaggcccuggaucagc

SEQ ID NO: 1386182 - RNA, 15 nt, Human
agaggcccuggauca

SEQ ID NO: 1386183 - RNA, 13 nt, Human
agaggcccuggau

SEQ ID NO: 1386184 - RNA, 12 nt, Human
agaggcccugga

SEQ ID NO: 1386185 - RNA, 13 nt, Human
agaggccagaggc

SEQ ID NO: 1386186 - RNA, 13 nt, Human
agaggcaguaccu

SEQ ID NO: 1386187 - RNA, 23 nt, Human
agaggccaggcaggagcccuucu

SEQ ID NO: 1386188 - RNA, 18 nt, Human
agaggccuguuuggccuc

SEQ ID NO: 1386189 - RNA, 21 nt, Human
agaggcugaggcuggcacagg

SEQ ID NO: 1386190 - RNA, 19 nt, Human
agaggcugaggcuggcaca

SEQ ID NO: 1386191 - RNA, 20 nt, Human
agaggccuguuuggccucuc

SEQ ID NO: 1386192 - RNA, 12 nt, Human
agaggcugcccc

SEQ ID NO: 1386193 - RNA, 19 nt, Human
agaggcugccccucucacc

SEQ ID NO: 1386194 - RNA, 18 nt, Human
agaggcugccccucucac

SEQ ID NO: 1386195 - RNA, 16 nt, Human
agaggcugccccucuc

SEQ ID NO: 1386196 - RNA, 14 nt, Human
agaggcugccccuc

SEQ ID NO: 1386197 - RNA, 15 nt, Human
agaggcugcccuccu

SEQ ID NO: 1386198 - RNA, 20 nt, Human
agaggcugccccucucacca

SEQ ID NO: 1386199 - RNA, 13 nt, Human
agagguucaaaga

SEQ ID NO: 1386200 - RNA, 18 nt, Human
agaguaauccaagcaaau

SEQ ID NO: 1386201 - RNA, 20 nt, Human
agaguaauccaagcaaaugu

SEQ ID NO: 1386202 - RNA, 22 nt, Human
agaguaauccaagcaaauguga

SEQ ID NO: 1386203 - RNA, 21 nt, Human
ugaagauucuuucccaauuca

SEQ ID NO: 1386204 - RNA, 16 nt, Human
agagguucaaagauau

SEQ ID NO: 1386205 - RNA, 19 nt, Human
agagguucaaagauauuuu

SEQ ID NO: 1386206 - RNA, 20 nt, Human
agagguucaaagauauuuug

SEQ ID NO: 1386207 - RNA, 20 nt, Human
ugaagaauuauuuuuuuucu

SEQ ID NO: 1386208 - RNA, 21 nt, Human
ugaagaauuauuuuuuuucuu

SEQ ID NO: 1386209 - RNA, 13 nt, Human
ugaagaauguuaa

SEQ ID NO: 1386210 - RNA, 22 nt, Human
ugaagaaugcacaagaauggau

SEQ ID NO: 1386211 - RNA, 20 nt, Human
ugaagaauacuucucauuuu

SEQ ID NO: 1386212 - RNA, 21 nt, Human
ugaagaauacuucucauuuuu

SEQ ID NO: 1386213 - RNA, 19 nt, Human
ugaagaauacuucucauuu

SEQ ID NO: 1386214 - RNA, 16 nt, Human
ugaagaauacuucuca

SEQ ID NO: 1386215 - RNA, 22 nt, Human
ugaagaagcuaaauccuuuacu

SEQ ID NO: 1386216 - RNA, 15 nt, Human
ugaagaaggugaaua

SEQ ID NO: 1386217 - RNA, 14 nt, Human
ugaacuccugccau

SEQ ID NO: 1386218 - RNA, 18 nt, Human
ugaagaacugcaggcccu

SEQ ID NO: 1386219 - RNA, 12 nt, Human
agagcuggugcg

SEQ ID NO: 1386220 - RNA, 13 nt, Human
ugaagacagaagu

SEQ ID NO: 1386221 - RNA, 19 nt, Human
ugaagacagaaccacaggg

SEQ ID NO: 1386222 - RNA, 14 nt, Human
ugaagacagaacca

SEQ ID NO: 1386223 - RNA, 22 nt, Human
ugaagacaaugacuuacuguac

SEQ ID NO: 1386224 - RNA, 23 nt, Human
ugaagacaaugacuuacuguaca

SEQ ID NO: 1386225 - RNA, 20 nt, Human
ugaagaacugcaggcccugg

SEQ ID NO: 1386226 - RNA, 17 nt, Human
ugaagaacugcaggccc

SEQ ID NO: 1386227 - RNA, 16 nt, Human
ugaagaacugcaggcc

SEQ ID NO: 1386228 - RNA, 15 nt, Human
ugaagaacugcaggc

SEQ ID NO: 1386229 - RNA, 14 nt, Human
ugaagaacugcagg

SEQ ID NO: 1386230 - RNA, 19 nt, Human
ugaagaacugaggaggaaa

SEQ ID NO: 1386231 - RNA, 13 nt, Human
ugaagaacugagg

SEQ ID NO: 1386232 - RNA, 20 nt, Human
ugaagaaccaguccccccac

SEQ ID NO: 1386233 - RNA, 19 nt, Human
ugaagaaccagucccccca

SEQ ID NO: 1386234 - RNA, 14 nt, Human
ugaagaacauguga

SEQ ID NO: 1386235 - RNA, 13 nt, Human
ugaagaacaugug

SEQ ID NO: 1386236 - RNA, 20 nt, Human
ugaacucacuuuccuccuga

SEQ ID NO: 1386237 - RNA, 20 nt, Human
ugaacuaccuugguuccccc

SEQ ID NO: 1386238 - RNA, 13 nt, Human
ugaacccaggaca

SEQ ID NO: 1386239 - RNA, 22 nt, Human
ugaacccaggacaagcaugguc

SEQ ID NO: 1386240 - RNA, 12 nt, Human
ugaacccaggac

SEQ ID NO: 1386241 - RNA, 17 nt, Human
ugaaccauuaaccagau

SEQ ID NO: 1386242 - RNA, 12 nt, Human
ugaaccaccgcg

SEQ ID NO: 1386243 - RNA, 17 nt, Human
ugaacguuuucuaauug

SEQ ID NO: 1386244 - RNA, 16 nt, Human
ugaacguuuucuaauu

SEQ ID NO: 1386245 - RNA, 15 nt, Human
ugaacguuuucuaau

SEQ ID NO: 1386246 - RNA, 15 nt, Human
ugaacuaaagugcug

SEQ ID NO: 1386247 - RNA, 19 nt, Human
ugaacguuuucuaauugcu

SEQ ID NO: 1386248 - RNA, 23 nt, Human
ugaacguuuucuaauugcuuauu

SEQ ID NO: 1386249 - RNA, 19 nt, Human
ugaacuaaagugcugcacu

SEQ ID NO: 1386250 - RNA, 21 nt, Human
ugaacuaaagugcugcacuca

SEQ ID NO: 1386251 - RNA, 23 nt, Human
ugaacuagaguuuagcuggaaaa

SEQ ID NO: 1386252 - RNA, 23 nt, Human
agagauuggguuuuuggacuucu

SEQ ID NO: 1386253 - RNA, 19 nt, Human
agagauuaccuccugagaa

SEQ ID NO: 1386254 - RNA, 16 nt, Human
agagauuaccuccuga

SEQ ID NO: 1386255 - RNA, 24 nt, Human
agagauguguguugauacuguugc

SEQ ID NO: 1386256 - RNA, 23 nt, Human
agagauguguguugauacuguug

SEQ ID NO: 1386257 - RNA, 22 nt, Human
agagauguguguugauacuguu

SEQ ID NO: 1386258 - RNA, 21 nt, Human
agagauguguguugauacugu

SEQ ID NO: 1386259 - RNA, 15 nt, Human
agagaugccucccug

SEQ ID NO: 1386260 - RNA, 23 nt, Human
agagauucugaacuaaagugcug

SEQ ID NO: 1386261 - RNA, 20 nt, Human
agagauuaccuccugagaaa

SEQ ID NO: 1386262 - RNA, 20 nt, Human
ugaaauaagaauucagacau

SEQ ID NO: 1386263 - RNA, 21 nt, Human
ugaaauaccaaccugaagaca

SEQ ID NO: 1386264 - RNA, 15 nt, Human
ugaaauaagaauuca

SEQ ID NO: 1386265 - RNA, 23 nt, Human
ugaaauaaacgucuuaaauauuc

SEQ ID NO: 1386266 - RNA, 22 nt, Human
ugaaauaaacgucuuaaauauu

SEQ ID NO: 1386267 - RNA, 18 nt, Human
ugaaauaaacgucuuaaa

SEQ ID NO: 1386268 - RNA, 13 nt, Human
ugaaauaaacguc

SEQ ID NO: 1386269 - RNA, 15 nt, Human
ugaacaaauggccuu

SEQ ID NO: 1386270 - RNA, 23 nt, Human
ugaacaaaguuuaccagaaagca

SEQ ID NO: 1386271 - RNA, 17 nt, Human
ugaacaaagcagccacg

SEQ ID NO: 1386272 - RNA, 16 nt, Human
ugaacaaagcagccac

SEQ ID NO: 1386273 - RNA, 15 nt, Human
ugaacaaagcagcca

SEQ ID NO: 1386274 - RNA, 14 nt, Human
ugaacaaagcagcc

SEQ ID NO: 1386275 - RNA, 15 nt, Human
ugaaauuuuucuucu

SEQ ID NO: 1386276 - RNA, 13 nt, Human
ugaaauuuuucuu

SEQ ID NO: 1386277 - RNA, 21 nt, Human
ugaaauuuccugggagcuuuu

SEQ ID NO: 1386278 - RNA, 22 nt, Human
ugaaauuucagauucccagagc

SEQ ID NO: 1386279 - RNA, 15 nt, Human
ugaaauuuccuggga

SEQ ID NO: 1386280 - RNA, 19 nt, Human
ugaaauugaaccuuugugc

SEQ ID NO: 1386281 - RNA, 17 nt, Human
ugaaauugaaccuuugu

SEQ ID NO: 1386282 - RNA, 13 nt, Human
ugaaauugaaccu

SEQ ID NO: 1386283 - RNA, 12 nt, Human
ugaaauuucaga

SEQ ID NO: 1386284 - RNA, 22 nt, Human
ugaaauugaaccuuugugcccu

SEQ ID NO: 1386285 - RNA, 14 nt, Human
ugaaagagaaacac

SEQ ID NO: 1386286 - RNA, 13 nt, Human
agagaccgaggag

SEQ ID NO: 1386287 - RNA, 16 nt, Human
agagacuuguuuugga

SEQ ID NO: 1386288 - RNA, 18 nt, Human
agagacuuguuuuggaug

SEQ ID NO: 1386289 - RNA, 12 nt, Human
agagacuuguuu

SEQ ID NO: 1386290 - RNA, 22 nt, Human
agagacugaauagauaugaaag

SEQ ID NO: 1386291 - RNA, 18 nt, Human
agagaugccucccugagc

SEQ ID NO: 1386292 - RNA, 14 nt, Human
agagaugccucccu

SEQ ID NO: 1386293 - RNA, 13 nt, Human
agagaugccuccc

SEQ ID NO: 1386294 - RNA, 16 nt, Human
agagaugcagaaauau

SEQ ID NO: 1386295 - RNA, 17 nt, Human
agagaugcagaaauauu

SEQ ID NO: 1386296 - RNA, 13 nt, Human
agagaugcagaaa

SEQ ID NO: 1386297 - RNA, 21 nt, Human
agagaucccaaguagaaucuc

SEQ ID NO: 1386298 - RNA, 13 nt, Human
agagauacagagg

SEQ ID NO: 1386299 - RNA, 15 nt, Human
agagaguugaaccua

SEQ ID NO: 1386300 - RNA, 17 nt, Human
ugaaaauaaagaaugga

SEQ ID NO: 1386301 - RNA, 16 nt, Human
ugaaaauaagaauaga

SEQ ID NO: 1386302 - RNA, 17 nt, Human
ugaaaauaaaguguaua

SEQ ID NO: 1386303 - RNA, 16 nt, Human
ugaaaauaaagaaugg

SEQ ID NO: 1386304 - RNA, 15 nt, Human
ugaaaauaaagaaug

SEQ ID NO: 1386305 - RNA, 14 nt, Human
ugaaaauaaagaau

SEQ ID NO: 1386306 - RNA, 13 nt, Human
ugaaaauaaagaa

SEQ ID NO: 1386307 - RNA, 21 nt, Human
ugaaaauaaaaagaucacuuu

SEQ ID NO: 1386308 - RNA, 20 nt, Human
ugaaaauaaaaagaucacuu

SEQ ID NO: 1386309 - RNA, 19 nt, Human
ugaaaacacauuugcuuuu

SEQ ID NO: 1386310 - RNA, 20 nt, Human
ugaaaacacauuuuucuuag

SEQ ID NO: 1386311 - RNA, 19 nt, Human
ugaaaacacauuuuucuua

SEQ ID NO: 1386312 - RNA, 15 nt, Human
ugaaaacacauuuuu

SEQ ID NO: 1386313 - RNA, 17 nt, Human
ugaaaacacauuuuucu

SEQ ID NO: 1386314 - RNA, 22 nt, Human
ucuuuuuuuuuuuuuaauaaau

SEQ ID NO: 1386315 - RNA, 23 nt, Human
ucuuuuuuuuuuuuuaauaaauu

SEQ ID NO: 1386316 - RNA, 20 nt, Human
ucuuuuuuuucuauuucacu

SEQ ID NO: 1386317 - RNA, 23 nt, Human
ucuuuuuuuguauaguuaacaca

SEQ ID NO: 1386318 - RNA, 18 nt, Human
ucuuuuuuuguauaguua

SEQ ID NO: 1386319 - RNA, 17 nt, Human
ugaaaacacauuugcuu

SEQ ID NO: 1386320 - RNA, 14 nt, Human
ugaaaacacauuug

SEQ ID NO: 1386321 - RNA, 14 nt, Human
ugaaaacacauuuu

SEQ ID NO: 1386322 - RNA, 12 nt, Human
ugaaaacacauu

SEQ ID NO: 1386323 - RNA, 13 nt, Human
ugaaaacacauuu

SEQ ID NO: 1386324 - RNA, 19 nt, Human
ugaaaaugugcuauacugc

SEQ ID NO: 1386325 - RNA, 17 nt, Human
ugaaaaugugcuauacu

SEQ ID NO: 1386326 - RNA, 16 nt, Human
ugaaaaugucuugugu

SEQ ID NO: 1386327 - RNA, 13 nt, Human
ugaaaaugcuggc

SEQ ID NO: 1386328 - RNA, 16 nt, Human
ugaaaaugggcucaac

SEQ ID NO: 1386329 - RNA, 12 nt, Human
ugaaaaugcugg

SEQ ID NO: 1386330 - RNA, 13 nt, Human
ugaaagaaaauaa

SEQ ID NO: 1386331 - RNA, 17 nt, Human
ugaaacuggauuaaacu

SEQ ID NO: 1386332 - RNA, 18 nt, Human
ugaaacuggauuaaacuu

SEQ ID NO: 1386333 - RNA, 22 nt, Human
ugaaaaugugcuauacugcaua

SEQ ID NO: 1386334 - RNA, 21 nt, Human
ugaaaaugugcuauacugcau

SEQ ID NO: 1386335 - RNA, 20 nt, Human
ugaaaaugugcuauacugca

SEQ ID NO: 1386336 - RNA, 14 nt, Human
ugaaaauuaacaug

SEQ ID NO: 1386337 - RNA, 18 nt, Human
ucuuucucacuaaaucuu

SEQ ID NO: 1386338 - RNA, 17 nt, Human
ucuuucucacuaaaucu

SEQ ID NO: 1386339 - RNA, 14 nt, Human
ucuuucccuggucc

SEQ ID NO: 1386340 - RNA, 17 nt, Human
ucuuuaaugcaauauac

SEQ ID NO: 1386341 - RNA, 23 nt, Human
agacuggcuuuuauuaaugcacu

SEQ ID NO: 1386342 - RNA, 22 nt, Human
agacuggcuuuuauuaaugcac

SEQ ID NO: 1386343 - RNA, 18 nt, Human
agacuggcuuuuauuaau

SEQ ID NO: 1386344 - RNA, 11 nt, Human
agacuggcuuu

SEQ ID NO: 1386345 - RNA, 21 nt, Human
agacucuagaguccaagguuu

SEQ ID NO: 1386346 - RNA, 22 nt, Human
agacuccuagcuguccuuuuuc

SEQ ID NO: 1386347 - RNA, 17 nt, Human
agacuccuagcuguccu

SEQ ID NO: 1386348 - RNA, 23 nt, Human
agacucccauuccugaagaacca

SEQ ID NO: 1386349 - RNA, 19 nt, Human
agacucccauuccugaaga

SEQ ID NO: 1386350 - RNA, 17 nt, Human
agacucccauuccugaa

SEQ ID NO: 1386351 - RNA, 18 nt, Human
agacuccagaccugaggc

SEQ ID NO: 1386352 - RNA, 14 nt, Human
agacuccagaccug

SEQ ID NO: 1386353 - RNA, 20 nt, Human
agacucuagaguccaagguu

SEQ ID NO: 1386354 - RNA, 19 nt, Human
agacucuagaguccaaggu

SEQ ID NO: 1386355 - RNA, 17 nt, Human
agacucuagaguccaag

SEQ ID NO: 1386356 - RNA, 16 nt, Human
agacucuagaguccaa

SEQ ID NO: 1386357 - RNA, 19 nt, Human
agacucuacccauauuaca

SEQ ID NO: 1386358 - RNA, 20 nt, Human
agacugggcugagggagccu

SEQ ID NO: 1386359 - RNA, 16 nt, Human
agacugggcugaggga

SEQ ID NO: 1386360 - RNA, 15 nt, Human
agacugggcugaggg

SEQ ID NO: 1386361 - RNA, 14 nt, Human
agacugggcugagg

SEQ ID NO: 1386362 - RNA, 12 nt, Human
agacugggcuga

SEQ ID NO: 1386363 - RNA, 23 nt, Human
agacugggaaggcuugggauuug

SEQ ID NO: 1386364 - RNA, 22 nt, Human
agacugggaaggcuugggauuu

SEQ ID NO: 1386365 - RNA, 21 nt, Human
agacugggaaggcuugggauu

SEQ ID NO: 1386366 - RNA, 19 nt, Human
agacugggaaggcuuggga

SEQ ID NO: 1386367 - RNA, 20 nt, Human
agacugguuccauggccucu

SEQ ID NO: 1386368 - RNA, 12 nt, Human
agacuuuuauga

SEQ ID NO: 1386369 - RNA, 15 nt, Human
agacuuuuaugauac

SEQ ID NO: 1386370 - RNA, 16 nt, Human
agagacacuggugggg

SEQ ID NO: 1386371 - RNA, 16 nt, Human
agagacacacugaaga

SEQ ID NO: 1386372 - RNA, 21 nt, Human
ucuuugucagggaguguuccc

SEQ ID NO: 1386373 - RNA, 15 nt, Human
ucuuugucagggagu

SEQ ID NO: 1386374 - RNA, 15 nt, Human
agagacacugguggg

SEQ ID NO: 1386375 - RNA, 21 nt, Human
ucuuuuuucuaaaguaaaaac

SEQ ID NO: 1386376 - RNA, 22 nt, Human
ucuuuuuucuaaaguaaaaaca

SEQ ID NO: 1386377 - RNA, 17 nt, Human
ucuuuuuuuguauaguu

SEQ ID NO: 1386378 - RNA, 15 nt, Human
ucuuuuuuuguauag

SEQ ID NO: 1386379 - RNA, 15 nt, Human
ucuuuuuuucuugaa

SEQ ID NO: 1386380 - RNA, 21 nt, Human
ucuuuuuuggccaucugcucc

SEQ ID NO: 1386381 - RNA, 22 nt, Human
ucuuuuuuggccaucugcuccu

SEQ ID NO: 1386382 - RNA, 13 nt, Human
ucuuuuuucguuu

SEQ ID NO: 1386383 - RNA, 17 nt, Human
ucuuuuuucaaaagaaa

SEQ ID NO: 1386384 - RNA, 20 nt, Human
ugacuguuuuucggacaguu

SEQ ID NO: 1386385 - RNA, 19 nt, Human
ugacuguuuuucggacagu

SEQ ID NO: 1386386 - RNA, 16 nt, Human
ugacucgguuucucca

SEQ ID NO: 1386387 - RNA, 15 nt, Human
ugacucgguuucucc

SEQ ID NO: 1386388 - RNA, 14 nt, Human
ugacucgguuucuc

SEQ ID NO: 1386389 - RNA, 21 nt, Human
ugacuauucuugauguaaaau

SEQ ID NO: 1386390 - RNA, 19 nt, Human
ugacuauuuuucagaaucu

SEQ ID NO: 1386391 - RNA, 18 nt, Human
ugacucgguuucuccaaa

SEQ ID NO: 1386392 - RNA, 13 nt, Human
ugacuauguaaac

SEQ ID NO: 1386393 - RNA, 22 nt, Human
ugacuauucuugauguaaaauc

SEQ ID NO: 1386394 - RNA, 20 nt, Human
ugacuauucuugauguaaaa

SEQ ID NO: 1386395 - RNA, 19 nt, Human
ugacuauucuugauguaaa

SEQ ID NO: 1386396 - RNA, 17 nt, Human
ugacuauucuugaugua

SEQ ID NO: 1386397 - RNA, 12 nt, Human
ugacuauguaaa

SEQ ID NO: 1386398 - RNA, 15 nt, Human
ugaccuggcccccuc

SEQ ID NO: 1386399 - RNA, 12 nt, Human
ugaccuggcccc

SEQ ID NO: 1386400 - RNA, 22 nt, Human
ugaccuggauggggcaggccac

SEQ ID NO: 1386401 - RNA, 16 nt, Human
ugaccuggauggggca

SEQ ID NO: 1386402 - RNA, 21 nt, Human
ugaccugcugagcucugagag

SEQ ID NO: 1386403 - RNA, 22 nt, Human
ugaccugcugagcucugagagg

SEQ ID NO: 1386404 - RNA, 20 nt, Human
ugaccugcugagcucugaga

SEQ ID NO: 1386405 - RNA, 19 nt, Human
ugaccugcugagcucugag

SEQ ID NO: 1386406 - RNA, 18 nt, Human
ugaccugcugagcucuga

SEQ ID NO: 1386407 - RNA, 17 nt, Human
ugaccugcugagcucug

SEQ ID NO: 1386408 - RNA, 16 nt, Human
ugaccugcugagcucu

SEQ ID NO: 1386409 - RNA, 15 nt, Human
ugaccugcugagcuc

SEQ ID NO: 1386410 - RNA, 14 nt, Human
ugaccugcugagcu

SEQ ID NO: 1386411 - RNA, 13 nt, Human
ugaccugcugagc

SEQ ID NO: 1386412 - RNA, 12 nt, Human
ugaccugcugag

SEQ ID NO: 1386413 - RNA, 18 nt, Human
ugaccugcugaccugugc

SEQ ID NO: 1386414 - RNA, 15 nt, Human
ugaccugcugaccug

SEQ ID NO: 1386415 - RNA, 13 nt, Human
ugaccugcugacc

SEQ ID NO: 1386416 - RNA, 11 nt, Human
ugaccugcuga

SEQ ID NO: 1386417 - RNA, 19 nt, Human
ugaccugcuaggccagagc

SEQ ID NO: 1386418 - RNA, 17 nt, Human
ugaccugccucccuuca

SEQ ID NO: 1386419 - RNA, 19 nt, Human
ugaccugccucccuucaug

SEQ ID NO: 1386420 - RNA, 23 nt, Human
ugaccugccucccuucaugcaug

SEQ ID NO: 1386421 - RNA, 22 nt, Human
ugaccugcuaggccagagccca

SEQ ID NO: 1386422 - RNA, 18 nt, Human
ugaccugcuaggccagag

SEQ ID NO: 1386423 - RNA, 16 nt, Human
ugaccugcuaggccag

SEQ ID NO: 1386424 - RNA, 21 nt, Human
ugaccugccucccuucaugca

SEQ ID NO: 1386425 - RNA, 22 nt, Human
agaugucuuuucccauuuaucu

SEQ ID NO: 1386426 - RNA, 18 nt, Human
agaugucuuuucccauuu

SEQ ID NO: 1386427 - RNA, 18 nt, Human
agaugucuuggaacauug

SEQ ID NO: 1386428 - RNA, 14 nt, Human
agaugucuuggaac

SEQ ID NO: 1386429 - RNA, 13 nt, Human
agaugucuuggaa

SEQ ID NO: 1386430 - RNA, 16 nt, Human
agauguaggagggacu

SEQ ID NO: 1386431 - RNA, 22 nt, Human
agauguauguacuucaugcugu

SEQ ID NO: 1386432 - RNA, 16 nt, Human
ugaccugccucccuuc

SEQ ID NO: 1386433 - RNA, 16 nt, Human
ugaccugccaggcaca

SEQ ID NO: 1386434 - RNA, 19 nt, Human
ugaccugccaggcacacug

SEQ ID NO: 1386435 - RNA, 18 nt, Human
agauuuuaaucaaauuug

SEQ ID NO: 1386436 - RNA, 16 nt, Human
agauuuuaaucaaauu

SEQ ID NO: 1386437 - RNA, 15 nt, Human
agauuuuaaucaaau

SEQ ID NO: 1386438 - RNA, 23 nt, Human
agauuuguuuuuaaacuguacag

SEQ ID NO: 1386439 - RNA, 22 nt, Human
agauuuguuuuuaaacuguaca

SEQ ID NO: 1386440 - RNA, 21 nt, Human
agauuuguuuuuaaacuguac

SEQ ID NO: 1386441 - RNA, 20 nt, Human
agauuuguuuuuaaacugua

SEQ ID NO: 1386442 - RNA, 19 nt, Human
agauuuguuuuuaaacugu

SEQ ID NO: 1386443 - RNA, 17 nt, Human
agauuuguuuuuaaacu

SEQ ID NO: 1386444 - RNA, 15 nt, Human
agauuuguuuuuaaa

SEQ ID NO: 1386445 - RNA, 19 nt, Human
agauuugugugcaucaggc

SEQ ID NO: 1386446 - RNA, 20 nt, Human
agauuucauaguucagaauu

SEQ ID NO: 1386447 - RNA, 19 nt, Human
agauuucauaguucagaau

SEQ ID NO: 1386448 - RNA, 18 nt, Human
agauuucauaguucagaa

SEQ ID NO: 1386449 - RNA, 12 nt, Human
agauuucauagu

SEQ ID NO: 1386450 - RNA, 12 nt, Human
agauuguuugca

SEQ ID NO: 1386451 - RNA, 16 nt, Human
agauucccagagcaaa

SEQ ID NO: 1386452 - RNA, 13 nt, Human
agauucccagagc

SEQ ID NO: 1386453 - RNA, 23 nt, Human
agauuccauugguccaagauucc

SEQ ID NO: 1386454 - RNA, 22 nt, Human
agauuccauugguccaagauuc

SEQ ID NO: 1386455 - RNA, 21 nt, Human
agauuccauugguccaagauu

SEQ ID NO: 1386456 - RNA, 20 nt, Human
agauuccauugguccaagau

SEQ ID NO: 1386457 - RNA, 19 nt, Human
agauuccauugguccaaga

SEQ ID NO: 1386458 - RNA, 20 nt, Human
agauuauagauucuaaagau

SEQ ID NO: 1386459 - RNA, 19 nt, Human
agauuauagauucuaaaga

SEQ ID NO: 1386460 - RNA, 18 nt, Human
agauuauagauucuaaag

SEQ ID NO: 1386461 - RNA, 17 nt, Human
agauuauagauucuaaa

SEQ ID NO: 1386462 - RNA, 16 nt, Human
agauuauagauucuaa

SEQ ID NO: 1386463 - RNA, 15 nt, Human
agauuauagauucua

SEQ ID NO: 1386464 - RNA, 14 nt, Human
agauuauagauucu

SEQ ID NO: 1386465 - RNA, 20 nt, Human
agauucagguaauacaaacu

SEQ ID NO: 1386466 - RNA, 18 nt, Human
agauucagguaauacaaa

SEQ ID NO: 1386467 - RNA, 16 nt, Human
agauucagguaauaca

SEQ ID NO: 1386468 - RNA, 21 nt, Human
agauuagagccuguaaacuuu

SEQ ID NO: 1386469 - RNA, 13 nt, Human
ugacuuauaguac

SEQ ID NO: 1386470 - RNA, 14 nt, Human
ugacuuauaguaca

SEQ ID NO: 1386471 - RNA, 12 nt, Human
ugacuuacugua

SEQ ID NO: 1386472 - RNA, 20 nt, Human
ugacuuacuguacaugaaaa

SEQ ID NO: 1386473 - RNA, 15 nt, Human
agauuaagaaauaga

SEQ ID NO: 1386474 - RNA, 14 nt, Human
agauuaagaaauag

SEQ ID NO: 1386475 - RNA, 15 nt, Human
ugacuuauaguacau

SEQ ID NO: 1386476 - RNA, 17 nt, Human
ugacuuauaguacauga

SEQ ID NO: 1386477 - RNA, 19 nt, Human
ugacuuauaguacaugaua

SEQ ID NO: 1386478 - RNA, 14 nt, Human
agauuaccuccuga

SEQ ID NO: 1386479 - RNA, 20 nt, Human
agauuacaaaucagaaguca

SEQ ID NO: 1386480 - RNA, 24 nt, Human
ugacauuugggagacaugugacau

SEQ ID NO: 1386481 - RNA, 23 nt, Human
ugacauuugggagacaugugaca

SEQ ID NO: 1386482 - RNA, 22 nt, Human
ugacauuugggagacaugugac

SEQ ID NO: 1386483 - RNA, 21 nt, Human
ugacauuugggagacauguga

SEQ ID NO: 1386484 - RNA, 21 nt, Human
ugacauuuggaguguuccccu

SEQ ID NO: 1386485 - RNA, 21 nt, Human
ugacauuuauuuuucauuuag

SEQ ID NO: 1386486 - RNA, 18 nt, Human
ugacauuuauuuuucauu

SEQ ID NO: 1386487 - RNA, 20 nt, Human
ugacauuuauauauugaauu

SEQ ID NO: 1386488 - RNA, 18 nt, Human
ugacauucugaaugcuuc

SEQ ID NO: 1386489 - RNA, 12 nt, Human
ugacauucaccu

SEQ ID NO: 1386490 - RNA, 20 nt, Human
ugacauuaugugguuuuaga

SEQ ID NO: 1386491 - RNA, 21 nt, Human
ugacagggcggggguggcggc

SEQ ID NO: 1386492 - RNA, 18 nt, Human
ugacauucaccugcccca

SEQ ID NO: 1386493 - RNA, 15 nt, Human
ugacauucaccugcc

SEQ ID NO: 1386494 - RNA, 16 nt, Human
ugacauucugaaugcu

SEQ ID NO: 1386495 - RNA, 15 nt, Human
ugacauucugaaugc

SEQ ID NO: 1386496 - RNA, 15 nt, Human
ugacagguaaacuau

SEQ ID NO: 1386497 - RNA, 15 nt, Human
ugacagccucaguga

SEQ ID NO: 1386498 - RNA, 18 nt, Human
ugacagccucagugaccc

SEQ ID NO: 1386499 - RNA, 14 nt, Human
ugacagcagcaucu

SEQ ID NO: 1386500 - RNA, 16 nt, Human
ugacagcagcaucucu

SEQ ID NO: 1386501 - RNA, 12 nt, Human
ugacagcagcau

SEQ ID NO: 1386502 - RNA, 20 nt, Human
ugacacugcuggagaggccc

SEQ ID NO: 1386503 - RNA, 22 nt, Human
ugacacugcucuaacagcccuc

SEQ ID NO: 1386504 - RNA, 21 nt, Human
ugacacugcucuaacagcccu

SEQ ID NO: 1386505 - RNA, 19 nt, Human
ugacacugcucuaacagcc

SEQ ID NO: 1386506 - RNA, 16 nt, Human
ugacacugcucuaaca

SEQ ID NO: 1386507 - RNA, 15 nt, Human
ugacacugcucuaac

SEQ ID NO: 1386508 - RNA, 13 nt, Human
ugacacugcucua

SEQ ID NO: 1386509 - RNA, 17 nt, Human
ugacacugcaauuggca

SEQ ID NO: 1386510 - RNA, 13 nt, Human
ugaaugcugggac

SEQ ID NO: 1386511 - RNA, 12 nt, Human
ugaaugcuggga

SEQ ID NO: 1386512 - RNA, 11 nt, Human
ugaaugcuggg

SEQ ID NO: 1386513 - RNA, 14 nt, Human
ugaaugccguggau

SEQ ID NO: 1386514 - RNA, 13 nt, Human
ugaaugcggccca

SEQ ID NO: 1386515 - RNA, 22 nt, Human
ugaaucaauaauauauuuucug

SEQ ID NO: 1386516 - RNA, 20 nt, Human
ugaaucaauaauauauuuuc

SEQ ID NO: 1386517 - RNA, 19 nt, Human
ugaaucaauaauauauuuu

SEQ ID NO: 1386518 - RNA, 17 nt, Human
ugaaucaauaauauauu

SEQ ID NO: 1386519 - RNA, 16 nt, Human
ugaaucaauaauauau

SEQ ID NO: 1386520 - RNA, 15 nt, Human
ugaaucaauaauaua

SEQ ID NO: 1386521 - RNA, 13 nt, Human
ugaaucaauaaua

SEQ ID NO: 1386522 - RNA, 15 nt, Human
ugaaugcugggacuc

SEQ ID NO: 1386523 - RNA, 14 nt, Human
ugaaugcugggacu

SEQ ID NO: 1386524 - RNA, 19 nt, Human
ugaaugcugggacucagcc

SEQ ID NO: 1386525 - RNA, 19 nt, Human
ugaaugccuaugguggauc

SEQ ID NO: 1386526 - RNA, 20 nt, Human
ugacacccuucucccacucu

SEQ ID NO: 1386527 - RNA, 19 nt, Human
ugacacccuucucccacuc

SEQ ID NO: 1386528 - RNA, 16 nt, Human
ugacacccuucuccca

SEQ ID NO: 1386529 - RNA, 15 nt, Human
ugacacccuucuccc

SEQ ID NO: 1386530 - RNA, 14 nt, Human
ugacacccuucucc

SEQ ID NO: 1386531 - RNA, 15 nt, Human
ugacaccugcugaga

SEQ ID NO: 1386532 - RNA, 17 nt, Human
ugacaccucuuuuuucg

SEQ ID NO: 1386533 - RNA, 18 nt, Human
ugacaccuaacucuucuu

SEQ ID NO: 1386534 - RNA, 15 nt, Human
ugacaccuaacucuu

SEQ ID NO: 1386535 - RNA, 21 nt, Human
ugacacccuucucccacucuc

SEQ ID NO: 1386536 - RNA, 23 nt, Human
ugacacccuucucccacucuccu

SEQ ID NO: 1386537 - RNA, 18 nt, Human
agaucuaaauaaaaugcu

SEQ ID NO: 1386538 - RNA, 19 nt, Human
agaucuaaauaaaaugcua

SEQ ID NO: 1386539 - RNA, 11 nt, Human
agaucuaaaua

SEQ ID NO: 1386540 - RNA, 15 nt, Human
agauccuccucauuc

SEQ ID NO: 1386541 - RNA, 18 nt, Human
agaucucuaacuucacca

SEQ ID NO: 1386542 - RNA, 18 nt, Human
agauccugcggguggggc

SEQ ID NO: 1386543 - RNA, 14 nt, Human
agauccuggaaauc

SEQ ID NO: 1386544 - RNA, 17 nt, Human
agauccugcgggugggg

SEQ ID NO: 1386545 - RNA, 12 nt, Human
agauccuccugc

SEQ ID NO: 1386546 - RNA, 13 nt, Human
agauccuccucau

SEQ ID NO: 1386547 - RNA, 12 nt, Human
agauccuccuca

SEQ ID NO: 1386548 - RNA, 13 nt, Human
agauccuggaaau

SEQ ID NO: 1386549 - RNA, 15 nt, Human
ugaccaagauacuua

SEQ ID NO: 1386550 - RNA, 22 nt, Human
ugaccaaccuuuucccaaccau

SEQ ID NO: 1386551 - RNA, 18 nt, Human
agauccuagauccuaagg

SEQ ID NO: 1386552 - RNA, 16 nt, Human
agauccuagauccuaa

SEQ ID NO: 1386553 - RNA, 23 nt, Human
agauccuaagggucgaaagcucu

SEQ ID NO: 1386554 - RNA, 21 nt, Human
agauccuaagggucgaaagcu

SEQ ID NO: 1386555 - RNA, 14 nt, Human
agauccuaaggguc

SEQ ID NO: 1386556 - RNA, 13 nt, Human
agaucccccagaa

SEQ ID NO: 1386557 - RNA, 19 nt, Human
agaucccccagaaaagaaa

SEQ ID NO: 1386558 - RNA, 15 nt, Human
agaucccccagaaaa

SEQ ID NO: 1386559 - RNA, 19 nt, Human
agaugcuggcccagggccc

SEQ ID NO: 1386560 - RNA, 18 nt, Human
agaugcuggcccagggcc

SEQ ID NO: 1386561 - RNA, 17 nt, Human
agaugcuggcccagggc

SEQ ID NO: 1386562 - RNA, 16 nt, Human
agaugcuggcccaggg

SEQ ID NO: 1386563 - RNA, 15 nt, Human
agaugcuggcccagg

SEQ ID NO: 1386564 - RNA, 14 nt, Human
agaugcuggcccag

SEQ ID NO: 1386565 - RNA, 14 nt, Human
agauguaguauuuu

SEQ ID NO: 1386566 - RNA, 15 nt, Human
agauguaggagggac

SEQ ID NO: 1386567 - RNA, 14 nt, Human
agauguaggaggga

SEQ ID NO: 1386568 - RNA, 13 nt, Human
agauguaggaggg

SEQ ID NO: 1386569 - RNA, 22 nt, Human
agauguagccccucuccuggaa

SEQ ID NO: 1386570 - RNA, 18 nt, Human
agaugcaccaccaagcca

SEQ ID NO: 1386571 - RNA, 16 nt, Human
agaugcacaugagcug

SEQ ID NO: 1386572 - RNA, 16 nt, Human
agaugcaagaaggagg

SEQ ID NO: 1386573 - RNA, 13 nt, Human
agaugcacaugag

SEQ ID NO: 1386574 - RNA, 22 nt, Human
agaugcauuuggguccaggagg

SEQ ID NO: 1386575 - RNA, 23 nt, Human
agaugcauuuggguccaggagga

SEQ ID NO: 1386576 - RNA, 21 nt, Human
agaugcauuuggguccaggag

SEQ ID NO: 1386577 - RNA, 20 nt, Human
agaugcauuuggguccagga

SEQ ID NO: 1386578 - RNA, 19 nt, Human
agaugcauuuggguccagg

SEQ ID NO: 1386579 - RNA, 18 nt, Human
agaugcauuuggguccag

SEQ ID NO: 1386580 - RNA, 20 nt, Human
agaugcaccaccaagccaag

SEQ ID NO: 1386581 - RNA, 21 nt, Human
agaugcaguucugaagaagau

SEQ ID NO: 1386582 - RNA, 17 nt, Human
agcaagcugauuaaaug

SEQ ID NO: 1386583 - RNA, 22 nt, Human
agcaagcauucagaagaaaaag

SEQ ID NO: 1386584 - RNA, 21 nt, Human
agcaagcauucagaagaaaaa

SEQ ID NO: 1386585 - RNA, 18 nt, Human
agcaagcauucagaagaa

SEQ ID NO: 1386586 - RNA, 15 nt, Human
agcaagcauucagaa

SEQ ID NO: 1386587 - RNA, 15 nt, Human
agcaagcaagaggcc

SEQ ID NO: 1386588 - RNA, 11 nt, Human
ugagccacugc

SEQ ID NO: 1386589 - RNA, 18 nt, Human
ugagauuuauuaaagaaa

SEQ ID NO: 1386590 - RNA, 15 nt, Human
ugagcauguuacuga

SEQ ID NO: 1386591 - RNA, 19 nt, Human
ugagcauggaacacuucga

SEQ ID NO: 1386592 - RNA, 16 nt, Human
ugagcaucuguccccc

SEQ ID NO: 1386593 - RNA, 16 nt, Human
ugagcaaaucaccaca

SEQ ID NO: 1386594 - RNA, 18 nt, Human
ugagcaucugucccccuu

SEQ ID NO: 1386595 - RNA, 24 nt, Human
ugagcauguuuagacuuuaacaua

SEQ ID NO: 1386596 - RNA, 23 nt, Human
ugagcauguuuagacuuuaacau

SEQ ID NO: 1386597 - RNA, 15 nt, Human
ugagcauguuuagac

SEQ ID NO: 1386598 - RNA, 14 nt, Human
ugagcauguuuaga

SEQ ID NO: 1386599 - RNA, 16 nt, Human
ugagcauguuacugac

SEQ ID NO: 1386600 - RNA, 21 nt, Human
agcaaggcccgagcagcugag

SEQ ID NO: 1386601 - RNA, 20 nt, Human
agcaaggcccgagcagcuga

SEQ ID NO: 1386602 - RNA, 22 nt, Human
agcaaggcccgagcagcugagc

SEQ ID NO: 1386603 - RNA, 19 nt, Human
agcaaggcccgagcagcug

SEQ ID NO: 1386604 - RNA, 18 nt, Human
agcaaggcccgagcagcu

SEQ ID NO: 1386605 - RNA, 17 nt, Human
agcaaggcccgagcagc

SEQ ID NO: 1386606 - RNA, 14 nt, Human
agcaaggcccgagc

SEQ ID NO: 1386607 - RNA, 12 nt, Human
agcaaggcccga

SEQ ID NO: 1386608 - RNA, 17 nt, Human
agcaagcuuaauggcug

SEQ ID NO: 1386609 - RNA, 14 nt, Human
agcaaggagauuua

SEQ ID NO: 1386610 - RNA, 17 nt, Human
agcaaggagauuuacaa

SEQ ID NO: 1386611 - RNA, 19 nt, Human
agcaaggagauuuacaacu

SEQ ID NO: 1386612 - RNA, 18 nt, Human
agcaaguaaaaaggcuaa

SEQ ID NO: 1386613 - RNA, 14 nt, Human
agcaagucaggguu

SEQ ID NO: 1386614 - RNA, 13 nt, Human
agcaaguaaaaag

SEQ ID NO: 1386615 - RNA, 15 nt, Human
agcaagucagaauag

SEQ ID NO: 1386616 - RNA, 17 nt, Human
agcaccguucugugcac

SEQ ID NO: 1386617 - RNA, 16 nt, Human
agcaccguucugugca

SEQ ID NO: 1386618 - RNA, 15 nt, Human
agcaccguucugugc

SEQ ID NO: 1386619 - RNA, 23 nt, Human
agcaccggaccagccuggcccac

SEQ ID NO: 1386620 - RNA, 18 nt, Human
agcaccggaccagccugg

SEQ ID NO: 1386621 - RNA, 17 nt, Human
agcaccggaccagccug

SEQ ID NO: 1386622 - RNA, 16 nt, Human
agcaccggaccagccu

SEQ ID NO: 1386623 - RNA, 16 nt, Human
agcacaugugcugccc

SEQ ID NO: 1386624 - RNA, 15 nt, Human
agcaccuacuuacau

SEQ ID NO: 1386625 - RNA, 18 nt, Human
agcaccguucugugcaca

SEQ ID NO: 1386626 - RNA, 19 nt, Human
agcaccggaccagccuggc

SEQ ID NO: 1386627 - RNA, 18 nt, Human
agcaccuccucagccuga

SEQ ID NO: 1386628 - RNA, 16 nt, Human
agcaccuccucagccu

SEQ ID NO: 1386629 - RNA, 15 nt, Human
agcaccuccucagcc

SEQ ID NO: 1386630 - RNA, 14 nt, Human
agcaccuccucagc

SEQ ID NO: 1386631 - RNA, 16 nt, Human
agcacaggcuaauuuu

SEQ ID NO: 1386632 - RNA, 17 nt, Human
agcacaggcuaauuuuu

SEQ ID NO: 1386633 - RNA, 12 nt, Human
agcacaggcuaa

SEQ ID NO: 1386634 - RNA, 20 nt, Human
agcacagcuugaccugaggc

SEQ ID NO: 1386635 - RNA, 18 nt, Human
agcacagcuugaccugag

SEQ ID NO: 1386636 - RNA, 12 nt, Human
agcaauaugcau

SEQ ID NO: 1386637 - RNA, 14 nt, Human
agcacagcuugacc

SEQ ID NO: 1386638 - RNA, 19 nt, Human
agcaauccuagguaggguu

SEQ ID NO: 1386639 - RNA, 23 nt, Human
ugagaaucuauauuuaacaagau

SEQ ID NO: 1386640 - RNA, 18 nt, Human
ugagaaucuauauuuaac

SEQ ID NO: 1386641 - RNA, 21 nt, Human
ugagaaucuacccccagaucc

SEQ ID NO: 1386642 - RNA, 12 nt, Human
ugagaaucuacc

SEQ ID NO: 1386643 - RNA, 22 nt, Human
ugagaaucccaaauuugauuga

SEQ ID NO: 1386644 - RNA, 21 nt, Human
ugagaaucccaaauuugauug

SEQ ID NO: 1386645 - RNA, 20 nt, Human
ugagaaucccaaauuugauu

SEQ ID NO: 1386646 - RNA, 13 nt, Human
ugagaaucccaaa

SEQ ID NO: 1386647 - RNA, 16 nt, Human
ugagaauguaucccca

SEQ ID NO: 1386648 - RNA, 19 nt, Human
ugagaaucauuuagcaugu

SEQ ID NO: 1386649 - RNA, 14 nt, Human
ugagaaucauuuag

SEQ ID NO: 1386650 - RNA, 16 nt, Human
agauuuucugcuacuu

SEQ ID NO: 1386651 - RNA, 19 nt, Human
agauuuuacaugaaguauu

SEQ ID NO: 1386652 - RNA, 16 nt, Human
agauuuuccugaaaac

SEQ ID NO: 1386653 - RNA, 20 nt, Human
agauuuuacaugaaguauuu

SEQ ID NO: 1386654 - RNA, 16 nt, Human
agauuuuacaugaagu

SEQ ID NO: 1386655 - RNA, 13 nt, Human
agauuuuacauga

SEQ ID NO: 1386656 - RNA, 15 nt, Human
agauuuuccugaaaa

SEQ ID NO: 1386657 - RNA, 20 nt, Human
ugagagacacacugaagaag

SEQ ID NO: 1386658 - RNA, 19 nt, Human
ugagagacacacugaagaa

SEQ ID NO: 1386659 - RNA, 17 nt, Human
ugagagacacacugaag

SEQ ID NO: 1386660 - RNA, 16 nt, Human
ugagagacacacugaa

SEQ ID NO: 1386661 - RNA, 19 nt, Human
ugagacagaaucucagucu

SEQ ID NO: 1386662 - RNA, 16 nt, Human
ugagauggcucccagg

SEQ ID NO: 1386663 - RNA, 17 nt, Human
ugagauggagucuugcu

SEQ ID NO: 1386664 - RNA, 18 nt, Human
ugagauggagucuugcuc

SEQ ID NO: 1386665 - RNA, 15 nt, Human
ugagaugcuggcuug

SEQ ID NO: 1386666 - RNA, 12 nt, Human
ugagaugcuggc

SEQ ID NO: 1386667 - RNA, 17 nt, Human
ugagaugcuggcuuggg

SEQ ID NO: 1386668 - RNA, 23 nt, Human
ugagauguagccccucuccugga

SEQ ID NO: 1386669 - RNA, 16 nt, Human
ugagaggaggcagcag

SEQ ID NO: 1386670 - RNA, 20 nt, Human
ugagaggaggcagcaggacu

SEQ ID NO: 1386671 - RNA, 22 nt, Human
ugagaugggcuucccaagggcu

SEQ ID NO: 1386672 - RNA, 21 nt, Human
ugagauuuauuaaagaaaaaa

SEQ ID NO: 1386673 - RNA, 17 nt, Human
ugagauuuauuaaagaa

SEQ ID NO: 1386674 - RNA, 16 nt, Human
ugagauuuauuaaaga

SEQ ID NO: 1386675 - RNA, 17 nt, Human
ugagauugaauuucacu

SEQ ID NO: 1386676 - RNA, 18 nt, Human
ugagauugcaccacugca

SEQ ID NO: 1386677 - RNA, 22 nt, Human
ugagauucucaaaggagcgagc

SEQ ID NO: 1386678 - RNA, 15 nt, Human
ugagauucucaaagg

SEQ ID NO: 1386679 - RNA, 16 nt, Human
ugagauuacaggcaug

SEQ ID NO: 1386680 - RNA, 14 nt, Human
ugagauguguucac

SEQ ID NO: 1386681 - RNA, 21 nt, Human
ugagagaugcagaaauauuug

SEQ ID NO: 1386682 - RNA, 21 nt, Human
ugagagcaguuugguuucuag

SEQ ID NO: 1386683 - RNA, 23 nt, Human
ugagagcaguuugguuucuagca

SEQ ID NO: 1386684 - RNA, 13 nt, Human
ugagagaggccau

SEQ ID NO: 1386685 - RNA, 18 nt, Human
ugagagacauuaacucau

SEQ ID NO: 1386686 - RNA, 19 nt, Human
ugagagacauuaacucauu

SEQ ID NO: 1386687 - RNA, 22 nt, Human
ugagagacacacugaagaagca

SEQ ID NO: 1386688 - RNA, 21 nt, Human
ugagagacacacugaagaagc

SEQ ID NO: 1386689 - RNA, 16 nt, Human
aggaaggagcugccug

SEQ ID NO: 1386690 - RNA, 15 nt, Human
aggaaggagcugccu

SEQ ID NO: 1386691 - RNA, 14 nt, Human
aggaaggagcugcc

SEQ ID NO: 1386692 - RNA, 13 nt, Human
aggaaggagcugc

SEQ ID NO: 1386693 - RNA, 12 nt, Human
aggaaggagcug

SEQ ID NO: 1386694 - RNA, 23 nt, Human
aggaagcuuuggugagaaccugg

SEQ ID NO: 1386695 - RNA, 22 nt, Human
aggaagcuuuggugagaaccug

SEQ ID NO: 1386696 - RNA, 18 nt, Human
aggaagcugugagagcag

SEQ ID NO: 1386697 - RNA, 11 nt, Human
aggaauuuaaa

SEQ ID NO: 1386698 - RNA, 20 nt, Human
aggaaggagcugccuggacc

SEQ ID NO: 1386699 - RNA, 19 nt, Human
aggaaggagcugccuggac

SEQ ID NO: 1386700 - RNA, 18 nt, Human
aggaaggagcugccugga

SEQ ID NO: 1386701 - RNA, 17 nt, Human
aggaaggagcugccugg

SEQ ID NO: 1386702 - RNA, 22 nt, Human
aggaaggagcugccuggacccg

SEQ ID NO: 1386703 - RNA, 21 nt, Human
aggaaggagcugccuggaccc

SEQ ID NO: 1386704 - RNA, 18 nt, Human
aggaaggaggacccagga

SEQ ID NO: 1386705 - RNA, 21 nt, Human
aggaaggaggacccaggacag

SEQ ID NO: 1386706 - RNA, 13 nt, Human
aggaauuucuuaa

SEQ ID NO: 1386707 - RNA, 21 nt, Human
aggaauuucccaggacccuga

SEQ ID NO: 1386708 - RNA, 20 nt, Human
aggaauuucccaggacccug

SEQ ID NO: 1386709 - RNA, 19 nt, Human
aggaauuucccaggacccu

SEQ ID NO: 1386710 - RNA, 18 nt, Human
aggaauuucccaggaccc

SEQ ID NO: 1386711 - RNA, 17 nt, Human
aggaauuucccaggacc

SEQ ID NO: 1386712 - RNA, 15 nt, Human
aggaauuucccagga

SEQ ID NO: 1386713 - RNA, 22 nt, Human
aggaauuucaccuguaaaccug

SEQ ID NO: 1386714 - RNA, 23 nt, Human
aggaauuguguuuauaauuuuaa

SEQ ID NO: 1386715 - RNA, 18 nt, Human
aggaauuucaccuguaaa

SEQ ID NO: 1386716 - RNA, 19 nt, Human
aggaaggaggacccaggac

SEQ ID NO: 1386717 - RNA, 20 nt, Human
aggaaggaggacccaggaca

SEQ ID NO: 1386718 - RNA, 18 nt, Human
ugcucccauccugugugu

SEQ ID NO: 1386719 - RNA, 13 nt, Human
ugcuccccacguc

SEQ ID NO: 1386720 - RNA, 16 nt, Human
ugcuccgccuggccug

SEQ ID NO: 1386721 - RNA, 14 nt, Human
ugcuccgccuggcc

SEQ ID NO: 1386722 - RNA, 20 nt, Human
ugcuccgaggacccaggaaa

SEQ ID NO: 1386723 - RNA, 18 nt, Human
ugcuccgaggacccagga

SEQ ID NO: 1386724 - RNA, 23 nt, Human
ugcugaccugcugaccugugcac

SEQ ID NO: 1386725 - RNA, 14 nt, Human
ugcugaccugcuga

SEQ ID NO: 1386726 - RNA, 13 nt, Human
ugcugaccugcug

SEQ ID NO: 1386727 - RNA, 18 nt, Human
ugcuccgccuggccuggc

SEQ ID NO: 1386728 - RNA, 18 nt, Human
ugcugacauucaccugcc

SEQ ID NO: 1386729 - RNA, 20 nt, Human
ugcugacggccagggagaag

SEQ ID NO: 1386730 - RNA, 17 nt, Human
ugcugacggccagggag

SEQ ID NO: 1386731 - RNA, 15 nt, Human
ugcugacggccaggg

SEQ ID NO: 1386732 - RNA, 14 nt, Human
ugcugacggccagg

SEQ ID NO: 1386733 - RNA, 20 nt, Human
ugcugacgggacccacaugc

SEQ ID NO: 1386734 - RNA, 14 nt, Human
ugcugaccugugca

SEQ ID NO: 1386735 - RNA, 22 nt, Human
ugcugacggccagggagaagcu

SEQ ID NO: 1386736 - RNA, 21 nt, Human
ugcuccagaccugauccugga

SEQ ID NO: 1386737 - RNA, 14 nt, Human
ugcuccagaccuga

SEQ ID NO: 1386738 - RNA, 12 nt, Human
ugcuccagaccu

SEQ ID NO: 1386739 - RNA, 17 nt, Human
ugcuccagacagggaau

SEQ ID NO: 1386740 - RNA, 13 nt, Human
ugcuccagacagg

SEQ ID NO: 1386741 - RNA, 15 nt, Human
agcuggagugcagug

SEQ ID NO: 1386742 - RNA, 19 nt, Human
agcuggagugcaguggcau

SEQ ID NO: 1386743 - RNA, 23 nt, Human
agcuggaggcaggggcuuccugg

SEQ ID NO: 1386744 - RNA, 14 nt, Human
ugcuucacaauguu

SEQ ID NO: 1386745 - RNA, 22 nt, Human
ugcuuauuccaugacugcuugc

SEQ ID NO: 1386746 - RNA, 21 nt, Human
ugcuuauuccaugacugcuug

SEQ ID NO: 1386747 - RNA, 19 nt, Human
ugcuuauuccaugacugcu

SEQ ID NO: 1386748 - RNA, 14 nt, Human
ugcuuaugguacca

SEQ ID NO: 1386749 - RNA, 21 nt, Human
ugcuuaugguaccagaugcag

SEQ ID NO: 1386750 - RNA, 18 nt, Human
ugcuuaugcucuuaauug

SEQ ID NO: 1386751 - RNA, 14 nt, Human
ugcugugaggcugu

SEQ ID NO: 1386752 - RNA, 13 nt, Human
ugcugugaggcug

SEQ ID NO: 1386753 - RNA, 14 nt, Human
ugcugucuuaaacu

SEQ ID NO: 1386754 - RNA, 21 nt, Human
ugcugucuuaaacuaaaugug

SEQ ID NO: 1386755 - RNA, 13 nt, Human
ugcugucuuaaac

SEQ ID NO: 1386756 - RNA, 19 nt, Human
ugcugucuggguggcucac

SEQ ID NO: 1386757 - RNA, 18 nt, Human
ugcugucuggguggcuca

SEQ ID NO: 1386758 - RNA, 15 nt, Human
ugcugucugggugcu

SEQ ID NO: 1386759 - RNA, 20 nt, Human
ugcuuaguguacuuggagua

SEQ ID NO: 1386760 - RNA, 23 nt, Human
ugcugugagucuuugguucuaag

SEQ ID NO: 1386761 - RNA, 19 nt, Human
ugcugugaggcuguccugu

SEQ ID NO: 1386762 - RNA, 18 nt, Human
ugcugugaggcuguccug

SEQ ID NO: 1386763 - RNA, 17 nt, Human
ugcugugaggcuguccu

SEQ ID NO: 1386764 - RNA, 16 nt, Human
ugcugugaggcugucc

SEQ ID NO: 1386765 - RNA, 21 nt, Human
ugcuuaugacaucacuuguac

SEQ ID NO: 1386766 - RNA, 14 nt, Human
aggacaggauccag

SEQ ID NO: 1386767 - RNA, 20 nt, Human
aggacaggauccaggccggc

SEQ ID NO: 1386768 - RNA, 16 nt, Human
aggacagccgccugga

SEQ ID NO: 1386769 - RNA, 17 nt, Human
aggacacugauaugggu

SEQ ID NO: 1386770 - RNA, 22 nt, Human
aggacaugcgguagccagcaca

SEQ ID NO: 1386771 - RNA, 20 nt, Human
aggacaugcgguagccagca

SEQ ID NO: 1386772 - RNA, 12 nt, Human
aggacaucagca

SEQ ID NO: 1386773 - RNA, 13 nt, Human
aggacaucagcaa

SEQ ID NO: 1386774 - RNA, 14 nt, Human
aggacaucagcaaa

SEQ ID NO: 1386775 - RNA, 15 nt, Human
aggacaucagcaaac

SEQ ID NO: 1386776 - RNA, 16 nt, Human
aggacaucagcaaaca

SEQ ID NO: 1386777 - RNA, 22 nt, Human
aggacaucagcaaacaggauca

SEQ ID NO: 1386778 - RNA, 14 nt, Human
aggacacugauaug

SEQ ID NO: 1386779 - RNA, 14 nt, Human
ugcuucaucccuuu

SEQ ID NO: 1386780 - RNA, 17 nt, Human
ugcugggagaggcagcc

SEQ ID NO: 1386781 - RNA, 23 nt, Human
ugcugggagcuccacucugcuuc

SEQ ID NO: 1386782 - RNA, 22 nt, Human
ugcugggagcuccacucugcuu

SEQ ID NO: 1386783 - RNA, 21 nt, Human
ugcugggagcuccacucugcu

SEQ ID NO: 1386784 - RNA, 20 nt, Human
ugcugggagcuccacucugc

SEQ ID NO: 1386785 - RNA, 18 nt, Human
ugcugggagcuccacucu

SEQ ID NO: 1386786 - RNA, 17 nt, Human
ugcugggagcuccacuc

SEQ ID NO: 1386787 - RNA, 16 nt, Human
ugcugggagcuccacu

SEQ ID NO: 1386788 - RNA, 15 nt, Human
ugcugggagcuccac

SEQ ID NO: 1386789 - RNA, 16 nt, Human
ugcugggagaggcagc

SEQ ID NO: 1386790 - RNA, 21 nt, Human
ugcuguacaucuauuuuggau

SEQ ID NO: 1386791 - RNA, 17 nt, Human
ugcuguacaucuauuuu

SEQ ID NO: 1386792 - RNA, 16 nt, Human
ugcuguacaucuauuu

SEQ ID NO: 1386793 - RNA, 15 nt, Human
ugcuguacaucuauu

SEQ ID NO: 1386794 - RNA, 17 nt, Human
ugcugucccucccccuu

SEQ ID NO: 1386795 - RNA, 16 nt, Human
ugcugucccucccccu

SEQ ID NO: 1386796 - RNA, 13 nt, Human
ugcugucccuccc

SEQ ID NO: 1386797 - RNA, 12 nt, Human
ugcugucccucc

SEQ ID NO: 1386798 - RNA, 17 nt, Human
ugcugucaccuugcuca

SEQ ID NO: 1386799 - RNA, 18 nt, Human
ugcuguccgguggagauc

SEQ ID NO: 1386800 - RNA, 23 nt, Human
ugcuggcccagggcccagagccc

SEQ ID NO: 1386801 - RNA, 22 nt, Human
ugcuggcccagggcccagagcc

SEQ ID NO: 1386802 - RNA, 21 nt, Human
ugcuggcccagggcccagagc

SEQ ID NO: 1386803 - RNA, 20 nt, Human
ugcuggcccagggcccagag

SEQ ID NO: 1386804 - RNA, 19 nt, Human
ugcuggcccagggcccaga

SEQ ID NO: 1386805 - RNA, 18 nt, Human
ugcuggcccagggcccag

SEQ ID NO: 1386806 - RNA, 17 nt, Human
ugcuggcccagggccca

SEQ ID NO: 1386807 - RNA, 16 nt, Human
ugcuggcccagggccc

SEQ ID NO: 1386808 - RNA, 14 nt, Human
ugcuggcccagggc

SEQ ID NO: 1386809 - RNA, 13 nt, Human
ugcuggcccaggg

SEQ ID NO: 1386810 - RNA, 12 nt, Human
ugcuggcccagg

SEQ ID NO: 1386811 - RNA, 23 nt, Human
aggaauuucuuaacuucuugcuu

SEQ ID NO: 1386812 - RNA, 19 nt, Human
aggaauuucuuaacuucuu

SEQ ID NO: 1386813 - RNA, 15 nt, Human
aggaauuucuuaacu

SEQ ID NO: 1386814 - RNA, 20 nt, Human
aggaauuuuauuuuuuucug

SEQ ID NO: 1386815 - RNA, 20 nt, Human
ugcuuggggggugaugaggg

SEQ ID NO: 1386816 - RNA, 21 nt, Human
ugcuuggggggugaugagggc

SEQ ID NO: 1386817 - RNA, 17 nt, Human
ugcuuugggcuugggcc

SEQ ID NO: 1386818 - RNA, 12 nt, Human
ugcuuuguauug

SEQ ID NO: 1386819 - RNA, 24 nt, Human
ugcuuuuaguauuuuagugaacuu

SEQ ID NO: 1386820 - RNA, 14 nt, Human
ugcuuuucauccuu

SEQ ID NO: 1386821 - RNA, 18 nt, Human
ugcuuuucccuuugugag

SEQ ID NO: 1386822 - RNA, 21 nt, Human
ugcuuuucccuuugugaguca

SEQ ID NO: 1386823 - RNA, 17 nt, Human
ugcuuuucccuuuguga

SEQ ID NO: 1386824 - RNA, 17 nt, Human
ugcuuuucaugcaaacu

SEQ ID NO: 1386825 - RNA, 20 nt, Human
ugcuuuucaugcaaacucuu

SEQ ID NO: 1386826 - RNA, 16 nt, Human
ugcuuuucaugcaaac

SEQ ID NO: 1386827 - RNA, 14 nt, Human
ugcuuuucagcuga

SEQ ID NO: 1386828 - RNA, 13 nt, Human
uggaaauauauau

SEQ ID NO: 1386829 - RNA, 15 nt, Human
uggaaauacacagug

SEQ ID NO: 1386830 - RNA, 14 nt, Human
uggaaauacacagu

SEQ ID NO: 1386831 - RNA, 13 nt, Human
uggaaaggcagcu

SEQ ID NO: 1386832 - RNA, 20 nt, Human
ugcuugcccuaagcagaaag

SEQ ID NO: 1386833 - RNA, 21 nt, Human
ugcuugcccuaagcagaaagu

SEQ ID NO: 1386834 - RNA, 18 nt, Human
ugcuugcccuaagcagaa

SEQ ID NO: 1386835 - RNA, 23 nt, Human
ugcuugccaaggcagaggccugg

SEQ ID NO: 1386836 - RNA, 22 nt, Human
ugcuugccaaggcagaggccug

SEQ ID NO: 1386837 - RNA, 21 nt, Human
ugcuugccaaggcagaggccu

SEQ ID NO: 1386838 - RNA, 15 nt, Human
aggagcuaaggcucu

SEQ ID NO: 1386839 - RNA, 14 nt, Human
aggagcuaaggcuc

SEQ ID NO: 1386840 - RNA, 13 nt, Human
aggagcuaaggcu

SEQ ID NO: 1386841 - RNA, 12 nt, Human
aggagcuaaggc

SEQ ID NO: 1386842 - RNA, 15 nt, Human
aggagcgagcauguc

SEQ ID NO: 1386843 - RNA, 14 nt, Human
aggagcgagcaugu

SEQ ID NO: 1386844 - RNA, 14 nt, Human
aggagccugugaca

SEQ ID NO: 1386845 - RNA, 13 nt, Human
aggagccugugac

SEQ ID NO: 1386846 - RNA, 22 nt, Human
aggagccugugaacccaggaca

SEQ ID NO: 1386847 - RNA, 21 nt, Human
aggagccugugaacccaggac

SEQ ID NO: 1386848 - RNA, 20 nt, Human
aggagccugugaacccagga

SEQ ID NO: 1386849 - RNA, 19 nt, Human
aggagccugugaacccagg

SEQ ID NO: 1386850 - RNA, 18 nt, Human
aggagccugugaacccag

SEQ ID NO: 1386851 - RNA, 17 nt, Human
aggagccugugaaccca

SEQ ID NO: 1386852 - RNA, 13 nt, Human
aggagccugugaa

SEQ ID NO: 1386853 - RNA, 12 nt, Human
aggagccuguga

SEQ ID NO: 1386854 - RNA, 11 nt, Human
aggagccugug

SEQ ID NO: 1386855 - RNA, 21 nt, Human
aggagccuguccugccugugg

SEQ ID NO: 1386856 - RNA, 19 nt, Human
aggagccuguccugccugu

SEQ ID NO: 1386857 - RNA, 17 nt, Human
aggagccuguccugccu

SEQ ID NO: 1386858 - RNA, 16 nt, Human
aggagccuguccugcc

SEQ ID NO: 1386859 - RNA, 12 nt, Human
aggagccugucc

SEQ ID NO: 1386860 - RNA, 11 nt, Human
aggagccuggc

SEQ ID NO: 1386861 - RNA, 19 nt, Human
aggagcccugggaggcucu

SEQ ID NO: 1386862 - RNA, 23 nt, Human
aggagcccugggaggcucuggag

SEQ ID NO: 1386863 - RNA, 22 nt, Human
aggagauucugccuuugccagg

SEQ ID NO: 1386864 - RNA, 20 nt, Human
aggagauucugccuuugcca

SEQ ID NO: 1386865 - RNA, 16 nt, Human
aggagauucugccuuu

SEQ ID NO: 1386866 - RNA, 17 nt, Human
aggagauggggacaggg

SEQ ID NO: 1386867 - RNA, 21 nt, Human
aggagauucugccuuugccag

SEQ ID NO: 1386868 - RNA, 13 nt, Human
aggacuuuguaca

SEQ ID NO: 1386869 - RNA, 11 nt, Human
aggacuuugca

SEQ ID NO: 1386870 - RNA, 15 nt, Human
aggacuuuguacauu

SEQ ID NO: 1386871 - RNA, 21 nt, Human
aggacuuuauagaucagccag

SEQ ID NO: 1386872 - RNA, 20 nt, Human
aggacuuuauagaucagcca

SEQ ID NO: 1386873 - RNA, 15 nt, Human
aggagcaaagccugu

SEQ ID NO: 1386874 - RNA, 16 nt, Human
aggagcaaagccuguu

SEQ ID NO: 1386875 - RNA, 14 nt, Human
aggagcaaagccug

SEQ ID NO: 1386876 - RNA, 13 nt, Human
aggagcaaagccu

SEQ ID NO: 1386877 - RNA, 17 nt, Human
aggagccaccaguucuc

SEQ ID NO: 1386878 - RNA, 15 nt, Human
aggagccaccaguuc

SEQ ID NO: 1386879 - RNA, 14 nt, Human
aggagccaccaguu

SEQ ID NO: 1386880 - RNA, 20 nt, Human
aggagcccacgacacugcag

SEQ ID NO: 1386881 - RNA, 18 nt, Human
aggagcccugggaggcuc

SEQ ID NO: 1386882 - RNA, 20 nt, Human
aggacugaauuaugaaacuu

SEQ ID NO: 1386883 - RNA, 19 nt, Human
aggacugaauuaugaaacu

SEQ ID NO: 1386884 - RNA, 14 nt, Human
aggacuguccccuu

SEQ ID NO: 1386885 - RNA, 21 nt, Human
aggacuguccccuugaaggag

SEQ ID NO: 1386886 - RNA, 23 nt, Human
aggacuguccccuugaaggagaa

SEQ ID NO: 1386887 - RNA, 14 nt, Human
aggacauuucucua

SEQ ID NO: 1386888 - RNA, 20 nt, Human
aggacuuccuguccagcucc

SEQ ID NO: 1386889 - RNA, 15 nt, Human
aggacuucccugugu

SEQ ID NO: 1386890 - RNA, 19 nt, Human
aggacuuauuuaaacucug

SEQ ID NO: 1386891 - RNA, 16 nt, Human
aggacuugugucucug

SEQ ID NO: 1386892 - RNA, 13 nt, Human
aggacuugugucu

SEQ ID NO: 1386893 - RNA, 21 nt, Human
aggacuuccuguccagcucca

SEQ ID NO: 1386894 - RNA, 23 nt, Human
aggacuugcccucgugguggaaa

SEQ ID NO: 1386895 - RNA, 12 nt, Human
aggauaaaauaa

SEQ ID NO: 1386896 - RNA, 15 nt, Human
aggaguuuugcaaag

SEQ ID NO: 1386897 - RNA, 21 nt, Human
aggaggagccuguccugccug

SEQ ID NO: 1386898 - RNA, 20 nt, Human
aggagggagagucucccagg

SEQ ID NO: 1386899 - RNA, 21 nt, Human
aggauacaaaagcaugugaga

SEQ ID NO: 1386900 - RNA, 19 nt, Human
uggaaauauauauuauacu

SEQ ID NO: 1386901 - RNA, 17 nt, Human
uggaaauauauauuaua

SEQ ID NO: 1386902 - RNA, 14 nt, Human
uggaaauauauauu

SEQ ID NO: 1386903 - RNA, 17 nt, Human
aggagcugccuggaccc

SEQ ID NO: 1386904 - RNA, 18 nt, Human
aggagcugccuggacccg

SEQ ID NO: 1386905 - RNA, 16 nt, Human
aggagcugccuggacc

SEQ ID NO: 1386906 - RNA, 15 nt, Human
aggagcugccuggac

SEQ ID NO: 1386907 - RNA, 14 nt, Human
aggagcugccugga

SEQ ID NO: 1386908 - RNA, 12 nt, Human
aggagcugccug

SEQ ID NO: 1386909 - RNA, 17 nt, Human
uggaaauucccuucauc

SEQ ID NO: 1386910 - RNA, 22 nt, Human
uggaaauucccuucaucuggaa

SEQ ID NO: 1386911 - RNA, 17 nt, Human
uggaaauugauuuugaa

SEQ ID NO: 1386912 - RNA, 16 nt, Human
uggaaauugacgaggg

SEQ ID NO: 1386913 - RNA, 18 nt, Human
uggaaauucccuucaucu

SEQ ID NO: 1386914 - RNA, 23 nt, Human
aggaggagggucggugccuucaa

SEQ ID NO: 1386915 - RNA, 22 nt, Human
aggaggagccuguccugccugu

SEQ ID NO: 1386916 - RNA, 23 nt, Human
aggagggagacacuggccccuca

SEQ ID NO: 1386917 - RNA, 16 nt, Human
aggagggagacacugg

SEQ ID NO: 1386918 - RNA, 19 nt, Human
aggagggacugucgcugcu

SEQ ID NO: 1386919 - RNA, 22 nt, Human
aggagggacaaaggagccugug

SEQ ID NO: 1386920 - RNA, 23 nt, Human
aggagggacaaaggagccuguga

SEQ ID NO: 1386921 - RNA, 21 nt, Human
aggagggacaaaggagccugu

SEQ ID NO: 1386922 - RNA, 20 nt, Human
aggagggacaaaggagccug

SEQ ID NO: 1386923 - RNA, 19 nt, Human
aggagggacaaaggagccu

SEQ ID NO: 1386924 - RNA, 18 nt, Human
aggagggacaaaggagcc

SEQ ID NO: 1386925 - RNA, 14 nt, Human
aggagggacaaagg

SEQ ID NO: 1386926 - RNA, 18 nt, Human
aggaggcaccuacacuca

SEQ ID NO: 1386927 - RNA, 14 nt, Human
aggaggcaggaccu

SEQ ID NO: 1386928 - RNA, 14 nt, Human
aggaggcagagaag

SEQ ID NO: 1386929 - RNA, 14 nt, Human
aggaggcagcagga

SEQ ID NO: 1386930 - RNA, 15 nt, Human
aggaggcagcaggac

SEQ ID NO: 1386931 - RNA, 17 nt, Human
aggaggcagcaggacug

SEQ ID NO: 1386932 - RNA, 18 nt, Human
uggacccagccaggccca

SEQ ID NO: 1386933 - RNA, 21 nt, Human
uggacccagccaggcccagcc

SEQ ID NO: 1386934 - RNA, 17 nt, Human
uggacccagccaggccc

SEQ ID NO: 1386935 - RNA, 19 nt, Human
uggaccauggaguggcagc

SEQ ID NO: 1386936 - RNA, 20 nt, Human
uggaccauggaguggcagcc

SEQ ID NO: 1386937 - RNA, 22 nt, Human
uggaccagccucuccacucaug

SEQ ID NO: 1386938 - RNA, 16 nt, Human
uggaccagccucucca

SEQ ID NO: 1386939 - RNA, 19 nt, Human
uggaccucugacagcagca

SEQ ID NO: 1386940 - RNA, 18 nt, Human
uggaccucugacagcagc

SEQ ID NO: 1386941 - RNA, 17 nt, Human
uggaccucugacagcag

SEQ ID NO: 1386942 - RNA, 16 nt, Human
uggaccucugacagca

SEQ ID NO: 1386943 - RNA, 15 nt, Human
uggaccucugacagc

SEQ ID NO: 1386944 - RNA, 14 nt, Human
uggaccucugacag

SEQ ID NO: 1386945 - RNA, 13 nt, Human
uggaccucugaca

SEQ ID NO: 1386946 - RNA, 15 nt, Human
uggaccucaccaagc

SEQ ID NO: 1386947 - RNA, 22 nt, Human
uggaccuaauccaagcaucccu

SEQ ID NO: 1386948 - RNA, 14 nt, Human
uggaccuaauccaa

SEQ ID NO: 1386949 - RNA, 21 nt, Human
uggaccuaaauggccucaugu

SEQ ID NO: 1386950 - RNA, 18 nt, Human
uggaccuaaauggccuca

SEQ ID NO: 1386951 - RNA, 17 nt, Human
uggaccuaaauggccuc

SEQ ID NO: 1386952 - RNA, 22 nt, Human
uggaccggagaguggggguggg

SEQ ID NO: 1386953 - RNA, 18 nt, Human
uggaccggagaguggggg

SEQ ID NO: 1386954 - RNA, 15 nt, Human
uggaccggagagugg

SEQ ID NO: 1386955 - RNA, 23 nt, Human
uggacccugaccagcucccccuc

SEQ ID NO: 1386956 - RNA, 13 nt, Human
uggacccuuccau

SEQ ID NO: 1386957 - RNA, 20 nt, Human
uggacccugaccagcucccc

SEQ ID NO: 1386958 - RNA, 19 nt, Human
uggacccugaccagcuccc

SEQ ID NO: 1386959 - RNA, 18 nt, Human
uggacccugaccagcucc

SEQ ID NO: 1386960 - RNA, 15 nt, Human
uggacccugaccagc

SEQ ID NO: 1386961 - RNA, 13 nt, Human
uggacccugacca

SEQ ID NO: 1386962 - RNA, 22 nt, Human
aggaugagggaaaagaaaaaga

SEQ ID NO: 1386963 - RNA, 15 nt, Human
aggcaaaaauguaaa

SEQ ID NO: 1386964 - RNA, 21 nt, Human
aggauuuuuuuuaauguuuaa

SEQ ID NO: 1386965 - RNA, 19 nt, Human
aggaugcuaacaucuaaaa

SEQ ID NO: 1386966 - RNA, 17 nt, Human
aggaugcuaacaucuaa

SEQ ID NO: 1386967 - RNA, 16 nt, Human
aggaugcuaacaucua

SEQ ID NO: 1386968 - RNA, 16 nt, Human
aggcaacauccaaaau

SEQ ID NO: 1386969 - RNA, 22 nt, Human
aggcaaauuugcauuaaauuac

SEQ ID NO: 1386970 - RNA, 15 nt, Human
aggcaaauuugcauu

SEQ ID NO: 1386971 - RNA, 17 nt, Human
aggcaaaauugcaaauc

SEQ ID NO: 1386972 - RNA, 13 nt, Human
aggcaaaauugca

SEQ ID NO: 1386973 - RNA, 19 nt, Human
aggcaaaauccuugcuuau

SEQ ID NO: 1386974 - RNA, 17 nt, Human
aggcaaaauccuugcuu

SEQ ID NO: 1386975 - RNA, 17 nt, Human
uggaauugggagcuugg

SEQ ID NO: 1386976 - RNA, 18 nt, Human
uggaauuggagcucgugg

SEQ ID NO: 1386977 - RNA, 23 nt, Human
uggaauugauuugcauugaacac

SEQ ID NO: 1386978 - RNA, 15 nt, Human
uggccgccugggucc

SEQ ID NO: 1386979 - RNA, 23 nt, Human
uggccgcccccugccccccagcc

SEQ ID NO: 1386980 - RNA, 21 nt, Human
uggccgcccccugccccccag

SEQ ID NO: 1386981 - RNA, 17 nt, Human
uggccgcccccugcccc

SEQ ID NO: 1386982 - RNA, 15 nt, Human
uggccgcccccugcc

SEQ ID NO: 1386983 - RNA, 13 nt, Human
uggccgcccccug

SEQ ID NO: 1386984 - RNA, 19 nt, Human
uggccgaguccaagcuggg

SEQ ID NO: 1386985 - RNA, 17 nt, Human
uggccgaguccaagcug

SEQ ID NO: 1386986 - RNA, 19 nt, Human
uggccgcugaguggcaggg

SEQ ID NO: 1386987 - RNA, 17 nt, Human
uggccgcugaguggcag

SEQ ID NO: 1386988 - RNA, 20 nt, Human
uggccuggccagugcccuga

SEQ ID NO: 1386989 - RNA, 17 nt, Human
uggccuggccagugccc

SEQ ID NO: 1386990 - RNA, 14 nt, Human
uggccuggccagug

SEQ ID NO: 1386991 - RNA, 13 nt, Human
uggccuggccagu

SEQ ID NO: 1386992 - RNA, 23 nt, Human
uggccuggagcacaaagacccug

SEQ ID NO: 1386993 - RNA, 12 nt, Human
uggccuggagca

SEQ ID NO: 1386994 - RNA, 18 nt, Human
aggccucagggcuccuug

SEQ ID NO: 1386995 - RNA, 13 nt, Human
aggccucagggcu

SEQ ID NO: 1386996 - RNA, 23 nt, Human
aggccuccuggcugucugaggcu

SEQ ID NO: 1386997 - RNA, 14 nt, Human
aggccuccuggcug

SEQ ID NO: 1386998 - RNA, 22 nt, Human
aggcccucgcugccagcucugu

SEQ ID NO: 1386999 - RNA, 17 nt, Human
aggcccucgcugccagc

SEQ ID NO: 1387000 - RNA, 19 nt, Human
aggccauucuuucccaaca

SEQ ID NO: 1387001 - RNA, 18 nt, Human
aggccauucuuucccaac

SEQ ID NO: 1387002 - RNA, 17 nt, Human
aggccauucuuucccaa

SEQ ID NO: 1387003 - RNA, 20 nt, Human
uggcauggaaauuuaaagca

SEQ ID NO: 1387004 - RNA, 19 nt, Human
uggcauggaaauuuaaagc

SEQ ID NO: 1387005 - RNA, 19 nt, Human
aggccugagguuacuggaa

SEQ ID NO: 1387006 - RNA, 21 nt, Human
uggccaagaagcaguggccuu

SEQ ID NO: 1387007 - RNA, 16 nt, Human
uggccaagaagcagug

SEQ ID NO: 1387008 - RNA, 13 nt, Human
uggccaagaagca

SEQ ID NO: 1387009 - RNA, 23 nt, Human
uggcauggaaauuuaaagcaggu

SEQ ID NO: 1387010 - RNA, 21 nt, Human
uggcauggaaauuuaaagcag

SEQ ID NO: 1387011 - RNA, 16 nt, Human
uggccaaggaaaggca

SEQ ID NO: 1387012 - RNA, 23 nt, Human
uggccaagcugaggugcccagga

SEQ ID NO: 1387013 - RNA, 22 nt, Human
uggccaagcugaggugcccagg

SEQ ID NO: 1387014 - RNA, 21 nt, Human
uggccaagcugaggugcccag

SEQ ID NO: 1387015 - RNA, 19 nt, Human
uggccaagcugaggugccc

SEQ ID NO: 1387016 - RNA, 17 nt, Human
uggccaagcugaggugc

SEQ ID NO: 1387017 - RNA, 14 nt, Human
uggccaagcugagg

SEQ ID NO: 1387018 - RNA, 13 nt, Human
uggccaagcugag

SEQ ID NO: 1387019 - RNA, 22 nt, Human
uggccaagaagcaguggccuua

SEQ ID NO: 1387020 - RNA, 22 nt, Human
uggccaaugcaccuaaagaaaa

SEQ ID NO: 1387021 - RNA, 16 nt, Human
uggccaaguuccucua

SEQ ID NO: 1387022 - RNA, 22 nt, Human
uggccagggccacgcuccagcu

SEQ ID NO: 1387023 - RNA, 20 nt, Human
uggccagggccacgcuccag

SEQ ID NO: 1387024 - RNA, 14 nt, Human
uggccaaguuccuc

SEQ ID NO: 1387025 - RNA, 20 nt, Human
uggccaggcuugucucgaac

SEQ ID NO: 1387026 - RNA, 21 nt, Human
uggccaguccaggcugccgug

SEQ ID NO: 1387027 - RNA, 17 nt, Human
uggccaguccaggcugc

SEQ ID NO: 1387028 - RNA, 21 nt, Human
uggccagugcccugaucccag

SEQ ID NO: 1387029 - RNA, 18 nt, Human
uggccagugcccugaucc

SEQ ID NO: 1387030 - RNA, 14 nt, Human
uggccagugcccug

SEQ ID NO: 1387031 - RNA, 23 nt, Human
uggccaguccaggcugccguggg

SEQ ID NO: 1387032 - RNA, 20 nt, Human
uggccagucuggucucgaac

SEQ ID NO: 1387033 - RNA, 21 nt, Human
uggcagccacacuucucagga

SEQ ID NO: 1387034 - RNA, 18 nt, Human
uggcagccacacuucuca

SEQ ID NO: 1387035 - RNA, 11 nt, Human
uggcagccaca

SEQ ID NO: 1387036 - RNA, 21 nt, Human
uggcacaucagcacgauuucu

SEQ ID NO: 1387037 - RNA, 16 nt, Human
uggauguccccagcag

SEQ ID NO: 1387038 - RNA, 15 nt, Human
uggauguccccagca

SEQ ID NO: 1387039 - RNA, 14 nt, Human
uggauguccccagc

SEQ ID NO: 1387040 - RNA, 22 nt, Human
uggauuaaacuuaaucuaaaug

SEQ ID NO: 1387041 - RNA, 20 nt, Human
uggcacaucagcacgauuuc

SEQ ID NO: 1387042 - RNA, 18 nt, Human
uggcagcccagccagcgu

SEQ ID NO: 1387043 - RNA, 17 nt, Human
uggcagcccagccagcg

SEQ ID NO: 1387044 - RNA, 16 nt, Human
uggcagcccagccagc

SEQ ID NO: 1387045 - RNA, 15 nt, Human
uggcagcccagccag

SEQ ID NO: 1387046 - RNA, 14 nt, Human
uggcagcccagcca

SEQ ID NO: 1387047 - RNA, 13 nt, Human
uggcagcccagcc

SEQ ID NO: 1387048 - RNA, 12 nt, Human
uggcagcccagc

SEQ ID NO: 1387049 - RNA, 19 nt, Human
uggcagccacacuucucag

SEQ ID NO: 1387050 - RNA, 22 nt, Human
uggcagccucccauccagggcc

SEQ ID NO: 1387051 - RNA, 21 nt, Human
uggcagccucccauccagggc

SEQ ID NO: 1387052 - RNA, 20 nt, Human
uggcagccucccauccaggg

SEQ ID NO: 1387053 - RNA, 19 nt, Human
uggcagccucccauccagg

SEQ ID NO: 1387054 - RNA, 11 nt, Human
uggcagccuug

SEQ ID NO: 1387055 - RNA, 21 nt, Human
aggccacacuucaaacuacuu

SEQ ID NO: 1387056 - RNA, 18 nt, Human
aggccacacucagcacaa

SEQ ID NO: 1387057 - RNA, 17 nt, Human
aggccacacucagcaca

SEQ ID NO: 1387058 - RNA, 19 nt, Human
aggccacuguguuccuucc

SEQ ID NO: 1387059 - RNA, 14 nt, Human
aggccacuguguuc

SEQ ID NO: 1387060 - RNA, 20 nt, Human
aggccacuggagacgcauau

SEQ ID NO: 1387061 - RNA, 14 nt, Human
aggccacuggagac

SEQ ID NO: 1387062 - RNA, 21 nt, Human
aggccaccuggcucucaccuc

SEQ ID NO: 1387063 - RNA, 19 nt, Human
aggccacuguuuggaaaua

SEQ ID NO: 1387064 - RNA, 20 nt, Human
aggccacuguguuccuuccg

SEQ ID NO: 1387065 - RNA, 16 nt, Human
aggccagaccauggac

SEQ ID NO: 1387066 - RNA, 17 nt, Human
aggccagaccauggaca

SEQ ID NO: 1387067 - RNA, 18 nt, Human
aggccagaccauggacac

SEQ ID NO: 1387068 - RNA, 23 nt, Human
uggaugggggaacucagauccag

SEQ ID NO: 1387069 - RNA, 15 nt, Human
uggagucugccaccc

SEQ ID NO: 1387070 - RNA, 21 nt, Human
uggaguccccucaccuccucu

SEQ ID NO: 1387071 - RNA, 20 nt, Human
uggaguccccucaccuccuc

SEQ ID NO: 1387072 - RNA, 19 nt, Human
uggaguccccucaccuccu

SEQ ID NO: 1387073 - RNA, 15 nt, Human
uggaguccccucacc

SEQ ID NO: 1387074 - RNA, 14 nt, Human
uggaguccccucac

SEQ ID NO: 1387075 - RNA, 16 nt, Human
uggagucaaaaagaac

SEQ ID NO: 1387076 - RNA, 18 nt, Human
aggccaagucaggcccuu

SEQ ID NO: 1387077 - RNA, 21 nt, Human
aggccaagguguccuacagaa

SEQ ID NO: 1387078 - RNA, 20 nt, Human
aggccaagguguccuacaga

SEQ ID NO: 1387079 - RNA, 19 nt, Human
aggccaagguguccuacag

SEQ ID NO: 1387080 - RNA, 14 nt, Human
aggccaaggugucc

SEQ ID NO: 1387081 - RNA, 21 nt, Human
aggccaaaggggaccuggaag

SEQ ID NO: 1387082 - RNA, 21 nt, Human
aggccaagaaacgucuucuaa

SEQ ID NO: 1387083 - RNA, 17 nt, Human
aggccaagaaacgucuu

SEQ ID NO: 1387084 - RNA, 14 nt, Human
aggccaagaaacgu

SEQ ID NO: 1387085 - RNA, 22 nt, Human
aggccaacccaaaauaagcagg

SEQ ID NO: 1387086 - RNA, 22 nt, Human
aggccaaaggggaccuggaagg

SEQ ID NO: 1387087 - RNA, 21 nt, Human
aggccaaagagucuccaguuu

SEQ ID NO: 1387088 - RNA, 15 nt, Human
aggcauuuuuaccau

SEQ ID NO: 1387089 - RNA, 18 nt, Human
aggcauuuguuugaacug

SEQ ID NO: 1387090 - RNA, 22 nt, Human
uggaccucugacagcagcaucu

SEQ ID NO: 1387091 - RNA, 24 nt, Human
uggacgacacggucggggcaucug

SEQ ID NO: 1387092 - RNA, 18 nt, Human
uggacgagaaaacaauaa

SEQ ID NO: 1387093 - RNA, 23 nt, Human
aggcucugagagucuagauucuc

SEQ ID NO: 1387094 - RNA, 22 nt, Human
aggcucugagagucuagauucu

SEQ ID NO: 1387095 - RNA, 21 nt, Human
aggcucugagagucuagauuc

SEQ ID NO: 1387096 - RNA, 20 nt, Human
aggcucugagagucuagauu

SEQ ID NO: 1387097 - RNA, 19 nt, Human
aggcucugagagucuagau

SEQ ID NO: 1387098 - RNA, 16 nt, Human
aggcucugagagucua

SEQ ID NO: 1387099 - RNA, 13 nt, Human
aggcucugagagu

SEQ ID NO: 1387100 - RNA, 18 nt, Human
aggcucucuuugcccagu

SEQ ID NO: 1387101 - RNA, 21 nt, Human
aggcucuaugagucuagaugu

SEQ ID NO: 1387102 - RNA, 20 nt, Human
aggcucuaugagucuagaug

SEQ ID NO: 1387103 - RNA, 19 nt, Human
aggcucuaugagucuagau

SEQ ID NO: 1387104 - RNA, 17 nt, Human
aggcucuagaucauaag

SEQ ID NO: 1387105 - RNA, 18 nt, Human
aggcucguggacugagug

SEQ ID NO: 1387106 - RNA, 17 nt, Human
aggcucggccugccccc

SEQ ID NO: 1387107 - RNA, 22 nt, Human
aggcuccuguuuugcacagcca

SEQ ID NO: 1387108 - RNA, 16 nt, Human
aggcuccuguuuugca

SEQ ID NO: 1387109 - RNA, 20 nt, Human
aggccuggggugacccggca

SEQ ID NO: 1387110 - RNA, 21 nt, Human
aggccuggggugacccggcac

SEQ ID NO: 1387111 - RNA, 18 nt, Human
aggccuggggugacccgg

SEQ ID NO: 1387112 - RNA, 11 nt, Human
aggccuggggu

SEQ ID NO: 1387113 - RNA, 19 nt, Human
aggccugggccgcugccac

SEQ ID NO: 1387114 - RNA, 15 nt, Human
aggccugggcagugg

SEQ ID NO: 1387115 - RNA, 14 nt, Human
aggccugggcagug

SEQ ID NO: 1387116 - RNA, 13 nt, Human
aggccugggcagu

SEQ ID NO: 1387117 - RNA, 20 nt, Human
aggccuguguagcugugacc

SEQ ID NO: 1387118 - RNA, 17 nt, Human
aggccugguguuucuug

SEQ ID NO: 1387119 - RNA, 22 nt, Human
aggccuguccugaccugucuca

SEQ ID NO: 1387120 - RNA, 15 nt, Human
aggcuggccagucca

SEQ ID NO: 1387121 - RNA, 18 nt, Human
aggcuggcacaggacaug

SEQ ID NO: 1387122 - RNA, 17 nt, Human
aggcuggcacaggacau

SEQ ID NO: 1387123 - RNA, 16 nt, Human
aggcuggcacaggaca

SEQ ID NO: 1387124 - RNA, 14 nt, Human
aggcuggcacagga

SEQ ID NO: 1387125 - RNA, 22 nt, Human
aggcuggaagauagcugugacu

SEQ ID NO: 1387126 - RNA, 21 nt, Human
aggcuggccaguccaggcugc

SEQ ID NO: 1387127 - RNA, 19 nt, Human
aggcuggccaguccaggcu

SEQ ID NO: 1387128 - RNA, 18 nt, Human
aggcuggccaguccaggc

SEQ ID NO: 1387129 - RNA, 17 nt, Human
aggcuggccaguccagg

SEQ ID NO: 1387130 - RNA, 23 nt, Human
aggcugcucggggugcacaggag

SEQ ID NO: 1387131 - RNA, 22 nt, Human
aggcugcucggggugcacagga

SEQ ID NO: 1387132 - RNA, 21 nt, Human
aggcugcucggggugcacagg

SEQ ID NO: 1387133 - RNA, 20 nt, Human
aggcugcucggggugcacag

SEQ ID NO: 1387134 - RNA, 17 nt, Human
aggcugcucggggugca

SEQ ID NO: 1387135 - RNA, 18 nt, Human
aggcuggaagcugggagg

SEQ ID NO: 1387136 - RNA, 18 nt, Human
aggcuggaagauagcugu

SEQ ID NO: 1387137 - RNA, 13 nt, Human
aggcucuggagcc

SEQ ID NO: 1387138 - RNA, 14 nt, Human
aggcucuggagccc

SEQ ID NO: 1387139 - RNA, 15 nt, Human
aggcucuggagccca

SEQ ID NO: 1387140 - RNA, 24 nt, Human
aggcugccugagucgugaccugcu

SEQ ID NO: 1387141 - RNA, 15 nt, Human
aggcugcucagggcu

SEQ ID NO: 1387142 - RNA, 16 nt, Human
aggcugcucagggcug

SEQ ID NO: 1387143 - RNA, 17 nt, Human
aggcugcucagggcugg

SEQ ID NO: 1387144 - RNA, 18 nt, Human
aggcucuggagcccacug

SEQ ID NO: 1387145 - RNA, 19 nt, Human
aggcucuggagcccacugu

SEQ ID NO: 1387146 - RNA, 18 nt, Human
uggcuuauaauucuuuca

SEQ ID NO: 1387147 - RNA, 15 nt, Human
uggcuuaccuggccc

SEQ ID NO: 1387148 - RNA, 17 nt, Human
uggcuuaccuggcccau

SEQ ID NO: 1387149 - RNA, 14 nt, Human
uggcuuaccuggcc

SEQ ID NO: 1387150 - RNA, 13 nt, Human
uggcuuaccuggc

SEQ ID NO: 1387151 - RNA, 19 nt, Human
uggcuuauaauucuuucaa

SEQ ID NO: 1387152 - RNA, 15 nt, Human
ugggaagugaagacu

SEQ ID NO: 1387153 - RNA, 23 nt, Human
ugggaagucguccuuacuccugu

SEQ ID NO: 1387154 - RNA, 18 nt, Human
ugggaaguccggccccag

SEQ ID NO: 1387155 - RNA, 18 nt, Human
ugggaaggcuugggauuu

SEQ ID NO: 1387156 - RNA, 17 nt, Human
ugggaaggcuugggauu

SEQ ID NO: 1387157 - RNA, 23 nt, Human
ugggaaggcuacuucggggcugg

SEQ ID NO: 1387158 - RNA, 22 nt, Human
ugggaagcccauccugaccagc

SEQ ID NO: 1387159 - RNA, 19 nt, Human
ugggaagcccauccugacc

SEQ ID NO: 1387160 - RNA, 22 nt, Human
ugggaagacuccuagcuguccu

SEQ ID NO: 1387161 - RNA, 23 nt, Human
ugggaagacuccuagcuguccuu

SEQ ID NO: 1387162 - RNA, 20 nt, Human
ugggaagacuccuagcuguc

SEQ ID NO: 1387163 - RNA, 21 nt, Human
uggcuucccauccccagcgau

SEQ ID NO: 1387164 - RNA, 20 nt, Human
uggcuucccauccccagcga

SEQ ID NO: 1387165 - RNA, 19 nt, Human
uggcuucccauccccagcg

SEQ ID NO: 1387166 - RNA, 18 nt, Human
uggcuucccauccccagc

SEQ ID NO: 1387167 - RNA, 15 nt, Human
uggcuucccaucccc

SEQ ID NO: 1387168 - RNA, 14 nt, Human
uggcuucccauccc

SEQ ID NO: 1387169 - RNA, 18 nt, Human
ugggaaccccuuucccac

SEQ ID NO: 1387170 - RNA, 20 nt, Human
ugggaaagggauuuucagcc

SEQ ID NO: 1387171 - RNA, 22 nt, Human
ugggaaagccccugccccuccu

SEQ ID NO: 1387172 - RNA, 20 nt, Human
ugggaaagccccugccccuc

SEQ ID NO: 1387173 - RNA, 12 nt, Human
uggcuauuuuau

SEQ ID NO: 1387174 - RNA, 18 nt, Human
uggcuauguuuuuaaugu

SEQ ID NO: 1387175 - RNA, 15 nt, Human
uggcuauuuaaaacu

SEQ ID NO: 1387176 - RNA, 17 nt, Human
uggcuauguuuuuaaug

SEQ ID NO: 1387177 - RNA, 13 nt, Human
uggcuauguuuuu

SEQ ID NO: 1387178 - RNA, 19 nt, Human
uggcuaugcauuugaaaau

SEQ ID NO: 1387179 - RNA, 13 nt, Human
aggcugccugagu

SEQ ID NO: 1387180 - RNA, 15 nt, Human
uggcuaguccuuguu

SEQ ID NO: 1387181 - RNA, 14 nt, Human
uggcuaugcauuug

SEQ ID NO: 1387182 - RNA, 15 nt, Human
uggcuaugcauuuga

SEQ ID NO: 1387183 - RNA, 17 nt, Human
uggcuaugcauuugaaa

SEQ ID NO: 1387184 - RNA, 18 nt, Human
aggcugggaacucaucug

SEQ ID NO: 1387185 - RNA, 22 nt, Human
uggcuagagguucaaagauauu

SEQ ID NO: 1387186 - RNA, 19 nt, Human
aggcuggcuccagaugcag

SEQ ID NO: 1387187 - RNA, 22 nt, Human
aggcugggaauggaggggcaga

SEQ ID NO: 1387188 - RNA, 14 nt, Human
uggcugagggcagu

SEQ ID NO: 1387189 - RNA, 17 nt, Human
uggcugaggccacccag

SEQ ID NO: 1387190 - RNA, 13 nt, Human
uggcugagggcag

SEQ ID NO: 1387191 - RNA, 23 nt, Human
uggcugagggcaguucgcagcca

SEQ ID NO: 1387192 - RNA, 22 nt, Human
uggcugagggcaguucgcagcc

SEQ ID NO: 1387193 - RNA, 15 nt, Human
uggcugagggcaguu

SEQ ID NO: 1387194 - RNA, 19 nt, Human
uggcugcauaaauguggua

SEQ ID NO: 1387195 - RNA, 19 nt, Human
uggcugauaauuuuaaauu

SEQ ID NO: 1387196 - RNA, 14 nt, Human
uggcugauaauuuu

SEQ ID NO: 1387197 - RNA, 12 nt, Human
uggcugcaugcg

SEQ ID NO: 1387198 - RNA, 18 nt, Human
agccagccucgcccaucc

SEQ ID NO: 1387199 - RNA, 10 nt, Human
agccagccuc

SEQ ID NO: 1387200 - RNA, 19 nt, Human
agccagccggggcgagugg

SEQ ID NO: 1387201 - RNA, 16 nt, Human
agccagccggggcgag

SEQ ID NO: 1387202 - RNA, 21 nt, Human
agccagccgagcaggaggccu

SEQ ID NO: 1387203 - RNA, 19 nt, Human
agccagccgagcaggaggc

SEQ ID NO: 1387204 - RNA, 24 nt, Human
agccagcccugccuggaggaccug

SEQ ID NO: 1387205 - RNA, 23 nt, Human
agccagcccugccuggaggaccu

SEQ ID NO: 1387206 - RNA, 21 nt, Human
agccagcccugccuggaggac

SEQ ID NO: 1387207 - RNA, 20 nt, Human
agccagcccugccuggagga

SEQ ID NO: 1387208 - RNA, 19 nt, Human
agccagcccugccuggagg

SEQ ID NO: 1387209 - RNA, 18 nt, Human
agccagcccugccuggag

SEQ ID NO: 1387210 - RNA, 17 nt, Human
agccagcccugccugga

SEQ ID NO: 1387211 - RNA, 16 nt, Human
agccagcccugccugg

SEQ ID NO: 1387212 - RNA, 15 nt, Human
agccagcccugccug

SEQ ID NO: 1387213 - RNA, 14 nt, Human
agccagcccugccu

SEQ ID NO: 1387214 - RNA, 13 nt, Human
agccagcccugcc

SEQ ID NO: 1387215 - RNA, 16 nt, Human
agccagcaucugggcc

SEQ ID NO: 1387216 - RNA, 17 nt, Human
agccagcaucugggccu

SEQ ID NO: 1387217 - RNA, 12 nt, Human
agccagcaucug

SEQ ID NO: 1387218 - RNA, 14 nt, Human
agccagcaucggaa

SEQ ID NO: 1387219 - RNA, 13 nt, Human
agccacuccucug

SEQ ID NO: 1387220 - RNA, 19 nt, Human
ugauuaaauucuugcaaag

SEQ ID NO: 1387221 - RNA, 24 nt, Human
ugaugggauucuggacaggaugug

SEQ ID NO: 1387222 - RNA, 20 nt, Human
ugauuaaauucuugcaaagu

SEQ ID NO: 1387223 - RNA, 18 nt, Human
ugauuaaguaaugauaac

SEQ ID NO: 1387224 - RNA, 12 nt, Human
agccacuccucu

SEQ ID NO: 1387225 - RNA, 22 nt, Human
agccacuaaccuugccugguac

SEQ ID NO: 1387226 - RNA, 20 nt, Human
agccacuaaccuugccuggu

SEQ ID NO: 1387227 - RNA, 19 nt, Human
agccacuaaccuugccugg

SEQ ID NO: 1387228 - RNA, 23 nt, Human
ugauuaaguaaugauaacuggaa

SEQ ID NO: 1387229 - RNA, 15 nt, Human
ugauccuggaggccc

SEQ ID NO: 1387230 - RNA, 14 nt, Human
ugauccuggaggcc

SEQ ID NO: 1387231 - RNA, 22 nt, Human
agcaccugcccuaccugcccca

SEQ ID NO: 1387232 - RNA, 18 nt, Human
agcaccugcccuaccugc

SEQ ID NO: 1387233 - RNA, 23 nt, Human
ugaugacuuucuuuuuguagcug

SEQ ID NO: 1387234 - RNA, 16 nt, Human
ugaugacccuuuucau

SEQ ID NO: 1387235 - RNA, 15 nt, Human
ugaugacccuuuuca

SEQ ID NO: 1387236 - RNA, 14 nt, Human
ugaugaccaaaguc

SEQ ID NO: 1387237 - RNA, 18 nt, Human
ugaugaacucuuaaucaa

SEQ ID NO: 1387238 - RNA, 18 nt, Human
ugauccuggaggcccagu

SEQ ID NO: 1387239 - RNA, 17 nt, Human
ugauccuggaggcccag

SEQ ID NO: 1387240 - RNA, 16 nt, Human
ugauccuggaggccca

SEQ ID NO: 1387241 - RNA, 12 nt, Human
ugaugaagaagu

SEQ ID NO: 1387242 - RNA, 11 nt, Human
ugaugaagaag

SEQ ID NO: 1387243 - RNA, 12 nt, Human
ugauggagaagg

SEQ ID NO: 1387244 - RNA, 13 nt, Human
ugauggagaagga

SEQ ID NO: 1387245 - RNA, 14 nt, Human
ugauggagaaggaa

SEQ ID NO: 1387246 - RNA, 15 nt, Human
ugauggagaaggaag

SEQ ID NO: 1387247 - RNA, 16 nt, Human
ugauggagaaggaagg

SEQ ID NO: 1387248 - RNA, 16 nt, Human
ugauggagugcuguuu

SEQ ID NO: 1387249 - RNA, 17 nt, Human
ugaugggauucuggaca

SEQ ID NO: 1387250 - RNA, 16 nt, Human
ugaugggauucuggac

SEQ ID NO: 1387251 - RNA, 14 nt, Human
ugaugggauuuggu

SEQ ID NO: 1387252 - RNA, 21 nt, Human
ugaugggaaguccggccccag

SEQ ID NO: 1387253 - RNA, 14 nt, Human
ugauggagugcugu

SEQ ID NO: 1387254 - RNA, 17 nt, Human
ugauggagaaggaaggc

SEQ ID NO: 1387255 - RNA, 17 nt, Human
ugauucauuuuaacauc

SEQ ID NO: 1387256 - RNA, 19 nt, Human
ugauucaugccaauuagca

SEQ ID NO: 1387257 - RNA, 19 nt, Human
ugauucauaguaacuucuu

SEQ ID NO: 1387258 - RNA, 18 nt, Human
ugauucauaguaacuucu

SEQ ID NO: 1387259 - RNA, 16 nt, Human
ugauucauaguaacuu

SEQ ID NO: 1387260 - RNA, 20 nt, Human
agcccagcugggucaggcag

SEQ ID NO: 1387261 - RNA, 19 nt, Human
agcccagcugggucaggca

SEQ ID NO: 1387262 - RNA, 12 nt, Human
agcccagccagc

SEQ ID NO: 1387263 - RNA, 17 nt, Human
agcccagcugggucagg

SEQ ID NO: 1387264 - RNA, 11 nt, Human
agcccagccag

SEQ ID NO: 1387265 - RNA, 21 nt, Human
agcccagcacugcuugaggaa

SEQ ID NO: 1387266 - RNA, 21 nt, Human
agcccagcugggucaggcagg

SEQ ID NO: 1387267 - RNA, 20 nt, Human
ugauuuaggagaagccagga

SEQ ID NO: 1387268 - RNA, 16 nt, Human
ugauuuaggagaagcc

SEQ ID NO: 1387269 - RNA, 20 nt, Human
ugauuuagcaggaagcugug

SEQ ID NO: 1387270 - RNA, 16 nt, Human
ugauuuacgcucauug

SEQ ID NO: 1387271 - RNA, 17 nt, Human
ugauuuagcaggaagcu

SEQ ID NO: 1387272 - RNA, 22 nt, Human
ugauuuaggagaagccaggaau

SEQ ID NO: 1387273 - RNA, 21 nt, Human
ugauuuaggagaagccaggaa

SEQ ID NO: 1387274 - RNA, 18 nt, Human
ugauuucaguucuaggaa

SEQ ID NO: 1387275 - RNA, 15 nt, Human
ugauuucaguucuag

SEQ ID NO: 1387276 - RNA, 22 nt, Human
ugauuucaguagcacaaguuau

SEQ ID NO: 1387277 - RNA, 20 nt, Human
ugauuucaguucuaggaaaa

SEQ ID NO: 1387278 - RNA, 19 nt, Human
ugauuucaguucuaggaaa

SEQ ID NO: 1387279 - RNA, 21 nt, Human
ugauuucaguucuaggaaaau

SEQ ID NO: 1387280 - RNA, 15 nt, Human
ugauuucauuaauac

SEQ ID NO: 1387281 - RNA, 22 nt, Human
ugauuuccguuaaaauaccagc

SEQ ID NO: 1387282 - RNA, 20 nt, Human
ugauuuguaacccacugaga

SEQ ID NO: 1387283 - RNA, 19 nt, Human
ugauuugaagaacauguga

SEQ ID NO: 1387284 - RNA, 17 nt, Human
ugauuugaagaacaugu

SEQ ID NO: 1387285 - RNA, 17 nt, Human
ugauuuggggauauuuu

SEQ ID NO: 1387286 - RNA, 11 nt, Human
ugauuucuagg

SEQ ID NO: 1387287 - RNA, 23 nt, Human
ugauuuccuugaauguggcuuga

SEQ ID NO: 1387288 - RNA, 19 nt, Human
ugauuuccuugaauguggc

SEQ ID NO: 1387289 - RNA, 17 nt, Human
ugauuuccuugaaugug

SEQ ID NO: 1387290 - RNA, 16 nt, Human
ugauuuccuugaaugu

SEQ ID NO: 1387291 - RNA, 15 nt, Human
ugauuuccuugaaug

SEQ ID NO: 1387292 - RNA, 14 nt, Human
ugauuuccuugaau

SEQ ID NO: 1387293 - RNA, 13 nt, Human
ugauuuccuugaa

SEQ ID NO: 1387294 - RNA, 22 nt, Human
agccagggagagcccaggagcu

SEQ ID NO: 1387295 - RNA, 21 nt, Human
agccagggagagcccaggagc

SEQ ID NO: 1387296 - RNA, 20 nt, Human
agccagggagagcccaggag

SEQ ID NO: 1387297 - RNA, 19 nt, Human
agccagggagagcccagga

SEQ ID NO: 1387298 - RNA, 18 nt, Human
agccagggagagcccagg

SEQ ID NO: 1387299 - RNA, 17 nt, Human
agccagggagagcccag

SEQ ID NO: 1387300 - RNA, 16 nt, Human
agccagggagagccca

SEQ ID NO: 1387301 - RNA, 15 nt, Human
agccagggagagccc

SEQ ID NO: 1387302 - RNA, 22 nt, Human
agccagcgucggucugugcccc

SEQ ID NO: 1387303 - RNA, 23 nt, Human
agccagcuaagggguggggcugc

SEQ ID NO: 1387304 - RNA, 20 nt, Human
agccagcgucggucugugcc

SEQ ID NO: 1387305 - RNA, 23 nt, Human
agccagcguccuccucugugacc

SEQ ID NO: 1387306 - RNA, 21 nt, Human
agccagcguccuccucuguga

SEQ ID NO: 1387307 - RNA, 19 nt, Human
agccagcguccuccucugu

SEQ ID NO: 1387308 - RNA, 18 nt, Human
agccagcguccuccucug

SEQ ID NO: 1387309 - RNA, 17 nt, Human
agccagcguccuccucu

SEQ ID NO: 1387310 - RNA, 16 nt, Human
agccagcguccuccuc

SEQ ID NO: 1387311 - RNA, 22 nt, Human
agccaucaccucagauggcagc

SEQ ID NO: 1387312 - RNA, 21 nt, Human
agccaucaccucagauggcag

SEQ ID NO: 1387313 - RNA, 19 nt, Human
agccaucaccucagauggc

SEQ ID NO: 1387314 - RNA, 18 nt, Human
agccaucaccucagaugg

SEQ ID NO: 1387315 - RNA, 16 nt, Human
agccaucaccucagau

SEQ ID NO: 1387316 - RNA, 15 nt, Human
agccaucaccucaga

SEQ ID NO: 1387317 - RNA, 17 nt, Human
agccaucaagagacuga

SEQ ID NO: 1387318 - RNA, 18 nt, Human
agccaucaaaaugcuuuu

SEQ ID NO: 1387319 - RNA, 22 nt, Human
agccaguaaaugggggugcauu

SEQ ID NO: 1387320 - RNA, 21 nt, Human
agccaguaaaugggggugcau

SEQ ID NO: 1387321 - RNA, 15 nt, Human
agccaggucccucuc

SEQ ID NO: 1387322 - RNA, 13 nt, Human
agccagggcucaa

SEQ ID NO: 1387323 - RNA, 18 nt, Human
agccagguuccacagagg

SEQ ID NO: 1387324 - RNA, 12 nt, Human
agccaggucccu

SEQ ID NO: 1387325 - RNA, 13 nt, Human
agccaguaaaugg

SEQ ID NO: 1387326 - RNA, 15 nt, Human
agcccagcacugcuu

SEQ ID NO: 1387327 - RNA, 21 nt, Human
agcccagagggucugggggca

SEQ ID NO: 1387328 - RNA, 20 nt, Human
agcccagagggucugggggc

SEQ ID NO: 1387329 - RNA, 17 nt, Human
agcccagagggucuggg

SEQ ID NO: 1387330 - RNA, 15 nt, Human
agcccagagggucug

SEQ ID NO: 1387331 - RNA, 23 nt, Human
agcccacuguccugggccugcag

SEQ ID NO: 1387332 - RNA, 22 nt, Human
agcccacuguccugggccugca

SEQ ID NO: 1387333 - RNA, 20 nt, Human
agcccacuguccugggccug

SEQ ID NO: 1387334 - RNA, 19 nt, Human
agcccacuguccugggccu

SEQ ID NO: 1387335 - RNA, 18 nt, Human
agcccacuguccugggcc

SEQ ID NO: 1387336 - RNA, 17 nt, Human
agcccacuguccugggc

SEQ ID NO: 1387337 - RNA, 15 nt, Human
agcccacuguccugg

SEQ ID NO: 1387338 - RNA, 23 nt, Human
agccaugcgcccccuccgcccug

SEQ ID NO: 1387339 - RNA, 16 nt, Human
agccaugcgcccccuc

SEQ ID NO: 1387340 - RNA, 23 nt, Human
agccaugaguuccagaaaguaaa

SEQ ID NO: 1387341 - RNA, 21 nt, Human
agccaugagaugauacaucca

SEQ ID NO: 1387342 - RNA, 18 nt, Human
agccaucccgucuucucc

SEQ ID NO: 1387343 - RNA, 22 nt, Human
agccauggagauucucauaacu

SEQ ID NO: 1387344 - RNA, 19 nt, Human
agccauggagauucucaua

SEQ ID NO: 1387345 - RNA, 18 nt, Human
agccaugcuggaaaauaa

SEQ ID NO: 1387346 - RNA, 14 nt, Human
agcccacuguacuu

SEQ ID NO: 1387347 - RNA, 14 nt, Human
agcccacuguccug

SEQ ID NO: 1387348 - RNA, 20 nt, Human
agccauggagauucucauaa

SEQ ID NO: 1387349 - RNA, 16 nt, Human
agcccacuguacuugc

SEQ ID NO: 1387350 - RNA, 15 nt, Human
agcccgcacaccugc

SEQ ID NO: 1387351 - RNA, 14 nt, Human
agcccgaggaggug

SEQ ID NO: 1387352 - RNA, 23 nt, Human
agccccuuucccuuguagcuccu

SEQ ID NO: 1387353 - RNA, 21 nt, Human
agccccuuucccuuguagcuc

SEQ ID NO: 1387354 - RNA, 14 nt, Human
agccccuuucccuu

SEQ ID NO: 1387355 - RNA, 14 nt, Human
agccccugaaagcc

SEQ ID NO: 1387356 - RNA, 14 nt, Human
agccccugccauug

SEQ ID NO: 1387357 - RNA, 16 nt, Human
agccccugaaagccau

SEQ ID NO: 1387358 - RNA, 23 nt, Human
agccccucuuggagaagucucag

SEQ ID NO: 1387359 - RNA, 20 nt, Human
agccccucuuggagaagucu

SEQ ID NO: 1387360 - RNA, 18 nt, Human
agccccucuuggagaagu

SEQ ID NO: 1387361 - RNA, 17 nt, Human
agccccucuuggagaag

SEQ ID NO: 1387362 - RNA, 15 nt, Human
agccccucuuggaga

SEQ ID NO: 1387363 - RNA, 22 nt, Human
agcccccugaccacucagagac

SEQ ID NO: 1387364 - RNA, 22 nt, Human
agccccucuggucgcuccugcc

SEQ ID NO: 1387365 - RNA, 21 nt, Human
agccccucuggucgcuccugc

SEQ ID NO: 1387366 - RNA, 21 nt, Human
agcccccugaccacucagaga

SEQ ID NO: 1387367 - RNA, 20 nt, Human
agcccccugaccacucagag

SEQ ID NO: 1387368 - RNA, 19 nt, Human
agcccccugaccacucaga

SEQ ID NO: 1387369 - RNA, 12 nt, Human
agcccccugacc

SEQ ID NO: 1387370 - RNA, 21 nt, Human
agcccccuccuggugccaccu

SEQ ID NO: 1387371 - RNA, 20 nt, Human
agcccccuccuggugccacc

SEQ ID NO: 1387372 - RNA, 13 nt, Human
agcccccuccugg

SEQ ID NO: 1387373 - RNA, 23 nt, Human
agcccccucacaguauugcucac

SEQ ID NO: 1387374 - RNA, 22 nt, Human
agcccccucacaguauugcuca

SEQ ID NO: 1387375 - RNA, 14 nt, Human
agcccccucacagu

SEQ ID NO: 1387376 - RNA, 11 nt, Human
agcccccucac

SEQ ID NO: 1387377 - RNA, 19 nt, Human
agcccccuaagagagcacc

SEQ ID NO: 1387378 - RNA, 22 nt, Human
agcccuggcaugucaacagcgu

SEQ ID NO: 1387379 - RNA, 14 nt, Human
agcccggcuccugg

SEQ ID NO: 1387380 - RNA, 13 nt, Human
agcccggcuccug

SEQ ID NO: 1387381 - RNA, 12 nt, Human
agcccggcuccu

SEQ ID NO: 1387382 - RNA, 23 nt, Human
agcccugccuggaggaccugagc

SEQ ID NO: 1387383 - RNA, 21 nt, Human
agcccugccuggaggaccuga

SEQ ID NO: 1387384 - RNA, 20 nt, Human
agcccugccuggaggaccug

SEQ ID NO: 1387385 - RNA, 16 nt, Human
agcccggcuccugguc

SEQ ID NO: 1387386 - RNA, 15 nt, Human
agcccggcuccuggu

SEQ ID NO: 1387387 - RNA, 19 nt, Human
agcccugccuggaggaccu

SEQ ID NO: 1387388 - RNA, 20 nt, Human
agcccugcugcugccugccu

SEQ ID NO: 1387389 - RNA, 22 nt, Human
agcccugccuggaggaccugag

SEQ ID NO: 1387390 - RNA, 18 nt, Human
agcccugcugcugccugc

SEQ ID NO: 1387391 - RNA, 19 nt, Human
agcccugcugcugccugcc

SEQ ID NO: 1387392 - RNA, 15 nt, Human
agcccugggaccgcu

SEQ ID NO: 1387393 - RNA, 14 nt, Human
agcccugggaccgc

SEQ ID NO: 1387394 - RNA, 13 nt, Human
agcccugggaccg

SEQ ID NO: 1387395 - RNA, 11 nt, Human
agcccugggac

SEQ ID NO: 1387396 - RNA, 20 nt, Human
agcccugggaccgcuacacc

SEQ ID NO: 1387397 - RNA, 17 nt, Human
agcccugggaggcucug

SEQ ID NO: 1387398 - RNA, 20 nt, Human
ugcaauaaaucugacccagu

SEQ ID NO: 1387399 - RNA, 23 nt, Human
ugcaauaaaucugacccagugcc

SEQ ID NO: 1387400 - RNA, 21 nt, Human
ugcaauaaaucugacccagug

SEQ ID NO: 1387401 - RNA, 23 nt, Human
agcccaggagcuccccuccccaa

SEQ ID NO: 1387402 - RNA, 19 nt, Human
agcccaggagcuccccucc

SEQ ID NO: 1387403 - RNA, 18 nt, Human
agcccaggagcuccccuc

SEQ ID NO: 1387404 - RNA, 14 nt, Human
agcccaggagcucc

SEQ ID NO: 1387405 - RNA, 12 nt, Human
agcccaggagcu

SEQ ID NO: 1387406 - RNA, 16 nt, Human
ugcaauauacuggaaa

SEQ ID NO: 1387407 - RNA, 20 nt, Human
ugcaauauacuggaaagcuu

SEQ ID NO: 1387408 - RNA, 15 nt, Human
ugcaauauacuggaa

SEQ ID NO: 1387409 - RNA, 16 nt, Human
ugcaauagaaggugau

SEQ ID NO: 1387410 - RNA, 14 nt, Human
ugcaauacauacca

SEQ ID NO: 1387411 - RNA, 23 nt, Human
ugcaagucaguccaggaugcuaa

SEQ ID NO: 1387412 - RNA, 22 nt, Human
ugcaaacugggaaccccuuucc

SEQ ID NO: 1387413 - RNA, 23 nt, Human
ugcaaacugggaaccccuuuccc

SEQ ID NO: 1387414 - RNA, 13 nt, Human
ugcaaacugggaa

SEQ ID NO: 1387415 - RNA, 11 nt, Human
ugcaaacuggg

SEQ ID NO: 1387416 - RNA, 20 nt, Human
ugcaaacucuuuggucguuu

SEQ ID NO: 1387417 - RNA, 23 nt, Human
ugcaaaccugaccccugcucagu

SEQ ID NO: 1387418 - RNA, 22 nt, Human
ugcaaaccugaccccugcucag

SEQ ID NO: 1387419 - RNA, 17 nt, Human
ugauuuguaacccacug

SEQ ID NO: 1387420 - RNA, 18 nt, Human
ugauuuguacugaaaaau

SEQ ID NO: 1387421 - RNA, 15 nt, Human
ugauuuguacugaaa

SEQ ID NO: 1387422 - RNA, 19 nt, Human
agcccauuguggccuaaga

SEQ ID NO: 1387423 - RNA, 22 nt, Human
agcccauuguggccuaagaggc

SEQ ID NO: 1387424 - RNA, 16 nt, Human
agcccauuguggccua

SEQ ID NO: 1387425 - RNA, 20 nt, Human
agcccaggcucggccugccc

SEQ ID NO: 1387426 - RNA, 21 nt, Human
agcccaggccaggacucugca

SEQ ID NO: 1387427 - RNA, 20 nt, Human
agcccaggccaggacucugc

SEQ ID NO: 1387428 - RNA, 19 nt, Human
agcccaggccaggacucug

SEQ ID NO: 1387429 - RNA, 22 nt, Human
agcccaggccaggacucugcag

SEQ ID NO: 1387430 - RNA, 16 nt, Human
agcccaggccaggacu

SEQ ID NO: 1387431 - RNA, 15 nt, Human
agcccaggccaggac

SEQ ID NO: 1387432 - RNA, 14 nt, Human
agcccaggccagga

SEQ ID NO: 1387433 - RNA, 13 nt, Human
agcccaggccagg

SEQ ID NO: 1387434 - RNA, 23 nt, Human
agcccagggcuccugcacuuacu

SEQ ID NO: 1387435 - RNA, 17 nt, Human
agcccagggcuccugca

SEQ ID NO: 1387436 - RNA, 16 nt, Human
agcccagggcuccugc

SEQ ID NO: 1387437 - RNA, 15 nt, Human
agcccagggcuccug

SEQ ID NO: 1387438 - RNA, 14 nt, Human
agcccagggcuccu

SEQ ID NO: 1387439 - RNA, 16 nt, Human
agcccagggaggccga

SEQ ID NO: 1387440 - RNA, 14 nt, Human
agcccauucauucc

SEQ ID NO: 1387441 - RNA, 17 nt, Human
agcccauucauuccauu

SEQ ID NO: 1387442 - RNA, 22 nt, Human
agcccauucauuccauucugga

SEQ ID NO: 1387443 - RNA, 23 nt, Human
agcccauucauuccauucuggaa

SEQ ID NO: 1387444 - RNA, 15 nt, Human
agcccuuuccaagcu

SEQ ID NO: 1387445 - RNA, 21 nt, Human
agcccuugugaaucaaggguc

SEQ ID NO: 1387446 - RNA, 21 nt, Human
agcccuuuacuugaccuccua

SEQ ID NO: 1387447 - RNA, 23 nt, Human
agcccuuggggguccuccuccag

SEQ ID NO: 1387448 - RNA, 22 nt, Human
agcccuuggggguccuccucca

SEQ ID NO: 1387449 - RNA, 21 nt, Human
agcccuuggggguccuccucc

SEQ ID NO: 1387450 - RNA, 14 nt, Human
agcccuuggggguc

SEQ ID NO: 1387451 - RNA, 21 nt, Human
agcccuguccuggugguauuu

SEQ ID NO: 1387452 - RNA, 23 nt, Human
agcccuguccuggugguauuuuc

SEQ ID NO: 1387453 - RNA, 11 nt, Human
agcccugucuc

SEQ ID NO: 1387454 - RNA, 18 nt, Human
agcccugucuccucucuc

SEQ ID NO: 1387455 - RNA, 17 nt, Human
agcccuguccugguggu

SEQ ID NO: 1387456 - RNA, 16 nt, Human
agcccuguccuggugg

SEQ ID NO: 1387457 - RNA, 14 nt, Human
agcccuguccuggu

SEQ ID NO: 1387458 - RNA, 14 nt, Human
ugcagacucacugu

SEQ ID NO: 1387459 - RNA, 19 nt, Human
ugcagacccugcccuuguu

SEQ ID NO: 1387460 - RNA, 15 nt, Human
ugcagacccugcccu

SEQ ID NO: 1387461 - RNA, 23 nt, Human
ugcagaccacgcccguccugccu

SEQ ID NO: 1387462 - RNA, 17 nt, Human
ugcagaagaaggcaucg

SEQ ID NO: 1387463 - RNA, 16 nt, Human
ugcagaagaaggcauc

SEQ ID NO: 1387464 - RNA, 12 nt, Human
ugcacacauuuu

SEQ ID NO: 1387465 - RNA, 13 nt, Human
ugcacacauuuuu

SEQ ID NO: 1387466 - RNA, 15 nt, Human
ugcacacauuuuuua

SEQ ID NO: 1387467 - RNA, 20 nt, Human
ugcacacauuuuuuaaaugc

SEQ ID NO: 1387468 - RNA, 22 nt, Human
agccucugggggguggccaggc

SEQ ID NO: 1387469 - RNA, 21 nt, Human
agccucugggggguggccagg

SEQ ID NO: 1387470 - RNA, 20 nt, Human
agccucugggggguggccag

SEQ ID NO: 1387471 - RNA, 13 nt, Human
agccucugggggg

SEQ ID NO: 1387472 - RNA, 23 nt, Human
agccucuggcauuagaauuauuu

SEQ ID NO: 1387473 - RNA, 22 nt, Human
agccucuggcauuagaauuauu

SEQ ID NO: 1387474 - RNA, 22 nt, Human
agccuccaccccacaacccaaa

SEQ ID NO: 1387475 - RNA, 14 nt, Human
agccuccaauuuuu

SEQ ID NO: 1387476 - RNA, 22 nt, Human
agccucugcccaggcacugcua

SEQ ID NO: 1387477 - RNA, 18 nt, Human
agccucugcccaggcacu

SEQ ID NO: 1387478 - RNA, 22 nt, Human
agccucugcagcggaaucuguu

SEQ ID NO: 1387479 - RNA, 15 nt, Human
agccucaauuucuga

SEQ ID NO: 1387480 - RNA, 23 nt, Human
agccucaagguuuuagguucuaa

SEQ ID NO: 1387481 - RNA, 21 nt, Human
agccucaagucuuauuuccuc

SEQ ID NO: 1387482 - RNA, 22 nt, Human
agccucaagguuuuagguucua

SEQ ID NO: 1387483 - RNA, 21 nt, Human
agccucaagguuuuagguucu

SEQ ID NO: 1387484 - RNA, 21 nt, Human
agccucagugacccuggcucc

SEQ ID NO: 1387485 - RNA, 20 nt, Human
agccucagugacccuggcuc

SEQ ID NO: 1387486 - RNA, 18 nt, Human
agccucagauuccuuccc

SEQ ID NO: 1387487 - RNA, 23 nt, Human
agccucagauuccuucccaugga

SEQ ID NO: 1387488 - RNA, 17 nt, Human
agccucagauuccuucc

SEQ ID NO: 1387489 - RNA, 16 nt, Human
agccucagauuccuuc

SEQ ID NO: 1387490 - RNA, 14 nt, Human
agccucagauuccu

SEQ ID NO: 1387491 - RNA, 23 nt, Human
agccucagagacaucagcccuug

SEQ ID NO: 1387492 - RNA, 20 nt, Human
agccucagagacaucagccc

SEQ ID NO: 1387493 - RNA, 22 nt, Human
agccucacuuuuaaugaacaaa

SEQ ID NO: 1387494 - RNA, 23 nt, Human
agccucacuuuuaaugaacaaau

SEQ ID NO: 1387495 - RNA, 20 nt, Human
agccucaggggucugagcuc

SEQ ID NO: 1387496 - RNA, 23 nt, Human
agccucaggggucugagcuccag

SEQ ID NO: 1387497 - RNA, 23 nt, Human
agccucaggacugggagccccca

SEQ ID NO: 1387498 - RNA, 21 nt, Human
agccucaggacugggagcccc

SEQ ID NO: 1387499 - RNA, 19 nt, Human
agccucaggacugggagcc

SEQ ID NO: 1387500 - RNA, 18 nt, Human
agccucaggacugggagc

SEQ ID NO: 1387501 - RNA, 17 nt, Human
agccucaggacugggag

SEQ ID NO: 1387502 - RNA, 16 nt, Human
agccucaggacuggga

SEQ ID NO: 1387503 - RNA, 13 nt, Human
agccucaggacug

SEQ ID NO: 1387504 - RNA, 23 nt, Human
agccucagcucucaguugcagcc

SEQ ID NO: 1387505 - RNA, 12 nt, Human
ugcccaggagaa

SEQ ID NO: 1387506 - RNA, 11 nt, Human
ugcccaggaga

SEQ ID NO: 1387507 - RNA, 19 nt, Human
ugcccaacccuucccucac

SEQ ID NO: 1387508 - RNA, 20 nt, Human
ugcccaaauccuuagaucug

SEQ ID NO: 1387509 - RNA, 23 nt, Human
ugcccaaagcagcacuuauaaau

SEQ ID NO: 1387510 - RNA, 23 nt, Human
ugccauuuguacugaccccauca

SEQ ID NO: 1387511 - RNA, 22 nt, Human
ugcccccugcagaaccggagag

SEQ ID NO: 1387512 - RNA, 14 nt, Human
ugcccccugcagaa

SEQ ID NO: 1387513 - RNA, 13 nt, Human
ugcccccugcaga

SEQ ID NO: 1387514 - RNA, 12 nt, Human
ugcccccugcag

SEQ ID NO: 1387515 - RNA, 20 nt, Human
ugcccuaaaguguauuuuuu

SEQ ID NO: 1387516 - RNA, 23 nt, Human
ugcccccuaauccccuucucccc

SEQ ID NO: 1387517 - RNA, 21 nt, Human
ugcccccuaauccccuucucc

SEQ ID NO: 1387518 - RNA, 16 nt, Human
ugcccccaaccauuuc

SEQ ID NO: 1387519 - RNA, 21 nt, Human
ugcccccaaccauuuccucag

SEQ ID NO: 1387520 - RNA, 16 nt, Human
ugccccauucaacauc

SEQ ID NO: 1387521 - RNA, 20 nt, Human
agcuacccuuuuucuccagc

SEQ ID NO: 1387522 - RNA, 17 nt, Human
agcuacccgcagaguuc

SEQ ID NO: 1387523 - RNA, 15 nt, Human
agcuacauaauuuag

SEQ ID NO: 1387524 - RNA, 16 nt, Human
agcuagucuuuugcuu

SEQ ID NO: 1387525 - RNA, 23 nt, Human
agcuacagagaaaccagcuuccu

SEQ ID NO: 1387526 - RNA, 22 nt, Human
agcuacagagaaaccagcuucc

SEQ ID NO: 1387527 - RNA, 21 nt, Human
agcuacagagaaaccagcuuc

SEQ ID NO: 1387528 - RNA, 20 nt, Human
agcuacagagaaaccagcuu

SEQ ID NO: 1387529 - RNA, 19 nt, Human
agcuacagagaaaccagcu

SEQ ID NO: 1387530 - RNA, 18 nt, Human
agcuacagagaaaccagc

SEQ ID NO: 1387531 - RNA, 17 nt, Human
agcuacagagaaaccag

SEQ ID NO: 1387532 - RNA, 16 nt, Human
agcgucggucugugcc

SEQ ID NO: 1387533 - RNA, 18 nt, Human
agcgucuuucuuuuuugg

SEQ ID NO: 1387534 - RNA, 15 nt, Human
agcgucggucugugc

SEQ ID NO: 1387535 - RNA, 19 nt, Human
agcguccuccucugugacc

SEQ ID NO: 1387536 - RNA, 16 nt, Human
agcuacagagaaacca

SEQ ID NO: 1387537 - RNA, 15 nt, Human
agcuacagagaaacc

SEQ ID NO: 1387538 - RNA, 18 nt, Human
agcuauccggacagagca

SEQ ID NO: 1387539 - RNA, 20 nt, Human
agcuaucauugcuuccuccu

SEQ ID NO: 1387540 - RNA, 20 nt, Human
agcuagugacccacaugcca

SEQ ID NO: 1387541 - RNA, 21 nt, Human
agcuagugacccacaugccau

SEQ ID NO: 1387542 - RNA, 18 nt, Human
agcuagugacccacaugc

SEQ ID NO: 1387543 - RNA, 17 nt, Human
agcuagugacccacaug

SEQ ID NO: 1387544 - RNA, 23 nt, Human
agcuagucuuuugcuuuugccca

SEQ ID NO: 1387545 - RNA, 19 nt, Human
agcuagucuuuugcuuuug

SEQ ID NO: 1387546 - RNA, 20 nt, Human
agcuaugucccaggaaucag

SEQ ID NO: 1387547 - RNA, 20 nt, Human
agcuauguuauauugaaaaa

SEQ ID NO: 1387548 - RNA, 22 nt, Human
agcuauguuauauugaaaaaau

SEQ ID NO: 1387549 - RNA, 18 nt, Human
agcuauguuauauugaaa

SEQ ID NO: 1387550 - RNA, 17 nt, Human
agcuaucguaaaauuaa

SEQ ID NO: 1387551 - RNA, 22 nt, Human
agcucaggaugagggaaaagaa

SEQ ID NO: 1387552 - RNA, 18 nt, Human
agcucaggaugagggaaa

SEQ ID NO: 1387553 - RNA, 15 nt, Human
ugccauuuguacuga

SEQ ID NO: 1387554 - RNA, 20 nt, Human
ugccauuguagcgucuuucu

SEQ ID NO: 1387555 - RNA, 15 nt, Human
agcuccaagccccau

SEQ ID NO: 1387556 - RNA, 18 nt, Human
agcuccaagaauuucuag

SEQ ID NO: 1387557 - RNA, 22 nt, Human
agcuccaaccugcaaagaucug

SEQ ID NO: 1387558 - RNA, 15 nt, Human
agcuccaagaauuuc

SEQ ID NO: 1387559 - RNA, 20 nt, Human
agcggcuugccugccugcuc

SEQ ID NO: 1387560 - RNA, 17 nt, Human
agcguccuccucuguga

SEQ ID NO: 1387561 - RNA, 16 nt, Human
agcguccuccucugug

SEQ ID NO: 1387562 - RNA, 15 nt, Human
agcguccuccucugu

SEQ ID NO: 1387563 - RNA, 22 nt, Human
ugccagugacagacaggcucuu

SEQ ID NO: 1387564 - RNA, 20 nt, Human
ugccagugacagacaggcuc

SEQ ID NO: 1387565 - RNA, 19 nt, Human
ugccagugacagacaggcu

SEQ ID NO: 1387566 - RNA, 17 nt, Human
ugccagugacagacagg

SEQ ID NO: 1387567 - RNA, 16 nt, Human
ugccagugacagacag

SEQ ID NO: 1387568 - RNA, 14 nt, Human
ugccaguccugucc

SEQ ID NO: 1387569 - RNA, 15 nt, Human
ugccaguccuguccu

SEQ ID NO: 1387570 - RNA, 13 nt, Human
ugccaguccuguc

SEQ ID NO: 1387571 - RNA, 15 nt, Human
ugccagcugcacuga

SEQ ID NO: 1387572 - RNA, 13 nt, Human
ugccagccaagcu

SEQ ID NO: 1387573 - RNA, 23 nt, Human
ugccagcucuguaucaggaccca

SEQ ID NO: 1387574 - RNA, 21 nt, Human
ugccagccaagcucugcaguc

SEQ ID NO: 1387575 - RNA, 22 nt, Human
ugccagaggcugaugucaagca

SEQ ID NO: 1387576 - RNA, 20 nt, Human
ugccagagccuggggcucua

SEQ ID NO: 1387577 - RNA, 19 nt, Human
ugccagagccuggggcucu

SEQ ID NO: 1387578 - RNA, 18 nt, Human
ugccagagccuggggcuc

SEQ ID NO: 1387579 - RNA, 17 nt, Human
ugccagagccuggggcu

SEQ ID NO: 1387580 - RNA, 16 nt, Human
ugccagagccuggggc

SEQ ID NO: 1387581 - RNA, 15 nt, Human
ugccagagccugggg

SEQ ID NO: 1387582 - RNA, 14 nt, Human
ugccagagccuggg

SEQ ID NO: 1387583 - RNA, 13 nt, Human
ugccagagccugg

SEQ ID NO: 1387584 - RNA, 12 nt, Human
ugccagagccug

SEQ ID NO: 1387585 - RNA, 11 nt, Human
ugccagagccu

SEQ ID NO: 1387586 - RNA, 14 nt, Human
ugccagagauccaa

SEQ ID NO: 1387587 - RNA, 20 nt, Human
ugcauuuaugagcucuucau

SEQ ID NO: 1387588 - RNA, 20 nt, Human
ugcauuugaggucuguucuu

SEQ ID NO: 1387589 - RNA, 21 nt, Human
ugcauuugaggucuguucuuu

SEQ ID NO: 1387590 - RNA, 19 nt, Human
agccuugccagagauccaa

SEQ ID NO: 1387591 - RNA, 17 nt, Human
agccuugccagagaucc

SEQ ID NO: 1387592 - RNA, 15 nt, Human
agccuugccagagau

SEQ ID NO: 1387593 - RNA, 14 nt, Human
agccuugccagaga

SEQ ID NO: 1387594 - RNA, 13 nt, Human
agccuugccagag

SEQ ID NO: 1387595 - RNA, 14 nt, Human
agccuucucuguuc

SEQ ID NO: 1387596 - RNA, 23 nt, Human
agccuugaacuuugaccucugca

SEQ ID NO: 1387597 - RNA, 16 nt, Human
agccuugaacuuugac

SEQ ID NO: 1387598 - RNA, 22 nt, Human
agccuugaacuuugaccucugc

SEQ ID NO: 1387599 - RNA, 23 nt, Human
agccuuccccuuauccucccugu

SEQ ID NO: 1387600 - RNA, 21 nt, Human
agccuuccccuuauccucccu

SEQ ID NO: 1387601 - RNA, 20 nt, Human
agccuuccccuaccccuugu

SEQ ID NO: 1387602 - RNA, 16 nt, Human
agccuuccccuacccc

SEQ ID NO: 1387603 - RNA, 12 nt, Human
agccuucucugu

SEQ ID NO: 1387604 - RNA, 15 nt, Human
agccuugaacuuuga

SEQ ID NO: 1387605 - RNA, 20 nt, Human
ugcagcucuccccuucucug

SEQ ID NO: 1387606 - RNA, 22 nt, Human
ugcagcucuccccuucucugua

SEQ ID NO: 1387607 - RNA, 22 nt, Human
agcggaacaaggagucagacau

SEQ ID NO: 1387608 - RNA, 17 nt, Human
agcggaacaaggaguca

SEQ ID NO: 1387609 - RNA, 16 nt, Human
agcgcugucaggauug

SEQ ID NO: 1387610 - RNA, 21 nt, Human
agcgcugucaggauugcgaga

SEQ ID NO: 1387611 - RNA, 23 nt, Human
agcgcaguuuuuuuuuucuuguc

SEQ ID NO: 1387612 - RNA, 14 nt, Human
agcgcaguuuuuuu

SEQ ID NO: 1387613 - RNA, 12 nt, Human
ugcauucuagua

SEQ ID NO: 1387614 - RNA, 14 nt, Human
ugcauucccagcuc

SEQ ID NO: 1387615 - RNA, 20 nt, Human
ugcauucugccucucuagga

SEQ ID NO: 1387616 - RNA, 19 nt, Human
ugcauucugccucucuagg

SEQ ID NO: 1387617 - RNA, 15 nt, Human
ugcauucugccucuc

SEQ ID NO: 1387618 - RNA, 14 nt, Human
ugcauucugccucu

SEQ ID NO: 1387619 - RNA, 20 nt, Human
ugcauuuaaaagauacaguu

SEQ ID NO: 1387620 - RNA, 19 nt, Human
ugcauuugaggucuguucu

SEQ ID NO: 1387621 - RNA, 24 nt, Human
ugcauuuaaauacagucuuccauu

SEQ ID NO: 1387622 - RNA, 22 nt, Human
ugcauuuaaauacagucuucca

SEQ ID NO: 1387623 - RNA, 16 nt, Human
ugcauuuaaauacagu

SEQ ID NO: 1387624 - RNA, 13 nt, Human
ugcauuuauaugu

SEQ ID NO: 1387625 - RNA, 14 nt, Human
ugcauuuauaugua

SEQ ID NO: 1387626 - RNA, 19 nt, Human
ugcauuuaugagcucuuca

SEQ ID NO: 1387627 - RNA, 16 nt, Human
ugcauuuauauguacc

SEQ ID NO: 1387628 - RNA, 16 nt, Human
agcucuucauguuuca

SEQ ID NO: 1387629 - RNA, 13 nt, Human
agcucuucauguu

SEQ ID NO: 1387630 - RNA, 16 nt, Human
agcucuuaacuacagu

SEQ ID NO: 1387631 - RNA, 23 nt, Human
agcucuguucuuccucagccagc

SEQ ID NO: 1387632 - RNA, 22 nt, Human
agcucuguucuuccucagccag

SEQ ID NO: 1387633 - RNA, 21 nt, Human
agcucuguucuuccucagcca

SEQ ID NO: 1387634 - RNA, 20 nt, Human
agcucuguucuuccucagcc

SEQ ID NO: 1387635 - RNA, 19 nt, Human
agcucuguucuuccucagc

SEQ ID NO: 1387636 - RNA, 18 nt, Human
agcucuguucuuccucag

SEQ ID NO: 1387637 - RNA, 17 nt, Human
agcucuguucuuccuca

SEQ ID NO: 1387638 - RNA, 15 nt, Human
agcucuguucuuccu

SEQ ID NO: 1387639 - RNA, 20 nt, Human
agcucuggaggggaggggga

SEQ ID NO: 1387640 - RNA, 19 nt, Human
agcucuggaggggaggggg

SEQ ID NO: 1387641 - RNA, 18 nt, Human
agcucuggaggggagggg

SEQ ID NO: 1387642 - RNA, 17 nt, Human
agcucuggaggggaggg

SEQ ID NO: 1387643 - RNA, 16 nt, Human
agcucuggaggggagg

SEQ ID NO: 1387644 - RNA, 12 nt, Human
agcucuggaggg

SEQ ID NO: 1387645 - RNA, 15 nt, Human
agcucuagaaucugc

SEQ ID NO: 1387646 - RNA, 14 nt, Human
agcucuagaaucug

SEQ ID NO: 1387647 - RNA, 13 nt, Human
agcucuagaaucu

SEQ ID NO: 1387648 - RNA, 17 nt, Human
agcucuacugccucaac

SEQ ID NO: 1387649 - RNA, 14 nt, Human
agcucuacccugca

SEQ ID NO: 1387650 - RNA, 10 nt, Human
agcucugagc

SEQ ID NO: 1387651 - RNA, 23 nt, Human
agcucugagaggcccuggaucag

SEQ ID NO: 1387652 - RNA, 15 nt, Human
agcucugagggaaag

SEQ ID NO: 1387653 - RNA, 12 nt, Human
agcucugaggga

SEQ ID NO: 1387654 - RNA, 16 nt, Human
agcucugagcugucaa

SEQ ID NO: 1387655 - RNA, 15 nt, Human
agcucugagcuguca

SEQ ID NO: 1387656 - RNA, 14 nt, Human
agcucugagcuguc

SEQ ID NO: 1387657 - RNA, 13 nt, Human
agcucugagcugu

SEQ ID NO: 1387658 - RNA, 12 nt, Human
agcucugagcug

SEQ ID NO: 1387659 - RNA, 12 nt, Human
agcucugcauua

SEQ ID NO: 1387660 - RNA, 21 nt, Human
agcucuggacagccccacccu

SEQ ID NO: 1387661 - RNA, 13 nt, Human
agcucugcauuau

SEQ ID NO: 1387662 - RNA, 18 nt, Human
agcucuggacagccccac

SEQ ID NO: 1387663 - RNA, 17 nt, Human
agcucuggacagcccca

SEQ ID NO: 1387664 - RNA, 15 nt, Human
agcucccccucccuc

SEQ ID NO: 1387665 - RNA, 23 nt, Human
agcucccccagcaaagcccccag

SEQ ID NO: 1387666 - RNA, 19 nt, Human
agcucccccagcaaagccc

SEQ ID NO: 1387667 - RNA, 22 nt, Human
agcuccuugagggcaagagcca

SEQ ID NO: 1387668 - RNA, 21 nt, Human
agcuccuugagggcaagagcc

SEQ ID NO: 1387669 - RNA, 21 nt, Human
agcucccaccuccccuugggc

SEQ ID NO: 1387670 - RNA, 19 nt, Human
agcucccaccuccccuugg

SEQ ID NO: 1387671 - RNA, 14 nt, Human
agcucccaccuccc

SEQ ID NO: 1387672 - RNA, 11 nt, Human
agcucccaccu

SEQ ID NO: 1387673 - RNA, 19 nt, Human
agcucccacaagccugagg

SEQ ID NO: 1387674 - RNA, 17 nt, Human
agcucccacaagccuga

SEQ ID NO: 1387675 - RNA, 16 nt, Human
agcucccacaagccug

SEQ ID NO: 1387676 - RNA, 20 nt, Human
agcucccacaagccucugcc

SEQ ID NO: 1387677 - RNA, 18 nt, Human
agcucccacaagccucug

SEQ ID NO: 1387678 - RNA, 17 nt, Human
agcucccacaagccucu

SEQ ID NO: 1387679 - RNA, 16 nt, Human
agcucccacaagccuc

SEQ ID NO: 1387680 - RNA, 16 nt, Human
agcuccagccugacau

SEQ ID NO: 1387681 - RNA, 19 nt, Human
agcuccagcuccuuugggc

SEQ ID NO: 1387682 - RNA, 15 nt, Human
agcuccagccugaca

SEQ ID NO: 1387683 - RNA, 14 nt, Human
agcuccagccugac

SEQ ID NO: 1387684 - RNA, 13 nt, Human
agcuccagccuga

SEQ ID NO: 1387685 - RNA, 15 nt, Human
ugcccucugggcucu

SEQ ID NO: 1387686 - RNA, 14 nt, Human
ugcccucugggcuc

SEQ ID NO: 1387687 - RNA, 13 nt, Human
ugcccucugggcu

SEQ ID NO: 1387688 - RNA, 12 nt, Human
ugcccucugggc

SEQ ID NO: 1387689 - RNA, 20 nt, Human
ugcccucugcauccucugga

SEQ ID NO: 1387690 - RNA, 17 nt, Human
ugcccucucccacccuc

SEQ ID NO: 1387691 - RNA, 16 nt, Human
ugcccucucccacccu

SEQ ID NO: 1387692 - RNA, 15 nt, Human
ugcccucucccaccc

SEQ ID NO: 1387693 - RNA, 13 nt, Human
ugcccucucccac

SEQ ID NO: 1387694 - RNA, 12 nt, Human
ugcccucuccca

SEQ ID NO: 1387695 - RNA, 16 nt, Human
ugcccucuccccucag

SEQ ID NO: 1387696 - RNA, 21 nt, Human
ugcccuccugugcucagcccu

SEQ ID NO: 1387697 - RNA, 23 nt, Human
ugcccuccugugcucagcccuga

SEQ ID NO: 1387698 - RNA, 20 nt, Human
ugcccuccugugcucagccc

SEQ ID NO: 1387699 - RNA, 14 nt, Human
ugcccuccugugcu

SEQ ID NO: 1387700 - RNA, 22 nt, Human
ugcccuacagcacccugugguc

SEQ ID NO: 1387701 - RNA, 17 nt, Human
ugcccuaagcagaaagu

SEQ ID NO: 1387702 - RNA, 15 nt, Human
ugcccuaagcagaaa

SEQ ID NO: 1387703 - RNA, 13 nt, Human
ugcccuaagcaga

SEQ ID NO: 1387704 - RNA, 17 nt, Human
ugccccggccccucccc

SEQ ID NO: 1387705 - RNA, 22 nt, Human
ugcccuaagcagaaagugccuu

SEQ ID NO: 1387706 - RNA, 20 nt, Human
ugcccuaagcagaaagugcc

SEQ ID NO: 1387707 - RNA, 18 nt, Human
ugcccuaagcagaaagug

SEQ ID NO: 1387708 - RNA, 18 nt, Human
ugcccucugggcucugag

SEQ ID NO: 1387709 - RNA, 17 nt, Human
ugcccucugggcucuga

SEQ ID NO: 1387710 - RNA, 16 nt, Human
ugcccucugggcucug

SEQ ID NO: 1387711 - RNA, 19 nt, Human
ugcccucugggcucugagu

SEQ ID NO: 1387712 - RNA, 22 nt, Human
ugcccugagccagggucuccag

SEQ ID NO: 1387713 - RNA, 15 nt, Human
ugcccugaucccaga

SEQ ID NO: 1387714 - RNA, 14 nt, Human
ugcccugccaccug

SEQ ID NO: 1387715 - RNA, 15 nt, Human
ugcccugccaccugu

SEQ ID NO: 1387716 - RNA, 16 nt, Human
ugcccugccaccuguc

SEQ ID NO: 1387717 - RNA, 17 nt, Human
ugcccugccaccugucu

SEQ ID NO: 1387718 - RNA, 19 nt, Human
ugcccugccaccugucugu

SEQ ID NO: 1387719 - RNA, 24 nt, Human
agcuccacucugcuucucugacuu

SEQ ID NO: 1387720 - RNA, 23 nt, Human
agcuccacucugcuucucugacu

SEQ ID NO: 1387721 - RNA, 22 nt, Human
agcuccacucugcuucucugac

SEQ ID NO: 1387722 - RNA, 19 nt, Human
agcuccacucugcuucucu

SEQ ID NO: 1387723 - RNA, 18 nt, Human
agcuccacucugcuucuc

SEQ ID NO: 1387724 - RNA, 17 nt, Human
agcuccacucugcuucu

SEQ ID NO: 1387725 - RNA, 16 nt, Human
agcuccacucugcuuc

SEQ ID NO: 1387726 - RNA, 14 nt, Human
agcuccacucugcu

SEQ ID NO: 1387727 - RNA, 13 nt, Human
agcuccacucugc

SEQ ID NO: 1387728 - RNA, 12 nt, Human
agcuccacucug

SEQ ID NO: 1387729 - RNA, 11 nt, Human
agcuccacucu

SEQ ID NO: 1387730 - RNA, 17 nt, Human
agcuccacccuggccga

SEQ ID NO: 1387731 - RNA, 15 nt, Human
agcuccacccuggcc

SEQ ID NO: 1387732 - RNA, 20 nt, Human
ugcccugccaccugucuguc

SEQ ID NO: 1387733 - RNA, 21 nt, Human
ugcccugccaccugucugucu

SEQ ID NO: 1387734 - RNA, 22 nt, Human
ugcccugccaccugucugucug

SEQ ID NO: 1387735 - RNA, 16 nt, Human
ugcccuucuuucuacc

SEQ ID NO: 1387736 - RNA, 15 nt, Human
ugcccuucacuguca

SEQ ID NO: 1387737 - RNA, 14 nt, Human
ugcccuucuuucua

SEQ ID NO: 1387738 - RNA, 13 nt, Human
ugcccuucuuucu

SEQ ID NO: 1387739 - RNA, 14 nt, Human
ugcccuucuccuua

SEQ ID NO: 1387740 - RNA, 12 nt, Human
ugcccugugcaa

SEQ ID NO: 1387741 - RNA, 22 nt, Human
agcucuuccuuacucccaggca

SEQ ID NO: 1387742 - RNA, 21 nt, Human
agcucuuccuuacucccaggc

SEQ ID NO: 1387743 - RNA, 21 nt, Human
ugccucaggaggcaggaccuu

SEQ ID NO: 1387744 - RNA, 18 nt, Human
ugccucaggaggcaggac

SEQ ID NO: 1387745 - RNA, 19 nt, Human
ugccucagagaccagggcu

SEQ ID NO: 1387746 - RNA, 23 nt, Human
ugccucagccacuugccugugcu

SEQ ID NO: 1387747 - RNA, 18 nt, Human
ugccucagagaccagggc

SEQ ID NO: 1387748 - RNA, 16 nt, Human
ugccucagagaccagg

SEQ ID NO: 1387749 - RNA, 15 nt, Human
ugccucagagaccag

SEQ ID NO: 1387750 - RNA, 14 nt, Human
ugccucagagacca

SEQ ID NO: 1387751 - RNA, 14 nt, Human
ugccucacuucagg

SEQ ID NO: 1387752 - RNA, 18 nt, Human
ugccucagaaaacaagga

SEQ ID NO: 1387753 - RNA, 11 nt, Human
ugccucucugc

SEQ ID NO: 1387754 - RNA, 12 nt, Human
ugccucucugca

SEQ ID NO: 1387755 - RNA, 21 nt, Human
ugccugcucgcucccugcaga

SEQ ID NO: 1387756 - RNA, 16 nt, Human
ugccugcucgcucccu

SEQ ID NO: 1387757 - RNA, 22 nt, Human
ugccugcucccauccugugugu

SEQ ID NO: 1387758 - RNA, 20 nt, Human
ugccugcucccauccugugu

SEQ ID NO: 1387759 - RNA, 18 nt, Human
ugccugcucccauccugu

SEQ ID NO: 1387760 - RNA, 15 nt, Human
ugccugcucccaucc

SEQ ID NO: 1387761 - RNA, 14 nt, Human
ugccugcucccauc

SEQ ID NO: 1387762 - RNA, 17 nt, Human
ugccugcuauuugaagu

SEQ ID NO: 1387763 - RNA, 19 nt, Human
ugccugcgugggugugugc

SEQ ID NO: 1387764 - RNA, 22 nt, Human
ugccugccuuuccauccauggc

SEQ ID NO: 1387765 - RNA, 15 nt, Human
ugccugccuuuccau

SEQ ID NO: 1387766 - RNA, 14 nt, Human
ugccugccuuucca

SEQ ID NO: 1387767 - RNA, 22 nt, Human
ugccucugaggccagccuggcc

SEQ ID NO: 1387768 - RNA, 21 nt, Human
ugccucugaggccagccuggc

SEQ ID NO: 1387769 - RNA, 20 nt, Human
ugccucugaggccagccugg

SEQ ID NO: 1387770 - RNA, 19 nt, Human
ugccucugaggccagccug

SEQ ID NO: 1387771 - RNA, 18 nt, Human
ugccucugaggccagccu

SEQ ID NO: 1387772 - RNA, 17 nt, Human
ugccucugaggccagcc

SEQ ID NO: 1387773 - RNA, 16 nt, Human
ugccucugaggccagc

SEQ ID NO: 1387774 - RNA, 15 nt, Human
ugccucugaggccag

SEQ ID NO: 1387775 - RNA, 13 nt, Human
ugccucugaggcc

SEQ ID NO: 1387776 - RNA, 12 nt, Human
ugccucugaggc

SEQ ID NO: 1387777 - RNA, 22 nt, Human
ugccucugccaaaggaugugau

SEQ ID NO: 1387778 - RNA, 21 nt, Human
ugccucugccaaaggauguga

SEQ ID NO: 1387779 - RNA, 23 nt, Human
ugccucugaggccagccuggccu

SEQ ID NO: 1387780 - RNA, 15 nt, Human
ugccucucugcaggu

SEQ ID NO: 1387781 - RNA, 23 nt, Human
ugccucucugcaggucccuaaua

SEQ ID NO: 1387782 - RNA, 22 nt, Human
ugccugcuuggggggugaugag

SEQ ID NO: 1387783 - RNA, 23 nt, Human
agcugccugucccuaccccaugg

SEQ ID NO: 1387784 - RNA, 13 nt, Human
agcuggaaaagua

SEQ ID NO: 1387785 - RNA, 18 nt, Human
agcuggagaugaggccag

SEQ ID NO: 1387786 - RNA, 17 nt, Human
agcuggaggcaggggcu

SEQ ID NO: 1387787 - RNA, 13 nt, Human
agcuggaggcagg

SEQ ID NO: 1387788 - RNA, 22 nt, Human
agcuggaggcaggggcuuccug

SEQ ID NO: 1387789 - RNA, 21 nt, Human
agcuggaggcaggggcuuccu

SEQ ID NO: 1387790 - RNA, 14 nt, Human
agcuggagugcagu

SEQ ID NO: 1387791 - RNA, 19 nt, Human
agcuggagaugaggccaga

SEQ ID NO: 1387792 - RNA, 20 nt, Human
agcuggagaugaggccagac

SEQ ID NO: 1387793 - RNA, 21 nt, Human
agcuggagaugaggccagacc

SEQ ID NO: 1387794 - RNA, 22 nt, Human
agcuggagaugaggccagacca

SEQ ID NO: 1387795 - RNA, 23 nt, Human
agcuggagaugaggccagaccau

SEQ ID NO: 1387796 - RNA, 23 nt, Human
uguccuuagccuggaccucugac

SEQ ID NO: 1387797 - RNA, 22 nt, Human
uguccuuagccuggaccucuga

SEQ ID NO: 1387798 - RNA, 17 nt, Human
uguccuuagccuggacc

SEQ ID NO: 1387799 - RNA, 16 nt, Human
uguccuuagccuggac

SEQ ID NO: 1387800 - RNA, 15 nt, Human
uguccuuagccugga

SEQ ID NO: 1387801 - RNA, 14 nt, Human
uguccuuagccugg

SEQ ID NO: 1387802 - RNA, 15 nt, Human
uguccugucaucauc

SEQ ID NO: 1387803 - RNA, 19 nt, Human
uguccugucaucaucaugg

SEQ ID NO: 1387804 - RNA, 16 nt, Human
uguccuguacauugug

SEQ ID NO: 1387805 - RNA, 22 nt, Human
uguccuguaaagguuacaagcc

SEQ ID NO: 1387806 - RNA, 15 nt, Human
uguccuguaaagguu

SEQ ID NO: 1387807 - RNA, 15 nt, Human
uguccugguucccgu

SEQ ID NO: 1387808 - RNA, 20 nt, Human
uguccuggugguauuuucaa

SEQ ID NO: 1387809 - RNA, 19 nt, Human
uguccuggugguauuuuca

SEQ ID NO: 1387810 - RNA, 18 nt, Human
uguccuggugguauuuuc

SEQ ID NO: 1387811 - RNA, 17 nt, Human
uguccuggugguauuuu

SEQ ID NO: 1387812 - RNA, 12 nt, Human
ugucccuccggg

SEQ ID NO: 1387813 - RNA, 14 nt, Human
ugucccucccccuu

SEQ ID NO: 1387814 - RNA, 13 nt, Human
ugucccuaggugu

SEQ ID NO: 1387815 - RNA, 22 nt, Human
ugucccuugccucaaugccagu

SEQ ID NO: 1387816 - RNA, 21 nt, Human
ugucccuugccccccuggccu

SEQ ID NO: 1387817 - RNA, 18 nt, Human
ugucccuugccccccugg

SEQ ID NO: 1387818 - RNA, 23 nt, Human
uguccagcuccaaccugcaaaga

SEQ ID NO: 1387819 - RNA, 20 nt, Human
uguccagcuccaaccugcaa

SEQ ID NO: 1387820 - RNA, 16 nt, Human
uguccagcuccaaccu

SEQ ID NO: 1387821 - RNA, 12 nt, Human
uguccagcucca

SEQ ID NO: 1387822 - RNA, 19 nt, Human
uguccacgacugucuccau

SEQ ID NO: 1387823 - RNA, 11 nt, Human
uguccagcucc

SEQ ID NO: 1387824 - RNA, 18 nt, Human
uguccacgacugucucca

SEQ ID NO: 1387825 - RNA, 17 nt, Human
uguccacgacugucucc

SEQ ID NO: 1387826 - RNA, 16 nt, Human
uguccacgacugucuc

SEQ ID NO: 1387827 - RNA, 12 nt, Human
uguccaccccca

SEQ ID NO: 1387828 - RNA, 13 nt, Human
uguccacccccau

SEQ ID NO: 1387829 - RNA, 11 nt, Human
uguccaccccc

SEQ ID NO: 1387830 - RNA, 18 nt, Human
uguccacaggcuucugag

SEQ ID NO: 1387831 - RNA, 21 nt, Human
uguccagcugagcgccaggau

SEQ ID NO: 1387832 - RNA, 17 nt, Human
uguccagcugagcgcca

SEQ ID NO: 1387833 - RNA, 17 nt, Human
uguccacauagguuuag

SEQ ID NO: 1387834 - RNA, 16 nt, Human
uguccacaggcuucug

SEQ ID NO: 1387835 - RNA, 20 nt, Human
ugucagcaugaauuuguaau

SEQ ID NO: 1387836 - RNA, 16 nt, Human
ugucagcaugaauuug

SEQ ID NO: 1387837 - RNA, 14 nt, Human
ugucagcaugaauu

SEQ ID NO: 1387838 - RNA, 12 nt, Human
ugucagcaugaa

SEQ ID NO: 1387839 - RNA, 17 nt, Human
agucacucuuaugcugu

SEQ ID NO: 1387840 - RNA, 21 nt, Human
aguccaguccuaucugggcuu

SEQ ID NO: 1387841 - RNA, 17 nt, Human
aguccaguccaguccua

SEQ ID NO: 1387842 - RNA, 18 nt, Human
aguccagguccugguggg

SEQ ID NO: 1387843 - RNA, 19 nt, Human
aguccagguccuggugggg

SEQ ID NO: 1387844 - RNA, 17 nt, Human
aguccagguccuggugg

SEQ ID NO: 1387845 - RNA, 16 nt, Human
aguccagguccuggug

SEQ ID NO: 1387846 - RNA, 15 nt, Human
aguccagguccuggu

SEQ ID NO: 1387847 - RNA, 14 nt, Human
aguccagguccugg

SEQ ID NO: 1387848 - RNA, 13 nt, Human
aguccagguccug

SEQ ID NO: 1387849 - RNA, 23 nt, Human
agucaucuugcuaccaguauuua

SEQ ID NO: 1387850 - RNA, 19 nt, Human
agucaucuugcuaccagua

SEQ ID NO: 1387851 - RNA, 13 nt, Human
agucaucuugcua

SEQ ID NO: 1387852 - RNA, 11 nt, Human
agucaucuugc

SEQ ID NO: 1387853 - RNA, 14 nt, Human
aguccaucagccuc

SEQ ID NO: 1387854 - RNA, 13 nt, Human
aguccaucagccu

SEQ ID NO: 1387855 - RNA, 17 nt, Human
aguccaguccuaucugg

SEQ ID NO: 1387856 - RNA, 16 nt, Human
aguccaucagccucca

SEQ ID NO: 1387857 - RNA, 23 nt, Human
agucccagguuggcucugccagu

SEQ ID NO: 1387858 - RNA, 21 nt, Human
agucccagguuggcucugcca

SEQ ID NO: 1387859 - RNA, 20 nt, Human
agucccagguuggcucugcc

SEQ ID NO: 1387860 - RNA, 19 nt, Human
agucccagguuggcucugc

SEQ ID NO: 1387861 - RNA, 18 nt, Human
agucccagguuggcucug

SEQ ID NO: 1387862 - RNA, 17 nt, Human
agucccaucugcuucag

SEQ ID NO: 1387863 - RNA, 22 nt, Human
aguccccacagauaacugaaaa

SEQ ID NO: 1387864 - RNA, 22 nt, Human
agucccagguuggcucugccag

SEQ ID NO: 1387865 - RNA, 18 nt, Human
agucccaucccugcguga

SEQ ID NO: 1387866 - RNA, 13 nt, Human
agucauccagucu

SEQ ID NO: 1387867 - RNA, 21 nt, Human
agucagucauucagauaugau

SEQ ID NO: 1387868 - RNA, 15 nt, Human
agucagucauucaga

SEQ ID NO: 1387869 - RNA, 16 nt, Human
ugucuaagauucuaga

SEQ ID NO: 1387870 - RNA, 23 nt, Human
agucagauggaaaauucauuuuu

SEQ ID NO: 1387871 - RNA, 22 nt, Human
agucagauggaaaauucauuuu

SEQ ID NO: 1387872 - RNA, 20 nt, Human
agucagauggaaaauucauu

SEQ ID NO: 1387873 - RNA, 15 nt, Human
ugucuaagauucuag

SEQ ID NO: 1387874 - RNA, 14 nt, Human
ugucuaagauucua

SEQ ID NO: 1387875 - RNA, 21 nt, Human
uguccuuuaccaaagaugaau

SEQ ID NO: 1387876 - RNA, 19 nt, Human
uguccuuuaccaaagauga

SEQ ID NO: 1387877 - RNA, 20 nt, Human
uguccuugaaggacuaauag

SEQ ID NO: 1387878 - RNA, 13 nt, Human
ugucuaagauucu

SEQ ID NO: 1387879 - RNA, 18 nt, Human
ugucuaagaaauugaaua

SEQ ID NO: 1387880 - RNA, 23 nt, Human
ugucuaagaaauugaauacuuug

SEQ ID NO: 1387881 - RNA, 22 nt, Human
aguauguucuaaccuuuacaug

SEQ ID NO: 1387882 - RNA, 21 nt, Human
aguauguucuaaccuuuacau

SEQ ID NO: 1387883 - RNA, 18 nt, Human
aguauguucuaaccuuua

SEQ ID NO: 1387884 - RNA, 14 nt, Human
aguauuauaccuuu

SEQ ID NO: 1387885 - RNA, 14 nt, Human
aguauuauauguac

SEQ ID NO: 1387886 - RNA, 13 nt, Human
aguauuauaugua

SEQ ID NO: 1387887 - RNA, 12 nt, Human
aguauuauaugu

SEQ ID NO: 1387888 - RNA, 15 nt, Human
aguauuauaccuuuu

SEQ ID NO: 1387889 - RNA, 18 nt, Human
aguauuggggucugaccc

SEQ ID NO: 1387890 - RNA, 23 nt, Human
aguagcugagcucacaaggcagc

SEQ ID NO: 1387891 - RNA, 14 nt, Human
aguauguucaaagu

SEQ ID NO: 1387892 - RNA, 22 nt, Human
aguagcugagcucacaaggcag

SEQ ID NO: 1387893 - RNA, 14 nt, Human
aguagcugagcuca

SEQ ID NO: 1387894 - RNA, 13 nt, Human
aguagcugagcuc

SEQ ID NO: 1387895 - RNA, 21 nt, Human
aguauguuagugcaaauuguc

SEQ ID NO: 1387896 - RNA, 18 nt, Human
aguauguuagugcaaauu

SEQ ID NO: 1387897 - RNA, 17 nt, Human
agucacagggcaguacc

SEQ ID NO: 1387898 - RNA, 13 nt, Human
agucacagggcag

SEQ ID NO: 1387899 - RNA, 13 nt, Human
agucacagccacc

SEQ ID NO: 1387900 - RNA, 15 nt, Human
aguauuuagaagcca

SEQ ID NO: 1387901 - RNA, 22 nt, Human
agucacucuagucaaugacaug

SEQ ID NO: 1387902 - RNA, 20 nt, Human
agucacucuagucaaugaca

SEQ ID NO: 1387903 - RNA, 17 nt, Human
agucacucuagucaaug

SEQ ID NO: 1387904 - RNA, 20 nt, Human
agucacucgauaauaaagua

SEQ ID NO: 1387905 - RNA, 14 nt, Human
agucacagggcagu

SEQ ID NO: 1387906 - RNA, 18 nt, Human
agucacauuccugaacag

SEQ ID NO: 1387907 - RNA, 17 nt, Human
aguauuuaacuaauuau

SEQ ID NO: 1387908 - RNA, 12 nt, Human
aguauuuaacua

SEQ ID NO: 1387909 - RNA, 22 nt, Human
aguauuguuguccuuuucauag

SEQ ID NO: 1387910 - RNA, 21 nt, Human
aguauuguuguccuuuucaua

SEQ ID NO: 1387911 - RNA, 24 nt, Human
aguauuguuguccuuuucauaggu

SEQ ID NO: 1387912 - RNA, 20 nt, Human
aguauuguuguccuuuucau

SEQ ID NO: 1387913 - RNA, 19 nt, Human
aguauuguuguccuuuuca

SEQ ID NO: 1387914 - RNA, 16 nt, Human
aguauuguuguccuuu

SEQ ID NO: 1387915 - RNA, 15 nt, Human
aguauuguuguccuu

SEQ ID NO: 1387916 - RNA, 13 nt, Human
aguauuguugucc

SEQ ID NO: 1387917 - RNA, 12 nt, Human
aguauuguuguc

SEQ ID NO: 1387918 - RNA, 22 nt, Human
aguauugcucacccagugcccu

SEQ ID NO: 1387919 - RNA, 16 nt, Human
aguauuguccaggucu

SEQ ID NO: 1387920 - RNA, 15 nt, Human
aguauuguccagguc

SEQ ID NO: 1387921 - RNA, 11 nt, Human
aguauuuaauu

SEQ ID NO: 1387922 - RNA, 13 nt, Human
aguauuuaauuag

SEQ ID NO: 1387923 - RNA, 14 nt, Human
aguauuuaauuagu

SEQ ID NO: 1387924 - RNA, 15 nt, Human
aguauuuaauuagug

SEQ ID NO: 1387925 - RNA, 16 nt, Human
aguauuuaauuagugc

SEQ ID NO: 1387926 - RNA, 17 nt, Human
aguauuuaauuagugcu

SEQ ID NO: 1387927 - RNA, 19 nt, Human
aguauuuaauuagugcuaa

SEQ ID NO: 1387928 - RNA, 21 nt, Human
aguauuuaauuagugcuaagu

SEQ ID NO: 1387929 - RNA, 21 nt, Human
aguauuuaauucauguugccu

SEQ ID NO: 1387930 - RNA, 14 nt, Human
uguauuaagccacu

SEQ ID NO: 1387931 - RNA, 16 nt, Human
uguauuaagaaaggaa

SEQ ID NO: 1387932 - RNA, 19 nt, Human
uguauuagauguucucuau

SEQ ID NO: 1387933 - RNA, 13 nt, Human
uguauuagauguu

SEQ ID NO: 1387934 - RNA, 14 nt, Human
uguauuagauguuc

SEQ ID NO: 1387935 - RNA, 16 nt, Human
uguauuagauguucuc

SEQ ID NO: 1387936 - RNA, 18 nt, Human
uguauuagauguucucua

SEQ ID NO: 1387937 - RNA, 11 nt, Human
uguauuaugug

SEQ ID NO: 1387938 - RNA, 19 nt, Human
ugucaaauauuuagaugua

SEQ ID NO: 1387939 - RNA, 15 nt, Human
ugucaacucuuuguu

SEQ ID NO: 1387940 - RNA, 11 nt, Human
aguagcugagc

SEQ ID NO: 1387941 - RNA, 21 nt, Human
aguagcguuuuuuaaauguau

SEQ ID NO: 1387942 - RNA, 22 nt, Human
aguagcguuuuuuaaauguaua

SEQ ID NO: 1387943 - RNA, 20 nt, Human
uguauuaagaaaggaagcau

SEQ ID NO: 1387944 - RNA, 22 nt, Human
agguuuggaaggagcagaaaac

SEQ ID NO: 1387945 - RNA, 14 nt, Human
agguuuggaaggag

SEQ ID NO: 1387946 - RNA, 18 nt, Human
agguuugcagucccaagc

SEQ ID NO: 1387947 - RNA, 23 nt, Human
agguuuggacaaaauggaauacu

SEQ ID NO: 1387948 - RNA, 13 nt, Human
ugucuucucccug

SEQ ID NO: 1387949 - RNA, 12 nt, Human
ugucuucucccu

SEQ ID NO: 1387950 - RNA, 22 nt, Human
ugucuugaugcaugcacuguuc

SEQ ID NO: 1387951 - RNA, 16 nt, Human
ugucuugagcucuauu

SEQ ID NO: 1387952 - RNA, 14 nt, Human
ugucuugagcucua

SEQ ID NO: 1387953 - RNA, 21 nt, Human
ugugaacccaggacaagcaug

SEQ ID NO: 1387954 - RNA, 16 nt, Human
ugugaacccaggacaa

SEQ ID NO: 1387955 - RNA, 15 nt, Human
ugugaacccaggaca

SEQ ID NO: 1387956 - RNA, 21 nt, Human
ugugaaccccacgaaggagcc

SEQ ID NO: 1387957 - RNA, 14 nt, Human
ugugaacccaggac

SEQ ID NO: 1387958 - RNA, 13 nt, Human
ugugaacccagga

SEQ ID NO: 1387959 - RNA, 17 nt, Human
ugucuuuagauagcccu

SEQ ID NO: 1387960 - RNA, 18 nt, Human
ugucuuuagauagcccug

SEQ ID NO: 1387961 - RNA, 15 nt, Human
ugucuuuagauagcc

SEQ ID NO: 1387962 - RNA, 15 nt, Human
ugucuuuaaugcaau

SEQ ID NO: 1387963 - RNA, 15 nt, Human
ugucuuuaauucugu

SEQ ID NO: 1387964 - RNA, 14 nt, Human
ugucuuuaaugcaa

SEQ ID NO: 1387965 - RNA, 22 nt, Human
ugugaacaguuguguuugaagc

SEQ ID NO: 1387966 - RNA, 13 nt, Human
ugucuuggaacau

SEQ ID NO: 1387967 - RNA, 19 nt, Human
ugucuugagcucuauuaug

SEQ ID NO: 1387968 - RNA, 18 nt, Human
ugucuuaauuuucuuuca

SEQ ID NO: 1387969 - RNA, 15 nt, Human
ugucuuaauuauuau

SEQ ID NO: 1387970 - RNA, 14 nt, Human
ugucuuaauuauua

SEQ ID NO: 1387971 - RNA, 23 nt, Human
ugucucuuuggcgaccuccuuuc

SEQ ID NO: 1387972 - RNA, 17 nt, Human
ugucucuugaguuuguc

SEQ ID NO: 1387973 - RNA, 14 nt, Human
ugucucuugaguuu

SEQ ID NO: 1387974 - RNA, 17 nt, Human
ugucucuucuuuagaac

SEQ ID NO: 1387975 - RNA, 16 nt, Human
ugucucuucugagcua

SEQ ID NO: 1387976 - RNA, 13 nt, Human
ugucucuucugag

SEQ ID NO: 1387977 - RNA, 22 nt, Human
ugucucuuauggauguccccag

SEQ ID NO: 1387978 - RNA, 20 nt, Human
ugucucuuauggaugucccc

SEQ ID NO: 1387979 - RNA, 15 nt, Human
ugucucuuauggaug

SEQ ID NO: 1387980 - RNA, 15 nt, Human
ugucucgaacuauuu

SEQ ID NO: 1387981 - RNA, 13 nt, Human
agucccugccugg

SEQ ID NO: 1387982 - RNA, 15 nt, Human
ugucuccucucucug

SEQ ID NO: 1387983 - RNA, 19 nt, Human
ugucucgagcgcccugcag

SEQ ID NO: 1387984 - RNA, 18 nt, Human
ugucucgagcgcccugca

SEQ ID NO: 1387985 - RNA, 17 nt, Human
ugucucgagcgcccugc

SEQ ID NO: 1387986 - RNA, 15 nt, Human
ugucucgagcgcccu

SEQ ID NO: 1387987 - RNA, 20 nt, Human
ugucucgagcgcccugcaga

SEQ ID NO: 1387988 - RNA, 17 nt, Human
ugucucuccugccccuu

SEQ ID NO: 1387989 - RNA, 12 nt, Human
ugucucucauga

SEQ ID NO: 1387990 - RNA, 20 nt, Human
ugucucugaugcagcuuaua

SEQ ID NO: 1387991 - RNA, 19 nt, Human
ugucucugaugcagcuuau

SEQ ID NO: 1387992 - RNA, 14 nt, Human
ugucucugaugcag

SEQ ID NO: 1387993 - RNA, 13 nt, Human
ugucucugaugca

SEQ ID NO: 1387994 - RNA, 16 nt, Human
ugucucuccugccccu

SEQ ID NO: 1387995 - RNA, 13 nt, Human
ugucucuccugcc

SEQ ID NO: 1387996 - RNA, 18 nt, Human
ugucucucagggccaggc

SEQ ID NO: 1387997 - RNA, 22 nt, Human
ugucucuggauuauauuaugaa

SEQ ID NO: 1387998 - RNA, 21 nt, Human
ugugaagccaauucagacagg

SEQ ID NO: 1387999 - RNA, 20 nt, Human
ugugaagccaauucagacag

SEQ ID NO: 1388000 - RNA, 10 nt, Human
ugugaagcca

SEQ ID NO: 1388001 - RNA, 23 nt, Human
ugugaagccaugaguuccagaaa

SEQ ID NO: 1388002 - RNA, 18 nt, Human
ugugaacuggacccuguu

SEQ ID NO: 1388003 - RNA, 19 nt, Human
ugugaacuggacccuguug

SEQ ID NO: 1388004 - RNA, 20 nt, Human
ugugaagcaaacucuaaaau

SEQ ID NO: 1388005 - RNA, 14 nt, Human
ugugaagcaaaauu

SEQ ID NO: 1388006 - RNA, 23 nt, Human
agucucucuucucuccagcugac

SEQ ID NO: 1388007 - RNA, 21 nt, Human
agucucucuucucuccagcug

SEQ ID NO: 1388008 - RNA, 16 nt, Human
agucucugagcaguga

SEQ ID NO: 1388009 - RNA, 13 nt, Human
agucucugagcag

SEQ ID NO: 1388010 - RNA, 11 nt, Human
agucucugagc

SEQ ID NO: 1388011 - RNA, 16 nt, Human
agucucugaggggcua

SEQ ID NO: 1388012 - RNA, 22 nt, Human
agucucugaggggcuaccagga

SEQ ID NO: 1388013 - RNA, 23 nt, Human
agucucugaggggcuaccaggaa

SEQ ID NO: 1388014 - RNA, 13 nt, Human
agucucccaggga

SEQ ID NO: 1388015 - RNA, 14 nt, Human
agucucccagggag

SEQ ID NO: 1388016 - RNA, 15 nt, Human
agucucccagggagc

SEQ ID NO: 1388017 - RNA, 15 nt, Human
ugugagcccagcugg

SEQ ID NO: 1388018 - RNA, 14 nt, Human
ugugagcccagcug

SEQ ID NO: 1388019 - RNA, 19 nt, Human
agucuccaaagucucugga

SEQ ID NO: 1388020 - RNA, 22 nt, Human
agucuuuuguucgcauggucac

SEQ ID NO: 1388021 - RNA, 20 nt, Human
agucuuuugcuuuuggcaaa

SEQ ID NO: 1388022 - RNA, 19 nt, Human
agucuuuugcuuuuggcaa

SEQ ID NO: 1388023 - RNA, 18 nt, Human
agucuuuugcuuuuggca

SEQ ID NO: 1388024 - RNA, 14 nt, Human
agucuuuugcuuuu

SEQ ID NO: 1388025 - RNA, 13 nt, Human
agucuuuugcuuu

SEQ ID NO: 1388026 - RNA, 12 nt, Human
agucuuuugcuu

SEQ ID NO: 1388027 - RNA, 13 nt, Human
agucuuuuccaug

SEQ ID NO: 1388028 - RNA, 15 nt, Human
agucuuuuccaugaa

SEQ ID NO: 1388029 - RNA, 19 nt, Human
agucuuccugacacuuuaa

SEQ ID NO: 1388030 - RNA, 18 nt, Human
agucuuccugacacuuua

SEQ ID NO: 1388031 - RNA, 17 nt, Human
agucuuccugacacuuu

SEQ ID NO: 1388032 - RNA, 16 nt, Human
agucuuccugacacuu

SEQ ID NO: 1388033 - RNA, 15 nt, Human
agucuuccugacacu

SEQ ID NO: 1388034 - RNA, 12 nt, Human
agucuuccugac

SEQ ID NO: 1388035 - RNA, 19 nt, Human
agucuuccauuugcaaggg

SEQ ID NO: 1388036 - RNA, 17 nt, Human
agucuuccauuugcaag

SEQ ID NO: 1388037 - RNA, 16 nt, Human
agucuuccauuugcaa

SEQ ID NO: 1388038 - RNA, 15 nt, Human
agucuuccauuugca

SEQ ID NO: 1388039 - RNA, 22 nt, Human
agucuuaauauauauauccaga

SEQ ID NO: 1388040 - RNA, 14 nt, Human
agucuuaacugguc

SEQ ID NO: 1388041 - RNA, 16 nt, Human
agucuuacgaauacuu

SEQ ID NO: 1388042 - RNA, 18 nt, Human
agucuuacucuguugcca

SEQ ID NO: 1388043 - RNA, 21 nt, Human
agugagacccagcccucaucc

SEQ ID NO: 1388044 - RNA, 13 nt, Human
agugagacagacu

SEQ ID NO: 1388045 - RNA, 16 nt, Human
agugaaaacuuuguag

SEQ ID NO: 1388046 - RNA, 15 nt, Human
agugaaaacuuugua

SEQ ID NO: 1388047 - RNA, 22 nt, Human
agucuuuugcuuuugcccauuu

SEQ ID NO: 1388048 - RNA, 17 nt, Human
agucuuuuguucgcaug

SEQ ID NO: 1388049 - RNA, 14 nt, Human
agugaaaauauagc

SEQ ID NO: 1388050 - RNA, 20 nt, Human
agugaaacucguuaauuugu

SEQ ID NO: 1388051 - RNA, 15 nt, Human
ugugauucaaucugu

SEQ ID NO: 1388052 - RNA, 14 nt, Human
ugugauucaaucug

SEQ ID NO: 1388053 - RNA, 16 nt, Human
ugugauuagacagaac

SEQ ID NO: 1388054 - RNA, 22 nt, Human
ugugauuagacagaacaccuau

SEQ ID NO: 1388055 - RNA, 18 nt, Human
ugugauguucuaaggcuc

SEQ ID NO: 1388056 - RNA, 17 nt, Human
ugugauguucuaaggcu

SEQ ID NO: 1388057 - RNA, 16 nt, Human
ugugauguucuaaggc

SEQ ID NO: 1388058 - RNA, 15 nt, Human
ugugauguucuaagg

SEQ ID NO: 1388059 - RNA, 14 nt, Human
ugugauguucuaag

SEQ ID NO: 1388060 - RNA, 13 nt, Human
ugugauguucuaa

SEQ ID NO: 1388061 - RNA, 15 nt, Human
ugugaugugaagcca

SEQ ID NO: 1388062 - RNA, 23 nt, Human
ugugaugucauacagagaaguca

SEQ ID NO: 1388063 - RNA, 22 nt, Human
ugugaugucauacagagaaguc

SEQ ID NO: 1388064 - RNA, 20 nt, Human
ugugaugucauacagagaag

SEQ ID NO: 1388065 - RNA, 19 nt, Human
ugugaugucauacagagaa

SEQ ID NO: 1388066 - RNA, 18 nt, Human
ugugaugucauacagaga

SEQ ID NO: 1388067 - RNA, 17 nt, Human
ugugauggagugcuguu

SEQ ID NO: 1388068 - RNA, 15 nt, Human
ugugauggagugcug

SEQ ID NO: 1388069 - RNA, 21 nt, Human
agugagcauggaacacuucga

SEQ ID NO: 1388070 - RNA, 22 nt, Human
agugagcauggaacacuucgag

SEQ ID NO: 1388071 - RNA, 21 nt, Human
agugagagacauuaacucauu

SEQ ID NO: 1388072 - RNA, 13 nt, Human
agugagagacauu

SEQ ID NO: 1388073 - RNA, 22 nt, Human
agugagagacauuaacucauua

SEQ ID NO: 1388074 - RNA, 21 nt, Human
agugagcagucaggaaagaga

SEQ ID NO: 1388075 - RNA, 20 nt, Human
aggugugacugaauuucuuu

SEQ ID NO: 1388076 - RNA, 18 nt, Human
aggugugacugaauuucu

SEQ ID NO: 1388077 - RNA, 18 nt, Human
agguggguugaaagccaa

SEQ ID NO: 1388078 - RNA, 22 nt, Human
aggugcaacaagguccucuguc

SEQ ID NO: 1388079 - RNA, 19 nt, Human
aggugauccauguaacugc

SEQ ID NO: 1388080 - RNA, 21 nt, Human
aggugauccauguaacugccu

SEQ ID NO: 1388081 - RNA, 18 nt, Human
aggugauccauguaacug

SEQ ID NO: 1388082 - RNA, 15 nt, Human
aggugauccauguaa

SEQ ID NO: 1388083 - RNA, 21 nt, Human
agguggggagacugggcugag

SEQ ID NO: 1388084 - RNA, 19 nt, Human
agguggggagacugggcug

SEQ ID NO: 1388085 - RNA, 17 nt, Human
agguguuggcugcacgu

SEQ ID NO: 1388086 - RNA, 23 nt, Human
agguguugccaaauauguccugg

SEQ ID NO: 1388087 - RNA, 22 nt, Human
agguguugccaaauauguccug

SEQ ID NO: 1388088 - RNA, 21 nt, Human
agguguugccaaauauguccu

SEQ ID NO: 1388089 - RNA, 12 nt, Human
agguguugccaa

SEQ ID NO: 1388090 - RNA, 12 nt, Human
agguguuauuug

SEQ ID NO: 1388091 - RNA, 23 nt, Human
agguguuauuuggaaccuuguuu

SEQ ID NO: 1388092 - RNA, 16 nt, Human
agguguuacuguaauu

SEQ ID NO: 1388093 - RNA, 15 nt, Human
agguguuacuguaau

SEQ ID NO: 1388094 - RNA, 23 nt, Human
agguguuaacauuccaagacucu

SEQ ID NO: 1388095 - RNA, 18 nt, Human
agguguuaacauuccaag

SEQ ID NO: 1388096 - RNA, 15 nt, Human
aggugugagacuggg

SEQ ID NO: 1388097 - RNA, 14 nt, Human
aggugugagacugg

SEQ ID NO: 1388098 - RNA, 21 nt, Human
aggugugaaggugauuuaagg

SEQ ID NO: 1388099 - RNA, 22 nt, Human
agguuuaaaugaacaagagaag

SEQ ID NO: 1388100 - RNA, 15 nt, Human
agguuuaaaugaaca

SEQ ID NO: 1388101 - RNA, 14 nt, Human
agguuuaaaugaac

SEQ ID NO: 1388102 - RNA, 13 nt, Human
agguuuaaaugaa

SEQ ID NO: 1388103 - RNA, 20 nt, Human
agguuuaaagagucuagauu

SEQ ID NO: 1388104 - RNA, 16 nt, Human
agguuuaaagagucua

SEQ ID NO: 1388105 - RNA, 15 nt, Human
agguuuaaagagucu

SEQ ID NO: 1388106 - RNA, 14 nt, Human
agguuuaaagaguc

SEQ ID NO: 1388107 - RNA, 13 nt, Human
agguuuaaagagu

SEQ ID NO: 1388108 - RNA, 22 nt, Human
agguuguggccuuugcgcuccu

SEQ ID NO: 1388109 - RNA, 12 nt, Human
agguugucugug

SEQ ID NO: 1388110 - RNA, 17 nt, Human
uguaagaaauacagacu

SEQ ID NO: 1388111 - RNA, 15 nt, Human
uguaagaaauacaga

SEQ ID NO: 1388112 - RNA, 12 nt, Human
uguaagaaaccu

SEQ ID NO: 1388113 - RNA, 19 nt, Human
agguuuaaaugaacaagag

SEQ ID NO: 1388114 - RNA, 18 nt, Human
uguaagaaaauaucacuu

SEQ ID NO: 1388115 - RNA, 17 nt, Human
uguaaggaugggcaugg

SEQ ID NO: 1388116 - RNA, 23 nt, Human
uguaauuuuacacgcuuuuguga

SEQ ID NO: 1388117 - RNA, 21 nt, Human
uguaaggauccggaaagaaga

SEQ ID NO: 1388118 - RNA, 19 nt, Human
uguaaggauccggaaagaa

SEQ ID NO: 1388119 - RNA, 17 nt, Human
uguaauuugugauacaa

SEQ ID NO: 1388120 - RNA, 21 nt, Human
uguaauuugugauacaaugcu

SEQ ID NO: 1388121 - RNA, 15 nt, Human
uguaaggcaaucaug

SEQ ID NO: 1388122 - RNA, 16 nt, Human
uguaauuugugauaca

SEQ ID NO: 1388123 - RNA, 14 nt, Human
uguacaucuauuuu

SEQ ID NO: 1388124 - RNA, 20 nt, Human
uguacauaugugcuggaauu

SEQ ID NO: 1388125 - RNA, 17 nt, Human
uguacauaugugcugga

SEQ ID NO: 1388126 - RNA, 15 nt, Human
uguacauaugugcug

SEQ ID NO: 1388127 - RNA, 16 nt, Human
uguacauuugggaguu

SEQ ID NO: 1388128 - RNA, 14 nt, Human
uguacauuaauuac

SEQ ID NO: 1388129 - RNA, 17 nt, Human
uguacaugaaaacacau

SEQ ID NO: 1388130 - RNA, 18 nt, Human
uguacaugaaaacacauu

SEQ ID NO: 1388131 - RNA, 19 nt, Human
uguacaugaaaacacauuu

SEQ ID NO: 1388132 - RNA, 20 nt, Human
uguacaugaaaacacauuuu

SEQ ID NO: 1388133 - RNA, 18 nt, Human
uguagaaugauuucaugc

SEQ ID NO: 1388134 - RNA, 17 nt, Human
uguagaaugauuucaug

SEQ ID NO: 1388135 - RNA, 16 nt, Human
uguagaaugauuucau

SEQ ID NO: 1388136 - RNA, 21 nt, Human
uguagaagucacauuccugaa

SEQ ID NO: 1388137 - RNA, 15 nt, Human
uguacuugcucuuga

SEQ ID NO: 1388138 - RNA, 17 nt, Human
uguagaaccuaauucaa

SEQ ID NO: 1388139 - RNA, 20 nt, Human
uguagaacacuaauucauaa

SEQ ID NO: 1388140 - RNA, 19 nt, Human
uguagaacacuaauucaua

SEQ ID NO: 1388141 - RNA, 18 nt, Human
uguagaacacuaauucau

SEQ ID NO: 1388142 - RNA, 19 nt, Human
uguacuugcucuugaugcc

SEQ ID NO: 1388143 - RNA, 23 nt, Human
uggugugguacagagaagccagc

SEQ ID NO: 1388144 - RNA, 21 nt, Human
uggugugguacagagaagcca

SEQ ID NO: 1388145 - RNA, 20 nt, Human
uggugugguacagagaagcc

SEQ ID NO: 1388146 - RNA, 19 nt, Human
uggugugguacagagaagc

SEQ ID NO: 1388147 - RNA, 18 nt, Human
uggugugguacagagaag

SEQ ID NO: 1388148 - RNA, 17 nt, Human
uggugugguacagagaa

SEQ ID NO: 1388149 - RNA, 16 nt, Human
uggugugguacagaga

SEQ ID NO: 1388150 - RNA, 15 nt, Human
uggugugguacagag

SEQ ID NO: 1388151 - RNA, 19 nt, Human
uggugugucccccucuguc

SEQ ID NO: 1388152 - RNA, 20 nt, Human
ugguguuaacagaagggagg

SEQ ID NO: 1388153 - RNA, 14 nt, Human
ugguguuaacagaa

SEQ ID NO: 1388154 - RNA, 11 nt, Human
ugguguuaaca

SEQ ID NO: 1388155 - RNA, 23 nt, Human
ugguguucuccugcugcucccuc

SEQ ID NO: 1388156 - RNA, 17 nt, Human
ugguguucuccugcugc

SEQ ID NO: 1388157 - RNA, 14 nt, Human
ugguguucuccugc

SEQ ID NO: 1388158 - RNA, 14 nt, Human
uggugugguacaga

SEQ ID NO: 1388159 - RNA, 16 nt, Human
uggugugaucgucuga

SEQ ID NO: 1388160 - RNA, 16 nt, Human
ugguguggcaaagccu

SEQ ID NO: 1388161 - RNA, 18 nt, Human
uggugugaucgucugacu

SEQ ID NO: 1388162 - RNA, 21 nt, Human
aggugaacauugguucuuuca

SEQ ID NO: 1388163 - RNA, 14 nt, Human
aggugaacauuggu

SEQ ID NO: 1388164 - RNA, 17 nt, Human
ugguuaagaguccaaga

SEQ ID NO: 1388165 - RNA, 16 nt, Human
ugguuaagaguccaag

SEQ ID NO: 1388166 - RNA, 14 nt, Human
ugguuaagagucca

SEQ ID NO: 1388167 - RNA, 13 nt, Human
ugguuaagagucc

SEQ ID NO: 1388168 - RNA, 19 nt, Human
ugguuaaauaaggcagggu

SEQ ID NO: 1388169 - RNA, 22 nt, Human
ugguguuuuuuucuaugggugu

SEQ ID NO: 1388170 - RNA, 20 nt, Human
ugguguuggacaagcuucug

SEQ ID NO: 1388171 - RNA, 22 nt, Human
ugguguucuccugcugcucccu

SEQ ID NO: 1388172 - RNA, 20 nt, Human
ugguucagaauuaaacuuuu

SEQ ID NO: 1388173 - RNA, 15 nt, Human
ugguucacacugacc

SEQ ID NO: 1388174 - RNA, 19 nt, Human
ugguuuaaagaaaguguau

SEQ ID NO: 1388175 - RNA, 17 nt, Human
ugguuuaaagaaagugu

SEQ ID NO: 1388176 - RNA, 16 nt, Human
ugguuuaaagaaagug

SEQ ID NO: 1388177 - RNA, 15 nt, Human
ugguuuaaagaaagu

SEQ ID NO: 1388178 - RNA, 23 nt, Human
ugguuuaaaagacacacuugucc

SEQ ID NO: 1388179 - RNA, 21 nt, Human
ugguucagaauuaaacuuuua

SEQ ID NO: 1388180 - RNA, 16 nt, Human
ugguucagcuaagcua

SEQ ID NO: 1388181 - RNA, 17 nt, Human
ugguuguuucuguucca

SEQ ID NO: 1388182 - RNA, 17 nt, Human
uguaaauauuuuaaaga

SEQ ID NO: 1388183 - RNA, 14 nt, Human
uguaaauauuuuaa

SEQ ID NO: 1388184 - RNA, 15 nt, Human
uguaaauauugugug

SEQ ID NO: 1388185 - RNA, 14 nt, Human
uguaaauauugugu

SEQ ID NO: 1388186 - RNA, 22 nt, Human
uguaaauauuuuaaagaauugu

SEQ ID NO: 1388187 - RNA, 20 nt, Human
uguaaauauuuuaaagaauu

SEQ ID NO: 1388188 - RNA, 18 nt, Human
uguaaauauuuuaaagaa

SEQ ID NO: 1388189 - RNA, 17 nt, Human
uguaaauauaaagacgu

SEQ ID NO: 1388190 - RNA, 16 nt, Human
uguaaauauaaagacg

SEQ ID NO: 1388191 - RNA, 15 nt, Human
uguaaauacccauau

SEQ ID NO: 1388192 - RNA, 14 nt, Human
uguaaauauaaaga

SEQ ID NO: 1388193 - RNA, 13 nt, Human
uguaaagcuuguc

SEQ ID NO: 1388194 - RNA, 11 nt, Human
uguaaagaugu

SEQ ID NO: 1388195 - RNA, 18 nt, Human
uguaaagauauuuuuauc

SEQ ID NO: 1388196 - RNA, 13 nt, Human
ugguuuucuguuc

SEQ ID NO: 1388197 - RNA, 15 nt, Human
ugguuuucuguucuu

SEQ ID NO: 1388198 - RNA, 21 nt, Human
uguaaagcuaaaauaaagaaa

SEQ ID NO: 1388199 - RNA, 20 nt, Human
uguaaagcuaaaauaaagaa

SEQ ID NO: 1388200 - RNA, 17 nt, Human
uguaaagcuaaaauaaa

SEQ ID NO: 1388201 - RNA, 16 nt, Human
uguaaagcuaaaauaa

SEQ ID NO: 1388202 - RNA, 12 nt, Human
uguaaagcuaaa

SEQ ID NO: 1388203 - RNA, 13 nt, Human
uguaaagccaugc

SEQ ID NO: 1388204 - RNA, 16 nt, Human
uguaaaggaauuuaaa

SEQ ID NO: 1388205 - RNA, 15 nt, Human
ugguuucgaacuccu

SEQ ID NO: 1388206 - RNA, 15 nt, Human
ugguuucuagcauga

SEQ ID NO: 1388207 - RNA, 15 nt, Human
ugguuucauguuagu

SEQ ID NO: 1388208 - RNA, 12 nt, Human
ugguuucauguu

SEQ ID NO: 1388209 - RNA, 23 nt, Human
ugguuucagcacuagccaaaccu

SEQ ID NO: 1388210 - RNA, 20 nt, Human
ugguuucagcacuagccaaa

SEQ ID NO: 1388211 - RNA, 13 nt, Human
ugguuucagcacu

SEQ ID NO: 1388212 - RNA, 17 nt, Human
ugguuuauauauuuaaa

SEQ ID NO: 1388213 - RNA, 21 nt, Human
ugguuuaaagaaaguguauuu

SEQ ID NO: 1388214 - RNA, 14 nt, Human
ugguuucagaaaug

SEQ ID NO: 1388215 - RNA, 15 nt, Human
ugguuucagaaaugu

SEQ ID NO: 1388216 - RNA, 23 nt, Human
ugguuugaagaauguuaagacuu

SEQ ID NO: 1388217 - RNA, 22 nt, Human
ugguuucuugugcacuggcacc

SEQ ID NO: 1388218 - RNA, 20 nt, Human
ugguuuucuccaagagcuac

SEQ ID NO: 1388219 - RNA, 19 nt, Human
ugguuuucuccaagagcua

SEQ ID NO: 1388220 - RNA, 12 nt, Human
ugguuuucuguu

SEQ ID NO: 1388221 - RNA, 14 nt, Human
ugguuuuagauuuu

SEQ ID NO: 1388222 - RNA, 13 nt, Human
ugguuuuagauuu

SEQ ID NO: 1388223 - RNA, 18 nt, Human
ugguuuuaguugcaacuu

SEQ ID NO: 1388224 - RNA, 14 nt, Human
agguauauacuuug

SEQ ID NO: 1388225 - RNA, 22 nt, Human
agguaggggccccucucagccc

SEQ ID NO: 1388226 - RNA, 12 nt, Human
agguaggguuua

SEQ ID NO: 1388227 - RNA, 15 nt, Human
agguauaccucacuu

SEQ ID NO: 1388228 - RNA, 17 nt, Human
agguaggggccccucuc

SEQ ID NO: 1388229 - RNA, 23 nt, Human
agguaggccaagguguccuacag

SEQ ID NO: 1388230 - RNA, 19 nt, Human
agguagcugaaaggggaag

SEQ ID NO: 1388231 - RNA, 14 nt, Human
agguaggccaaggu

SEQ ID NO: 1388232 - RNA, 20 nt, Human
aggucaaaauagugccacua

SEQ ID NO: 1388233 - RNA, 15 nt, Human
aggguuugugacagg

SEQ ID NO: 1388234 - RNA, 18 nt, Human
aggguuugugacagggcg

SEQ ID NO: 1388235 - RNA, 21 nt, Human
aggguuucccuacugaagccc

SEQ ID NO: 1388236 - RNA, 22 nt, Human
aggguuucccuacugaagcccu

SEQ ID NO: 1388237 - RNA, 15 nt, Human
aggguuucaccaugu

SEQ ID NO: 1388238 - RNA, 22 nt, Human
aggguuuaauccccaguaaaau

SEQ ID NO: 1388239 - RNA, 21 nt, Human
aggguuuaauccccaguaaaa

SEQ ID NO: 1388240 - RNA, 14 nt, Human
aggguuggagcagu

SEQ ID NO: 1388241 - RNA, 19 nt, Human
aggugaaaguuaauccacu

SEQ ID NO: 1388242 - RNA, 15 nt, Human
aggugaaaggaaauu

SEQ ID NO: 1388243 - RNA, 22 nt, Human
aggugaaacuccagaugccaca

SEQ ID NO: 1388244 - RNA, 21 nt, Human
aggugaaacuccagaugccac

SEQ ID NO: 1388245 - RNA, 20 nt, Human
aggugaaacuccagaugcca

SEQ ID NO: 1388246 - RNA, 19 nt, Human
aggugaaacuccagaugcc

SEQ ID NO: 1388247 - RNA, 16 nt, Human
agguccaaugagcuuu

SEQ ID NO: 1388248 - RNA, 15 nt, Human
agguccaaugagcuu

SEQ ID NO: 1388249 - RNA, 20 nt, Human
agguccaaugagcuuucuga

SEQ ID NO: 1388250 - RNA, 19 nt, Human
agguccaaugagcuuucug

SEQ ID NO: 1388251 - RNA, 17 nt, Human
agguccaaugagcuuuc

SEQ ID NO: 1388252 - RNA, 15 nt, Human
aggucagugcaaaua

SEQ ID NO: 1388253 - RNA, 22 nt, Human
aggucauuuuuuuuaagaaaaa

SEQ ID NO: 1388254 - RNA, 23 nt, Human
aggucauuuuuuuuaagaaaaag

SEQ ID NO: 1388255 - RNA, 18 nt, Human
aggguugaccccagagga

SEQ ID NO: 1388256 - RNA, 17 nt, Human
aggguugaccccagagg

SEQ ID NO: 1388257 - RNA, 16 nt, Human
aggguugaccccagag

SEQ ID NO: 1388258 - RNA, 16 nt, Human
uggucuuuuauaauuc

SEQ ID NO: 1388259 - RNA, 15 nt, Human
uggucuuacagcagg

SEQ ID NO: 1388260 - RNA, 20 nt, Human
uggucuuacagcaggcagua

SEQ ID NO: 1388261 - RNA, 14 nt, Human
uggucuuuugguua

SEQ ID NO: 1388262 - RNA, 13 nt, Human
uggucucuugcuu

SEQ ID NO: 1388263 - RNA, 21 nt, Human
uggucucucuaugccucucua

SEQ ID NO: 1388264 - RNA, 18 nt, Human
uggucugcccucugcauc

SEQ ID NO: 1388265 - RNA, 11 nt, Human
uggucugcugu

SEQ ID NO: 1388266 - RNA, 18 nt, Human
uggucuguuggcaggcug

SEQ ID NO: 1388267 - RNA, 14 nt, Human
uggucuguuggcag

SEQ ID NO: 1388268 - RNA, 23 nt, Human
uggucccacaucccugggccugc

SEQ ID NO: 1388269 - RNA, 22 nt, Human
uggucccacaucccugggccug

SEQ ID NO: 1388270 - RNA, 21 nt, Human
uggucccacaucccugggccu

SEQ ID NO: 1388271 - RNA, 20 nt, Human
uggucccacaucccugggcc

SEQ ID NO: 1388272 - RNA, 19 nt, Human
uggucccacaucccugggc

SEQ ID NO: 1388273 - RNA, 17 nt, Human
uggucccacaucccugg

SEQ ID NO: 1388274 - RNA, 16 nt, Human
uggucccacaucccug

SEQ ID NO: 1388275 - RNA, 15 nt, Human
uggucccacaucccu

SEQ ID NO: 1388276 - RNA, 13 nt, Human
uggucccacaucc

SEQ ID NO: 1388277 - RNA, 22 nt, Human
ugguccaugggccauaugaaaa

SEQ ID NO: 1388278 - RNA, 22 nt, Human
agggugaguuggcuuaccuggc

SEQ ID NO: 1388279 - RNA, 19 nt, Human
agggugaguuggcuuaccu

SEQ ID NO: 1388280 - RNA, 20 nt, Human
agggugcaguaucaugcccu

SEQ ID NO: 1388281 - RNA, 20 nt, Human
agggugaguuggcuuaccug

SEQ ID NO: 1388282 - RNA, 14 nt, Human
ugguaaaacacuug

SEQ ID NO: 1388283 - RNA, 17 nt, Human
uggguuuuuuuccuuua

SEQ ID NO: 1388284 - RNA, 17 nt, Human
uggguuuuuggacuucu

SEQ ID NO: 1388285 - RNA, 21 nt, Human
uggguuuuguauucucugagc

SEQ ID NO: 1388286 - RNA, 19 nt, Human
uggguuuuguauucucuga

SEQ ID NO: 1388287 - RNA, 14 nt, Human
uggguuuuucccug

SEQ ID NO: 1388288 - RNA, 19 nt, Human
ugguacagagaagccagcu

SEQ ID NO: 1388289 - RNA, 18 nt, Human
ugguacagagaagccagc

SEQ ID NO: 1388290 - RNA, 17 nt, Human
ugguacagagaagccag

SEQ ID NO: 1388291 - RNA, 16 nt, Human
ugguacagagaagcca

SEQ ID NO: 1388292 - RNA, 15 nt, Human
ugguacagagaagcc

SEQ ID NO: 1388293 - RNA, 14 nt, Human
ugguacagagaagc

SEQ ID NO: 1388294 - RNA, 13 nt, Human
ugguacagagaag

SEQ ID NO: 1388295 - RNA, 12 nt, Human
ugguacagagaa

SEQ ID NO: 1388296 - RNA, 11 nt, Human
ugguacagaga

SEQ ID NO: 1388297 - RNA, 13 nt, Human
ugguaauuguugc

SEQ ID NO: 1388298 - RNA, 16 nt, Human
ugguaaagacuggcuu

SEQ ID NO: 1388299 - RNA, 14 nt, Human
ugguaauuguacua

SEQ ID NO: 1388300 - RNA, 17 nt, Human
ugguaaagacuggcuuu

SEQ ID NO: 1388301 - RNA, 18 nt, Human
ugguacaugguguuugug

SEQ ID NO: 1388302 - RNA, 15 nt, Human
ugguacaugguguuu

SEQ ID NO: 1388303 - RNA, 22 nt, Human
ugguacagagaagccagcuugu

SEQ ID NO: 1388304 - RNA, 22 nt, Human
ugguacaguauggggguuguaa

SEQ ID NO: 1388305 - RNA, 21 nt, Human
ugguacagagaagccagcuug

SEQ ID NO: 1388306 - RNA, 20 nt, Human
ugguacagagaagccagcuu

SEQ ID NO: 1388307 - RNA, 21 nt, Human
ugguccagggcuagugacuug

SEQ ID NO: 1388308 - RNA, 13 nt, Human
ugguccagggcua

SEQ ID NO: 1388309 - RNA, 16 nt, Human
ugguccaggagaaggc

SEQ ID NO: 1388310 - RNA, 12 nt, Human
ugguccaggaga

SEQ ID NO: 1388311 - RNA, 21 nt, Human
ugguccaauuaguuuccuuuu

SEQ ID NO: 1388312 - RNA, 23 nt, Human
ugguccaauuaguuuccuuuuua

SEQ ID NO: 1388313 - RNA, 19 nt, Human
ugguccaauuaguuuccuu

SEQ ID NO: 1388314 - RNA, 18 nt, Human
ugguccaauuaguuuccu

SEQ ID NO: 1388315 - RNA, 15 nt, Human
ugguccaauuaguuu

SEQ ID NO: 1388316 - RNA, 15 nt, Human
ugguccaagauuccg

SEQ ID NO: 1388317 - RNA, 19 nt, Human
uggucacggauuugugucu

SEQ ID NO: 1388318 - RNA, 23 nt, Human
ugguccaaaagauugcugaaauu

SEQ ID NO: 1388319 - RNA, 21 nt, Human
ugguccaaaagauugcugaaa

SEQ ID NO: 1388320 - RNA, 18 nt, Human
uggucauuuuauguuaag

SEQ ID NO: 1388321 - RNA, 23 nt, Human
uggucaccuaggaagccucagau

SEQ ID NO: 1388322 - RNA, 22 nt, Human
uggucaccuaggaagccucaga

SEQ ID NO: 1388323 - RNA, 21 nt, Human
uggucaccuaggaagccucag

SEQ ID NO: 1388324 - RNA, 16 nt, Human
uggucaccuaggaagc

SEQ ID NO: 1388325 - RNA, 19 nt, Human
uggucacguuuggugcuuc

SEQ ID NO: 1388326 - RNA, 12 nt, Human
aggguaaguauu

SEQ ID NO: 1388327 - RNA, 21 nt, Human
aggggucggcugaccaugcuc

SEQ ID NO: 1388328 - RNA, 15 nt, Human
aggggucggcugacc

SEQ ID NO: 1388329 - RNA, 18 nt, Human
agggggucguggagagcu

SEQ ID NO: 1388330 - RNA, 17 nt, Human
agggggucguggagagc

SEQ ID NO: 1388331 - RNA, 16 nt, Human
agggggucguggagag

SEQ ID NO: 1388332 - RNA, 15 nt, Human
agggggucguggaga

SEQ ID NO: 1388333 - RNA, 16 nt, Human
agggggggcucccugg

SEQ ID NO: 1388334 - RNA, 13 nt, Human
aggggggagggaa

SEQ ID NO: 1388335 - RNA, 17 nt, Human
agggggcuggugggugc

SEQ ID NO: 1388336 - RNA, 19 nt, Human
agggggaaaaagugucaac

SEQ ID NO: 1388337 - RNA, 21 nt, Human
aggguauauuuuccuauauua

SEQ ID NO: 1388338 - RNA, 17 nt, Human
aggguauauuuuccuau

SEQ ID NO: 1388339 - RNA, 16 nt, Human
aggguaggcuggaguu

SEQ ID NO: 1388340 - RNA, 18 nt, Human
aggguaggcaggauuggg

SEQ ID NO: 1388341 - RNA, 16 nt, Human
aggguaggcaggauug

SEQ ID NO: 1388342 - RNA, 15 nt, Human
aggguaggcaggauu

SEQ ID NO: 1388343 - RNA, 13 nt, Human
aggguaggcagga

SEQ ID NO: 1388344 - RNA, 14 nt, Human
aggguaccagcaga

SEQ ID NO: 1388345 - RNA, 15 nt, Human
aggguaccagcagaa

SEQ ID NO: 1388346 - RNA, 18 nt, Human
aggguacauggugcuggg

SEQ ID NO: 1388347 - RNA, 17 nt, Human
aggguacauggugcugg

SEQ ID NO: 1388348 - RNA, 14 nt, Human
aggguacauggugc

SEQ ID NO: 1388349 - RNA, 20 nt, Human
aggguaggagggugggaagg

SEQ ID NO: 1388350 - RNA, 23 nt, Human
aggguagaauucuggcugguaga

SEQ ID NO: 1388351 - RNA, 17 nt, Human
aggggaggcaucagugu

SEQ ID NO: 1388352 - RNA, 23 nt, Human
aggggaccuggaagggagguggg

SEQ ID NO: 1388353 - RNA, 13 nt, Human
aggggaccuggaa

SEQ ID NO: 1388354 - RNA, 19 nt, Human
aggggacccuccgcucugu

SEQ ID NO: 1388355 - RNA, 20 nt, Human
aggggaccaggagugggugg

SEQ ID NO: 1388356 - RNA, 17 nt, Human
aggggaccaggaguggg

SEQ ID NO: 1388357 - RNA, 22 nt, Human
aggggaccaggagugggugggg

SEQ ID NO: 1388358 - RNA, 16 nt, Human
aggggaccaggagugg

SEQ ID NO: 1388359 - RNA, 15 nt, Human
aggggaccaggagug

SEQ ID NO: 1388360 - RNA, 14 nt, Human
aggggaccaggagu

SEQ ID NO: 1388361 - RNA, 13 nt, Human
aggggaccaggag

SEQ ID NO: 1388362 - RNA, 12 nt, Human
aggggaccagga

SEQ ID NO: 1388363 - RNA, 22 nt, Human
ugggaauauuugaaucuugucu

SEQ ID NO: 1388364 - RNA, 19 nt, Human
ugggaauauuugaaucuug

SEQ ID NO: 1388365 - RNA, 20 nt, Human
ugggaauauuugaaucuugu

SEQ ID NO: 1388366 - RNA, 13 nt, Human
ugggaauauuuga

SEQ ID NO: 1388367 - RNA, 14 nt, Human
ugggaauauuugaa

SEQ ID NO: 1388368 - RNA, 15 nt, Human
ugggaauauuugaau

SEQ ID NO: 1388369 - RNA, 16 nt, Human
ugggaauauuugaauc

SEQ ID NO: 1388370 - RNA, 18 nt, Human
ugggaauauuugaaucuu

SEQ ID NO: 1388371 - RNA, 20 nt, Human
aggggaggggcuccuuucca

SEQ ID NO: 1388372 - RNA, 18 nt, Human
aggggagggggauccgac

SEQ ID NO: 1388373 - RNA, 18 nt, Human
aggggaggggcuccuuuc

SEQ ID NO: 1388374 - RNA, 17 nt, Human
aggggaggggcuccuuu

SEQ ID NO: 1388375 - RNA, 14 nt, Human
aggggcugggaaca

SEQ ID NO: 1388376 - RNA, 13 nt, Human
aggggcugggaac

SEQ ID NO: 1388377 - RNA, 23 nt, Human
aggggcuugacuuuuucaacuuc

SEQ ID NO: 1388378 - RNA, 16 nt, Human
aggggcuuccuggugc

SEQ ID NO: 1388379 - RNA, 14 nt, Human
aggggcuuccuggu

SEQ ID NO: 1388380 - RNA, 16 nt, Human
aggggcuucaggucca

SEQ ID NO: 1388381 - RNA, 15 nt, Human
aggggcuucaggucc

SEQ ID NO: 1388382 - RNA, 12 nt, Human
aggggcuucagg

SEQ ID NO: 1388383 - RNA, 21 nt, Human
aggggcuuauaauaaaggacu

SEQ ID NO: 1388384 - RNA, 13 nt, Human
auaauuauauguu

SEQ ID NO: 1388385 - RNA, 14 nt, Human
auaauuauauguug

SEQ ID NO: 1388386 - RNA, 13 nt, Human
auaaugaacagaa

SEQ ID NO: 1388387 - RNA, 19 nt, Human
auaauuauauaacuguauu

SEQ ID NO: 1388388 - RNA, 17 nt, Human
auaauuauauaacugua

SEQ ID NO: 1388389 - RNA, 15 nt, Human
auaauuauauaacug

SEQ ID NO: 1388390 - RNA, 14 nt, Human
auaaugaauacuuu

SEQ ID NO: 1388391 - RNA, 22 nt, Human
auaaucacucuaauuaauugua

SEQ ID NO: 1388392 - RNA, 18 nt, Human
auaaucacgcuuuccuga

SEQ ID NO: 1388393 - RNA, 16 nt, Human
auaaucacgcuuuccu

SEQ ID NO: 1388394 - RNA, 22 nt, Human
auaaucauuauuacuuuugcug

SEQ ID NO: 1388395 - RNA, 21 nt, Human
auaaucauuauuacuuuugcu

SEQ ID NO: 1388396 - RNA, 19 nt, Human
auaaucaucaaguaauaca

SEQ ID NO: 1388397 - RNA, 17 nt, Human
auaaugaacagaacaua

SEQ ID NO: 1388398 - RNA, 17 nt, Human
auaauccaguaaaauaa

SEQ ID NO: 1388399 - RNA, 15 nt, Human
uuagcagcuuccaga

SEQ ID NO: 1388400 - RNA, 18 nt, Human
uuagcaggaagcugugag

SEQ ID NO: 1388401 - RNA, 12 nt, Human
uuagcagacagg

SEQ ID NO: 1388402 - RNA, 21 nt, Human
uuagauuuucugguucuaaca

SEQ ID NO: 1388403 - RNA, 20 nt, Human
uuagauuuucugguucuaac

SEQ ID NO: 1388404 - RNA, 19 nt, Human
uuagauuuucugguucuaa

SEQ ID NO: 1388405 - RNA, 18 nt, Human
uuagauuuucugguucua

SEQ ID NO: 1388406 - RNA, 23 nt, Human
uuagauuuuacaugaaguauuuu

SEQ ID NO: 1388407 - RNA, 21 nt, Human
uuagauuuuacaugaaguauu

SEQ ID NO: 1388408 - RNA, 20 nt, Human
uuagauuuuacaugaaguau

SEQ ID NO: 1388409 - RNA, 19 nt, Human
uuagauuuuacaugaagua

SEQ ID NO: 1388410 - RNA, 15 nt, Human
uuagauuuuacauga

SEQ ID NO: 1388411 - RNA, 14 nt, Human
uuagauuuuacaug

SEQ ID NO: 1388412 - RNA, 12 nt, Human
uuagauuuuaca

SEQ ID NO: 1388413 - RNA, 13 nt, Human
uuagauuuuaauc

SEQ ID NO: 1388414 - RNA, 13 nt, Human
uuagauuugugug

SEQ ID NO: 1388415 - RNA, 22 nt, Human
uuagauuucauaguucagaauu

SEQ ID NO: 1388416 - RNA, 20 nt, Human
uuagauuucauaguucagaa

SEQ ID NO: 1388417 - RNA, 18 nt, Human
uuagauuucauaguucag

SEQ ID NO: 1388418 - RNA, 14 nt, Human
uuagauuucauagu

SEQ ID NO: 1388419 - RNA, 10 nt, Human
uuagauuuca

SEQ ID NO: 1388420 - RNA, 22 nt, Human
uuagauucucugugucuaagau

SEQ ID NO: 1388421 - RNA, 20 nt, Human
uuagauucucugugucuaag

SEQ ID NO: 1388422 - RNA, 19 nt, Human
uuagauucucugugucuaa

SEQ ID NO: 1388423 - RNA, 16 nt, Human
uuagauguaauuuugu

SEQ ID NO: 1388424 - RNA, 20 nt, Human
auaauugugauuagacagaa

SEQ ID NO: 1388425 - RNA, 23 nt, Human
auaauugccaaaaagugaaauaa

SEQ ID NO: 1388426 - RNA, 21 nt, Human
auaauugccaaaaagugaaau

SEQ ID NO: 1388427 - RNA, 17 nt, Human
auaauugccaaaaagug

SEQ ID NO: 1388428 - RNA, 22 nt, Human
auaauugcauugacuuucccca

SEQ ID NO: 1388429 - RNA, 16 nt, Human
auaauugcauugacuu

SEQ ID NO: 1388430 - RNA, 14 nt, Human
auaauugcauugac

SEQ ID NO: 1388431 - RNA, 19 nt, Human
auaauugaguuuucagugg

SEQ ID NO: 1388432 - RNA, 23 nt, Human
auaauucugaguuuuguguuugu

SEQ ID NO: 1388433 - RNA, 20 nt, Human
auaauucugaguuuuguguu

SEQ ID NO: 1388434 - RNA, 23 nt, Human
auaauucucauuaaaagaauauc

SEQ ID NO: 1388435 - RNA, 22 nt, Human
auaauucucauuaaaagaauau

SEQ ID NO: 1388436 - RNA, 15 nt, Human
auaauucucauuaaa

SEQ ID NO: 1388437 - RNA, 14 nt, Human
auaauucucauuaa

SEQ ID NO: 1388438 - RNA, 22 nt, Human
auaauugccaaaaagugaaaua

SEQ ID NO: 1388439 - RNA, 20 nt, Human
auaauuggauuuccuaauac

SEQ ID NO: 1388440 - RNA, 18 nt, Human
auaauuggauuuccuaau

SEQ ID NO: 1388441 - RNA, 17 nt, Human
auaauuggauuuccuaa

SEQ ID NO: 1388442 - RNA, 16 nt, Human
auaauuggauuuccua

SEQ ID NO: 1388443 - RNA, 21 nt, Human
auaauugugauuagacagaac

SEQ ID NO: 1388444 - RNA, 22 nt, Human
uuagaugcaguucugaagaaga

SEQ ID NO: 1388445 - RNA, 23 nt, Human
uuagaugcaguucugaagaagau

SEQ ID NO: 1388446 - RNA, 18 nt, Human
uuaccuaagauuacaaau

SEQ ID NO: 1388447 - RNA, 14 nt, Human
uuaccuaagauuac

SEQ ID NO: 1388448 - RNA, 22 nt, Human
uuaccugaaaacacugugcaca

SEQ ID NO: 1388449 - RNA, 20 nt, Human
uuaccugaaaacacugugca

SEQ ID NO: 1388450 - RNA, 18 nt, Human
uuaccugaaaacacugug

SEQ ID NO: 1388451 - RNA, 12 nt, Human
uuaccugggaaa

SEQ ID NO: 1388452 - RNA, 23 nt, Human
auaagcaagaaggcaaaaauagu

SEQ ID NO: 1388453 - RNA, 21 nt, Human
auaagcaagaaggcaaaaaua

SEQ ID NO: 1388454 - RNA, 16 nt, Human
auaagcaagaaggcaa

SEQ ID NO: 1388455 - RNA, 17 nt, Human
auaagauucuaacgguc

SEQ ID NO: 1388456 - RNA, 16 nt, Human
auaagcagguggaucu

SEQ ID NO: 1388457 - RNA, 15 nt, Human
auaagaagaaugcuu

SEQ ID NO: 1388458 - RNA, 13 nt, Human
auaagaagaaugc

SEQ ID NO: 1388459 - RNA, 11 nt, Human
auaagaagaau

SEQ ID NO: 1388460 - RNA, 16 nt, Human
auaagaacuuugagcu

SEQ ID NO: 1388461 - RNA, 13 nt, Human
auaagauucuaac

SEQ ID NO: 1388462 - RNA, 19 nt, Human
auaagaagaaugcuuaauc

SEQ ID NO: 1388463 - RNA, 20 nt, Human
auaagaagaaugcuuaauca

SEQ ID NO: 1388464 - RNA, 20 nt, Human
auaagcaaaaacaaaaagaa

SEQ ID NO: 1388465 - RNA, 13 nt, Human
auaagcaggugga

SEQ ID NO: 1388466 - RNA, 24 nt, Human
auaaguucaaauucuucugaacuc

SEQ ID NO: 1388467 - RNA, 21 nt, Human
auaaguucaaauucuucugaa

SEQ ID NO: 1388468 - RNA, 20 nt, Human
auaaguucaaauucuucuga

SEQ ID NO: 1388469 - RNA, 18 nt, Human
auaaguucaaauucuucu

SEQ ID NO: 1388470 - RNA, 24 nt, Human
auaaguuauugcaguuuaucauuc

SEQ ID NO: 1388471 - RNA, 21 nt, Human
auaaguuauugcaguuuauca

SEQ ID NO: 1388472 - RNA, 20 nt, Human
auaaguuauugcaguuuauc

SEQ ID NO: 1388473 - RNA, 16 nt, Human
auaaguuauugcaguu

SEQ ID NO: 1388474 - RNA, 14 nt, Human
auaaguuauugcag

SEQ ID NO: 1388475 - RNA, 13 nt, Human
auaaguuauugca

SEQ ID NO: 1388476 - RNA, 14 nt, Human
auaauaauuaguaa

SEQ ID NO: 1388477 - RNA, 23 nt, Human
auaauacaccacuacauucuguu

SEQ ID NO: 1388478 - RNA, 21 nt, Human
auaaguuucugggaccucagu

SEQ ID NO: 1388479 - RNA, 13 nt, Human
auaaguuuuaugu

SEQ ID NO: 1388480 - RNA, 18 nt, Human
uuacccuggccccucucc

SEQ ID NO: 1388481 - RNA, 20 nt, Human
uuacccuggccccucucccu

SEQ ID NO: 1388482 - RNA, 17 nt, Human
uuacccuggccccucuc

SEQ ID NO: 1388483 - RNA, 13 nt, Human
uuacccuggcccc

SEQ ID NO: 1388484 - RNA, 14 nt, Human
uuaccauuuacaug

SEQ ID NO: 1388485 - RNA, 13 nt, Human
uuacaugcuuauu

SEQ ID NO: 1388486 - RNA, 12 nt, Human
uuacaugcuuau

SEQ ID NO: 1388487 - RNA, 22 nt, Human
uuacaugcauuacugcaugcac

SEQ ID NO: 1388488 - RNA, 22 nt, Human
uuacaugaggacucuauucuuu

SEQ ID NO: 1388489 - RNA, 22 nt, Human
uuaccauuaaaccaucucccug

SEQ ID NO: 1388490 - RNA, 23 nt, Human
uuaccauuaaaccaucucccugg

SEQ ID NO: 1388491 - RNA, 20 nt, Human
uuacaugcuuauuccaugac

SEQ ID NO: 1388492 - RNA, 14 nt, Human
uuaccauguaaugg

SEQ ID NO: 1388493 - RNA, 19 nt, Human
uuacaugcuuauuccauga

SEQ ID NO: 1388494 - RNA, 14 nt, Human
uuacaugcuuauuc

SEQ ID NO: 1388495 - RNA, 17 nt, Human
uuacaugauucauuuua

SEQ ID NO: 1388496 - RNA, 16 nt, Human
uuacaugauucauuuu

SEQ ID NO: 1388497 - RNA, 20 nt, Human
uuacaugaaguauuuuuuca

SEQ ID NO: 1388498 - RNA, 17 nt, Human
uuacaugaauugcauuu

SEQ ID NO: 1388499 - RNA, 16 nt, Human
uuacaugaaguauuuu

SEQ ID NO: 1388500 - RNA, 15 nt, Human
uuacaugaaguauuu

SEQ ID NO: 1388501 - RNA, 14 nt, Human
uuacaugaaguauu

SEQ ID NO: 1388502 - RNA, 13 nt, Human
uuacaugaaguau

SEQ ID NO: 1388503 - RNA, 18 nt, Human
auaacuguauuugaaaua

SEQ ID NO: 1388504 - RNA, 15 nt, Human
auaacuguauuugaa

SEQ ID NO: 1388505 - RNA, 20 nt, Human
auaacuguaaaugugacauu

SEQ ID NO: 1388506 - RNA, 14 nt, Human
auaacugaacaucc

SEQ ID NO: 1388507 - RNA, 21 nt, Human
auaacugaaaauuauuuaaac

SEQ ID NO: 1388508 - RNA, 20 nt, Human
auaacugaaaauuauuuaaa

SEQ ID NO: 1388509 - RNA, 17 nt, Human
auaacugaaaauuauuu

SEQ ID NO: 1388510 - RNA, 14 nt, Human
auaacugaaaauua

SEQ ID NO: 1388511 - RNA, 15 nt, Human
auaacugaaaaugug

SEQ ID NO: 1388512 - RNA, 13 nt, Human
auaacugaaaaug

SEQ ID NO: 1388513 - RNA, 12 nt, Human
auaaccacugcu

SEQ ID NO: 1388514 - RNA, 14 nt, Human
auaaccacugcuuc

SEQ ID NO: 1388515 - RNA, 20 nt, Human
auaaccaguguuguggauuu

SEQ ID NO: 1388516 - RNA, 21 nt, Human
auaacuggaaaacagaacacu

SEQ ID NO: 1388517 - RNA, 17 nt, Human
auaacuggaaaacagaa

SEQ ID NO: 1388518 - RNA, 15 nt, Human
auaacuggaaaacag

SEQ ID NO: 1388519 - RNA, 23 nt, Human
auaacuggaaaacagaacacuua

SEQ ID NO: 1388520 - RNA, 22 nt, Human
auaacuggaaaacagaacacuu

SEQ ID NO: 1388521 - RNA, 15 nt, Human
auaacuggaaagaag

SEQ ID NO: 1388522 - RNA, 12 nt, Human
auaacuggaaac

SEQ ID NO: 1388523 - RNA, 19 nt, Human
auaacaugugaaaagaaua

SEQ ID NO: 1388524 - RNA, 13 nt, Human
auaaauaaaguuu

SEQ ID NO: 1388525 - RNA, 19 nt, Human
auaaauaaaguuuguugaa

SEQ ID NO: 1388526 - RNA, 15 nt, Human
auaaaguaucaucag

SEQ ID NO: 1388527 - RNA, 14 nt, Human
auaaaguaucauca

SEQ ID NO: 1388528 - RNA, 17 nt, Human
auaaaguaguccuguga

SEQ ID NO: 1388529 - RNA, 16 nt, Human
auaaaguaguccugug

SEQ ID NO: 1388530 - RNA, 16 nt, Human
auaaacuuuaccuuuu

SEQ ID NO: 1388531 - RNA, 13 nt, Human
auaaacuuuaccu

SEQ ID NO: 1388532 - RNA, 15 nt, Human
auaaacuuuaccuuu

SEQ ID NO: 1388533 - RNA, 18 nt, Human
auaaagugacccugcucu

SEQ ID NO: 1388534 - RNA, 20 nt, Human
auaaagugacccugcucuca

SEQ ID NO: 1388535 - RNA, 12 nt, Human
auaaaguauuua

SEQ ID NO: 1388536 - RNA, 14 nt, Human
auaaaguauuuaau

SEQ ID NO: 1388537 - RNA, 15 nt, Human
auaaaguauuuaauu

SEQ ID NO: 1388538 - RNA, 17 nt, Human
auaaaguauuuaauuag

SEQ ID NO: 1388539 - RNA, 19 nt, Human
auaaaguauuuaauuagug

SEQ ID NO: 1388540 - RNA, 21 nt, Human
auaaaguauuuaauuagugcu

SEQ ID NO: 1388541 - RNA, 22 nt, Human
auaaacuuuaauauaaaguagu

SEQ ID NO: 1388542 - RNA, 20 nt, Human
auaaacuuuaauauaaagua

SEQ ID NO: 1388543 - RNA, 16 nt, Human
auaaacuuuaauauaa

SEQ ID NO: 1388544 - RNA, 17 nt, Human
auaaacuaauaauugca

SEQ ID NO: 1388545 - RNA, 15 nt, Human
auaaacuaauaauug

SEQ ID NO: 1388546 - RNA, 14 nt, Human
auaaacuaauaauu

SEQ ID NO: 1388547 - RNA, 15 nt, Human
auaaacucauuucua

SEQ ID NO: 1388548 - RNA, 18 nt, Human
auaaacgucuuaaauauu

SEQ ID NO: 1388549 - RNA, 16 nt, Human
auaaacgucuuaaaua

SEQ ID NO: 1388550 - RNA, 15 nt, Human
auaaacgucuuaaau

SEQ ID NO: 1388551 - RNA, 22 nt, Human
auaaacauuuguagcauccucu

SEQ ID NO: 1388552 - RNA, 21 nt, Human
auaaacccaguugccaucugc

SEQ ID NO: 1388553 - RNA, 16 nt, Human
auaaaccgaacugaug

SEQ ID NO: 1388554 - RNA, 18 nt, Human
aguuuuccuaugcuuuga

SEQ ID NO: 1388555 - RNA, 16 nt, Human
aguuuuccuaugcuuu

SEQ ID NO: 1388556 - RNA, 17 nt, Human
aguuuucuccucccagg

SEQ ID NO: 1388557 - RNA, 23 nt, Human
auaaacacucuugaaaaaugcau

SEQ ID NO: 1388558 - RNA, 12 nt, Human
auacaaaagcau

SEQ ID NO: 1388559 - RNA, 13 nt, Human
auacaaaagcaug

SEQ ID NO: 1388560 - RNA, 15 nt, Human
auacaaaagcaugug

SEQ ID NO: 1388561 - RNA, 14 nt, Human
auaauuuuuauaug

SEQ ID NO: 1388562 - RNA, 22 nt, Human
auaauuuuuauauuugaaauau

SEQ ID NO: 1388563 - RNA, 21 nt, Human
auaauuuuuauauuugaaaua

SEQ ID NO: 1388564 - RNA, 19 nt, Human
auaauuuuuauauuugaaa

SEQ ID NO: 1388565 - RNA, 16 nt, Human
auaauuuuuauauuug

SEQ ID NO: 1388566 - RNA, 23 nt, Human
auaauuuuguaauguaucaaaua

SEQ ID NO: 1388567 - RNA, 13 nt, Human
auaauuuuguaau

SEQ ID NO: 1388568 - RNA, 12 nt, Human
auaauuuuguaa

SEQ ID NO: 1388569 - RNA, 14 nt, Human
auaauuuuuauauu

SEQ ID NO: 1388570 - RNA, 20 nt, Human
auaauuuugugaagcaaaau

SEQ ID NO: 1388571 - RNA, 15 nt, Human
auaauuuugugaagc

SEQ ID NO: 1388572 - RNA, 14 nt, Human
auaauuuugugaag

SEQ ID NO: 1388573 - RNA, 13 nt, Human
auaauuuugugaa

SEQ ID NO: 1388574 - RNA, 21 nt, Human
uuauauauggggaugguaguu

SEQ ID NO: 1388575 - RNA, 17 nt, Human
uuauauauguauuuaua

SEQ ID NO: 1388576 - RNA, 14 nt, Human
uuauauauauauau

SEQ ID NO: 1388577 - RNA, 18 nt, Human
uuauauauaaauauauua

SEQ ID NO: 1388578 - RNA, 23 nt, Human
uuauauauaaauauauuauuacu

SEQ ID NO: 1388579 - RNA, 15 nt, Human
uuauauauaaauaua

SEQ ID NO: 1388580 - RNA, 14 nt, Human
uuauauauguauuu

SEQ ID NO: 1388581 - RNA, 22 nt, Human
uuauauauauuuuuuucugaaa

SEQ ID NO: 1388582 - RNA, 22 nt, Human
uuauauaauugccaaaaaguga

SEQ ID NO: 1388583 - RNA, 20 nt, Human
uuauauaauugccaaaaagu

SEQ ID NO: 1388584 - RNA, 16 nt, Human
uuauauaaucauuauu

SEQ ID NO: 1388585 - RNA, 20 nt, Human
uuauauaaucauuauuacuu

SEQ ID NO: 1388586 - RNA, 22 nt, Human
uuauauaacuguauuugaaaua

SEQ ID NO: 1388587 - RNA, 18 nt, Human
uuauauaacuguauuuga

SEQ ID NO: 1388588 - RNA, 16 nt, Human
uuauauaacuguauuu

SEQ ID NO: 1388589 - RNA, 12 nt, Human
uuauauaacugu

SEQ ID NO: 1388590 - RNA, 12 nt, Human
uuauaguuucug

SEQ ID NO: 1388591 - RNA, 19 nt, Human
uuauaguuacuguguaauu

SEQ ID NO: 1388592 - RNA, 15 nt, Human
uuauaguuacugugu

SEQ ID NO: 1388593 - RNA, 14 nt, Human
uuauaguuacugug

SEQ ID NO: 1388594 - RNA, 13 nt, Human
uuauaguuacugu

SEQ ID NO: 1388595 - RNA, 13 nt, Human
uuauaguuucuga

SEQ ID NO: 1388596 - RNA, 15 nt, Human
uuauaguuucugagg

SEQ ID NO: 1388597 - RNA, 18 nt, Human
uuauauaagcuuguauuc

SEQ ID NO: 1388598 - RNA, 18 nt, Human
uuauaacuguaaagaugu

SEQ ID NO: 1388599 - RNA, 17 nt, Human
uuauaacuguaaagaug

SEQ ID NO: 1388600 - RNA, 17 nt, Human
uuauaacuggaaagaag

SEQ ID NO: 1388601 - RNA, 16 nt, Human
uuauaacuggaaagaa

SEQ ID NO: 1388602 - RNA, 19 nt, Human
uuauaacuaacauguccug

SEQ ID NO: 1388603 - RNA, 15 nt, Human
uuauaacuaacaugu

SEQ ID NO: 1388604 - RNA, 21 nt, Human
uuauaaccuuaauuuauuauu

SEQ ID NO: 1388605 - RNA, 19 nt, Human
uuauaaccuuaauuuauua

SEQ ID NO: 1388606 - RNA, 16 nt, Human
uuauaaccuuaauuua

SEQ ID NO: 1388607 - RNA, 17 nt, Human
uuauaaauuucuauuuu

SEQ ID NO: 1388608 - RNA, 16 nt, Human
uuauaccaaaauguug

SEQ ID NO: 1388609 - RNA, 23 nt, Human
uuauaaauguaccagagagaguu

SEQ ID NO: 1388610 - RNA, 18 nt, Human
uuagccuggaccucugac

SEQ ID NO: 1388611 - RNA, 17 nt, Human
uuagccuggaccucuga

SEQ ID NO: 1388612 - RNA, 20 nt, Human
uuagccucaauuucugaaca

SEQ ID NO: 1388613 - RNA, 17 nt, Human
uuagccugaguagaaag

SEQ ID NO: 1388614 - RNA, 16 nt, Human
uuagccccugaaagcc

SEQ ID NO: 1388615 - RNA, 15 nt, Human
uuagccccugaaagc

SEQ ID NO: 1388616 - RNA, 21 nt, Human
uuagccguggugauuuagcag

SEQ ID NO: 1388617 - RNA, 16 nt, Human
uuauagaaguuuagau

SEQ ID NO: 1388618 - RNA, 23 nt, Human
uuauacuuucccuacccucuaga

SEQ ID NO: 1388619 - RNA, 18 nt, Human
uuauacuuuguaaagaca

SEQ ID NO: 1388620 - RNA, 18 nt, Human
uuauacuuucccuacccu

SEQ ID NO: 1388621 - RNA, 19 nt, Human
uuauacuuguaauuaugga

SEQ ID NO: 1388622 - RNA, 15 nt, Human
uuauacuuguaauua

SEQ ID NO: 1388623 - RNA, 16 nt, Human
uuauacucuuucugua

SEQ ID NO: 1388624 - RNA, 22 nt, Human
uuauacgcuggcaacacagagg

SEQ ID NO: 1388625 - RNA, 21 nt, Human
uuauacgcuggcaacacagag

SEQ ID NO: 1388626 - RNA, 20 nt, Human
uuauacgaguaauaugccug

SEQ ID NO: 1388627 - RNA, 17 nt, Human
uuauacgaaauaauugu

SEQ ID NO: 1388628 - RNA, 16 nt, Human
uuauacgaaauaauug

SEQ ID NO: 1388629 - RNA, 14 nt, Human
uuauacgaaauaau

SEQ ID NO: 1388630 - RNA, 22 nt, Human
uuauaccaaaauguugcugaaa

SEQ ID NO: 1388631 - RNA, 21 nt, Human
uuauagauucuaaagauucua

SEQ ID NO: 1388632 - RNA, 20 nt, Human
uuauagauucuaaagauucu

SEQ ID NO: 1388633 - RNA, 19 nt, Human
uuauagauucuaaagauuc

SEQ ID NO: 1388634 - RNA, 16 nt, Human
uuauagauucuaaaga

SEQ ID NO: 1388635 - RNA, 15 nt, Human
uuauagauucuaaag

SEQ ID NO: 1388636 - RNA, 14 nt, Human
uuauagauucuaaa

SEQ ID NO: 1388637 - RNA, 13 nt, Human
uuauagauucuaa

SEQ ID NO: 1388638 - RNA, 12 nt, Human
uuauagauucua

SEQ ID NO: 1388639 - RNA, 17 nt, Human
uuauagccucugucugg

SEQ ID NO: 1388640 - RNA, 16 nt, Human
uuauagccucugucug

SEQ ID NO: 1388641 - RNA, 15 nt, Human
uuauagccucugucu

SEQ ID NO: 1388642 - RNA, 19 nt, Human
uuauagccucugucuggca

SEQ ID NO: 1388643 - RNA, 16 nt, Human
uuauaggaucauuugu

SEQ ID NO: 1388644 - RNA, 18 nt, Human
uuauaggauuuauuuaaa

SEQ ID NO: 1388645 - RNA, 21 nt, Human
uuauagugauguaaucuugaa

SEQ ID NO: 1388646 - RNA, 21 nt, Human
uuauagugaauacugcuacag

SEQ ID NO: 1388647 - RNA, 15 nt, Human
uuauagugaauacug

SEQ ID NO: 1388648 - RNA, 24 nt, Human
uuauaggauuuauuuaaaauagca

SEQ ID NO: 1388649 - RNA, 13 nt, Human
uuauaguacauga

SEQ ID NO: 1388650 - RNA, 16 nt, Human
uuauaguacaugauaa

SEQ ID NO: 1388651 - RNA, 17 nt, Human
uuauaguacaugauaaa

SEQ ID NO: 1388652 - RNA, 12 nt, Human
auacagcuguau

SEQ ID NO: 1388653 - RNA, 13 nt, Human
auacagcucagaa

SEQ ID NO: 1388654 - RNA, 22 nt, Human
auacagcagagcuagguggaaa

SEQ ID NO: 1388655 - RNA, 16 nt, Human
auacagcaacaauuua

SEQ ID NO: 1388656 - RNA, 14 nt, Human
auacagauuuugau

SEQ ID NO: 1388657 - RNA, 16 nt, Human
auacagauuuugauag

SEQ ID NO: 1388658 - RNA, 17 nt, Human
auacagauuuugauagc

SEQ ID NO: 1388659 - RNA, 18 nt, Human
auacagauuuugauagca

SEQ ID NO: 1388660 - RNA, 19 nt, Human
auacagauuuugauagcaa

SEQ ID NO: 1388661 - RNA, 22 nt, Human
auacagauuuugauagcaaagc

SEQ ID NO: 1388662 - RNA, 17 nt, Human
auacaaauggauuuugg

SEQ ID NO: 1388663 - RNA, 20 nt, Human
auacaaauggauuuugggag

SEQ ID NO: 1388664 - RNA, 14 nt, Human
auacaaauggauuu

SEQ ID NO: 1388665 - RNA, 13 nt, Human
auacaaauggauu

SEQ ID NO: 1388666 - RNA, 19 nt, Human
auacaaaggcuuauuaauu

SEQ ID NO: 1388667 - RNA, 18 nt, Human
auacaaaaauacucagau

SEQ ID NO: 1388668 - RNA, 21 nt, Human
auacaguucggugagcuacaa

SEQ ID NO: 1388669 - RNA, 20 nt, Human
auacagcuguauugucugaa

SEQ ID NO: 1388670 - RNA, 16 nt, Human
auacauuuucuaagaa

SEQ ID NO: 1388671 - RNA, 16 nt, Human
auaccaaaauguugcu

SEQ ID NO: 1388672 - RNA, 15 nt, Human
auaccaaaauguugc

SEQ ID NO: 1388673 - RNA, 18 nt, Human
auaccaaagcacauuuua

SEQ ID NO: 1388674 - RNA, 17 nt, Human
auaccaaagcacauuuu

SEQ ID NO: 1388675 - RNA, 20 nt, Human
auaccaaaauguugcugaaa

SEQ ID NO: 1388676 - RNA, 12 nt, Human
auaccaauaaag

SEQ ID NO: 1388677 - RNA, 13 nt, Human
auaccaauaaagu

SEQ ID NO: 1388678 - RNA, 21 nt, Human
auacauuuaaaacauuaaaau

SEQ ID NO: 1388679 - RNA, 16 nt, Human
auacauuuaaaacauu

SEQ ID NO: 1388680 - RNA, 20 nt, Human
auacauuguauauaugugua

SEQ ID NO: 1388681 - RNA, 21 nt, Human
auacaguucugcucugguugu

SEQ ID NO: 1388682 - RNA, 20 nt, Human
auacauaaacaagaccacgu

SEQ ID NO: 1388683 - RNA, 22 nt, Human
auacauuauauuucuauuuuau

SEQ ID NO: 1388684 - RNA, 17 nt, Human
auacauuauauuucuau

SEQ ID NO: 1388685 - RNA, 15 nt, Human
auacauuauauuucu

SEQ ID NO: 1388686 - RNA, 20 nt, Human
auacaucccuuaccugggaa

SEQ ID NO: 1388687 - RNA, 19 nt, Human
auacucaaaugaguaacau

SEQ ID NO: 1388688 - RNA, 16 nt, Human
auacuagggagccauu

SEQ ID NO: 1388689 - RNA, 22 nt, Human
auacuauuuaaagccuccucau

SEQ ID NO: 1388690 - RNA, 21 nt, Human
auacuauuuaaagccuccuca

SEQ ID NO: 1388691 - RNA, 17 nt, Human
auacuaccuugaaaaua

SEQ ID NO: 1388692 - RNA, 15 nt, Human
auacuaccuugaaaa

SEQ ID NO: 1388693 - RNA, 14 nt, Human
auacuaccuugaaa

SEQ ID NO: 1388694 - RNA, 13 nt, Human
auacuacaguuug

SEQ ID NO: 1388695 - RNA, 15 nt, Human
auacuacaguuuguu

SEQ ID NO: 1388696 - RNA, 16 nt, Human
auacuacaguuuguua

SEQ ID NO: 1388697 - RNA, 20 nt, Human
auacuacaguuuguuaguau

SEQ ID NO: 1388698 - RNA, 22 nt, Human
auaccagcgaggaggcuccaga

SEQ ID NO: 1388699 - RNA, 16 nt, Human
auaccagcgaggaggc

SEQ ID NO: 1388700 - RNA, 21 nt, Human
auacuaaugaaaacagaaugu

SEQ ID NO: 1388701 - RNA, 22 nt, Human
auacuaauaaacuaauaauugc

SEQ ID NO: 1388702 - RNA, 18 nt, Human
auacuaauaaacuaauaa

SEQ ID NO: 1388703 - RNA, 21 nt, Human
auacuaagcauugaauggcua

SEQ ID NO: 1388704 - RNA, 17 nt, Human
auacuaagcauugaaug

SEQ ID NO: 1388705 - RNA, 21 nt, Human
auacuaaccagcagaaaugcc

SEQ ID NO: 1388706 - RNA, 21 nt, Human
auaccaaugaaaaaauguaua

SEQ ID NO: 1388707 - RNA, 19 nt, Human
auaccagccaguaaauggg

SEQ ID NO: 1388708 - RNA, 22 nt, Human
auaccacaggaaccacaagacu

SEQ ID NO: 1388709 - RNA, 14 nt, Human
auaccaauaaagug

SEQ ID NO: 1388710 - RNA, 15 nt, Human
auaccaauaaaguga

SEQ ID NO: 1388711 - RNA, 19 nt, Human
auaccaaugaaaaaaugua

SEQ ID NO: 1388712 - RNA, 21 nt, Human
auaccaauaaagugacccugc

SEQ ID NO: 1388713 - RNA, 15 nt, Human
uuaucaacaauagug

SEQ ID NO: 1388714 - RNA, 19 nt, Human
uuaucaaacccuagccuug

SEQ ID NO: 1388715 - RNA, 21 nt, Human
uuaucaaacccuagccuugcu

SEQ ID NO: 1388716 - RNA, 18 nt, Human
uuaucaaacccuagccuu

SEQ ID NO: 1388717 - RNA, 16 nt, Human
uuaucaaaacuuucuu

SEQ ID NO: 1388718 - RNA, 20 nt, Human
auacucaaaugaguaacauu

SEQ ID NO: 1388719 - RNA, 16 nt, Human
uuaucaguaaauaacu

SEQ ID NO: 1388720 - RNA, 19 nt, Human
uuaucaccuagcugaaugu

SEQ ID NO: 1388721 - RNA, 23 nt, Human
uuaucaccuagcugaauguuuuu

SEQ ID NO: 1388722 - RNA, 21 nt, Human
uuaucaccgugggcucccuga

SEQ ID NO: 1388723 - RNA, 21 nt, Human
uuaucaacuuccuaaauauua

SEQ ID NO: 1388724 - RNA, 15 nt, Human
uuaucaacuuccuaa

SEQ ID NO: 1388725 - RNA, 14 nt, Human
uuaucagugcuucc

SEQ ID NO: 1388726 - RNA, 23 nt, Human
uuaucagucauaacuaaauaaag

SEQ ID NO: 1388727 - RNA, 21 nt, Human
uuaucagucauaacuaaauaa

SEQ ID NO: 1388728 - RNA, 23 nt, Human
uuaucagucaauauuuuuagaua

SEQ ID NO: 1388729 - RNA, 15 nt, Human
uuaucagucaauauu

SEQ ID NO: 1388730 - RNA, 14 nt, Human
uuaucagucaauau

SEQ ID NO: 1388731 - RNA, 17 nt, Human
uuaucaugugaaaucau

SEQ ID NO: 1388732 - RNA, 18 nt, Human
uuaucaugugaaaucauu

SEQ ID NO: 1388733 - RNA, 20 nt, Human
uuaucaugugaaaucauuca

SEQ ID NO: 1388734 - RNA, 22 nt, Human
uuaucaugugaaaucauucauu

SEQ ID NO: 1388735 - RNA, 12 nt, Human
uuaaaauauaau

SEQ ID NO: 1388736 - RNA, 23 nt, Human
uuaaaauagcguucuuguaauuu

SEQ ID NO: 1388737 - RNA, 23 nt, Human
uuaaacgcucuagguacgaugac

SEQ ID NO: 1388738 - RNA, 22 nt, Human
uuaaacgauuuuuaaaauguac

SEQ ID NO: 1388739 - RNA, 18 nt, Human
uuaaacgauuuuuaaaau

SEQ ID NO: 1388740 - RNA, 15 nt, Human
uuaaacgauuuuuaa

SEQ ID NO: 1388741 - RNA, 19 nt, Human
uuaaaccgcuaaaagaaac

SEQ ID NO: 1388742 - RNA, 14 nt, Human
uuaaaccuuuuuug

SEQ ID NO: 1388743 - RNA, 14 nt, Human
uuaaaccuauacuc

SEQ ID NO: 1388744 - RNA, 17 nt, Human
uuaaaccuauacucacu

SEQ ID NO: 1388745 - RNA, 16 nt, Human
uuaaaccgcuaaaaga

SEQ ID NO: 1388746 - RNA, 16 nt, Human
uuaaaaucagcuauuu

SEQ ID NO: 1388747 - RNA, 20 nt, Human
uuaaauaaugugaaacugga

SEQ ID NO: 1388748 - RNA, 21 nt, Human
uuaaauaaugugaaacuggau

SEQ ID NO: 1388749 - RNA, 22 nt, Human
uuaaauaaugugaaacuggauu

SEQ ID NO: 1388750 - RNA, 16 nt, Human
aguugcacagcuauga

SEQ ID NO: 1388751 - RNA, 17 nt, Human
aguugcacagcuaugaa

SEQ ID NO: 1388752 - RNA, 19 nt, Human
aguugcauguaguaacacu

SEQ ID NO: 1388753 - RNA, 18 nt, Human
aguugcauguaguaacac

SEQ ID NO: 1388754 - RNA, 17 nt, Human
aguugcauguaguaaca

SEQ ID NO: 1388755 - RNA, 15 nt, Human
aguugcauguaguaa

SEQ ID NO: 1388756 - RNA, 13 nt, Human
aguugcauguagu

SEQ ID NO: 1388757 - RNA, 21 nt, Human
aguugcauguaguaacacuaa

SEQ ID NO: 1388758 - RNA, 22 nt, Human
aguugcauguaguaacacuaau

SEQ ID NO: 1388759 - RNA, 18 nt, Human
uuaaaaaagaaacauuug

SEQ ID NO: 1388760 - RNA, 15 nt, Human
uuaaaaaagaaacau

SEQ ID NO: 1388761 - RNA, 17 nt, Human
uuaaaaauucagcaaag

SEQ ID NO: 1388762 - RNA, 21 nt, Human
uuaaaaauaagucaacaguaa

SEQ ID NO: 1388763 - RNA, 22 nt, Human
uuaaaaauaagucaacaguaaa

SEQ ID NO: 1388764 - RNA, 15 nt, Human
uuaaaaauaagucaa

SEQ ID NO: 1388765 - RNA, 20 nt, Human
uuaaaaaguuauaaccaacu

SEQ ID NO: 1388766 - RNA, 13 nt, Human
uuaaaaaacuaaa

SEQ ID NO: 1388767 - RNA, 19 nt, Human
uuaaaaaagaaacauuugg

SEQ ID NO: 1388768 - RNA, 20 nt, Human
aguuuauuuguugagagugu

SEQ ID NO: 1388769 - RNA, 23 nt, Human
aguuuauuuguugagagugugac

SEQ ID NO: 1388770 - RNA, 19 nt, Human
aguuuauuuguugagagug

SEQ ID NO: 1388771 - RNA, 18 nt, Human
aguuuauuuguugagagu

SEQ ID NO: 1388772 - RNA, 16 nt, Human
aguuuauuuguugaga

SEQ ID NO: 1388773 - RNA, 23 nt, Human
uuaaauucucucucuugcaggaa

SEQ ID NO: 1388774 - RNA, 20 nt, Human
uuaaauucuugcaaaguauc

SEQ ID NO: 1388775 - RNA, 16 nt, Human
uuaaauucuugcaaag

SEQ ID NO: 1388776 - RNA, 22 nt, Human
uuaaauucccguuuugucacuu

SEQ ID NO: 1388777 - RNA, 19 nt, Human
uuaaauucccguuuuguca

SEQ ID NO: 1388778 - RNA, 13 nt, Human
uuaaauucuugca

SEQ ID NO: 1388779 - RNA, 12 nt, Human
aguuuccugaaa

SEQ ID NO: 1388780 - RNA, 15 nt, Human
aguuucguuuucaaa

SEQ ID NO: 1388781 - RNA, 18 nt, Human
aguuuccuuuuuaauaug

SEQ ID NO: 1388782 - RNA, 16 nt, Human
aguuuccuuuuuaaua

SEQ ID NO: 1388783 - RNA, 12 nt, Human
aguuuccuuuuu

SEQ ID NO: 1388784 - RNA, 16 nt, Human
aguuucguuuucaaaa

SEQ ID NO: 1388785 - RNA, 22 nt, Human
aguuuuccauggcaggaaggcu

SEQ ID NO: 1388786 - RNA, 20 nt, Human
aguuuuccauggcaggaagg

SEQ ID NO: 1388787 - RNA, 20 nt, Human
aguuuucauccauaacugaa

SEQ ID NO: 1388788 - RNA, 21 nt, Human
aguuuucauccauaacugaac

SEQ ID NO: 1388789 - RNA, 12 nt, Human
aguuuucagugg

SEQ ID NO: 1388790 - RNA, 15 nt, Human
aguuuuaucauuuuc

SEQ ID NO: 1388791 - RNA, 18 nt, Human
aguuuggguaaaauacuu

SEQ ID NO: 1388792 - RNA, 16 nt, Human
aguuugguuucuagca

SEQ ID NO: 1388793 - RNA, 20 nt, Human
aguuuggguaaaauacuuuu

SEQ ID NO: 1388794 - RNA, 13 nt, Human
aguuuggguaaaa

SEQ ID NO: 1388795 - RNA, 16 nt, Human
aguuucuaaacuggag

SEQ ID NO: 1388796 - RNA, 21 nt, Human
aguuugucgcucaugugugca

SEQ ID NO: 1388797 - RNA, 19 nt, Human
aguuugucgcucaugugug

SEQ ID NO: 1388798 - RNA, 17 nt, Human
aguuugucgcucaugug

SEQ ID NO: 1388799 - RNA, 20 nt, Human
aguuuuaucauuuucaaaau

SEQ ID NO: 1388800 - RNA, 14 nt, Human
aguuuuaucauuuu

SEQ ID NO: 1388801 - RNA, 17 nt, Human
aguucuuugggccagac

SEQ ID NO: 1388802 - RNA, 16 nt, Human
aguucuuugggccaga

SEQ ID NO: 1388803 - RNA, 15 nt, Human
aguucuuugggccag

SEQ ID NO: 1388804 - RNA, 17 nt, Human
aguucuuuaaaauguaa

SEQ ID NO: 1388805 - RNA, 23 nt, Human
aguucugugguuucauguuaguu

SEQ ID NO: 1388806 - RNA, 22 nt, Human
aguucugugguuucauguuagu

SEQ ID NO: 1388807 - RNA, 19 nt, Human
aguucugugguuucauguu

SEQ ID NO: 1388808 - RNA, 16 nt, Human
aguucugugguuucau

SEQ ID NO: 1388809 - RNA, 16 nt, Human
aguucuguagaaaugg

SEQ ID NO: 1388810 - RNA, 17 nt, Human
aguucuguagaaauggu

SEQ ID NO: 1388811 - RNA, 18 nt, Human
aguucuguagaaaugguu

SEQ ID NO: 1388812 - RNA, 16 nt, Human
aguucugaagaagaug

SEQ ID NO: 1388813 - RNA, 13 nt, Human
aguucuguagaaa

SEQ ID NO: 1388814 - RNA, 15 nt, Human
aguucuguagaaaug

SEQ ID NO: 1388815 - RNA, 15 nt, Human
aguucugaagaagau

SEQ ID NO: 1388816 - RNA, 14 nt, Human
aguucugaagaaga

SEQ ID NO: 1388817 - RNA, 13 nt, Human
aguucugaagaag

SEQ ID NO: 1388818 - RNA, 21 nt, Human
aguugaucuggaacccagacu

SEQ ID NO: 1388819 - RNA, 20 nt, Human
aguugaucuggaacccagac

SEQ ID NO: 1388820 - RNA, 19 nt, Human
aguugaucuggaacccaga

SEQ ID NO: 1388821 - RNA, 18 nt, Human
aguugaucuggaacccag

SEQ ID NO: 1388822 - RNA, 17 nt, Human
aguugaucuggaaccca

SEQ ID NO: 1388823 - RNA, 15 nt, Human
aguugaucuggaacc

SEQ ID NO: 1388824 - RNA, 13 nt, Human
aguugaucuggaa

SEQ ID NO: 1388825 - RNA, 13 nt, Human
aguugauuagaaa

SEQ ID NO: 1388826 - RNA, 23 nt, Human
aguugaucuggaacccagacuca

SEQ ID NO: 1388827 - RNA, 21 nt, Human
aguugaucgccuuucccaggu

SEQ ID NO: 1388828 - RNA, 19 nt, Human
aguucuuugggccagacau

SEQ ID NO: 1388829 - RNA, 18 nt, Human
aguucuuugggccagaca

SEQ ID NO: 1388830 - RNA, 21 nt, Human
aguugauaugccuuuucccaa

SEQ ID NO: 1388831 - RNA, 23 nt, Human
aguugauuuuuuuuuuuuuuucc

SEQ ID NO: 1388832 - RNA, 16 nt, Human
aguugauuuucuggau

SEQ ID NO: 1388833 - RNA, 19 nt, Human
aguugcaacuuuguauaaa

SEQ ID NO: 1388834 - RNA, 17 nt, Human
uguuguccuuuucauag

SEQ ID NO: 1388835 - RNA, 16 nt, Human
uguuguccuuuucaua

SEQ ID NO: 1388836 - RNA, 14 nt, Human
uguuguccuuuuca

SEQ ID NO: 1388837 - RNA, 14 nt, Human
uguugucuaagaaa

SEQ ID NO: 1388838 - RNA, 20 nt, Human
uguugucguaaagauuuggg

SEQ ID NO: 1388839 - RNA, 18 nt, Human
uguugucguaaagauuug

SEQ ID NO: 1388840 - RNA, 22 nt, Human
uguuguccuuuucauaggucug

SEQ ID NO: 1388841 - RNA, 22 nt, Human
uguugucuaagaaauugaauac

SEQ ID NO: 1388842 - RNA, 17 nt, Human
uguugucuaagaaauug

SEQ ID NO: 1388843 - RNA, 15 nt, Human
uguuugcaucugaaa

SEQ ID NO: 1388844 - RNA, 15 nt, Human
uguuugcuaagcauu

SEQ ID NO: 1388845 - RNA, 14 nt, Human
uguuuggcuuucag

SEQ ID NO: 1388846 - RNA, 13 nt, Human
uguuuggcuuuca

SEQ ID NO: 1388847 - RNA, 12 nt, Human
uguuuggcuggg

SEQ ID NO: 1388848 - RNA, 13 nt, Human
uguuuuacaauag

SEQ ID NO: 1388849 - RNA, 17 nt, Human
uguuuuacaauaguucu

SEQ ID NO: 1388850 - RNA, 22 nt, Human
uguuuuacaauaguucuguggg

SEQ ID NO: 1388851 - RNA, 20 nt, Human
uguuuuacaaguuggaguca

SEQ ID NO: 1388852 - RNA, 21 nt, Human
uguuuuacaauaguucugugg

SEQ ID NO: 1388853 - RNA, 11 nt, Human
uguuuggcugg

SEQ ID NO: 1388854 - RNA, 20 nt, Human
uguuugcucagcuucuccaa

SEQ ID NO: 1388855 - RNA, 20 nt, Human
uguuugccuucuacuuuuaa

SEQ ID NO: 1388856 - RNA, 19 nt, Human
uguuugcuaagcauuccaa

SEQ ID NO: 1388857 - RNA, 21 nt, Human
uguuuucucuggaguauucua

SEQ ID NO: 1388858 - RNA, 17 nt, Human
uguuuucucugaacaca

SEQ ID NO: 1388859 - RNA, 12 nt, Human
uguuuucucuga

SEQ ID NO: 1388860 - RNA, 21 nt, Human
uguuuuauuuucaaaaccagg

SEQ ID NO: 1388861 - RNA, 20 nt, Human
uguuuuauaauuuugugaag

SEQ ID NO: 1388862 - RNA, 13 nt, Human
uguuuuauaauuu

SEQ ID NO: 1388863 - RNA, 14 nt, Human
uguuuuaggagcau

SEQ ID NO: 1388864 - RNA, 19 nt, Human
uguucuugguuuguaaauu

SEQ ID NO: 1388865 - RNA, 13 nt, Human
uguucuuuccaaa

SEQ ID NO: 1388866 - RNA, 14 nt, Human
uguucuuuccaaag

SEQ ID NO: 1388867 - RNA, 20 nt, Human
uguucuuagcucaaugagca

SEQ ID NO: 1388868 - RNA, 18 nt, Human
uguucuuagcucaaugag

SEQ ID NO: 1388869 - RNA, 22 nt, Human
uguucuuaccuguaugucucca

SEQ ID NO: 1388870 - RNA, 17 nt, Human
uguucuuaccuguaugu

SEQ ID NO: 1388871 - RNA, 17 nt, Human
uguucuugguuuguaaa

SEQ ID NO: 1388872 - RNA, 18 nt, Human
uguucuugguuuguaaau

SEQ ID NO: 1388873 - RNA, 15 nt, Human
uguucccccugugca

SEQ ID NO: 1388874 - RNA, 18 nt, Human
uguuccccauggccacuu

SEQ ID NO: 1388875 - RNA, 17 nt, Human
uguuccccacuggagca

SEQ ID NO: 1388876 - RNA, 14 nt, Human
uguuccccagagaa

SEQ ID NO: 1388877 - RNA, 13 nt, Human
uguuccccagaga

SEQ ID NO: 1388878 - RNA, 16 nt, Human
uguuccccacuggagc

SEQ ID NO: 1388879 - RNA, 15 nt, Human
uguuccccacuggag

SEQ ID NO: 1388880 - RNA, 14 nt, Human
uguuccccacugga

SEQ ID NO: 1388881 - RNA, 13 nt, Human
uguuccccacugg

SEQ ID NO: 1388882 - RNA, 16 nt, Human
uguucccccugugcag

SEQ ID NO: 1388883 - RNA, 14 nt, Human
uguucuuaauucuu

SEQ ID NO: 1388884 - RNA, 16 nt, Human
uguucuuaauucuuag

SEQ ID NO: 1388885 - RNA, 16 nt, Human
aguguaccauuugccu

SEQ ID NO: 1388886 - RNA, 18 nt, Human
uguuauuuuuuaauuauu

SEQ ID NO: 1388887 - RNA, 14 nt, Human
uguuauuuugcaac

SEQ ID NO: 1388888 - RNA, 15 nt, Human
uguucaaagcugccu

SEQ ID NO: 1388889 - RNA, 22 nt, Human
uguucaaagccagcguccuccu

SEQ ID NO: 1388890 - RNA, 21 nt, Human
uguucaaagccagcguccucc

SEQ ID NO: 1388891 - RNA, 17 nt, Human
uguucccauuucagcug

SEQ ID NO: 1388892 - RNA, 16 nt, Human
uguucccauuucagcu

SEQ ID NO: 1388893 - RNA, 17 nt, Human
uguuauguagauaacaa

SEQ ID NO: 1388894 - RNA, 17 nt, Human
uguuaugcaaaagcaag

SEQ ID NO: 1388895 - RNA, 15 nt, Human
uguuaugcugugaca

SEQ ID NO: 1388896 - RNA, 17 nt, Human
uguuauuuguaauagau

SEQ ID NO: 1388897 - RNA, 21 nt, Human
uguuauguuuucgaaaaucaa

SEQ ID NO: 1388898 - RNA, 20 nt, Human
uguuauguuuucgaaaauca

SEQ ID NO: 1388899 - RNA, 14 nt, Human
uguuauuaaacaaa

SEQ ID NO: 1388900 - RNA, 21 nt, Human
aguggguuuuuuaguugaauu

SEQ ID NO: 1388901 - RNA, 22 nt, Human
aguggguuuuuuaguugaauuu

SEQ ID NO: 1388902 - RNA, 15 nt, Human
aguggguuuuuuagu

SEQ ID NO: 1388903 - RNA, 12 nt, Human
aguggguuuuuu

SEQ ID NO: 1388904 - RNA, 14 nt, Human
aguggguggggagu

SEQ ID NO: 1388905 - RNA, 11 nt, Human
agugggugggg

SEQ ID NO: 1388906 - RNA, 23 nt, Human
agugguuuaggcuauuuguaaau

SEQ ID NO: 1388907 - RNA, 14 nt, Human
aguguaauugagaa

SEQ ID NO: 1388908 - RNA, 18 nt, Human
ugugcaacaggguaugga

SEQ ID NO: 1388909 - RNA, 20 nt, Human
ugugcaacaggguauggacu

SEQ ID NO: 1388910 - RNA, 19 nt, Human
agugagcagccuggagccc

SEQ ID NO: 1388911 - RNA, 23 nt, Human
aguggcaggcagaggcccaggcu

SEQ ID NO: 1388912 - RNA, 20 nt, Human
aguggcaggcagaggcccag

SEQ ID NO: 1388913 - RNA, 22 nt, Human
aguggguacccccaggaccaga

SEQ ID NO: 1388914 - RNA, 17 nt, Human
aguggguacccccagga

SEQ ID NO: 1388915 - RNA, 21 nt, Human
agugggguuaucucuguguua

SEQ ID NO: 1388916 - RNA, 11 nt, Human
aguggcagggg

SEQ ID NO: 1388917 - RNA, 18 nt, Human
aguggcaggggacaggag

SEQ ID NO: 1388918 - RNA, 15 nt, Human
aguggcaucaucuca

SEQ ID NO: 1388919 - RNA, 22 nt, Human
aguuaguuuguauauauuauua

SEQ ID NO: 1388920 - RNA, 14 nt, Human
aguuaguuuguaua

SEQ ID NO: 1388921 - RNA, 19 nt, Human
aguuaguuccacugagacc

SEQ ID NO: 1388922 - RNA, 17 nt, Human
aguuaguuccacugaga

SEQ ID NO: 1388923 - RNA, 15 nt, Human
aguuaguuccacuga

SEQ ID NO: 1388924 - RNA, 20 nt, Human
aguuaguggauuacugccau

SEQ ID NO: 1388925 - RNA, 17 nt, Human
aguuaguggauuacugc

SEQ ID NO: 1388926 - RNA, 20 nt, Human
aguuaguaucuuuugauaug

SEQ ID NO: 1388927 - RNA, 22 nt, Human
aguuaccuuauaguuacugugu

SEQ ID NO: 1388928 - RNA, 21 nt, Human
aguuaccuuauaguuacugug

SEQ ID NO: 1388929 - RNA, 20 nt, Human
aguuaccuuauaguuacugu

SEQ ID NO: 1388930 - RNA, 17 nt, Human
aguuaccuuauaguuac

SEQ ID NO: 1388931 - RNA, 16 nt, Human
aguuaccuuauaguua

SEQ ID NO: 1388932 - RNA, 20 nt, Human
aguguuuauccuuucauaua

SEQ ID NO: 1388933 - RNA, 18 nt, Human
aguguuuauccuuucaua

SEQ ID NO: 1388934 - RNA, 16 nt, Human
aguguuuauccuuuca

SEQ ID NO: 1388935 - RNA, 14 nt, Human
aguguuuaaaacuu

SEQ ID NO: 1388936 - RNA, 15 nt, Human
aguguuuaaaacuuc

SEQ ID NO: 1388937 - RNA, 18 nt, Human
uguucuuuccaaaguaca

SEQ ID NO: 1388938 - RNA, 20 nt, Human
uguucuuuccaaaguacacu

SEQ ID NO: 1388939 - RNA, 23 nt, Human
aguuaccugagagauuuaacauu

SEQ ID NO: 1388940 - RNA, 19 nt, Human
aguuaccauuaaaccaucu

SEQ ID NO: 1388941 - RNA, 17 nt, Human
aguuaccauuaaaccau

SEQ ID NO: 1388942 - RNA, 18 nt, Human
aguuacccaaauuaagag

SEQ ID NO: 1388943 - RNA, 16 nt, Human
aguuaccagugccuua

SEQ ID NO: 1388944 - RNA, 15 nt, Human
aguuaccagugccuu

SEQ ID NO: 1388945 - RNA, 17 nt, Human
aguuacccaaauuaaga

SEQ ID NO: 1388946 - RNA, 22 nt, Human
aguuauugcaguuuaucauuca

SEQ ID NO: 1388947 - RNA, 19 nt, Human
aguuauugcaguuuaucau

SEQ ID NO: 1388948 - RNA, 18 nt, Human
aguuauugcaguuuauca

SEQ ID NO: 1388949 - RNA, 16 nt, Human
aguuauugcaguuuau

SEQ ID NO: 1388950 - RNA, 13 nt, Human
aguuauugcaguu

SEQ ID NO: 1388951 - RNA, 17 nt, Human
aguuauuaauuucuuca

SEQ ID NO: 1388952 - RNA, 19 nt, Human
aguuauuaaguucuuuaaa

SEQ ID NO: 1388953 - RNA, 18 nt, Human
aguuauuaaguucuuuaa

SEQ ID NO: 1388954 - RNA, 14 nt, Human
aguuauuaacuuua

SEQ ID NO: 1388955 - RNA, 20 nt, Human
aguuauuaacuuuaauguuu

SEQ ID NO: 1388956 - RNA, 20 nt, Human
aguuaugauuuuuuuuucau

SEQ ID NO: 1388957 - RNA, 22 nt, Human
aguuaucuaaguuaauuuaaag

SEQ ID NO: 1388958 - RNA, 15 nt, Human
aguuaucuaaguuaa

SEQ ID NO: 1388959 - RNA, 20 nt, Human
aguuauacuuauuuguauau

SEQ ID NO: 1388960 - RNA, 15 nt, Human
aguuaguuuguauau

SEQ ID NO: 1388961 - RNA, 21 nt, Human
aguuauaaguagcaggccaag

SEQ ID NO: 1388962 - RNA, 20 nt, Human
aguuauuauauuuacaaaug

SEQ ID NO: 1388963 - RNA, 22 nt, Human
aguucgacucugugcuggccag

SEQ ID NO: 1388964 - RNA, 15 nt, Human
aguuccuguggcucc

SEQ ID NO: 1388965 - RNA, 17 nt, Human
aguuccuguggcucccu

SEQ ID NO: 1388966 - RNA, 13 nt, Human
aguucaagaaaua

SEQ ID NO: 1388967 - RNA, 19 nt, Human
aguucaagaaauaaguuuu

SEQ ID NO: 1388968 - RNA, 13 nt, Human
aguucaacauguu

SEQ ID NO: 1388969 - RNA, 18 nt, Human
aguucaaauucuucugaa

SEQ ID NO: 1388970 - RNA, 21 nt, Human
aguuauuuauuuauuggagau

SEQ ID NO: 1388971 - RNA, 12 nt, Human
aguuauuuaaau

SEQ ID NO: 1388972 - RNA, 22 nt, Human
aguuauuuaugccucuguauuu

SEQ ID NO: 1388973 - RNA, 14 nt, Human
uguugggagagggc

SEQ ID NO: 1388974 - RNA, 19 nt, Human
aguucuaauaauuucuaau

SEQ ID NO: 1388975 - RNA, 18 nt, Human
aguucuaauaauuucuaa

SEQ ID NO: 1388976 - RNA, 17 nt, Human
aguucuaauaauuucua

SEQ ID NO: 1388977 - RNA, 16 nt, Human
aguucuaauaauuucu

SEQ ID NO: 1388978 - RNA, 17 nt, Human
aguucuaagauucugau

SEQ ID NO: 1388979 - RNA, 16 nt, Human
aguucuaagauucuga

SEQ ID NO: 1388980 - RNA, 15 nt, Human
aguucuaagauucug

SEQ ID NO: 1388981 - RNA, 19 nt, Human
aguucuaagauucuaauga

SEQ ID NO: 1388982 - RNA, 18 nt, Human
aguucuaagauucuaaug

SEQ ID NO: 1388983 - RNA, 17 nt, Human
aguucuaagauucuaau

SEQ ID NO: 1388984 - RNA, 16 nt, Human
aguucuaagauucuaa

SEQ ID NO: 1388985 - RNA, 15 nt, Human
aguucuaagauucua

SEQ ID NO: 1388986 - RNA, 14 nt, Human
aguucuaagauucu

SEQ ID NO: 1388987 - RNA, 13 nt, Human
aguucuaagauuc

SEQ ID NO: 1388988 - RNA, 23 nt, Human
aguucuaagacucaaauguucua

SEQ ID NO: 1388989 - RNA, 18 nt, Human
aguucuaagacucaaaug

SEQ ID NO: 1388990 - RNA, 13 nt, Human
aguucgucuguug

SEQ ID NO: 1388991 - RNA, 19 nt, Human
uguugggagagggcgcagg

SEQ ID NO: 1388992 - RNA, 17 nt, Human
uguugggagagggcgca

SEQ ID NO: 1388993 - RNA, 20 nt, Human
uguuggggaagggccugccc

SEQ ID NO: 1388994 - RNA, 20 nt, Human
uguugggagagggcgcaggc

SEQ ID NO: 1388995 - RNA, 21 nt, Human
uguuguagauugauuguauug

SEQ ID NO: 1388996 - RNA, 14 nt, Human
uguuguauucauug

SEQ ID NO: 1388997 - RNA, 22 nt, Human
uguuguagauugauuguauugu

SEQ ID NO: 1388998 - RNA, 13 nt, Human
uguugucaccaga

SEQ ID NO: 1388999 - RNA, 20 nt, Human
uguugucaagaauagcauug

SEQ ID NO: 1389000 - RNA, 16 nt, Human
uguugucaagaauagc

SEQ ID NO: 1389001 - RNA, 11 nt, Human
uguugucaaga

SEQ ID NO: 1389002 - RNA, 14 nt, Human
uguuguaagcaaca

SEQ ID NO: 1389003 - RNA, 14 nt, Human
uguuguaaccugcu

SEQ ID NO: 1389004 - RNA, 17 nt, Human
uguuguaagcaacaggc

SEQ ID NO: 1389005 - RNA, 18 nt, Human
uguuguaaccugcuguga

SEQ ID NO: 1389006 - RNA, 18 nt, Human
uugaaguauuuugcugga

SEQ ID NO: 1389007 - RNA, 12 nt, Human
uugaaguauuua

SEQ ID NO: 1389008 - RNA, 16 nt, Human
uugaaguagcucuuuu

SEQ ID NO: 1389009 - RNA, 16 nt, Human
uugaaguaaacuuuuu

SEQ ID NO: 1389010 - RNA, 15 nt, Human
uugaaguaaacuuuu

SEQ ID NO: 1389011 - RNA, 23 nt, Human
uugaaggugcugacggccaggga

SEQ ID NO: 1389012 - RNA, 20 nt, Human
uugaagggccagagccaggg

SEQ ID NO: 1389013 - RNA, 19 nt, Human
uugaagggccagagccagg

SEQ ID NO: 1389014 - RNA, 17 nt, Human
uugaagggccagagcca

SEQ ID NO: 1389015 - RNA, 15 nt, Human
uugaagggccagagc

SEQ ID NO: 1389016 - RNA, 20 nt, Human
uugaagggaggggcuguguu

SEQ ID NO: 1389017 - RNA, 15 nt, Human
uugaagggaggggcu

SEQ ID NO: 1389018 - RNA, 14 nt, Human
uugaaggacuaaua

SEQ ID NO: 1389019 - RNA, 21 nt, Human
uugaaggaugcugucuucgua

SEQ ID NO: 1389020 - RNA, 21 nt, Human
uugaaggacuaauagaaaagu

SEQ ID NO: 1389021 - RNA, 14 nt, Human
uugaaggaugcugu

SEQ ID NO: 1389022 - RNA, 16 nt, Human
uugaaggaugcugucu

SEQ ID NO: 1389023 - RNA, 13 nt, Human
uugaauacuuuuu

SEQ ID NO: 1389024 - RNA, 12 nt, Human
uugaauacuuuu

SEQ ID NO: 1389025 - RNA, 19 nt, Human
uugaauacuuugaaugugu

SEQ ID NO: 1389026 - RNA, 23 nt, Human
uugaaguuagcuuuaacuuaaau

SEQ ID NO: 1389027 - RNA, 19 nt, Human
uugaaguuagcuuuaacuu

SEQ ID NO: 1389028 - RNA, 20 nt, Human
uugaauacuuugaauguguu

SEQ ID NO: 1389029 - RNA, 22 nt, Human
uugacacugcucuaacagcccu

SEQ ID NO: 1389030 - RNA, 16 nt, Human
uugacacugcucuaac

SEQ ID NO: 1389031 - RNA, 15 nt, Human
uugacacugcucuaa

SEQ ID NO: 1389032 - RNA, 14 nt, Human
uugacacugcucua

SEQ ID NO: 1389033 - RNA, 23 nt, Human
aucuaaaaauagacuuaaaucuc

SEQ ID NO: 1389034 - RNA, 17 nt, Human
aucgucaugcacaguau

SEQ ID NO: 1389035 - RNA, 19 nt, Human
aucguccagcgaccuuccu

SEQ ID NO: 1389036 - RNA, 18 nt, Human
aucgucacugcuuaacuu

SEQ ID NO: 1389037 - RNA, 14 nt, Human
aucgucacugcuua

SEQ ID NO: 1389038 - RNA, 16 nt, Human
aucuaaauaaaaugcu

SEQ ID NO: 1389039 - RNA, 22 nt, Human
aucuaaauauggacugcucagg

SEQ ID NO: 1389040 - RNA, 17 nt, Human
aucuaaauaaaaugcua

SEQ ID NO: 1389041 - RNA, 18 nt, Human
aucuaaccucaucuucuu

SEQ ID NO: 1389042 - RNA, 15 nt, Human
aucuaaccucaucuu

SEQ ID NO: 1389043 - RNA, 14 nt, Human
aucuaaccucaucu

SEQ ID NO: 1389044 - RNA, 13 nt, Human
aucuaaccucauc

SEQ ID NO: 1389045 - RNA, 17 nt, Human
aucuaaguuaauuuaaa

SEQ ID NO: 1389046 - RNA, 16 nt, Human
aucuaaguuaauuuaa

SEQ ID NO: 1389047 - RNA, 17 nt, Human
aucuaagugauauaaau

SEQ ID NO: 1389048 - RNA, 15 nt, Human
aucuaagugauauaa

SEQ ID NO: 1389049 - RNA, 14 nt, Human
aucuaagugauaua

SEQ ID NO: 1389050 - RNA, 13 nt, Human
aucuaagugauau

SEQ ID NO: 1389051 - RNA, 16 nt, Human
uugauaagaucuuuua

SEQ ID NO: 1389052 - RNA, 18 nt, Human
uugauaagaucuuuuauu

SEQ ID NO: 1389053 - RNA, 18 nt, Human
uugauaaccuugaaaaaa

SEQ ID NO: 1389054 - RNA, 14 nt, Human
uugauaaagauuuu

SEQ ID NO: 1389055 - RNA, 17 nt, Human
uugaguuuugacugcuu

SEQ ID NO: 1389056 - RNA, 18 nt, Human
uugaguuuugacugcuug

SEQ ID NO: 1389057 - RNA, 20 nt, Human
uugaguagagagcaagggaa

SEQ ID NO: 1389058 - RNA, 16 nt, Human
uugaguaaugguguag

SEQ ID NO: 1389059 - RNA, 21 nt, Human
uugaguaaugguguagaacac

SEQ ID NO: 1389060 - RNA, 12 nt, Human
uugaguaauggu

SEQ ID NO: 1389061 - RNA, 22 nt, Human
uugauaaagauuuuuuaauaau

SEQ ID NO: 1389062 - RNA, 20 nt, Human
uugauaaagauuuuuuaaua

SEQ ID NO: 1389063 - RNA, 17 nt, Human
uugauaaagauuuuuua

SEQ ID NO: 1389064 - RNA, 21 nt, Human
uugagauauuaaugcccagac

SEQ ID NO: 1389065 - RNA, 16 nt, Human
uugaggucuguucuuu

SEQ ID NO: 1389066 - RNA, 20 nt, Human
uugagauauuaaugcccaga

SEQ ID NO: 1389067 - RNA, 22 nt, Human
uugagauaguuuucauccauaa

SEQ ID NO: 1389068 - RNA, 17 nt, Human
uugagauaguuuucauc

SEQ ID NO: 1389069 - RNA, 13 nt, Human
uugagagugugac

SEQ ID NO: 1389070 - RNA, 15 nt, Human
uugagagugugacca

SEQ ID NO: 1389071 - RNA, 16 nt, Human
uugagagaauuugugc

SEQ ID NO: 1389072 - RNA, 17 nt, Human
uugagagaagagacaaa

SEQ ID NO: 1389073 - RNA, 20 nt, Human
uugagaaggaaaauuuuagc

SEQ ID NO: 1389074 - RNA, 19 nt, Human
uugagaaggaaaauuuuag

SEQ ID NO: 1389075 - RNA, 21 nt, Human
uugagaaauauggacacuuaa

SEQ ID NO: 1389076 - RNA, 19 nt, Human
uugacauaaaguugauaaa

SEQ ID NO: 1389077 - RNA, 14 nt, Human
uugacaguguuuuu

SEQ ID NO: 1389078 - RNA, 19 nt, Human
uugacaguguugaaaaugu

SEQ ID NO: 1389079 - RNA, 23 nt, Human
uugacacugcucuaacagcccuc

SEQ ID NO: 1389080 - RNA, 15 nt, Human
uugacauaaaguuga

SEQ ID NO: 1389081 - RNA, 13 nt, Human
auccugcuaaguu

SEQ ID NO: 1389082 - RNA, 16 nt, Human
auccugcggguggggc

SEQ ID NO: 1389083 - RNA, 24 nt, Human
auccugaccagcugcuccgaggac

SEQ ID NO: 1389084 - RNA, 17 nt, Human
auccugaaauuucagau

SEQ ID NO: 1389085 - RNA, 16 nt, Human
auccugaaauuucaga

SEQ ID NO: 1389086 - RNA, 14 nt, Human
auccugaaauuuca

SEQ ID NO: 1389087 - RNA, 15 nt, Human
auccucuuuuuccaa

SEQ ID NO: 1389088 - RNA, 14 nt, Human
auccucuuuuucca

SEQ ID NO: 1389089 - RNA, 22 nt, Human
auccucuuuagaguuagacugu

SEQ ID NO: 1389090 - RNA, 23 nt, Human
auccucuuuagaguuagacuguu

SEQ ID NO: 1389091 - RNA, 16 nt, Human
auccucuuuagaguua

SEQ ID NO: 1389092 - RNA, 19 nt, Human
auccucuuuagaguuagac

SEQ ID NO: 1389093 - RNA, 20 nt, Human
auccucuuuagaguuagacu

SEQ ID NO: 1389094 - RNA, 21 nt, Human
auccucuuuagaguuagacug

SEQ ID NO: 1389095 - RNA, 14 nt, Human
uucuuuugccauga

SEQ ID NO: 1389096 - RNA, 21 nt, Human
uucuuuucuggaauguaauca

SEQ ID NO: 1389097 - RNA, 23 nt, Human
uucuuuugguaaagacuggcuuu

SEQ ID NO: 1389098 - RNA, 22 nt, Human
uucuuuugguaaagacuggcuu

SEQ ID NO: 1389099 - RNA, 13 nt, Human
uucuuuugguaaa

SEQ ID NO: 1389100 - RNA, 20 nt, Human
uucuuuugccguuauuaaaa

SEQ ID NO: 1389101 - RNA, 13 nt, Human
auccucuuuagag

SEQ ID NO: 1389102 - RNA, 15 nt, Human
auccucuuuagaguu

SEQ ID NO: 1389103 - RNA, 20 nt, Human
auccuggaggcccaguucac

SEQ ID NO: 1389104 - RNA, 19 nt, Human
auccuggaggcccaguuca

SEQ ID NO: 1389105 - RNA, 22 nt, Human
auccuggacaugaagauucuuu

SEQ ID NO: 1389106 - RNA, 12 nt, Human
auccugcuugau

SEQ ID NO: 1389107 - RNA, 14 nt, Human
auccugcuucagug

SEQ ID NO: 1389108 - RNA, 17 nt, Human
auccuggaggcccaguu

SEQ ID NO: 1389109 - RNA, 16 nt, Human
auccuggaggcccagu

SEQ ID NO: 1389110 - RNA, 15 nt, Human
auccuggaggcccag

SEQ ID NO: 1389111 - RNA, 14 nt, Human
auccuggaggccca

SEQ ID NO: 1389112 - RNA, 19 nt, Human
auccuguguguuaagcucu

SEQ ID NO: 1389113 - RNA, 21 nt, Human
auccuguguguuaagcucugc

SEQ ID NO: 1389114 - RNA, 13 nt, Human
auccuguguguua

SEQ ID NO: 1389115 - RNA, 12 nt, Human
auccuguguguu

SEQ ID NO: 1389116 - RNA, 11 nt, Human
auccugugugu

SEQ ID NO: 1389117 - RNA, 22 nt, Human
auccuguguggagagggaaugu

SEQ ID NO: 1389118 - RNA, 23 nt, Human
auccuguguggagagggaaugug

SEQ ID NO: 1389119 - RNA, 21 nt, Human
auccuguguggagagggaaug

SEQ ID NO: 1389120 - RNA, 19 nt, Human
auccuguguggagagggaa

SEQ ID NO: 1389121 - RNA, 18 nt, Human
auccuguguggagaggga

SEQ ID NO: 1389122 - RNA, 16 nt, Human
auccuguguggagagg

SEQ ID NO: 1389123 - RNA, 14 nt, Human
auccuguguggaga

SEQ ID NO: 1389124 - RNA, 17 nt, Human
auccuguggucacugac

SEQ ID NO: 1389125 - RNA, 19 nt, Human
auccugucgauuagacugg

SEQ ID NO: 1389126 - RNA, 21 nt, Human
auccugucgauuagacuggac

SEQ ID NO: 1389127 - RNA, 21 nt, Human
auccuguauucagacagauga

SEQ ID NO: 1389128 - RNA, 20 nt, Human
auccuguauucagacagaug

SEQ ID NO: 1389129 - RNA, 18 nt, Human
auccuguauucagacaga

SEQ ID NO: 1389130 - RNA, 16 nt, Human
auccuguauucagaca

SEQ ID NO: 1389131 - RNA, 16 nt, Human
aucggggagccgggag

SEQ ID NO: 1389132 - RNA, 18 nt, Human
aucggggagccgggagcc

SEQ ID NO: 1389133 - RNA, 12 nt, Human
aucguaaaauua

SEQ ID NO: 1389134 - RNA, 13 nt, Human
aucguaaaauuaa

SEQ ID NO: 1389135 - RNA, 14 nt, Human
aucguaaaauuaag

SEQ ID NO: 1389136 - RNA, 17 nt, Human
aucguaaaauuaagaaa

SEQ ID NO: 1389137 - RNA, 19 nt, Human
uucuuugaauaaaugucac

SEQ ID NO: 1389138 - RNA, 18 nt, Human
uucuuugaauaaauguca

SEQ ID NO: 1389139 - RNA, 17 nt, Human
uucuuugaauaaauguc

SEQ ID NO: 1389140 - RNA, 14 nt, Human
uucuuugaauaaau

SEQ ID NO: 1389141 - RNA, 13 nt, Human
uucuuugaauaaa

SEQ ID NO: 1389142 - RNA, 15 nt, Human
uucuuucucacuaaa

SEQ ID NO: 1389143 - RNA, 12 nt, Human
uucuuucuggcu

SEQ ID NO: 1389144 - RNA, 17 nt, Human
uucuuucuggcuaugca

SEQ ID NO: 1389145 - RNA, 20 nt, Human
uucuuucuggcuaugcauuu

SEQ ID NO: 1389146 - RNA, 18 nt, Human
uucuugccugaacuccug

SEQ ID NO: 1389147 - RNA, 22 nt, Human
uucuugccucugugcugugugu

SEQ ID NO: 1389148 - RNA, 17 nt, Human
uucuugccucugugcug

SEQ ID NO: 1389149 - RNA, 16 nt, Human
uucuugccucugugcu

SEQ ID NO: 1389150 - RNA, 15 nt, Human
uucuugccucugugc

SEQ ID NO: 1389151 - RNA, 12 nt, Human
uucuugccucau

SEQ ID NO: 1389152 - RNA, 15 nt, Human
uucuucuagaguuca

SEQ ID NO: 1389153 - RNA, 21 nt, Human
uucuucuagguucuaaaaauu

SEQ ID NO: 1389154 - RNA, 18 nt, Human
uucuucuagguucuaaaa

SEQ ID NO: 1389155 - RNA, 14 nt, Human
uucuucuagaguuc

SEQ ID NO: 1389156 - RNA, 11 nt, Human
uucuucuagag

SEQ ID NO: 1389157 - RNA, 22 nt, Human
uucuucuacaacucauacacuc

SEQ ID NO: 1389158 - RNA, 12 nt, Human
uucuuagcucaa

SEQ ID NO: 1389159 - RNA, 13 nt, Human
uucuguuugcugu

SEQ ID NO: 1389160 - RNA, 17 nt, Human
uucuguuuuauaauuuu

SEQ ID NO: 1389161 - RNA, 23 nt, Human
uucuguuucaaggcacucuagau

SEQ ID NO: 1389162 - RNA, 12 nt, Human
uucuguuucaag

SEQ ID NO: 1389163 - RNA, 16 nt, Human
uucuguuuuauaauuu

SEQ ID NO: 1389164 - RNA, 13 nt, Human
uucuguuuagaua

SEQ ID NO: 1389165 - RNA, 18 nt, Human
uucuguuuagauaauaca

SEQ ID NO: 1389166 - RNA, 19 nt, Human
uucuuaaauaagaaacuuu

SEQ ID NO: 1389167 - RNA, 18 nt, Human
uucuuaaauaagaaacuu

SEQ ID NO: 1389168 - RNA, 11 nt, Human
uucuuaaauaa

SEQ ID NO: 1389169 - RNA, 22 nt, Human
uucuuaaccagaucauugugaa

SEQ ID NO: 1389170 - RNA, 23 nt, Human
uucuuaaccagaucauugugaaa

SEQ ID NO: 1389171 - RNA, 15 nt, Human
uucuuaccuguaugu

SEQ ID NO: 1389172 - RNA, 13 nt, Human
uucuuacugcuug

SEQ ID NO: 1389173 - RNA, 13 nt, Human
uucuuagaaauuu

SEQ ID NO: 1389174 - RNA, 22 nt, Human
uucuuagaaauuuauuuccuag

SEQ ID NO: 1389175 - RNA, 14 nt, Human
uucuuacugcuugg

SEQ ID NO: 1389176 - RNA, 12 nt, Human
uucuuagaaauu

SEQ ID NO: 1389177 - RNA, 14 nt, Human
uucuuacugcuuaa

SEQ ID NO: 1389178 - RNA, 18 nt, Human
aucccagagagcccgagg

SEQ ID NO: 1389179 - RNA, 18 nt, Human
aucccacucacaacagcu

SEQ ID NO: 1389180 - RNA, 23 nt, Human
auccauggccagcagcaccugcc

SEQ ID NO: 1389181 - RNA, 21 nt, Human
auccauggccagcagcaccug

SEQ ID NO: 1389182 - RNA, 12 nt, Human
auccauggccag

SEQ ID NO: 1389183 - RNA, 12 nt, Human
auccaugccuca

SEQ ID NO: 1389184 - RNA, 22 nt, Human
auccaugaccuaguuuuccaug

SEQ ID NO: 1389185 - RNA, 21 nt, Human
auccaugaccuaguuuuccau

SEQ ID NO: 1389186 - RNA, 17 nt, Human
auccauggccagcagca

SEQ ID NO: 1389187 - RNA, 16 nt, Human
auccauggccagcagc

SEQ ID NO: 1389188 - RNA, 14 nt, Human
auccauggccagca

SEQ ID NO: 1389189 - RNA, 13 nt, Human
auccauggccagc

SEQ ID NO: 1389190 - RNA, 22 nt, Human
aucccugaggacugauuucaga

SEQ ID NO: 1389191 - RNA, 18 nt, Human
aucccugaggacugauuu

SEQ ID NO: 1389192 - RNA, 15 nt, Human
aucccugaggacuga

SEQ ID NO: 1389193 - RNA, 14 nt, Human
auccacacaugaau

SEQ ID NO: 1389194 - RNA, 22 nt, Human
auccaauggacugcauaaauaa

SEQ ID NO: 1389195 - RNA, 22 nt, Human
auccacauacccugaccuggcc

SEQ ID NO: 1389196 - RNA, 20 nt, Human
auccaugaccuaguuuucca

SEQ ID NO: 1389197 - RNA, 18 nt, Human
auccaugaccuaguuuuc

SEQ ID NO: 1389198 - RNA, 20 nt, Human
auccauccuugccaauagug

SEQ ID NO: 1389199 - RNA, 18 nt, Human
auccaucaucaugugugu

SEQ ID NO: 1389200 - RNA, 13 nt, Human
auccaguauaaga

SEQ ID NO: 1389201 - RNA, 19 nt, Human
auccagguucccucccaga

SEQ ID NO: 1389202 - RNA, 15 nt, Human
auccagguucccucc

SEQ ID NO: 1389203 - RNA, 16 nt, Human
auccaguaggauccag

SEQ ID NO: 1389204 - RNA, 15 nt, Human
auccaguaaaauaau

SEQ ID NO: 1389205 - RNA, 22 nt, Human
uucugccugccagcugcacuga

SEQ ID NO: 1389206 - RNA, 15 nt, Human
auccaaagcagacag

SEQ ID NO: 1389207 - RNA, 19 nt, Human
uucugccugccagcugcac

SEQ ID NO: 1389208 - RNA, 18 nt, Human
uucugccugccagcugca

SEQ ID NO: 1389209 - RNA, 20 nt, Human
auccaauggguuuuucccug

SEQ ID NO: 1389210 - RNA, 19 nt, Human
auccaagauauuuuaaaau

SEQ ID NO: 1389211 - RNA, 18 nt, Human
auccaagcaaaugugaau

SEQ ID NO: 1389212 - RNA, 20 nt, Human
auccaacuaaugccuuacuc

SEQ ID NO: 1389213 - RNA, 18 nt, Human
auccaacuaaugccuuac

SEQ ID NO: 1389214 - RNA, 16 nt, Human
auccaacuaaugccuu

SEQ ID NO: 1389215 - RNA, 16 nt, Human
auccaagcaaauguga

SEQ ID NO: 1389216 - RNA, 19 nt, Human
uucucguccucguuugugu

SEQ ID NO: 1389217 - RNA, 19 nt, Human
uucucgcuguccuuucuag

SEQ ID NO: 1389218 - RNA, 18 nt, Human
uucuccuuuuccucucuc

SEQ ID NO: 1389219 - RNA, 13 nt, Human
uucuccuuuuccu

SEQ ID NO: 1389220 - RNA, 23 nt, Human
uucuccuccaugggagaaaauag

SEQ ID NO: 1389221 - RNA, 15 nt, Human
uucucucaacaccau

SEQ ID NO: 1389222 - RNA, 16 nt, Human
uucucuaucauuuaau

SEQ ID NO: 1389223 - RNA, 20 nt, Human
uucucucaacaccaugauuc

SEQ ID NO: 1389224 - RNA, 13 nt, Human
uucucuaucauuu

SEQ ID NO: 1389225 - RNA, 21 nt, Human
uucucuaguuugauuaaauuc

SEQ ID NO: 1389226 - RNA, 17 nt, Human
uucugccugccagcugc

SEQ ID NO: 1389227 - RNA, 16 nt, Human
uucugccugccagcug

SEQ ID NO: 1389228 - RNA, 23 nt, Human
uucugcauauguugaauacuuuu

SEQ ID NO: 1389229 - RNA, 22 nt, Human
uucugcauauguugaauacuuu

SEQ ID NO: 1389230 - RNA, 21 nt, Human
uucugcauauguugaauacuu

SEQ ID NO: 1389231 - RNA, 17 nt, Human
uucugcauauguugaau

SEQ ID NO: 1389232 - RNA, 22 nt, Human
uucugcaguaaaucuuuuacaa

SEQ ID NO: 1389233 - RNA, 18 nt, Human
uucugcaguaaaucuuuu

SEQ ID NO: 1389234 - RNA, 15 nt, Human
uucugcaguaaaucu

SEQ ID NO: 1389235 - RNA, 18 nt, Human
uucugaaugcuucuaagu

SEQ ID NO: 1389236 - RNA, 23 nt, Human
uucugaaugcuucuaaguaaaua

SEQ ID NO: 1389237 - RNA, 15 nt, Human
uucugaaugcuucua

SEQ ID NO: 1389238 - RNA, 14 nt, Human
uucugaauaaagca

SEQ ID NO: 1389239 - RNA, 15 nt, Human
uucugaauaaagcaa

SEQ ID NO: 1389240 - RNA, 16 nt, Human
uucugaauaaagcaau

SEQ ID NO: 1389241 - RNA, 17 nt, Human
uucugaauaaagcaauu

SEQ ID NO: 1389242 - RNA, 13 nt, Human
uucuccucccagg

SEQ ID NO: 1389243 - RNA, 18 nt, Human
uucuccucacuguaucca

SEQ ID NO: 1389244 - RNA, 14 nt, Human
uucuccuauguuug

SEQ ID NO: 1389245 - RNA, 22 nt, Human
uucuccguuagcuccuguggcc

SEQ ID NO: 1389246 - RNA, 20 nt, Human
uucuccguuagcuccugugg

SEQ ID NO: 1389247 - RNA, 19 nt, Human
uucuccguuagcuccugug

SEQ ID NO: 1389248 - RNA, 18 nt, Human
uucuccguuagcuccugu

SEQ ID NO: 1389249 - RNA, 17 nt, Human
uucuccguuagcuccug

SEQ ID NO: 1389250 - RNA, 16 nt, Human
uucuccguuagcuccu

SEQ ID NO: 1389251 - RNA, 10 nt, Human
uucucccugu

SEQ ID NO: 1389252 - RNA, 21 nt, Human
uucuccccugcacuguaaaau

SEQ ID NO: 1389253 - RNA, 13 nt, Human
aucauuguaugug

SEQ ID NO: 1389254 - RNA, 24 nt, Human
aucauucucugucucauccaucau

SEQ ID NO: 1389255 - RNA, 13 nt, Human
aucauugugaaau

SEQ ID NO: 1389256 - RNA, 15 nt, Human
aucauugugaaauua

SEQ ID NO: 1389257 - RNA, 20 nt, Human
uucuccccugcacuguaaaa

SEQ ID NO: 1389258 - RNA, 19 nt, Human
uucuccccugcacuguaaa

SEQ ID NO: 1389259 - RNA, 18 nt, Human
uucuccccugcacuguaa

SEQ ID NO: 1389260 - RNA, 19 nt, Human
aucauugugaaauuauuca

SEQ ID NO: 1389261 - RNA, 21 nt, Human
aucauucucugucucauccau

SEQ ID NO: 1389262 - RNA, 16 nt, Human
aucauucucugucuca

SEQ ID NO: 1389263 - RNA, 14 nt, Human
aucauucucugucu

SEQ ID NO: 1389264 - RNA, 12 nt, Human
aucauucucugu

SEQ ID NO: 1389265 - RNA, 13 nt, Human
aucauuacuauaa

SEQ ID NO: 1389266 - RNA, 16 nt, Human
aucauuaggugugacu

SEQ ID NO: 1389267 - RNA, 16 nt, Human
aucauccacacaugaa

SEQ ID NO: 1389268 - RNA, 14 nt, Human
aucauccacacaug

SEQ ID NO: 1389269 - RNA, 13 nt, Human
aucauccacacau

SEQ ID NO: 1389270 - RNA, 14 nt, Human
aucaucauggccag

SEQ ID NO: 1389271 - RNA, 13 nt, Human
aucaucauggcca

SEQ ID NO: 1389272 - RNA, 18 nt, Human
aucaucauguguguccac

SEQ ID NO: 1389273 - RNA, 16 nt, Human
aucaucaguguagaac

SEQ ID NO: 1389274 - RNA, 15 nt, Human
aucaucaguguagaa

SEQ ID NO: 1389275 - RNA, 20 nt, Human
aucauauauauacauacaug

SEQ ID NO: 1389276 - RNA, 20 nt, Human
aucauauaauaaauguacau

SEQ ID NO: 1389277 - RNA, 16 nt, Human
aucauauaauaaaugu

SEQ ID NO: 1389278 - RNA, 21 nt, Human
aucaguuuuuucaccuggaag

SEQ ID NO: 1389279 - RNA, 20 nt, Human
aucaguuuaaaagcacgaca

SEQ ID NO: 1389280 - RNA, 22 nt, Human
aucaguuuaaaagcacgacagu

SEQ ID NO: 1389281 - RNA, 16 nt, Human
aucaguuuaaaagcac

SEQ ID NO: 1389282 - RNA, 21 nt, Human
aucaguucauuagaaauauuu

SEQ ID NO: 1389283 - RNA, 19 nt, Human
aucaguucauuagaaauau

SEQ ID NO: 1389284 - RNA, 18 nt, Human
aucaguucauuagaaaua

SEQ ID NO: 1389285 - RNA, 15 nt, Human
aucagugcucccuca

SEQ ID NO: 1389286 - RNA, 16 nt, Human
aucagucucagaaugu

SEQ ID NO: 1389287 - RNA, 17 nt, Human
aucaguucauuagaaau

SEQ ID NO: 1389288 - RNA, 12 nt, Human
aucaguuaacua

SEQ ID NO: 1389289 - RNA, 22 nt, Human
aucaguuaagaaauuucacaua

SEQ ID NO: 1389290 - RNA, 18 nt, Human
aucaguuaagaaauuuca

SEQ ID NO: 1389291 - RNA, 18 nt, Human
aucaguuaacuauugcau

SEQ ID NO: 1389292 - RNA, 23 nt, Human
aucacuuaacggaccaaagcaag

SEQ ID NO: 1389293 - RNA, 17 nt, Human
aucacuuaaacuugcau

SEQ ID NO: 1389294 - RNA, 20 nt, Human
aucacuuaggaaauggcuuu

SEQ ID NO: 1389295 - RNA, 14 nt, Human
aucacuuaaacuug

SEQ ID NO: 1389296 - RNA, 21 nt, Human
aucacucuguucauuccucca

SEQ ID NO: 1389297 - RNA, 22 nt, Human
aucacucuguucauuccuccag

SEQ ID NO: 1389298 - RNA, 23 nt, Human
aucacucuguucauuccuccagg

SEQ ID NO: 1389299 - RNA, 14 nt, Human
aucacugaacuuug

SEQ ID NO: 1389300 - RNA, 21 nt, Human
aucacugaacuuugcugagcc

SEQ ID NO: 1389301 - RNA, 15 nt, Human
aucaacuugcuuauc

SEQ ID NO: 1389302 - RNA, 21 nt, Human
aucaacuuaccaggcaccaaa

SEQ ID NO: 1389303 - RNA, 14 nt, Human
aucaacugaaugag

SEQ ID NO: 1389304 - RNA, 13 nt, Human
aucaacugaauga

SEQ ID NO: 1389305 - RNA, 11 nt, Human
aucaacugaau

SEQ ID NO: 1389306 - RNA, 20 nt, Human
uuccuuacuuuuuauauaua

SEQ ID NO: 1389307 - RNA, 13 nt, Human
uuccuuaccuuuu

SEQ ID NO: 1389308 - RNA, 23 nt, Human
uuccuguuuuucacauuuuccuu

SEQ ID NO: 1389309 - RNA, 19 nt, Human
uuccuguuuuucacauuuu

SEQ ID NO: 1389310 - RNA, 20 nt, Human
uuccuuaagucagaacagca

SEQ ID NO: 1389311 - RNA, 19 nt, Human
uuccuuaagucagaacagc

SEQ ID NO: 1389312 - RNA, 18 nt, Human
uuccuuacagaacuacuu

SEQ ID NO: 1389313 - RNA, 12 nt, Human
aucacucaccau

SEQ ID NO: 1389314 - RNA, 13 nt, Human
aucacgcuuuccu

SEQ ID NO: 1389315 - RNA, 20 nt, Human
aucacucuaauuaauuguaa

SEQ ID NO: 1389316 - RNA, 19 nt, Human
aucacucuguucauuccuc

SEQ ID NO: 1389317 - RNA, 17 nt, Human
aucaauuauaguuucug

SEQ ID NO: 1389318 - RNA, 16 nt, Human
aucaauuauaguuucu

SEQ ID NO: 1389319 - RNA, 19 nt, Human
aucaauguuucuucuaggu

SEQ ID NO: 1389320 - RNA, 18 nt, Human
aucaauuauaguuucuga

SEQ ID NO: 1389321 - RNA, 17 nt, Human
aucaaguaauacaaacu

SEQ ID NO: 1389322 - RNA, 16 nt, Human
aucaaguaauacaaac

SEQ ID NO: 1389323 - RNA, 15 nt, Human
aucaaguaauacaaa

SEQ ID NO: 1389324 - RNA, 14 nt, Human
aucaaguaauacaa

SEQ ID NO: 1389325 - RNA, 15 nt, Human
aucaaggucguuuuu

SEQ ID NO: 1389326 - RNA, 14 nt, Human
aucaaggucguuuu

SEQ ID NO: 1389327 - RNA, 16 nt, Human
aucaagggucaggccu

SEQ ID NO: 1389328 - RNA, 17 nt, Human
aucaagggucaggccuu

SEQ ID NO: 1389329 - RNA, 15 nt, Human
aucaagggucaggcc

SEQ ID NO: 1389330 - RNA, 21 nt, Human
aucaaggguacacugccuucu

SEQ ID NO: 1389331 - RNA, 21 nt, Human
uuccugggaaauauucccuag

SEQ ID NO: 1389332 - RNA, 17 nt, Human
uuccugggaaauauucc

SEQ ID NO: 1389333 - RNA, 18 nt, Human
uuccugaaacaacuugga

SEQ ID NO: 1389334 - RNA, 19 nt, Human
uuccucuuuuccuucccaa

SEQ ID NO: 1389335 - RNA, 12 nt, Human
uuccugaacagg

SEQ ID NO: 1389336 - RNA, 21 nt, Human
uuccucucgcggcccucagua

SEQ ID NO: 1389337 - RNA, 20 nt, Human
uuccucucgcggcccucagu

SEQ ID NO: 1389338 - RNA, 16 nt, Human
uuccucucgcggcccu

SEQ ID NO: 1389339 - RNA, 21 nt, Human
uuccuaaauuuuccuguccuc

SEQ ID NO: 1389340 - RNA, 20 nt, Human
uuccuaaauuuuccuguccu

SEQ ID NO: 1389341 - RNA, 18 nt, Human
uuccuaaauuuuccuguc

SEQ ID NO: 1389342 - RNA, 12 nt, Human
uuccuaaauuuu

SEQ ID NO: 1389343 - RNA, 16 nt, Human
uuccuaaauauuauga

SEQ ID NO: 1389344 - RNA, 18 nt, Human
uuccuaaauauuaugaga

SEQ ID NO: 1389345 - RNA, 21 nt, Human
uuccuaaauauauuuuaagac

SEQ ID NO: 1389346 - RNA, 20 nt, Human
uucccgcagugggagcaaac

SEQ ID NO: 1389347 - RNA, 17 nt, Human
auauuugaaucuugucu

SEQ ID NO: 1389348 - RNA, 18 nt, Human
auauuugaaucuugucuc

SEQ ID NO: 1389349 - RNA, 19 nt, Human
auauuugaaucuugucuca

SEQ ID NO: 1389350 - RNA, 21 nt, Human
auauuugaaucuugucucaau

SEQ ID NO: 1389351 - RNA, 17 nt, Human
uucccguuucuccaccu

SEQ ID NO: 1389352 - RNA, 15 nt, Human
uucccguuucuccac

SEQ ID NO: 1389353 - RNA, 14 nt, Human
uucccguuucucca

SEQ ID NO: 1389354 - RNA, 16 nt, Human
uucccuaaucuauggu

SEQ ID NO: 1389355 - RNA, 17 nt, Human
uucccuacccucuagag

SEQ ID NO: 1389356 - RNA, 16 nt, Human
uucccuacccucuaga

SEQ ID NO: 1389357 - RNA, 14 nt, Human
uucccuacccucua

SEQ ID NO: 1389358 - RNA, 20 nt, Human
uucccuacccucuagagaaa

SEQ ID NO: 1389359 - RNA, 19 nt, Human
uuccgcuuggagcagaggg

SEQ ID NO: 1389360 - RNA, 13 nt, Human
uuccgcuuggagc

SEQ ID NO: 1389361 - RNA, 18 nt, Human
uuccgccacuggggcuca

SEQ ID NO: 1389362 - RNA, 15 nt, Human
uuccgccacuggggc

SEQ ID NO: 1389363 - RNA, 17 nt, Human
uucccuacugaagcccu

SEQ ID NO: 1389364 - RNA, 15 nt, Human
uucccuuuuuuuaag

SEQ ID NO: 1389365 - RNA, 20 nt, Human
uucccaggacccugaagggg

SEQ ID NO: 1389366 - RNA, 19 nt, Human
uucccaggacccugaaggg

SEQ ID NO: 1389367 - RNA, 13 nt, Human
uucccaggacccu

SEQ ID NO: 1389368 - RNA, 12 nt, Human
uucccaggaccc

SEQ ID NO: 1389369 - RNA, 11 nt, Human
uucccaggacc

SEQ ID NO: 1389370 - RNA, 20 nt, Human
uuccagucuuccugacacuu

SEQ ID NO: 1389371 - RNA, 18 nt, Human
uucccagcucuacccugc

SEQ ID NO: 1389372 - RNA, 17 nt, Human
uuccagucuuccugaca

SEQ ID NO: 1389373 - RNA, 16 nt, Human
uucccaguuggagcuc

SEQ ID NO: 1389374 - RNA, 15 nt, Human
uucccaguuggagcu

SEQ ID NO: 1389375 - RNA, 15 nt, Human
uucccagucugucga

SEQ ID NO: 1389376 - RNA, 16 nt, Human
uucccaggugcuacac

SEQ ID NO: 1389377 - RNA, 12 nt, Human
uucccaggugcu

SEQ ID NO: 1389378 - RNA, 21 nt, Human
uucccagguaggccaaggugu

SEQ ID NO: 1389379 - RNA, 19 nt, Human
uucccaggcccacugugcc

SEQ ID NO: 1389380 - RNA, 22 nt, Human
uucccaggcccacugugccuca

SEQ ID NO: 1389381 - RNA, 12 nt, Human
uucccaggccca

SEQ ID NO: 1389382 - RNA, 18 nt, Human
uucccaguuggagcucca

SEQ ID NO: 1389383 - RNA, 14 nt, Human
auauguugaauacu

SEQ ID NO: 1389384 - RNA, 16 nt, Human
auauguucugacauaa

SEQ ID NO: 1389385 - RNA, 21 nt, Human
auauguuguaauauuucuuca

SEQ ID NO: 1389386 - RNA, 16 nt, Human
auauguuguaauauuu

SEQ ID NO: 1389387 - RNA, 18 nt, Human
auauguugaauacuuuuu

SEQ ID NO: 1389388 - RNA, 17 nt, Human
auauguugaauacuuuu

SEQ ID NO: 1389389 - RNA, 16 nt, Human
auauguugaauacuuu

SEQ ID NO: 1389390 - RNA, 15 nt, Human
auauguugaauacuu

SEQ ID NO: 1389391 - RNA, 13 nt, Human
auauuacaaugau

SEQ ID NO: 1389392 - RNA, 15 nt, Human
auauuacaaugauca

SEQ ID NO: 1389393 - RNA, 16 nt, Human
auauuacaaugaucac

SEQ ID NO: 1389394 - RNA, 17 nt, Human
auauuaccacagacaua

SEQ ID NO: 1389395 - RNA, 12 nt, Human
auauuacaauga

SEQ ID NO: 1389396 - RNA, 19 nt, Human
auauugugauucugccuuu

SEQ ID NO: 1389397 - RNA, 17 nt, Human
auauugugauucugccu

SEQ ID NO: 1389398 - RNA, 14 nt, Human
auauugugauucug

SEQ ID NO: 1389399 - RNA, 19 nt, Human
auauuguggguguuaauuu

SEQ ID NO: 1389400 - RNA, 14 nt, Human
auauuguuugcuaa

SEQ ID NO: 1389401 - RNA, 13 nt, Human
auauuuacaaaug

SEQ ID NO: 1389402 - RNA, 19 nt, Human
auauuuaacucucuuuaug

SEQ ID NO: 1389403 - RNA, 21 nt, Human
auauuuaaauguaaagacaaa

SEQ ID NO: 1389404 - RNA, 19 nt, Human
auauuuaaauguaaagaca

SEQ ID NO: 1389405 - RNA, 19 nt, Human
auauuguuuuacaauaguu

SEQ ID NO: 1389406 - RNA, 12 nt, Human
auauuguaaaua

SEQ ID NO: 1389407 - RNA, 17 nt, Human
auauuguaaaacaggua

SEQ ID NO: 1389408 - RNA, 16 nt, Human
auauuguaaaacaggu

SEQ ID NO: 1389409 - RNA, 17 nt, Human
auauuggccaaggaaag

SEQ ID NO: 1389410 - RNA, 21 nt, Human
auauuggccaaggaaaggcac

SEQ ID NO: 1389411 - RNA, 19 nt, Human
auauuggacaaagaaccuu

SEQ ID NO: 1389412 - RNA, 12 nt, Human
auauuggaacuu

SEQ ID NO: 1389413 - RNA, 18 nt, Human
auauugauaagaucuuuu

SEQ ID NO: 1389414 - RNA, 17 nt, Human
auauugagucaaauggu

SEQ ID NO: 1389415 - RNA, 19 nt, Human
auauugauaagaucuuuua

SEQ ID NO: 1389416 - RNA, 16 nt, Human
auauugacuuguauau

SEQ ID NO: 1389417 - RNA, 15 nt, Human
auauugacuuguaua

SEQ ID NO: 1389418 - RNA, 14 nt, Human
auauugacuuguau

SEQ ID NO: 1389419 - RNA, 21 nt, Human
auauucucacagcuccaagaa

SEQ ID NO: 1389420 - RNA, 15 nt, Human
auauuacacuacaca

SEQ ID NO: 1389421 - RNA, 19 nt, Human
auauuaccacagacauacu

SEQ ID NO: 1389422 - RNA, 22 nt, Human
auauucuauuacauuuucagug

SEQ ID NO: 1389423 - RNA, 23 nt, Human
auauucuaagacuuacucuaaga

SEQ ID NO: 1389424 - RNA, 14 nt, Human
auauucuaagacuu

SEQ ID NO: 1389425 - RNA, 13 nt, Human
auauucuaagacu

SEQ ID NO: 1389426 - RNA, 18 nt, Human
auauucucacagcuccaa

SEQ ID NO: 1389427 - RNA, 22 nt, Human
uuccaggcuucugcuggggccu

SEQ ID NO: 1389428 - RNA, 20 nt, Human
uuccaggcuucugcuggggc

SEQ ID NO: 1389429 - RNA, 18 nt, Human
uuccaggcuucugcuggg

SEQ ID NO: 1389430 - RNA, 17 nt, Human
uuccaggcuucugcugg

SEQ ID NO: 1389431 - RNA, 16 nt, Human
uuccaggcuucugcug

SEQ ID NO: 1389432 - RNA, 15 nt, Human
uuccaggcuucugcu

SEQ ID NO: 1389433 - RNA, 14 nt, Human
uuccaggcuucugc

SEQ ID NO: 1389434 - RNA, 19 nt, Human
uuccacguacugcagccuc

SEQ ID NO: 1389435 - RNA, 24 nt, Human
uuccacggagccacuccucugacu

SEQ ID NO: 1389436 - RNA, 21 nt, Human
uuccaccacagccagcaccug

SEQ ID NO: 1389437 - RNA, 16 nt, Human
uuccaccacagccagc

SEQ ID NO: 1389438 - RNA, 15 nt, Human
uuccaccacagccag

SEQ ID NO: 1389439 - RNA, 18 nt, Human
uuccacagggucccacag

SEQ ID NO: 1389440 - RNA, 22 nt, Human
uuccacagggucccacagccac

SEQ ID NO: 1389441 - RNA, 17 nt, Human
uuccacagggucccaca

SEQ ID NO: 1389442 - RNA, 21 nt, Human
uuccacagccugcaagucagu

SEQ ID NO: 1389443 - RNA, 22 nt, Human
uuccacagaggacacagagaag

SEQ ID NO: 1389444 - RNA, 14 nt, Human
uuccacagaggaca

SEQ ID NO: 1389445 - RNA, 22 nt, Human
uuccacggagccacuccucuga

SEQ ID NO: 1389446 - RNA, 21 nt, Human
uuccacggagccacuccucug

SEQ ID NO: 1389447 - RNA, 15 nt, Human
uuccacggagccacu

SEQ ID NO: 1389448 - RNA, 17 nt, Human
uuccaccaaaugugcuu

SEQ ID NO: 1389449 - RNA, 22 nt, Human
uuccaccacagccagcaccugg

SEQ ID NO: 1389450 - RNA, 21 nt, Human
uuccaagacaugucuguucua

SEQ ID NO: 1389451 - RNA, 16 nt, Human
uuccaagacaugucug

SEQ ID NO: 1389452 - RNA, 22 nt, Human
uuccaacuuggcugcaggaauc

SEQ ID NO: 1389453 - RNA, 17 nt, Human
uuccaacuuggcugcag

SEQ ID NO: 1389454 - RNA, 19 nt, Human
uuccaacucguauagcaug

SEQ ID NO: 1389455 - RNA, 18 nt, Human
uuccaacuacuaauagaa

SEQ ID NO: 1389456 - RNA, 22 nt, Human
uuccaacucguauagcaugcau

SEQ ID NO: 1389457 - RNA, 18 nt, Human
uucauugaguugguuacu

SEQ ID NO: 1389458 - RNA, 21 nt, Human
uucauugccuuaacuggagcc

SEQ ID NO: 1389459 - RNA, 19 nt, Human
uucauugcacuuugauuag

SEQ ID NO: 1389460 - RNA, 21 nt, Human
uuccaauuuucuggaauacau

SEQ ID NO: 1389461 - RNA, 17 nt, Human
uuccaaugucuggagac

SEQ ID NO: 1389462 - RNA, 16 nt, Human
uuccaaugucuggaga

SEQ ID NO: 1389463 - RNA, 22 nt, Human
uuccaagacucuagaguccaag

SEQ ID NO: 1389464 - RNA, 21 nt, Human
uuccaagacucuagaguccaa

SEQ ID NO: 1389465 - RNA, 18 nt, Human
uuccaaugucuggagacc

SEQ ID NO: 1389466 - RNA, 17 nt, Human
uuccaagacucuagagu

SEQ ID NO: 1389467 - RNA, 16 nt, Human
uuccaagacucuagag

SEQ ID NO: 1389468 - RNA, 15 nt, Human
uuccaagacucuaga

SEQ ID NO: 1389469 - RNA, 15 nt, Human
uucauuagucauguu

SEQ ID NO: 1389470 - RNA, 16 nt, Human
uucauuagucauguuu

SEQ ID NO: 1389471 - RNA, 20 nt, Human
uucauuagaaauauuuuaaa

SEQ ID NO: 1389472 - RNA, 13 nt, Human
uucauuaaauaaa

SEQ ID NO: 1389473 - RNA, 16 nt, Human
uucauuaauucuauaa

SEQ ID NO: 1389474 - RNA, 22 nt, Human
uucauugaguugguuacuucau

SEQ ID NO: 1389475 - RNA, 19 nt, Human
auauggggaugguaguuuu

SEQ ID NO: 1389476 - RNA, 20 nt, Human
auauggggaugguaguuuuu

SEQ ID NO: 1389477 - RNA, 21 nt, Human
auauguacccucugaaauaca

SEQ ID NO: 1389478 - RNA, 22 nt, Human
uucaugcuguucaugaaagauu

SEQ ID NO: 1389479 - RNA, 22 nt, Human
auauguguaugcacaguaaaaa

SEQ ID NO: 1389480 - RNA, 20 nt, Human
auauguacccucugaaauac

SEQ ID NO: 1389481 - RNA, 16 nt, Human
uucauuaacaaaaugu

SEQ ID NO: 1389482 - RNA, 14 nt, Human
uucauuaaauaaau

SEQ ID NO: 1389483 - RNA, 12 nt, Human
uucauuaaauaa

SEQ ID NO: 1389484 - RNA, 22 nt, Human
auaugacuguuuuucggacagu

SEQ ID NO: 1389485 - RNA, 21 nt, Human
auaugacuguuuuucggacag

SEQ ID NO: 1389486 - RNA, 23 nt, Human
auauggccacaguagucuugaug

SEQ ID NO: 1389487 - RNA, 16 nt, Human
auaugaagacauaaac

SEQ ID NO: 1389488 - RNA, 15 nt, Human
auaugaagacauaaa

SEQ ID NO: 1389489 - RNA, 14 nt, Human
auaugaagacauaa

SEQ ID NO: 1389490 - RNA, 19 nt, Human
auaugaacauauuguugaa

SEQ ID NO: 1389491 - RNA, 20 nt, Human
auaugaacauauuguugaaa

SEQ ID NO: 1389492 - RNA, 15 nt, Human
auaugaacauauugu

SEQ ID NO: 1389493 - RNA, 15 nt, Human
auauauuuucuguuu

SEQ ID NO: 1389494 - RNA, 18 nt, Human
auauauuuuacaauuuuu

SEQ ID NO: 1389495 - RNA, 17 nt, Human
auaugaaagcugauuuu

SEQ ID NO: 1389496 - RNA, 16 nt, Human
auauauuuuguuuaca

SEQ ID NO: 1389497 - RNA, 13 nt, Human
uucagguuuuucc

SEQ ID NO: 1389498 - RNA, 16 nt, Human
uucagguuuuuccuuu

SEQ ID NO: 1389499 - RNA, 14 nt, Human
uucagguccaggcu

SEQ ID NO: 1389500 - RNA, 17 nt, Human
uucauaguucagaauuu

SEQ ID NO: 1389501 - RNA, 16 nt, Human
uucauaguucagaauu

SEQ ID NO: 1389502 - RNA, 14 nt, Human
uucauaguucagaa

SEQ ID NO: 1389503 - RNA, 17 nt, Human
uucauaguaacuucuua

SEQ ID NO: 1389504 - RNA, 22 nt, Human
uucauaggucugaaauuuuucu

SEQ ID NO: 1389505 - RNA, 17 nt, Human
uucauaggucugaaauu

SEQ ID NO: 1389506 - RNA, 15 nt, Human
uucauaggucugaaa

SEQ ID NO: 1389507 - RNA, 13 nt, Human
uucauaggucuga

SEQ ID NO: 1389508 - RNA, 18 nt, Human
uucagucucuauaccaau

SEQ ID NO: 1389509 - RNA, 21 nt, Human
uucagucucuauaccaauaaa

SEQ ID NO: 1389510 - RNA, 22 nt, Human
uucagucucuauaccaauaaag

SEQ ID NO: 1389511 - RNA, 23 nt, Human
uucagucucuauaccaauaaagu

SEQ ID NO: 1389512 - RNA, 24 nt, Human
uucagucucuauaccaauaaagug

SEQ ID NO: 1389513 - RNA, 15 nt, Human
uucauaucauccaca

SEQ ID NO: 1389514 - RNA, 21 nt, Human
uucauauaguuagcuaauaaa

SEQ ID NO: 1389515 - RNA, 21 nt, Human
uucauauaugaggacuugugu

SEQ ID NO: 1389516 - RNA, 18 nt, Human
uucauauaugaggacuug

SEQ ID NO: 1389517 - RNA, 16 nt, Human
uucauauaaaguauca

SEQ ID NO: 1389518 - RNA, 14 nt, Human
uucauauaaaguau

SEQ ID NO: 1389519 - RNA, 20 nt, Human
uucauaguucagaauuuagu

SEQ ID NO: 1389520 - RNA, 19 nt, Human
uucauaguucagaauuuag

SEQ ID NO: 1389521 - RNA, 22 nt, Human
uucauauuuuaaacagaggaua

SEQ ID NO: 1389522 - RNA, 21 nt, Human
uucauauuuuucauagcuaaa

SEQ ID NO: 1389523 - RNA, 16 nt, Human
auauauuuuacaauuu

SEQ ID NO: 1389524 - RNA, 21 nt, Human
auauauggggaugguaguuuu

SEQ ID NO: 1389525 - RNA, 22 nt, Human
auauauggggaugguaguuuuu

SEQ ID NO: 1389526 - RNA, 20 nt, Human
auauauggggaugguaguuu

SEQ ID NO: 1389527 - RNA, 13 nt, Human
auauaugcuaagu

SEQ ID NO: 1389528 - RNA, 11 nt, Human
uucagcauuug

SEQ ID NO: 1389529 - RNA, 10 nt, Human
uucagccaag

SEQ ID NO: 1389530 - RNA, 12 nt, Human
uucagcaugcaa

SEQ ID NO: 1389531 - RNA, 20 nt, Human
uucagcuaagcuaggaauga

SEQ ID NO: 1389532 - RNA, 14 nt, Human
uucagcuaagcuag

SEQ ID NO: 1389533 - RNA, 17 nt, Human
uucagcgguuuauauaa

SEQ ID NO: 1389534 - RNA, 21 nt, Human
uucagcacugucccuugccuc

SEQ ID NO: 1389535 - RNA, 16 nt, Human
uucagcacugucccuu

SEQ ID NO: 1389536 - RNA, 15 nt, Human
uucagcacugucccu

SEQ ID NO: 1389537 - RNA, 14 nt, Human
uucagcacuguccc

SEQ ID NO: 1389538 - RNA, 12 nt, Human
uucagauuuggc

SEQ ID NO: 1389539 - RNA, 19 nt, Human
uucagcauccgcaggugcu

SEQ ID NO: 1389540 - RNA, 23 nt, Human
uucagcauccgcaggugcugguc

SEQ ID NO: 1389541 - RNA, 20 nt, Human
uucagcacugucccuugccu

SEQ ID NO: 1389542 - RNA, 22 nt, Human
uucagcacuuuagaauaugccu

SEQ ID NO: 1389543 - RNA, 23 nt, Human
uucagcacuuuagaauaugccuu

SEQ ID NO: 1389544 - RNA, 19 nt, Human
uucacuucauaauccagua

SEQ ID NO: 1389545 - RNA, 18 nt, Human
uuaucauucaaguguaaa

SEQ ID NO: 1389546 - RNA, 23 nt, Human
uucagaaccccaacuacuguguu

SEQ ID NO: 1389547 - RNA, 22 nt, Human
uucagaaccccaacuacugugu

SEQ ID NO: 1389548 - RNA, 20 nt, Human
uucacuuuugacaaaggcaa

SEQ ID NO: 1389549 - RNA, 17 nt, Human
uucacuuuugacaaagg

SEQ ID NO: 1389550 - RNA, 16 nt, Human
uucagaaauguguuau

SEQ ID NO: 1389551 - RNA, 22 nt, Human
uucagauucccagagcaaaaua

SEQ ID NO: 1389552 - RNA, 21 nt, Human
uucagauucccagagcaaaau

SEQ ID NO: 1389553 - RNA, 14 nt, Human
uucagauucccaga

SEQ ID NO: 1389554 - RNA, 22 nt, Human
uucagauaucuuggacaaauca

SEQ ID NO: 1389555 - RNA, 19 nt, Human
uucagauaugauucaaaug

SEQ ID NO: 1389556 - RNA, 12 nt, Human
uucagaagaaaa

SEQ ID NO: 1389557 - RNA, 14 nt, Human
uucagaagaaaaag

SEQ ID NO: 1389558 - RNA, 18 nt, Human
uucagauaugauucaaau

SEQ ID NO: 1389559 - RNA, 17 nt, Human
uucagauaugauucaaa

SEQ ID NO: 1389560 - RNA, 16 nt, Human
uucagauaugauucaa

SEQ ID NO: 1389561 - RNA, 20 nt, Human
uuuccuucccuuuucuguuc

SEQ ID NO: 1389562 - RNA, 19 nt, Human
uuuccuucccuuuucuguu

SEQ ID NO: 1389563 - RNA, 18 nt, Human
uuuccuucccuuuucugu

SEQ ID NO: 1389564 - RNA, 14 nt, Human
uuuccuucccuuuu

SEQ ID NO: 1389565 - RNA, 12 nt, Human
uuuccuuccaau

SEQ ID NO: 1389566 - RNA, 21 nt, Human
uuuccuuccaaugucuggaga

SEQ ID NO: 1389567 - RNA, 18 nt, Human
uuuccuucaaaguuuaau

SEQ ID NO: 1389568 - RNA, 21 nt, Human
uuuccuguccucuuucagcuc

SEQ ID NO: 1389569 - RNA, 20 nt, Human
uuuccuguccucuuucagcu

SEQ ID NO: 1389570 - RNA, 21 nt, Human
uuuccuuuaacugacaagcca

SEQ ID NO: 1389571 - RNA, 14 nt, Human
uuucgaaaaucaaa

SEQ ID NO: 1389572 - RNA, 17 nt, Human
uuuccuuuuuuguuauu

SEQ ID NO: 1389573 - RNA, 16 nt, Human
uuuccuuuuuuguuau

SEQ ID NO: 1389574 - RNA, 22 nt, Human
uuuccuuuuuaauaugcuuaaa

SEQ ID NO: 1389575 - RNA, 19 nt, Human
uuuccuuuuuaauaugcuu

SEQ ID NO: 1389576 - RNA, 13 nt, Human
uuuccuuuuuaau

SEQ ID NO: 1389577 - RNA, 21 nt, Human
uuucuaaaaucuuauaguucu

SEQ ID NO: 1389578 - RNA, 12 nt, Human
uuucuaaaaucu

SEQ ID NO: 1389579 - RNA, 12 nt, Human
uuucguuuguuu

SEQ ID NO: 1389580 - RNA, 14 nt, Human
uuucguuuguuugu

SEQ ID NO: 1389581 - RNA, 13 nt, Human
uuucguggggagg

SEQ ID NO: 1389582 - RNA, 16 nt, Human
uuucguaacacagcau

SEQ ID NO: 1389583 - RNA, 17 nt, Human
uuucggauuuuuuccaa

SEQ ID NO: 1389584 - RNA, 18 nt, Human
uuucggacaguuuauuug

SEQ ID NO: 1389585 - RNA, 13 nt, Human
augggcauggugu

SEQ ID NO: 1389586 - RNA, 20 nt, Human
augggcaucuuuuguauuaa

SEQ ID NO: 1389587 - RNA, 21 nt, Human
augggcaucuuuuguauuaag

SEQ ID NO: 1389588 - RNA, 17 nt, Human
augggcaucuuuuguau

SEQ ID NO: 1389589 - RNA, 16 nt, Human
augggcaucuuuugua

SEQ ID NO: 1389590 - RNA, 14 nt, Human
augggcccaggccu

SEQ ID NO: 1389591 - RNA, 14 nt, Human
augggcagagccca

SEQ ID NO: 1389592 - RNA, 23 nt, Human
augggagcugaggccacacucag

SEQ ID NO: 1389593 - RNA, 12 nt, Human
augggaccacaa

SEQ ID NO: 1389594 - RNA, 20 nt, Human
augggagccgggucugccuc

SEQ ID NO: 1389595 - RNA, 17 nt, Human
augggagccgggucugc

SEQ ID NO: 1389596 - RNA, 17 nt, Human
auggaauuuugcaaaga

SEQ ID NO: 1389597 - RNA, 19 nt, Human
auggaauugauuugcauug

SEQ ID NO: 1389598 - RNA, 18 nt, Human
auggaauugauuugcauu

SEQ ID NO: 1389599 - RNA, 13 nt, Human
auggccucaugug

SEQ ID NO: 1389600 - RNA, 18 nt, Human
auggaccugccugcauag

SEQ ID NO: 1389601 - RNA, 20 nt, Human
auggaccggagagugggggu

SEQ ID NO: 1389602 - RNA, 16 nt, Human
auggaccggagagugg

SEQ ID NO: 1389603 - RNA, 13 nt, Human
auggaccggagag

SEQ ID NO: 1389604 - RNA, 20 nt, Human
auggccucauguggcuggaa

SEQ ID NO: 1389605 - RNA, 19 nt, Human
auggccucauguggcugga

SEQ ID NO: 1389606 - RNA, 18 nt, Human
auggccucauguggcugg

SEQ ID NO: 1389607 - RNA, 17 nt, Human
auggccucauguggcug

SEQ ID NO: 1389608 - RNA, 18 nt, Human
auggccucuucagaucuc

SEQ ID NO: 1389609 - RNA, 21 nt, Human
augggacauuugcucauggaa

SEQ ID NO: 1389610 - RNA, 22 nt, Human
augggacauuugcucauggaau

SEQ ID NO: 1389611 - RNA, 13 nt, Human
uuucuuuaacugc

SEQ ID NO: 1389612 - RNA, 12 nt, Human
uuucuuuaacug

SEQ ID NO: 1389613 - RNA, 15 nt, Human
uuucuuuaaaaaaca

SEQ ID NO: 1389614 - RNA, 19 nt, Human
uuucuggccaguguuuaaa

SEQ ID NO: 1389615 - RNA, 11 nt, Human
uuucuggccag

SEQ ID NO: 1389616 - RNA, 23 nt, Human
uuucuggauuccccaucucaggc

SEQ ID NO: 1389617 - RNA, 15 nt, Human
uuucuggauuucaua

SEQ ID NO: 1389618 - RNA, 18 nt, Human
uuucuggaauguaaucaa

SEQ ID NO: 1389619 - RNA, 21 nt, Human
uuucuggaauacaugaaauau

SEQ ID NO: 1389620 - RNA, 20 nt, Human
uuucuggaauacaugaaaua

SEQ ID NO: 1389621 - RNA, 18 nt, Human
uuucuggaauacaugaaa

SEQ ID NO: 1389622 - RNA, 22 nt, Human
uuucugccuggaguguaugacu

SEQ ID NO: 1389623 - RNA, 14 nt, Human
uuucugccuggagu

SEQ ID NO: 1389624 - RNA, 13 nt, Human
uuucugcccugcc

SEQ ID NO: 1389625 - RNA, 15 nt, Human
uuucuuuacaaaaca

SEQ ID NO: 1389626 - RNA, 21 nt, Human
uuucuuuucccccauuaauca

SEQ ID NO: 1389627 - RNA, 9 nt, Human
uuucuuuuc

SEQ ID NO: 1389628 - RNA, 19 nt, Human
uuucuuuguuucuuucuuu

SEQ ID NO: 1389629 - RNA, 18 nt, Human
uuucuuuguuucuuucuu

SEQ ID NO: 1389630 - RNA, 15 nt, Human
uuucuuuguguagcu

SEQ ID NO: 1389631 - RNA, 23 nt, Human
uuucuuuugguaaagacuggcuu

SEQ ID NO: 1389632 - RNA, 13 nt, Human
uuucuuuucuuug

SEQ ID NO: 1389633 - RNA, 22 nt, Human
uuucuuuucuggaauguaauca

SEQ ID NO: 1389634 - RNA, 16 nt, Human
uuucuuuucucuggua

SEQ ID NO: 1389635 - RNA, 13 nt, Human
uuugaaaagcaga

SEQ ID NO: 1389636 - RNA, 16 nt, Human
uuugaaaagcagacau

SEQ ID NO: 1389637 - RNA, 18 nt, Human
uuugaaaagcagacauuu

SEQ ID NO: 1389638 - RNA, 11 nt, Human
auggggaggga

SEQ ID NO: 1389639 - RNA, 14 nt, Human
auggggaggaggag

SEQ ID NO: 1389640 - RNA, 17 nt, Human
auggggaggacaaaaug

SEQ ID NO: 1389641 - RNA, 13 nt, Human
auggggaggacaa

SEQ ID NO: 1389642 - RNA, 14 nt, Human
auggggaccagcag

SEQ ID NO: 1389643 - RNA, 16 nt, Human
uuugaaauauggucuu

SEQ ID NO: 1389644 - RNA, 16 nt, Human
uuugaaauaagcuauu

SEQ ID NO: 1389645 - RNA, 15 nt, Human
uuugaaauauugacu

SEQ ID NO: 1389646 - RNA, 14 nt, Human
uuugaaauauugac

SEQ ID NO: 1389647 - RNA, 19 nt, Human
uuugaaauaagcuauuuga

SEQ ID NO: 1389648 - RNA, 14 nt, Human
uuugaaauaagcua

SEQ ID NO: 1389649 - RNA, 12 nt, Human
uuugaaauaagc

SEQ ID NO: 1389650 - RNA, 19 nt, Human
uuugaaagucuguccuuga

SEQ ID NO: 1389651 - RNA, 17 nt, Human
uuugaaagucuguccuu

SEQ ID NO: 1389652 - RNA, 16 nt, Human
uuugaaagucuguccu

SEQ ID NO: 1389653 - RNA, 21 nt, Human
uuugaaaggagaugucuugga

SEQ ID NO: 1389654 - RNA, 21 nt, Human
uuugaaagaauagaacacagu

SEQ ID NO: 1389655 - RNA, 22 nt, Human
uuugaaaccccuguaggccuca

SEQ ID NO: 1389656 - RNA, 11 nt, Human
uuugaaaaugg

SEQ ID NO: 1389657 - RNA, 17 nt, Human
uuugaaacacuuugcau

SEQ ID NO: 1389658 - RNA, 19 nt, Human
uuugaaacacuuugcauaa

SEQ ID NO: 1389659 - RNA, 20 nt, Human
uuucucauccacauacccug

SEQ ID NO: 1389660 - RNA, 16 nt, Human
uuucucaguuuucaua

SEQ ID NO: 1389661 - RNA, 16 nt, Human
uuucucacuaaaucuu

SEQ ID NO: 1389662 - RNA, 13 nt, Human
uuucuauuuuuau

SEQ ID NO: 1389663 - RNA, 15 nt, Human
uuucuauuuuuaucu

SEQ ID NO: 1389664 - RNA, 19 nt, Human
uuucuauuucacuggagca

SEQ ID NO: 1389665 - RNA, 17 nt, Human
uuucuauuucuccucca

SEQ ID NO: 1389666 - RNA, 17 nt, Human
uuucuauuucacuggag

SEQ ID NO: 1389667 - RNA, 16 nt, Human
uuucuauuucacugga

SEQ ID NO: 1389668 - RNA, 12 nt, Human
uuucuccagcug

SEQ ID NO: 1389669 - RNA, 11 nt, Human
uuucuccagcu

SEQ ID NO: 1389670 - RNA, 15 nt, Human
uuucuccaagagcua

SEQ ID NO: 1389671 - RNA, 21 nt, Human
uuucuccaagagcuacauaau

SEQ ID NO: 1389672 - RNA, 13 nt, Human
uuucugcauaugu

SEQ ID NO: 1389673 - RNA, 17 nt, Human
uuucugcauauguugaa

SEQ ID NO: 1389674 - RNA, 12 nt, Human
uuucugcccugc

SEQ ID NO: 1389675 - RNA, 23 nt, Human
uuucuauuaaaagacucauccgu

SEQ ID NO: 1389676 - RNA, 19 nt, Human
uuucuauuaaaagacucau

SEQ ID NO: 1389677 - RNA, 18 nt, Human
uuucuauuaaaagacuca

SEQ ID NO: 1389678 - RNA, 17 nt, Human
uuucuauuaaaagacuc

SEQ ID NO: 1389679 - RNA, 16 nt, Human
uuucuauuaaaagacu

SEQ ID NO: 1389680 - RNA, 15 nt, Human
uuucuauuaaaagac

SEQ ID NO: 1389681 - RNA, 14 nt, Human
uuucuauuaaaaga

SEQ ID NO: 1389682 - RNA, 23 nt, Human
uuucuauggguguuaucaccuag

SEQ ID NO: 1389683 - RNA, 15 nt, Human
uuucuaugacacaug

SEQ ID NO: 1389684 - RNA, 21 nt, Human
uuucuaugacacaugcaaggu

SEQ ID NO: 1389685 - RNA, 20 nt, Human
uuucuaugaaauauuauguu

SEQ ID NO: 1389686 - RNA, 14 nt, Human
uuucuaugaaauau

SEQ ID NO: 1389687 - RNA, 20 nt, Human
uuucuaucguucucucuuug

SEQ ID NO: 1389688 - RNA, 19 nt, Human
uuucuaucguucucucuuu

SEQ ID NO: 1389689 - RNA, 17 nt, Human
uuucuaucguucucucu

SEQ ID NO: 1389690 - RNA, 15 nt, Human
uuucuauccucugua

SEQ ID NO: 1389691 - RNA, 22 nt, Human
uuucuauagccaaaaauagcua

SEQ ID NO: 1389692 - RNA, 13 nt, Human
uuucuaugaaaua

SEQ ID NO: 1389693 - RNA, 21 nt, Human
uuucuagguaggaaauguggu

SEQ ID NO: 1389694 - RNA, 17 nt, Human
uuucuagguaggaaaug

SEQ ID NO: 1389695 - RNA, 22 nt, Human
uuucuaggacugaauuaugaaa

SEQ ID NO: 1389696 - RNA, 20 nt, Human
uuucuaaacuggagacugug

SEQ ID NO: 1389697 - RNA, 19 nt, Human
uuucuaaacuggagacugu

SEQ ID NO: 1389698 - RNA, 17 nt, Human
uuucuaaacuggagacu

SEQ ID NO: 1389699 - RNA, 16 nt, Human
uuucuaaacuggagac

SEQ ID NO: 1389700 - RNA, 15 nt, Human
uuucuaaacuggaga

SEQ ID NO: 1389701 - RNA, 14 nt, Human
uuucuaaacuggag

SEQ ID NO: 1389702 - RNA, 17 nt, Human
uuucuaggacugaauua

SEQ ID NO: 1389703 - RNA, 21 nt, Human
uuucuaggacugaauuaugaa

SEQ ID NO: 1389704 - RNA, 13 nt, Human
uuucuaguugaaa

SEQ ID NO: 1389705 - RNA, 18 nt, Human
uuucuauagccaaaaaua

SEQ ID NO: 1389706 - RNA, 17 nt, Human
augcuuagauguuccag

SEQ ID NO: 1389707 - RNA, 23 nt, Human
augcuuacugauauauuuuacaa

SEQ ID NO: 1389708 - RNA, 22 nt, Human
augcuuacugauauauuuuaca

SEQ ID NO: 1389709 - RNA, 13 nt, Human
augcuuacugaua

SEQ ID NO: 1389710 - RNA, 22 nt, Human
augcugugagucuuugguucua

SEQ ID NO: 1389711 - RNA, 21 nt, Human
augcugugagucuuugguucu

SEQ ID NO: 1389712 - RNA, 22 nt, Human
augcugugcccuaaaguguauu

SEQ ID NO: 1389713 - RNA, 23 nt, Human
augcugugacacauggccccucc

SEQ ID NO: 1389714 - RNA, 19 nt, Human
augcugugcccuaaagugu

SEQ ID NO: 1389715 - RNA, 16 nt, Human
augcuguacccaguuu

SEQ ID NO: 1389716 - RNA, 13 nt, Human
augcuguacccag

SEQ ID NO: 1389717 - RNA, 19 nt, Human
augcuguauuuuaaaagaa

SEQ ID NO: 1389718 - RNA, 14 nt, Human
augcuguauuuuaa

SEQ ID NO: 1389719 - RNA, 23 nt, Human
augcuguacaucuauuuuggauu

SEQ ID NO: 1389720 - RNA, 14 nt, Human
augcuggugagcca

SEQ ID NO: 1389721 - RNA, 21 nt, Human
augcuggguccauaucacaca

SEQ ID NO: 1389722 - RNA, 16 nt, Human
augcugggacucagcc

SEQ ID NO: 1389723 - RNA, 15 nt, Human
augcugggacucagc

SEQ ID NO: 1389724 - RNA, 10 nt, Human
augcugggac

SEQ ID NO: 1389725 - RNA, 9 nt, Human
augcuggga

SEQ ID NO: 1389726 - RNA, 15 nt, Human
uuuauuaugaagaag

SEQ ID NO: 1389727 - RNA, 20 nt, Human
uuuauuaguauuguuguccu

SEQ ID NO: 1389728 - RNA, 13 nt, Human
uuuauuaugcaug

SEQ ID NO: 1389729 - RNA, 19 nt, Human
uuuauuacuguaagaaaau

SEQ ID NO: 1389730 - RNA, 14 nt, Human
auggaacacuucga

SEQ ID NO: 1389731 - RNA, 22 nt, Human
augcuuauuccaugacugcuug

SEQ ID NO: 1389732 - RNA, 23 nt, Human
augcuuauuccaugacugcuugc

SEQ ID NO: 1389733 - RNA, 17 nt, Human
augcuuauuccaugacu

SEQ ID NO: 1389734 - RNA, 15 nt, Human
augcuuauuccauga

SEQ ID NO: 1389735 - RNA, 21 nt, Human
augcuuagucccucaugcaaa

SEQ ID NO: 1389736 - RNA, 15 nt, Human
augcuuagucccuca

SEQ ID NO: 1389737 - RNA, 13 nt, Human
augcuuauuccau

SEQ ID NO: 1389738 - RNA, 23 nt, Human
augcuuagucccucaugcaaauc

SEQ ID NO: 1389739 - RNA, 16 nt, Human
uuuauuuuaauaaugu

SEQ ID NO: 1389740 - RNA, 14 nt, Human
uuuauuuugacaua

SEQ ID NO: 1389741 - RNA, 16 nt, Human
uuuauuuuguguuuag

SEQ ID NO: 1389742 - RNA, 22 nt, Human
uuucaccauuugauuauguagc

SEQ ID NO: 1389743 - RNA, 17 nt, Human
uuucaccagauuugcua

SEQ ID NO: 1389744 - RNA, 14 nt, Human
uuucacauuuuccu

SEQ ID NO: 1389745 - RNA, 13 nt, Human
uuucacauuuucc

SEQ ID NO: 1389746 - RNA, 17 nt, Human
uuuauuuuuuucugaau

SEQ ID NO: 1389747 - RNA, 24 nt, Human
uuucacuguagaaugauuucaugc

SEQ ID NO: 1389748 - RNA, 16 nt, Human
uuucacuggagcacaa

SEQ ID NO: 1389749 - RNA, 15 nt, Human
uuucacuggagcaca

SEQ ID NO: 1389750 - RNA, 16 nt, Human
uuucaccuagauuuuu

SEQ ID NO: 1389751 - RNA, 21 nt, Human
uuucacugucuuuaauucugu

SEQ ID NO: 1389752 - RNA, 12 nt, Human
uuucauaaagca

SEQ ID NO: 1389753 - RNA, 15 nt, Human
uuucauauaguuagc

SEQ ID NO: 1389754 - RNA, 13 nt, Human
uuucauauaaagu

SEQ ID NO: 1389755 - RNA, 14 nt, Human
uuucauagcuaaaa

SEQ ID NO: 1389756 - RNA, 15 nt, Human
uuucauagcuaaaaa

SEQ ID NO: 1389757 - RNA, 14 nt, Human
uuucauaguucaga

SEQ ID NO: 1389758 - RNA, 17 nt, Human
uuucauaggucugaaau

SEQ ID NO: 1389759 - RNA, 16 nt, Human
uuucauaggucugaaa

SEQ ID NO: 1389760 - RNA, 15 nt, Human
uuucauaguucagaa

SEQ ID NO: 1389761 - RNA, 18 nt, Human
uuucauauaaauggaauu

SEQ ID NO: 1389762 - RNA, 20 nt, Human
uuucauacauuuucuaagaa

SEQ ID NO: 1389763 - RNA, 16 nt, Human
uuucauacauuuucua

SEQ ID NO: 1389764 - RNA, 14 nt, Human
uuucauacacuuau

SEQ ID NO: 1389765 - RNA, 19 nt, Human
uuucauaaguauuucaaau

SEQ ID NO: 1389766 - RNA, 18 nt, Human
uuucauaaguauuucaaa

SEQ ID NO: 1389767 - RNA, 17 nt, Human
uuucauaaguauuucaa

SEQ ID NO: 1389768 - RNA, 14 nt, Human
uuucauaaguauuu

SEQ ID NO: 1389769 - RNA, 14 nt, Human
uuucauaaauuuga

SEQ ID NO: 1389770 - RNA, 15 nt, Human
uuucauaaaaggaga

SEQ ID NO: 1389771 - RNA, 21 nt, Human
uuucaguuuauuugaaccaau

SEQ ID NO: 1389772 - RNA, 12 nt, Human
uuucccacucca

SEQ ID NO: 1389773 - RNA, 22 nt, Human
uuucccaccccaaccugcucuc

SEQ ID NO: 1389774 - RNA, 23 nt, Human
uuucccaccccaaccugcucucc

SEQ ID NO: 1389775 - RNA, 21 nt, Human
uuucccaccccaaccugcucu

SEQ ID NO: 1389776 - RNA, 18 nt, Human
uuucccaggacccugaag

SEQ ID NO: 1389777 - RNA, 16 nt, Human
uuucccaggacccuga

SEQ ID NO: 1389778 - RNA, 14 nt, Human
uuucccaggacccu

SEQ ID NO: 1389779 - RNA, 11 nt, Human
uuucccaggac

SEQ ID NO: 1389780 - RNA, 21 nt, Human
uuucccacuguuuaaggaguu

SEQ ID NO: 1389781 - RNA, 16 nt, Human
uuucccacuccaagcc

SEQ ID NO: 1389782 - RNA, 22 nt, Human
uuucccaggcccacugugccuc

SEQ ID NO: 1389783 - RNA, 23 nt, Human
auggaauuggagcucgugggaca

SEQ ID NO: 1389784 - RNA, 20 nt, Human
uuuagcauuguagugcuuug

SEQ ID NO: 1389785 - RNA, 14 nt, Human
uuuagcauguuguu

SEQ ID NO: 1389786 - RNA, 15 nt, Human
uuuagaucucugaag

SEQ ID NO: 1389787 - RNA, 22 nt, Human
uuuagauagcccuguccuggug

SEQ ID NO: 1389788 - RNA, 23 nt, Human
uuuagauagcccuguccuggugg

SEQ ID NO: 1389789 - RNA, 20 nt, Human
uuuagauagcccuguccugg

SEQ ID NO: 1389790 - RNA, 18 nt, Human
uuuagauagcccuguccu

SEQ ID NO: 1389791 - RNA, 14 nt, Human
uuuagauagcccug

SEQ ID NO: 1389792 - RNA, 13 nt, Human
uuuagauagcccu

SEQ ID NO: 1389793 - RNA, 15 nt, Human
uuuagauaauacacc

SEQ ID NO: 1389794 - RNA, 18 nt, Human
uuuacuagggaucccuca

SEQ ID NO: 1389795 - RNA, 23 nt, Human
uuuacuagggaucccucaucugu

SEQ ID NO: 1389796 - RNA, 13 nt, Human
uuuagauaauaca

SEQ ID NO: 1389797 - RNA, 13 nt, Human
uuuaguaaaccaa

SEQ ID NO: 1389798 - RNA, 23 nt, Human
uuuagguucuuugcugcauucug

SEQ ID NO: 1389799 - RNA, 22 nt, Human
uuuagguuuuuguuuguuuccu

SEQ ID NO: 1389800 - RNA, 23 nt, Human
uuuagguucuaaaguucuaagau

SEQ ID NO: 1389801 - RNA, 18 nt, Human
uuuagguucuaaaguucu

SEQ ID NO: 1389802 - RNA, 16 nt, Human
uuuagguucuaaaguu

SEQ ID NO: 1389803 - RNA, 15 nt, Human
uuuagguucuaaagu

SEQ ID NO: 1389804 - RNA, 14 nt, Human
uuuagguucuaaag

SEQ ID NO: 1389805 - RNA, 13 nt, Human
uuuagguucuaaa

SEQ ID NO: 1389806 - RNA, 12 nt, Human
uuuagguucuaa

SEQ ID NO: 1389807 - RNA, 11 nt, Human
uuuagguucua

SEQ ID NO: 1389808 - RNA, 22 nt, Human
uuuaguaaaccaauccuaugca

SEQ ID NO: 1389809 - RNA, 11 nt, Human
uuuagcucuga

SEQ ID NO: 1389810 - RNA, 16 nt, Human
uuuagccuucucuguu

SEQ ID NO: 1389811 - RNA, 14 nt, Human
uuuagccuguccug

SEQ ID NO: 1389812 - RNA, 12 nt, Human
uuuagcauugua

SEQ ID NO: 1389813 - RNA, 15 nt, Human
uuuagguaagaaguu

SEQ ID NO: 1389814 - RNA, 14 nt, Human
uuuagcucugagaa

SEQ ID NO: 1389815 - RNA, 13 nt, Human
uuuagcucugaga

SEQ ID NO: 1389816 - RNA, 12 nt, Human
uuuagcucugag

SEQ ID NO: 1389817 - RNA, 20 nt, Human
uuuagcuggaaaaguauguu

SEQ ID NO: 1389818 - RNA, 16 nt, Human
uuuauuaaagaaaaaa

SEQ ID NO: 1389819 - RNA, 19 nt, Human
uuuauguauugugcaaugu

SEQ ID NO: 1389820 - RNA, 11 nt, Human
uuuauguauug

SEQ ID NO: 1389821 - RNA, 14 nt, Human
uuuaugugaaacau

SEQ ID NO: 1389822 - RNA, 14 nt, Human
uuuauuaaagaaaa

SEQ ID NO: 1389823 - RNA, 13 nt, Human
uuuauuaaagaaa

SEQ ID NO: 1389824 - RNA, 12 nt, Human
uuuauuaaagaa

SEQ ID NO: 1389825 - RNA, 11 nt, Human
uuuauuaaaga

SEQ ID NO: 1389826 - RNA, 19 nt, Human
uuuaugucuguggauuuuu

SEQ ID NO: 1389827 - RNA, 11 nt, Human
uuuaugucugg

SEQ ID NO: 1389828 - RNA, 15 nt, Human
uuuaugugaaacaug

SEQ ID NO: 1389829 - RNA, 17 nt, Human
uuuauauauuauaugga

SEQ ID NO: 1389830 - RNA, 15 nt, Human
uuuauaucacauguu

SEQ ID NO: 1389831 - RNA, 21 nt, Human
uuuauauauuuaaaaguguca

SEQ ID NO: 1389832 - RNA, 18 nt, Human
uuuauauauuauauggaa

SEQ ID NO: 1389833 - RNA, 15 nt, Human
uuuauauauuauaug

SEQ ID NO: 1389834 - RNA, 14 nt, Human
uuuauauauuauau

SEQ ID NO: 1389835 - RNA, 13 nt, Human
uuuauauauguau

SEQ ID NO: 1389836 - RNA, 19 nt, Human
uuuauauauauauauaaag

SEQ ID NO: 1389837 - RNA, 20 nt, Human
uuuauauauauauauaaaga

SEQ ID NO: 1389838 - RNA, 13 nt, Human
uuuauauauauau

SEQ ID NO: 1389839 - RNA, 19 nt, Human
uuuauguaguaauugacau

SEQ ID NO: 1389840 - RNA, 14 nt, Human
uuuauguaauuuca

SEQ ID NO: 1389841 - RNA, 20 nt, Human
uuuauaugcuuacugauaua

SEQ ID NO: 1389842 - RNA, 19 nt, Human
uuuauaugcuucuguuuua

SEQ ID NO: 1389843 - RNA, 21 nt, Human
uuuauaugaagaaaaucacuu

SEQ ID NO: 1389844 - RNA, 14 nt, Human
uuuauaugaagaaa

SEQ ID NO: 1389845 - RNA, 17 nt, Human
uuuauaugcuucuguuu

SEQ ID NO: 1389846 - RNA, 13 nt, Human
uuuaccuuguaua

SEQ ID NO: 1389847 - RNA, 14 nt, Human
uuuaccuuuuuuau

SEQ ID NO: 1389848 - RNA, 19 nt, Human
uuuaccuuuuuuauacaua

SEQ ID NO: 1389849 - RNA, 20 nt, Human
uuuaccuuuuuuauacauaa

SEQ ID NO: 1389850 - RNA, 17 nt, Human
augcuacacacugcaug

SEQ ID NO: 1389851 - RNA, 18 nt, Human
augcuacaggauuugaaa

SEQ ID NO: 1389852 - RNA, 18 nt, Human
augcuacacacugcaugu

SEQ ID NO: 1389853 - RNA, 18 nt, Human
uuuacgcuuugauucaua

SEQ ID NO: 1389854 - RNA, 13 nt, Human
uuuacgcuuugau

SEQ ID NO: 1389855 - RNA, 21 nt, Human
uuuaccuuuuuuauacauaaa

SEQ ID NO: 1389856 - RNA, 14 nt, Human
uuuacuaauagaca

SEQ ID NO: 1389857 - RNA, 17 nt, Human
uuuacuaauagacaauu

SEQ ID NO: 1389858 - RNA, 18 nt, Human
uuuacuaauagacaauuu

SEQ ID NO: 1389859 - RNA, 22 nt, Human
augccguggauugcacguggcc

SEQ ID NO: 1389860 - RNA, 16 nt, Human
augccucagaagugca

SEQ ID NO: 1389861 - RNA, 15 nt, Human
augccucagaagugc

SEQ ID NO: 1389862 - RNA, 21 nt, Human
augccuaugguggauccaaac

SEQ ID NO: 1389863 - RNA, 19 nt, Human
augccuaugguggauccaa

SEQ ID NO: 1389864 - RNA, 16 nt, Human
augccuaugguggauc

SEQ ID NO: 1389865 - RNA, 23 nt, Human
augccucagaagugcaucuggag

SEQ ID NO: 1389866 - RNA, 23 nt, Human
augccucagccacuugccugugc

SEQ ID NO: 1389867 - RNA, 23 nt, Human
augcgcucagggccaugcugagg

SEQ ID NO: 1389868 - RNA, 15 nt, Human
augcgcucagggcca

SEQ ID NO: 1389869 - RNA, 22 nt, Human
augcgcccccuccgcccugcca

SEQ ID NO: 1389870 - RNA, 18 nt, Human
augcgcccccuccgcccu

SEQ ID NO: 1389871 - RNA, 13 nt, Human
augcgcccccucc

SEQ ID NO: 1389872 - RNA, 16 nt, Human
augcggcccaggaugg

SEQ ID NO: 1389873 - RNA, 20 nt, Human
augcggcccaggauggcuuu

SEQ ID NO: 1389874 - RNA, 17 nt, Human
uuuaaagcguuugcaca

SEQ ID NO: 1389875 - RNA, 19 nt, Human
uuuaaagcagguucuuguu

SEQ ID NO: 1389876 - RNA, 15 nt, Human
uuuaaagcagguucu

SEQ ID NO: 1389877 - RNA, 12 nt, Human
uuuaaagaaagu

SEQ ID NO: 1389878 - RNA, 21 nt, Human
uuuaaagaaaaaaauugaaau

SEQ ID NO: 1389879 - RNA, 22 nt, Human
uuuaaagaaaaaaauugaaaug

SEQ ID NO: 1389880 - RNA, 19 nt, Human
uuuaaagaaaaaaauugaa

SEQ ID NO: 1389881 - RNA, 16 nt, Human
uuuaaagcagguucuu

SEQ ID NO: 1389882 - RNA, 16 nt, Human
uuuaaagcuuccauug

SEQ ID NO: 1389883 - RNA, 21 nt, Human
augagcauguuuagacuuuaa

SEQ ID NO: 1389884 - RNA, 14 nt, Human
augagcauguuuag

SEQ ID NO: 1389885 - RNA, 13 nt, Human
augagauugaauu

SEQ ID NO: 1389886 - RNA, 19 nt, Human
augagaugcuggcuugggc

SEQ ID NO: 1389887 - RNA, 22 nt, Human
augagaugcuggcuugggcagc

SEQ ID NO: 1389888 - RNA, 15 nt, Human
augagaugcuggcuu

SEQ ID NO: 1389889 - RNA, 14 nt, Human
augagaugcuggcu

SEQ ID NO: 1389890 - RNA, 24 nt, Human
augagaugauacauccaaagcaga

SEQ ID NO: 1389891 - RNA, 23 nt, Human
augagaugauacauccaaagcag

SEQ ID NO: 1389892 - RNA, 18 nt, Human
augagaguuuuggaugca

SEQ ID NO: 1389893 - RNA, 20 nt, Human
augagaguuuuggaugcagu

SEQ ID NO: 1389894 - RNA, 21 nt, Human
augagaguuuuggaugcagug

SEQ ID NO: 1389895 - RNA, 13 nt, Human
augagaggaggca

SEQ ID NO: 1389896 - RNA, 15 nt, Human
augagaguuuuggau

SEQ ID NO: 1389897 - RNA, 17 nt, Human
augagaguuuuggaugc

SEQ ID NO: 1389898 - RNA, 22 nt, Human
augacaugaauuuuagcuuuug

SEQ ID NO: 1389899 - RNA, 12 nt, Human
augacaugaauu

SEQ ID NO: 1389900 - RNA, 20 nt, Human
augacaucacuuguacaaaa

SEQ ID NO: 1389901 - RNA, 19 nt, Human
augacaucacuuguacaaa

SEQ ID NO: 1389902 - RNA, 18 nt, Human
augacaucacuuguacaa

SEQ ID NO: 1389903 - RNA, 14 nt, Human
augacaucacuugu

SEQ ID NO: 1389904 - RNA, 17 nt, Human
augacaguguuccccga

SEQ ID NO: 1389905 - RNA, 22 nt, Human
augacaguccgucaaaacagau

SEQ ID NO: 1389906 - RNA, 21 nt, Human
augacaguccgucaaaacaga

SEQ ID NO: 1389907 - RNA, 20 nt, Human
augacaguccgucaaaacag

SEQ ID NO: 1389908 - RNA, 22 nt, Human
augacauuaaagaaggguugag

SEQ ID NO: 1389909 - RNA, 21 nt, Human
augacaugaauuuuagcuuuu

SEQ ID NO: 1389910 - RNA, 15 nt, Human
augacaugaauuuua

SEQ ID NO: 1389911 - RNA, 14 nt, Human
uugucgcucaugug

SEQ ID NO: 1389912 - RNA, 14 nt, Human
uuguccuuuucaua

SEQ ID NO: 1389913 - RNA, 19 nt, Human
uuguccuuuugcaaagaaa

SEQ ID NO: 1389914 - RNA, 17 nt, Human
uuguccuuucccuucag

SEQ ID NO: 1389915 - RNA, 15 nt, Human
uuguccuuucccuuc

SEQ ID NO: 1389916 - RNA, 16 nt, Human
uuguccuuagccugga

SEQ ID NO: 1389917 - RNA, 16 nt, Human
uuguccgcuggguggu

SEQ ID NO: 1389918 - RNA, 15 nt, Human
uuguccuagcacaga

SEQ ID NO: 1389919 - RNA, 23 nt, Human
uuguccuagcacagauggccagc

SEQ ID NO: 1389920 - RNA, 22 nt, Human
uuguccucagccccgcguggaa

SEQ ID NO: 1389921 - RNA, 18 nt, Human
uugucccgauuguaacuc

SEQ ID NO: 1389922 - RNA, 14 nt, Human
uugucauguguaua

SEQ ID NO: 1389923 - RNA, 22 nt, Human
uugucauguguauaaaaauaaa

SEQ ID NO: 1389924 - RNA, 14 nt, Human
uugucauuagccug

SEQ ID NO: 1389925 - RNA, 15 nt, Human
uugucauuagccuga

SEQ ID NO: 1389926 - RNA, 17 nt, Human
uugucauuagccugagu

SEQ ID NO: 1389927 - RNA, 18 nt, Human
uugucauuagccugagua

SEQ ID NO: 1389928 - RNA, 19 nt, Human
uugucauuagccugaguag

SEQ ID NO: 1389929 - RNA, 20 nt, Human
uugucauuagccugaguaga

SEQ ID NO: 1389930 - RNA, 13 nt, Human
uugucauguguau

SEQ ID NO: 1389931 - RNA, 17 nt, Human
uugucaccagaucugau

SEQ ID NO: 1389932 - RNA, 16 nt, Human
uugucaccagaucuga

SEQ ID NO: 1389933 - RNA, 14 nt, Human
uugucaccagaucu

SEQ ID NO: 1389934 - RNA, 20 nt, Human
uugucacgccagacuuccca

SEQ ID NO: 1389935 - RNA, 13 nt, Human
uugucacgccaga

SEQ ID NO: 1389936 - RNA, 21 nt, Human
augaguggaaauuaagacuuu

SEQ ID NO: 1389937 - RNA, 19 nt, Human
augagugcguggugcgagu

SEQ ID NO: 1389938 - RNA, 17 nt, Human
augaguggcuuuaauga

SEQ ID NO: 1389939 - RNA, 22 nt, Human
augagugcguggugcgagugcg

SEQ ID NO: 1389940 - RNA, 17 nt, Human
augagugaauaaauguc

SEQ ID NO: 1389941 - RNA, 16 nt, Human
augagugaauaaaugu

SEQ ID NO: 1389942 - RNA, 15 nt, Human
augagugaauaaaug

SEQ ID NO: 1389943 - RNA, 17 nt, Human
augagucuagauguuua

SEQ ID NO: 1389944 - RNA, 13 nt, Human
augagucuagaug

SEQ ID NO: 1389945 - RNA, 12 nt, Human
augagucuagau

SEQ ID NO: 1389946 - RNA, 20 nt, Human
augauaaagagacagugaua

SEQ ID NO: 1389947 - RNA, 17 nt, Human
augauaaagagacagug

SEQ ID NO: 1389948 - RNA, 14 nt, Human
augauaaagagaca

SEQ ID NO: 1389949 - RNA, 14 nt, Human
augauaacuggaaa

SEQ ID NO: 1389950 - RNA, 19 nt, Human
uuguuuuucauucagucuu

SEQ ID NO: 1389951 - RNA, 19 nt, Human
uuguuuuuaaacuguacag

SEQ ID NO: 1389952 - RNA, 18 nt, Human
uuguuuuuaaacuguaca

SEQ ID NO: 1389953 - RNA, 16 nt, Human
uuguuuuuaaacugua

SEQ ID NO: 1389954 - RNA, 14 nt, Human
uuguuuuuaaacug

SEQ ID NO: 1389955 - RNA, 19 nt, Human
uuguuuugugucucuuaug

SEQ ID NO: 1389956 - RNA, 16 nt, Human
uuguuuugugcagaga

SEQ ID NO: 1389957 - RNA, 19 nt, Human
augcaccuggaauauauaa

SEQ ID NO: 1389958 - RNA, 20 nt, Human
uuuaaaaaagcuuaaaacuu

SEQ ID NO: 1389959 - RNA, 17 nt, Human
uuuaaaaaagcuuaaaa

SEQ ID NO: 1389960 - RNA, 14 nt, Human
uuuaaaaaagcuua

SEQ ID NO: 1389961 - RNA, 13 nt, Human
uuuaaaaaagcuu

SEQ ID NO: 1389962 - RNA, 21 nt, Human
uuuaaaaaagcuuaaaacuuu

SEQ ID NO: 1389963 - RNA, 23 nt, Human
uuuaaaaaagcuuaaaacuuuga

SEQ ID NO: 1389964 - RNA, 19 nt, Human
uuuaaaaaauagcagcuuu

SEQ ID NO: 1389965 - RNA, 22 nt, Human
uuuaaacuguguacauaacuga

SEQ ID NO: 1389966 - RNA, 21 nt, Human
uuuaaacuguguacauaacug

SEQ ID NO: 1389967 - RNA, 19 nt, Human
uuuaaacuguguacauaac

SEQ ID NO: 1389968 - RNA, 15 nt, Human
uuuaaacuguguaca

SEQ ID NO: 1389969 - RNA, 16 nt, Human
uuuaaaaaauggucac

SEQ ID NO: 1389970 - RNA, 22 nt, Human
augcaaacucuuuggucguuuu

SEQ ID NO: 1389971 - RNA, 22 nt, Human
augcaaggucauuuuuuuuaag

SEQ ID NO: 1389972 - RNA, 16 nt, Human
augcaccuggaauaua

SEQ ID NO: 1389973 - RNA, 14 nt, Human
augcaccuggaaua

SEQ ID NO: 1389974 - RNA, 16 nt, Human
augcaaacucuuuggu

SEQ ID NO: 1389975 - RNA, 13 nt, Human
augcaaacucuuu

SEQ ID NO: 1389976 - RNA, 12 nt, Human
augcaaacucuu

SEQ ID NO: 1389977 - RNA, 14 nt, Human
augcaaaccauagc

SEQ ID NO: 1389978 - RNA, 15 nt, Human
augaucugucugugg

SEQ ID NO: 1389979 - RNA, 22 nt, Human
augcaaacuuuauuuuguguuu

SEQ ID NO: 1389980 - RNA, 14 nt, Human
augcaaggucauuu

SEQ ID NO: 1389981 - RNA, 16 nt, Human
augcaaggucauuuuu

SEQ ID NO: 1389982 - RNA, 16 nt, Human
uuguugcguuccuuuc

SEQ ID NO: 1389983 - RNA, 23 nt, Human
uuguuggagucaaaaagaaccac

SEQ ID NO: 1389984 - RNA, 13 nt, Human
uuguuggaaugaa

SEQ ID NO: 1389985 - RNA, 17 nt, Human
augaucggcaggacacc

SEQ ID NO: 1389986 - RNA, 20 nt, Human
augauccuguauucagacag

SEQ ID NO: 1389987 - RNA, 20 nt, Human
augaucccuguguugucucu

SEQ ID NO: 1389988 - RNA, 18 nt, Human
augaucccuguguugucu

SEQ ID NO: 1389989 - RNA, 20 nt, Human
augaucaauuauaguuucug

SEQ ID NO: 1389990 - RNA, 18 nt, Human
augaucaccgacugaaaa

SEQ ID NO: 1389991 - RNA, 23 nt, Human
uuguucucagaaucccuuaacag

SEQ ID NO: 1389992 - RNA, 16 nt, Human
uuguucucagaauccc

SEQ ID NO: 1389993 - RNA, 17 nt, Human
uuguuccccacuggagc

SEQ ID NO: 1389994 - RNA, 13 nt, Human
uugugugucuuaa

SEQ ID NO: 1389995 - RNA, 14 nt, Human
uuguguguauuugc

SEQ ID NO: 1389996 - RNA, 16 nt, Human
uuguguguauuugcua

SEQ ID NO: 1389997 - RNA, 22 nt, Human
uuguguguaugcacaugaacuu

SEQ ID NO: 1389998 - RNA, 18 nt, Human
uuguuccccacuggagca

SEQ ID NO: 1389999 - RNA, 19 nt, Human
uugugugucuuaauuauua

SEQ ID NO: 1390000 - RNA, 13 nt, Human
uugugaaggcagg

SEQ ID NO: 1390001 - RNA, 22 nt, Human
uugugaagccaugaguuccaga

SEQ ID NO: 1390002 - RNA, 11 nt, Human
uugugaagagg

SEQ ID NO: 1390003 - RNA, 18 nt, Human
uugugaagcaaaauuuuu

SEQ ID NO: 1390004 - RNA, 14 nt, Human
uuguguguaugcac

SEQ ID NO: 1390005 - RNA, 13 nt, Human
uuguguguaugca

SEQ ID NO: 1390006 - RNA, 17 nt, Human
uugugaagguggaaaua

SEQ ID NO: 1390007 - RNA, 18 nt, Human
uugugaagguggaaauaa

SEQ ID NO: 1390008 - RNA, 21 nt, Human
uugguuuugcuacauaauuau

SEQ ID NO: 1390009 - RNA, 18 nt, Human
uugguucccccacugauc

SEQ ID NO: 1390010 - RNA, 20 nt, Human
uugguucauuaauucuauaa

SEQ ID NO: 1390011 - RNA, 14 nt, Human
uugguucauuaauu

SEQ ID NO: 1390012 - RNA, 17 nt, Human
uuggggucuggcagccu

SEQ ID NO: 1390013 - RNA, 15 nt, Human
uuggggucugacccc

SEQ ID NO: 1390014 - RNA, 14 nt, Human
uuggggucugaccc

SEQ ID NO: 1390015 - RNA, 14 nt, Human
uuggggaagaccca

SEQ ID NO: 1390016 - RNA, 23 nt, Human
uuggggaaacagcaucuccaagc

SEQ ID NO: 1390017 - RNA, 19 nt, Human
uuggggaaacagcaucucc

SEQ ID NO: 1390018 - RNA, 23 nt, Human
uugggcuugcuauucugucccua

SEQ ID NO: 1390019 - RNA, 18 nt, Human
uugggcuugcuauucugu

SEQ ID NO: 1390020 - RNA, 17 nt, Human
uugggcuugcuauucug

SEQ ID NO: 1390021 - RNA, 19 nt, Human
uugggcuucagcugccagu

SEQ ID NO: 1390022 - RNA, 22 nt, Human
uugguuuuuacugcucugagaa

SEQ ID NO: 1390023 - RNA, 18 nt, Human
uugguuuuuaaaacccag

SEQ ID NO: 1390024 - RNA, 21 nt, Human
uuguaacuaaaauaauuuugu

SEQ ID NO: 1390025 - RNA, 18 nt, Human
uuguaacuaaaauaauuu

SEQ ID NO: 1390026 - RNA, 17 nt, Human
uuguaacuaaaauaauu

SEQ ID NO: 1390027 - RNA, 23 nt, Human
uuguaacuaaaauaauuuuguaa

SEQ ID NO: 1390028 - RNA, 22 nt, Human
uuguaacuaaaauaauuuugua

SEQ ID NO: 1390029 - RNA, 21 nt, Human
augaacauauuguugaaaggu

SEQ ID NO: 1390030 - RNA, 21 nt, Human
augaacagaacauagacagaa

SEQ ID NO: 1390031 - RNA, 22 nt, Human
uugggcacccccagccugggcc

SEQ ID NO: 1390032 - RNA, 21 nt, Human
uugggcacccccagccugggc

SEQ ID NO: 1390033 - RNA, 20 nt, Human
uugggcacccccagccuggg

SEQ ID NO: 1390034 - RNA, 19 nt, Human
uugggcacccccagccugg

SEQ ID NO: 1390035 - RNA, 18 nt, Human
uugggcacccccagccug

SEQ ID NO: 1390036 - RNA, 14 nt, Human
augaacaucccuuu

SEQ ID NO: 1390037 - RNA, 22 nt, Human
augaauuacauuuguauaaaau

SEQ ID NO: 1390038 - RNA, 19 nt, Human
augaauuacauuuguauaa

SEQ ID NO: 1390039 - RNA, 18 nt, Human
augaauuacauuuguaua

SEQ ID NO: 1390040 - RNA, 18 nt, Human
uugggcuucagcugccag

SEQ ID NO: 1390041 - RNA, 13 nt, Human
uugggcucugaug

SEQ ID NO: 1390042 - RNA, 14 nt, Human
uugggcucugauga

SEQ ID NO: 1390043 - RNA, 12 nt, Human
uugggcucugau

SEQ ID NO: 1390044 - RNA, 21 nt, Human
uugggccagaaguaccagacu

SEQ ID NO: 1390045 - RNA, 12 nt, Human
uugggcagagcu

SEQ ID NO: 1390046 - RNA, 23 nt, Human
uugggcacccccagccugggccu

SEQ ID NO: 1390047 - RNA, 21 nt, Human
uugggcagagcuggcucugag

SEQ ID NO: 1390048 - RNA, 17 nt, Human
uugggcagagcuggcuc

SEQ ID NO: 1390049 - RNA, 22 nt, Human
uugggcagagcuggcucugagc

SEQ ID NO: 1390050 - RNA, 18 nt, Human
uugggcagcaauuuaaau

SEQ ID NO: 1390051 - RNA, 14 nt, Human
uugggccagacaug

SEQ ID NO: 1390052 - RNA, 13 nt, Human
uugggccagacau

SEQ ID NO: 1390053 - RNA, 14 nt, Human
uugggccagaagua

SEQ ID NO: 1390054 - RNA, 19 nt, Human
uugggcagcaauuuaaaug

SEQ ID NO: 1390055 - RNA, 16 nt, Human
augacacuguucagga

SEQ ID NO: 1390056 - RNA, 15 nt, Human
augacaggccugucc

SEQ ID NO: 1390057 - RNA, 17 nt, Human
augacaggauguuugcu

SEQ ID NO: 1390058 - RNA, 19 nt, Human
augacaguccgucaaaaca

SEQ ID NO: 1390059 - RNA, 23 nt, Human
augacacucauauaauuauaugu

SEQ ID NO: 1390060 - RNA, 15 nt, Human
augacaaucaugugu

SEQ ID NO: 1390061 - RNA, 20 nt, Human
augacaacuucuaauugcca

SEQ ID NO: 1390062 - RNA, 19 nt, Human
augacaacuucuaauugcc

SEQ ID NO: 1390063 - RNA, 18 nt, Human
augacaacuucuaauugc

SEQ ID NO: 1390064 - RNA, 16 nt, Human
augacaacuucuaauu

SEQ ID NO: 1390065 - RNA, 14 nt, Human
augacaacuucuaa

SEQ ID NO: 1390066 - RNA, 20 nt, Human
augacaaagcagauucagaa

SEQ ID NO: 1390067 - RNA, 17 nt, Human
augaauuauuacagugu

SEQ ID NO: 1390068 - RNA, 15 nt, Human
augaauuauuacagu

SEQ ID NO: 1390069 - RNA, 13 nt, Human
augaauugcauuu

SEQ ID NO: 1390070 - RNA, 23 nt, Human
augaauuaguuuuauaugcuucu

SEQ ID NO: 1390071 - RNA, 21 nt, Human
augaauuaguuuuauaugcuu

SEQ ID NO: 1390072 - RNA, 14 nt, Human
uuguauauucacuu

SEQ ID NO: 1390073 - RNA, 21 nt, Human
uuguauauauuauuauaaucu

SEQ ID NO: 1390074 - RNA, 19 nt, Human
uuguauauauuauuauaau

SEQ ID NO: 1390075 - RNA, 13 nt, Human
uuguauauuacaa

SEQ ID NO: 1390076 - RNA, 14 nt, Human
uuguauauuacaau

SEQ ID NO: 1390077 - RNA, 15 nt, Human
uuguauauuacaaug

SEQ ID NO: 1390078 - RNA, 16 nt, Human
uuguauauuacaauga

SEQ ID NO: 1390079 - RNA, 13 nt, Human
uuguauauucacu

SEQ ID NO: 1390080 - RNA, 13 nt, Human
uuguaaugaaaac

SEQ ID NO: 1390081 - RNA, 19 nt, Human
uuguaguuccacuuauagc

SEQ ID NO: 1390082 - RNA, 14 nt, Human
uuguaauuauggag

SEQ ID NO: 1390083 - RNA, 17 nt, Human
uuguaauuaaaagcaaa

SEQ ID NO: 1390084 - RNA, 11 nt, Human
uuguaauuaug

SEQ ID NO: 1390085 - RNA, 23 nt, Human
uuguaauuaaaagcaaaucauuu

SEQ ID NO: 1390086 - RNA, 15 nt, Human
uuguaauuauggagu

SEQ ID NO: 1390087 - RNA, 19 nt, Human
uuguaaugucuugagcucu

SEQ ID NO: 1390088 - RNA, 20 nt, Human
uuguaaugucuugagcucua

SEQ ID NO: 1390089 - RNA, 15 nt, Human
uuguaaugucuugag

SEQ ID NO: 1390090 - RNA, 21 nt, Human
uuguauaauuggauuuccuaa

SEQ ID NO: 1390091 - RNA, 20 nt, Human
uuguauaauuggauuuccua

SEQ ID NO: 1390092 - RNA, 12 nt, Human
uuguauaauugg

SEQ ID NO: 1390093 - RNA, 11 nt, Human
uuguauaauug

SEQ ID NO: 1390094 - RNA, 14 nt, Human
uuguauaaaauaga

SEQ ID NO: 1390095 - RNA, 12 nt, Human
uuguauaaaaua

SEQ ID NO: 1390096 - RNA, 15 nt, Human
uuguauaaaauaauu

SEQ ID NO: 1390097 - RNA, 16 nt, Human
uuguaguugaauauug

SEQ ID NO: 1390098 - RNA, 13 nt, Human
uuguaguugaaua

SEQ ID NO: 1390099 - RNA, 13 nt, Human
uuguaguuccacu

SEQ ID NO: 1390100 - RNA, 13 nt, Human
uuguauaaaauaa

SEQ ID NO: 1390101 - RNA, 17 nt, Human
uuggcgaugccagccaa

SEQ ID NO: 1390102 - RNA, 21 nt, Human
uuggcuagagguucaaagaua

SEQ ID NO: 1390103 - RNA, 22 nt, Human
uuggcuagagguucaaagauau

SEQ ID NO: 1390104 - RNA, 19 nt, Human
uuggccuguagaguugcug

SEQ ID NO: 1390105 - RNA, 16 nt, Human
uuggccuggagcacaa

SEQ ID NO: 1390106 - RNA, 14 nt, Human
uuggccuggagcac

SEQ ID NO: 1390107 - RNA, 21 nt, Human
uuggccugcuaaggucuugga

SEQ ID NO: 1390108 - RNA, 19 nt, Human
uuggccugaucagaccacg

SEQ ID NO: 1390109 - RNA, 12 nt, Human
uuggacuaugga

SEQ ID NO: 1390110 - RNA, 17 nt, Human
uuggaccuaauccaagc

SEQ ID NO: 1390111 - RNA, 23 nt, Human
uuggaccuaaauggccucaugug

SEQ ID NO: 1390112 - RNA, 21 nt, Human
uuggaccuaaauggccucaug

SEQ ID NO: 1390113 - RNA, 19 nt, Human
uuggaccuaaauggccuca

SEQ ID NO: 1390114 - RNA, 16 nt, Human
uuggacccuuccaugg

SEQ ID NO: 1390115 - RNA, 14 nt, Human
uuggacccuuccau

SEQ ID NO: 1390116 - RNA, 13 nt, Human
uuggacccuucca

SEQ ID NO: 1390117 - RNA, 22 nt, Human
aucuuuuacaacugccucgaaa

SEQ ID NO: 1390118 - RNA, 14 nt, Human
aucuuuuauuuugc

SEQ ID NO: 1390119 - RNA, 21 nt, Human
augaaauauuauguuaaaacu

SEQ ID NO: 1390120 - RNA, 22 nt, Human
uugcuuuucaugcaaacucuuu

SEQ ID NO: 1390121 - RNA, 18 nt, Human
uugcuuuucaugcaaacu

SEQ ID NO: 1390122 - RNA, 17 nt, Human
uugcuuuucaugcaaac

SEQ ID NO: 1390123 - RNA, 16 nt, Human
uugcuuuucaugcaaa

SEQ ID NO: 1390124 - RNA, 13 nt, Human
uugcuuuucaugc

SEQ ID NO: 1390125 - RNA, 12 nt, Human
uugcuuuucaug

SEQ ID NO: 1390126 - RNA, 15 nt, Human
uugcuuuucacaaau

SEQ ID NO: 1390127 - RNA, 23 nt, Human
uugcuuuaauauaaaugcaaaua

SEQ ID NO: 1390128 - RNA, 22 nt, Human
uugcuuuaauauaaaugcaaau

SEQ ID NO: 1390129 - RNA, 21 nt, Human
uugcuuuaauauaaaugcaaa

SEQ ID NO: 1390130 - RNA, 19 nt, Human
uugcuuuaauauaaaugca

SEQ ID NO: 1390131 - RNA, 18 nt, Human
uugcuuuaauauaaaugc

SEQ ID NO: 1390132 - RNA, 21 nt, Human
uugcuuuuugugauaugcaca

SEQ ID NO: 1390133 - RNA, 15 nt, Human
uugcuuuuugugaua

SEQ ID NO: 1390134 - RNA, 15 nt, Human
uugcuuuuucaccag

SEQ ID NO: 1390135 - RNA, 20 nt, Human
uugcuuuuggcaaaacucua

SEQ ID NO: 1390136 - RNA, 17 nt, Human
uugcuuuuuuuuccuuc

SEQ ID NO: 1390137 - RNA, 17 nt, Human
uugcuuuaauauaaaug

SEQ ID NO: 1390138 - RNA, 16 nt, Human
uugcuuuaauauaaau

SEQ ID NO: 1390139 - RNA, 14 nt, Human
uugcuuuaauauaa

SEQ ID NO: 1390140 - RNA, 18 nt, Human
uugcugaauaggcgauca

SEQ ID NO: 1390141 - RNA, 21 nt, Human
uugcugacuguagcuuuggaa

SEQ ID NO: 1390142 - RNA, 11 nt, Human
uugcugagacu

SEQ ID NO: 1390143 - RNA, 11 nt, Human
uugcugagccu

SEQ ID NO: 1390144 - RNA, 21 nt, Human
uugcuagagcuccucccucuc

SEQ ID NO: 1390145 - RNA, 18 nt, Human
uugcuagagcuccucccu

SEQ ID NO: 1390146 - RNA, 16 nt, Human
uugcuagagcuccucc

SEQ ID NO: 1390147 - RNA, 15 nt, Human
uugcuagagcuccuc

SEQ ID NO: 1390148 - RNA, 14 nt, Human
uugcuagagcuccu

SEQ ID NO: 1390149 - RNA, 13 nt, Human
uugcuacauaauu

SEQ ID NO: 1390150 - RNA, 23 nt, Human
uugcuaccaguauuuagaagcca

SEQ ID NO: 1390151 - RNA, 22 nt, Human
uugcuaccaguauuuagaagcc

SEQ ID NO: 1390152 - RNA, 20 nt, Human
uugcuaccaguauuuagaag

SEQ ID NO: 1390153 - RNA, 16 nt, Human
uugcuaccaguauuua

SEQ ID NO: 1390154 - RNA, 15 nt, Human
uugcuaccaguauuu

SEQ ID NO: 1390155 - RNA, 12 nt, Human
uugcuaccagua

SEQ ID NO: 1390156 - RNA, 16 nt, Human
uugcuacauaauuauc

SEQ ID NO: 1390157 - RNA, 17 nt, Human
uugcuaauuuuuauuaa

SEQ ID NO: 1390158 - RNA, 15 nt, Human
uugcuaauuuuuauu

SEQ ID NO: 1390159 - RNA, 19 nt, Human
aucuaaguuauaagacucu

SEQ ID NO: 1390160 - RNA, 13 nt, Human
aucuaaguuauaa

SEQ ID NO: 1390161 - RNA, 18 nt, Human
aucuaaguuaauuuaaag

SEQ ID NO: 1390162 - RNA, 16 nt, Human
uugcugaaauuuuaua

SEQ ID NO: 1390163 - RNA, 11 nt, Human
uugcugaaauu

SEQ ID NO: 1390164 - RNA, 17 nt, Human
uugcuccgccuggccug

SEQ ID NO: 1390165 - RNA, 16 nt, Human
uugcuccgccuggccu

SEQ ID NO: 1390166 - RNA, 19 nt, Human
uugcugaaauuuuauaugc

SEQ ID NO: 1390167 - RNA, 11 nt, Human
uugcugaauag

SEQ ID NO: 1390168 - RNA, 12 nt, Human
uugcucauggaa

SEQ ID NO: 1390169 - RNA, 11 nt, Human
uugcucaugga

SEQ ID NO: 1390170 - RNA, 20 nt, Human
auucuauuuauauguacaug

SEQ ID NO: 1390171 - RNA, 18 nt, Human
auucuauuacauuuucag

SEQ ID NO: 1390172 - RNA, 20 nt, Human
auucuauuacauuuucagug

SEQ ID NO: 1390173 - RNA, 15 nt, Human
auucuauuaaagugc

SEQ ID NO: 1390174 - RNA, 17 nt, Human
auucuauaguucuagac

SEQ ID NO: 1390175 - RNA, 16 nt, Human
auucuauaguucuaga

SEQ ID NO: 1390176 - RNA, 15 nt, Human
auucuauaguucuag

SEQ ID NO: 1390177 - RNA, 14 nt, Human
auucuauaguucua

SEQ ID NO: 1390178 - RNA, 13 nt, Human
auucuauaguucu

SEQ ID NO: 1390179 - RNA, 18 nt, Human
auucuauaaguuuuaugu

SEQ ID NO: 1390180 - RNA, 15 nt, Human
auucuauaaggccau

SEQ ID NO: 1390181 - RNA, 18 nt, Human
auucuaaaugaauguuua

SEQ ID NO: 1390182 - RNA, 17 nt, Human
auucuaaaugaauguuu

SEQ ID NO: 1390183 - RNA, 15 nt, Human
auucuaaaugaaugu

SEQ ID NO: 1390184 - RNA, 14 nt, Human
auucuaaaggucca

SEQ ID NO: 1390185 - RNA, 22 nt, Human
auucuaaagauucuauaguucu

SEQ ID NO: 1390186 - RNA, 20 nt, Human
auucuaaagauucuauaguu

SEQ ID NO: 1390187 - RNA, 19 nt, Human
auucuaaagauucuauagu

SEQ ID NO: 1390188 - RNA, 18 nt, Human
auucuaaagauucuauag

SEQ ID NO: 1390189 - RNA, 17 nt, Human
auucuaaagauucuaua

SEQ ID NO: 1390190 - RNA, 15 nt, Human
auucuaaagauucua

SEQ ID NO: 1390191 - RNA, 14 nt, Human
auucuaaagauucu

SEQ ID NO: 1390192 - RNA, 22 nt, Human
auucuaaaaugugauguucuaa

SEQ ID NO: 1390193 - RNA, 23 nt, Human
auucuaaaaugugauguucuaag

SEQ ID NO: 1390194 - RNA, 20 nt, Human
auucuaaaaugugauguucu

SEQ ID NO: 1390195 - RNA, 15 nt, Human
auucuaaaaugccuu

SEQ ID NO: 1390196 - RNA, 14 nt, Human
auucuaaaaugccu

SEQ ID NO: 1390197 - RNA, 20 nt, Human
auucuaaaaugauuguagua

SEQ ID NO: 1390198 - RNA, 17 nt, Human
auucucaaaggagcgag

SEQ ID NO: 1390199 - RNA, 15 nt, Human
auucucaagcccugc

SEQ ID NO: 1390200 - RNA, 22 nt, Human
auucuauuuauauguacaugag

SEQ ID NO: 1390201 - RNA, 16 nt, Human
auucucaagcccugca

SEQ ID NO: 1390202 - RNA, 17 nt, Human
auucuccuccucccucc

SEQ ID NO: 1390203 - RNA, 12 nt, Human
auucuccuccuc

SEQ ID NO: 1390204 - RNA, 11 nt, Human
auucuccuccu

SEQ ID NO: 1390205 - RNA, 15 nt, Human
auucucccuugcucu

SEQ ID NO: 1390206 - RNA, 23 nt, Human
auucuccagccaucaagagacug

SEQ ID NO: 1390207 - RNA, 11 nt, Human
auucuccugga

SEQ ID NO: 1390208 - RNA, 16 nt, Human
auucuccuuguguuac

SEQ ID NO: 1390209 - RNA, 20 nt, Human
auucuccugccucagccucc

SEQ ID NO: 1390210 - RNA, 16 nt, Human
auucuaaaaugauugu

SEQ ID NO: 1390211 - RNA, 14 nt, Human
auucuaaaaugauu

SEQ ID NO: 1390212 - RNA, 16 nt, Human
auucccucucccaggc

SEQ ID NO: 1390213 - RNA, 18 nt, Human
auucccucucccaggccc

SEQ ID NO: 1390214 - RNA, 15 nt, Human
auucccucucccagg

SEQ ID NO: 1390215 - RNA, 14 nt, Human
auucccucucccag

SEQ ID NO: 1390216 - RNA, 20 nt, Human
auucccucacucgucucccc

SEQ ID NO: 1390217 - RNA, 17 nt, Human
auucccucacucgucuc

SEQ ID NO: 1390218 - RNA, 11 nt, Human
auucccucacu

SEQ ID NO: 1390219 - RNA, 22 nt, Human
auuccaagacaugucuguucua

SEQ ID NO: 1390220 - RNA, 19 nt, Human
auuccaacucguauagcau

SEQ ID NO: 1390221 - RNA, 17 nt, Human
auuccagccccucuggu

SEQ ID NO: 1390222 - RNA, 23 nt, Human
auuccaacucguauagcaugcau

SEQ ID NO: 1390223 - RNA, 19 nt, Human
auuccaacaguuuaaugaa

SEQ ID NO: 1390224 - RNA, 20 nt, Human
auuccaacaguuuaaugaag

SEQ ID NO: 1390225 - RNA, 18 nt, Human
auuccaacaguuuaauga

SEQ ID NO: 1390226 - RNA, 17 nt, Human
auuccaacaguuuaaug

SEQ ID NO: 1390227 - RNA, 16 nt, Human
auuccaacaguuuaau

SEQ ID NO: 1390228 - RNA, 14 nt, Human
auuccaacaguuua

SEQ ID NO: 1390229 - RNA, 18 nt, Human
auuccaaagucucuaauu

SEQ ID NO: 1390230 - RNA, 19 nt, Human
auuccaaagucucuaauuc

SEQ ID NO: 1390231 - RNA, 13 nt, Human
auuccagcugucc

SEQ ID NO: 1390232 - RNA, 11 nt, Human
auuccauccuu

SEQ ID NO: 1390233 - RNA, 11 nt, Human
auucagacauc

SEQ ID NO: 1390234 - RNA, 15 nt, Human
auucagacaucugag

SEQ ID NO: 1390235 - RNA, 14 nt, Human
auucagacaggcaa

SEQ ID NO: 1390236 - RNA, 13 nt, Human
auucagacaggca

SEQ ID NO: 1390237 - RNA, 17 nt, Human
auucagaguugaugguu

SEQ ID NO: 1390238 - RNA, 16 nt, Human
auuccaaagucucuaa

SEQ ID NO: 1390239 - RNA, 23 nt, Human
auucagguuuuuccuuuuuuugu

SEQ ID NO: 1390240 - RNA, 16 nt, Human
auucagguuuuuccuu

SEQ ID NO: 1390241 - RNA, 15 nt, Human
auucagguuuuuccu

SEQ ID NO: 1390242 - RNA, 14 nt, Human
auucagguuuuucc

SEQ ID NO: 1390243 - RNA, 12 nt, Human
auucagguuuuu

SEQ ID NO: 1390244 - RNA, 18 nt, Human
auucagauaugauucaaa

SEQ ID NO: 1390245 - RNA, 20 nt, Human
auucagauaugauucaaaug

SEQ ID NO: 1390246 - RNA, 19 nt, Human
auuauauaacuguauuuga

SEQ ID NO: 1390247 - RNA, 17 nt, Human
auuauauaacuguauuu

SEQ ID NO: 1390248 - RNA, 15 nt, Human
auuauauaacuguau

SEQ ID NO: 1390249 - RNA, 19 nt, Human
auuauaguuucugaggcuu

SEQ ID NO: 1390250 - RNA, 16 nt, Human
auuauaguuucugagg

SEQ ID NO: 1390251 - RNA, 15 nt, Human
auuagugcuaagugu

SEQ ID NO: 1390252 - RNA, 17 nt, Human
auuagugcuaaguguga

SEQ ID NO: 1390253 - RNA, 23 nt, Human
auuauagugauguaaucuugaau

SEQ ID NO: 1390254 - RNA, 22 nt, Human
auuagugccacuuaauguaugu

SEQ ID NO: 1390255 - RNA, 21 nt, Human
auuagugccacuuaauguaug

SEQ ID NO: 1390256 - RNA, 13 nt, Human
auuagugcuaagu

SEQ ID NO: 1390257 - RNA, 20 nt, Human
auuagugccacuuaauguau

SEQ ID NO: 1390258 - RNA, 19 nt, Human
auuagugccacuuaaugua

SEQ ID NO: 1390259 - RNA, 18 nt, Human
auuagugccacuuaaugu

SEQ ID NO: 1390260 - RNA, 16 nt, Human
auuagugccacuuaau

SEQ ID NO: 1390261 - RNA, 20 nt, Human
auuagucucagugaagacua

SEQ ID NO: 1390262 - RNA, 15 nt, Human
auuagucauguuuau

SEQ ID NO: 1390263 - RNA, 17 nt, Human
auuaguauuguuguccu

SEQ ID NO: 1390264 - RNA, 23 nt, Human
auuaguauuguuguccuuuucau

SEQ ID NO: 1390265 - RNA, 15 nt, Human
auuaguauuguuguc

SEQ ID NO: 1390266 - RNA, 14 nt, Human
auuaguauuguugu

SEQ ID NO: 1390267 - RNA, 13 nt, Human
auuaguauuguug

SEQ ID NO: 1390268 - RNA, 17 nt, Human
auuacucaguaauuugu

SEQ ID NO: 1390269 - RNA, 19 nt, Human
auuacuuauuuuugacagu

SEQ ID NO: 1390270 - RNA, 18 nt, Human
auuacuuauuuuugacag

SEQ ID NO: 1390271 - RNA, 17 nt, Human
auuacuuauuuuugaca

SEQ ID NO: 1390272 - RNA, 16 nt, Human
auuacuuauuuuugac

SEQ ID NO: 1390273 - RNA, 15 nt, Human
auuacuuauuuuuga

SEQ ID NO: 1390274 - RNA, 15 nt, Human
auuacguaugucugg

SEQ ID NO: 1390275 - RNA, 21 nt, Human
auuacguaugucugguucuca

SEQ ID NO: 1390276 - RNA, 13 nt, Human
auuacgugcucug

SEQ ID NO: 1390277 - RNA, 14 nt, Human
uuuuuguaccauuu

SEQ ID NO: 1390278 - RNA, 23 nt, Human
uuuuuguaccauuuuaaaguuag

SEQ ID NO: 1390279 - RNA, 12 nt, Human
uuuuuguaccaa

SEQ ID NO: 1390280 - RNA, 13 nt, Human
uuuuuauuuaaaa

SEQ ID NO: 1390281 - RNA, 18 nt, Human
uuuuuauuaguauuguug

SEQ ID NO: 1390282 - RNA, 15 nt, Human
uuuuuauuaugcauu

SEQ ID NO: 1390283 - RNA, 14 nt, Human
uuuuuauuaugcau

SEQ ID NO: 1390284 - RNA, 17 nt, Human
uuuuuauuaguauuguu

SEQ ID NO: 1390285 - RNA, 23 nt, Human
uuuuuauuaauuuuaguuuuuca

SEQ ID NO: 1390286 - RNA, 14 nt, Human
uuuuuaucuuuuua

SEQ ID NO: 1390287 - RNA, 14 nt, Human
uuuuuaucuuuaua

SEQ ID NO: 1390288 - RNA, 22 nt, Human
uuuuuauggcuuuugugcauua

SEQ ID NO: 1390289 - RNA, 20 nt, Human
uuuuuauggcuuuugugcau

SEQ ID NO: 1390290 - RNA, 21 nt, Human
uuuuuauggcuuuugugcauu

SEQ ID NO: 1390291 - RNA, 19 nt, Human
uuuuugugaaaagcuccau

SEQ ID NO: 1390292 - RNA, 23 nt, Human
auuaaguaaugauaacuggaaac

SEQ ID NO: 1390293 - RNA, 15 nt, Human
uuuuuguguguauuu

SEQ ID NO: 1390294 - RNA, 18 nt, Human
uuuuuguguguauuugcu

SEQ ID NO: 1390295 - RNA, 16 nt, Human
uuuuuguuauuaaaca

SEQ ID NO: 1390296 - RNA, 17 nt, Human
uuuuuguguguauuugc

SEQ ID NO: 1390297 - RNA, 14 nt, Human
auuacaguguuuau

SEQ ID NO: 1390298 - RNA, 22 nt, Human
auuacaguguuuauccuuucau

SEQ ID NO: 1390299 - RNA, 17 nt, Human
auuaauagcagccuuuc

SEQ ID NO: 1390300 - RNA, 18 nt, Human
auuaauagcagccuuucu

SEQ ID NO: 1390301 - RNA, 21 nt, Human
auuacaguggggaaugaagau

SEQ ID NO: 1390302 - RNA, 14 nt, Human
auuaccauguaaug

SEQ ID NO: 1390303 - RNA, 15 nt, Human
auuaccauguaaugg

SEQ ID NO: 1390304 - RNA, 20 nt, Human
auuacauuuguauaaaauaa

SEQ ID NO: 1390305 - RNA, 18 nt, Human
auuacauuuguauaaaau

SEQ ID NO: 1390306 - RNA, 17 nt, Human
auuacauuuguauaaaa

SEQ ID NO: 1390307 - RNA, 18 nt, Human
uuuugauacuaagcauug

SEQ ID NO: 1390308 - RNA, 19 nt, Human
uuuugauaugcauauuugu

SEQ ID NO: 1390309 - RNA, 15 nt, Human
uuuugauagcaaagc

SEQ ID NO: 1390310 - RNA, 15 nt, Human
uuuugaggagcccca

SEQ ID NO: 1390311 - RNA, 23 nt, Human
uuuugagauauuaaugcccagac

SEQ ID NO: 1390312 - RNA, 13 nt, Human
uuuugagauauua

SEQ ID NO: 1390313 - RNA, 12 nt, Human
uuuugagauauu

SEQ ID NO: 1390314 - RNA, 18 nt, Human
uuuugaggcaaaagaagg

SEQ ID NO: 1390315 - RNA, 13 nt, Human
uuuugaggcaaaa

SEQ ID NO: 1390316 - RNA, 21 nt, Human
auuaaagaaggguugagcugg

SEQ ID NO: 1390317 - RNA, 20 nt, Human
auuaaagaaggguugagcug

SEQ ID NO: 1390318 - RNA, 22 nt, Human
auuaaagaagaccugagaaugu

SEQ ID NO: 1390319 - RNA, 21 nt, Human
auuaaagaagaccugagaaug

SEQ ID NO: 1390320 - RNA, 16 nt, Human
auuaaagaagaccuga

SEQ ID NO: 1390321 - RNA, 15 nt, Human
auuaaagaagaccug

SEQ ID NO: 1390322 - RNA, 14 nt, Human
auuaaagaagaccu

SEQ ID NO: 1390323 - RNA, 21 nt, Human
auuaaagaaaaaaauguauuu

SEQ ID NO: 1390324 - RNA, 22 nt, Human
auuaaagaaaaaaauguauuuu

SEQ ID NO: 1390325 - RNA, 19 nt, Human
auuaaagaaaaaaauguau

SEQ ID NO: 1390326 - RNA, 18 nt, Human
auuaaagaaaaaaaugua

SEQ ID NO: 1390327 - RNA, 17 nt, Human
auuaaagaaaaaaaugu

SEQ ID NO: 1390328 - RNA, 16 nt, Human
auuaaagaaaaaaaug

SEQ ID NO: 1390329 - RNA, 15 nt, Human
auuaaagacuccagu

SEQ ID NO: 1390330 - RNA, 15 nt, Human
auuaaagaauaugaa

SEQ ID NO: 1390331 - RNA, 15 nt, Human
auuaaagcauuuaga

SEQ ID NO: 1390332 - RNA, 12 nt, Human
auuaaagaauau

SEQ ID NO: 1390333 - RNA, 20 nt, Human
auuaagccacuuaaaauguu

SEQ ID NO: 1390334 - RNA, 17 nt, Human
auuaagccacuuaaaau

SEQ ID NO: 1390335 - RNA, 17 nt, Human
auuaagcaucagaaacu

SEQ ID NO: 1390336 - RNA, 14 nt, Human
auuaagcaucagaa

SEQ ID NO: 1390337 - RNA, 17 nt, Human
uuuugcacagccaaauu

SEQ ID NO: 1390338 - RNA, 20 nt, Human
uuuugcacauguuuccucua

SEQ ID NO: 1390339 - RNA, 18 nt, Human
uuuugcaaucccuuaaua

SEQ ID NO: 1390340 - RNA, 21 nt, Human
uuuugcaaccucgcuggacuc

SEQ ID NO: 1390341 - RNA, 17 nt, Human
uuuugcaaccucgcugg

SEQ ID NO: 1390342 - RNA, 21 nt, Human
uuuugcaaccaggaacagcaa

SEQ ID NO: 1390343 - RNA, 17 nt, Human
uuuugcaaagauuuaau

SEQ ID NO: 1390344 - RNA, 19 nt, Human
uuuugcaaagauuuaaucu

SEQ ID NO: 1390345 - RNA, 13 nt, Human
uuuugcaaagaaa

SEQ ID NO: 1390346 - RNA, 21 nt, Human
uuuugauuuguacugaaaaau

SEQ ID NO: 1390347 - RNA, 20 nt, Human
uuuugauuuguacugaaaaa

SEQ ID NO: 1390348 - RNA, 20 nt, Human
uuuugauuuaauguuuucag

SEQ ID NO: 1390349 - RNA, 18 nt, Human
uuuugauguaaagauguu

SEQ ID NO: 1390350 - RNA, 16 nt, Human
uuuugauguaaagaug

SEQ ID NO: 1390351 - RNA, 16 nt, Human
uuuugaugaguuguga

SEQ ID NO: 1390352 - RNA, 16 nt, Human
uuuugauauuucuagc

SEQ ID NO: 1390353 - RNA, 20 nt, Human
uuuugccacagcuuuugcaa

SEQ ID NO: 1390354 - RNA, 16 nt, Human
uuuugccacagcuuuu

SEQ ID NO: 1390355 - RNA, 14 nt, Human
uuuugccacagcuu

SEQ ID NO: 1390356 - RNA, 13 nt, Human
uuuugcccuuuga

SEQ ID NO: 1390357 - RNA, 19 nt, Human
uuuugcccauuuugaauca

SEQ ID NO: 1390358 - RNA, 15 nt, Human
uuuugccauuaaacu

SEQ ID NO: 1390359 - RNA, 18 nt, Human
uuuugcauuuaaaacaga

SEQ ID NO: 1390360 - RNA, 15 nt, Human
uuuugcaguaacugu

SEQ ID NO: 1390361 - RNA, 16 nt, Human
uuuugcaguaacuguu

SEQ ID NO: 1390362 - RNA, 14 nt, Human
uuuugcaguaacug

SEQ ID NO: 1390363 - RNA, 13 nt, Human
uuuugcaguaacu

SEQ ID NO: 1390364 - RNA, 9 nt, Human
uuuugcagu

SEQ ID NO: 1390365 - RNA, 12 nt, Human
uuuugcagcuuu

SEQ ID NO: 1390366 - RNA, 15 nt, Human
uuuuuacugcucuga

SEQ ID NO: 1390367 - RNA, 20 nt, Human
uuuuuagaaagcauuugaau

SEQ ID NO: 1390368 - RNA, 22 nt, Human
uuuuguuugcuucauguguccc

SEQ ID NO: 1390369 - RNA, 14 nt, Human
uuuuguuugguauu

SEQ ID NO: 1390370 - RNA, 19 nt, Human
uuuuguuugguauuguauu

SEQ ID NO: 1390371 - RNA, 22 nt, Human
uuuuguuugguauuguauuuau

SEQ ID NO: 1390372 - RNA, 11 nt, Human
uuuuuacuaau

SEQ ID NO: 1390373 - RNA, 15 nt, Human
uuuuuaguugaauuu

SEQ ID NO: 1390374 - RNA, 12 nt, Human
uuuuuaguugaa

SEQ ID NO: 1390375 - RNA, 20 nt, Human
uuuuuaggaagcaagcuuaa

SEQ ID NO: 1390376 - RNA, 13 nt, Human
uuuuuaggaaaug

SEQ ID NO: 1390377 - RNA, 12 nt, Human
uuuuuaggaaau

SEQ ID NO: 1390378 - RNA, 19 nt, Human
uuuuuauauuugaaauauu

SEQ ID NO: 1390379 - RNA, 23 nt, Human
uuuuuauacauaaacaagaccac

SEQ ID NO: 1390380 - RNA, 17 nt, Human
uuuuuaucaugcauguc

SEQ ID NO: 1390381 - RNA, 12 nt, Human
uuuuuauggcuu

SEQ ID NO: 1390382 - RNA, 12 nt, Human
uuuuuaucaugu

SEQ ID NO: 1390383 - RNA, 20 nt, Human
uuuuuaucgucacugcuuaa

SEQ ID NO: 1390384 - RNA, 13 nt, Human
uuuugcuggaaua

SEQ ID NO: 1390385 - RNA, 19 nt, Human
uuuugcugagacuaaucuu

SEQ ID NO: 1390386 - RNA, 21 nt, Human
uuuugcgguucaggaaaauug

SEQ ID NO: 1390387 - RNA, 15 nt, Human
uuuugccuuuugcaa

SEQ ID NO: 1390388 - RNA, 17 nt, Human
uuuugcccauuuugaau

SEQ ID NO: 1390389 - RNA, 22 nt, Human
uuuugcuguaauguuaauauug

SEQ ID NO: 1390390 - RNA, 13 nt, Human
uuuugcugagacu

SEQ ID NO: 1390391 - RNA, 19 nt, Human
uuuugugauggagugcugu

SEQ ID NO: 1390392 - RNA, 20 nt, Human
uuuugugaugcaaauaaaua

SEQ ID NO: 1390393 - RNA, 23 nt, Human
uuuugugcauuaucuagauacug

SEQ ID NO: 1390394 - RNA, 15 nt, Human
uuuuguuauuaaaca

SEQ ID NO: 1390395 - RNA, 18 nt, Human
uuuuguuaucagucaaua

SEQ ID NO: 1390396 - RNA, 17 nt, Human
uuuugugcauuaucuag

SEQ ID NO: 1390397 - RNA, 20 nt, Human
uuuugugcauuaucuagaua

SEQ ID NO: 1390398 - RNA, 16 nt, Human
uuuuguucaaagccag

SEQ ID NO: 1390399 - RNA, 16 nt, Human
uuuuguuuaccagaga

SEQ ID NO: 1390400 - RNA, 18 nt, Human
uuuuguuucaaugaggug

SEQ ID NO: 1390401 - RNA, 13 nt, Human
uuuuguuuccuuu

SEQ ID NO: 1390402 - RNA, 22 nt, Human
auuaaaccaucucccuggugcu

SEQ ID NO: 1390403 - RNA, 18 nt, Human
auuaaaccaucucccugg

SEQ ID NO: 1390404 - RNA, 17 nt, Human
auuaaaccaucucccug

SEQ ID NO: 1390405 - RNA, 16 nt, Human
auuaaaccaucucccu

SEQ ID NO: 1390406 - RNA, 14 nt, Human
auuaaaccaucucc

SEQ ID NO: 1390407 - RNA, 14 nt, Human
auuaaaagaauauc

SEQ ID NO: 1390408 - RNA, 16 nt, Human
auuaaaagaauaucug

SEQ ID NO: 1390409 - RNA, 19 nt, Human
auuaaacuuuuaauucauu

SEQ ID NO: 1390410 - RNA, 18 nt, Human
auuaaacuuuuaauucau

SEQ ID NO: 1390411 - RNA, 16 nt, Human
auuaaacuuaaucuaa

SEQ ID NO: 1390412 - RNA, 21 nt, Human
auuaaacgauuuuuaaaaugu

SEQ ID NO: 1390413 - RNA, 22 nt, Human
auuaaacgauuuuuaaaaugua

SEQ ID NO: 1390414 - RNA, 15 nt, Human
auuaaacgauuuuua

SEQ ID NO: 1390415 - RNA, 14 nt, Human
auuaaacgauuuuu

SEQ ID NO: 1390416 - RNA, 17 nt, Human
auuaaaccggaccaucu

SEQ ID NO: 1390417 - RNA, 15 nt, Human
auuaaaaaucucaaa

SEQ ID NO: 1390418 - RNA, 19 nt, Human
auuaaaaaucucaaauuuc

SEQ ID NO: 1390419 - RNA, 20 nt, Human
auuaaaaaucucaaauuucu

SEQ ID NO: 1390420 - RNA, 22 nt, Human
auuaaaaaucucaaauuucuaa

SEQ ID NO: 1390421 - RNA, 17 nt, Human
auguuuaguaaucauau

SEQ ID NO: 1390422 - RNA, 14 nt, Human
auguuguugaaagg

SEQ ID NO: 1390423 - RNA, 17 nt, Human
auguuguuauuuaaaga

SEQ ID NO: 1390424 - RNA, 15 nt, Human
auguuguuauuuaaa

SEQ ID NO: 1390425 - RNA, 14 nt, Human
auguuguuauuuaa

SEQ ID NO: 1390426 - RNA, 13 nt, Human
auguuguuauuua

SEQ ID NO: 1390427 - RNA, 12 nt, Human
auguuguuauuu

SEQ ID NO: 1390428 - RNA, 15 nt, Human
auguuguguuuuuaa

SEQ ID NO: 1390429 - RNA, 18 nt, Human
uuuucugugccugaauau

SEQ ID NO: 1390430 - RNA, 17 nt, Human
uuuucugugccugaaua

SEQ ID NO: 1390431 - RNA, 17 nt, Human
uuuucuguauaaauguc

SEQ ID NO: 1390432 - RNA, 21 nt, Human
uuuucuguaccaguuaauuuu

SEQ ID NO: 1390433 - RNA, 14 nt, Human
uuuucuguaccagu

SEQ ID NO: 1390434 - RNA, 14 nt, Human
uuuucuguaauuca

SEQ ID NO: 1390435 - RNA, 17 nt, Human
uuuucugguucuaacau

SEQ ID NO: 1390436 - RNA, 15 nt, Human
uuuucugguucuaac

SEQ ID NO: 1390437 - RNA, 14 nt, Human
uuuucugguucuaa

SEQ ID NO: 1390438 - RNA, 14 nt, Human
auguuuaucugcuu

SEQ ID NO: 1390439 - RNA, 23 nt, Human
auguuuuggccaaugcaccuaaa

SEQ ID NO: 1390440 - RNA, 21 nt, Human
auguuuucaggcuagauguau

SEQ ID NO: 1390441 - RNA, 17 nt, Human
auguuuucaggcuagau

SEQ ID NO: 1390442 - RNA, 15 nt, Human
uuuucaguuguucuu

SEQ ID NO: 1390443 - RNA, 13 nt, Human
uuuucaguuacuu

SEQ ID NO: 1390444 - RNA, 17 nt, Human
uuuuauuuucaaaacca

SEQ ID NO: 1390445 - RNA, 15 nt, Human
uuuuauuugcaugug

SEQ ID NO: 1390446 - RNA, 11 nt, Human
uuuuauuuuau

SEQ ID NO: 1390447 - RNA, 16 nt, Human
uuuucauaggucugaa

SEQ ID NO: 1390448 - RNA, 17 nt, Human
uuuucauaggucugaaa

SEQ ID NO: 1390449 - RNA, 15 nt, Human
uuuucauaggucuga

SEQ ID NO: 1390450 - RNA, 21 nt, Human
uuuucauacauuuucuaagaa

SEQ ID NO: 1390451 - RNA, 18 nt, Human
uuuucauacauuuucuaa

SEQ ID NO: 1390452 - RNA, 16 nt, Human
uuuucauacauuuucu

SEQ ID NO: 1390453 - RNA, 12 nt, Human
uuuucaguuguu

SEQ ID NO: 1390454 - RNA, 22 nt, Human
uuuucaguuuauuugaaccaau

SEQ ID NO: 1390455 - RNA, 13 nt, Human
uuuuauuuaaaaa

SEQ ID NO: 1390456 - RNA, 23 nt, Human
uuuuauuaguauuguuguccuuu

SEQ ID NO: 1390457 - RNA, 22 nt, Human
uuuuauuaguauuguuguccuu

SEQ ID NO: 1390458 - RNA, 20 nt, Human
uuuuauuaguauuguugucc

SEQ ID NO: 1390459 - RNA, 13 nt, Human
uuuuauuaugcau

SEQ ID NO: 1390460 - RNA, 13 nt, Human
uuuuagguucuaa

SEQ ID NO: 1390461 - RNA, 12 nt, Human
uuuuagguucua

SEQ ID NO: 1390462 - RNA, 14 nt, Human
uuuuauuaaugcac

SEQ ID NO: 1390463 - RNA, 23 nt, Human
uuuuagguucuaaaguucuaaga

SEQ ID NO: 1390464 - RNA, 18 nt, Human
uuuuagguucuaaaguuc

SEQ ID NO: 1390465 - RNA, 16 nt, Human
uuuuagguucuaaagu

SEQ ID NO: 1390466 - RNA, 15 nt, Human
uuuuagguucuaaag

SEQ ID NO: 1390467 - RNA, 14 nt, Human
uuuuagguucuaaa

SEQ ID NO: 1390468 - RNA, 15 nt, Human
uuuuauuaguauugu

SEQ ID NO: 1390469 - RNA, 19 nt, Human
uuuuauuaauuuuaguuuu

SEQ ID NO: 1390470 - RNA, 19 nt, Human
uuuuauuaaugcacuuucu

SEQ ID NO: 1390471 - RNA, 12 nt, Human
uuuuauuaugaa

SEQ ID NO: 1390472 - RNA, 21 nt, Human
uuuucuccucacuguauccag

SEQ ID NO: 1390473 - RNA, 13 nt, Human
uuuucauuuaucu

SEQ ID NO: 1390474 - RNA, 21 nt, Human
uuuucaucuucaguugucucu

SEQ ID NO: 1390475 - RNA, 16 nt, Human
uuuucaucuucaguug

SEQ ID NO: 1390476 - RNA, 14 nt, Human
uuuucaucuucagu

SEQ ID NO: 1390477 - RNA, 20 nt, Human
uuuucauccauaacugaaca

SEQ ID NO: 1390478 - RNA, 18 nt, Human
uuuucauccauaacugaa

SEQ ID NO: 1390479 - RNA, 17 nt, Human
uuuucaugcaaacucuu

SEQ ID NO: 1390480 - RNA, 19 nt, Human
uuuucaucuucaguugucu

SEQ ID NO: 1390481 - RNA, 16 nt, Human
uuuucucuaggaaaua

SEQ ID NO: 1390482 - RNA, 21 nt, Human
uuuucucgcuguccuuucuag

SEQ ID NO: 1390483 - RNA, 19 nt, Human
uuuucuccucccaggaacu

SEQ ID NO: 1390484 - RNA, 14 nt, Human
uuuucuccucccag

SEQ ID NO: 1390485 - RNA, 13 nt, Human
uuuucuccuccca

SEQ ID NO: 1390486 - RNA, 14 nt, Human
uuuucucuaggaaa

SEQ ID NO: 1390487 - RNA, 20 nt, Human
uuuucuggccaguguuuaaa

SEQ ID NO: 1390488 - RNA, 22 nt, Human
auguugccauccuaccgucuuu

SEQ ID NO: 1390489 - RNA, 22 nt, Human
auguucagcacugucccuugcc

SEQ ID NO: 1390490 - RNA, 19 nt, Human
auguucagcacugucccuu

SEQ ID NO: 1390491 - RNA, 16 nt, Human
auguucagcacugucc

SEQ ID NO: 1390492 - RNA, 17 nt, Human
auguugcauagaauaaa

SEQ ID NO: 1390493 - RNA, 18 nt, Human
auguugcauagaauaaaa

SEQ ID NO: 1390494 - RNA, 23 nt, Human
uuuuaggagcuaaggcucuauga

SEQ ID NO: 1390495 - RNA, 20 nt, Human
uuuuaggagcuaaggcucua

SEQ ID NO: 1390496 - RNA, 18 nt, Human
uuuuaggaagcaagcuua

SEQ ID NO: 1390497 - RNA, 11 nt, Human
uuuuaggaaau

SEQ ID NO: 1390498 - RNA, 12 nt, Human
uuuuaggaaaug

SEQ ID NO: 1390499 - RNA, 13 nt, Human
uuuuagcuuuugu

SEQ ID NO: 1390500 - RNA, 14 nt, Human
uuuuagaaagcauu

SEQ ID NO: 1390501 - RNA, 16 nt, Human
uuuuagaaagcauuug

SEQ ID NO: 1390502 - RNA, 18 nt, Human
uuuuagaaagcauuugaa

SEQ ID NO: 1390503 - RNA, 19 nt, Human
uuuuagaaagcauuugaau

SEQ ID NO: 1390504 - RNA, 20 nt, Human
uuuuagaaagcauuugaaug

SEQ ID NO: 1390505 - RNA, 21 nt, Human
uuuuagaaagcauuugaaugc

SEQ ID NO: 1390506 - RNA, 22 nt, Human
uuuuagaaagcauuugaaugca

SEQ ID NO: 1390507 - RNA, 23 nt, Human
uuuuagaaagcauuugaaugcau

SEQ ID NO: 1390508 - RNA, 12 nt, Human
uuuuacuuuugu

SEQ ID NO: 1390509 - RNA, 20 nt, Human
uuuuacuuuuaaacugugua

SEQ ID NO: 1390510 - RNA, 18 nt, Human
uuuuacuuuuaaacugug

SEQ ID NO: 1390511 - RNA, 17 nt, Human
uuuuacuuuuaaacugu

SEQ ID NO: 1390512 - RNA, 20 nt, Human
auguugcccuguugcugccu

SEQ ID NO: 1390513 - RNA, 15 nt, Human
auguuaaaauguguu

SEQ ID NO: 1390514 - RNA, 14 nt, Human
auguuaaaaugugu

SEQ ID NO: 1390515 - RNA, 21 nt, Human
auguuaaaaaaauaagaagaa

SEQ ID NO: 1390516 - RNA, 12 nt, Human
auguuaaaaugu

SEQ ID NO: 1390517 - RNA, 22 nt, Human
auguuaaaaaaauaagaagaau

SEQ ID NO: 1390518 - RNA, 19 nt, Human
auguuaaaaaaauaagaag

SEQ ID NO: 1390519 - RNA, 17 nt, Human
auguguuuacuuuaugu

SEQ ID NO: 1390520 - RNA, 22 nt, Human
auguguuggggaagggccugcc

SEQ ID NO: 1390521 - RNA, 23 nt, Human
auguguguuuugcuaaaggaaaa

SEQ ID NO: 1390522 - RNA, 16 nt, Human
auguuaaaauguguug

SEQ ID NO: 1390523 - RNA, 24 nt, Human
auguuaaacuagcauaucugccuu

SEQ ID NO: 1390524 - RNA, 21 nt, Human
auguuaaacuagcauaucugc

SEQ ID NO: 1390525 - RNA, 23 nt, Human
auguuaaacuagcauaucugccu

SEQ ID NO: 1390526 - RNA, 15 nt, Human
auguuaaacuagcau

SEQ ID NO: 1390527 - RNA, 19 nt, Human
auguuaaacuagcauaucu

SEQ ID NO: 1390528 - RNA, 17 nt, Human
auguuacuacaugcacu

SEQ ID NO: 1390529 - RNA, 14 nt, Human
auguuaaguuauau

SEQ ID NO: 1390530 - RNA, 15 nt, Human
auguuaauauugauu

SEQ ID NO: 1390531 - RNA, 20 nt, Human
auguuaagggaagaauucca

SEQ ID NO: 1390532 - RNA, 12 nt, Human
auguuagccagg

SEQ ID NO: 1390533 - RNA, 22 nt, Human
auguucacuuuugacaaaggca

SEQ ID NO: 1390534 - RNA, 20 nt, Human
auguucacuuuugacaaagg

SEQ ID NO: 1390535 - RNA, 23 nt, Human
auguucagaagguugcucuagau

SEQ ID NO: 1390536 - RNA, 16 nt, Human
auguucagauuauugg

SEQ ID NO: 1390537 - RNA, 20 nt, Human
uuuuaaguuucucugcagaa

SEQ ID NO: 1390538 - RNA, 19 nt, Human
uuuuaaguuucucugcaga

SEQ ID NO: 1390539 - RNA, 14 nt, Human
uuuuaauaaacacu

SEQ ID NO: 1390540 - RNA, 14 nt, Human
uuuuaauaauguuu

SEQ ID NO: 1390541 - RNA, 13 nt, Human
uuuuaauaauguu

SEQ ID NO: 1390542 - RNA, 14 nt, Human
uuuuaauaaauuuc

SEQ ID NO: 1390543 - RNA, 12 nt, Human
uuuuaauaaauu

SEQ ID NO: 1390544 - RNA, 15 nt, Human
uuuuaauaaaagaaa

SEQ ID NO: 1390545 - RNA, 19 nt, Human
uuuuaauaaaaauaauuuu

SEQ ID NO: 1390546 - RNA, 12 nt, Human
uuuuaauaaugu

SEQ ID NO: 1390547 - RNA, 16 nt, Human
uuuuaauaauguuuca

SEQ ID NO: 1390548 - RNA, 19 nt, Human
augugcccaguuaaucuug

SEQ ID NO: 1390549 - RNA, 20 nt, Human
uuuuaauaauguuucaaaca

SEQ ID NO: 1390550 - RNA, 20 nt, Human
augugccuauugcuagagcu

SEQ ID NO: 1390551 - RNA, 23 nt, Human
augugccuauugcuagagcuccu

SEQ ID NO: 1390552 - RNA, 19 nt, Human
augugccuauugcuagagc

SEQ ID NO: 1390553 - RNA, 11 nt, Human
augugccuauu

SEQ ID NO: 1390554 - RNA, 19 nt, Human
augugcuaguaauuggaaa

SEQ ID NO: 1390555 - RNA, 18 nt, Human
auguggccccugaacaag

SEQ ID NO: 1390556 - RNA, 13 nt, Human
auguggcaggggu

SEQ ID NO: 1390557 - RNA, 18 nt, Human
auguggcaaggaaaaaca

SEQ ID NO: 1390558 - RNA, 18 nt, Human
auguggaccuuagaauac

SEQ ID NO: 1390559 - RNA, 20 nt, Human
augugcuaguaauuggaaag

SEQ ID NO: 1390560 - RNA, 20 nt, Human
auguggcuggaagauccugc

SEQ ID NO: 1390561 - RNA, 14 nt, Human
auguggcuggaaga

SEQ ID NO: 1390562 - RNA, 13 nt, Human
auguggcuggaag

SEQ ID NO: 1390563 - RNA, 22 nt, Human
auguggccccugaacaagaauu

SEQ ID NO: 1390564 - RNA, 20 nt, Human
auguggccccugaacaagaa

SEQ ID NO: 1390565 - RNA, 16 nt, Human
auguguguuuugcuaa

SEQ ID NO: 1390566 - RNA, 23 nt, Human
auguguguuuuaaaaugagaaau

SEQ ID NO: 1390567 - RNA, 18 nt, Human
auuuugguccaaguugug

SEQ ID NO: 1390568 - RNA, 15 nt, Human
auuuuaaagaccccu

SEQ ID NO: 1390569 - RNA, 17 nt, Human
auuugugacaaaaaauu

SEQ ID NO: 1390570 - RNA, 15 nt, Human
auuugugacaaaaaa

SEQ ID NO: 1390571 - RNA, 14 nt, Human
auuugugacaaaaa

SEQ ID NO: 1390572 - RNA, 14 nt, Human
auuugugauacaau

SEQ ID NO: 1390573 - RNA, 15 nt, Human
auuugugauacaaug

SEQ ID NO: 1390574 - RNA, 17 nt, Human
auuuguuuuuaaacugu

SEQ ID NO: 1390575 - RNA, 16 nt, Human
auuuguuuuuaaacug

SEQ ID NO: 1390576 - RNA, 18 nt, Human
auuuguuuuguuuacaga

SEQ ID NO: 1390577 - RNA, 16 nt, Human
auuuguuuuguuuaca

SEQ ID NO: 1390578 - RNA, 15 nt, Human
auuuguuuuguuuac

SEQ ID NO: 1390579 - RNA, 16 nt, Human
auuuguuuuggauaua

SEQ ID NO: 1390580 - RNA, 15 nt, Human
auuuguuuuggauau

SEQ ID NO: 1390581 - RNA, 21 nt, Human
auuuguuuuuaaacuguacag

SEQ ID NO: 1390582 - RNA, 22 nt, Human
auuuguuuuuaaacuguacagu

SEQ ID NO: 1390583 - RNA, 20 nt, Human
auuuguuuuuaaacuguaca

SEQ ID NO: 1390584 - RNA, 18 nt, Human
auuuguuuuuaaacugua

SEQ ID NO: 1390585 - RNA, 17 nt, Human
auuuuaaaagaaugauu

SEQ ID NO: 1390586 - RNA, 23 nt, Human
auuugaaucagccuacaggccuc

SEQ ID NO: 1390587 - RNA, 14 nt, Human
auuugaaucuuguc

SEQ ID NO: 1390588 - RNA, 15 nt, Human
auuugaaucuugucu

SEQ ID NO: 1390589 - RNA, 16 nt, Human
auuugaaucuugucuc

SEQ ID NO: 1390590 - RNA, 18 nt, Human
auuugaaucuugucucaa

SEQ ID NO: 1390591 - RNA, 20 nt, Human
auuugaaucuugucucaaug

SEQ ID NO: 1390592 - RNA, 22 nt, Human
auuugaaucuugucucaaugcu

SEQ ID NO: 1390593 - RNA, 14 nt, Human
auuugaaucagccu

SEQ ID NO: 1390594 - RNA, 13 nt, Human
auuugaaguguaa

SEQ ID NO: 1390595 - RNA, 21 nt, Human
auuuguauaaaauaauuuuua

SEQ ID NO: 1390596 - RNA, 19 nt, Human
auuuguauaaaauaauuuu

SEQ ID NO: 1390597 - RNA, 18 nt, Human
auuuguauaaaauaauuu

SEQ ID NO: 1390598 - RNA, 23 nt, Human
auuuuaauuauuauucuucauaa

SEQ ID NO: 1390599 - RNA, 17 nt, Human
auuuuacauaaauuuag

SEQ ID NO: 1390600 - RNA, 16 nt, Human
auuuuacauaaauuua

SEQ ID NO: 1390601 - RNA, 13 nt, Human
auuuuacaugaag

SEQ ID NO: 1390602 - RNA, 19 nt, Human
auuuuacaugaaguauuuu

SEQ ID NO: 1390603 - RNA, 14 nt, Human
auuuuacaugaagu

SEQ ID NO: 1390604 - RNA, 12 nt, Human
auuuuacauuaa

SEQ ID NO: 1390605 - RNA, 15 nt, Human
auuuuacauuaaauu

SEQ ID NO: 1390606 - RNA, 17 nt, Human
auuuuaccuuugacaaa

SEQ ID NO: 1390607 - RNA, 19 nt, Human
auuuuaauuauuauucuuc

SEQ ID NO: 1390608 - RNA, 13 nt, Human
auuuuaauuauua

SEQ ID NO: 1390609 - RNA, 12 nt, Human
auuuuaaagaca

SEQ ID NO: 1390610 - RNA, 17 nt, Human
auuuuaaagaauugugu

SEQ ID NO: 1390611 - RNA, 13 nt, Human
auuuuaaagaauu

SEQ ID NO: 1390612 - RNA, 12 nt, Human
auuuuaaagaau

SEQ ID NO: 1390613 - RNA, 15 nt, Human
auuuuaaacagagga

SEQ ID NO: 1390614 - RNA, 23 nt, Human
auuuuaaacacauuaggaaaagu

SEQ ID NO: 1390615 - RNA, 14 nt, Human
auuuuaaacacauu

SEQ ID NO: 1390616 - RNA, 13 nt, Human
auuuuaaacacau

SEQ ID NO: 1390617 - RNA, 15 nt, Human
auuuuaaaauuuguu

SEQ ID NO: 1390618 - RNA, 22 nt, Human
auuuuaaacaaagguugagaug

SEQ ID NO: 1390619 - RNA, 13 nt, Human
auuuuaaacaaag

SEQ ID NO: 1390620 - RNA, 22 nt, Human
auuuuaaaagaaugauuaugaa

SEQ ID NO: 1390621 - RNA, 18 nt, Human
auuuuaaaagaaugauua

SEQ ID NO: 1390622 - RNA, 17 nt, Human
auuuuaaaauuuguucu

SEQ ID NO: 1390623 - RNA, 14 nt, Human
auuuuaaaauuugu

SEQ ID NO: 1390624 - RNA, 13 nt, Human
auuuuaaaauuug

SEQ ID NO: 1390625 - RNA, 16 nt, Human
auuuuaaaaaaugguc

SEQ ID NO: 1390626 - RNA, 17 nt, Human
auuuuaaaaaaugguca

SEQ ID NO: 1390627 - RNA, 19 nt, Human
auuuucagcaaacucuuuu

SEQ ID NO: 1390628 - RNA, 18 nt, Human
auuuucagcaaacucuuu

SEQ ID NO: 1390629 - RNA, 17 nt, Human
auuuucagcaaacucuu

SEQ ID NO: 1390630 - RNA, 22 nt, Human
auuuucauaaguauuucaaauu

SEQ ID NO: 1390631 - RNA, 21 nt, Human
auuuucauaaguauuucaaau

SEQ ID NO: 1390632 - RNA, 20 nt, Human
auuuucauaaguauuucaaa

SEQ ID NO: 1390633 - RNA, 22 nt, Human
auuuucaguuauuauauuuaca

SEQ ID NO: 1390634 - RNA, 14 nt, Human
auuuuccaaaugua

SEQ ID NO: 1390635 - RNA, 14 nt, Human
auuuuccaaagagu

SEQ ID NO: 1390636 - RNA, 17 nt, Human
auuuucauccuugucuu

SEQ ID NO: 1390637 - RNA, 20 nt, Human
auuuuccuauauuacgguuu

SEQ ID NO: 1390638 - RNA, 21 nt, Human
auuuuccuaauaaaguucugu

SEQ ID NO: 1390639 - RNA, 21 nt, Human
auuuuccaggcuucugcuggg

SEQ ID NO: 1390640 - RNA, 15 nt, Human
auuuuccaggcuucu

SEQ ID NO: 1390641 - RNA, 17 nt, Human
auuuuccaaauguaaua

SEQ ID NO: 1390642 - RNA, 17 nt, Human
auuuucaauagccacua

SEQ ID NO: 1390643 - RNA, 20 nt, Human
auuuucaauagccacuaacc

SEQ ID NO: 1390644 - RNA, 16 nt, Human
auuuucaauagccacu

SEQ ID NO: 1390645 - RNA, 13 nt, Human
auuuucacuguag

SEQ ID NO: 1390646 - RNA, 24 nt, Human
auuuucaagaauaaucacgcuuuc

SEQ ID NO: 1390647 - RNA, 23 nt, Human
auuuucaagaaacugaggaauuu

SEQ ID NO: 1390648 - RNA, 22 nt, Human
auuuucaagaaacugaggaauu

SEQ ID NO: 1390649 - RNA, 17 nt, Human
auuuucaagaaacugag

SEQ ID NO: 1390650 - RNA, 16 nt, Human
auuuucaagaaacuga

SEQ ID NO: 1390651 - RNA, 14 nt, Human
auuuucaagaaacu

SEQ ID NO: 1390652 - RNA, 13 nt, Human
auuuucaagaaac

SEQ ID NO: 1390653 - RNA, 22 nt, Human
auuuucaaagcuuuuuccagag

SEQ ID NO: 1390654 - RNA, 17 nt, Human
auuuucaaagacuuaag

SEQ ID NO: 1390655 - RNA, 16 nt, Human
auuuucaaagacuuaa

SEQ ID NO: 1390656 - RNA, 21 nt, Human
auuuuagccuucucuguucau

SEQ ID NO: 1390657 - RNA, 18 nt, Human
auuuuagccuucucuguu

SEQ ID NO: 1390658 - RNA, 17 nt, Human
auuuuagccuucucugu

SEQ ID NO: 1390659 - RNA, 13 nt, Human
auuuuagcagaga

SEQ ID NO: 1390660 - RNA, 15 nt, Human
auuuucaaagacuua

SEQ ID NO: 1390661 - RNA, 16 nt, Human
auuuucaaaaccaggu

SEQ ID NO: 1390662 - RNA, 17 nt, Human
auuuucaaaaccagguc

SEQ ID NO: 1390663 - RNA, 15 nt, Human
auuuucaaaaccagg

SEQ ID NO: 1390664 - RNA, 21 nt, Human
auuuuauuuuuuucugaauua

SEQ ID NO: 1390665 - RNA, 23 nt, Human
auuuagaagccaacuaugauuau

SEQ ID NO: 1390666 - RNA, 22 nt, Human
auuuagaagccaacuaugauua

SEQ ID NO: 1390667 - RNA, 21 nt, Human
auuuagaagccaacuaugauu

SEQ ID NO: 1390668 - RNA, 13 nt, Human
auuuagaagccaa

SEQ ID NO: 1390669 - RNA, 12 nt, Human
auuuagaagcca

SEQ ID NO: 1390670 - RNA, 18 nt, Human
auuuagaaaacuuuaaag

SEQ ID NO: 1390671 - RNA, 23 nt, Human
auuuaaaaauaagucaacaguaa

SEQ ID NO: 1390672 - RNA, 22 nt, Human
auuuaaaaauaagucaacagua

SEQ ID NO: 1390673 - RNA, 19 nt, Human
auuuaaaaauaagucaaca

SEQ ID NO: 1390674 - RNA, 18 nt, Human
auuuaaaaauaagucaac

SEQ ID NO: 1390675 - RNA, 12 nt, Human
auuuaaaaauaa

SEQ ID NO: 1390676 - RNA, 22 nt, Human
auuuaaaaaacuaaaaacuaga

SEQ ID NO: 1390677 - RNA, 17 nt, Human
auuuaaaaaacuaaaaa

SEQ ID NO: 1390678 - RNA, 13 nt, Human
auuuaaaaaacua

SEQ ID NO: 1390679 - RNA, 13 nt, Human
auuuaacagaaau

SEQ ID NO: 1390680 - RNA, 15 nt, Human
auuuaacagaaaugu

SEQ ID NO: 1390681 - RNA, 14 nt, Human
auuuaacagaaaug

SEQ ID NO: 1390682 - RNA, 13 nt, Human
auuuaacaagauc

SEQ ID NO: 1390683 - RNA, 17 nt, Human
auuuaaauuuuuuuccu

SEQ ID NO: 1390684 - RNA, 23 nt, Human
auuuaaauguuaugacuauguaa

SEQ ID NO: 1390685 - RNA, 12 nt, Human
auuuaacagaaa

SEQ ID NO: 1390686 - RNA, 16 nt, Human
auuuagucaugugacc

SEQ ID NO: 1390687 - RNA, 18 nt, Human
auuuaguauuuuguuuca

SEQ ID NO: 1390688 - RNA, 20 nt, Human
auuuaguaucuuuuuauuca

SEQ ID NO: 1390689 - RNA, 21 nt, Human
auuuagugaucaaauugugca

SEQ ID NO: 1390690 - RNA, 13 nt, Human
auuuagugagcau

SEQ ID NO: 1390691 - RNA, 14 nt, Human
auuuagucauguga

SEQ ID NO: 1390692 - RNA, 13 nt, Human
auuuaguguucau

SEQ ID NO: 1390693 - RNA, 14 nt, Human
auuuagauuugugu

SEQ ID NO: 1390694 - RNA, 17 nt, Human
auuuagaugauaaagag

SEQ ID NO: 1390695 - RNA, 23 nt, Human
auuuagacuuggauucuuuccau

SEQ ID NO: 1390696 - RNA, 19 nt, Human
auuuagacuuggauucuuu

SEQ ID NO: 1390697 - RNA, 13 nt, Human
auuuagauguaua

SEQ ID NO: 1390698 - RNA, 16 nt, Human
auuuauaaaaaggugu

SEQ ID NO: 1390699 - RNA, 23 nt, Human
auuuaguuucaguagauugcaga

SEQ ID NO: 1390700 - RNA, 22 nt, Human
auuuaguuugauuauucagugu

SEQ ID NO: 1390701 - RNA, 15 nt, Human
auuuaguuugauuau

SEQ ID NO: 1390702 - RNA, 20 nt, Human
auuuaguuucaguagauugc

SEQ ID NO: 1390703 - RNA, 14 nt, Human
auuuaguuucagua

SEQ ID NO: 1390704 - RNA, 12 nt, Human
auuuaguuucag

SEQ ID NO: 1390705 - RNA, 15 nt, Human
auuuaguguauccau

SEQ ID NO: 1390706 - RNA, 17 nt, Human
auuuauaaaaauaaaaa

SEQ ID NO: 1390707 - RNA, 22 nt, Human
auuuauaaaaauaaaaaacacu

SEQ ID NO: 1390708 - RNA, 20 nt, Human
auuuauuaauauauauuauc

SEQ ID NO: 1390709 - RNA, 12 nt, Human
auuuauuaauau

SEQ ID NO: 1390710 - RNA, 23 nt, Human
auuuauaaaaauaaaaaacacug

SEQ ID NO: 1390711 - RNA, 22 nt, Human
auuuauucaauaaaguauuuaa

SEQ ID NO: 1390712 - RNA, 11 nt, Human
auuuauucaau

SEQ ID NO: 1390713 - RNA, 13 nt, Human
auuuauucaauaa

SEQ ID NO: 1390714 - RNA, 14 nt, Human
auuuauucaauaaa

SEQ ID NO: 1390715 - RNA, 15 nt, Human
auuuauucaauaaag

SEQ ID NO: 1390716 - RNA, 16 nt, Human
auuuauucaauaaagu

SEQ ID NO: 1390717 - RNA, 17 nt, Human
auuuauucaauaaagua

SEQ ID NO: 1390718 - RNA, 18 nt, Human
auuuauucaauaaaguau

SEQ ID NO: 1390719 - RNA, 21 nt, Human
auuuauucaauaaaguauuua

SEQ ID NO: 1390720 - RNA, 13 nt, Human
auuuccacugugc

SEQ ID NO: 1390721 - RNA, 18 nt, Human
auuucauuucaacuguuu

SEQ ID NO: 1390722 - RNA, 17 nt, Human
auuucaaauuggagcuu

SEQ ID NO: 1390723 - RNA, 16 nt, Human
auuucaaaaugcuuuu

SEQ ID NO: 1390724 - RNA, 21 nt, Human
auuucaaaaugcuuuuuauua

SEQ ID NO: 1390725 - RNA, 15 nt, Human
auuucaaaaugcuuu

SEQ ID NO: 1390726 - RNA, 14 nt, Human
auuucaaaaugcuu

SEQ ID NO: 1390727 - RNA, 13 nt, Human
auuucaaaaugcu

SEQ ID NO: 1390728 - RNA, 21 nt, Human
auuuauuuuaauaauguuuca

SEQ ID NO: 1390729 - RNA, 20 nt, Human
auuuauuuuaauaauguuuc

SEQ ID NO: 1390730 - RNA, 19 nt, Human
auuuauuuuaauaauguuu

SEQ ID NO: 1390731 - RNA, 21 nt, Human
auuucuagcuuaucuacuucc

SEQ ID NO: 1390732 - RNA, 18 nt, Human
auuucuagcuuaucuacu

SEQ ID NO: 1390733 - RNA, 16 nt, Human
auuucuagcuuaucua

SEQ ID NO: 1390734 - RNA, 18 nt, Human
auuucuacuuugaaguca

SEQ ID NO: 1390735 - RNA, 18 nt, Human
auuucuaccauuucagag

SEQ ID NO: 1390736 - RNA, 17 nt, Human
auuucuaccauuucaga

SEQ ID NO: 1390737 - RNA, 22 nt, Human
auuucuaauuauguagcucuuu

SEQ ID NO: 1390738 - RNA, 21 nt, Human
auuucuaauuauguagcucuu

SEQ ID NO: 1390739 - RNA, 17 nt, Human
auuuccguuaaaauacc

SEQ ID NO: 1390740 - RNA, 16 nt, Human
auuuccccuccuuccc

SEQ ID NO: 1390741 - RNA, 15 nt, Human
auuuccccuccuucc

SEQ ID NO: 1390742 - RNA, 15 nt, Human
auuuccguuaaaaua

SEQ ID NO: 1390743 - RNA, 16 nt, Human
auuuccguuaaaauac

SEQ ID NO: 1390744 - RNA, 22 nt, Human
auuucuuuuuuaaaugaagaaa

SEQ ID NO: 1390745 - RNA, 18 nt, Human
auuucuuuuuuaaaugaa

SEQ ID NO: 1390746 - RNA, 21 nt, Human
auuucuuuuugggagagacuu

SEQ ID NO: 1390747 - RNA, 20 nt, Human
auuucuuuuugggagagacu

SEQ ID NO: 1390748 - RNA, 23 nt, Human
auuucuuuuugggagagacuugu

SEQ ID NO: 1390749 - RNA, 21 nt, Human
auuucuuuuuuaaaugaagaa

SEQ ID NO: 1390750 - RNA, 14 nt, Human
auuugaaaauuuug

SEQ ID NO: 1390751 - RNA, 14 nt, Human
auuugaaauauuga

SEQ ID NO: 1390752 - RNA, 15 nt, Human
auuugaaaauuuuga

SEQ ID NO: 1390753 - RNA, 16 nt, Human
auuugaaauaagaauu

SEQ ID NO: 1390754 - RNA, 15 nt, Human
auuugaaauaagaau

SEQ ID NO: 1390755 - RNA, 16 nt, Human
auuugaagaacaugug

SEQ ID NO: 1390756 - RNA, 20 nt, Human
auuugaacuuuuuauugauu

SEQ ID NO: 1390757 - RNA, 14 nt, Human
auuugaaccaauaa

SEQ ID NO: 1390758 - RNA, 22 nt, Human
auugaaaauguccaggaaagug

SEQ ID NO: 1390759 - RNA, 16 nt, Human
auugggccagcuuuuc

SEQ ID NO: 1390760 - RNA, 15 nt, Human
auuggguaucaccac

SEQ ID NO: 1390761 - RNA, 14 nt, Human
auugggguuauuuu

SEQ ID NO: 1390762 - RNA, 12 nt, Human
auugggguuauu

SEQ ID NO: 1390763 - RNA, 13 nt, Human
auugggguaguug

SEQ ID NO: 1390764 - RNA, 17 nt, Human
auugggggaggaaaagu

SEQ ID NO: 1390765 - RNA, 22 nt, Human
auucuuuuauacucagcuuucu

SEQ ID NO: 1390766 - RNA, 21 nt, Human
auucuucucuuccuuuuauca

SEQ ID NO: 1390767 - RNA, 15 nt, Human
auucuucucuuccuu

SEQ ID NO: 1390768 - RNA, 16 nt, Human
auucuucucuguuguc

SEQ ID NO: 1390769 - RNA, 15 nt, Human
auucuucucuguugu

SEQ ID NO: 1390770 - RNA, 14 nt, Human
auucuucuagaguu

SEQ ID NO: 1390771 - RNA, 13 nt, Human
auucuucuagagu

SEQ ID NO: 1390772 - RNA, 12 nt, Human
auucuucuagag

SEQ ID NO: 1390773 - RNA, 16 nt, Human
auucugguuccagggu

SEQ ID NO: 1390774 - RNA, 16 nt, Human
auucugggggcugcag

SEQ ID NO: 1390775 - RNA, 16 nt, Human
auucuggaccucuggg

SEQ ID NO: 1390776 - RNA, 12 nt, Human
auucuggaccuc

SEQ ID NO: 1390777 - RNA, 15 nt, Human
auucuggacaggaug

SEQ ID NO: 1390778 - RNA, 22 nt, Human
auucuggacaggauguguuugc

SEQ ID NO: 1390779 - RNA, 19 nt, Human
auucugcuggccucugcga

SEQ ID NO: 1390780 - RNA, 18 nt, Human
auucugcuggccucugcg

SEQ ID NO: 1390781 - RNA, 16 nt, Human
auucugcuggccucug

SEQ ID NO: 1390782 - RNA, 13 nt, Human
auucugcuggccu

SEQ ID NO: 1390783 - RNA, 13 nt, Human
auucugcuccuuc

SEQ ID NO: 1390784 - RNA, 23 nt, Human
auucugcaguaaaucuuuuacaa

SEQ ID NO: 1390785 - RNA, 21 nt, Human
auucugcaguaaaucuuuuac

SEQ ID NO: 1390786 - RNA, 20 nt, Human
auucugcaguaaaucuuuua

SEQ ID NO: 1390787 - RNA, 18 nt, Human
auucugcaguaaaucuuu

SEQ ID NO: 1390788 - RNA, 17 nt, Human
auucugcaguaaaucuu

SEQ ID NO: 1390789 - RNA, 14 nt, Human
auucugcaaguaua

SEQ ID NO: 1390790 - RNA, 17 nt, Human
auucuccuuguguuacu

SEQ ID NO: 1390791 - RNA, 18 nt, Human
auucugucccuagguguu

SEQ ID NO: 1390792 - RNA, 17 nt, Human
auucugggggcugcagu

SEQ ID NO: 1390793 - RNA, 19 nt, Human
auucugguuccaggguccc

SEQ ID NO: 1390794 - RNA, 20 nt, Human
auucugugccuuguuuuuug

SEQ ID NO: 1390795 - RNA, 14 nt, Human
auucugucuugaag

SEQ ID NO: 1390796 - RNA, 24 nt, Human
auucugucucuggauuauauuaug

SEQ ID NO: 1390797 - RNA, 14 nt, Human
auuuaaaacagaca

SEQ ID NO: 1390798 - RNA, 18 nt, Human
auugugcaauguaaauau

SEQ ID NO: 1390799 - RNA, 17 nt, Human
auugugcaauguaaaua

SEQ ID NO: 1390800 - RNA, 15 nt, Human
auugugcaauguaaa

SEQ ID NO: 1390801 - RNA, 16 nt, Human
auugugauuggccugu

SEQ ID NO: 1390802 - RNA, 15 nt, Human
auugugauuggccug

SEQ ID NO: 1390803 - RNA, 23 nt, Human
auugugauuagacagaacaccua

SEQ ID NO: 1390804 - RNA, 22 nt, Human
auugugcaauguguauaaacaa

SEQ ID NO: 1390805 - RNA, 21 nt, Human
auugugcaauguguauaaaca

SEQ ID NO: 1390806 - RNA, 18 nt, Human
auugugcaauguguauaa

SEQ ID NO: 1390807 - RNA, 17 nt, Human
auugugcaauguguaua

SEQ ID NO: 1390808 - RNA, 16 nt, Human
auugugcaauguguau

SEQ ID NO: 1390809 - RNA, 15 nt, Human
auugugcaaugugua

SEQ ID NO: 1390810 - RNA, 20 nt, Human
auugugcaauguaaauauuu

SEQ ID NO: 1390811 - RNA, 20 nt, Human
auugugcaguacuuugugca

SEQ ID NO: 1390812 - RNA, 17 nt, Human
auugugucagacuguuu

SEQ ID NO: 1390813 - RNA, 22 nt, Human
auuguguagccuuuuuguauaa

SEQ ID NO: 1390814 - RNA, 18 nt, Human
auuguguagccuuuuugu

SEQ ID NO: 1390815 - RNA, 16 nt, Human
auuguguagccuuuuu

SEQ ID NO: 1390816 - RNA, 15 nt, Human
auuguguagccuuuu

SEQ ID NO: 1390817 - RNA, 14 nt, Human
auuguguagccuuu

SEQ ID NO: 1390818 - RNA, 21 nt, Human
auugugguuuauauauuuaaa

SEQ ID NO: 1390819 - RNA, 20 nt, Human
auugugguuuauauauuuaa

SEQ ID NO: 1390820 - RNA, 23 nt, Human
auugugaucagaccauaauguua

SEQ ID NO: 1390821 - RNA, 18 nt, Human
auugugauucugccuuug

SEQ ID NO: 1390822 - RNA, 22 nt, Human
auugugauuagacagaacaccu

SEQ ID NO: 1390823 - RNA, 16 nt, Human
auugugauuagacaga

SEQ ID NO: 1390824 - RNA, 18 nt, Human
auuguccaauccuauguu

SEQ ID NO: 1390825 - RNA, 18 nt, Human
auugguguuuuuuucuau

SEQ ID NO: 1390826 - RNA, 23 nt, Human
auuguauuuauucaauaaaguau

SEQ ID NO: 1390827 - RNA, 16 nt, Human
auuguauuuauucaau

SEQ ID NO: 1390828 - RNA, 18 nt, Human
auuguauuuauucaauaa

SEQ ID NO: 1390829 - RNA, 19 nt, Human
auuguauuuauucaauaaa

SEQ ID NO: 1390830 - RNA, 20 nt, Human
auuguauuuauucaauaaag

SEQ ID NO: 1390831 - RNA, 12 nt, Human
auuguauucugg

SEQ ID NO: 1390832 - RNA, 11 nt, Human
auuguauuuau

SEQ ID NO: 1390833 - RNA, 14 nt, Human
auuguauuuauuca

SEQ ID NO: 1390834 - RNA, 13 nt, Human
auuguauucagag

SEQ ID NO: 1390835 - RNA, 19 nt, Human
auugguguaagguacuuuc

SEQ ID NO: 1390836 - RNA, 18 nt, Human
aaaaacagguauauacuu

SEQ ID NO: 1390837 - RNA, 12 nt, Human
aaaaacaggcac

SEQ ID NO: 1390838 - RNA, 19 nt, Human
aaaaacagguauauacuuu

SEQ ID NO: 1390839 - RNA, 21 nt, Human
aaaaacagguauauacuuuga

SEQ ID NO: 1390840 - RNA, 15 nt, Human
aaaaacugagugacu

SEQ ID NO: 1390841 - RNA, 18 nt, Human
aaaaagaagcaaccucag

SEQ ID NO: 1390842 - RNA, 21 nt, Human
aaaaacuuuggaaccagacuc

SEQ ID NO: 1390843 - RNA, 14 nt, Human
aaaaagaagugcug

SEQ ID NO: 1390844 - RNA, 20 nt, Human
aaaaacuuuggaaccagacu

SEQ ID NO: 1390845 - RNA, 17 nt, Human
aaaaagaaugaagccuc

SEQ ID NO: 1390846 - RNA, 14 nt, Human
aaaaagaucccaaa

SEQ ID NO: 1390847 - RNA, 11 nt, Human
aaaaagauccc

SEQ ID NO: 1390848 - RNA, 19 nt, Human
aaaaagauaaacacaagau

SEQ ID NO: 1390849 - RNA, 13 nt, Human
aaaaagauaaaca

SEQ ID NO: 1390850 - RNA, 15 nt, Human
aaaaauugcugacug

SEQ ID NO: 1390851 - RNA, 14 nt, Human
aaaaauugaaaugu

SEQ ID NO: 1390852 - RNA, 22 nt, Human
aaaaauugaaauguaaggcugu

SEQ ID NO: 1390853 - RNA, 13 nt, Human
aaaaauugaaaug

SEQ ID NO: 1390854 - RNA, 20 nt, Human
aaaaauucagcaaagugguu

SEQ ID NO: 1390855 - RNA, 21 nt, Human
aaaaauuguuaauuuuuccua

SEQ ID NO: 1390856 - RNA, 14 nt, Human
aaaaauugugauca

SEQ ID NO: 1390857 - RNA, 23 nt, Human
aaaaauugcugacuguagcuuug

SEQ ID NO: 1390858 - RNA, 21 nt, Human
aaaaauugcugacuguagcuu

SEQ ID NO: 1390859 - RNA, 22 nt, Human
aaaacaacuauggaucagaaua

SEQ ID NO: 1390860 - RNA, 17 nt, Human
aaaacaaggaugaauua

SEQ ID NO: 1390861 - RNA, 12 nt, Human
aaaacacauuuu

SEQ ID NO: 1390862 - RNA, 15 nt, Human
aaaacaaacucauuc

SEQ ID NO: 1390863 - RNA, 15 nt, Human
aaaacaaaacugcau

SEQ ID NO: 1390864 - RNA, 14 nt, Human
aaaacaaggaugaa

SEQ ID NO: 1390865 - RNA, 20 nt, Human
acagggggucuggcuggugu

SEQ ID NO: 1390866 - RNA, 19 nt, Human
acagggggucuggcuggug

SEQ ID NO: 1390867 - RNA, 18 nt, Human
acagggggucuggcuggu

SEQ ID NO: 1390868 - RNA, 17 nt, Human
acagggggucuggcugg

SEQ ID NO: 1390869 - RNA, 16 nt, Human
acagggggucuggcug

SEQ ID NO: 1390870 - RNA, 15 nt, Human
acagggggucuggcu

SEQ ID NO: 1390871 - RNA, 13 nt, Human
acagggggucugg

SEQ ID NO: 1390872 - RNA, 21 nt, Human
acagggggucuggcugguguu

SEQ ID NO: 1390873 - RNA, 14 nt, Human
acaggggcuugacu

SEQ ID NO: 1390874 - RNA, 13 nt, Human
acaggucccuccc

SEQ ID NO: 1390875 - RNA, 13 nt, Human
acaggucccaaau

SEQ ID NO: 1390876 - RNA, 19 nt, Human
acagguauauacuuugaaa

SEQ ID NO: 1390877 - RNA, 16 nt, Human
acagguauauacuuug

SEQ ID NO: 1390878 - RNA, 22 nt, Human
acagguagaauuaucuaauuua

SEQ ID NO: 1390879 - RNA, 15 nt, Human
acagguaauauaaaa

SEQ ID NO: 1390880 - RNA, 18 nt, Human
acagguaaacuaucuugg

SEQ ID NO: 1390881 - RNA, 18 nt, Human
acagggucccacagccac

SEQ ID NO: 1390882 - RNA, 13 nt, Human
acaggucuagacu

SEQ ID NO: 1390883 - RNA, 15 nt, Human
acaggucccuccccu

SEQ ID NO: 1390884 - RNA, 13 nt, Human
acagcucuagaca

SEQ ID NO: 1390885 - RNA, 16 nt, Human
acagccagcaccuggc

SEQ ID NO: 1390886 - RNA, 13 nt, Human
acagccagcaccu

SEQ ID NO: 1390887 - RNA, 22 nt, Human
acagcauguacggauuuucagu

SEQ ID NO: 1390888 - RNA, 21 nt, Human
acagcauguacggauuuucag

SEQ ID NO: 1390889 - RNA, 22 nt, Human
acagcaucuccaagcagcuuag

SEQ ID NO: 1390890 - RNA, 20 nt, Human
acagcaucuccaagcagcuu

SEQ ID NO: 1390891 - RNA, 15 nt, Human
acagcaucuccaagc

SEQ ID NO: 1390892 - RNA, 17 nt, Human
acagaaguuugcacuau

SEQ ID NO: 1390893 - RNA, 15 nt, Human
acagaaguuugcacu

SEQ ID NO: 1390894 - RNA, 14 nt, Human
acagcaucuccaag

SEQ ID NO: 1390895 - RNA, 11 nt, Human
acagcaucucc

SEQ ID NO: 1390896 - RNA, 22 nt, Human
acacugaugcuuagauguucca

SEQ ID NO: 1390897 - RNA, 20 nt, Human
acacugcucuaacagcccuc

SEQ ID NO: 1390898 - RNA, 19 nt, Human
acacugcucuaacagcccu

SEQ ID NO: 1390899 - RNA, 17 nt, Human
acacugcucuaacagcc

SEQ ID NO: 1390900 - RNA, 14 nt, Human
acacugcucuaaca

SEQ ID NO: 1390901 - RNA, 13 nt, Human
acacugcucuaac

SEQ ID NO: 1390902 - RNA, 18 nt, Human
acacugugcacaucugug

SEQ ID NO: 1390903 - RNA, 21 nt, Human
acacugugcacaucugugucu

SEQ ID NO: 1390904 - RNA, 20 nt, Human
acacugugcacaucuguguc

SEQ ID NO: 1390905 - RNA, 23 nt, Human
acagaaauuguauauuguaauuu

SEQ ID NO: 1390906 - RNA, 12 nt, Human
acagaaauuuaa

SEQ ID NO: 1390907 - RNA, 19 nt, Human
acagaaauuguauauugua

SEQ ID NO: 1390908 - RNA, 16 nt, Human
acagaaauuguauauu

SEQ ID NO: 1390909 - RNA, 15 nt, Human
acagaaauuguauau

SEQ ID NO: 1390910 - RNA, 14 nt, Human
acagaaauuguaua

SEQ ID NO: 1390911 - RNA, 12 nt, Human
acagaacacuua

SEQ ID NO: 1390912 - RNA, 13 nt, Human
acagaacacuuau

SEQ ID NO: 1390913 - RNA, 14 nt, Human
acagaagaaacaag

SEQ ID NO: 1390914 - RNA, 15 nt, Human
acagaagaaacuggg

SEQ ID NO: 1390915 - RNA, 23 nt, Human
acacuaaccaagcugaguuuccu

SEQ ID NO: 1390916 - RNA, 22 nt, Human
acacuaaccaagcugaguuucc

SEQ ID NO: 1390917 - RNA, 16 nt, Human
acacuaaccaagcuga

SEQ ID NO: 1390918 - RNA, 23 nt, Human
acacagacugcgauuugucccag

SEQ ID NO: 1390919 - RNA, 14 nt, Human
acacagacuauuuu

SEQ ID NO: 1390920 - RNA, 21 nt, Human
acacagaaaccuuuuuaaaaa

SEQ ID NO: 1390921 - RNA, 19 nt, Human
acacagaaaccuuuuuaaa

SEQ ID NO: 1390922 - RNA, 18 nt, Human
acacagaaaccuuuuuaa

SEQ ID NO: 1390923 - RNA, 13 nt, Human
acacagaaaccuu

SEQ ID NO: 1390924 - RNA, 14 nt, Human
acacagaaaccaau

SEQ ID NO: 1390925 - RNA, 23 nt, Human
acacagcuacucuccccacgagg

SEQ ID NO: 1390926 - RNA, 17 nt, Human
acacagcuacucucccc

SEQ ID NO: 1390927 - RNA, 20 nt, Human
acaccacucuggcagccaca

SEQ ID NO: 1390928 - RNA, 18 nt, Human
acaccacucuggcagcca

SEQ ID NO: 1390929 - RNA, 22 nt, Human
acaccacucuggcagccacacu

SEQ ID NO: 1390930 - RNA, 17 nt, Human
acaccacucuggcagcc

SEQ ID NO: 1390931 - RNA, 16 nt, Human
acaccacucuggcagc

SEQ ID NO: 1390932 - RNA, 13 nt, Human
acaccacucuggc

SEQ ID NO: 1390933 - RNA, 13 nt, Human
acaccacuagccu

SEQ ID NO: 1390934 - RNA, 14 nt, Human
acaccacuacauuc

SEQ ID NO: 1390935 - RNA, 17 nt, Human
acacgcuuuugugaugg

SEQ ID NO: 1390936 - RNA, 14 nt, Human
acacgcuuuuguga

SEQ ID NO: 1390937 - RNA, 12 nt, Human
acacgcuuuugu

SEQ ID NO: 1390938 - RNA, 14 nt, Human
acaaugugucugag

SEQ ID NO: 1390939 - RNA, 19 nt, Human
acaauuaaagcuguuauuu

SEQ ID NO: 1390940 - RNA, 16 nt, Human
acaauuaaagcuguua

SEQ ID NO: 1390941 - RNA, 17 nt, Human
acaauguuuaaaccuuu

SEQ ID NO: 1390942 - RNA, 15 nt, Human
acaauuuauuauggc

SEQ ID NO: 1390943 - RNA, 22 nt, Human
acaauuuggcaauuuugugguu

SEQ ID NO: 1390944 - RNA, 20 nt, Human
acaauuuggcaauuuugugg

SEQ ID NO: 1390945 - RNA, 18 nt, Human
acaauuuggcaauuuugu

SEQ ID NO: 1390946 - RNA, 14 nt, Human
acaauuuggcaauu

SEQ ID NO: 1390947 - RNA, 16 nt, Human
acaauuuauuauggca

SEQ ID NO: 1390948 - RNA, 19 nt, Human
acacaaacuguaaauaaaa

SEQ ID NO: 1390949 - RNA, 16 nt, Human
acacaaacuguaaaua

SEQ ID NO: 1390950 - RNA, 15 nt, Human
acacaaacuguaaau

SEQ ID NO: 1390951 - RNA, 14 nt, Human
acacaaacuguaaa

SEQ ID NO: 1390952 - RNA, 14 nt, Human
acacaaacacacac

SEQ ID NO: 1390953 - RNA, 12 nt, Human
acaaagaaccuu

SEQ ID NO: 1390954 - RNA, 15 nt, Human
acaaagacccuggcu

SEQ ID NO: 1390955 - RNA, 13 nt, Human
acaaagacugagu

SEQ ID NO: 1390956 - RNA, 16 nt, Human
acaaagaguucaagaa

SEQ ID NO: 1390957 - RNA, 13 nt, Human
acaacuauauugu

SEQ ID NO: 1390958 - RNA, 14 nt, Human
acaaaccaugcaaa

SEQ ID NO: 1390959 - RNA, 20 nt, Human
acaaaauggaauacucuuau

SEQ ID NO: 1390960 - RNA, 20 nt, Human
aauuuugaagugcuguuuau

SEQ ID NO: 1390961 - RNA, 19 nt, Human
aauuuugaagugcuguuua

SEQ ID NO: 1390962 - RNA, 14 nt, Human
aauuuugaagugcu

SEQ ID NO: 1390963 - RNA, 12 nt, Human
aauuuucuuuca

SEQ ID NO: 1390964 - RNA, 17 nt, Human
aauuuugaguugccaca

SEQ ID NO: 1390965 - RNA, 19 nt, Human
acaaaauggaauacucuua

SEQ ID NO: 1390966 - RNA, 16 nt, Human
aauuauaauauacuau

SEQ ID NO: 1390967 - RNA, 20 nt, Human
aauuauaacuguaaagaugu

SEQ ID NO: 1390968 - RNA, 19 nt, Human
aauuauaacuggaaagaag

SEQ ID NO: 1390969 - RNA, 18 nt, Human
aauuauaacuggaaagaa

SEQ ID NO: 1390970 - RNA, 13 nt, Human
aauuauaaaugac

SEQ ID NO: 1390971 - RNA, 15 nt, Human
aauuuuaguuuuuca

SEQ ID NO: 1390972 - RNA, 14 nt, Human
aauuuuaguuuuuc

SEQ ID NO: 1390973 - RNA, 14 nt, Human
aauuuuagcuuuug

SEQ ID NO: 1390974 - RNA, 19 nt, Human
aauuuuaguagagacaggg

SEQ ID NO: 1390975 - RNA, 15 nt, Human
aauuuuagcuuuugu

SEQ ID NO: 1390976 - RNA, 20 nt, Human
aauuuuaucccucaccugua

SEQ ID NO: 1390977 - RNA, 14 nt, Human
aauuuuaucccuca

SEQ ID NO: 1390978 - RNA, 21 nt, Human
aauuuuauacuuucccuaccc

SEQ ID NO: 1390979 - RNA, 20 nt, Human
aauuuuauacuuucccuacc

SEQ ID NO: 1390980 - RNA, 15 nt, Human
aauuuuauaaucugc

SEQ ID NO: 1390981 - RNA, 16 nt, Human
aauuuuaguuuuucau

SEQ ID NO: 1390982 - RNA, 18 nt, Human
aauuuuaguuuuucauua

SEQ ID NO: 1390983 - RNA, 13 nt, Human
aauuuugaaaaac

SEQ ID NO: 1390984 - RNA, 15 nt, Human
acaaguaacaaaaau

SEQ ID NO: 1390985 - RNA, 14 nt, Human
acaaguaacaaaaa

SEQ ID NO: 1390986 - RNA, 13 nt, Human
acaaguaacaaaa

SEQ ID NO: 1390987 - RNA, 22 nt, Human
acaacuugucuauuaccuguua

SEQ ID NO: 1390988 - RNA, 17 nt, Human
acaacuucuaauugcca

SEQ ID NO: 1390989 - RNA, 17 nt, Human
acaacucacuccuuuua

SEQ ID NO: 1390990 - RNA, 16 nt, Human
acaacucacuccuuuu

SEQ ID NO: 1390991 - RNA, 16 nt, Human
acaacuauuuucagau

SEQ ID NO: 1390992 - RNA, 20 nt, Human
acaacuauuuucagauguga

SEQ ID NO: 1390993 - RNA, 15 nt, Human
acaacuauuuucaga

SEQ ID NO: 1390994 - RNA, 13 nt, Human
acaacuauuuuca

SEQ ID NO: 1390995 - RNA, 18 nt, Human
acaaagaguucaagaaau

SEQ ID NO: 1390996 - RNA, 17 nt, Human
acaacuauggaucagaa

SEQ ID NO: 1390997 - RNA, 23 nt, Human
acaagucauagguuaauauuuaa

SEQ ID NO: 1390998 - RNA, 15 nt, Human
acaaguauuuuuaau

SEQ ID NO: 1390999 - RNA, 12 nt, Human
acaaguauuuuu

SEQ ID NO: 1391000 - RNA, 22 nt, Human
acaaguauuuguuaauuuagaa

SEQ ID NO: 1391001 - RNA, 20 nt, Human
acaaguauuuguuaauuuag

SEQ ID NO: 1391002 - RNA, 17 nt, Human
acaaguauuuguuaauu

SEQ ID NO: 1391003 - RNA, 14 nt, Human
acaaguauuuguua

SEQ ID NO: 1391004 - RNA, 20 nt, Human
acaagucagucauucagaua

SEQ ID NO: 1391005 - RNA, 18 nt, Human
accacgccucuugaccag

SEQ ID NO: 1391006 - RNA, 23 nt, Human
accacgcccguccugccuguggc

SEQ ID NO: 1391007 - RNA, 21 nt, Human
accacgcccguccugccugug

SEQ ID NO: 1391008 - RNA, 20 nt, Human
accacgcccguccugccugu

SEQ ID NO: 1391009 - RNA, 19 nt, Human
accacgcccguccugccug

SEQ ID NO: 1391010 - RNA, 18 nt, Human
accacgcccguccugccu

SEQ ID NO: 1391011 - RNA, 19 nt, Human
accaagcugaguuuccuau

SEQ ID NO: 1391012 - RNA, 14 nt, Human
accaagcugcugug

SEQ ID NO: 1391013 - RNA, 18 nt, Human
accaagcugaguuuccua

SEQ ID NO: 1391014 - RNA, 17 nt, Human
accaagcugaguuuccu

SEQ ID NO: 1391015 - RNA, 14 nt, Human
accaagcugaguuu

SEQ ID NO: 1391016 - RNA, 22 nt, Human
accacgccucuugaccaggcug

SEQ ID NO: 1391017 - RNA, 13 nt, Human
accacgccuggcu

SEQ ID NO: 1391018 - RNA, 20 nt, Human
accacgccuggcuaauuuuu

SEQ ID NO: 1391019 - RNA, 14 nt, Human
accacuacauucug

SEQ ID NO: 1391020 - RNA, 15 nt, Human
accacguuucuaaag

SEQ ID NO: 1391021 - RNA, 19 nt, Human
accacguuucuaaaggcua

SEQ ID NO: 1391022 - RNA, 15 nt, Human
accacuacauucugu

SEQ ID NO: 1391023 - RNA, 21 nt, Human
acauuugggaguuuuuaugag

SEQ ID NO: 1391024 - RNA, 20 nt, Human
acauuugggaguuuuuauga

SEQ ID NO: 1391025 - RNA, 21 nt, Human
acauuugggagacaugugaca

SEQ ID NO: 1391026 - RNA, 20 nt, Human
acauuugggagacaugugac

SEQ ID NO: 1391027 - RNA, 19 nt, Human
acauuugggagacauguga

SEQ ID NO: 1391028 - RNA, 21 nt, Human
acauuuguagcauccucuuua

SEQ ID NO: 1391029 - RNA, 17 nt, Human
acauuugggagacaugu

SEQ ID NO: 1391030 - RNA, 20 nt, Human
acauuuggaguguuccccuu

SEQ ID NO: 1391031 - RNA, 15 nt, Human
acauuuggaguguuc

SEQ ID NO: 1391032 - RNA, 19 nt, Human
acauuugcuuuuugugaua

SEQ ID NO: 1391033 - RNA, 18 nt, Human
acauuuggaauacuuuuu

SEQ ID NO: 1391034 - RNA, 17 nt, Human
acauuuggaauacuuuu

SEQ ID NO: 1391035 - RNA, 16 nt, Human
acauuuggaauacuuu

SEQ ID NO: 1391036 - RNA, 15 nt, Human
acauuuggaauacuu

SEQ ID NO: 1391037 - RNA, 22 nt, Human
accaacuccuaguucuagaaaa

SEQ ID NO: 1391038 - RNA, 23 nt, Human
accaacuccuaguucuagaaaaa

SEQ ID NO: 1391039 - RNA, 17 nt, Human
accaacuccuaguucua

SEQ ID NO: 1391040 - RNA, 14 nt, Human
acauuuguauaaaa

SEQ ID NO: 1391041 - RNA, 12 nt, Human
acauuuggaaua

SEQ ID NO: 1391042 - RNA, 23 nt, Human
acauuugcuuuuugugauaugca

SEQ ID NO: 1391043 - RNA, 23 nt, Human
acauuugcuguuuuaaacauuaa

SEQ ID NO: 1391044 - RNA, 22 nt, Human
acauuugcuguuuuaaacauua

SEQ ID NO: 1391045 - RNA, 18 nt, Human
acauuugcucauggaauu

SEQ ID NO: 1391046 - RNA, 22 nt, Human
acauuaaagaaggguugagcug

SEQ ID NO: 1391047 - RNA, 11 nt, Human
acauuaaagaa

SEQ ID NO: 1391048 - RNA, 20 nt, Human
acauguuguaagcacugacu

SEQ ID NO: 1391049 - RNA, 20 nt, Human
acauguugggaaacuuggcu

SEQ ID NO: 1391050 - RNA, 14 nt, Human
acauguuauuugua

SEQ ID NO: 1391051 - RNA, 19 nt, Human
acaugcaaggucauuuuuu

SEQ ID NO: 1391052 - RNA, 20 nt, Human
acauaaauuuaguauuuugu

SEQ ID NO: 1391053 - RNA, 20 nt, Human
acauaaaggaaaagacacau

SEQ ID NO: 1391054 - RNA, 22 nt, Human
acauaaaggaaaagacacauuu

SEQ ID NO: 1391055 - RNA, 18 nt, Human
acauaaaggaaaagacac

SEQ ID NO: 1391056 - RNA, 17 nt, Human
acauaaaggaaaagaca

SEQ ID NO: 1391057 - RNA, 16 nt, Human
acauaaaggaaaagac

SEQ ID NO: 1391058 - RNA, 14 nt, Human
acauaaaggaaaag

SEQ ID NO: 1391059 - RNA, 15 nt, Human
acauaaaguugauaa

SEQ ID NO: 1391060 - RNA, 12 nt, Human
acauaaaguuga

SEQ ID NO: 1391061 - RNA, 20 nt, Human
acaucagcacgauuucuguu

SEQ ID NO: 1391062 - RNA, 21 nt, Human
acaucagcacgauuucuguuu

SEQ ID NO: 1391063 - RNA, 22 nt, Human
acaucagcacgauuucuguuua

SEQ ID NO: 1391064 - RNA, 17 nt, Human
acaucuaaccucaucuu

SEQ ID NO: 1391065 - RNA, 16 nt, Human
acaucuaaccucaucu

SEQ ID NO: 1391066 - RNA, 15 nt, Human
acaucggaaaaauaa

SEQ ID NO: 1391067 - RNA, 14 nt, Human
acaucggaaaaaua

SEQ ID NO: 1391068 - RNA, 14 nt, Human
acaucccacugcca

SEQ ID NO: 1391069 - RNA, 20 nt, Human
acaucccacucacaacagcu

SEQ ID NO: 1391070 - RNA, 12 nt, Human
acauccagcaga

SEQ ID NO: 1391071 - RNA, 18 nt, Human
acagguuauaacaguguu

SEQ ID NO: 1391072 - RNA, 15 nt, Human
acagguuauaacagu

SEQ ID NO: 1391073 - RNA, 15 nt, Human
acagguuagcugcuc

SEQ ID NO: 1391074 - RNA, 12 nt, Human
acauaaaggaaa

SEQ ID NO: 1391075 - RNA, 19 nt, Human
acauaaaaaugaucuaaac

SEQ ID NO: 1391076 - RNA, 20 nt, Human
acauaaaaaggacaucagca

SEQ ID NO: 1391077 - RNA, 21 nt, Human
acauaaaaaggacaucagcaa

SEQ ID NO: 1391078 - RNA, 22 nt, Human
acauaaaaaggacaucagcaaa

SEQ ID NO: 1391079 - RNA, 23 nt, Human
acauaaacaagaccacguuucua

SEQ ID NO: 1391080 - RNA, 15 nt, Human
acauaaaaaggacau

SEQ ID NO: 1391081 - RNA, 16 nt, Human
accccuacaugaaaca

SEQ ID NO: 1391082 - RNA, 14 nt, Human
acccaauccaaaug

SEQ ID NO: 1391083 - RNA, 13 nt, Human
acccaauccaaau

SEQ ID NO: 1391084 - RNA, 18 nt, Human
acccaagguaccauccua

SEQ ID NO: 1391085 - RNA, 23 nt, Human
acccaaggggauuuuuaugucug

SEQ ID NO: 1391086 - RNA, 21 nt, Human
acccaugaguuggggucuggc

SEQ ID NO: 1391087 - RNA, 20 nt, Human
acccaugaguuggggucugg

SEQ ID NO: 1391088 - RNA, 23 nt, Human
accccaaacaccuuccagcuccu

SEQ ID NO: 1391089 - RNA, 20 nt, Human
accccaaacaccuuccagcu

SEQ ID NO: 1391090 - RNA, 18 nt, Human
accccaaacaccuuccag

SEQ ID NO: 1391091 - RNA, 16 nt, Human
accccaaacaccuucc

SEQ ID NO: 1391092 - RNA, 17 nt, Human
acccauuuuuccuuuug

SEQ ID NO: 1391093 - RNA, 15 nt, Human
accccaaccugcucu

SEQ ID NO: 1391094 - RNA, 14 nt, Human
accccaaccugcuc

SEQ ID NO: 1391095 - RNA, 13 nt, Human
accccaaccugcu

SEQ ID NO: 1391096 - RNA, 18 nt, Human
accccaaagcuuuccugc

SEQ ID NO: 1391097 - RNA, 17 nt, Human
accccaaagcuuuccug

SEQ ID NO: 1391098 - RNA, 15 nt, Human
accccaaagcuuucc

SEQ ID NO: 1391099 - RNA, 14 nt, Human
accccgccugcccu

SEQ ID NO: 1391100 - RNA, 20 nt, Human
accccgcagacaccuuggac

SEQ ID NO: 1391101 - RNA, 18 nt, Human
accccgcagacaccuugg

SEQ ID NO: 1391102 - RNA, 17 nt, Human
accccgcagacaccuug

SEQ ID NO: 1391103 - RNA, 15 nt, Human
accccgcagacaccu

SEQ ID NO: 1391104 - RNA, 15 nt, Human
accccgacuuuuguu

SEQ ID NO: 1391105 - RNA, 12 nt, Human
accccgacuuuu

SEQ ID NO: 1391106 - RNA, 19 nt, Human
accccgccugcccucaugg

SEQ ID NO: 1391107 - RNA, 13 nt, Human
accccggggugag

SEQ ID NO: 1391108 - RNA, 23 nt, Human
accccggggugcccacaggccgc

SEQ ID NO: 1391109 - RNA, 21 nt, Human
accccggggugcccacaggcc

SEQ ID NO: 1391110 - RNA, 20 nt, Human
accccggggugcccacaggc

SEQ ID NO: 1391111 - RNA, 12 nt, Human
accccuaggacu

SEQ ID NO: 1391112 - RNA, 21 nt, Human
accccuaaaagaaacccugca

SEQ ID NO: 1391113 - RNA, 22 nt, Human
accccuaaaagaaacccugcac

SEQ ID NO: 1391114 - RNA, 19 nt, Human
agaaaggacuccugaaaaa

SEQ ID NO: 1391115 - RNA, 22 nt, Human
agaaaggaagcauuguaaaaua

SEQ ID NO: 1391116 - RNA, 21 nt, Human
agaaaggaagcauuguaaaau

SEQ ID NO: 1391117 - RNA, 19 nt, Human
agaaaggaagcauuguaaa

SEQ ID NO: 1391118 - RNA, 17 nt, Human
agaaacaacucuuugag

SEQ ID NO: 1391119 - RNA, 16 nt, Human
agaaacaacacuguag

SEQ ID NO: 1391120 - RNA, 15 nt, Human
agaaacaacacugua

SEQ ID NO: 1391121 - RNA, 14 nt, Human
agaaacaacacugu

SEQ ID NO: 1391122 - RNA, 17 nt, Human
agaaacaaagauguuau

SEQ ID NO: 1391123 - RNA, 20 nt, Human
agaaauaaaaggaagccaaa

SEQ ID NO: 1391124 - RNA, 19 nt, Human
agaaauaaaaggaagccaa

SEQ ID NO: 1391125 - RNA, 16 nt, Human
agaaaggauaaaguug

SEQ ID NO: 1391126 - RNA, 13 nt, Human
acuuuuaaacugu

SEQ ID NO: 1391127 - RNA, 15 nt, Human
acuuuuaaacaguga

SEQ ID NO: 1391128 - RNA, 12 nt, Human
acuuuuaaacag

SEQ ID NO: 1391129 - RNA, 14 nt, Human
acuuuguuuuauuu

SEQ ID NO: 1391130 - RNA, 20 nt, Human
acuuuguuucguggggaggu

SEQ ID NO: 1391131 - RNA, 14 nt, Human
acuuuccugcaacu

SEQ ID NO: 1391132 - RNA, 13 nt, Human
acuuuccauuaca

SEQ ID NO: 1391133 - RNA, 18 nt, Human
acuuucauuccuucagau

SEQ ID NO: 1391134 - RNA, 15 nt, Human
acuuucauuccuuca

SEQ ID NO: 1391135 - RNA, 20 nt, Human
acuuucauuccuucagauuu

SEQ ID NO: 1391136 - RNA, 22 nt, Human
acuuucauauuuuaaacagagg

SEQ ID NO: 1391137 - RNA, 18 nt, Human
acuuuauaacuaacaugu

SEQ ID NO: 1391138 - RNA, 16 nt, Human
acuuuauaacuaacau

SEQ ID NO: 1391139 - RNA, 23 nt, Human
acuuuagggaaguacuuuuggca

SEQ ID NO: 1391140 - RNA, 19 nt, Human
acuuuagggggugggauuc

SEQ ID NO: 1391141 - RNA, 14 nt, Human
agaaaauaacaaua

SEQ ID NO: 1391142 - RNA, 18 nt, Human
agaaaauguucuguuugc

SEQ ID NO: 1391143 - RNA, 14 nt, Human
agaaaauguucugu

SEQ ID NO: 1391144 - RNA, 23 nt, Human
agaaaauucugugccuuguuuuu

SEQ ID NO: 1391145 - RNA, 15 nt, Human
agaaaauuagacugu

SEQ ID NO: 1391146 - RNA, 17 nt, Human
agaaaauguugagaauc

SEQ ID NO: 1391147 - RNA, 16 nt, Human
agaaaauguugagaau

SEQ ID NO: 1391148 - RNA, 18 nt, Human
agaaacaacaauuucuac

SEQ ID NO: 1391149 - RNA, 13 nt, Human
agaaacaaagaug

SEQ ID NO: 1391150 - RNA, 16 nt, Human
agaaaauucugugccu

SEQ ID NO: 1391151 - RNA, 16 nt, Human
agaaaauuuuuguagu

SEQ ID NO: 1391152 - RNA, 20 nt, Human
agaaaauuuuuguaguagcg

SEQ ID NO: 1391153 - RNA, 22 nt, Human
agaaaauuuuuguaguagcguu

SEQ ID NO: 1391154 - RNA, 17 nt, Human
acuuuguuuuauuuuca

SEQ ID NO: 1391155 - RNA, 17 nt, Human
acuuuuaaacuguguac

SEQ ID NO: 1391156 - RNA, 15 nt, Human
acuuuuaaacugugu

SEQ ID NO: 1391157 - RNA, 14 nt, Human
acuuuuaaacugug

SEQ ID NO: 1391158 - RNA, 22 nt, Human
acuuuuauaaacuuuaccuuuu

SEQ ID NO: 1391159 - RNA, 19 nt, Human
acuuuuauaaacuuuaccu

SEQ ID NO: 1391160 - RNA, 17 nt, Human
acuuuuccucccucagu

SEQ ID NO: 1391161 - RNA, 23 nt, Human
acuuuuauacucuuucuguauau

SEQ ID NO: 1391162 - RNA, 19 nt, Human
acuuuuccuuugaauccuc

SEQ ID NO: 1391163 - RNA, 18 nt, Human
acuuuuccuuugaauccu

SEQ ID NO: 1391164 - RNA, 11 nt, Human
acuuuucugua

SEQ ID NO: 1391165 - RNA, 17 nt, Human
acuuuucuauuaaaagu

SEQ ID NO: 1391166 - RNA, 17 nt, Human
agaaaaguauguucuaa

SEQ ID NO: 1391167 - RNA, 17 nt, Human
acuuuucuuaaaaaguu

SEQ ID NO: 1391168 - RNA, 24 nt, Human
acuuuucuuaaaccuucaguuaug

SEQ ID NO: 1391169 - RNA, 16 nt, Human
acuuuucuuaaaccuu

SEQ ID NO: 1391170 - RNA, 20 nt, Human
acuuuucuguaauucagguu

SEQ ID NO: 1391171 - RNA, 17 nt, Human
acuuuucuguaauucag

SEQ ID NO: 1391172 - RNA, 21 nt, Human
agaaaaguauguucuaaccuu

SEQ ID NO: 1391173 - RNA, 15 nt, Human
agaaaaguauguucu

SEQ ID NO: 1391174 - RNA, 21 nt, Human
agaaaaguugaauuuuacaug

SEQ ID NO: 1391175 - RNA, 18 nt, Human
agaaaaguugaauuuuac

SEQ ID NO: 1391176 - RNA, 20 nt, Human
acugucuggggagcgggucu

SEQ ID NO: 1391177 - RNA, 22 nt, Human
acugucuggggagcgggucugc

SEQ ID NO: 1391178 - RNA, 22 nt, Human
acugucuggccccccugguccc

SEQ ID NO: 1391179 - RNA, 19 nt, Human
acugucuggccccccuggu

SEQ ID NO: 1391180 - RNA, 21 nt, Human
acugugcacaucugugucuug

SEQ ID NO: 1391181 - RNA, 20 nt, Human
acugugcacaucugugucuu

SEQ ID NO: 1391182 - RNA, 19 nt, Human
acugugcacaucugugucu

SEQ ID NO: 1391183 - RNA, 15 nt, Human
acugugcacaucugu

SEQ ID NO: 1391184 - RNA, 22 nt, Human
acugugauucagaaaauguucu

SEQ ID NO: 1391185 - RNA, 18 nt, Human
acugugcaccaagcagga

SEQ ID NO: 1391186 - RNA, 17 nt, Human
acugucgcugcuucgug

SEQ ID NO: 1391187 - RNA, 19 nt, Human
acuguccugggccugcaga

SEQ ID NO: 1391188 - RNA, 14 nt, Human
acugucgcugcuuc

SEQ ID NO: 1391189 - RNA, 13 nt, Human
acugucgcugcuu

SEQ ID NO: 1391190 - RNA, 17 nt, Human
acuguccugggccugca

SEQ ID NO: 1391191 - RNA, 22 nt, Human
acugguguuaucaccgugggcu

SEQ ID NO: 1391192 - RNA, 21 nt, Human
acugguguuaucaccgugggc

SEQ ID NO: 1391193 - RNA, 22 nt, Human
acugguggggauaggccagccg

SEQ ID NO: 1391194 - RNA, 20 nt, Human
acugccaagacugcuguggc

SEQ ID NO: 1391195 - RNA, 19 nt, Human
acugccaagacugcugugg

SEQ ID NO: 1391196 - RNA, 18 nt, Human
acugccaagacugcugug

SEQ ID NO: 1391197 - RNA, 16 nt, Human
acugccaagacugcug

SEQ ID NO: 1391198 - RNA, 14 nt, Human
acugaagcuuuuua

SEQ ID NO: 1391199 - RNA, 13 nt, Human
acugaagcuuuuu

SEQ ID NO: 1391200 - RNA, 17 nt, Human
acugaagugcuuagugu

SEQ ID NO: 1391201 - RNA, 13 nt, Human
acugaagugcuua

SEQ ID NO: 1391202 - RNA, 18 nt, Human
acugcccccugcugccau

SEQ ID NO: 1391203 - RNA, 19 nt, Human
acugcccccugcugccaug

SEQ ID NO: 1391204 - RNA, 17 nt, Human
acugcccccugcugcca

SEQ ID NO: 1391205 - RNA, 16 nt, Human
acugcccccugcugcc

SEQ ID NO: 1391206 - RNA, 18 nt, Human
acuggaacuugaacugau

SEQ ID NO: 1391207 - RNA, 17 nt, Human
acuggaacuugaacuga

SEQ ID NO: 1391208 - RNA, 16 nt, Human
acuggacccuguugcu

SEQ ID NO: 1391209 - RNA, 17 nt, Human
acuggacccuguugcua

SEQ ID NO: 1391210 - RNA, 18 nt, Human
acuggacccuguugcuaa

SEQ ID NO: 1391211 - RNA, 19 nt, Human
acuggacccuguugcuaag

SEQ ID NO: 1391212 - RNA, 20 nt, Human
acuggacccuguugcuaagc

SEQ ID NO: 1391213 - RNA, 18 nt, Human
acugggugguggccuggu

SEQ ID NO: 1391214 - RNA, 22 nt, Human
acugggugguggccuggucccu

SEQ ID NO: 1391215 - RNA, 15 nt, Human
acuggguaggaaaga

SEQ ID NO: 1391216 - RNA, 19 nt, Human
acuuguaaauauaaagacg

SEQ ID NO: 1391217 - RNA, 18 nt, Human
acuuguaaauauaaagac

SEQ ID NO: 1391218 - RNA, 17 nt, Human
acuuguaaauauaaaga

SEQ ID NO: 1391219 - RNA, 16 nt, Human
acuuguaaauauaaag

SEQ ID NO: 1391220 - RNA, 15 nt, Human
acuuguaaauauaaa

SEQ ID NO: 1391221 - RNA, 14 nt, Human
acuuguaaauauaa

SEQ ID NO: 1391222 - RNA, 13 nt, Human
acuuguaaauaua

SEQ ID NO: 1391223 - RNA, 12 nt, Human
acuuguaaauau

SEQ ID NO: 1391224 - RNA, 19 nt, Human
acuucuuuugcucuuagcu

SEQ ID NO: 1391225 - RNA, 20 nt, Human
acuucugagaucuguugauu

SEQ ID NO: 1391226 - RNA, 12 nt, Human
acuucugagauc

SEQ ID NO: 1391227 - RNA, 23 nt, Human
acuucacauauugauuuccguua

SEQ ID NO: 1391228 - RNA, 22 nt, Human
acuucugccagcauaauacuug

SEQ ID NO: 1391229 - RNA, 20 nt, Human
acuucuuuugcucuuagcug

SEQ ID NO: 1391230 - RNA, 19 nt, Human
acuuguaaaggaauuuaaa

SEQ ID NO: 1391231 - RNA, 20 nt, Human
acuuguaaaggaauuuaaaa

SEQ ID NO: 1391232 - RNA, 19 nt, Human
acuguuuguuuacaaaauc

SEQ ID NO: 1391233 - RNA, 20 nt, Human
acuguuuguuuacaaaauca

SEQ ID NO: 1391234 - RNA, 18 nt, Human
acuguuuauacacugugu

SEQ ID NO: 1391235 - RNA, 19 nt, Human
acuguuuauacacugugua

SEQ ID NO: 1391236 - RNA, 17 nt, Human
acuguuuauacacugug

SEQ ID NO: 1391237 - RNA, 14 nt, Human
acuguuuauacacu

SEQ ID NO: 1391238 - RNA, 13 nt, Human
acuguuucaaacu

SEQ ID NO: 1391239 - RNA, 13 nt, Human
acuuauuuaaugc

SEQ ID NO: 1391240 - RNA, 15 nt, Human
acuuauuuaaacucu

SEQ ID NO: 1391241 - RNA, 19 nt, Human
acuucacauauugauuucc

SEQ ID NO: 1391242 - RNA, 23 nt, Human
acuguuuucucucggcuccccau

SEQ ID NO: 1391243 - RNA, 22 nt, Human
acuguuuucucucggcucccca

SEQ ID NO: 1391244 - RNA, 21 nt, Human
acuuauuggaacucugcuuga

SEQ ID NO: 1391245 - RNA, 23 nt, Human
acuuauuguagcauccuggaaua

SEQ ID NO: 1391246 - RNA, 20 nt, Human
acuuauuggaacucugcuug

SEQ ID NO: 1391247 - RNA, 20 nt, Human
acuuauuguagcauccugga

SEQ ID NO: 1391248 - RNA, 18 nt, Human
accucuucagaggcccuc

SEQ ID NO: 1391249 - RNA, 17 nt, Human
accucuucagaggcccu

SEQ ID NO: 1391250 - RNA, 15 nt, Human
accucuucagaggcc

SEQ ID NO: 1391251 - RNA, 21 nt, Human
accucugcacuacugacaugu

SEQ ID NO: 1391252 - RNA, 15 nt, Human
accucugcagcaaua

SEQ ID NO: 1391253 - RNA, 22 nt, Human
accugccccacuuguccuuagc

SEQ ID NO: 1391254 - RNA, 19 nt, Human
accugccccacuuguccuu

SEQ ID NO: 1391255 - RNA, 17 nt, Human
accugccccacuugucc

SEQ ID NO: 1391256 - RNA, 17 nt, Human
accugccccaacucucc

SEQ ID NO: 1391257 - RNA, 16 nt, Human
accugcccccaaucca

SEQ ID NO: 1391258 - RNA, 23 nt, Human
accugccccacuuguccuuagcc

SEQ ID NO: 1391259 - RNA, 16 nt, Human
accuuguuacuucuga

SEQ ID NO: 1391260 - RNA, 15 nt, Human
accuuguuacuucug

SEQ ID NO: 1391261 - RNA, 17 nt, Human
accuuguuacuucugag

SEQ ID NO: 1391262 - RNA, 23 nt, Human
accuuuauuccuucauuucaucu

SEQ ID NO: 1391263 - RNA, 21 nt, Human
accuuuauuccuucauuucau

SEQ ID NO: 1391264 - RNA, 20 nt, Human
accuguaaugacaggccugu

SEQ ID NO: 1391265 - RNA, 15 nt, Human
accuguaaugacagg

SEQ ID NO: 1391266 - RNA, 17 nt, Human
accuguaugucuccagu

SEQ ID NO: 1391267 - RNA, 14 nt, Human
acgaugacaguguu

SEQ ID NO: 1391268 - RNA, 12 nt, Human
acgauuucuguu

SEQ ID NO: 1391269 - RNA, 13 nt, Human
acgauuucuguuu

SEQ ID NO: 1391270 - RNA, 14 nt, Human
acgauuucuguuua

SEQ ID NO: 1391271 - RNA, 17 nt, Human
acgauuucuguuuagau

SEQ ID NO: 1391272 - RNA, 19 nt, Human
acgauuucuguuuagauaa

SEQ ID NO: 1391273 - RNA, 20 nt, Human
acuaauagaauaaaggcagu

SEQ ID NO: 1391274 - RNA, 16 nt, Human
acuaauagaaaaguau

SEQ ID NO: 1391275 - RNA, 17 nt, Human
acuaauagaauaaaggc

SEQ ID NO: 1391276 - RNA, 16 nt, Human
acuaauagaauaaagg

SEQ ID NO: 1391277 - RNA, 14 nt, Human
acuaauagaaaagu

SEQ ID NO: 1391278 - RNA, 14 nt, Human
acuaauaauugcag

SEQ ID NO: 1391279 - RNA, 13 nt, Human
acuaauaauugca

SEQ ID NO: 1391280 - RNA, 11 nt, Human
acuaauaauug

SEQ ID NO: 1391281 - RNA, 19 nt, Human
acuaauaaacuaauaauug

SEQ ID NO: 1391282 - RNA, 22 nt, Human
acuaaguuuuuauggcuuuugu

SEQ ID NO: 1391283 - RNA, 22 nt, Human
acgccagacuucccacggcucc

SEQ ID NO: 1391284 - RNA, 16 nt, Human
acgccagacuucccac

SEQ ID NO: 1391285 - RNA, 16 nt, Human
acgugcacgcacacug

SEQ ID NO: 1391286 - RNA, 16 nt, Human
acuaagagagaaugag

SEQ ID NO: 1391287 - RNA, 22 nt, Human
acgugcauugugcuucuuucuu

SEQ ID NO: 1391288 - RNA, 12 nt, Human
acgugcauugug

SEQ ID NO: 1391289 - RNA, 14 nt, Human
acgugcauugugcu

SEQ ID NO: 1391290 - RNA, 15 nt, Human
acgugcauugugcuu

SEQ ID NO: 1391291 - RNA, 16 nt, Human
acgugcauugugcuuc

SEQ ID NO: 1391292 - RNA, 14 nt, Human
acucccuugggcuc

SEQ ID NO: 1391293 - RNA, 18 nt, Human
acucccuccuaaccuaga

SEQ ID NO: 1391294 - RNA, 15 nt, Human
acucccucacaagug

SEQ ID NO: 1391295 - RNA, 20 nt, Human
acucuagucaaugacaugaa

SEQ ID NO: 1391296 - RNA, 19 nt, Human
acucuagucaaugacauga

SEQ ID NO: 1391297 - RNA, 16 nt, Human
acucugugccagagcc

SEQ ID NO: 1391298 - RNA, 15 nt, Human
acucugugccagagc

SEQ ID NO: 1391299 - RNA, 16 nt, Human
acucuauauuguucag

SEQ ID NO: 1391300 - RNA, 22 nt, Human
acucuauauagcugaucaguuu

SEQ ID NO: 1391301 - RNA, 21 nt, Human
acucuaucaaguauuauaccu

SEQ ID NO: 1391302 - RNA, 16 nt, Human
acucuaucaaguauua

SEQ ID NO: 1391303 - RNA, 22 nt, Human
acucuagucaaugacaugaauu

SEQ ID NO: 1391304 - RNA, 23 nt, Human
acucuagucaaugacaugaauuu

SEQ ID NO: 1391305 - RNA, 14 nt, Human
acucuaucaaguau

SEQ ID NO: 1391306 - RNA, 15 nt, Human
acucugugcuggcca

SEQ ID NO: 1391307 - RNA, 23 nt, Human
acucugugccagagccuggggcu

SEQ ID NO: 1391308 - RNA, 22 nt, Human
acucugugccagagccuggggc

SEQ ID NO: 1391309 - RNA, 21 nt, Human
acucugugccagagccugggg

SEQ ID NO: 1391310 - RNA, 20 nt, Human
acucugugccagagccuggg

SEQ ID NO: 1391311 - RNA, 19 nt, Human
acucugugccagagccugg

SEQ ID NO: 1391312 - RNA, 18 nt, Human
acucugugccagagccug

SEQ ID NO: 1391313 - RNA, 17 nt, Human
acucugugccagagccu

SEQ ID NO: 1391314 - RNA, 17 nt, Human
acucugugcuggccagc

SEQ ID NO: 1391315 - RNA, 20 nt, Human
acucuguugcaagugcaaua

SEQ ID NO: 1391316 - RNA, 16 nt, Human
acucugugcuggccag

SEQ ID NO: 1391317 - RNA, 14 nt, Human
acucugugccagag

SEQ ID NO: 1391318 - RNA, 21 nt, Human
acucuguucauuccuccaggu

SEQ ID NO: 1391319 - RNA, 17 nt, Human
acucagcacuuggcccu

SEQ ID NO: 1391320 - RNA, 15 nt, Human
acucagcacaaggcc

SEQ ID NO: 1391321 - RNA, 17 nt, Human
acucagauccuccucau

SEQ ID NO: 1391322 - RNA, 16 nt, Human
acucagauccuccuca

SEQ ID NO: 1391323 - RNA, 19 nt, Human
acucagauccagggacaga

SEQ ID NO: 1391324 - RNA, 17 nt, Human
acucagauccagggaca

SEQ ID NO: 1391325 - RNA, 16 nt, Human
acucagauccagggac

SEQ ID NO: 1391326 - RNA, 14 nt, Human
acucagauccaggg

SEQ ID NO: 1391327 - RNA, 12 nt, Human
acucagauccag

SEQ ID NO: 1391328 - RNA, 11 nt, Human
acucagaucca

SEQ ID NO: 1391329 - RNA, 17 nt, Human
acucaaaggguggaaua

SEQ ID NO: 1391330 - RNA, 22 nt, Human
acucaaagcaugggauuauuag

SEQ ID NO: 1391331 - RNA, 23 nt, Human
acucaaacugaggaauuucaccu

SEQ ID NO: 1391332 - RNA, 14 nt, Human
acuauaagaacuuu

SEQ ID NO: 1391333 - RNA, 13 nt, Human
acuauaagaacuu

SEQ ID NO: 1391334 - RNA, 20 nt, Human
acuaguugugucuggcaguu

SEQ ID NO: 1391335 - RNA, 15 nt, Human
acucaaaauauuugu

SEQ ID NO: 1391336 - RNA, 19 nt, Human
acuauaagaacuuugagcu

SEQ ID NO: 1391337 - RNA, 18 nt, Human
acuauaagaacuuugagc

SEQ ID NO: 1391338 - RNA, 20 nt, Human
acuauaagcaagaaggcaaa

SEQ ID NO: 1391339 - RNA, 20 nt, Human
acucaaaauauuuguacaua

SEQ ID NO: 1391340 - RNA, 19 nt, Human
acucaaaauauuuguacau

SEQ ID NO: 1391341 - RNA, 17 nt, Human
acucaaaauauuuguac

SEQ ID NO: 1391342 - RNA, 21 nt, Human
acucaaacugaggaauuucac

SEQ ID NO: 1391343 - RNA, 14 nt, Human
acucaaacugagga

SEQ ID NO: 1391344 - RNA, 19 nt, Human
acucaaaccaaaucacuga

SEQ ID NO: 1391345 - RNA, 20 nt, Human
acucaaaccaaaucacugaa

SEQ ID NO: 1391346 - RNA, 19 nt, Human
acucagcucugacauucug

SEQ ID NO: 1391347 - RNA, 23 nt, Human
acucagccuucagacagagagga

SEQ ID NO: 1391348 - RNA, 11 nt, Human
acucagccuuc

SEQ ID NO: 1391349 - RNA, 23 nt, Human
acucaggcccccaccuggcucac

SEQ ID NO: 1391350 - RNA, 22 nt, Human
acucaggcccccaccuggcuca

SEQ ID NO: 1391351 - RNA, 11 nt, Human
acucagcucug

SEQ ID NO: 1391352 - RNA, 23 nt, Human
acucagucucucuucucuccagc

SEQ ID NO: 1391353 - RNA, 19 nt, Human
acucagucucucuucucuc

SEQ ID NO: 1391354 - RNA, 22 nt, Human
acucagggcagcgccaggcuga

SEQ ID NO: 1391355 - RNA, 21 nt, Human
acucagggcagcgccaggcug

SEQ ID NO: 1391356 - RNA, 20 nt, Human
acucagggcagcgccaggcu

SEQ ID NO: 1391357 - RNA, 17 nt, Human
acucagggcagcgccag

SEQ ID NO: 1391358 - RNA, 20 nt, Human
acuccccacaucccaucguc

SEQ ID NO: 1391359 - RNA, 16 nt, Human
acuccccgaagucuuu

SEQ ID NO: 1391360 - RNA, 14 nt, Human
acuccccgaagucu

SEQ ID NO: 1391361 - RNA, 17 nt, Human
acuccccgaagucuuuu

SEQ ID NO: 1391362 - RNA, 12 nt, Human
acuccccuccuu

SEQ ID NO: 1391363 - RNA, 20 nt, Human
acuagggaucccucaucugu

SEQ ID NO: 1391364 - RNA, 19 nt, Human
acuagggaucccucaucug

SEQ ID NO: 1391365 - RNA, 22 nt, Human
acuaggcccccacuugccucuu

SEQ ID NO: 1391366 - RNA, 20 nt, Human
acuaggcccccacuugccuc

SEQ ID NO: 1391367 - RNA, 18 nt, Human
acuaggcccccacuugcc

SEQ ID NO: 1391368 - RNA, 22 nt, Human
acuaggagcuuugacucaggag

SEQ ID NO: 1391369 - RNA, 23 nt, Human
acuaggagcuuugacucaggagc

SEQ ID NO: 1391370 - RNA, 21 nt, Human
acuaggagcuuugacucagga

SEQ ID NO: 1391371 - RNA, 18 nt, Human
acuaggagaaccaaaucu

SEQ ID NO: 1391372 - RNA, 18 nt, Human
acuaggaaauccauucac

SEQ ID NO: 1391373 - RNA, 24 nt, Human
acuagcucuuguugagccgugggc

SEQ ID NO: 1391374 - RNA, 13 nt, Human
acuagcucuuguu

SEQ ID NO: 1391375 - RNA, 11 nt, Human
acuagcucuug

SEQ ID NO: 1391376 - RNA, 16 nt, Human
acuagggccaagccca

SEQ ID NO: 1391377 - RNA, 22 nt, Human
acuagccaaaccucaccaacuc

SEQ ID NO: 1391378 - RNA, 19 nt, Human
acuagccaaaccucaccaa

SEQ ID NO: 1391379 - RNA, 18 nt, Human
acuagccaaaccucacca

SEQ ID NO: 1391380 - RNA, 17 nt, Human
acuagccaaaccucacc

SEQ ID NO: 1391381 - RNA, 18 nt, Human
acuagcccuccuuuuucc

SEQ ID NO: 1391382 - RNA, 17 nt, Human
acuagcccaaugaaaug

SEQ ID NO: 1391383 - RNA, 15 nt, Human
acuagcccaaugaaa

SEQ ID NO: 1391384 - RNA, 14 nt, Human
acuagcuauggugu

SEQ ID NO: 1391385 - RNA, 14 nt, Human
aacacgcaccugcc

SEQ ID NO: 1391386 - RNA, 19 nt, Human
aacacgcaccugccucagg

SEQ ID NO: 1391387 - RNA, 15 nt, Human
aacacgcaccugccu

SEQ ID NO: 1391388 - RNA, 18 nt, Human
aacaagaaaaauaaagaa

SEQ ID NO: 1391389 - RNA, 17 nt, Human
aacaagaaaaauaaaga

SEQ ID NO: 1391390 - RNA, 12 nt, Human
aacaagaaaaau

SEQ ID NO: 1391391 - RNA, 19 nt, Human
aacaagaaaaauaaagaaa

SEQ ID NO: 1391392 - RNA, 11 nt, Human
aacaagaaaaa

SEQ ID NO: 1391393 - RNA, 15 nt, Human
aacaacucuuugaga

SEQ ID NO: 1391394 - RNA, 21 nt, Human
aacaaagaugccacauucaaa

SEQ ID NO: 1391395 - RNA, 19 nt, Human
aacaaagaguucaagaaau

SEQ ID NO: 1391396 - RNA, 23 nt, Human
aacaaagaguucaagaaauaagu

SEQ ID NO: 1391397 - RNA, 17 nt, Human
aacaaagaguucaagaa

SEQ ID NO: 1391398 - RNA, 11 nt, Human
aacaaagaaac

SEQ ID NO: 1391399 - RNA, 14 nt, Human
aacaaagcagccac

SEQ ID NO: 1391400 - RNA, 15 nt, Human
aacaaagcagccacg

SEQ ID NO: 1391401 - RNA, 17 nt, Human
aacaccuuccagcuccu

SEQ ID NO: 1391402 - RNA, 21 nt, Human
aacaccaagcacagcagccug

SEQ ID NO: 1391403 - RNA, 19 nt, Human
aacaccaagcacagcagcc

SEQ ID NO: 1391404 - RNA, 18 nt, Human
aacaccaagcacagcagc

SEQ ID NO: 1391405 - RNA, 17 nt, Human
aacaccaagcacagcag

SEQ ID NO: 1391406 - RNA, 14 nt, Human
aacaccaagcacag

SEQ ID NO: 1391407 - RNA, 15 nt, Human
aacaccaacauaaaa

SEQ ID NO: 1391408 - RNA, 21 nt, Human
aacacauuugcuuuuugugau

SEQ ID NO: 1391409 - RNA, 12 nt, Human
aacaagaauugg

SEQ ID NO: 1391410 - RNA, 19 nt, Human
aacaagaagggacugagag

SEQ ID NO: 1391411 - RNA, 21 nt, Human
aacaagaagccacagaccuag

SEQ ID NO: 1391412 - RNA, 19 nt, Human
aacacauuuuucuuaggga

SEQ ID NO: 1391413 - RNA, 19 nt, Human
aaauugcaaaucuugaaau

SEQ ID NO: 1391414 - RNA, 14 nt, Human
aaauugcaaaucuu

SEQ ID NO: 1391415 - RNA, 13 nt, Human
aaauugcaaaucu

SEQ ID NO: 1391416 - RNA, 14 nt, Human
aaauugauuuugaa

SEQ ID NO: 1391417 - RNA, 23 nt, Human
aaauuggcauggaaauuuaaagc

SEQ ID NO: 1391418 - RNA, 21 nt, Human
aaauuggcauggaaauuuaaa

SEQ ID NO: 1391419 - RNA, 20 nt, Human
aaauuggcauggaaauuuaa

SEQ ID NO: 1391420 - RNA, 16 nt, Human
aaauuggaaagcaggu

SEQ ID NO: 1391421 - RNA, 16 nt, Human
aaauuggcauggaaau

SEQ ID NO: 1391422 - RNA, 14 nt, Human
aaauugccauauug

SEQ ID NO: 1391423 - RNA, 15 nt, Human
aaauugauuuugaac

SEQ ID NO: 1391424 - RNA, 18 nt, Human
aaauugcuuuguauugua

SEQ ID NO: 1391425 - RNA, 22 nt, Human
aacaaaagaagcccggcuccug

SEQ ID NO: 1391426 - RNA, 17 nt, Human
aacaaaacugcauuuca

SEQ ID NO: 1391427 - RNA, 13 nt, Human
aacaaaaauuguc

SEQ ID NO: 1391428 - RNA, 20 nt, Human
aacaaacuguguaacugccc

SEQ ID NO: 1391429 - RNA, 17 nt, Human
aacaaacuguguaacug

SEQ ID NO: 1391430 - RNA, 17 nt, Human
aacaaaauguaugucug

SEQ ID NO: 1391431 - RNA, 14 nt, Human
aacaaaauguaugu

SEQ ID NO: 1391432 - RNA, 15 nt, Human
aacaaagaaauuaug

SEQ ID NO: 1391433 - RNA, 17 nt, Human
aacaaagaaauuaugug

SEQ ID NO: 1391434 - RNA, 22 nt, Human
aacccugucuggauccuauccu

SEQ ID NO: 1391435 - RNA, 17 nt, Human
aacaugaugagguagua

SEQ ID NO: 1391436 - RNA, 14 nt, Human
aacaugcacugaug

SEQ ID NO: 1391437 - RNA, 21 nt, Human
aacaugaugagguaguaccuu

SEQ ID NO: 1391438 - RNA, 19 nt, Human
aacaugcacugauguugug

SEQ ID NO: 1391439 - RNA, 16 nt, Human
aacaugcacugauguu

SEQ ID NO: 1391440 - RNA, 22 nt, Human
aacaugcuacacacugcauguu

SEQ ID NO: 1391441 - RNA, 13 nt, Human
aacaucacagccc

SEQ ID NO: 1391442 - RNA, 19 nt, Human
aacaucauuacuauaagaa

SEQ ID NO: 1391443 - RNA, 13 nt, Human
aacaugauuuggg

SEQ ID NO: 1391444 - RNA, 23 nt, Human
aacagcuggacccugaccagcuc

SEQ ID NO: 1391445 - RNA, 11 nt, Human
aacagcuggug

SEQ ID NO: 1391446 - RNA, 20 nt, Human
aaccacugaaaaaauauaug

SEQ ID NO: 1391447 - RNA, 16 nt, Human
aaccacugaaaaaaua

SEQ ID NO: 1391448 - RNA, 15 nt, Human
aaccacugaaaaaau

SEQ ID NO: 1391449 - RNA, 13 nt, Human
aaccacugaaaaa

SEQ ID NO: 1391450 - RNA, 22 nt, Human
aaccacuggaaaguuuaugguu

SEQ ID NO: 1391451 - RNA, 14 nt, Human
aaccagaucauugu

SEQ ID NO: 1391452 - RNA, 22 nt, Human
aaccacucuaucaaguauuaua

SEQ ID NO: 1391453 - RNA, 22 nt, Human
aaccaguccccccacccucauu

SEQ ID NO: 1391454 - RNA, 18 nt, Human
aaccaguccccccacccu

SEQ ID NO: 1391455 - RNA, 17 nt, Human
aaccaguguuguggauu

SEQ ID NO: 1391456 - RNA, 13 nt, Human
aaccagcuuccuu

SEQ ID NO: 1391457 - RNA, 17 nt, Human
aaccagcucagcacugc

SEQ ID NO: 1391458 - RNA, 22 nt, Human
aaccagcucagcacugccugcu

SEQ ID NO: 1391459 - RNA, 14 nt, Human
aaccagcucagcac

SEQ ID NO: 1391460 - RNA, 23 nt, Human
aaccagaucuagucaaucaaguc

SEQ ID NO: 1391461 - RNA, 23 nt, Human
aaccagcacagcuuagauuucau

SEQ ID NO: 1391462 - RNA, 20 nt, Human
aaccacugcuuccauuuaau

SEQ ID NO: 1391463 - RNA, 13 nt, Human
aaccacugcuucc

SEQ ID NO: 1391464 - RNA, 12 nt, Human
aaccacugcuuc

SEQ ID NO: 1391465 - RNA, 19 nt, Human
aaccacugaaaaaauauau

SEQ ID NO: 1391466 - RNA, 22 nt, Human
aaccagcuuccuucagagagca

SEQ ID NO: 1391467 - RNA, 21 nt, Human
aaccagcuuccuucagagagc

SEQ ID NO: 1391468 - RNA, 20 nt, Human
aaccagcuuccuucagagag

SEQ ID NO: 1391469 - RNA, 19 nt, Human
aaccagcuuccuucagaga

SEQ ID NO: 1391470 - RNA, 17 nt, Human
aaccagcuuccuucaga

SEQ ID NO: 1391471 - RNA, 16 nt, Human
aaccagcuuccuucag

SEQ ID NO: 1391472 - RNA, 20 nt, Human
aacugaagcagccucucccc

SEQ ID NO: 1391473 - RNA, 18 nt, Human
aacugaagcagccucucc

SEQ ID NO: 1391474 - RNA, 18 nt, Human
aacugaagaguaaucaau

SEQ ID NO: 1391475 - RNA, 23 nt, Human
aacucauacacucguaugauacu

SEQ ID NO: 1391476 - RNA, 19 nt, Human
aacuuaaauaaugugaaac

SEQ ID NO: 1391477 - RNA, 17 nt, Human
aacuuaaauaaugugaa

SEQ ID NO: 1391478 - RNA, 13 nt, Human
aacuguuuuuuaa

SEQ ID NO: 1391479 - RNA, 15 nt, Human
aacuguuuuuuaagu

SEQ ID NO: 1391480 - RNA, 19 nt, Human
aacugauucacaucucauu

SEQ ID NO: 1391481 - RNA, 17 nt, Human
aacugauucacaucuca

SEQ ID NO: 1391482 - RNA, 21 nt, Human
aacugauccaguauaagacua

SEQ ID NO: 1391483 - RNA, 17 nt, Human
aacugacaagccaucuu

SEQ ID NO: 1391484 - RNA, 16 nt, Human
aacugacaagccaucu

SEQ ID NO: 1391485 - RNA, 10 nt, Human
aacugacaag

SEQ ID NO: 1391486 - RNA, 23 nt, Human
aacugacacaugcugaacaucac

SEQ ID NO: 1391487 - RNA, 17 nt, Human
aacugauccagcaauua

SEQ ID NO: 1391488 - RNA, 13 nt, Human
aacuucacauauu

SEQ ID NO: 1391489 - RNA, 23 nt, Human
aacuuuuuuuuuucuuuauaaga

SEQ ID NO: 1391490 - RNA, 18 nt, Human
aacuuuuuuuuuucuuua

SEQ ID NO: 1391491 - RNA, 22 nt, Human
aacuuuuuuucuguaccaguua

SEQ ID NO: 1391492 - RNA, 21 nt, Human
aacuuuuuuucuguaccaguu

SEQ ID NO: 1391493 - RNA, 23 nt, Human
aacuuuuuuauuuaaaaaacuaa

SEQ ID NO: 1391494 - RNA, 15 nt, Human
aacuuuuuguucugg

SEQ ID NO: 1391495 - RNA, 23 nt, Human
aacuuuuuguucugguccuuuuu

SEQ ID NO: 1391496 - RNA, 17 nt, Human
aacuuuuaguaaaguca

SEQ ID NO: 1391497 - RNA, 12 nt, Human
aacuuuguuuua

SEQ ID NO: 1391498 - RNA, 18 nt, Human
aacuuuucuauuaaaagu

SEQ ID NO: 1391499 - RNA, 19 nt, Human
aacuuuucuaacagaaagc

SEQ ID NO: 1391500 - RNA, 16 nt, Human
aacuuuucuaacagaa

SEQ ID NO: 1391501 - RNA, 16 nt, Human
aacuuuuauaaacuuu

SEQ ID NO: 1391502 - RNA, 19 nt, Human
aacuuuuauaaacuuuacc

SEQ ID NO: 1391503 - RNA, 20 nt, Human
aacuuuuuauugauuuuugg

SEQ ID NO: 1391504 - RNA, 21 nt, Human
aacuuuucuuaaaaaguuaua

SEQ ID NO: 1391505 - RNA, 19 nt, Human
aacuuuugugaauuaggcu

SEQ ID NO: 1391506 - RNA, 13 nt, Human
aacuuuugugaau

SEQ ID NO: 1391507 - RNA, 21 nt, Human
aacuuuuguaagacaaagguu

SEQ ID NO: 1391508 - RNA, 11 nt, Human
aacuuuuguaa

SEQ ID NO: 1391509 - RNA, 11 nt, Human
aacuuuuaauu

SEQ ID NO: 1391510 - RNA, 24 nt, Human
aacuuuggaaccagacucuugccu

SEQ ID NO: 1391511 - RNA, 18 nt, Human
aacuuuggaguccccuca

SEQ ID NO: 1391512 - RNA, 12 nt, Human
aacuuuuauaaa

SEQ ID NO: 1391513 - RNA, 15 nt, Human
aacuuuuauaaacuu

SEQ ID NO: 1391514 - RNA, 19 nt, Human
aacuuuggaaccagacucu

SEQ ID NO: 1391515 - RNA, 15 nt, Human
aacuuuggaaccaga

SEQ ID NO: 1391516 - RNA, 15 nt, Human
aacuuugaaguuagc

SEQ ID NO: 1391517 - RNA, 15 nt, Human
aacuuugcugagccu

SEQ ID NO: 1391518 - RNA, 19 nt, Human
aacuuugaccucugcagca

SEQ ID NO: 1391519 - RNA, 20 nt, Human
aacuuugaccucugcagcaa

SEQ ID NO: 1391520 - RNA, 13 nt, Human
aacuuugaccucu

SEQ ID NO: 1391521 - RNA, 14 nt, Human
aacuuugaccucug

SEQ ID NO: 1391522 - RNA, 17 nt, Human
aacuuugaccucugcag

SEQ ID NO: 1391523 - RNA, 17 nt, Human
aaagaugaaagagcagu

SEQ ID NO: 1391524 - RNA, 21 nt, Human
aaagaucuguuuugaaggcaa

SEQ ID NO: 1391525 - RNA, 20 nt, Human
aaagauaucucaucucuucu

SEQ ID NO: 1391526 - RNA, 18 nt, Human
aaagauauaagugcugua

SEQ ID NO: 1391527 - RNA, 20 nt, Human
aaagauauaagugcuguaua

SEQ ID NO: 1391528 - RNA, 21 nt, Human
aaagauauaagugcuguauaa

SEQ ID NO: 1391529 - RNA, 22 nt, Human
aaagauauaagugcuguauaaa

SEQ ID NO: 1391530 - RNA, 15 nt, Human
aaagauauaagugcu

SEQ ID NO: 1391531 - RNA, 16 nt, Human
aaagauauaagugcug

SEQ ID NO: 1391532 - RNA, 17 nt, Human
aaagauauaagugcugu

SEQ ID NO: 1391533 - RNA, 18 nt, Human
aaagaguagaauugcauu

SEQ ID NO: 1391534 - RNA, 13 nt, Human
aaagaguagaauu

SEQ ID NO: 1391535 - RNA, 17 nt, Human
aaagaguacucuuguuu

SEQ ID NO: 1391536 - RNA, 12 nt, Human
aaagaguacucu

SEQ ID NO: 1391537 - RNA, 13 nt, Human
aaagaaaguguau

SEQ ID NO: 1391538 - RNA, 12 nt, Human
aaagaaagugua

SEQ ID NO: 1391539 - RNA, 10 nt, Human
aaagaaagug

SEQ ID NO: 1391540 - RNA, 16 nt, Human
aaagaaaguguauuug

SEQ ID NO: 1391541 - RNA, 13 nt, Human
aaagaaauuaugu

SEQ ID NO: 1391542 - RNA, 15 nt, Human
aaagaaauuaugugc

SEQ ID NO: 1391543 - RNA, 15 nt, Human
aaagaaauauaccua

SEQ ID NO: 1391544 - RNA, 11 nt, Human
aaagaacaucc

SEQ ID NO: 1391545 - RNA, 16 nt, Human
aaacugcaugcccaga

SEQ ID NO: 1391546 - RNA, 17 nt, Human
aaacugacucuuaagaa

SEQ ID NO: 1391547 - RNA, 16 nt, Human
aaacugacucuuaaga

SEQ ID NO: 1391548 - RNA, 20 nt, Human
aaagaaaagaugcacuuugc

SEQ ID NO: 1391549 - RNA, 17 nt, Human
aaagaaaagaugcacuu

SEQ ID NO: 1391550 - RNA, 15 nt, Human
aaagaaaagaugcac

SEQ ID NO: 1391551 - RNA, 14 nt, Human
aaagaaaagaugca

SEQ ID NO: 1391552 - RNA, 13 nt, Human
aaagaaaagaugc

SEQ ID NO: 1391553 - RNA, 13 nt, Human
aaagaaaaccuuu

SEQ ID NO: 1391554 - RNA, 16 nt, Human
aaagaaaagaaaauuu

SEQ ID NO: 1391555 - RNA, 13 nt, Human
aaagaaaaacaaa

SEQ ID NO: 1391556 - RNA, 12 nt, Human
aaagaaaacuug

SEQ ID NO: 1391557 - RNA, 20 nt, Human
aaagaaaacuuguauuaugu

SEQ ID NO: 1391558 - RNA, 17 nt, Human
aaacagauuuggaaaga

SEQ ID NO: 1391559 - RNA, 16 nt, Human
aaacagauuguuugca

SEQ ID NO: 1391560 - RNA, 15 nt, Human
aaacacuugcaaccu

SEQ ID NO: 1391561 - RNA, 24 nt, Human
aaacacuugcggauauucuggacu

SEQ ID NO: 1391562 - RNA, 12 nt, Human
aaaauucauuuu

SEQ ID NO: 1391563 - RNA, 13 nt, Human
aaaauugccauau

SEQ ID NO: 1391564 - RNA, 14 nt, Human
aaaauugccauauu

SEQ ID NO: 1391565 - RNA, 16 nt, Human
aaaauugccauauugc

SEQ ID NO: 1391566 - RNA, 17 nt, Human
aaaauugccauauugca

SEQ ID NO: 1391567 - RNA, 18 nt, Human
aaaauugccauauugcac

SEQ ID NO: 1391568 - RNA, 19 nt, Human
aaaauucagcaaagugguu

SEQ ID NO: 1391569 - RNA, 14 nt, Human
aaaauucagcaaag

SEQ ID NO: 1391570 - RNA, 13 nt, Human
aaaauucagcaaa

SEQ ID NO: 1391571 - RNA, 18 nt, Human
aaaauucaacaaacauuu

SEQ ID NO: 1391572 - RNA, 13 nt, Human
aaaacacacaggu

SEQ ID NO: 1391573 - RNA, 13 nt, Human
aaaacacauuuuu

SEQ ID NO: 1391574 - RNA, 15 nt, Human
aaaacacauuuuucu

SEQ ID NO: 1391575 - RNA, 14 nt, Human
aaacacucuugaaa

SEQ ID NO: 1391576 - RNA, 17 nt, Human
aaacacucuugaaaaau

SEQ ID NO: 1391577 - RNA, 20 nt, Human
aaaauugcugacuguagcuu

SEQ ID NO: 1391578 - RNA, 19 nt, Human
aaaauugccauauugcaca

SEQ ID NO: 1391579 - RNA, 21 nt, Human
aaaauugccauauugcacaug

SEQ ID NO: 1391580 - RNA, 13 nt, Human
aaacacucuugaa

SEQ ID NO: 1391581 - RNA, 24 nt, Human
aaauauaaagacguuuuauaagca

SEQ ID NO: 1391582 - RNA, 12 nt, Human
aaauauaaagac

SEQ ID NO: 1391583 - RNA, 10 nt, Human
aaauauaaag

SEQ ID NO: 1391584 - RNA, 13 nt, Human
aaauauaaaauau

SEQ ID NO: 1391585 - RNA, 21 nt, Human
aaauaguuuggauauguaaaa

SEQ ID NO: 1391586 - RNA, 20 nt, Human
aaauaguuuggauauguaaa

SEQ ID NO: 1391587 - RNA, 23 nt, Human
aaauagucucuuuaaaaggaaag

SEQ ID NO: 1391588 - RNA, 19 nt, Human
aaauaguggugugauuugg

SEQ ID NO: 1391589 - RNA, 13 nt, Human
aaauauaaagacg

SEQ ID NO: 1391590 - RNA, 19 nt, Human
aaauauuuuaaagaauugu

SEQ ID NO: 1391591 - RNA, 23 nt, Human
aaauauuuuaaagaauuguguca

SEQ ID NO: 1391592 - RNA, 15 nt, Human
aaauagaaaaugguc

SEQ ID NO: 1391593 - RNA, 14 nt, Human
aaauagaaaauggu

SEQ ID NO: 1391594 - RNA, 17 nt, Human
aaauacuuuuacucugc

SEQ ID NO: 1391595 - RNA, 19 nt, Human
aaauacuuuuacucugccu

SEQ ID NO: 1391596 - RNA, 12 nt, Human
aaauaguauuuc

SEQ ID NO: 1391597 - RNA, 17 nt, Human
aaauagacagcaugaga

SEQ ID NO: 1391598 - RNA, 15 nt, Human
aaauagacaaauaga

SEQ ID NO: 1391599 - RNA, 16 nt, Human
aaauagaagagagagg

SEQ ID NO: 1391600 - RNA, 21 nt, Human
aaauauuuugaaucaauaaua

SEQ ID NO: 1391601 - RNA, 15 nt, Human
aaauauuuugaauca

SEQ ID NO: 1391602 - RNA, 18 nt, Human
aaaucaacuugcuuauca

SEQ ID NO: 1391603 - RNA, 13 nt, Human
aaaucaaaugaau

SEQ ID NO: 1391604 - RNA, 20 nt, Human
aaaucaaaugguaucuuuug

SEQ ID NO: 1391605 - RNA, 18 nt, Human
aaaucuugucauguguau

SEQ ID NO: 1391606 - RNA, 17 nt, Human
aaaucuugucaugugua

SEQ ID NO: 1391607 - RNA, 16 nt, Human
aaaucuugucaugugu

SEQ ID NO: 1391608 - RNA, 14 nt, Human
aaaucuugucaugu

SEQ ID NO: 1391609 - RNA, 22 nt, Human
aaaucuugguugaugccaaaaa

SEQ ID NO: 1391610 - RNA, 20 nt, Human
aaaucuugguugaugccaaa

SEQ ID NO: 1391611 - RNA, 14 nt, Human
aaaucuugaucagu

SEQ ID NO: 1391612 - RNA, 13 nt, Human
aaaucuugaaauu

SEQ ID NO: 1391613 - RNA, 21 nt, Human
aaaucuugucauguguauaaa

SEQ ID NO: 1391614 - RNA, 20 nt, Human
aaaucuugucauguguauaa

SEQ ID NO: 1391615 - RNA, 19 nt, Human
aaaucuugucauguguaua

SEQ ID NO: 1391616 - RNA, 16 nt, Human
aaaucuuucuuucuua

SEQ ID NO: 1391617 - RNA, 18 nt, Human
aaaucuuucuuucuuaga

SEQ ID NO: 1391618 - RNA, 20 nt, Human
aaaugcuuuuuauuucugca

SEQ ID NO: 1391619 - RNA, 13 nt, Human
aaauggaaacuau

SEQ ID NO: 1391620 - RNA, 20 nt, Human
aaaucuuucuuucuuagaaa

SEQ ID NO: 1391621 - RNA, 22 nt, Human
aaaucuuucuuucuuagaaauu

SEQ ID NO: 1391622 - RNA, 17 nt, Human
aaauggaauacucuuau

SEQ ID NO: 1391623 - RNA, 18 nt, Human
aaauggcuuccuggcaau

SEQ ID NO: 1391624 - RNA, 22 nt, Human
aaauggccucauguggcuggaa

SEQ ID NO: 1391625 - RNA, 21 nt, Human
aaauggccucauguggcugga

SEQ ID NO: 1391626 - RNA, 21 nt, Human
aaauggcgucuggaaguccaa

SEQ ID NO: 1391627 - RNA, 15 nt, Human
aaauggccucaugug

SEQ ID NO: 1391628 - RNA, 11 nt, Human
aaauggccuca

SEQ ID NO: 1391629 - RNA, 23 nt, Human
aaauggccauuugcuuuuucacc

SEQ ID NO: 1391630 - RNA, 22 nt, Human
aaauggccauuugcuuuuucac

SEQ ID NO: 1391631 - RNA, 19 nt, Human
aaauggccauuugcuuuuu

SEQ ID NO: 1391632 - RNA, 17 nt, Human
aaauaacaaugugcucu

SEQ ID NO: 1391633 - RNA, 14 nt, Human
aaauaacaaugugc

SEQ ID NO: 1391634 - RNA, 20 nt, Human
aaauaacaaaugccaaauua

SEQ ID NO: 1391635 - RNA, 14 nt, Human
aaauaaauuugacu

SEQ ID NO: 1391636 - RNA, 18 nt, Human
aaauaaaaggaagccaaa

SEQ ID NO: 1391637 - RNA, 13 nt, Human
aaagugcugagau

SEQ ID NO: 1391638 - RNA, 23 nt, Human
aaagugcuaagguucuaaggccu

SEQ ID NO: 1391639 - RNA, 21 nt, Human
aaagugcuaagguucuaaggc

SEQ ID NO: 1391640 - RNA, 20 nt, Human
aaagugcuaagguucuaagg

SEQ ID NO: 1391641 - RNA, 18 nt, Human
aaagugcuaagguucuaa

SEQ ID NO: 1391642 - RNA, 17 nt, Human
aaagugcuaagguucua

SEQ ID NO: 1391643 - RNA, 16 nt, Human
aaagugcuaagguucu

SEQ ID NO: 1391644 - RNA, 14 nt, Human
aaagugagagcacg

SEQ ID NO: 1391645 - RNA, 19 nt, Human
aaagugacuaauggcauga

SEQ ID NO: 1391646 - RNA, 14 nt, Human
aaagugacccuguu

SEQ ID NO: 1391647 - RNA, 16 nt, Human
aaauaaagaauggaaa

SEQ ID NO: 1391648 - RNA, 13 nt, Human
aaauaaagaaugg

SEQ ID NO: 1391649 - RNA, 15 nt, Human
aaauaaagaaaagau

SEQ ID NO: 1391650 - RNA, 13 nt, Human
aaauaaagaaaua

SEQ ID NO: 1391651 - RNA, 17 nt, Human
aaauaaaauuuguugca

SEQ ID NO: 1391652 - RNA, 16 nt, Human
aaauaaaauuuguugc

SEQ ID NO: 1391653 - RNA, 15 nt, Human
aaauaaaauuuguug

SEQ ID NO: 1391654 - RNA, 17 nt, Human
aaauaaaaugcuagguu

SEQ ID NO: 1391655 - RNA, 14 nt, Human
aaauaaaaugcuag

SEQ ID NO: 1391656 - RNA, 13 nt, Human
aaauaaaaugcua

SEQ ID NO: 1391657 - RNA, 20 nt, Human
aaauaaagcuugcaacaaaa

SEQ ID NO: 1391658 - RNA, 15 nt, Human
aaauaaagcaucuca

SEQ ID NO: 1391659 - RNA, 14 nt, Human
aaauaaagaaugga

SEQ ID NO: 1391660 - RNA, 23 nt, Human
aaauaaaggaugugauuguggaa

SEQ ID NO: 1391661 - RNA, 12 nt, Human
aaauaacaauga

SEQ ID NO: 1391662 - RNA, 20 nt, Human
aaaggcuguuaaauacagga

SEQ ID NO: 1391663 - RNA, 22 nt, Human
aaaggcuguuaaauacaggaaa

SEQ ID NO: 1391664 - RNA, 19 nt, Human
aaaggcuguuaaauacagg

SEQ ID NO: 1391665 - RNA, 18 nt, Human
aaaggcuguuaaauacag

SEQ ID NO: 1391666 - RNA, 20 nt, Human
aaagggacugagaaauuuau

SEQ ID NO: 1391667 - RNA, 16 nt, Human
aaagggacugagaaau

SEQ ID NO: 1391668 - RNA, 18 nt, Human
aaagucucuaauucuauu

SEQ ID NO: 1391669 - RNA, 15 nt, Human
aaagucucuaauucu

SEQ ID NO: 1391670 - RNA, 19 nt, Human
aaagucucuggaauuugaa

SEQ ID NO: 1391671 - RNA, 15 nt, Human
aaagugaaauaaugu

SEQ ID NO: 1391672 - RNA, 17 nt, Human
aaagugaaauaaugugu

SEQ ID NO: 1391673 - RNA, 20 nt, Human
aaagucuguugauuaaagau

SEQ ID NO: 1391674 - RNA, 19 nt, Human
aaagucuguugauuaaaga

SEQ ID NO: 1391675 - RNA, 18 nt, Human
aaagucuguugauuaaag

SEQ ID NO: 1391676 - RNA, 22 nt, Human
aaagucuguccuugaaggacua

SEQ ID NO: 1391677 - RNA, 19 nt, Human
aaagucuguccuugaagga

SEQ ID NO: 1391678 - RNA, 14 nt, Human
aaagucuguccuug

SEQ ID NO: 1391679 - RNA, 12 nt, Human
aaagucucuugu

SEQ ID NO: 1391680 - RNA, 20 nt, Human
aaagucucuggaauuugaaa

SEQ ID NO: 1391681 - RNA, 22 nt, Human
aaagucucuggaauuugaaaca

SEQ ID NO: 1391682 - RNA, 22 nt, Human
aagcaggaaaugaaaaugucuu

SEQ ID NO: 1391683 - RNA, 15 nt, Human
aagcagcuuagaguu

SEQ ID NO: 1391684 - RNA, 21 nt, Human
aagcagaccacugauaaaacc

SEQ ID NO: 1391685 - RNA, 15 nt, Human
aagcagacagcucca

SEQ ID NO: 1391686 - RNA, 14 nt, Human
aagcagacagcucc

SEQ ID NO: 1391687 - RNA, 12 nt, Human
aagcagacagcu

SEQ ID NO: 1391688 - RNA, 22 nt, Human
aagauuuguuuuuaaacuguac

SEQ ID NO: 1391689 - RNA, 16 nt, Human
aagcagacauuuuaaa

SEQ ID NO: 1391690 - RNA, 22 nt, Human
aagccaggaauuucccaggacc

SEQ ID NO: 1391691 - RNA, 21 nt, Human
aagccaggaauuucccaggac

SEQ ID NO: 1391692 - RNA, 20 nt, Human
aagccaggaauuucccagga

SEQ ID NO: 1391693 - RNA, 23 nt, Human
aagccagcuuucccugccucuca

SEQ ID NO: 1391694 - RNA, 17 nt, Human
aagccagcuuucccugc

SEQ ID NO: 1391695 - RNA, 15 nt, Human
aagccagcuuucccu

SEQ ID NO: 1391696 - RNA, 14 nt, Human
aagccagcuuuccc

SEQ ID NO: 1391697 - RNA, 12 nt, Human
aagccagcuuuc

SEQ ID NO: 1391698 - RNA, 21 nt, Human
aagccagcuuguuuacaugcu

SEQ ID NO: 1391699 - RNA, 14 nt, Human
aagccagcuuguuu

SEQ ID NO: 1391700 - RNA, 12 nt, Human
aagccagcuugu

SEQ ID NO: 1391701 - RNA, 11 nt, Human
aagccagcuug

SEQ ID NO: 1391702 - RNA, 20 nt, Human
aagccagcguccuccucugu

SEQ ID NO: 1391703 - RNA, 14 nt, Human
aagccagaggcugg

SEQ ID NO: 1391704 - RNA, 18 nt, Human
aagccacuuaaaauguuc

SEQ ID NO: 1391705 - RNA, 16 nt, Human
aagccagaggcugggu

SEQ ID NO: 1391706 - RNA, 15 nt, Human
aagccagaggcuggg

SEQ ID NO: 1391707 - RNA, 19 nt, Human
aagccagauuuuccugaaa

SEQ ID NO: 1391708 - RNA, 13 nt, Human
aagccagauuuuc

SEQ ID NO: 1391709 - RNA, 23 nt, Human
aagauuuguuuuuaaacuguaca

SEQ ID NO: 1391710 - RNA, 20 nt, Human
aagauuuguuuuuaaacugu

SEQ ID NO: 1391711 - RNA, 19 nt, Human
aagauuuguuuuuaaacug

SEQ ID NO: 1391712 - RNA, 17 nt, Human
aagauuuguuuuuaaac

SEQ ID NO: 1391713 - RNA, 16 nt, Human
aagauuuguuuuuaaa

SEQ ID NO: 1391714 - RNA, 14 nt, Human
aagauuuguuuuua

SEQ ID NO: 1391715 - RNA, 22 nt, Human
aagauuuccuucuuuuuuucuu

SEQ ID NO: 1391716 - RNA, 15 nt, Human
aagauuguuccugcu

SEQ ID NO: 1391717 - RNA, 21 nt, Human
aagauugguguuuuuuucuau

SEQ ID NO: 1391718 - RNA, 16 nt, Human
aagauuuaccacuugu

SEQ ID NO: 1391719 - RNA, 16 nt, Human
aagauugcugaaauuu

SEQ ID NO: 1391720 - RNA, 23 nt, Human
aagauugguguuuuuuucuaugg

SEQ ID NO: 1391721 - RNA, 20 nt, Human
aagauugguguuuuuuucua

SEQ ID NO: 1391722 - RNA, 19 nt, Human
aagauugguguuuuuuucu

SEQ ID NO: 1391723 - RNA, 17 nt, Human
aagauugguguuuuuuu

SEQ ID NO: 1391724 - RNA, 19 nt, Human
aagauugcuuaauaaauug

SEQ ID NO: 1391725 - RNA, 21 nt, Human
aagaacacccuauauuuugca

SEQ ID NO: 1391726 - RNA, 19 nt, Human
aagaacacccuauauuuug

SEQ ID NO: 1391727 - RNA, 15 nt, Human
aagaaauuucacaua

SEQ ID NO: 1391728 - RNA, 22 nt, Human
aagaaauugaauacuuugaaug

SEQ ID NO: 1391729 - RNA, 13 nt, Human
aagaaauggugaa

SEQ ID NO: 1391730 - RNA, 13 nt, Human
aagaaauuaugug

SEQ ID NO: 1391731 - RNA, 19 nt, Human
aagaaauugaauacuuuga

SEQ ID NO: 1391732 - RNA, 18 nt, Human
aagaaauugaauacuuug

SEQ ID NO: 1391733 - RNA, 17 nt, Human
aagaaauugaauacuuu

SEQ ID NO: 1391734 - RNA, 22 nt, Human
aagaaauuaugugccagauuua

SEQ ID NO: 1391735 - RNA, 20 nt, Human
aagccauggagauucucaua

SEQ ID NO: 1391736 - RNA, 21 nt, Human
aagccaugcuggaaaauaaua

SEQ ID NO: 1391737 - RNA, 15 nt, Human
aagccaugcuggaaa

SEQ ID NO: 1391738 - RNA, 13 nt, Human
aagccaugcugga

SEQ ID NO: 1391739 - RNA, 23 nt, Human
aagccaugaguuccagaaaguaa

SEQ ID NO: 1391740 - RNA, 22 nt, Human
aagccaugaguuccagaaagua

SEQ ID NO: 1391741 - RNA, 23 nt, Human
aagccaucaccucagauggcagc

SEQ ID NO: 1391742 - RNA, 20 nt, Human
aagccaucuugaguggucau

SEQ ID NO: 1391743 - RNA, 16 nt, Human
aagccaucaccucaga

SEQ ID NO: 1391744 - RNA, 23 nt, Human
aagccagcuuguuuacaugcuua

SEQ ID NO: 1391745 - RNA, 22 nt, Human
aaggcacccaucugucugccaa

SEQ ID NO: 1391746 - RNA, 19 nt, Human
aaggcacccccgucaagag

SEQ ID NO: 1391747 - RNA, 19 nt, Human
aaggcacccaucugucugc

SEQ ID NO: 1391748 - RNA, 16 nt, Human
aaggcacaugucaccu

SEQ ID NO: 1391749 - RNA, 14 nt, Human
aaggcaaaaaugua

SEQ ID NO: 1391750 - RNA, 15 nt, Human
aaggcaaaaauguaa

SEQ ID NO: 1391751 - RNA, 20 nt, Human
aagcugccugguauauccaa

SEQ ID NO: 1391752 - RNA, 15 nt, Human
aagcugccugguaua

SEQ ID NO: 1391753 - RNA, 23 nt, Human
aagcugccuccccucuccuuccu

SEQ ID NO: 1391754 - RNA, 23 nt, Human
aagcuaacagggaaggcaggcag

SEQ ID NO: 1391755 - RNA, 17 nt, Human
aagcuaagguuuagaua

SEQ ID NO: 1391756 - RNA, 22 nt, Human
aagcuaacagggaaggcaggca

SEQ ID NO: 1391757 - RNA, 21 nt, Human
aagcuaacagggaaggcaggc

SEQ ID NO: 1391758 - RNA, 20 nt, Human
aagcuaacagggaaggcagg

SEQ ID NO: 1391759 - RNA, 15 nt, Human
aagcuaaaauaaaga

SEQ ID NO: 1391760 - RNA, 21 nt, Human
aagcuaaauccuuuacuguua

SEQ ID NO: 1391761 - RNA, 16 nt, Human
aagcuaaaauaaagaa

SEQ ID NO: 1391762 - RNA, 13 nt, Human
aagcuaaaauaaa

SEQ ID NO: 1391763 - RNA, 22 nt, Human
aagcgugagcuuaaaauacaag

SEQ ID NO: 1391764 - RNA, 23 nt, Human
aagcuggcggcuggggucccagc

SEQ ID NO: 1391765 - RNA, 20 nt, Human
aagcuggagugcaguggcau

SEQ ID NO: 1391766 - RNA, 15 nt, Human
aaggacuccugaaaa

SEQ ID NO: 1391767 - RNA, 22 nt, Human
aaggacuccuccuuuuuccaug

SEQ ID NO: 1391768 - RNA, 16 nt, Human
aaggacuauaagaaua

SEQ ID NO: 1391769 - RNA, 21 nt, Human
aaggacuaugaaaagcuagaa

SEQ ID NO: 1391770 - RNA, 21 nt, Human
aaggcaaaaauaguuuggaua

SEQ ID NO: 1391771 - RNA, 13 nt, Human
aaggcaaaaauag

SEQ ID NO: 1391772 - RNA, 14 nt, Human
aaggacuguaaucu

SEQ ID NO: 1391773 - RNA, 18 nt, Human
aagucucuaauucuauua

SEQ ID NO: 1391774 - RNA, 15 nt, Human
aagucucuaauucua

SEQ ID NO: 1391775 - RNA, 19 nt, Human
aagucucuggaauuugaaa

SEQ ID NO: 1391776 - RNA, 21 nt, Human
aagguuuaaagagucuagauu

SEQ ID NO: 1391777 - RNA, 20 nt, Human
aagguuuaaagagucuagau

SEQ ID NO: 1391778 - RNA, 16 nt, Human
aagguugggcagggug

SEQ ID NO: 1391779 - RNA, 17 nt, Human
aagguucuuacugcuug

SEQ ID NO: 1391780 - RNA, 19 nt, Human
aagguggauggccccagca

SEQ ID NO: 1391781 - RNA, 18 nt, Human
aaggugcugacggccagg

SEQ ID NO: 1391782 - RNA, 19 nt, Human
aaggugcucucuuucuguc

SEQ ID NO: 1391783 - RNA, 19 nt, Human
aaguaucaucaguguagaa

SEQ ID NO: 1391784 - RNA, 13 nt, Human
aaguagaaaucau

SEQ ID NO: 1391785 - RNA, 18 nt, Human
aaguagaaacaaaauaca

SEQ ID NO: 1391786 - RNA, 15 nt, Human
aaguagaaaucauag

SEQ ID NO: 1391787 - RNA, 16 nt, Human
aaguagaaacaaaaua

SEQ ID NO: 1391788 - RNA, 17 nt, Human
aaguacuuguaguucca

SEQ ID NO: 1391789 - RNA, 21 nt, Human
aagguuuaaaugaacaagaga

SEQ ID NO: 1391790 - RNA, 16 nt, Human
aagguuuaaaugaaca

SEQ ID NO: 1391791 - RNA, 14 nt, Human
aagguuuaaaugaa

SEQ ID NO: 1391792 - RNA, 14 nt, Human
aaguacuuuuggca

SEQ ID NO: 1391793 - RNA, 15 nt, Human
aaguacuuuuggcau

SEQ ID NO: 1391794 - RNA, 21 nt, Human
aaguauguauuauuuacauuu

SEQ ID NO: 1391795 - RNA, 14 nt, Human
aaguauguauuauu

SEQ ID NO: 1391796 - RNA, 23 nt, Human
aaguccaggcuuuuuuaucaugu

SEQ ID NO: 1391797 - RNA, 15 nt, Human
aaguccagguccugg

SEQ ID NO: 1391798 - RNA, 13 nt, Human
aaguccagguccu

SEQ ID NO: 1391799 - RNA, 21 nt, Human
aaguccagguccugguggggc

SEQ ID NO: 1391800 - RNA, 18 nt, Human
aaguccagguccuggugg

SEQ ID NO: 1391801 - RNA, 17 nt, Human
aaguccagguccuggug

SEQ ID NO: 1391802 - RNA, 20 nt, Human
aaguccaguccaguccuauc

SEQ ID NO: 1391803 - RNA, 19 nt, Human
aaguccagguccugguggg

SEQ ID NO: 1391804 - RNA, 20 nt, Human
aaguccaguguuucuuuuuu

SEQ ID NO: 1391805 - RNA, 16 nt, Human
aaguaucccuacugua

SEQ ID NO: 1391806 - RNA, 17 nt, Human
aaguaucccuacuguaa

SEQ ID NO: 1391807 - RNA, 20 nt, Human
aagugcuguuuauuaaucuu

SEQ ID NO: 1391808 - RNA, 18 nt, Human
aagugcuguuuauuaauc

SEQ ID NO: 1391809 - RNA, 17 nt, Human
aagugcuguuuauuaau

SEQ ID NO: 1391810 - RNA, 16 nt, Human
aagugcuguuuauuaa

SEQ ID NO: 1391811 - RNA, 14 nt, Human
aagugcuguuuauu

SEQ ID NO: 1391812 - RNA, 23 nt, Human
aagugcuguauaaaaucagccaa

SEQ ID NO: 1391813 - RNA, 19 nt, Human
aagugcuguauaaaaucag

SEQ ID NO: 1391814 - RNA, 22 nt, Human
aagugcuguauaaaaucagcca

SEQ ID NO: 1391815 - RNA, 12 nt, Human
aagugcuguaua

SEQ ID NO: 1391816 - RNA, 13 nt, Human
aagugcuguauaa

SEQ ID NO: 1391817 - RNA, 15 nt, Human
aagugcuguauaaaa

SEQ ID NO: 1391818 - RNA, 16 nt, Human
aagugcuguauaaaau

SEQ ID NO: 1391819 - RNA, 17 nt, Human
aagugcuguauaaaauc

SEQ ID NO: 1391820 - RNA, 15 nt, Human
aauaaugcuuugaaa

SEQ ID NO: 1391821 - RNA, 13 nt, Human
aauaaugcuuuga

SEQ ID NO: 1391822 - RNA, 12 nt, Human
aauaaugcuuug

SEQ ID NO: 1391823 - RNA, 12 nt, Human
aauaauguaaga

SEQ ID NO: 1391824 - RNA, 19 nt, Human
aauaauguaagacaaauau

SEQ ID NO: 1391825 - RNA, 16 nt, Human
aauaaugugaaacugg

SEQ ID NO: 1391826 - RNA, 12 nt, Human
aauaauaaagaa

SEQ ID NO: 1391827 - RNA, 20 nt, Human
aauaaguuuuuguuucacag

SEQ ID NO: 1391828 - RNA, 22 nt, Human
aauaaguucaaauucuucugaa

SEQ ID NO: 1391829 - RNA, 21 nt, Human
aauaaguucaaauucuucuga

SEQ ID NO: 1391830 - RNA, 18 nt, Human
aauaaguuauugcaguuu

SEQ ID NO: 1391831 - RNA, 14 nt, Human
aauaaguuauugca

SEQ ID NO: 1391832 - RNA, 13 nt, Human
aauaaguuauugc

SEQ ID NO: 1391833 - RNA, 20 nt, Human
aauaauaaagaauagcuuua

SEQ ID NO: 1391834 - RNA, 21 nt, Human
aauaaucacgcuuuccugaau

SEQ ID NO: 1391835 - RNA, 20 nt, Human
aauaaucacgcuuuccugaa

SEQ ID NO: 1391836 - RNA, 21 nt, Human
aauaauccuaaacauaugaau

SEQ ID NO: 1391837 - RNA, 22 nt, Human
aaguguaaaauauuuugaauca

SEQ ID NO: 1391838 - RNA, 18 nt, Human
aagugguucccucucuua

SEQ ID NO: 1391839 - RNA, 17 nt, Human
aaguggguuuuuuaguu

SEQ ID NO: 1391840 - RNA, 21 nt, Human
aaguggguuuuuuaguugaau

SEQ ID NO: 1391841 - RNA, 22 nt, Human
aagugcuguuuauuaaucuuag

SEQ ID NO: 1391842 - RNA, 21 nt, Human
aagugcuguuuauuaaucuua

SEQ ID NO: 1391843 - RNA, 18 nt, Human
aaguuguuguaaccugcu

SEQ ID NO: 1391844 - RNA, 20 nt, Human
aaguuguuccuuaagucaga

SEQ ID NO: 1391845 - RNA, 11 nt, Human
aauaaguuauu

SEQ ID NO: 1391846 - RNA, 18 nt, Human
aauaagugcccucuccca

SEQ ID NO: 1391847 - RNA, 17 nt, Human
aauaagugcccucuccc

SEQ ID NO: 1391848 - RNA, 16 nt, Human
aauaagugcccucucc

SEQ ID NO: 1391849 - RNA, 19 nt, Human
aauaaacuauuuguaaagu

SEQ ID NO: 1391850 - RNA, 22 nt, Human
aauaaaauucaacaaacauuug

SEQ ID NO: 1391851 - RNA, 18 nt, Human
aauaaaauucaacaaaca

SEQ ID NO: 1391852 - RNA, 16 nt, Human
aauaaacgucuuaaau

SEQ ID NO: 1391853 - RNA, 18 nt, Human
aauaaacuaauaauugca

SEQ ID NO: 1391854 - RNA, 19 nt, Human
aauaaaauucaacaaacau

SEQ ID NO: 1391855 - RNA, 17 nt, Human
aauaaacgucuuaaaua

SEQ ID NO: 1391856 - RNA, 15 nt, Human
aauauaauuguuuua

SEQ ID NO: 1391857 - RNA, 21 nt, Human
aauauggacacuuaauacuac

SEQ ID NO: 1391858 - RNA, 17 nt, Human
aauauggacacuuaaua

SEQ ID NO: 1391859 - RNA, 20 nt, Human
aauauaggaacuuaaauaau

SEQ ID NO: 1391860 - RNA, 21 nt, Human
aauauaggaacuuaaauaaug

SEQ ID NO: 1391861 - RNA, 18 nt, Human
aauauaggaacuuaaaua

SEQ ID NO: 1391862 - RNA, 22 nt, Human
aauauuaugagaugcuggcuug

SEQ ID NO: 1391863 - RNA, 15 nt, Human
aauauguaccaagaa

SEQ ID NO: 1391864 - RNA, 19 nt, Human
aauauguaccaagaaucuu

SEQ ID NO: 1391865 - RNA, 12 nt, Human
aauauguaccaa

SEQ ID NO: 1391866 - RNA, 21 nt, Human
aauaugggggccuuuugggaa

SEQ ID NO: 1391867 - RNA, 18 nt, Human
aauaugguguacauucuu

SEQ ID NO: 1391868 - RNA, 18 nt, Human
aauauggucuuuugguua

SEQ ID NO: 1391869 - RNA, 15 nt, Human
aauauggacugcuca

SEQ ID NO: 1391870 - RNA, 16 nt, Human
aauauuauuccucaaa

SEQ ID NO: 1391871 - RNA, 16 nt, Human
aauauuaugagaugcu

SEQ ID NO: 1391872 - RNA, 14 nt, Human
aauauuaugagaug

SEQ ID NO: 1391873 - RNA, 16 nt, Human
aauauuauguuaaaac

SEQ ID NO: 1391874 - RNA, 22 nt, Human
aaucaaauuuguaggguuucua

SEQ ID NO: 1391875 - RNA, 18 nt, Human
aauauuaugagaugcugg

SEQ ID NO: 1391876 - RNA, 20 nt, Human
aaucaaauuuguaggguuuc

SEQ ID NO: 1391877 - RNA, 14 nt, Human
aauauucaauaaag

SEQ ID NO: 1391878 - RNA, 15 nt, Human
aauauucaauaaagc

SEQ ID NO: 1391879 - RNA, 16 nt, Human
aauauucaauaaagcu

SEQ ID NO: 1391880 - RNA, 18 nt, Human
aaucaacuugcuuaucaa

SEQ ID NO: 1391881 - RNA, 20 nt, Human
aaucaauuacugguccaaaa

SEQ ID NO: 1391882 - RNA, 23 nt, Human
aaucacauauuuuaaaauuuguu

SEQ ID NO: 1391883 - RNA, 22 nt, Human
aaucacauauuuuaaaauuugu

SEQ ID NO: 1391884 - RNA, 13 nt, Human
aaucaacuugcuu

SEQ ID NO: 1391885 - RNA, 17 nt, Human
aaucaacuugcuuauca

SEQ ID NO: 1391886 - RNA, 15 nt, Human
aaucaacuugcuuau

SEQ ID NO: 1391887 - RNA, 14 nt, Human
aaucaauuaaaagu

SEQ ID NO: 1391888 - RNA, 21 nt, Human
aaucaacuugcuuaucaacuu

SEQ ID NO: 1391889 - RNA, 13 nt, Human
aaucacaauacau

SEQ ID NO: 1391890 - RNA, 23 nt, Human
aaugaugaucaauuauaguuucu

SEQ ID NO: 1391891 - RNA, 21 nt, Human
aaugaugaucaauuauaguuu

SEQ ID NO: 1391892 - RNA, 18 nt, Human
aaucccaaauuugauuga

SEQ ID NO: 1391893 - RNA, 13 nt, Human
aaucuccaaaaua

SEQ ID NO: 1391894 - RNA, 14 nt, Human
aaucuccaaaauaa

SEQ ID NO: 1391895 - RNA, 18 nt, Human
aaucuccaaaauaaaacu

SEQ ID NO: 1391896 - RNA, 16 nt, Human
aaucccaaauuugauu

SEQ ID NO: 1391897 - RNA, 11 nt, Human
aaucccaaauu

SEQ ID NO: 1391898 - RNA, 22 nt, Human
aauccaggcagauccaggacua

SEQ ID NO: 1391899 - RNA, 21 nt, Human
aauccaggcagauccaggacu

SEQ ID NO: 1391900 - RNA, 20 nt, Human
aauccaggcagauccaggac

SEQ ID NO: 1391901 - RNA, 14 nt, Human
aauccauacauuug

SEQ ID NO: 1391902 - RNA, 13 nt, Human
aauccauacauuu

SEQ ID NO: 1391903 - RNA, 21 nt, Human
aaugaacaucccuuuuucaau

SEQ ID NO: 1391904 - RNA, 15 nt, Human
aaugaacagaacaua

SEQ ID NO: 1391905 - RNA, 14 nt, Human
aaugaacagaacau

SEQ ID NO: 1391906 - RNA, 17 nt, Human
aaucugcauuauuggaa

SEQ ID NO: 1391907 - RNA, 16 nt, Human
aaucugcauuauugga

SEQ ID NO: 1391908 - RNA, 19 nt, Human
aaucugcaauucaaaaguu

SEQ ID NO: 1391909 - RNA, 15 nt, Human
aaucugcaauucaaa

SEQ ID NO: 1391910 - RNA, 17 nt, Human
aaucucaucucagugaa

SEQ ID NO: 1391911 - RNA, 17 nt, Human
aaucucauugcuuacaa

SEQ ID NO: 1391912 - RNA, 19 nt, Human
aaucugcuaccaaaacagu

SEQ ID NO: 1391913 - RNA, 18 nt, Human
aaucugcauuauuggaau

SEQ ID NO: 1391914 - RNA, 17 nt, Human
aaugaagauacugaaau

SEQ ID NO: 1391915 - RNA, 20 nt, Human
aaugauaacuggaaacuuca

SEQ ID NO: 1391916 - RNA, 11 nt, Human
aaugaagaaag

SEQ ID NO: 1391917 - RNA, 22 nt, Human
aaugaacagaacauagacagaa

SEQ ID NO: 1391918 - RNA, 12 nt, Human
aaugaagauacu

SEQ ID NO: 1391919 - RNA, 20 nt, Human
aauuaguuuuauaugcuucu

SEQ ID NO: 1391920 - RNA, 17 nt, Human
aauuaguuuuauaugcu

SEQ ID NO: 1391921 - RNA, 23 nt, Human
aauuaguuuccuuuuuaauaugc

SEQ ID NO: 1391922 - RNA, 15 nt, Human
aauuaguuuccuuuu

SEQ ID NO: 1391923 - RNA, 14 nt, Human
aauuaguuuccuuu

SEQ ID NO: 1391924 - RNA, 13 nt, Human
aauuaguuuccuu

SEQ ID NO: 1391925 - RNA, 12 nt, Human
aauuaguuuccu

SEQ ID NO: 1391926 - RNA, 14 nt, Human
aauuaguuauauau

SEQ ID NO: 1391927 - RNA, 22 nt, Human
aauuagugcuaagugugaacug

SEQ ID NO: 1391928 - RNA, 14 nt, Human
aauuaguuuuauau

SEQ ID NO: 1391929 - RNA, 16 nt, Human
aauuaaaguacuuuaa

SEQ ID NO: 1391930 - RNA, 14 nt, Human
aauuaaaguacuuu

SEQ ID NO: 1391931 - RNA, 15 nt, Human
aauuaaagcuguuau

SEQ ID NO: 1391932 - RNA, 19 nt, Human
aauuaaacuuuuaauucau

SEQ ID NO: 1391933 - RNA, 15 nt, Human
aauguuuuuugccac

SEQ ID NO: 1391934 - RNA, 13 nt, Human
aauguuuuuugcc

SEQ ID NO: 1391935 - RNA, 23 nt, Human
aauguuuuuugccacagcuuuug

SEQ ID NO: 1391936 - RNA, 15 nt, Human
aauguuuuucuaaag

SEQ ID NO: 1391937 - RNA, 14 nt, Human
aauguuuuucuaaa

SEQ ID NO: 1391938 - RNA, 22 nt, Human
aauguuuuuaauaaaagaaaau

SEQ ID NO: 1391939 - RNA, 14 nt, Human
aauuaaacuuuuaa

SEQ ID NO: 1391940 - RNA, 20 nt, Human
aauuaaaagcaaaucauuug

SEQ ID NO: 1391941 - RNA, 21 nt, Human
aauuaaaagcaaaucauuugu

SEQ ID NO: 1391942 - RNA, 18 nt, Human
aauuaaaagcaaaucauu

SEQ ID NO: 1391943 - RNA, 16 nt, Human
aauuaaaagcaaauca

SEQ ID NO: 1391944 - RNA, 19 nt, Human
aaugucuugagcucuauua

SEQ ID NO: 1391945 - RNA, 17 nt, Human
aaugucuugagcucuau

SEQ ID NO: 1391946 - RNA, 15 nt, Human
aaugucuugagcucu

SEQ ID NO: 1391947 - RNA, 14 nt, Human
aaugucuugagcuc

SEQ ID NO: 1391948 - RNA, 13 nt, Human
aaugucuugagcu

SEQ ID NO: 1391949 - RNA, 13 nt, Human
aaugucuuguguu

SEQ ID NO: 1391950 - RNA, 11 nt, Human
aaugucuugug

SEQ ID NO: 1391951 - RNA, 20 nt, Human
aaugucuugaugcaugcacu

SEQ ID NO: 1391952 - RNA, 16 nt, Human
aauggugccuucauuu

SEQ ID NO: 1391953 - RNA, 20 nt, Human
aaugucuggagaccaccagg

SEQ ID NO: 1391954 - RNA, 14 nt, Human
aaugucuggagacc

SEQ ID NO: 1391955 - RNA, 13 nt, Human
aaugucuggagac

SEQ ID NO: 1391956 - RNA, 18 nt, Human
aaugguaggcauuuccua

SEQ ID NO: 1391957 - RNA, 17 nt, Human
aaugguaggcauuuccu

SEQ ID NO: 1391958 - RNA, 18 nt, Human
aaugguacugacuuugcu

SEQ ID NO: 1391959 - RNA, 20 nt, Human
aaugguacuccacauauuuc

SEQ ID NO: 1391960 - RNA, 14 nt, Human
aauggggccagauc

SEQ ID NO: 1391961 - RNA, 13 nt, Human
aauggggccagau

SEQ ID NO: 1391962 - RNA, 12 nt, Human
aauggggccaga

SEQ ID NO: 1391963 - RNA, 14 nt, Human
aaugggcucaaacu

SEQ ID NO: 1391964 - RNA, 16 nt, Human
aaugggcucaaccaga

SEQ ID NO: 1391965 - RNA, 19 nt, Human
aauggcugauaauuuuaaa

SEQ ID NO: 1391966 - RNA, 18 nt, Human
aauggcugauaauuuuaa

SEQ ID NO: 1391967 - RNA, 17 nt, Human
aauggcugauaauuuua

SEQ ID NO: 1391968 - RNA, 16 nt, Human
aauggcugauaauuuu

SEQ ID NO: 1391969 - RNA, 18 nt, Human
aauggcuuuggucucuug

SEQ ID NO: 1391970 - RNA, 21 nt, Human
aauggcuuuggucucuugcuu

SEQ ID NO: 1391971 - RNA, 21 nt, Human
agaucuguuuugaaggcaaaa

SEQ ID NO: 1391972 - RNA, 14 nt, Human
agaucuguuuugaa

SEQ ID NO: 1391973 - RNA, 23 nt, Human
agaucuguccucagccuugccag

SEQ ID NO: 1391974 - RNA, 19 nt, Human
agaucuguccucagccuug

SEQ ID NO: 1391975 - RNA, 14 nt, Human
agaugacuugaggc

SEQ ID NO: 1391976 - RNA, 14 nt, Human
agaugacugagggu

SEQ ID NO: 1391977 - RNA, 14 nt, Human
agaucuuagauucu

SEQ ID NO: 1391978 - RNA, 18 nt, Human
agaucuguuuugaaggca

SEQ ID NO: 1391979 - RNA, 15 nt, Human
agaucuuagauucuc

SEQ ID NO: 1391980 - RNA, 22 nt, Human
agaugaggccagaccauggaca

SEQ ID NO: 1391981 - RNA, 13 nt, Human
agaugaggccaga

SEQ ID NO: 1391982 - RNA, 14 nt, Human
agaugaggccagac

SEQ ID NO: 1391983 - RNA, 16 nt, Human
agaugaggccagacca

SEQ ID NO: 1391984 - RNA, 21 nt, Human
agaugaggccagaccauggac

SEQ ID NO: 1391985 - RNA, 14 nt, Human
agauaguuuucauc

SEQ ID NO: 1391986 - RNA, 13 nt, Human
agauaguuuucau

SEQ ID NO: 1391987 - RNA, 17 nt, Human
agauaguuuucauccau

SEQ ID NO: 1391988 - RNA, 21 nt, Human
agauaggucagugcaaauacu

SEQ ID NO: 1391989 - RNA, 21 nt, Human
agaggauggucuuacagcagg

SEQ ID NO: 1391990 - RNA, 23 nt, Human
agaggagcccccacccuguuccu

SEQ ID NO: 1391991 - RNA, 17 nt, Human
agaggagccaccaguuc

SEQ ID NO: 1391992 - RNA, 16 nt, Human
agauacuuaagugcug

SEQ ID NO: 1391993 - RNA, 11 nt, Human
agaguuacagu

SEQ ID NO: 1391994 - RNA, 22 nt, Human
agaguuacaguucugugguuuc

SEQ ID NO: 1391995 - RNA, 17 nt, Human
agaguuacaguucugug

SEQ ID NO: 1391996 - RNA, 16 nt, Human
agaguuacaguucugu

SEQ ID NO: 1391997 - RNA, 15 nt, Human
agaguuacaguucug

SEQ ID NO: 1391998 - RNA, 21 nt, Human
agaggggcugaauagcagaag

SEQ ID NO: 1391999 - RNA, 23 nt, Human
agaggggccugccaccuggaccc

SEQ ID NO: 1392000 - RNA, 22 nt, Human
agaggggccugccaccuggacc

SEQ ID NO: 1392001 - RNA, 21 nt, Human
agaggggccugccaccuggac

SEQ ID NO: 1392002 - RNA, 20 nt, Human
agaggggccugccaccugga

SEQ ID NO: 1392003 - RNA, 17 nt, Human
agaggggccugccaccu

SEQ ID NO: 1392004 - RNA, 14 nt, Human
agaggggccugcca

SEQ ID NO: 1392005 - RNA, 13 nt, Human
agaggggccugcc

SEQ ID NO: 1392006 - RNA, 20 nt, Human
agaggggccgaugcccagag

SEQ ID NO: 1392007 - RNA, 16 nt, Human
agaggguguccugcac

SEQ ID NO: 1392008 - RNA, 21 nt, Human
agagcccgaggaggugucuca

SEQ ID NO: 1392009 - RNA, 22 nt, Human
agagcccgaggaggugucucag

SEQ ID NO: 1392010 - RNA, 22 nt, Human
agagagguuugcagucccaagc

SEQ ID NO: 1392011 - RNA, 17 nt, Human
agagccuuccacccagg

SEQ ID NO: 1392012 - RNA, 16 nt, Human
agagccuuccacccag

SEQ ID NO: 1392013 - RNA, 13 nt, Human
agagccuuccacc

SEQ ID NO: 1392014 - RNA, 22 nt, Human
agagccuuccacccaggggcag

SEQ ID NO: 1392015 - RNA, 20 nt, Human
agagccuuccacccaggggc

SEQ ID NO: 1392016 - RNA, 16 nt, Human
agagccuguaaacuuu

SEQ ID NO: 1392017 - RNA, 23 nt, Human
agagccuggggcucuaacgccug

SEQ ID NO: 1392018 - RNA, 16 nt, Human
agagccuggggcucua

SEQ ID NO: 1392019 - RNA, 13 nt, Human
agagccuggggcu

SEQ ID NO: 1392020 - RNA, 12 nt, Human
agagccuggggc

SEQ ID NO: 1392021 - RNA, 10 nt, Human
agagccuggg

SEQ ID NO: 1392022 - RNA, 19 nt, Human
agagcccugucaguagagu

SEQ ID NO: 1392023 - RNA, 13 nt, Human
agagcccugggac

SEQ ID NO: 1392024 - RNA, 12 nt, Human
agagcccuggga

SEQ ID NO: 1392025 - RNA, 17 nt, Human
agagcccugggaccgcu

SEQ ID NO: 1392026 - RNA, 15 nt, Human
agagcccugggaccg

SEQ ID NO: 1392027 - RNA, 23 nt, Human
agagaaaggggagcccacugucc

SEQ ID NO: 1392028 - RNA, 21 nt, Human
agagaaaggggagcccacugu

SEQ ID NO: 1392029 - RNA, 19 nt, Human
agagaaaggggagcccacu

SEQ ID NO: 1392030 - RNA, 18 nt, Human
agagaaaggggagcccac

SEQ ID NO: 1392031 - RNA, 21 nt, Human
agacugcauuauauuuauuac

SEQ ID NO: 1392032 - RNA, 17 nt, Human
agacugcauuauauuua

SEQ ID NO: 1392033 - RNA, 16 nt, Human
agagaaguagaaauca

SEQ ID NO: 1392034 - RNA, 22 nt, Human
agagaagccaucaccucagaug

SEQ ID NO: 1392035 - RNA, 16 nt, Human
agagaagccaucaccu

SEQ ID NO: 1392036 - RNA, 13 nt, Human
agagaagccauca

SEQ ID NO: 1392037 - RNA, 16 nt, Human
agagaagccagcuugu

SEQ ID NO: 1392038 - RNA, 14 nt, Human
agagaagccagcuu

SEQ ID NO: 1392039 - RNA, 13 nt, Human
agagaagccagcu

SEQ ID NO: 1392040 - RNA, 12 nt, Human
agagaagccagc

SEQ ID NO: 1392041 - RNA, 11 nt, Human
agagaagccag

SEQ ID NO: 1392042 - RNA, 23 nt, Human
agagaagcauucucauuggaaau

SEQ ID NO: 1392043 - RNA, 22 nt, Human
agagaagcauucucauuggaaa

SEQ ID NO: 1392044 - RNA, 15 nt, Human
agagaagcaaguaaa

SEQ ID NO: 1392045 - RNA, 22 nt, Human
agagaagccuucaagcucugag

SEQ ID NO: 1392046 - RNA, 21 nt, Human
agagaagccuucaagcucuga

SEQ ID NO: 1392047 - RNA, 17 nt, Human
agagaagccuucaagcu

SEQ ID NO: 1392048 - RNA, 14 nt, Human
agagaagccuucaa

SEQ ID NO: 1392049 - RNA, 13 nt, Human
agagaagccuuca

SEQ ID NO: 1392050 - RNA, 12 nt, Human
agagaagccuuc

SEQ ID NO: 1392051 - RNA, 23 nt, Human
agagaagccuucaagcucugagg

SEQ ID NO: 1392052 - RNA, 13 nt, Human
agagaaggagcag

SEQ ID NO: 1392053 - RNA, 16 nt, Human
agaccagggcuccagc

SEQ ID NO: 1392054 - RNA, 18 nt, Human
agaccagggcuccagccc

SEQ ID NO: 1392055 - RNA, 12 nt, Human
agaccagggcuc

SEQ ID NO: 1392056 - RNA, 17 nt, Human
agaccauccaccaggcc

SEQ ID NO: 1392057 - RNA, 13 nt, Human
agaccauaauguu

SEQ ID NO: 1392058 - RNA, 14 nt, Human
agaccacaugcccc

SEQ ID NO: 1392059 - RNA, 19 nt, Human
agaccaaggcuuucucuac

SEQ ID NO: 1392060 - RNA, 11 nt, Human
agaccaauaaa

SEQ ID NO: 1392061 - RNA, 21 nt, Human
agaccaagauggcccauccug

SEQ ID NO: 1392062 - RNA, 13 nt, Human
agaccaagcuugu

SEQ ID NO: 1392063 - RNA, 16 nt, Human
agaccaagcuugucca

SEQ ID NO: 1392064 - RNA, 14 nt, Human
agacgggcccuggu

SEQ ID NO: 1392065 - RNA, 16 nt, Human
agacuaagccagcacc

SEQ ID NO: 1392066 - RNA, 15 nt, Human
agacuaagccagcac

SEQ ID NO: 1392067 - RNA, 13 nt, Human
agacuaagccagc

SEQ ID NO: 1392068 - RNA, 16 nt, Human
agacguuuuauaagca

SEQ ID NO: 1392069 - RNA, 22 nt, Human
agacguuuuauaagcaucauua

SEQ ID NO: 1392070 - RNA, 21 nt, Human
agacuacagcuggggugcagg

SEQ ID NO: 1392071 - RNA, 16 nt, Human
agacuacagcuggggu

SEQ ID NO: 1392072 - RNA, 23 nt, Human
agacuacaggcacacaccaccac

SEQ ID NO: 1392073 - RNA, 13 nt, Human
agacaaugacuua

SEQ ID NO: 1392074 - RNA, 17 nt, Human
agacaaugacuuacugu

SEQ ID NO: 1392075 - RNA, 19 nt, Human
agacaaugacuuacuguac

SEQ ID NO: 1392076 - RNA, 15 nt, Human
agacaauuuauuaug

SEQ ID NO: 1392077 - RNA, 21 nt, Human
agacaauuuauuauggcacau

SEQ ID NO: 1392078 - RNA, 15 nt, Human
agccgagcaggaggc

SEQ ID NO: 1392079 - RNA, 14 nt, Human
agccgagcaggagg

SEQ ID NO: 1392080 - RNA, 16 nt, Human
agccgggucugccucu

SEQ ID NO: 1392081 - RNA, 24 nt, Human
agccggggugggguggcugcagcc

SEQ ID NO: 1392082 - RNA, 23 nt, Human
agccggggugggguggcugcagc

SEQ ID NO: 1392083 - RNA, 20 nt, Human
agccggggugggguggcugc

SEQ ID NO: 1392084 - RNA, 19 nt, Human
agccggggugggguggcug

SEQ ID NO: 1392085 - RNA, 16 nt, Human
agccgggguggggugg

SEQ ID NO: 1392086 - RNA, 16 nt, Human
agccggcacagggucu

SEQ ID NO: 1392087 - RNA, 15 nt, Human
agccggcacaggguc

SEQ ID NO: 1392088 - RNA, 14 nt, Human
agccggcacagggu

SEQ ID NO: 1392089 - RNA, 21 nt, Human
agccgcuuggcgaugccagcc

SEQ ID NO: 1392090 - RNA, 20 nt, Human
agccgcuuggcgaugccagc

SEQ ID NO: 1392091 - RNA, 16 nt, Human
agccggguguccccaa

SEQ ID NO: 1392092 - RNA, 22 nt, Human
agccgggucugccucuucuggg

SEQ ID NO: 1392093 - RNA, 21 nt, Human
agccgggucugccucuucugg

SEQ ID NO: 1392094 - RNA, 20 nt, Human
agccgggucugccucuucug

SEQ ID NO: 1392095 - RNA, 16 nt, Human
agccucccugaagccu

SEQ ID NO: 1392096 - RNA, 15 nt, Human
agccucccugaagcc

SEQ ID NO: 1392097 - RNA, 14 nt, Human
agccucccugaagc

SEQ ID NO: 1392098 - RNA, 17 nt, Human
agccucccugaagacca

SEQ ID NO: 1392099 - RNA, 13 nt, Human
agccuccucucuc

SEQ ID NO: 1392100 - RNA, 13 nt, Human
agccucccugaag

SEQ ID NO: 1392101 - RNA, 22 nt, Human
agccuccccugccagggcaggg

SEQ ID NO: 1392102 - RNA, 20 nt, Human
agccuccccugccagggcag

SEQ ID NO: 1392103 - RNA, 19 nt, Human
agccuccccugccagggca

SEQ ID NO: 1392104 - RNA, 18 nt, Human
agccuccccugccagggc

SEQ ID NO: 1392105 - RNA, 17 nt, Human
agccuccccugccaggg

SEQ ID NO: 1392106 - RNA, 16 nt, Human
agccuccccugccagg

SEQ ID NO: 1392107 - RNA, 15 nt, Human
agccuccccugccag

SEQ ID NO: 1392108 - RNA, 14 nt, Human
agccuccccugcca

SEQ ID NO: 1392109 - RNA, 23 nt, Human
agcccaaguucaugcagcugugg

SEQ ID NO: 1392110 - RNA, 21 nt, Human
agcccaaguucaugcagcugu

SEQ ID NO: 1392111 - RNA, 13 nt, Human
agccccacuccuc

SEQ ID NO: 1392112 - RNA, 17 nt, Human
agccccacccuggccua

SEQ ID NO: 1392113 - RNA, 16 nt, Human
agccccacccuggccu

SEQ ID NO: 1392114 - RNA, 23 nt, Human
agccccaccccagggcagccagg

SEQ ID NO: 1392115 - RNA, 19 nt, Human
agccccacccucagaugca

SEQ ID NO: 1392116 - RNA, 22 nt, Human
agccccaccccagggcagccag

SEQ ID NO: 1392117 - RNA, 18 nt, Human
agccccaccccagggcag

SEQ ID NO: 1392118 - RNA, 20 nt, Human
agccccacccaggccaggca

SEQ ID NO: 1392119 - RNA, 16 nt, Human
agccccacccaggcca

SEQ ID NO: 1392120 - RNA, 14 nt, Human
agccccacccaggc

SEQ ID NO: 1392121 - RNA, 19 nt, Human
agccccagcccagccccac

SEQ ID NO: 1392122 - RNA, 21 nt, Human
agccccagcccagccccacuc

SEQ ID NO: 1392123 - RNA, 14 nt, Human
agccccagccaggg

SEQ ID NO: 1392124 - RNA, 13 nt, Human
agccccagccagg

SEQ ID NO: 1392125 - RNA, 20 nt, Human
agcccuaggguggagagcca

SEQ ID NO: 1392126 - RNA, 17 nt, Human
agcccuaggguggagag

SEQ ID NO: 1392127 - RNA, 16 nt, Human
agcccuaggguggaga

SEQ ID NO: 1392128 - RNA, 23 nt, Human
agcccugaggacagaugccuccu

SEQ ID NO: 1392129 - RNA, 22 nt, Human
agcccugaggacagaugccucc

SEQ ID NO: 1392130 - RNA, 19 nt, Human
agcccugaggacagaugcc

SEQ ID NO: 1392131 - RNA, 17 nt, Human
agccccaucagcuccag

SEQ ID NO: 1392132 - RNA, 13 nt, Human
agauguaauuuug

SEQ ID NO: 1392133 - RNA, 19 nt, Human
agauguaauuuuguguaag

SEQ ID NO: 1392134 - RNA, 17 nt, Human
agauguaauuuugugua

SEQ ID NO: 1392135 - RNA, 15 nt, Human
agauguaauuuugug

SEQ ID NO: 1392136 - RNA, 14 nt, Human
agauguaauuuugu

SEQ ID NO: 1392137 - RNA, 20 nt, Human
agcagcccccagcucccacc

SEQ ID NO: 1392138 - RNA, 19 nt, Human
agcagcccccagcucccac

SEQ ID NO: 1392139 - RNA, 17 nt, Human
agcagcccccagcuccc

SEQ ID NO: 1392140 - RNA, 14 nt, Human
agcagcccccagcu

SEQ ID NO: 1392141 - RNA, 23 nt, Human
agcagccccacaccagggccagc

SEQ ID NO: 1392142 - RNA, 22 nt, Human
agcagccagcccugccuggagg

SEQ ID NO: 1392143 - RNA, 23 nt, Human
agcagccagcccugccuggagga

SEQ ID NO: 1392144 - RNA, 21 nt, Human
agcagccagcccugccuggag

SEQ ID NO: 1392145 - RNA, 20 nt, Human
agcagccagcccugccugga

SEQ ID NO: 1392146 - RNA, 19 nt, Human
agcagccagcccugccugg

SEQ ID NO: 1392147 - RNA, 18 nt, Human
agcagccagcccugccug

SEQ ID NO: 1392148 - RNA, 17 nt, Human
agcagccagcccugccu

SEQ ID NO: 1392149 - RNA, 16 nt, Human
agcagccagcccugcc

SEQ ID NO: 1392150 - RNA, 15 nt, Human
agcagccagcccugc

SEQ ID NO: 1392151 - RNA, 14 nt, Human
agcagccagcccug

SEQ ID NO: 1392152 - RNA, 13 nt, Human
agcagccagcccu

SEQ ID NO: 1392153 - RNA, 12 nt, Human
agcagccagccc

SEQ ID NO: 1392154 - RNA, 20 nt, Human
agcagccaccccaugcuggc

SEQ ID NO: 1392155 - RNA, 22 nt, Human
agcagccaccccaugcuggccu

SEQ ID NO: 1392156 - RNA, 11 nt, Human
agcagccagcc

SEQ ID NO: 1392157 - RNA, 13 nt, Human
agcagccacgagg

SEQ ID NO: 1392158 - RNA, 10 nt, Human
agcagccacg

SEQ ID NO: 1392159 - RNA, 20 nt, Human
agcagugaaugauucagugu

SEQ ID NO: 1392160 - RNA, 21 nt, Human
agcagucgugccuguguccau

SEQ ID NO: 1392161 - RNA, 19 nt, Human
agcagucgugccugugucc

SEQ ID NO: 1392162 - RNA, 22 nt, Human
agcagugaaugauucaguguua

SEQ ID NO: 1392163 - RNA, 21 nt, Human
agcagugaaugauucaguguu

SEQ ID NO: 1392164 - RNA, 17 nt, Human
agcacgugguaaaacac

SEQ ID NO: 1392165 - RNA, 20 nt, Human
agcacugccugcucccaucc

SEQ ID NO: 1392166 - RNA, 19 nt, Human
agcacugccugcucccauc

SEQ ID NO: 1392167 - RNA, 16 nt, Human
agcacugccugcuccc

SEQ ID NO: 1392168 - RNA, 15 nt, Human
agcacugccugcucc

SEQ ID NO: 1392169 - RNA, 13 nt, Human
agcacugccugcu

SEQ ID NO: 1392170 - RNA, 16 nt, Human
agcacugccaggaggg

SEQ ID NO: 1392171 - RNA, 17 nt, Human
agcacugccaggaggga

SEQ ID NO: 1392172 - RNA, 15 nt, Human
agcacugccaggagg

SEQ ID NO: 1392173 - RNA, 14 nt, Human
agcacugccaggag

SEQ ID NO: 1392174 - RNA, 21 nt, Human
agcacugccugcucccauccu

SEQ ID NO: 1392175 - RNA, 17 nt, Human
agcacugcuugaggaaa

SEQ ID NO: 1392176 - RNA, 12 nt, Human
agcacugcucca

SEQ ID NO: 1392177 - RNA, 20 nt, Human
agcaguugagacaagaaaau

SEQ ID NO: 1392178 - RNA, 22 nt, Human
agcaguugagacaagaaaauaa

SEQ ID NO: 1392179 - RNA, 19 nt, Human
agcaguugagacaagaaaa

SEQ ID NO: 1392180 - RNA, 23 nt, Human
agcaucuuggggggguggccgcu

SEQ ID NO: 1392181 - RNA, 21 nt, Human
agcaucuuggggggguggccg

SEQ ID NO: 1392182 - RNA, 19 nt, Human
agcaucuuggggggguggc

SEQ ID NO: 1392183 - RNA, 15 nt, Human
agcaucuugcauuau

SEQ ID NO: 1392184 - RNA, 18 nt, Human
agcaugcaauacauacca

SEQ ID NO: 1392185 - RNA, 12 nt, Human
agcaugaagaca

SEQ ID NO: 1392186 - RNA, 15 nt, Human
agcaugaagacagag

SEQ ID NO: 1392187 - RNA, 14 nt, Human
agcaugcacaaauu

SEQ ID NO: 1392188 - RNA, 18 nt, Human
agccagaggcuggguuca

SEQ ID NO: 1392189 - RNA, 15 nt, Human
agccagaggcugggu

SEQ ID NO: 1392190 - RNA, 14 nt, Human
agccagaggcuggg

SEQ ID NO: 1392191 - RNA, 11 nt, Human
agccagaggcu

SEQ ID NO: 1392192 - RNA, 15 nt, Human
agcaugcaucuguuu

SEQ ID NO: 1392193 - RNA, 12 nt, Human
agccauuugaga

SEQ ID NO: 1392194 - RNA, 22 nt, Human
agccauuggcuauuuaaaacuu

SEQ ID NO: 1392195 - RNA, 21 nt, Human
agccauuggcuauuuaaaacu

SEQ ID NO: 1392196 - RNA, 15 nt, Human
agccauguuucacaa

SEQ ID NO: 1392197 - RNA, 19 nt, Human
agccagauuuuccugaaaa

SEQ ID NO: 1392198 - RNA, 15 nt, Human
agccagauuuuccug

SEQ ID NO: 1392199 - RNA, 13 nt, Human
agccagcacacag

SEQ ID NO: 1392200 - RNA, 22 nt, Human
agccagauuuuuuaaaauuuau

SEQ ID NO: 1392201 - RNA, 23 nt, Human
agccagauuuuuuaaaauuuaua

SEQ ID NO: 1392202 - RNA, 18 nt, Human
agccagauuuuuuaaaau

SEQ ID NO: 1392203 - RNA, 17 nt, Human
aggggccgggggcaguc

SEQ ID NO: 1392204 - RNA, 22 nt, Human
agguaagaaguuuuaaaaagcc

SEQ ID NO: 1392205 - RNA, 15 nt, Human
agguaagaaguuuua

SEQ ID NO: 1392206 - RNA, 18 nt, Human
agguaauauaaaaagcuu

SEQ ID NO: 1392207 - RNA, 13 nt, Human
agguaaguuuuuu

SEQ ID NO: 1392208 - RNA, 23 nt, Human
aggucccuaauaaagcugugugg

SEQ ID NO: 1392209 - RNA, 20 nt, Human
aggucccuaauaaagcugug

SEQ ID NO: 1392210 - RNA, 18 nt, Human
aggucccuaauaaagcug

SEQ ID NO: 1392211 - RNA, 19 nt, Human
aggucccuaauaaagcugu

SEQ ID NO: 1392212 - RNA, 12 nt, Human
agguaccauccu

SEQ ID NO: 1392213 - RNA, 21 nt, Human
agguaauccaagauauuuuaa

SEQ ID NO: 1392214 - RNA, 17 nt, Human
aggucccuaauaaagcu

SEQ ID NO: 1392215 - RNA, 20 nt, Human
agguucuaaaguucuaagau

SEQ ID NO: 1392216 - RNA, 19 nt, Human
agguucuaaaguucuaaga

SEQ ID NO: 1392217 - RNA, 18 nt, Human
agguucuaaaguucuaag

SEQ ID NO: 1392218 - RNA, 17 nt, Human
agguucuaaaguucuaa

SEQ ID NO: 1392219 - RNA, 16 nt, Human
agguucuaaaguucua

SEQ ID NO: 1392220 - RNA, 15 nt, Human
agguucuaaaguucu

SEQ ID NO: 1392221 - RNA, 14 nt, Human
agguucuaaaguuc

SEQ ID NO: 1392222 - RNA, 13 nt, Human
agguucuaaaguu

SEQ ID NO: 1392223 - RNA, 13 nt, Human
agguucuaaggcc

SEQ ID NO: 1392224 - RNA, 12 nt, Human
agguucuaaggc

SEQ ID NO: 1392225 - RNA, 14 nt, Human
agguucuaacccua

SEQ ID NO: 1392226 - RNA, 23 nt, Human
agguucuaaaguucuaagauucu

SEQ ID NO: 1392227 - RNA, 19 nt, Human
agguucuaaggccuaggau

SEQ ID NO: 1392228 - RNA, 15 nt, Human
agguucuaaggccua

SEQ ID NO: 1392229 - RNA, 22 nt, Human
agguucuaaggccuaggauucu

SEQ ID NO: 1392230 - RNA, 13 nt, Human
agguuaauauuua

SEQ ID NO: 1392231 - RNA, 14 nt, Human
agguucaacuuauu

SEQ ID NO: 1392232 - RNA, 16 nt, Human
agguuaauauuuaaga

SEQ ID NO: 1392233 - RNA, 17 nt, Human
agguucaaagauauuuu

SEQ ID NO: 1392234 - RNA, 14 nt, Human
agguucccucccag

SEQ ID NO: 1392235 - RNA, 13 nt, Human
agguucccacuua

SEQ ID NO: 1392236 - RNA, 16 nt, Human
agguucccaagcucag

SEQ ID NO: 1392237 - RNA, 15 nt, Human
agguucccaagcuca

SEQ ID NO: 1392238 - RNA, 14 nt, Human
agguucccaagcuc

SEQ ID NO: 1392239 - RNA, 18 nt, Human
agguuccacagaggacac

SEQ ID NO: 1392240 - RNA, 12 nt, Human
agguucuaaagu

SEQ ID NO: 1392241 - RNA, 11 nt, Human
agguucuaaag

SEQ ID NO: 1392242 - RNA, 11 nt, Human
agguucuaaaa

SEQ ID NO: 1392243 - RNA, 13 nt, Human
agguucagccaag

SEQ ID NO: 1392244 - RNA, 19 nt, Human
agguucaagcaauccuccc

SEQ ID NO: 1392245 - RNA, 19 nt, Human
agguucagccaagguuuua

SEQ ID NO: 1392246 - RNA, 15 nt, Human
agguucagccaaggu

SEQ ID NO: 1392247 - RNA, 17 nt, Human
agguucaugcaaacuuu

SEQ ID NO: 1392248 - RNA, 18 nt, Human
aggugcucucuuucuguc

SEQ ID NO: 1392249 - RNA, 20 nt, Human
aggugcugacggccagggag

SEQ ID NO: 1392250 - RNA, 17 nt, Human
aggugcugacggccagg

SEQ ID NO: 1392251 - RNA, 16 nt, Human
aggugcugacggccag

SEQ ID NO: 1392252 - RNA, 22 nt, Human
agguccugguggggcagcuccu

SEQ ID NO: 1392253 - RNA, 19 nt, Human
agguccugguggggcagcu

SEQ ID NO: 1392254 - RNA, 17 nt, Human
agguccugguggggcag

SEQ ID NO: 1392255 - RNA, 14 nt, Human
agguccuggugggg

SEQ ID NO: 1392256 - RNA, 23 nt, Human
agguccugagcacugccaggagg

SEQ ID NO: 1392257 - RNA, 22 nt, Human
agguccugagcacugccaggag

SEQ ID NO: 1392258 - RNA, 21 nt, Human
agguccugagcacugccagga

SEQ ID NO: 1392259 - RNA, 20 nt, Human
agguccugagcacugccagg

SEQ ID NO: 1392260 - RNA, 20 nt, Human
aggucgcuugggaauuuuau

SEQ ID NO: 1392261 - RNA, 20 nt, Human
agguccugguggggcagcuc

SEQ ID NO: 1392262 - RNA, 23 nt, Human
agguggauggccccagcacagcu

SEQ ID NO: 1392263 - RNA, 16 nt, Human
agguggauggccccag

SEQ ID NO: 1392264 - RNA, 23 nt, Human
aggugcuucuaguucugccagga

SEQ ID NO: 1392265 - RNA, 19 nt, Human
agguccugagcacugccag

SEQ ID NO: 1392266 - RNA, 21 nt, Human
aggugcuucaggauaccauau

SEQ ID NO: 1392267 - RNA, 17 nt, Human
aggugcuggggccuggu

SEQ ID NO: 1392268 - RNA, 22 nt, Human
aggugcuucuaguucugccagg

SEQ ID NO: 1392269 - RNA, 21 nt, Human
aggugcuucuaguucugccag

SEQ ID NO: 1392270 - RNA, 15 nt, Human
agguggaaauaaacu

SEQ ID NO: 1392271 - RNA, 20 nt, Human
aggcagacucuuuaugcuug

SEQ ID NO: 1392272 - RNA, 21 nt, Human
aggcagacucuuuaugcuugc

SEQ ID NO: 1392273 - RNA, 21 nt, Human
aggcugacaccuaacucuucu

SEQ ID NO: 1392274 - RNA, 18 nt, Human
aggcugaggcuggcacag

SEQ ID NO: 1392275 - RNA, 15 nt, Human
aggcugauuucuagg

SEQ ID NO: 1392276 - RNA, 21 nt, Human
aggcugaugucaauuucugug

SEQ ID NO: 1392277 - RNA, 22 nt, Human
aggcuauggacagggcaugcca

SEQ ID NO: 1392278 - RNA, 19 nt, Human
aggcuguuaaauacaggaa

SEQ ID NO: 1392279 - RNA, 22 nt, Human
aggcuguguuuggcuuucaggg

SEQ ID NO: 1392280 - RNA, 21 nt, Human
aggcuguguuuggcuuucagg

SEQ ID NO: 1392281 - RNA, 20 nt, Human
aggcuguguuuggcuuucag

SEQ ID NO: 1392282 - RNA, 18 nt, Human
aggcuguguuuggcuuuc

SEQ ID NO: 1392283 - RNA, 19 nt, Human
aggcuguguaagauuuguu

SEQ ID NO: 1392284 - RNA, 17 nt, Human
aggcuguguaagauuug

SEQ ID NO: 1392285 - RNA, 19 nt, Human
aggcuguggugagggaaga

SEQ ID NO: 1392286 - RNA, 16 nt, Human
aggcuguggucacagc

SEQ ID NO: 1392287 - RNA, 18 nt, Human
aggcuguggaccauggag

SEQ ID NO: 1392288 - RNA, 16 nt, Human
aggcugccguccccua

SEQ ID NO: 1392289 - RNA, 16 nt, Human
aggcugucuguuguau

SEQ ID NO: 1392290 - RNA, 17 nt, Human
aggcugccccucucacc

SEQ ID NO: 1392291 - RNA, 15 nt, Human
aggcugccccucuca

SEQ ID NO: 1392292 - RNA, 12 nt, Human
aggcugccccuc

SEQ ID NO: 1392293 - RNA, 12 nt, Human
aggcugccugag

SEQ ID NO: 1392294 - RNA, 22 nt, Human
aggcugccguccccuagagucc

SEQ ID NO: 1392295 - RNA, 22 nt, Human
aggcugcccuccugugcucagc

SEQ ID NO: 1392296 - RNA, 14 nt, Human
aggcugcccuccug

SEQ ID NO: 1392297 - RNA, 13 nt, Human
aggcugcccuccu

SEQ ID NO: 1392298 - RNA, 12 nt, Human
aggcugcccucc

SEQ ID NO: 1392299 - RNA, 22 nt, Human
agggacagaggccccagccucc

SEQ ID NO: 1392300 - RNA, 21 nt, Human
agggacagaggccccagccuc

SEQ ID NO: 1392301 - RNA, 20 nt, Human
agggacagaggccccagccu

SEQ ID NO: 1392302 - RNA, 17 nt, Human
agggacagaggccccag

SEQ ID NO: 1392303 - RNA, 20 nt, Human
agggacucaucauuuccauu

SEQ ID NO: 1392304 - RNA, 22 nt, Human
agggcacaggagcuaccugugu

SEQ ID NO: 1392305 - RNA, 23 nt, Human
agggcacaggagcuaccugugug

SEQ ID NO: 1392306 - RNA, 20 nt, Human
agggcacaggagcuaccugu

SEQ ID NO: 1392307 - RNA, 19 nt, Human
agggcacaggagcuaccug

SEQ ID NO: 1392308 - RNA, 18 nt, Human
agggcacaggagcuaccu

SEQ ID NO: 1392309 - RNA, 17 nt, Human
agggcacaggagcuacc

SEQ ID NO: 1392310 - RNA, 15 nt, Human
agggcacaggagcua

SEQ ID NO: 1392311 - RNA, 14 nt, Human
agggcacaggagcu

SEQ ID NO: 1392312 - RNA, 13 nt, Human
agggcacaggagc

SEQ ID NO: 1392313 - RNA, 12 nt, Human
agggcacaggag

SEQ ID NO: 1392314 - RNA, 19 nt, Human
agggcaauuaauuccuuca

SEQ ID NO: 1392315 - RNA, 22 nt, Human
agggcaauuaauuccuucagca

SEQ ID NO: 1392316 - RNA, 18 nt, Human
agggcaauuaauuccuuc

SEQ ID NO: 1392317 - RNA, 18 nt, Human
aggggauuuuuaugucug

SEQ ID NO: 1392318 - RNA, 17 nt, Human
agggcggggguggcggc

SEQ ID NO: 1392319 - RNA, 20 nt, Human
agggcgggcagagggcugga

SEQ ID NO: 1392320 - RNA, 19 nt, Human
agggcgggcagagggcugg

SEQ ID NO: 1392321 - RNA, 18 nt, Human
agggcgggcagagggcug

SEQ ID NO: 1392322 - RNA, 17 nt, Human
agggcgggcagagggcu

SEQ ID NO: 1392323 - RNA, 17 nt, Human
agggcggccuccuucug

SEQ ID NO: 1392324 - RNA, 23 nt, Human
agggcggcaggggccuggagauc

SEQ ID NO: 1392325 - RNA, 19 nt, Human
agggcggcaggggccugga

SEQ ID NO: 1392326 - RNA, 18 nt, Human
agggcggcaggggccugg

SEQ ID NO: 1392327 - RNA, 16 nt, Human
agggcggcaggggccu

SEQ ID NO: 1392328 - RNA, 15 nt, Human
agggcggcaggggcc

SEQ ID NO: 1392329 - RNA, 13 nt, Human
agggcggcagggg

SEQ ID NO: 1392330 - RNA, 19 nt, Human
aggggccgaugcccagaga

SEQ ID NO: 1392331 - RNA, 18 nt, Human
aggggccgaugcccagag

SEQ ID NO: 1392332 - RNA, 17 nt, Human
aggggccgaugcccaga

SEQ ID NO: 1392333 - RNA, 15 nt, Human
aggggcccuggagca

SEQ ID NO: 1392334 - RNA, 17 nt, Human
aggggcccuggagcagc

SEQ ID NO: 1392335 - RNA, 13 nt, Human
aggggcagagcca

SEQ ID NO: 1392336 - RNA, 12 nt, Human
aggggcagcccc

SEQ ID NO: 1392337 - RNA, 13 nt, Human
aggggcagaggcc

SEQ ID NO: 1392338 - RNA, 14 nt, Human
aggggcagagccag

SEQ ID NO: 1392339 - RNA, 15 nt, Human
aggggcagagccagg

SEQ ID NO: 1392340 - RNA, 16 nt, Human
aggggcagagccagga

SEQ ID NO: 1392341 - RNA, 17 nt, Human
aggggcagagccaggaa

SEQ ID NO: 1392342 - RNA, 15 nt, Human
agcuccucccucuca

SEQ ID NO: 1392343 - RNA, 14 nt, Human
agcuccucccucuc

SEQ ID NO: 1392344 - RNA, 13 nt, Human
agcuccucccucu

SEQ ID NO: 1392345 - RNA, 17 nt, Human
agcuccuccccuggagg

SEQ ID NO: 1392346 - RNA, 14 nt, Human
agcuccuccccugg

SEQ ID NO: 1392347 - RNA, 11 nt, Human
agcuccucccc

SEQ ID NO: 1392348 - RNA, 12 nt, Human
agcuccucccac

SEQ ID NO: 1392349 - RNA, 14 nt, Human
agcuccuguccccu

SEQ ID NO: 1392350 - RNA, 11 nt, Human
agcuccuguaa

SEQ ID NO: 1392351 - RNA, 24 nt, Human
agcuccugaccaguugcagucacu

SEQ ID NO: 1392352 - RNA, 19 nt, Human
agcuccugaccaguugcag

SEQ ID NO: 1392353 - RNA, 16 nt, Human
agcuccugaccaguug

SEQ ID NO: 1392354 - RNA, 15 nt, Human
agcuccugaccaguu

SEQ ID NO: 1392355 - RNA, 14 nt, Human
agcuccugaccagu

SEQ ID NO: 1392356 - RNA, 18 nt, Human
agcuccugacacugcugg

SEQ ID NO: 1392357 - RNA, 10 nt, Human
agcuccugac

SEQ ID NO: 1392358 - RNA, 18 nt, Human
agcuccucuuccaugcug

SEQ ID NO: 1392359 - RNA, 15 nt, Human
agcuccucuuccaug

SEQ ID NO: 1392360 - RNA, 14 nt, Human
agcuccucuuccau

SEQ ID NO: 1392361 - RNA, 13 nt, Human
agcuccucuucca

SEQ ID NO: 1392362 - RNA, 24 nt, Human
agcuccucugucucgagcgcccug

SEQ ID NO: 1392363 - RNA, 18 nt, Human
agcuccucugucucgagc

SEQ ID NO: 1392364 - RNA, 12 nt, Human
agcuccucuguc

SEQ ID NO: 1392365 - RNA, 20 nt, Human
agcuccuguccccugcuaca

SEQ ID NO: 1392366 - RNA, 18 nt, Human
agcuccuguccccugcua

SEQ ID NO: 1392367 - RNA, 17 nt, Human
agcuccuguccccugcu

SEQ ID NO: 1392368 - RNA, 16 nt, Human
agcuccuguccccugc

SEQ ID NO: 1392369 - RNA, 24 nt, Human
agcuccuguccccugcuacaccua

SEQ ID NO: 1392370 - RNA, 22 nt, Human
agcugaauguuuuucuaaagga

SEQ ID NO: 1392371 - RNA, 22 nt, Human
agcugcuccgaggacccaggaa

SEQ ID NO: 1392372 - RNA, 20 nt, Human
agcugcuccgaggacccagg

SEQ ID NO: 1392373 - RNA, 19 nt, Human
agcugcuccgaggacccag

SEQ ID NO: 1392374 - RNA, 18 nt, Human
agcugcuccgaggaccca

SEQ ID NO: 1392375 - RNA, 14 nt, Human
agcugaguuuccua

SEQ ID NO: 1392376 - RNA, 13 nt, Human
agcugaucaguuu

SEQ ID NO: 1392377 - RNA, 20 nt, Human
agcugauacuuugacagugu

SEQ ID NO: 1392378 - RNA, 21 nt, Human
agcugaguuuccuaugggaac

SEQ ID NO: 1392379 - RNA, 13 nt, Human
agcugaguuuccu

SEQ ID NO: 1392380 - RNA, 21 nt, Human
agcugaguuaggugucugucc

SEQ ID NO: 1392381 - RNA, 22 nt, Human
agcugaguauuaaaauguaugc

SEQ ID NO: 1392382 - RNA, 19 nt, Human
agcugaguauuaaaaugua

SEQ ID NO: 1392383 - RNA, 22 nt, Human
agcugaggugcccaggagaaga

SEQ ID NO: 1392384 - RNA, 19 nt, Human
agcugaggugcccaggaga

SEQ ID NO: 1392385 - RNA, 18 nt, Human
agcugaggugcccaggag

SEQ ID NO: 1392386 - RNA, 17 nt, Human
agcugaggugcccagga

SEQ ID NO: 1392387 - RNA, 16 nt, Human
agcugaggugcccagg

SEQ ID NO: 1392388 - RNA, 15 nt, Human
agcugaggugcccag

SEQ ID NO: 1392389 - RNA, 12 nt, Human
agcugaggugcc

SEQ ID NO: 1392390 - RNA, 22 nt, Human
agcugaggccacacucagcaca

SEQ ID NO: 1392391 - RNA, 20 nt, Human
agcugaauguuuuucuaaag

SEQ ID NO: 1392392 - RNA, 22 nt, Human
agcugaccagccgugagcaugu

SEQ ID NO: 1392393 - RNA, 19 nt, Human
agcugaccagccgugagca

SEQ ID NO: 1392394 - RNA, 16 nt, Human
agcugaccagccguga

SEQ ID NO: 1392395 - RNA, 17 nt, Human
agcugggucaggcaggg

SEQ ID NO: 1392396 - RNA, 16 nt, Human
agcugggucaggcagg

SEQ ID NO: 1392397 - RNA, 16 nt, Human
agcugcucugucuucu

SEQ ID NO: 1392398 - RNA, 15 nt, Human
agcugggucaggcag

SEQ ID NO: 1392399 - RNA, 23 nt, Human
agcuuccuucagagagcagugcu

SEQ ID NO: 1392400 - RNA, 20 nt, Human
agcuuccuucagagagcagu

SEQ ID NO: 1392401 - RNA, 19 nt, Human
agcuuccuucagagagcag

SEQ ID NO: 1392402 - RNA, 18 nt, Human
agcuuccuucagagagca

SEQ ID NO: 1392403 - RNA, 17 nt, Human
agcuuccuucagagagc

SEQ ID NO: 1392404 - RNA, 16 nt, Human
agcuuccuucagagag

SEQ ID NO: 1392405 - RNA, 17 nt, Human
agcuucagugcugccga

SEQ ID NO: 1392406 - RNA, 17 nt, Human
agcuucagccaggagcu

SEQ ID NO: 1392407 - RNA, 19 nt, Human
agcuucagccaggagcugg

SEQ ID NO: 1392408 - RNA, 20 nt, Human
agcuucagccaggagcuggg

SEQ ID NO: 1392409 - RNA, 20 nt, Human
agcuucguuuauuuucaaga

SEQ ID NO: 1392410 - RNA, 21 nt, Human
agcuuccuucagagagcagug

SEQ ID NO: 1392411 - RNA, 12 nt, Human
agcuucuccaac

SEQ ID NO: 1392412 - RNA, 19 nt, Human
agcuucucauccugcaggc

SEQ ID NO: 1392413 - RNA, 15 nt, Human
agcuucagccaggag

SEQ ID NO: 1392414 - RNA, 14 nt, Human
aggaaaaacagguc

SEQ ID NO: 1392415 - RNA, 15 nt, Human
agcuuuucccuuuuu

SEQ ID NO: 1392416 - RNA, 22 nt, Human
aggaaauguuuuuaauaaaaga

SEQ ID NO: 1392417 - RNA, 20 nt, Human
aggaaauguuuuuaauaaaa

SEQ ID NO: 1392418 - RNA, 23 nt, Human
aggaaaugugguagccucacuuu

SEQ ID NO: 1392419 - RNA, 19 nt, Human
aggaaaugaaaaugucuug

SEQ ID NO: 1392420 - RNA, 22 nt, Human
aggaaaucccuucauacuugaa

SEQ ID NO: 1392421 - RNA, 18 nt, Human
aggaaaucccuucauacu

SEQ ID NO: 1392422 - RNA, 16 nt, Human
aggaaaucccuucaua

SEQ ID NO: 1392423 - RNA, 14 nt, Human
aggaaaucccuuca

SEQ ID NO: 1392424 - RNA, 13 nt, Human
aggaaaucccuuc

SEQ ID NO: 1392425 - RNA, 22 nt, Human
aggaaaaagcaaguucgucugu

SEQ ID NO: 1392426 - RNA, 18 nt, Human
agcuuuucccaaaagccc

SEQ ID NO: 1392427 - RNA, 21 nt, Human
agcuguauagcugcuuccagu

SEQ ID NO: 1392428 - RNA, 14 nt, Human
agcuguaugauucc

SEQ ID NO: 1392429 - RNA, 22 nt, Human
aggcacugcccugguggcccuc

SEQ ID NO: 1392430 - RNA, 15 nt, Human
aggcacugcccuggu

SEQ ID NO: 1392431 - RNA, 14 nt, Human
aggcacugcccugg

SEQ ID NO: 1392432 - RNA, 13 nt, Human
aggcacugcccug

SEQ ID NO: 1392433 - RNA, 19 nt, Human
aggcacugcaaaccgccac

SEQ ID NO: 1392434 - RNA, 21 nt, Human
aggcacuguaguucuaagacu

SEQ ID NO: 1392435 - RNA, 19 nt, Human
aggcacuguaguucuaaga

SEQ ID NO: 1392436 - RNA, 17 nt, Human
aggcacuguaguucuaa

SEQ ID NO: 1392437 - RNA, 16 nt, Human
aggcacuguaguucua

SEQ ID NO: 1392438 - RNA, 14 nt, Human
aggcacugggcucc

SEQ ID NO: 1392439 - RNA, 16 nt, Human
aggcacugggcaugag

SEQ ID NO: 1392440 - RNA, 13 nt, Human
aggcacugggcau

SEQ ID NO: 1392441 - RNA, 21 nt, Human
aggcacugcccugguggcccu

SEQ ID NO: 1392442 - RNA, 21 nt, Human
aggagggggucguggagagcu

SEQ ID NO: 1392443 - RNA, 20 nt, Human
aggagggggucguggagagc

SEQ ID NO: 1392444 - RNA, 23 nt, Human
aggaggggggagggaagggagcc

SEQ ID NO: 1392445 - RNA, 21 nt, Human
aggaggggggagggaagggag

SEQ ID NO: 1392446 - RNA, 17 nt, Human
aggaggggggagggaag

SEQ ID NO: 1392447 - RNA, 16 nt, Human
aggaggggggagggaa

SEQ ID NO: 1392448 - RNA, 14 nt, Human
aggaggggggaggg

SEQ ID NO: 1392449 - RNA, 16 nt, Human
aggaggggcuguaaaa

SEQ ID NO: 1392450 - RNA, 18 nt, Human
aggaggggaagaggccug

SEQ ID NO: 1392451 - RNA, 16 nt, Human
aggaggggaagaggcc

SEQ ID NO: 1392452 - RNA, 15 nt, Human
aggaggggaagaggc

SEQ ID NO: 1392453 - RNA, 12 nt, Human
aggaggggaaga

SEQ ID NO: 1392454 - RNA, 13 nt, Human
aggauucugcugg

SEQ ID NO: 1392455 - RNA, 14 nt, Human
aggauucuaaaaug

SEQ ID NO: 1392456 - RNA, 12 nt, Human
aggauucuaaaa

SEQ ID NO: 1392457 - RNA, 21 nt, Human
aggauucugcuggccucugcg

SEQ ID NO: 1392458 - RNA, 20 nt, Human
aggauucugcuggccucugc

SEQ ID NO: 1392459 - RNA, 22 nt, Human
aggauucugcuggccucugcga

SEQ ID NO: 1392460 - RNA, 12 nt, Human
aggaccagcuca

SEQ ID NO: 1392461 - RNA, 22 nt, Human
aggaccagaagcucccccagca

SEQ ID NO: 1392462 - RNA, 16 nt, Human
aggaccagaagcuccc

SEQ ID NO: 1392463 - RNA, 12 nt, Human
aggaccagaagc

SEQ ID NO: 1392464 - RNA, 17 nt, Human
aggaccacaggcucagg

SEQ ID NO: 1392465 - RNA, 14 nt, Human
aggaccacaggcuc

SEQ ID NO: 1392466 - RNA, 20 nt, Human
aggaccacaggcucaggcag

SEQ ID NO: 1392467 - RNA, 19 nt, Human
aggaccaagcaucuugggg

SEQ ID NO: 1392468 - RNA, 17 nt, Human
aggaccaagcaucuugg

SEQ ID NO: 1392469 - RNA, 23 nt, Human
aggaccagcucaggacagaugcc

SEQ ID NO: 1392470 - RNA, 18 nt, Human
aggaccagcucaggacag

SEQ ID NO: 1392471 - RNA, 15 nt, Human
aggaccagcucagga

SEQ ID NO: 1392472 - RNA, 14 nt, Human
aggaccagcucagg

SEQ ID NO: 1392473 - RNA, 13 nt, Human
aggaccagcucag

SEQ ID NO: 1392474 - RNA, 19 nt, Human
aggagaagcucagcugcau

SEQ ID NO: 1392475 - RNA, 15 nt, Human
aggagaagcucagcu

SEQ ID NO: 1392476 - RNA, 14 nt, Human
aggagaagcucagc

SEQ ID NO: 1392477 - RNA, 13 nt, Human
aggagaagcucag

SEQ ID NO: 1392478 - RNA, 12 nt, Human
aggagaagcuca

SEQ ID NO: 1392479 - RNA, 15 nt, Human
aggagaagccaggaa

SEQ ID NO: 1392480 - RNA, 14 nt, Human
aggagaagccagga

SEQ ID NO: 1392481 - RNA, 13 nt, Human
aggagaagccagg

SEQ ID NO: 1392482 - RNA, 12 nt, Human
aggagaagccag

SEQ ID NO: 1392483 - RNA, 11 nt, Human
aggagaagcca

SEQ ID NO: 1392484 - RNA, 22 nt, Human
aggagaaccaaaucuggaagcc

SEQ ID NO: 1392485 - RNA, 19 nt, Human
aggagaaccaaaucuggaa

SEQ ID NO: 1392486 - RNA, 16 nt, Human
aggagaaccaaaucug

SEQ ID NO: 1392487 - RNA, 15 nt, Human
aggaacuacugagga

SEQ ID NO: 1392488 - RNA, 20 nt, Human
aucgcagaccuuuuuuagga

SEQ ID NO: 1392489 - RNA, 20 nt, Human
aucgcaccacuguguauuua

SEQ ID NO: 1392490 - RNA, 18 nt, Human
aucgcaccauucugacuc

SEQ ID NO: 1392491 - RNA, 17 nt, Human
aucgcaccauucugacu

SEQ ID NO: 1392492 - RNA, 15 nt, Human
auccucccuuccucc

SEQ ID NO: 1392493 - RNA, 16 nt, Human
auccucccuguaacuu

SEQ ID NO: 1392494 - RNA, 15 nt, Human
auccucccuguaacu

SEQ ID NO: 1392495 - RNA, 11 nt, Human
auccucccugu

SEQ ID NO: 1392496 - RNA, 18 nt, Human
aucccucaccuucugagu

SEQ ID NO: 1392497 - RNA, 17 nt, Human
aucccucaccuucugag

SEQ ID NO: 1392498 - RNA, 16 nt, Human
aucccucaccuucuga

SEQ ID NO: 1392499 - RNA, 20 nt, Human
auccuccuaccuccaaagcu

SEQ ID NO: 1392500 - RNA, 17 nt, Human
aucccucaccuguagca

SEQ ID NO: 1392501 - RNA, 14 nt, Human
aucccucaccugua

SEQ ID NO: 1392502 - RNA, 15 nt, Human
aucccuacuguaauu

SEQ ID NO: 1392503 - RNA, 14 nt, Human
aucccuagcuguga

SEQ ID NO: 1392504 - RNA, 12 nt, Human
aucccucaccca

SEQ ID NO: 1392505 - RNA, 13 nt, Human
aucccucaccugu

SEQ ID NO: 1392506 - RNA, 19 nt, Human
aucccucacccauccuaga

SEQ ID NO: 1392507 - RNA, 19 nt, Human
aucccgagcaccuccacau

SEQ ID NO: 1392508 - RNA, 15 nt, Human
aucccgauucacccu

SEQ ID NO: 1392509 - RNA, 20 nt, Human
aucccgauucacccugucca

SEQ ID NO: 1392510 - RNA, 17 nt, Human
aucccgagcaccuccac

SEQ ID NO: 1392511 - RNA, 14 nt, Human
aucccgagcaccuc

SEQ ID NO: 1392512 - RNA, 22 nt, Human
auccccuugaggucucagcccc

SEQ ID NO: 1392513 - RNA, 21 nt, Human
auccccuugaggucucagccc

SEQ ID NO: 1392514 - RNA, 16 nt, Human
auccccuugaacucuu

SEQ ID NO: 1392515 - RNA, 12 nt, Human
auccccuugaac

SEQ ID NO: 1392516 - RNA, 23 nt, Human
auccccuucuccccugcacugua

SEQ ID NO: 1392517 - RNA, 22 nt, Human
auccccuucuccccugcacugu

SEQ ID NO: 1392518 - RNA, 21 nt, Human
auccccuucuccccugcacug

SEQ ID NO: 1392519 - RNA, 20 nt, Human
auccccuucuccccugcacu

SEQ ID NO: 1392520 - RNA, 15 nt, Human
auccccuucuccccu

SEQ ID NO: 1392521 - RNA, 23 nt, Human
auccaccccaauccucccagaaa

SEQ ID NO: 1392522 - RNA, 20 nt, Human
auccacccgccucagccucc

SEQ ID NO: 1392523 - RNA, 16 nt, Human
aucagcccuugggggu

SEQ ID NO: 1392524 - RNA, 16 nt, Human
aucagccuacaggccu

SEQ ID NO: 1392525 - RNA, 19 nt, Human
aucagccccacccuggccu

SEQ ID NO: 1392526 - RNA, 17 nt, Human
aucagccccacccuggc

SEQ ID NO: 1392527 - RNA, 16 nt, Human
aucagccccacccugg

SEQ ID NO: 1392528 - RNA, 15 nt, Human
aucagccccacccug

SEQ ID NO: 1392529 - RNA, 13 nt, Human
aucagccagugac

SEQ ID NO: 1392530 - RNA, 19 nt, Human
aucagccaauuauguuaaa

SEQ ID NO: 1392531 - RNA, 16 nt, Human
aucagccaauuauguu

SEQ ID NO: 1392532 - RNA, 18 nt, Human
aucagccaauuauguuaa

SEQ ID NO: 1392533 - RNA, 15 nt, Human
aucagccaauuaugu

SEQ ID NO: 1392534 - RNA, 15 nt, Human
aucauggcuaucugu

SEQ ID NO: 1392535 - RNA, 19 nt, Human
aucauggccagcuggaggc

SEQ ID NO: 1392536 - RNA, 17 nt, Human
aucauggccagcuggag

SEQ ID NO: 1392537 - RNA, 14 nt, Human
aucauggccagcug

SEQ ID NO: 1392538 - RNA, 13 nt, Human
aucauggccagcu

SEQ ID NO: 1392539 - RNA, 12 nt, Human
aucauggccagc

SEQ ID NO: 1392540 - RNA, 15 nt, Human
aucaucuauagaaag

SEQ ID NO: 1392541 - RNA, 18 nt, Human
aucaucuuggaacugcau

SEQ ID NO: 1392542 - RNA, 19 nt, Human
aucaucuauagaaagcuau

SEQ ID NO: 1392543 - RNA, 13 nt, Human
aucaucucagcuc

SEQ ID NO: 1392544 - RNA, 23 nt, Human
aucaucuccugccuuccuccugg

SEQ ID NO: 1392545 - RNA, 20 nt, Human
aucaucuccugccuuccucc

SEQ ID NO: 1392546 - RNA, 14 nt, Human
aucaucucagcuca

SEQ ID NO: 1392547 - RNA, 19 nt, Human
aucaucucagcucacugca

SEQ ID NO: 1392548 - RNA, 12 nt, Human
aucuugaaauua

SEQ ID NO: 1392549 - RNA, 22 nt, Human
aucuugaaauuaagaaggcaaa

SEQ ID NO: 1392550 - RNA, 21 nt, Human
aucuugaaauuaagaaggcaa

SEQ ID NO: 1392551 - RNA, 23 nt, Human
aucuugaaauuaagaaggcaaaa

SEQ ID NO: 1392552 - RNA, 18 nt, Human
aucuggaaccucagccug

SEQ ID NO: 1392553 - RNA, 17 nt, Human
aucuggaaccucagccu

SEQ ID NO: 1392554 - RNA, 16 nt, Human
aucuggaaccucagcc

SEQ ID NO: 1392555 - RNA, 11 nt, Human
aucuggaaccu

SEQ ID NO: 1392556 - RNA, 23 nt, Human
aucuggaacccagacucagacau

SEQ ID NO: 1392557 - RNA, 19 nt, Human
aucuggaacccagacucag

SEQ ID NO: 1392558 - RNA, 18 nt, Human
aucugcuggaguuucaug

SEQ ID NO: 1392559 - RNA, 14 nt, Human
aucugcuggaguuu

SEQ ID NO: 1392560 - RNA, 14 nt, Human
aucucucugcccaa

SEQ ID NO: 1392561 - RNA, 15 nt, Human
aucucucuucuuuuc

SEQ ID NO: 1392562 - RNA, 22 nt, Human
aucucuaccuucuccccagcuc

SEQ ID NO: 1392563 - RNA, 20 nt, Human
aucucuaccuucuccccagc

SEQ ID NO: 1392564 - RNA, 19 nt, Human
aucucuaccuucuccccag

SEQ ID NO: 1392565 - RNA, 17 nt, Human
aucucuaccuucucccc

SEQ ID NO: 1392566 - RNA, 17 nt, Human
aucuuauaguucuaggc

SEQ ID NO: 1392567 - RNA, 15 nt, Human
aucuuauaguucuag

SEQ ID NO: 1392568 - RNA, 20 nt, Human
aucugggcuuccuggagcag

SEQ ID NO: 1392569 - RNA, 18 nt, Human
aucugggcuuccuggagc

SEQ ID NO: 1392570 - RNA, 16 nt, Human
aucugggcuuccugga

SEQ ID NO: 1392571 - RNA, 23 nt, Human
aucuucucaaguucuaagauucu

SEQ ID NO: 1392572 - RNA, 20 nt, Human
aucuucucaaguucuaagau

SEQ ID NO: 1392573 - RNA, 19 nt, Human
aucuucucaaguucuaaga

SEQ ID NO: 1392574 - RNA, 18 nt, Human
aucuucucaaguucuaag

SEQ ID NO: 1392575 - RNA, 16 nt, Human
aucuucucaaguucua

SEQ ID NO: 1392576 - RNA, 15 nt, Human
aucuucucaaguucu

SEQ ID NO: 1392577 - RNA, 19 nt, Human
aucuucaguugucucugau

SEQ ID NO: 1392578 - RNA, 18 nt, Human
aucuucaguugucucuga

SEQ ID NO: 1392579 - RNA, 17 nt, Human
aucuucaguugucucug

SEQ ID NO: 1392580 - RNA, 16 nt, Human
aucuucaguugucucu

SEQ ID NO: 1392581 - RNA, 14 nt, Human
aucuucaguugucu

SEQ ID NO: 1392582 - RNA, 21 nt, Human
aucuggaagccaaaauguagg

SEQ ID NO: 1392583 - RNA, 22 nt, Human
aucuggaaccucagccuggcca

SEQ ID NO: 1392584 - RNA, 21 nt, Human
aucuggaaccucagccuggcc

SEQ ID NO: 1392585 - RNA, 20 nt, Human
aucuggaaccucagccuggc

SEQ ID NO: 1392586 - RNA, 19 nt, Human
aucuggaaccucagccugg

SEQ ID NO: 1392587 - RNA, 15 nt, Human
aucugggcuuccugg

SEQ ID NO: 1392588 - RNA, 14 nt, Human
aucugggcuuccug

SEQ ID NO: 1392589 - RNA, 13 nt, Human
aucugggcuuccu

SEQ ID NO: 1392590 - RNA, 10 nt, Human
aucugggcuu

SEQ ID NO: 1392591 - RNA, 19 nt, Human
aucugggccuuggccugga

SEQ ID NO: 1392592 - RNA, 21 nt, Human
aucugggccuuggccuggagc

SEQ ID NO: 1392593 - RNA, 16 nt, Human
aucugggccuuggccu

SEQ ID NO: 1392594 - RNA, 15 nt, Human
aucugggccuuggcc

SEQ ID NO: 1392595 - RNA, 22 nt, Human
aucuuauaauuuaaaauaugcu

SEQ ID NO: 1392596 - RNA, 21 nt, Human
augaccuccagcuuuccugua

SEQ ID NO: 1392597 - RNA, 19 nt, Human
augaccuccagcuuuccug

SEQ ID NO: 1392598 - RNA, 13 nt, Human
augaccuccagcu

SEQ ID NO: 1392599 - RNA, 12 nt, Human
augaccuccagc

SEQ ID NO: 1392600 - RNA, 14 nt, Human
augacccuuuucau

SEQ ID NO: 1392601 - RNA, 18 nt, Human
augaccuaguuuuccaug

SEQ ID NO: 1392602 - RNA, 23 nt, Human
augacccugccucucccaggcag

SEQ ID NO: 1392603 - RNA, 20 nt, Human
augacccugccucucccagg

SEQ ID NO: 1392604 - RNA, 18 nt, Human
augacccugccucuccca

SEQ ID NO: 1392605 - RNA, 14 nt, Human
augacccugccucu

SEQ ID NO: 1392606 - RNA, 18 nt, Human
augaagcuuuuaugugaa

SEQ ID NO: 1392607 - RNA, 19 nt, Human
augaagcuuuuaugugaaa

SEQ ID NO: 1392608 - RNA, 20 nt, Human
augaagcuuuuaugugaaac

SEQ ID NO: 1392609 - RNA, 21 nt, Human
augaagcuuuuaugugaaaca

SEQ ID NO: 1392610 - RNA, 16 nt, Human
augacucggggguggg

SEQ ID NO: 1392611 - RNA, 15 nt, Human
augacuauguaaacu

SEQ ID NO: 1392612 - RNA, 16 nt, Human
augacuauguaaacua

SEQ ID NO: 1392613 - RNA, 13 nt, Human
augaaacagaaac

SEQ ID NO: 1392614 - RNA, 22 nt, Human
augaaacagaaacaaaaacacu

SEQ ID NO: 1392615 - RNA, 18 nt, Human
augaaacagaaacaaaaa

SEQ ID NO: 1392616 - RNA, 18 nt, Human
augaaaagcuagaauuga

SEQ ID NO: 1392617 - RNA, 13 nt, Human
augaaaagcuaga

SEQ ID NO: 1392618 - RNA, 16 nt, Human
augaaaacucuuugcu

SEQ ID NO: 1392619 - RNA, 15 nt, Human
augaaaauaaagaau

SEQ ID NO: 1392620 - RNA, 17 nt, Human
augaaaauaaagaaugg

SEQ ID NO: 1392621 - RNA, 14 nt, Human
augaaaauaaagaa

SEQ ID NO: 1392622 - RNA, 16 nt, Human
augaaaaguauauuga

SEQ ID NO: 1392623 - RNA, 16 nt, Human
augaaaaugucuugug

SEQ ID NO: 1392624 - RNA, 14 nt, Human
augaaaaaauauau

SEQ ID NO: 1392625 - RNA, 17 nt, Human
augaaaaaauauauauc

SEQ ID NO: 1392626 - RNA, 22 nt, Human
augaaaaaauauauaucaaaua

SEQ ID NO: 1392627 - RNA, 23 nt, Human
augaaaaaauauauaucaaauau

SEQ ID NO: 1392628 - RNA, 21 nt, Human
augcaauauacuggaaagcuu

SEQ ID NO: 1392629 - RNA, 15 nt, Human
augcacaguauuugu

SEQ ID NO: 1392630 - RNA, 14 nt, Human
augcacaguauuug

SEQ ID NO: 1392631 - RNA, 17 nt, Human
augcacaguaaaaaugg

SEQ ID NO: 1392632 - RNA, 23 nt, Human
augcacacauuuuuuaaaugcac

SEQ ID NO: 1392633 - RNA, 17 nt, Human
augcacacauuuuuuaa

SEQ ID NO: 1392634 - RNA, 19 nt, Human
augcacacauuuuuuaaau

SEQ ID NO: 1392635 - RNA, 22 nt, Human
augcacacauuuuuuaaaugca

SEQ ID NO: 1392636 - RNA, 18 nt, Human
augcacaguauuuguaau

SEQ ID NO: 1392637 - RNA, 21 nt, Human
augcacaguauuuguaauuaa

SEQ ID NO: 1392638 - RNA, 23 nt, Human
augcaugaaguaauaugcacaca

SEQ ID NO: 1392639 - RNA, 17 nt, Human
augcaugcacuguuccc

SEQ ID NO: 1392640 - RNA, 12 nt, Human
augcauggaaau

SEQ ID NO: 1392641 - RNA, 18 nt, Human
augcauuugaaaauuuug

SEQ ID NO: 1392642 - RNA, 10 nt, Human
augcauuuga

SEQ ID NO: 1392643 - RNA, 12 nt, Human
augcauuugaaa

SEQ ID NO: 1392644 - RNA, 14 nt, Human
augccuuuucccaa

SEQ ID NO: 1392645 - RNA, 21 nt, Human
augccuuuguacuuuagggaa

SEQ ID NO: 1392646 - RNA, 19 nt, Human
augcuugcaaaaacuacaa

SEQ ID NO: 1392647 - RNA, 16 nt, Human
augcuugcaaaaacua

SEQ ID NO: 1392648 - RNA, 23 nt, Human
augcuuuuuauuucugcauaugu

SEQ ID NO: 1392649 - RNA, 19 nt, Human
augcuuuuuauuucugcau

SEQ ID NO: 1392650 - RNA, 16 nt, Human
augcuuuuuauuucug

SEQ ID NO: 1392651 - RNA, 22 nt, Human
augcuuuuuauuauuauuauuu

SEQ ID NO: 1392652 - RNA, 17 nt, Human
auggaaauuuaaagcag

SEQ ID NO: 1392653 - RNA, 18 nt, Human
auggaaauucugcucaga

SEQ ID NO: 1392654 - RNA, 20 nt, Human
auggaaauucccuucaucug

SEQ ID NO: 1392655 - RNA, 12 nt, Human
auggauucuaaa

SEQ ID NO: 1392656 - RNA, 18 nt, Human
auggauguccccagcaga

SEQ ID NO: 1392657 - RNA, 17 nt, Human
auggauguccccagcag

SEQ ID NO: 1392658 - RNA, 19 nt, Human
auggaugggggaacucaga

SEQ ID NO: 1392659 - RNA, 23 nt, Human
auggaugccaauauuaaaucugc

SEQ ID NO: 1392660 - RNA, 22 nt, Human
auggaugccaauauuaaaucug

SEQ ID NO: 1392661 - RNA, 13 nt, Human
auggaugccaaua

SEQ ID NO: 1392662 - RNA, 14 nt, Human
auggagcugggcua

SEQ ID NO: 1392663 - RNA, 15 nt, Human
auggaaauuuaaagc

SEQ ID NO: 1392664 - RNA, 21 nt, Human
auggagccagcucugcauuau

SEQ ID NO: 1392665 - RNA, 20 nt, Human
auggcugauaauuuuaaauu

SEQ ID NO: 1392666 - RNA, 18 nt, Human
auggcuggagcuagaauu

SEQ ID NO: 1392667 - RNA, 20 nt, Human
augucuuggaacauuggaau

SEQ ID NO: 1392668 - RNA, 16 nt, Human
augucuugagcucuau

SEQ ID NO: 1392669 - RNA, 15 nt, Human
augucuugagcucua

SEQ ID NO: 1392670 - RNA, 23 nt, Human
augucuugaugcaugcacuguuc

SEQ ID NO: 1392671 - RNA, 15 nt, Human
augucuucucccugg

SEQ ID NO: 1392672 - RNA, 21 nt, Human
augucuugagcucuauuauga

SEQ ID NO: 1392673 - RNA, 21 nt, Human
augucacuuuuugaggcaaaa

SEQ ID NO: 1392674 - RNA, 20 nt, Human
augucacuuuuugaggcaaa

SEQ ID NO: 1392675 - RNA, 10 nt, Human
augucacuuu

SEQ ID NO: 1392676 - RNA, 22 nt, Human
augucacuaaagcaggccuuuu

SEQ ID NO: 1392677 - RNA, 16 nt, Human
augucacuaaagcagg

SEQ ID NO: 1392678 - RNA, 23 nt, Human
augucaaauauuuagauguaauu

SEQ ID NO: 1392679 - RNA, 19 nt, Human
augucaaauauuuagaugu

SEQ ID NO: 1392680 - RNA, 15 nt, Human
auguacaugagaagg

SEQ ID NO: 1392681 - RNA, 22 nt, Human
augucaaggguucaagauuguu

SEQ ID NO: 1392682 - RNA, 16 nt, Human
augucaaucagccuag

SEQ ID NO: 1392683 - RNA, 14 nt, Human
auguacaagaugaa

SEQ ID NO: 1392684 - RNA, 19 nt, Human
auguaaucuugaauuguaa

SEQ ID NO: 1392685 - RNA, 21 nt, Human
auguaauacuucuugugugua

SEQ ID NO: 1392686 - RNA, 17 nt, Human
auguacauguacugauu

SEQ ID NO: 1392687 - RNA, 17 nt, Human
auggucuuacagcaggc

SEQ ID NO: 1392688 - RNA, 16 nt, Human
auggucuuacagcagg

SEQ ID NO: 1392689 - RNA, 15 nt, Human
auggucuuacagcag

SEQ ID NO: 1392690 - RNA, 16 nt, Human
auggucugcccucugc

SEQ ID NO: 1392691 - RNA, 22 nt, Human
auguaagauuauagauucuaaa

SEQ ID NO: 1392692 - RNA, 21 nt, Human
auguaagauuauagauucuaa

SEQ ID NO: 1392693 - RNA, 20 nt, Human
auguaagauuauagauucua

SEQ ID NO: 1392694 - RNA, 19 nt, Human
auguaagauuauagauucu

SEQ ID NO: 1392695 - RNA, 17 nt, Human
auguaagauuauagauu

SEQ ID NO: 1392696 - RNA, 15 nt, Human
auguaagauuauaga

SEQ ID NO: 1392697 - RNA, 18 nt, Human
auguaacuuuuguaagac

SEQ ID NO: 1392698 - RNA, 17 nt, Human
auguaacuuuuguaaga

SEQ ID NO: 1392699 - RNA, 16 nt, Human
auguaacuuuuguaag

SEQ ID NO: 1392700 - RNA, 16 nt, Human
auguaaucaauguuuc

SEQ ID NO: 1392701 - RNA, 15 nt, Human
auguaaucaauguuu

SEQ ID NO: 1392702 - RNA, 12 nt, Human
auguaauacuuc

SEQ ID NO: 1392703 - RNA, 16 nt, Human
auguaauaaacuuuaa

SEQ ID NO: 1392704 - RNA, 15 nt, Human
auguaauaaacuuua

SEQ ID NO: 1392705 - RNA, 14 nt, Human
auguaauaaacuuu

SEQ ID NO: 1392706 - RNA, 24 nt, Human
auguaagauuauagauucuaaaga

SEQ ID NO: 1392707 - RNA, 16 nt, Human
auguaaguaaacgguc

SEQ ID NO: 1392708 - RNA, 19 nt, Human
auguggucacagcuguaua

SEQ ID NO: 1392709 - RNA, 22 nt, Human
auguggucacagcuguauagcu

SEQ ID NO: 1392710 - RNA, 17 nt, Human
auguggucacagcugua

SEQ ID NO: 1392711 - RNA, 16 nt, Human
auguggucacagcugu

SEQ ID NO: 1392712 - RNA, 15 nt, Human
auguggucacagcug

SEQ ID NO: 1392713 - RNA, 17 nt, Human
auguggguuccacagac

SEQ ID NO: 1392714 - RNA, 22 nt, Human
augugguggcacaggcccccuu

SEQ ID NO: 1392715 - RNA, 18 nt, Human
augugguggcacaggccc

SEQ ID NO: 1392716 - RNA, 16 nt, Human
auguggguuccacaga

SEQ ID NO: 1392717 - RNA, 15 nt, Human
auguggguuccacag

SEQ ID NO: 1392718 - RNA, 16 nt, Human
auguggggccagguca

SEQ ID NO: 1392719 - RNA, 13 nt, Human
auguggggccagg

SEQ ID NO: 1392720 - RNA, 18 nt, Human
auuaaauucacaaacuuu

SEQ ID NO: 1392721 - RNA, 17 nt, Human
auuaaauucacaaacuu

SEQ ID NO: 1392722 - RNA, 16 nt, Human
auuaaauucacaaacu

SEQ ID NO: 1392723 - RNA, 14 nt, Human
auuaaauucacaaa

SEQ ID NO: 1392724 - RNA, 13 nt, Human
auuaaauucuugc

SEQ ID NO: 1392725 - RNA, 13 nt, Human
auuaaauucacaa

SEQ ID NO: 1392726 - RNA, 19 nt, Human
auuaaauaagauucuaacg

SEQ ID NO: 1392727 - RNA, 16 nt, Human
auuaaauaagauucua

SEQ ID NO: 1392728 - RNA, 15 nt, Human
auuaaauaagauucu

SEQ ID NO: 1392729 - RNA, 13 nt, Human
auuaaauaaauuu

SEQ ID NO: 1392730 - RNA, 23 nt, Human
auuaaagugcuaagguucuaagg

SEQ ID NO: 1392731 - RNA, 22 nt, Human
auuaaagugcuaagguucuaag

SEQ ID NO: 1392732 - RNA, 21 nt, Human
auuaaagugcuaagguucuaa

SEQ ID NO: 1392733 - RNA, 20 nt, Human
auuaaagugcuaagguucua

SEQ ID NO: 1392734 - RNA, 19 nt, Human
auuaaagugcuaagguucu

SEQ ID NO: 1392735 - RNA, 18 nt, Human
auuaaagugcuaagguuc

SEQ ID NO: 1392736 - RNA, 17 nt, Human
auuaaagugcuaagguu

SEQ ID NO: 1392737 - RNA, 22 nt, Human
auguuugcaccuuucuaguuga

SEQ ID NO: 1392738 - RNA, 19 nt, Human
auguuugcaccuuucuagu

SEQ ID NO: 1392739 - RNA, 17 nt, Human
auguuugcaccuuucua

SEQ ID NO: 1392740 - RNA, 21 nt, Human
auguuugauagauuuucugcu

SEQ ID NO: 1392741 - RNA, 21 nt, Human
auguuugcaccuuucuaguug

SEQ ID NO: 1392742 - RNA, 13 nt, Human
auguguccugguu

SEQ ID NO: 1392743 - RNA, 17 nt, Human
auguguccugacacugc

SEQ ID NO: 1392744 - RNA, 14 nt, Human
auguguccugacac

SEQ ID NO: 1392745 - RNA, 16 nt, Human
augugucccagaagau

SEQ ID NO: 1392746 - RNA, 14 nt, Human
augugucccagaag

SEQ ID NO: 1392747 - RNA, 12 nt, Human
augugucccaga

SEQ ID NO: 1392748 - RNA, 11 nt, Human
augugucccag

SEQ ID NO: 1392749 - RNA, 21 nt, Human
augugucuuuagauagcccug

SEQ ID NO: 1392750 - RNA, 13 nt, Human
augugucuuuaga

SEQ ID NO: 1392751 - RNA, 18 nt, Human
auguuucuuuguaaugaa

SEQ ID NO: 1392752 - RNA, 15 nt, Human
auguucuuaauucuu

SEQ ID NO: 1392753 - RNA, 19 nt, Human
auacuuauauggaaauucu

SEQ ID NO: 1392754 - RNA, 15 nt, Human
auaccuaagaaguac

SEQ ID NO: 1392755 - RNA, 14 nt, Human
auaccuaacugaau

SEQ ID NO: 1392756 - RNA, 21 nt, Human
auaccuaagaaguacauuguu

SEQ ID NO: 1392757 - RNA, 19 nt, Human
auacccuggccgcccccug

SEQ ID NO: 1392758 - RNA, 15 nt, Human
auacccugaccuggc

SEQ ID NO: 1392759 - RNA, 20 nt, Human
auaccugauuuuuuuuccuu

SEQ ID NO: 1392760 - RNA, 17 nt, Human
auaccugggauacugug

SEQ ID NO: 1392761 - RNA, 20 nt, Human
auaccugggauacugugccc

SEQ ID NO: 1392762 - RNA, 16 nt, Human
auaauuauaauauacu

SEQ ID NO: 1392763 - RNA, 11 nt, Human
auacacaaauu

SEQ ID NO: 1392764 - RNA, 17 nt, Human
auacaauuuuuuuuauu

SEQ ID NO: 1392765 - RNA, 20 nt, Human
auacaauuuuuuuuauuagu

SEQ ID NO: 1392766 - RNA, 18 nt, Human
auaccccuuacaaaugaa

SEQ ID NO: 1392767 - RNA, 14 nt, Human
auacccucccuccc

SEQ ID NO: 1392768 - RNA, 16 nt, Human
auacccucccucccua

SEQ ID NO: 1392769 - RNA, 22 nt, Human
auacccucccucccuacccuaa

SEQ ID NO: 1392770 - RNA, 23 nt, Human
auaacagaaagccugggugacau

SEQ ID NO: 1392771 - RNA, 16 nt, Human
auaaugugaaaauggu

SEQ ID NO: 1392772 - RNA, 13 nt, Human
auaaugugaaaau

SEQ ID NO: 1392773 - RNA, 17 nt, Human
auaaguguucugucuga

SEQ ID NO: 1392774 - RNA, 18 nt, Human
auaaugugaaacuggauu

SEQ ID NO: 1392775 - RNA, 19 nt, Human
auaaguguguguuuuucau

SEQ ID NO: 1392776 - RNA, 22 nt, Human
auaaguguguguuuuucauaaa

SEQ ID NO: 1392777 - RNA, 19 nt, Human
auaaugugaaacuggauua

SEQ ID NO: 1392778 - RNA, 21 nt, Human
auaaugugaaacuggauuaaa

SEQ ID NO: 1392779 - RNA, 20 nt, Human
auaaguguacauaugugcug

SEQ ID NO: 1392780 - RNA, 19 nt, Human
auaaguguacauaugugcu

SEQ ID NO: 1392781 - RNA, 14 nt, Human
auaaguguacauau

SEQ ID NO: 1392782 - RNA, 13 nt, Human
auaaguguacaua

SEQ ID NO: 1392783 - RNA, 17 nt, Human
auaagucaacaguaaac

SEQ ID NO: 1392784 - RNA, 18 nt, Human
auaagucaacaguaaacc

SEQ ID NO: 1392785 - RNA, 16 nt, Human
auaagucaacaguaaa

SEQ ID NO: 1392786 - RNA, 15 nt, Human
auaagucaacaguaa

SEQ ID NO: 1392787 - RNA, 14 nt, Human
auaagucaacagua

SEQ ID NO: 1392788 - RNA, 19 nt, Human
auaaguauuucaaauugga

SEQ ID NO: 1392789 - RNA, 18 nt, Human
auaaguauuucaaauugg

SEQ ID NO: 1392790 - RNA, 16 nt, Human
auaaguauuucaaauu

SEQ ID NO: 1392791 - RNA, 19 nt, Human
auaaguauuuaauucaugu

SEQ ID NO: 1392792 - RNA, 20 nt, Human
auacuucuuguguguaugca

SEQ ID NO: 1392793 - RNA, 18 nt, Human
auacuucuuguguguaug

SEQ ID NO: 1392794 - RNA, 16 nt, Human
auacuucuugugugua

SEQ ID NO: 1392795 - RNA, 15 nt, Human
auacuucuugugugu

SEQ ID NO: 1392796 - RNA, 16 nt, Human
auacuucucauuuuuu

SEQ ID NO: 1392797 - RNA, 19 nt, Human
auacuugaaaauuaacaug

SEQ ID NO: 1392798 - RNA, 19 nt, Human
auacuucgacacuguucuu

SEQ ID NO: 1392799 - RNA, 15 nt, Human
auacuucgacacugu

SEQ ID NO: 1392800 - RNA, 18 nt, Human
auacuuauuuguauaugg

SEQ ID NO: 1392801 - RNA, 15 nt, Human
auacuugaaaauuaa

SEQ ID NO: 1392802 - RNA, 16 nt, Human
auacuugaaaauuaac

SEQ ID NO: 1392803 - RNA, 14 nt, Human
auauaaguguacau

SEQ ID NO: 1392804 - RNA, 20 nt, Human
auauaagugcuguauaaaau

SEQ ID NO: 1392805 - RNA, 17 nt, Human
auauaagugcuguauaa

SEQ ID NO: 1392806 - RNA, 18 nt, Human
auauaagugcuguauaaa

SEQ ID NO: 1392807 - RNA, 13 nt, Human
auauaagugcugu

SEQ ID NO: 1392808 - RNA, 15 nt, Human
auauaagugcuguau

SEQ ID NO: 1392809 - RNA, 15 nt, Human
auauaagugauugcu

SEQ ID NO: 1392810 - RNA, 14 nt, Human
auauaauuauaugu

SEQ ID NO: 1392811 - RNA, 15 nt, Human
auauaauuauauguu

SEQ ID NO: 1392812 - RNA, 22 nt, Human
auauaauguuguuauuuaaaga

SEQ ID NO: 1392813 - RNA, 21 nt, Human
auauaauguuguuauuuaaag

SEQ ID NO: 1392814 - RNA, 18 nt, Human
auauaaguguacauaugu

SEQ ID NO: 1392815 - RNA, 15 nt, Human
auauaaguguacaua

SEQ ID NO: 1392816 - RNA, 15 nt, Human
auauaaguguguguu

SEQ ID NO: 1392817 - RNA, 18 nt, Human
auauagcugaucaguuuu

SEQ ID NO: 1392818 - RNA, 17 nt, Human
auauagcugaucaguuu

SEQ ID NO: 1392819 - RNA, 12 nt, Human
auauaccaaagc

SEQ ID NO: 1392820 - RNA, 22 nt, Human
auauacuauuaaaaagguuuac

SEQ ID NO: 1392821 - RNA, 17 nt, Human
auauaccaaagcacauu

SEQ ID NO: 1392822 - RNA, 18 nt, Human
auauaauuguuuuaucug

SEQ ID NO: 1392823 - RNA, 15 nt, Human
auauaauugccaaaa

SEQ ID NO: 1392824 - RNA, 12 nt, Human
auauaauucuua

SEQ ID NO: 1392825 - RNA, 16 nt, Human
auauaggaacuuaaau

SEQ ID NO: 1392826 - RNA, 22 nt, Human
auauuuagauguaauuuugugu

SEQ ID NO: 1392827 - RNA, 20 nt, Human
auauuuagauguaauuuugu

SEQ ID NO: 1392828 - RNA, 19 nt, Human
auauuauacuuguaauuau

SEQ ID NO: 1392829 - RNA, 16 nt, Human
auauuauacuuguaau

SEQ ID NO: 1392830 - RNA, 14 nt, Human
auauuauacuugua

SEQ ID NO: 1392831 - RNA, 21 nt, Human
auauuuauuuucuuucuguaa

SEQ ID NO: 1392832 - RNA, 22 nt, Human
auauuuauuacuguaagaaaau

SEQ ID NO: 1392833 - RNA, 18 nt, Human
auauuuauuuuaauaaug

SEQ ID NO: 1392834 - RNA, 19 nt, Human
auauuuauuacuguaagaa

SEQ ID NO: 1392835 - RNA, 14 nt, Human
auauuuauuacugu

SEQ ID NO: 1392836 - RNA, 22 nt, Human
auauuauacuuguaauuaugga

SEQ ID NO: 1392837 - RNA, 18 nt, Human
auauuuaguguucauaaa

SEQ ID NO: 1392838 - RNA, 16 nt, Human
auauuuauaaaaauaa

SEQ ID NO: 1392839 - RNA, 19 nt, Human
auauuuauuuuuuuuaagu

SEQ ID NO: 1392840 - RNA, 23 nt, Human
auauuucagauaaucacaauaca

SEQ ID NO: 1392841 - RNA, 19 nt, Human
auauggaauuuugcaaaga

SEQ ID NO: 1392842 - RNA, 20 nt, Human
auauggacacuuaauacuac

SEQ ID NO: 1392843 - RNA, 15 nt, Human
auauggacacuuaau

SEQ ID NO: 1392844 - RNA, 22 nt, Human
auauggacaaaacaagaaagac

SEQ ID NO: 1392845 - RNA, 15 nt, Human
auauggaauuuugca

SEQ ID NO: 1392846 - RNA, 23 nt, Human
auauggaaauauauauuauacuu

SEQ ID NO: 1392847 - RNA, 18 nt, Human
auauggaaauauauauua

SEQ ID NO: 1392848 - RNA, 16 nt, Human
auauggaaauauauau

SEQ ID NO: 1392849 - RNA, 15 nt, Human
auauggaaauauaua

SEQ ID NO: 1392850 - RNA, 19 nt, Human
auaugcuuguaacuaaaau

SEQ ID NO: 1392851 - RNA, 13 nt, Human
auauccugcuuga

SEQ ID NO: 1392852 - RNA, 20 nt, Human
auaucccuccuguugggaga

SEQ ID NO: 1392853 - RNA, 14 nt, Human
auaugcauauuugu

SEQ ID NO: 1392854 - RNA, 21 nt, Human
auaugcuaccaccagcugugu

SEQ ID NO: 1392855 - RNA, 19 nt, Human
auaugcuaccaccagcugu

SEQ ID NO: 1392856 - RNA, 17 nt, Human
auaugcuaccaccagcu

SEQ ID NO: 1392857 - RNA, 16 nt, Human
auaugcuaccaccagc

SEQ ID NO: 1392858 - RNA, 15 nt, Human
auaugcguauuauac

SEQ ID NO: 1392859 - RNA, 14 nt, Human
auaugcuuacugau

SEQ ID NO: 1392860 - RNA, 17 nt, Human
auaucccuacauguauu

SEQ ID NO: 1392861 - RNA, 16 nt, Human
auaucccuacauguau

SEQ ID NO: 1392862 - RNA, 15 nt, Human
auaucccuacaugua

SEQ ID NO: 1392863 - RNA, 13 nt, Human
auaucccacuggg

SEQ ID NO: 1392864 - RNA, 21 nt, Human
auauccaugaccuaguuuucc

SEQ ID NO: 1392865 - RNA, 20 nt, Human
auaucacccagacauaaagg

SEQ ID NO: 1392866 - RNA, 19 nt, Human
auaucacccagacauaaag

SEQ ID NO: 1392867 - RNA, 16 nt, Human
auaucacccagacaua

SEQ ID NO: 1392868 - RNA, 14 nt, Human
auaucacccagaca

SEQ ID NO: 1392869 - RNA, 13 nt, Human
auaucacagaaaa

SEQ ID NO: 1392870 - RNA, 18 nt, Human
auaucacauguuuucucu

SEQ ID NO: 1392871 - RNA, 14 nt, Human
auaucacacacauu

SEQ ID NO: 1392872 - RNA, 21 nt, Human
auaucacccagacauaaagga

SEQ ID NO: 1392873 - RNA, 22 nt, Human
auaucacccagacauaaaggaa

SEQ ID NO: 1392874 - RNA, 18 nt, Human
auaucacuugucaauaaa

SEQ ID NO: 1392875 - RNA, 14 nt, Human
aguccacuuuguuu

SEQ ID NO: 1392876 - RNA, 15 nt, Human
aguccaccugaggaa

SEQ ID NO: 1392877 - RNA, 18 nt, Human
aguccacccuugguuccu

SEQ ID NO: 1392878 - RNA, 19 nt, Human
aguccuggaugauacuaau

SEQ ID NO: 1392879 - RNA, 17 nt, Human
aguccuggaugauacua

SEQ ID NO: 1392880 - RNA, 23 nt, Human
aguccuggaagccagcuuucccu

SEQ ID NO: 1392881 - RNA, 22 nt, Human
aguccuggaagccagcuuuccc

SEQ ID NO: 1392882 - RNA, 20 nt, Human
aguccuggaagccagcuuuc

SEQ ID NO: 1392883 - RNA, 14 nt, Human
aguccuggaagcca

SEQ ID NO: 1392884 - RNA, 20 nt, Human
aguccacuucugacagccuc

SEQ ID NO: 1392885 - RNA, 22 nt, Human
aguccugcgaaaacccccaaac

SEQ ID NO: 1392886 - RNA, 22 nt, Human
aguccuggaugauacuaauaaa

SEQ ID NO: 1392887 - RNA, 17 nt, Human
agugacagacaggcucu

SEQ ID NO: 1392888 - RNA, 16 nt, Human
agugacagacaggcuc

SEQ ID NO: 1392889 - RNA, 15 nt, Human
agugauauuggaacu

SEQ ID NO: 1392890 - RNA, 14 nt, Human
agugaucaaacuac

SEQ ID NO: 1392891 - RNA, 12 nt, Human
agucaauacaua

SEQ ID NO: 1392892 - RNA, 10 nt, Human
agucaauaca

SEQ ID NO: 1392893 - RNA, 20 nt, Human
agucaagugcguccacgagc

SEQ ID NO: 1392894 - RNA, 17 nt, Human
agucaauauuuuuagau

SEQ ID NO: 1392895 - RNA, 21 nt, Human
agucaauacauagugcugcug

SEQ ID NO: 1392896 - RNA, 13 nt, Human
agucaaauugugu

SEQ ID NO: 1392897 - RNA, 17 nt, Human
agucaaauugugugaaa

SEQ ID NO: 1392898 - RNA, 15 nt, Human
agucaaauuguguga

SEQ ID NO: 1392899 - RNA, 15 nt, Human
agucaaccugggcaa

SEQ ID NO: 1392900 - RNA, 14 nt, Human
agucaaccugggca

SEQ ID NO: 1392901 - RNA, 15 nt, Human
agucaaccugccuga

SEQ ID NO: 1392902 - RNA, 19 nt, Human
agucaaauugugugaaagg

SEQ ID NO: 1392903 - RNA, 23 nt, Human
agucauucagauaugauucaaau

SEQ ID NO: 1392904 - RNA, 20 nt, Human
agucauucagauaugauuca

SEQ ID NO: 1392905 - RNA, 15 nt, Human
agucauucagauaug

SEQ ID NO: 1392906 - RNA, 14 nt, Human
aguccacaaaauaa

SEQ ID NO: 1392907 - RNA, 14 nt, Human
aguccaauguggca

SEQ ID NO: 1392908 - RNA, 16 nt, Human
aguccaagguuuaaag

SEQ ID NO: 1392909 - RNA, 13 nt, Human
aguccaagguuua

SEQ ID NO: 1392910 - RNA, 16 nt, Human
aguccaagcugggaga

SEQ ID NO: 1392911 - RNA, 14 nt, Human
aguccaagcuggga

SEQ ID NO: 1392912 - RNA, 11 nt, Human
aguccaagcug

SEQ ID NO: 1392913 - RNA, 21 nt, Human
aguccaagcauuuagauguau

SEQ ID NO: 1392914 - RNA, 15 nt, Human
agucauuggcugucu

SEQ ID NO: 1392915 - RNA, 14 nt, Human
agucauuggcuuua

SEQ ID NO: 1392916 - RNA, 15 nt, Human
agucauuggcuuuau

SEQ ID NO: 1392917 - RNA, 18 nt, Human
agucauuggcuuuauccu

SEQ ID NO: 1392918 - RNA, 17 nt, Human
agucauucguucugugg

SEQ ID NO: 1392919 - RNA, 16 nt, Human
aguccaagcauuuaga

SEQ ID NO: 1392920 - RNA, 20 nt, Human
agucauuggcuuuauccucu

SEQ ID NO: 1392921 - RNA, 21 nt, Human
agucauuggcuuuauccucuu

SEQ ID NO: 1392922 - RNA, 22 nt, Human
agucauuggcuuuauccucuuu

SEQ ID NO: 1392923 - RNA, 20 nt, Human
aguuaagacaugauuuccuu

SEQ ID NO: 1392924 - RNA, 19 nt, Human
aguuaagacaugauuuccu

SEQ ID NO: 1392925 - RNA, 22 nt, Human
agugucuuuuuuuguauaguua

SEQ ID NO: 1392926 - RNA, 20 nt, Human
agugucuuuuuuuguauagu

SEQ ID NO: 1392927 - RNA, 19 nt, Human
agugucuuuuuuuguauag

SEQ ID NO: 1392928 - RNA, 17 nt, Human
agugucuuuuuuuguau

SEQ ID NO: 1392929 - RNA, 16 nt, Human
agugucuuuuuuugua

SEQ ID NO: 1392930 - RNA, 15 nt, Human
agugucuuuuuuugu

SEQ ID NO: 1392931 - RNA, 14 nt, Human
agugugaacuggac

SEQ ID NO: 1392932 - RNA, 22 nt, Human
agugugaacuggacccuguugc

SEQ ID NO: 1392933 - RNA, 23 nt, Human
agugugaacuggacccuguugcu

SEQ ID NO: 1392934 - RNA, 13 nt, Human
agugucuuuccac

SEQ ID NO: 1392935 - RNA, 23 nt, Human
agugucuuuccacggagccacuc

SEQ ID NO: 1392936 - RNA, 20 nt, Human
agugugaauugcaaaaccca

SEQ ID NO: 1392937 - RNA, 23 nt, Human
aguuguauuuaacagaaauugua

SEQ ID NO: 1392938 - RNA, 19 nt, Human
aguuguuacauuuuuaagu

SEQ ID NO: 1392939 - RNA, 16 nt, Human
aguuguuacauuuuua

SEQ ID NO: 1392940 - RNA, 13 nt, Human
aguuguuacauuu

SEQ ID NO: 1392941 - RNA, 15 nt, Human
aguuguuacauuuuu

SEQ ID NO: 1392942 - RNA, 14 nt, Human
aguuacaguucugu

SEQ ID NO: 1392943 - RNA, 13 nt, Human
aguuacaguucug

SEQ ID NO: 1392944 - RNA, 17 nt, Human
aguuaagaccuggcagc

SEQ ID NO: 1392945 - RNA, 16 nt, Human
aguuaagaccuggcag

SEQ ID NO: 1392946 - RNA, 13 nt, Human
aguuaagaccugg

SEQ ID NO: 1392947 - RNA, 15 nt, Human
aguuacauguuugca

SEQ ID NO: 1392948 - RNA, 22 nt, Human
aguuacauaauucacucugagu

SEQ ID NO: 1392949 - RNA, 16 nt, Human
aguuacaguucugugg

SEQ ID NO: 1392950 - RNA, 15 nt, Human
aguuacaguucugug

SEQ ID NO: 1392951 - RNA, 22 nt, Human
aguuguauuuaacagaaauugu

SEQ ID NO: 1392952 - RNA, 20 nt, Human
aguuguauuuaacagaaauu

SEQ ID NO: 1392953 - RNA, 19 nt, Human
aguuguauuuaacagaaau

SEQ ID NO: 1392954 - RNA, 10 nt, Human
aguugaauuu

SEQ ID NO: 1392955 - RNA, 12 nt, Human
aguugaauuuuu

SEQ ID NO: 1392956 - RNA, 15 nt, Human
aguugaauuuuacau

SEQ ID NO: 1392957 - RNA, 20 nt, Human
cacauagcccacuuacauuu

SEQ ID NO: 1392958 - RNA, 21 nt, Human
cacauagcccacuuacauuua

SEQ ID NO: 1392959 - RNA, 19 nt, Human
cacauacucauuuuucaug

SEQ ID NO: 1392960 - RNA, 18 nt, Human
cacauacucauuuuucau

SEQ ID NO: 1392961 - RNA, 16 nt, Human
cacauacccugaccug

SEQ ID NO: 1392962 - RNA, 18 nt, Human
cacauacccugaccuggc

SEQ ID NO: 1392963 - RNA, 22 nt, Human
cacauacccucuucauggaugg

SEQ ID NO: 1392964 - RNA, 19 nt, Human
cacauacccucuucaugga

SEQ ID NO: 1392965 - RNA, 17 nt, Human
cacauagcccacuuaca

SEQ ID NO: 1392966 - RNA, 21 nt, Human
cacaguucuuugggccagaca

SEQ ID NO: 1392967 - RNA, 19 nt, Human
cacagcuuagauuucauag

SEQ ID NO: 1392968 - RNA, 14 nt, Human
cacagcuucagcca

SEQ ID NO: 1392969 - RNA, 17 nt, Human
cacagcuucagccagga

SEQ ID NO: 1392970 - RNA, 16 nt, Human
cacagcuuagauuuca

SEQ ID NO: 1392971 - RNA, 15 nt, Human
cacagcuuagauuuc

SEQ ID NO: 1392972 - RNA, 20 nt, Human
cacagcuguauagcugcuuc

SEQ ID NO: 1392973 - RNA, 17 nt, Human
cacagcuguauagcugc

SEQ ID NO: 1392974 - RNA, 18 nt, Human
cacaggagcuaccugugu

SEQ ID NO: 1392975 - RNA, 16 nt, Human
cacaggagcuaccugu

SEQ ID NO: 1392976 - RNA, 15 nt, Human
cacaggagcuaccug

SEQ ID NO: 1392977 - RNA, 14 nt, Human
cacaggagcuaccu

SEQ ID NO: 1392978 - RNA, 17 nt, Human
cacagcuuagauuucau

SEQ ID NO: 1392979 - RNA, 22 nt, Human
cacagcuucagccaggagcugg

SEQ ID NO: 1392980 - RNA, 18 nt, Human
cacagcuucagccaggag

SEQ ID NO: 1392981 - RNA, 19 nt, Human
cacagcuucagccaggagc

SEQ ID NO: 1392982 - RNA, 20 nt, Human
cacaggagcuaccugugugg

SEQ ID NO: 1392983 - RNA, 23 nt, Human
cacaggagggggucguggagagc

SEQ ID NO: 1392984 - RNA, 22 nt, Human
cacaggagggggucguggagag

SEQ ID NO: 1392985 - RNA, 12 nt, Human
cacaggaggggg

SEQ ID NO: 1392986 - RNA, 22 nt, Human
cacaggagggcggccuccuucu

SEQ ID NO: 1392987 - RNA, 19 nt, Human
cacaggagggcggccuccu

SEQ ID NO: 1392988 - RNA, 17 nt, Human
cacagugucaggcacug

SEQ ID NO: 1392989 - RNA, 16 nt, Human
cacaguguaugaaggg

SEQ ID NO: 1392990 - RNA, 14 nt, Human
cacagugggagcca

SEQ ID NO: 1392991 - RNA, 18 nt, Human
cacagugggagccagggc

SEQ ID NO: 1392992 - RNA, 19 nt, Human
cacagugggagccagggcu

SEQ ID NO: 1392993 - RNA, 20 nt, Human
cacaguucuuugggccagac

SEQ ID NO: 1392994 - RNA, 19 nt, Human
cacaguucuuugggccaga

SEQ ID NO: 1392995 - RNA, 18 nt, Human
cacaguucuuugggccag

SEQ ID NO: 1392996 - RNA, 19 nt, Human
cacagugaucaaguuauuu

SEQ ID NO: 1392997 - RNA, 19 nt, Human
auuuuguaaacucaaaaua

SEQ ID NO: 1392998 - RNA, 22 nt, Human
auuuugguaaaauacuucuuga

SEQ ID NO: 1392999 - RNA, 20 nt, Human
auuuuggagaguuuccugaa

SEQ ID NO: 1393000 - RNA, 21 nt, Human
auuuucuaccuggucucuccu

SEQ ID NO: 1393001 - RNA, 22 nt, Human
auuuucuaagaaacauuuauau

SEQ ID NO: 1393002 - RNA, 17 nt, Human
auuuuggauuuugcaag

SEQ ID NO: 1393003 - RNA, 21 nt, Human
auuuuggagaguuuccugaaa

SEQ ID NO: 1393004 - RNA, 22 nt, Human
auuuuggagaguuuccugaaac

SEQ ID NO: 1393005 - RNA, 17 nt, Human
auuuucuaagaaacauu

SEQ ID NO: 1393006 - RNA, 16 nt, Human
auuuucuaagaaacau

SEQ ID NO: 1393007 - RNA, 14 nt, Human
auuuuccuuuucaa

SEQ ID NO: 1393008 - RNA, 14 nt, Human
auuuuccugaaaac

SEQ ID NO: 1393009 - RNA, 13 nt, Human
auuuuccugaaaa

SEQ ID NO: 1393010 - RNA, 18 nt, Human
caaaaaauuaaagcauuu

SEQ ID NO: 1393011 - RNA, 15 nt, Human
caaaaaauuaaagca

SEQ ID NO: 1393012 - RNA, 19 nt, Human
caaaaaauuaaagcauuua

SEQ ID NO: 1393013 - RNA, 17 nt, Human
auuuuguaaacucaaaa

SEQ ID NO: 1393014 - RNA, 10 nt, Human
auuuuguaaa

SEQ ID NO: 1393015 - RNA, 14 nt, Human
caaaaacaaaaaga

SEQ ID NO: 1393016 - RNA, 17 nt, Human
caaaaagaaccacuugu

SEQ ID NO: 1393017 - RNA, 14 nt, Human
caaaaagaaccacu

SEQ ID NO: 1393018 - RNA, 18 nt, Human
caaaaagcuaauaccagu

SEQ ID NO: 1393019 - RNA, 20 nt, Human
caaaaacagguauauacuuu

SEQ ID NO: 1393020 - RNA, 22 nt, Human
caaaaacagguauauacuuuga

SEQ ID NO: 1393021 - RNA, 14 nt, Human
caaaaacuauuugg

SEQ ID NO: 1393022 - RNA, 16 nt, Human
caaaaacuauuuggga

SEQ ID NO: 1393023 - RNA, 23 nt, Human
caaaaacuuuggaguccccucac

SEQ ID NO: 1393024 - RNA, 20 nt, Human
caaaaagaaaagaaaauuuu

SEQ ID NO: 1393025 - RNA, 20 nt, Human
caaaaccgccagcucuguuc

SEQ ID NO: 1393026 - RNA, 18 nt, Human
caaaaccgccagcucugu

SEQ ID NO: 1393027 - RNA, 17 nt, Human
caaaaccgccagcucug

SEQ ID NO: 1393028 - RNA, 14 nt, Human
caaaaccgccagcu

SEQ ID NO: 1393029 - RNA, 12 nt, Human
caaaaccgccag

SEQ ID NO: 1393030 - RNA, 21 nt, Human
caaaaccccccagauaucauc

SEQ ID NO: 1393031 - RNA, 19 nt, Human
caaaaccccccagauauca

SEQ ID NO: 1393032 - RNA, 15 nt, Human
caaaaccccccagau

SEQ ID NO: 1393033 - RNA, 15 nt, Human
caaaacccagaccug

SEQ ID NO: 1393034 - RNA, 13 nt, Human
caaaacccagacc

SEQ ID NO: 1393035 - RNA, 23 nt, Human
caaaaccagguccaaugagcuuu

SEQ ID NO: 1393036 - RNA, 22 nt, Human
caaaaccagguccaaugagcuu

SEQ ID NO: 1393037 - RNA, 16 nt, Human
caaaaccagguccaau

SEQ ID NO: 1393038 - RNA, 21 nt, Human
caaaacaguauugacuuguau

SEQ ID NO: 1393039 - RNA, 18 nt, Human
caaaacagauuguuugca

SEQ ID NO: 1393040 - RNA, 13 nt, Human
caaaacagauugu

SEQ ID NO: 1393041 - RNA, 18 nt, Human
caaaacacuuguaauuuu

SEQ ID NO: 1393042 - RNA, 16 nt, Human
caaaacacuuguaauu

SEQ ID NO: 1393043 - RNA, 16 nt, Human
caaaacaauguuuaaa

SEQ ID NO: 1393044 - RNA, 18 nt, Human
caaaacaauguuuaaacc

SEQ ID NO: 1393045 - RNA, 14 nt, Human
caaaacaauguuua

SEQ ID NO: 1393046 - RNA, 14 nt, Human
caaaacaaacucau

SEQ ID NO: 1393047 - RNA, 22 nt, Human
caaaacaaaggccuaauucuau

SEQ ID NO: 1393048 - RNA, 12 nt, Human
caaaacugcucc

SEQ ID NO: 1393049 - RNA, 22 nt, Human
caaaacugccucaggaggcagg

SEQ ID NO: 1393050 - RNA, 20 nt, Human
caaaagaagaaguuucauca

SEQ ID NO: 1393051 - RNA, 15 nt, Human
caaaagaagaaguuu

SEQ ID NO: 1393052 - RNA, 14 nt, Human
caaaagaagaaguu

SEQ ID NO: 1393053 - RNA, 16 nt, Human
caaaacaaaggccuaa

SEQ ID NO: 1393054 - RNA, 15 nt, Human
caaaacaaaggccua

SEQ ID NO: 1393055 - RNA, 12 nt, Human
caaaacaaaggc

SEQ ID NO: 1393056 - RNA, 22 nt, Human
caaaaauuucuguaaaacaggu

SEQ ID NO: 1393057 - RNA, 21 nt, Human
caaaaauuucuguaaaacagg

SEQ ID NO: 1393058 - RNA, 19 nt, Human
caaaaauuaucuauagcua

SEQ ID NO: 1393059 - RNA, 23 nt, Human
caaaaauauaaaauaugaagaca

SEQ ID NO: 1393060 - RNA, 12 nt, Human
caaaaauauaaa

SEQ ID NO: 1393061 - RNA, 14 nt, Human
caaaaauagcuaaa

SEQ ID NO: 1393062 - RNA, 15 nt, Human
caaaaagugaaauaa

SEQ ID NO: 1393063 - RNA, 19 nt, Human
caaaaaucucaauauuuca

SEQ ID NO: 1393064 - RNA, 16 nt, Human
caaaauguaugucugg

SEQ ID NO: 1393065 - RNA, 23 nt, Human
caaaauguaggcuuaguuugugu

SEQ ID NO: 1393066 - RNA, 23 nt, Human
caaaaugcuuuuuauuucugcau

SEQ ID NO: 1393067 - RNA, 20 nt, Human
caaaaugcuuuuuauuucug

SEQ ID NO: 1393068 - RNA, 18 nt, Human
caaaaugcuuuuuauuuc

SEQ ID NO: 1393069 - RNA, 12 nt, Human
caaaauaaaacu

SEQ ID NO: 1393070 - RNA, 14 nt, Human
caaaauaaaacuuu

SEQ ID NO: 1393071 - RNA, 21 nt, Human
caaaauguuggucauuuuaug

SEQ ID NO: 1393072 - RNA, 18 nt, Human
caaaauguuggucauuuu

SEQ ID NO: 1393073 - RNA, 17 nt, Human
caaaauguuggucauuu

SEQ ID NO: 1393074 - RNA, 22 nt, Human
caaaauguuaucuucucaaguu

SEQ ID NO: 1393075 - RNA, 21 nt, Human
caaaauguuaucuucucaagu

SEQ ID NO: 1393076 - RNA, 20 nt, Human
caaaauguuaucuucucaag

SEQ ID NO: 1393077 - RNA, 19 nt, Human
caaaauguuaucuucucaa

SEQ ID NO: 1393078 - RNA, 22 nt, Human
caaaauguugaaauaugauguu

SEQ ID NO: 1393079 - RNA, 21 nt, Human
caaaauuauagaaguuuagau

SEQ ID NO: 1393080 - RNA, 17 nt, Human
caaaauugcaaaucuug

SEQ ID NO: 1393081 - RNA, 16 nt, Human
caaaauugcaaaucuu

SEQ ID NO: 1393082 - RNA, 16 nt, Human
caaaauuguuacaaau

SEQ ID NO: 1393083 - RNA, 23 nt, Human
caaacgcccuuuccuccucaggc

SEQ ID NO: 1393084 - RNA, 22 nt, Human
caaacgcccuuuccuccucagg

SEQ ID NO: 1393085 - RNA, 20 nt, Human
caaacgcccuuuccuccuca

SEQ ID NO: 1393086 - RNA, 13 nt, Human
caaaccucaccaa

SEQ ID NO: 1393087 - RNA, 16 nt, Human
caaacaccaacauaaa

SEQ ID NO: 1393088 - RNA, 18 nt, Human
caaacaccaacauaaaaa

SEQ ID NO: 1393089 - RNA, 19 nt, Human
caaacaaugacaaagcaga

SEQ ID NO: 1393090 - RNA, 17 nt, Human
caaacaaugacaaagca

SEQ ID NO: 1393091 - RNA, 16 nt, Human
caaacacacacaaaag

SEQ ID NO: 1393092 - RNA, 22 nt, Human
caaaauuuuuucucuaggaaau

SEQ ID NO: 1393093 - RNA, 21 nt, Human
caaaauuuuuucucuaggaaa

SEQ ID NO: 1393094 - RNA, 22 nt, Human
caaaauugcaaaucuugaaauu

SEQ ID NO: 1393095 - RNA, 16 nt, Human
caaaauuuuuucucua

SEQ ID NO: 1393096 - RNA, 19 nt, Human
caaagccaggucccucuca

SEQ ID NO: 1393097 - RNA, 18 nt, Human
caaagccaggucccucuc

SEQ ID NO: 1393098 - RNA, 17 nt, Human
caaagccaggucccucu

SEQ ID NO: 1393099 - RNA, 14 nt, Human
caaagccagguccc

SEQ ID NO: 1393100 - RNA, 22 nt, Human
caaagccagcguccuccucugu

SEQ ID NO: 1393101 - RNA, 23 nt, Human
caaagccagcguccuccucugug

SEQ ID NO: 1393102 - RNA, 21 nt, Human
caaagccagcguccuccucug

SEQ ID NO: 1393103 - RNA, 20 nt, Human
caaagccagcguccuccucu

SEQ ID NO: 1393104 - RNA, 18 nt, Human
caaacuguguaacugccc

SEQ ID NO: 1393105 - RNA, 22 nt, Human
caaagccuguucauggcagaug

SEQ ID NO: 1393106 - RNA, 21 nt, Human
caaagccuguucauggcagau

SEQ ID NO: 1393107 - RNA, 20 nt, Human
caaagccuguucauggcaga

SEQ ID NO: 1393108 - RNA, 19 nt, Human
caaagccuguucauggcag

SEQ ID NO: 1393109 - RNA, 15 nt, Human
caaagcccuuuuaua

SEQ ID NO: 1393110 - RNA, 20 nt, Human
caaacuguguaacugcccaa

SEQ ID NO: 1393111 - RNA, 15 nt, Human
caaacuguguaacug

SEQ ID NO: 1393112 - RNA, 14 nt, Human
caaacuguaauaca

SEQ ID NO: 1393113 - RNA, 21 nt, Human
caaacuguaaauaaaaagaaa

SEQ ID NO: 1393114 - RNA, 20 nt, Human
caaacuguaaauaaaaagaa

SEQ ID NO: 1393115 - RNA, 14 nt, Human
caaacuguaaauaa

SEQ ID NO: 1393116 - RNA, 12 nt, Human
caaacuguaaau

SEQ ID NO: 1393117 - RNA, 17 nt, Human
caaacuggggccucccu

SEQ ID NO: 1393118 - RNA, 13 nt, Human
caaacuagggcca

SEQ ID NO: 1393119 - RNA, 20 nt, Human
caaacuacuuugcugcuaau

SEQ ID NO: 1393120 - RNA, 19 nt, Human
caaacuagggccaagccca

SEQ ID NO: 1393121 - RNA, 21 nt, Human
caaagcugccugucccuaccc

SEQ ID NO: 1393122 - RNA, 23 nt, Human
caaaggccuaauucuaugccugu

SEQ ID NO: 1393123 - RNA, 17 nt, Human
caaaggaagguggaugg

SEQ ID NO: 1393124 - RNA, 11 nt, Human
caaagcugccu

SEQ ID NO: 1393125 - RNA, 12 nt, Human
caaagcugccug

SEQ ID NO: 1393126 - RNA, 21 nt, Human
caaaggcauuauaaaaagaau

SEQ ID NO: 1393127 - RNA, 18 nt, Human
caaauugugcaguacuuu

SEQ ID NO: 1393128 - RNA, 15 nt, Human
caaauugugugaaag

SEQ ID NO: 1393129 - RNA, 15 nt, Human
caaauucaguuucau

SEQ ID NO: 1393130 - RNA, 14 nt, Human
caaauucaguuuca

SEQ ID NO: 1393131 - RNA, 12 nt, Human
caaauucaguuu

SEQ ID NO: 1393132 - RNA, 21 nt, Human
caaauuguaagcaugcacaaa

SEQ ID NO: 1393133 - RNA, 11 nt, Human
caaauuucuaa

SEQ ID NO: 1393134 - RNA, 12 nt, Human
caaauuucuaaa

SEQ ID NO: 1393135 - RNA, 14 nt, Human
caaauuucuaaauc

SEQ ID NO: 1393136 - RNA, 16 nt, Human
caaauucaguuucaua

SEQ ID NO: 1393137 - RNA, 14 nt, Human
caaauucaaauaaa

SEQ ID NO: 1393138 - RNA, 17 nt, Human
caaauuauuaaugaaaa

SEQ ID NO: 1393139 - RNA, 15 nt, Human
caaauuauuaaugaa

SEQ ID NO: 1393140 - RNA, 14 nt, Human
caaauuaucuuaaa

SEQ ID NO: 1393141 - RNA, 23 nt, Human
caaauguaguauggccuguguca

SEQ ID NO: 1393142 - RNA, 22 nt, Human
caaauguaguauggccuguguc

SEQ ID NO: 1393143 - RNA, 13 nt, Human
caaaugguaucuu

SEQ ID NO: 1393144 - RNA, 19 nt, Human
caaaugucaugcugccuua

SEQ ID NO: 1393145 - RNA, 17 nt, Human
caaaugucaugcugccu

SEQ ID NO: 1393146 - RNA, 16 nt, Human
caaaugucaugcugcc

SEQ ID NO: 1393147 - RNA, 14 nt, Human
caaaugucuauaaa

SEQ ID NO: 1393148 - RNA, 18 nt, Human
caaaugucaugcugccuu

SEQ ID NO: 1393149 - RNA, 15 nt, Human
caaaugucuauaaac

SEQ ID NO: 1393150 - RNA, 15 nt, Human
caaaugguaucuuuu

SEQ ID NO: 1393151 - RNA, 20 nt, Human
caaaugguaggcauuuccua

SEQ ID NO: 1393152 - RNA, 15 nt, Human
caaaugguaggcauu

SEQ ID NO: 1393153 - RNA, 13 nt, Human
caaaugguaggca

SEQ ID NO: 1393154 - RNA, 23 nt, Human
caaauggggccagauccagccug

SEQ ID NO: 1393155 - RNA, 20 nt, Human
caaauggggccagauccagc

SEQ ID NO: 1393156 - RNA, 19 nt, Human
caaauggggccagauccag

SEQ ID NO: 1393157 - RNA, 18 nt, Human
caaauggggccagaucca

SEQ ID NO: 1393158 - RNA, 17 nt, Human
caaauggggccagaucc

SEQ ID NO: 1393159 - RNA, 16 nt, Human
caaauggggccagauc

SEQ ID NO: 1393160 - RNA, 15 nt, Human
caaauggggccagau

SEQ ID NO: 1393161 - RNA, 14 nt, Human
caaauggggccaga

SEQ ID NO: 1393162 - RNA, 17 nt, Human
caaauauguccuggggu

SEQ ID NO: 1393163 - RNA, 15 nt, Human
caaauauguccuggg

SEQ ID NO: 1393164 - RNA, 14 nt, Human
caaauauguccugg

SEQ ID NO: 1393165 - RNA, 13 nt, Human
caaauauguccug

SEQ ID NO: 1393166 - RNA, 19 nt, Human
caaagugcugggauuacag

SEQ ID NO: 1393167 - RNA, 22 nt, Human
caaagggggaggcuaaagccca

SEQ ID NO: 1393168 - RNA, 18 nt, Human
caaauacuguauauucag

SEQ ID NO: 1393169 - RNA, 17 nt, Human
caaauacuaaugaaaac

SEQ ID NO: 1393170 - RNA, 16 nt, Human
caaauacuaaugaaaa

SEQ ID NO: 1393171 - RNA, 21 nt, Human
caaauacuaaaaagaagugcu

SEQ ID NO: 1393172 - RNA, 16 nt, Human
caaauacuaaaaagaa

SEQ ID NO: 1393173 - RNA, 15 nt, Human
caaauacuaaaaaga

SEQ ID NO: 1393174 - RNA, 20 nt, Human
caaauacgugggcauucaaa

SEQ ID NO: 1393175 - RNA, 15 nt, Human
caaaguggaacgaaa

SEQ ID NO: 1393176 - RNA, 14 nt, Human
caaaguggaacgaa

SEQ ID NO: 1393177 - RNA, 11 nt, Human
caaaguggaac

SEQ ID NO: 1393178 - RNA, 22 nt, Human
caaauacgugggcauucaaaug

SEQ ID NO: 1393179 - RNA, 21 nt, Human
caaauacgugggcauucaaau

SEQ ID NO: 1393180 - RNA, 17 nt, Human
caaaaauuaucuauagc

SEQ ID NO: 1393181 - RNA, 18 nt, Human
caauaauauauuuucugu

SEQ ID NO: 1393182 - RNA, 20 nt, Human
caauaauauauuuucuguuu

SEQ ID NO: 1393183 - RNA, 17 nt, Human
caauaauauauuuucug

SEQ ID NO: 1393184 - RNA, 16 nt, Human
caauaauauauuuucu

SEQ ID NO: 1393185 - RNA, 14 nt, Human
caauaauauauuuu

SEQ ID NO: 1393186 - RNA, 13 nt, Human
caauaauauauuu

SEQ ID NO: 1393187 - RNA, 13 nt, Human
caaguuauuaauu

SEQ ID NO: 1393188 - RNA, 16 nt, Human
caaguuagaaaacaua

SEQ ID NO: 1393189 - RNA, 14 nt, Human
caaguuaaauguag

SEQ ID NO: 1393190 - RNA, 13 nt, Human
caaguuaaaugua

SEQ ID NO: 1393191 - RNA, 12 nt, Human
caaguuaaaugu

SEQ ID NO: 1393192 - RNA, 24 nt, Human
caauagccacuaaccuugccuggu

SEQ ID NO: 1393193 - RNA, 22 nt, Human
caauagccacuaaccuugccug

SEQ ID NO: 1393194 - RNA, 18 nt, Human
caauagccacuaaccuug

SEQ ID NO: 1393195 - RNA, 17 nt, Human
caauagccacuaaccuu

SEQ ID NO: 1393196 - RNA, 16 nt, Human
caauacaaauggauuu

SEQ ID NO: 1393197 - RNA, 15 nt, Human
caauacaaauggauu

SEQ ID NO: 1393198 - RNA, 14 nt, Human
caauacaaauggau

SEQ ID NO: 1393199 - RNA, 13 nt, Human
caauacaaaugga

SEQ ID NO: 1393200 - RNA, 14 nt, Human
caauaauuuucuac

SEQ ID NO: 1393201 - RNA, 13 nt, Human
caauaauuuucua

SEQ ID NO: 1393202 - RNA, 15 nt, Human
caauacagauauauu

SEQ ID NO: 1393203 - RNA, 13 nt, Human
caauacagauaua

SEQ ID NO: 1393204 - RNA, 21 nt, Human
caauacaaauggauuuuggga

SEQ ID NO: 1393205 - RNA, 16 nt, Human
caauacagauauauuu

SEQ ID NO: 1393206 - RNA, 23 nt, Human
caauacaucccuuaccugggaaa

SEQ ID NO: 1393207 - RNA, 20 nt, Human
caauauacuggaaagcuuuu

SEQ ID NO: 1393208 - RNA, 16 nt, Human
caauauaagcuuuucu

SEQ ID NO: 1393209 - RNA, 14 nt, Human
caauaucagacuuu

SEQ ID NO: 1393210 - RNA, 18 nt, Human
caaucuguaaacugugua

SEQ ID NO: 1393211 - RNA, 14 nt, Human
caaucugucaguuc

SEQ ID NO: 1393212 - RNA, 17 nt, Human
caaucuguaaacugugu

SEQ ID NO: 1393213 - RNA, 16 nt, Human
caaucuguaaacugug

SEQ ID NO: 1393214 - RNA, 15 nt, Human
caaucuguaaacugu

SEQ ID NO: 1393215 - RNA, 12 nt, Human
caaucuguaaac

SEQ ID NO: 1393216 - RNA, 18 nt, Human
caaucuguaaaacuaaga

SEQ ID NO: 1393217 - RNA, 15 nt, Human
caaugacuuacugua

SEQ ID NO: 1393218 - RNA, 17 nt, Human
caaugacuuacuguaca

SEQ ID NO: 1393219 - RNA, 18 nt, Human
caaugacuuacuguacau

SEQ ID NO: 1393220 - RNA, 23 nt, Human
caauguaauuauuuauguauggu

SEQ ID NO: 1393221 - RNA, 22 nt, Human
caauguaauuauuuauguaugg

SEQ ID NO: 1393222 - RNA, 14 nt, Human
caauguaauuauuu

SEQ ID NO: 1393223 - RNA, 13 nt, Human
caauguaauuauu

SEQ ID NO: 1393224 - RNA, 12 nt, Human
caauguaauuau

SEQ ID NO: 1393225 - RNA, 23 nt, Human
caauggguuuuucccuguacagu

SEQ ID NO: 1393226 - RNA, 15 nt, Human
caauggggccaguca

SEQ ID NO: 1393227 - RNA, 22 nt, Human
caaugagcuuucugaacagcug

SEQ ID NO: 1393228 - RNA, 21 nt, Human
caaugggagcugaggccacac

SEQ ID NO: 1393229 - RNA, 21 nt, Human
caauguagauaaguguucugu

SEQ ID NO: 1393230 - RNA, 20 nt, Human
caauguagauaaguguucug

SEQ ID NO: 1393231 - RNA, 16 nt, Human
caauguagauaagugu

SEQ ID NO: 1393232 - RNA, 22 nt, Human
caauguacccaccgggccacuc

SEQ ID NO: 1393233 - RNA, 19 nt, Human
caauguacccaccgggcca

SEQ ID NO: 1393234 - RNA, 17 nt, Human
caauguacccaccgggc

SEQ ID NO: 1393235 - RNA, 23 nt, Human
caaugggagcugaggccacacuc

SEQ ID NO: 1393236 - RNA, 19 nt, Human
caaugggagcugaggccac

SEQ ID NO: 1393237 - RNA, 13 nt, Human
caaugagcuuucu

SEQ ID NO: 1393238 - RNA, 12 nt, Human
caaugagcuuuc

SEQ ID NO: 1393239 - RNA, 20 nt, Human
caaugagcauguuuagacuu

SEQ ID NO: 1393240 - RNA, 18 nt, Human
caaugagcauguuuagac

SEQ ID NO: 1393241 - RNA, 14 nt, Human
caaugagcauguuu

SEQ ID NO: 1393242 - RNA, 13 nt, Human
caaugagcauguu

SEQ ID NO: 1393243 - RNA, 12 nt, Human
caaugagcaugu

SEQ ID NO: 1393244 - RNA, 23 nt, Human
caaugagcuuucugaacagcugg

SEQ ID NO: 1393245 - RNA, 21 nt, Human
caaugagcuuucugaacagcu

SEQ ID NO: 1393246 - RNA, 20 nt, Human
caaugagcuuucugaacagc

SEQ ID NO: 1393247 - RNA, 17 nt, Human
caaugagcuuucugaac

SEQ ID NO: 1393248 - RNA, 16 nt, Human
caaugagcuuucugaa

SEQ ID NO: 1393249 - RNA, 15 nt, Human
caaugagcuuucuga

SEQ ID NO: 1393250 - RNA, 14 nt, Human
caaugagcuuucug

SEQ ID NO: 1393251 - RNA, 19 nt, Human
caauuuggcaauuuugugg

SEQ ID NO: 1393252 - RNA, 18 nt, Human
caauuuggcaauuuugug

SEQ ID NO: 1393253 - RNA, 23 nt, Human
caauuuggauuuaaaagccugcu

SEQ ID NO: 1393254 - RNA, 21 nt, Human
caauuuggauuuaaaagccug

SEQ ID NO: 1393255 - RNA, 19 nt, Human
caauuacaacggagucaaa

SEQ ID NO: 1393256 - RNA, 22 nt, Human
caauguuagccucaauuucuga

SEQ ID NO: 1393257 - RNA, 15 nt, Human
caauguuagccucaa

SEQ ID NO: 1393258 - RNA, 18 nt, Human
caauuaauuccuucagca

SEQ ID NO: 1393259 - RNA, 15 nt, Human
caauuaauuccuuca

SEQ ID NO: 1393260 - RNA, 14 nt, Human
caauuaauuuuaga

SEQ ID NO: 1393261 - RNA, 19 nt, Human
caagugaggugugucacaa

SEQ ID NO: 1393262 - RNA, 16 nt, Human
caaguggacucagggc

SEQ ID NO: 1393263 - RNA, 15 nt, Human
caaguggacucaggg

SEQ ID NO: 1393264 - RNA, 19 nt, Human
caagugaucugcccaccuc

SEQ ID NO: 1393265 - RNA, 18 nt, Human
caagugagucucucuggg

SEQ ID NO: 1393266 - RNA, 23 nt, Human
caaguggacucagggcagcgcca

SEQ ID NO: 1393267 - RNA, 18 nt, Human
caaguggacucagggcag

SEQ ID NO: 1393268 - RNA, 23 nt, Human
caaguguaaaauauuuugaauca

SEQ ID NO: 1393269 - RNA, 15 nt, Human
caaggcuguggacca

SEQ ID NO: 1393270 - RNA, 15 nt, Human
caaggggccugagca

SEQ ID NO: 1393271 - RNA, 14 nt, Human
caaggggccugagc

SEQ ID NO: 1393272 - RNA, 20 nt, Human
caaggcuguggaccauggag

SEQ ID NO: 1393273 - RNA, 22 nt, Human
caaggggcuucagguccaggcu

SEQ ID NO: 1393274 - RNA, 21 nt, Human
caaggggccugagcaguccuu

SEQ ID NO: 1393275 - RNA, 16 nt, Human
caaggggccugagcag

SEQ ID NO: 1393276 - RNA, 14 nt, Human
caaggucauuuuuu

SEQ ID NO: 1393277 - RNA, 20 nt, Human
caaggucauuuuuuuuaaga

SEQ ID NO: 1393278 - RNA, 22 nt, Human
caagguccucugucagucacag

SEQ ID NO: 1393279 - RNA, 21 nt, Human
caagguccucugucagucaca

SEQ ID NO: 1393280 - RNA, 20 nt, Human
caagguccucugucagucac

SEQ ID NO: 1393281 - RNA, 19 nt, Human
caaggucguuuuuuucauu

SEQ ID NO: 1393282 - RNA, 13 nt, Human
caaggucugcuuu

SEQ ID NO: 1393283 - RNA, 15 nt, Human
caaggacuuuguaca

SEQ ID NO: 1393284 - RNA, 16 nt, Human
caaggacuuugcagcc

SEQ ID NO: 1393285 - RNA, 15 nt, Human
caaggacuuugcagc

SEQ ID NO: 1393286 - RNA, 23 nt, Human
caaggacuuccuguccagcucca

SEQ ID NO: 1393287 - RNA, 22 nt, Human
caaggacuuccuguccagcucc

SEQ ID NO: 1393288 - RNA, 21 nt, Human
caaggacuuccuguccagcuc

SEQ ID NO: 1393289 - RNA, 19 nt, Human
caaggacuuccuguccagc

SEQ ID NO: 1393290 - RNA, 14 nt, Human
caaggacuuccugu

SEQ ID NO: 1393291 - RNA, 18 nt, Human
caaggaggggcuguaaaa

SEQ ID NO: 1393292 - RNA, 18 nt, Human
caaggaguaugcagggag

SEQ ID NO: 1393293 - RNA, 16 nt, Human
caaggagucacugaga

SEQ ID NO: 1393294 - RNA, 19 nt, Human
caaggaaguagaaacaaaa

SEQ ID NO: 1393295 - RNA, 23 nt, Human
caaggaauuucuuaacuucuugc

SEQ ID NO: 1393296 - RNA, 21 nt, Human
caaggaauuucuuaacuucuu

SEQ ID NO: 1393297 - RNA, 18 nt, Human
caaggaauuucuuaacuu

SEQ ID NO: 1393298 - RNA, 16 nt, Human
caaggaauuucuuaac

SEQ ID NO: 1393299 - RNA, 15 nt, Human
caaggaauuucuuaa

SEQ ID NO: 1393300 - RNA, 12 nt, Human
caaggaauuucu

SEQ ID NO: 1393301 - RNA, 12 nt, Human
caaggaagucaa

SEQ ID NO: 1393302 - RNA, 16 nt, Human
caaggaaguagaaaca

SEQ ID NO: 1393303 - RNA, 23 nt, Human
caagccugcacaauaaaaauguu

SEQ ID NO: 1393304 - RNA, 22 nt, Human
caagccugagggaaaggccagc

SEQ ID NO: 1393305 - RNA, 21 nt, Human
caagccugagggaaaggccag

SEQ ID NO: 1393306 - RNA, 18 nt, Human
caagccugagggaaaggc

SEQ ID NO: 1393307 - RNA, 17 nt, Human
caagccugagggaaagg

SEQ ID NO: 1393308 - RNA, 13 nt, Human
caagccugaggga

SEQ ID NO: 1393309 - RNA, 11 nt, Human
caagccugagg

SEQ ID NO: 1393310 - RNA, 18 nt, Human
caagccucugcccaggca

SEQ ID NO: 1393311 - RNA, 16 nt, Human
caagccagaggcuggg

SEQ ID NO: 1393312 - RNA, 15 nt, Human
caagccagaggcugg

SEQ ID NO: 1393313 - RNA, 13 nt, Human
caagccagaggcu

SEQ ID NO: 1393314 - RNA, 13 nt, Human
caagccagaacuu

SEQ ID NO: 1393315 - RNA, 15 nt, Human
caagccagauuuuuu

SEQ ID NO: 1393316 - RNA, 21 nt, Human
caagccagauuuuccugaaaa

SEQ ID NO: 1393317 - RNA, 13 nt, Human
caacuuuucuauu

SEQ ID NO: 1393318 - RNA, 20 nt, Human
caacuuuuccuuugaauccu

SEQ ID NO: 1393319 - RNA, 23 nt, Human
caagaaaaauaaagaaaagaugc

SEQ ID NO: 1393320 - RNA, 18 nt, Human
caagaaaaauaaagaaaa

SEQ ID NO: 1393321 - RNA, 17 nt, Human
caagaaaaauaaagaaa

SEQ ID NO: 1393322 - RNA, 16 nt, Human
caagaaaaauaaagaa

SEQ ID NO: 1393323 - RNA, 14 nt, Human
caagaaaaauaaag

SEQ ID NO: 1393324 - RNA, 20 nt, Human
caagaaaaauaaagaaaaga

SEQ ID NO: 1393325 - RNA, 19 nt, Human
caagaaaaauaaagaaaag

SEQ ID NO: 1393326 - RNA, 22 nt, Human
caagaaaaauaaagaaaagaug

SEQ ID NO: 1393327 - RNA, 20 nt, Human
caagaacacagcccugcuuc

SEQ ID NO: 1393328 - RNA, 16 nt, Human
caagacugacgccagg

SEQ ID NO: 1393329 - RNA, 20 nt, Human
caagaggcuguucccaccag

SEQ ID NO: 1393330 - RNA, 22 nt, Human
caagacucuuuaugaucuggcc

SEQ ID NO: 1393331 - RNA, 19 nt, Human
caagagggacgccuggggg

SEQ ID NO: 1393332 - RNA, 17 nt, Human
caagagggacgccuggg

SEQ ID NO: 1393333 - RNA, 21 nt, Human
caagacucuagaguccaaggu

SEQ ID NO: 1393334 - RNA, 17 nt, Human
caagacucuagagucca

SEQ ID NO: 1393335 - RNA, 14 nt, Human
caagacucuagagu

SEQ ID NO: 1393336 - RNA, 19 nt, Human
caagaagaagggcacccua

SEQ ID NO: 1393337 - RNA, 19 nt, Human
caagacugcacaucaaaau

SEQ ID NO: 1393338 - RNA, 17 nt, Human
caacccgugccaagucc

SEQ ID NO: 1393339 - RNA, 16 nt, Human
caacccgugccaaguc

SEQ ID NO: 1393340 - RNA, 22 nt, Human
caacccgucuggcccaccaggg

SEQ ID NO: 1393341 - RNA, 21 nt, Human
caacccgucuggcccaccagg

SEQ ID NO: 1393342 - RNA, 20 nt, Human
caacccgucuggcccaccag

SEQ ID NO: 1393343 - RNA, 22 nt, Human
caacacuguaguaaauaaugcu

SEQ ID NO: 1393344 - RNA, 16 nt, Human
caacccgaggcccgca

SEQ ID NO: 1393345 - RNA, 21 nt, Human
caacccguggaggcugcucgg

SEQ ID NO: 1393346 - RNA, 18 nt, Human
caacccguggaggcugcu

SEQ ID NO: 1393347 - RNA, 17 nt, Human
caacccguggaggcugc

SEQ ID NO: 1393348 - RNA, 16 nt, Human
caacccguggaggcug

SEQ ID NO: 1393349 - RNA, 23 nt, Human
caacccgugccaaguccaggucc

SEQ ID NO: 1393350 - RNA, 18 nt, Human
caacacuggucugcuguu

SEQ ID NO: 1393351 - RNA, 22 nt, Human
caacacuggucugcuguuccag

SEQ ID NO: 1393352 - RNA, 14 nt, Human
caacacugccagca

SEQ ID NO: 1393353 - RNA, 13 nt, Human
caacacugccagc

SEQ ID NO: 1393354 - RNA, 12 nt, Human
caacacugccag

SEQ ID NO: 1393355 - RNA, 17 nt, Human
caaauuucaugaccagu

SEQ ID NO: 1393356 - RNA, 13 nt, Human
caacgugcauugu

SEQ ID NO: 1393357 - RNA, 16 nt, Human
caacgugcauugugcu

SEQ ID NO: 1393358 - RNA, 17 nt, Human
caacgugcauugugcuu

SEQ ID NO: 1393359 - RNA, 23 nt, Human
caaccuguuaccuacuuugacuu

SEQ ID NO: 1393360 - RNA, 22 nt, Human
caaccuguuaccuacuuugacu

SEQ ID NO: 1393361 - RNA, 20 nt, Human
caaccuguuaccuacuuuga

SEQ ID NO: 1393362 - RNA, 18 nt, Human
caaccuguagaguggcca

SEQ ID NO: 1393363 - RNA, 18 nt, Human
caaccuuagauguucuaa

SEQ ID NO: 1393364 - RNA, 17 nt, Human
caaccuuagauguucua

SEQ ID NO: 1393365 - RNA, 20 nt, Human
caacggaaagugcugucuua

SEQ ID NO: 1393366 - RNA, 13 nt, Human
caacggagucaaa

SEQ ID NO: 1393367 - RNA, 15 nt, Human
caaccguggcccuuc

SEQ ID NO: 1393368 - RNA, 22 nt, Human
caaccggcuuuguggcacuggg

SEQ ID NO: 1393369 - RNA, 13 nt, Human
caaccggcuuugu

SEQ ID NO: 1393370 - RNA, 22 nt, Human
caaccguggcccuuccuggaca

SEQ ID NO: 1393371 - RNA, 23 nt, Human
caaccguggcccuuccuggacag

SEQ ID NO: 1393372 - RNA, 21 nt, Human
caaccguggcccuuccuggac

SEQ ID NO: 1393373 - RNA, 20 nt, Human
caaccguggcccuuccugga

SEQ ID NO: 1393374 - RNA, 19 nt, Human
caaccguggcccuuccugg

SEQ ID NO: 1393375 - RNA, 18 nt, Human
caaccguggcccuuccug

SEQ ID NO: 1393376 - RNA, 20 nt, Human
caaccucugccucccagguu

SEQ ID NO: 1393377 - RNA, 13 nt, Human
caccccugcacag

SEQ ID NO: 1393378 - RNA, 12 nt, Human
caccccuaggac

SEQ ID NO: 1393379 - RNA, 13 nt, Human
cacauauugauuu

SEQ ID NO: 1393380 - RNA, 16 nt, Human
cacccuaccugugccu

SEQ ID NO: 1393381 - RNA, 21 nt, Human
cacccggcugcagaggccaga

SEQ ID NO: 1393382 - RNA, 15 nt, Human
cacccggcugcagag

SEQ ID NO: 1393383 - RNA, 21 nt, Human
cacccucacuggcucuccugg

SEQ ID NO: 1393384 - RNA, 20 nt, Human
cacccucagaugcacaugag

SEQ ID NO: 1393385 - RNA, 14 nt, Human
cacccugucugccc

SEQ ID NO: 1393386 - RNA, 20 nt, Human
cacccucacuggcucuccug

SEQ ID NO: 1393387 - RNA, 12 nt, Human
cacccucacacu

SEQ ID NO: 1393388 - RNA, 21 nt, Human
cacccuucucccacucuccua

SEQ ID NO: 1393389 - RNA, 23 nt, Human
cacccuucucccacucuccuagg

SEQ ID NO: 1393390 - RNA, 19 nt, Human
cacccuucucccacucucc

SEQ ID NO: 1393391 - RNA, 18 nt, Human
cacccuucucccacucuc

SEQ ID NO: 1393392 - RNA, 17 nt, Human
cacccuucucccacucu

SEQ ID NO: 1393393 - RNA, 16 nt, Human
cacccuucucccacuc

SEQ ID NO: 1393394 - RNA, 15 nt, Human
cacccuucucccacu

SEQ ID NO: 1393395 - RNA, 13 nt, Human
cacccuucuccca

SEQ ID NO: 1393396 - RNA, 17 nt, Human
cacccuguuccugcugc

SEQ ID NO: 1393397 - RNA, 18 nt, Human
cacccuguuccugcugcu

SEQ ID NO: 1393398 - RNA, 16 nt, Human
cacccuguuccugcug

SEQ ID NO: 1393399 - RNA, 15 nt, Human
cacccuguuccugcu

SEQ ID NO: 1393400 - RNA, 14 nt, Human
cacccuguuccugc

SEQ ID NO: 1393401 - RNA, 18 nt, Human
cacccuguggucuuccuc

SEQ ID NO: 1393402 - RNA, 19 nt, Human
cacccugucugccccgccc

SEQ ID NO: 1393403 - RNA, 21 nt, Human
caccgaagcccagagggucug

SEQ ID NO: 1393404 - RNA, 15 nt, Human
caccgaagcccagag

SEQ ID NO: 1393405 - RNA, 14 nt, Human
caccgaagcccaga

SEQ ID NO: 1393406 - RNA, 21 nt, Human
cacccuuuuccagcuggauga

SEQ ID NO: 1393407 - RNA, 17 nt, Human
cacccuuuuccagcugg

SEQ ID NO: 1393408 - RNA, 15 nt, Human
cacccuuuuccagcu

SEQ ID NO: 1393409 - RNA, 22 nt, Human
cacccuuugcugugaggcuguc

SEQ ID NO: 1393410 - RNA, 20 nt, Human
cacccuuugcugugaggcug

SEQ ID NO: 1393411 - RNA, 18 nt, Human
cacccuugguuccuaacu

SEQ ID NO: 1393412 - RNA, 15 nt, Human
caccgacugaaaaua

SEQ ID NO: 1393413 - RNA, 12 nt, Human
caccgagugggg

SEQ ID NO: 1393414 - RNA, 13 nt, Human
caccgcagaagga

SEQ ID NO: 1393415 - RNA, 20 nt, Human
cacauauugauuuccguuaa

SEQ ID NO: 1393416 - RNA, 21 nt, Human
caccugcacuaacagaguggc

SEQ ID NO: 1393417 - RNA, 16 nt, Human
caccugcacuaacaga

SEQ ID NO: 1393418 - RNA, 15 nt, Human
caccugcacuaacag

SEQ ID NO: 1393419 - RNA, 23 nt, Human
caccugagucacccuaccugugc

SEQ ID NO: 1393420 - RNA, 19 nt, Human
caccugagucacccuaccu

SEQ ID NO: 1393421 - RNA, 11 nt, Human
caccugaggaa

SEQ ID NO: 1393422 - RNA, 14 nt, Human
caccugaggaacug

SEQ ID NO: 1393423 - RNA, 20 nt, Human
caccugacacaccaggcgcu

SEQ ID NO: 1393424 - RNA, 22 nt, Human
caccuggaagcauuuguuucua

SEQ ID NO: 1393425 - RNA, 21 nt, Human
caccuggaagcauuuguuucu

SEQ ID NO: 1393426 - RNA, 23 nt, Human
caccugcugucuggguggcucac

SEQ ID NO: 1393427 - RNA, 20 nt, Human
caccuggaauauauaaccag

SEQ ID NO: 1393428 - RNA, 23 nt, Human
caccugcugagaaaacaugccuc

SEQ ID NO: 1393429 - RNA, 13 nt, Human
caccugaacugaa

SEQ ID NO: 1393430 - RNA, 12 nt, Human
caccucugcugc

SEQ ID NO: 1393431 - RNA, 17 nt, Human
caccugacacaccaggc

SEQ ID NO: 1393432 - RNA, 16 nt, Human
caccugacacaccagg

SEQ ID NO: 1393433 - RNA, 19 nt, Human
caccugaacugaacaccau

SEQ ID NO: 1393434 - RNA, 17 nt, Human
caccugaacugaacacc

SEQ ID NO: 1393435 - RNA, 16 nt, Human
caccuggcccugcuuc

SEQ ID NO: 1393436 - RNA, 15 nt, Human
caccuggcccugcuu

SEQ ID NO: 1393437 - RNA, 13 nt, Human
caccuggcccugc

SEQ ID NO: 1393438 - RNA, 23 nt, Human
caccuggcaucgcaccauucuga

SEQ ID NO: 1393439 - RNA, 19 nt, Human
caccuggaccccugcauug

SEQ ID NO: 1393440 - RNA, 18 nt, Human
caccuggaccccugcauu

SEQ ID NO: 1393441 - RNA, 17 nt, Human
caccuggaccccugcau

SEQ ID NO: 1393442 - RNA, 16 nt, Human
caccuggaccccugca

SEQ ID NO: 1393443 - RNA, 15 nt, Human
caccuggaccccugc

SEQ ID NO: 1393444 - RNA, 12 nt, Human
caccuggacccc

SEQ ID NO: 1393445 - RNA, 11 nt, Human
caccuggaccc

SEQ ID NO: 1393446 - RNA, 19 nt, Human
caccuggcucucaccucua

SEQ ID NO: 1393447 - RNA, 18 nt, Human
caccuggcucucaccucu

SEQ ID NO: 1393448 - RNA, 17 nt, Human
caccuggcucucaccuc

SEQ ID NO: 1393449 - RNA, 16 nt, Human
caccuggcucucaccu

SEQ ID NO: 1393450 - RNA, 20 nt, Human
caccuggcccugcuuccugc

SEQ ID NO: 1393451 - RNA, 22 nt, Human
caccuggcccugcuuccugcuu

SEQ ID NO: 1393452 - RNA, 20 nt, Human
caccugggauuacaagcaug

SEQ ID NO: 1393453 - RNA, 20 nt, Human
caccuguaaugugcgaggga

SEQ ID NO: 1393454 - RNA, 16 nt, Human
caccuguaaaccugag

SEQ ID NO: 1393455 - RNA, 15 nt, Human
caccuguaaaccuga

SEQ ID NO: 1393456 - RNA, 14 nt, Human
caccuguaaaccug

SEQ ID NO: 1393457 - RNA, 17 nt, Human
caccugguggccaugcu

SEQ ID NO: 1393458 - RNA, 21 nt, Human
caccugguggccaugcuccuc

SEQ ID NO: 1393459 - RNA, 16 nt, Human
caccugguggccaugc

SEQ ID NO: 1393460 - RNA, 15 nt, Human
caccugguggccaug

SEQ ID NO: 1393461 - RNA, 20 nt, Human
caccugguacucccucucag

SEQ ID NO: 1393462 - RNA, 23 nt, Human
caccugggcccuggggccuguac

SEQ ID NO: 1393463 - RNA, 22 nt, Human
caccugggcccuggggccugua

SEQ ID NO: 1393464 - RNA, 21 nt, Human
caccugggcccuggggccugu

SEQ ID NO: 1393465 - RNA, 20 nt, Human
caccugggcccuggggccug

SEQ ID NO: 1393466 - RNA, 19 nt, Human
caccugggcccuggggccu

SEQ ID NO: 1393467 - RNA, 18 nt, Human
caccugggcccuggggcc

SEQ ID NO: 1393468 - RNA, 17 nt, Human
caccugggcccuggggc

SEQ ID NO: 1393469 - RNA, 14 nt, Human
caccugggcccugg

SEQ ID NO: 1393470 - RNA, 17 nt, Human
caccugggagaaaucug

SEQ ID NO: 1393471 - RNA, 16 nt, Human
caccugggagaaaucu

SEQ ID NO: 1393472 - RNA, 15 nt, Human
caccuguagcagcca

SEQ ID NO: 1393473 - RNA, 22 nt, Human
caccuguagcacuuacugguag

SEQ ID NO: 1393474 - RNA, 18 nt, Human
caccuguagcacuuacug

SEQ ID NO: 1393475 - RNA, 14 nt, Human
caccugucccagaa

SEQ ID NO: 1393476 - RNA, 15 nt, Human
caccugucccagaaa

SEQ ID NO: 1393477 - RNA, 11 nt, Human
caccugucugu

SEQ ID NO: 1393478 - RNA, 12 nt, Human
caccugucuguc

SEQ ID NO: 1393479 - RNA, 13 nt, Human
caccugucugucu

SEQ ID NO: 1393480 - RNA, 14 nt, Human
caccugucugucug

SEQ ID NO: 1393481 - RNA, 13 nt, Human
caccuccugccuc

SEQ ID NO: 1393482 - RNA, 15 nt, Human
caccuccugccucag

SEQ ID NO: 1393483 - RNA, 16 nt, Human
caccuccucagccuga

SEQ ID NO: 1393484 - RNA, 14 nt, Human
caccuccucaugua

SEQ ID NO: 1393485 - RNA, 14 nt, Human
caccuccucagccu

SEQ ID NO: 1393486 - RNA, 21 nt, Human
caccucccucaaccucauccu

SEQ ID NO: 1393487 - RNA, 17 nt, Human
caccuccuucccucucu

SEQ ID NO: 1393488 - RNA, 13 nt, Human
caccuccuucccu

SEQ ID NO: 1393489 - RNA, 22 nt, Human
caccuccuggguucaagcgauu

SEQ ID NO: 1393490 - RNA, 20 nt, Human
caccuccuggguucaagcga

SEQ ID NO: 1393491 - RNA, 19 nt, Human
caccuccugacacccuucu

SEQ ID NO: 1393492 - RNA, 22 nt, Human
caccuccuucccucucuggaga

SEQ ID NO: 1393493 - RNA, 16 nt, Human
caccucuaacagcacc

SEQ ID NO: 1393494 - RNA, 19 nt, Human
caccucgcagguucaagca

SEQ ID NO: 1393495 - RNA, 22 nt, Human
caccucuaacagcaccaaauca

SEQ ID NO: 1393496 - RNA, 20 nt, Human
caccucuaacagcaccaaau

SEQ ID NO: 1393497 - RNA, 17 nt, Human
caccucuaacagcacca

SEQ ID NO: 1393498 - RNA, 22 nt, Human
caccucuagguccccauacucc

SEQ ID NO: 1393499 - RNA, 21 nt, Human
caccucucaauauucaauaaa

SEQ ID NO: 1393500 - RNA, 22 nt, Human
caccucucaauauucaauaaag

SEQ ID NO: 1393501 - RNA, 23 nt, Human
caccucucaauauucaauaaagc

SEQ ID NO: 1393502 - RNA, 16 nt, Human
caccuccccagcauuc

SEQ ID NO: 1393503 - RNA, 14 nt, Human
caccuccccagcau

SEQ ID NO: 1393504 - RNA, 12 nt, Human
caccucccagga

SEQ ID NO: 1393505 - RNA, 11 nt, Human
caccucccagg

SEQ ID NO: 1393506 - RNA, 10 nt, Human
caccucccag

SEQ ID NO: 1393507 - RNA, 15 nt, Human
caccuccaucccaga

SEQ ID NO: 1393508 - RNA, 16 nt, Human
caccuccacauccucc

SEQ ID NO: 1393509 - RNA, 17 nt, Human
caccuccacauccucca

SEQ ID NO: 1393510 - RNA, 14 nt, Human
caccucauggaauu

SEQ ID NO: 1393511 - RNA, 12 nt, Human
caccucauggaa

SEQ ID NO: 1393512 - RNA, 11 nt, Human
caccucaugga

SEQ ID NO: 1393513 - RNA, 23 nt, Human
caccuccccccacaagugcccuc

SEQ ID NO: 1393514 - RNA, 20 nt, Human
caccucccuauacugcuugg

SEQ ID NO: 1393515 - RNA, 14 nt, Human
caccuccccuuggg

SEQ ID NO: 1393516 - RNA, 21 nt, Human
caccucccuauacugcuugga

SEQ ID NO: 1393517 - RNA, 15 nt, Human
caccucccucaaccu

SEQ ID NO: 1393518 - RNA, 17 nt, Human
caccucccucaaccuca

SEQ ID NO: 1393519 - RNA, 19 nt, Human
caccucccucaaccucauc

SEQ ID NO: 1393520 - RNA, 18 nt, Human
caccgugggcucccugac

SEQ ID NO: 1393521 - RNA, 17 nt, Human
caccgugggcucccuga

SEQ ID NO: 1393522 - RNA, 13 nt, Human
caccgugggcucc

SEQ ID NO: 1393523 - RNA, 15 nt, Human
caccgugggcaggga

SEQ ID NO: 1393524 - RNA, 24 nt, Human
caccgugcccagcccuaaacauca

SEQ ID NO: 1393525 - RNA, 23 nt, Human
caccgggccacuccuuccugccc

SEQ ID NO: 1393526 - RNA, 21 nt, Human
caccgggccacuccuuccugc

SEQ ID NO: 1393527 - RNA, 19 nt, Human
caccgggccacuccuuccu

SEQ ID NO: 1393528 - RNA, 14 nt, Human
caccgggccacucc

SEQ ID NO: 1393529 - RNA, 12 nt, Human
caccgggccacu

SEQ ID NO: 1393530 - RNA, 22 nt, Human
caccggggccugggcaggaggg

SEQ ID NO: 1393531 - RNA, 21 nt, Human
caccggggccugggcaggagg

SEQ ID NO: 1393532 - RNA, 14 nt, Human
caccggggccuggg

SEQ ID NO: 1393533 - RNA, 17 nt, Human
caccggaccagccuggc

SEQ ID NO: 1393534 - RNA, 21 nt, Human
caccggcucucaccuggcccu

SEQ ID NO: 1393535 - RNA, 16 nt, Human
caccggcucucaccug

SEQ ID NO: 1393536 - RNA, 19 nt, Human
caccggaccagccuggccc

SEQ ID NO: 1393537 - RNA, 14 nt, Human
caccgcagaaggaa

SEQ ID NO: 1393538 - RNA, 15 nt, Human
caccgcagaaggaag

SEQ ID NO: 1393539 - RNA, 13 nt, Human
caccucucaauau

SEQ ID NO: 1393540 - RNA, 20 nt, Human
cacuuggggguucaggcccg

SEQ ID NO: 1393541 - RNA, 22 nt, Human
cacuuggggcaccuugcuccuc

SEQ ID NO: 1393542 - RNA, 20 nt, Human
cacuuggggcaccuugcucc

SEQ ID NO: 1393543 - RNA, 23 nt, Human
cacuuggcugcauaaauguggua

SEQ ID NO: 1393544 - RNA, 16 nt, Human
cacuuggcagccuugu

SEQ ID NO: 1393545 - RNA, 18 nt, Human
cacuuggcagccuuguga

SEQ ID NO: 1393546 - RNA, 15 nt, Human
cacuuggcagccuug

SEQ ID NO: 1393547 - RNA, 14 nt, Human
cacuuggcagccuu

SEQ ID NO: 1393548 - RNA, 12 nt, Human
cacuuggcagcc

SEQ ID NO: 1393549 - RNA, 16 nt, Human
cacuugcuggaagacg

SEQ ID NO: 1393550 - RNA, 22 nt, Human
cacuugcggauauucuggacug

SEQ ID NO: 1393551 - RNA, 21 nt, Human
cacuugccucuuccuugaaga

SEQ ID NO: 1393552 - RNA, 17 nt, Human
cacuugccucuuccuug

SEQ ID NO: 1393553 - RNA, 14 nt, Human
cacuugccucuucc

SEQ ID NO: 1393554 - RNA, 13 nt, Human
cacuugccucuuc

SEQ ID NO: 1393555 - RNA, 12 nt, Human
cacuugccucuu

SEQ ID NO: 1393556 - RNA, 16 nt, Human
cacuugccaaaaucca

SEQ ID NO: 1393557 - RNA, 19 nt, Human
cacuucuuacaauaauucu

SEQ ID NO: 1393558 - RNA, 20 nt, Human
cacuucugggcuucaucugg

SEQ ID NO: 1393559 - RNA, 12 nt, Human
cacuugcaaccu

SEQ ID NO: 1393560 - RNA, 17 nt, Human
cacuucugacagccuca

SEQ ID NO: 1393561 - RNA, 22 nt, Human
cacuucucaggacacaggccug

SEQ ID NO: 1393562 - RNA, 21 nt, Human
cacuucucaggacacaggccu

SEQ ID NO: 1393563 - RNA, 23 nt, Human
cacuucucaggacacaggccugu

SEQ ID NO: 1393564 - RNA, 19 nt, Human
cacuucucaggacacaggc

SEQ ID NO: 1393565 - RNA, 15 nt, Human
cacuucucaggacac

SEQ ID NO: 1393566 - RNA, 14 nt, Human
cacuucucaggaca

SEQ ID NO: 1393567 - RNA, 13 nt, Human
cacuucucaggac

SEQ ID NO: 1393568 - RNA, 18 nt, Human
cacuucugggcuucaucu

SEQ ID NO: 1393569 - RNA, 11 nt, Human
cacuucugcac

SEQ ID NO: 1393570 - RNA, 14 nt, Human
cacuucugcacuug

SEQ ID NO: 1393571 - RNA, 21 nt, Human
cacuuccucucgcggcccuca

SEQ ID NO: 1393572 - RNA, 18 nt, Human
cacuucccugcuuaaauu

SEQ ID NO: 1393573 - RNA, 13 nt, Human
cacuuccauggga

SEQ ID NO: 1393574 - RNA, 16 nt, Human
cacuucaaacuacuuu

SEQ ID NO: 1393575 - RNA, 18 nt, Human
cacuucaaauucaaauaa

SEQ ID NO: 1393576 - RNA, 21 nt, Human
cacuucaagugaccaccagga

SEQ ID NO: 1393577 - RNA, 21 nt, Human
cacuguucuuagcucaaugag

SEQ ID NO: 1393578 - RNA, 23 nt, Human
cacuguucuuagcucaaugagca

SEQ ID NO: 1393579 - RNA, 16 nt, Human
cacuguucuuagcuca

SEQ ID NO: 1393580 - RNA, 14 nt, Human
cacuucaaacuacu

SEQ ID NO: 1393581 - RNA, 12 nt, Human
cacuucaaacua

SEQ ID NO: 1393582 - RNA, 11 nt, Human
cacuucaaacu

SEQ ID NO: 1393583 - RNA, 20 nt, Human
cacuuauuuaugaaccugcc

SEQ ID NO: 1393584 - RNA, 22 nt, Human
cacuuauuggaacucugcuuga

SEQ ID NO: 1393585 - RNA, 15 nt, Human
cacuucauaauccag

SEQ ID NO: 1393586 - RNA, 14 nt, Human
cacuucauaaucca

SEQ ID NO: 1393587 - RNA, 20 nt, Human
cacuucagguauaccucacu

SEQ ID NO: 1393588 - RNA, 19 nt, Human
cacuucagguauaccucac

SEQ ID NO: 1393589 - RNA, 18 nt, Human
cacuucagguauaccuca

SEQ ID NO: 1393590 - RNA, 19 nt, Human
cacuucagggcuuuacucc

SEQ ID NO: 1393591 - RNA, 22 nt, Human
cacugugccucagagaccaggg

SEQ ID NO: 1393592 - RNA, 21 nt, Human
cacugugccucagagaccagg

SEQ ID NO: 1393593 - RNA, 20 nt, Human
cacugugccucagagaccag

SEQ ID NO: 1393594 - RNA, 17 nt, Human
cacugugccucagagac

SEQ ID NO: 1393595 - RNA, 13 nt, Human
cacugugccucag

SEQ ID NO: 1393596 - RNA, 22 nt, Human
cacugugcacaucugugucuug

SEQ ID NO: 1393597 - RNA, 20 nt, Human
cacugugcacaucugugucu

SEQ ID NO: 1393598 - RNA, 19 nt, Human
cacuguggguagacacaca

SEQ ID NO: 1393599 - RNA, 19 nt, Human
cacuguucccccugugcag

SEQ ID NO: 1393600 - RNA, 17 nt, Human
cacuguucccccugugc

SEQ ID NO: 1393601 - RNA, 15 nt, Human
cacuguguuccuucc

SEQ ID NO: 1393602 - RNA, 15 nt, Human
cacuguuaucaaaac

SEQ ID NO: 1393603 - RNA, 17 nt, Human
cacuguguuccuuccgc

SEQ ID NO: 1393604 - RNA, 15 nt, Human
cacuguguauuuaac

SEQ ID NO: 1393605 - RNA, 24 nt, Human
cacuguggguagacacacaugaag

SEQ ID NO: 1393606 - RNA, 22 nt, Human
cacuguggguagacacacauga

SEQ ID NO: 1393607 - RNA, 18 nt, Human
cacuguccugggccugca

SEQ ID NO: 1393608 - RNA, 15 nt, Human
cacuguccugggccu

SEQ ID NO: 1393609 - RNA, 18 nt, Human
cacugucccuugccucaa

SEQ ID NO: 1393610 - RNA, 17 nt, Human
cacugucccuugccuca

SEQ ID NO: 1393611 - RNA, 12 nt, Human
cacugucccuug

SEQ ID NO: 1393612 - RNA, 22 nt, Human
cacugucagcagggacuguaaa

SEQ ID NO: 1393613 - RNA, 21 nt, Human
cacugucaccacccugcucau

SEQ ID NO: 1393614 - RNA, 22 nt, Human
cacugugacccccagcuccggc

SEQ ID NO: 1393615 - RNA, 20 nt, Human
cacugugacccccagcuccg

SEQ ID NO: 1393616 - RNA, 19 nt, Human
cacugugacccccagcucc

SEQ ID NO: 1393617 - RNA, 15 nt, Human
cacugugacccccag

SEQ ID NO: 1393618 - RNA, 14 nt, Human
cacugugaccccca

SEQ ID NO: 1393619 - RNA, 15 nt, Human
cacugugaaggaccc

SEQ ID NO: 1393620 - RNA, 17 nt, Human
cacugugaaggacccuu

SEQ ID NO: 1393621 - RNA, 23 nt, Human
cacugugacccccagcuccggcc

SEQ ID NO: 1393622 - RNA, 14 nt, Human
cacugugaaggacc

SEQ ID NO: 1393623 - RNA, 13 nt, Human
cacugugaaggac

SEQ ID NO: 1393624 - RNA, 18 nt, Human
cacugucuuuaauucugu

SEQ ID NO: 1393625 - RNA, 19 nt, Human
cacugucuuuaauucugua

SEQ ID NO: 1393626 - RNA, 13 nt, Human
cacuguaaaaugu

SEQ ID NO: 1393627 - RNA, 12 nt, Human
cacuguaaaaug

SEQ ID NO: 1393628 - RNA, 17 nt, Human
cacuggcucuccuggcc

SEQ ID NO: 1393629 - RNA, 21 nt, Human
cacuggcucuccuggcccugg

SEQ ID NO: 1393630 - RNA, 15 nt, Human
cacuggcucuccugg

SEQ ID NO: 1393631 - RNA, 14 nt, Human
cacuggcucuccug

SEQ ID NO: 1393632 - RNA, 24 nt, Human
cacuggccccucaaaucguccagc

SEQ ID NO: 1393633 - RNA, 13 nt, Human
cacuggccccuca

SEQ ID NO: 1393634 - RNA, 13 nt, Human
cacuggccccacc

SEQ ID NO: 1393635 - RNA, 14 nt, Human
cacuggccccaccc

SEQ ID NO: 1393636 - RNA, 16 nt, Human
cacuggccccacccuc

SEQ ID NO: 1393637 - RNA, 13 nt, Human
cacuggcgaggag

SEQ ID NO: 1393638 - RNA, 15 nt, Human
cacuguaugagugga

SEQ ID NO: 1393639 - RNA, 14 nt, Human
cacuguauccaggu

SEQ ID NO: 1393640 - RNA, 20 nt, Human
cacuguaguucuaagacuca

SEQ ID NO: 1393641 - RNA, 18 nt, Human
cacuguaguucuaagacu

SEQ ID NO: 1393642 - RNA, 17 nt, Human
cacuguaguucuaagac

SEQ ID NO: 1393643 - RNA, 16 nt, Human
cacuguaguucuaaga

SEQ ID NO: 1393644 - RNA, 15 nt, Human
cacuguaguucuaag

SEQ ID NO: 1393645 - RNA, 14 nt, Human
cacuguaguucuaa

SEQ ID NO: 1393646 - RNA, 23 nt, Human
cacuguaguaaauaaugcuuuga

SEQ ID NO: 1393647 - RNA, 22 nt, Human
cacuguaguaaauaaugcuuug

SEQ ID NO: 1393648 - RNA, 21 nt, Human
cacuguaguaaauaaugcuuu

SEQ ID NO: 1393649 - RNA, 20 nt, Human
cacuguaguaaauaaugcuu

SEQ ID NO: 1393650 - RNA, 19 nt, Human
cacuguaguaaauaaugcu

SEQ ID NO: 1393651 - RNA, 15 nt, Human
cacuguacuugcucu

SEQ ID NO: 1393652 - RNA, 18 nt, Human
cacuguacuugcucuuga

SEQ ID NO: 1393653 - RNA, 18 nt, Human
cacuguagaaugauuuca

SEQ ID NO: 1393654 - RNA, 19 nt, Human
cacuguacuugcucuugau

SEQ ID NO: 1393655 - RNA, 19 nt, Human
cacuggagcagaaggggag

SEQ ID NO: 1393656 - RNA, 23 nt, Human
cacuggagcagaaggggagaugg

SEQ ID NO: 1393657 - RNA, 14 nt, Human
cacuggagcagaag

SEQ ID NO: 1393658 - RNA, 12 nt, Human
cacuggagcaca

SEQ ID NO: 1393659 - RNA, 13 nt, Human
cacuggagcacaa

SEQ ID NO: 1393660 - RNA, 10 nt, Human
cacuggagca

SEQ ID NO: 1393661 - RNA, 19 nt, Human
cacuggagacgcauaugag

SEQ ID NO: 1393662 - RNA, 16 nt, Human
cacuggaccacugggc

SEQ ID NO: 1393663 - RNA, 21 nt, Human
cacugcuuuucccuuugugag

SEQ ID NO: 1393664 - RNA, 13 nt, Human
cacugcuuuuccc

SEQ ID NO: 1393665 - RNA, 15 nt, Human
cacugcuugaggaaa

SEQ ID NO: 1393666 - RNA, 20 nt, Human
cacugcuugaggaaaacaag

SEQ ID NO: 1393667 - RNA, 14 nt, Human
cacugcuugaggaa

SEQ ID NO: 1393668 - RNA, 13 nt, Human
cacugcuugagga

SEQ ID NO: 1393669 - RNA, 17 nt, Human
cacugcuuccauuuaau

SEQ ID NO: 1393670 - RNA, 13 nt, Human
cacugcuuaacuu

SEQ ID NO: 1393671 - RNA, 19 nt, Human
cacugcccugguggcccuc

SEQ ID NO: 1393672 - RNA, 20 nt, Human
cacugcccccugcugccaug

SEQ ID NO: 1393673 - RNA, 19 nt, Human
cacugcccccugcugccau

SEQ ID NO: 1393674 - RNA, 17 nt, Human
cacugcccccugcugcc

SEQ ID NO: 1393675 - RNA, 18 nt, Human
cacugcccauggacaggc

SEQ ID NO: 1393676 - RNA, 17 nt, Human
cacugcccauggacagg

SEQ ID NO: 1393677 - RNA, 21 nt, Human
cacugccauuaaagaauauga

SEQ ID NO: 1393678 - RNA, 19 nt, Human
cacugcucuaacagcccuc

SEQ ID NO: 1393679 - RNA, 18 nt, Human
cacugcucuaacagcccu

SEQ ID NO: 1393680 - RNA, 15 nt, Human
cacugcucuaacagc

SEQ ID NO: 1393681 - RNA, 13 nt, Human
cacugcucacacu

SEQ ID NO: 1393682 - RNA, 17 nt, Human
cacugcuggagaggccc

SEQ ID NO: 1393683 - RNA, 20 nt, Human
cacugcugauauuuucucua

SEQ ID NO: 1393684 - RNA, 14 nt, Human
cacugccugcuccc

SEQ ID NO: 1393685 - RNA, 13 nt, Human
cacugccugcucc

SEQ ID NO: 1393686 - RNA, 21 nt, Human
cacugccugcucccauccugu

SEQ ID NO: 1393687 - RNA, 20 nt, Human
cacugccugcucccauccug

SEQ ID NO: 1393688 - RNA, 19 nt, Human
cacugccugcucccauccu

SEQ ID NO: 1393689 - RNA, 12 nt, Human
cacugccuuuga

SEQ ID NO: 1393690 - RNA, 23 nt, Human
cacugccuucgcuucuugccucu

SEQ ID NO: 1393691 - RNA, 21 nt, Human
cacugccuucgcuucuugccu

SEQ ID NO: 1393692 - RNA, 19 nt, Human
cacugccuucgcuucuugc

SEQ ID NO: 1393693 - RNA, 18 nt, Human
cacugccuucgcuucuug

SEQ ID NO: 1393694 - RNA, 20 nt, Human
cacugccuucucaacuccaa

SEQ ID NO: 1393695 - RNA, 20 nt, Human
cacugacugggaccaggcac

SEQ ID NO: 1393696 - RNA, 17 nt, Human
cacucuguaauugcaaa

SEQ ID NO: 1393697 - RNA, 15 nt, Human
cacugaccagaacua

SEQ ID NO: 1393698 - RNA, 14 nt, Human
cacugaccagaacu

SEQ ID NO: 1393699 - RNA, 13 nt, Human
cacugaccagaac

SEQ ID NO: 1393700 - RNA, 14 nt, Human
cacugacugggacc

SEQ ID NO: 1393701 - RNA, 20 nt, Human
cacucuguaauugcaaaaaa

SEQ ID NO: 1393702 - RNA, 23 nt, Human
cacucuguaauugaauauuauuc

SEQ ID NO: 1393703 - RNA, 14 nt, Human
cacucuguaauuga

SEQ ID NO: 1393704 - RNA, 13 nt, Human
cacucuguaauug

SEQ ID NO: 1393705 - RNA, 18 nt, Human
cacucuggcagccacacu

SEQ ID NO: 1393706 - RNA, 22 nt, Human
cacugaguuuuccauggcagga

SEQ ID NO: 1393707 - RNA, 20 nt, Human
cacugauauaucaugaguga

SEQ ID NO: 1393708 - RNA, 21 nt, Human
cacugaguuuuccauggcagg

SEQ ID NO: 1393709 - RNA, 15 nt, Human
cacugaguuuuccau

SEQ ID NO: 1393710 - RNA, 20 nt, Human
cacugaggggggauccaguu

SEQ ID NO: 1393711 - RNA, 14 nt, Human
cacugagggcaguc

SEQ ID NO: 1393712 - RNA, 17 nt, Human
cacugaugcugccccuc

SEQ ID NO: 1393713 - RNA, 12 nt, Human
cacugaugcugc

SEQ ID NO: 1393714 - RNA, 15 nt, Human
cacugaugcuuagau

SEQ ID NO: 1393715 - RNA, 19 nt, Human
cacugaugcugccccucau

SEQ ID NO: 1393716 - RNA, 16 nt, Human
cacugaugcuuagaug

SEQ ID NO: 1393717 - RNA, 20 nt, Human
cacugagcaacgcuauucca

SEQ ID NO: 1393718 - RNA, 23 nt, Human
cacugagauaccagcgaggaggc

SEQ ID NO: 1393719 - RNA, 19 nt, Human
cacugagauaccagcgagg

SEQ ID NO: 1393720 - RNA, 18 nt, Human
cacugagauaccagcgag

SEQ ID NO: 1393721 - RNA, 22 nt, Human
cacugagaggacagagagaaau

SEQ ID NO: 1393722 - RNA, 21 nt, Human
cacugagaggacagagagaaa

SEQ ID NO: 1393723 - RNA, 17 nt, Human
cacugagaccaaggcuu

SEQ ID NO: 1393724 - RNA, 23 nt, Human
cacugagaccccaggcuguuagg

SEQ ID NO: 1393725 - RNA, 15 nt, Human
cacugagaccaaggc

SEQ ID NO: 1393726 - RNA, 23 nt, Human
cacugcacaauaacuccucccag

SEQ ID NO: 1393727 - RNA, 22 nt, Human
cacugcacaauaacuccuccca

SEQ ID NO: 1393728 - RNA, 18 nt, Human
cacugcacaauaacuccu

SEQ ID NO: 1393729 - RNA, 20 nt, Human
cacugcaauuggcaccgaag

SEQ ID NO: 1393730 - RNA, 20 nt, Human
cacugcaaucuccaccuccc

SEQ ID NO: 1393731 - RNA, 19 nt, Human
cacugcaaccuccaccucc

SEQ ID NO: 1393732 - RNA, 13 nt, Human
cacugcaacauga

SEQ ID NO: 1393733 - RNA, 20 nt, Human
cacugcaaaccgccaccucc

SEQ ID NO: 1393734 - RNA, 21 nt, Human
cacugcaaaccgccaccuccc

SEQ ID NO: 1393735 - RNA, 13 nt, Human
cacugcaaccucc

SEQ ID NO: 1393736 - RNA, 19 nt, Human
cacugauguuguguuuuua

SEQ ID NO: 1393737 - RNA, 14 nt, Human
cacugcaaccuccg

SEQ ID NO: 1393738 - RNA, 14 nt, Human
cacugcaaccucca

SEQ ID NO: 1393739 - RNA, 17 nt, Human
cacugcaaccuccaccu

SEQ ID NO: 1393740 - RNA, 19 nt, Human
cacugcaaccuccaccucg

SEQ ID NO: 1393741 - RNA, 14 nt, Human
cacugcaaccucug

SEQ ID NO: 1393742 - RNA, 16 nt, Human
cacgacugucuccaug

SEQ ID NO: 1393743 - RNA, 13 nt, Human
cacgacugucucc

SEQ ID NO: 1393744 - RNA, 16 nt, Human
cacgacuggccagggc

SEQ ID NO: 1393745 - RNA, 14 nt, Human
cacgacaguggaug

SEQ ID NO: 1393746 - RNA, 15 nt, Human
cacgaccgccccagu

SEQ ID NO: 1393747 - RNA, 15 nt, Human
cacgacacugcagcc

SEQ ID NO: 1393748 - RNA, 12 nt, Human
caccuucugagu

SEQ ID NO: 1393749 - RNA, 18 nt, Human
caccuucccacuuuccca

SEQ ID NO: 1393750 - RNA, 18 nt, Human
caccuuccagcuccugua

SEQ ID NO: 1393751 - RNA, 16 nt, Human
caccuuccagcuccug

SEQ ID NO: 1393752 - RNA, 15 nt, Human
caccuuccagcuccu

SEQ ID NO: 1393753 - RNA, 14 nt, Human
caccuuccagcucc

SEQ ID NO: 1393754 - RNA, 19 nt, Human
caccuucaccuucauccau

SEQ ID NO: 1393755 - RNA, 13 nt, Human
caccuuagcuggc

SEQ ID NO: 1393756 - RNA, 16 nt, Human
caccugucugucuguc

SEQ ID NO: 1393757 - RNA, 22 nt, Human
caccugucugucugucuguccc

SEQ ID NO: 1393758 - RNA, 19 nt, Human
caccugugcuucgggcccu

SEQ ID NO: 1393759 - RNA, 22 nt, Human
caccuguggaacauaaaaagga

SEQ ID NO: 1393760 - RNA, 22 nt, Human
cacgagggcuggcuggccucac

SEQ ID NO: 1393761 - RNA, 21 nt, Human
cacgagggcuggcuggccuca

SEQ ID NO: 1393762 - RNA, 17 nt, Human
cacgagggcuggcuggc

SEQ ID NO: 1393763 - RNA, 13 nt, Human
cacgagggcuggc

SEQ ID NO: 1393764 - RNA, 12 nt, Human
cacgagggcugg

SEQ ID NO: 1393765 - RNA, 11 nt, Human
cacgagggcug

SEQ ID NO: 1393766 - RNA, 23 nt, Human
cacgaggaaucugugggucuggg

SEQ ID NO: 1393767 - RNA, 22 nt, Human
cacgaggaaucugugggucugg

SEQ ID NO: 1393768 - RNA, 20 nt, Human
cacgagcuguuuacuaggga

SEQ ID NO: 1393769 - RNA, 17 nt, Human
cacgacuggccagggcc

SEQ ID NO: 1393770 - RNA, 15 nt, Human
cacgcaccugccuca

SEQ ID NO: 1393771 - RNA, 12 nt, Human
cacgcaccugcc

SEQ ID NO: 1393772 - RNA, 15 nt, Human
cacgcacacugucug

SEQ ID NO: 1393773 - RNA, 16 nt, Human
cacgcaccugccucag

SEQ ID NO: 1393774 - RNA, 12 nt, Human
cacgauuucugu

SEQ ID NO: 1393775 - RNA, 14 nt, Human
cacgauuucuguuu

SEQ ID NO: 1393776 - RNA, 16 nt, Human
cacgauuucuguuuag

SEQ ID NO: 1393777 - RNA, 21 nt, Human
cacgcccguccugccuguggc

SEQ ID NO: 1393778 - RNA, 20 nt, Human
cacgcccguccugccugugg

SEQ ID NO: 1393779 - RNA, 19 nt, Human
cacgcccguccugccugug

SEQ ID NO: 1393780 - RNA, 16 nt, Human
cacgcccguccugccu

SEQ ID NO: 1393781 - RNA, 15 nt, Human
cacgcccguccugcc

SEQ ID NO: 1393782 - RNA, 14 nt, Human
cacgcccguccugc

SEQ ID NO: 1393783 - RNA, 15 nt, Human
cacgcaugcaguguu

SEQ ID NO: 1393784 - RNA, 13 nt, Human
cacgcacggcagc

SEQ ID NO: 1393785 - RNA, 18 nt, Human
cacgcuccagcugccccg

SEQ ID NO: 1393786 - RNA, 19 nt, Human
cacgcuccagcugccccgg

SEQ ID NO: 1393787 - RNA, 15 nt, Human
cacgcuccagcugcc

SEQ ID NO: 1393788 - RNA, 14 nt, Human
cacgcuccagcugc

SEQ ID NO: 1393789 - RNA, 13 nt, Human
cacgcuccagcug

SEQ ID NO: 1393790 - RNA, 12 nt, Human
cacgcuccagcu

SEQ ID NO: 1393791 - RNA, 16 nt, Human
cacgcuagggcuggcu

SEQ ID NO: 1393792 - RNA, 22 nt, Human
cacgcuaaucccgauucacccu

SEQ ID NO: 1393793 - RNA, 16 nt, Human
cacgccuggcuaauuu

SEQ ID NO: 1393794 - RNA, 23 nt, Human
cacgcucucuccaggcaggucug

SEQ ID NO: 1393795 - RNA, 19 nt, Human
cacgcucucuccaggcagg

SEQ ID NO: 1393796 - RNA, 24 nt, Human
cacgggccuguccacaggcuucug

SEQ ID NO: 1393797 - RNA, 18 nt, Human
cacgggccuguccacagg

SEQ ID NO: 1393798 - RNA, 17 nt, Human
cacgggccuguccacag

SEQ ID NO: 1393799 - RNA, 14 nt, Human
cacgggccugucca

SEQ ID NO: 1393800 - RNA, 16 nt, Human
cacggcugcgcacugu

SEQ ID NO: 1393801 - RNA, 17 nt, Human
cacggcugcgcacugug

SEQ ID NO: 1393802 - RNA, 21 nt, Human
cacggcucuguccccagccug

SEQ ID NO: 1393803 - RNA, 20 nt, Human
cacggcucuguccccagccu

SEQ ID NO: 1393804 - RNA, 19 nt, Human
cacggcucuguccccagcc

SEQ ID NO: 1393805 - RNA, 18 nt, Human
cacggcucuguccccagc

SEQ ID NO: 1393806 - RNA, 17 nt, Human
cacggcucuguccccag

SEQ ID NO: 1393807 - RNA, 22 nt, Human
cacggcuccucgagaucccaac

SEQ ID NO: 1393808 - RNA, 20 nt, Human
cacggcuccucgagauccca

SEQ ID NO: 1393809 - RNA, 22 nt, Human
cacggucggggcaucuggccug

SEQ ID NO: 1393810 - RNA, 23 nt, Human
cacguggccucuugagcaguggc

SEQ ID NO: 1393811 - RNA, 20 nt, Human
cacguggccucuugagcagu

SEQ ID NO: 1393812 - RNA, 18 nt, Human
cacguggccucuugagca

SEQ ID NO: 1393813 - RNA, 17 nt, Human
cacguggccucuugagc

SEQ ID NO: 1393814 - RNA, 13 nt, Human
cacguggccucuu

SEQ ID NO: 1393815 - RNA, 12 nt, Human
cacguggccucu

SEQ ID NO: 1393816 - RNA, 17 nt, Human
cacgugacacaaacaca

SEQ ID NO: 1393817 - RNA, 14 nt, Human
cacgugacacaaac

SEQ ID NO: 1393818 - RNA, 19 nt, Human
cacguccugagaaagcuca

SEQ ID NO: 1393819 - RNA, 13 nt, Human
cacguccugagaa

SEQ ID NO: 1393820 - RNA, 20 nt, Human
cacgucaaaugcauacaagu

SEQ ID NO: 1393821 - RNA, 23 nt, Human
cacguguguuuuucuauuaaaag

SEQ ID NO: 1393822 - RNA, 16 nt, Human
cacguguuugugcugu

SEQ ID NO: 1393823 - RNA, 22 nt, Human
cacguguguuuuucuauuaaaa

SEQ ID NO: 1393824 - RNA, 20 nt, Human
cacguguguuuuucuauuaa

SEQ ID NO: 1393825 - RNA, 19 nt, Human
cacguguguuuuucuauua

SEQ ID NO: 1393826 - RNA, 18 nt, Human
cacguguguuuuucuauu

SEQ ID NO: 1393827 - RNA, 17 nt, Human
cacguguguuuuucuau

SEQ ID NO: 1393828 - RNA, 15 nt, Human
cacguguguuuuucu

SEQ ID NO: 1393829 - RNA, 18 nt, Human
cacgugguaaaacacuug

SEQ ID NO: 1393830 - RNA, 16 nt, Human
cacgugggcucauaug

SEQ ID NO: 1393831 - RNA, 21 nt, Human
cacuaaagcaggccuuuugau

SEQ ID NO: 1393832 - RNA, 19 nt, Human
cacuaaaacacacaggugc

SEQ ID NO: 1393833 - RNA, 13 nt, Human
cacuaaacaaaga

SEQ ID NO: 1393834 - RNA, 12 nt, Human
cacguuucuaaa

SEQ ID NO: 1393835 - RNA, 14 nt, Human
cacguuucuaaagg

SEQ ID NO: 1393836 - RNA, 23 nt, Human
cacguuucuaaaggcuaccuuug

SEQ ID NO: 1393837 - RNA, 17 nt, Human
cacucagccacccugag

SEQ ID NO: 1393838 - RNA, 16 nt, Human
cacucagccacccuga

SEQ ID NO: 1393839 - RNA, 17 nt, Human
cacucagcacuuggccc

SEQ ID NO: 1393840 - RNA, 18 nt, Human
cacucagauccuccucau

SEQ ID NO: 1393841 - RNA, 22 nt, Human
cacucagcacaaggccaucugg

SEQ ID NO: 1393842 - RNA, 15 nt, Human
cacucagcacaaggc

SEQ ID NO: 1393843 - RNA, 13 nt, Human
cacucagcacaag

SEQ ID NO: 1393844 - RNA, 12 nt, Human
cacucagcacaa

SEQ ID NO: 1393845 - RNA, 20 nt, Human
cacucagagacaugcagaga

SEQ ID NO: 1393846 - RNA, 18 nt, Human
cacucagagacaugcaga

SEQ ID NO: 1393847 - RNA, 16 nt, Human
cacucagagacaugca

SEQ ID NO: 1393848 - RNA, 15 nt, Human
cacucagagacaugc

SEQ ID NO: 1393849 - RNA, 23 nt, Human
cacucagaagccugggggccugg

SEQ ID NO: 1393850 - RNA, 12 nt, Human
cacucagaccug

SEQ ID NO: 1393851 - RNA, 22 nt, Human
cacucagaagccugggggccug

SEQ ID NO: 1393852 - RNA, 19 nt, Human
cacucagaagccugggggc

SEQ ID NO: 1393853 - RNA, 17 nt, Human
cacucagaagccugggg

SEQ ID NO: 1393854 - RNA, 16 nt, Human
cacucagaagccuggg

SEQ ID NO: 1393855 - RNA, 15 nt, Human
cacucagaagccugg

SEQ ID NO: 1393856 - RNA, 14 nt, Human
cacucagaagccug

SEQ ID NO: 1393857 - RNA, 13 nt, Human
cacucagaagccu

SEQ ID NO: 1393858 - RNA, 22 nt, Human
cacucacuaggcccccacuugc

SEQ ID NO: 1393859 - RNA, 17 nt, Human
cacucacuaggccccca

SEQ ID NO: 1393860 - RNA, 16 nt, Human
cacucacuaggccccc

SEQ ID NO: 1393861 - RNA, 12 nt, Human
cacucaccugca

SEQ ID NO: 1393862 - RNA, 17 nt, Human
cacucacaacagcugcc

SEQ ID NO: 1393863 - RNA, 19 nt, Human
cacucaaggcggugcuuga

SEQ ID NO: 1393864 - RNA, 17 nt, Human
cacucaaggcggugcuu

SEQ ID NO: 1393865 - RNA, 11 nt, Human
cacucaaggcg

SEQ ID NO: 1393866 - RNA, 21 nt, Human
cacucaaggcggugcuugaua

SEQ ID NO: 1393867 - RNA, 14 nt, Human
cacuaucuuucagc

SEQ ID NO: 1393868 - RNA, 19 nt, Human
cacuaguauuucuaugaaa

SEQ ID NO: 1393869 - RNA, 23 nt, Human
cacuaaccaagcugaguuuccua

SEQ ID NO: 1393870 - RNA, 22 nt, Human
cacuaaccaagcugaguuuccu

SEQ ID NO: 1393871 - RNA, 14 nt, Human
cacuaacagagugg

SEQ ID NO: 1393872 - RNA, 16 nt, Human
cacuaacaugauuugg

SEQ ID NO: 1393873 - RNA, 20 nt, Human
cacuaacguugagccccugg

SEQ ID NO: 1393874 - RNA, 21 nt, Human
cacuaacgguugaguuuugac

SEQ ID NO: 1393875 - RNA, 23 nt, Human
cacuaaccuugccugguacagua

SEQ ID NO: 1393876 - RNA, 14 nt, Human
cacuaaccuugccu

SEQ ID NO: 1393877 - RNA, 17 nt, Human
cacuaagagagaaugag

SEQ ID NO: 1393878 - RNA, 20 nt, Human
cacucaucaauggggccagu

SEQ ID NO: 1393879 - RNA, 16 nt, Human
cacucaugugacucuu

SEQ ID NO: 1393880 - RNA, 22 nt, Human
cacucaugugacucuuuccaac

SEQ ID NO: 1393881 - RNA, 18 nt, Human
cacucagccacccugagu

SEQ ID NO: 1393882 - RNA, 18 nt, Human
cacucagucucucuucuc

SEQ ID NO: 1393883 - RNA, 22 nt, Human
cacuccucugcugaccugcuga

SEQ ID NO: 1393884 - RNA, 21 nt, Human
cacuccucugcugaccugcug

SEQ ID NO: 1393885 - RNA, 18 nt, Human
cacuccucugcugaccug

SEQ ID NO: 1393886 - RNA, 16 nt, Human
cacuccucugcugacc

SEQ ID NO: 1393887 - RNA, 14 nt, Human
cacuccucugcuga

SEQ ID NO: 1393888 - RNA, 13 nt, Human
cacuccucugcug

SEQ ID NO: 1393889 - RNA, 23 nt, Human
cacuccucugacucagggcuccu

SEQ ID NO: 1393890 - RNA, 21 nt, Human
cacuccucugacucagggcuc

SEQ ID NO: 1393891 - RNA, 20 nt, Human
cacuccucugacucagggcu

SEQ ID NO: 1393892 - RNA, 13 nt, Human
cacuccucugacu

SEQ ID NO: 1393893 - RNA, 12 nt, Human
cacuccucugac

SEQ ID NO: 1393894 - RNA, 19 nt, Human
cacuccgagaggugggcca

SEQ ID NO: 1393895 - RNA, 20 nt, Human
cacucccuugggcucccugu

SEQ ID NO: 1393896 - RNA, 16 nt, Human
cacucccuugggcucc

SEQ ID NO: 1393897 - RNA, 13 nt, Human
cacucccuugggc

SEQ ID NO: 1393898 - RNA, 14 nt, Human
cacucccuccuaac

SEQ ID NO: 1393899 - RNA, 13 nt, Human
cacucccucacaa

SEQ ID NO: 1393900 - RNA, 16 nt, Human
cacucugcuuguuauu

SEQ ID NO: 1393901 - RNA, 21 nt, Human
cacucugcuucucugacuucu

SEQ ID NO: 1393902 - RNA, 19 nt, Human
cacucugcuucucugacuu

SEQ ID NO: 1393903 - RNA, 18 nt, Human
cacucugcuucucugacu

SEQ ID NO: 1393904 - RNA, 17 nt, Human
cacucugcuucucugac

SEQ ID NO: 1393905 - RNA, 16 nt, Human
cacucugcuucucuga

SEQ ID NO: 1393906 - RNA, 15 nt, Human
cacucugcuucucug

SEQ ID NO: 1393907 - RNA, 14 nt, Human
cacucugcuucucu

SEQ ID NO: 1393908 - RNA, 13 nt, Human
cacucugcuucuc

SEQ ID NO: 1393909 - RNA, 12 nt, Human
cacucugcuucu

SEQ ID NO: 1393910 - RNA, 12 nt, Human
cacucugcuguu

SEQ ID NO: 1393911 - RNA, 17 nt, Human
cacucugcucugaugca

SEQ ID NO: 1393912 - RNA, 16 nt, Human
cacucuggcagccaca

SEQ ID NO: 1393913 - RNA, 15 nt, Human
cacucuggcagccac

SEQ ID NO: 1393914 - RNA, 14 nt, Human
cacucuggcagcca

SEQ ID NO: 1393915 - RNA, 13 nt, Human
cacucuggcagcc

SEQ ID NO: 1393916 - RNA, 12 nt, Human
cacucuggcagc

SEQ ID NO: 1393917 - RNA, 16 nt, Human
cacucugcucugaugc

SEQ ID NO: 1393918 - RNA, 15 nt, Human
cacucugcucugaug

SEQ ID NO: 1393919 - RNA, 14 nt, Human
cacucugcucugau

SEQ ID NO: 1393920 - RNA, 13 nt, Human
cacucugcucuga

SEQ ID NO: 1393921 - RNA, 12 nt, Human
cacucugcucug

SEQ ID NO: 1393922 - RNA, 16 nt, Human
cacucugaguguuuua

SEQ ID NO: 1393923 - RNA, 20 nt, Human
cacucuagucaaugacauga

SEQ ID NO: 1393924 - RNA, 18 nt, Human
cacucuagucaaugacau

SEQ ID NO: 1393925 - RNA, 14 nt, Human
cacucuagauucca

SEQ ID NO: 1393926 - RNA, 11 nt, Human
cacucuagauu

SEQ ID NO: 1393927 - RNA, 19 nt, Human
cacucuagucaaugacaug

SEQ ID NO: 1393928 - RNA, 14 nt, Human
cacuccuuccugcc

SEQ ID NO: 1393929 - RNA, 13 nt, Human
cacuccuuccugc

SEQ ID NO: 1393930 - RNA, 12 nt, Human
cacuccuuccug

SEQ ID NO: 1393931 - RNA, 21 nt, Human
cacucgcuagcaguggcaggc

SEQ ID NO: 1393932 - RNA, 16 nt, Human
cacucgcuagcagugg

SEQ ID NO: 1393933 - RNA, 21 nt, Human
cacuccuuccugccccaacuc

SEQ ID NO: 1393934 - RNA, 17 nt, Human
cacuccuuccugcccca

SEQ ID NO: 1393935 - RNA, 15 nt, Human
cacuccuuccugccc

SEQ ID NO: 1393936 - RNA, 13 nt, Human
cacucgacaugaa

SEQ ID NO: 1393937 - RNA, 15 nt, Human
cacuccuuuuaaaga

SEQ ID NO: 1393938 - RNA, 16 nt, Human
cacucgucucccccaa

SEQ ID NO: 1393939 - RNA, 14 nt, Human
cacucgucuccccc

SEQ ID NO: 1393940 - RNA, 13 nt, Human
cacucgucucccc

SEQ ID NO: 1393941 - RNA, 20 nt, Human
cacucgcuagcaguggcagg

SEQ ID NO: 1393942 - RNA, 13 nt, Human
cacucuaaagcaa

SEQ ID NO: 1393943 - RNA, 15 nt, Human
cacucguguguuucu

SEQ ID NO: 1393944 - RNA, 16 nt, Human
cacucguguguuucua

SEQ ID NO: 1393945 - RNA, 15 nt, Human
cagaaaacaaaacug

SEQ ID NO: 1393946 - RNA, 23 nt, Human
cagaagguugcucuagauugaga

SEQ ID NO: 1393947 - RNA, 15 nt, Human
cagaagggggucucu

SEQ ID NO: 1393948 - RNA, 17 nt, Human
cagaaggggagauggac

SEQ ID NO: 1393949 - RNA, 23 nt, Human
cagaagggagggcagagcuggug

SEQ ID NO: 1393950 - RNA, 22 nt, Human
cagaagggagggcagagcuggu

SEQ ID NO: 1393951 - RNA, 21 nt, Human
cagaagggagggcagagcugg

SEQ ID NO: 1393952 - RNA, 19 nt, Human
cagaagggagggcagagcu

SEQ ID NO: 1393953 - RNA, 17 nt, Human
cagaagggagggcagag

SEQ ID NO: 1393954 - RNA, 16 nt, Human
cagaagggagggcaga

SEQ ID NO: 1393955 - RNA, 15 nt, Human
cagaagggagggcag

SEQ ID NO: 1393956 - RNA, 13 nt, Human
cagaagggagggc

SEQ ID NO: 1393957 - RNA, 22 nt, Human
cagaagucaucuugcuaccagu

SEQ ID NO: 1393958 - RNA, 20 nt, Human
cagaagucaucuugcuacca

SEQ ID NO: 1393959 - RNA, 17 nt, Human
cagaagucaucuugcua

SEQ ID NO: 1393960 - RNA, 16 nt, Human
cagaagucaucuugcu

SEQ ID NO: 1393961 - RNA, 14 nt, Human
cagaagucaucuug

SEQ ID NO: 1393962 - RNA, 20 nt, Human
cagaaguaccagacuagaug

SEQ ID NO: 1393963 - RNA, 16 nt, Human
cagaaguaccagacua

SEQ ID NO: 1393964 - RNA, 15 nt, Human
cagaaguaccagacu

SEQ ID NO: 1393965 - RNA, 23 nt, Human
cagaaucgcuccaccuugcagcu

SEQ ID NO: 1393966 - RNA, 19 nt, Human
cagaagcucccccagcaaa

SEQ ID NO: 1393967 - RNA, 18 nt, Human
cagaagcucccccagcaa

SEQ ID NO: 1393968 - RNA, 17 nt, Human
cagaagcucccccagca

SEQ ID NO: 1393969 - RNA, 16 nt, Human
cagaagcucccccagc

SEQ ID NO: 1393970 - RNA, 15 nt, Human
cagaagcucccccag

SEQ ID NO: 1393971 - RNA, 24 nt, Human
cagaagccugggggccuggcuggc

SEQ ID NO: 1393972 - RNA, 23 nt, Human
cagaagccugggggccuggcugg

SEQ ID NO: 1393973 - RNA, 22 nt, Human
cagaagccugggggccuggcug

SEQ ID NO: 1393974 - RNA, 21 nt, Human
cagaagccugggggccuggcu

SEQ ID NO: 1393975 - RNA, 20 nt, Human
cagaagccugggggccuggc

SEQ ID NO: 1393976 - RNA, 19 nt, Human
cagaagccugggggccugg

SEQ ID NO: 1393977 - RNA, 14 nt, Human
cagaagccuggggg

SEQ ID NO: 1393978 - RNA, 13 nt, Human
cagaagccugggg

SEQ ID NO: 1393979 - RNA, 12 nt, Human
cagaagccuggg

SEQ ID NO: 1393980 - RNA, 18 nt, Human
cagaagccugaugcugac

SEQ ID NO: 1393981 - RNA, 23 nt, Human
cagaagcucccccagcaaagccc

SEQ ID NO: 1393982 - RNA, 21 nt, Human
cagaagcucccccagcaaagc

SEQ ID NO: 1393983 - RNA, 18 nt, Human
cagaaggcaaacccauca

SEQ ID NO: 1393984 - RNA, 13 nt, Human
cagaaggccaaga

SEQ ID NO: 1393985 - RNA, 14 nt, Human
cagaaggccaagag

SEQ ID NO: 1393986 - RNA, 18 nt, Human
cagaaggccaagaggcug

SEQ ID NO: 1393987 - RNA, 11 nt, Human
cagaaggaagg

SEQ ID NO: 1393988 - RNA, 15 nt, Human
cagaaggaaggcagg

SEQ ID NO: 1393989 - RNA, 20 nt, Human
cagaaggaaggcagggagga

SEQ ID NO: 1393990 - RNA, 22 nt, Human
cagaaggaaggcagggaggagg

SEQ ID NO: 1393991 - RNA, 14 nt, Human
cagaagaugacuga

SEQ ID NO: 1393992 - RNA, 14 nt, Human
cagaagaaacaagg

SEQ ID NO: 1393993 - RNA, 19 nt, Human
cagaacuugugcccucccu

SEQ ID NO: 1393994 - RNA, 21 nt, Human
cagaacuugacccugagcuga

SEQ ID NO: 1393995 - RNA, 20 nt, Human
cagaacuucagaaagacuug

SEQ ID NO: 1393996 - RNA, 19 nt, Human
cagaacuucagaaagacuu

SEQ ID NO: 1393997 - RNA, 17 nt, Human
cagaacuucagaaagac

SEQ ID NO: 1393998 - RNA, 16 nt, Human
cagaacuucagaaaga

SEQ ID NO: 1393999 - RNA, 13 nt, Human
cagaacuucagaa

SEQ ID NO: 1394000 - RNA, 16 nt, Human
cagaacucuuucaaaa

SEQ ID NO: 1394001 - RNA, 15 nt, Human
cagaacucuuucaaa

SEQ ID NO: 1394002 - RNA, 14 nt, Human
cagaacucuuucaa

SEQ ID NO: 1394003 - RNA, 22 nt, Human
cagaacucaaauggggccagau

SEQ ID NO: 1394004 - RNA, 21 nt, Human
cagaacucaaauggggccaga

SEQ ID NO: 1394005 - RNA, 20 nt, Human
cagaacucaaauggggccag

SEQ ID NO: 1394006 - RNA, 15 nt, Human
cagaacuagaauuug

SEQ ID NO: 1394007 - RNA, 19 nt, Human
cagaaccggagagccagcu

SEQ ID NO: 1394008 - RNA, 23 nt, Human
cagaaccccuacaugaaacagaa

SEQ ID NO: 1394009 - RNA, 18 nt, Human
cagaaccggagagccagc

SEQ ID NO: 1394010 - RNA, 19 nt, Human
cagaacuagaauuugauua

SEQ ID NO: 1394011 - RNA, 13 nt, Human
cagaacuagaauu

SEQ ID NO: 1394012 - RNA, 13 nt, Human
cagaacuacuucu

SEQ ID NO: 1394013 - RNA, 17 nt, Human
cacuuuuaaugaacaaa

SEQ ID NO: 1394014 - RNA, 21 nt, Human
cacuuuguuucguggggaggu

SEQ ID NO: 1394015 - RNA, 20 nt, Human
cacuuuguuucguggggagg

SEQ ID NO: 1394016 - RNA, 20 nt, Human
cacuuugucgcccaggcugg

SEQ ID NO: 1394017 - RNA, 22 nt, Human
cacuuugguaccagauaacuuu

SEQ ID NO: 1394018 - RNA, 19 nt, Human
cacuuuucccacuccaagc

SEQ ID NO: 1394019 - RNA, 15 nt, Human
cacuuuucccacucc

SEQ ID NO: 1394020 - RNA, 14 nt, Human
cacuuuucccacuc

SEQ ID NO: 1394021 - RNA, 13 nt, Human
cacuuuucccacu

SEQ ID NO: 1394022 - RNA, 12 nt, Human
cacuuuucccac

SEQ ID NO: 1394023 - RNA, 18 nt, Human
cacuuuugacaaaggcaa

SEQ ID NO: 1394024 - RNA, 17 nt, Human
cacuuuugacaaaggca

SEQ ID NO: 1394025 - RNA, 16 nt, Human
cacuuuuccucccuca

SEQ ID NO: 1394026 - RNA, 14 nt, Human
cacuuuuguucuug

SEQ ID NO: 1394027 - RNA, 22 nt, Human
cacuuuuguucuugguuuguaa

SEQ ID NO: 1394028 - RNA, 22 nt, Human
cagaaaacccuugggccagaag

SEQ ID NO: 1394029 - RNA, 20 nt, Human
cagaaaacccuugggccaga

SEQ ID NO: 1394030 - RNA, 19 nt, Human
cagaaaacccuugggccag

SEQ ID NO: 1394031 - RNA, 17 nt, Human
cagaaaacccuugggcc

SEQ ID NO: 1394032 - RNA, 16 nt, Human
cagaaaacauguuucc

SEQ ID NO: 1394033 - RNA, 14 nt, Human
cagaaaacaaaacu

SEQ ID NO: 1394034 - RNA, 13 nt, Human
cagaaaacaaaac

SEQ ID NO: 1394035 - RNA, 22 nt, Human
cagaaaaauauguaccaagaau

SEQ ID NO: 1394036 - RNA, 18 nt, Human
cagaaaaauauguaccaa

SEQ ID NO: 1394037 - RNA, 15 nt, Human
cagaaaaaccuuggg

SEQ ID NO: 1394038 - RNA, 20 nt, Human
cacuuuuugaggcaaaagaa

SEQ ID NO: 1394039 - RNA, 17 nt, Human
cacuuuuucucuuucca

SEQ ID NO: 1394040 - RNA, 16 nt, Human
cacuuuuugaggcaaa

SEQ ID NO: 1394041 - RNA, 14 nt, Human
cacuuuuugaggca

SEQ ID NO: 1394042 - RNA, 14 nt, Human
cacuuuuugcagcu

SEQ ID NO: 1394043 - RNA, 18 nt, Human
cacuuuuugcagcuuucu

SEQ ID NO: 1394044 - RNA, 15 nt, Human
cacuuuuugcagcuu

SEQ ID NO: 1394045 - RNA, 23 nt, Human
cacuuuggcuuauaauucuuuca

SEQ ID NO: 1394046 - RNA, 11 nt, Human
cacuuucuuau

SEQ ID NO: 1394047 - RNA, 23 nt, Human
cacuuucuuuuuuuucuauuuca

SEQ ID NO: 1394048 - RNA, 19 nt, Human
cacuuucucaguuuucaua

SEQ ID NO: 1394049 - RNA, 20 nt, Human
cacuuucuauccucuguaaa

SEQ ID NO: 1394050 - RNA, 15 nt, Human
cacuugguaauugua

SEQ ID NO: 1394051 - RNA, 19 nt, Human
cacuugguaauuguacuaa

SEQ ID NO: 1394052 - RNA, 16 nt, Human
cacuugggucuucccu

SEQ ID NO: 1394053 - RNA, 18 nt, Human
cacuuuggcuuauaauuc

SEQ ID NO: 1394054 - RNA, 20 nt, Human
cacuuugcuuuaauauaaau

SEQ ID NO: 1394055 - RNA, 19 nt, Human
cacuuugcuuuaauauaaa

SEQ ID NO: 1394056 - RNA, 18 nt, Human
cacuuugcuuuaauauaa

SEQ ID NO: 1394057 - RNA, 17 nt, Human
cacuuugcuuuaauaua

SEQ ID NO: 1394058 - RNA, 12 nt, Human
cacuuugcuuua

SEQ ID NO: 1394059 - RNA, 22 nt, Human
cacuuugcacugauauaucaug

SEQ ID NO: 1394060 - RNA, 19 nt, Human
cacuuugcacugauauauc

SEQ ID NO: 1394061 - RNA, 14 nt, Human
cacuuugcacagcu

SEQ ID NO: 1394062 - RNA, 17 nt, Human
cacuuugcacagcucuc

SEQ ID NO: 1394063 - RNA, 12 nt, Human
cacuuugcauaa

SEQ ID NO: 1394064 - RNA, 17 nt, Human
cagaaaauucugugccu

SEQ ID NO: 1394065 - RNA, 20 nt, Human
cagaaacaaaaacacuaaaa

SEQ ID NO: 1394066 - RNA, 18 nt, Human
cagaaacaaaaacacuaa

SEQ ID NO: 1394067 - RNA, 23 nt, Human
cagaaaauucugugccuuguuuu

SEQ ID NO: 1394068 - RNA, 15 nt, Human
cagaaaauucugugc

SEQ ID NO: 1394069 - RNA, 14 nt, Human
cagaaaauucugug

SEQ ID NO: 1394070 - RNA, 13 nt, Human
cagaaaauucugu

SEQ ID NO: 1394071 - RNA, 23 nt, Human
cagaaaauguugagaaucccaaa

SEQ ID NO: 1394072 - RNA, 18 nt, Human
cagaaaauguugagaauc

SEQ ID NO: 1394073 - RNA, 14 nt, Human
cagaaaauguugag

SEQ ID NO: 1394074 - RNA, 19 nt, Human
cagaaaaugaacacagcag

SEQ ID NO: 1394075 - RNA, 21 nt, Human
cagaaaauaaggcacccaucu

SEQ ID NO: 1394076 - RNA, 12 nt, Human
cagaaaauaagg

SEQ ID NO: 1394077 - RNA, 23 nt, Human
cagaaaauaaggcacccaucugu

SEQ ID NO: 1394078 - RNA, 19 nt, Human
cagaaaauaucccuccugu

SEQ ID NO: 1394079 - RNA, 22 nt, Human
cagaaaaguugaauuuuacaug

SEQ ID NO: 1394080 - RNA, 20 nt, Human
cagaaaaguugaauuuuaca

SEQ ID NO: 1394081 - RNA, 17 nt, Human
cagaaaaguugaauuuu

SEQ ID NO: 1394082 - RNA, 23 nt, Human
cagaaaacccuugggccagaagu

SEQ ID NO: 1394083 - RNA, 23 nt, Human
cagaaaagaaagcuacagaagaa

SEQ ID NO: 1394084 - RNA, 14 nt, Human
cagaaccacagggc

SEQ ID NO: 1394085 - RNA, 20 nt, Human
cagaaccacagggcuauuuu

SEQ ID NO: 1394086 - RNA, 12 nt, Human
cagaaccacagg

SEQ ID NO: 1394087 - RNA, 17 nt, Human
cagaaccaauuauuuuc

SEQ ID NO: 1394088 - RNA, 20 nt, Human
cagaaccaauuauuuucauc

SEQ ID NO: 1394089 - RNA, 15 nt, Human
cagaaccaauuauuu

SEQ ID NO: 1394090 - RNA, 19 nt, Human
cagaacauagacagaagaa

SEQ ID NO: 1394091 - RNA, 21 nt, Human
cagaacauagacagaagaaac

SEQ ID NO: 1394092 - RNA, 16 nt, Human
cagaacauagacagaa

SEQ ID NO: 1394093 - RNA, 15 nt, Human
cagaaagcugccugg

SEQ ID NO: 1394094 - RNA, 14 nt, Human
cagaaagcugccug

SEQ ID NO: 1394095 - RNA, 22 nt, Human
cagaaagccugggugacauuug

SEQ ID NO: 1394096 - RNA, 19 nt, Human
cagaaagccugggugacau

SEQ ID NO: 1394097 - RNA, 23 nt, Human
cagaaagccccacccaggccagg

SEQ ID NO: 1394098 - RNA, 22 nt, Human
cagaaagccccacccaggccag

SEQ ID NO: 1394099 - RNA, 21 nt, Human
cagaaagccccacccaggcca

SEQ ID NO: 1394100 - RNA, 20 nt, Human
cagaaagccccacccaggcc

SEQ ID NO: 1394101 - RNA, 22 nt, Human
cagaaagcaguugagacaagaa

SEQ ID NO: 1394102 - RNA, 23 nt, Human
cagaaagcaguugagacaagaaa

SEQ ID NO: 1394103 - RNA, 22 nt, Human
cagaaagcaucccucacccauc

SEQ ID NO: 1394104 - RNA, 18 nt, Human
cagaaacacccucacacu

SEQ ID NO: 1394105 - RNA, 20 nt, Human
cagaaacacccucacacugg

SEQ ID NO: 1394106 - RNA, 21 nt, Human
cagaaacacccucacacuggg

SEQ ID NO: 1394107 - RNA, 22 nt, Human
cagaaacacccucacacuggga

SEQ ID NO: 1394108 - RNA, 23 nt, Human
cagaaacacccucacacugggac

SEQ ID NO: 1394109 - RNA, 20 nt, Human
cagacaucugagguuuuauu

SEQ ID NO: 1394110 - RNA, 18 nt, Human
cagacaugccacaaggac

SEQ ID NO: 1394111 - RNA, 22 nt, Human
cagacauccaaacuaaaaggaa

SEQ ID NO: 1394112 - RNA, 17 nt, Human
cagacauccaaacuaaa

SEQ ID NO: 1394113 - RNA, 20 nt, Human
cagacauaaaggaaaagaca

SEQ ID NO: 1394114 - RNA, 22 nt, Human
cagacauaaaggaaaagacaca

SEQ ID NO: 1394115 - RNA, 19 nt, Human
cagacauaaaggaaaagac

SEQ ID NO: 1394116 - RNA, 17 nt, Human
cagacauaaaggaaaag

SEQ ID NO: 1394117 - RNA, 15 nt, Human
cagacauaaaggaaa

SEQ ID NO: 1394118 - RNA, 14 nt, Human
cagacauaaaggaa

SEQ ID NO: 1394119 - RNA, 19 nt, Human
cagacauacuaaccagcag

SEQ ID NO: 1394120 - RNA, 14 nt, Human
cagacaccuuggac

SEQ ID NO: 1394121 - RNA, 18 nt, Human
cagacaccuuggacaucc

SEQ ID NO: 1394122 - RNA, 22 nt, Human
cagacacugguuugaagaaugu

SEQ ID NO: 1394123 - RNA, 17 nt, Human
cagacacccaggacuua

SEQ ID NO: 1394124 - RNA, 15 nt, Human
cagacacccaggacu

SEQ ID NO: 1394125 - RNA, 14 nt, Human
cagacacccaggac

SEQ ID NO: 1394126 - RNA, 13 nt, Human
cagacacccagga

SEQ ID NO: 1394127 - RNA, 12 nt, Human
cagacacccagg

SEQ ID NO: 1394128 - RNA, 18 nt, Human
cagacacaggcccucccu

SEQ ID NO: 1394129 - RNA, 15 nt, Human
cagacacaggcccuc

SEQ ID NO: 1394130 - RNA, 14 nt, Human
cagacacaggcccu

SEQ ID NO: 1394131 - RNA, 17 nt, Human
cagacaacacguuacua

SEQ ID NO: 1394132 - RNA, 23 nt, Human
cagaauuuuauacuuucccuacc

SEQ ID NO: 1394133 - RNA, 22 nt, Human
cagaauuuuauacuuucccuac

SEQ ID NO: 1394134 - RNA, 21 nt, Human
cagaauuuuauacuuucccua

SEQ ID NO: 1394135 - RNA, 20 nt, Human
cagaauuuuauacuuucccu

SEQ ID NO: 1394136 - RNA, 19 nt, Human
cagaauuuggguucugccu

SEQ ID NO: 1394137 - RNA, 18 nt, Human
cagaauuuaguguaucca

SEQ ID NO: 1394138 - RNA, 22 nt, Human
cagaauuacuguaacugauuac

SEQ ID NO: 1394139 - RNA, 14 nt, Human
cagaauuacuguaa

SEQ ID NO: 1394140 - RNA, 19 nt, Human
cagaauuaaacuuuuaauu

SEQ ID NO: 1394141 - RNA, 23 nt, Human
cagaauuacuguaacugauuaca

SEQ ID NO: 1394142 - RNA, 23 nt, Human
cagaauuaaacuuuuaauucauu

SEQ ID NO: 1394143 - RNA, 17 nt, Human
cagaauuaaacuuuuaa

SEQ ID NO: 1394144 - RNA, 16 nt, Human
cagaauuaaacuuuua

SEQ ID NO: 1394145 - RNA, 15 nt, Human
cagaauucucuaguu

SEQ ID NO: 1394146 - RNA, 18 nt, Human
cagaauucucuaguuuga

SEQ ID NO: 1394147 - RNA, 15 nt, Human
cagaauuaaacuuuu

SEQ ID NO: 1394148 - RNA, 14 nt, Human
cagaauuaaacuuu

SEQ ID NO: 1394149 - RNA, 22 nt, Human
cagaauguugauuacagugcag

SEQ ID NO: 1394150 - RNA, 16 nt, Human
cagaauguugauuaca

SEQ ID NO: 1394151 - RNA, 21 nt, Human
cagaaugucauuuugguacuu

SEQ ID NO: 1394152 - RNA, 21 nt, Human
cagaaugugauaaggaaauca

SEQ ID NO: 1394153 - RNA, 14 nt, Human
cagaauguauauua

SEQ ID NO: 1394154 - RNA, 21 nt, Human
cagaaugcuguacaucuauuu

SEQ ID NO: 1394155 - RNA, 18 nt, Human
cagaaugcuguacaucua

SEQ ID NO: 1394156 - RNA, 17 nt, Human
cagaaugcuguacaucu

SEQ ID NO: 1394157 - RNA, 16 nt, Human
cagaaugcuguacauc

SEQ ID NO: 1394158 - RNA, 11 nt, Human
cagaaugcugu

SEQ ID NO: 1394159 - RNA, 21 nt, Human
cagaaugagacauccagcaga

SEQ ID NO: 1394160 - RNA, 22 nt, Human
cagacuauuuuuagauuuucuu

SEQ ID NO: 1394161 - RNA, 20 nt, Human
cagacuauuuuuagauuuuc

SEQ ID NO: 1394162 - RNA, 15 nt, Human
cagacuauuuuuaga

SEQ ID NO: 1394163 - RNA, 21 nt, Human
cagacuagauguaguauuuuu

SEQ ID NO: 1394164 - RNA, 20 nt, Human
cagacuagauguaguauuuu

SEQ ID NO: 1394165 - RNA, 19 nt, Human
cagacuagauguaguauuu

SEQ ID NO: 1394166 - RNA, 15 nt, Human
cagacuagauguagu

SEQ ID NO: 1394167 - RNA, 14 nt, Human
cagacuagauguag

SEQ ID NO: 1394168 - RNA, 23 nt, Human
cagacuagauggaccugccugca

SEQ ID NO: 1394169 - RNA, 22 nt, Human
cagacuagauggaccugccugc

SEQ ID NO: 1394170 - RNA, 21 nt, Human
cagacuagauggaccugccug

SEQ ID NO: 1394171 - RNA, 12 nt, Human
cagacuacagcu

SEQ ID NO: 1394172 - RNA, 21 nt, Human
cagacuacagcuggggugcag

SEQ ID NO: 1394173 - RNA, 23 nt, Human
cagacuaagccagcaccggacca

SEQ ID NO: 1394174 - RNA, 22 nt, Human
cagacuaagccagcaccggacc

SEQ ID NO: 1394175 - RNA, 21 nt, Human
cagacuaagccagcaccggac

SEQ ID NO: 1394176 - RNA, 18 nt, Human
cagacuaagccagcaccg

SEQ ID NO: 1394177 - RNA, 15 nt, Human
cagacuaagccagca

SEQ ID NO: 1394178 - RNA, 14 nt, Human
cagacuaagccagc

SEQ ID NO: 1394179 - RNA, 22 nt, Human
cagacggaaggguaaacaauau

SEQ ID NO: 1394180 - RNA, 20 nt, Human
cagacggaaggguaaacaau

SEQ ID NO: 1394181 - RNA, 19 nt, Human
cagacggaaggguaaacaa

SEQ ID NO: 1394182 - RNA, 18 nt, Human
cagacgcugcugucacaa

SEQ ID NO: 1394183 - RNA, 17 nt, Human
cagacgcugcugucaca

SEQ ID NO: 1394184 - RNA, 23 nt, Human
cagacgccuggcugcugaucgcc

SEQ ID NO: 1394185 - RNA, 17 nt, Human
cagacgccuggcugcug

SEQ ID NO: 1394186 - RNA, 16 nt, Human
cagacgccuggcugcu

SEQ ID NO: 1394187 - RNA, 15 nt, Human
cagacgccuggcugc

SEQ ID NO: 1394188 - RNA, 14 nt, Human
cagacgccuggcug

SEQ ID NO: 1394189 - RNA, 13 nt, Human
cagacgccuggcu

SEQ ID NO: 1394190 - RNA, 16 nt, Human
cagacgccugaggaac

SEQ ID NO: 1394191 - RNA, 15 nt, Human
cagaccuuuuuuagg

SEQ ID NO: 1394192 - RNA, 20 nt, Human
cagaccuguuagcagacagg

SEQ ID NO: 1394193 - RNA, 19 nt, Human
cagaccuguuagcagacag

SEQ ID NO: 1394194 - RNA, 23 nt, Human
cagaccugauccuggaggcccag

SEQ ID NO: 1394195 - RNA, 22 nt, Human
cagaccugauccuggaggccca

SEQ ID NO: 1394196 - RNA, 20 nt, Human
cagaccugauccuggaggcc

SEQ ID NO: 1394197 - RNA, 17 nt, Human
cagaccugauccuggag

SEQ ID NO: 1394198 - RNA, 14 nt, Human
cagaccugauccug

SEQ ID NO: 1394199 - RNA, 13 nt, Human
cagaccugauccu

SEQ ID NO: 1394200 - RNA, 11 nt, Human
cagacuuguug

SEQ ID NO: 1394201 - RNA, 20 nt, Human
cagacuucccagcuaggaag

SEQ ID NO: 1394202 - RNA, 15 nt, Human
cagacuucccagcua

SEQ ID NO: 1394203 - RNA, 14 nt, Human
cagacuucccagcu

SEQ ID NO: 1394204 - RNA, 15 nt, Human
cagacucagcucuga

SEQ ID NO: 1394205 - RNA, 14 nt, Human
cagacucagcucug

SEQ ID NO: 1394206 - RNA, 14 nt, Human
cagacucagacauu

SEQ ID NO: 1394207 - RNA, 18 nt, Human
cagacucccauuccugaa

SEQ ID NO: 1394208 - RNA, 17 nt, Human
cagacucccauuccuga

SEQ ID NO: 1394209 - RNA, 14 nt, Human
cagacucccauucc

SEQ ID NO: 1394210 - RNA, 22 nt, Human
cagacuucccacggcuccucga

SEQ ID NO: 1394211 - RNA, 12 nt, Human
cagacuucccac

SEQ ID NO: 1394212 - RNA, 22 nt, Human
cagagaaaccagcuuccuucag

SEQ ID NO: 1394213 - RNA, 23 nt, Human
cagagaaaccagcuuccuucaga

SEQ ID NO: 1394214 - RNA, 21 nt, Human
cagagaaaccagcuuccuuca

SEQ ID NO: 1394215 - RNA, 19 nt, Human
cagagaaaccagcuuccuu

SEQ ID NO: 1394216 - RNA, 18 nt, Human
cagagaaaccagcuuccu

SEQ ID NO: 1394217 - RNA, 17 nt, Human
cagagaaaccagcuucc

SEQ ID NO: 1394218 - RNA, 16 nt, Human
cagagaaaccagcuuc

SEQ ID NO: 1394219 - RNA, 15 nt, Human
cagagaaaccagcuu

SEQ ID NO: 1394220 - RNA, 14 nt, Human
cagagaaaccagcu

SEQ ID NO: 1394221 - RNA, 13 nt, Human
cagagaaaccagc

SEQ ID NO: 1394222 - RNA, 18 nt, Human
cagagaaaaagggagggg

SEQ ID NO: 1394223 - RNA, 17 nt, Human
cagagaaaaagggaggg

SEQ ID NO: 1394224 - RNA, 12 nt, Human
cagagaaaaagg

SEQ ID NO: 1394225 - RNA, 18 nt, Human
cagagaaaggggagccca

SEQ ID NO: 1394226 - RNA, 22 nt, Human
cagaccuaggauuucaugauuu

SEQ ID NO: 1394227 - RNA, 22 nt, Human
cagacccuggaggccccaaccc

SEQ ID NO: 1394228 - RNA, 19 nt, Human
cagacccuggaggccccaa

SEQ ID NO: 1394229 - RNA, 18 nt, Human
cagacccuggaggcccca

SEQ ID NO: 1394230 - RNA, 14 nt, Human
cagacccuggaggc

SEQ ID NO: 1394231 - RNA, 11 nt, Human
cagacccugga

SEQ ID NO: 1394232 - RNA, 13 nt, Human
cagacccuggagg

SEQ ID NO: 1394233 - RNA, 15 nt, Human
cagacccugcccuug

SEQ ID NO: 1394234 - RNA, 13 nt, Human
cagacccugcccu

SEQ ID NO: 1394235 - RNA, 14 nt, Human
cagacauuggcacc

SEQ ID NO: 1394236 - RNA, 13 nt, Human
cagacauuuuaaa

SEQ ID NO: 1394237 - RNA, 22 nt, Human
cagaccacgcccguccugccug

SEQ ID NO: 1394238 - RNA, 22 nt, Human
cagaccaccccgccugcccuca

SEQ ID NO: 1394239 - RNA, 19 nt, Human
cagaccaccccgccugccc

SEQ ID NO: 1394240 - RNA, 15 nt, Human
cagaccaccccgccu

SEQ ID NO: 1394241 - RNA, 13 nt, Human
cagaccaccccgc

SEQ ID NO: 1394242 - RNA, 16 nt, Human
cagaccacauugcuuu

SEQ ID NO: 1394243 - RNA, 16 nt, Human
cagaccacaugcccca

SEQ ID NO: 1394244 - RNA, 15 nt, Human
cagaccacaugcccc

SEQ ID NO: 1394245 - RNA, 13 nt, Human
cagaccacggcuc

SEQ ID NO: 1394246 - RNA, 24 nt, Human
cagaccacgcccguccugccugug

SEQ ID NO: 1394247 - RNA, 23 nt, Human
cagaccacgcccguccugccugu

SEQ ID NO: 1394248 - RNA, 16 nt, Human
cagaccauaauguuac

SEQ ID NO: 1394249 - RNA, 14 nt, Human
cagaccauggacac

SEQ ID NO: 1394250 - RNA, 17 nt, Human
cagaccauugucucaga

SEQ ID NO: 1394251 - RNA, 22 nt, Human
cagaccauggacacuacaccca

SEQ ID NO: 1394252 - RNA, 21 nt, Human
cagaccauggacacuacaccc

SEQ ID NO: 1394253 - RNA, 17 nt, Human
cagaugaaugccgugga

SEQ ID NO: 1394254 - RNA, 14 nt, Human
cagaugagucacac

SEQ ID NO: 1394255 - RNA, 16 nt, Human
cagaugaggcuuucca

SEQ ID NO: 1394256 - RNA, 14 nt, Human
cagaugcagggcag

SEQ ID NO: 1394257 - RNA, 13 nt, Human
cagaugcagggca

SEQ ID NO: 1394258 - RNA, 16 nt, Human
cagaugcagcucaaga

SEQ ID NO: 1394259 - RNA, 17 nt, Human
cagaugcacaugagcug

SEQ ID NO: 1394260 - RNA, 21 nt, Human
cagaucuagucaaucaagucu

SEQ ID NO: 1394261 - RNA, 20 nt, Human
cagaucucuaacuucaccau

SEQ ID NO: 1394262 - RNA, 14 nt, Human
cagauccuggaaau

SEQ ID NO: 1394263 - RNA, 23 nt, Human
cagaucuggaaccucagccuggc

SEQ ID NO: 1394264 - RNA, 22 nt, Human
cagaucuggaaccucagccugg

SEQ ID NO: 1394265 - RNA, 21 nt, Human
cagaucuggaaccucagccug

SEQ ID NO: 1394266 - RNA, 20 nt, Human
cagaucuggaaccucagccu

SEQ ID NO: 1394267 - RNA, 19 nt, Human
cagaucuggaaccucagcc

SEQ ID NO: 1394268 - RNA, 18 nt, Human
cagaucuggaaccucagc

SEQ ID NO: 1394269 - RNA, 15 nt, Human
cagaucuggaaccuc

SEQ ID NO: 1394270 - RNA, 14 nt, Human
cagaucuggaaccu

SEQ ID NO: 1394271 - RNA, 23 nt, Human
cagaucugauuuguaacccacug

SEQ ID NO: 1394272 - RNA, 20 nt, Human
cagaguugcugcaaaccuga

SEQ ID NO: 1394273 - RNA, 23 nt, Human
cagaguucuuuuugaaguauuua

SEQ ID NO: 1394274 - RNA, 14 nt, Human
cagaguuguuacau

SEQ ID NO: 1394275 - RNA, 19 nt, Human
cagaguuacaguucugugg

SEQ ID NO: 1394276 - RNA, 18 nt, Human
cagaguuacaguucugug

SEQ ID NO: 1394277 - RNA, 17 nt, Human
cagaguuacaguucugu

SEQ ID NO: 1394278 - RNA, 16 nt, Human
cagaguuacaguucug

SEQ ID NO: 1394279 - RNA, 15 nt, Human
cagaguuacaguucu

SEQ ID NO: 1394280 - RNA, 14 nt, Human
cagaguuacaguuc

SEQ ID NO: 1394281 - RNA, 13 nt, Human
cagaguuacaguu

SEQ ID NO: 1394282 - RNA, 12 nt, Human
cagaguuacagu

SEQ ID NO: 1394283 - RNA, 18 nt, Human
cagaguguggacucuggu

SEQ ID NO: 1394284 - RNA, 22 nt, Human
cagauaaagguucaugcaaacu

SEQ ID NO: 1394285 - RNA, 15 nt, Human
cagaguuguuacauu

SEQ ID NO: 1394286 - RNA, 18 nt, Human
cagaguuguuacauuuuu

SEQ ID NO: 1394287 - RNA, 19 nt, Human
cagaguuguuacauuuuua

SEQ ID NO: 1394288 - RNA, 22 nt, Human
cagauaagguaaaaugccauga

SEQ ID NO: 1394289 - RNA, 20 nt, Human
cagauaagguaaaaugccau

SEQ ID NO: 1394290 - RNA, 20 nt, Human
cagauaacuuuuuuuuuucu

SEQ ID NO: 1394291 - RNA, 13 nt, Human
cagauaacuuuuu

SEQ ID NO: 1394292 - RNA, 12 nt, Human
cagauaacuuuu

SEQ ID NO: 1394293 - RNA, 19 nt, Human
cagauaacugaaaauuauu

SEQ ID NO: 1394294 - RNA, 22 nt, Human
cagauaacugaaaauuauuuaa

SEQ ID NO: 1394295 - RNA, 16 nt, Human
cagauaaugugaaaau

SEQ ID NO: 1394296 - RNA, 14 nt, Human
cagauaaugugaaa

SEQ ID NO: 1394297 - RNA, 13 nt, Human
cagauaaugugaa

SEQ ID NO: 1394298 - RNA, 15 nt, Human
cagauaaucccugua

SEQ ID NO: 1394299 - RNA, 14 nt, Human
cagauaaucacaau

SEQ ID NO: 1394300 - RNA, 14 nt, Human
cagagucccugccu

SEQ ID NO: 1394301 - RNA, 16 nt, Human
cagaguccuuaaaaug

SEQ ID NO: 1394302 - RNA, 18 nt, Human
cagagucccugccuggac

SEQ ID NO: 1394303 - RNA, 14 nt, Human
cagagggcacucug

SEQ ID NO: 1394304 - RNA, 20 nt, Human
cagagugagacccagcccuc

SEQ ID NO: 1394305 - RNA, 17 nt, Human
cagagugagacccagcc

SEQ ID NO: 1394306 - RNA, 15 nt, Human
cagagugagacccag

SEQ ID NO: 1394307 - RNA, 14 nt, Human
cagagugagaccca

SEQ ID NO: 1394308 - RNA, 20 nt, Human
cagagugacauccaggagga

SEQ ID NO: 1394309 - RNA, 20 nt, Human
cagagucuggugaagcucac

SEQ ID NO: 1394310 - RNA, 18 nt, Human
cagaggcccaggcugccg

SEQ ID NO: 1394311 - RNA, 19 nt, Human
cagaggcccaggcugccgu

SEQ ID NO: 1394312 - RNA, 17 nt, Human
cagaggcccaggcugcc

SEQ ID NO: 1394313 - RNA, 16 nt, Human
cagaggcccaggcugc

SEQ ID NO: 1394314 - RNA, 15 nt, Human
cagaggcccaggcug

SEQ ID NO: 1394315 - RNA, 14 nt, Human
cagaggcccaggcu

SEQ ID NO: 1394316 - RNA, 20 nt, Human
cagaggcccacauuggaaga

SEQ ID NO: 1394317 - RNA, 14 nt, Human
cagaggccaaggag

SEQ ID NO: 1394318 - RNA, 20 nt, Human
cagaggccagaggcccccag

SEQ ID NO: 1394319 - RNA, 21 nt, Human
cagaggcaguaccugggcaag

SEQ ID NO: 1394320 - RNA, 17 nt, Human
cagaggcaguaccuggg

SEQ ID NO: 1394321 - RNA, 21 nt, Human
cagaggcagcccgcacaccug

SEQ ID NO: 1394322 - RNA, 21 nt, Human
cagaggauugcugccccauca

SEQ ID NO: 1394323 - RNA, 14 nt, Human
cagaggcuggguuc

SEQ ID NO: 1394324 - RNA, 13 nt, Human
cagaggcuggguu

SEQ ID NO: 1394325 - RNA, 12 nt, Human
cagaggcugggu

SEQ ID NO: 1394326 - RNA, 21 nt, Human
cagaggcccucaagucuuucu

SEQ ID NO: 1394327 - RNA, 20 nt, Human
cagaggcccucgcugccagc

SEQ ID NO: 1394328 - RNA, 19 nt, Human
cagaggcccucgcugccag

SEQ ID NO: 1394329 - RNA, 12 nt, Human
cagaggcccuca

SEQ ID NO: 1394330 - RNA, 24 nt, Human
cagaggcccccagcccagggcucc

SEQ ID NO: 1394331 - RNA, 23 nt, Human
cagaggcccccagcccagggcuc

SEQ ID NO: 1394332 - RNA, 22 nt, Human
cagaggcccccagcccagggcu

SEQ ID NO: 1394333 - RNA, 19 nt, Human
cagaggcccccagcccagg

SEQ ID NO: 1394334 - RNA, 17 nt, Human
cagaggcccccagccca

SEQ ID NO: 1394335 - RNA, 16 nt, Human
cagaggcccccagccc

SEQ ID NO: 1394336 - RNA, 17 nt, Human
cagaggccccagccucc

SEQ ID NO: 1394337 - RNA, 16 nt, Human
cagaggccccagccuc

SEQ ID NO: 1394338 - RNA, 14 nt, Human
cagaggccccagcc

SEQ ID NO: 1394339 - RNA, 13 nt, Human
cagaggccccagc

SEQ ID NO: 1394340 - RNA, 21 nt, Human
cagaggcucagauuguaauau

SEQ ID NO: 1394341 - RNA, 20 nt, Human
cagaggcuauuauuuucacu

SEQ ID NO: 1394342 - RNA, 19 nt, Human
cagaggccugggcugggaa

SEQ ID NO: 1394343 - RNA, 18 nt, Human
cagaggcgcacugugacc

SEQ ID NO: 1394344 - RNA, 17 nt, Human
cagaggcgcacugugac

SEQ ID NO: 1394345 - RNA, 16 nt, Human
cagaggccugggcugg

SEQ ID NO: 1394346 - RNA, 14 nt, Human
cagaggccugggcu

SEQ ID NO: 1394347 - RNA, 23 nt, Human
cagaggcgcaugaauuugugaag

SEQ ID NO: 1394348 - RNA, 17 nt, Human
cagagaccuuccagaaa

SEQ ID NO: 1394349 - RNA, 15 nt, Human
cagagacccagcgga

SEQ ID NO: 1394350 - RNA, 22 nt, Human
cagagacccagcggacacacgc

SEQ ID NO: 1394351 - RNA, 13 nt, Human
cagagacccagcg

SEQ ID NO: 1394352 - RNA, 12 nt, Human
cagagacccagc

SEQ ID NO: 1394353 - RNA, 21 nt, Human
cagagaccagggcuccagccc

SEQ ID NO: 1394354 - RNA, 15 nt, Human
cagagaccagggcuc

SEQ ID NO: 1394355 - RNA, 13 nt, Human
cagagaccagggc

SEQ ID NO: 1394356 - RNA, 16 nt, Human
cagagaugccucccug

SEQ ID NO: 1394357 - RNA, 23 nt, Human
cagagaugccucccugagcuaga

SEQ ID NO: 1394358 - RNA, 15 nt, Human
cagagaugccucccu

SEQ ID NO: 1394359 - RNA, 14 nt, Human
cagagaugccuccc

SEQ ID NO: 1394360 - RNA, 23 nt, Human
cagagagugagagacauuaacuc

SEQ ID NO: 1394361 - RNA, 21 nt, Human
cagagaugcaccaccaagcca

SEQ ID NO: 1394362 - RNA, 20 nt, Human
cagagaugcaccaccaagcc

SEQ ID NO: 1394363 - RNA, 23 nt, Human
cagagauccaaaagaagccccca

SEQ ID NO: 1394364 - RNA, 21 nt, Human
cagagauccaaaagaagcccc

SEQ ID NO: 1394365 - RNA, 20 nt, Human
cagagauccaaaagaagccc

SEQ ID NO: 1394366 - RNA, 19 nt, Human
cagagauccaaaagaagcc

SEQ ID NO: 1394367 - RNA, 16 nt, Human
cagagauaaagaccuu

SEQ ID NO: 1394368 - RNA, 19 nt, Human
cagagcaccugcugucugg

SEQ ID NO: 1394369 - RNA, 18 nt, Human
cagagcaccugcugucug

SEQ ID NO: 1394370 - RNA, 16 nt, Human
cagagcaccugcuguc

SEQ ID NO: 1394371 - RNA, 24 nt, Human
cagagauuggguuuuuggacuucu

SEQ ID NO: 1394372 - RNA, 16 nt, Human
cagagcaaaauaauuu

SEQ ID NO: 1394373 - RNA, 14 nt, Human
cagagcaaaauaau

SEQ ID NO: 1394374 - RNA, 16 nt, Human
cagagauucugaacua

SEQ ID NO: 1394375 - RNA, 17 nt, Human
cagagcaagaccccauc

SEQ ID NO: 1394376 - RNA, 17 nt, Human
cagagacaugcagagau

SEQ ID NO: 1394377 - RNA, 16 nt, Human
cagagacaugcagaga

SEQ ID NO: 1394378 - RNA, 14 nt, Human
cagagacaugcaga

SEQ ID NO: 1394379 - RNA, 23 nt, Human
cagagacaucagcccuugggggu

SEQ ID NO: 1394380 - RNA, 17 nt, Human
cagagacaucagcccuu

SEQ ID NO: 1394381 - RNA, 23 nt, Human
cagagacauacuugaagggccag

SEQ ID NO: 1394382 - RNA, 21 nt, Human
cagagacauacuugaagggcc

SEQ ID NO: 1394383 - RNA, 20 nt, Human
cagagacauacuugaagggc

SEQ ID NO: 1394384 - RNA, 19 nt, Human
cagagacauacuugaaggg

SEQ ID NO: 1394385 - RNA, 17 nt, Human
cagagacauacuugaag

SEQ ID NO: 1394386 - RNA, 16 nt, Human
cagagacauacuugaa

SEQ ID NO: 1394387 - RNA, 15 nt, Human
cagagacauacuuga

SEQ ID NO: 1394388 - RNA, 12 nt, Human
cagagaccaggg

SEQ ID NO: 1394389 - RNA, 18 nt, Human
cagagacaugcagagauu

SEQ ID NO: 1394390 - RNA, 23 nt, Human
cagagaccaagauggcccauccu

SEQ ID NO: 1394391 - RNA, 23 nt, Human
cagagaauuucuaccauuucaga

SEQ ID NO: 1394392 - RNA, 22 nt, Human
cagagaauuucuaccauuucag

SEQ ID NO: 1394393 - RNA, 16 nt, Human
cagagaauuucuacca

SEQ ID NO: 1394394 - RNA, 15 nt, Human
cagagaauuucuacc

SEQ ID NO: 1394395 - RNA, 13 nt, Human
cagagaauuucua

SEQ ID NO: 1394396 - RNA, 19 nt, Human
cagagaagucacagggcag

SEQ ID NO: 1394397 - RNA, 20 nt, Human
cagagaagucacagggcagu

SEQ ID NO: 1394398 - RNA, 18 nt, Human
cagagaagucacagggca

SEQ ID NO: 1394399 - RNA, 16 nt, Human
cagagaagucacaggg

SEQ ID NO: 1394400 - RNA, 13 nt, Human
cagagaagucaca

SEQ ID NO: 1394401 - RNA, 23 nt, Human
cagagaagccuucaagcucugag

SEQ ID NO: 1394402 - RNA, 22 nt, Human
cagagaagccuucaagcucuga

SEQ ID NO: 1394403 - RNA, 21 nt, Human
cagagaagccuucaagcucug

SEQ ID NO: 1394404 - RNA, 20 nt, Human
cagagaagccuucaagcucu

SEQ ID NO: 1394405 - RNA, 19 nt, Human
cagagaagccuucaagcuc

SEQ ID NO: 1394406 - RNA, 18 nt, Human
cagagaagccuucaagcu

SEQ ID NO: 1394407 - RNA, 17 nt, Human
cagagaagccuucaagc

SEQ ID NO: 1394408 - RNA, 16 nt, Human
cagagaagccuucaag

SEQ ID NO: 1394409 - RNA, 15 nt, Human
cagagaagccuucaa

SEQ ID NO: 1394410 - RNA, 14 nt, Human
cagagaagccuuca

SEQ ID NO: 1394411 - RNA, 13 nt, Human
cagagaagccuuc

SEQ ID NO: 1394412 - RNA, 12 nt, Human
cagagaagccuu

SEQ ID NO: 1394413 - RNA, 11 nt, Human
cagagaagccu

SEQ ID NO: 1394414 - RNA, 22 nt, Human
cagagaagccaucaccucagau

SEQ ID NO: 1394415 - RNA, 21 nt, Human
cagagaagccaucaccucaga

SEQ ID NO: 1394416 - RNA, 19 nt, Human
cagagaagccaucaccuca

SEQ ID NO: 1394417 - RNA, 18 nt, Human
cagagaagccaucaccuc

SEQ ID NO: 1394418 - RNA, 14 nt, Human
cagagaagccauca

SEQ ID NO: 1394419 - RNA, 13 nt, Human
cagagaagccauc

SEQ ID NO: 1394420 - RNA, 12 nt, Human
cagagaagccau

SEQ ID NO: 1394421 - RNA, 21 nt, Human
cagagaagccagcuuguuuac

SEQ ID NO: 1394422 - RNA, 20 nt, Human
cagagaagccagcuuguuua

SEQ ID NO: 1394423 - RNA, 19 nt, Human
cagagaagccagcuuguuu

SEQ ID NO: 1394424 - RNA, 18 nt, Human
cagagaagccagcuuguu

SEQ ID NO: 1394425 - RNA, 22 nt, Human
cagagaacccagcccacccccg

SEQ ID NO: 1394426 - RNA, 11 nt, Human
cagagaaccca

SEQ ID NO: 1394427 - RNA, 14 nt, Human
cagagaaccaggcu

SEQ ID NO: 1394428 - RNA, 19 nt, Human
cagagaaaggggagcccac

SEQ ID NO: 1394429 - RNA, 16 nt, Human
cagagaacccagccca

SEQ ID NO: 1394430 - RNA, 13 nt, Human
cagagaagaaaga

SEQ ID NO: 1394431 - RNA, 17 nt, Human
cagagaagccagcuugu

SEQ ID NO: 1394432 - RNA, 16 nt, Human
cagagaagccagcuug

SEQ ID NO: 1394433 - RNA, 15 nt, Human
cagagaagccagcuu

SEQ ID NO: 1394434 - RNA, 14 nt, Human
cagagaagccagcu

SEQ ID NO: 1394435 - RNA, 13 nt, Human
cagagaagccagc

SEQ ID NO: 1394436 - RNA, 12 nt, Human
cagagaagccag

SEQ ID NO: 1394437 - RNA, 11 nt, Human
cagagaagcca

SEQ ID NO: 1394438 - RNA, 20 nt, Human
cagagaagccaaaagauugg

SEQ ID NO: 1394439 - RNA, 14 nt, Human
cagagaagaaagaa

SEQ ID NO: 1394440 - RNA, 18 nt, Human
cagagaagaaagaacgga

SEQ ID NO: 1394441 - RNA, 19 nt, Human
cagagaagaaagaacggaa

SEQ ID NO: 1394442 - RNA, 21 nt, Human
cagaggaaggggccagaggcu

SEQ ID NO: 1394443 - RNA, 20 nt, Human
cagaggaaggggccagaggc

SEQ ID NO: 1394444 - RNA, 19 nt, Human
cagaggaaggggccagagg

SEQ ID NO: 1394445 - RNA, 18 nt, Human
cagaggaaggggccagag

SEQ ID NO: 1394446 - RNA, 17 nt, Human
cagaggacacagagaag

SEQ ID NO: 1394447 - RNA, 15 nt, Human
cagaggacacagaga

SEQ ID NO: 1394448 - RNA, 20 nt, Human
cagaggagccaccaguucuc

SEQ ID NO: 1394449 - RNA, 19 nt, Human
cagaggagccaccaguucu

SEQ ID NO: 1394450 - RNA, 18 nt, Human
cagaggagccaccaguuc

SEQ ID NO: 1394451 - RNA, 16 nt, Human
cagaggaaggggccag

SEQ ID NO: 1394452 - RNA, 23 nt, Human
cagagccggggugggguggcugc

SEQ ID NO: 1394453 - RNA, 23 nt, Human
cagagcccugugaggcugggucc

SEQ ID NO: 1394454 - RNA, 20 nt, Human
cagagccccacccucagaug

SEQ ID NO: 1394455 - RNA, 20 nt, Human
cagagccuccuuucuggcuu

SEQ ID NO: 1394456 - RNA, 20 nt, Human
cagagccgugguccuuuggg

SEQ ID NO: 1394457 - RNA, 19 nt, Human
cagagccgugguccuuugg

SEQ ID NO: 1394458 - RNA, 22 nt, Human
cagagccggggugggguggcug

SEQ ID NO: 1394459 - RNA, 19 nt, Human
cagagcccaggcucggccu

SEQ ID NO: 1394460 - RNA, 23 nt, Human
cagagcccaggcucggccugccc

SEQ ID NO: 1394461 - RNA, 17 nt, Human
cagagcccaggcucggc

SEQ ID NO: 1394462 - RNA, 14 nt, Human
cagagcccaggcuc

SEQ ID NO: 1394463 - RNA, 13 nt, Human
cagagcccaggcu

SEQ ID NO: 1394464 - RNA, 14 nt, Human
cagagcccagcucc

SEQ ID NO: 1394465 - RNA, 13 nt, Human
cagagcccagcuc

SEQ ID NO: 1394466 - RNA, 11 nt, Human
cagagcccagc

SEQ ID NO: 1394467 - RNA, 19 nt, Human
cagagcccacuccaucugg

SEQ ID NO: 1394468 - RNA, 18 nt, Human
cagagcccacuccaucug

SEQ ID NO: 1394469 - RNA, 13 nt, Human
cagagcccacucc

SEQ ID NO: 1394470 - RNA, 13 nt, Human
cagagcacugcuc

SEQ ID NO: 1394471 - RNA, 21 nt, Human
cagagcaccugcugucugggu

SEQ ID NO: 1394472 - RNA, 15 nt, Human
cagagcacugcucca

SEQ ID NO: 1394473 - RNA, 21 nt, Human
cagagccaugucuucucccug

SEQ ID NO: 1394474 - RNA, 20 nt, Human
cagagccaugucuucucccu

SEQ ID NO: 1394475 - RNA, 18 nt, Human
cagagccaugucuucucc

SEQ ID NO: 1394476 - RNA, 23 nt, Human
cagagccaggggggugaggagcu

SEQ ID NO: 1394477 - RNA, 14 nt, Human
cagagccaggaaga

SEQ ID NO: 1394478 - RNA, 15 nt, Human
cagagccaggaagau

SEQ ID NO: 1394479 - RNA, 17 nt, Human
cagagccaggaagaucc

SEQ ID NO: 1394480 - RNA, 21 nt, Human
cagagccaggaagauccccca

SEQ ID NO: 1394481 - RNA, 23 nt, Human
cagagccaggagaagcucagcug

SEQ ID NO: 1394482 - RNA, 20 nt, Human
cagagccaggagaagcucag

SEQ ID NO: 1394483 - RNA, 17 nt, Human
cagagccaggagaagcu

SEQ ID NO: 1394484 - RNA, 16 nt, Human
cagagccaggagaagc

SEQ ID NO: 1394485 - RNA, 13 nt, Human
cagagccaggaga

SEQ ID NO: 1394486 - RNA, 12 nt, Human
cagagccaggag

SEQ ID NO: 1394487 - RNA, 23 nt, Human
cagagccaggaagaucccccaga

SEQ ID NO: 1394488 - RNA, 21 nt, Human
cagagccaaggggcuucaggu

SEQ ID NO: 1394489 - RNA, 20 nt, Human
cagagccaaggggcuucagg

SEQ ID NO: 1394490 - RNA, 13 nt, Human
cagagccaggaag

SEQ ID NO: 1394491 - RNA, 14 nt, Human
cagaugccuccuuc

SEQ ID NO: 1394492 - RNA, 17 nt, Human
cagaugccuccuuccuc

SEQ ID NO: 1394493 - RNA, 12 nt, Human
cagaugccuccu

SEQ ID NO: 1394494 - RNA, 17 nt, Human
cagaugccccuuucugg

SEQ ID NO: 1394495 - RNA, 15 nt, Human
cagaugccccuuucu

SEQ ID NO: 1394496 - RNA, 17 nt, Human
cagaugcagggcaguca

SEQ ID NO: 1394497 - RNA, 23 nt, Human
cagaugcuccaagauucuagaug

SEQ ID NO: 1394498 - RNA, 22 nt, Human
cagaugcuccaagauucuagau

SEQ ID NO: 1394499 - RNA, 21 nt, Human
cagaugcuccaagauucuaga

SEQ ID NO: 1394500 - RNA, 20 nt, Human
cagaugcuccaagauucuag

SEQ ID NO: 1394501 - RNA, 19 nt, Human
cagaugcuccaagauucua

SEQ ID NO: 1394502 - RNA, 18 nt, Human
cagaugcuccaagauucu

SEQ ID NO: 1394503 - RNA, 16 nt, Human
cagaugcuccaagauu

SEQ ID NO: 1394504 - RNA, 15 nt, Human
cagaugcuccaagau

SEQ ID NO: 1394505 - RNA, 14 nt, Human
cagaugcuccaaga

SEQ ID NO: 1394506 - RNA, 21 nt, Human
cagauggaaaauucauuuuuu

SEQ ID NO: 1394507 - RNA, 19 nt, Human
cagauggaaaauucauuuu

SEQ ID NO: 1394508 - RNA, 21 nt, Human
cagaugcuuuccugcacauua

SEQ ID NO: 1394509 - RNA, 14 nt, Human
cagaugcuuuccug

SEQ ID NO: 1394510 - RNA, 16 nt, Human
cagauggcauguguuu

SEQ ID NO: 1394511 - RNA, 16 nt, Human
cagauggcagcuuuua

SEQ ID NO: 1394512 - RNA, 15 nt, Human
cagauggcagcuuuu

SEQ ID NO: 1394513 - RNA, 13 nt, Human
cagauggcagcuu

SEQ ID NO: 1394514 - RNA, 12 nt, Human
cagauggcacuu

SEQ ID NO: 1394515 - RNA, 19 nt, Human
cagauggcagcuuuuaaaa

SEQ ID NO: 1394516 - RNA, 22 nt, Human
cagauggcauguguuuacuuua

SEQ ID NO: 1394517 - RNA, 16 nt, Human
cagauggccagccccu

SEQ ID NO: 1394518 - RNA, 17 nt, Human
cagaugugaaccauuaa

SEQ ID NO: 1394519 - RNA, 14 nt, Human
cagaugugaaccau

SEQ ID NO: 1394520 - RNA, 17 nt, Human
cagauguaggagggacu

SEQ ID NO: 1394521 - RNA, 15 nt, Human
cagauguaggaggga

SEQ ID NO: 1394522 - RNA, 24 nt, Human
cagauguaggagggacugucgcug

SEQ ID NO: 1394523 - RNA, 18 nt, Human
cagauguaggagggacug

SEQ ID NO: 1394524 - RNA, 17 nt, Human
cagauucccagagcaaa

SEQ ID NO: 1394525 - RNA, 14 nt, Human
cagauucccagagc

SEQ ID NO: 1394526 - RNA, 21 nt, Human
cagauucagaaaugaggccau

SEQ ID NO: 1394527 - RNA, 17 nt, Human
cagauucagaaaugagg

SEQ ID NO: 1394528 - RNA, 15 nt, Human
cagauucagaaauga

SEQ ID NO: 1394529 - RNA, 12 nt, Human
cagauuccuucc

SEQ ID NO: 1394530 - RNA, 21 nt, Human
cagauucccagagcaaaauaa

SEQ ID NO: 1394531 - RNA, 19 nt, Human
cagauucccagagcaaaau

SEQ ID NO: 1394532 - RNA, 18 nt, Human
cagauucccagagcaaaa

SEQ ID NO: 1394533 - RNA, 13 nt, Human
cagauuccuuccc

SEQ ID NO: 1394534 - RNA, 14 nt, Human
cagauuccuuccca

SEQ ID NO: 1394535 - RNA, 15 nt, Human
cagauuuucagcaaa

SEQ ID NO: 1394536 - RNA, 13 nt, Human
cagauuuucagca

SEQ ID NO: 1394537 - RNA, 22 nt, Human
cagauuuucagcaaacucuuuu

SEQ ID NO: 1394538 - RNA, 19 nt, Human
cagauuuucagcaaacucu

SEQ ID NO: 1394539 - RNA, 16 nt, Human
cagauuuugauagcaa

SEQ ID NO: 1394540 - RNA, 18 nt, Human
cagauuuugauagcaaag

SEQ ID NO: 1394541 - RNA, 19 nt, Human
cagauuuugauagcaaagc

SEQ ID NO: 1394542 - RNA, 20 nt, Human
cagauuuugauagcaaagcg

SEQ ID NO: 1394543 - RNA, 15 nt, Human
cagauuuuccugaaa

SEQ ID NO: 1394544 - RNA, 14 nt, Human
cagauuuuccugaa

SEQ ID NO: 1394545 - RNA, 23 nt, Human
cagauuuuguuggcauagcucug

SEQ ID NO: 1394546 - RNA, 16 nt, Human
cagauuuuuacacaug

SEQ ID NO: 1394547 - RNA, 23 nt, Human
cagcaacuuguccuagcacagau

SEQ ID NO: 1394548 - RNA, 22 nt, Human
cagcaacuuguccuagcacaga

SEQ ID NO: 1394549 - RNA, 17 nt, Human
cagcaacuuguccuagc

SEQ ID NO: 1394550 - RNA, 23 nt, Human
cagcaacuaucagacuaagccag

SEQ ID NO: 1394551 - RNA, 21 nt, Human
cagcaacuaucagacuaagcc

SEQ ID NO: 1394552 - RNA, 20 nt, Human
cagcaacuaucagacuaagc

SEQ ID NO: 1394553 - RNA, 20 nt, Human
cagcaacggcacagcuaauu

SEQ ID NO: 1394554 - RNA, 17 nt, Human
cagcaaccccaggcuga

SEQ ID NO: 1394555 - RNA, 16 nt, Human
cagcaaccccaggcug

SEQ ID NO: 1394556 - RNA, 13 nt, Human
cagcaaccccagg

SEQ ID NO: 1394557 - RNA, 12 nt, Human
cagcaaccccag

SEQ ID NO: 1394558 - RNA, 20 nt, Human
cagcaaacucuuuucccacu

SEQ ID NO: 1394559 - RNA, 16 nt, Human
cagcaaaccggggccu

SEQ ID NO: 1394560 - RNA, 14 nt, Human
cagcaaaccggggc

SEQ ID NO: 1394561 - RNA, 14 nt, Human
cagcaaacaggugc

SEQ ID NO: 1394562 - RNA, 22 nt, Human
cagcaaagcccccagagcccag

SEQ ID NO: 1394563 - RNA, 18 nt, Human
cagcaaagcccccagagc

SEQ ID NO: 1394564 - RNA, 17 nt, Human
cagcaaagcccccagag

SEQ ID NO: 1394565 - RNA, 15 nt, Human
cagcaaagcccccag

SEQ ID NO: 1394566 - RNA, 14 nt, Human
cagcaaagccccca

SEQ ID NO: 1394567 - RNA, 13 nt, Human
cagcaaagccccc

SEQ ID NO: 1394568 - RNA, 23 nt, Human
cagcaaagcccccagagcccagg

SEQ ID NO: 1394569 - RNA, 14 nt, Human
cagcaaagugguuc

SEQ ID NO: 1394570 - RNA, 22 nt, Human
cagcaaaugcaaaaacucuuug

SEQ ID NO: 1394571 - RNA, 13 nt, Human
cagcaaaugcaaa

SEQ ID NO: 1394572 - RNA, 14 nt, Human
cagcaacaauaaau

SEQ ID NO: 1394573 - RNA, 19 nt, Human
cagcaacaauaaauagaca

SEQ ID NO: 1394574 - RNA, 20 nt, Human
cagcaacaauaaauagacac

SEQ ID NO: 1394575 - RNA, 22 nt, Human
cagcaaggcccgagcagcugag

SEQ ID NO: 1394576 - RNA, 23 nt, Human
cagcaaggcccgagcagcugagc

SEQ ID NO: 1394577 - RNA, 21 nt, Human
cagcaaggcccgagcagcuga

SEQ ID NO: 1394578 - RNA, 20 nt, Human
cagcaaggcccgagcagcug

SEQ ID NO: 1394579 - RNA, 19 nt, Human
cagcaaggcccgagcagcu

SEQ ID NO: 1394580 - RNA, 16 nt, Human
cagcaaggcccgagca

SEQ ID NO: 1394581 - RNA, 15 nt, Human
cagcaaggcccgagc

SEQ ID NO: 1394582 - RNA, 14 nt, Human
cagcaaggcccgag

SEQ ID NO: 1394583 - RNA, 20 nt, Human
cagcaagacuucucuuugcc

SEQ ID NO: 1394584 - RNA, 23 nt, Human
cagcaagacuucucuuugccuca

SEQ ID NO: 1394585 - RNA, 17 nt, Human
cagcaaggagauuuaca

SEQ ID NO: 1394586 - RNA, 18 nt, Human
cagcaaggagauuuacaa

SEQ ID NO: 1394587 - RNA, 15 nt, Human
cagcaagucaggguu

SEQ ID NO: 1394588 - RNA, 17 nt, Human
cagcaauagagacggga

SEQ ID NO: 1394589 - RNA, 22 nt, Human
cagcaauaaagcagcguuucua

SEQ ID NO: 1394590 - RNA, 15 nt, Human
cagcaauagagacgg

SEQ ID NO: 1394591 - RNA, 22 nt, Human
cagcaauuacaacggagucaaa

SEQ ID NO: 1394592 - RNA, 13 nt, Human
cagcaauaaagca

SEQ ID NO: 1394593 - RNA, 21 nt, Human
cagcaauaaagcagcguuucu

SEQ ID NO: 1394594 - RNA, 23 nt, Human
cagcaauuucuaauuuuuaagaa

SEQ ID NO: 1394595 - RNA, 14 nt, Human
cagcaauuuaaaug

SEQ ID NO: 1394596 - RNA, 15 nt, Human
cagcaauuuaaaugu

SEQ ID NO: 1394597 - RNA, 18 nt, Human
cagcacacagggcaguga

SEQ ID NO: 1394598 - RNA, 20 nt, Human
cagcacugucccuugccuca

SEQ ID NO: 1394599 - RNA, 18 nt, Human
cagcacugucccuugccu

SEQ ID NO: 1394600 - RNA, 16 nt, Human
cagcacugucccuugc

SEQ ID NO: 1394601 - RNA, 14 nt, Human
cagcacugucccuu

SEQ ID NO: 1394602 - RNA, 13 nt, Human
cagcacugucccu

SEQ ID NO: 1394603 - RNA, 12 nt, Human
cagcacuguccc

SEQ ID NO: 1394604 - RNA, 15 nt, Human
cagcacacagggcag

SEQ ID NO: 1394605 - RNA, 14 nt, Human
cagcacacagggca

SEQ ID NO: 1394606 - RNA, 13 nt, Human
cagcacacagggc

SEQ ID NO: 1394607 - RNA, 16 nt, Human
cagcacaaggccaucu

SEQ ID NO: 1394608 - RNA, 13 nt, Human
cagcacaaggcca

SEQ ID NO: 1394609 - RNA, 13 nt, Human
cagcaauuucuaa

SEQ ID NO: 1394610 - RNA, 20 nt, Human
cagcacaaauuaguuauaua

SEQ ID NO: 1394611 - RNA, 16 nt, Human
cagcaauuuaaauguu

SEQ ID NO: 1394612 - RNA, 23 nt, Human
cagcagacucagcucugacauuc

SEQ ID NO: 1394613 - RNA, 21 nt, Human
cagcagacucagcucugacau

SEQ ID NO: 1394614 - RNA, 18 nt, Human
cagcagacucagcucuga

SEQ ID NO: 1394615 - RNA, 17 nt, Human
cagcagacucagcucug

SEQ ID NO: 1394616 - RNA, 15 nt, Human
cagcagacucagcuc

SEQ ID NO: 1394617 - RNA, 21 nt, Human
cagcagacagagccaggagaa

SEQ ID NO: 1394618 - RNA, 20 nt, Human
cagcagacagagccaggaga

SEQ ID NO: 1394619 - RNA, 18 nt, Human
cagcagacagagccagga

SEQ ID NO: 1394620 - RNA, 17 nt, Human
cagcagacagagccagg

SEQ ID NO: 1394621 - RNA, 16 nt, Human
cagcagacagagccag

SEQ ID NO: 1394622 - RNA, 15 nt, Human
cagcagacagagcca

SEQ ID NO: 1394623 - RNA, 14 nt, Human
cagcagacagagcc

SEQ ID NO: 1394624 - RNA, 12 nt, Human
cagcagacagag

SEQ ID NO: 1394625 - RNA, 19 nt, Human
cagcagaaaugccuuaccc

SEQ ID NO: 1394626 - RNA, 22 nt, Human
cagcagaaaugccuuacccuca

SEQ ID NO: 1394627 - RNA, 17 nt, Human
cagcacuuguccagcug

SEQ ID NO: 1394628 - RNA, 15 nt, Human
cagcacuuguccagc

SEQ ID NO: 1394629 - RNA, 23 nt, Human
cagcacuuggggguucaggcccg

SEQ ID NO: 1394630 - RNA, 16 nt, Human
cagcacuuggcccuuc

SEQ ID NO: 1394631 - RNA, 15 nt, Human
cagcacuuggcccuu

SEQ ID NO: 1394632 - RNA, 14 nt, Human
cagcacuuggcccu

SEQ ID NO: 1394633 - RNA, 12 nt, Human
cagcacuuccau

SEQ ID NO: 1394634 - RNA, 13 nt, Human
cagcacuuccaug

SEQ ID NO: 1394635 - RNA, 13 nt, Human
cagcacuuauuua

SEQ ID NO: 1394636 - RNA, 19 nt, Human
cagcacuuguccagcugag

SEQ ID NO: 1394637 - RNA, 18 nt, Human
cagcacuuguccagcuga

SEQ ID NO: 1394638 - RNA, 14 nt, Human
cagcacuuuagaau

SEQ ID NO: 1394639 - RNA, 19 nt, Human
cagcacuuggcccuucuac

SEQ ID NO: 1394640 - RNA, 22 nt, Human
cagcacuuuagaauaugccuug

SEQ ID NO: 1394641 - RNA, 15 nt, Human
cagcagaaaugccuu

SEQ ID NO: 1394642 - RNA, 17 nt, Human
cagcagaaaugccuuac

SEQ ID NO: 1394643 - RNA, 23 nt, Human
cagcagcccccagcucccaccuc

SEQ ID NO: 1394644 - RNA, 20 nt, Human
cagcagcccccagcucccac

SEQ ID NO: 1394645 - RNA, 13 nt, Human
cagcagcccccag

SEQ ID NO: 1394646 - RNA, 12 nt, Human
cagcagccccca

SEQ ID NO: 1394647 - RNA, 18 nt, Human
cagcagccccacaccagg

SEQ ID NO: 1394648 - RNA, 16 nt, Human
cagcagccccacacca

SEQ ID NO: 1394649 - RNA, 15 nt, Human
cagcagccccacacc

SEQ ID NO: 1394650 - RNA, 23 nt, Human
cagcagccagcccugccuggagg

SEQ ID NO: 1394651 - RNA, 22 nt, Human
cagcagccagcccugccuggag

SEQ ID NO: 1394652 - RNA, 21 nt, Human
cagcagccagcccugccugga

SEQ ID NO: 1394653 - RNA, 20 nt, Human
cagcagccagcccugccugg

SEQ ID NO: 1394654 - RNA, 19 nt, Human
cagcagccagcccugccug

SEQ ID NO: 1394655 - RNA, 23 nt, Human
cagcagccucgccccuggcagag

SEQ ID NO: 1394656 - RNA, 19 nt, Human
cagcagccucgccccuggc

SEQ ID NO: 1394657 - RNA, 18 nt, Human
cagcagccucgccccugg

SEQ ID NO: 1394658 - RNA, 18 nt, Human
cagcagccagcccugccu

SEQ ID NO: 1394659 - RNA, 17 nt, Human
cagcagccagcccugcc

SEQ ID NO: 1394660 - RNA, 16 nt, Human
cagcagccagcccugc

SEQ ID NO: 1394661 - RNA, 15 nt, Human
cagcagccagcccug

SEQ ID NO: 1394662 - RNA, 14 nt, Human
cagcagccagcccu

SEQ ID NO: 1394663 - RNA, 13 nt, Human
cagcagccagccc

SEQ ID NO: 1394664 - RNA, 12 nt, Human
cagcagccagcc

SEQ ID NO: 1394665 - RNA, 11 nt, Human
cagcagccagc

SEQ ID NO: 1394666 - RNA, 10 nt, Human
cagcagccag

SEQ ID NO: 1394667 - RNA, 22 nt, Human
cagcagcaucucuaccuucucc

SEQ ID NO: 1394668 - RNA, 12 nt, Human
cagcagcaucuc

SEQ ID NO: 1394669 - RNA, 22 nt, Human
cagcagcaccugcccuaccugc

SEQ ID NO: 1394670 - RNA, 23 nt, Human
cagcagagagguuugcaguccca

SEQ ID NO: 1394671 - RNA, 16 nt, Human
cagccacccugaguug

SEQ ID NO: 1394672 - RNA, 18 nt, Human
cagccacgaggugcaaca

SEQ ID NO: 1394673 - RNA, 21 nt, Human
cagccaccgaagccgccugug

SEQ ID NO: 1394674 - RNA, 14 nt, Human
cagccacccugagu

SEQ ID NO: 1394675 - RNA, 22 nt, Human
cagccacccugaggagucugag

SEQ ID NO: 1394676 - RNA, 21 nt, Human
cagccacccugaggagucuga

SEQ ID NO: 1394677 - RNA, 20 nt, Human
cagccacccugaggagucug

SEQ ID NO: 1394678 - RNA, 19 nt, Human
cagccacccugaggagucu

SEQ ID NO: 1394679 - RNA, 18 nt, Human
cagccacccugaggaguc

SEQ ID NO: 1394680 - RNA, 16 nt, Human
cagccacccugaggag

SEQ ID NO: 1394681 - RNA, 15 nt, Human
cagccacccugagga

SEQ ID NO: 1394682 - RNA, 14 nt, Human
cagccacccugagg

SEQ ID NO: 1394683 - RNA, 12 nt, Human
cagccacccuga

SEQ ID NO: 1394684 - RNA, 21 nt, Human
cagccacacuucucaggacac

SEQ ID NO: 1394685 - RNA, 20 nt, Human
cagccacacuucucaggaca

SEQ ID NO: 1394686 - RNA, 19 nt, Human
cagccacacuucucaggac

SEQ ID NO: 1394687 - RNA, 18 nt, Human
cagccacacuucucagga

SEQ ID NO: 1394688 - RNA, 15 nt, Human
cagccaccccaugcu

SEQ ID NO: 1394689 - RNA, 18 nt, Human
cagccaccccaugcuggc

SEQ ID NO: 1394690 - RNA, 19 nt, Human
cagccaccccaugcuggcc

SEQ ID NO: 1394691 - RNA, 20 nt, Human
cagccaccccaugcuggccu

SEQ ID NO: 1394692 - RNA, 22 nt, Human
cagccaagucgguuaguggaag

SEQ ID NO: 1394693 - RNA, 23 nt, Human
cagccaagguuuuauaaggcuga

SEQ ID NO: 1394694 - RNA, 14 nt, Human
cagccaagcucugc

SEQ ID NO: 1394695 - RNA, 18 nt, Human
cagccaauuauguuaaac

SEQ ID NO: 1394696 - RNA, 17 nt, Human
cagccaauuauguuaaa

SEQ ID NO: 1394697 - RNA, 17 nt, Human
cagccacacuucucagg

SEQ ID NO: 1394698 - RNA, 16 nt, Human
cagccacacuucucag

SEQ ID NO: 1394699 - RNA, 14 nt, Human
cagccacacuucuc

SEQ ID NO: 1394700 - RNA, 13 nt, Human
cagccaucaaaau

SEQ ID NO: 1394701 - RNA, 21 nt, Human
cagccagugcccugagccagg

SEQ ID NO: 1394702 - RNA, 19 nt, Human
cagccagugcccugagcca

SEQ ID NO: 1394703 - RNA, 18 nt, Human
cagccagugcccugagcc

SEQ ID NO: 1394704 - RNA, 17 nt, Human
cagccagugcccugagc

SEQ ID NO: 1394705 - RNA, 22 nt, Human
cagccagucccguuucauuuag

SEQ ID NO: 1394706 - RNA, 22 nt, Human
cagccaguaaaugggggugcau

SEQ ID NO: 1394707 - RNA, 21 nt, Human
cagccacggggacucagcccu

SEQ ID NO: 1394708 - RNA, 22 nt, Human
cagcccauggagauugaccugg

SEQ ID NO: 1394709 - RNA, 21 nt, Human
cagcccauggagauugaccug

SEQ ID NO: 1394710 - RNA, 13 nt, Human
cagcccauggaga

SEQ ID NO: 1394711 - RNA, 16 nt, Human
cagccccacaccaggg

SEQ ID NO: 1394712 - RNA, 14 nt, Human
cagccccacaccag

SEQ ID NO: 1394713 - RNA, 13 nt, Human
cagccccacacca

SEQ ID NO: 1394714 - RNA, 21 nt, Human
cagcccagggcuccugcacuu

SEQ ID NO: 1394715 - RNA, 19 nt, Human
cagcccagggcuccugcac

SEQ ID NO: 1394716 - RNA, 18 nt, Human
cagcccagggcuccugca

SEQ ID NO: 1394717 - RNA, 17 nt, Human
cagcccagggcuccugc

SEQ ID NO: 1394718 - RNA, 16 nt, Human
cagcccagggcuccug

SEQ ID NO: 1394719 - RNA, 23 nt, Human
cagcccaggaagucucaucuggg

SEQ ID NO: 1394720 - RNA, 22 nt, Human
cagcccaggaagucucaucugg

SEQ ID NO: 1394721 - RNA, 20 nt, Human
cagcccaggaagucucaucu

SEQ ID NO: 1394722 - RNA, 12 nt, Human
cagcccaggaag

SEQ ID NO: 1394723 - RNA, 16 nt, Human
cagcccagccccacuc

SEQ ID NO: 1394724 - RNA, 20 nt, Human
cagcccagcccgcccacugg

SEQ ID NO: 1394725 - RNA, 15 nt, Human
cagcccagccagcgu

SEQ ID NO: 1394726 - RNA, 14 nt, Human
cagcccagccagcg

SEQ ID NO: 1394727 - RNA, 13 nt, Human
cagcccagccagc

SEQ ID NO: 1394728 - RNA, 12 nt, Human
cagcccagccag

SEQ ID NO: 1394729 - RNA, 22 nt, Human
cagcccagagacauacuugaag

SEQ ID NO: 1394730 - RNA, 21 nt, Human
cagcccagagacauacuugaa

SEQ ID NO: 1394731 - RNA, 13 nt, Human
cagcccagagaca

SEQ ID NO: 1394732 - RNA, 12 nt, Human
cagcccagagac

SEQ ID NO: 1394733 - RNA, 11 nt, Human
cagcccagaga

SEQ ID NO: 1394734 - RNA, 22 nt, Human
cagcccacccccggcagcagcc

SEQ ID NO: 1394735 - RNA, 20 nt, Human
cagcccacccccggcagcag

SEQ ID NO: 1394736 - RNA, 22 nt, Human
cagccauuggcuauuuaaaacu

SEQ ID NO: 1394737 - RNA, 12 nt, Human
cagcccaccccc

SEQ ID NO: 1394738 - RNA, 18 nt, Human
cagcccacccccggcagc

SEQ ID NO: 1394739 - RNA, 17 nt, Human
cagcccacccccggcag

SEQ ID NO: 1394740 - RNA, 16 nt, Human
cagcccacccccggca

SEQ ID NO: 1394741 - RNA, 20 nt, Human
cagccauuggcuauuuaaaa

SEQ ID NO: 1394742 - RNA, 19 nt, Human
cagccauuggcuauuuaaa

SEQ ID NO: 1394743 - RNA, 21 nt, Human
cagccaucaagagacugaguc

SEQ ID NO: 1394744 - RNA, 18 nt, Human
cagccaucaagagacuga

SEQ ID NO: 1394745 - RNA, 17 nt, Human
cagccaucaaaaugcuu

SEQ ID NO: 1394746 - RNA, 16 nt, Human
cagccaucaaaaugcu

SEQ ID NO: 1394747 - RNA, 23 nt, Human
cagccauccagggggcaagagga

SEQ ID NO: 1394748 - RNA, 21 nt, Human
cagcagggcuacccugagcug

SEQ ID NO: 1394749 - RNA, 19 nt, Human
cagcagggcuacccugagc

SEQ ID NO: 1394750 - RNA, 11 nt, Human
cagcagggcua

SEQ ID NO: 1394751 - RNA, 22 nt, Human
cagcagggacuguaaacacaga

SEQ ID NO: 1394752 - RNA, 21 nt, Human
cagcagggacuguaaacacag

SEQ ID NO: 1394753 - RNA, 18 nt, Human
cagcaggaggggggaggg

SEQ ID NO: 1394754 - RNA, 15 nt, Human
cagcaggagggggga

SEQ ID NO: 1394755 - RNA, 14 nt, Human
cagcaggacugucc

SEQ ID NO: 1394756 - RNA, 21 nt, Human
cagcagcuuuagaaucccagc

SEQ ID NO: 1394757 - RNA, 21 nt, Human
cagcaggccagguccagagag

SEQ ID NO: 1394758 - RNA, 23 nt, Human
cagcaggccagguccagagagac

SEQ ID NO: 1394759 - RNA, 21 nt, Human
cagcagccuggggcuggccuc

SEQ ID NO: 1394760 - RNA, 20 nt, Human
cagcagccuggggcuggccu

SEQ ID NO: 1394761 - RNA, 22 nt, Human
cagcagccucgccccuggcaga

SEQ ID NO: 1394762 - RNA, 21 nt, Human
cagcagccucgccccuggcag

SEQ ID NO: 1394763 - RNA, 18 nt, Human
cagcaugucuauucagcu

SEQ ID NO: 1394764 - RNA, 22 nt, Human
cagcauguacggauuuucaguu

SEQ ID NO: 1394765 - RNA, 21 nt, Human
cagcauguacggauuuucagu

SEQ ID NO: 1394766 - RNA, 20 nt, Human
cagcauguacggauuuucag

SEQ ID NO: 1394767 - RNA, 22 nt, Human
cagcauggcauccaagacucuu

SEQ ID NO: 1394768 - RNA, 15 nt, Human
cagcauggcauccaa

SEQ ID NO: 1394769 - RNA, 16 nt, Human
cagcaugcaauacaua

SEQ ID NO: 1394770 - RNA, 17 nt, Human
cagcaugaauuuguaau

SEQ ID NO: 1394771 - RNA, 18 nt, Human
cagcaugaauuuguaaug

SEQ ID NO: 1394772 - RNA, 23 nt, Human
cagcauucccagguaggccaagg

SEQ ID NO: 1394773 - RNA, 20 nt, Human
cagcauucccagguaggcca

SEQ ID NO: 1394774 - RNA, 18 nt, Human
cagcauucccagguaggc

SEQ ID NO: 1394775 - RNA, 21 nt, Human
cagcauuccagccccucuggu

SEQ ID NO: 1394776 - RNA, 20 nt, Human
cagcauuccagccccucugg

SEQ ID NO: 1394777 - RNA, 16 nt, Human
cagcauuccagccccu

SEQ ID NO: 1394778 - RNA, 14 nt, Human
cagcauuccagccc

SEQ ID NO: 1394779 - RNA, 17 nt, Human
cagcauucccagguagg

SEQ ID NO: 1394780 - RNA, 14 nt, Human
cagcauucccaggu

SEQ ID NO: 1394781 - RNA, 13 nt, Human
cagcauucccagg

SEQ ID NO: 1394782 - RNA, 12 nt, Human
cagcauucccag

SEQ ID NO: 1394783 - RNA, 14 nt, Human
cagcaugaauuugu

SEQ ID NO: 1394784 - RNA, 12 nt, Human
cagcaugaauuu

SEQ ID NO: 1394785 - RNA, 22 nt, Human
cagcaucugggccuuggccugg

SEQ ID NO: 1394786 - RNA, 20 nt, Human
cagcaucugggccuuggccu

SEQ ID NO: 1394787 - RNA, 19 nt, Human
cagcaucugggccuuggcc

SEQ ID NO: 1394788 - RNA, 16 nt, Human
cagcaucugggccuug

SEQ ID NO: 1394789 - RNA, 15 nt, Human
cagcaucugggccuu

SEQ ID NO: 1394790 - RNA, 14 nt, Human
cagcaucugggccu

SEQ ID NO: 1394791 - RNA, 13 nt, Human
cagcaucugggcc

SEQ ID NO: 1394792 - RNA, 21 nt, Human
cagcaucucuaccuucucccc

SEQ ID NO: 1394793 - RNA, 23 nt, Human
cagcaucucuaccuucuccccag

SEQ ID NO: 1394794 - RNA, 20 nt, Human
cagcaucucuaccuucuccc

SEQ ID NO: 1394795 - RNA, 17 nt, Human
cagcaucucuaccuucu

SEQ ID NO: 1394796 - RNA, 22 nt, Human
cagcaucuccaagcagcuuaga

SEQ ID NO: 1394797 - RNA, 21 nt, Human
cagcaucuccaagcagcuuag

SEQ ID NO: 1394798 - RNA, 18 nt, Human
cagcaucuccaagcagcu

SEQ ID NO: 1394799 - RNA, 17 nt, Human
cagcaucuccaagcagc

SEQ ID NO: 1394800 - RNA, 16 nt, Human
cagcaucuccaagcag

SEQ ID NO: 1394801 - RNA, 23 nt, Human
cagcauccgcaggugcugguccc

SEQ ID NO: 1394802 - RNA, 22 nt, Human
cagcaucggacaagacccccag

SEQ ID NO: 1394803 - RNA, 21 nt, Human
cagcaucggacaagaccccca

SEQ ID NO: 1394804 - RNA, 20 nt, Human
cagcagggguuggggaaaca

SEQ ID NO: 1394805 - RNA, 20 nt, Human
cagcauccgcaggugcuggu

SEQ ID NO: 1394806 - RNA, 16 nt, Human
cagcauuguauaugug

SEQ ID NO: 1394807 - RNA, 15 nt, Human
cagcauuucccuucc

SEQ ID NO: 1394808 - RNA, 23 nt, Human
cagccaacacgcaccugccucag

SEQ ID NO: 1394809 - RNA, 22 nt, Human
cagccaacacgcaccugccuca

SEQ ID NO: 1394810 - RNA, 20 nt, Human
cagccaacacgcaccugccu

SEQ ID NO: 1394811 - RNA, 19 nt, Human
cagccaacacgcaccugcc

SEQ ID NO: 1394812 - RNA, 14 nt, Human
cagccaaauuuaaa

SEQ ID NO: 1394813 - RNA, 17 nt, Human
cagccaacuagccccug

SEQ ID NO: 1394814 - RNA, 16 nt, Human
cagccaacuagccccu

SEQ ID NO: 1394815 - RNA, 14 nt, Human
cagccaacuagccc

SEQ ID NO: 1394816 - RNA, 22 nt, Human
cagccaaauuuaaaacuguugg

SEQ ID NO: 1394817 - RNA, 22 nt, Human
cagccaacuagccccuggggug

SEQ ID NO: 1394818 - RNA, 20 nt, Human
cagccaacuagccccugggg

SEQ ID NO: 1394819 - RNA, 19 nt, Human
cagccaacuagccccuggg

SEQ ID NO: 1394820 - RNA, 18 nt, Human
cagccaacuagccccugg

SEQ ID NO: 1394821 - RNA, 18 nt, Human
cagccaacuauggccugu

SEQ ID NO: 1394822 - RNA, 19 nt, Human
cagcccucacacacccugu

SEQ ID NO: 1394823 - RNA, 17 nt, Human
cagcccucacacacccu

SEQ ID NO: 1394824 - RNA, 16 nt, Human
cagcccucacacaccc

SEQ ID NO: 1394825 - RNA, 18 nt, Human
cagcccuaggguggagag

SEQ ID NO: 1394826 - RNA, 17 nt, Human
cagcccucaucccgagc

SEQ ID NO: 1394827 - RNA, 14 nt, Human
cagcccucaucccg

SEQ ID NO: 1394828 - RNA, 13 nt, Human
cagcccucauccc

SEQ ID NO: 1394829 - RNA, 13 nt, Human
cagcccucagaau

SEQ ID NO: 1394830 - RNA, 14 nt, Human
cagcccuaaacauc

SEQ ID NO: 1394831 - RNA, 16 nt, Human
cagcccuaaacaucau

SEQ ID NO: 1394832 - RNA, 19 nt, Human
cagcccgcccacuggguaa

SEQ ID NO: 1394833 - RNA, 15 nt, Human
cagcccgcacaccug

SEQ ID NO: 1394834 - RNA, 16 nt, Human
cagcccgcacaccugc

SEQ ID NO: 1394835 - RNA, 14 nt, Human
cagcccgcacaccu

SEQ ID NO: 1394836 - RNA, 23 nt, Human
cagccccuuucccuuguagcucc

SEQ ID NO: 1394837 - RNA, 15 nt, Human
cagccccuuucccuu

SEQ ID NO: 1394838 - RNA, 13 nt, Human
cagccccuuuccc

SEQ ID NO: 1394839 - RNA, 12 nt, Human
cagccccuuucc

SEQ ID NO: 1394840 - RNA, 18 nt, Human
cagccccuuagacagagg

SEQ ID NO: 1394841 - RNA, 21 nt, Human
cagccccuuagacagaggccc

SEQ ID NO: 1394842 - RNA, 17 nt, Human
cagccccuuagacagag

SEQ ID NO: 1394843 - RNA, 21 nt, Human
cagccccuggccccaggaccu

SEQ ID NO: 1394844 - RNA, 13 nt, Human
cagccccuggccc

SEQ ID NO: 1394845 - RNA, 15 nt, Human
cagccccagccaggg

SEQ ID NO: 1394846 - RNA, 18 nt, Human
cagccccacuccucugcu

SEQ ID NO: 1394847 - RNA, 21 nt, Human
cagccccacuccucugcugac

SEQ ID NO: 1394848 - RNA, 16 nt, Human
cagccccacuccucug

SEQ ID NO: 1394849 - RNA, 15 nt, Human
cagccccacuccucu

SEQ ID NO: 1394850 - RNA, 17 nt, Human
cagccccacccuggccu

SEQ ID NO: 1394851 - RNA, 18 nt, Human
cagccccacccuggccua

SEQ ID NO: 1394852 - RNA, 15 nt, Human
cagccccacccuggc

SEQ ID NO: 1394853 - RNA, 23 nt, Human
cagccccaccccagggcagccag

SEQ ID NO: 1394854 - RNA, 22 nt, Human
cagccccaccccagggcagcca

SEQ ID NO: 1394855 - RNA, 21 nt, Human
cagccccaccccagggcagcc

SEQ ID NO: 1394856 - RNA, 20 nt, Human
cagccccaccccagggcagc

SEQ ID NO: 1394857 - RNA, 18 nt, Human
cagccccaccccagggca

SEQ ID NO: 1394858 - RNA, 14 nt, Human
cagccccaccccag

SEQ ID NO: 1394859 - RNA, 21 nt, Human
cagccccacaccagggccagc

SEQ ID NO: 1394860 - RNA, 23 nt, Human
cagccccacaccagggccagccu

SEQ ID NO: 1394861 - RNA, 20 nt, Human
cagccggggcgaguggcacg

SEQ ID NO: 1394862 - RNA, 17 nt, Human
cagccggggcgaguggc

SEQ ID NO: 1394863 - RNA, 15 nt, Human
cagccggggcgagug

SEQ ID NO: 1394864 - RNA, 13 nt, Human
cagccgugggccc

SEQ ID NO: 1394865 - RNA, 14 nt, Human
cagccgugagcaug

SEQ ID NO: 1394866 - RNA, 17 nt, Human
cagccgugagcauguuu

SEQ ID NO: 1394867 - RNA, 16 nt, Human
cagccuacaggccuca

SEQ ID NO: 1394868 - RNA, 14 nt, Human
cagccuacaggccu

SEQ ID NO: 1394869 - RNA, 17 nt, Human
cagccgugggccccacc

SEQ ID NO: 1394870 - RNA, 15 nt, Human
cagccgugggcccca

SEQ ID NO: 1394871 - RNA, 23 nt, Human
cagcccugaggacagaugccucc

SEQ ID NO: 1394872 - RNA, 18 nt, Human
cagcccuccucugcacuc

SEQ ID NO: 1394873 - RNA, 17 nt, Human
cagcccuccucugcacu

SEQ ID NO: 1394874 - RNA, 23 nt, Human
cagcccugcaccaugcugcuggg

SEQ ID NO: 1394875 - RNA, 17 nt, Human
cagcccugcaccaugcu

SEQ ID NO: 1394876 - RNA, 15 nt, Human
cagcccugcaccaug

SEQ ID NO: 1394877 - RNA, 13 nt, Human
cagcccugcacca

SEQ ID NO: 1394878 - RNA, 20 nt, Human
cagcccugccuggaggaccu

SEQ ID NO: 1394879 - RNA, 19 nt, Human
cagcccugccuggaggacc

SEQ ID NO: 1394880 - RNA, 17 nt, Human
cagcccugccuggagga

SEQ ID NO: 1394881 - RNA, 16 nt, Human
cagcccugccuggagg

SEQ ID NO: 1394882 - RNA, 15 nt, Human
cagcccugccuggag

SEQ ID NO: 1394883 - RNA, 14 nt, Human
cagcccugccugga

SEQ ID NO: 1394884 - RNA, 13 nt, Human
cagcccugccugg

SEQ ID NO: 1394885 - RNA, 21 nt, Human
cagcccugccuggaggaccug

SEQ ID NO: 1394886 - RNA, 20 nt, Human
cagcccugcugcugccugcc

SEQ ID NO: 1394887 - RNA, 14 nt, Human
cagccucccaaagu

SEQ ID NO: 1394888 - RNA, 18 nt, Human
cagccuccauccuacccc

SEQ ID NO: 1394889 - RNA, 21 nt, Human
cagccuccauccuacccccug

SEQ ID NO: 1394890 - RNA, 17 nt, Human
cagccuccccugccagg

SEQ ID NO: 1394891 - RNA, 16 nt, Human
cagccuccccugccag

SEQ ID NO: 1394892 - RNA, 23 nt, Human
cagccucccccuguccccucuau

SEQ ID NO: 1394893 - RNA, 23 nt, Human
cagccucccauccagggccccca

SEQ ID NO: 1394894 - RNA, 20 nt, Human
cagccucccauccagggccc

SEQ ID NO: 1394895 - RNA, 19 nt, Human
cagccucccauccagggcc

SEQ ID NO: 1394896 - RNA, 18 nt, Human
cagccucccauccagggc

SEQ ID NO: 1394897 - RNA, 16 nt, Human
cagccucccauccagg

SEQ ID NO: 1394898 - RNA, 14 nt, Human
cagccucccaucca

SEQ ID NO: 1394899 - RNA, 22 nt, Human
cagccucccaaagugcugagau

SEQ ID NO: 1394900 - RNA, 21 nt, Human
cagccucccaaagugcugaga

SEQ ID NO: 1394901 - RNA, 15 nt, Human
cagccucccaaagug

SEQ ID NO: 1394902 - RNA, 22 nt, Human
cagccuccccugccagggcagg

SEQ ID NO: 1394903 - RNA, 20 nt, Human
cagccuccccugccagggca

SEQ ID NO: 1394904 - RNA, 19 nt, Human
cagccuccccugccagggc

SEQ ID NO: 1394905 - RNA, 18 nt, Human
cagccuccccugccaggg

SEQ ID NO: 1394906 - RNA, 23 nt, Human
cagccucaggacugggagccccc

SEQ ID NO: 1394907 - RNA, 21 nt, Human
cagccucaggacugggagccc

SEQ ID NO: 1394908 - RNA, 20 nt, Human
cagccucaggacugggagcc

SEQ ID NO: 1394909 - RNA, 19 nt, Human
cagccucaggacugggagc

SEQ ID NO: 1394910 - RNA, 18 nt, Human
cagccucaggacugggag

SEQ ID NO: 1394911 - RNA, 17 nt, Human
cagccucaggacuggga

SEQ ID NO: 1394912 - RNA, 16 nt, Human
cagccucaggacuggg

SEQ ID NO: 1394913 - RNA, 14 nt, Human
cagccucaggacug

SEQ ID NO: 1394914 - RNA, 12 nt, Human
cagccucagaga

SEQ ID NO: 1394915 - RNA, 21 nt, Human
cagccucagagacaucagccc

SEQ ID NO: 1394916 - RNA, 12 nt, Human
cagccuccagag

SEQ ID NO: 1394917 - RNA, 21 nt, Human
cagccucagugacccuggcuc

SEQ ID NO: 1394918 - RNA, 21 nt, Human
cagccuagggcugagcugggg

SEQ ID NO: 1394919 - RNA, 16 nt, Human
cagccuaguugaucag

SEQ ID NO: 1394920 - RNA, 24 nt, Human
cagcuacccuuuuucuccagcugg

SEQ ID NO: 1394921 - RNA, 21 nt, Human
cagcuacccuuuuucuccagc

SEQ ID NO: 1394922 - RNA, 22 nt, Human
cagcuaauucuacucacagugc

SEQ ID NO: 1394923 - RNA, 14 nt, Human
cagcuaauucuacu

SEQ ID NO: 1394924 - RNA, 23 nt, Human
cagcuacucuccccacgagggcu

SEQ ID NO: 1394925 - RNA, 15 nt, Human
cagcuacucucccca

SEQ ID NO: 1394926 - RNA, 13 nt, Human
cagcuacucuccc

SEQ ID NO: 1394927 - RNA, 21 nt, Human
cagcuacuuccuccuccccac

SEQ ID NO: 1394928 - RNA, 17 nt, Human
cagcuacuuccuccucc

SEQ ID NO: 1394929 - RNA, 15 nt, Human
cagcuacuuccuccu

SEQ ID NO: 1394930 - RNA, 14 nt, Human
cagcuaagcucacg

SEQ ID NO: 1394931 - RNA, 13 nt, Human
cagcuaagcucac

SEQ ID NO: 1394932 - RNA, 18 nt, Human
cagcuaagcuaggaauga

SEQ ID NO: 1394933 - RNA, 15 nt, Human
cagcuaagcuaggaa

SEQ ID NO: 1394934 - RNA, 23 nt, Human
cagcuaagaaccuggaacuuggg

SEQ ID NO: 1394935 - RNA, 19 nt, Human
cagcuaagaaccuggaacu

SEQ ID NO: 1394936 - RNA, 18 nt, Human
cagcuaagaaccuggaac

SEQ ID NO: 1394937 - RNA, 16 nt, Human
cagcuaagaaccugga

SEQ ID NO: 1394938 - RNA, 14 nt, Human
cagcuaagaaccug

SEQ ID NO: 1394939 - RNA, 13 nt, Human
cagcuaagaaccu

SEQ ID NO: 1394940 - RNA, 12 nt, Human
cagcgccaggcu

SEQ ID NO: 1394941 - RNA, 21 nt, Human
cagcuaauaacugaucucguu

SEQ ID NO: 1394942 - RNA, 21 nt, Human
cagcuaagggguggggcugcg

SEQ ID NO: 1394943 - RNA, 19 nt, Human
cagcuaagggguggggcug

SEQ ID NO: 1394944 - RNA, 20 nt, Human
cagcuaagcucacguccuga

SEQ ID NO: 1394945 - RNA, 18 nt, Human
cagcgaccgcccccuccu

SEQ ID NO: 1394946 - RNA, 17 nt, Human
cagcgaccgcccccucc

SEQ ID NO: 1394947 - RNA, 16 nt, Human
cagcgaccgcccccuc

SEQ ID NO: 1394948 - RNA, 18 nt, Human
cagccuuuuuguuucaau

SEQ ID NO: 1394949 - RNA, 22 nt, Human
cagcgacuccguuggccacucc

SEQ ID NO: 1394950 - RNA, 21 nt, Human
cagcgacuccguuggccacuc

SEQ ID NO: 1394951 - RNA, 17 nt, Human
cagcgacuccguuggcc

SEQ ID NO: 1394952 - RNA, 18 nt, Human
cagcgaccuuccucaucc

SEQ ID NO: 1394953 - RNA, 23 nt, Human
cagcgauucccucucccaggccc

SEQ ID NO: 1394954 - RNA, 22 nt, Human
cagcgauucccucucccaggcc

SEQ ID NO: 1394955 - RNA, 21 nt, Human
cagcgauucccucucccaggc

SEQ ID NO: 1394956 - RNA, 20 nt, Human
cagcgauucccucucccagg

SEQ ID NO: 1394957 - RNA, 21 nt, Human
cagcgagcgcccagcuccuga

SEQ ID NO: 1394958 - RNA, 18 nt, Human
cagcgaggaggcuccaga

SEQ ID NO: 1394959 - RNA, 17 nt, Human
cagcgaggaggcuccag

SEQ ID NO: 1394960 - RNA, 16 nt, Human
cagcgaggaggcucca

SEQ ID NO: 1394961 - RNA, 20 nt, Human
cagcgagcgcccagcuccug

SEQ ID NO: 1394962 - RNA, 14 nt, Human
cagcgagccugcua

SEQ ID NO: 1394963 - RNA, 12 nt, Human
cagcgacuggca

SEQ ID NO: 1394964 - RNA, 13 nt, Human
cagcgagccugcu

SEQ ID NO: 1394965 - RNA, 12 nt, Human
cagcgagccugc

SEQ ID NO: 1394966 - RNA, 21 nt, Human
cagcgagauaccccaccuccc

SEQ ID NO: 1394967 - RNA, 22 nt, Human
cagcuagugacccacaugccau

SEQ ID NO: 1394968 - RNA, 21 nt, Human
cagcuagugacccacaugcca

SEQ ID NO: 1394969 - RNA, 20 nt, Human
cagcuagugacccacaugcc

SEQ ID NO: 1394970 - RNA, 19 nt, Human
cagcuagugacccacaugc

SEQ ID NO: 1394971 - RNA, 18 nt, Human
cagcuagugacccacaug

SEQ ID NO: 1394972 - RNA, 15 nt, Human
cagcuagugacccac

SEQ ID NO: 1394973 - RNA, 13 nt, Human
cagcuagugaccc

SEQ ID NO: 1394974 - RNA, 21 nt, Human
cagcuaggaagagcaggacuc

SEQ ID NO: 1394975 - RNA, 20 nt, Human
cagcuaggaagagcaggacu

SEQ ID NO: 1394976 - RNA, 16 nt, Human
cagcuaggaagagcag

SEQ ID NO: 1394977 - RNA, 15 nt, Human
cagcucaagagaucc

SEQ ID NO: 1394978 - RNA, 15 nt, Human
cagcuauuuugugaa

SEQ ID NO: 1394979 - RNA, 14 nt, Human
cagcuauuuuguga

SEQ ID NO: 1394980 - RNA, 21 nt, Human
cagcuauguuauauugaaaaa

SEQ ID NO: 1394981 - RNA, 20 nt, Human
cagcuauguuauauugaaaa

SEQ ID NO: 1394982 - RNA, 16 nt, Human
cagcucaauggacugg

SEQ ID NO: 1394983 - RNA, 22 nt, Human
cagcucaagagaucccaaguag

SEQ ID NO: 1394984 - RNA, 20 nt, Human
cagcucaauggacuggaagg

SEQ ID NO: 1394985 - RNA, 13 nt, Human
cagcucacugcaa

SEQ ID NO: 1394986 - RNA, 22 nt, Human
cagcucagaaguuucuucuuua

SEQ ID NO: 1394987 - RNA, 21 nt, Human
cagcucagaaguuucuucuuu

SEQ ID NO: 1394988 - RNA, 15 nt, Human
cagcucacugcaacc

SEQ ID NO: 1394989 - RNA, 14 nt, Human
cagccuggccuccu

SEQ ID NO: 1394990 - RNA, 13 nt, Human
cagccuggccucc

SEQ ID NO: 1394991 - RNA, 12 nt, Human
cagccuggccuc

SEQ ID NO: 1394992 - RNA, 11 nt, Human
cagccuggccu

SEQ ID NO: 1394993 - RNA, 20 nt, Human
cagccuggcccaccccaccc

SEQ ID NO: 1394994 - RNA, 12 nt, Human
cagccuggccca

SEQ ID NO: 1394995 - RNA, 20 nt, Human
cagccuggccagacacaggc

SEQ ID NO: 1394996 - RNA, 18 nt, Human
cagccuggccagacacag

SEQ ID NO: 1394997 - RNA, 17 nt, Human
cagccuggccagacaca

SEQ ID NO: 1394998 - RNA, 15 nt, Human
cagccuggccagaca

SEQ ID NO: 1394999 - RNA, 14 nt, Human
cagccuggccagac

SEQ ID NO: 1395000 - RNA, 13 nt, Human
cagccuggccaga

SEQ ID NO: 1395001 - RNA, 20 nt, Human
cagccuggccuccugccucu

SEQ ID NO: 1395002 - RNA, 21 nt, Human
cagccuggccuccugccucua

SEQ ID NO: 1395003 - RNA, 18 nt, Human
cagccuggccuccugccu

SEQ ID NO: 1395004 - RNA, 17 nt, Human
cagccuggccuccugcc

SEQ ID NO: 1395005 - RNA, 16 nt, Human
cagccuggccuccugc

SEQ ID NO: 1395006 - RNA, 15 nt, Human
cagccuggccuccug

SEQ ID NO: 1395007 - RNA, 23 nt, Human
cagccuggcuguggccuaaccug

SEQ ID NO: 1395008 - RNA, 14 nt, Human
cagccuggagcccu

SEQ ID NO: 1395009 - RNA, 19 nt, Human
cagccuggagcccuggaga

SEQ ID NO: 1395010 - RNA, 23 nt, Human
cagccucuccacucaugugacuc

SEQ ID NO: 1395011 - RNA, 18 nt, Human
cagccucccugaagccuu

SEQ ID NO: 1395012 - RNA, 17 nt, Human
cagccucccugaagccu

SEQ ID NO: 1395013 - RNA, 16 nt, Human
cagccucccugaagcc

SEQ ID NO: 1395014 - RNA, 14 nt, Human
cagccucccugaag

SEQ ID NO: 1395015 - RNA, 12 nt, Human
cagccucccuga

SEQ ID NO: 1395016 - RNA, 20 nt, Human
cagccucgccccuggcagag

SEQ ID NO: 1395017 - RNA, 19 nt, Human
cagccucgccccuggcaga

SEQ ID NO: 1395018 - RNA, 21 nt, Human
cagccucgccccuggcagaga

SEQ ID NO: 1395019 - RNA, 23 nt, Human
cagccugucagauccaggagcuc

SEQ ID NO: 1395020 - RNA, 22 nt, Human
cagccugucagauccaggagcu

SEQ ID NO: 1395021 - RNA, 21 nt, Human
cagccugucagauccaggagc

SEQ ID NO: 1395022 - RNA, 17 nt, Human
cagccugucagauccag

SEQ ID NO: 1395023 - RNA, 16 nt, Human
cagccugucagaucca

SEQ ID NO: 1395024 - RNA, 19 nt, Human
cagccuggggucuggaguu

SEQ ID NO: 1395025 - RNA, 15 nt, Human
cagccuggggucugg

SEQ ID NO: 1395026 - RNA, 21 nt, Human
cagccuggggcuggccuccca

SEQ ID NO: 1395027 - RNA, 18 nt, Human
cagccuggggcuggccuc

SEQ ID NO: 1395028 - RNA, 17 nt, Human
cagccuggggcuggccu

SEQ ID NO: 1395029 - RNA, 23 nt, Human
cagccugggcgcugguccuuucu

SEQ ID NO: 1395030 - RNA, 20 nt, Human
cagccugggcgcugguccuu

SEQ ID NO: 1395031 - RNA, 19 nt, Human
cagccugggcgcugguccu

SEQ ID NO: 1395032 - RNA, 16 nt, Human
cagccugggcgcuggu

SEQ ID NO: 1395033 - RNA, 15 nt, Human
cagccugggcgcugg

SEQ ID NO: 1395034 - RNA, 14 nt, Human
cagccugggcgcug

SEQ ID NO: 1395035 - RNA, 22 nt, Human
cagccugggccuauggagagcc

SEQ ID NO: 1395036 - RNA, 23 nt, Human
cagccugggccuauggagagccc

SEQ ID NO: 1395037 - RNA, 21 nt, Human
cagccugggccuauggagagc

SEQ ID NO: 1395038 - RNA, 20 nt, Human
cagccugggccuauggagag

SEQ ID NO: 1395039 - RNA, 18 nt, Human
cagccugggccuauggag

SEQ ID NO: 1395040 - RNA, 17 nt, Human
cagccugggccuaugga

SEQ ID NO: 1395041 - RNA, 16 nt, Human
cagccugggccuaugg

SEQ ID NO: 1395042 - RNA, 13 nt, Human
cagccugggccua

SEQ ID NO: 1395043 - RNA, 12 nt, Human
cagccugggccu

SEQ ID NO: 1395044 - RNA, 11 nt, Human
cagccugggcc

SEQ ID NO: 1395045 - RNA, 20 nt, Human
cagccugggaaagccccugc

SEQ ID NO: 1395046 - RNA, 12 nt, Human
cagccugggaaa

SEQ ID NO: 1395047 - RNA, 20 nt, Human
cagccuuuuuguuucaauga

SEQ ID NO: 1395048 - RNA, 23 nt, Human
cagccuuuguuccccacuggagc

SEQ ID NO: 1395049 - RNA, 22 nt, Human
cagccuuuguuccccacuggag

SEQ ID NO: 1395050 - RNA, 21 nt, Human
cagccuuuguuccccacugga

SEQ ID NO: 1395051 - RNA, 20 nt, Human
cagccuuuguuccccacugg

SEQ ID NO: 1395052 - RNA, 18 nt, Human
cagccuuuguuccccacu

SEQ ID NO: 1395053 - RNA, 16 nt, Human
cagccuuuguucccca

SEQ ID NO: 1395054 - RNA, 15 nt, Human
cagccuuuguucccc

SEQ ID NO: 1395055 - RNA, 14 nt, Human
cagccuuuguuccc

SEQ ID NO: 1395056 - RNA, 16 nt, Human
cagccuugccagagau

SEQ ID NO: 1395057 - RNA, 15 nt, Human
cagccuugccagaga

SEQ ID NO: 1395058 - RNA, 14 nt, Human
cagccuugccagag

SEQ ID NO: 1395059 - RNA, 13 nt, Human
cagccuugccaga

SEQ ID NO: 1395060 - RNA, 21 nt, Human
cagccuuagcucucccaacuc

SEQ ID NO: 1395061 - RNA, 23 nt, Human
cagccuucagacagagaggacug

SEQ ID NO: 1395062 - RNA, 19 nt, Human
cagccuuagcucucccaac

SEQ ID NO: 1395063 - RNA, 16 nt, Human
cagccuucuacugcuc

SEQ ID NO: 1395064 - RNA, 18 nt, Human
cagcugacuaaacuuuuu

SEQ ID NO: 1395065 - RNA, 13 nt, Human
cagcugacuaaac

SEQ ID NO: 1395066 - RNA, 23 nt, Human
cagcugcuccgaggacccaggaa

SEQ ID NO: 1395067 - RNA, 23 nt, Human
cagcuggaggcaggggcuuccug

SEQ ID NO: 1395068 - RNA, 22 nt, Human
cagcuggaggcaggggcuuccu

SEQ ID NO: 1395069 - RNA, 15 nt, Human
cagcuggaggcaggg

SEQ ID NO: 1395070 - RNA, 14 nt, Human
cagcuggaggcagg

SEQ ID NO: 1395071 - RNA, 13 nt, Human
cagcuggaggcag

SEQ ID NO: 1395072 - RNA, 18 nt, Human
cagcuggacccugaccag

SEQ ID NO: 1395073 - RNA, 16 nt, Human
cagcuggagaagaccc

SEQ ID NO: 1395074 - RNA, 23 nt, Human
cagcuggacccugaccagcuccc

SEQ ID NO: 1395075 - RNA, 17 nt, Human
cagcuggacccugacca

SEQ ID NO: 1395076 - RNA, 16 nt, Human
cagcuggacccugacc

SEQ ID NO: 1395077 - RNA, 23 nt, Human
cagcuggaugagaauuugagugc

SEQ ID NO: 1395078 - RNA, 18 nt, Human
cagcuggcucuacuuccc

SEQ ID NO: 1395079 - RNA, 22 nt, Human
cagcuggcucuacuuccccaug

SEQ ID NO: 1395080 - RNA, 16 nt, Human
cagcuggcucuacuuc

SEQ ID NO: 1395081 - RNA, 12 nt, Human
cagcuggcucua

SEQ ID NO: 1395082 - RNA, 16 nt, Human
cagcugggcucugcaa

SEQ ID NO: 1395083 - RNA, 15 nt, Human
cagcugggcucugca

SEQ ID NO: 1395084 - RNA, 17 nt, Human
cagcugggcucugcaau

SEQ ID NO: 1395085 - RNA, 18 nt, Human
cagcuggggccaggcugg

SEQ ID NO: 1395086 - RNA, 19 nt, Human
cagcuggggccaggcuggg

SEQ ID NO: 1395087 - RNA, 20 nt, Human
cagcuggggccaggcugggu

SEQ ID NO: 1395088 - RNA, 19 nt, Human
cagcugguguagcuacaga

SEQ ID NO: 1395089 - RNA, 15 nt, Human
cagcugguguagcua

SEQ ID NO: 1395090 - RNA, 14 nt, Human
cagcugguguagcu

SEQ ID NO: 1395091 - RNA, 11 nt, Human
cagcuggugua

SEQ ID NO: 1395092 - RNA, 23 nt, Human
cagcugguguagcuacagagaaa

SEQ ID NO: 1395093 - RNA, 22 nt, Human
cagcugguguagcuacagagaa

SEQ ID NO: 1395094 - RNA, 21 nt, Human
cagcugguguagcuacagaga

SEQ ID NO: 1395095 - RNA, 20 nt, Human
cagcugguguagcuacagag

SEQ ID NO: 1395096 - RNA, 18 nt, Human
cagcuguaugauucccag

SEQ ID NO: 1395097 - RNA, 23 nt, Human
cagcuggggugcagggauguggg

SEQ ID NO: 1395098 - RNA, 20 nt, Human
cagcugggucaggcagggug

SEQ ID NO: 1395099 - RNA, 18 nt, Human
cagcugggucaggcaggg

SEQ ID NO: 1395100 - RNA, 16 nt, Human
cagcugggucaggcag

SEQ ID NO: 1395101 - RNA, 15 nt, Human
cagcugggucaggca

SEQ ID NO: 1395102 - RNA, 14 nt, Human
cagcugggucaggc

SEQ ID NO: 1395103 - RNA, 19 nt, Human
cagcuggggugcagggaug

SEQ ID NO: 1395104 - RNA, 18 nt, Human
cagcuggggugcagggau

SEQ ID NO: 1395105 - RNA, 17 nt, Human
cagcuggggugcaggga

SEQ ID NO: 1395106 - RNA, 16 nt, Human
cagcuggggugcaggg

SEQ ID NO: 1395107 - RNA, 15 nt, Human
cagcuggggugcagg

SEQ ID NO: 1395108 - RNA, 14 nt, Human
cagcuggggugcag

SEQ ID NO: 1395109 - RNA, 21 nt, Human
cagcuggggccaggcuggguc

SEQ ID NO: 1395110 - RNA, 22 nt, Human
cagcuggggccaggcugggucg

SEQ ID NO: 1395111 - RNA, 23 nt, Human
cagcucuguucuuccucagccag

SEQ ID NO: 1395112 - RNA, 22 nt, Human
cagcucuguucuuccucagcca

SEQ ID NO: 1395113 - RNA, 21 nt, Human
cagcucuguucuuccucagcc

SEQ ID NO: 1395114 - RNA, 20 nt, Human
cagcucuguucuuccucagc

SEQ ID NO: 1395115 - RNA, 16 nt, Human
cagcucuguucuuccu

SEQ ID NO: 1395116 - RNA, 23 nt, Human
cagcucugggccauucuccacag

SEQ ID NO: 1395117 - RNA, 22 nt, Human
cagcucugggccauucuccaca

SEQ ID NO: 1395118 - RNA, 19 nt, Human
cagcucugggccauucucc

SEQ ID NO: 1395119 - RNA, 12 nt, Human
cagcucugggcc

SEQ ID NO: 1395120 - RNA, 18 nt, Human
cagcucuggaggggaggg

SEQ ID NO: 1395121 - RNA, 15 nt, Human
cagcuccuguaacau

SEQ ID NO: 1395122 - RNA, 22 nt, Human
cagcuccugaccaguugcaguc

SEQ ID NO: 1395123 - RNA, 20 nt, Human
cagcuccugaccaguugcag

SEQ ID NO: 1395124 - RNA, 19 nt, Human
cagcuccugaccaguugca

SEQ ID NO: 1395125 - RNA, 15 nt, Human
cagcuccugaccagu

SEQ ID NO: 1395126 - RNA, 19 nt, Human
cagcuccucugucucgagc

SEQ ID NO: 1395127 - RNA, 18 nt, Human
cagcuccucugucucgag

SEQ ID NO: 1395128 - RNA, 15 nt, Human
cagcuccucugucuc

SEQ ID NO: 1395129 - RNA, 14 nt, Human
cagcuccucugucu

SEQ ID NO: 1395130 - RNA, 14 nt, Human
cagcuccaaccugc

SEQ ID NO: 1395131 - RNA, 21 nt, Human
cagcucauccaugccucagaa

SEQ ID NO: 1395132 - RNA, 22 nt, Human
cagcucauccaugccucagaag

SEQ ID NO: 1395133 - RNA, 22 nt, Human
cagcucaggacagaugccacac

SEQ ID NO: 1395134 - RNA, 19 nt, Human
cagcucaggacagaugcca

SEQ ID NO: 1395135 - RNA, 18 nt, Human
cagcucaggacagaugcc

SEQ ID NO: 1395136 - RNA, 16 nt, Human
cagcucaggacagaug

SEQ ID NO: 1395137 - RNA, 13 nt, Human
cagcucaggacag

SEQ ID NO: 1395138 - RNA, 12 nt, Human
cagcucaggaca

SEQ ID NO: 1395139 - RNA, 21 nt, Human
cagcucagcacugccugcucc

SEQ ID NO: 1395140 - RNA, 20 nt, Human
cagcucagcacugccugcuc

SEQ ID NO: 1395141 - RNA, 15 nt, Human
cagcucagcacugcc

SEQ ID NO: 1395142 - RNA, 14 nt, Human
cagcucagcacugc

SEQ ID NO: 1395143 - RNA, 12 nt, Human
cagcucagcacu

SEQ ID NO: 1395144 - RNA, 11 nt, Human
cagcucuggag

SEQ ID NO: 1395145 - RNA, 23 nt, Human
cagcucuggacagccccacccug

SEQ ID NO: 1395146 - RNA, 21 nt, Human
cagcucuggacagccccaccc

SEQ ID NO: 1395147 - RNA, 18 nt, Human
cagcucuggacagcccca

SEQ ID NO: 1395148 - RNA, 17 nt, Human
cagcucuggacagcccc

SEQ ID NO: 1395149 - RNA, 21 nt, Human
cagcucugacauucugauucg

SEQ ID NO: 1395150 - RNA, 20 nt, Human
cagcucugacauucugauuc

SEQ ID NO: 1395151 - RNA, 14 nt, Human
cagcucugacauuc

SEQ ID NO: 1395152 - RNA, 16 nt, Human
cagcucugaaagagaa

SEQ ID NO: 1395153 - RNA, 12 nt, Human
cagcucugaaag

SEQ ID NO: 1395154 - RNA, 19 nt, Human
cagcucugaaaccaguguu

SEQ ID NO: 1395155 - RNA, 18 nt, Human
cagcucugaaaccagugu

SEQ ID NO: 1395156 - RNA, 13 nt, Human
cagcuccuuuggg

SEQ ID NO: 1395157 - RNA, 16 nt, Human
cagcuccuuccuggag

SEQ ID NO: 1395158 - RNA, 14 nt, Human
cagcuccuuccugg

SEQ ID NO: 1395159 - RNA, 13 nt, Human
cagcuccuuccug

SEQ ID NO: 1395160 - RNA, 15 nt, Human
cagcucuacccugca

SEQ ID NO: 1395161 - RNA, 19 nt, Human
cagcucuacccugcauggc

SEQ ID NO: 1395162 - RNA, 20 nt, Human
cagcucuagacacugccaca

SEQ ID NO: 1395163 - RNA, 15 nt, Human
cagcucuacuggucu

SEQ ID NO: 1395164 - RNA, 18 nt, Human
cagcucucaguugcagcc

SEQ ID NO: 1395165 - RNA, 16 nt, Human
cagcucuccccuucuc

SEQ ID NO: 1395166 - RNA, 19 nt, Human
cagcuuguagccagccggg

SEQ ID NO: 1395167 - RNA, 21 nt, Human
cagcuuguagccagccggggc

SEQ ID NO: 1395168 - RNA, 18 nt, Human
cagcuuguagccagccgg

SEQ ID NO: 1395169 - RNA, 17 nt, Human
cagcuuguagccagccg

SEQ ID NO: 1395170 - RNA, 16 nt, Human
cagcuuguagccagcc

SEQ ID NO: 1395171 - RNA, 15 nt, Human
cagcuuguagccagc

SEQ ID NO: 1395172 - RNA, 12 nt, Human
cagcuuguagcc

SEQ ID NO: 1395173 - RNA, 14 nt, Human
cagcuuuccuguau

SEQ ID NO: 1395174 - RNA, 19 nt, Human
cagcuuucccugccucuca

SEQ ID NO: 1395175 - RNA, 17 nt, Human
cagcuuucccugccucu

SEQ ID NO: 1395176 - RNA, 18 nt, Human
cagcuuuagaaucccagc

SEQ ID NO: 1395177 - RNA, 21 nt, Human
cagcuuuauggagauauaauu

SEQ ID NO: 1395178 - RNA, 13 nt, Human
cagcuuguuuaca

SEQ ID NO: 1395179 - RNA, 21 nt, Human
cagcuuguggcaagugaauuu

SEQ ID NO: 1395180 - RNA, 20 nt, Human
cagcuuguggcaagugaauu

SEQ ID NO: 1395181 - RNA, 18 nt, Human
cagcuuguggcaagugaa

SEQ ID NO: 1395182 - RNA, 21 nt, Human
cagcuuguuuacaugcuuauu

SEQ ID NO: 1395183 - RNA, 15 nt, Human
cagcuuguuuacaug

SEQ ID NO: 1395184 - RNA, 14 nt, Human
cagcuuguuuacau

SEQ ID NO: 1395185 - RNA, 18 nt, Human
cagcuuguuuacaugcuu

SEQ ID NO: 1395186 - RNA, 14 nt, Human
cagcuuuagccaag

SEQ ID NO: 1395187 - RNA, 11 nt, Human
cagcuuugcua

SEQ ID NO: 1395188 - RNA, 22 nt, Human
cagcuuugcuaccaaagcaccu

SEQ ID NO: 1395189 - RNA, 18 nt, Human
caggaaccacaagacugc

SEQ ID NO: 1395190 - RNA, 12 nt, Human
cagcuuuugcaa

SEQ ID NO: 1395191 - RNA, 11 nt, Human
cagcuuuucaa

SEQ ID NO: 1395192 - RNA, 18 nt, Human
cagcuuuuaaaagauuuu

SEQ ID NO: 1395193 - RNA, 13 nt, Human
cagcuuuucaaac

SEQ ID NO: 1395194 - RNA, 18 nt, Human
cagcuuuucccaaaagcc

SEQ ID NO: 1395195 - RNA, 20 nt, Human
cagcuuuucccaaaagccca

SEQ ID NO: 1395196 - RNA, 23 nt, Human
cagcuugaccugaggcugugguc

SEQ ID NO: 1395197 - RNA, 22 nt, Human
cagcuugaccugaggcuguggu

SEQ ID NO: 1395198 - RNA, 21 nt, Human
cagcuugaccugaggcugugg

SEQ ID NO: 1395199 - RNA, 20 nt, Human
cagcuugaccugaggcugug

SEQ ID NO: 1395200 - RNA, 19 nt, Human
cagcuugaccugaggcugu

SEQ ID NO: 1395201 - RNA, 17 nt, Human
cagcuugaccugaggcu

SEQ ID NO: 1395202 - RNA, 16 nt, Human
cagcuugaccugaggc

SEQ ID NO: 1395203 - RNA, 15 nt, Human
cagcuugaccugagg

SEQ ID NO: 1395204 - RNA, 19 nt, Human
cagcuugaucaaaggcaca

SEQ ID NO: 1395205 - RNA, 23 nt, Human
cagcuugaucaaaggcacacagc

SEQ ID NO: 1395206 - RNA, 19 nt, Human
cagcuucugcccccugcag

SEQ ID NO: 1395207 - RNA, 20 nt, Human
cagcuucugcccccugcaga

SEQ ID NO: 1395208 - RNA, 16 nt, Human
cagcuucugcccccug

SEQ ID NO: 1395209 - RNA, 14 nt, Human
cagcuucugccccc

SEQ ID NO: 1395210 - RNA, 21 nt, Human
cagcuuccuucagagagcagu

SEQ ID NO: 1395211 - RNA, 21 nt, Human
cagcuucucauccugcaggca

SEQ ID NO: 1395212 - RNA, 20 nt, Human
cagcuucucauccugcaggc

SEQ ID NO: 1395213 - RNA, 19 nt, Human
cagcuucucauccugcagg

SEQ ID NO: 1395214 - RNA, 18 nt, Human
cagcuucucauccugcag

SEQ ID NO: 1395215 - RNA, 22 nt, Human
cagcuucguuuauuuucaagaa

SEQ ID NO: 1395216 - RNA, 20 nt, Human
cagcuucguuuauuuucaag

SEQ ID NO: 1395217 - RNA, 20 nt, Human
cagcuuccuucagagagcag

SEQ ID NO: 1395218 - RNA, 19 nt, Human
cagcuuccuucagagagca

SEQ ID NO: 1395219 - RNA, 16 nt, Human
cagcuuccuucagaga

SEQ ID NO: 1395220 - RNA, 15 nt, Human
cagcuuccuucagag

SEQ ID NO: 1395221 - RNA, 14 nt, Human
cagcuuccuucaga

SEQ ID NO: 1395222 - RNA, 13 nt, Human
cagcuuccuucag

SEQ ID NO: 1395223 - RNA, 14 nt, Human
cagcuguauagcug

SEQ ID NO: 1395224 - RNA, 16 nt, Human
cagcuguaaucuauga

SEQ ID NO: 1395225 - RNA, 19 nt, Human
cagcuguaugauucccagc

SEQ ID NO: 1395226 - RNA, 17 nt, Human
caggaauauuuuccaaa

SEQ ID NO: 1395227 - RNA, 22 nt, Human
caggaaggcuuguugugcuuuu

SEQ ID NO: 1395228 - RNA, 19 nt, Human
caggaaggagcugccugga

SEQ ID NO: 1395229 - RNA, 18 nt, Human
caggaaggagcugccugg

SEQ ID NO: 1395230 - RNA, 17 nt, Human
caggaaggagcugccug

SEQ ID NO: 1395231 - RNA, 16 nt, Human
caggaaggagcugccu

SEQ ID NO: 1395232 - RNA, 15 nt, Human
caggaaggagcugcc

SEQ ID NO: 1395233 - RNA, 14 nt, Human
caggaaggagcugc

SEQ ID NO: 1395234 - RNA, 13 nt, Human
caggaaggagcug

SEQ ID NO: 1395235 - RNA, 12 nt, Human
caggaaggagcu

SEQ ID NO: 1395236 - RNA, 13 nt, Human
caggaaggcuugu

SEQ ID NO: 1395237 - RNA, 22 nt, Human
caggaaggagcugccuggaccc

SEQ ID NO: 1395238 - RNA, 21 nt, Human
caggaaggagcugccuggacc

SEQ ID NO: 1395239 - RNA, 20 nt, Human
caggaaggagcugccuggac

SEQ ID NO: 1395240 - RNA, 22 nt, Human
caggaccuucgggcugugcccg

SEQ ID NO: 1395241 - RNA, 21 nt, Human
caggaccuucgggcugugccc

SEQ ID NO: 1395242 - RNA, 20 nt, Human
caggaccuucgggcugugcc

SEQ ID NO: 1395243 - RNA, 18 nt, Human
caggaccuggcugccaua

SEQ ID NO: 1395244 - RNA, 17 nt, Human
caggaccuggcugccau

SEQ ID NO: 1395245 - RNA, 16 nt, Human
caggaccuggcugcca

SEQ ID NO: 1395246 - RNA, 14 nt, Human
caggaccuggcugc

SEQ ID NO: 1395247 - RNA, 22 nt, Human
caggacacaggccuguguagcu

SEQ ID NO: 1395248 - RNA, 20 nt, Human
caggacacaggccuguguag

SEQ ID NO: 1395249 - RNA, 19 nt, Human
caggacacaggccugugua

SEQ ID NO: 1395250 - RNA, 18 nt, Human
caggacacaggccugugu

SEQ ID NO: 1395251 - RNA, 17 nt, Human
caggacacaggccugug

SEQ ID NO: 1395252 - RNA, 16 nt, Human
caggacacaggccugu

SEQ ID NO: 1395253 - RNA, 15 nt, Human
caggacacaggccug

SEQ ID NO: 1395254 - RNA, 14 nt, Human
caggacacaggccu

SEQ ID NO: 1395255 - RNA, 13 nt, Human
caggacacaggcc

SEQ ID NO: 1395256 - RNA, 12 nt, Human
caggacacaggc

SEQ ID NO: 1395257 - RNA, 14 nt, Human
caggacaagcaugg

SEQ ID NO: 1395258 - RNA, 21 nt, Human
caggaauucuuggagaaaaug

SEQ ID NO: 1395259 - RNA, 21 nt, Human
caggaauuucccaggacccug

SEQ ID NO: 1395260 - RNA, 20 nt, Human
caggaauuucccaggacccu

SEQ ID NO: 1395261 - RNA, 19 nt, Human
caggaauuucccaggaccc

SEQ ID NO: 1395262 - RNA, 18 nt, Human
caggaauuucccaggacc

SEQ ID NO: 1395263 - RNA, 17 nt, Human
caggaauuucccaggac

SEQ ID NO: 1395264 - RNA, 16 nt, Human
caggaauuucccagga

SEQ ID NO: 1395265 - RNA, 15 nt, Human
caggaaucuuaaggu

SEQ ID NO: 1395266 - RNA, 14 nt, Human
caggaaucuuaagg

SEQ ID NO: 1395267 - RNA, 16 nt, Human
caggaaucaguuuaaa

SEQ ID NO: 1395268 - RNA, 21 nt, Human
caggaaucaguuuaaaagcac

SEQ ID NO: 1395269 - RNA, 19 nt, Human
caggaaggacuaugaaaag

SEQ ID NO: 1395270 - RNA, 16 nt, Human
caggaaggacuaugaa

SEQ ID NO: 1395271 - RNA, 22 nt, Human
caggaagcuuuggugagaaccu

SEQ ID NO: 1395272 - RNA, 23 nt, Human
caggaagcuuuggugagaaccug

SEQ ID NO: 1395273 - RNA, 21 nt, Human
caggaagcuuuggugagaacc

SEQ ID NO: 1395274 - RNA, 22 nt, Human
caggaagcugugagagcaguuu

SEQ ID NO: 1395275 - RNA, 13 nt, Human
caggaagcuguga

SEQ ID NO: 1395276 - RNA, 14 nt, Human
caggaagcugugag

SEQ ID NO: 1395277 - RNA, 14 nt, Human
caggaagccuuccc

SEQ ID NO: 1395278 - RNA, 21 nt, Human
caggaagccugcaguccugga

SEQ ID NO: 1395279 - RNA, 19 nt, Human
caggaagccugcaguccug

SEQ ID NO: 1395280 - RNA, 13 nt, Human
caggaagccugca

SEQ ID NO: 1395281 - RNA, 18 nt, Human
caggaagccguccuggcg

SEQ ID NO: 1395282 - RNA, 15 nt, Human
caggaagccguccug

SEQ ID NO: 1395283 - RNA, 18 nt, Human
caggaagcccaauugcug

SEQ ID NO: 1395284 - RNA, 16 nt, Human
caggaagcccaauugc

SEQ ID NO: 1395285 - RNA, 13 nt, Human
caggaacugggcc

SEQ ID NO: 1395286 - RNA, 12 nt, Human
caggaacugggc

SEQ ID NO: 1395287 - RNA, 18 nt, Human
caggaaccgaggcaggga

SEQ ID NO: 1395288 - RNA, 17 nt, Human
caggaaccgaggcaggg

SEQ ID NO: 1395289 - RNA, 15 nt, Human
caggaaccgaggcag

SEQ ID NO: 1395290 - RNA, 19 nt, Human
caggaagaucccccagaaa

SEQ ID NO: 1395291 - RNA, 14 nt, Human
caggaagagaagga

SEQ ID NO: 1395292 - RNA, 15 nt, Human
caggaagagaaggag

SEQ ID NO: 1395293 - RNA, 17 nt, Human
caggaagagaaggagca

SEQ ID NO: 1395294 - RNA, 17 nt, Human
caggaagaucccccaga

SEQ ID NO: 1395295 - RNA, 18 nt, Human
caggaagaucccccagaa

SEQ ID NO: 1395296 - RNA, 19 nt, Human
caggaucucaccaggcagc

SEQ ID NO: 1395297 - RNA, 19 nt, Human
caggauagagacuggaaca

SEQ ID NO: 1395298 - RNA, 13 nt, Human
caggagugugugu

SEQ ID NO: 1395299 - RNA, 21 nt, Human
caggaguguccucuucccucu

SEQ ID NO: 1395300 - RNA, 19 nt, Human
caggaguguccucuucccu

SEQ ID NO: 1395301 - RNA, 17 nt, Human
caggaguguccucuucc

SEQ ID NO: 1395302 - RNA, 17 nt, Human
caggaguggguggggag

SEQ ID NO: 1395303 - RNA, 16 nt, Human
caggagugggugggga

SEQ ID NO: 1395304 - RNA, 14 nt, Human
caggaguggguggg

SEQ ID NO: 1395305 - RNA, 18 nt, Human
caggaguggguggggagu

SEQ ID NO: 1395306 - RNA, 19 nt, Human
caggaguuucguuuucaaa

SEQ ID NO: 1395307 - RNA, 19 nt, Human
caggacuccaggcccaagg

SEQ ID NO: 1395308 - RNA, 21 nt, Human
caggacuccaggcccaaggcu

SEQ ID NO: 1395309 - RNA, 18 nt, Human
caggacuccaggcccaag

SEQ ID NO: 1395310 - RNA, 17 nt, Human
caggacuccaggcccaa

SEQ ID NO: 1395311 - RNA, 16 nt, Human
caggacuccaggccca

SEQ ID NO: 1395312 - RNA, 20 nt, Human
caggacuauauuugggccug

SEQ ID NO: 1395313 - RNA, 23 nt, Human
caggacuaacacucagaagccug

SEQ ID NO: 1395314 - RNA, 22 nt, Human
caggacuaacacucagaagccu

SEQ ID NO: 1395315 - RNA, 21 nt, Human
caggacuaacacucagaagcc

SEQ ID NO: 1395316 - RNA, 20 nt, Human
caggacuaacacucagaagc

SEQ ID NO: 1395317 - RNA, 19 nt, Human
caggacuaacacucagaag

SEQ ID NO: 1395318 - RNA, 17 nt, Human
caggacuaacacucaga

SEQ ID NO: 1395319 - RNA, 23 nt, Human
caggacugggagcccccagccug

SEQ ID NO: 1395320 - RNA, 21 nt, Human
caggacugggagcccccagcc

SEQ ID NO: 1395321 - RNA, 18 nt, Human
caggacugggagccccca

SEQ ID NO: 1395322 - RNA, 14 nt, Human
caggacugggagcc

SEQ ID NO: 1395323 - RNA, 13 nt, Human
caggacugggagc

SEQ ID NO: 1395324 - RNA, 14 nt, Human
caggacuguccccu

SEQ ID NO: 1395325 - RNA, 22 nt, Human
caggacuguccccuugaaggag

SEQ ID NO: 1395326 - RNA, 23 nt, Human
caggacuguccccuugaaggaga

SEQ ID NO: 1395327 - RNA, 18 nt, Human
caggacugaugucuccua

SEQ ID NO: 1395328 - RNA, 23 nt, Human
caggacugaugucuccuaagcac

SEQ ID NO: 1395329 - RNA, 17 nt, Human
caggacugaugucuccu

SEQ ID NO: 1395330 - RNA, 12 nt, Human
caggacugaugu

SEQ ID NO: 1395331 - RNA, 21 nt, Human
caggacucugcagccucagag

SEQ ID NO: 1395332 - RNA, 20 nt, Human
caggacucugcagccucaga

SEQ ID NO: 1395333 - RNA, 19 nt, Human
caggacucugcagccucag

SEQ ID NO: 1395334 - RNA, 18 nt, Human
caggacucugcagccuca

SEQ ID NO: 1395335 - RNA, 17 nt, Human
caggacucugcagccuc

SEQ ID NO: 1395336 - RNA, 16 nt, Human
caggacucugcagccu

SEQ ID NO: 1395337 - RNA, 15 nt, Human
caggacucugcagcc

SEQ ID NO: 1395338 - RNA, 14 nt, Human
caggacucugcagc

SEQ ID NO: 1395339 - RNA, 13 nt, Human
caggacucugcag

SEQ ID NO: 1395340 - RNA, 11 nt, Human
caggacucugc

SEQ ID NO: 1395341 - RNA, 17 nt, Human
caggagcacggcucugu

SEQ ID NO: 1395342 - RNA, 16 nt, Human
caggagcacggcucug

SEQ ID NO: 1395343 - RNA, 16 nt, Human
caggagaagcucagcu

SEQ ID NO: 1395344 - RNA, 15 nt, Human
caggagaagcucagc

SEQ ID NO: 1395345 - RNA, 14 nt, Human
caggagaagcucag

SEQ ID NO: 1395346 - RNA, 13 nt, Human
caggagaagcuca

SEQ ID NO: 1395347 - RNA, 21 nt, Human
caggagaagaaagaggugacc

SEQ ID NO: 1395348 - RNA, 20 nt, Human
caggagaagaaagaggugac

SEQ ID NO: 1395349 - RNA, 14 nt, Human
caggagaagaaaga

SEQ ID NO: 1395350 - RNA, 16 nt, Human
caggacuugaaagaaa

SEQ ID NO: 1395351 - RNA, 22 nt, Human
caggacugggagcccccagccu

SEQ ID NO: 1395352 - RNA, 19 nt, Human
caggagagaguugaaccua

SEQ ID NO: 1395353 - RNA, 22 nt, Human
caggagaaggccaauuccuaua

SEQ ID NO: 1395354 - RNA, 21 nt, Human
caggagaaggccaauuccuau

SEQ ID NO: 1395355 - RNA, 19 nt, Human
caggagaaggccaauuccu

SEQ ID NO: 1395356 - RNA, 19 nt, Human
caggagaagcucagcugca

SEQ ID NO: 1395357 - RNA, 17 nt, Human
caggagaagcucagcug

SEQ ID NO: 1395358 - RNA, 20 nt, Human
caggagaagcucagcugcau

SEQ ID NO: 1395359 - RNA, 23 nt, Human
caggagacagguuagcugcuccc

SEQ ID NO: 1395360 - RNA, 19 nt, Human
caggagcacggcucugucc

SEQ ID NO: 1395361 - RNA, 11 nt, Human
caggagcccug

SEQ ID NO: 1395362 - RNA, 14 nt, Human
caggagcccuggga

SEQ ID NO: 1395363 - RNA, 16 nt, Human
caggagcccugggagg

SEQ ID NO: 1395364 - RNA, 18 nt, Human
caggagcccugggaggcu

SEQ ID NO: 1395365 - RNA, 19 nt, Human
caggagcccugggaggcuc

SEQ ID NO: 1395366 - RNA, 18 nt, Human
caggaguccacuuuguuu

SEQ ID NO: 1395367 - RNA, 14 nt, Human
caggaguccacuuu

SEQ ID NO: 1395368 - RNA, 18 nt, Human
caggaguagcugagcuca

SEQ ID NO: 1395369 - RNA, 20 nt, Human
caggaguagcugagcucaca

SEQ ID NO: 1395370 - RNA, 17 nt, Human
caggaguagcugagcuc

SEQ ID NO: 1395371 - RNA, 16 nt, Human
caggaguagcugagcu

SEQ ID NO: 1395372 - RNA, 15 nt, Human
caggaguagcugagc

SEQ ID NO: 1395373 - RNA, 14 nt, Human
caggaguagcugag

SEQ ID NO: 1395374 - RNA, 13 nt, Human
caggaguagcuga

SEQ ID NO: 1395375 - RNA, 21 nt, Human
caggagcuccccuccccaacu

SEQ ID NO: 1395376 - RNA, 18 nt, Human
caggagcuccccucccca

SEQ ID NO: 1395377 - RNA, 16 nt, Human
caggagcuccccuccc

SEQ ID NO: 1395378 - RNA, 14 nt, Human
caggagcuccccuc

SEQ ID NO: 1395379 - RNA, 13 nt, Human
caggagcuccccu

SEQ ID NO: 1395380 - RNA, 22 nt, Human
caggagcuccaguguccugagc

SEQ ID NO: 1395381 - RNA, 23 nt, Human
caggagcuccaguguccugagcu

SEQ ID NO: 1395382 - RNA, 21 nt, Human
caggagcuccaguguccugag

SEQ ID NO: 1395383 - RNA, 23 nt, Human
caggagcuaccuguguggacagg

SEQ ID NO: 1395384 - RNA, 22 nt, Human
caggagcuaccuguguggacag

SEQ ID NO: 1395385 - RNA, 18 nt, Human
caggagcuaccugugugg

SEQ ID NO: 1395386 - RNA, 17 nt, Human
caggagcuaccugugug

SEQ ID NO: 1395387 - RNA, 14 nt, Human
caggagccugugac

SEQ ID NO: 1395388 - RNA, 16 nt, Human
caggagccugugccuc

SEQ ID NO: 1395389 - RNA, 15 nt, Human
caggagccugugccu

SEQ ID NO: 1395390 - RNA, 11 nt, Human
caggagccugu

SEQ ID NO: 1395391 - RNA, 12 nt, Human
caggagccuggc

SEQ ID NO: 1395392 - RNA, 11 nt, Human
caggagccugg

SEQ ID NO: 1395393 - RNA, 21 nt, Human
caggagcccugggaggcucug

SEQ ID NO: 1395394 - RNA, 12 nt, Human
caggccaggucc

SEQ ID NO: 1395395 - RNA, 16 nt, Human
caggccagguccagag

SEQ ID NO: 1395396 - RNA, 18 nt, Human
caggccacacuucaaacu

SEQ ID NO: 1395397 - RNA, 21 nt, Human
caggccacacuucaaacuacu

SEQ ID NO: 1395398 - RNA, 16 nt, Human
caggccacacuucaaa

SEQ ID NO: 1395399 - RNA, 17 nt, Human
caggccaagaaacgucu

SEQ ID NO: 1395400 - RNA, 22 nt, Human
caggccaaaggggaccuggaag

SEQ ID NO: 1395401 - RNA, 21 nt, Human
caggccaaaggggaccuggaa

SEQ ID NO: 1395402 - RNA, 19 nt, Human
caggccaaaggggaccugg

SEQ ID NO: 1395403 - RNA, 22 nt, Human
caggccaaagagucuccaguuu

SEQ ID NO: 1395404 - RNA, 19 nt, Human
caggcauuuccuggguggc

SEQ ID NO: 1395405 - RNA, 18 nt, Human
caggcauuuccugggugg

SEQ ID NO: 1395406 - RNA, 17 nt, Human
caggcauuuccugggug

SEQ ID NO: 1395407 - RNA, 22 nt, Human
caggccccaugaccuccagcuu

SEQ ID NO: 1395408 - RNA, 20 nt, Human
caggccccaugaccuccagc

SEQ ID NO: 1395409 - RNA, 19 nt, Human
caggccccaugaccuccag

SEQ ID NO: 1395410 - RNA, 18 nt, Human
caggccccaugaccucca

SEQ ID NO: 1395411 - RNA, 17 nt, Human
caggccccaugaccucc

SEQ ID NO: 1395412 - RNA, 16 nt, Human
caggccccaugaccuc

SEQ ID NO: 1395413 - RNA, 14 nt, Human
caggccccaugacc

SEQ ID NO: 1395414 - RNA, 15 nt, Human
caggccccaggaaag

SEQ ID NO: 1395415 - RNA, 21 nt, Human
caggcccagccgacccccucu

SEQ ID NO: 1395416 - RNA, 22 nt, Human
caggcccagccgacccccucuc

SEQ ID NO: 1395417 - RNA, 20 nt, Human
caggcccagccgacccccuc

SEQ ID NO: 1395418 - RNA, 19 nt, Human
caggcccagccgacccccu

SEQ ID NO: 1395419 - RNA, 16 nt, Human
caggcccagccgaccc

SEQ ID NO: 1395420 - RNA, 17 nt, Human
caggcccacugugccuc

SEQ ID NO: 1395421 - RNA, 19 nt, Human
caggcccacugugccucag

SEQ ID NO: 1395422 - RNA, 16 nt, Human
caggcccacugugccu

SEQ ID NO: 1395423 - RNA, 15 nt, Human
caggcccacugugcc

SEQ ID NO: 1395424 - RNA, 17 nt, Human
caggcccaaggcucccg

SEQ ID NO: 1395425 - RNA, 16 nt, Human
caggcccaaggcuccc

SEQ ID NO: 1395426 - RNA, 19 nt, Human
caggcccccaccuggcuca

SEQ ID NO: 1395427 - RNA, 18 nt, Human
caggcccccaccuggcuc

SEQ ID NO: 1395428 - RNA, 17 nt, Human
caggcccccaccuggcu

SEQ ID NO: 1395429 - RNA, 21 nt, Human
caggcccccgccuuggccugu

SEQ ID NO: 1395430 - RNA, 20 nt, Human
caggcccccgccuuggccug

SEQ ID NO: 1395431 - RNA, 17 nt, Human
caggcccccgccuuggc

SEQ ID NO: 1395432 - RNA, 16 nt, Human
caggcccccgccuugg

SEQ ID NO: 1395433 - RNA, 21 nt, Human
caggccccgugaggcaauggg

SEQ ID NO: 1395434 - RNA, 20 nt, Human
caggauguguuugcuuucug

SEQ ID NO: 1395435 - RNA, 18 nt, Human
caggauguguuugcuuuc

SEQ ID NO: 1395436 - RNA, 15 nt, Human
caggauguguuugcu

SEQ ID NO: 1395437 - RNA, 23 nt, Human
caggaugguucccuugaugaaga

SEQ ID NO: 1395438 - RNA, 21 nt, Human
caggaugguucccuugaugaa

SEQ ID NO: 1395439 - RNA, 21 nt, Human
caggauggcaaccagaccauu

SEQ ID NO: 1395440 - RNA, 23 nt, Human
caggaugggguauggauucuaaa

SEQ ID NO: 1395441 - RNA, 18 nt, Human
caggauggucuccaucuc

SEQ ID NO: 1395442 - RNA, 23 nt, Human
caggaugcuaacaucuaaaaaua

SEQ ID NO: 1395443 - RNA, 22 nt, Human
caggaugaugacuauggaaaga

SEQ ID NO: 1395444 - RNA, 22 nt, Human
caggaugagggaaaagaaaaag

SEQ ID NO: 1395445 - RNA, 18 nt, Human
caggaugagggaaaagaa

SEQ ID NO: 1395446 - RNA, 18 nt, Human
caggaugaugacuaugga

SEQ ID NO: 1395447 - RNA, 20 nt, Human
caggaugaugacuauggaaa

SEQ ID NO: 1395448 - RNA, 15 nt, Human
caggaucaguuaacu

SEQ ID NO: 1395449 - RNA, 16 nt, Human
caggauagagacugga

SEQ ID NO: 1395450 - RNA, 14 nt, Human
caggauagagacug

SEQ ID NO: 1395451 - RNA, 21 nt, Human
caggauauucucacagcucca

SEQ ID NO: 1395452 - RNA, 22 nt, Human
caggaucucaccaggcagccuc

SEQ ID NO: 1395453 - RNA, 18 nt, Human
caggaucucaccaggcag

SEQ ID NO: 1395454 - RNA, 17 nt, Human
caggaucucaccaggca

SEQ ID NO: 1395455 - RNA, 21 nt, Human
caggaucuauuuuuggagguu

SEQ ID NO: 1395456 - RNA, 20 nt, Human
caggaucuauuuuuggaggu

SEQ ID NO: 1395457 - RNA, 19 nt, Human
caggaucuauuuuuggagg

SEQ ID NO: 1395458 - RNA, 18 nt, Human
caggaucuauuuuuggag

SEQ ID NO: 1395459 - RNA, 12 nt, Human
caggaucuauuu

SEQ ID NO: 1395460 - RNA, 22 nt, Human
caggauccccaaggcacuugag

SEQ ID NO: 1395461 - RNA, 17 nt, Human
caggaucaguuaacuau

SEQ ID NO: 1395462 - RNA, 17 nt, Human
caggauccaagcuaagc

SEQ ID NO: 1395463 - RNA, 13 nt, Human
caggauccaggcc

SEQ ID NO: 1395464 - RNA, 20 nt, Human
caggcaggucugaagcucaa

SEQ ID NO: 1395465 - RNA, 15 nt, Human
caggcagggugcagu

SEQ ID NO: 1395466 - RNA, 12 nt, Human
caggcauccucc

SEQ ID NO: 1395467 - RNA, 18 nt, Human
caggcagccagcaucugg

SEQ ID NO: 1395468 - RNA, 21 nt, Human
caggcaucggggagccgggag

SEQ ID NO: 1395469 - RNA, 20 nt, Human
caggcaucggggagccggga

SEQ ID NO: 1395470 - RNA, 16 nt, Human
caggcauuuccugggu

SEQ ID NO: 1395471 - RNA, 15 nt, Human
caggcauuuccuggg

SEQ ID NO: 1395472 - RNA, 14 nt, Human
caggcauuuccugg

SEQ ID NO: 1395473 - RNA, 15 nt, Human
caggcauuggauauu

SEQ ID NO: 1395474 - RNA, 19 nt, Human
caggcauugccaagggcuu

SEQ ID NO: 1395475 - RNA, 14 nt, Human
caggcaaggcugug

SEQ ID NO: 1395476 - RNA, 13 nt, Human
caggcaaggcugu

SEQ ID NO: 1395477 - RNA, 17 nt, Human
caggcaaggcuguggac

SEQ ID NO: 1395478 - RNA, 21 nt, Human
caggcagccagcaucugggcc

SEQ ID NO: 1395479 - RNA, 22 nt, Human
caggcaacgcacaaaacagaaa

SEQ ID NO: 1395480 - RNA, 18 nt, Human
caggcaaaauccuugcuu

SEQ ID NO: 1395481 - RNA, 14 nt, Human
caggcaaaauccuu

SEQ ID NO: 1395482 - RNA, 24 nt, Human
caggauuggggaagagagccugca

SEQ ID NO: 1395483 - RNA, 20 nt, Human
caggauuggggaagagagcc

SEQ ID NO: 1395484 - RNA, 15 nt, Human
caggauuggggaaga

SEQ ID NO: 1395485 - RNA, 14 nt, Human
caggauuggggaag

SEQ ID NO: 1395486 - RNA, 23 nt, Human
caggauugcgagagauguguguu

SEQ ID NO: 1395487 - RNA, 22 nt, Human
caggauugcgagagaugugugu

SEQ ID NO: 1395488 - RNA, 21 nt, Human
caggauugcgagagaugugug

SEQ ID NO: 1395489 - RNA, 20 nt, Human
caggauugcgagagaugugu

SEQ ID NO: 1395490 - RNA, 19 nt, Human
caggauugcgagagaugug

SEQ ID NO: 1395491 - RNA, 18 nt, Human
caggauugcgagagaugu

SEQ ID NO: 1395492 - RNA, 17 nt, Human
caggauugcgagagaug

SEQ ID NO: 1395493 - RNA, 16 nt, Human
caggauugcgagagau

SEQ ID NO: 1395494 - RNA, 13 nt, Human
caggauugcgaga

SEQ ID NO: 1395495 - RNA, 22 nt, Human
caggcagcuuuuucucucccac

SEQ ID NO: 1395496 - RNA, 19 nt, Human
caggcagcuuuuucucucc

SEQ ID NO: 1395497 - RNA, 19 nt, Human
caggcagccucuggggggu

SEQ ID NO: 1395498 - RNA, 16 nt, Human
caggcagccucugggg

SEQ ID NO: 1395499 - RNA, 15 nt, Human
caggcagccucuggg

SEQ ID NO: 1395500 - RNA, 14 nt, Human
caggcagccucugg

SEQ ID NO: 1395501 - RNA, 23 nt, Human
caggcagccagugcccugagcca

SEQ ID NO: 1395502 - RNA, 13 nt, Human
caggcagccucug

SEQ ID NO: 1395503 - RNA, 24 nt, Human
caggcagccagugcccugagccag

SEQ ID NO: 1395504 - RNA, 20 nt, Human
caggcagccagugcccugag

SEQ ID NO: 1395505 - RNA, 19 nt, Human
caggcagccagugcccuga

SEQ ID NO: 1395506 - RNA, 15 nt, Human
caggcagccagugcc

SEQ ID NO: 1395507 - RNA, 12 nt, Human
caggcagccagu

SEQ ID NO: 1395508 - RNA, 16 nt, Human
caggcaggggccucca

SEQ ID NO: 1395509 - RNA, 15 nt, Human
caggcaggggccucc

SEQ ID NO: 1395510 - RNA, 13 nt, Human
caggcaggggccu

SEQ ID NO: 1395511 - RNA, 21 nt, Human
caggcagggcucuccuggcuu

SEQ ID NO: 1395512 - RNA, 23 nt, Human
caggcagggcucuccuggcuucc

SEQ ID NO: 1395513 - RNA, 20 nt, Human
caggcagggcucuccuggcu

SEQ ID NO: 1395514 - RNA, 19 nt, Human
caggcagggcucuccuggc

SEQ ID NO: 1395515 - RNA, 18 nt, Human
caggcaggggccuccaug

SEQ ID NO: 1395516 - RNA, 21 nt, Human
caggcaggggccuccaugggc

SEQ ID NO: 1395517 - RNA, 18 nt, Human
caggcagggcucuccugg

SEQ ID NO: 1395518 - RNA, 17 nt, Human
caggcagggcucuccug

SEQ ID NO: 1395519 - RNA, 16 nt, Human
caggcagggcucuccu

SEQ ID NO: 1395520 - RNA, 15 nt, Human
caggcagggcucucc

SEQ ID NO: 1395521 - RNA, 14 nt, Human
caggcagggcucuc

SEQ ID NO: 1395522 - RNA, 13 nt, Human
caggcagggcucu

SEQ ID NO: 1395523 - RNA, 12 nt, Human
caggcagggcuc

SEQ ID NO: 1395524 - RNA, 11 nt, Human
caggcagggcu

SEQ ID NO: 1395525 - RNA, 16 nt, Human
caggcaggcucccagg

SEQ ID NO: 1395526 - RNA, 18 nt, Human
caggcaggcucccaggga

SEQ ID NO: 1395527 - RNA, 14 nt, Human
caggcaggagcccu

SEQ ID NO: 1395528 - RNA, 22 nt, Human
caggcuguguuuggcuuucagg

SEQ ID NO: 1395529 - RNA, 21 nt, Human
caggcuguaggaaaucuaguu

SEQ ID NO: 1395530 - RNA, 18 nt, Human
caggcuggucuaaaacuc

SEQ ID NO: 1395531 - RNA, 17 nt, Human
caggcuggucuaaaacu

SEQ ID NO: 1395532 - RNA, 19 nt, Human
caggcuucugcuggggccu

SEQ ID NO: 1395533 - RNA, 17 nt, Human
caggcuucugcuggggc

SEQ ID NO: 1395534 - RNA, 14 nt, Human
caggcuucugcugg

SEQ ID NO: 1395535 - RNA, 23 nt, Human
caggcuucugagcagcgagccug

SEQ ID NO: 1395536 - RNA, 21 nt, Human
caggcuucugagcagcgagcc

SEQ ID NO: 1395537 - RNA, 16 nt, Human
caggcuucugagcagc

SEQ ID NO: 1395538 - RNA, 18 nt, Human
caggcuugccugcaggca

SEQ ID NO: 1395539 - RNA, 17 nt, Human
caggcuugccugcaggc

SEQ ID NO: 1395540 - RNA, 16 nt, Human
caggcuugccugcagg

SEQ ID NO: 1395541 - RNA, 15 nt, Human
caggcuugccugcag

SEQ ID NO: 1395542 - RNA, 23 nt, Human
caggcuuuuuuaucaugugaaau

SEQ ID NO: 1395543 - RNA, 15 nt, Human
caggcugccugaguc

SEQ ID NO: 1395544 - RNA, 14 nt, Human
caggcugccugagu

SEQ ID NO: 1395545 - RNA, 13 nt, Human
caggcugccugag

SEQ ID NO: 1395546 - RNA, 12 nt, Human
caggcugccuga

SEQ ID NO: 1395547 - RNA, 11 nt, Human
caggcugccug

SEQ ID NO: 1395548 - RNA, 16 nt, Human
caggcugccucccuug

SEQ ID NO: 1395549 - RNA, 16 nt, Human
caggcugccguggggc

SEQ ID NO: 1395550 - RNA, 16 nt, Human
caggcugauuucuagg

SEQ ID NO: 1395551 - RNA, 17 nt, Human
caggcugauuucuaggu

SEQ ID NO: 1395552 - RNA, 22 nt, Human
caggcugagguccugaucagcu

SEQ ID NO: 1395553 - RNA, 21 nt, Human
caggcugaccacagcacagcc

SEQ ID NO: 1395554 - RNA, 20 nt, Human
caggcugaccacagcacagc

SEQ ID NO: 1395555 - RNA, 17 nt, Human
caggcugaccacagcac

SEQ ID NO: 1395556 - RNA, 15 nt, Human
caggcugaccacagc

SEQ ID NO: 1395557 - RNA, 22 nt, Human
caggcugaccacagcacagcca

SEQ ID NO: 1395558 - RNA, 14 nt, Human
caggcugaccacag

SEQ ID NO: 1395559 - RNA, 18 nt, Human
caggcugaagcagguucc

SEQ ID NO: 1395560 - RNA, 18 nt, Human
caggcucuuagcagcuuc

SEQ ID NO: 1395561 - RNA, 15 nt, Human
caggcucuuagcagc

SEQ ID NO: 1395562 - RNA, 12 nt, Human
caggcucuuagc

SEQ ID NO: 1395563 - RNA, 22 nt, Human
caggcucuuagcagcuuccaga

SEQ ID NO: 1395564 - RNA, 21 nt, Human
caggcucuuagcagcuuccag

SEQ ID NO: 1395565 - RNA, 17 nt, Human
caggcugcucagggcug

SEQ ID NO: 1395566 - RNA, 18 nt, Human
caggcugcucagggcugg

SEQ ID NO: 1395567 - RNA, 12 nt, Human
caggcuggccag

SEQ ID NO: 1395568 - RNA, 19 nt, Human
caggcuggaagauagcugu

SEQ ID NO: 1395569 - RNA, 20 nt, Human
caggcuggaagauagcugug

SEQ ID NO: 1395570 - RNA, 16 nt, Human
caggcuggagugcagu

SEQ ID NO: 1395571 - RNA, 19 nt, Human
caggcuggccaguccaggc

SEQ ID NO: 1395572 - RNA, 18 nt, Human
caggcuggccaguccagg

SEQ ID NO: 1395573 - RNA, 16 nt, Human
caggcuggccagucca

SEQ ID NO: 1395574 - RNA, 14 nt, Human
caggcuggccaguc

SEQ ID NO: 1395575 - RNA, 16 nt, Human
caggcuggucuaaaac

SEQ ID NO: 1395576 - RNA, 21 nt, Human
caggcuggccaguccaggcug

SEQ ID NO: 1395577 - RNA, 23 nt, Human
caggcugggucgcccuggacugu

SEQ ID NO: 1395578 - RNA, 21 nt, Human
caggcugggucgcccuggacu

SEQ ID NO: 1395579 - RNA, 23 nt, Human
caggcccucccuguuccccagag

SEQ ID NO: 1395580 - RNA, 22 nt, Human
caggcccucccuguuccccaga

SEQ ID NO: 1395581 - RNA, 16 nt, Human
caggcccggcagggcg

SEQ ID NO: 1395582 - RNA, 20 nt, Human
caggcccuggccuccccugc

SEQ ID NO: 1395583 - RNA, 18 nt, Human
caggcccuggccuccccu

SEQ ID NO: 1395584 - RNA, 17 nt, Human
caggcccuggccucccc

SEQ ID NO: 1395585 - RNA, 15 nt, Human
caggcccuggccucc

SEQ ID NO: 1395586 - RNA, 14 nt, Human
caggcccuggccuc

SEQ ID NO: 1395587 - RNA, 21 nt, Human
caggcccuuauuuucaagaaa

SEQ ID NO: 1395588 - RNA, 22 nt, Human
caggcccuggccuccccugcca

SEQ ID NO: 1395589 - RNA, 12 nt, Human
caggcucucuuu

SEQ ID NO: 1395590 - RNA, 21 nt, Human
caggcucguggacugaguggg

SEQ ID NO: 1395591 - RNA, 23 nt, Human
caggcucggccugcccccacccc

SEQ ID NO: 1395592 - RNA, 20 nt, Human
caggcucggccugcccccac

SEQ ID NO: 1395593 - RNA, 19 nt, Human
caggcucggccugccccca

SEQ ID NO: 1395594 - RNA, 16 nt, Human
caggcucggccugccc

SEQ ID NO: 1395595 - RNA, 15 nt, Human
caggcucggccugcc

SEQ ID NO: 1395596 - RNA, 14 nt, Human
caggcucggccugc

SEQ ID NO: 1395597 - RNA, 23 nt, Human
caggcucccagggacaccuggga

SEQ ID NO: 1395598 - RNA, 22 nt, Human
caggcucccagggacaccuggg

SEQ ID NO: 1395599 - RNA, 19 nt, Human
caggcucccagggacaccu

SEQ ID NO: 1395600 - RNA, 16 nt, Human
caggcucccagggaca

SEQ ID NO: 1395601 - RNA, 14 nt, Human
caggcucccaggga

SEQ ID NO: 1395602 - RNA, 21 nt, Human
caggcucaggcaggggccucc

SEQ ID NO: 1395603 - RNA, 18 nt, Human
caggcucaaacaaugaca

SEQ ID NO: 1395604 - RNA, 19 nt, Human
caggcucaggcaggggccu

SEQ ID NO: 1395605 - RNA, 15 nt, Human
caggcucaggcaggg

SEQ ID NO: 1395606 - RNA, 14 nt, Human
caggcucaggcagg

SEQ ID NO: 1395607 - RNA, 15 nt, Human
caggcucagagggug

SEQ ID NO: 1395608 - RNA, 11 nt, Human
caggcucagag

SEQ ID NO: 1395609 - RNA, 14 nt, Human
caggccgcccugcg

SEQ ID NO: 1395610 - RNA, 19 nt, Human
caggcuagauguauguacu

SEQ ID NO: 1395611 - RNA, 13 nt, Human
caggcuagaugua

SEQ ID NO: 1395612 - RNA, 23 nt, Human
cagggaaggcaggcagggcucuc

SEQ ID NO: 1395613 - RNA, 22 nt, Human
cagggaaggcaggcagggcucu

SEQ ID NO: 1395614 - RNA, 21 nt, Human
cagggaaggcaggcagggcuc

SEQ ID NO: 1395615 - RNA, 20 nt, Human
cagggaaggcaggcagggcu

SEQ ID NO: 1395616 - RNA, 18 nt, Human
cagggaaggcaggcaggg

SEQ ID NO: 1395617 - RNA, 17 nt, Human
cagggaaggcaggcagg

SEQ ID NO: 1395618 - RNA, 16 nt, Human
cagggaaggcaggcag

SEQ ID NO: 1395619 - RNA, 18 nt, Human
cagggaaggaggagccug

SEQ ID NO: 1395620 - RNA, 16 nt, Human
cagggaaggaggagcc

SEQ ID NO: 1395621 - RNA, 15 nt, Human
cagggaaggaggagc

SEQ ID NO: 1395622 - RNA, 14 nt, Human
cagggaaggaggag

SEQ ID NO: 1395623 - RNA, 15 nt, Human
cagggaaggcaggca

SEQ ID NO: 1395624 - RNA, 14 nt, Human
cagggaaggcaggc

SEQ ID NO: 1395625 - RNA, 13 nt, Human
cagggaaggcagg

SEQ ID NO: 1395626 - RNA, 12 nt, Human
cagggaaggcag

SEQ ID NO: 1395627 - RNA, 18 nt, Human
cagggaaggaucccauga

SEQ ID NO: 1395628 - RNA, 23 nt, Human
cagggaaggaggagccuguccug

SEQ ID NO: 1395629 - RNA, 22 nt, Human
cagggaaggaggagccuguccu

SEQ ID NO: 1395630 - RNA, 21 nt, Human
cagggaaggaggagccugucc

SEQ ID NO: 1395631 - RNA, 20 nt, Human
cagggaaggaggagccuguc

SEQ ID NO: 1395632 - RNA, 13 nt, Human
cagggaaggaucc

SEQ ID NO: 1395633 - RNA, 17 nt, Human
cagggacaccugggaga

SEQ ID NO: 1395634 - RNA, 22 nt, Human
cagggacaccugggagaaaucu

SEQ ID NO: 1395635 - RNA, 18 nt, Human
cagggaauuaggccccca

SEQ ID NO: 1395636 - RNA, 18 nt, Human
cagggacagaggccccag

SEQ ID NO: 1395637 - RNA, 16 nt, Human
cagggacagaggcccc

SEQ ID NO: 1395638 - RNA, 14 nt, Human
cagggacagaggcc

SEQ ID NO: 1395639 - RNA, 20 nt, Human
cagggaaaauuauuugcaua

SEQ ID NO: 1395640 - RNA, 18 nt, Human
cagggaacauggggagga

SEQ ID NO: 1395641 - RNA, 20 nt, Human
cagggaacauggggaggagg

SEQ ID NO: 1395642 - RNA, 17 nt, Human
cagggaagcagcagccu

SEQ ID NO: 1395643 - RNA, 15 nt, Human
cagggaagcagcagc

SEQ ID NO: 1395644 - RNA, 18 nt, Human
cagggaaaauaggcagga

SEQ ID NO: 1395645 - RNA, 15 nt, Human
cagggaaaauaggca

SEQ ID NO: 1395646 - RNA, 14 nt, Human
caggcuuuuguuuc

SEQ ID NO: 1395647 - RNA, 24 nt, Human
cagggccggggaacuggccaagcu

SEQ ID NO: 1395648 - RNA, 23 nt, Human
cagggccggggaacuggccaagc

SEQ ID NO: 1395649 - RNA, 22 nt, Human
cagggccggggaacuggccaag

SEQ ID NO: 1395650 - RNA, 20 nt, Human
cagggccggggaacuggcca

SEQ ID NO: 1395651 - RNA, 12 nt, Human
cagggccgggga

SEQ ID NO: 1395652 - RNA, 22 nt, Human
cagggccccucuccccagggaa

SEQ ID NO: 1395653 - RNA, 15 nt, Human
cagggccccucuccc

SEQ ID NO: 1395654 - RNA, 22 nt, Human
cagggccccucacccugccuua

SEQ ID NO: 1395655 - RNA, 21 nt, Human
cagggccccucacccugccuu

SEQ ID NO: 1395656 - RNA, 18 nt, Human
cagggccccucacccugc

SEQ ID NO: 1395657 - RNA, 21 nt, Human
cagggcccccaucucaugccc

SEQ ID NO: 1395658 - RNA, 16 nt, Human
cagggcccccaucuca

SEQ ID NO: 1395659 - RNA, 15 nt, Human
cagggcccccaucuc

SEQ ID NO: 1395660 - RNA, 20 nt, Human
cagggccccaggcauugcca

SEQ ID NO: 1395661 - RNA, 22 nt, Human
cagggcccagagcccagcucca

SEQ ID NO: 1395662 - RNA, 21 nt, Human
cagggcccagagcccagcucc

SEQ ID NO: 1395663 - RNA, 19 nt, Human
cagggcccagagcccagcu

SEQ ID NO: 1395664 - RNA, 18 nt, Human
cagggcccagagcccagc

SEQ ID NO: 1395665 - RNA, 16 nt, Human
cagggcccagagccca

SEQ ID NO: 1395666 - RNA, 15 nt, Human
cagggcccagagccc

SEQ ID NO: 1395667 - RNA, 14 nt, Human
cagggcccagagcc

SEQ ID NO: 1395668 - RNA, 13 nt, Human
cagggcccagagc

SEQ ID NO: 1395669 - RNA, 12 nt, Human
cagggcccagag

SEQ ID NO: 1395670 - RNA, 22 nt, Human
cagggccaugcugaggccuggg

SEQ ID NO: 1395671 - RNA, 23 nt, Human
cagggccaugcugaggccugggc

SEQ ID NO: 1395672 - RNA, 21 nt, Human
cagggccaugcugaggccugg

SEQ ID NO: 1395673 - RNA, 18 nt, Human
cagggccaugcugaggcc

SEQ ID NO: 1395674 - RNA, 17 nt, Human
cagggccaugcugaggc

SEQ ID NO: 1395675 - RNA, 16 nt, Human
cagggccaugcugagg

SEQ ID NO: 1395676 - RNA, 14 nt, Human
cagggccaugcuga

SEQ ID NO: 1395677 - RNA, 17 nt, Human
cagggccaggccucucc

SEQ ID NO: 1395678 - RNA, 15 nt, Human
cagggccagccucua

SEQ ID NO: 1395679 - RNA, 19 nt, Human
cagggccagccucuagagc

SEQ ID NO: 1395680 - RNA, 14 nt, Human
cagggccagccucu

SEQ ID NO: 1395681 - RNA, 23 nt, Human
cagggccacgcuccagcugcccc

SEQ ID NO: 1395682 - RNA, 22 nt, Human
cagggccacgcuccagcugccc

SEQ ID NO: 1395683 - RNA, 20 nt, Human
cagggccacgcuccagcugc

SEQ ID NO: 1395684 - RNA, 18 nt, Human
cagggccacgcuccagcu

SEQ ID NO: 1395685 - RNA, 17 nt, Human
cagggccacgcuccagc

SEQ ID NO: 1395686 - RNA, 16 nt, Human
cagggccacgcuccag

SEQ ID NO: 1395687 - RNA, 16 nt, Human
cagggcaucucugggc

SEQ ID NO: 1395688 - RNA, 23 nt, Human
cagggcaguaccugagggucugu

SEQ ID NO: 1395689 - RNA, 21 nt, Human
cagggcagucauuggcugucu

SEQ ID NO: 1395690 - RNA, 19 nt, Human
cagggcaguaccugagggu

SEQ ID NO: 1395691 - RNA, 15 nt, Human
cagggcaguaccuga

SEQ ID NO: 1395692 - RNA, 14 nt, Human
cagggcaguaccug

SEQ ID NO: 1395693 - RNA, 13 nt, Human
cagggcagggccc

SEQ ID NO: 1395694 - RNA, 15 nt, Human
cagggcaugccacgu

SEQ ID NO: 1395695 - RNA, 24 nt, Human
cagggcaucucugggcuggaugag

SEQ ID NO: 1395696 - RNA, 20 nt, Human
cagggcaucucugggcugga

SEQ ID NO: 1395697 - RNA, 19 nt, Human
cagggcaucucugggcugg

SEQ ID NO: 1395698 - RNA, 18 nt, Human
cagggcaucucugggcug

SEQ ID NO: 1395699 - RNA, 17 nt, Human
cagggcaucucugggcu

SEQ ID NO: 1395700 - RNA, 22 nt, Human
cagggcagcgccaggcugacca

SEQ ID NO: 1395701 - RNA, 19 nt, Human
cagggcagcgccaggcuga

SEQ ID NO: 1395702 - RNA, 18 nt, Human
cagggcagcgccaggcug

SEQ ID NO: 1395703 - RNA, 17 nt, Human
cagggcagcgccaggcu

SEQ ID NO: 1395704 - RNA, 16 nt, Human
cagggcagcgccaggc

SEQ ID NO: 1395705 - RNA, 15 nt, Human
cagggcagcgccagg

SEQ ID NO: 1395706 - RNA, 14 nt, Human
cagggcagcgccag

SEQ ID NO: 1395707 - RNA, 13 nt, Human
cagggcagcgcca

SEQ ID NO: 1395708 - RNA, 23 nt, Human
cagggcagccagggagagcccag

SEQ ID NO: 1395709 - RNA, 22 nt, Human
cagggcagccagggagagccca

SEQ ID NO: 1395710 - RNA, 20 nt, Human
cagggcagccagggagagcc

SEQ ID NO: 1395711 - RNA, 18 nt, Human
cagggcagccagggagag

SEQ ID NO: 1395712 - RNA, 17 nt, Human
cagggcagccagggaga

SEQ ID NO: 1395713 - RNA, 16 nt, Human
cagggcagccagggag

SEQ ID NO: 1395714 - RNA, 15 nt, Human
cagggcagccaggga

SEQ ID NO: 1395715 - RNA, 14 nt, Human
cagggcagccaggg

SEQ ID NO: 1395716 - RNA, 13 nt, Human
cagggcagccagg

SEQ ID NO: 1395717 - RNA, 12 nt, Human
cagggcagccag

SEQ ID NO: 1395718 - RNA, 19 nt, Human
cagggcagagugagaccca

SEQ ID NO: 1395719 - RNA, 13 nt, Human
cagggcagaguga

SEQ ID NO: 1395720 - RNA, 21 nt, Human
cagggcacaggagcuaccugu

SEQ ID NO: 1395721 - RNA, 22 nt, Human
cagggcacaggagcuaccugug

SEQ ID NO: 1395722 - RNA, 20 nt, Human
cagggcacaggagcuaccug

SEQ ID NO: 1395723 - RNA, 19 nt, Human
cagggcacaggagcuaccu

SEQ ID NO: 1395724 - RNA, 18 nt, Human
cagggcacaggagcuacc

SEQ ID NO: 1395725 - RNA, 16 nt, Human
cagggcacaggagcua

SEQ ID NO: 1395726 - RNA, 15 nt, Human
cagggcacaggagcu

SEQ ID NO: 1395727 - RNA, 14 nt, Human
cagggcacaggagc

SEQ ID NO: 1395728 - RNA, 13 nt, Human
cagggcacaggag

SEQ ID NO: 1395729 - RNA, 12 nt, Human
cagggcacagga

SEQ ID NO: 1395730 - RNA, 22 nt, Human
cagggauguggguuccacagac

SEQ ID NO: 1395731 - RNA, 20 nt, Human
cagggauuaaccucugcacu

SEQ ID NO: 1395732 - RNA, 19 nt, Human
cagggauuaaccucugcac

SEQ ID NO: 1395733 - RNA, 18 nt, Human
cagggauuaaccucugca

SEQ ID NO: 1395734 - RNA, 17 nt, Human
cagggauuaaccucugc

SEQ ID NO: 1395735 - RNA, 21 nt, Human
cagggauguggguuccacaga

SEQ ID NO: 1395736 - RNA, 20 nt, Human
cagggauguggguuccacag

SEQ ID NO: 1395737 - RNA, 13 nt, Human
cagggaugugggu

SEQ ID NO: 1395738 - RNA, 12 nt, Human
cagggauguggg

SEQ ID NO: 1395739 - RNA, 13 nt, Human
cagggagaagcuc

SEQ ID NO: 1395740 - RNA, 12 nt, Human
cagggagaagcu

SEQ ID NO: 1395741 - RNA, 21 nt, Human
cagggacuucaggaucaaguc

SEQ ID NO: 1395742 - RNA, 23 nt, Human
cagggcaaagccaggucccucuc

SEQ ID NO: 1395743 - RNA, 22 nt, Human
cagggcaaagccaggucccucu

SEQ ID NO: 1395744 - RNA, 20 nt, Human
cagggcaaagccaggucccu

SEQ ID NO: 1395745 - RNA, 18 nt, Human
cagggcaaagccaggucc

SEQ ID NO: 1395746 - RNA, 17 nt, Human
cagggcaaagccagguc

SEQ ID NO: 1395747 - RNA, 16 nt, Human
cagggcaaagccaggu

SEQ ID NO: 1395748 - RNA, 14 nt, Human
cagggcaaagccag

SEQ ID NO: 1395749 - RNA, 13 nt, Human
cagggcaaagcca

SEQ ID NO: 1395750 - RNA, 12 nt, Human
cagggcaaagcc

SEQ ID NO: 1395751 - RNA, 18 nt, Human
cagggcaaugaugaauga

SEQ ID NO: 1395752 - RNA, 15 nt, Human
cagggcaaggccauu

SEQ ID NO: 1395753 - RNA, 22 nt, Human
cagggaccacacccuguacugu

SEQ ID NO: 1395754 - RNA, 16 nt, Human
cagggaccacacccug

SEQ ID NO: 1395755 - RNA, 14 nt, Human
cagggacagcaacu

SEQ ID NO: 1395756 - RNA, 23 nt, Human
cagggacagaggccccagccucc

SEQ ID NO: 1395757 - RNA, 21 nt, Human
cagggacagaggccccagccu

SEQ ID NO: 1395758 - RNA, 19 nt, Human
cagggacagaggccccagc

SEQ ID NO: 1395759 - RNA, 12 nt, Human
cagggacucagg

SEQ ID NO: 1395760 - RNA, 14 nt, Human
cagggaccauggcu

SEQ ID NO: 1395761 - RNA, 21 nt, Human
cagggaccgcccccugucucu

SEQ ID NO: 1395762 - RNA, 23 nt, Human
cagggaccggcggaccccagcca

SEQ ID NO: 1395763 - RNA, 22 nt, Human
caggggcugcuuccuccuggaa

SEQ ID NO: 1395764 - RNA, 20 nt, Human
caggggcugcuuccuccugg

SEQ ID NO: 1395765 - RNA, 19 nt, Human
caggggcugcuuccuccug

SEQ ID NO: 1395766 - RNA, 18 nt, Human
caggggcugcuuccuccu

SEQ ID NO: 1395767 - RNA, 16 nt, Human
caggggcugcuuccuc

SEQ ID NO: 1395768 - RNA, 13 nt, Human
caggggcugcuuc

SEQ ID NO: 1395769 - RNA, 18 nt, Human
caggggcucccuccgccc

SEQ ID NO: 1395770 - RNA, 21 nt, Human
caggggcucccuccgccccca

SEQ ID NO: 1395771 - RNA, 14 nt, Human
caggggcucccucc

SEQ ID NO: 1395772 - RNA, 16 nt, Human
caggggccugcccagu

SEQ ID NO: 1395773 - RNA, 23 nt, Human
caggggccuggagauccuccugc

SEQ ID NO: 1395774 - RNA, 22 nt, Human
caggggccuggagauccuccug

SEQ ID NO: 1395775 - RNA, 15 nt, Human
caggggccuggagau

SEQ ID NO: 1395776 - RNA, 14 nt, Human
caggggccuggaga

SEQ ID NO: 1395777 - RNA, 13 nt, Human
caggggccuggag

SEQ ID NO: 1395778 - RNA, 12 nt, Human
caggggccugga

SEQ ID NO: 1395779 - RNA, 15 nt, Human
caggggcccuggagc

SEQ ID NO: 1395780 - RNA, 17 nt, Human
caggggcccuggagcag

SEQ ID NO: 1395781 - RNA, 18 nt, Human
caggggcccuggagcagc

SEQ ID NO: 1395782 - RNA, 20 nt, Human
caggggcccuggagcagcca

SEQ ID NO: 1395783 - RNA, 22 nt, Human
caggggcccgcgauguggaacu

SEQ ID NO: 1395784 - RNA, 18 nt, Human
caggggcagccccaggcc

SEQ ID NO: 1395785 - RNA, 14 nt, Human
caggggcagcccca

SEQ ID NO: 1395786 - RNA, 14 nt, Human
cagggccugucuca

SEQ ID NO: 1395787 - RNA, 22 nt, Human
cagggccuggggagauggagga

SEQ ID NO: 1395788 - RNA, 22 nt, Human
caggggagcagaggggcagagg

SEQ ID NO: 1395789 - RNA, 21 nt, Human
caggggagcagaggggcagag

SEQ ID NO: 1395790 - RNA, 20 nt, Human
caggggagcagaggggcaga

SEQ ID NO: 1395791 - RNA, 16 nt, Human
caggggagcagagggg

SEQ ID NO: 1395792 - RNA, 22 nt, Human
caggggacaggaguccacuuug

SEQ ID NO: 1395793 - RNA, 16 nt, Human
caggggacaggagucc

SEQ ID NO: 1395794 - RNA, 15 nt, Human
cagggcggggguggc

SEQ ID NO: 1395795 - RNA, 22 nt, Human
cagggcgggcagagggcuggag

SEQ ID NO: 1395796 - RNA, 21 nt, Human
cagggcgggcagagggcugga

SEQ ID NO: 1395797 - RNA, 20 nt, Human
cagggcgggcagagggcugg

SEQ ID NO: 1395798 - RNA, 19 nt, Human
cagggcgggcagagggcug

SEQ ID NO: 1395799 - RNA, 17 nt, Human
cagggcgggcagagggc

SEQ ID NO: 1395800 - RNA, 16 nt, Human
cagggcgggcagaggg

SEQ ID NO: 1395801 - RNA, 16 nt, Human
caggggacaggauggu

SEQ ID NO: 1395802 - RNA, 11 nt, Human
caggggacagg

SEQ ID NO: 1395803 - RNA, 19 nt, Human
cagggggucuggcuggugu

SEQ ID NO: 1395804 - RNA, 18 nt, Human
cagggggucuggcuggug

SEQ ID NO: 1395805 - RNA, 17 nt, Human
cagggggucuggcuggu

SEQ ID NO: 1395806 - RNA, 16 nt, Human
cagggggucuggcugg

SEQ ID NO: 1395807 - RNA, 14 nt, Human
cagggggucuggcu

SEQ ID NO: 1395808 - RNA, 13 nt, Human
cagggggucuggc

SEQ ID NO: 1395809 - RNA, 19 nt, Human
caggggggugaggagcugg

SEQ ID NO: 1395810 - RNA, 18 nt, Human
caggggggugaggagcug

SEQ ID NO: 1395811 - RNA, 15 nt, Human
caggggggugaggag

SEQ ID NO: 1395812 - RNA, 21 nt, Human
cagggggcugcugcugggcuc

SEQ ID NO: 1395813 - RNA, 23 nt, Human
cagggggcugcugcugggcucag

SEQ ID NO: 1395814 - RNA, 20 nt, Human
cagggggcugcugcugggcu

SEQ ID NO: 1395815 - RNA, 18 nt, Human
cagggggcugcugcuggg

SEQ ID NO: 1395816 - RNA, 15 nt, Human
cagggggcugcugcu

SEQ ID NO: 1395817 - RNA, 14 nt, Human
cagggggcugcugc

SEQ ID NO: 1395818 - RNA, 13 nt, Human
cagggggcugcug

SEQ ID NO: 1395819 - RNA, 12 nt, Human
cagggggcugcu

SEQ ID NO: 1395820 - RNA, 22 nt, Human
cagggggagcugggccuggucu

SEQ ID NO: 1395821 - RNA, 19 nt, Human
cagggggaagguggggucc

SEQ ID NO: 1395822 - RNA, 16 nt, Human
caggggcuugacuuuu

SEQ ID NO: 1395823 - RNA, 13 nt, Human
caggggcuugacu

SEQ ID NO: 1395824 - RNA, 20 nt, Human
caggggcuuccuggugcugg

SEQ ID NO: 1395825 - RNA, 17 nt, Human
caggggcuuccuggugc

SEQ ID NO: 1395826 - RNA, 16 nt, Human
caggggcuuccuggug

SEQ ID NO: 1395827 - RNA, 15 nt, Human
caggggcuuccuggu

SEQ ID NO: 1395828 - RNA, 18 nt, Human
caggggcugucccggagg

SEQ ID NO: 1395829 - RNA, 19 nt, Human
cagggggagcugggccugg

SEQ ID NO: 1395830 - RNA, 18 nt, Human
cagggggagcugggccug

SEQ ID NO: 1395831 - RNA, 15 nt, Human
cagggggcaagagga

SEQ ID NO: 1395832 - RNA, 14 nt, Human
cagugcucccucac

SEQ ID NO: 1395833 - RNA, 14 nt, Human
cagugcucgcuguu

SEQ ID NO: 1395834 - RNA, 15 nt, Human
cagugcucgcuguug

SEQ ID NO: 1395835 - RNA, 16 nt, Human
cagugcucgcuguugc

SEQ ID NO: 1395836 - RNA, 17 nt, Human
cagugcucgcuguugcu

SEQ ID NO: 1395837 - RNA, 18 nt, Human
cagugcucgcuguugcug

SEQ ID NO: 1395838 - RNA, 19 nt, Human
cagugcucgcuguugcuga

SEQ ID NO: 1395839 - RNA, 20 nt, Human
cagugcucgcuguugcugaa

SEQ ID NO: 1395840 - RNA, 21 nt, Human
cagugcucgcuguugcugaau

SEQ ID NO: 1395841 - RNA, 22 nt, Human
cagugcucgcuguugcugaaua

SEQ ID NO: 1395842 - RNA, 23 nt, Human
cagugccuuucuucucuccagug

SEQ ID NO: 1395843 - RNA, 22 nt, Human
cagugccuuccuguuuuucaca

SEQ ID NO: 1395844 - RNA, 16 nt, Human
cagugcccugagccag

SEQ ID NO: 1395845 - RNA, 15 nt, Human
cagugcccugauccc

SEQ ID NO: 1395846 - RNA, 23 nt, Human
cagugcccccacugaccagaacu

SEQ ID NO: 1395847 - RNA, 22 nt, Human
cagugcccccacugaccagaac

SEQ ID NO: 1395848 - RNA, 21 nt, Human
cagugcccccacugaccagaa

SEQ ID NO: 1395849 - RNA, 20 nt, Human
cagugcccccacugaccaga

SEQ ID NO: 1395850 - RNA, 17 nt, Human
cagugcccccacugacc

SEQ ID NO: 1395851 - RNA, 15 nt, Human
cagugcccccacuga

SEQ ID NO: 1395852 - RNA, 12 nt, Human
cagugcccccac

SEQ ID NO: 1395853 - RNA, 15 nt, Human
cagugcccugagcca

SEQ ID NO: 1395854 - RNA, 14 nt, Human
cagugcccugagcc

SEQ ID NO: 1395855 - RNA, 13 nt, Human
cagugcccugagc

SEQ ID NO: 1395856 - RNA, 22 nt, Human
cagugcccucuccccucagccu

SEQ ID NO: 1395857 - RNA, 13 nt, Human
cagugcccucucc

SEQ ID NO: 1395858 - RNA, 19 nt, Human
cagugcccucauuuuaugu

SEQ ID NO: 1395859 - RNA, 17 nt, Human
cagugcccucauuuuau

SEQ ID NO: 1395860 - RNA, 18 nt, Human
cagugacagacaggcucu

SEQ ID NO: 1395861 - RNA, 17 nt, Human
cagugacagacaggcuc

SEQ ID NO: 1395862 - RNA, 16 nt, Human
cagugacagacaggcu

SEQ ID NO: 1395863 - RNA, 15 nt, Human
cagugacagacaggc

SEQ ID NO: 1395864 - RNA, 20 nt, Human
cagugaauuguguaggagag

SEQ ID NO: 1395865 - RNA, 20 nt, Human
cagugaaugauucaguguua

SEQ ID NO: 1395866 - RNA, 18 nt, Human
cagugaaugauucagugu

SEQ ID NO: 1395867 - RNA, 17 nt, Human
cagugaaugauucagug

SEQ ID NO: 1395868 - RNA, 23 nt, Human
cagugaaguugcugcuucuccca

SEQ ID NO: 1395869 - RNA, 19 nt, Human
cagugaaguugcugcuucu

SEQ ID NO: 1395870 - RNA, 18 nt, Human
cagugaaguugcugcuuc

SEQ ID NO: 1395871 - RNA, 17 nt, Human
cagugaaguugcugcuu

SEQ ID NO: 1395872 - RNA, 16 nt, Human
cagugaaguugcugcu

SEQ ID NO: 1395873 - RNA, 15 nt, Human
cagugaaguugcugc

SEQ ID NO: 1395874 - RNA, 14 nt, Human
cagugaaguugcug

SEQ ID NO: 1395875 - RNA, 21 nt, Human
cagugaagagccacugccauu

SEQ ID NO: 1395876 - RNA, 15 nt, Human
cagugaagacuauga

SEQ ID NO: 1395877 - RNA, 16 nt, Human
cagugaagacagaagu

SEQ ID NO: 1395878 - RNA, 15 nt, Human
cagugaagacagaag

SEQ ID NO: 1395879 - RNA, 14 nt, Human
cagugaagacagaa

SEQ ID NO: 1395880 - RNA, 13 nt, Human
cagugaagacaga

SEQ ID NO: 1395881 - RNA, 17 nt, Human
cagugacccuggcuccu

SEQ ID NO: 1395882 - RNA, 16 nt, Human
cagugacccuggcucc

SEQ ID NO: 1395883 - RNA, 13 nt, Human
cagugacccuggc

SEQ ID NO: 1395884 - RNA, 12 nt, Human
cagugacagcua

SEQ ID NO: 1395885 - RNA, 15 nt, Human
cagugacagcuagga

SEQ ID NO: 1395886 - RNA, 17 nt, Human
cagugacuucugagauc

SEQ ID NO: 1395887 - RNA, 16 nt, Human
cagugacuucugagau

SEQ ID NO: 1395888 - RNA, 15 nt, Human
cagugacuucugaga

SEQ ID NO: 1395889 - RNA, 13 nt, Human
cagugacuucuga

SEQ ID NO: 1395890 - RNA, 23 nt, Human
cagugaggguaaguauuuuccug

SEQ ID NO: 1395891 - RNA, 21 nt, Human
cagugagggagggcugucauc

SEQ ID NO: 1395892 - RNA, 12 nt, Human
cagugagccuga

SEQ ID NO: 1395893 - RNA, 19 nt, Human
cagugagcagccuggagcc

SEQ ID NO: 1395894 - RNA, 22 nt, Human
cagugagcuuggaaaggaccag

SEQ ID NO: 1395895 - RNA, 22 nt, Human
caguccuggaagccagcuuucc

SEQ ID NO: 1395896 - RNA, 17 nt, Human
caguccuggaagccagc

SEQ ID NO: 1395897 - RNA, 22 nt, Human
caguccugaucagagccguggu

SEQ ID NO: 1395898 - RNA, 21 nt, Human
cagucuuccugacacuuuaau

SEQ ID NO: 1395899 - RNA, 18 nt, Human
cagucuuccugacacuuu

SEQ ID NO: 1395900 - RNA, 17 nt, Human
cagucuuccugacacuu

SEQ ID NO: 1395901 - RNA, 16 nt, Human
cagucuuccugacacu

SEQ ID NO: 1395902 - RNA, 13 nt, Human
cagucuuccugac

SEQ ID NO: 1395903 - RNA, 21 nt, Human
cagucuuccauuugcaaggga

SEQ ID NO: 1395904 - RNA, 18 nt, Human
cagucuuccauuugcaag

SEQ ID NO: 1395905 - RNA, 17 nt, Human
cagucuuccauuugcaa

SEQ ID NO: 1395906 - RNA, 15 nt, Human
cagucuuccauuugc

SEQ ID NO: 1395907 - RNA, 15 nt, Human
cagucuguggaucag

SEQ ID NO: 1395908 - RNA, 21 nt, Human
cagucuguuccccauggccac

SEQ ID NO: 1395909 - RNA, 12 nt, Human
caguccuguccu

SEQ ID NO: 1395910 - RNA, 17 nt, Human
cagugaaaaacuauuaa

SEQ ID NO: 1395911 - RNA, 14 nt, Human
cagugaaaaacuau

SEQ ID NO: 1395912 - RNA, 16 nt, Human
cagugaaagaaaauaa

SEQ ID NO: 1395913 - RNA, 20 nt, Human
cagugaaagaaaauaacaau

SEQ ID NO: 1395914 - RNA, 20 nt, Human
caguccccccacccucauuc

SEQ ID NO: 1395915 - RNA, 14 nt, Human
caguccccccaccc

SEQ ID NO: 1395916 - RNA, 13 nt, Human
caguccccuuccc

SEQ ID NO: 1395917 - RNA, 19 nt, Human
caguccccuucccuccaag

SEQ ID NO: 1395918 - RNA, 14 nt, Human
caguccccuucccu

SEQ ID NO: 1395919 - RNA, 22 nt, Human
caguccuaucugggcuuccugg

SEQ ID NO: 1395920 - RNA, 21 nt, Human
caguccuaucugggcuuccug

SEQ ID NO: 1395921 - RNA, 20 nt, Human
caguccuaucugggcuuccu

SEQ ID NO: 1395922 - RNA, 17 nt, Human
caguccuaucugggcuu

SEQ ID NO: 1395923 - RNA, 16 nt, Human
caguccuaucugggcu

SEQ ID NO: 1395924 - RNA, 15 nt, Human
caguccuaucugggc

SEQ ID NO: 1395925 - RNA, 19 nt, Human
caguccgucaaaacagauu

SEQ ID NO: 1395926 - RNA, 13 nt, Human
cagucccuccaca

SEQ ID NO: 1395927 - RNA, 16 nt, Human
caguaucaugcccugu

SEQ ID NO: 1395928 - RNA, 13 nt, Human
caguaucaugccc

SEQ ID NO: 1395929 - RNA, 23 nt, Human
caguauaauugaguuuucagugg

SEQ ID NO: 1395930 - RNA, 16 nt, Human
caguauccacuuugca

SEQ ID NO: 1395931 - RNA, 20 nt, Human
caguaucaugcccugugcaa

SEQ ID NO: 1395932 - RNA, 19 nt, Human
caguaucaugcccugugca

SEQ ID NO: 1395933 - RNA, 17 nt, Human
caguaucaugcccugug

SEQ ID NO: 1395934 - RNA, 14 nt, Human
caguaucucuucag

SEQ ID NO: 1395935 - RNA, 15 nt, Human
caguaucucuucagu

SEQ ID NO: 1395936 - RNA, 16 nt, Human
caguaucucuucaguc

SEQ ID NO: 1395937 - RNA, 17 nt, Human
caguaucucuucagucu

SEQ ID NO: 1395938 - RNA, 18 nt, Human
caguauggggguuguaaa

SEQ ID NO: 1395939 - RNA, 19 nt, Human
caguaugaauuauucaauu

SEQ ID NO: 1395940 - RNA, 19 nt, Human
caguaucucuucagucucu

SEQ ID NO: 1395941 - RNA, 22 nt, Human
caguaucucuucagucucuaua

SEQ ID NO: 1395942 - RNA, 21 nt, Human
caguaggagcccagcucugaa

SEQ ID NO: 1395943 - RNA, 15 nt, Human
caguaggagcccagc

SEQ ID NO: 1395944 - RNA, 14 nt, Human
caguaggagcccag

SEQ ID NO: 1395945 - RNA, 12 nt, Human
caguaggagccc

SEQ ID NO: 1395946 - RNA, 23 nt, Human
caguagcacaaguuauuuaaauc

SEQ ID NO: 1395947 - RNA, 21 nt, Human
caguagcacaaguuauuuaaa

SEQ ID NO: 1395948 - RNA, 18 nt, Human
caguagcacaaguuauuu

SEQ ID NO: 1395949 - RNA, 18 nt, Human
caguagauuuuccaaaug

SEQ ID NO: 1395950 - RNA, 16 nt, Human
caguagauuuuccaaa

SEQ ID NO: 1395951 - RNA, 18 nt, Human
caguagauugcagaaaau

SEQ ID NO: 1395952 - RNA, 16 nt, Human
caguagauugcagaaa

SEQ ID NO: 1395953 - RNA, 15 nt, Human
caguagauugcagaa

SEQ ID NO: 1395954 - RNA, 23 nt, Human
caguagaggcuauggacagggca

SEQ ID NO: 1395955 - RNA, 20 nt, Human
caguagaccuuguuacuucu

SEQ ID NO: 1395956 - RNA, 18 nt, Human
caguacuuugugcauucu

SEQ ID NO: 1395957 - RNA, 16 nt, Human
caguacuuugugcauu

SEQ ID NO: 1395958 - RNA, 22 nt, Human
caguaguucacauacaaaucau

SEQ ID NO: 1395959 - RNA, 14 nt, Human
caguaguucacaua

SEQ ID NO: 1395960 - RNA, 23 nt, Human
caguagucuugaugaccaaaguc

SEQ ID NO: 1395961 - RNA, 22 nt, Human
caguagguuauuuagcuuggga

SEQ ID NO: 1395962 - RNA, 20 nt, Human
caguagguuauuuagcuugg

SEQ ID NO: 1395963 - RNA, 22 nt, Human
caguaggagcccagcucugaaa

SEQ ID NO: 1395964 - RNA, 19 nt, Human
caguaggggcuuauaauaa

SEQ ID NO: 1395965 - RNA, 22 nt, Human
caguaggugcccagaauaaguu

SEQ ID NO: 1395966 - RNA, 22 nt, Human
caguaggggcuuauaauaaagg

SEQ ID NO: 1395967 - RNA, 20 nt, Human
cagucccagcggugggaccu

SEQ ID NO: 1395968 - RNA, 14 nt, Human
cagucccagagcag

SEQ ID NO: 1395969 - RNA, 15 nt, Human
cagucccagagcagg

SEQ ID NO: 1395970 - RNA, 21 nt, Human
cagucccaagcggugucucuc

SEQ ID NO: 1395971 - RNA, 19 nt, Human
cagucccaagcggugucuc

SEQ ID NO: 1395972 - RNA, 23 nt, Human
caguccaguccuaucugggcuuc

SEQ ID NO: 1395973 - RNA, 22 nt, Human
caguccaguccuaucugggcuu

SEQ ID NO: 1395974 - RNA, 21 nt, Human
caguccaguccuaucugggcu

SEQ ID NO: 1395975 - RNA, 20 nt, Human
caguccaguccuaucugggc

SEQ ID NO: 1395976 - RNA, 18 nt, Human
caguccaguccuaucugg

SEQ ID NO: 1395977 - RNA, 18 nt, Human
caguccaggcugccgugg

SEQ ID NO: 1395978 - RNA, 15 nt, Human
caguccaggcugccg

SEQ ID NO: 1395979 - RNA, 23 nt, Human
caguccaggaugcuaacaucuaa

SEQ ID NO: 1395980 - RNA, 21 nt, Human
caguccacuucugacagccuc

SEQ ID NO: 1395981 - RNA, 20 nt, Human
caguccacuucugacagccu

SEQ ID NO: 1395982 - RNA, 18 nt, Human
caguccacuucugacagc

SEQ ID NO: 1395983 - RNA, 23 nt, Human
caguccaccugaggaacugucuc

SEQ ID NO: 1395984 - RNA, 20 nt, Human
caguccaccugaggaacugu

SEQ ID NO: 1395985 - RNA, 13 nt, Human
caguccacaaaau

SEQ ID NO: 1395986 - RNA, 21 nt, Human
cagucauuggcugucuccuag

SEQ ID NO: 1395987 - RNA, 17 nt, Human
cagucauuggcugucuc

SEQ ID NO: 1395988 - RNA, 13 nt, Human
cagucauuggcug

SEQ ID NO: 1395989 - RNA, 20 nt, Human
cagucauucagauaugauuc

SEQ ID NO: 1395990 - RNA, 17 nt, Human
cagucauucagauauga

SEQ ID NO: 1395991 - RNA, 12 nt, Human
cagucacugcuc

SEQ ID NO: 1395992 - RNA, 19 nt, Human
caguauguucaaagucaaa

SEQ ID NO: 1395993 - RNA, 23 nt, Human
caguauggguuagggaaaacauu

SEQ ID NO: 1395994 - RNA, 23 nt, Human
caguauggggguuguaaauuggc

SEQ ID NO: 1395995 - RNA, 21 nt, Human
caguauggggguuguaaauug

SEQ ID NO: 1395996 - RNA, 20 nt, Human
caguauggggguuguaaauu

SEQ ID NO: 1395997 - RNA, 19 nt, Human
caguauggggguuguaaau

SEQ ID NO: 1395998 - RNA, 16 nt, Human
caguauggguuaggga

SEQ ID NO: 1395999 - RNA, 21 nt, Human
caguauggguuagggaaaaca

SEQ ID NO: 1396000 - RNA, 15 nt, Human
cagucauaacuaaau

SEQ ID NO: 1396001 - RNA, 14 nt, Human
cagucaggcccagg

SEQ ID NO: 1396002 - RNA, 21 nt, Human
cagucaggaaaggaaucauuu

SEQ ID NO: 1396003 - RNA, 22 nt, Human
cagucaggaaagagaacuucca

SEQ ID NO: 1396004 - RNA, 18 nt, Human
cagucaggaaagagaacu

SEQ ID NO: 1396005 - RNA, 15 nt, Human
cagucaggaaagaga

SEQ ID NO: 1396006 - RNA, 14 nt, Human
cagguuaagaaaau

SEQ ID NO: 1396007 - RNA, 14 nt, Human
cagguguugccaaa

SEQ ID NO: 1396008 - RNA, 13 nt, Human
cagguguugccaa

SEQ ID NO: 1396009 - RNA, 22 nt, Human
cagguguuacuguaauuccuca

SEQ ID NO: 1396010 - RNA, 20 nt, Human
cagguguuaacauuccaaga

SEQ ID NO: 1396011 - RNA, 19 nt, Human
cagguguuaacauuccaag

SEQ ID NO: 1396012 - RNA, 18 nt, Human
cagguguuaacauuccaa

SEQ ID NO: 1396013 - RNA, 17 nt, Human
cagguguuaacauucca

SEQ ID NO: 1396014 - RNA, 10 nt, Human
caguaacugu

SEQ ID NO: 1396015 - RNA, 9 nt, Human
caguaacug

SEQ ID NO: 1396016 - RNA, 18 nt, Human
caguaacuguuuuuuaag

SEQ ID NO: 1396017 - RNA, 16 nt, Human
caguaacucaucuguc

SEQ ID NO: 1396018 - RNA, 14 nt, Human
caguaacucaucug

SEQ ID NO: 1396019 - RNA, 21 nt, Human
caguaacgcgucuuccugagu

SEQ ID NO: 1396020 - RNA, 20 nt, Human
caguaacgcgucuuccugag

SEQ ID NO: 1396021 - RNA, 19 nt, Human
caguaacgcgucuuccuga

SEQ ID NO: 1396022 - RNA, 18 nt, Human
caguaacgcgucuuccug

SEQ ID NO: 1396023 - RNA, 15 nt, Human
caguaacaggcucaa

SEQ ID NO: 1396024 - RNA, 20 nt, Human
cagguucuccguuagcuccu

SEQ ID NO: 1396025 - RNA, 22 nt, Human
caguaaaugggggugcauuuga

SEQ ID NO: 1396026 - RNA, 21 nt, Human
caguaaaugggggugcauuug

SEQ ID NO: 1396027 - RNA, 23 nt, Human
cagguucccucccagaggagcca

SEQ ID NO: 1396028 - RNA, 18 nt, Human
cagguucccucccagagg

SEQ ID NO: 1396029 - RNA, 16 nt, Human
cagguucccucccaga

SEQ ID NO: 1396030 - RNA, 15 nt, Human
cagguucccucccag

SEQ ID NO: 1396031 - RNA, 14 nt, Human
cagguucccacuua

SEQ ID NO: 1396032 - RNA, 17 nt, Human
cagguucccaagcucag

SEQ ID NO: 1396033 - RNA, 15 nt, Human
cagguucccaagcuc

SEQ ID NO: 1396034 - RNA, 14 nt, Human
cagguucccaagcu

SEQ ID NO: 1396035 - RNA, 19 nt, Human
cagguuccacagaggacac

SEQ ID NO: 1396036 - RNA, 15 nt, Human
cagguuccacagagg

SEQ ID NO: 1396037 - RNA, 17 nt, Human
cagguuauaacaguguu

SEQ ID NO: 1396038 - RNA, 16 nt, Human
cagguuauaacagugu

SEQ ID NO: 1396039 - RNA, 15 nt, Human
cagguuauaacagug

SEQ ID NO: 1396040 - RNA, 23 nt, Human
caguaccuucaaacuagggccaa

SEQ ID NO: 1396041 - RNA, 22 nt, Human
caguaccugagggucuguaggu

SEQ ID NO: 1396042 - RNA, 23 nt, Human
caguaccugagggucuguagguu

SEQ ID NO: 1396043 - RNA, 21 nt, Human
caguaccugagggucuguagg

SEQ ID NO: 1396044 - RNA, 15 nt, Human
caguaccugaggguc

SEQ ID NO: 1396045 - RNA, 14 nt, Human
caguaccugagggu

SEQ ID NO: 1396046 - RNA, 24 nt, Human
caguacccucucagcuccaggugg

SEQ ID NO: 1396047 - RNA, 22 nt, Human
caguacccucucagcuccaggu

SEQ ID NO: 1396048 - RNA, 20 nt, Human
caguacccucucagcuccag

SEQ ID NO: 1396049 - RNA, 19 nt, Human
caguacccucucagcucca

SEQ ID NO: 1396050 - RNA, 16 nt, Human
caguacccucucagcu

SEQ ID NO: 1396051 - RNA, 15 nt, Human
caguacccucucagc

SEQ ID NO: 1396052 - RNA, 14 nt, Human
caguacccucucag

SEQ ID NO: 1396053 - RNA, 23 nt, Human
caguaccccauggagcugggcua

SEQ ID NO: 1396054 - RNA, 17 nt, Human
caguaccccauggagcu

SEQ ID NO: 1396055 - RNA, 23 nt, Human
caguaccauuuaauggggaggac

SEQ ID NO: 1396056 - RNA, 12 nt, Human
caguaccacaug

SEQ ID NO: 1396057 - RNA, 21 nt, Human
caguaauugguccgaucuuug

SEQ ID NO: 1396058 - RNA, 23 nt, Human
caguacacugucagcagggacug

SEQ ID NO: 1396059 - RNA, 14 nt, Human
caguaauuuagaaa

SEQ ID NO: 1396060 - RNA, 17 nt, Human
caguaauuugaggacaa

SEQ ID NO: 1396061 - RNA, 23 nt, Human
cagguggggagacugggcugagg

SEQ ID NO: 1396062 - RNA, 22 nt, Human
cagguggggagacugggcugag

SEQ ID NO: 1396063 - RNA, 20 nt, Human
cagguggggagacugggcug

SEQ ID NO: 1396064 - RNA, 19 nt, Human
cagguggggagacugggcu

SEQ ID NO: 1396065 - RNA, 21 nt, Human
caggggucugagcuccagcuc

SEQ ID NO: 1396066 - RNA, 19 nt, Human
caggggucugagcuccagc

SEQ ID NO: 1396067 - RNA, 23 nt, Human
caggggucugagcuccagcuccu

SEQ ID NO: 1396068 - RNA, 20 nt, Human
cagggggucuggcugguguu

SEQ ID NO: 1396069 - RNA, 16 nt, Human
cagggggugugucugc

SEQ ID NO: 1396070 - RNA, 14 nt, Human
caggguccugggag

SEQ ID NO: 1396071 - RNA, 17 nt, Human
caggguuuuaacuuugu

SEQ ID NO: 1396072 - RNA, 23 nt, Human
caggguccuuuugacacugcucu

SEQ ID NO: 1396073 - RNA, 22 nt, Human
caggguccuuuugacacugcuc

SEQ ID NO: 1396074 - RNA, 21 nt, Human
caggguccuuuugacacugcu

SEQ ID NO: 1396075 - RNA, 19 nt, Human
caggguccuuuugacacug

SEQ ID NO: 1396076 - RNA, 14 nt, Human
caggguccuuuuga

SEQ ID NO: 1396077 - RNA, 13 nt, Human
caggguccuggga

SEQ ID NO: 1396078 - RNA, 20 nt, Human
caggguccucuucugggccu

SEQ ID NO: 1396079 - RNA, 16 nt, Human
cagggucccucugugu

SEQ ID NO: 1396080 - RNA, 15 nt, Human
cagggucccucugug

SEQ ID NO: 1396081 - RNA, 13 nt, Human
cagggucccucug

SEQ ID NO: 1396082 - RNA, 19 nt, Human
cagggucccacagccacgu

SEQ ID NO: 1396083 - RNA, 18 nt, Human
cagggucccacagccacg

SEQ ID NO: 1396084 - RNA, 17 nt, Human
cagggucccacagccac

SEQ ID NO: 1396085 - RNA, 13 nt, Human
cagggucccacag

SEQ ID NO: 1396086 - RNA, 21 nt, Human
caggguccaacauagagccgg

SEQ ID NO: 1396087 - RNA, 13 nt, Human
cagggguuucucg

SEQ ID NO: 1396088 - RNA, 15 nt, Human
cagggguuagagcag

SEQ ID NO: 1396089 - RNA, 23 nt, Human
cagggucaaaguguuuucucuga

SEQ ID NO: 1396090 - RNA, 21 nt, Human
cagggucaaaguguuuucucu

SEQ ID NO: 1396091 - RNA, 23 nt, Human
caggguauggacuaucugucugg

SEQ ID NO: 1396092 - RNA, 18 nt, Human
caggguauggacuaucug

SEQ ID NO: 1396093 - RNA, 17 nt, Human
caggguaugaagagugu

SEQ ID NO: 1396094 - RNA, 13 nt, Human
caggguaugaaga

SEQ ID NO: 1396095 - RNA, 16 nt, Human
caggguaggcuggagu

SEQ ID NO: 1396096 - RNA, 15 nt, Human
cagguggcccuacug

SEQ ID NO: 1396097 - RNA, 22 nt, Human
cagguggcucugaggugccugu

SEQ ID NO: 1396098 - RNA, 20 nt, Human
cagguggccaaguuccucua

SEQ ID NO: 1396099 - RNA, 19 nt, Human
cagguggccaaguuccucu

SEQ ID NO: 1396100 - RNA, 18 nt, Human
cagguggccaaguuccuc

SEQ ID NO: 1396101 - RNA, 15 nt, Human
caggugcuggucccg

SEQ ID NO: 1396102 - RNA, 14 nt, Human
caggugcugguccc

SEQ ID NO: 1396103 - RNA, 18 nt, Human
caggugcuggggccuggu

SEQ ID NO: 1396104 - RNA, 17 nt, Human
caggugcuggggccugg

SEQ ID NO: 1396105 - RNA, 13 nt, Human
caggugcuggggc

SEQ ID NO: 1396106 - RNA, 22 nt, Human
cagguggaucuauuucauguuu

SEQ ID NO: 1396107 - RNA, 17 nt, Human
cagguggccaaguuccu

SEQ ID NO: 1396108 - RNA, 17 nt, Human
caggugaaaggaaauua

SEQ ID NO: 1396109 - RNA, 20 nt, Human
caggucuucaucgaaucuac

SEQ ID NO: 1396110 - RNA, 18 nt, Human
caggugaggucagcacau

SEQ ID NO: 1396111 - RNA, 19 nt, Human
caggugacugucuggggag

SEQ ID NO: 1396112 - RNA, 21 nt, Human
caggucugaagcucaacucuc

SEQ ID NO: 1396113 - RNA, 12 nt, Human
caggucuagacu

SEQ ID NO: 1396114 - RNA, 23 nt, Human
cagguccugguggggcagcuccu

SEQ ID NO: 1396115 - RNA, 21 nt, Human
cagguccugguggggcagcuc

SEQ ID NO: 1396116 - RNA, 20 nt, Human
cagguccugguggggcagcu

SEQ ID NO: 1396117 - RNA, 19 nt, Human
cagguccugguggggcagc

SEQ ID NO: 1396118 - RNA, 18 nt, Human
cagguccugguggggcag

SEQ ID NO: 1396119 - RNA, 14 nt, Human
cagguccugguggg

SEQ ID NO: 1396120 - RNA, 13 nt, Human
cagguccuggugg

SEQ ID NO: 1396121 - RNA, 20 nt, Human
cagguccucaguguccucag

SEQ ID NO: 1396122 - RNA, 20 nt, Human
cagguccucagagaauuucu

SEQ ID NO: 1396123 - RNA, 15 nt, Human
cagguccucagagaa

SEQ ID NO: 1396124 - RNA, 16 nt, Human
caggucccucucauuu

SEQ ID NO: 1396125 - RNA, 14 nt, Human
caggucccucucau

SEQ ID NO: 1396126 - RNA, 16 nt, Human
caggucccuccccuuc

SEQ ID NO: 1396127 - RNA, 16 nt, Human
cagguccaggcugugu

SEQ ID NO: 1396128 - RNA, 21 nt, Human
caggucccaaauggcccuggg

SEQ ID NO: 1396129 - RNA, 19 nt, Human
caggucccuaauaaagcug

SEQ ID NO: 1396130 - RNA, 20 nt, Human
caggucccuaauaaagcugu

SEQ ID NO: 1396131 - RNA, 21 nt, Human
caggucccuaauaaagcugug

SEQ ID NO: 1396132 - RNA, 22 nt, Human
caggucccuaauaaagcugugu

SEQ ID NO: 1396133 - RNA, 22 nt, Human
cagguauauacuuugaaaggag

SEQ ID NO: 1396134 - RNA, 18 nt, Human
cagguauauacuuugaaa

SEQ ID NO: 1396135 - RNA, 15 nt, Human
cagguauauacuuug

SEQ ID NO: 1396136 - RNA, 16 nt, Human
cagguauaccucacuu

SEQ ID NO: 1396137 - RNA, 15 nt, Human
cagguauaccucacu

SEQ ID NO: 1396138 - RNA, 14 nt, Human
cagguauaccucac

SEQ ID NO: 1396139 - RNA, 23 nt, Human
cagguaggggccccucucagccc

SEQ ID NO: 1396140 - RNA, 22 nt, Human
cagguaggggccccucucagcc

SEQ ID NO: 1396141 - RNA, 19 nt, Human
cagguaggggccccucuca

SEQ ID NO: 1396142 - RNA, 18 nt, Human
cagguaggggccccucuc

SEQ ID NO: 1396143 - RNA, 22 nt, Human
cagguaggccaagguguccuac

SEQ ID NO: 1396144 - RNA, 14 nt, Human
cagguaggccaagg

SEQ ID NO: 1396145 - RNA, 23 nt, Human
cagguaggaggcaaauaucuuga

SEQ ID NO: 1396146 - RNA, 14 nt, Human
cagguaggaggcaa

SEQ ID NO: 1396147 - RNA, 18 nt, Human
cagguagcugaaagggga

SEQ ID NO: 1396148 - RNA, 23 nt, Human
cagguagaauuaucuaauuuaua

SEQ ID NO: 1396149 - RNA, 22 nt, Human
cagguagaauuaucuaauuuau

SEQ ID NO: 1396150 - RNA, 20 nt, Human
cagguagaauuaucuaauuu

SEQ ID NO: 1396151 - RNA, 21 nt, Human
cagguacuuguaaauuauuaa

SEQ ID NO: 1396152 - RNA, 15 nt, Human
cagguaauacaaacu

SEQ ID NO: 1396153 - RNA, 14 nt, Human
cagguccaaugagc

SEQ ID NO: 1396154 - RNA, 15 nt, Human
caggucagccacugu

SEQ ID NO: 1396155 - RNA, 16 nt, Human
caggucagccacuguu

SEQ ID NO: 1396156 - RNA, 19 nt, Human
cagguccagcucuggaggg

SEQ ID NO: 1396157 - RNA, 17 nt, Human
cagguccagcucuggag

SEQ ID NO: 1396158 - RNA, 16 nt, Human
cagguccagcucugga

SEQ ID NO: 1396159 - RNA, 14 nt, Human
cagguccagcucug

SEQ ID NO: 1396160 - RNA, 13 nt, Human
cagguccagcucu

SEQ ID NO: 1396161 - RNA, 22 nt, Human
cagguccaaugagcuuucugaa

SEQ ID NO: 1396162 - RNA, 21 nt, Human
cagguccaaugagcuuucuga

SEQ ID NO: 1396163 - RNA, 19 nt, Human
cagguccaaugagcuuucu

SEQ ID NO: 1396164 - RNA, 18 nt, Human
cagguccaaugagcuuuc

SEQ ID NO: 1396165 - RNA, 17 nt, Human
cagguccaaugagcuuu

SEQ ID NO: 1396166 - RNA, 13 nt, Human
cagguccaggcug

SEQ ID NO: 1396167 - RNA, 16 nt, Human
cagguccagagagacc

SEQ ID NO: 1396168 - RNA, 23 nt, Human
cagguccagcucuggaggggagg

SEQ ID NO: 1396169 - RNA, 11 nt, Human
caggucccuaa

SEQ ID NO: 1396170 - RNA, 12 nt, Human
caggucccuaau

SEQ ID NO: 1396171 - RNA, 13 nt, Human
caggucccuaaua

SEQ ID NO: 1396172 - RNA, 14 nt, Human
caggucccuaauaa

SEQ ID NO: 1396173 - RNA, 15 nt, Human
caggucccuaauaaa

SEQ ID NO: 1396174 - RNA, 16 nt, Human
caggucccuaauaaag

SEQ ID NO: 1396175 - RNA, 17 nt, Human
caggucccuaauaaagc

SEQ ID NO: 1396176 - RNA, 18 nt, Human
caggucccuaauaaagcu

SEQ ID NO: 1396177 - RNA, 18 nt, Human
cauauuuuaaacagagga

SEQ ID NO: 1396178 - RNA, 15 nt, Human
caucaacaaaaauug

SEQ ID NO: 1396179 - RNA, 13 nt, Human
caucaacaaaaau

SEQ ID NO: 1396180 - RNA, 17 nt, Human
cauauuuuaaacagagg

SEQ ID NO: 1396181 - RNA, 16 nt, Human
cauauuuuaaacagag

SEQ ID NO: 1396182 - RNA, 19 nt, Human
cauauuuuaaaauuuguuc

SEQ ID NO: 1396183 - RNA, 13 nt, Human
cauauuuuaaaau

SEQ ID NO: 1396184 - RNA, 23 nt, Human
cauauuuguuuaugguaaaaaau

SEQ ID NO: 1396185 - RNA, 12 nt, Human
caucaacugaau

SEQ ID NO: 1396186 - RNA, 10 nt, Human
caucaacuga

SEQ ID NO: 1396187 - RNA, 15 nt, Human
cagugcuucccgagu

SEQ ID NO: 1396188 - RNA, 22 nt, Human
cagugcugugcugugcuauggu

SEQ ID NO: 1396189 - RNA, 19 nt, Human
cagugcugugcugugcuau

SEQ ID NO: 1396190 - RNA, 16 nt, Human
cagugcugugcugugc

SEQ ID NO: 1396191 - RNA, 12 nt, Human
cagugcugugcu

SEQ ID NO: 1396192 - RNA, 19 nt, Human
cagugcugauguagcaugc

SEQ ID NO: 1396193 - RNA, 23 nt, Human
cagugcugaccagacagccuccc

SEQ ID NO: 1396194 - RNA, 23 nt, Human
cagugcucuuuucuccucacugu

SEQ ID NO: 1396195 - RNA, 14 nt, Human
cagugcucuuuucu

SEQ ID NO: 1396196 - RNA, 18 nt, Human
cauaguauucaugacuau

SEQ ID NO: 1396197 - RNA, 16 nt, Human
cauaguagaacgcuau

SEQ ID NO: 1396198 - RNA, 18 nt, Human
cauaguaccaaucauuuu

SEQ ID NO: 1396199 - RNA, 16 nt, Human
cauaguaccaaucauu

SEQ ID NO: 1396200 - RNA, 24 nt, Human
cauaguaacuucuuauggaauuga

SEQ ID NO: 1396201 - RNA, 23 nt, Human
cauaguaacuucuuauggaauug

SEQ ID NO: 1396202 - RNA, 22 nt, Human
cauaguaacuucuuauggaauu

SEQ ID NO: 1396203 - RNA, 21 nt, Human
cauaguaacuucuuauggaau

SEQ ID NO: 1396204 - RNA, 22 nt, Human
cauaguaccaaucauuuuaauu

SEQ ID NO: 1396205 - RNA, 16 nt, Human
cauauaagugauugcu

SEQ ID NO: 1396206 - RNA, 13 nt, Human
cauauauaacaau

SEQ ID NO: 1396207 - RNA, 20 nt, Human
cauauauaacaaugcuguau

SEQ ID NO: 1396208 - RNA, 15 nt, Human
cauauauaacaaugc

SEQ ID NO: 1396209 - RNA, 17 nt, Human
cauauaugaggacuugu

SEQ ID NO: 1396210 - RNA, 20 nt, Human
cauauugugauucugccuuu

SEQ ID NO: 1396211 - RNA, 18 nt, Human
cauauugugauucugccu

SEQ ID NO: 1396212 - RNA, 19 nt, Human
cauauuguaaaacagguag

SEQ ID NO: 1396213 - RNA, 17 nt, Human
cauauuguaaaacaggu

SEQ ID NO: 1396214 - RNA, 16 nt, Human
cauauuguaaaacagg

SEQ ID NO: 1396215 - RNA, 13 nt, Human
cauauuguaaaac

SEQ ID NO: 1396216 - RNA, 21 nt, Human
cauauugauuuccguuaaaau

SEQ ID NO: 1396217 - RNA, 14 nt, Human
cauauugcacaugu

SEQ ID NO: 1396218 - RNA, 15 nt, Human
cauauugcacauguc

SEQ ID NO: 1396219 - RNA, 16 nt, Human
cauauugcacaugucu

SEQ ID NO: 1396220 - RNA, 17 nt, Human
cauauugcacaugucuu

SEQ ID NO: 1396221 - RNA, 18 nt, Human
cauauugcacaugucuua

SEQ ID NO: 1396222 - RNA, 19 nt, Human
cauauugcacaugucuuaa

SEQ ID NO: 1396223 - RNA, 20 nt, Human
cauauugcacaugucuuaau

SEQ ID NO: 1396224 - RNA, 21 nt, Human
cauauugcacaugucuuaaug

SEQ ID NO: 1396225 - RNA, 23 nt, Human
cauauugcacaugucuuaaugaa

SEQ ID NO: 1396226 - RNA, 22 nt, Human
cauauugcacaugucuuaauga

SEQ ID NO: 1396227 - RNA, 17 nt, Human
cauauugauuuccguua

SEQ ID NO: 1396228 - RNA, 11 nt, Human
cauaucugccu

SEQ ID NO: 1396229 - RNA, 12 nt, Human
cauaucugccuu

SEQ ID NO: 1396230 - RNA, 13 nt, Human
cauaucugccuuu

SEQ ID NO: 1396231 - RNA, 15 nt, Human
cauaucugccuuuau

SEQ ID NO: 1396232 - RNA, 18 nt, Human
cauaucugccuuuauugu

SEQ ID NO: 1396233 - RNA, 20 nt, Human
cauaucugccuuuauugugu

SEQ ID NO: 1396234 - RNA, 19 nt, Human
cauauuuguaaaaugacaa

SEQ ID NO: 1396235 - RNA, 18 nt, Human
cauauuuguaaaaugaca

SEQ ID NO: 1396236 - RNA, 16 nt, Human
cauauuuguaaaauga

SEQ ID NO: 1396237 - RNA, 15 nt, Human
cauauuuguaaaaug

SEQ ID NO: 1396238 - RNA, 14 nt, Human
cauauuuguaaaau

SEQ ID NO: 1396239 - RNA, 13 nt, Human
cauauuuguaaaa

SEQ ID NO: 1396240 - RNA, 16 nt, Human
cauauuguugaaaggu

SEQ ID NO: 1396241 - RNA, 13 nt, Human
cauauuguugaaa

SEQ ID NO: 1396242 - RNA, 13 nt, Human
cauauuguuacug

SEQ ID NO: 1396243 - RNA, 19 nt, Human
cauauuguugcauugcuuu

SEQ ID NO: 1396244 - RNA, 19 nt, Human
cauauuguuacugguacca

SEQ ID NO: 1396245 - RNA, 20 nt, Human
cauccagagucccugccugg

SEQ ID NO: 1396246 - RNA, 18 nt, Human
cauccagagucccugccu

SEQ ID NO: 1396247 - RNA, 17 nt, Human
cauccagagucccugcc

SEQ ID NO: 1396248 - RNA, 13 nt, Human
cauccagaguccc

SEQ ID NO: 1396249 - RNA, 14 nt, Human
cauccaugccucag

SEQ ID NO: 1396250 - RNA, 14 nt, Human
cauccaucaucaug

SEQ ID NO: 1396251 - RNA, 13 nt, Human
cauccaucaucau

SEQ ID NO: 1396252 - RNA, 13 nt, Human
cauccaguucaug

SEQ ID NO: 1396253 - RNA, 14 nt, Human
cauccagucuauuc

SEQ ID NO: 1396254 - RNA, 21 nt, Human
cauccagagucccugccugga

SEQ ID NO: 1396255 - RNA, 14 nt, Human
caucauuauuuaug

SEQ ID NO: 1396256 - RNA, 19 nt, Human
caucauuauuuauguauug

SEQ ID NO: 1396257 - RNA, 15 nt, Human
caucauuauuuaugu

SEQ ID NO: 1396258 - RNA, 14 nt, Human
caucauucucuguc

SEQ ID NO: 1396259 - RNA, 12 nt, Human
caucauucucug

SEQ ID NO: 1396260 - RNA, 17 nt, Human
caucauucucugucuca

SEQ ID NO: 1396261 - RNA, 16 nt, Human
caucauucucugucuc

SEQ ID NO: 1396262 - RNA, 15 nt, Human
caucauucucugucu

SEQ ID NO: 1396263 - RNA, 21 nt, Human
caucccugggccuugggcucc

SEQ ID NO: 1396264 - RNA, 17 nt, Human
caucccugggccuuggg

SEQ ID NO: 1396265 - RNA, 23 nt, Human
caucccugggccugcugcugaga

SEQ ID NO: 1396266 - RNA, 22 nt, Human
caucccugggccugcugcugag

SEQ ID NO: 1396267 - RNA, 21 nt, Human
caucccugggccugcugcuga

SEQ ID NO: 1396268 - RNA, 20 nt, Human
caucccugggccugcugcug

SEQ ID NO: 1396269 - RNA, 19 nt, Human
caucccugggccugcugcu

SEQ ID NO: 1396270 - RNA, 18 nt, Human
caucccugggccugcugc

SEQ ID NO: 1396271 - RNA, 17 nt, Human
caucccugggccugcug

SEQ ID NO: 1396272 - RNA, 16 nt, Human
caucccugggccugcu

SEQ ID NO: 1396273 - RNA, 15 nt, Human
caucccugggccugc

SEQ ID NO: 1396274 - RNA, 14 nt, Human
caucccugggccug

SEQ ID NO: 1396275 - RNA, 13 nt, Human
caucccugggccu

SEQ ID NO: 1396276 - RNA, 12 nt, Human
caucccugggcc

SEQ ID NO: 1396277 - RNA, 11 nt, Human
caucccugggc

SEQ ID NO: 1396278 - RNA, 23 nt, Human
caucccuggcccccucccuggau

SEQ ID NO: 1396279 - RNA, 22 nt, Human
caucccuggcccccucccugga

SEQ ID NO: 1396280 - RNA, 21 nt, Human
caucccuggcccccucccugg

SEQ ID NO: 1396281 - RNA, 20 nt, Human
caucccuggcccccucccug

SEQ ID NO: 1396282 - RNA, 13 nt, Human
caucccuggcccc

SEQ ID NO: 1396283 - RNA, 12 nt, Human
caucccuggccc

SEQ ID NO: 1396284 - RNA, 15 nt, Human
cauccaugccucaga

SEQ ID NO: 1396285 - RNA, 13 nt, Human
caucccuccuggg

SEQ ID NO: 1396286 - RNA, 14 nt, Human
cauccgcaggugcu

SEQ ID NO: 1396287 - RNA, 13 nt, Human
cauccgcaggugc

SEQ ID NO: 1396288 - RNA, 15 nt, Human
caucccuuuuucaau

SEQ ID NO: 1396289 - RNA, 16 nt, Human
caucccuuugcccaga

SEQ ID NO: 1396290 - RNA, 22 nt, Human
caucccugggccuugggcuccg

SEQ ID NO: 1396291 - RNA, 18 nt, Human
caucccuuaccugggaaa

SEQ ID NO: 1396292 - RNA, 24 nt, Human
caucagugcucccucacaugucag

SEQ ID NO: 1396293 - RNA, 16 nt, Human
caucagugcucccuca

SEQ ID NO: 1396294 - RNA, 15 nt, Human
caucagugcucccuc

SEQ ID NO: 1396295 - RNA, 19 nt, Human
caucaggguaggcuggagu

SEQ ID NO: 1396296 - RNA, 15 nt, Human
caucaggcuuucuua

SEQ ID NO: 1396297 - RNA, 15 nt, Human
caucaggcuuucuuu

SEQ ID NO: 1396298 - RNA, 11 nt, Human
caucaggcuuu

SEQ ID NO: 1396299 - RNA, 17 nt, Human
caucacugaguuuucca

SEQ ID NO: 1396300 - RNA, 23 nt, Human
caucacugaguuuuccauggcag

SEQ ID NO: 1396301 - RNA, 16 nt, Human
caucacugaguuuucc

SEQ ID NO: 1396302 - RNA, 19 nt, Human
caucacguuagcuguccca

SEQ ID NO: 1396303 - RNA, 20 nt, Human
caucaccucagauggcagcu

SEQ ID NO: 1396304 - RNA, 22 nt, Human
caucaccucagauggcagcuuu

SEQ ID NO: 1396305 - RNA, 17 nt, Human
caucaccucagauggca

SEQ ID NO: 1396306 - RNA, 16 nt, Human
caucaccucagauggc

SEQ ID NO: 1396307 - RNA, 21 nt, Human
caucaccuacucacacaggca

SEQ ID NO: 1396308 - RNA, 20 nt, Human
caucaccuacucacacaggc

SEQ ID NO: 1396309 - RNA, 14 nt, Human
caucaacugaauga

SEQ ID NO: 1396310 - RNA, 14 nt, Human
caucaccuacucac

SEQ ID NO: 1396311 - RNA, 23 nt, Human
caucaugccucugaggccagccu

SEQ ID NO: 1396312 - RNA, 22 nt, Human
caucaugccucugaggccagcc

SEQ ID NO: 1396313 - RNA, 20 nt, Human
caucaugccucugaggccag

SEQ ID NO: 1396314 - RNA, 19 nt, Human
caucaugccucugaggcca

SEQ ID NO: 1396315 - RNA, 18 nt, Human
caucaugccucugaggcc

SEQ ID NO: 1396316 - RNA, 17 nt, Human
caucaugccucugaggc

SEQ ID NO: 1396317 - RNA, 16 nt, Human
caucaugccucugagg

SEQ ID NO: 1396318 - RNA, 15 nt, Human
caucaugccucugag

SEQ ID NO: 1396319 - RNA, 14 nt, Human
caucaugccucuga

SEQ ID NO: 1396320 - RNA, 13 nt, Human
caucaugccucug

SEQ ID NO: 1396321 - RNA, 15 nt, Human
caucauggcuaucug

SEQ ID NO: 1396322 - RNA, 21 nt, Human
caucauggccagcuggaggca

SEQ ID NO: 1396323 - RNA, 15 nt, Human
caucauggccagcug

SEQ ID NO: 1396324 - RNA, 14 nt, Human
caucauggccagcu

SEQ ID NO: 1396325 - RNA, 13 nt, Human
caucauggccagc

SEQ ID NO: 1396326 - RNA, 24 nt, Human
caucaucauggccagcuggaggca

SEQ ID NO: 1396327 - RNA, 18 nt, Human
caucaucauggccagcug

SEQ ID NO: 1396328 - RNA, 15 nt, Human
caucaucauggccag

SEQ ID NO: 1396329 - RNA, 15 nt, Human
caucauccucuggcu

SEQ ID NO: 1396330 - RNA, 14 nt, Human
caucauccucuggc

SEQ ID NO: 1396331 - RNA, 13 nt, Human
caucauccucugg

SEQ ID NO: 1396332 - RNA, 21 nt, Human
caucaucuccugccuuccucc

SEQ ID NO: 1396333 - RNA, 20 nt, Human
caucaucuccugccuuccuc

SEQ ID NO: 1396334 - RNA, 13 nt, Human
caucaucuccugc

SEQ ID NO: 1396335 - RNA, 14 nt, Human
caucaucucagcuc

SEQ ID NO: 1396336 - RNA, 15 nt, Human
caucaucucagcuca

SEQ ID NO: 1396337 - RNA, 20 nt, Human
cauccgcaggugcugguccc

SEQ ID NO: 1396338 - RNA, 21 nt, Human
cauccuaccacaaugcagugc

SEQ ID NO: 1396339 - RNA, 15 nt, Human
cauccuacccccugu

SEQ ID NO: 1396340 - RNA, 16 nt, Human
caucuccugccuuccu

SEQ ID NO: 1396341 - RNA, 17 nt, Human
caucucccuuuuccaug

SEQ ID NO: 1396342 - RNA, 23 nt, Human
caucucccuggugcuuaugcucu

SEQ ID NO: 1396343 - RNA, 19 nt, Human
caucucccuggugcuuaug

SEQ ID NO: 1396344 - RNA, 16 nt, Human
caucucccuggugcuu

SEQ ID NO: 1396345 - RNA, 15 nt, Human
caucucccuggugcu

SEQ ID NO: 1396346 - RNA, 14 nt, Human
caucucccuggugc

SEQ ID NO: 1396347 - RNA, 23 nt, Human
cauccuaccacaaugcagugccu

SEQ ID NO: 1396348 - RNA, 18 nt, Human
cauccuacccccugugcc

SEQ ID NO: 1396349 - RNA, 20 nt, Human
caucucccuggugcuuaugc

SEQ ID NO: 1396350 - RNA, 22 nt, Human
caucuccugccuuccuccuggg

SEQ ID NO: 1396351 - RNA, 19 nt, Human
caucuccugccuuccuccu

SEQ ID NO: 1396352 - RNA, 22 nt, Human
caucucugggcuggaugagcuc

SEQ ID NO: 1396353 - RNA, 19 nt, Human
caucucugggcuggaugag

SEQ ID NO: 1396354 - RNA, 18 nt, Human
caucucugggcuggauga

SEQ ID NO: 1396355 - RNA, 14 nt, Human
caucucugggcugg

SEQ ID NO: 1396356 - RNA, 12 nt, Human
caucucugggcu

SEQ ID NO: 1396357 - RNA, 18 nt, Human
caucucucugcccaaccc

SEQ ID NO: 1396358 - RNA, 16 nt, Human
caucucucugcccaac

SEQ ID NO: 1396359 - RNA, 15 nt, Human
caucucucugcccaa

SEQ ID NO: 1396360 - RNA, 13 nt, Human
caucucucugccc

SEQ ID NO: 1396361 - RNA, 20 nt, Human
caucucuaccuucuccccag

SEQ ID NO: 1396362 - RNA, 21 nt, Human
caucucuaccuucuccccagc

SEQ ID NO: 1396363 - RNA, 19 nt, Human
caucucuaccuucucccca

SEQ ID NO: 1396364 - RNA, 18 nt, Human
caucucuaccuucucccc

SEQ ID NO: 1396365 - RNA, 13 nt, Human
caucucuaccuuc

SEQ ID NO: 1396366 - RNA, 19 nt, Human
caucuucuucaccauuugg

SEQ ID NO: 1396367 - RNA, 14 nt, Human
caucuucuucacca

SEQ ID NO: 1396368 - RNA, 17 nt, Human
caucuucugccuuaguc

SEQ ID NO: 1396369 - RNA, 10 nt, Human
caucuuuaag

SEQ ID NO: 1396370 - RNA, 22 nt, Human
caucuuugaaauuauguaaauu

SEQ ID NO: 1396371 - RNA, 21 nt, Human
caucuuugaaauuauguaaau

SEQ ID NO: 1396372 - RNA, 18 nt, Human
caucuuugaaauuaugua

SEQ ID NO: 1396373 - RNA, 12 nt, Human
caucuuugaaau

SEQ ID NO: 1396374 - RNA, 11 nt, Human
caucuuugaaa

SEQ ID NO: 1396375 - RNA, 22 nt, Human
caucuuuacaaaacuacaugag

SEQ ID NO: 1396376 - RNA, 22 nt, Human
caucuuuuguauuaagaaagga

SEQ ID NO: 1396377 - RNA, 18 nt, Human
caucuuuuguauuaagaa

SEQ ID NO: 1396378 - RNA, 15 nt, Human
caucuuuuguauuaa

SEQ ID NO: 1396379 - RNA, 14 nt, Human
caucuuuuguauua

SEQ ID NO: 1396380 - RNA, 13 nt, Human
caucuuuuguauu

SEQ ID NO: 1396381 - RNA, 19 nt, Human
caucuuuuguauuaagaaa

SEQ ID NO: 1396382 - RNA, 13 nt, Human
caugaaaacacau

SEQ ID NO: 1396383 - RNA, 14 nt, Human
caugaaaacacauu

SEQ ID NO: 1396384 - RNA, 15 nt, Human
caugaaaacacauuu

SEQ ID NO: 1396385 - RNA, 16 nt, Human
caugaaaacacauuuu

SEQ ID NO: 1396386 - RNA, 17 nt, Human
caugaaaacacauuuuu

SEQ ID NO: 1396387 - RNA, 19 nt, Human
caugaaccucaagcugcau

SEQ ID NO: 1396388 - RNA, 20 nt, Human
caugaacuuagauuuuacau

SEQ ID NO: 1396389 - RNA, 17 nt, Human
caugaacuuagauuuua

SEQ ID NO: 1396390 - RNA, 20 nt, Human
caugaaccucaagcugcauc

SEQ ID NO: 1396391 - RNA, 15 nt, Human
caugaaacagaaaca

SEQ ID NO: 1396392 - RNA, 13 nt, Human
caugaaacagaaa

SEQ ID NO: 1396393 - RNA, 15 nt, Human
caugaaaauucagaa

SEQ ID NO: 1396394 - RNA, 19 nt, Human
caugaaacagaaacaaaaa

SEQ ID NO: 1396395 - RNA, 22 nt, Human
caugaaauauagaucaguuaua

SEQ ID NO: 1396396 - RNA, 14 nt, Human
caugaaagauucaa

SEQ ID NO: 1396397 - RNA, 19 nt, Human
caugaaaacacauuuuucu

SEQ ID NO: 1396398 - RNA, 21 nt, Human
caugaaaacacauuuuucuua

SEQ ID NO: 1396399 - RNA, 22 nt, Human
caugaccuccagcuuuccugua

SEQ ID NO: 1396400 - RNA, 21 nt, Human
caugaccuccagcuuuccugu

SEQ ID NO: 1396401 - RNA, 20 nt, Human
caugaccuccagcuuuccug

SEQ ID NO: 1396402 - RNA, 17 nt, Human
caugaccuccagcuuuc

SEQ ID NO: 1396403 - RNA, 15 nt, Human
caugaccuccagcuu

SEQ ID NO: 1396404 - RNA, 14 nt, Human
caugaccuccagcu

SEQ ID NO: 1396405 - RNA, 13 nt, Human
caugaccuccagc

SEQ ID NO: 1396406 - RNA, 22 nt, Human
caugaagccacgggugccagaa

SEQ ID NO: 1396407 - RNA, 17 nt, Human
caugacucggggguggg

SEQ ID NO: 1396408 - RNA, 14 nt, Human
caugacuauggaua

SEQ ID NO: 1396409 - RNA, 21 nt, Human
caugaagccacgggugccaga

SEQ ID NO: 1396410 - RNA, 18 nt, Human
caugaagauucuuuccca

SEQ ID NO: 1396411 - RNA, 19 nt, Human
caugagaaucuauauuuaa

SEQ ID NO: 1396412 - RNA, 12 nt, Human
caugagaaucua

SEQ ID NO: 1396413 - RNA, 16 nt, Human
caugagaacaaacaga

SEQ ID NO: 1396414 - RNA, 22 nt, Human
caugagaaauacaaaaauacuc

SEQ ID NO: 1396415 - RNA, 18 nt, Human
caugagaaauacaaaaau

SEQ ID NO: 1396416 - RNA, 13 nt, Human
caugagaaauaca

SEQ ID NO: 1396417 - RNA, 18 nt, Human
caugacugcuugcccuaa

SEQ ID NO: 1396418 - RNA, 21 nt, Human
caugacugcuugcccuaagca

SEQ ID NO: 1396419 - RNA, 16 nt, Human
caugacugcuugcccu

SEQ ID NO: 1396420 - RNA, 14 nt, Human
caugacugcuugcc

SEQ ID NO: 1396421 - RNA, 13 nt, Human
caugacugcuugc

SEQ ID NO: 1396422 - RNA, 12 nt, Human
caugacugcuug

SEQ ID NO: 1396423 - RNA, 17 nt, Human
caugagaccacuguuau

SEQ ID NO: 1396424 - RNA, 19 nt, Human
caugagaccacuguuauca

SEQ ID NO: 1396425 - RNA, 14 nt, Human
caugagaggaggca

SEQ ID NO: 1396426 - RNA, 15 nt, Human
caugagaggaggcag

SEQ ID NO: 1396427 - RNA, 16 nt, Human
caugagaggaggcagc

SEQ ID NO: 1396428 - RNA, 20 nt, Human
caugagaggaggcagcagga

SEQ ID NO: 1396429 - RNA, 21 nt, Human
caugagaggaggcagcaggac

SEQ ID NO: 1396430 - RNA, 22 nt, Human
caugagaugauacauccaaagc

SEQ ID NO: 1396431 - RNA, 18 nt, Human
caugaggccacuggagac

SEQ ID NO: 1396432 - RNA, 23 nt, Human
caugaggagauucugccuuugcc

SEQ ID NO: 1396433 - RNA, 21 nt, Human
caugaggagauucugccuuug

SEQ ID NO: 1396434 - RNA, 20 nt, Human
caugaggagauucugccuuu

SEQ ID NO: 1396435 - RNA, 19 nt, Human
caugaggagauucugccuu

SEQ ID NO: 1396436 - RNA, 21 nt, Human
caugaggacucuauucuuuaa

SEQ ID NO: 1396437 - RNA, 20 nt, Human
caugaggacucuauucuuua

SEQ ID NO: 1396438 - RNA, 23 nt, Human
caugagcuccuuaaggcucuuuu

SEQ ID NO: 1396439 - RNA, 14 nt, Human
caugagugaauaaa

SEQ ID NO: 1396440 - RNA, 22 nt, Human
caugagggguuccuccccucca

SEQ ID NO: 1396441 - RNA, 21 nt, Human
caugagggguuccuccccucc

SEQ ID NO: 1396442 - RNA, 18 nt, Human
caugagggguuccucccc

SEQ ID NO: 1396443 - RNA, 15 nt, Human
caugagggguuccuc

SEQ ID NO: 1396444 - RNA, 18 nt, Human
caugagucacuacgccug

SEQ ID NO: 1396445 - RNA, 14 nt, Human
caugcacugauguu

SEQ ID NO: 1396446 - RNA, 18 nt, Human
caugauaaugaacagaac

SEQ ID NO: 1396447 - RNA, 22 nt, Human
caugaucccuguguugucucua

SEQ ID NO: 1396448 - RNA, 21 nt, Human
caugaucccuguguugucucu

SEQ ID NO: 1396449 - RNA, 20 nt, Human
caugaguuccagaaaguaaa

SEQ ID NO: 1396450 - RNA, 19 nt, Human
caugaguuccagaaaguaa

SEQ ID NO: 1396451 - RNA, 18 nt, Human
caugaguuccagaaagua

SEQ ID NO: 1396452 - RNA, 23 nt, Human
caugaguuggggucuggcagccu

SEQ ID NO: 1396453 - RNA, 21 nt, Human
caugaguuggggucuggcagc

SEQ ID NO: 1396454 - RNA, 13 nt, Human
caugauaaaugau

SEQ ID NO: 1396455 - RNA, 16 nt, Human
cauggucacacacuga

SEQ ID NO: 1396456 - RNA, 20 nt, Human
cauggguauaguucaugucu

SEQ ID NO: 1396457 - RNA, 18 nt, Human
cauggggaggaggagggu

SEQ ID NO: 1396458 - RNA, 19 nt, Human
cauggggaggaggaggguc

SEQ ID NO: 1396459 - RNA, 15 nt, Human
cauggggaggaggag

SEQ ID NO: 1396460 - RNA, 12 nt, Human
cauggggaggag

SEQ ID NO: 1396461 - RNA, 21 nt, Human
caugggagcugguuagaaaug

SEQ ID NO: 1396462 - RNA, 22 nt, Human
caugggagccgggucugccucu

SEQ ID NO: 1396463 - RNA, 13 nt, Human
caugggagccggg

SEQ ID NO: 1396464 - RNA, 17 nt, Human
caugggaccacaacuau

SEQ ID NO: 1396465 - RNA, 23 nt, Human
cauggcagugggaaaaauguagg

SEQ ID NO: 1396466 - RNA, 12 nt, Human
cauggcaguggg

SEQ ID NO: 1396467 - RNA, 20 nt, Human
cauggcagggggcugcugcu

SEQ ID NO: 1396468 - RNA, 19 nt, Human
cauggcagggggcugcugc

SEQ ID NO: 1396469 - RNA, 18 nt, Human
cauggcagggggcugcug

SEQ ID NO: 1396470 - RNA, 17 nt, Human
cauggcagggggcugcu

SEQ ID NO: 1396471 - RNA, 14 nt, Human
cauggcagggggcu

SEQ ID NO: 1396472 - RNA, 13 nt, Human
cauggcagggggc

SEQ ID NO: 1396473 - RNA, 21 nt, Human
cauggcagauguaggagggac

SEQ ID NO: 1396474 - RNA, 23 nt, Human
cauggcagauguaggagggacug

SEQ ID NO: 1396475 - RNA, 20 nt, Human
cauggcagauguaggaggga

SEQ ID NO: 1396476 - RNA, 19 nt, Human
cauggcagauguaggaggg

SEQ ID NO: 1396477 - RNA, 16 nt, Human
cauggagguucuaagg

SEQ ID NO: 1396478 - RNA, 15 nt, Human
cauggagguucuaag

SEQ ID NO: 1396479 - RNA, 13 nt, Human
cauggagguucua

SEQ ID NO: 1396480 - RNA, 22 nt, Human
cauggagggagggagugguuug

SEQ ID NO: 1396481 - RNA, 18 nt, Human
cauggagggagggagugg

SEQ ID NO: 1396482 - RNA, 17 nt, Human
caugggcagagcccaag

SEQ ID NO: 1396483 - RNA, 15 nt, Human
caugggcagagccca

SEQ ID NO: 1396484 - RNA, 14 nt, Human
caugggaggcucac

SEQ ID NO: 1396485 - RNA, 16 nt, Human
caugggauuauuagaa

SEQ ID NO: 1396486 - RNA, 15 nt, Human
cauggagcugggcua

SEQ ID NO: 1396487 - RNA, 19 nt, Human
cauggacucuguccugaag

SEQ ID NO: 1396488 - RNA, 22 nt, Human
cauggacuucugccagcauaau

SEQ ID NO: 1396489 - RNA, 23 nt, Human
cauggacucuguccugaaggccu

SEQ ID NO: 1396490 - RNA, 17 nt, Human
cauggacucuguccuga

SEQ ID NO: 1396491 - RNA, 16 nt, Human
cauggacucuguccug

SEQ ID NO: 1396492 - RNA, 23 nt, Human
cauggacaauggaccggagagug

SEQ ID NO: 1396493 - RNA, 16 nt, Human
cauggacacuacaccc

SEQ ID NO: 1396494 - RNA, 17 nt, Human
cauggacacuacaccca

SEQ ID NO: 1396495 - RNA, 18 nt, Human
cauggacacuacacccag

SEQ ID NO: 1396496 - RNA, 19 nt, Human
cauggacacuacacccagc

SEQ ID NO: 1396497 - RNA, 20 nt, Human
cauggacacuacacccagca

SEQ ID NO: 1396498 - RNA, 20 nt, Human
caugcuguucaugaaagauu

SEQ ID NO: 1396499 - RNA, 22 nt, Human
caugcugugugacucaaaccaa

SEQ ID NO: 1396500 - RNA, 18 nt, Human
caugcuguucaugaaaga

SEQ ID NO: 1396501 - RNA, 16 nt, Human
caugcuguucaugaaa

SEQ ID NO: 1396502 - RNA, 20 nt, Human
cauggacaauggaccggaga

SEQ ID NO: 1396503 - RNA, 18 nt, Human
cauggacaauggaccgga

SEQ ID NO: 1396504 - RNA, 17 nt, Human
cauggacaauggaccgg

SEQ ID NO: 1396505 - RNA, 15 nt, Human
cauggacaauggacc

SEQ ID NO: 1396506 - RNA, 14 nt, Human
cauggacaauggac

SEQ ID NO: 1396507 - RNA, 19 nt, Human
cauggaaauuuaaagcagg

SEQ ID NO: 1396508 - RNA, 20 nt, Human
cauggaauuggagcucgugg

SEQ ID NO: 1396509 - RNA, 21 nt, Human
cauggaaauuuaaagcagguu

SEQ ID NO: 1396510 - RNA, 18 nt, Human
cauggaaauuuaaagcag

SEQ ID NO: 1396511 - RNA, 17 nt, Human
cauggaaauuuaaagca

SEQ ID NO: 1396512 - RNA, 16 nt, Human
cauggaaauuuaaagc

SEQ ID NO: 1396513 - RNA, 15 nt, Human
cauggaaauuuaaag

SEQ ID NO: 1396514 - RNA, 21 nt, Human
cauggaaauucccuucaucug

SEQ ID NO: 1396515 - RNA, 14 nt, Human
caugcugugugacu

SEQ ID NO: 1396516 - RNA, 20 nt, Human
caugcugugcgcccagggcu

SEQ ID NO: 1396517 - RNA, 15 nt, Human
caugcuguucaugaa

SEQ ID NO: 1396518 - RNA, 17 nt, Human
caugcugugugacucaa

SEQ ID NO: 1396519 - RNA, 21 nt, Human
caugcugugugacucaaacca

SEQ ID NO: 1396520 - RNA, 16 nt, Human
caugcggcccaggaug

SEQ ID NO: 1396521 - RNA, 23 nt, Human
caugcgcucagggccaugcugag

SEQ ID NO: 1396522 - RNA, 20 nt, Human
caugcacugugaaggacccu

SEQ ID NO: 1396523 - RNA, 18 nt, Human
caugcacugugaaggacc

SEQ ID NO: 1396524 - RNA, 17 nt, Human
caugcacugugaaggac

SEQ ID NO: 1396525 - RNA, 16 nt, Human
caugcacugugaagga

SEQ ID NO: 1396526 - RNA, 14 nt, Human
caugcacugugaag

SEQ ID NO: 1396527 - RNA, 13 nt, Human
caugcacugugaa

SEQ ID NO: 1396528 - RNA, 10 nt, Human
caugcacugu

SEQ ID NO: 1396529 - RNA, 20 nt, Human
caugcacugauguuguguuu

SEQ ID NO: 1396530 - RNA, 15 nt, Human
caugcacugauguug

SEQ ID NO: 1396531 - RNA, 23 nt, Human
caugcacuguucccccugugcag

SEQ ID NO: 1396532 - RNA, 19 nt, Human
caugcacuguucccccugu

SEQ ID NO: 1396533 - RNA, 22 nt, Human
caugcacugugaaggacccuug

SEQ ID NO: 1396534 - RNA, 17 nt, Human
caugcacuuggcugcau

SEQ ID NO: 1396535 - RNA, 14 nt, Human
caugcagaaagcau

SEQ ID NO: 1396536 - RNA, 14 nt, Human
cauuaaaauauaau

SEQ ID NO: 1396537 - RNA, 11 nt, Human
cauuaaaauau

SEQ ID NO: 1396538 - RNA, 13 nt, Human
cauuaaaagaaua

SEQ ID NO: 1396539 - RNA, 22 nt, Human
cauuaaaaaugcauauacuuua

SEQ ID NO: 1396540 - RNA, 23 nt, Human
cauuaaaccaucucccuggugcu

SEQ ID NO: 1396541 - RNA, 22 nt, Human
cauguuuggaaggggucuguag

SEQ ID NO: 1396542 - RNA, 15 nt, Human
cauguuugugauuga

SEQ ID NO: 1396543 - RNA, 21 nt, Human
cauguuugcaccuuucuaguu

SEQ ID NO: 1396544 - RNA, 22 nt, Human
cauguuugcaccuuucuaguug

SEQ ID NO: 1396545 - RNA, 20 nt, Human
cauguuugcaccuuucuagu

SEQ ID NO: 1396546 - RNA, 20 nt, Human
cauguuucuuuguaaugaaa

SEQ ID NO: 1396547 - RNA, 12 nt, Human
cauguuugugau

SEQ ID NO: 1396548 - RNA, 14 nt, Human
cauguuugugauug

SEQ ID NO: 1396549 - RNA, 20 nt, Human
cauguacaugaagaagcuaa

SEQ ID NO: 1396550 - RNA, 14 nt, Human
cauguaaauaauac

SEQ ID NO: 1396551 - RNA, 16 nt, Human
cauguaaacugugcac

SEQ ID NO: 1396552 - RNA, 15 nt, Human
cauguaaacugugca

SEQ ID NO: 1396553 - RNA, 17 nt, Human
caugucuauucagcuuc

SEQ ID NO: 1396554 - RNA, 16 nt, Human
caugucuauucagcuu

SEQ ID NO: 1396555 - RNA, 21 nt, Human
caugucguggacacacacaga

SEQ ID NO: 1396556 - RNA, 22 nt, Human
cauguacugagccuuguaauuc

SEQ ID NO: 1396557 - RNA, 19 nt, Human
cauguacugagccuuguaa

SEQ ID NO: 1396558 - RNA, 23 nt, Human
cauguacugagccuuguaauucu

SEQ ID NO: 1396559 - RNA, 16 nt, Human
caugguuucagcacua

SEQ ID NO: 1396560 - RNA, 15 nt, Human
caugguuucagcacu

SEQ ID NO: 1396561 - RNA, 13 nt, Human
caugguuucagca

SEQ ID NO: 1396562 - RNA, 22 nt, Human
caugguggguccaugggcagag

SEQ ID NO: 1396563 - RNA, 21 nt, Human
caugguggguccaugggcaga

SEQ ID NO: 1396564 - RNA, 15 nt, Human
cauggugcugggaga

SEQ ID NO: 1396565 - RNA, 22 nt, Human
cauggugcugggagaggcagcc

SEQ ID NO: 1396566 - RNA, 22 nt, Human
cauggugcuaggaagaggagug

SEQ ID NO: 1396567 - RNA, 17 nt, Human
cauggugcuaggaagag

SEQ ID NO: 1396568 - RNA, 13 nt, Human
cauggugcuagga

SEQ ID NO: 1396569 - RNA, 15 nt, Human
cauggucugcccucu

SEQ ID NO: 1396570 - RNA, 16 nt, Human
cauggucugcccucug

SEQ ID NO: 1396571 - RNA, 13 nt, Human
cauggucugcccu

SEQ ID NO: 1396572 - RNA, 15 nt, Human
cauggucacacacug

SEQ ID NO: 1396573 - RNA, 14 nt, Human
cauggucacacacu

SEQ ID NO: 1396574 - RNA, 23 nt, Human
cauggucggaaaacaugcuacac

SEQ ID NO: 1396575 - RNA, 19 nt, Human
cauggucggaaaacaugcu

SEQ ID NO: 1396576 - RNA, 15 nt, Human
caugucuucucccug

SEQ ID NO: 1396577 - RNA, 21 nt, Human
caugucuuaaugaaguuugaa

SEQ ID NO: 1396578 - RNA, 22 nt, Human
caugucuuaaugaaguuugaau

SEQ ID NO: 1396579 - RNA, 23 nt, Human
caugucuuaaugaaguuugaaug

SEQ ID NO: 1396580 - RNA, 17 nt, Human
caugugacucuuuccaa

SEQ ID NO: 1396581 - RNA, 16 nt, Human
caugugacucuuucca

SEQ ID NO: 1396582 - RNA, 14 nt, Human
caugucuucucccu

SEQ ID NO: 1396583 - RNA, 14 nt, Human
caugugacucuuuc

SEQ ID NO: 1396584 - RNA, 13 nt, Human
caugucuuaauga

SEQ ID NO: 1396585 - RNA, 14 nt, Human
caugucuuaaugaa

SEQ ID NO: 1396586 - RNA, 15 nt, Human
caugucuuaaugaag

SEQ ID NO: 1396587 - RNA, 16 nt, Human
caugucuuaaugaagu

SEQ ID NO: 1396588 - RNA, 17 nt, Human
caugucuuaaugaaguu

SEQ ID NO: 1396589 - RNA, 18 nt, Human
caugucuuaaugaaguuu

SEQ ID NO: 1396590 - RNA, 20 nt, Human
caugucuuaaugaaguuuga

SEQ ID NO: 1396591 - RNA, 20 nt, Human
caugugagcaugucacuucc

SEQ ID NO: 1396592 - RNA, 14 nt, Human
caugugcccaguua

SEQ ID NO: 1396593 - RNA, 13 nt, Human
caugugucccaga

SEQ ID NO: 1396594 - RNA, 17 nt, Human
cauguguauaaaaauaa

SEQ ID NO: 1396595 - RNA, 14 nt, Human
cauguguauaaaaa

SEQ ID NO: 1396596 - RNA, 13 nt, Human
cauguguauaaaa

SEQ ID NO: 1396597 - RNA, 18 nt, Human
caugugcugcccuacagc

SEQ ID NO: 1396598 - RNA, 20 nt, Human
caugugcuaguaauuggaaa

SEQ ID NO: 1396599 - RNA, 16 nt, Human
cauguguuauguuuuc

SEQ ID NO: 1396600 - RNA, 16 nt, Human
cauguguuaaguauuu

SEQ ID NO: 1396601 - RNA, 22 nt, Human
cauguguguuaacccagugcuu

SEQ ID NO: 1396602 - RNA, 21 nt, Human
caugugucccagaagaugacu

SEQ ID NO: 1396603 - RNA, 21 nt, Human
cauguguccugguucccguuu

SEQ ID NO: 1396604 - RNA, 15 nt, Human
cauguguccugguuc

SEQ ID NO: 1396605 - RNA, 17 nt, Human
caugugucccagaagau

SEQ ID NO: 1396606 - RNA, 14 nt, Human
caugugucccagaa

SEQ ID NO: 1396607 - RNA, 18 nt, Human
cauguguuuacuuuaugu

SEQ ID NO: 1396608 - RNA, 15 nt, Human
cauguguuauguuuu

SEQ ID NO: 1396609 - RNA, 23 nt, Human
cauguguguuaacccagugcuuu

SEQ ID NO: 1396610 - RNA, 14 nt, Human
cauguguuuauccu

SEQ ID NO: 1396611 - RNA, 21 nt, Human
cauguuuccucuaguucuuug

SEQ ID NO: 1396612 - RNA, 13 nt, Human
cauguuuccucua

SEQ ID NO: 1396613 - RNA, 22 nt, Human
cauguuuccagcauucccaggu

SEQ ID NO: 1396614 - RNA, 20 nt, Human
cauguuuccagcauucccag

SEQ ID NO: 1396615 - RNA, 17 nt, Human
cauguuuccagcauucc

SEQ ID NO: 1396616 - RNA, 16 nt, Human
cauguuuccagcauuc

SEQ ID NO: 1396617 - RNA, 15 nt, Human
cauguuuccagcauu

SEQ ID NO: 1396618 - RNA, 13 nt, Human
cauguuuccagca

SEQ ID NO: 1396619 - RNA, 12 nt, Human
cauguuuccagc

SEQ ID NO: 1396620 - RNA, 20 nt, Human
cauguuuauuuuucuugucu

SEQ ID NO: 1396621 - RNA, 19 nt, Human
cauguuuauuuuucuuguc

SEQ ID NO: 1396622 - RNA, 18 nt, Human
cauguuuauuuuucuugu

SEQ ID NO: 1396623 - RNA, 15 nt, Human
cauguuuauuuuucu

SEQ ID NO: 1396624 - RNA, 21 nt, Human
cauguuaaccccuccacucuu

SEQ ID NO: 1396625 - RNA, 16 nt, Human
cauuuacauguuuuaa

SEQ ID NO: 1396626 - RNA, 22 nt, Human
cauuuacccuucuuuucugacu

SEQ ID NO: 1396627 - RNA, 19 nt, Human
cauuuacaaacugaagagu

SEQ ID NO: 1396628 - RNA, 16 nt, Human
cauuuacaaacugaag

SEQ ID NO: 1396629 - RNA, 15 nt, Human
cauuuacaaacugaa

SEQ ID NO: 1396630 - RNA, 17 nt, Human
cauuuaauaauauacuu

SEQ ID NO: 1396631 - RNA, 20 nt, Human
cauuuaauaauauacuugug

SEQ ID NO: 1396632 - RNA, 22 nt, Human
cauuuaauaauauacuugugga

SEQ ID NO: 1396633 - RNA, 17 nt, Human
cauuugaaaauuuugau

SEQ ID NO: 1396634 - RNA, 19 nt, Human
cauuugaaaauuuugaugu

SEQ ID NO: 1396635 - RNA, 23 nt, Human
cauuuaaccccccuguacacaac

SEQ ID NO: 1396636 - RNA, 20 nt, Human
cauuuaaccccccuguacac

SEQ ID NO: 1396637 - RNA, 19 nt, Human
cauuuaaccccccuguaca

SEQ ID NO: 1396638 - RNA, 12 nt, Human
cauuuaauaaua

SEQ ID NO: 1396639 - RNA, 13 nt, Human
cauuuaauaauau

SEQ ID NO: 1396640 - RNA, 14 nt, Human
cauuuaauaauaua

SEQ ID NO: 1396641 - RNA, 18 nt, Human
cauuuaaauuuuuuuccu

SEQ ID NO: 1396642 - RNA, 20 nt, Human
cauuuaaauacagucuucca

SEQ ID NO: 1396643 - RNA, 18 nt, Human
cauuuaaauacagucuuc

SEQ ID NO: 1396644 - RNA, 19 nt, Human
cauuuaaaacauuaaaaua

SEQ ID NO: 1396645 - RNA, 17 nt, Human
cauuguuauauaaucau

SEQ ID NO: 1396646 - RNA, 18 nt, Human
cauuguuaccucuauaua

SEQ ID NO: 1396647 - RNA, 23 nt, Human
cauuuaaaacagacacuggcaug

SEQ ID NO: 1396648 - RNA, 18 nt, Human
cauuuaaaacagacacug

SEQ ID NO: 1396649 - RNA, 17 nt, Human
cauuuaaaacagacacu

SEQ ID NO: 1396650 - RNA, 13 nt, Human
cauuuaaaacaga

SEQ ID NO: 1396651 - RNA, 21 nt, Human
cauuguuauauaaucauuauu

SEQ ID NO: 1396652 - RNA, 14 nt, Human
cauuguuaccucua

SEQ ID NO: 1396653 - RNA, 14 nt, Human
cauuguguuaccug

SEQ ID NO: 1396654 - RNA, 22 nt, Human
cauugugggauguucagcacug

SEQ ID NO: 1396655 - RNA, 21 nt, Human
cauugugggauguucagcacu

SEQ ID NO: 1396656 - RNA, 22 nt, Human
cauugaauggcuauguuuuuaa

SEQ ID NO: 1396657 - RNA, 14 nt, Human
cauugaaggcuuaa

SEQ ID NO: 1396658 - RNA, 13 nt, Human
cauugaaggcuua

SEQ ID NO: 1396659 - RNA, 22 nt, Human
cauugaacacaaacuguaaaua

SEQ ID NO: 1396660 - RNA, 15 nt, Human
cauugaaaagagcug

SEQ ID NO: 1396661 - RNA, 16 nt, Human
cauugaguugguuacu

SEQ ID NO: 1396662 - RNA, 18 nt, Human
cauugaguugguuacuuc

SEQ ID NO: 1396663 - RNA, 23 nt, Human
cauugaauucuugguugaggaaa

SEQ ID NO: 1396664 - RNA, 22 nt, Human
cauugaauucuugguugaggaa

SEQ ID NO: 1396665 - RNA, 21 nt, Human
cauugaauucuugguugagga

SEQ ID NO: 1396666 - RNA, 23 nt, Human
cauuuucuaagaaacauuuauau

SEQ ID NO: 1396667 - RNA, 14 nt, Human
cauuuucucucagg

SEQ ID NO: 1396668 - RNA, 12 nt, Human
cauuuucucuaa

SEQ ID NO: 1396669 - RNA, 17 nt, Human
cauuuucuaagaaacau

SEQ ID NO: 1396670 - RNA, 14 nt, Human
cauuuucuaagaaa

SEQ ID NO: 1396671 - RNA, 21 nt, Human
ccaaaauguuggucauuuuau

SEQ ID NO: 1396672 - RNA, 20 nt, Human
ccaaaauguuggucauuuua

SEQ ID NO: 1396673 - RNA, 20 nt, Human
ccaaacaccuuccagcuccu

SEQ ID NO: 1396674 - RNA, 19 nt, Human
ccaaacaccuuccagcucc

SEQ ID NO: 1396675 - RNA, 15 nt, Human
ccaaacaccuuccag

SEQ ID NO: 1396676 - RNA, 17 nt, Human
ccaaaauguugcugaaa

SEQ ID NO: 1396677 - RNA, 17 nt, Human
ccaaaauguugaaauau

SEQ ID NO: 1396678 - RNA, 15 nt, Human
ccaaaaugugccuau

SEQ ID NO: 1396679 - RNA, 23 nt, Human
ccaaaauguaggcuuaguuugug

SEQ ID NO: 1396680 - RNA, 20 nt, Human
cauuuuuacuauuguuacau

SEQ ID NO: 1396681 - RNA, 20 nt, Human
cauuuuuacaauguaauuau

SEQ ID NO: 1396682 - RNA, 19 nt, Human
cauuuuuacaauguaauua

SEQ ID NO: 1396683 - RNA, 18 nt, Human
cauuuuuaccaucacuga

SEQ ID NO: 1396684 - RNA, 16 nt, Human
cauuuuuacaauguaa

SEQ ID NO: 1396685 - RNA, 15 nt, Human
cauuugcuuuggaag

SEQ ID NO: 1396686 - RNA, 14 nt, Human
cauuugcuuuggaa

SEQ ID NO: 1396687 - RNA, 16 nt, Human
cauuugcuguuuuaaa

SEQ ID NO: 1396688 - RNA, 15 nt, Human
cauuugcuguuuuaa

SEQ ID NO: 1396689 - RNA, 20 nt, Human
cauuugcugaauagcuacua

SEQ ID NO: 1396690 - RNA, 13 nt, Human
cauuugcauuugu

SEQ ID NO: 1396691 - RNA, 22 nt, Human
cauuugcaggguccucuucugg

SEQ ID NO: 1396692 - RNA, 20 nt, Human
cauuugcaggguccucuucu

SEQ ID NO: 1396693 - RNA, 19 nt, Human
cauuugcaggguccucuuc

SEQ ID NO: 1396694 - RNA, 14 nt, Human
cauuugcagggucc

SEQ ID NO: 1396695 - RNA, 22 nt, Human
cauuugcaagggaaaagucucu

SEQ ID NO: 1396696 - RNA, 22 nt, Human
cauuucuuuuugggagagacuu

SEQ ID NO: 1396697 - RNA, 15 nt, Human
cauuucuuuuuggga

SEQ ID NO: 1396698 - RNA, 18 nt, Human
cauuuuacauuaaauuuu

SEQ ID NO: 1396699 - RNA, 23 nt, Human
cauuuuauuuuauuaugcaugaa

SEQ ID NO: 1396700 - RNA, 17 nt, Human
cauuugcuguuuuaaac

SEQ ID NO: 1396701 - RNA, 16 nt, Human
cauuugcuuuuucacc

SEQ ID NO: 1396702 - RNA, 19 nt, Human
cauuugcuuuuugugauau

SEQ ID NO: 1396703 - RNA, 15 nt, Human
cauuugcuuuuugug

SEQ ID NO: 1396704 - RNA, 23 nt, Human
cauuuuaccuuugacaaagguaa

SEQ ID NO: 1396705 - RNA, 14 nt, Human
cauucuuucccaac

SEQ ID NO: 1396706 - RNA, 12 nt, Human
cauucuuuccca

SEQ ID NO: 1396707 - RNA, 18 nt, Human
cauucuucugagcacugu

SEQ ID NO: 1396708 - RNA, 19 nt, Human
cauucuucugagcacuguu

SEQ ID NO: 1396709 - RNA, 21 nt, Human
cauucuucucuguugucguaa

SEQ ID NO: 1396710 - RNA, 18 nt, Human
cauucuucucuguugucg

SEQ ID NO: 1396711 - RNA, 16 nt, Human
cauucuucucuguugu

SEQ ID NO: 1396712 - RNA, 21 nt, Human
cauucuuccuaguuuucuccu

SEQ ID NO: 1396713 - RNA, 18 nt, Human
cauucuuccuaguuuucu

SEQ ID NO: 1396714 - RNA, 13 nt, Human
cauucuuccuagu

SEQ ID NO: 1396715 - RNA, 15 nt, Human
cauucugucuugaag

SEQ ID NO: 1396716 - RNA, 17 nt, Human
cauucuguuaaucauua

SEQ ID NO: 1396717 - RNA, 13 nt, Human
cauucuggaauaa

SEQ ID NO: 1396718 - RNA, 17 nt, Human
cauucuggaccucuggg

SEQ ID NO: 1396719 - RNA, 16 nt, Human
cauucugcuccuuccc

SEQ ID NO: 1396720 - RNA, 12 nt, Human
cauucuggaagu

SEQ ID NO: 1396721 - RNA, 16 nt, Human
cauucuggaccucugg

SEQ ID NO: 1396722 - RNA, 14 nt, Human
cauucugcuccuuc

SEQ ID NO: 1396723 - RNA, 16 nt, Human
cauucuggaagugacu

SEQ ID NO: 1396724 - RNA, 18 nt, Human
cauucugccucucuagga

SEQ ID NO: 1396725 - RNA, 17 nt, Human
cauucugccucucuagg

SEQ ID NO: 1396726 - RNA, 17 nt, Human
cauucugcaaguauacu

SEQ ID NO: 1396727 - RNA, 11 nt, Human
cauucugcaag

SEQ ID NO: 1396728 - RNA, 22 nt, Human
cauucugauucgaaugacacug

SEQ ID NO: 1396729 - RNA, 23 nt, Human
cauucugauucgaaugacacugu

SEQ ID NO: 1396730 - RNA, 23 nt, Human
cauucugacucgguuucuccaaa

SEQ ID NO: 1396731 - RNA, 21 nt, Human
cauucugacucgguuucucca

SEQ ID NO: 1396732 - RNA, 19 nt, Human
cauucugacucgguuucuc

SEQ ID NO: 1396733 - RNA, 16 nt, Human
cauucugacucgguuu

SEQ ID NO: 1396734 - RNA, 12 nt, Human
cauucugacucg

SEQ ID NO: 1396735 - RNA, 18 nt, Human
cauucugaaugcuucuaa

SEQ ID NO: 1396736 - RNA, 16 nt, Human
cauucugaaugcuucu

SEQ ID NO: 1396737 - RNA, 15 nt, Human
cauucugaaugcuuc

SEQ ID NO: 1396738 - RNA, 21 nt, Human
cauuccugggaaauauucccu

SEQ ID NO: 1396739 - RNA, 13 nt, Human
cauucugaaugcu

SEQ ID NO: 1396740 - RNA, 21 nt, Human
cauuccugaagaaccaguccc

SEQ ID NO: 1396741 - RNA, 20 nt, Human
cauuccugaagaaccagucc

SEQ ID NO: 1396742 - RNA, 17 nt, Human
cauuccugaagaaccag

SEQ ID NO: 1396743 - RNA, 16 nt, Human
cauuccugaagaacca

SEQ ID NO: 1396744 - RNA, 13 nt, Human
cauuccugaagaa

SEQ ID NO: 1396745 - RNA, 14 nt, Human
cauuccugaacagg

SEQ ID NO: 1396746 - RNA, 21 nt, Human
cauuccucaugaauguaaauu

SEQ ID NO: 1396747 - RNA, 19 nt, Human
cauuccucaugaauguaaa

SEQ ID NO: 1396748 - RNA, 18 nt, Human
cauuccucaugaauguaa

SEQ ID NO: 1396749 - RNA, 17 nt, Human
cauuccucaugaaugua

SEQ ID NO: 1396750 - RNA, 12 nt, Human
cauuccuccagg

SEQ ID NO: 1396751 - RNA, 13 nt, Human
cauuccuccaggu

SEQ ID NO: 1396752 - RNA, 13 nt, Human
cauuccgcagccc

SEQ ID NO: 1396753 - RNA, 20 nt, Human
cauuccgcagcccccacccc

SEQ ID NO: 1396754 - RNA, 22 nt, Human
cauucccgcagugggagcaaac

SEQ ID NO: 1396755 - RNA, 20 nt, Human
cauucccgcagugggagcaa

SEQ ID NO: 1396756 - RNA, 19 nt, Human
cauucccgcagugggagca

SEQ ID NO: 1396757 - RNA, 16 nt, Human
cauucccgcaguggga

SEQ ID NO: 1396758 - RNA, 11 nt, Human
cauucccaggu

SEQ ID NO: 1396759 - RNA, 15 nt, Human
cauuccauucuggaa

SEQ ID NO: 1396760 - RNA, 21 nt, Human
cauuccaugugcccaguuaau

SEQ ID NO: 1396761 - RNA, 17 nt, Human
cauucccagcucuaccc

SEQ ID NO: 1396762 - RNA, 18 nt, Human
cauucccagcucuacccu

SEQ ID NO: 1396763 - RNA, 14 nt, Human
cauuccauucugga

SEQ ID NO: 1396764 - RNA, 19 nt, Human
cauuccagccccucugguc

SEQ ID NO: 1396765 - RNA, 18 nt, Human
cauuccagccccucuggu

SEQ ID NO: 1396766 - RNA, 15 nt, Human
cauuccagccccucu

SEQ ID NO: 1396767 - RNA, 13 nt, Human
cauuccagccccu

SEQ ID NO: 1396768 - RNA, 18 nt, Human
cauuccaagacucuagag

SEQ ID NO: 1396769 - RNA, 22 nt, Human
cauuccagccccucuggucgcu

SEQ ID NO: 1396770 - RNA, 18 nt, Human
cauuccaugugcccaguu

SEQ ID NO: 1396771 - RNA, 17 nt, Human
cauuccaugugcccagu

SEQ ID NO: 1396772 - RNA, 16 nt, Human
cauuccaugugcccag

SEQ ID NO: 1396773 - RNA, 15 nt, Human
cauuccaugugccca

SEQ ID NO: 1396774 - RNA, 12 nt, Human
cauuccauccuu

SEQ ID NO: 1396775 - RNA, 14 nt, Human
cauuccauccuuga

SEQ ID NO: 1396776 - RNA, 17 nt, Human
cauuccaagacucuaga

SEQ ID NO: 1396777 - RNA, 14 nt, Human
cauuccaagacucu

SEQ ID NO: 1396778 - RNA, 21 nt, Human
cauuccaacucguauagcaug

SEQ ID NO: 1396779 - RNA, 22 nt, Human
cauuccaacuaucucauuucca

SEQ ID NO: 1396780 - RNA, 21 nt, Human
cauucauuagucauguuuauc

SEQ ID NO: 1396781 - RNA, 15 nt, Human
cauucauuccauucu

SEQ ID NO: 1396782 - RNA, 20 nt, Human
cauucauuuagcuaaacgga

SEQ ID NO: 1396783 - RNA, 16 nt, Human
cauucauuccauucug

SEQ ID NO: 1396784 - RNA, 17 nt, Human
cauucauuccauucugg

SEQ ID NO: 1396785 - RNA, 16 nt, Human
cauuccaaagaacagc

SEQ ID NO: 1396786 - RNA, 17 nt, Human
cauucauuuuuguuguu

SEQ ID NO: 1396787 - RNA, 19 nt, Human
cauucauuuucuggguguu

SEQ ID NO: 1396788 - RNA, 19 nt, Human
cauucaccugccccaacuc

SEQ ID NO: 1396789 - RNA, 16 nt, Human
cauucaccugccccaa

SEQ ID NO: 1396790 - RNA, 15 nt, Human
cauucaccugcccca

SEQ ID NO: 1396791 - RNA, 11 nt, Human
cauucacuuca

SEQ ID NO: 1396792 - RNA, 18 nt, Human
cauucagaagaaaaagaa

SEQ ID NO: 1396793 - RNA, 13 nt, Human
cauucagaagaaa

SEQ ID NO: 1396794 - RNA, 15 nt, Human
cauucacuucauaau

SEQ ID NO: 1396795 - RNA, 14 nt, Human
cauucacuucauaa

SEQ ID NO: 1396796 - RNA, 17 nt, Human
cauucaggacugcuggu

SEQ ID NO: 1396797 - RNA, 19 nt, Human
cauucaggaauucuuggag

SEQ ID NO: 1396798 - RNA, 13 nt, Human
cauucaggaauuc

SEQ ID NO: 1396799 - RNA, 17 nt, Human
cauucagaagaaaaaga

SEQ ID NO: 1396800 - RNA, 21 nt, Human
cauucagauaugauucaaaug

SEQ ID NO: 1396801 - RNA, 17 nt, Human
cauuacaaguauuuuua

SEQ ID NO: 1396802 - RNA, 15 nt, Human
cauuaacucauuaga

SEQ ID NO: 1396803 - RNA, 18 nt, Human
cauuaacucauuagacug

SEQ ID NO: 1396804 - RNA, 19 nt, Human
cauuaaaccaucucccugg

SEQ ID NO: 1396805 - RNA, 13 nt, Human
cauucaccugccc

SEQ ID NO: 1396806 - RNA, 17 nt, Human
cauucacaucgcagauu

SEQ ID NO: 1396807 - RNA, 23 nt, Human
cauucacaguucuuugggccaga

SEQ ID NO: 1396808 - RNA, 22 nt, Human
cauucacaguucuuugggccag

SEQ ID NO: 1396809 - RNA, 21 nt, Human
cauucaaguguaaaauauuuu

SEQ ID NO: 1396810 - RNA, 20 nt, Human
cauucaaguguaaaauauuu

SEQ ID NO: 1396811 - RNA, 19 nt, Human
cauucaaguguaaaauauu

SEQ ID NO: 1396812 - RNA, 18 nt, Human
cauucaaguguaaaauau

SEQ ID NO: 1396813 - RNA, 23 nt, Human
cauucaaguguaaaauauuuuga

SEQ ID NO: 1396814 - RNA, 22 nt, Human
cauucaaguguaaaauauuuug

SEQ ID NO: 1396815 - RNA, 17 nt, Human
cauucaaguguaaaaua

SEQ ID NO: 1396816 - RNA, 17 nt, Human
cauucaagucagcucuu

SEQ ID NO: 1396817 - RNA, 16 nt, Human
cauucaagucagcucu

SEQ ID NO: 1396818 - RNA, 18 nt, Human
cauucaacagagacugaa

SEQ ID NO: 1396819 - RNA, 12 nt, Human
cauucaacaaga

SEQ ID NO: 1396820 - RNA, 23 nt, Human
cauucaaaauaggguauauuuuc

SEQ ID NO: 1396821 - RNA, 20 nt, Human
cauucaaauguauuacagug

SEQ ID NO: 1396822 - RNA, 19 nt, Human
cauuagaauuauuuaaaca

SEQ ID NO: 1396823 - RNA, 14 nt, Human
cauuagaauuauuu

SEQ ID NO: 1396824 - RNA, 19 nt, Human
cauuagaagacaauugaca

SEQ ID NO: 1396825 - RNA, 18 nt, Human
cauuagaaauauuuuaaa

SEQ ID NO: 1396826 - RNA, 14 nt, Human
cauuagaaauauuu

SEQ ID NO: 1396827 - RNA, 17 nt, Human
cauuacuauaagaacuu

SEQ ID NO: 1396828 - RNA, 23 nt, Human
cauuacuguacaggguuaucugc

SEQ ID NO: 1396829 - RNA, 23 nt, Human
cauuacugcaugcacuucuuaca

SEQ ID NO: 1396830 - RNA, 16 nt, Human
cauuacugcaugcacu

SEQ ID NO: 1396831 - RNA, 13 nt, Human
cauuacugcaugc

SEQ ID NO: 1396832 - RNA, 23 nt, Human
cauuacuauaagaacuuugagcu

SEQ ID NO: 1396833 - RNA, 18 nt, Human
cauuauuggaauauaauu

SEQ ID NO: 1396834 - RNA, 15 nt, Human
cauuagaaauauuuu

SEQ ID NO: 1396835 - RNA, 22 nt, Human
cauuauucguagauauuggaca

SEQ ID NO: 1396836 - RNA, 13 nt, Human
ccacaccugcggc

SEQ ID NO: 1396837 - RNA, 14 nt, Human
ccacacugcacaau

SEQ ID NO: 1396838 - RNA, 12 nt, Human
ccacacugcaca

SEQ ID NO: 1396839 - RNA, 16 nt, Human
ccacacucuuucuccu

SEQ ID NO: 1396840 - RNA, 18 nt, Human
ccacacucuuucuccugc

SEQ ID NO: 1396841 - RNA, 19 nt, Human
ccacacucuuucuccugcu

SEQ ID NO: 1396842 - RNA, 15 nt, Human
ccacauacccugacc

SEQ ID NO: 1396843 - RNA, 14 nt, Human
ccacaucaaagagg

SEQ ID NO: 1396844 - RNA, 17 nt, Human
ccacccacuucugcacu

SEQ ID NO: 1396845 - RNA, 15 nt, Human
ccacccacuucugca

SEQ ID NO: 1396846 - RNA, 22 nt, Human
ccacccaauucaaaacauugug

SEQ ID NO: 1396847 - RNA, 19 nt, Human
ccacaccuccuucccucuc

SEQ ID NO: 1396848 - RNA, 16 nt, Human
ccacaccuccuucccu

SEQ ID NO: 1396849 - RNA, 15 nt, Human
ccacaccuccuuccc

SEQ ID NO: 1396850 - RNA, 11 nt, Human
ccacaccuccu

SEQ ID NO: 1396851 - RNA, 16 nt, Human
ccacacccacacucag

SEQ ID NO: 1396852 - RNA, 23 nt, Human
ccacacccuguacuguucugugu

SEQ ID NO: 1396853 - RNA, 11 nt, Human
ccaaaccacuu

SEQ ID NO: 1396854 - RNA, 14 nt, Human
ccaaaccacuuuuu

SEQ ID NO: 1396855 - RNA, 22 nt, Human
ccaaaccacuuuuugcagcuuu

SEQ ID NO: 1396856 - RNA, 16 nt, Human
ccaccccgccugcccu

SEQ ID NO: 1396857 - RNA, 11 nt, Human
ccacccagagg

SEQ ID NO: 1396858 - RNA, 17 nt, Human
ccacccagaggcagcag

SEQ ID NO: 1396859 - RNA, 22 nt, Human
ccacccagaaugagacauccag

SEQ ID NO: 1396860 - RNA, 23 nt, Human
ccaccccuuucuagaccaauaaa

SEQ ID NO: 1396861 - RNA, 21 nt, Human
ccacccucacuggcucuccug

SEQ ID NO: 1396862 - RNA, 19 nt, Human
ccacccucacuggcucucc

SEQ ID NO: 1396863 - RNA, 17 nt, Human
ccacccucacuggcucu

SEQ ID NO: 1396864 - RNA, 14 nt, Human
ccacccucacuggc

SEQ ID NO: 1396865 - RNA, 12 nt, Human
ccacccucacug

SEQ ID NO: 1396866 - RNA, 21 nt, Human
ccacccucguggacaccugcc

SEQ ID NO: 1396867 - RNA, 22 nt, Human
ccacccucguggacaccugccc

SEQ ID NO: 1396868 - RNA, 20 nt, Human
ccacccucguggacaccugc

SEQ ID NO: 1396869 - RNA, 19 nt, Human
ccacggcaccugggcccug

SEQ ID NO: 1396870 - RNA, 20 nt, Human
ccacggcaccugggcccugg

SEQ ID NO: 1396871 - RNA, 15 nt, Human
ccacggcaccugggc

SEQ ID NO: 1396872 - RNA, 21 nt, Human
ccacggagccacuccucugac

SEQ ID NO: 1396873 - RNA, 20 nt, Human
ccacggagccacuccucuga

SEQ ID NO: 1396874 - RNA, 12 nt, Human
ccacggagccac

SEQ ID NO: 1396875 - RNA, 22 nt, Human
ccacggaccaaagggagucugc

SEQ ID NO: 1396876 - RNA, 22 nt, Human
ccaccugcuagugugaauuaaa

SEQ ID NO: 1396877 - RNA, 19 nt, Human
ccaccugcuagugugaauu

SEQ ID NO: 1396878 - RNA, 16 nt, Human
ccaccuccccccacaa

SEQ ID NO: 1396879 - RNA, 23 nt, Human
ccaccugacacaccaggcgcuaa

SEQ ID NO: 1396880 - RNA, 20 nt, Human
ccaccugacacaccaggcgc

SEQ ID NO: 1396881 - RNA, 20 nt, Human
ccaccugaggaacugucucg

SEQ ID NO: 1396882 - RNA, 17 nt, Human
ccaccugacacaccagg

SEQ ID NO: 1396883 - RNA, 16 nt, Human
ccaccugacacaccag

SEQ ID NO: 1396884 - RNA, 20 nt, Human
ccaccugaauaaagaaugaa

SEQ ID NO: 1396885 - RNA, 16 nt, Human
ccaccuccccuugggc

SEQ ID NO: 1396886 - RNA, 15 nt, Human
ccaccuccccuuggg

SEQ ID NO: 1396887 - RNA, 18 nt, Human
ccaccucccucaaccuca

SEQ ID NO: 1396888 - RNA, 20 nt, Human
ccaccucccucaaccucauc

SEQ ID NO: 1396889 - RNA, 17 nt, Human
ccacuaaccuugccugg

SEQ ID NO: 1396890 - RNA, 21 nt, Human
ccacuaaccuugccugguaca

SEQ ID NO: 1396891 - RNA, 21 nt, Human
ccacguuggagaagcccgugu

SEQ ID NO: 1396892 - RNA, 20 nt, Human
ccacguuggagaagcccgug

SEQ ID NO: 1396893 - RNA, 23 nt, Human
ccacguucugcucaucauucucu

SEQ ID NO: 1396894 - RNA, 13 nt, Human
ccacguuucuaaa

SEQ ID NO: 1396895 - RNA, 18 nt, Human
ccacucacuaggccccca

SEQ ID NO: 1396896 - RNA, 22 nt, Human
ccacucacuaggcccccacuug

SEQ ID NO: 1396897 - RNA, 22 nt, Human
ccacucaugugacucuuuccaa

SEQ ID NO: 1396898 - RNA, 19 nt, Human
ccacucaugugacucuuuc

SEQ ID NO: 1396899 - RNA, 18 nt, Human
ccacuccaagcccagccc

SEQ ID NO: 1396900 - RNA, 20 nt, Human
ccacucacaacagcugccug

SEQ ID NO: 1396901 - RNA, 14 nt, Human
ccacucacaacagc

SEQ ID NO: 1396902 - RNA, 18 nt, Human
ccacuacauucuguuaau

SEQ ID NO: 1396903 - RNA, 20 nt, Human
ccacugcccccugcugccau

SEQ ID NO: 1396904 - RNA, 19 nt, Human
ccacugcccccugcugcca

SEQ ID NO: 1396905 - RNA, 17 nt, Human
ccacugcccccugcugc

SEQ ID NO: 1396906 - RNA, 18 nt, Human
ccacucccuccuaaccua

SEQ ID NO: 1396907 - RNA, 14 nt, Human
ccacucccucacaa

SEQ ID NO: 1396908 - RNA, 13 nt, Human
ccacucccucaca

SEQ ID NO: 1396909 - RNA, 12 nt, Human
ccacucccucac

SEQ ID NO: 1396910 - RNA, 18 nt, Human
ccacuggagcagaagggg

SEQ ID NO: 1396911 - RNA, 11 nt, Human
ccacuggagca

SEQ ID NO: 1396912 - RNA, 18 nt, Human
ccacugccuucgcuucuu

SEQ ID NO: 1396913 - RNA, 16 nt, Human
ccacugccuucgcuuc

SEQ ID NO: 1396914 - RNA, 15 nt, Human
ccacugccuucgcuu

SEQ ID NO: 1396915 - RNA, 14 nt, Human
ccacugccuucgcu

SEQ ID NO: 1396916 - RNA, 23 nt, Human
ccacugccuucgcuucuugccuc

SEQ ID NO: 1396917 - RNA, 22 nt, Human
ccacugccuucgcuucuugccu

SEQ ID NO: 1396918 - RNA, 14 nt, Human
ccacugccuuugac

SEQ ID NO: 1396919 - RNA, 22 nt, Human
ccacugccuuugaccugccucc

SEQ ID NO: 1396920 - RNA, 14 nt, Human
ccagaugcuuuccu

SEQ ID NO: 1396921 - RNA, 14 nt, Human
ccagaugcugaaaa

SEQ ID NO: 1396922 - RNA, 17 nt, Human
ccagaugccccuuucug

SEQ ID NO: 1396923 - RNA, 18 nt, Human
ccagaugccccuuucugg

SEQ ID NO: 1396924 - RNA, 18 nt, Human
ccagaugcagggcaguca

SEQ ID NO: 1396925 - RNA, 15 nt, Human
ccagaugcagggcag

SEQ ID NO: 1396926 - RNA, 14 nt, Human
ccagaugcagggca

SEQ ID NO: 1396927 - RNA, 16 nt, Human
ccagaugcagcucaag

SEQ ID NO: 1396928 - RNA, 16 nt, Human
ccagaggcuggguuca

SEQ ID NO: 1396929 - RNA, 13 nt, Human
ccagauuuaugca

SEQ ID NO: 1396930 - RNA, 22 nt, Human
ccagauuuaugcauauuauuuu

SEQ ID NO: 1396931 - RNA, 15 nt, Human
ccagaggcuggguuc

SEQ ID NO: 1396932 - RNA, 12 nt, Human
ccagaggcuggg

SEQ ID NO: 1396933 - RNA, 19 nt, Human
ccagaggccaaggaggccu

SEQ ID NO: 1396934 - RNA, 11 nt, Human
ccagaggcucg

SEQ ID NO: 1396935 - RNA, 19 nt, Human
ccagaggcuauuauuuuca

SEQ ID NO: 1396936 - RNA, 22 nt, Human
ccagaggcccccagcccagggc

SEQ ID NO: 1396937 - RNA, 21 nt, Human
ccagaggcccccagcccaggg

SEQ ID NO: 1396938 - RNA, 19 nt, Human
ccagaggcccccagcccag

SEQ ID NO: 1396939 - RNA, 18 nt, Human
ccagaggcccccagccca

SEQ ID NO: 1396940 - RNA, 15 nt, Human
ccagaggcccccagc

SEQ ID NO: 1396941 - RNA, 14 nt, Human
ccagaggcccccag

SEQ ID NO: 1396942 - RNA, 15 nt, Human
ccagaggccaaggag

SEQ ID NO: 1396943 - RNA, 21 nt, Human
ccagaggauugcugccccauc

SEQ ID NO: 1396944 - RNA, 21 nt, Human
ccagaggagccaccaguucuc

SEQ ID NO: 1396945 - RNA, 19 nt, Human
ccagaggagccaccaguuc

SEQ ID NO: 1396946 - RNA, 17 nt, Human
ccagaggagccaccagu

SEQ ID NO: 1396947 - RNA, 16 nt, Human
ccagaggagccaccag

SEQ ID NO: 1396948 - RNA, 22 nt, Human
ccagaggaaggggccagaggcu

SEQ ID NO: 1396949 - RNA, 19 nt, Human
ccagaggaaggggccagag

SEQ ID NO: 1396950 - RNA, 17 nt, Human
ccagaggaaggggccag

SEQ ID NO: 1396951 - RNA, 20 nt, Human
ccagagauccaaaagaagcc

SEQ ID NO: 1396952 - RNA, 13 nt, Human
ccagagcaaaaua

SEQ ID NO: 1396953 - RNA, 19 nt, Human
ccagagcaccugcugucug

SEQ ID NO: 1396954 - RNA, 18 nt, Human
ccagagcaccugcugucu

SEQ ID NO: 1396955 - RNA, 17 nt, Human
ccagagcaccugcuguc

SEQ ID NO: 1396956 - RNA, 20 nt, Human
ccagagcaccugcugucugg

SEQ ID NO: 1396957 - RNA, 16 nt, Human
ccagagcacugcucca

SEQ ID NO: 1396958 - RNA, 21 nt, Human
ccagagcuacccgcagaguuc

SEQ ID NO: 1396959 - RNA, 16 nt, Human
ccagacacccaggacu

SEQ ID NO: 1396960 - RNA, 15 nt, Human
ccagacacccaggac

SEQ ID NO: 1396961 - RNA, 14 nt, Human
ccagacacccagga

SEQ ID NO: 1396962 - RNA, 20 nt, Human
ccacuguacuugcucuugau

SEQ ID NO: 1396963 - RNA, 11 nt, Human
ccacuggcucc

SEQ ID NO: 1396964 - RNA, 17 nt, Human
ccacuguacuugcucuu

SEQ ID NO: 1396965 - RNA, 18 nt, Human
ccacuguacuugcucuug

SEQ ID NO: 1396966 - RNA, 19 nt, Human
ccacuguacuugcucuuga

SEQ ID NO: 1396967 - RNA, 21 nt, Human
ccagaccauugucucagagca

SEQ ID NO: 1396968 - RNA, 18 nt, Human
ccagaccauugucucaga

SEQ ID NO: 1396969 - RNA, 15 nt, Human
ccagaccauggacac

SEQ ID NO: 1396970 - RNA, 22 nt, Human
ccagcaagcggggaugucccug

SEQ ID NO: 1396971 - RNA, 20 nt, Human
ccagcaagcggggauguccc

SEQ ID NO: 1396972 - RNA, 17 nt, Human
ccagauuagagccugua

SEQ ID NO: 1396973 - RNA, 23 nt, Human
ccagcaauuacaacggagucaaa

SEQ ID NO: 1396974 - RNA, 18 nt, Human
ccagccccacuccucugc

SEQ ID NO: 1396975 - RNA, 19 nt, Human
ccagccccacuccucugcu

SEQ ID NO: 1396976 - RNA, 15 nt, Human
ccagccagggcucaa

SEQ ID NO: 1396977 - RNA, 19 nt, Human
ccagccagggcucaaucuc

SEQ ID NO: 1396978 - RNA, 14 nt, Human
ccagcccucauccc

SEQ ID NO: 1396979 - RNA, 13 nt, Human
ccagcccucaucc

SEQ ID NO: 1396980 - RNA, 16 nt, Human
ccagccccagccaggg

SEQ ID NO: 1396981 - RNA, 15 nt, Human
ccagccccagccagg

SEQ ID NO: 1396982 - RNA, 13 nt, Human
ccagccccagcca

SEQ ID NO: 1396983 - RNA, 17 nt, Human
ccagccgacccccucuc

SEQ ID NO: 1396984 - RNA, 14 nt, Human
ccagccgacccccu

SEQ ID NO: 1396985 - RNA, 18 nt, Human
ccagccgagcaggaggcc

SEQ ID NO: 1396986 - RNA, 15 nt, Human
ccagccgacccccuc

SEQ ID NO: 1396987 - RNA, 14 nt, Human
ccagccucagcucu

SEQ ID NO: 1396988 - RNA, 21 nt, Human
ccagccaggcccagccgaccc

SEQ ID NO: 1396989 - RNA, 20 nt, Human
ccagccaggcccagccgacc

SEQ ID NO: 1396990 - RNA, 18 nt, Human
ccagccaggcccagccga

SEQ ID NO: 1396991 - RNA, 22 nt, Human
ccagccaggcccagccgacccc

SEQ ID NO: 1396992 - RNA, 16 nt, Human
ccagccaggcccagcc

SEQ ID NO: 1396993 - RNA, 14 nt, Human
ccagccaggcccag

SEQ ID NO: 1396994 - RNA, 22 nt, Human
ccagccagcgucggucugugcc

SEQ ID NO: 1396995 - RNA, 21 nt, Human
ccagcauucccagguaggcca

SEQ ID NO: 1396996 - RNA, 19 nt, Human
ccagcauucccagguaggc

SEQ ID NO: 1396997 - RNA, 17 nt, Human
ccagcauucccagguag

SEQ ID NO: 1396998 - RNA, 21 nt, Human
ccagcauuucccuuccuuccu

SEQ ID NO: 1396999 - RNA, 16 nt, Human
ccagcauuucccuucc

SEQ ID NO: 1397000 - RNA, 20 nt, Human
ccagccaagcucugcagucc

SEQ ID NO: 1397001 - RNA, 14 nt, Human
ccagccaagcucug

SEQ ID NO: 1397002 - RNA, 18 nt, Human
ccagcaggugcugacuuc

SEQ ID NO: 1397003 - RNA, 15 nt, Human
ccagcaggugcugac

SEQ ID NO: 1397004 - RNA, 22 nt, Human
ccagcacugcuugaggaaaaca

SEQ ID NO: 1397005 - RNA, 19 nt, Human
ccagcacugcuugaggaaa

SEQ ID NO: 1397006 - RNA, 18 nt, Human
ccagcacugcuugaggaa

SEQ ID NO: 1397007 - RNA, 15 nt, Human
ccagcacugcuugag

SEQ ID NO: 1397008 - RNA, 12 nt, Human
ccagcacugcuu

SEQ ID NO: 1397009 - RNA, 20 nt, Human
ccagcacucgcuagcagugg

SEQ ID NO: 1397010 - RNA, 15 nt, Human
ccagcauucccaggu

SEQ ID NO: 1397011 - RNA, 14 nt, Human
ccagcauucccagg

SEQ ID NO: 1397012 - RNA, 22 nt, Human
ccagcauuccagccccucuggu

SEQ ID NO: 1397013 - RNA, 21 nt, Human
ccagcauuccagccccucugg

SEQ ID NO: 1397014 - RNA, 20 nt, Human
ccagcauuccagccccucug

SEQ ID NO: 1397015 - RNA, 19 nt, Human
ccagcauuccagccccucu

SEQ ID NO: 1397016 - RNA, 18 nt, Human
ccagcauuccagccccuc

SEQ ID NO: 1397017 - RNA, 17 nt, Human
ccagcauuccagccccu

SEQ ID NO: 1397018 - RNA, 16 nt, Human
ccagcauuccagcccc

SEQ ID NO: 1397019 - RNA, 15 nt, Human
ccagcauuccagccc

SEQ ID NO: 1397020 - RNA, 14 nt, Human
ccagcauuccagcc

SEQ ID NO: 1397021 - RNA, 21 nt, Human
ccagcaucugggccuuggccu

SEQ ID NO: 1397022 - RNA, 17 nt, Human
ccagcaucugggccuug

SEQ ID NO: 1397023 - RNA, 15 nt, Human
ccagcaucugggccu

SEQ ID NO: 1397024 - RNA, 14 nt, Human
ccagcaucugggcc

SEQ ID NO: 1397025 - RNA, 13 nt, Human
ccagcaucugggc

SEQ ID NO: 1397026 - RNA, 12 nt, Human
ccagcaucuggg

SEQ ID NO: 1397027 - RNA, 11 nt, Human
ccagcaucugg

SEQ ID NO: 1397028 - RNA, 23 nt, Human
ccagcauaauacuugcuuuggaa

SEQ ID NO: 1397029 - RNA, 18 nt, Human
ccagugcccugaucccag

SEQ ID NO: 1397030 - RNA, 17 nt, Human
ccagugcccugauccca

SEQ ID NO: 1397031 - RNA, 16 nt, Human
ccagugcccugauccc

SEQ ID NO: 1397032 - RNA, 21 nt, Human
ccagugcccugagccaggguc

SEQ ID NO: 1397033 - RNA, 18 nt, Human
ccagugcccugagccagg

SEQ ID NO: 1397034 - RNA, 17 nt, Human
ccagugcccugagccag

SEQ ID NO: 1397035 - RNA, 16 nt, Human
ccagugcccugagcca

SEQ ID NO: 1397036 - RNA, 15 nt, Human
ccagugcccugagcc

SEQ ID NO: 1397037 - RNA, 14 nt, Human
ccagugcccugagc

SEQ ID NO: 1397038 - RNA, 23 nt, Human
ccagugcccucuccccucagccu

SEQ ID NO: 1397039 - RNA, 18 nt, Human
ccagugcccccacugacc

SEQ ID NO: 1397040 - RNA, 16 nt, Human
ccagugcccccacuga

SEQ ID NO: 1397041 - RNA, 14 nt, Human
ccagugcccccacu

SEQ ID NO: 1397042 - RNA, 16 nt, Human
ccagucuguggaucag

SEQ ID NO: 1397043 - RNA, 18 nt, Human
ccaguguguggcuuucag

SEQ ID NO: 1397044 - RNA, 16 nt, Human
ccaguguguggcuuuc

SEQ ID NO: 1397045 - RNA, 22 nt, Human
ccaguguccugagcucagcgug

SEQ ID NO: 1397046 - RNA, 23 nt, Human
ccaguguccugagcucagcgugg

SEQ ID NO: 1397047 - RNA, 20 nt, Human
ccaguguccugagcucagcg

SEQ ID NO: 1397048 - RNA, 19 nt, Human
ccaguguccugagcucagc

SEQ ID NO: 1397049 - RNA, 18 nt, Human
ccaguguccugagcucag

SEQ ID NO: 1397050 - RNA, 23 nt, Human
ccaguguccugagccccagggag

SEQ ID NO: 1397051 - RNA, 22 nt, Human
ccaguguccugagccccaggga

SEQ ID NO: 1397052 - RNA, 19 nt, Human
ccaguguccugagccccag

SEQ ID NO: 1397053 - RNA, 20 nt, Human
ccagugucauuucucaucca

SEQ ID NO: 1397054 - RNA, 24 nt, Human
ccagugcccugaucccagagagcc

SEQ ID NO: 1397055 - RNA, 17 nt, Human
ccaguuaaaaaaaauuu

SEQ ID NO: 1397056 - RNA, 19 nt, Human
ccaguguuuuaggagcaug

SEQ ID NO: 1397057 - RNA, 20 nt, Human
ccaguguuagggaagggccu

SEQ ID NO: 1397058 - RNA, 17 nt, Human
ccaguguuagggaaggg

SEQ ID NO: 1397059 - RNA, 23 nt, Human
ccaguguguggcuuucagagccu

SEQ ID NO: 1397060 - RNA, 22 nt, Human
ccaguguguggcuuucagagcc

SEQ ID NO: 1397061 - RNA, 21 nt, Human
ccaguguguggcuuucagagc

SEQ ID NO: 1397062 - RNA, 22 nt, Human
ccaguguuguggauuuaacaga

SEQ ID NO: 1397063 - RNA, 22 nt, Human
ccaguuagccucugcaggaugu

SEQ ID NO: 1397064 - RNA, 17 nt, Human
ccaguuagccucugcag

SEQ ID NO: 1397065 - RNA, 19 nt, Human
ccaguuaaucuugcuuucu

SEQ ID NO: 1397066 - RNA, 18 nt, Human
ccaguuaauuuuuccaac

SEQ ID NO: 1397067 - RNA, 16 nt, Human
ccaguuaauuuuucca

SEQ ID NO: 1397068 - RNA, 17 nt, Human
ccaguuaaucuugcuuu

SEQ ID NO: 1397069 - RNA, 13 nt, Human
ccaguguuuaaaa

SEQ ID NO: 1397070 - RNA, 15 nt, Human
ccauagguagaaugu

SEQ ID NO: 1397071 - RNA, 20 nt, Human
ccaggagaaggccaauuccu

SEQ ID NO: 1397072 - RNA, 22 nt, Human
ccaggagaagcucagcugcauu

SEQ ID NO: 1397073 - RNA, 21 nt, Human
ccaggagaagcucagcugcau

SEQ ID NO: 1397074 - RNA, 18 nt, Human
ccaggagaagcucagcug

SEQ ID NO: 1397075 - RNA, 17 nt, Human
ccaggagaagcucagcu

SEQ ID NO: 1397076 - RNA, 21 nt, Human
ccagccucccugaagccuuug

SEQ ID NO: 1397077 - RNA, 17 nt, Human
ccagccucccugaagcc

SEQ ID NO: 1397078 - RNA, 15 nt, Human
ccagccucccugaag

SEQ ID NO: 1397079 - RNA, 13 nt, Human
ccagccucccuga

SEQ ID NO: 1397080 - RNA, 13 nt, Human
ccaggagacaggu

SEQ ID NO: 1397081 - RNA, 17 nt, Human
ccaggagcuccaguguc

SEQ ID NO: 1397082 - RNA, 14 nt, Human
ccaggagcuccagu

SEQ ID NO: 1397083 - RNA, 13 nt, Human
ccaggagcuccag

SEQ ID NO: 1397084 - RNA, 12 nt, Human
ccaggagcucca

SEQ ID NO: 1397085 - RNA, 17 nt, Human
ccaggagccugugccuc

SEQ ID NO: 1397086 - RNA, 16 nt, Human
ccaggagccugugccu

SEQ ID NO: 1397087 - RNA, 23 nt, Human
ccaggccaggacucugcagccuc

SEQ ID NO: 1397088 - RNA, 18 nt, Human
ccaggccaggcauguggc

SEQ ID NO: 1397089 - RNA, 22 nt, Human
ccaggccaggacucugcagccu

SEQ ID NO: 1397090 - RNA, 21 nt, Human
ccaggccaggacucugcagcc

SEQ ID NO: 1397091 - RNA, 20 nt, Human
ccaggccaggacucugcagc

SEQ ID NO: 1397092 - RNA, 19 nt, Human
ccaggccaggacucugcag

SEQ ID NO: 1397093 - RNA, 18 nt, Human
ccaggccaggacucugca

SEQ ID NO: 1397094 - RNA, 17 nt, Human
ccaggccaggacucugc

SEQ ID NO: 1397095 - RNA, 13 nt, Human
ccaggccaggacu

SEQ ID NO: 1397096 - RNA, 23 nt, Human
ccaggagcugggcagaaggccaa

SEQ ID NO: 1397097 - RNA, 20 nt, Human
ccaggagcuccccuccccaa

SEQ ID NO: 1397098 - RNA, 19 nt, Human
ccaggagcuccccucccca

SEQ ID NO: 1397099 - RNA, 14 nt, Human
ccaggagcuccccu

SEQ ID NO: 1397100 - RNA, 23 nt, Human
ccaggagcuccaguguccugagc

SEQ ID NO: 1397101 - RNA, 21 nt, Human
ccaggagcuccaguguccuga

SEQ ID NO: 1397102 - RNA, 20 nt, Human
ccaggagcuccaguguccug

SEQ ID NO: 1397103 - RNA, 18 nt, Human
ccaggagcuccagugucc

SEQ ID NO: 1397104 - RNA, 16 nt, Human
ccaggagcugggcaga

SEQ ID NO: 1397105 - RNA, 21 nt, Human
ccaggagcugggcagaaggcc

SEQ ID NO: 1397106 - RNA, 19 nt, Human
ccaggcccaaggcucccgg

SEQ ID NO: 1397107 - RNA, 17 nt, Human
ccaggcccaaggcuccc

SEQ ID NO: 1397108 - RNA, 15 nt, Human
ccaggcccaaggcuc

SEQ ID NO: 1397109 - RNA, 14 nt, Human
ccaggcccaaggcu

SEQ ID NO: 1397110 - RNA, 22 nt, Human
ccaggcccacugugccucagag

SEQ ID NO: 1397111 - RNA, 18 nt, Human
ccaggcccagccgacccc

SEQ ID NO: 1397112 - RNA, 17 nt, Human
ccaggcccacugugccu

SEQ ID NO: 1397113 - RNA, 18 nt, Human
ccaggcccaaggcucccg

SEQ ID NO: 1397114 - RNA, 21 nt, Human
ccaggccgggaaaaagcccac

SEQ ID NO: 1397115 - RNA, 16 nt, Human
ccaggcgcuaauucaa

SEQ ID NO: 1397116 - RNA, 24 nt, Human
ccaggcuaauuuuuuuguauuuua

SEQ ID NO: 1397117 - RNA, 18 nt, Human
ccagggagagggggcugg

SEQ ID NO: 1397118 - RNA, 13 nt, Human
ccagggagagggg

SEQ ID NO: 1397119 - RNA, 19 nt, Human
ccagggagcaugagaggag

SEQ ID NO: 1397120 - RNA, 22 nt, Human
ccagggagcaugagaggaggca

SEQ ID NO: 1397121 - RNA, 23 nt, Human
ccagggagcaugagaggaggcag

SEQ ID NO: 1397122 - RNA, 21 nt, Human
ccagggagagcccaggagcuc

SEQ ID NO: 1397123 - RNA, 23 nt, Human
ccagggagagcccaggagcuccc

SEQ ID NO: 1397124 - RNA, 20 nt, Human
ccagggagagcccaggagcu

SEQ ID NO: 1397125 - RNA, 19 nt, Human
ccagggagagcccaggagc

SEQ ID NO: 1397126 - RNA, 18 nt, Human
ccagggagagcccaggag

SEQ ID NO: 1397127 - RNA, 17 nt, Human
ccagggagagcccagga

SEQ ID NO: 1397128 - RNA, 15 nt, Human
ccagggagagcccag

SEQ ID NO: 1397129 - RNA, 14 nt, Human
ccagggagagccca

SEQ ID NO: 1397130 - RNA, 23 nt, Human
ccaggcuguguuuggcuuucagg

SEQ ID NO: 1397131 - RNA, 18 nt, Human
ccagggcccagagcccag

SEQ ID NO: 1397132 - RNA, 17 nt, Human
ccagggcccagagccca

SEQ ID NO: 1397133 - RNA, 16 nt, Human
ccagggcccagagccc

SEQ ID NO: 1397134 - RNA, 15 nt, Human
ccagggcccagagcc

SEQ ID NO: 1397135 - RNA, 14 nt, Human
ccagggcccagagc

SEQ ID NO: 1397136 - RNA, 13 nt, Human
ccagggcccagag

SEQ ID NO: 1397137 - RNA, 14 nt, Human
ccagggccagccuc

SEQ ID NO: 1397138 - RNA, 15 nt, Human
ccagggccagccucu

SEQ ID NO: 1397139 - RNA, 22 nt, Human
ccagggagagggggcugguggg

SEQ ID NO: 1397140 - RNA, 14 nt, Human
ccagggcuccugca

SEQ ID NO: 1397141 - RNA, 13 nt, Human
ccagggcuccugc

SEQ ID NO: 1397142 - RNA, 12 nt, Human
ccagggcuccug

SEQ ID NO: 1397143 - RNA, 19 nt, Human
ccagggcuccagccccucu

SEQ ID NO: 1397144 - RNA, 23 nt, Human
ccagggcccagagcccagcucca

SEQ ID NO: 1397145 - RNA, 22 nt, Human
ccagggcccagagcccagcucc

SEQ ID NO: 1397146 - RNA, 21 nt, Human
ccagggcccagagcccagcuc

SEQ ID NO: 1397147 - RNA, 19 nt, Human
ccagggcccagagcccagc

SEQ ID NO: 1397148 - RNA, 21 nt, Human
ccagggcuccagccccucuug

SEQ ID NO: 1397149 - RNA, 20 nt, Human
ccagggcuccugcacuuacu

SEQ ID NO: 1397150 - RNA, 16 nt, Human
ccaggguuuuaacuuu

SEQ ID NO: 1397151 - RNA, 13 nt, Human
ccaggguuuuaac

SEQ ID NO: 1397152 - RNA, 21 nt, Human
ccaggguugaccccagaggau

SEQ ID NO: 1397153 - RNA, 18 nt, Human
ccaggguugaccccagag

SEQ ID NO: 1397154 - RNA, 16 nt, Human
ccaggguugaccccag

SEQ ID NO: 1397155 - RNA, 13 nt, Human
ccagucuguggau

SEQ ID NO: 1397156 - RNA, 12 nt, Human
ccagucugugga

SEQ ID NO: 1397157 - RNA, 17 nt, Human
ccaguaaaauugccaua

SEQ ID NO: 1397158 - RNA, 19 nt, Human
ccaguaaaauugccauauu

SEQ ID NO: 1397159 - RNA, 23 nt, Human
ccaguaaaauugccauauugcac

SEQ ID NO: 1397160 - RNA, 24 nt, Human
ccagguucuccguuagcuccugug

SEQ ID NO: 1397161 - RNA, 23 nt, Human
ccagguucuccguuagcuccugu

SEQ ID NO: 1397162 - RNA, 22 nt, Human
ccagguucuccguuagcuccug

SEQ ID NO: 1397163 - RNA, 21 nt, Human
ccagguucuccguuagcuccu

SEQ ID NO: 1397164 - RNA, 18 nt, Human
ccagguuccacagaggac

SEQ ID NO: 1397165 - RNA, 15 nt, Human
ccagguuccacagag

SEQ ID NO: 1397166 - RNA, 18 nt, Human
ccagguuggcucugccag

SEQ ID NO: 1397167 - RNA, 17 nt, Human
ccagguuggcucugcca

SEQ ID NO: 1397168 - RNA, 16 nt, Human
ccagguuggcucugcc

SEQ ID NO: 1397169 - RNA, 14 nt, Human
ccagguuggcucug

SEQ ID NO: 1397170 - RNA, 18 nt, Human
ccagguuggagugcagug

SEQ ID NO: 1397171 - RNA, 11 nt, Human
ccaguaaaauu

SEQ ID NO: 1397172 - RNA, 13 nt, Human
ccaguaaaauugc

SEQ ID NO: 1397173 - RNA, 15 nt, Human
ccaguaaaauugcca

SEQ ID NO: 1397174 - RNA, 17 nt, Human
cccaauccucccagaaa

SEQ ID NO: 1397175 - RNA, 16 nt, Human
cccaagggaggcugcu

SEQ ID NO: 1397176 - RNA, 18 nt, Human
cccaagggaggcugcugc

SEQ ID NO: 1397177 - RNA, 19 nt, Human
cccaaggcucccggaauuc

SEQ ID NO: 1397178 - RNA, 13 nt, Human
cccaaccugcucu

SEQ ID NO: 1397179 - RNA, 17 nt, Human
cccaacccuucccucac

SEQ ID NO: 1397180 - RNA, 22 nt, Human
cccaacccguggaggcugcucg

SEQ ID NO: 1397181 - RNA, 23 nt, Human
cccaacccguggaggcugcucgg

SEQ ID NO: 1397182 - RNA, 21 nt, Human
cccaacccguggaggcugcuc

SEQ ID NO: 1397183 - RNA, 20 nt, Human
cccaacccguggaggcugcu

SEQ ID NO: 1397184 - RNA, 19 nt, Human
cccaacccguggaggcugc

SEQ ID NO: 1397185 - RNA, 18 nt, Human
cccaacccguggaggcug

SEQ ID NO: 1397186 - RNA, 14 nt, Human
cccaaaugagccau

SEQ ID NO: 1397187 - RNA, 23 nt, Human
cccaaaguuguuguaaccugcug

SEQ ID NO: 1397188 - RNA, 20 nt, Human
cccaaagugcugagauuaca

SEQ ID NO: 1397189 - RNA, 15 nt, Human
cccaaagugcugaga

SEQ ID NO: 1397190 - RNA, 15 nt, Human
cccaaagcuuuccug

SEQ ID NO: 1397191 - RNA, 14 nt, Human
cccaaagcuuuccu

SEQ ID NO: 1397192 - RNA, 18 nt, Human
cccaaaggacgcacugag

SEQ ID NO: 1397193 - RNA, 19 nt, Human
cccaaaggacgcacugagc

SEQ ID NO: 1397194 - RNA, 15 nt, Human
cccaaaggacgcacu

SEQ ID NO: 1397195 - RNA, 20 nt, Human
cccaaagcuuuccugcccca

SEQ ID NO: 1397196 - RNA, 17 nt, Human
cccaaagcuuuccugcc

SEQ ID NO: 1397197 - RNA, 16 nt, Human
cccaaagcuuuccugc

SEQ ID NO: 1397198 - RNA, 13 nt, Human
ccauuuguacuga

SEQ ID NO: 1397199 - RNA, 18 nt, Human
ccauuuggcaucccuggg

SEQ ID NO: 1397200 - RNA, 19 nt, Human
ccauuuggcaucccugggc

SEQ ID NO: 1397201 - RNA, 21 nt, Human
ccauuuguguacacagucagc

SEQ ID NO: 1397202 - RNA, 16 nt, Human
ccauuuggcaucccug

SEQ ID NO: 1397203 - RNA, 23 nt, Human
ccauuuggauccuguguggagag

SEQ ID NO: 1397204 - RNA, 13 nt, Human
ccauucauuccau

SEQ ID NO: 1397205 - RNA, 14 nt, Human
ccauucauuccauu

SEQ ID NO: 1397206 - RNA, 15 nt, Human
ccaugggaccacaac

SEQ ID NO: 1397207 - RNA, 22 nt, Human
ccaugggagcugguuagaaaug

SEQ ID NO: 1397208 - RNA, 11 nt, Human
ccaugggacca

SEQ ID NO: 1397209 - RNA, 13 nt, Human
ccauguuggcuag

SEQ ID NO: 1397210 - RNA, 13 nt, Human
ccauguuucaaau

SEQ ID NO: 1397211 - RNA, 20 nt, Human
ccauucacuucauaauccag

SEQ ID NO: 1397212 - RNA, 17 nt, Human
ccauccuaggcugacac

SEQ ID NO: 1397213 - RNA, 16 nt, Human
ccauccuaggcugaca

SEQ ID NO: 1397214 - RNA, 17 nt, Human
ccauauuuaccucagcc

SEQ ID NO: 1397215 - RNA, 18 nt, Human
ccauauuguaaaacaggu

SEQ ID NO: 1397216 - RNA, 14 nt, Human
ccauauuguaaaac

SEQ ID NO: 1397217 - RNA, 16 nt, Human
ccauauuuaccucagc

SEQ ID NO: 1397218 - RNA, 15 nt, Human
ccauauuuaccucag

SEQ ID NO: 1397219 - RNA, 18 nt, Human
ccauccuacccccugugc

SEQ ID NO: 1397220 - RNA, 14 nt, Human
ccauauuggccagu

SEQ ID NO: 1397221 - RNA, 23 nt, Human
ccauauugcacaugucuuaauga

SEQ ID NO: 1397222 - RNA, 18 nt, Human
ccauauugcacaugucuu

SEQ ID NO: 1397223 - RNA, 21 nt, Human
ccauauugcacaugucuuaau

SEQ ID NO: 1397224 - RNA, 13 nt, Human
ccauauugcacau

SEQ ID NO: 1397225 - RNA, 21 nt, Human
ccaucguugcccccauuucug

SEQ ID NO: 1397226 - RNA, 15 nt, Human
ccaucugcauuccca

SEQ ID NO: 1397227 - RNA, 17 nt, Human
ccaucugcauucccagc

SEQ ID NO: 1397228 - RNA, 21 nt, Human
ccauggccugcaaacugggaa

SEQ ID NO: 1397229 - RNA, 18 nt, Human
ccauggccugcaaacugg

SEQ ID NO: 1397230 - RNA, 16 nt, Human
ccauggccugcaaacu

SEQ ID NO: 1397231 - RNA, 22 nt, Human
ccauggccugcaaacugggaac

SEQ ID NO: 1397232 - RNA, 20 nt, Human
ccaucugcgugacaauaaaa

SEQ ID NO: 1397233 - RNA, 22 nt, Human
ccaucugcgugacaauaaaaca

SEQ ID NO: 1397234 - RNA, 13 nt, Human
ccauggcccugcc

SEQ ID NO: 1397235 - RNA, 19 nt, Human
cccuagcgcuaucucccug

SEQ ID NO: 1397236 - RNA, 14 nt, Human
cccuagccuugcuu

SEQ ID NO: 1397237 - RNA, 11 nt, Human
cccuagccuug

SEQ ID NO: 1397238 - RNA, 16 nt, Human
cccuaccugccccacu

SEQ ID NO: 1397239 - RNA, 14 nt, Human
cccuaccugugccu

SEQ ID NO: 1397240 - RNA, 14 nt, Human
cccuaccugcccca

SEQ ID NO: 1397241 - RNA, 15 nt, Human
cccuacccucuagag

SEQ ID NO: 1397242 - RNA, 14 nt, Human
cccuacccucuaga

SEQ ID NO: 1397243 - RNA, 13 nt, Human
cccuacccucuag

SEQ ID NO: 1397244 - RNA, 11 nt, Human
cccuacccucu

SEQ ID NO: 1397245 - RNA, 22 nt, Human
cccuaaucuauggucgggagac

SEQ ID NO: 1397246 - RNA, 15 nt, Human
cccuaaucuaugguc

SEQ ID NO: 1397247 - RNA, 14 nt, Human
cccuacauguauug

SEQ ID NO: 1397248 - RNA, 13 nt, Human
cccgucucagugu

SEQ ID NO: 1397249 - RNA, 12 nt, Human
cccgucucagug

SEQ ID NO: 1397250 - RNA, 17 nt, Human
cccguccugccuguggc

SEQ ID NO: 1397251 - RNA, 16 nt, Human
cccguccugccugugg

SEQ ID NO: 1397252 - RNA, 15 nt, Human
cccguccugccugug

SEQ ID NO: 1397253 - RNA, 14 nt, Human
cccguccugccugu

SEQ ID NO: 1397254 - RNA, 13 nt, Human
cccguccugccug

SEQ ID NO: 1397255 - RNA, 17 nt, Human
cccgucuggcccaccag

SEQ ID NO: 1397256 - RNA, 23 nt, Human
cccggggugagggggggcucccu

SEQ ID NO: 1397257 - RNA, 14 nt, Human
cccggggccagcac

SEQ ID NO: 1397258 - RNA, 16 nt, Human
cccggggccagcacuu

SEQ ID NO: 1397259 - RNA, 21 nt, Human
cccggggugcccacaggccgc

SEQ ID NO: 1397260 - RNA, 22 nt, Human
cccggggaaaggcaagguccgg

SEQ ID NO: 1397261 - RNA, 13 nt, Human
cccagaaaagaaa

SEQ ID NO: 1397262 - RNA, 20 nt, Human
cccagaaaagaaagcuacag

SEQ ID NO: 1397263 - RNA, 21 nt, Human
cccgagucauucguucugugg

SEQ ID NO: 1397264 - RNA, 12 nt, Human
cccgccugcccu

SEQ ID NO: 1397265 - RNA, 13 nt, Human
cccgccucagccu

SEQ ID NO: 1397266 - RNA, 11 nt, Human
cccuggucccu

SEQ ID NO: 1397267 - RNA, 14 nt, Human
cccugggccuuggg

SEQ ID NO: 1397268 - RNA, 19 nt, Human
cccugguaauagcuguaaa

SEQ ID NO: 1397269 - RNA, 16 nt, Human
cccugguaauagcugu

SEQ ID NO: 1397270 - RNA, 14 nt, Human
cccuggucccuugu

SEQ ID NO: 1397271 - RNA, 21 nt, Human
cccugguccccuccuucccaa

SEQ ID NO: 1397272 - RNA, 14 nt, Human
cccugguccccucc

SEQ ID NO: 1397273 - RNA, 18 nt, Human
cccuggucccucugcagu

SEQ ID NO: 1397274 - RNA, 21 nt, Human
cccuggacugugugcucagga

SEQ ID NO: 1397275 - RNA, 15 nt, Human
cccuggacugugugc

SEQ ID NO: 1397276 - RNA, 18 nt, Human
cccugggccuugggcucc

SEQ ID NO: 1397277 - RNA, 13 nt, Human
cccugggccuugg

SEQ ID NO: 1397278 - RNA, 20 nt, Human
cccugggccugcugcugaga

SEQ ID NO: 1397279 - RNA, 19 nt, Human
cccugggccugcugcugag

SEQ ID NO: 1397280 - RNA, 17 nt, Human
cccugggccugcugcug

SEQ ID NO: 1397281 - RNA, 16 nt, Human
cccugggccugcugcu

SEQ ID NO: 1397282 - RNA, 15 nt, Human
cccugggccugcugc

SEQ ID NO: 1397283 - RNA, 14 nt, Human
cccugggccugcug

SEQ ID NO: 1397284 - RNA, 13 nt, Human
cccugggccugcu

SEQ ID NO: 1397285 - RNA, 19 nt, Human
cccugggccugccucacca

SEQ ID NO: 1397286 - RNA, 13 nt, Human
cccugggccugcc

SEQ ID NO: 1397287 - RNA, 11 nt, Human
cccugggccug

SEQ ID NO: 1397288 - RNA, 19 nt, Human
cccugggcccugggcugga

SEQ ID NO: 1397289 - RNA, 18 nt, Human
cccugggcccugggcugg

SEQ ID NO: 1397290 - RNA, 16 nt, Human
cccugggcccugggcu

SEQ ID NO: 1397291 - RNA, 13 nt, Human
cccugggcccugg

SEQ ID NO: 1397292 - RNA, 24 nt, Human
cccugggagaaucgcuccugcagc

SEQ ID NO: 1397293 - RNA, 22 nt, Human
cccugggagaaucgcuccugca

SEQ ID NO: 1397294 - RNA, 15 nt, Human
cccugggaggcucug

SEQ ID NO: 1397295 - RNA, 20 nt, Human
cccugccacucacuaggccc

SEQ ID NO: 1397296 - RNA, 18 nt, Human
cccuggacccagccagaa

SEQ ID NO: 1397297 - RNA, 16 nt, Human
cccuggacccagccag

SEQ ID NO: 1397298 - RNA, 23 nt, Human
cccuggaaugaguugaggccacu

SEQ ID NO: 1397299 - RNA, 21 nt, Human
cccuggaaggacauccauguu

SEQ ID NO: 1397300 - RNA, 18 nt, Human
cccucuguguauuugcuu

SEQ ID NO: 1397301 - RNA, 24 nt, Human
cccucuguccaggcacugagauac

SEQ ID NO: 1397302 - RNA, 20 nt, Human
cccucuguccaggcacugag

SEQ ID NO: 1397303 - RNA, 22 nt, Human
cccucuggucgcuccugcccac

SEQ ID NO: 1397304 - RNA, 20 nt, Human
cccucuggucgcuccugccc

SEQ ID NO: 1397305 - RNA, 19 nt, Human
cccucuggucgcuccugcc

SEQ ID NO: 1397306 - RNA, 18 nt, Human
cccucuggucgcuccugc

SEQ ID NO: 1397307 - RNA, 13 nt, Human
cccugcacaguug

SEQ ID NO: 1397308 - RNA, 22 nt, Human
cccugcacagugacuucugaga

SEQ ID NO: 1397309 - RNA, 20 nt, Human
cccugcacagugacuucuga

SEQ ID NO: 1397310 - RNA, 17 nt, Human
cccugcacuguaaaaug

SEQ ID NO: 1397311 - RNA, 20 nt, Human
cccugcacuguaaaaugugg

SEQ ID NO: 1397312 - RNA, 16 nt, Human
cccugcacuguaaaau

SEQ ID NO: 1397313 - RNA, 23 nt, Human
cccugcaccaugcugcuggggaa

SEQ ID NO: 1397314 - RNA, 20 nt, Human
cccugccaccuccugccuca

SEQ ID NO: 1397315 - RNA, 13 nt, Human
cccugccaccugu

SEQ ID NO: 1397316 - RNA, 14 nt, Human
cccugccaccuguc

SEQ ID NO: 1397317 - RNA, 15 nt, Human
cccugccaccugucu

SEQ ID NO: 1397318 - RNA, 16 nt, Human
cccugccaccugucug

SEQ ID NO: 1397319 - RNA, 17 nt, Human
cccugccaccugucugu

SEQ ID NO: 1397320 - RNA, 19 nt, Human
cccugccacucacuaggcc

SEQ ID NO: 1397321 - RNA, 18 nt, Human
cccugccacucacuaggc

SEQ ID NO: 1397322 - RNA, 13 nt, Human
cccugccacucac

SEQ ID NO: 1397323 - RNA, 18 nt, Human
cccugccaccugucuguc

SEQ ID NO: 1397324 - RNA, 18 nt, Human
cccucccccccaugcacu

SEQ ID NO: 1397325 - RNA, 15 nt, Human
cccucccccccaugc

SEQ ID NO: 1397326 - RNA, 21 nt, Human
cccuccccaacugaccaccuu

SEQ ID NO: 1397327 - RNA, 19 nt, Human
cccuccaccgcagaaggaa

SEQ ID NO: 1397328 - RNA, 19 nt, Human
cccuauacuguaguauucu

SEQ ID NO: 1397329 - RNA, 23 nt, Human
cccuauacugcuuggagcugagc

SEQ ID NO: 1397330 - RNA, 19 nt, Human
cccuaguucuaccucaggc

SEQ ID NO: 1397331 - RNA, 22 nt, Human
cccuagguguuuuguucaccau

SEQ ID NO: 1397332 - RNA, 16 nt, Human
cccuagguguuuuguu

SEQ ID NO: 1397333 - RNA, 15 nt, Human
cccuagguguuuugu

SEQ ID NO: 1397334 - RNA, 12 nt, Human
cccuagguguuu

SEQ ID NO: 1397335 - RNA, 16 nt, Human
cccuauccaaucaauc

SEQ ID NO: 1397336 - RNA, 23 nt, Human
cccuccacauuucccccuagccu

SEQ ID NO: 1397337 - RNA, 21 nt, Human
cccuccaccgcagaaggaagg

SEQ ID NO: 1397338 - RNA, 18 nt, Human
cccuccaccgcagaagga

SEQ ID NO: 1397339 - RNA, 22 nt, Human
cccucuggagggguguggcucc

SEQ ID NO: 1397340 - RNA, 21 nt, Human
cccucuggagggguguggcuc

SEQ ID NO: 1397341 - RNA, 12 nt, Human
cccucuggaggg

SEQ ID NO: 1397342 - RNA, 15 nt, Human
cccucugcugcuguc

SEQ ID NO: 1397343 - RNA, 14 nt, Human
cccucugcugcugu

SEQ ID NO: 1397344 - RNA, 19 nt, Human
cccucugaccugcacuggg

SEQ ID NO: 1397345 - RNA, 17 nt, Human
cccucugaccugcacug

SEQ ID NO: 1397346 - RNA, 16 nt, Human
cccucugaccugcacu

SEQ ID NO: 1397347 - RNA, 15 nt, Human
cccucugaccugcac

SEQ ID NO: 1397348 - RNA, 14 nt, Human
cccucugaccugca

SEQ ID NO: 1397349 - RNA, 13 nt, Human
cccucugaaauac

SEQ ID NO: 1397350 - RNA, 14 nt, Human
cccucucuggagaa

SEQ ID NO: 1397351 - RNA, 13 nt, Human
cccucucuggaga

SEQ ID NO: 1397352 - RNA, 16 nt, Human
cccucucugcucugcg

SEQ ID NO: 1397353 - RNA, 15 nt, Human
cccucucugcucugc

SEQ ID NO: 1397354 - RNA, 20 nt, Human
cccucccccccaugcacugu

SEQ ID NO: 1397355 - RNA, 18 nt, Human
cccucucucauacccucc

SEQ ID NO: 1397356 - RNA, 14 nt, Human
cccucucugcucug

SEQ ID NO: 1397357 - RNA, 20 nt, Human
cccucucugcagacuuccca

SEQ ID NO: 1397358 - RNA, 22 nt, Human
cccucucucauacccucccucc

SEQ ID NO: 1397359 - RNA, 23 nt, Human
cccgagucauucguucuguggag

SEQ ID NO: 1397360 - RNA, 22 nt, Human
cccacaagccucugcccaggca

SEQ ID NO: 1397361 - RNA, 23 nt, Human
cccacaggaagccugcaguccug

SEQ ID NO: 1397362 - RNA, 22 nt, Human
cccacaggaagccugcaguccu

SEQ ID NO: 1397363 - RNA, 20 nt, Human
cccacaggaagccugcaguc

SEQ ID NO: 1397364 - RNA, 19 nt, Human
cccaccaacccucagggca

SEQ ID NO: 1397365 - RNA, 18 nt, Human
cccaccaacccucagggc

SEQ ID NO: 1397366 - RNA, 17 nt, Human
cccaccaacccucaggg

SEQ ID NO: 1397367 - RNA, 16 nt, Human
cccaccaacccucagg

SEQ ID NO: 1397368 - RNA, 20 nt, Human
cccacauuggaagagcagca

SEQ ID NO: 1397369 - RNA, 22 nt, Human
cccacauuggaagagcagcacc

SEQ ID NO: 1397370 - RNA, 14 nt, Human
cccacauuaaagaa

SEQ ID NO: 1397371 - RNA, 20 nt, Human
cccacaggacauuucucuaa

SEQ ID NO: 1397372 - RNA, 19 nt, Human
cccacaggacauuucucua

SEQ ID NO: 1397373 - RNA, 21 nt, Human
cccacaagugcccuccaggcu

SEQ ID NO: 1397374 - RNA, 13 nt, Human
cccacaagccuga

SEQ ID NO: 1397375 - RNA, 20 nt, Human
cccacaagccucugcccagg

SEQ ID NO: 1397376 - RNA, 19 nt, Human
cccacaacccaaaagguuu

SEQ ID NO: 1397377 - RNA, 15 nt, Human
cccacaagccugagg

SEQ ID NO: 1397378 - RNA, 18 nt, Human
cccacuuguccuuagccu

SEQ ID NO: 1397379 - RNA, 14 nt, Human
cccacuuguccuua

SEQ ID NO: 1397380 - RNA, 21 nt, Human
cccacuugccucuuccuugaa

SEQ ID NO: 1397381 - RNA, 15 nt, Human
cccacuugccucuuc

SEQ ID NO: 1397382 - RNA, 14 nt, Human
cccacuugccucuu

SEQ ID NO: 1397383 - RNA, 13 nt, Human
cccacuugccucu

SEQ ID NO: 1397384 - RNA, 14 nt, Human
cccacgagggcugg

SEQ ID NO: 1397385 - RNA, 13 nt, Human
cccacgagggcug

SEQ ID NO: 1397386 - RNA, 16 nt, Human
cccacgacacugcagc

SEQ ID NO: 1397387 - RNA, 16 nt, Human
cccaccagaugcugaa

SEQ ID NO: 1397388 - RNA, 13 nt, Human
cccaccaggcugc

SEQ ID NO: 1397389 - RNA, 16 nt, Human
cccaccaggcugcuca

SEQ ID NO: 1397390 - RNA, 17 nt, Human
cccaccaggcugcucag

SEQ ID NO: 1397391 - RNA, 22 nt, Human
cccaccaggcugcucagggcug

SEQ ID NO: 1397392 - RNA, 17 nt, Human
cccaccgggccacuccu

SEQ ID NO: 1397393 - RNA, 13 nt, Human
cccaccagggucc

SEQ ID NO: 1397394 - RNA, 18 nt, Human
cccaccugacacaccagg

SEQ ID NO: 1397395 - RNA, 15 nt, Human
cccaccuccugacac

SEQ ID NO: 1397396 - RNA, 16 nt, Human
cccaccuccccuuggg

SEQ ID NO: 1397397 - RNA, 23 nt, Human
cccaccgggccacuccuuccugc

SEQ ID NO: 1397398 - RNA, 22 nt, Human
cccaccgggccacuccuuccug

SEQ ID NO: 1397399 - RNA, 19 nt, Human
cccaccgggccacuccuuc

SEQ ID NO: 1397400 - RNA, 18 nt, Human
cccaccgggccacuccuu

SEQ ID NO: 1397401 - RNA, 21 nt, Human
cccaccucccucaaccucauc

SEQ ID NO: 1397402 - RNA, 23 nt, Human
ccuagggaggcauggucugcccu

SEQ ID NO: 1397403 - RNA, 11 nt, Human
ccuaggcugca

SEQ ID NO: 1397404 - RNA, 15 nt, Human
ccuagaaacaacacu

SEQ ID NO: 1397405 - RNA, 18 nt, Human
ccuaggcuccaccccauc

SEQ ID NO: 1397406 - RNA, 17 nt, Human
ccuaggcuccaccccau

SEQ ID NO: 1397407 - RNA, 15 nt, Human
ccuaggcuccacccc

SEQ ID NO: 1397408 - RNA, 16 nt, Human
ccuagaaacaacacug

SEQ ID NO: 1397409 - RNA, 21 nt, Human
ccuacuuugacuuuuugcauu

SEQ ID NO: 1397410 - RNA, 15 nt, Human
ccuacuuugacuuuu

SEQ ID NO: 1397411 - RNA, 14 nt, Human
ccuacuuugacuuu

SEQ ID NO: 1397412 - RNA, 22 nt, Human
ccuacuucuuuugcucuuagcu

SEQ ID NO: 1397413 - RNA, 16 nt, Human
ccuacuucuuuugcuc

SEQ ID NO: 1397414 - RNA, 17 nt, Human
ccuacagaaaaaccuug

SEQ ID NO: 1397415 - RNA, 19 nt, Human
ccuacagaaaaaccuuggg

SEQ ID NO: 1397416 - RNA, 14 nt, Human
ccuacagaaaaacc

SEQ ID NO: 1397417 - RNA, 13 nt, Human
ccuacagaaaaac

SEQ ID NO: 1397418 - RNA, 18 nt, Human
ccuacacucaccugcacu

SEQ ID NO: 1397419 - RNA, 19 nt, Human
ccuaguuuucuccucccag

SEQ ID NO: 1397420 - RNA, 18 nt, Human
ccuaguuuucuccuccca

SEQ ID NO: 1397421 - RNA, 16 nt, Human
ccuaguuuucuccucc

SEQ ID NO: 1397422 - RNA, 15 nt, Human
ccuaguuuucuccuc

SEQ ID NO: 1397423 - RNA, 15 nt, Human
ccuaguuuuccaugc

SEQ ID NO: 1397424 - RNA, 13 nt, Human
ccuaguuuuccau

SEQ ID NO: 1397425 - RNA, 12 nt, Human
ccuaguuuucca

SEQ ID NO: 1397426 - RNA, 13 nt, Human
ccuaguucuucau

SEQ ID NO: 1397427 - RNA, 19 nt, Human
ccuaguucuguagaaaugg

SEQ ID NO: 1397428 - RNA, 18 nt, Human
ccuaguucuagaaaaaca

SEQ ID NO: 1397429 - RNA, 18 nt, Human
ccuaguucuguagaaaug

SEQ ID NO: 1397430 - RNA, 17 nt, Human
ccuaguucuagaaaaac

SEQ ID NO: 1397431 - RNA, 15 nt, Human
ccuaguucuagaaaa

SEQ ID NO: 1397432 - RNA, 19 nt, Human
ccuauacuguaguauucuu

SEQ ID NO: 1397433 - RNA, 23 nt, Human
ccuauacugcuuggagcugagca

SEQ ID NO: 1397434 - RNA, 22 nt, Human
ccuauacugcuuggagcugagc

SEQ ID NO: 1397435 - RNA, 13 nt, Human
ccuauacugcuug

SEQ ID NO: 1397436 - RNA, 22 nt, Human
ccuauacgcagcgugcuuuaaa

SEQ ID NO: 1397437 - RNA, 18 nt, Human
ccuauaccuguguuucuu

SEQ ID NO: 1397438 - RNA, 20 nt, Human
ccuaguuuucuccucccagg

SEQ ID NO: 1397439 - RNA, 16 nt, Human
ccuaaauauauuuuaa

SEQ ID NO: 1397440 - RNA, 18 nt, Human
ccuaaauauauuuuaaga

SEQ ID NO: 1397441 - RNA, 19 nt, Human
ccuaaauaauaaaaauaaa

SEQ ID NO: 1397442 - RNA, 15 nt, Human
ccguguccaccccca

SEQ ID NO: 1397443 - RNA, 22 nt, Human
ccgugugagaagugaaugcugg

SEQ ID NO: 1397444 - RNA, 23 nt, Human
ccgugugagaagugaaugcuggg

SEQ ID NO: 1397445 - RNA, 18 nt, Human
ccguguccacccccauac

SEQ ID NO: 1397446 - RNA, 12 nt, Human
ccguguccaccc

SEQ ID NO: 1397447 - RNA, 14 nt, Human
ccgugguccuuugg

SEQ ID NO: 1397448 - RNA, 22 nt, Human
ccuaaaagugggcuugauucug

SEQ ID NO: 1397449 - RNA, 19 nt, Human
ccuaaaagaaacccugcac

SEQ ID NO: 1397450 - RNA, 21 nt, Human
ccgaggaggugucucaggcug

SEQ ID NO: 1397451 - RNA, 20 nt, Human
ccgaggaggugucucaggcu

SEQ ID NO: 1397452 - RNA, 18 nt, Human
ccgaggaggugucucagg

SEQ ID NO: 1397453 - RNA, 15 nt, Human
ccgaggcagggaagg

SEQ ID NO: 1397454 - RNA, 23 nt, Human
ccgaggaggugucucaggcugcc

SEQ ID NO: 1397455 - RNA, 13 nt, Human
cccuggugacauc

SEQ ID NO: 1397456 - RNA, 16 nt, Human
ccgauuguaacucaaa

SEQ ID NO: 1397457 - RNA, 13 nt, Human
ccgauuguaacuc

SEQ ID NO: 1397458 - RNA, 13 nt, Human
ccgauucacccug

SEQ ID NO: 1397459 - RNA, 15 nt, Human
ccgaguccaagcugg

SEQ ID NO: 1397460 - RNA, 13 nt, Human
ccgaguccaagcu

SEQ ID NO: 1397461 - RNA, 12 nt, Human
ccgaguccaagc

SEQ ID NO: 1397462 - RNA, 20 nt, Human
ccgagucauucguucugugg

SEQ ID NO: 1397463 - RNA, 19 nt, Human
ccgagucauucguucugug

SEQ ID NO: 1397464 - RNA, 22 nt, Human
ccgaggccuaccccgcagacac

SEQ ID NO: 1397465 - RNA, 23 nt, Human
ccgcgauguggaacugcugccac

SEQ ID NO: 1397466 - RNA, 22 nt, Human
ccgcgauguggaacugcugcca

SEQ ID NO: 1397467 - RNA, 17 nt, Human
ccgccuuggccuguguu

SEQ ID NO: 1397468 - RNA, 13 nt, Human
ccgcaccccccaa

SEQ ID NO: 1397469 - RNA, 17 nt, Human
ccgcgucuacccuggga

SEQ ID NO: 1397470 - RNA, 15 nt, Human
ccgcgucuacccugg

SEQ ID NO: 1397471 - RNA, 13 nt, Human
ccgcgucuacccu

SEQ ID NO: 1397472 - RNA, 18 nt, Human
ccgcuaaaagaaacuuuc

SEQ ID NO: 1397473 - RNA, 14 nt, Human
ccgcuaaaagaaac

SEQ ID NO: 1397474 - RNA, 22 nt, Human
ccgcgugcggaggggacagagc

SEQ ID NO: 1397475 - RNA, 16 nt, Human
ccgcgucuacccuggg

SEQ ID NO: 1397476 - RNA, 21 nt, Human
ccgcuacaccacucuggcagc

SEQ ID NO: 1397477 - RNA, 20 nt, Human
ccgcuacaccacucuggcag

SEQ ID NO: 1397478 - RNA, 19 nt, Human
ccgcuacaccacucuggca

SEQ ID NO: 1397479 - RNA, 17 nt, Human
ccgcuacaccacucugg

SEQ ID NO: 1397480 - RNA, 16 nt, Human
ccgcuacaccacucug

SEQ ID NO: 1397481 - RNA, 21 nt, Human
ccgggaccacccugagccggc

SEQ ID NO: 1397482 - RNA, 17 nt, Human
ccgggaccuggugcugc

SEQ ID NO: 1397483 - RNA, 20 nt, Human
ccgggaccacccugagccgg

SEQ ID NO: 1397484 - RNA, 21 nt, Human
ccgggaagugagggcucacuc

SEQ ID NO: 1397485 - RNA, 23 nt, Human
ccggguguccccaacagcgccca

SEQ ID NO: 1397486 - RNA, 22 nt, Human
ccggguguccccaacagcgccc

SEQ ID NO: 1397487 - RNA, 14 nt, Human
ccgggucugccucu

SEQ ID NO: 1397488 - RNA, 15 nt, Human
ccggggaaaggcaag

SEQ ID NO: 1397489 - RNA, 17 nt, Human
ccgugcucgccccagca

SEQ ID NO: 1397490 - RNA, 16 nt, Human
ccgugcucgccccagc

SEQ ID NO: 1397491 - RNA, 19 nt, Human
ccgguaagagcaaaagaau

SEQ ID NO: 1397492 - RNA, 23 nt, Human
ccgcugagcgaggagaugcuccu

SEQ ID NO: 1397493 - RNA, 20 nt, Human
ccgcucaggcugaccacuuu

SEQ ID NO: 1397494 - RNA, 20 nt, Human
ccgcugccacguuggagaag

SEQ ID NO: 1397495 - RNA, 20 nt, Human
ccgcuuggcgaugccagcca

SEQ ID NO: 1397496 - RNA, 21 nt, Human
ccgcuuggcgaugccagccaa

SEQ ID NO: 1397497 - RNA, 23 nt, Human
ccgcuuggagcuauuuuccaggc

SEQ ID NO: 1397498 - RNA, 20 nt, Human
ccgggacaccuaggcuaggg

SEQ ID NO: 1397499 - RNA, 19 nt, Human
ccgggacaccuaggcuagg

SEQ ID NO: 1397500 - RNA, 17 nt, Human
ccggcuugccacacccc

SEQ ID NO: 1397501 - RNA, 12 nt, Human
ccuaugcuuuga

SEQ ID NO: 1397502 - RNA, 23 nt, Human
ccuaugcaugguuucagcacuag

SEQ ID NO: 1397503 - RNA, 19 nt, Human
ccuaugcaugguuucagca

SEQ ID NO: 1397504 - RNA, 18 nt, Human
ccuaugcaugguuucagc

SEQ ID NO: 1397505 - RNA, 14 nt, Human
ccuaugcaugguuu

SEQ ID NO: 1397506 - RNA, 11 nt, Human
ccuaugcaugg

SEQ ID NO: 1397507 - RNA, 21 nt, Human
ccucagugacccuggcuccuu

SEQ ID NO: 1397508 - RNA, 20 nt, Human
ccucagugacccuggcuccu

SEQ ID NO: 1397509 - RNA, 19 nt, Human
ccucagugacccuggcucc

SEQ ID NO: 1397510 - RNA, 18 nt, Human
ccucagugacccuggcuc

SEQ ID NO: 1397511 - RNA, 17 nt, Human
ccucagugacccuggcu

SEQ ID NO: 1397512 - RNA, 16 nt, Human
ccuauggagagcccug

SEQ ID NO: 1397513 - RNA, 15 nt, Human
ccuauggagagcccu

SEQ ID NO: 1397514 - RNA, 14 nt, Human
ccuauggagagccc

SEQ ID NO: 1397515 - RNA, 13 nt, Human
ccuauggagagcc

SEQ ID NO: 1397516 - RNA, 22 nt, Human
ccuaugcaugguuucagcacua

SEQ ID NO: 1397517 - RNA, 21 nt, Human
ccuaugcaugguuucagcacu

SEQ ID NO: 1397518 - RNA, 20 nt, Human
ccuaugcaugguuucagcac

SEQ ID NO: 1397519 - RNA, 20 nt, Human
ccuccacauccuccacguuc

SEQ ID NO: 1397520 - RNA, 16 nt, Human
ccuccacauccuccac

SEQ ID NO: 1397521 - RNA, 15 nt, Human
ccuccacauccucca

SEQ ID NO: 1397522 - RNA, 14 nt, Human
ccuccacauccucc

SEQ ID NO: 1397523 - RNA, 16 nt, Human
ccuccacaccugcggc

SEQ ID NO: 1397524 - RNA, 17 nt, Human
ccuccacaccugcggcc

SEQ ID NO: 1397525 - RNA, 18 nt, Human
ccucaucuucuucaccau

SEQ ID NO: 1397526 - RNA, 15 nt, Human
ccucaucuucuucac

SEQ ID NO: 1397527 - RNA, 17 nt, Human
ccucaucugucccuccg

SEQ ID NO: 1397528 - RNA, 15 nt, Human
ccucaucugucccuc

SEQ ID NO: 1397529 - RNA, 20 nt, Human
ccucaucucucugcccaacc

SEQ ID NO: 1397530 - RNA, 15 nt, Human
ccuccacaccugcgg

SEQ ID NO: 1397531 - RNA, 14 nt, Human
ccuccacaccugcg

SEQ ID NO: 1397532 - RNA, 13 nt, Human
ccuccacaccugc

SEQ ID NO: 1397533 - RNA, 13 nt, Human
ccucaugaaugua

SEQ ID NO: 1397534 - RNA, 17 nt, Human
ccucaucuucuucacca

SEQ ID NO: 1397535 - RNA, 20 nt, Human
ccucaucccguguucuccuu

SEQ ID NO: 1397536 - RNA, 20 nt, Human
ccucaucccgagcaccucca

SEQ ID NO: 1397537 - RNA, 14 nt, Human
ccucaucccgagca

SEQ ID NO: 1397538 - RNA, 22 nt, Human
ccucauccaccccaucccuccc

SEQ ID NO: 1397539 - RNA, 16 nt, Human
ccucaucaaggacacg

SEQ ID NO: 1397540 - RNA, 19 nt, Human
ccucaucucucugcccaac

SEQ ID NO: 1397541 - RNA, 17 nt, Human
ccucaucucucugccca

SEQ ID NO: 1397542 - RNA, 17 nt, Human
ccucauccuccuucuuc

SEQ ID NO: 1397543 - RNA, 21 nt, Human
ccucaucuccccaucauuggu

SEQ ID NO: 1397544 - RNA, 18 nt, Human
ccucccaaagugcugaga

SEQ ID NO: 1397545 - RNA, 15 nt, Human
ccuccagggacagca

SEQ ID NO: 1397546 - RNA, 13 nt, Human
ccuccagggacag

SEQ ID NO: 1397547 - RNA, 12 nt, Human
ccuccagccccu

SEQ ID NO: 1397548 - RNA, 13 nt, Human
ccuccagccccug

SEQ ID NO: 1397549 - RNA, 21 nt, Human
ccuccacguucugcucaucau

SEQ ID NO: 1397550 - RNA, 18 nt, Human
ccuccacguucugcucau

SEQ ID NO: 1397551 - RNA, 17 nt, Human
ccuccacguucugcuca

SEQ ID NO: 1397552 - RNA, 18 nt, Human
ccuccaccgcagaaggaa

SEQ ID NO: 1397553 - RNA, 13 nt, Human
ccuccaccuccug

SEQ ID NO: 1397554 - RNA, 12 nt, Human
ccuccaccucaa

SEQ ID NO: 1397555 - RNA, 12 nt, Human
ccuccucuguga

SEQ ID NO: 1397556 - RNA, 22 nt, Human
ccuccucugugaccaaugucuu

SEQ ID NO: 1397557 - RNA, 21 nt, Human
ccuccucauguacauacccug

SEQ ID NO: 1397558 - RNA, 20 nt, Human
ccuccucauguacauacccu

SEQ ID NO: 1397559 - RNA, 12 nt, Human
ccuccucaugua

SEQ ID NO: 1397560 - RNA, 23 nt, Human
ccuccucaucccguguucuccuu

SEQ ID NO: 1397561 - RNA, 20 nt, Human
ccuccucaucccguguucuc

SEQ ID NO: 1397562 - RNA, 13 nt, Human
ccuccucaucccg

SEQ ID NO: 1397563 - RNA, 21 nt, Human
ccuccucaggcacacagcuac

SEQ ID NO: 1397564 - RNA, 11 nt, Human
ccuccugcuca

SEQ ID NO: 1397565 - RNA, 18 nt, Human
ccuccugccucuacuggg

SEQ ID NO: 1397566 - RNA, 13 nt, Human
ccuccugccucua

SEQ ID NO: 1397567 - RNA, 12 nt, Human
ccuccugccucu

SEQ ID NO: 1397568 - RNA, 12 nt, Human
ccuccugagaaa

SEQ ID NO: 1397569 - RNA, 22 nt, Human
ccuccugacacccuucucccac

SEQ ID NO: 1397570 - RNA, 19 nt, Human
ccuccugacacccuucucc

SEQ ID NO: 1397571 - RNA, 18 nt, Human
ccuccugacacccuucuc

SEQ ID NO: 1397572 - RNA, 15 nt, Human
ccuccugacacccuu

SEQ ID NO: 1397573 - RNA, 24 nt, Human
ccuccccuugggcccacaccuccu

SEQ ID NO: 1397574 - RNA, 14 nt, Human
ccuccccuugccug

SEQ ID NO: 1397575 - RNA, 12 nt, Human
ccuccccuuggg

SEQ ID NO: 1397576 - RNA, 13 nt, Human
ccuccccuugccu

SEQ ID NO: 1397577 - RNA, 18 nt, Human
ccuccccuuaaaggggag

SEQ ID NO: 1397578 - RNA, 22 nt, Human
ccuccccuggagggggaauggc

SEQ ID NO: 1397579 - RNA, 14 nt, Human
ccuccccuggaggg

SEQ ID NO: 1397580 - RNA, 12 nt, Human
ccuccccuggag

SEQ ID NO: 1397581 - RNA, 13 nt, Human
ccucccccacuuu

SEQ ID NO: 1397582 - RNA, 21 nt, Human
ccuccccuugggcccacaccu

SEQ ID NO: 1397583 - RNA, 19 nt, Human
ccuccucaggcacacagcu

SEQ ID NO: 1397584 - RNA, 17 nt, Human
ccuccucaggcacacag

SEQ ID NO: 1397585 - RNA, 22 nt, Human
ccuccucagccugaaccccagg

SEQ ID NO: 1397586 - RNA, 15 nt, Human
ccuccucagccugaa

SEQ ID NO: 1397587 - RNA, 14 nt, Human
ccuccucagccuga

SEQ ID NO: 1397588 - RNA, 13 nt, Human
ccuccucagccug

SEQ ID NO: 1397589 - RNA, 12 nt, Human
ccuccucagccu

SEQ ID NO: 1397590 - RNA, 15 nt, Human
ccucuagagcagacu

SEQ ID NO: 1397591 - RNA, 14 nt, Human
ccucuagagcagac

SEQ ID NO: 1397592 - RNA, 22 nt, Human
ccucuagagaaauaagaucuuu

SEQ ID NO: 1397593 - RNA, 15 nt, Human
ccucuaacagcacca

SEQ ID NO: 1397594 - RNA, 14 nt, Human
ccucuaacagcacc

SEQ ID NO: 1397595 - RNA, 16 nt, Human
ccucuaacagcaccaa

SEQ ID NO: 1397596 - RNA, 15 nt, Human
ccucguuuguguucu

SEQ ID NO: 1397597 - RNA, 14 nt, Human
ccucguuuguguuc

SEQ ID NO: 1397598 - RNA, 13 nt, Human
ccucguuuguguu

SEQ ID NO: 1397599 - RNA, 16 nt, Human
ccucggggaugugucc

SEQ ID NO: 1397600 - RNA, 13 nt, Human
ccuccuuccuaaa

SEQ ID NO: 1397601 - RNA, 20 nt, Human
ccuccuucccucucuggaga

SEQ ID NO: 1397602 - RNA, 15 nt, Human
ccuccuucccucucu

SEQ ID NO: 1397603 - RNA, 13 nt, Human
ccuccuucccucu

SEQ ID NO: 1397604 - RNA, 21 nt, Human
ccuccugugcucagcccugag

SEQ ID NO: 1397605 - RNA, 19 nt, Human
ccuccugugcucagcccug

SEQ ID NO: 1397606 - RNA, 18 nt, Human
ccuccugugcucagcccu

SEQ ID NO: 1397607 - RNA, 17 nt, Human
ccuccugugcucagccc

SEQ ID NO: 1397608 - RNA, 16 nt, Human
ccuccugugcucagcc

SEQ ID NO: 1397609 - RNA, 15 nt, Human
ccuccugugcucagc

SEQ ID NO: 1397610 - RNA, 14 nt, Human
ccuccugugcucag

SEQ ID NO: 1397611 - RNA, 13 nt, Human
ccuccuuccucuu

SEQ ID NO: 1397612 - RNA, 23 nt, Human
ccuccuuccucuuuuccuuccca

SEQ ID NO: 1397613 - RNA, 18 nt, Human
ccucuccacucaugugac

SEQ ID NO: 1397614 - RNA, 22 nt, Human
ccucuagguccccauacuccua

SEQ ID NO: 1397615 - RNA, 15 nt, Human
ccucuagguccccau

SEQ ID NO: 1397616 - RNA, 22 nt, Human
ccucuagcugugggggugaggg

SEQ ID NO: 1397617 - RNA, 20 nt, Human
ccucucauuuagccuguccu

SEQ ID NO: 1397618 - RNA, 19 nt, Human
ccucucauuuagccugucc

SEQ ID NO: 1397619 - RNA, 18 nt, Human
ccucucauuuagccuguc

SEQ ID NO: 1397620 - RNA, 22 nt, Human
ccucucaauauucaauaaagcu

SEQ ID NO: 1397621 - RNA, 15 nt, Human
ccucucaacacccag

SEQ ID NO: 1397622 - RNA, 18 nt, Human
ccucucaauauucaauaa

SEQ ID NO: 1397623 - RNA, 20 nt, Human
ccucucaauauucaauaaag

SEQ ID NO: 1397624 - RNA, 15 nt, Human
ccugcuccagaccug

SEQ ID NO: 1397625 - RNA, 14 nt, Human
ccugcuccagaccu

SEQ ID NO: 1397626 - RNA, 13 nt, Human
ccugcuccagacc

SEQ ID NO: 1397627 - RNA, 12 nt, Human
ccugcuccagac

SEQ ID NO: 1397628 - RNA, 11 nt, Human
ccugcuccaga

SEQ ID NO: 1397629 - RNA, 17 nt, Human
ccugcucauccacucua

SEQ ID NO: 1397630 - RNA, 13 nt, Human
ccugcucauccac

SEQ ID NO: 1397631 - RNA, 20 nt, Human
ccugcucagcccugcaccau

SEQ ID NO: 1397632 - RNA, 19 nt, Human
ccugcucagcccugcacca

SEQ ID NO: 1397633 - RNA, 16 nt, Human
ccugcucagcccugca

SEQ ID NO: 1397634 - RNA, 19 nt, Human
ccugcucacgucaaaugca

SEQ ID NO: 1397635 - RNA, 19 nt, Human
ccugcucaaucccugagga

SEQ ID NO: 1397636 - RNA, 15 nt, Human
ccugcuauuugaagu

SEQ ID NO: 1397637 - RNA, 19 nt, Human
ccugcuaggccagagccca

SEQ ID NO: 1397638 - RNA, 21 nt, Human
ccugcuaggccagagcccacu

SEQ ID NO: 1397639 - RNA, 18 nt, Human
ccugcuaggccagagccc

SEQ ID NO: 1397640 - RNA, 17 nt, Human
ccugcuaggccagagcc

SEQ ID NO: 1397641 - RNA, 21 nt, Human
ccugcugagcucugagaggcc

SEQ ID NO: 1397642 - RNA, 20 nt, Human
ccugcugagcucugagaggc

SEQ ID NO: 1397643 - RNA, 19 nt, Human
ccugcugagcucugagagg

SEQ ID NO: 1397644 - RNA, 18 nt, Human
ccugcugagcucugagag

SEQ ID NO: 1397645 - RNA, 17 nt, Human
ccugcugagcucugaga

SEQ ID NO: 1397646 - RNA, 16 nt, Human
ccugcugagcucugag

SEQ ID NO: 1397647 - RNA, 15 nt, Human
ccugcugagcucuga

SEQ ID NO: 1397648 - RNA, 14 nt, Human
ccugcugagcucug

SEQ ID NO: 1397649 - RNA, 13 nt, Human
ccugcugagcucu

SEQ ID NO: 1397650 - RNA, 12 nt, Human
ccugcugagcuc

SEQ ID NO: 1397651 - RNA, 11 nt, Human
ccugcugagcu

SEQ ID NO: 1397652 - RNA, 18 nt, Human
ccugcugaccugugcaca

SEQ ID NO: 1397653 - RNA, 16 nt, Human
ccugcugaccugugca

SEQ ID NO: 1397654 - RNA, 15 nt, Human
ccugcugaccugugc

SEQ ID NO: 1397655 - RNA, 14 nt, Human
ccugcugaccugug

SEQ ID NO: 1397656 - RNA, 13 nt, Human
ccugcugaccugu

SEQ ID NO: 1397657 - RNA, 16 nt, Human
ccugcucuccucuucu

SEQ ID NO: 1397658 - RNA, 15 nt, Human
ccugcucuccucuuc

SEQ ID NO: 1397659 - RNA, 12 nt, Human
ccugcucuccuc

SEQ ID NO: 1397660 - RNA, 15 nt, Human
ccugcucgcucccug

SEQ ID NO: 1397661 - RNA, 18 nt, Human
ccugcucguccccaagug

SEQ ID NO: 1397662 - RNA, 18 nt, Human
ccugcuuugggcuugggc

SEQ ID NO: 1397663 - RNA, 22 nt, Human
ccugcugagcucugagaggccc

SEQ ID NO: 1397664 - RNA, 24 nt, Human
ccugcugagcucugagaggcccug

SEQ ID NO: 1397665 - RNA, 19 nt, Human
ccugcugugaaagaaguaa

SEQ ID NO: 1397666 - RNA, 20 nt, Human
ccuggaaggacauccauguu

SEQ ID NO: 1397667 - RNA, 23 nt, Human
ccuggaagcauuuguuucuacuu

SEQ ID NO: 1397668 - RNA, 17 nt, Human
ccuggaagccagcuuuc

SEQ ID NO: 1397669 - RNA, 15 nt, Human
ccuggaagccagcuu

SEQ ID NO: 1397670 - RNA, 17 nt, Human
ccuggaagagcagcccu

SEQ ID NO: 1397671 - RNA, 16 nt, Human
ccuggaagagcagccc

SEQ ID NO: 1397672 - RNA, 17 nt, Human
ccuggaacuuggggagu

SEQ ID NO: 1397673 - RNA, 16 nt, Human
ccuggaacuuggggag

SEQ ID NO: 1397674 - RNA, 13 nt, Human
ccuggaacuuggg

SEQ ID NO: 1397675 - RNA, 20 nt, Human
ccuggaacugucucucauga

SEQ ID NO: 1397676 - RNA, 18 nt, Human
ccuggaacugucucucau

SEQ ID NO: 1397677 - RNA, 23 nt, Human
ccuggaaaucaggguuaguauug

SEQ ID NO: 1397678 - RNA, 20 nt, Human
ccugcuuuuuauggccugug

SEQ ID NO: 1397679 - RNA, 19 nt, Human
ccugccuuggccucccaag

SEQ ID NO: 1397680 - RNA, 19 nt, Human
ccugccuugaaaaagacau

SEQ ID NO: 1397681 - RNA, 22 nt, Human
ccugccuuccuccugggcccuc

SEQ ID NO: 1397682 - RNA, 17 nt, Human
ccugccuuccuccuggg

SEQ ID NO: 1397683 - RNA, 16 nt, Human
ccugccuuccuccugg

SEQ ID NO: 1397684 - RNA, 14 nt, Human
ccugccuuccuccu

SEQ ID NO: 1397685 - RNA, 20 nt, Human
ccugcgccaccgcccagaga

SEQ ID NO: 1397686 - RNA, 15 nt, Human
ccugcgaaaaccccc

SEQ ID NO: 1397687 - RNA, 16 nt, Human
ccugccuuuccaucca

SEQ ID NO: 1397688 - RNA, 13 nt, Human
ccugccuuuccau

SEQ ID NO: 1397689 - RNA, 20 nt, Human
ccugcggcccaauccaaggu

SEQ ID NO: 1397690 - RNA, 23 nt, Human
ccugcgguagaugggagggaggc

SEQ ID NO: 1397691 - RNA, 24 nt, Human
ccugcggguggggcuuggggcuca

SEQ ID NO: 1397692 - RNA, 21 nt, Human
ccugcggguggggcuuggggc

SEQ ID NO: 1397693 - RNA, 20 nt, Human
ccugcggguggggcuugggg

SEQ ID NO: 1397694 - RNA, 24 nt, Human
ccugcgggugaacaaagcagccac

SEQ ID NO: 1397695 - RNA, 23 nt, Human
ccugcgggugaacaaagcagcca

SEQ ID NO: 1397696 - RNA, 13 nt, Human
ccugccggcuccu

SEQ ID NO: 1397697 - RNA, 23 nt, Human
ccugccuggaggaccugagccug

SEQ ID NO: 1397698 - RNA, 16 nt, Human
ccugccuuaucuugca

SEQ ID NO: 1397699 - RNA, 24 nt, Human
ccugccuggaggaccugagccugc

SEQ ID NO: 1397700 - RNA, 22 nt, Human
ccugccuggaggaccugagccu

SEQ ID NO: 1397701 - RNA, 21 nt, Human
ccugccuggaggaccugagcc

SEQ ID NO: 1397702 - RNA, 20 nt, Human
ccugccuggaggaccugagc

SEQ ID NO: 1397703 - RNA, 19 nt, Human
ccugccuggaggaccugag

SEQ ID NO: 1397704 - RNA, 17 nt, Human
ccugccuggaggaccug

SEQ ID NO: 1397705 - RNA, 14 nt, Human
ccugccuggaggac

SEQ ID NO: 1397706 - RNA, 16 nt, Human
ccugccucaccacgga

SEQ ID NO: 1397707 - RNA, 19 nt, Human
ccugccuauuaucugucag

SEQ ID NO: 1397708 - RNA, 13 nt, Human
ccugccuggagga

SEQ ID NO: 1397709 - RNA, 12 nt, Human
ccugccuggagg

SEQ ID NO: 1397710 - RNA, 22 nt, Human
ccugccucaccagcccuggcaa

SEQ ID NO: 1397711 - RNA, 19 nt, Human
ccugguccccuccuuccca

SEQ ID NO: 1397712 - RNA, 19 nt, Human
ccuggcuggcugagggcag

SEQ ID NO: 1397713 - RNA, 18 nt, Human
ccuggcuggcugagggca

SEQ ID NO: 1397714 - RNA, 17 nt, Human
ccuggcuggcugagggc

SEQ ID NO: 1397715 - RNA, 13 nt, Human
ccuggcuggcuga

SEQ ID NO: 1397716 - RNA, 22 nt, Human
ccuggcugcugaucgccuuccc

SEQ ID NO: 1397717 - RNA, 23 nt, Human
ccuggcugcugaucgccuucccc

SEQ ID NO: 1397718 - RNA, 21 nt, Human
ccuggcugcugaucgccuucc

SEQ ID NO: 1397719 - RNA, 20 nt, Human
ccuggcugcugaucgccuuc

SEQ ID NO: 1397720 - RNA, 18 nt, Human
ccuggcugcagccugcgc

SEQ ID NO: 1397721 - RNA, 23 nt, Human
ccuggcagcucuggacagcccca

SEQ ID NO: 1397722 - RNA, 21 nt, Human
ccuggcagcucuggacagccc

SEQ ID NO: 1397723 - RNA, 20 nt, Human
ccuggcagcucuggacagcc

SEQ ID NO: 1397724 - RNA, 19 nt, Human
ccuggcagcucuggacagc

SEQ ID NO: 1397725 - RNA, 17 nt, Human
ccuggcagcucuggaca

SEQ ID NO: 1397726 - RNA, 15 nt, Human
ccuggcagcucugga

SEQ ID NO: 1397727 - RNA, 14 nt, Human
ccuggcagcucugg

SEQ ID NO: 1397728 - RNA, 13 nt, Human
ccuggcagcucug

SEQ ID NO: 1397729 - RNA, 12 nt, Human
ccuggcagcucu

SEQ ID NO: 1397730 - RNA, 23 nt, Human
ccuggccagacacaggcccuccc

SEQ ID NO: 1397731 - RNA, 19 nt, Human
ccuggccagacacaggccc

SEQ ID NO: 1397732 - RNA, 18 nt, Human
ccuggccagacacaggcc

SEQ ID NO: 1397733 - RNA, 16 nt, Human
ccuggccagacacagg

SEQ ID NO: 1397734 - RNA, 15 nt, Human
ccuggccagacacag

SEQ ID NO: 1397735 - RNA, 14 nt, Human
ccuggccagacaca

SEQ ID NO: 1397736 - RNA, 13 nt, Human
ccuggccagacac

SEQ ID NO: 1397737 - RNA, 12 nt, Human
ccuggccagaca

SEQ ID NO: 1397738 - RNA, 19 nt, Human
ccuggcagagaugccuccc

SEQ ID NO: 1397739 - RNA, 12 nt, Human
ccuggcagagau

SEQ ID NO: 1397740 - RNA, 23 nt, Human
ccuggcacuaacguugagccccu

SEQ ID NO: 1397741 - RNA, 19 nt, Human
ccuggagauccuccugcag

SEQ ID NO: 1397742 - RNA, 18 nt, Human
ccuggagauccuccugca

SEQ ID NO: 1397743 - RNA, 17 nt, Human
ccuggagauccuccugc

SEQ ID NO: 1397744 - RNA, 16 nt, Human
ccuggagauccuccug

SEQ ID NO: 1397745 - RNA, 15 nt, Human
ccuggagauccuccu

SEQ ID NO: 1397746 - RNA, 13 nt, Human
ccuggagauccuc

SEQ ID NO: 1397747 - RNA, 23 nt, Human
ccuggagacuuagggcaccaggg

SEQ ID NO: 1397748 - RNA, 19 nt, Human
ccuggagacuuagggcacc

SEQ ID NO: 1397749 - RNA, 18 nt, Human
ccuggagacugcccagcu

SEQ ID NO: 1397750 - RNA, 19 nt, Human
ccuggacagcugugccucg

SEQ ID NO: 1397751 - RNA, 18 nt, Human
ccuggacagcugugccuc

SEQ ID NO: 1397752 - RNA, 17 nt, Human
ccuggacagcugugccu

SEQ ID NO: 1397753 - RNA, 16 nt, Human
ccuggacagcugugcc

SEQ ID NO: 1397754 - RNA, 15 nt, Human
ccuggacagcugugc

SEQ ID NO: 1397755 - RNA, 14 nt, Human
ccuggacagcugug

SEQ ID NO: 1397756 - RNA, 13 nt, Human
ccuggacagcugu

SEQ ID NO: 1397757 - RNA, 17 nt, Human
ccuggacacucagaccu

SEQ ID NO: 1397758 - RNA, 16 nt, Human
ccuggacacucagacc

SEQ ID NO: 1397759 - RNA, 20 nt, Human
ccuggaaugaguugaggcca

SEQ ID NO: 1397760 - RNA, 17 nt, Human
ccuggaagggagguggg

SEQ ID NO: 1397761 - RNA, 22 nt, Human
ccuggaaggacauccauguucc

SEQ ID NO: 1397762 - RNA, 18 nt, Human
ccuggaauauauaaccag

SEQ ID NO: 1397763 - RNA, 15 nt, Human
ccugggugacauuug

SEQ ID NO: 1397764 - RNA, 14 nt, Human
ccugggugacauuu

SEQ ID NO: 1397765 - RNA, 13 nt, Human
ccugggugacauu

SEQ ID NO: 1397766 - RNA, 15 nt, Human
ccugggucccaggac

SEQ ID NO: 1397767 - RNA, 22 nt, Human
ccugggucccaggacccuggac

SEQ ID NO: 1397768 - RNA, 21 nt, Human
ccugggguauaaaacuuuccu

SEQ ID NO: 1397769 - RNA, 14 nt, Human
ccugggggugccag

SEQ ID NO: 1397770 - RNA, 16 nt, Human
ccugggggugccagga

SEQ ID NO: 1397771 - RNA, 15 nt, Human
ccugggggugccagg

SEQ ID NO: 1397772 - RNA, 14 nt, Human
ccugggcaggaggg

SEQ ID NO: 1397773 - RNA, 23 nt, Human
ccuggcuucccauccccagcgau

SEQ ID NO: 1397774 - RNA, 22 nt, Human
ccuggcuucccauccccagcga

SEQ ID NO: 1397775 - RNA, 21 nt, Human
ccuggcuucccauccccagcg

SEQ ID NO: 1397776 - RNA, 20 nt, Human
ccuggcuucccauccccagc

SEQ ID NO: 1397777 - RNA, 19 nt, Human
ccuggcuucccauccccag

SEQ ID NO: 1397778 - RNA, 15 nt, Human
ccuggcuucccaucc

SEQ ID NO: 1397779 - RNA, 16 nt, Human
ccuggcugucugaggc

SEQ ID NO: 1397780 - RNA, 20 nt, Human
ccuggcuggcugagggcagu

SEQ ID NO: 1397781 - RNA, 24 nt, Human
ccuggcugggacguggcucagcca

SEQ ID NO: 1397782 - RNA, 22 nt, Human
ccuggcugggacguggcucagc

SEQ ID NO: 1397783 - RNA, 21 nt, Human
ccuggcugggacguggcucag

SEQ ID NO: 1397784 - RNA, 20 nt, Human
ccuggcugggacguggcuca

SEQ ID NO: 1397785 - RNA, 12 nt, Human
ccugggcaggag

SEQ ID NO: 1397786 - RNA, 18 nt, Human
ccugguagaccacugcca

SEQ ID NO: 1397787 - RNA, 20 nt, Human
ccugguagaccacugccaua

SEQ ID NO: 1397788 - RNA, 20 nt, Human
ccugguacucccucucagga

SEQ ID NO: 1397789 - RNA, 13 nt, Human
ccugguacucccu

SEQ ID NO: 1397790 - RNA, 17 nt, Human
ccugguacccuccuggc

SEQ ID NO: 1397791 - RNA, 15 nt, Human
ccugguacccuccug

SEQ ID NO: 1397792 - RNA, 14 nt, Human
ccugguacccuccu

SEQ ID NO: 1397793 - RNA, 18 nt, Human
ccugguaauagcuguaaa

SEQ ID NO: 1397794 - RNA, 23 nt, Human
ccuggguuuuguauucucugagc

SEQ ID NO: 1397795 - RNA, 22 nt, Human
ccuggguuuuguauucucugag

SEQ ID NO: 1397796 - RNA, 21 nt, Human
ccuggguuuuguauucucuga

SEQ ID NO: 1397797 - RNA, 20 nt, Human
ccuggguuuuguauucucug

SEQ ID NO: 1397798 - RNA, 19 nt, Human
ccuggguuuuguauucucu

SEQ ID NO: 1397799 - RNA, 19 nt, Human
ccuggguuugguguauggu

SEQ ID NO: 1397800 - RNA, 16 nt, Human
ccuggguugcagacag

SEQ ID NO: 1397801 - RNA, 17 nt, Human
ccuggguugcagacagg

SEQ ID NO: 1397802 - RNA, 23 nt, Human
ccuggguggcuacucugugccag

SEQ ID NO: 1397803 - RNA, 22 nt, Human
ccuggguggcuacucugugcca

SEQ ID NO: 1397804 - RNA, 21 nt, Human
ccuggguggcuacucugugcc

SEQ ID NO: 1397805 - RNA, 20 nt, Human
ccuggguggcuacucugugc

SEQ ID NO: 1397806 - RNA, 19 nt, Human
ccuggguggcuacucugug

SEQ ID NO: 1397807 - RNA, 17 nt, Human
ccuggguggcuacucug

SEQ ID NO: 1397808 - RNA, 15 nt, Human
ccuggguggcuacuc

SEQ ID NO: 1397809 - RNA, 14 nt, Human
ccuggguggcuacu

SEQ ID NO: 1397810 - RNA, 20 nt, Human
ccugguauauccaaaagcuu

SEQ ID NO: 1397811 - RNA, 18 nt, Human
ccugguauauccaaaagc

SEQ ID NO: 1397812 - RNA, 21 nt, Human
ccuggucaccuaggaagccuc

SEQ ID NO: 1397813 - RNA, 17 nt, Human
ccuggucaccuaggaag

SEQ ID NO: 1397814 - RNA, 15 nt, Human
ccuggucaccuagga

SEQ ID NO: 1397815 - RNA, 18 nt, Human
ccugguccccuccuuccc

SEQ ID NO: 1397816 - RNA, 23 nt, Human
ccuggugacaucagguuuuuccc

SEQ ID NO: 1397817 - RNA, 15 nt, Human
ccugguccccuccuu

SEQ ID NO: 1397818 - RNA, 13 nt, Human
ccugguccccucc

SEQ ID NO: 1397819 - RNA, 13 nt, Human
ccuggugccaccu

SEQ ID NO: 1397820 - RNA, 17 nt, Human
ccuggugcacuggcccc

SEQ ID NO: 1397821 - RNA, 19 nt, Human
ccuggugcacuggccccac

SEQ ID NO: 1397822 - RNA, 12 nt, Human
ccuggugccacc

SEQ ID NO: 1397823 - RNA, 14 nt, Human
ccuggugaucacgu

SEQ ID NO: 1397824 - RNA, 20 nt, Human
ccuggugcacuggccccacc

SEQ ID NO: 1397825 - RNA, 17 nt, Human
ccugacacaccaggcgc

SEQ ID NO: 1397826 - RNA, 15 nt, Human
ccugacacaccaggc

SEQ ID NO: 1397827 - RNA, 14 nt, Human
ccugacacaccagg

SEQ ID NO: 1397828 - RNA, 19 nt, Human
ccugacaaccacuggucug

SEQ ID NO: 1397829 - RNA, 18 nt, Human
ccugacaaccacuggucu

SEQ ID NO: 1397830 - RNA, 23 nt, Human
ccucuccacacagugcucaaggc

SEQ ID NO: 1397831 - RNA, 18 nt, Human
ccucuccacacagugcuc

SEQ ID NO: 1397832 - RNA, 17 nt, Human
ccucuccacacagugcu

SEQ ID NO: 1397833 - RNA, 13 nt, Human
ccucuccacacag

SEQ ID NO: 1397834 - RNA, 21 nt, Human
ccugacaucaaaaaaggcagu

SEQ ID NO: 1397835 - RNA, 19 nt, Human
ccugacaucaaaaaaggca

SEQ ID NO: 1397836 - RNA, 18 nt, Human
ccugacaucaaaaaaggc

SEQ ID NO: 1397837 - RNA, 23 nt, Human
ccugacaggugaggucuguuccu

SEQ ID NO: 1397838 - RNA, 22 nt, Human
ccugacaggugaggucuguucc

SEQ ID NO: 1397839 - RNA, 23 nt, Human
ccugaccaaacagccaacuagcc

SEQ ID NO: 1397840 - RNA, 23 nt, Human
ccugagcaacucuugauuaucca

SEQ ID NO: 1397841 - RNA, 18 nt, Human
ccugagcaacucuugauu

SEQ ID NO: 1397842 - RNA, 15 nt, Human
ccugagcaacucuug

SEQ ID NO: 1397843 - RNA, 14 nt, Human
ccugagcaacucuu

SEQ ID NO: 1397844 - RNA, 13 nt, Human
ccugagcaacucu

SEQ ID NO: 1397845 - RNA, 17 nt, Human
ccugacauguccuucug

SEQ ID NO: 1397846 - RNA, 12 nt, Human
ccugacacugca

SEQ ID NO: 1397847 - RNA, 13 nt, Human
ccugacacucccu

SEQ ID NO: 1397848 - RNA, 23 nt, Human
ccugacacccuucucccacucuc

SEQ ID NO: 1397849 - RNA, 18 nt, Human
ccugacacccuucuccca

SEQ ID NO: 1397850 - RNA, 14 nt, Human
ccugacacccuucu

SEQ ID NO: 1397851 - RNA, 13 nt, Human
ccugacacccuuc

SEQ ID NO: 1397852 - RNA, 20 nt, Human
ccugacacacuaaccaagcu

SEQ ID NO: 1397853 - RNA, 23 nt, Human
ccugacacacuaaccaagcugag

SEQ ID NO: 1397854 - RNA, 14 nt, Human
ccugacacacuaac

SEQ ID NO: 1397855 - RNA, 18 nt, Human
ccugacacaccaggcgcu

SEQ ID NO: 1397856 - RNA, 15 nt, Human
ccugacacuuuaauu

SEQ ID NO: 1397857 - RNA, 14 nt, Human
ccugacacuuuaau

SEQ ID NO: 1397858 - RNA, 13 nt, Human
ccugacacuuuaa

SEQ ID NO: 1397859 - RNA, 15 nt, Human
ccugacacugcugga

SEQ ID NO: 1397860 - RNA, 14 nt, Human
ccugacacugcugg

SEQ ID NO: 1397861 - RNA, 19 nt, Human
ccugaggacagaugccucc

SEQ ID NO: 1397862 - RNA, 13 nt, Human
ccugaggaacugu

SEQ ID NO: 1397863 - RNA, 18 nt, Human
ccugaggaacccuuacag

SEQ ID NO: 1397864 - RNA, 16 nt, Human
ccugagccccagggag

SEQ ID NO: 1397865 - RNA, 22 nt, Human
ccugaggagucugagguccuga

SEQ ID NO: 1397866 - RNA, 20 nt, Human
ccugaggagucugagguccu

SEQ ID NO: 1397867 - RNA, 19 nt, Human
ccugaggagucugaggucc

SEQ ID NO: 1397868 - RNA, 18 nt, Human
ccugaggagucugagguc

SEQ ID NO: 1397869 - RNA, 17 nt, Human
ccugaggagucugaggu

SEQ ID NO: 1397870 - RNA, 16 nt, Human
ccugaggagucugagg

SEQ ID NO: 1397871 - RNA, 14 nt, Human
ccugaggagucuga

SEQ ID NO: 1397872 - RNA, 13 nt, Human
ccugaggagucug

SEQ ID NO: 1397873 - RNA, 23 nt, Human
ccugaggacugauuucagaguga

SEQ ID NO: 1397874 - RNA, 19 nt, Human
ccugaggacugauuucaga

SEQ ID NO: 1397875 - RNA, 21 nt, Human
ccugaggagucugagguccug

SEQ ID NO: 1397876 - RNA, 14 nt, Human
ccugagcccaggga

SEQ ID NO: 1397877 - RNA, 13 nt, Human
ccugagcccaggg

SEQ ID NO: 1397878 - RNA, 12 nt, Human
ccugagcccagg

SEQ ID NO: 1397879 - RNA, 21 nt, Human
ccugagccagggucuccagaa

SEQ ID NO: 1397880 - RNA, 17 nt, Human
ccugagccccagggaga

SEQ ID NO: 1397881 - RNA, 15 nt, Human
ccugagccccaggga

SEQ ID NO: 1397882 - RNA, 19 nt, Human
ccugagcccagggaggccg

SEQ ID NO: 1397883 - RNA, 18 nt, Human
ccugagcccagggaggcc

SEQ ID NO: 1397884 - RNA, 17 nt, Human
ccugagcccagggaggc

SEQ ID NO: 1397885 - RNA, 16 nt, Human
ccugagcccagggagg

SEQ ID NO: 1397886 - RNA, 15 nt, Human
ccugagcccagggag

SEQ ID NO: 1397887 - RNA, 22 nt, Human
ccugagcaguccuuggccugcu

SEQ ID NO: 1397888 - RNA, 19 nt, Human
ccugagcaguccuuggccu

SEQ ID NO: 1397889 - RNA, 18 nt, Human
ccugagcaguccuuggcc

SEQ ID NO: 1397890 - RNA, 14 nt, Human
ccugagcaguccuu

SEQ ID NO: 1397891 - RNA, 20 nt, Human
ccugagcacugccaggaggg

SEQ ID NO: 1397892 - RNA, 19 nt, Human
ccugagcacugccaggagg

SEQ ID NO: 1397893 - RNA, 18 nt, Human
ccugagcacugccaggag

SEQ ID NO: 1397894 - RNA, 17 nt, Human
ccugagcacugccagga

SEQ ID NO: 1397895 - RNA, 16 nt, Human
ccugagcacugccagg

SEQ ID NO: 1397896 - RNA, 15 nt, Human
ccugagcacugccag

SEQ ID NO: 1397897 - RNA, 14 nt, Human
ccugagcacugcca

SEQ ID NO: 1397898 - RNA, 12 nt, Human
ccugagcacugc

SEQ ID NO: 1397899 - RNA, 23 nt, Human
ccugagccagggucuccagaaag

SEQ ID NO: 1397900 - RNA, 20 nt, Human
ccugagccagggucuccaga

SEQ ID NO: 1397901 - RNA, 19 nt, Human
ccugagccagggucuccag

SEQ ID NO: 1397902 - RNA, 18 nt, Human
ccugagccagggucucca

SEQ ID NO: 1397903 - RNA, 15 nt, Human
ccugagccagggucu

SEQ ID NO: 1397904 - RNA, 13 nt, Human
ccugagccagggu

SEQ ID NO: 1397905 - RNA, 23 nt, Human
ccugcauggcauccuccagcccc

SEQ ID NO: 1397906 - RNA, 16 nt, Human
ccugcauggcugagcu

SEQ ID NO: 1397907 - RNA, 21 nt, Human
ccugcauggcugagcugccca

SEQ ID NO: 1397908 - RNA, 21 nt, Human
ccugcauggcauccuccagcc

SEQ ID NO: 1397909 - RNA, 20 nt, Human
ccugcauggcauccuccagc

SEQ ID NO: 1397910 - RNA, 19 nt, Human
ccugcauggcauccuccag

SEQ ID NO: 1397911 - RNA, 18 nt, Human
ccugcauggcauccucca

SEQ ID NO: 1397912 - RNA, 16 nt, Human
ccugcauggcauccuc

SEQ ID NO: 1397913 - RNA, 15 nt, Human
ccugcauggcauccu

SEQ ID NO: 1397914 - RNA, 23 nt, Human
ccugcauccauucuccugaggau

SEQ ID NO: 1397915 - RNA, 22 nt, Human
ccugcauccauucuccugagga

SEQ ID NO: 1397916 - RNA, 22 nt, Human
ccugcauaauguuucuggauuu

SEQ ID NO: 1397917 - RNA, 22 nt, Human
ccugcauggcauccuccagccc

SEQ ID NO: 1397918 - RNA, 23 nt, Human
ccugccagcugcacugaugcugc

SEQ ID NO: 1397919 - RNA, 18 nt, Human
ccugccagcugcacugau

SEQ ID NO: 1397920 - RNA, 17 nt, Human
ccugccagcugcacuga

SEQ ID NO: 1397921 - RNA, 16 nt, Human
ccugccagcugcacug

SEQ ID NO: 1397922 - RNA, 14 nt, Human
ccugccagcugcac

SEQ ID NO: 1397923 - RNA, 13 nt, Human
ccugccagcugca

SEQ ID NO: 1397924 - RNA, 12 nt, Human
ccugccagcugc

SEQ ID NO: 1397925 - RNA, 16 nt, Human
ccugccagccccugcc

SEQ ID NO: 1397926 - RNA, 13 nt, Human
ccugccagccccu

SEQ ID NO: 1397927 - RNA, 19 nt, Human
ccugcccccaccccauucc

SEQ ID NO: 1397928 - RNA, 18 nt, Human
ccugcccccaccccauuc

SEQ ID NO: 1397929 - RNA, 14 nt, Human
ccugcccccacccc

SEQ ID NO: 1397930 - RNA, 13 nt, Human
ccugcccccaccc

SEQ ID NO: 1397931 - RNA, 12 nt, Human
ccugccaggagg

SEQ ID NO: 1397932 - RNA, 13 nt, Human
ccugccaggagga

SEQ ID NO: 1397933 - RNA, 21 nt, Human
ccugccaggagcuuuggaccu

SEQ ID NO: 1397934 - RNA, 11 nt, Human
ccugccaggag

SEQ ID NO: 1397935 - RNA, 14 nt, Human
ccugccagccccug

SEQ ID NO: 1397936 - RNA, 19 nt, Human
ccugcaaaaggacucucag

SEQ ID NO: 1397937 - RNA, 17 nt, Human
ccugcaaaaggacucuc

SEQ ID NO: 1397938 - RNA, 22 nt, Human
ccugauuuuuuuuccuuuuaau

SEQ ID NO: 1397939 - RNA, 17 nt, Human
ccugcacuaacagagug

SEQ ID NO: 1397940 - RNA, 15 nt, Human
ccugcagucacagcu

SEQ ID NO: 1397941 - RNA, 20 nt, Human
ccugcaacucaaggacuuug

SEQ ID NO: 1397942 - RNA, 18 nt, Human
ccugcaacucaaggacuu

SEQ ID NO: 1397943 - RNA, 17 nt, Human
ccugcaacucaaggacu

SEQ ID NO: 1397944 - RNA, 17 nt, Human
ccugcaagucaguccag

SEQ ID NO: 1397945 - RNA, 21 nt, Human
ccuguguguccaaaacugccu

SEQ ID NO: 1397946 - RNA, 20 nt, Human
ccuguguguccaaaacugcc

SEQ ID NO: 1397947 - RNA, 22 nt, Human
ccuguguggagagggaauguga

SEQ ID NO: 1397948 - RNA, 21 nt, Human
ccuguguggagagggaaugug

SEQ ID NO: 1397949 - RNA, 23 nt, Human
ccuguguggagagggaaugugaa

SEQ ID NO: 1397950 - RNA, 19 nt, Human
ccuguguggagagggaaug

SEQ ID NO: 1397951 - RNA, 16 nt, Human
ccuguguggagaggga

SEQ ID NO: 1397952 - RNA, 15 nt, Human
ccuguguggagaggg

SEQ ID NO: 1397953 - RNA, 14 nt, Human
ccuguguggagagg

SEQ ID NO: 1397954 - RNA, 13 nt, Human
ccuguguggagag

SEQ ID NO: 1397955 - RNA, 12 nt, Human
ccuguguggaga

SEQ ID NO: 1397956 - RNA, 17 nt, Human
ccuguguggacaggacu

SEQ ID NO: 1397957 - RNA, 15 nt, Human
ccuguguggacagga

SEQ ID NO: 1397958 - RNA, 14 nt, Human
ccuguguggacagg

SEQ ID NO: 1397959 - RNA, 13 nt, Human
ccuguguccaugc

SEQ ID NO: 1397960 - RNA, 22 nt, Human
ccuguguagcugugaccugcug

SEQ ID NO: 1397961 - RNA, 21 nt, Human
ccuguguagcugugaccugcu

SEQ ID NO: 1397962 - RNA, 20 nt, Human
ccuguguagcugugaccugc

SEQ ID NO: 1397963 - RNA, 23 nt, Human
ccuguguagcugugaccugcuga

SEQ ID NO: 1397964 - RNA, 19 nt, Human
ccuguguagcugugaccug

SEQ ID NO: 1397965 - RNA, 17 nt, Human
ccuguguagcugugacc

SEQ ID NO: 1397966 - RNA, 15 nt, Human
ccuguguagcuguga

SEQ ID NO: 1397967 - RNA, 14 nt, Human
ccuguguagcugug

SEQ ID NO: 1397968 - RNA, 13 nt, Human
ccuguguagcugu

SEQ ID NO: 1397969 - RNA, 19 nt, Human
ccuguguccaugcgcucag

SEQ ID NO: 1397970 - RNA, 13 nt, Human
ccuguuuuccccc

SEQ ID NO: 1397971 - RNA, 23 nt, Human
ccuguuuucccacgaggaaucug

SEQ ID NO: 1397972 - RNA, 20 nt, Human
ccuguuuggccucucuaucc

SEQ ID NO: 1397973 - RNA, 21 nt, Human
ccuguuuggccucucuauccu

SEQ ID NO: 1397974 - RNA, 16 nt, Human
ccuguuuggccucucu

SEQ ID NO: 1397975 - RNA, 15 nt, Human
ccuguuuggccucuc

SEQ ID NO: 1397976 - RNA, 19 nt, Human
ccuguuugaggaaagcaag

SEQ ID NO: 1397977 - RNA, 16 nt, Human
ccuguuuaaaaaacca

SEQ ID NO: 1397978 - RNA, 14 nt, Human
ccuguuuaaaaaac

SEQ ID NO: 1397979 - RNA, 18 nt, Human
ccuguuucagaggcucag

SEQ ID NO: 1397980 - RNA, 12 nt, Human
ccuguuucuucc

SEQ ID NO: 1397981 - RNA, 14 nt, Human
ccuguuucuggcac

SEQ ID NO: 1397982 - RNA, 15 nt, Human
ccuguuucccaggcc

SEQ ID NO: 1397983 - RNA, 17 nt, Human
ccuguuucccaggccca

SEQ ID NO: 1397984 - RNA, 19 nt, Human
ccuguguuucuugccucau

SEQ ID NO: 1397985 - RNA, 22 nt, Human
ccuguguugucucuagagcagg

SEQ ID NO: 1397986 - RNA, 20 nt, Human
ccuguguugucucuagagca

SEQ ID NO: 1397987 - RNA, 16 nt, Human
ccuguguugucucuag

SEQ ID NO: 1397988 - RNA, 20 nt, Human
ccuguguucuuccuggccgc

SEQ ID NO: 1397989 - RNA, 19 nt, Human
ccuguguucuuccuggccg

SEQ ID NO: 1397990 - RNA, 17 nt, Human
ccuguguguuaagcucu

SEQ ID NO: 1397991 - RNA, 20 nt, Human
ccuguguguuaagcucugcu

SEQ ID NO: 1397992 - RNA, 16 nt, Human
ccuguguguuaagcuc

SEQ ID NO: 1397993 - RNA, 18 nt, Human
ccuguguuucuugccuca

SEQ ID NO: 1397994 - RNA, 14 nt, Human
ccuguguuucuugc

SEQ ID NO: 1397995 - RNA, 12 nt, Human
ccuguuuaagag

SEQ ID NO: 1397996 - RNA, 15 nt, Human
ccuguuuaagagaca

SEQ ID NO: 1397997 - RNA, 21 nt, Human
ccuuagacagaggcccucaag

SEQ ID NO: 1397998 - RNA, 20 nt, Human
ccuuagacagaggcccucaa

SEQ ID NO: 1397999 - RNA, 17 nt, Human
ccuuagacagaggcccu

SEQ ID NO: 1398000 - RNA, 15 nt, Human
ccuuagacagaggcc

SEQ ID NO: 1398001 - RNA, 22 nt, Human
ccuuacuccugugggagccucg

SEQ ID NO: 1398002 - RNA, 22 nt, Human
ccuuacucuucuugaaauuuua

SEQ ID NO: 1398003 - RNA, 17 nt, Human
ccuuacucuucuugaaa

SEQ ID NO: 1398004 - RNA, 16 nt, Human
ccuuacucuucuugaa

SEQ ID NO: 1398005 - RNA, 21 nt, Human
ccuuacuccugugggagccuc

SEQ ID NO: 1398006 - RNA, 20 nt, Human
ccuuacuccugugggagccu

SEQ ID NO: 1398007 - RNA, 19 nt, Human
ccuuacuccugugggagcc

SEQ ID NO: 1398008 - RNA, 15 nt, Human
ccuuacuccuguggg

SEQ ID NO: 1398009 - RNA, 14 nt, Human
ccuuacuccugugg

SEQ ID NO: 1398010 - RNA, 13 nt, Human
ccuuacuccugug

SEQ ID NO: 1398011 - RNA, 12 nt, Human
ccuuacuccugu

SEQ ID NO: 1398012 - RNA, 16 nt, Human
ccuuacucccaggcac

SEQ ID NO: 1398013 - RNA, 14 nt, Human
ccuuaccuuuuuau

SEQ ID NO: 1398014 - RNA, 19 nt, Human
ccuuacccucauguucuua

SEQ ID NO: 1398015 - RNA, 15 nt, Human
ccuuacccucauguu

SEQ ID NO: 1398016 - RNA, 21 nt, Human
ccuuacaguaggagcccagcu

SEQ ID NO: 1398017 - RNA, 17 nt, Human
ccuuacaguaggagccc

SEQ ID NO: 1398018 - RNA, 22 nt, Human
ccuuacaaguuagaaaacauaa

SEQ ID NO: 1398019 - RNA, 20 nt, Human
ccuguuuuucacauuuuccu

SEQ ID NO: 1398020 - RNA, 16 nt, Human
ccuguuuuucacauuu

SEQ ID NO: 1398021 - RNA, 13 nt, Human
ccuguuuuucaca

SEQ ID NO: 1398022 - RNA, 20 nt, Human
ccuuaaacaaaaauuaaaau

SEQ ID NO: 1398023 - RNA, 17 nt, Human
ccuuaacaguuguauuu

SEQ ID NO: 1398024 - RNA, 16 nt, Human
ccuuaacaguuguauu

SEQ ID NO: 1398025 - RNA, 14 nt, Human
ccuuaaaggggaga

SEQ ID NO: 1398026 - RNA, 16 nt, Human
ccuuaauuuauuauua

SEQ ID NO: 1398027 - RNA, 23 nt, Human
ccuuaaucagguccucagagaau

SEQ ID NO: 1398028 - RNA, 12 nt, Human
ccuuaagucaga

SEQ ID NO: 1398029 - RNA, 18 nt, Human
ccuuaaggcucuuuugua

SEQ ID NO: 1398030 - RNA, 16 nt, Human
ccuuaaggcucuuuug

SEQ ID NO: 1398031 - RNA, 23 nt, Human
ccuuaagaccuacuguucuaaag

SEQ ID NO: 1398032 - RNA, 13 nt, Human
ccuuaaggcucuu

SEQ ID NO: 1398033 - RNA, 16 nt, Human
ccuuaacugcauccag

SEQ ID NO: 1398034 - RNA, 14 nt, Human
ccuuaacuggagcc

SEQ ID NO: 1398035 - RNA, 17 nt, Human
ccuuaacuggagcccca

SEQ ID NO: 1398036 - RNA, 23 nt, Human
ccuuaacuggagccccaucagcu

SEQ ID NO: 1398037 - RNA, 22 nt, Human
ccuuaagaccuacuguucuaaa

SEQ ID NO: 1398038 - RNA, 17 nt, Human
ccuuaagagucauccag

SEQ ID NO: 1398039 - RNA, 18 nt, Human
ccuucgcuucuugccucu

SEQ ID NO: 1398040 - RNA, 17 nt, Human
ccuucgcuucuugccuc

SEQ ID NO: 1398041 - RNA, 16 nt, Human
ccuucgcuucuugccu

SEQ ID NO: 1398042 - RNA, 23 nt, Human
ccuucgcuucuugccucugugcu

SEQ ID NO: 1398043 - RNA, 21 nt, Human
ccuucgcuucuugccucugug

SEQ ID NO: 1398044 - RNA, 20 nt, Human
ccuucgcuucuugccucugu

SEQ ID NO: 1398045 - RNA, 19 nt, Human
ccuucgcuucuugccucug

SEQ ID NO: 1398046 - RNA, 22 nt, Human
ccuuagacagaggcccucaagu

SEQ ID NO: 1398047 - RNA, 19 nt, Human
ccuucacugucaccacccu

SEQ ID NO: 1398048 - RNA, 23 nt, Human
ccuucagagagcagugcuuuugg

SEQ ID NO: 1398049 - RNA, 22 nt, Human
ccuucagagagcagugcuuuug

SEQ ID NO: 1398050 - RNA, 20 nt, Human
ccuucagagagcagugcuuu

SEQ ID NO: 1398051 - RNA, 19 nt, Human
ccuucagagagcagugcuu

SEQ ID NO: 1398052 - RNA, 16 nt, Human
ccuucagagagcagug

SEQ ID NO: 1398053 - RNA, 15 nt, Human
ccuucagagagcagu

SEQ ID NO: 1398054 - RNA, 13 nt, Human
ccuucagagagca

SEQ ID NO: 1398055 - RNA, 20 nt, Human
ccuucagcacuuuagaauau

SEQ ID NO: 1398056 - RNA, 14 nt, Human
ccuucgggcugugc

SEQ ID NO: 1398057 - RNA, 18 nt, Human
ccuucuauacccacccag

SEQ ID NO: 1398058 - RNA, 20 nt, Human
ccuucuauacccacccagaa

SEQ ID NO: 1398059 - RNA, 19 nt, Human
ccuucuauacccacccaga

SEQ ID NO: 1398060 - RNA, 17 nt, Human
ccuugagggcaagagcc

SEQ ID NO: 1398061 - RNA, 19 nt, Human
ccuugaguaguuuuuaucu

SEQ ID NO: 1398062 - RNA, 14 nt, Human
ccuugaggucucag

SEQ ID NO: 1398063 - RNA, 17 nt, Human
ccuugaggucucagccc

SEQ ID NO: 1398064 - RNA, 18 nt, Human
ccuugaaggacuaauaga

SEQ ID NO: 1398065 - RNA, 16 nt, Human
ccuugaaggagaauca

SEQ ID NO: 1398066 - RNA, 13 nt, Human
ccuugaaggacua

SEQ ID NO: 1398067 - RNA, 23 nt, Human
ccuugaagaacugcaggcccugg

SEQ ID NO: 1398068 - RNA, 22 nt, Human
ccuugaagaacugcaggcccug

SEQ ID NO: 1398069 - RNA, 21 nt, Human
ccuugaagaacugcaggcccu

SEQ ID NO: 1398070 - RNA, 18 nt, Human
ccuugaagaacugcaggc

SEQ ID NO: 1398071 - RNA, 21 nt, Human
ccuugaaaauaagaauagaaa

SEQ ID NO: 1398072 - RNA, 13 nt, Human
ccuugaacuagga

SEQ ID NO: 1398073 - RNA, 22 nt, Human
ccuugauuuuagccuucucugu

SEQ ID NO: 1398074 - RNA, 21 nt, Human
ccuugauuuuagccuucucug

SEQ ID NO: 1398075 - RNA, 20 nt, Human
ccuugauuuuagccuucucu

SEQ ID NO: 1398076 - RNA, 21 nt, Human
ccuugauuuaucacacaaagc

SEQ ID NO: 1398077 - RNA, 20 nt, Human
ccuugaguaguuuuuaucug

SEQ ID NO: 1398078 - RNA, 19 nt, Human
ccuugauggagauauuuac

SEQ ID NO: 1398079 - RNA, 23 nt, Human
ccuugaugauugacaacacccau

SEQ ID NO: 1398080 - RNA, 23 nt, Human
ccuugagugggguuaucucugug

SEQ ID NO: 1398081 - RNA, 22 nt, Human
ccuugagugggguuaucucugu

SEQ ID NO: 1398082 - RNA, 14 nt, Human
ccuugagugggguu

SEQ ID NO: 1398083 - RNA, 22 nt, Human
ccuugggccagaaguaccagac

SEQ ID NO: 1398084 - RNA, 22 nt, Human
ccuuggguuagaccuacagggg

SEQ ID NO: 1398085 - RNA, 23 nt, Human
ccuugggccagaaguaccagacu

SEQ ID NO: 1398086 - RNA, 22 nt, Human
ccuuggggauucuuccaucuga

SEQ ID NO: 1398087 - RNA, 18 nt, Human
ccuuggggauucuuccau

SEQ ID NO: 1398088 - RNA, 17 nt, Human
ccuugggcccuuugagu

SEQ ID NO: 1398089 - RNA, 14 nt, Human
ccuugggcccuuug

SEQ ID NO: 1398090 - RNA, 12 nt, Human
ccuugggcccuu

SEQ ID NO: 1398091 - RNA, 23 nt, Human
ccuugggcccacaccuccuuccc

SEQ ID NO: 1398092 - RNA, 20 nt, Human
ccuuggguuagaccuacagg

SEQ ID NO: 1398093 - RNA, 18 nt, Human
ccuuggguuagaccuaca

SEQ ID NO: 1398094 - RNA, 21 nt, Human
ccuuggggguccuccuccagg

SEQ ID NO: 1398095 - RNA, 22 nt, Human
ccuuggggguccuccuccaggg

SEQ ID NO: 1398096 - RNA, 20 nt, Human
ccuuggggguccuccuccag

SEQ ID NO: 1398097 - RNA, 11 nt, Human
ccuuggggguc

SEQ ID NO: 1398098 - RNA, 19 nt, Human
ccuuggggcugaugcaguu

SEQ ID NO: 1398099 - RNA, 18 nt, Human
ccuuucuaucguucucuc

SEQ ID NO: 1398100 - RNA, 14 nt, Human
ccuuucuaguugaa

SEQ ID NO: 1398101 - RNA, 15 nt, Human
ccuuucuaguugaaa

SEQ ID NO: 1398102 - RNA, 15 nt, Human
ccuuucuagccuggc

SEQ ID NO: 1398103 - RNA, 19 nt, Human
ccuuucuagagcacugcca

SEQ ID NO: 1398104 - RNA, 14 nt, Human
ccuuucuagagcac

SEQ ID NO: 1398105 - RNA, 21 nt, Human
ccuuucggauccagggaggcu

SEQ ID NO: 1398106 - RNA, 17 nt, Human
ccuuucggauccaggga

SEQ ID NO: 1398107 - RNA, 16 nt, Human
ccuuugaccugccucc

SEQ ID NO: 1398108 - RNA, 14 nt, Human
ccuuguccuuuccc

SEQ ID NO: 1398109 - RNA, 16 nt, Human
ccuugucacugguaga

SEQ ID NO: 1398110 - RNA, 18 nt, Human
ccuugucacgccagacuu

SEQ ID NO: 1398111 - RNA, 15 nt, Human
ccuugucacgccaga

SEQ ID NO: 1398112 - RNA, 11 nt, Human
ccuuguucugu

SEQ ID NO: 1398113 - RNA, 21 nt, Human
ccuuguucugauaaugaaaau

SEQ ID NO: 1398114 - RNA, 19 nt, Human
ccuuguuacuucugaggua

SEQ ID NO: 1398115 - RNA, 18 nt, Human
ccuuguuacuucugaggu

SEQ ID NO: 1398116 - RNA, 16 nt, Human
ccuuguuacuucugag

SEQ ID NO: 1398117 - RNA, 19 nt, Human
ccuuguuuacacauacccu

SEQ ID NO: 1398118 - RNA, 17 nt, Human
ccuuguuguuucuugcc

SEQ ID NO: 1398119 - RNA, 21 nt, Human
ccuuguuucucuuccuuucuu

SEQ ID NO: 1398120 - RNA, 15 nt, Human
cgcaccauucugacu

SEQ ID NO: 1398121 - RNA, 14 nt, Human
cgcaccauucugac

SEQ ID NO: 1398122 - RNA, 22 nt, Human
cgcaacccgugccaaguccagg

SEQ ID NO: 1398123 - RNA, 19 nt, Human
cgcaacccgugccaagucc

SEQ ID NO: 1398124 - RNA, 14 nt, Human
cgcaacccgugcca

SEQ ID NO: 1398125 - RNA, 13 nt, Human
cgcaacccgugcc

SEQ ID NO: 1398126 - RNA, 17 nt, Human
cgauucccucucccagg

SEQ ID NO: 1398127 - RNA, 11 nt, Human
cgauuagacug

SEQ ID NO: 1398128 - RNA, 14 nt, Human
cgauuugucccagg

SEQ ID NO: 1398129 - RNA, 18 nt, Human
cgauucccucucccaggc

SEQ ID NO: 1398130 - RNA, 20 nt, Human
cgauuucuguuuagauaaua

SEQ ID NO: 1398131 - RNA, 18 nt, Human
cgauuagacuggacagcu

SEQ ID NO: 1398132 - RNA, 19 nt, Human
cgauguggucacagcugua

SEQ ID NO: 1398133 - RNA, 18 nt, Human
cgauguggucacagcugu

SEQ ID NO: 1398134 - RNA, 16 nt, Human
cgauucacccugucca

SEQ ID NO: 1398135 - RNA, 21 nt, Human
cgauucacccuguccaaacug

SEQ ID NO: 1398136 - RNA, 17 nt, Human
cgauguggucacagcug

SEQ ID NO: 1398137 - RNA, 21 nt, Human
cgauguggaacugcugccacu

SEQ ID NO: 1398138 - RNA, 20 nt, Human
cgauguggaacugcugccac

SEQ ID NO: 1398139 - RNA, 19 nt, Human
cgauguggaacugcugcca

SEQ ID NO: 1398140 - RNA, 15 nt, Human
cgauguggaacugcu

SEQ ID NO: 1398141 - RNA, 15 nt, Human
cgagcaugucgugga

SEQ ID NO: 1398142 - RNA, 23 nt, Human
cgccaggcugaccacagcacagc

SEQ ID NO: 1398143 - RNA, 21 nt, Human
cgccaggcugaccacagcaca

SEQ ID NO: 1398144 - RNA, 20 nt, Human
cgccaggcugaccacagcac

SEQ ID NO: 1398145 - RNA, 17 nt, Human
cgccaggcugaccacag

SEQ ID NO: 1398146 - RNA, 16 nt, Human
cgccaggcugaccaca

SEQ ID NO: 1398147 - RNA, 23 nt, Human
cgccaggauggaacacggccaca

SEQ ID NO: 1398148 - RNA, 17 nt, Human
cgcaccccccaagcugu

SEQ ID NO: 1398149 - RNA, 22 nt, Human
cgcagccacccugaggagucug

SEQ ID NO: 1398150 - RNA, 17 nt, Human
cgcagccacccugagga

SEQ ID NO: 1398151 - RNA, 16 nt, Human
cgcagccacccugagg

SEQ ID NO: 1398152 - RNA, 14 nt, Human
cgcagccacccuga

SEQ ID NO: 1398153 - RNA, 13 nt, Human
cgcagccacccug

SEQ ID NO: 1398154 - RNA, 12 nt, Human
cgcagccacccu

SEQ ID NO: 1398155 - RNA, 11 nt, Human
cgcagccaccc

SEQ ID NO: 1398156 - RNA, 18 nt, Human
cgaaagcucuagaaucug

SEQ ID NO: 1398157 - RNA, 14 nt, Human
cgaaagcucuagaa

SEQ ID NO: 1398158 - RNA, 13 nt, Human
cgaaagcucuaga

SEQ ID NO: 1398159 - RNA, 13 nt, Human
cgaagacacagac

SEQ ID NO: 1398160 - RNA, 15 nt, Human
cgaacuccuugauuu

SEQ ID NO: 1398161 - RNA, 17 nt, Human
cgaaacacagaaaccuu

SEQ ID NO: 1398162 - RNA, 13 nt, Human
cgaaaaucaaaug

SEQ ID NO: 1398163 - RNA, 22 nt, Human
cgaaaaucauauaaucuuacaa

SEQ ID NO: 1398164 - RNA, 19 nt, Human
cgaaaacccccaaaccaga

SEQ ID NO: 1398165 - RNA, 10 nt, Human
ccuuuucaua

SEQ ID NO: 1398166 - RNA, 18 nt, Human
ccuuuuuuuccaucuuua

SEQ ID NO: 1398167 - RNA, 15 nt, Human
ccuuuuauugacaca

SEQ ID NO: 1398168 - RNA, 22 nt, Human
ccuuuuauguaguaauugacau

SEQ ID NO: 1398169 - RNA, 19 nt, Human
ccuuuuaucccaaaguugu

SEQ ID NO: 1398170 - RNA, 16 nt, Human
ccuuuuauaucccauu

SEQ ID NO: 1398171 - RNA, 21 nt, Human
ccuuugaccugccucccuuca

SEQ ID NO: 1398172 - RNA, 22 nt, Human
ccuuugaccugccucccuucau

SEQ ID NO: 1398173 - RNA, 15 nt, Human
cgacuuucugccugg

SEQ ID NO: 1398174 - RNA, 14 nt, Human
cgacuuucugccug

SEQ ID NO: 1398175 - RNA, 13 nt, Human
cgacuuucugccu

SEQ ID NO: 1398176 - RNA, 19 nt, Human
cgacuuguuuuugcacaug

SEQ ID NO: 1398177 - RNA, 16 nt, Human
cgacuugccaaauuua

SEQ ID NO: 1398178 - RNA, 21 nt, Human
cgagaaauucguguguuuuuu

SEQ ID NO: 1398179 - RNA, 21 nt, Human
cgagaaagaggcaccaggaag

SEQ ID NO: 1398180 - RNA, 19 nt, Human
cgagaaagaggcaccagga

SEQ ID NO: 1398181 - RNA, 16 nt, Human
cgacuuucugccugga

SEQ ID NO: 1398182 - RNA, 17 nt, Human
cgagaaagaggcaccag

SEQ ID NO: 1398183 - RNA, 19 nt, Human
cgaauacuuuugcccuuug

SEQ ID NO: 1398184 - RNA, 11 nt, Human
cgacugucucc

SEQ ID NO: 1398185 - RNA, 20 nt, Human
cgagaggugggccagucugu

SEQ ID NO: 1398186 - RNA, 19 nt, Human
cgagaggugggccagucug

SEQ ID NO: 1398187 - RNA, 15 nt, Human
cgagaggugggccag

SEQ ID NO: 1398188 - RNA, 14 nt, Human
cgagaggugggcca

SEQ ID NO: 1398189 - RNA, 22 nt, Human
cgagaggggccgaugcccagag

SEQ ID NO: 1398190 - RNA, 21 nt, Human
cgagaggggccgaugcccaga

SEQ ID NO: 1398191 - RNA, 16 nt, Human
cgagaagggcugcuuc

SEQ ID NO: 1398192 - RNA, 23 nt, Human
cgagaggugggccagucugugga

SEQ ID NO: 1398193 - RNA, 22 nt, Human
cgagaggugggccagucugugg

SEQ ID NO: 1398194 - RNA, 13 nt, Human
cgagauaccccac

SEQ ID NO: 1398195 - RNA, 13 nt, Human
cgagcaggaggcc

SEQ ID NO: 1398196 - RNA, 19 nt, Human
cgagcagcugagcagggcc

SEQ ID NO: 1398197 - RNA, 16 nt, Human
cgagcagcugagcagg

SEQ ID NO: 1398198 - RNA, 15 nt, Human
cgagcagcugagcag

SEQ ID NO: 1398199 - RNA, 14 nt, Human
cgagcagcugagca

SEQ ID NO: 1398200 - RNA, 13 nt, Human
cgagcagcugagc

SEQ ID NO: 1398201 - RNA, 12 nt, Human
cgagcagcugag

SEQ ID NO: 1398202 - RNA, 14 nt, Human
cgagcaggaggccu

SEQ ID NO: 1398203 - RNA, 11 nt, Human
cgagcagcuga

SEQ ID NO: 1398204 - RNA, 13 nt, Human
cgagcaccuccac

SEQ ID NO: 1398205 - RNA, 23 nt, Human
cgagcaaccguggcccuuccugg

SEQ ID NO: 1398206 - RNA, 22 nt, Human
cgagcaaccguggcccuuccug

SEQ ID NO: 1398207 - RNA, 16 nt, Human
cgagcaaccguggccc

SEQ ID NO: 1398208 - RNA, 15 nt, Human
cgagcaaccguggcc

SEQ ID NO: 1398209 - RNA, 14 nt, Human
cgagcaaccguggc

SEQ ID NO: 1398210 - RNA, 23 nt, Human
cgagauuaucguuuucuuaaagu

SEQ ID NO: 1398211 - RNA, 21 nt, Human
cgagauuaucguuuucuuaaa

SEQ ID NO: 1398212 - RNA, 19 nt, Human
cgagaucaguauuuaacua

SEQ ID NO: 1398213 - RNA, 17 nt, Human
cgagaucaguauuuaac

SEQ ID NO: 1398214 - RNA, 22 nt, Human
cgagaucccaacacugccagca

SEQ ID NO: 1398215 - RNA, 21 nt, Human
cgagaucccaacacugccagc

SEQ ID NO: 1398216 - RNA, 15 nt, Human
cgagaucccaacacu

SEQ ID NO: 1398217 - RNA, 13 nt, Human
cgagaucccaaca

SEQ ID NO: 1398218 - RNA, 20 nt, Human
cgagauaccccaccucccuc

SEQ ID NO: 1398219 - RNA, 22 nt, Human
cucagggcuccuugugggccug

SEQ ID NO: 1398220 - RNA, 15 nt, Human
cucagggcuccuugu

SEQ ID NO: 1398221 - RNA, 14 nt, Human
cucagggcuccuug

SEQ ID NO: 1398222 - RNA, 17 nt, Human
cucagggcuccuggguu

SEQ ID NO: 1398223 - RNA, 15 nt, Human
cucagggcuccuggg

SEQ ID NO: 1398224 - RNA, 14 nt, Human
cucagggcuccugg

SEQ ID NO: 1398225 - RNA, 13 nt, Human
cucagggcuccug

SEQ ID NO: 1398226 - RNA, 22 nt, Human
cucagggcaaagccaggucccu

SEQ ID NO: 1398227 - RNA, 10 nt, Human
cucagggcag

SEQ ID NO: 1398228 - RNA, 18 nt, Human
cucagggcaaagccaggu

SEQ ID NO: 1398229 - RNA, 17 nt, Human
cucagggcaaagccagg

SEQ ID NO: 1398230 - RNA, 16 nt, Human
cucagggcaaagccag

SEQ ID NO: 1398231 - RNA, 15 nt, Human
cucagggcaaagcca

SEQ ID NO: 1398232 - RNA, 14 nt, Human
cucagggcaaagcc

SEQ ID NO: 1398233 - RNA, 17 nt, Human
cucagggaccauggcuu

SEQ ID NO: 1398234 - RNA, 16 nt, Human
cucagggaccauggcu

SEQ ID NO: 1398235 - RNA, 15 nt, Human
cucaggcaggggccu

SEQ ID NO: 1398236 - RNA, 15 nt, Human
cucaggcagcucaag

SEQ ID NO: 1398237 - RNA, 14 nt, Human
cucaggcagcucaa

SEQ ID NO: 1398238 - RNA, 18 nt, Human
cucaggcacacagcuacu

SEQ ID NO: 1398239 - RNA, 16 nt, Human
cucaggcacacagcua

SEQ ID NO: 1398240 - RNA, 15 nt, Human
cucaggcacacagcu

SEQ ID NO: 1398241 - RNA, 14 nt, Human
cucaggcacacagc

SEQ ID NO: 1398242 - RNA, 13 nt, Human
cucaggcacacag

SEQ ID NO: 1398243 - RNA, 21 nt, Human
cucaggaugagggaaaagaaa

SEQ ID NO: 1398244 - RNA, 22 nt, Human
cucaggaugagggaaaagaaaa

SEQ ID NO: 1398245 - RNA, 20 nt, Human
cucaggaugagggaaaagaa

SEQ ID NO: 1398246 - RNA, 16 nt, Human
cucaggaugagggaaa

SEQ ID NO: 1398247 - RNA, 20 nt, Human
cucaggauccaagcuaagca

SEQ ID NO: 1398248 - RNA, 18 nt, Human
cucaggauccaagcuaag

SEQ ID NO: 1398249 - RNA, 12 nt, Human
cucaggauccaa

SEQ ID NO: 1398250 - RNA, 13 nt, Human
cucagccagccuc

SEQ ID NO: 1398251 - RNA, 12 nt, Human
cucagccagccu

SEQ ID NO: 1398252 - RNA, 13 nt, Human
cucagccagcacu

SEQ ID NO: 1398253 - RNA, 11 nt, Human
cucagccagca

SEQ ID NO: 1398254 - RNA, 21 nt, Human
cucagccacccugaguugcuu

SEQ ID NO: 1398255 - RNA, 18 nt, Human
cucagccacccugaguug

SEQ ID NO: 1398256 - RNA, 17 nt, Human
cucagccacccugaguu

SEQ ID NO: 1398257 - RNA, 16 nt, Human
cucagccacccugagu

SEQ ID NO: 1398258 - RNA, 15 nt, Human
cucagccacccugag

SEQ ID NO: 1398259 - RNA, 14 nt, Human
cucagccagccucg

SEQ ID NO: 1398260 - RNA, 19 nt, Human
cucaucccguguucuccuu

SEQ ID NO: 1398261 - RNA, 16 nt, Human
cucaucccguguucuc

SEQ ID NO: 1398262 - RNA, 22 nt, Human
cucaucccgagcaccuccacau

SEQ ID NO: 1398263 - RNA, 22 nt, Human
cucaucauucucugucucaucc

SEQ ID NO: 1398264 - RNA, 20 nt, Human
cucaucauucucugucucau

SEQ ID NO: 1398265 - RNA, 19 nt, Human
cucaucauucucugucuca

SEQ ID NO: 1398266 - RNA, 18 nt, Human
cucaucauucucugucuc

SEQ ID NO: 1398267 - RNA, 17 nt, Human
cucaucauucucugucu

SEQ ID NO: 1398268 - RNA, 15 nt, Human
cucaucauucucugu

SEQ ID NO: 1398269 - RNA, 14 nt, Human
cucaucauucucug

SEQ ID NO: 1398270 - RNA, 13 nt, Human
cucaucauucucu

SEQ ID NO: 1398271 - RNA, 17 nt, Human
cucaucucucugcccaa

SEQ ID NO: 1398272 - RNA, 16 nt, Human
cucaucucucugccca

SEQ ID NO: 1398273 - RNA, 14 nt, Human
cucauccuccuucu

SEQ ID NO: 1398274 - RNA, 16 nt, Human
cucauccuccuucuuc

SEQ ID NO: 1398275 - RNA, 13 nt, Human
cucauccuccuuc

SEQ ID NO: 1398276 - RNA, 12 nt, Human
cucauccuccuu

SEQ ID NO: 1398277 - RNA, 12 nt, Human
cucaucaguagu

SEQ ID NO: 1398278 - RNA, 18 nt, Human
cucaucaauggggccagu

SEQ ID NO: 1398279 - RNA, 14 nt, Human
cucaucaacugaau

SEQ ID NO: 1398280 - RNA, 16 nt, Human
cucaucaacugaauga

SEQ ID NO: 1398281 - RNA, 17 nt, Human
cucauauaauuauaugu

SEQ ID NO: 1398282 - RNA, 20 nt, Human
cucauauaauuauauguugu

SEQ ID NO: 1398283 - RNA, 17 nt, Human
cucauacccucccuccc

SEQ ID NO: 1398284 - RNA, 16 nt, Human
cucauacccucccucc

SEQ ID NO: 1398285 - RNA, 17 nt, Human
cuccacguucugcucau

SEQ ID NO: 1398286 - RNA, 16 nt, Human
cuccacguucugcuca

SEQ ID NO: 1398287 - RNA, 15 nt, Human
cuccacguucugcuc

SEQ ID NO: 1398288 - RNA, 14 nt, Human
cuccaccuucccac

SEQ ID NO: 1398289 - RNA, 12 nt, Human
cuccaccuuccc

SEQ ID NO: 1398290 - RNA, 17 nt, Human
cuccaccuugcagcucu

SEQ ID NO: 1398291 - RNA, 14 nt, Human
cuccaccuccuggg

SEQ ID NO: 1398292 - RNA, 19 nt, Human
cuccagcggcccugucauc

SEQ ID NO: 1398293 - RNA, 22 nt, Human
cuccagcggcccugucauccag

SEQ ID NO: 1398294 - RNA, 15 nt, Human
cuccagcggcccugu

SEQ ID NO: 1398295 - RNA, 13 nt, Human
cuccagcggcccu

SEQ ID NO: 1398296 - RNA, 18 nt, Human
cuccacguucugcucauc

SEQ ID NO: 1398297 - RNA, 12 nt, Human
cuccaucccugg

SEQ ID NO: 1398298 - RNA, 11 nt, Human
cuccaucccug

SEQ ID NO: 1398299 - RNA, 20 nt, Human
cuccauccacaugggagccg

SEQ ID NO: 1398300 - RNA, 18 nt, Human
cuccauccaaggccaggu

SEQ ID NO: 1398301 - RNA, 14 nt, Human
cuccauccaaggcc

SEQ ID NO: 1398302 - RNA, 13 nt, Human
cuccauccaaggc

SEQ ID NO: 1398303 - RNA, 12 nt, Human
cuccauccaagg

SEQ ID NO: 1398304 - RNA, 16 nt, Human
cuccauccuaccacaa

SEQ ID NO: 1398305 - RNA, 19 nt, Human
cuccaggaagccuuccccu

SEQ ID NO: 1398306 - RNA, 15 nt, Human
cuccagcuuuccugu

SEQ ID NO: 1398307 - RNA, 16 nt, Human
cuccagcuuuccugua

SEQ ID NO: 1398308 - RNA, 13 nt, Human
cuccagcuuuccu

SEQ ID NO: 1398309 - RNA, 13 nt, Human
cuccacauccucc

SEQ ID NO: 1398310 - RNA, 20 nt, Human
cuccacaccauucaggucuu

SEQ ID NO: 1398311 - RNA, 20 nt, Human
cuccacacagugcucaaggc

SEQ ID NO: 1398312 - RNA, 18 nt, Human
cuccacaccauucagguc

SEQ ID NO: 1398313 - RNA, 23 nt, Human
cuccaauuuuuuaagugaaaaua

SEQ ID NO: 1398314 - RNA, 15 nt, Human
cuccaauuuuuuaag

SEQ ID NO: 1398315 - RNA, 17 nt, Human
cuccacauccuccacgu

SEQ ID NO: 1398316 - RNA, 15 nt, Human
cuccacauccuccac

SEQ ID NO: 1398317 - RNA, 14 nt, Human
cuccacauccucca

SEQ ID NO: 1398318 - RNA, 15 nt, Human
cuccacccuggccga

SEQ ID NO: 1398319 - RNA, 14 nt, Human
cuccacccuggccg

SEQ ID NO: 1398320 - RNA, 23 nt, Human
cucauguugaagccacugccuuc

SEQ ID NO: 1398321 - RNA, 13 nt, Human
cucaucugcuggu

SEQ ID NO: 1398322 - RNA, 12 nt, Human
cucaucugcugg

SEQ ID NO: 1398323 - RNA, 12 nt, Human
cucaucucuucu

SEQ ID NO: 1398324 - RNA, 15 nt, Human
cucaucucuucuuuu

SEQ ID NO: 1398325 - RNA, 13 nt, Human
cucauuagacugg

SEQ ID NO: 1398326 - RNA, 17 nt, Human
cucauuaaaagaauauc

SEQ ID NO: 1398327 - RNA, 12 nt, Human
cucauuagacug

SEQ ID NO: 1398328 - RNA, 14 nt, Human
cucauuucuagcag

SEQ ID NO: 1398329 - RNA, 19 nt, Human
cucauuuuuuuccuugcaa

SEQ ID NO: 1398330 - RNA, 15 nt, Human
cuccaaaauaaaacu

SEQ ID NO: 1398331 - RNA, 16 nt, Human
cuccaaaauaaaacuu

SEQ ID NO: 1398332 - RNA, 18 nt, Human
cuccaaaauaaaacuuuu

SEQ ID NO: 1398333 - RNA, 21 nt, Human
cuccaaacugacucuuaagaa

SEQ ID NO: 1398334 - RNA, 22 nt, Human
cuccucccacccggcugcagag

SEQ ID NO: 1398335 - RNA, 20 nt, Human
cuccucccacccggcugcag

SEQ ID NO: 1398336 - RNA, 11 nt, Human
cuccucccagg

SEQ ID NO: 1398337 - RNA, 12 nt, Human
cuccucccagga

SEQ ID NO: 1398338 - RNA, 11 nt, Human
cuccucaggga

SEQ ID NO: 1398339 - RNA, 17 nt, Human
cuccucagggacucagg

SEQ ID NO: 1398340 - RNA, 23 nt, Human
cuccucaggcacacagcuacucu

SEQ ID NO: 1398341 - RNA, 22 nt, Human
cuccucaggcacacagcuacuc

SEQ ID NO: 1398342 - RNA, 21 nt, Human
cuccucaggcacacagcuacu

SEQ ID NO: 1398343 - RNA, 19 nt, Human
cuccucaggcacacagcua

SEQ ID NO: 1398344 - RNA, 18 nt, Human
cuccucaggcacacagcu

SEQ ID NO: 1398345 - RNA, 17 nt, Human
cuccucaggcacacagc

SEQ ID NO: 1398346 - RNA, 13 nt, Human
cuccucagccuga

SEQ ID NO: 1398347 - RNA, 24 nt, Human
cuccucagccugaaccccagggcu

SEQ ID NO: 1398348 - RNA, 12 nt, Human
cuccucagccug

SEQ ID NO: 1398349 - RNA, 11 nt, Human
cuccucagccu

SEQ ID NO: 1398350 - RNA, 15 nt, Human
cuccucacccccagc

SEQ ID NO: 1398351 - RNA, 20 nt, Human
cuccucaaccccuccccucc

SEQ ID NO: 1398352 - RNA, 14 nt, Human
cuccucacccccag

SEQ ID NO: 1398353 - RNA, 15 nt, Human
cuccucccacccggc

SEQ ID NO: 1398354 - RNA, 19 nt, Human
cucccuguuccccagagaa

SEQ ID NO: 1398355 - RNA, 18 nt, Human
cucccuguuccccagaga

SEQ ID NO: 1398356 - RNA, 17 nt, Human
cucccuguuccccagag

SEQ ID NO: 1398357 - RNA, 16 nt, Human
cucccuguuccccaga

SEQ ID NO: 1398358 - RNA, 19 nt, Human
cucccugugcccccagggu

SEQ ID NO: 1398359 - RNA, 15 nt, Human
cucccugugccccca

SEQ ID NO: 1398360 - RNA, 13 nt, Human
cucccugugcccc

SEQ ID NO: 1398361 - RNA, 18 nt, Human
cucccuguacaguguuac

SEQ ID NO: 1398362 - RNA, 15 nt, Human
cucccuguacagugu

SEQ ID NO: 1398363 - RNA, 15 nt, Human
cucccuguaacuuga

SEQ ID NO: 1398364 - RNA, 13 nt, Human
cucccuguaacuu

SEQ ID NO: 1398365 - RNA, 18 nt, Human
cucccuggugcuuaugcu

SEQ ID NO: 1398366 - RNA, 19 nt, Human
cucccuguaaccucuucag

SEQ ID NO: 1398367 - RNA, 22 nt, Human
cucccuggugcuuaugcucuua

SEQ ID NO: 1398368 - RNA, 17 nt, Human
cucccuugggcucugau

SEQ ID NO: 1398369 - RNA, 16 nt, Human
cucccuugggcucuga

SEQ ID NO: 1398370 - RNA, 18 nt, Human
cucccuugggcucccugu

SEQ ID NO: 1398371 - RNA, 14 nt, Human
cucccuugggcucc

SEQ ID NO: 1398372 - RNA, 13 nt, Human
cucccuugggcuc

SEQ ID NO: 1398373 - RNA, 21 nt, Human
cucccuugggcucugaugaaa

SEQ ID NO: 1398374 - RNA, 20 nt, Human
cucccuugggcucugaugaa

SEQ ID NO: 1398375 - RNA, 19 nt, Human
cucccuugggcucugauga

SEQ ID NO: 1398376 - RNA, 18 nt, Human
cucccuugggcucugaug

SEQ ID NO: 1398377 - RNA, 23 nt, Human
cucccuugggcucugaugaaaaa

SEQ ID NO: 1398378 - RNA, 17 nt, Human
cuccgaggacccaggaa

SEQ ID NO: 1398379 - RNA, 15 nt, Human
cuccgaggacccagg

SEQ ID NO: 1398380 - RNA, 22 nt, Human
cuccgagaggugggccagucug

SEQ ID NO: 1398381 - RNA, 18 nt, Human
cuccgagaggugggccag

SEQ ID NO: 1398382 - RNA, 17 nt, Human
cuccgagaggugggcca

SEQ ID NO: 1398383 - RNA, 15 nt, Human
cuccgagaggugggc

SEQ ID NO: 1398384 - RNA, 14 nt, Human
cuccgagagguggg

SEQ ID NO: 1398385 - RNA, 13 nt, Human
cuccgagaggugg

SEQ ID NO: 1398386 - RNA, 18 nt, Human
cuccuauguuuggcugcu

SEQ ID NO: 1398387 - RNA, 22 nt, Human
cuccuauggguugucaccaagc

SEQ ID NO: 1398388 - RNA, 23 nt, Human
cuccuaugaucugagucagagcc

SEQ ID NO: 1398389 - RNA, 19 nt, Human
cuccuaugaucugagucag

SEQ ID NO: 1398390 - RNA, 16 nt, Human
cuccuaugaucugagu

SEQ ID NO: 1398391 - RNA, 21 nt, Human
cuccucaaccccuccccucca

SEQ ID NO: 1398392 - RNA, 15 nt, Human
cuccucaaccccucc

SEQ ID NO: 1398393 - RNA, 12 nt, Human
cuccccuucucu

SEQ ID NO: 1398394 - RNA, 20 nt, Human
cuccccugcccccugcagga

SEQ ID NO: 1398395 - RNA, 23 nt, Human
cuccccugcccccugcaggaagg

SEQ ID NO: 1398396 - RNA, 19 nt, Human
cuccccugcccccugcagg

SEQ ID NO: 1398397 - RNA, 18 nt, Human
cuccccugcccccugcag

SEQ ID NO: 1398398 - RNA, 17 nt, Human
cuccccugcccccugca

SEQ ID NO: 1398399 - RNA, 15 nt, Human
cuccccugcccccug

SEQ ID NO: 1398400 - RNA, 13 nt, Human
cuccccugccccc

SEQ ID NO: 1398401 - RNA, 24 nt, Human
cuccaucccuggcccccucccugg

SEQ ID NO: 1398402 - RNA, 19 nt, Human
cuccaucccuggcccccuc

SEQ ID NO: 1398403 - RNA, 19 nt, Human
cuccccagcauuccagccc

SEQ ID NO: 1398404 - RNA, 16 nt, Human
cuccaucccuggcccc

SEQ ID NO: 1398405 - RNA, 15 nt, Human
cuccaucccuggccc

SEQ ID NO: 1398406 - RNA, 14 nt, Human
cuccaucccuggcc

SEQ ID NO: 1398407 - RNA, 13 nt, Human
cuccaucccuggc

SEQ ID NO: 1398408 - RNA, 15 nt, Human
cucccuggugcuuau

SEQ ID NO: 1398409 - RNA, 13 nt, Human
cucccuggugcuu

SEQ ID NO: 1398410 - RNA, 12 nt, Human
cucccuggugcu

SEQ ID NO: 1398411 - RNA, 14 nt, Human
cucccugccuccug

SEQ ID NO: 1398412 - RNA, 23 nt, Human
cucccugcauggcauccuccagc

SEQ ID NO: 1398413 - RNA, 22 nt, Human
cucccugcauggcauccuccag

SEQ ID NO: 1398414 - RNA, 14 nt, Human
cucccugcauggca

SEQ ID NO: 1398415 - RNA, 18 nt, Human
cuccccuugccugugcca

SEQ ID NO: 1398416 - RNA, 13 nt, Human
cuccccuugccug

SEQ ID NO: 1398417 - RNA, 16 nt, Human
cuccccuuuuuuuccc

SEQ ID NO: 1398418 - RNA, 18 nt, Human
cuccuucccucucuggag

SEQ ID NO: 1398419 - RNA, 19 nt, Human
cuccuucccucucuggaga

SEQ ID NO: 1398420 - RNA, 17 nt, Human
cuccuucccucucugga

SEQ ID NO: 1398421 - RNA, 13 nt, Human
cuccuucccucuc

SEQ ID NO: 1398422 - RNA, 12 nt, Human
cuccuuccccau

SEQ ID NO: 1398423 - RNA, 17 nt, Human
cuccuucccaucgcugu

SEQ ID NO: 1398424 - RNA, 16 nt, Human
cuccuucccaucgcug

SEQ ID NO: 1398425 - RNA, 14 nt, Human
cuccuucccaagug

SEQ ID NO: 1398426 - RNA, 13 nt, Human
cuccuucccaagu

SEQ ID NO: 1398427 - RNA, 22 nt, Human
cuccuggaccccccuuucacag

SEQ ID NO: 1398428 - RNA, 21 nt, Human
cuccuggaccccccuuucaca

SEQ ID NO: 1398429 - RNA, 23 nt, Human
cuccugcugcucccucagacugg

SEQ ID NO: 1398430 - RNA, 22 nt, Human
cuccugcugcucccucagacug

SEQ ID NO: 1398431 - RNA, 21 nt, Human
cuccugcugcucccucagacu

SEQ ID NO: 1398432 - RNA, 20 nt, Human
cuccugcugcucccucagac

SEQ ID NO: 1398433 - RNA, 19 nt, Human
cuccugcugcucccucaga

SEQ ID NO: 1398434 - RNA, 18 nt, Human
cuccugcugcucccucag

SEQ ID NO: 1398435 - RNA, 17 nt, Human
cuccugcugcucccuca

SEQ ID NO: 1398436 - RNA, 16 nt, Human
cuccugcugcucccuc

SEQ ID NO: 1398437 - RNA, 15 nt, Human
cuccugcugcucccu

SEQ ID NO: 1398438 - RNA, 15 nt, Human
cuccugccggcuccu

SEQ ID NO: 1398439 - RNA, 14 nt, Human
cuccucuccccagc

SEQ ID NO: 1398440 - RNA, 17 nt, Human
cuccugccucagccucc

SEQ ID NO: 1398441 - RNA, 23 nt, Human
cucgagaucccaacacugccagc

SEQ ID NO: 1398442 - RNA, 22 nt, Human
cucgagaucccaacacugccag

SEQ ID NO: 1398443 - RNA, 21 nt, Human
cucgagaucccaacacugcca

SEQ ID NO: 1398444 - RNA, 21 nt, Human
cuccuugguucuugaggggac

SEQ ID NO: 1398445 - RNA, 13 nt, Human
cucgagaucccaa

SEQ ID NO: 1398446 - RNA, 13 nt, Human
cuccuuccugugu

SEQ ID NO: 1398447 - RNA, 21 nt, Human
cuccuuccugccccaacuccu

SEQ ID NO: 1398448 - RNA, 14 nt, Human
cuccuuccuggaga

SEQ ID NO: 1398449 - RNA, 13 nt, Human
cuccuuccuggag

SEQ ID NO: 1398450 - RNA, 15 nt, Human
cuccuuccugcccca

SEQ ID NO: 1398451 - RNA, 13 nt, Human
cuccuuccugccc

SEQ ID NO: 1398452 - RNA, 11 nt, Human
cuccuuccugc

SEQ ID NO: 1398453 - RNA, 12 nt, Human
cuccuuccuaaa

SEQ ID NO: 1398454 - RNA, 16 nt, Human
cuccuugggcccuuug

SEQ ID NO: 1398455 - RNA, 13 nt, Human
cuccuugggcccu

SEQ ID NO: 1398456 - RNA, 12 nt, Human
cuccuugggccc

SEQ ID NO: 1398457 - RNA, 15 nt, Human
cuccuuccugugugu

SEQ ID NO: 1398458 - RNA, 19 nt, Human
cuccuugggcccuuugagu

SEQ ID NO: 1398459 - RNA, 18 nt, Human
cuccuugggcccuuugag

SEQ ID NO: 1398460 - RNA, 17 nt, Human
cuccuugggcccuuuga

SEQ ID NO: 1398461 - RNA, 22 nt, Human
cucgcaacccgugccaagucca

SEQ ID NO: 1398462 - RNA, 23 nt, Human
cucgcaacccgugccaaguccag

SEQ ID NO: 1398463 - RNA, 21 nt, Human
cucgcaacccgugccaagucc

SEQ ID NO: 1398464 - RNA, 16 nt, Human
cucgcaacccgugcca

SEQ ID NO: 1398465 - RNA, 12 nt, Human
cucgcaacccgu

SEQ ID NO: 1398466 - RNA, 19 nt, Human
cucgaggggugggcuggua

SEQ ID NO: 1398467 - RNA, 14 nt, Human
cucgauuucuccag

SEQ ID NO: 1398468 - RNA, 17 nt, Human
cucgaggggugggcugg

SEQ ID NO: 1398469 - RNA, 16 nt, Human
cucgaggggugggcug

SEQ ID NO: 1398470 - RNA, 14 nt, Human
cucgaggggugggc

SEQ ID NO: 1398471 - RNA, 23 nt, Human
cucgagggcagggaccacacccu

SEQ ID NO: 1398472 - RNA, 18 nt, Human
cucgagggcagggaccac

SEQ ID NO: 1398473 - RNA, 23 nt, Human
cucgagcgcccugcagacccugc

SEQ ID NO: 1398474 - RNA, 21 nt, Human
cucgagcgcccugcagacccu

SEQ ID NO: 1398475 - RNA, 20 nt, Human
cucgagcgcccugcagaccc

SEQ ID NO: 1398476 - RNA, 19 nt, Human
cucgagcgcccugcagacc

SEQ ID NO: 1398477 - RNA, 18 nt, Human
cucgagcgcccugcagac

SEQ ID NO: 1398478 - RNA, 17 nt, Human
cucgagcgcccugcaga

SEQ ID NO: 1398479 - RNA, 16 nt, Human
cucgagcgcccugcag

SEQ ID NO: 1398480 - RNA, 15 nt, Human
cucgagcgcccugca

SEQ ID NO: 1398481 - RNA, 12 nt, Human
cucgagcgcccu

SEQ ID NO: 1398482 - RNA, 23 nt, Human
cucgcuccccacucugcucugau

SEQ ID NO: 1398483 - RNA, 21 nt, Human
cucgcuccccacucugcucug

SEQ ID NO: 1398484 - RNA, 17 nt, Human
cucgcuccccacucugc

SEQ ID NO: 1398485 - RNA, 16 nt, Human
cucgcuccccacucug

SEQ ID NO: 1398486 - RNA, 15 nt, Human
cucgcuccccacucu

SEQ ID NO: 1398487 - RNA, 23 nt, Human
cucgccugacaaccacuggucug

SEQ ID NO: 1398488 - RNA, 18 nt, Human
cucgccggaucugaggga

SEQ ID NO: 1398489 - RNA, 19 nt, Human
cucgcauaggaccuuucca

SEQ ID NO: 1398490 - RNA, 18 nt, Human
cucgcauaggaccuuucc

SEQ ID NO: 1398491 - RNA, 20 nt, Human
cucgcccugcgguagauggg

SEQ ID NO: 1398492 - RNA, 17 nt, Human
cucgccggaucugaggg

SEQ ID NO: 1398493 - RNA, 12 nt, Human
cuagguggaaaa

SEQ ID NO: 1398494 - RNA, 15 nt, Human
cuagguggaaaagcc

SEQ ID NO: 1398495 - RNA, 18 nt, Human
cuaggugcuauuugucau

SEQ ID NO: 1398496 - RNA, 21 nt, Human
cuagguccccauacuccuaug

SEQ ID NO: 1398497 - RNA, 17 nt, Human
cuagguaggaaaugugg

SEQ ID NO: 1398498 - RNA, 15 nt, Human
cuagguaggguuuaa

SEQ ID NO: 1398499 - RNA, 20 nt, Human
cuagguacgaugacaguguu

SEQ ID NO: 1398500 - RNA, 19 nt, Human
cuagguacgaugacagugu

SEQ ID NO: 1398501 - RNA, 14 nt, Human
cuagguacgaugac

SEQ ID NO: 1398502 - RNA, 22 nt, Human
cgccccaacccguggaggcugc

SEQ ID NO: 1398503 - RNA, 21 nt, Human
cgccccaacccguggaggcug

SEQ ID NO: 1398504 - RNA, 20 nt, Human
cuagguaauuuuuacagaau

SEQ ID NO: 1398505 - RNA, 22 nt, Human
cuagguaaauuacaguuccuag

SEQ ID NO: 1398506 - RNA, 16 nt, Human
cuagugacccacaugc

SEQ ID NO: 1398507 - RNA, 21 nt, Human
cuagugaaggcuucucucugu

SEQ ID NO: 1398508 - RNA, 17 nt, Human
cuagugaaggcuucucu

SEQ ID NO: 1398509 - RNA, 17 nt, Human
cuagucuuuugcuuuug

SEQ ID NO: 1398510 - RNA, 18 nt, Human
cuagugacuuguguccca

SEQ ID NO: 1398511 - RNA, 19 nt, Human
cuagugacccacaugccau

SEQ ID NO: 1398512 - RNA, 18 nt, Human
cuagugacccacaugcca

SEQ ID NO: 1398513 - RNA, 17 nt, Human
cuagugacccacaugcc

SEQ ID NO: 1398514 - RNA, 21 nt, Human
cuagugagcagucaggaaaga

SEQ ID NO: 1398515 - RNA, 13 nt, Human
cuagucauaaccu

SEQ ID NO: 1398516 - RNA, 20 nt, Human
cuagugaaacucguuaauuu

SEQ ID NO: 1398517 - RNA, 13 nt, Human
cuagguucuaaaa

SEQ ID NO: 1398518 - RNA, 17 nt, Human
cuagguguuuuguucac

SEQ ID NO: 1398519 - RNA, 14 nt, Human
cuagguguuuuguu

SEQ ID NO: 1398520 - RNA, 23 nt, Human
cuagguggguugaaagccaagga

SEQ ID NO: 1398521 - RNA, 19 nt, Human
cuagguggguugaaagcca

SEQ ID NO: 1398522 - RNA, 18 nt, Human
cuagguggguugaaagcc

SEQ ID NO: 1398523 - RNA, 13 nt, Human
cuagguuucaaag

SEQ ID NO: 1398524 - RNA, 16 nt, Human
cuaguaauuggaaagg

SEQ ID NO: 1398525 - RNA, 15 nt, Human
cuagucaaugacaug

SEQ ID NO: 1398526 - RNA, 21 nt, Human
cuagucaaucaagucuguuua

SEQ ID NO: 1398527 - RNA, 20 nt, Human
cuagucaaucaagucuguuu

SEQ ID NO: 1398528 - RNA, 16 nt, Human
cuagucaaucaagucu

SEQ ID NO: 1398529 - RNA, 17 nt, Human
cuagucacgcaugcagu

SEQ ID NO: 1398530 - RNA, 21 nt, Human
cuagucacgcaugcaguguug

SEQ ID NO: 1398531 - RNA, 20 nt, Human
cuagucaaugacaugaauuu

SEQ ID NO: 1398532 - RNA, 18 nt, Human
cuagucaaugacaugaau

SEQ ID NO: 1398533 - RNA, 14 nt, Human
cuagucaccagaga

SEQ ID NO: 1398534 - RNA, 18 nt, Human
cuaguggccgaaccagaa

SEQ ID NO: 1398535 - RNA, 20 nt, Human
cuagugacuugugucccaug

SEQ ID NO: 1398536 - RNA, 19 nt, Human
cuagugacuugugucccau

SEQ ID NO: 1398537 - RNA, 23 nt, Human
cuauaaggugcucucuuucuguc

SEQ ID NO: 1398538 - RNA, 22 nt, Human
cuauaaggugcucucuuucugu

SEQ ID NO: 1398539 - RNA, 21 nt, Human
cuauaaggugcucucuuucug

SEQ ID NO: 1398540 - RNA, 22 nt, Human
cuauaagcaagaaggcaaaaau

SEQ ID NO: 1398541 - RNA, 22 nt, Human
cuauaauuuaccuaagauuaca

SEQ ID NO: 1398542 - RNA, 13 nt, Human
cuauagccaaaaa

SEQ ID NO: 1398543 - RNA, 22 nt, Human
cuauagaugucuuuucccauuu

SEQ ID NO: 1398544 - RNA, 16 nt, Human
cuauagaugucuuuuc

SEQ ID NO: 1398545 - RNA, 15 nt, Human
cuauagaugucuuuu

SEQ ID NO: 1398546 - RNA, 14 nt, Human
cuauagaugucuuu

SEQ ID NO: 1398547 - RNA, 13 nt, Human
cuauaccaauaaa

SEQ ID NO: 1398548 - RNA, 14 nt, Human
cuauaccaauaaag

SEQ ID NO: 1398549 - RNA, 10 nt, Human
cuauauguau

SEQ ID NO: 1398550 - RNA, 14 nt, Human
cuauagccaaaaau

SEQ ID NO: 1398551 - RNA, 19 nt, Human
cuauagccaaaaauagcua

SEQ ID NO: 1398552 - RNA, 19 nt, Human
cuauauuacgguuugcccc

SEQ ID NO: 1398553 - RNA, 18 nt, Human
cuauauuguuugcuaagc

SEQ ID NO: 1398554 - RNA, 16 nt, Human
cuauauuuaacaagau

SEQ ID NO: 1398555 - RNA, 16 nt, Human
cuauauuguucagcau

SEQ ID NO: 1398556 - RNA, 22 nt, Human
cuauauuugggccugcuccaga

SEQ ID NO: 1398557 - RNA, 12 nt, Human
cuauauuugggc

SEQ ID NO: 1398558 - RNA, 17 nt, Human
cuauauuuuacauaaau

SEQ ID NO: 1398559 - RNA, 17 nt, Human
cuaucuguauucccaaa

SEQ ID NO: 1398560 - RNA, 21 nt, Human
cuaucugucugguggccccgu

SEQ ID NO: 1398561 - RNA, 18 nt, Human
cuaucugucugguggccc

SEQ ID NO: 1398562 - RNA, 17 nt, Human
cuaucugucugguggcc

SEQ ID NO: 1398563 - RNA, 16 nt, Human
cuaucugucugguggc

SEQ ID NO: 1398564 - RNA, 14 nt, Human
cuaucugucuggug

SEQ ID NO: 1398565 - RNA, 11 nt, Human
cuaucugucug

SEQ ID NO: 1398566 - RNA, 12 nt, Human
cuaucuguauuc

SEQ ID NO: 1398567 - RNA, 23 nt, Human
cuaucugggcuuccuggagcaga

SEQ ID NO: 1398568 - RNA, 21 nt, Human
cuaucugggcuuccuggagca

SEQ ID NO: 1398569 - RNA, 20 nt, Human
cuaucugggcuuccuggagc

SEQ ID NO: 1398570 - RNA, 19 nt, Human
cuaucugggcuuccuggag

SEQ ID NO: 1398571 - RNA, 18 nt, Human
cuaucugggcuuccugga

SEQ ID NO: 1398572 - RNA, 17 nt, Human
cuaucugggcuuccugg

SEQ ID NO: 1398573 - RNA, 16 nt, Human
cuaucugggcuuccug

SEQ ID NO: 1398574 - RNA, 15 nt, Human
cuaucugggcuuccu

SEQ ID NO: 1398575 - RNA, 14 nt, Human
cuaucugggcuucc

SEQ ID NO: 1398576 - RNA, 21 nt, Human
cuauuaggugcaauuucaagg

SEQ ID NO: 1398577 - RNA, 17 nt, Human
cuauuacauuuucagug

SEQ ID NO: 1398578 - RNA, 21 nt, Human
cuauggucgggagacagcauc

SEQ ID NO: 1398579 - RNA, 17 nt, Human
cuauggucgggagacag

SEQ ID NO: 1398580 - RNA, 20 nt, Human
cuauggguguuaucaccuag

SEQ ID NO: 1398581 - RNA, 17 nt, Human
cuauggugcucugucua

SEQ ID NO: 1398582 - RNA, 16 nt, Human
cuauggugcucugucu

SEQ ID NO: 1398583 - RNA, 14 nt, Human
cuauggugcucugu

SEQ ID NO: 1398584 - RNA, 23 nt, Human
cuauggugcucugucuacuugcu

SEQ ID NO: 1398585 - RNA, 13 nt, Human
cuauguaaacuac

SEQ ID NO: 1398586 - RNA, 23 nt, Human
cuaugcauggugccccaggacca

SEQ ID NO: 1398587 - RNA, 22 nt, Human
cuaugcauggugccccaggacc

SEQ ID NO: 1398588 - RNA, 21 nt, Human
cuaugcauggugccccaggac

SEQ ID NO: 1398589 - RNA, 20 nt, Human
cuaugcauggugccccagga

SEQ ID NO: 1398590 - RNA, 19 nt, Human
cuaugcauggugccccagg

SEQ ID NO: 1398591 - RNA, 13 nt, Human
cuaugcauggugc

SEQ ID NO: 1398592 - RNA, 23 nt, Human
cuaugauauuuucugugccugaa

SEQ ID NO: 1398593 - RNA, 17 nt, Human
cuaugagucuagauguu

SEQ ID NO: 1398594 - RNA, 19 nt, Human
cuaugagucuagauguuua

SEQ ID NO: 1398595 - RNA, 16 nt, Human
cuaugagucuagaugu

SEQ ID NO: 1398596 - RNA, 15 nt, Human
cuaugagucuagaug

SEQ ID NO: 1398597 - RNA, 14 nt, Human
cuaugagucuagau

SEQ ID NO: 1398598 - RNA, 13 nt, Human
cuaugagucuaga

SEQ ID NO: 1398599 - RNA, 14 nt, Human
cuauggagagcccu

SEQ ID NO: 1398600 - RNA, 11 nt, Human
cuauggagagc

SEQ ID NO: 1398601 - RNA, 19 nt, Human
cuaugcuuugaaacagaaa

SEQ ID NO: 1398602 - RNA, 15 nt, Human
cuauggaaagauggc

SEQ ID NO: 1398603 - RNA, 17 nt, Human
cuaugcuuugaaacaga

SEQ ID NO: 1398604 - RNA, 15 nt, Human
cuaugcuuugaaaca

SEQ ID NO: 1398605 - RNA, 11 nt, Human
cuaugcuuuga

SEQ ID NO: 1398606 - RNA, 15 nt, Human
cuaugcaugguuuca

SEQ ID NO: 1398607 - RNA, 18 nt, Human
cuaugcaugguuucagca

SEQ ID NO: 1398608 - RNA, 19 nt, Human
cuauggagagcccugggac

SEQ ID NO: 1398609 - RNA, 19 nt, Human
cuauggagugcaccaaaga

SEQ ID NO: 1398610 - RNA, 21 nt, Human
cuauggagagcccugggaccg

SEQ ID NO: 1398611 - RNA, 18 nt, Human
cuauggagagcccuggga

SEQ ID NO: 1398612 - RNA, 17 nt, Human
cuauggagagcccuggg

SEQ ID NO: 1398613 - RNA, 16 nt, Human
cuauggagagcccugg

SEQ ID NO: 1398614 - RNA, 15 nt, Human
cuauggagagcccug

SEQ ID NO: 1398615 - RNA, 13 nt, Human
cuaugggaacaau

SEQ ID NO: 1398616 - RNA, 14 nt, Human
cuauggccucaugu

SEQ ID NO: 1398617 - RNA, 13 nt, Human
cuauggccugugg

SEQ ID NO: 1398618 - RNA, 15 nt, Human
cucacucuguuuccu

SEQ ID NO: 1398619 - RNA, 18 nt, Human
cucacugcaaccuucacc

SEQ ID NO: 1398620 - RNA, 19 nt, Human
cucacuccuuuuaaagaaa

SEQ ID NO: 1398621 - RNA, 14 nt, Human
cucacucgucuccc

SEQ ID NO: 1398622 - RNA, 18 nt, Human
cucacuccuuuuaaagaa

SEQ ID NO: 1398623 - RNA, 15 nt, Human
cucacuccuuuuaaa

SEQ ID NO: 1398624 - RNA, 14 nt, Human
cucacuccuuuuaa

SEQ ID NO: 1398625 - RNA, 13 nt, Human
cucacuccuuuua

SEQ ID NO: 1398626 - RNA, 18 nt, Human
cucacccccagcuuugcu

SEQ ID NO: 1398627 - RNA, 17 nt, Human
cucacccccagcuuugc

SEQ ID NO: 1398628 - RNA, 14 nt, Human
cucacccccagcuu

SEQ ID NO: 1398629 - RNA, 17 nt, Human
cucaccauuuggauccu

SEQ ID NO: 1398630 - RNA, 22 nt, Human
cucaccauuccaagucuccacc

SEQ ID NO: 1398631 - RNA, 20 nt, Human
cucaccauuccaagucucca

SEQ ID NO: 1398632 - RNA, 12 nt, Human
cucaccauucca

SEQ ID NO: 1398633 - RNA, 13 nt, Human
cucacccagugcc

SEQ ID NO: 1398634 - RNA, 17 nt, Human
cucacccaccccugcac

SEQ ID NO: 1398635 - RNA, 22 nt, Human
cucacucagccacccugaguug

SEQ ID NO: 1398636 - RNA, 21 nt, Human
cucacucagccacccugaguu

SEQ ID NO: 1398637 - RNA, 18 nt, Human
cucacucagccacccuga

SEQ ID NO: 1398638 - RNA, 12 nt, Human
cucacucagcca

SEQ ID NO: 1398639 - RNA, 19 nt, Human
cucacucagcacuuggccc

SEQ ID NO: 1398640 - RNA, 14 nt, Human
cucacucagcacuu

SEQ ID NO: 1398641 - RNA, 18 nt, Human
cucacuccccacauccca

SEQ ID NO: 1398642 - RNA, 19 nt, Human
cucacccccagcuuugcua

SEQ ID NO: 1398643 - RNA, 16 nt, Human
cucagauccuccucau

SEQ ID NO: 1398644 - RNA, 22 nt, Human
cucagauccagggacagaggcc

SEQ ID NO: 1398645 - RNA, 20 nt, Human
cucagauccagggacagagg

SEQ ID NO: 1398646 - RNA, 18 nt, Human
cucagauccagggacaga

SEQ ID NO: 1398647 - RNA, 17 nt, Human
cucagauccagggacag

SEQ ID NO: 1398648 - RNA, 16 nt, Human
cucagauccagggaca

SEQ ID NO: 1398649 - RNA, 15 nt, Human
cucagauccagggac

SEQ ID NO: 1398650 - RNA, 14 nt, Human
cucagauccaggga

SEQ ID NO: 1398651 - RNA, 13 nt, Human
cucagauccaggg

SEQ ID NO: 1398652 - RNA, 10 nt, Human
cucagaucca

SEQ ID NO: 1398653 - RNA, 21 nt, Human
cucagaucaguguaccauuug

SEQ ID NO: 1398654 - RNA, 17 nt, Human
cucagaucaguguacca

SEQ ID NO: 1398655 - RNA, 18 nt, Human
cucagauagaaugacagu

SEQ ID NO: 1398656 - RNA, 16 nt, Human
cucagauagaaugaca

SEQ ID NO: 1398657 - RNA, 23 nt, Human
cucagauaagguaaaaugccaug

SEQ ID NO: 1398658 - RNA, 22 nt, Human
cucagauaagguaaaaugccau

SEQ ID NO: 1398659 - RNA, 21 nt, Human
cucagauaagguaaaaugcca

SEQ ID NO: 1398660 - RNA, 22 nt, Human
cucagagaccagggcuccagcc

SEQ ID NO: 1398661 - RNA, 21 nt, Human
cucagagaccagggcuccagc

SEQ ID NO: 1398662 - RNA, 16 nt, Human
cucagagaccagggcu

SEQ ID NO: 1398663 - RNA, 13 nt, Human
cucagagaccagg

SEQ ID NO: 1398664 - RNA, 19 nt, Human
cucagagacaugcagagau

SEQ ID NO: 1398665 - RNA, 17 nt, Human
cucagagacaugcagag

SEQ ID NO: 1398666 - RNA, 16 nt, Human
cucagagacaugcaga

SEQ ID NO: 1398667 - RNA, 13 nt, Human
cucagagacaugc

SEQ ID NO: 1398668 - RNA, 23 nt, Human
cucagagaauuucuaccauuuca

SEQ ID NO: 1398669 - RNA, 18 nt, Human
cucagcacuuggcccuuc

SEQ ID NO: 1398670 - RNA, 16 nt, Human
cucagcacuuggcccu

SEQ ID NO: 1398671 - RNA, 15 nt, Human
cucagcacuuggccc

SEQ ID NO: 1398672 - RNA, 14 nt, Human
cucagcacuuggcc

SEQ ID NO: 1398673 - RNA, 13 nt, Human
cucagcacuuggc

SEQ ID NO: 1398674 - RNA, 21 nt, Human
cucagcacugccugcucccau

SEQ ID NO: 1398675 - RNA, 19 nt, Human
cucagcacugccugcuccc

SEQ ID NO: 1398676 - RNA, 18 nt, Human
cucagcacugccugcucc

SEQ ID NO: 1398677 - RNA, 17 nt, Human
cucagcacugccugcuc

SEQ ID NO: 1398678 - RNA, 16 nt, Human
cucagcacugccugcu

SEQ ID NO: 1398679 - RNA, 15 nt, Human
cucagcacugccugc

SEQ ID NO: 1398680 - RNA, 13 nt, Human
cucagcacugccu

SEQ ID NO: 1398681 - RNA, 17 nt, Human
cucagcacuuggcccuu

SEQ ID NO: 1398682 - RNA, 14 nt, Human
cucagauccuccuc

SEQ ID NO: 1398683 - RNA, 16 nt, Human
cucagauuccuuccca

SEQ ID NO: 1398684 - RNA, 14 nt, Human
cucagauuccuucc

SEQ ID NO: 1398685 - RNA, 22 nt, Human
cucagauuguaauauguaaaug

SEQ ID NO: 1398686 - RNA, 15 nt, Human
cucagauuguaauau

SEQ ID NO: 1398687 - RNA, 24 nt, Human
cucagauuccuucccauggaggga

SEQ ID NO: 1398688 - RNA, 21 nt, Human
cucagauuccuucccauggag

SEQ ID NO: 1398689 - RNA, 20 nt, Human
cucagauuccuucccaugga

SEQ ID NO: 1398690 - RNA, 17 nt, Human
cucagauuccuucccau

SEQ ID NO: 1398691 - RNA, 16 nt, Human
cucagauuucugagga

SEQ ID NO: 1398692 - RNA, 17 nt, Human
cucagauuucugaggaa

SEQ ID NO: 1398693 - RNA, 20 nt, Human
cucagcacaaggccaucugg

SEQ ID NO: 1398694 - RNA, 14 nt, Human
cucagcacaaggcc

SEQ ID NO: 1398695 - RNA, 20 nt, Human
cucaccaggcagccucuggg

SEQ ID NO: 1398696 - RNA, 21 nt, Human
cucaccaggcagccucugggg

SEQ ID NO: 1398697 - RNA, 19 nt, Human
cucaccaggcagccucugg

SEQ ID NO: 1398698 - RNA, 18 nt, Human
cucaccaggcagccucug

SEQ ID NO: 1398699 - RNA, 21 nt, Human
cucaccacugcccccugcugc

SEQ ID NO: 1398700 - RNA, 17 nt, Human
cucaccacugcccccug

SEQ ID NO: 1398701 - RNA, 16 nt, Human
cucaccacggaccaaa

SEQ ID NO: 1398702 - RNA, 13 nt, Human
cucaccaacuccu

SEQ ID NO: 1398703 - RNA, 12 nt, Human
cucacauuuaug

SEQ ID NO: 1398704 - RNA, 22 nt, Human
cucacaguauugcucacccagu

SEQ ID NO: 1398705 - RNA, 15 nt, Human
cucacaggucccaaa

SEQ ID NO: 1398706 - RNA, 16 nt, Human
cucacaggucccaaau

SEQ ID NO: 1398707 - RNA, 21 nt, Human
cucacaccacuagccucaggg

SEQ ID NO: 1398708 - RNA, 20 nt, Human
cucacaccacuagccucagg

SEQ ID NO: 1398709 - RNA, 17 nt, Human
cucacaccacuagccuc

SEQ ID NO: 1398710 - RNA, 23 nt, Human
cucacaccaggcuugccugcagg

SEQ ID NO: 1398711 - RNA, 21 nt, Human
cucaagucuuucucuuucccu

SEQ ID NO: 1398712 - RNA, 16 nt, Human
cucaagucuuucucuu

SEQ ID NO: 1398713 - RNA, 15 nt, Human
cucaagucuuucucu

SEQ ID NO: 1398714 - RNA, 15 nt, Human
cucaagagaucccaa

SEQ ID NO: 1398715 - RNA, 19 nt, Human
cucaagagaucccaaguag

SEQ ID NO: 1398716 - RNA, 23 nt, Human
cucaagacccuuuuggguuucug

SEQ ID NO: 1398717 - RNA, 23 nt, Human
cucaagaaauaaaaggaagccaa

SEQ ID NO: 1398718 - RNA, 22 nt, Human
cucaagaaauaaaaggaagcca

SEQ ID NO: 1398719 - RNA, 17 nt, Human
cucaacaggccucaggg

SEQ ID NO: 1398720 - RNA, 12 nt, Human
cucaaccucauc

SEQ ID NO: 1398721 - RNA, 21 nt, Human
cucaagaaauaaaaggaagcc

SEQ ID NO: 1398722 - RNA, 13 nt, Human
cucaaccucaucc

SEQ ID NO: 1398723 - RNA, 21 nt, Human
cuauucgccacacaguauuuu

SEQ ID NO: 1398724 - RNA, 17 nt, Human
cuauuccgagcccuuag

SEQ ID NO: 1398725 - RNA, 19 nt, Human
cuauuccagcugucccccc

SEQ ID NO: 1398726 - RNA, 16 nt, Human
cuauuccagcuguccc

SEQ ID NO: 1398727 - RNA, 17 nt, Human
cuauuuauauguacaug

SEQ ID NO: 1398728 - RNA, 16 nt, Human
cuauuucacuggagca

SEQ ID NO: 1398729 - RNA, 15 nt, Human
cuauuucacuggagc

SEQ ID NO: 1398730 - RNA, 22 nt, Human
cuauugugcaauguaaauauuu

SEQ ID NO: 1398731 - RNA, 18 nt, Human
cucaacaggccucagggc

SEQ ID NO: 1398732 - RNA, 16 nt, Human
cucaacaggccucagg

SEQ ID NO: 1398733 - RNA, 15 nt, Human
cucaacaggccucag

SEQ ID NO: 1398734 - RNA, 14 nt, Human
cucaacaggccuca

SEQ ID NO: 1398735 - RNA, 14 nt, Human
cucaacacccaguu

SEQ ID NO: 1398736 - RNA, 13 nt, Human
cucaacacccagu

SEQ ID NO: 1398737 - RNA, 23 nt, Human
cucaacaccaugauuccuuuaac

SEQ ID NO: 1398738 - RNA, 17 nt, Human
cucaaaugaugggaagu

SEQ ID NO: 1398739 - RNA, 20 nt, Human
cucaacacccaacugucucg

SEQ ID NO: 1398740 - RNA, 22 nt, Human
cucaacaccaugauuccuuuaa

SEQ ID NO: 1398741 - RNA, 21 nt, Human
cucaacaccaugauuccuuua

SEQ ID NO: 1398742 - RNA, 19 nt, Human
cucaacaccaugauuccuu

SEQ ID NO: 1398743 - RNA, 16 nt, Human
cucaacaccaugauuc

SEQ ID NO: 1398744 - RNA, 22 nt, Human
cucaaaugcggggugggggcag

SEQ ID NO: 1398745 - RNA, 22 nt, Human
cucaaaugaguaacauuugcug

SEQ ID NO: 1398746 - RNA, 21 nt, Human
cucaaaugaguaacauuugcu

SEQ ID NO: 1398747 - RNA, 20 nt, Human
cucaaaugaguaacauuugc

SEQ ID NO: 1398748 - RNA, 16 nt, Human
cucaaaugaguaacau

SEQ ID NO: 1398749 - RNA, 19 nt, Human
cucaaaucguccagcgacc

SEQ ID NO: 1398750 - RNA, 23 nt, Human
cucaaauacgugggcauucaaau

SEQ ID NO: 1398751 - RNA, 17 nt, Human
cuauuucauguuuuuga

SEQ ID NO: 1398752 - RNA, 15 nt, Human
cuauuucauguuuuu

SEQ ID NO: 1398753 - RNA, 17 nt, Human
cuauuucacuggagcac

SEQ ID NO: 1398754 - RNA, 22 nt, Human
cucugggcuggaugagcuccca

SEQ ID NO: 1398755 - RNA, 21 nt, Human
cucugggcuggaugagcuccc

SEQ ID NO: 1398756 - RNA, 20 nt, Human
cucugggcuggaugagcucc

SEQ ID NO: 1398757 - RNA, 19 nt, Human
cucugggcuggaugagcuc

SEQ ID NO: 1398758 - RNA, 16 nt, Human
cucugggcuggaugag

SEQ ID NO: 1398759 - RNA, 15 nt, Human
cucugggcuggauga

SEQ ID NO: 1398760 - RNA, 13 nt, Human
cucugggcucuga

SEQ ID NO: 1398761 - RNA, 15 nt, Human
cucugggcucugagu

SEQ ID NO: 1398762 - RNA, 11 nt, Human
cucugggcucu

SEQ ID NO: 1398763 - RNA, 20 nt, Human
cucugggccauucuccacag

SEQ ID NO: 1398764 - RNA, 21 nt, Human
cucugggggcugaggagcagc

SEQ ID NO: 1398765 - RNA, 16 nt, Human
cucugucuuguguuuc

SEQ ID NO: 1398766 - RNA, 15 nt, Human
cucugucuuguguuu

SEQ ID NO: 1398767 - RNA, 19 nt, Human
cucugucuacuugcucagg

SEQ ID NO: 1398768 - RNA, 18 nt, Human
cucugucgcccaugcugg

SEQ ID NO: 1398769 - RNA, 20 nt, Human
cucugucgcccaugcuggag

SEQ ID NO: 1398770 - RNA, 16 nt, Human
cucugggggcugagga

SEQ ID NO: 1398771 - RNA, 23 nt, Human
cucuggcauuagaauuauuuaaa

SEQ ID NO: 1398772 - RNA, 20 nt, Human
cucuggcauuagaauuauuu

SEQ ID NO: 1398773 - RNA, 13 nt, Human
cucuggcagccac

SEQ ID NO: 1398774 - RNA, 11 nt, Human
cucuggcagcc

SEQ ID NO: 1398775 - RNA, 19 nt, Human
cucuggcauuagaauuauu

SEQ ID NO: 1398776 - RNA, 18 nt, Human
cucuggcauuagaauuau

SEQ ID NO: 1398777 - RNA, 16 nt, Human
cucuggcagccacacu

SEQ ID NO: 1398778 - RNA, 15 nt, Human
cucuggcagccacac

SEQ ID NO: 1398779 - RNA, 14 nt, Human
cucuggcagccaca

SEQ ID NO: 1398780 - RNA, 15 nt, Human
cucugccuacagaac

SEQ ID NO: 1398781 - RNA, 13 nt, Human
cucugccaguccu

SEQ ID NO: 1398782 - RNA, 19 nt, Human
cucuggauuauauuaugaa

SEQ ID NO: 1398783 - RNA, 20 nt, Human
cucuggauuauauuaugaag

SEQ ID NO: 1398784 - RNA, 21 nt, Human
cucuuccuuacuuuuuauaua

SEQ ID NO: 1398785 - RNA, 15 nt, Human
cucuuccuucccugc

SEQ ID NO: 1398786 - RNA, 16 nt, Human
cucuuccuuuuaucag

SEQ ID NO: 1398787 - RNA, 23 nt, Human
cucuuccuugaagaacugcaggc

SEQ ID NO: 1398788 - RNA, 19 nt, Human
cucuuccuucccugcugug

SEQ ID NO: 1398789 - RNA, 19 nt, Human
cucuucuauuuuguaaacu

SEQ ID NO: 1398790 - RNA, 17 nt, Human
cucuucuauuuuguaaa

SEQ ID NO: 1398791 - RNA, 22 nt, Human
cucuucuacucacuuuucccac

SEQ ID NO: 1398792 - RNA, 18 nt, Human
cucuucuacucacuuuuc

SEQ ID NO: 1398793 - RNA, 14 nt, Human
cucuucuacucacu

SEQ ID NO: 1398794 - RNA, 13 nt, Human
cucuuccuuucuu

SEQ ID NO: 1398795 - RNA, 16 nt, Human
cucuucccccucuccc

SEQ ID NO: 1398796 - RNA, 15 nt, Human
cucuucccccucucc

SEQ ID NO: 1398797 - RNA, 15 nt, Human
cucuucccccaagau

SEQ ID NO: 1398798 - RNA, 15 nt, Human
cucuucccccaccac

SEQ ID NO: 1398799 - RNA, 14 nt, Human
cucuucccccaaga

SEQ ID NO: 1398800 - RNA, 22 nt, Human
cucuuccccagacgccuggcug

SEQ ID NO: 1398801 - RNA, 21 nt, Human
cucuuccccagacgccuggcu

SEQ ID NO: 1398802 - RNA, 16 nt, Human
cucuuccccagacgcc

SEQ ID NO: 1398803 - RNA, 14 nt, Human
cucuuccccagacg

SEQ ID NO: 1398804 - RNA, 16 nt, Human
cucuuccaugcugugc

SEQ ID NO: 1398805 - RNA, 12 nt, Human
cucuuccccaga

SEQ ID NO: 1398806 - RNA, 15 nt, Human
cucuuccaugcugug

SEQ ID NO: 1398807 - RNA, 14 nt, Human
cucuuccaugcugu

SEQ ID NO: 1398808 - RNA, 12 nt, Human
cucuuaauugcc

SEQ ID NO: 1398809 - RNA, 14 nt, Human
cucuuccaguuugc

SEQ ID NO: 1398810 - RNA, 23 nt, Human
cucuuaauugccaccucuaacag

SEQ ID NO: 1398811 - RNA, 19 nt, Human
cucuucccccucucccagu

SEQ ID NO: 1398812 - RNA, 20 nt, Human
cucuucccccucucccaguu

SEQ ID NO: 1398813 - RNA, 18 nt, Human
cucuucccccucucccag

SEQ ID NO: 1398814 - RNA, 17 nt, Human
cucuucccccucuccca

SEQ ID NO: 1398815 - RNA, 13 nt, Human
cucuuccucuucc

SEQ ID NO: 1398816 - RNA, 19 nt, Human
cucugugaccaaugucuug

SEQ ID NO: 1398817 - RNA, 18 nt, Human
cucugugaccaaugucuu

SEQ ID NO: 1398818 - RNA, 17 nt, Human
cucugugaccaaugucu

SEQ ID NO: 1398819 - RNA, 15 nt, Human
cucugugaccaaugu

SEQ ID NO: 1398820 - RNA, 14 nt, Human
cucugugaccaaug

SEQ ID NO: 1398821 - RNA, 21 nt, Human
cucuguugccaggcuggagug

SEQ ID NO: 1398822 - RNA, 17 nt, Human
cucugugugcacaaaua

SEQ ID NO: 1398823 - RNA, 15 nt, Human
cucugugugcacaaa

SEQ ID NO: 1398824 - RNA, 23 nt, Human
cucugugucuaagauucuagauc

SEQ ID NO: 1398825 - RNA, 22 nt, Human
cucugugucuaagauucuagau

SEQ ID NO: 1398826 - RNA, 21 nt, Human
cucugugucuaagauucuaga

SEQ ID NO: 1398827 - RNA, 19 nt, Human
cucugugucuaagauucua

SEQ ID NO: 1398828 - RNA, 18 nt, Human
cucugugucuaagauucu

SEQ ID NO: 1398829 - RNA, 15 nt, Human
cucugugucuaagau

SEQ ID NO: 1398830 - RNA, 16 nt, Human
cucuguuuuacaaguu

SEQ ID NO: 1398831 - RNA, 21 nt, Human
cucuguugucguaaagauuug

SEQ ID NO: 1398832 - RNA, 23 nt, Human
cucuguuuuacaaguuggaguca

SEQ ID NO: 1398833 - RNA, 22 nt, Human
cucuguuuuacaaguuggaguc

SEQ ID NO: 1398834 - RNA, 20 nt, Human
cucuguuuuacaaguuggag

SEQ ID NO: 1398835 - RNA, 19 nt, Human
cucuuaagaagacugcauu

SEQ ID NO: 1398836 - RNA, 22 nt, Human
cucugaggugccugucccaccc

SEQ ID NO: 1398837 - RNA, 19 nt, Human
cucugaggugccuguccca

SEQ ID NO: 1398838 - RNA, 15 nt, Human
cucugaggugccugu

SEQ ID NO: 1398839 - RNA, 12 nt, Human
cucugaggacaa

SEQ ID NO: 1398840 - RNA, 17 nt, Human
cucugagagucuagauu

SEQ ID NO: 1398841 - RNA, 16 nt, Human
cucugagcugugcagg

SEQ ID NO: 1398842 - RNA, 16 nt, Human
cucugagagucuagau

SEQ ID NO: 1398843 - RNA, 15 nt, Human
cucugagagucuaga

SEQ ID NO: 1398844 - RNA, 13 nt, Human
cucugagagucua

SEQ ID NO: 1398845 - RNA, 18 nt, Human
cucugagaggcccuggau

SEQ ID NO: 1398846 - RNA, 17 nt, Human
cucugagaggcccugga

SEQ ID NO: 1398847 - RNA, 16 nt, Human
cucugagaggcccugg

SEQ ID NO: 1398848 - RNA, 15 nt, Human
cucugagaggcccug

SEQ ID NO: 1398849 - RNA, 14 nt, Human
cucugagaggcccu

SEQ ID NO: 1398850 - RNA, 13 nt, Human
cucugagaggccc

SEQ ID NO: 1398851 - RNA, 14 nt, Human
cucugaccugcacu

SEQ ID NO: 1398852 - RNA, 12 nt, Human
cucugaccugca

SEQ ID NO: 1398853 - RNA, 23 nt, Human
cucugacauuaugugguuuuaga

SEQ ID NO: 1398854 - RNA, 23 nt, Human
cucugacagcagcaucucuaccu

SEQ ID NO: 1398855 - RNA, 18 nt, Human
cucugacagcagcaucuc

SEQ ID NO: 1398856 - RNA, 17 nt, Human
cucugacagcagcaucu

SEQ ID NO: 1398857 - RNA, 14 nt, Human
cucugacagcagca

SEQ ID NO: 1398858 - RNA, 13 nt, Human
cucugacagcagc

SEQ ID NO: 1398859 - RNA, 12 nt, Human
cucugacagcag

SEQ ID NO: 1398860 - RNA, 16 nt, Human
cucugacucagggcuc

SEQ ID NO: 1398861 - RNA, 15 nt, Human
cucugacucagggcu

SEQ ID NO: 1398862 - RNA, 14 nt, Human
cucugacucagggc

SEQ ID NO: 1398863 - RNA, 15 nt, Human
cucugaccugcacug

SEQ ID NO: 1398864 - RNA, 21 nt, Human
cucugacucagggcuccuggg

SEQ ID NO: 1398865 - RNA, 20 nt, Human
cucugacucagggcuccugg

SEQ ID NO: 1398866 - RNA, 17 nt, Human
cucugacucagggcucc

SEQ ID NO: 1398867 - RNA, 12 nt, Human
cucgcugccagc

SEQ ID NO: 1398868 - RNA, 19 nt, Human
cucugaauuugagauacaa

SEQ ID NO: 1398869 - RNA, 19 nt, Human
cucugaaggguaauuauau

SEQ ID NO: 1398870 - RNA, 20 nt, Human
cucugcccaacccuucccuc

SEQ ID NO: 1398871 - RNA, 14 nt, Human
cucugcccaacccu

SEQ ID NO: 1398872 - RNA, 18 nt, Human
cucugccaguccuguccu

SEQ ID NO: 1398873 - RNA, 14 nt, Human
cucugcccgggagc

SEQ ID NO: 1398874 - RNA, 20 nt, Human
cucugcccgggagcucagga

SEQ ID NO: 1398875 - RNA, 20 nt, Human
cucugccagugacagacagg

SEQ ID NO: 1398876 - RNA, 15 nt, Human
cucugccagugacag

SEQ ID NO: 1398877 - RNA, 14 nt, Human
cucugccagugaca

SEQ ID NO: 1398878 - RNA, 13 nt, Human
cucugccagugac

SEQ ID NO: 1398879 - RNA, 17 nt, Human
cucugccaguccugucc

SEQ ID NO: 1398880 - RNA, 15 nt, Human
cucugccaguccugu

SEQ ID NO: 1398881 - RNA, 14 nt, Human
cucugccaguccug

SEQ ID NO: 1398882 - RNA, 21 nt, Human
cucugccaaaggaugugauau

SEQ ID NO: 1398883 - RNA, 19 nt, Human
cucugccaaaggaugugau

SEQ ID NO: 1398884 - RNA, 14 nt, Human
cucugccaaaggau

SEQ ID NO: 1398885 - RNA, 15 nt, Human
cucugcauucuagua

SEQ ID NO: 1398886 - RNA, 14 nt, Human
cucugcauucuagu

SEQ ID NO: 1398887 - RNA, 20 nt, Human
cucugcauccucuggagcca

SEQ ID NO: 1398888 - RNA, 18 nt, Human
cucugcauccucuggagc

SEQ ID NO: 1398889 - RNA, 17 nt, Human
cucugcauccucuggag

SEQ ID NO: 1398890 - RNA, 21 nt, Human
cucugcaggucccuaauaaag

SEQ ID NO: 1398891 - RNA, 22 nt, Human
cucugcaggucccuaauaaagc

SEQ ID NO: 1398892 - RNA, 19 nt, Human
cucugcaggucccuaauaa

SEQ ID NO: 1398893 - RNA, 20 nt, Human
cucugcaggucccuaauaaa

SEQ ID NO: 1398894 - RNA, 14 nt, Human
cucugauaagagaa

SEQ ID NO: 1398895 - RNA, 22 nt, Human
cucugaguguuuuaugagaaag

SEQ ID NO: 1398896 - RNA, 19 nt, Human
cucugaguguuuuaugaga

SEQ ID NO: 1398897 - RNA, 17 nt, Human
cucugaguguuuuauga

SEQ ID NO: 1398898 - RNA, 12 nt, Human
cucugaguguga

SEQ ID NO: 1398899 - RNA, 15 nt, Human
cucugauacagaaaa

SEQ ID NO: 1398900 - RNA, 23 nt, Human
cucuucugagcuauuucaucuau

SEQ ID NO: 1398901 - RNA, 22 nt, Human
cucuucugagcuauuucaucua

SEQ ID NO: 1398902 - RNA, 21 nt, Human
cucuucugagcuauuucaucu

SEQ ID NO: 1398903 - RNA, 18 nt, Human
cucuucugagcuauuuca

SEQ ID NO: 1398904 - RNA, 15 nt, Human
cucuucugagcuauu

SEQ ID NO: 1398905 - RNA, 10 nt, Human
cucuucugaa

SEQ ID NO: 1398906 - RNA, 16 nt, Human
cucuucugaauaaagc

SEQ ID NO: 1398907 - RNA, 19 nt, Human
cucuucugaauaaagcaau

SEQ ID NO: 1398908 - RNA, 12 nt, Human
cucuucugagcu

SEQ ID NO: 1398909 - RNA, 20 nt, Human
cucuucugaauaaagcaauu

SEQ ID NO: 1398910 - RNA, 21 nt, Human
cucuuuuacccuggccccucu

SEQ ID NO: 1398911 - RNA, 23 nt, Human
cucuuuuacccuggccccucucc

SEQ ID NO: 1398912 - RNA, 20 nt, Human
cucuuuuacccuggccccuc

SEQ ID NO: 1398913 - RNA, 14 nt, Human
cucuuuuacccugg

SEQ ID NO: 1398914 - RNA, 20 nt, Human
cucuuuguuuugugucucuu

SEQ ID NO: 1398915 - RNA, 18 nt, Human
cucuuuguuuugugucuc

SEQ ID NO: 1398916 - RNA, 12 nt, Human
cucuuuguaaga

SEQ ID NO: 1398917 - RNA, 18 nt, Human
cucuuuguuauuugaaaa

SEQ ID NO: 1398918 - RNA, 16 nt, Human
cugaacaagaauugga

SEQ ID NO: 1398919 - RNA, 14 nt, Human
cugaacaagaauug

SEQ ID NO: 1398920 - RNA, 13 nt, Human
cugaacaagaauu

SEQ ID NO: 1398921 - RNA, 12 nt, Human
cugaacaagaau

SEQ ID NO: 1398922 - RNA, 19 nt, Human
cugaaauuuuucuucuuga

SEQ ID NO: 1398923 - RNA, 16 nt, Human
cugaaauuuuucuucu

SEQ ID NO: 1398924 - RNA, 20 nt, Human
cugaaauuuuucuucuugag

SEQ ID NO: 1398925 - RNA, 22 nt, Human
cugaaauuuuauaugcuuacug

SEQ ID NO: 1398926 - RNA, 18 nt, Human
cugaaauuccaaagucuc

SEQ ID NO: 1398927 - RNA, 19 nt, Human
cugaaauucuccuggaggu

SEQ ID NO: 1398928 - RNA, 18 nt, Human
cugaaauucuccuggagg

SEQ ID NO: 1398929 - RNA, 17 nt, Human
cugaaauucuccuggag

SEQ ID NO: 1398930 - RNA, 16 nt, Human
cugaaauucuccugga

SEQ ID NO: 1398931 - RNA, 15 nt, Human
cugaaauucuccugg

SEQ ID NO: 1398932 - RNA, 14 nt, Human
cugaaauucuccug

SEQ ID NO: 1398933 - RNA, 20 nt, Human
cugaaauuccaaagucucua

SEQ ID NO: 1398934 - RNA, 17 nt, Human
cugaaauuccaaagucu

SEQ ID NO: 1398935 - RNA, 16 nt, Human
cugaaauuccaaaguc

SEQ ID NO: 1398936 - RNA, 15 nt, Human
cugaaauuccaaagu

SEQ ID NO: 1398937 - RNA, 14 nt, Human
cugaaauuccaaag

SEQ ID NO: 1398938 - RNA, 13 nt, Human
cugaaauuccaaa

SEQ ID NO: 1398939 - RNA, 12 nt, Human
cugaaauuccaa

SEQ ID NO: 1398940 - RNA, 20 nt, Human
cugaaauaaacgucuuaaau

SEQ ID NO: 1398941 - RNA, 20 nt, Human
cugaacaucugaguccugga

SEQ ID NO: 1398942 - RNA, 23 nt, Human
cugaacaucugaguccuggauga

SEQ ID NO: 1398943 - RNA, 19 nt, Human
cugaacaucugaguccugg

SEQ ID NO: 1398944 - RNA, 15 nt, Human
cugaacaucugaguc

SEQ ID NO: 1398945 - RNA, 11 nt, Human
cugaacaccau

SEQ ID NO: 1398946 - RNA, 15 nt, Human
cugaaccccagggcu

SEQ ID NO: 1398947 - RNA, 14 nt, Human
cugaaccccagggc

SEQ ID NO: 1398948 - RNA, 16 nt, Human
cugaaccccagggcug

SEQ ID NO: 1398949 - RNA, 12 nt, Human
cugaacuuugcu

SEQ ID NO: 1398950 - RNA, 22 nt, Human
cugaagaaccaguccccccacc

SEQ ID NO: 1398951 - RNA, 15 nt, Human
cugaagaaccagucc

SEQ ID NO: 1398952 - RNA, 14 nt, Human
cugaagaaccaguc

SEQ ID NO: 1398953 - RNA, 13 nt, Human
cugaacuuugcug

SEQ ID NO: 1398954 - RNA, 14 nt, Human
cugaacuuugcuga

SEQ ID NO: 1398955 - RNA, 21 nt, Human
cugaacuuugcugagccugua

SEQ ID NO: 1398956 - RNA, 14 nt, Human
cugaagaagauggu

SEQ ID NO: 1398957 - RNA, 13 nt, Human
cugaauaaagcaa

SEQ ID NO: 1398958 - RNA, 14 nt, Human
cugaauaaagcaau

SEQ ID NO: 1398959 - RNA, 22 nt, Human
cugaaugucauugaaaaacuaa

SEQ ID NO: 1398960 - RNA, 20 nt, Human
cugaaugcuucuaaguaaau

SEQ ID NO: 1398961 - RNA, 18 nt, Human
cugaaugcuucuaaguaa

SEQ ID NO: 1398962 - RNA, 15 nt, Human
cugaaugcuucuaag

SEQ ID NO: 1398963 - RNA, 14 nt, Human
cugaaugcuucuaa

SEQ ID NO: 1398964 - RNA, 13 nt, Human
cugaaugcuucua

SEQ ID NO: 1398965 - RNA, 20 nt, Human
cugaaugaggucagcauguc

SEQ ID NO: 1398966 - RNA, 18 nt, Human
cugaauaaaguguaacaa

SEQ ID NO: 1398967 - RNA, 15 nt, Human
cugaauaaagcaauu

SEQ ID NO: 1398968 - RNA, 20 nt, Human
cugaauguuuuucuaaagga

SEQ ID NO: 1398969 - RNA, 23 nt, Human
cugaauguuuuucuaaaggaguu

SEQ ID NO: 1398970 - RNA, 18 nt, Human
cugaauguuuuucuaaag

SEQ ID NO: 1398971 - RNA, 17 nt, Human
cugaauguuuuucuaaa

SEQ ID NO: 1398972 - RNA, 16 nt, Human
cugaauguuuuucuaa

SEQ ID NO: 1398973 - RNA, 15 nt, Human
cugaauguuuuucua

SEQ ID NO: 1398974 - RNA, 14 nt, Human
cugaauguuuuucu

SEQ ID NO: 1398975 - RNA, 19 nt, Human
cugaauguugggacugcua

SEQ ID NO: 1398976 - RNA, 16 nt, Human
cugaauguugggacug

SEQ ID NO: 1398977 - RNA, 15 nt, Human
cugaauguugggacu

SEQ ID NO: 1398978 - RNA, 12 nt, Human
cugaauuauuuu

SEQ ID NO: 1398979 - RNA, 12 nt, Human
cugaauuucuuu

SEQ ID NO: 1398980 - RNA, 15 nt, Human
cugaauuaugaaacu

SEQ ID NO: 1398981 - RNA, 14 nt, Human
cugaauuaugaaac

SEQ ID NO: 1398982 - RNA, 17 nt, Human
cugaauuaucuauuuca

SEQ ID NO: 1398983 - RNA, 13 nt, Human
cugaauuaugaaa

SEQ ID NO: 1398984 - RNA, 16 nt, Human
cugagcacugccagga

SEQ ID NO: 1398985 - RNA, 15 nt, Human
cugagcacugccagg

SEQ ID NO: 1398986 - RNA, 14 nt, Human
cugagcacugccag

SEQ ID NO: 1398987 - RNA, 13 nt, Human
cugagcacugcca

SEQ ID NO: 1398988 - RNA, 18 nt, Human
cugagcagcgagccugcu

SEQ ID NO: 1398989 - RNA, 17 nt, Human
cugagcagcgagccugc

SEQ ID NO: 1398990 - RNA, 16 nt, Human
cugagcagcgagccug

SEQ ID NO: 1398991 - RNA, 22 nt, Human
cugagcacugccaggagggaca

SEQ ID NO: 1398992 - RNA, 18 nt, Human
cugagcacugccaggagg

SEQ ID NO: 1398993 - RNA, 17 nt, Human
cugagcacugccaggag

SEQ ID NO: 1398994 - RNA, 12 nt, Human
cugagcacuguu

SEQ ID NO: 1398995 - RNA, 19 nt, Human
cugagcacugccaggaggg

SEQ ID NO: 1398996 - RNA, 20 nt, Human
cugagcacuguuuauacacu

SEQ ID NO: 1398997 - RNA, 16 nt, Human
cugagcacuguuuaua

SEQ ID NO: 1398998 - RNA, 20 nt, Human
cugagcagugaaugauucag

SEQ ID NO: 1398999 - RNA, 22 nt, Human
cugagcaguccuuggccugcua

SEQ ID NO: 1399000 - RNA, 21 nt, Human
cugagcaguccuuggccugcu

SEQ ID NO: 1399001 - RNA, 18 nt, Human
cugagcaguccuuggccu

SEQ ID NO: 1399002 - RNA, 17 nt, Human
cugagcaguccuuggcc

SEQ ID NO: 1399003 - RNA, 15 nt, Human
cugagcaguccuugg

SEQ ID NO: 1399004 - RNA, 23 nt, Human
cugagcagggccggggaacuggc

SEQ ID NO: 1399005 - RNA, 12 nt, Human
cugagcagggcc

SEQ ID NO: 1399006 - RNA, 15 nt, Human
cugagcaggccacac

SEQ ID NO: 1399007 - RNA, 23 nt, Human
cugagcaggccacacuucaaacu

SEQ ID NO: 1399008 - RNA, 13 nt, Human
cugagcaggccac

SEQ ID NO: 1399009 - RNA, 12 nt, Human
cugagcaggcca

SEQ ID NO: 1399010 - RNA, 21 nt, Human
cugagcagggccggggaacug

SEQ ID NO: 1399011 - RNA, 17 nt, Human
cugagcagggccgggga

SEQ ID NO: 1399012 - RNA, 16 nt, Human
cugagcagggccgggg

SEQ ID NO: 1399013 - RNA, 13 nt, Human
cugagcagggccg

SEQ ID NO: 1399014 - RNA, 22 nt, Human
cugagcccagggaggccgaagc

SEQ ID NO: 1399015 - RNA, 17 nt, Human
cugagcccagggaggcc

SEQ ID NO: 1399016 - RNA, 16 nt, Human
cugagcccagggaggc

SEQ ID NO: 1399017 - RNA, 15 nt, Human
cugagcccagggagg

SEQ ID NO: 1399018 - RNA, 14 nt, Human
cugagcccagggag

SEQ ID NO: 1399019 - RNA, 13 nt, Human
cugagcccaggga

SEQ ID NO: 1399020 - RNA, 12 nt, Human
cugagcccaggg

SEQ ID NO: 1399021 - RNA, 20 nt, Human
cugagcaacucuugauuauc

SEQ ID NO: 1399022 - RNA, 23 nt, Human
cugagcaacgcuauuccagcugu

SEQ ID NO: 1399023 - RNA, 20 nt, Human
cugagcaacgcuauuccagc

SEQ ID NO: 1399024 - RNA, 19 nt, Human
cugagcaacgcuauuccag

SEQ ID NO: 1399025 - RNA, 19 nt, Human
cugagauuuauuaaagaaa

SEQ ID NO: 1399026 - RNA, 18 nt, Human
cugagauuuauuaaagaa

SEQ ID NO: 1399027 - RNA, 17 nt, Human
cugagauuuauuaaaga

SEQ ID NO: 1399028 - RNA, 15 nt, Human
cugagauuuauuaaa

SEQ ID NO: 1399029 - RNA, 14 nt, Human
cugagauuuauuaa

SEQ ID NO: 1399030 - RNA, 12 nt, Human
cugacugggagu

SEQ ID NO: 1399031 - RNA, 18 nt, Human
cugacugggaccaggcac

SEQ ID NO: 1399032 - RNA, 18 nt, Human
cugacucgguuucuccaa

SEQ ID NO: 1399033 - RNA, 17 nt, Human
cugacucgguuucucca

SEQ ID NO: 1399034 - RNA, 16 nt, Human
cugacucgguuucucc

SEQ ID NO: 1399035 - RNA, 15 nt, Human
cugacucgguuucuc

SEQ ID NO: 1399036 - RNA, 16 nt, Human
cugacucauucugaag

SEQ ID NO: 1399037 - RNA, 21 nt, Human
cugacucagggcuccuggguu

SEQ ID NO: 1399038 - RNA, 19 nt, Human
cugacucagggcuccuggg

SEQ ID NO: 1399039 - RNA, 18 nt, Human
cugacucagggcuccugg

SEQ ID NO: 1399040 - RNA, 16 nt, Human
cugacucagggcuccu

SEQ ID NO: 1399041 - RNA, 22 nt, Human
cugacuaaacuuuuuuucugua

SEQ ID NO: 1399042 - RNA, 19 nt, Human
cugacuaaacuuuuuuucu

SEQ ID NO: 1399043 - RNA, 15 nt, Human
cugacuaaacuuuuu

SEQ ID NO: 1399044 - RNA, 14 nt, Human
cugacuaaacuuuu

SEQ ID NO: 1399045 - RNA, 21 nt, Human
cugagaaaagcuuugaacccu

SEQ ID NO: 1399046 - RNA, 19 nt, Human
cugacuuugcuugcuuuga

SEQ ID NO: 1399047 - RNA, 18 nt, Human
cugacuuugcuugcuuug

SEQ ID NO: 1399048 - RNA, 17 nt, Human
cugacuuugcuugcuuu

SEQ ID NO: 1399049 - RNA, 16 nt, Human
cugacuuugcuugcuu

SEQ ID NO: 1399050 - RNA, 15 nt, Human
cugacuuugcuugcu

SEQ ID NO: 1399051 - RNA, 14 nt, Human
cugacuuugcuugc

SEQ ID NO: 1399052 - RNA, 18 nt, Human
cugacuguagcuuuggaa

SEQ ID NO: 1399053 - RNA, 13 nt, Human
cugacuguagcuu

SEQ ID NO: 1399054 - RNA, 16 nt, Human
cugacggaguccugug

SEQ ID NO: 1399055 - RNA, 21 nt, Human
cugacggccagggagaagcuc

SEQ ID NO: 1399056 - RNA, 20 nt, Human
cugacggccagggagaagcu

SEQ ID NO: 1399057 - RNA, 19 nt, Human
cugacggccagggagaagc

SEQ ID NO: 1399058 - RNA, 15 nt, Human
cugacggccagggag

SEQ ID NO: 1399059 - RNA, 14 nt, Human
cugacggacucaug

SEQ ID NO: 1399060 - RNA, 19 nt, Human
cugaccagcugcuccgagg

SEQ ID NO: 1399061 - RNA, 16 nt, Human
cugaccagcugcuccg

SEQ ID NO: 1399062 - RNA, 23 nt, Human
cugacgacuugagugcucaguag

SEQ ID NO: 1399063 - RNA, 13 nt, Human
cugaccagcugcu

SEQ ID NO: 1399064 - RNA, 22 nt, Human
cugaccagcucccccucccucc

SEQ ID NO: 1399065 - RNA, 21 nt, Human
cugaccagcucccccucccuc

SEQ ID NO: 1399066 - RNA, 20 nt, Human
cugaccagcucccccucccu

SEQ ID NO: 1399067 - RNA, 14 nt, Human
cugaccagcucccc

SEQ ID NO: 1399068 - RNA, 13 nt, Human
cugaccagcuccc

SEQ ID NO: 1399069 - RNA, 23 nt, Human
cugaccagccgugagcauguuug

SEQ ID NO: 1399070 - RNA, 20 nt, Human
cugaccagccgugagcaugu

SEQ ID NO: 1399071 - RNA, 18 nt, Human
cugaauuuuuaaacaagu

SEQ ID NO: 1399072 - RNA, 21 nt, Human
cugaauuuuuaaacaaguauu

SEQ ID NO: 1399073 - RNA, 12 nt, Human
cugaauuuuuaa

SEQ ID NO: 1399074 - RNA, 11 nt, Human
cugaauuuuua

SEQ ID NO: 1399075 - RNA, 18 nt, Human
cugaauuaucuauuucau

SEQ ID NO: 1399076 - RNA, 16 nt, Human
cugaauuaugaaacuu

SEQ ID NO: 1399077 - RNA, 14 nt, Human
cugaauuucuuuug

SEQ ID NO: 1399078 - RNA, 21 nt, Human
cugcauccauucuccugagga

SEQ ID NO: 1399079 - RNA, 16 nt, Human
cugcagaaacuacuga

SEQ ID NO: 1399080 - RNA, 22 nt, Human
cugcacuugcgguuccggcaug

SEQ ID NO: 1399081 - RNA, 23 nt, Human
cugcacuugcgguuccggcaugg

SEQ ID NO: 1399082 - RNA, 21 nt, Human
cugcaucuagaggcuuccuuc

SEQ ID NO: 1399083 - RNA, 20 nt, Human
cugcaucuagaggcuuccuu

SEQ ID NO: 1399084 - RNA, 22 nt, Human
cugcauccucuggagccagccg

SEQ ID NO: 1399085 - RNA, 20 nt, Human
cugcauccucuggagccagc

SEQ ID NO: 1399086 - RNA, 18 nt, Human
cugcauccucuggagcca

SEQ ID NO: 1399087 - RNA, 16 nt, Human
cugcauccucuggagc

SEQ ID NO: 1399088 - RNA, 15 nt, Human
cugcauccucuggag

SEQ ID NO: 1399089 - RNA, 19 nt, Human
cugcauccauucuccugag

SEQ ID NO: 1399090 - RNA, 13 nt, Human
cugcauccagccu

SEQ ID NO: 1399091 - RNA, 20 nt, Human
cugcauggcagggggcugcu

SEQ ID NO: 1399092 - RNA, 17 nt, Human
cugcauggcagggggcu

SEQ ID NO: 1399093 - RNA, 14 nt, Human
cugcauggcagggg

SEQ ID NO: 1399094 - RNA, 13 nt, Human
cugcauggcaggg

SEQ ID NO: 1399095 - RNA, 21 nt, Human
cugcaugcccagagacccagc

SEQ ID NO: 1399096 - RNA, 22 nt, Human
cugcaugcccagagacccagcg

SEQ ID NO: 1399097 - RNA, 20 nt, Human
cugcaugcccagagacccag

SEQ ID NO: 1399098 - RNA, 19 nt, Human
cugcaugcccagagaccca

SEQ ID NO: 1399099 - RNA, 17 nt, Human
cugcaugcccagagacc

SEQ ID NO: 1399100 - RNA, 16 nt, Human
cugcaugcccagagac

SEQ ID NO: 1399101 - RNA, 14 nt, Human
cugcaugcccagag

SEQ ID NO: 1399102 - RNA, 13 nt, Human
cugcaugcccaga

SEQ ID NO: 1399103 - RNA, 12 nt, Human
cugcaugcccag

SEQ ID NO: 1399104 - RNA, 23 nt, Human
cugcaugcgagugcucauuucag

SEQ ID NO: 1399105 - RNA, 21 nt, Human
cugcauguacuguauauuaca

SEQ ID NO: 1399106 - RNA, 22 nt, Human
cugcauggcauccuccagcccc

SEQ ID NO: 1399107 - RNA, 21 nt, Human
cugcauggcauccuccagccc

SEQ ID NO: 1399108 - RNA, 19 nt, Human
cugcauggcauccuccagc

SEQ ID NO: 1399109 - RNA, 18 nt, Human
cugcauggcauccuccag

SEQ ID NO: 1399110 - RNA, 17 nt, Human
cugcauggcauccucca

SEQ ID NO: 1399111 - RNA, 16 nt, Human
cugcauggcauccucc

SEQ ID NO: 1399112 - RNA, 23 nt, Human
cugcauggcagggggcugcugcu

SEQ ID NO: 1399113 - RNA, 22 nt, Human
cugcauggcagggggcugcugc

SEQ ID NO: 1399114 - RNA, 21 nt, Human
cugcauggcagggggcugcug

SEQ ID NO: 1399115 - RNA, 12 nt, Human
cugccacacagg

SEQ ID NO: 1399116 - RNA, 14 nt, Human
cugccaccuccugc

SEQ ID NO: 1399117 - RNA, 16 nt, Human
cugccaccuccugccu

SEQ ID NO: 1399118 - RNA, 21 nt, Human
cugccaccuggaccccugcau

SEQ ID NO: 1399119 - RNA, 22 nt, Human
cugccaccuggaccccugcauu

SEQ ID NO: 1399120 - RNA, 20 nt, Human
cugccaccuggaccccugca

SEQ ID NO: 1399121 - RNA, 16 nt, Human
cugccaccuggacccc

SEQ ID NO: 1399122 - RNA, 15 nt, Human
cugccaccuggaccc

SEQ ID NO: 1399123 - RNA, 14 nt, Human
cugccaccuggacc

SEQ ID NO: 1399124 - RNA, 13 nt, Human
cugccaccuggac

SEQ ID NO: 1399125 - RNA, 12 nt, Human
cugccaccugga

SEQ ID NO: 1399126 - RNA, 19 nt, Human
cugccaccuccugccucag

SEQ ID NO: 1399127 - RNA, 20 nt, Human
cugcccauggacaggcuggc

SEQ ID NO: 1399128 - RNA, 18 nt, Human
cugcccauggacaggcug

SEQ ID NO: 1399129 - RNA, 16 nt, Human
cugcccauggacaggc

SEQ ID NO: 1399130 - RNA, 13 nt, Human
cugcccaguugca

SEQ ID NO: 1399131 - RNA, 17 nt, Human
cugcccacucccaggac

SEQ ID NO: 1399132 - RNA, 23 nt, Human
cugccacugaggggggauccagu

SEQ ID NO: 1399133 - RNA, 18 nt, Human
cugccacugaggggggau

SEQ ID NO: 1399134 - RNA, 14 nt, Human
cugccacugagggg

SEQ ID NO: 1399135 - RNA, 19 nt, Human
cugccacucacuaggcccc

SEQ ID NO: 1399136 - RNA, 16 nt, Human
cugccacucacuaggc

SEQ ID NO: 1399137 - RNA, 17 nt, Human
cugccaccugucugucu

SEQ ID NO: 1399138 - RNA, 11 nt, Human
cugccaccugu

SEQ ID NO: 1399139 - RNA, 12 nt, Human
cugccaccuguc

SEQ ID NO: 1399140 - RNA, 13 nt, Human
cugccaccugucu

SEQ ID NO: 1399141 - RNA, 14 nt, Human
cugccaccugucug

SEQ ID NO: 1399142 - RNA, 15 nt, Human
cugccaccugucugu

SEQ ID NO: 1399143 - RNA, 16 nt, Human
cugccaccugucuguc

SEQ ID NO: 1399144 - RNA, 18 nt, Human
cugccaccugucugucug

SEQ ID NO: 1399145 - RNA, 15 nt, Human
cugccgcgcagugug

SEQ ID NO: 1399146 - RNA, 17 nt, Human
cugccccucucaccaaa

SEQ ID NO: 1399147 - RNA, 13 nt, Human
cugccccucucac

SEQ ID NO: 1399148 - RNA, 12 nt, Human
cugccccaacuc

SEQ ID NO: 1399149 - RNA, 17 nt, Human
cugccuauuaucuguca

SEQ ID NO: 1399150 - RNA, 19 nt, Human
cugccuagauucagggaaa

SEQ ID NO: 1399151 - RNA, 23 nt, Human
cugccuagauucagggaaagugg

SEQ ID NO: 1399152 - RNA, 15 nt, Human
cugccuagauucagg

SEQ ID NO: 1399153 - RNA, 23 nt, Human
cugccuagaaacaacacuguagu

SEQ ID NO: 1399154 - RNA, 21 nt, Human
cugccuagaaacaacacugua

SEQ ID NO: 1399155 - RNA, 20 nt, Human
cugccuagaaacaacacugu

SEQ ID NO: 1399156 - RNA, 18 nt, Human
cugccuagaaacaacacu

SEQ ID NO: 1399157 - RNA, 15 nt, Human
cugccuagaaacaac

SEQ ID NO: 1399158 - RNA, 14 nt, Human
cugccuagaaacaa

SEQ ID NO: 1399159 - RNA, 23 nt, Human
cugccuacagaacuucagaaaga

SEQ ID NO: 1399160 - RNA, 20 nt, Human
cugccuacagaacuucagaa

SEQ ID NO: 1399161 - RNA, 16 nt, Human
cugccggcuccuuggu

SEQ ID NO: 1399162 - RNA, 10 nt, Human
cugccucagg

SEQ ID NO: 1399163 - RNA, 18 nt, Human
cugccucagccucccaag

SEQ ID NO: 1399164 - RNA, 23 nt, Human
cugccuauuaucugucagcugca

SEQ ID NO: 1399165 - RNA, 13 nt, Human
cugccuauuuuaa

SEQ ID NO: 1399166 - RNA, 11 nt, Human
cugccucagga

SEQ ID NO: 1399167 - RNA, 15 nt, Human
cugccucucugcagg

SEQ ID NO: 1399168 - RNA, 16 nt, Human
cugccucucugcaggu

SEQ ID NO: 1399169 - RNA, 17 nt, Human
cugccucucugcagguc

SEQ ID NO: 1399170 - RNA, 18 nt, Human
cugccucucugcaggucc

SEQ ID NO: 1399171 - RNA, 19 nt, Human
cugcgugacaauaaaacau

SEQ ID NO: 1399172 - RNA, 16 nt, Human
cugccuuugccaggug

SEQ ID NO: 1399173 - RNA, 15 nt, Human
cugccuuugccaggu

SEQ ID NO: 1399174 - RNA, 14 nt, Human
cugccuuugccagg

SEQ ID NO: 1399175 - RNA, 21 nt, Human
cugccuuuccauccauggcca

SEQ ID NO: 1399176 - RNA, 22 nt, Human
cugccuuuccauccauggccag

SEQ ID NO: 1399177 - RNA, 20 nt, Human
cugccuuuccauccauggcc

SEQ ID NO: 1399178 - RNA, 15 nt, Human
cugccuuuccaucca

SEQ ID NO: 1399179 - RNA, 24 nt, Human
cugccuuuauuguguuugucauua

SEQ ID NO: 1399180 - RNA, 22 nt, Human
cugccuuuauuguguuugucau

SEQ ID NO: 1399181 - RNA, 17 nt, Human
cugccuuugccagguga

SEQ ID NO: 1399182 - RNA, 18 nt, Human
cugccuuugccaggugac

SEQ ID NO: 1399183 - RNA, 18 nt, Human
cugccuuuggcagaguuc

SEQ ID NO: 1399184 - RNA, 18 nt, Human
cugcggcccaauccaagg

SEQ ID NO: 1399185 - RNA, 23 nt, Human
cugcggaggaaggaggacccagg

SEQ ID NO: 1399186 - RNA, 11 nt, Human
cugccuggacc

SEQ ID NO: 1399187 - RNA, 15 nt, Human
cugccugcccuggug

SEQ ID NO: 1399188 - RNA, 20 nt, Human
cugccuggaagagcagcccu

SEQ ID NO: 1399189 - RNA, 14 nt, Human
cugccugcccuggu

SEQ ID NO: 1399190 - RNA, 19 nt, Human
cugccucucugcagguccc

SEQ ID NO: 1399191 - RNA, 17 nt, Human
cugccuugaaaaagaca

SEQ ID NO: 1399192 - RNA, 23 nt, Human
cugccuucgcuucuugccucugu

SEQ ID NO: 1399193 - RNA, 21 nt, Human
cugccuucgcuucuugccucu

SEQ ID NO: 1399194 - RNA, 22 nt, Human
cugccuggaggaccugagccug

SEQ ID NO: 1399195 - RNA, 23 nt, Human
cugccuggaggaccugagccugc

SEQ ID NO: 1399196 - RNA, 21 nt, Human
cugccuggaggaccugagccu

SEQ ID NO: 1399197 - RNA, 20 nt, Human
cugccuggaggaccugagcc

SEQ ID NO: 1399198 - RNA, 19 nt, Human
cugccuggaggaccugagc

SEQ ID NO: 1399199 - RNA, 18 nt, Human
cugccuggaggaccugag

SEQ ID NO: 1399200 - RNA, 17 nt, Human
cugccuggaggaccuga

SEQ ID NO: 1399201 - RNA, 16 nt, Human
cugccuggaggaccug

SEQ ID NO: 1399202 - RNA, 15 nt, Human
cugccuggaggaccu

SEQ ID NO: 1399203 - RNA, 12 nt, Human
cugccuggagga

SEQ ID NO: 1399204 - RNA, 11 nt, Human
cugccuggagg

SEQ ID NO: 1399205 - RNA, 13 nt, Human
cugccuggacccg

SEQ ID NO: 1399206 - RNA, 17 nt, Human
cugccuggaccagccuc

SEQ ID NO: 1399207 - RNA, 22 nt, Human
cugccuggagacuuagggcacc

SEQ ID NO: 1399208 - RNA, 10 nt, Human
cugccuggag

SEQ ID NO: 1399209 - RNA, 12 nt, Human
cugccuggaccc

SEQ ID NO: 1399210 - RNA, 22 nt, Human
cugccuggacuuggccccugcc

SEQ ID NO: 1399211 - RNA, 23 nt, Human
cugccuggacuuggccccugcca

SEQ ID NO: 1399212 - RNA, 19 nt, Human
cugagcccgguaagagcaa

SEQ ID NO: 1399213 - RNA, 20 nt, Human
cugagcccgguaagagcaaa

SEQ ID NO: 1399214 - RNA, 18 nt, Human
cugagccccagggagagg

SEQ ID NO: 1399215 - RNA, 15 nt, Human
cugagccccagggag

SEQ ID NO: 1399216 - RNA, 13 nt, Human
cugagccccaggg

SEQ ID NO: 1399217 - RNA, 12 nt, Human
cugagccccagg

SEQ ID NO: 1399218 - RNA, 19 nt, Human
cugagcccagggaggccga

SEQ ID NO: 1399219 - RNA, 23 nt, Human
cugaggccugggccgcugccacg

SEQ ID NO: 1399220 - RNA, 22 nt, Human
cugaggccugggccgcugccac

SEQ ID NO: 1399221 - RNA, 19 nt, Human
cugaggccugggccgcugc

SEQ ID NO: 1399222 - RNA, 15 nt, Human
cugaggccugggccg

SEQ ID NO: 1399223 - RNA, 14 nt, Human
cugaggccugggcc

SEQ ID NO: 1399224 - RNA, 22 nt, Human
cugaggccuggacuuuccugca

SEQ ID NO: 1399225 - RNA, 20 nt, Human
cugaggccuggacuuuccug

SEQ ID NO: 1399226 - RNA, 19 nt, Human
cugaggccuggacuuuccu

SEQ ID NO: 1399227 - RNA, 15 nt, Human
cugaggccuggacuu

SEQ ID NO: 1399228 - RNA, 12 nt, Human
cugaggccugga

SEQ ID NO: 1399229 - RNA, 22 nt, Human
cugaggcgagaagggcugcuuc

SEQ ID NO: 1399230 - RNA, 23 nt, Human
cugaggcgccccaacccguggag

SEQ ID NO: 1399231 - RNA, 21 nt, Human
cugagucagagccaugucuuc

SEQ ID NO: 1399232 - RNA, 17 nt, Human
cugagucaggacuugaa

SEQ ID NO: 1399233 - RNA, 19 nt, Human
cugagucagagccaugucu

SEQ ID NO: 1399234 - RNA, 18 nt, Human
cugagucagagccauguc

SEQ ID NO: 1399235 - RNA, 14 nt, Human
cugagucagagcca

SEQ ID NO: 1399236 - RNA, 23 nt, Human
cugagucacccuaccugugccug

SEQ ID NO: 1399237 - RNA, 22 nt, Human
cugagucacccuaccugugccu

SEQ ID NO: 1399238 - RNA, 15 nt, Human
cugagggaucuuuac

SEQ ID NO: 1399239 - RNA, 17 nt, Human
cugagggagccuggccc

SEQ ID NO: 1399240 - RNA, 13 nt, Human
cugagggagccug

SEQ ID NO: 1399241 - RNA, 12 nt, Human
cugagggagccu

SEQ ID NO: 1399242 - RNA, 20 nt, Human
cugaggcuguggucacagcg

SEQ ID NO: 1399243 - RNA, 19 nt, Human
cugaggcuguggucacagc

SEQ ID NO: 1399244 - RNA, 17 nt, Human
cugaggcuguggucaca

SEQ ID NO: 1399245 - RNA, 14 nt, Human
cugaggcugugguc

SEQ ID NO: 1399246 - RNA, 13 nt, Human
cugaggcuguggu

SEQ ID NO: 1399247 - RNA, 20 nt, Human
cugaggcuggcacaggacau

SEQ ID NO: 1399248 - RNA, 19 nt, Human
cugaggcuggcacaggaca

SEQ ID NO: 1399249 - RNA, 18 nt, Human
cugaggcuggcacaggac

SEQ ID NO: 1399250 - RNA, 17 nt, Human
cugaggcuggcacagga

SEQ ID NO: 1399251 - RNA, 12 nt, Human
cugaggcugagg

SEQ ID NO: 1399252 - RNA, 13 nt, Human
cugaggcuggcac

SEQ ID NO: 1399253 - RNA, 11 nt, Human
cugaggcuggc

SEQ ID NO: 1399254 - RNA, 14 nt, Human
cugaggcugaggca

SEQ ID NO: 1399255 - RNA, 17 nt, Human
cugauccuggaggccca

SEQ ID NO: 1399256 - RNA, 15 nt, Human
cugauccuggaggcc

SEQ ID NO: 1399257 - RNA, 12 nt, Human
cugauccuggag

SEQ ID NO: 1399258 - RNA, 15 nt, Human
cugaucccucuacag

SEQ ID NO: 1399259 - RNA, 16 nt, Human
cugaucagaacaaaug

SEQ ID NO: 1399260 - RNA, 20 nt, Human
cugaucagagccgugguccu

SEQ ID NO: 1399261 - RNA, 14 nt, Human
cugaucagagccgu

SEQ ID NO: 1399262 - RNA, 17 nt, Human
cugaucagaccacggcu

SEQ ID NO: 1399263 - RNA, 15 nt, Human
cugauauuuucucua

SEQ ID NO: 1399264 - RNA, 14 nt, Human
cugauauuuucucu

SEQ ID NO: 1399265 - RNA, 15 nt, Human
cugaucaaggccuua

SEQ ID NO: 1399266 - RNA, 12 nt, Human
cugaucaaggcc

SEQ ID NO: 1399267 - RNA, 16 nt, Human
cugauauuuucucuag

SEQ ID NO: 1399268 - RNA, 18 nt, Human
cugauauuuucucuagga

SEQ ID NO: 1399269 - RNA, 18 nt, Human
cugauauauuuuacaauu

SEQ ID NO: 1399270 - RNA, 16 nt, Human
cugauauauuuuacaa

SEQ ID NO: 1399271 - RNA, 18 nt, Human
cugauaauuuuaaauucu

SEQ ID NO: 1399272 - RNA, 17 nt, Human
cugauaauuuuaaauuc

SEQ ID NO: 1399273 - RNA, 15 nt, Human
cugauaauuuuaaau

SEQ ID NO: 1399274 - RNA, 22 nt, Human
cugauacagaaaaguugaauuu

SEQ ID NO: 1399275 - RNA, 17 nt, Human
cugaguuacagaaauga

SEQ ID NO: 1399276 - RNA, 11 nt, Human
cugaguuuccu

SEQ ID NO: 1399277 - RNA, 16 nt, Human
cugaguugcuuuucag

SEQ ID NO: 1399278 - RNA, 15 nt, Human
cugaguugcuuuuca

SEQ ID NO: 1399279 - RNA, 16 nt, Human
cugaguuccugcaugc

SEQ ID NO: 1399280 - RNA, 14 nt, Human
cugaguuccugcau

SEQ ID NO: 1399281 - RNA, 19 nt, Human
cugauaagagaaucaacau

SEQ ID NO: 1399282 - RNA, 11 nt, Human
cugaguuuucc

SEQ ID NO: 1399283 - RNA, 16 nt, Human
cugaguuuuccauggc

SEQ ID NO: 1399284 - RNA, 20 nt, Human
cugaguuuccuaugggaaca

SEQ ID NO: 1399285 - RNA, 19 nt, Human
cugaguuuccuaugggaac

SEQ ID NO: 1399286 - RNA, 12 nt, Human
cugaguuuccua

SEQ ID NO: 1399287 - RNA, 19 nt, Human
cugcacugaugcugccccu

SEQ ID NO: 1399288 - RNA, 18 nt, Human
cugcacugaugcugcccc

SEQ ID NO: 1399289 - RNA, 17 nt, Human
cugcacugaugcugccc

SEQ ID NO: 1399290 - RNA, 15 nt, Human
cugcacugaugcugc

SEQ ID NO: 1399291 - RNA, 23 nt, Human
cugcacaugacucgggggugggg

SEQ ID NO: 1399292 - RNA, 22 nt, Human
cugcacaugacucggggguggg

SEQ ID NO: 1399293 - RNA, 22 nt, Human
cugcacaucuguaaaucuacac

SEQ ID NO: 1399294 - RNA, 18 nt, Human
cugcacaucuguaaaucu

SEQ ID NO: 1399295 - RNA, 15 nt, Human
cugcacaguugaagg

SEQ ID NO: 1399296 - RNA, 23 nt, Human
cugcacaauaacuccucccaggg

SEQ ID NO: 1399297 - RNA, 22 nt, Human
cugcacaauaacuccucccagg

SEQ ID NO: 1399298 - RNA, 21 nt, Human
cugcacaauaacuccucccag

SEQ ID NO: 1399299 - RNA, 20 nt, Human
cugcacaauaacuccuccca

SEQ ID NO: 1399300 - RNA, 16 nt, Human
cugcacaauaacuccu

SEQ ID NO: 1399301 - RNA, 15 nt, Human
cugcacaauaacucc

SEQ ID NO: 1399302 - RNA, 22 nt, Human
cugcacaauaaaaauguuuaac

SEQ ID NO: 1399303 - RNA, 18 nt, Human
cugcacaauaaaaauguu

SEQ ID NO: 1399304 - RNA, 15 nt, Human
cugcacaauaaaaau

SEQ ID NO: 1399305 - RNA, 22 nt, Human
cugcaagugaggugugucacaa

SEQ ID NO: 1399306 - RNA, 19 nt, Human
cugcaagugagguguguca

SEQ ID NO: 1399307 - RNA, 20 nt, Human
cugauuuuuuuuccuuuuaa

SEQ ID NO: 1399308 - RNA, 19 nt, Human
cugauuuuuuuuccuuuua

SEQ ID NO: 1399309 - RNA, 15 nt, Human
cugauuuuuuuuccu

SEQ ID NO: 1399310 - RNA, 21 nt, Human
cugauuuucaaagcuuuuucc

SEQ ID NO: 1399311 - RNA, 18 nt, Human
cugauuuucaaagcuuuu

SEQ ID NO: 1399312 - RNA, 23 nt, Human
cugauuuuaggagcuaaggcucu

SEQ ID NO: 1399313 - RNA, 22 nt, Human
cugauuuuaggagcuaaggcuc

SEQ ID NO: 1399314 - RNA, 21 nt, Human
cugauuuuaggagcuaaggcu

SEQ ID NO: 1399315 - RNA, 19 nt, Human
cugauuuguaacccacuga

SEQ ID NO: 1399316 - RNA, 18 nt, Human
cugauuuguaacccacug

SEQ ID NO: 1399317 - RNA, 14 nt, Human
cugcaaacugggaa

SEQ ID NO: 1399318 - RNA, 13 nt, Human
cugcaaacuggga

SEQ ID NO: 1399319 - RNA, 12 nt, Human
cugcaaacuggg

SEQ ID NO: 1399320 - RNA, 17 nt, Human
cugcaaaaggacucuca

SEQ ID NO: 1399321 - RNA, 23 nt, Human
cugcaaagaucuguccucagccu

SEQ ID NO: 1399322 - RNA, 22 nt, Human
cugcaaagaucuguccucagcc

SEQ ID NO: 1399323 - RNA, 23 nt, Human
cugcaaacugggaaccccuuucc

SEQ ID NO: 1399324 - RNA, 21 nt, Human
cugcaaacugggaaccccuuu

SEQ ID NO: 1399325 - RNA, 16 nt, Human
cugcaaacugggaacc

SEQ ID NO: 1399326 - RNA, 15 nt, Human
cugcaaacugggaac

SEQ ID NO: 1399327 - RNA, 14 nt, Human
cugcaaaaagaaaa

SEQ ID NO: 1399328 - RNA, 18 nt, Human
cugauccuggaggcccag

SEQ ID NO: 1399329 - RNA, 21 nt, Human
cugauuuaggagaagccagga

SEQ ID NO: 1399330 - RNA, 22 nt, Human
cugauuuaggagaagccaggaa

SEQ ID NO: 1399331 - RNA, 20 nt, Human
cugauuuaggagaagccagg

SEQ ID NO: 1399332 - RNA, 18 nt, Human
cugauuuaggagaagcca

SEQ ID NO: 1399333 - RNA, 17 nt, Human
cugauuuaggagaagcc

SEQ ID NO: 1399334 - RNA, 16 nt, Human
cugauuuaggagaagc

SEQ ID NO: 1399335 - RNA, 12 nt, Human
cugauuucuagg

SEQ ID NO: 1399336 - RNA, 23 nt, Human
cugggcugagggagccuggcccc

SEQ ID NO: 1399337 - RNA, 19 nt, Human
cugggcugagggagccugg

SEQ ID NO: 1399338 - RNA, 18 nt, Human
cugggcugagggagccug

SEQ ID NO: 1399339 - RNA, 16 nt, Human
cugggcugagggagcc

SEQ ID NO: 1399340 - RNA, 13 nt, Human
cugggcugaggga

SEQ ID NO: 1399341 - RNA, 12 nt, Human
cugggcugaggg

SEQ ID NO: 1399342 - RNA, 13 nt, Human
cugggcucugagu

SEQ ID NO: 1399343 - RNA, 23 nt, Human
cugggcucugcaauuccccucug

SEQ ID NO: 1399344 - RNA, 22 nt, Human
cugggcucugcaauuccccucu

SEQ ID NO: 1399345 - RNA, 14 nt, Human
cugggcuccuggac

SEQ ID NO: 1399346 - RNA, 15 nt, Human
cugggcuccuggacc

SEQ ID NO: 1399347 - RNA, 13 nt, Human
cugggcuccugga

SEQ ID NO: 1399348 - RNA, 17 nt, Human
cugggcuccuccagggu

SEQ ID NO: 1399349 - RNA, 15 nt, Human
cugggcuccuccagg

SEQ ID NO: 1399350 - RNA, 14 nt, Human
cugggcuccuccag

SEQ ID NO: 1399351 - RNA, 18 nt, Human
cugggccuuaggaagagc

SEQ ID NO: 1399352 - RNA, 14 nt, Human
cugggccuuaggaa

SEQ ID NO: 1399353 - RNA, 23 nt, Human
cugggccuggucucacccuggag

SEQ ID NO: 1399354 - RNA, 19 nt, Human
cugggccuggucucacccu

SEQ ID NO: 1399355 - RNA, 16 nt, Human
cugggccuggucucac

SEQ ID NO: 1399356 - RNA, 15 nt, Human
cugggccuggucuca

SEQ ID NO: 1399357 - RNA, 14 nt, Human
cugggccuggucuc

SEQ ID NO: 1399358 - RNA, 13 nt, Human
cugggccuggucu

SEQ ID NO: 1399359 - RNA, 11 nt, Human
cugggccuggu

SEQ ID NO: 1399360 - RNA, 20 nt, Human
cugggccugcugcugagaac

SEQ ID NO: 1399361 - RNA, 22 nt, Human
cugggccugcugcugagaaccu

SEQ ID NO: 1399362 - RNA, 19 nt, Human
cugggccugcugcugagaa

SEQ ID NO: 1399363 - RNA, 18 nt, Human
cugggccugcugcugaga

SEQ ID NO: 1399364 - RNA, 17 nt, Human
cugggccugcugcugag

SEQ ID NO: 1399365 - RNA, 16 nt, Human
cugggccugcugcuga

SEQ ID NO: 1399366 - RNA, 15 nt, Human
cugggccugcugcug

SEQ ID NO: 1399367 - RNA, 14 nt, Human
cugggccugcugcu

SEQ ID NO: 1399368 - RNA, 13 nt, Human
cugggccugcugc

SEQ ID NO: 1399369 - RNA, 12 nt, Human
cugggccugcug

SEQ ID NO: 1399370 - RNA, 16 nt, Human
cugggccugccucacc

SEQ ID NO: 1399371 - RNA, 15 nt, Human
cugggccugccucac

SEQ ID NO: 1399372 - RNA, 14 nt, Human
cugggccugccuca

SEQ ID NO: 1399373 - RNA, 20 nt, Human
cugggccugaccaaacagcc

SEQ ID NO: 1399374 - RNA, 13 nt, Human
cugggccugcaga

SEQ ID NO: 1399375 - RNA, 11 nt, Human
cugggcccugg

SEQ ID NO: 1399376 - RNA, 15 nt, Human
cugggcaagcuggcg

SEQ ID NO: 1399377 - RNA, 15 nt, Human
cugggcaaagccuag

SEQ ID NO: 1399378 - RNA, 23 nt, Human
cugggauuccuuagacucuuuuc

SEQ ID NO: 1399379 - RNA, 22 nt, Human
cugggauucaggaaaaggccug

SEQ ID NO: 1399380 - RNA, 23 nt, Human
cugggauucaggaaaaggccugg

SEQ ID NO: 1399381 - RNA, 11 nt, Human
cugggauuagg

SEQ ID NO: 1399382 - RNA, 18 nt, Human
cugggcccucucugcucu

SEQ ID NO: 1399383 - RNA, 15 nt, Human
cugggcccucucugc

SEQ ID NO: 1399384 - RNA, 14 nt, Human
cugggcccucucug

SEQ ID NO: 1399385 - RNA, 13 nt, Human
cugggcccucucu

SEQ ID NO: 1399386 - RNA, 20 nt, Human
cugggccccugccucucugc

SEQ ID NO: 1399387 - RNA, 23 nt, Human
cugggccccugccucucugcagg

SEQ ID NO: 1399388 - RNA, 17 nt, Human
cuggguccauaucacac

SEQ ID NO: 1399389 - RNA, 15 nt, Human
cuggguccauaucac

SEQ ID NO: 1399390 - RNA, 13 nt, Human
cuggguccauauc

SEQ ID NO: 1399391 - RNA, 23 nt, Human
cuggguccaauuguggcacuugg

SEQ ID NO: 1399392 - RNA, 20 nt, Human
cuggguccauaucacacaca

SEQ ID NO: 1399393 - RNA, 13 nt, Human
cugggucgcccug

SEQ ID NO: 1399394 - RNA, 20 nt, Human
cugggguauaaaacuuuccu

SEQ ID NO: 1399395 - RNA, 19 nt, Human
cugggguaaguggucuaag

SEQ ID NO: 1399396 - RNA, 22 nt, Human
cuggguuuuguauucucugagc

SEQ ID NO: 1399397 - RNA, 20 nt, Human
cuggguuuuguauucucuga

SEQ ID NO: 1399398 - RNA, 15 nt, Human
cugggucgcccugga

SEQ ID NO: 1399399 - RNA, 16 nt, Human
cugggucgcccuggac

SEQ ID NO: 1399400 - RNA, 20 nt, Human
cugguauauccaaaagcuuu

SEQ ID NO: 1399401 - RNA, 19 nt, Human
cugguauauccaaaagcuu

SEQ ID NO: 1399402 - RNA, 14 nt, Human
cugguaauagcugu

SEQ ID NO: 1399403 - RNA, 18 nt, Human
cugguauauccaaaagcu

SEQ ID NO: 1399404 - RNA, 19 nt, Human
cugguaauauugacuugua

SEQ ID NO: 1399405 - RNA, 15 nt, Human
cugguaauauugacu

SEQ ID NO: 1399406 - RNA, 23 nt, Human
cugguaucucagaaagugccuga

SEQ ID NO: 1399407 - RNA, 22 nt, Human
cugguaucucagaaagugccug

SEQ ID NO: 1399408 - RNA, 19 nt, Human
cugguaucucagaaagugc

SEQ ID NO: 1399409 - RNA, 17 nt, Human
cugguaucucagaaagu

SEQ ID NO: 1399410 - RNA, 15 nt, Human
cugguaucucagaaa

SEQ ID NO: 1399411 - RNA, 14 nt, Human
cugguaucucagaa

SEQ ID NO: 1399412 - RNA, 18 nt, Human
cugguaugaacuugagga

SEQ ID NO: 1399413 - RNA, 20 nt, Human
cugguaugaacuugaggaca

SEQ ID NO: 1399414 - RNA, 21 nt, Human
cugguaugaacuugaggacac

SEQ ID NO: 1399415 - RNA, 22 nt, Human
cugguaugaacuugaggacaca

SEQ ID NO: 1399416 - RNA, 12 nt, Human
cugggcugggaa

SEQ ID NO: 1399417 - RNA, 20 nt, Human
cugggcuggaugagcuccca

SEQ ID NO: 1399418 - RNA, 19 nt, Human
cugggcuggaugagcuccc

SEQ ID NO: 1399419 - RNA, 18 nt, Human
cugggcuggaugagcucc

SEQ ID NO: 1399420 - RNA, 17 nt, Human
cugggcuggaugagcuc

SEQ ID NO: 1399421 - RNA, 16 nt, Human
cugggcuggaugagcu

SEQ ID NO: 1399422 - RNA, 20 nt, Human
cugggcuuauaucuggccuc

SEQ ID NO: 1399423 - RNA, 17 nt, Human
cugggggguggccaggc

SEQ ID NO: 1399424 - RNA, 19 nt, Human
cugggggugccaggaccag

SEQ ID NO: 1399425 - RNA, 15 nt, Human
cugggggugccagga

SEQ ID NO: 1399426 - RNA, 14 nt, Human
cugggggugccagg

SEQ ID NO: 1399427 - RNA, 19 nt, Human
cugggggguggccaggccg

SEQ ID NO: 1399428 - RNA, 16 nt, Human
cugggggguggccagg

SEQ ID NO: 1399429 - RNA, 18 nt, Human
cugggggcugcaguucga

SEQ ID NO: 1399430 - RNA, 14 nt, Human
cugggggcugcagu

SEQ ID NO: 1399431 - RNA, 18 nt, Human
cugggggcugaggagcag

SEQ ID NO: 1399432 - RNA, 23 nt, Human
cugggggccuggcuggcugaggg

SEQ ID NO: 1399433 - RNA, 18 nt, Human
cugggggccuggcuggcu

SEQ ID NO: 1399434 - RNA, 17 nt, Human
cugggggccuggcuggc

SEQ ID NO: 1399435 - RNA, 16 nt, Human
cugggggccuggcugg

SEQ ID NO: 1399436 - RNA, 19 nt, Human
cuggggaaacuggccaugg

SEQ ID NO: 1399437 - RNA, 22 nt, Human
cuggggaaacuggccauggccu

SEQ ID NO: 1399438 - RNA, 17 nt, Human
cuggggaaacuggccau

SEQ ID NO: 1399439 - RNA, 20 nt, Human
cuggggaaaacuccaccuuc

SEQ ID NO: 1399440 - RNA, 22 nt, Human
cugggcuuauaucuggccucug

SEQ ID NO: 1399441 - RNA, 15 nt, Human
cugggggccuggcug

SEQ ID NO: 1399442 - RNA, 14 nt, Human
cugggggccuggcu

SEQ ID NO: 1399443 - RNA, 13 nt, Human
cugggggccuggc

SEQ ID NO: 1399444 - RNA, 12 nt, Human
cugggggccugg

SEQ ID NO: 1399445 - RNA, 16 nt, Human
cugggggccucuucug

SEQ ID NO: 1399446 - RNA, 17 nt, Human
cuguauugucugaacuu

SEQ ID NO: 1399447 - RNA, 14 nt, Human
cuguauugucugaa

SEQ ID NO: 1399448 - RNA, 13 nt, Human
cuguauugucuga

SEQ ID NO: 1399449 - RNA, 20 nt, Human
cuguauuuuguauuguuuca

SEQ ID NO: 1399450 - RNA, 15 nt, Human
cuguauucagacaga

SEQ ID NO: 1399451 - RNA, 16 nt, Human
cuguauucagacagau

SEQ ID NO: 1399452 - RNA, 11 nt, Human
cuguauaaaau

SEQ ID NO: 1399453 - RNA, 17 nt, Human
cuguauaaaaucagcca

SEQ ID NO: 1399454 - RNA, 19 nt, Human
cuguauaaaaucagccaau

SEQ ID NO: 1399455 - RNA, 12 nt, Human
cuguaauugugu

SEQ ID NO: 1399456 - RNA, 16 nt, Human
cuguaauuguguguga

SEQ ID NO: 1399457 - RNA, 17 nt, Human
cuguacaugaaaacaca

SEQ ID NO: 1399458 - RNA, 20 nt, Human
cuguacaugaaaacacauuu

SEQ ID NO: 1399459 - RNA, 21 nt, Human
cuguacaugaaaacacauuuu

SEQ ID NO: 1399460 - RNA, 19 nt, Human
cuguaguucuaagacucaa

SEQ ID NO: 1399461 - RNA, 16 nt, Human
cuguaguucuaagacu

SEQ ID NO: 1399462 - RNA, 14 nt, Human
cuguaguucuaaga

SEQ ID NO: 1399463 - RNA, 13 nt, Human
cuguaguucuaag

SEQ ID NO: 1399464 - RNA, 23 nt, Human
cuguaccuuuugaggagccccag

SEQ ID NO: 1399465 - RNA, 14 nt, Human
cuguacaucuauuu

SEQ ID NO: 1399466 - RNA, 14 nt, Human
cuguaauugcaaaa

SEQ ID NO: 1399467 - RNA, 19 nt, Human
cuguaauugaauauuauuc

SEQ ID NO: 1399468 - RNA, 18 nt, Human
cuguaauugaauauuauu

SEQ ID NO: 1399469 - RNA, 15 nt, Human
cuguaauucagguuu

SEQ ID NO: 1399470 - RNA, 14 nt, Human
cuguaauuugugau

SEQ ID NO: 1399471 - RNA, 15 nt, Human
cuguaauuugugaua

SEQ ID NO: 1399472 - RNA, 20 nt, Human
cuguaaucccagcaugcuga

SEQ ID NO: 1399473 - RNA, 23 nt, Human
cugguuagaaaugcagaauccua

SEQ ID NO: 1399474 - RNA, 14 nt, Human
cugguuagaaaugc

SEQ ID NO: 1399475 - RNA, 15 nt, Human
cugguauuguucuca

SEQ ID NO: 1399476 - RNA, 22 nt, Human
cugguauguaaaagaaaaucca

SEQ ID NO: 1399477 - RNA, 23 nt, Human
cugguaugaacuugaggacacau

SEQ ID NO: 1399478 - RNA, 22 nt, Human
cuggugguggcucgggaggcga

SEQ ID NO: 1399479 - RNA, 14 nt, Human
cuggugguggcucg

SEQ ID NO: 1399480 - RNA, 23 nt, Human
cugguguagcuacagagaaacca

SEQ ID NO: 1399481 - RNA, 21 nt, Human
cugguguagcuacagagaaac

SEQ ID NO: 1399482 - RNA, 20 nt, Human
cugguguagcuacagagaaa

SEQ ID NO: 1399483 - RNA, 12 nt, Human
cugguguagcua

SEQ ID NO: 1399484 - RNA, 19 nt, Human
cugguguagcuacagagaa

SEQ ID NO: 1399485 - RNA, 18 nt, Human
cugguguagcuacagaga

SEQ ID NO: 1399486 - RNA, 17 nt, Human
cugguguagcuacagag

SEQ ID NO: 1399487 - RNA, 15 nt, Human
cugguguagcuacag

SEQ ID NO: 1399488 - RNA, 20 nt, Human
cugugccaggugaggucagc

SEQ ID NO: 1399489 - RNA, 19 nt, Human
cugugccaggugaggucag

SEQ ID NO: 1399490 - RNA, 23 nt, Human
cugugcccccaggguccugggag

SEQ ID NO: 1399491 - RNA, 20 nt, Human
cugugcccccaggguccugg

SEQ ID NO: 1399492 - RNA, 14 nt, Human
cugugcccccaggg

SEQ ID NO: 1399493 - RNA, 13 nt, Human
cugugcccccagg

SEQ ID NO: 1399494 - RNA, 12 nt, Human
cugugcccccag

SEQ ID NO: 1399495 - RNA, 21 nt, Human
cugugccccuuccgccacugg

SEQ ID NO: 1399496 - RNA, 20 nt, Human
cugugccccuuccgccacug

SEQ ID NO: 1399497 - RNA, 18 nt, Human
cugugccccuuccgccac

SEQ ID NO: 1399498 - RNA, 17 nt, Human
cugugccccuuccgcca

SEQ ID NO: 1399499 - RNA, 13 nt, Human
cugugccccuucc

SEQ ID NO: 1399500 - RNA, 22 nt, Human
cugugcccccaggguccuggga

SEQ ID NO: 1399501 - RNA, 19 nt, Human
cugugcccuaaaguguauu

SEQ ID NO: 1399502 - RNA, 21 nt, Human
cugugcagccgcugagcgagg

SEQ ID NO: 1399503 - RNA, 19 nt, Human
cugugcagccgcugagcga

SEQ ID NO: 1399504 - RNA, 17 nt, Human
cugugcagccgcugagc

SEQ ID NO: 1399505 - RNA, 16 nt, Human
cugugcagccgcugag

SEQ ID NO: 1399506 - RNA, 14 nt, Human
cugugcacugccca

SEQ ID NO: 1399507 - RNA, 14 nt, Human
cugugcaccaagca

SEQ ID NO: 1399508 - RNA, 21 nt, Human
cugugcaaccucuuggccuga

SEQ ID NO: 1399509 - RNA, 16 nt, Human
cugugauucagaaaau

SEQ ID NO: 1399510 - RNA, 18 nt, Human
cugugccagagccugggg

SEQ ID NO: 1399511 - RNA, 17 nt, Human
cugugccagagccuggg

SEQ ID NO: 1399512 - RNA, 16 nt, Human
cugugccagagccugg

SEQ ID NO: 1399513 - RNA, 15 nt, Human
cugugccagagccug

SEQ ID NO: 1399514 - RNA, 14 nt, Human
cugugccagagccu

SEQ ID NO: 1399515 - RNA, 13 nt, Human
cugugccagagcc

SEQ ID NO: 1399516 - RNA, 16 nt, Human
cugugcagguucccac

SEQ ID NO: 1399517 - RNA, 17 nt, Human
cugugcagguucccacu

SEQ ID NO: 1399518 - RNA, 14 nt, Human
cugugccaggugag

SEQ ID NO: 1399519 - RNA, 21 nt, Human
cugugccagagccuggggcuc

SEQ ID NO: 1399520 - RNA, 22 nt, Human
cugugccagagccuggggcucu

SEQ ID NO: 1399521 - RNA, 20 nt, Human
cugugccagagccuggggcu

SEQ ID NO: 1399522 - RNA, 19 nt, Human
cugugccagagccuggggc

SEQ ID NO: 1399523 - RNA, 13 nt, Human
cugugauucagaa

SEQ ID NO: 1399524 - RNA, 17 nt, Human
cugugaggcuguccugu

SEQ ID NO: 1399525 - RNA, 16 nt, Human
cugugaggcuguccug

SEQ ID NO: 1399526 - RNA, 15 nt, Human
cugugaggcuguccu

SEQ ID NO: 1399527 - RNA, 12 nt, Human
cugugaggcugu

SEQ ID NO: 1399528 - RNA, 17 nt, Human
cugugagcccagcuggg

SEQ ID NO: 1399529 - RNA, 22 nt, Human
cugugaacccaggacaagcaug

SEQ ID NO: 1399530 - RNA, 19 nt, Human
cugugaacccaggacaagc

SEQ ID NO: 1399531 - RNA, 17 nt, Human
cugugaacccaggacaa

SEQ ID NO: 1399532 - RNA, 16 nt, Human
cugugaacccaggaca

SEQ ID NO: 1399533 - RNA, 15 nt, Human
cugugaacccaggac

SEQ ID NO: 1399534 - RNA, 14 nt, Human
cugugaacccagga

SEQ ID NO: 1399535 - RNA, 19 nt, Human
cugucugccccgcccucau

SEQ ID NO: 1399536 - RNA, 14 nt, Human
cugucugccccgcc

SEQ ID NO: 1399537 - RNA, 20 nt, Human
cugucugccaaccuaaaacu

SEQ ID NO: 1399538 - RNA, 17 nt, Human
cugucugccaaccuaaa

SEQ ID NO: 1399539 - RNA, 15 nt, Human
cugucugguggcccc

SEQ ID NO: 1399540 - RNA, 13 nt, Human
cugucugguggcc

SEQ ID NO: 1399541 - RNA, 16 nt, Human
cugucuggguggcuca

SEQ ID NO: 1399542 - RNA, 23 nt, Human
cugucugggugcuacuggggaaa

SEQ ID NO: 1399543 - RNA, 22 nt, Human
cugucugggugcuacuggggaa

SEQ ID NO: 1399544 - RNA, 21 nt, Human
cugucugggugcuacugggga

SEQ ID NO: 1399545 - RNA, 19 nt, Human
cugucugggugcuacuggg

SEQ ID NO: 1399546 - RNA, 17 nt, Human
cugucugggugcuacug

SEQ ID NO: 1399547 - RNA, 16 nt, Human
cugucugggugcuacu

SEQ ID NO: 1399548 - RNA, 15 nt, Human
cugucuggccccccu

SEQ ID NO: 1399549 - RNA, 16 nt, Human
cugucuggccccccug

SEQ ID NO: 1399550 - RNA, 19 nt, Human
cugucuggcaaugccacag

SEQ ID NO: 1399551 - RNA, 23 nt, Human
cugucuggcaaugccacagcccu

SEQ ID NO: 1399552 - RNA, 17 nt, Human
cugucuggcaaugccac

SEQ ID NO: 1399553 - RNA, 16 nt, Human
cugucuggcaaugcca

SEQ ID NO: 1399554 - RNA, 18 nt, Human
cugucuggaagaugggga

SEQ ID NO: 1399555 - RNA, 17 nt, Human
cugucuggaagaugggg

SEQ ID NO: 1399556 - RNA, 15 nt, Human
cugucugcucagaca

SEQ ID NO: 1399557 - RNA, 17 nt, Human
cugucuggguggcucac

SEQ ID NO: 1399558 - RNA, 23 nt, Human
cugucugguggccccguuucugg

SEQ ID NO: 1399559 - RNA, 14 nt, Human
cugucugucugucc

SEQ ID NO: 1399560 - RNA, 15 nt, Human
cugucugucuguccc

SEQ ID NO: 1399561 - RNA, 16 nt, Human
cugucugucuguccca

SEQ ID NO: 1399562 - RNA, 17 nt, Human
cugucugucugucccaa

SEQ ID NO: 1399563 - RNA, 14 nt, Human
cugucugucugucu

SEQ ID NO: 1399564 - RNA, 15 nt, Human
cugucugucugucug

SEQ ID NO: 1399565 - RNA, 21 nt, Human
cugucuuaaacuaaaugugca

SEQ ID NO: 1399566 - RNA, 19 nt, Human
cugucuuaaacuaaaugug

SEQ ID NO: 1399567 - RNA, 19 nt, Human
cugucuguuguauucauug

SEQ ID NO: 1399568 - RNA, 18 nt, Human
cugucuguuguauucauu

SEQ ID NO: 1399569 - RNA, 16 nt, Human
cugucuuauccuccac

SEQ ID NO: 1399570 - RNA, 14 nt, Human
cugucuuaauuuuc

SEQ ID NO: 1399571 - RNA, 11 nt, Human
cugucuuccca

SEQ ID NO: 1399572 - RNA, 21 nt, Human
cugucuuuuuucuaaaguaaa

SEQ ID NO: 1399573 - RNA, 16 nt, Human
cugucuuuaauucugu

SEQ ID NO: 1399574 - RNA, 14 nt, Human
cugucuucuggacu

SEQ ID NO: 1399575 - RNA, 15 nt, Human
cugucuucuggacug

SEQ ID NO: 1399576 - RNA, 13 nt, Human
cugucuucuggac

SEQ ID NO: 1399577 - RNA, 21 nt, Human
cugugggagccucgcaacccg

SEQ ID NO: 1399578 - RNA, 15 nt, Human
cugugggagccucgc

SEQ ID NO: 1399579 - RNA, 14 nt, Human
cugugggagccucg

SEQ ID NO: 1399580 - RNA, 13 nt, Human
cugugggagccuc

SEQ ID NO: 1399581 - RNA, 24 nt, Human
cugugggaaaugguacuguacagc

SEQ ID NO: 1399582 - RNA, 14 nt, Human
cugugggaaauggu

SEQ ID NO: 1399583 - RNA, 14 nt, Human
cugugggaugggau

SEQ ID NO: 1399584 - RNA, 16 nt, Human
cugugggagccucgca

SEQ ID NO: 1399585 - RNA, 23 nt, Human
cugugggggugagggucccaugu

SEQ ID NO: 1399586 - RNA, 24 nt, Human
cugugggggugagggucccaugug

SEQ ID NO: 1399587 - RNA, 19 nt, Human
cugugggggugugcccccu

SEQ ID NO: 1399588 - RNA, 22 nt, Human
cugugggucugggagucacaca

SEQ ID NO: 1399589 - RNA, 16 nt, Human
cugugggucugggagu

SEQ ID NO: 1399590 - RNA, 15 nt, Human
cuguggguaguauga

SEQ ID NO: 1399591 - RNA, 20 nt, Human
cugugggggugugcccccuu

SEQ ID NO: 1399592 - RNA, 16 nt, Human
cuguggucacagcgga

SEQ ID NO: 1399593 - RNA, 22 nt, Human
cugugguucugagauggcuccc

SEQ ID NO: 1399594 - RNA, 20 nt, Human
cugugguucugagauggcuc

SEQ ID NO: 1399595 - RNA, 18 nt, Human
cugugguucugagauggc

SEQ ID NO: 1399596 - RNA, 22 nt, Human
cuguggugugucccccucuguc

SEQ ID NO: 1399597 - RNA, 15 nt, Human
cuguggugugucccc

SEQ ID NO: 1399598 - RNA, 14 nt, Human
cugugguguguccc

SEQ ID NO: 1399599 - RNA, 22 nt, Human
cuguggccaugacccugccucu

SEQ ID NO: 1399600 - RNA, 20 nt, Human
cuguggccaugacccugccu

SEQ ID NO: 1399601 - RNA, 15 nt, Human
cuguggccaggaggu

SEQ ID NO: 1399602 - RNA, 14 nt, Human
cuguggccaggagg

SEQ ID NO: 1399603 - RNA, 13 nt, Human
cuguggccaggag

SEQ ID NO: 1399604 - RNA, 12 nt, Human
cuguggccagga

SEQ ID NO: 1399605 - RNA, 15 nt, Human
cuguggaucagagau

SEQ ID NO: 1399606 - RNA, 20 nt, Human
cuguggccccacccugggcc

SEQ ID NO: 1399607 - RNA, 18 nt, Human
cuguggccccacccuggg

SEQ ID NO: 1399608 - RNA, 17 nt, Human
cuguggccccacccugg

SEQ ID NO: 1399609 - RNA, 16 nt, Human
cuguggccccacccug

SEQ ID NO: 1399610 - RNA, 21 nt, Human
cuguggccccacccugggccc

SEQ ID NO: 1399611 - RNA, 18 nt, Human
cuguggccuaaccugccg

SEQ ID NO: 1399612 - RNA, 14 nt, Human
cuguggaucaaauc

SEQ ID NO: 1399613 - RNA, 24 nt, Human
cuguggaucaaauccagccugcug

SEQ ID NO: 1399614 - RNA, 15 nt, Human
cugugccucagagac

SEQ ID NO: 1399615 - RNA, 20 nt, Human
cugugccccuugacaacugg

SEQ ID NO: 1399616 - RNA, 23 nt, Human
cugugccccuuccgccacugggg

SEQ ID NO: 1399617 - RNA, 22 nt, Human
cugugccccuuccgccacuggg

SEQ ID NO: 1399618 - RNA, 23 nt, Human
cuguggaccauggaguggcagcc

SEQ ID NO: 1399619 - RNA, 18 nt, Human
cuguggaacauaaaaagg

SEQ ID NO: 1399620 - RNA, 21 nt, Human
cuguggaacauaaaaaggaca

SEQ ID NO: 1399621 - RNA, 19 nt, Human
cuguuaaauacaggaaaca

SEQ ID NO: 1399622 - RNA, 17 nt, Human
cuguuaaauacaggaaa

SEQ ID NO: 1399623 - RNA, 16 nt, Human
cuguuaaauacaggaa

SEQ ID NO: 1399624 - RNA, 15 nt, Human
cuguuaaauacagga

SEQ ID NO: 1399625 - RNA, 11 nt, Human
cuguuaaauac

SEQ ID NO: 1399626 - RNA, 22 nt, Human
cuguguuuugaaagaauagaac

SEQ ID NO: 1399627 - RNA, 18 nt, Human
cuguguuuugaaagaaua

SEQ ID NO: 1399628 - RNA, 22 nt, Human
cuguguugucucuagagcaggg

SEQ ID NO: 1399629 - RNA, 17 nt, Human
cuguguuuugaaagaau

SEQ ID NO: 1399630 - RNA, 19 nt, Human
cuguguugucucuagagca

SEQ ID NO: 1399631 - RNA, 14 nt, Human
cuguguugucucua

SEQ ID NO: 1399632 - RNA, 21 nt, Human
cuguguugccaagcuccaagc

SEQ ID NO: 1399633 - RNA, 19 nt, Human
cuguguugccaagcuccaa

SEQ ID NO: 1399634 - RNA, 17 nt, Human
cuguguugccaagcucc

SEQ ID NO: 1399635 - RNA, 16 nt, Human
cuguguugccaagcuc

SEQ ID NO: 1399636 - RNA, 14 nt, Human
cuguguugccaagc

SEQ ID NO: 1399637 - RNA, 13 nt, Human
cuguguugccaag

SEQ ID NO: 1399638 - RNA, 13 nt, Human
cuguguuccuucc

SEQ ID NO: 1399639 - RNA, 21 nt, Human
cuguguuccuuccgcuuggag

SEQ ID NO: 1399640 - RNA, 17 nt, Human
cuguguuaugcaaaagc

SEQ ID NO: 1399641 - RNA, 19 nt, Human
cuguguuaugcaaaagcaa

SEQ ID NO: 1399642 - RNA, 23 nt, Human
cuguguuacuaaaaaaaagauga

SEQ ID NO: 1399643 - RNA, 22 nt, Human
cuguguuacuaaaaaaaagaug

SEQ ID NO: 1399644 - RNA, 20 nt, Human
cugugugugcccucugggcu

SEQ ID NO: 1399645 - RNA, 21 nt, Human
cugugguuuucuuuugccaug

SEQ ID NO: 1399646 - RNA, 22 nt, Human
cugugguuuucuuuugccauga

SEQ ID NO: 1399647 - RNA, 18 nt, Human
cugugguuucauguuagu

SEQ ID NO: 1399648 - RNA, 17 nt, Human
cugugguuucauguuag

SEQ ID NO: 1399649 - RNA, 16 nt, Human
cugugguuucauguua

SEQ ID NO: 1399650 - RNA, 15 nt, Human
cugugguuucauguu

SEQ ID NO: 1399651 - RNA, 23 nt, Human
cugugguucugagauggcuccca

SEQ ID NO: 1399652 - RNA, 20 nt, Human
cugugugaaacuuucauucc

SEQ ID NO: 1399653 - RNA, 20 nt, Human
cugugucuuucacagcuccu

SEQ ID NO: 1399654 - RNA, 18 nt, Human
cugugugaauaccugcuc

SEQ ID NO: 1399655 - RNA, 19 nt, Human
cugugugaauaccugcuca

SEQ ID NO: 1399656 - RNA, 18 nt, Human
cugugugacucaaaccaa

SEQ ID NO: 1399657 - RNA, 16 nt, Human
cugugugcacaaauau

SEQ ID NO: 1399658 - RNA, 14 nt, Human
cugugugcucagga

SEQ ID NO: 1399659 - RNA, 23 nt, Human
cugugugugcccucugggcucug

SEQ ID NO: 1399660 - RNA, 19 nt, Human
cugugugugcccucugggc

SEQ ID NO: 1399661 - RNA, 18 nt, Human
cugugugugcccucuggg

SEQ ID NO: 1399662 - RNA, 16 nt, Human
cugugugugcccucug

SEQ ID NO: 1399663 - RNA, 13 nt, Human
cugugugugcccu

SEQ ID NO: 1399664 - RNA, 11 nt, Human
cugugugugcc

SEQ ID NO: 1399665 - RNA, 22 nt, Human
cuguguguccaaaacugccuca

SEQ ID NO: 1399666 - RNA, 21 nt, Human
cuguguguccaaaacugccuc

SEQ ID NO: 1399667 - RNA, 19 nt, Human
cuguguguccaaaacugcc

SEQ ID NO: 1399668 - RNA, 15 nt, Human
cuguguguccaaaac

SEQ ID NO: 1399669 - RNA, 15 nt, Human
cuguugcacgugugu

SEQ ID NO: 1399670 - RNA, 23 nt, Human
cuguugcacguguguuuuucuau

SEQ ID NO: 1399671 - RNA, 22 nt, Human
cuguugcacguguguuuuucua

SEQ ID NO: 1399672 - RNA, 20 nt, Human
cuguugcacguguguuuuuc

SEQ ID NO: 1399673 - RNA, 18 nt, Human
cuguugcacguguguuuu

SEQ ID NO: 1399674 - RNA, 17 nt, Human
cuguugcacguguguuu

SEQ ID NO: 1399675 - RNA, 17 nt, Human
cuguugagcaucacaga

SEQ ID NO: 1399676 - RNA, 17 nt, Human
cuguugaauuucccaca

SEQ ID NO: 1399677 - RNA, 23 nt, Human
cuguucuuucuggcuaugcauuu

SEQ ID NO: 1399678 - RNA, 23 nt, Human
cuguucuuccucagccagccucg

SEQ ID NO: 1399679 - RNA, 15 nt, Human
cuguucuuuccaaag

SEQ ID NO: 1399680 - RNA, 16 nt, Human
cuguucuuuccaaagu

SEQ ID NO: 1399681 - RNA, 19 nt, Human
cuguucuuuccaaaguaca

SEQ ID NO: 1399682 - RNA, 21 nt, Human
cuguucuuuccaaaguacacu

SEQ ID NO: 1399683 - RNA, 13 nt, Human
cuguucuuucugg

SEQ ID NO: 1399684 - RNA, 14 nt, Human
cuguucuuucuggc

SEQ ID NO: 1399685 - RNA, 21 nt, Human
cuguucuuucuggcuaugcau

SEQ ID NO: 1399686 - RNA, 22 nt, Human
cuguucuuccucagccagccuc

SEQ ID NO: 1399687 - RNA, 20 nt, Human
cuguucuuccucagccagcc

SEQ ID NO: 1399688 - RNA, 19 nt, Human
cuguucuuccucagccagc

SEQ ID NO: 1399689 - RNA, 18 nt, Human
cuguucuuccucagccag

SEQ ID NO: 1399690 - RNA, 17 nt, Human
cuguucuuccucagcca

SEQ ID NO: 1399691 - RNA, 16 nt, Human
cuguucuuccucagcc

SEQ ID NO: 1399692 - RNA, 23 nt, Human
cuguucuuagcucaaugagcaug

SEQ ID NO: 1399693 - RNA, 21 nt, Human
cuguucuuagcucaaugagca

SEQ ID NO: 1399694 - RNA, 19 nt, Human
cuguucuuagcucaaugag

SEQ ID NO: 1399695 - RNA, 17 nt, Human
cuguucuuagcucaaug

SEQ ID NO: 1399696 - RNA, 16 nt, Human
cuguucuuagcucaau

SEQ ID NO: 1399697 - RNA, 13 nt, Human
cuguucuuagcuc

SEQ ID NO: 1399698 - RNA, 21 nt, Human
cuguucuguuucaaggcacuc

SEQ ID NO: 1399699 - RNA, 15 nt, Human
cuguucuguuucaag

SEQ ID NO: 1399700 - RNA, 14 nt, Human
cuguucuguuucaa

SEQ ID NO: 1399701 - RNA, 14 nt, Human
cuguucugugucuu

SEQ ID NO: 1399702 - RNA, 13 nt, Human
cuguucugugucu

SEQ ID NO: 1399703 - RNA, 11 nt, Human
cuguucugugu

SEQ ID NO: 1399704 - RNA, 19 nt, Human
cuguuaacugaauaccacu

SEQ ID NO: 1399705 - RNA, 22 nt, Human
cuguuaacugaauaccacucug

SEQ ID NO: 1399706 - RNA, 18 nt, Human
cuguuaacugaauaccac

SEQ ID NO: 1399707 - RNA, 17 nt, Human
cuguuaacugaauacca

SEQ ID NO: 1399708 - RNA, 15 nt, Human
cuguuaacugaauac

SEQ ID NO: 1399709 - RNA, 14 nt, Human
cuguuaacugaaua

SEQ ID NO: 1399710 - RNA, 13 nt, Human
cuguuaacugaau

SEQ ID NO: 1399711 - RNA, 12 nt, Human
cuguuaacugaa

SEQ ID NO: 1399712 - RNA, 23 nt, Human
cuguuaaauacaggaaacaguug

SEQ ID NO: 1399713 - RNA, 15 nt, Human
cuguuuuucacauuu

SEQ ID NO: 1399714 - RNA, 17 nt, Human
cuguuuuucagggaggu

SEQ ID NO: 1399715 - RNA, 21 nt, Human
cuguuuuucagggagguggcu

SEQ ID NO: 1399716 - RNA, 13 nt, Human
cuguuuuucacau

SEQ ID NO: 1399717 - RNA, 12 nt, Human
cuguuuuucaca

SEQ ID NO: 1399718 - RNA, 21 nt, Human
cuguuuucucucggcucccca

SEQ ID NO: 1399719 - RNA, 13 nt, Human
cuguuuucccccc

SEQ ID NO: 1399720 - RNA, 12 nt, Human
cuguuuuccccc

SEQ ID NO: 1399721 - RNA, 16 nt, Human
cuguuuucccacgagg

SEQ ID NO: 1399722 - RNA, 21 nt, Human
cuguuuuacaaguuggaguca

SEQ ID NO: 1399723 - RNA, 17 nt, Human
cuguuuuacaaguugga

SEQ ID NO: 1399724 - RNA, 14 nt, Human
cuguuuuacaaguu

SEQ ID NO: 1399725 - RNA, 15 nt, Human
cuguuuuauaauuuu

SEQ ID NO: 1399726 - RNA, 22 nt, Human
cuguuuggaaauugauuuugaa

SEQ ID NO: 1399727 - RNA, 14 nt, Human
cuguuuggccucuc

SEQ ID NO: 1399728 - RNA, 20 nt, Human
cuguuuguuuacaaaaucag

SEQ ID NO: 1399729 - RNA, 14 nt, Human
cuguuuuauaauuu

SEQ ID NO: 1399730 - RNA, 16 nt, Human
cuguuucagaggcuca

SEQ ID NO: 1399731 - RNA, 22 nt, Human
cuguuucaaggcacucuagauu

SEQ ID NO: 1399732 - RNA, 21 nt, Human
cuguuucaaggcacucuagau

SEQ ID NO: 1399733 - RNA, 11 nt, Human
cuguuucaagg

SEQ ID NO: 1399734 - RNA, 17 nt, Human
cuguuuaguagcaguga

SEQ ID NO: 1399735 - RNA, 23 nt, Human
cuguuugacaccucuuuuuucgu

SEQ ID NO: 1399736 - RNA, 19 nt, Human
cuguuugacaccucuuuuu

SEQ ID NO: 1399737 - RNA, 15 nt, Human
cuguuugacaccucu

SEQ ID NO: 1399738 - RNA, 21 nt, Human
cuguuugaggaaagcaagaau

SEQ ID NO: 1399739 - RNA, 23 nt, Human
cuguuuggaaauugauuuugaac

SEQ ID NO: 1399740 - RNA, 23 nt, Human
cuguuuggaaauaaaucuuccua

SEQ ID NO: 1399741 - RNA, 13 nt, Human
cuguuugcugugc

SEQ ID NO: 1399742 - RNA, 22 nt, Human
cuguuugcauuugauacauuuu

SEQ ID NO: 1399743 - RNA, 18 nt, Human
cuguuugcauuugauaca

SEQ ID NO: 1399744 - RNA, 21 nt, Human
cuguugccaggcuggagugca

SEQ ID NO: 1399745 - RNA, 17 nt, Human
cuguuuagauaauacac

SEQ ID NO: 1399746 - RNA, 18 nt, Human
cuguuuagauaauacacc

SEQ ID NO: 1399747 - RNA, 15 nt, Human
cuguuucaaacuuua

SEQ ID NO: 1399748 - RNA, 17 nt, Human
cuguuucaaacuuuacu

SEQ ID NO: 1399749 - RNA, 13 nt, Human
cuuacucuaagau

SEQ ID NO: 1399750 - RNA, 21 nt, Human
cuuacugauauauuuuacaau

SEQ ID NO: 1399751 - RNA, 19 nt, Human
cuuacugauauauuuuaca

SEQ ID NO: 1399752 - RNA, 15 nt, Human
cuuacugauauauuu

SEQ ID NO: 1399753 - RNA, 12 nt, Human
cuuacugauaua

SEQ ID NO: 1399754 - RNA, 19 nt, Human
cuuacucuucuugaaauuu

SEQ ID NO: 1399755 - RNA, 15 nt, Human
cuuacucuucuugaa

SEQ ID NO: 1399756 - RNA, 20 nt, Human
cuuacucuaagaucuuagau

SEQ ID NO: 1399757 - RNA, 12 nt, Human
cuuacucuaaga

SEQ ID NO: 1399758 - RNA, 20 nt, Human
cuuacuccugugggagccuc

SEQ ID NO: 1399759 - RNA, 13 nt, Human
cuuaccuuuuuau

SEQ ID NO: 1399760 - RNA, 21 nt, Human
cuuaccuggcccaucagggua

SEQ ID NO: 1399761 - RNA, 20 nt, Human
cuuaccuguaugucuccagu

SEQ ID NO: 1399762 - RNA, 19 nt, Human
cuuaccugggcauucuugu

SEQ ID NO: 1399763 - RNA, 18 nt, Human
cuuaccuggcccaucagg

SEQ ID NO: 1399764 - RNA, 13 nt, Human
cuuaccuggccca

SEQ ID NO: 1399765 - RNA, 12 nt, Human
cuuaccuggccc

SEQ ID NO: 1399766 - RNA, 15 nt, Human
cuuaauuuauuauua

SEQ ID NO: 1399767 - RNA, 23 nt, Human
cuuagaaaaccagcucagcacug

SEQ ID NO: 1399768 - RNA, 24 nt, Human
cuuagaaaaccagcucagcacugc

SEQ ID NO: 1399769 - RNA, 21 nt, Human
cuuagaaaaccagcucagcac

SEQ ID NO: 1399770 - RNA, 20 nt, Human
cuuagaaaaccagcucagca

SEQ ID NO: 1399771 - RNA, 19 nt, Human
cuuagaaaaccagcucagc

SEQ ID NO: 1399772 - RNA, 18 nt, Human
cuuagaaaaccagcucag

SEQ ID NO: 1399773 - RNA, 11 nt, Human
cuuagaaaacc

SEQ ID NO: 1399774 - RNA, 11 nt, Human
cuuacugcuug

SEQ ID NO: 1399775 - RNA, 13 nt, Human
cuuacuguacaug

SEQ ID NO: 1399776 - RNA, 15 nt, Human
cuuagacucuuuucc

SEQ ID NO: 1399777 - RNA, 21 nt, Human
cuuagacagaggcccucaagu

SEQ ID NO: 1399778 - RNA, 20 nt, Human
cuuagacagaggcccucaag

SEQ ID NO: 1399779 - RNA, 19 nt, Human
cuuagacagaggcccucaa

SEQ ID NO: 1399780 - RNA, 16 nt, Human
cuuagaauacaguuuu

SEQ ID NO: 1399781 - RNA, 14 nt, Human
cuuaaucuuugaaa

SEQ ID NO: 1399782 - RNA, 19 nt, Human
cuuaauauauauauccaga

SEQ ID NO: 1399783 - RNA, 12 nt, Human
cuuaaugaaguu

SEQ ID NO: 1399784 - RNA, 14 nt, Human
cuuaaugaaguuug

SEQ ID NO: 1399785 - RNA, 15 nt, Human
cuuaaugaaguuuga

SEQ ID NO: 1399786 - RNA, 17 nt, Human
cuuaaugaaguuugaau

SEQ ID NO: 1399787 - RNA, 18 nt, Human
cuuaaugaaguuugaaug

SEQ ID NO: 1399788 - RNA, 19 nt, Human
cuuaaugaaguuugaaugu

SEQ ID NO: 1399789 - RNA, 20 nt, Human
cuuaaugaaguuugaauguu

SEQ ID NO: 1399790 - RNA, 21 nt, Human
cuuaaugaaguuugaauguua

SEQ ID NO: 1399791 - RNA, 23 nt, Human
cuuaaugaaguuugaauguuaaa

SEQ ID NO: 1399792 - RNA, 22 nt, Human
cuuaaugaaguuugaauguuaa

SEQ ID NO: 1399793 - RNA, 18 nt, Human
cuuaauuauuauuugugu

SEQ ID NO: 1399794 - RNA, 15 nt, Human
cuuaauuauuauuug

SEQ ID NO: 1399795 - RNA, 11 nt, Human
cuuaauuauua

SEQ ID NO: 1399796 - RNA, 16 nt, Human
cuuaauuuauuauuaa

SEQ ID NO: 1399797 - RNA, 20 nt, Human
cuuaauugccaccucuaaca

SEQ ID NO: 1399798 - RNA, 16 nt, Human
cuuaauugccaccucu

SEQ ID NO: 1399799 - RNA, 19 nt, Human
cuuaauuauuauuuguguu

SEQ ID NO: 1399800 - RNA, 13 nt, Human
cuuaauucaaaua

SEQ ID NO: 1399801 - RNA, 20 nt, Human
cuuaauucuuagcucauucu

SEQ ID NO: 1399802 - RNA, 23 nt, Human
cuuaagaccuacuguucuaaagc

SEQ ID NO: 1399803 - RNA, 22 nt, Human
cuuaagaccuacuguucuaaag

SEQ ID NO: 1399804 - RNA, 20 nt, Human
cuuaagaccuacuguucuaa

SEQ ID NO: 1399805 - RNA, 15 nt, Human
cuuaaggcucuuuug

SEQ ID NO: 1399806 - RNA, 21 nt, Human
cuuaaggauggagccagcucu

SEQ ID NO: 1399807 - RNA, 13 nt, Human
cuuaauacuaagg

SEQ ID NO: 1399808 - RNA, 22 nt, Human
cuuaauacucaaaugaguaaca

SEQ ID NO: 1399809 - RNA, 18 nt, Human
cuuaauacuaccuugaaa

SEQ ID NO: 1399810 - RNA, 16 nt, Human
cuuaauacuaccuuga

SEQ ID NO: 1399811 - RNA, 21 nt, Human
cuuaagguguagccacaccag

SEQ ID NO: 1399812 - RNA, 17 nt, Human
cuuaagguguagccaca

SEQ ID NO: 1399813 - RNA, 14 nt, Human
cuuaagguguagcc

SEQ ID NO: 1399814 - RNA, 20 nt, Human
cuuaauaaauuguguuuccu

SEQ ID NO: 1399815 - RNA, 17 nt, Human
cuuaacaguuguauuua

SEQ ID NO: 1399816 - RNA, 16 nt, Human
cuuaacaguuguauuu

SEQ ID NO: 1399817 - RNA, 14 nt, Human
cuuaaaaaguuaua

SEQ ID NO: 1399818 - RNA, 12 nt, Human
cuuaaaaaguua

SEQ ID NO: 1399819 - RNA, 23 nt, Human
cuuaagaagacugcauuauauuu

SEQ ID NO: 1399820 - RNA, 17 nt, Human
cuuaaccagaucauugu

SEQ ID NO: 1399821 - RNA, 16 nt, Human
cuuccagaaaacaaaa

SEQ ID NO: 1399822 - RNA, 13 nt, Human
cuuccagaaauac

SEQ ID NO: 1399823 - RNA, 18 nt, Human
cuuccacugagggcaguc

SEQ ID NO: 1399824 - RNA, 19 nt, Human
cuuccaaugucuggagacc

SEQ ID NO: 1399825 - RNA, 23 nt, Human
cuuccccacccaccaacccucag

SEQ ID NO: 1399826 - RNA, 20 nt, Human
cuuccccacccaccaacccu

SEQ ID NO: 1399827 - RNA, 19 nt, Human
cuuccagauccuggaaauc

SEQ ID NO: 1399828 - RNA, 15 nt, Human
cuucccccaccacca

SEQ ID NO: 1399829 - RNA, 13 nt, Human
cuucccccaccac

SEQ ID NO: 1399830 - RNA, 21 nt, Human
cuuccccauggcccugagcga

SEQ ID NO: 1399831 - RNA, 19 nt, Human
cuuccccauggcccugagc

SEQ ID NO: 1399832 - RNA, 18 nt, Human
cuuccccaucuucuaaac

SEQ ID NO: 1399833 - RNA, 18 nt, Human
cuuccccagacgccuggc

SEQ ID NO: 1399834 - RNA, 21 nt, Human
cuuccccagacgccuggcugc

SEQ ID NO: 1399835 - RNA, 16 nt, Human
cuucccccaccaccaa

SEQ ID NO: 1399836 - RNA, 16 nt, Human
cuucccuaucuuugcc

SEQ ID NO: 1399837 - RNA, 17 nt, Human
cuucccuaucuuugcca

SEQ ID NO: 1399838 - RNA, 18 nt, Human
cuucccuaucuuugccac

SEQ ID NO: 1399839 - RNA, 22 nt, Human
cuuccuggacagcugugccucg

SEQ ID NO: 1399840 - RNA, 21 nt, Human
cuuccuggacagcugugccuc

SEQ ID NO: 1399841 - RNA, 20 nt, Human
cuuccuggacagcugugccu

SEQ ID NO: 1399842 - RNA, 17 nt, Human
cuuccuggacagcugug

SEQ ID NO: 1399843 - RNA, 16 nt, Human
cuuccuggacagcugu

SEQ ID NO: 1399844 - RNA, 15 nt, Human
cuuccuggacagcug

SEQ ID NO: 1399845 - RNA, 14 nt, Human
cuuccuggacagcu

SEQ ID NO: 1399846 - RNA, 13 nt, Human
cuuccuggacagc

SEQ ID NO: 1399847 - RNA, 16 nt, Human
cuuccugcuugccaag

SEQ ID NO: 1399848 - RNA, 14 nt, Human
cuuccugcuugcca

SEQ ID NO: 1399849 - RNA, 12 nt, Human
cuuccugcuugc

SEQ ID NO: 1399850 - RNA, 14 nt, Human
cuuccucagccagc

SEQ ID NO: 1399851 - RNA, 22 nt, Human
cuuccugccagccccugccauu

SEQ ID NO: 1399852 - RNA, 12 nt, Human
cuuccucagcca

SEQ ID NO: 1399853 - RNA, 11 nt, Human
cuuccucagcc

SEQ ID NO: 1399854 - RNA, 21 nt, Human
cuuccugccccaacuccuucc

SEQ ID NO: 1399855 - RNA, 21 nt, Human
cuuccuggagcagaagcagca

SEQ ID NO: 1399856 - RNA, 18 nt, Human
cuuccuguccagcuccaa

SEQ ID NO: 1399857 - RNA, 19 nt, Human
cuuccuggagcagaagcag

SEQ ID NO: 1399858 - RNA, 18 nt, Human
cuuccuggagcagaagca

SEQ ID NO: 1399859 - RNA, 13 nt, Human
cuuccuggagcag

SEQ ID NO: 1399860 - RNA, 12 nt, Human
cuuccuggagca

SEQ ID NO: 1399861 - RNA, 22 nt, Human
cuuccuggagacugcccagcua

SEQ ID NO: 1399862 - RNA, 14 nt, Human
cuuccuggagacug

SEQ ID NO: 1399863 - RNA, 24 nt, Human
cuuccuggacagcugugccucgcu

SEQ ID NO: 1399864 - RNA, 23 nt, Human
cuuccuggacagcugugccucgc

SEQ ID NO: 1399865 - RNA, 22 nt, Human
cuuccuaguuuucuccucccag

SEQ ID NO: 1399866 - RNA, 23 nt, Human
cuuccuaguuuucuccucccagg

SEQ ID NO: 1399867 - RNA, 17 nt, Human
cuuccuaguuuucuccu

SEQ ID NO: 1399868 - RNA, 15 nt, Human
cuuccuaguuuucuc

SEQ ID NO: 1399869 - RNA, 20 nt, Human
cuucccugacucauucugaa

SEQ ID NO: 1399870 - RNA, 13 nt, Human
cuucccugacuca

SEQ ID NO: 1399871 - RNA, 17 nt, Human
cuucccugaagcuccca

SEQ ID NO: 1399872 - RNA, 15 nt, Human
cuucccugaagcucc

SEQ ID NO: 1399873 - RNA, 13 nt, Human
cuucccugaagcu

SEQ ID NO: 1399874 - RNA, 22 nt, Human
cuucccucuuccuucccugcug

SEQ ID NO: 1399875 - RNA, 22 nt, Human
cuucccuaucuuugccacccuc

SEQ ID NO: 1399876 - RNA, 23 nt, Human
cuucccuaucuuugccacccuca

SEQ ID NO: 1399877 - RNA, 14 nt, Human
cuucccugacucau

SEQ ID NO: 1399878 - RNA, 19 nt, Human
cuucccugcugugaaagaa

SEQ ID NO: 1399879 - RNA, 23 nt, Human
cuucccuggaaaccuuccaccca

SEQ ID NO: 1399880 - RNA, 18 nt, Human
cuucccugaagcucccac

SEQ ID NO: 1399881 - RNA, 22 nt, Human
cuucccuggaaaccuuccaccc

SEQ ID NO: 1399882 - RNA, 14 nt, Human
cuucucaugaucca

SEQ ID NO: 1399883 - RNA, 17 nt, Human
cuucucauccugcaggc

SEQ ID NO: 1399884 - RNA, 16 nt, Human
cuucucauccugcagg

SEQ ID NO: 1399885 - RNA, 15 nt, Human
cuucucauccugcag

SEQ ID NO: 1399886 - RNA, 22 nt, Human
cuucgucuuucccauggggagg

SEQ ID NO: 1399887 - RNA, 21 nt, Human
cuucgucuuucccauggggag

SEQ ID NO: 1399888 - RNA, 14 nt, Human
cuucgucuuuccca

SEQ ID NO: 1399889 - RNA, 15 nt, Human
cuucggggcugggaa

SEQ ID NO: 1399890 - RNA, 14 nt, Human
cuucggggcuggga

SEQ ID NO: 1399891 - RNA, 16 nt, Human
cuucgggcugugcccg

SEQ ID NO: 1399892 - RNA, 17 nt, Human
cuuccuuuuaucaguag

SEQ ID NO: 1399893 - RNA, 21 nt, Human
cuucgcuucuugccucugugc

SEQ ID NO: 1399894 - RNA, 20 nt, Human
cuucgcuucuugccucugug

SEQ ID NO: 1399895 - RNA, 18 nt, Human
cuucgcuucuugccucug

SEQ ID NO: 1399896 - RNA, 17 nt, Human
cuucgcuucuugccucu

SEQ ID NO: 1399897 - RNA, 16 nt, Human
cuucgcuucuugccuc

SEQ ID NO: 1399898 - RNA, 15 nt, Human
cuucgcuucuugccu

SEQ ID NO: 1399899 - RNA, 21 nt, Human
cuuccuucagagagcagugcu

SEQ ID NO: 1399900 - RNA, 16 nt, Human
cuuccuucagagagca

SEQ ID NO: 1399901 - RNA, 15 nt, Human
cuuccuucagagagc

SEQ ID NO: 1399902 - RNA, 14 nt, Human
cuuccuucagagag

SEQ ID NO: 1399903 - RNA, 13 nt, Human
cuuccuucagaga

SEQ ID NO: 1399904 - RNA, 19 nt, Human
cuuccuuacucccaggcac

SEQ ID NO: 1399905 - RNA, 23 nt, Human
cuuccuguuuuucacauuuuccu

SEQ ID NO: 1399906 - RNA, 18 nt, Human
cuuccuguuuuucacauu

SEQ ID NO: 1399907 - RNA, 17 nt, Human
cuuccuguuuuucacau

SEQ ID NO: 1399908 - RNA, 16 nt, Human
cuuccuguuuuucaca

SEQ ID NO: 1399909 - RNA, 22 nt, Human
cuuccuguuuaaaaaaccacau

SEQ ID NO: 1399910 - RNA, 23 nt, Human
cuuccuguguguccaaaacugcc

SEQ ID NO: 1399911 - RNA, 15 nt, Human
cuuccugugugucca

SEQ ID NO: 1399912 - RNA, 16 nt, Human
cuuccuucauuuccuc

SEQ ID NO: 1399913 - RNA, 15 nt, Human
cuuccuucauuuccu

SEQ ID NO: 1399914 - RNA, 13 nt, Human
cuuccuucauuuc

SEQ ID NO: 1399915 - RNA, 23 nt, Human
cuuccuucagagagcagugcuuu

SEQ ID NO: 1399916 - RNA, 22 nt, Human
cuuccuucagagagcagugcuu

SEQ ID NO: 1399917 - RNA, 15 nt, Human
cuuccuucccugcug

SEQ ID NO: 1399918 - RNA, 18 nt, Human
cuucaagaaaacaggcac

SEQ ID NO: 1399919 - RNA, 14 nt, Human
cuucaagcucugag

SEQ ID NO: 1399920 - RNA, 13 nt, Human
cuucaagcucuga

SEQ ID NO: 1399921 - RNA, 12 nt, Human
cuucaagcucug

SEQ ID NO: 1399922 - RNA, 22 nt, Human
cuucaagcauggcuauuuuaua

SEQ ID NO: 1399923 - RNA, 20 nt, Human
cuucaacaauucuaaaauga

SEQ ID NO: 1399924 - RNA, 16 nt, Human
cuucaaaugccugacu

SEQ ID NO: 1399925 - RNA, 13 nt, Human
cuucaaaugccug

SEQ ID NO: 1399926 - RNA, 17 nt, Human
cuucaaauccuugaaga

SEQ ID NO: 1399927 - RNA, 21 nt, Human
cuucacaaucugucaguucua

SEQ ID NO: 1399928 - RNA, 17 nt, Human
cuucaagcucugaggga

SEQ ID NO: 1399929 - RNA, 18 nt, Human
cuucagagagcagugcuu

SEQ ID NO: 1399930 - RNA, 17 nt, Human
cuucagagagcagugcu

SEQ ID NO: 1399931 - RNA, 14 nt, Human
cuucagagagcagu

SEQ ID NO: 1399932 - RNA, 14 nt, Human
cuucacauauugau

SEQ ID NO: 1399933 - RNA, 23 nt, Human
cuucacauauugauuuccguuaa

SEQ ID NO: 1399934 - RNA, 23 nt, Human
cuucagaggcccucgcugccagc

SEQ ID NO: 1399935 - RNA, 21 nt, Human
cuucagaggcccucgcugcca

SEQ ID NO: 1399936 - RNA, 22 nt, Human
cuucagagagcagugcuuuugg

SEQ ID NO: 1399937 - RNA, 20 nt, Human
cuucagagagcagugcuuuu

SEQ ID NO: 1399938 - RNA, 19 nt, Human
cuucagagagcagugcuuu

SEQ ID NO: 1399939 - RNA, 14 nt, Human
cuucagcacuuuag

SEQ ID NO: 1399940 - RNA, 15 nt, Human
cuucagcacuuuaga

SEQ ID NO: 1399941 - RNA, 16 nt, Human
cuucagcacuuuagaa

SEQ ID NO: 1399942 - RNA, 17 nt, Human
cuucaggaucaaguccu

SEQ ID NO: 1399943 - RNA, 19 nt, Human
cuucaggacacucacuaca

SEQ ID NO: 1399944 - RNA, 16 nt, Human
cuucaggacacucacu

SEQ ID NO: 1399945 - RNA, 14 nt, Human
cuucagcugccagu

SEQ ID NO: 1399946 - RNA, 17 nt, Human
cuucagguccaggcugu

SEQ ID NO: 1399947 - RNA, 18 nt, Human
cuucagguccaggcugug

SEQ ID NO: 1399948 - RNA, 10 nt, Human
cuucaggucc

SEQ ID NO: 1399949 - RNA, 21 nt, Human
cuucaggcccccgccuuggcc

SEQ ID NO: 1399950 - RNA, 16 nt, Human
cuucagcgguuuauau

SEQ ID NO: 1399951 - RNA, 19 nt, Human
cuuccaaacaggcucagag

SEQ ID NO: 1399952 - RNA, 24 nt, Human
cuucauuugggaugcuacucuagu

SEQ ID NO: 1399953 - RNA, 18 nt, Human
cuuccaaugucuggagac

SEQ ID NO: 1399954 - RNA, 17 nt, Human
cuuccaaugucuggaga

SEQ ID NO: 1399955 - RNA, 16 nt, Human
cuuccaaacuaauuuu

SEQ ID NO: 1399956 - RNA, 18 nt, Human
cuucagguugguuuaauc

SEQ ID NO: 1399957 - RNA, 22 nt, Human
cuucaguaaaugugauucaccu

SEQ ID NO: 1399958 - RNA, 13 nt, Human
cuucagucucuau

SEQ ID NO: 1399959 - RNA, 17 nt, Human
cuucagucucuauacca

SEQ ID NO: 1399960 - RNA, 21 nt, Human
cuucagucucuauaccaauaa

SEQ ID NO: 1399961 - RNA, 20 nt, Human
cuucaugugucccagaagau

SEQ ID NO: 1399962 - RNA, 17 nt, Human
cuucaugugucccagaa

SEQ ID NO: 1399963 - RNA, 16 nt, Human
cuucaugugucccaga

SEQ ID NO: 1399964 - RNA, 15 nt, Human
cuucaugugucccag

SEQ ID NO: 1399965 - RNA, 14 nt, Human
cuucauguguccca

SEQ ID NO: 1399966 - RNA, 13 nt, Human
cuucauguguccc

SEQ ID NO: 1399967 - RNA, 21 nt, Human
cuucauggcagaaggcaaacc

SEQ ID NO: 1399968 - RNA, 15 nt, Human
cuucauggcagaagg

SEQ ID NO: 1399969 - RNA, 23 nt, Human
cuucauggaugggggaacucaga

SEQ ID NO: 1399970 - RNA, 23 nt, Human
cuucagucucuauaccaauaaag

SEQ ID NO: 1399971 - RNA, 22 nt, Human
cuucagucucuauaccaauaaa

SEQ ID NO: 1399972 - RNA, 22 nt, Human
cuuuguuccccacuggagcaga

SEQ ID NO: 1399973 - RNA, 19 nt, Human
cuuuguuccccacuggagc

SEQ ID NO: 1399974 - RNA, 18 nt, Human
cuuuguuccccacuggag

SEQ ID NO: 1399975 - RNA, 16 nt, Human
cuuuguuccccacugg

SEQ ID NO: 1399976 - RNA, 12 nt, Human
cuuuguucccca

SEQ ID NO: 1399977 - RNA, 18 nt, Human
cuuuguucauagcccagu

SEQ ID NO: 1399978 - RNA, 17 nt, Human
cuuugugauuuuuguaa

SEQ ID NO: 1399979 - RNA, 18 nt, Human
cuuugugauuuuuguaau

SEQ ID NO: 1399980 - RNA, 19 nt, Human
cuuugugauuuuuguaauu

SEQ ID NO: 1399981 - RNA, 21 nt, Human
cuuuggcuuauaauucuuuca

SEQ ID NO: 1399982 - RNA, 17 nt, Human
cuuugggaauauuugaa

SEQ ID NO: 1399983 - RNA, 18 nt, Human
cuuugggaauauuugaau

SEQ ID NO: 1399984 - RNA, 19 nt, Human
cuuugggaauauuugaauc

SEQ ID NO: 1399985 - RNA, 20 nt, Human
cuuugggaauauuugaaucu

SEQ ID NO: 1399986 - RNA, 23 nt, Human
cuuugggaauauuugaaucuugu

SEQ ID NO: 1399987 - RNA, 14 nt, Human
cuuugugauuuuug

SEQ ID NO: 1399988 - RNA, 18 nt, Human
cuuuggcuuauaauucuu

SEQ ID NO: 1399989 - RNA, 21 nt, Human
cuuuggaaguuuagcucugag

SEQ ID NO: 1399990 - RNA, 20 nt, Human
cuuuggaccuaaauggccuc

SEQ ID NO: 1399991 - RNA, 17 nt, Human
cuuugcucuucaagaaa

SEQ ID NO: 1399992 - RNA, 17 nt, Human
cuuucccagucugucga

SEQ ID NO: 1399993 - RNA, 16 nt, Human
cuuucccauggggagg

SEQ ID NO: 1399994 - RNA, 15 nt, Human
cuuucccagucuguc

SEQ ID NO: 1399995 - RNA, 23 nt, Human
cuuucccaccccaaccugcucuc

SEQ ID NO: 1399996 - RNA, 22 nt, Human
cuuucccaccccacgccuuauc

SEQ ID NO: 1399997 - RNA, 22 nt, Human
cuuucccaccccaaccugcucu

SEQ ID NO: 1399998 - RNA, 21 nt, Human
cuuucccaccccaaccugcuc

SEQ ID NO: 1399999 - RNA, 15 nt, Human
cuuucccaccccaac

SEQ ID NO: 1400000 - RNA, 22 nt, Human
cuuuggaaguuuagcucugaga

SEQ ID NO: 1400001 - RNA, 20 nt, Human
cuuuggaaguuuagcucuga

SEQ ID NO: 1400002 - RNA, 18 nt, Human
cuuuggaaguuuagcucu

SEQ ID NO: 1400003 - RNA, 22 nt, Human
cuuugcugugaggcuguccugu

SEQ ID NO: 1400004 - RNA, 21 nt, Human
cuuugcugugaggcuguccug

SEQ ID NO: 1400005 - RNA, 17 nt, Human
cuuugcugugaggcugu

SEQ ID NO: 1400006 - RNA, 15 nt, Human
cuuugcugcauggca

SEQ ID NO: 1400007 - RNA, 18 nt, Human
cuuugcugagccuguaaa

SEQ ID NO: 1400008 - RNA, 22 nt, Human
cuuuucccaaagcaucccucuu

SEQ ID NO: 1400009 - RNA, 22 nt, Human
cuuuucccaaaauguugaaaua

SEQ ID NO: 1400010 - RNA, 18 nt, Human
cuuuucccaaaauguuga

SEQ ID NO: 1400011 - RNA, 20 nt, Human
cuuuucaugcaaacucuuug

SEQ ID NO: 1400012 - RNA, 19 nt, Human
cuuuucaugcaaacucuuu

SEQ ID NO: 1400013 - RNA, 17 nt, Human
cuuuucaugcaaacucu

SEQ ID NO: 1400014 - RNA, 15 nt, Human
cuuuucaugcaaacu

SEQ ID NO: 1400015 - RNA, 14 nt, Human
cuuuucaugcaaac

SEQ ID NO: 1400016 - RNA, 13 nt, Human
cuuuucaugcaaa

SEQ ID NO: 1400017 - RNA, 20 nt, Human
cuuuucauaggucugaaauu

SEQ ID NO: 1400018 - RNA, 18 nt, Human
cuuuucauaggucugaaa

SEQ ID NO: 1400019 - RNA, 18 nt, Human
cuuuucauacauuuucua

SEQ ID NO: 1400020 - RNA, 14 nt, Human
cuuuuacucugccu

SEQ ID NO: 1400021 - RNA, 15 nt, Human
cuuuguuuggcuggg

SEQ ID NO: 1400022 - RNA, 16 nt, Human
cuuuguuucuccccca

SEQ ID NO: 1400023 - RNA, 15 nt, Human
cuuuguuucuccccc

SEQ ID NO: 1400024 - RNA, 14 nt, Human
cuuuguuucucccc

SEQ ID NO: 1400025 - RNA, 18 nt, Human
cuuuguuucguggggagg

SEQ ID NO: 1400026 - RNA, 17 nt, Human
cuuuguuucguggggag

SEQ ID NO: 1400027 - RNA, 15 nt, Human
cuuuuacccuggccc

SEQ ID NO: 1400028 - RNA, 23 nt, Human
cuuuuacaaguaacaaaaauaaa

SEQ ID NO: 1400029 - RNA, 14 nt, Human
cuuuuaauuuuccu

SEQ ID NO: 1400030 - RNA, 13 nt, Human
cuuuuaauucauu

SEQ ID NO: 1400031 - RNA, 12 nt, Human
cuuuuaauucau

SEQ ID NO: 1400032 - RNA, 23 nt, Human
cuuuuacccuggccccucucccu

SEQ ID NO: 1400033 - RNA, 22 nt, Human
cuuuuacccuggccccucuccc

SEQ ID NO: 1400034 - RNA, 21 nt, Human
cuuuuacccuggccccucucc

SEQ ID NO: 1400035 - RNA, 19 nt, Human
cuuuuacccuggccccucu

SEQ ID NO: 1400036 - RNA, 16 nt, Human
cuuuuacccuggcccc

SEQ ID NO: 1400037 - RNA, 20 nt, Human
cuuuuacguccaucucuugu

SEQ ID NO: 1400038 - RNA, 16 nt, Human
cuuuucuguaauucag

SEQ ID NO: 1400039 - RNA, 15 nt, Human
cuuuucuguaauuca

SEQ ID NO: 1400040 - RNA, 14 nt, Human
cuuuucuguaauuc

SEQ ID NO: 1400041 - RNA, 13 nt, Human
cuuuucuguaauu

SEQ ID NO: 1400042 - RNA, 16 nt, Human
cuuuucugaccaaaga

SEQ ID NO: 1400043 - RNA, 19 nt, Human
cuuuucuggaauguaauca

SEQ ID NO: 1400044 - RNA, 18 nt, Human
cuuuucuggaauguaauc

SEQ ID NO: 1400045 - RNA, 23 nt, Human
cuuuucccccauuaaucaguuca

SEQ ID NO: 1400046 - RNA, 22 nt, Human
cuuuucccacuccaagcccagc

SEQ ID NO: 1400047 - RNA, 21 nt, Human
cuuuucccauuuaucuaaaua

SEQ ID NO: 1400048 - RNA, 18 nt, Human
cuuuucccacuguuuaag

SEQ ID NO: 1400049 - RNA, 17 nt, Human
cuuuucccacuccaagc

SEQ ID NO: 1400050 - RNA, 13 nt, Human
cuuuucccacucc

SEQ ID NO: 1400051 - RNA, 14 nt, Human
cuuuucccaaccau

SEQ ID NO: 1400052 - RNA, 22 nt, Human
cuuuucccucuuuggcuccccu

SEQ ID NO: 1400053 - RNA, 20 nt, Human
cuuuucccucuuuggcuccc

SEQ ID NO: 1400054 - RNA, 19 nt, Human
cuuuucccccauuaaucag

SEQ ID NO: 1400055 - RNA, 17 nt, Human
cuuuucucugguaauau

SEQ ID NO: 1400056 - RNA, 17 nt, Human
cuuuucuccucacugua

SEQ ID NO: 1400057 - RNA, 18 nt, Human
gaaacagcaucuccaagc

SEQ ID NO: 1400058 - RNA, 17 nt, Human
gaaacagcaucuccaag

SEQ ID NO: 1400059 - RNA, 13 nt, Human
gaaacagcaucuc

SEQ ID NO: 1400060 - RNA, 22 nt, Human
gaaacagaaacaaaaacacuaa

SEQ ID NO: 1400061 - RNA, 14 nt, Human
gaaacagaaacaaa

SEQ ID NO: 1400062 - RNA, 22 nt, Human
gaaacagaaaaauauguaccaa

SEQ ID NO: 1400063 - RNA, 11 nt, Human
gaaacagaaaa

SEQ ID NO: 1400064 - RNA, 16 nt, Human
gaaacacuuugcauaa

SEQ ID NO: 1400065 - RNA, 15 nt, Human
gaaaaucaaauggua

SEQ ID NO: 1400066 - RNA, 14 nt, Human
gaaacacagaaacc

SEQ ID NO: 1400067 - RNA, 20 nt, Human
gaaaaucuuauaauuuaaaa

SEQ ID NO: 1400068 - RNA, 18 nt, Human
gaaacacccucacacugg

SEQ ID NO: 1400069 - RNA, 19 nt, Human
gaaacacccucacacuggg

SEQ ID NO: 1400070 - RNA, 22 nt, Human
gaaacacccucacacugggacu

SEQ ID NO: 1400071 - RNA, 19 nt, Human
gaaaaucuuauaauuuaaa

SEQ ID NO: 1400072 - RNA, 12 nt, Human
gaaaauaucacu

SEQ ID NO: 1400073 - RNA, 21 nt, Human
gaaaauaaggcacccaucugu

SEQ ID NO: 1400074 - RNA, 13 nt, Human
gaaaauaaggcac

SEQ ID NO: 1400075 - RNA, 19 nt, Human
gaaaauaagagcucaggau

SEQ ID NO: 1400076 - RNA, 17 nt, Human
gaaaauaagagcucagg

SEQ ID NO: 1400077 - RNA, 18 nt, Human
gaaaauaagaauagaaau

SEQ ID NO: 1400078 - RNA, 19 nt, Human
gaaaauaacgauaaaagac

SEQ ID NO: 1400079 - RNA, 23 nt, Human
gaaaagcuagaauugaguguuua

SEQ ID NO: 1400080 - RNA, 20 nt, Human
gaaaaccagcucagcacugc

SEQ ID NO: 1400081 - RNA, 15 nt, Human
gaaaaccagcucagc

SEQ ID NO: 1400082 - RNA, 16 nt, Human
gaaaacaugcuacaca

SEQ ID NO: 1400083 - RNA, 19 nt, Human
gaaaaauaaagaaaagaug

SEQ ID NO: 1400084 - RNA, 17 nt, Human
gaaaaauaaagaaaaga

SEQ ID NO: 1400085 - RNA, 14 nt, Human
gaaaaauaaagaaa

SEQ ID NO: 1400086 - RNA, 13 nt, Human
gaaaacacauuuu

SEQ ID NO: 1400087 - RNA, 22 nt, Human
gaaaacaauaacgauaaaagac

SEQ ID NO: 1400088 - RNA, 14 nt, Human
gaaaacacauuuuu

SEQ ID NO: 1400089 - RNA, 12 nt, Human
gaaaacaugcua

SEQ ID NO: 1400090 - RNA, 14 nt, Human
gaaaacaugcuaca

SEQ ID NO: 1400091 - RNA, 15 nt, Human
gaaaacaugcuacac

SEQ ID NO: 1400092 - RNA, 13 nt, Human
gaaaaauaaagaa

SEQ ID NO: 1400093 - RNA, 14 nt, Human
gaaaaaguuuguuu

SEQ ID NO: 1400094 - RNA, 16 nt, Human
cuuuuuuggccaucug

SEQ ID NO: 1400095 - RNA, 23 nt, Human
gaaaaaggaugcacagaguuguu

SEQ ID NO: 1400096 - RNA, 22 nt, Human
cuuuuuucucugauacagaaaa

SEQ ID NO: 1400097 - RNA, 18 nt, Human
cuuuugacacugcucuaa

SEQ ID NO: 1400098 - RNA, 17 nt, Human
cuuuugacacugcucua

SEQ ID NO: 1400099 - RNA, 12 nt, Human
cuuuugacacug

SEQ ID NO: 1400100 - RNA, 15 nt, Human
cuuuuuuccccagac

SEQ ID NO: 1400101 - RNA, 12 nt, Human
cuuuuuucccca

SEQ ID NO: 1400102 - RNA, 20 nt, Human
cuuuuuucucugauacagaa

SEQ ID NO: 1400103 - RNA, 14 nt, Human
cuuuuuucuaaagu

SEQ ID NO: 1400104 - RNA, 23 nt, Human
cuuggaacuugccugccuuucca

SEQ ID NO: 1400105 - RNA, 22 nt, Human
cuuggaacuugccugccuuucc

SEQ ID NO: 1400106 - RNA, 19 nt, Human
cuuggaacuugccugccuu

SEQ ID NO: 1400107 - RNA, 15 nt, Human
cuuggaacuugccug

SEQ ID NO: 1400108 - RNA, 13 nt, Human
cuuggaacugcau

SEQ ID NO: 1400109 - RNA, 11 nt, Human
cuuggaacugc

SEQ ID NO: 1400110 - RNA, 15 nt, Human
cuuggaacugaaggg

SEQ ID NO: 1400111 - RNA, 16 nt, Human
cuuggaacauuggaau

SEQ ID NO: 1400112 - RNA, 15 nt, Human
cuuggaaaggaccag

SEQ ID NO: 1400113 - RNA, 15 nt, Human
cuugcuuaccucuca

SEQ ID NO: 1400114 - RNA, 15 nt, Human
cuugcuuauuugaca

SEQ ID NO: 1400115 - RNA, 19 nt, Human
cuugcuuuucaugcaaacu

SEQ ID NO: 1400116 - RNA, 15 nt, Human
cuugcugugaauuaa

SEQ ID NO: 1400117 - RNA, 22 nt, Human
cuugccccccuggccuccccca

SEQ ID NO: 1400118 - RNA, 21 nt, Human
cuugccccccuggccuccccc

SEQ ID NO: 1400119 - RNA, 16 nt, Human
cuugccccccuggccu

SEQ ID NO: 1400120 - RNA, 18 nt, Human
cuugcccuaagcagaaag

SEQ ID NO: 1400121 - RNA, 16 nt, Human
cuugcccuaagcagaa

SEQ ID NO: 1400122 - RNA, 15 nt, Human
cuugcccuaagcaga

SEQ ID NO: 1400123 - RNA, 17 nt, Human
cuugcccgcucaggcug

SEQ ID NO: 1400124 - RNA, 23 nt, Human
cuugccagagauccaaaagaagc

SEQ ID NO: 1400125 - RNA, 16 nt, Human
cuugccagagauccaa

SEQ ID NO: 1400126 - RNA, 12 nt, Human
cuugccagagau

SEQ ID NO: 1400127 - RNA, 11 nt, Human
cuugccagaga

SEQ ID NO: 1400128 - RNA, 23 nt, Human
cuuggagcugugaguucucccug

SEQ ID NO: 1400129 - RNA, 18 nt, Human
cuuggaguauuggggucu

SEQ ID NO: 1400130 - RNA, 17 nt, Human
cuuggaggagaugggga

SEQ ID NO: 1400131 - RNA, 14 nt, Human
cuuggagcugugag

SEQ ID NO: 1400132 - RNA, 14 nt, Human
cuuggagcugagca

SEQ ID NO: 1400133 - RNA, 17 nt, Human
cuuggagcugagcaaau

SEQ ID NO: 1400134 - RNA, 20 nt, Human
cuugggcagagcuggcucug

SEQ ID NO: 1400135 - RNA, 19 nt, Human
cuugggcagagcuggcucu

SEQ ID NO: 1400136 - RNA, 18 nt, Human
cuugggcagagcuggcuc

SEQ ID NO: 1400137 - RNA, 15 nt, Human
cuugggcagagcugg

SEQ ID NO: 1400138 - RNA, 14 nt, Human
cuugggcagagcug

SEQ ID NO: 1400139 - RNA, 19 nt, Human
cuugggacuaaaugcccug

SEQ ID NO: 1400140 - RNA, 20 nt, Human
cuugggacuaaaugcccugc

SEQ ID NO: 1400141 - RNA, 13 nt, Human
cuugggaauuuua

SEQ ID NO: 1400142 - RNA, 18 nt, Human
cuugggaauggauccugg

SEQ ID NO: 1400143 - RNA, 10 nt, Human
cuugggaaug

SEQ ID NO: 1400144 - RNA, 21 nt, Human
cuugggaagacuccuagcugu

SEQ ID NO: 1400145 - RNA, 20 nt, Human
cuugggaagacuccuagcug

SEQ ID NO: 1400146 - RNA, 18 nt, Human
cuugggaagacuccuagc

SEQ ID NO: 1400147 - RNA, 22 nt, Human
cuugggaaaggugguguuucug

SEQ ID NO: 1400148 - RNA, 20 nt, Human
cuuggcuggacccagccagg

SEQ ID NO: 1400149 - RNA, 11 nt, Human
cuuggcuggug

SEQ ID NO: 1400150 - RNA, 18 nt, Human
cuuggcuggacccagcca

SEQ ID NO: 1400151 - RNA, 17 nt, Human
cuuggcuggacccagcc

SEQ ID NO: 1400152 - RNA, 16 nt, Human
cuuggcuggacccagc

SEQ ID NO: 1400153 - RNA, 15 nt, Human
cuuggcuggacccag

SEQ ID NO: 1400154 - RNA, 14 nt, Human
cuuggcuggaccca

SEQ ID NO: 1400155 - RNA, 22 nt, Human
cuuggaguauuggggucugacc

SEQ ID NO: 1400156 - RNA, 14 nt, Human
cuugggcagcaucc

SEQ ID NO: 1400157 - RNA, 23 nt, Human
cuugggcagagcuggcucugagc

SEQ ID NO: 1400158 - RNA, 22 nt, Human
cuugggcagagcuggcucugag

SEQ ID NO: 1400159 - RNA, 21 nt, Human
cuuggggaguuaagaccuggc

SEQ ID NO: 1400160 - RNA, 20 nt, Human
cuuggggaguuaagaccugg

SEQ ID NO: 1400161 - RNA, 19 nt, Human
cuuggggaguuaagaccug

SEQ ID NO: 1400162 - RNA, 22 nt, Human
cuuggggagaccucuacugccu

SEQ ID NO: 1400163 - RNA, 19 nt, Human
cuuguaaaggaauuuaaaa

SEQ ID NO: 1400164 - RNA, 19 nt, Human
cuuguuuggggcaggagua

SEQ ID NO: 1400165 - RNA, 18 nt, Human
cuuguuuggggcaggagu

SEQ ID NO: 1400166 - RNA, 17 nt, Human
cuuguuuggggcaggag

SEQ ID NO: 1400167 - RNA, 15 nt, Human
cuuguuguuucuugc

SEQ ID NO: 1400168 - RNA, 16 nt, Human
cuuguuguuucuugcc

SEQ ID NO: 1400169 - RNA, 15 nt, Human
cuuguugugcuuuua

SEQ ID NO: 1400170 - RNA, 17 nt, Human
cuuguugugcuuuuagu

SEQ ID NO: 1400171 - RNA, 22 nt, Human
cuuguuggcguaggcuacagag

SEQ ID NO: 1400172 - RNA, 23 nt, Human
cuuguuggcguaggcuacagaga

SEQ ID NO: 1400173 - RNA, 17 nt, Human
cuuguguuggcuguggc

SEQ ID NO: 1400174 - RNA, 14 nt, Human
cuuguguuggcugu

SEQ ID NO: 1400175 - RNA, 13 nt, Human
cuuguguuggcug

SEQ ID NO: 1400176 - RNA, 22 nt, Human
cuugugggccugggcuccugga

SEQ ID NO: 1400177 - RNA, 12 nt, Human
cuuguggggccu

SEQ ID NO: 1400178 - RNA, 23 nt, Human
cuugugggccugggcuccuggac

SEQ ID NO: 1400179 - RNA, 21 nt, Human
cuugugggccugggcuccugg

SEQ ID NO: 1400180 - RNA, 19 nt, Human
cuugugggccugggcuccu

SEQ ID NO: 1400181 - RNA, 17 nt, Human
cuugugggccugggcuc

SEQ ID NO: 1400182 - RNA, 16 nt, Human
cuugugggccugggcu

SEQ ID NO: 1400183 - RNA, 15 nt, Human
cuugugggccugggc

SEQ ID NO: 1400184 - RNA, 14 nt, Human
cuugugggccuggg

SEQ ID NO: 1400185 - RNA, 12 nt, Human
cuugugggccug

SEQ ID NO: 1400186 - RNA, 16 nt, Human
cuuguggcagcaacgg

SEQ ID NO: 1400187 - RNA, 15 nt, Human
cuuguggacuaaaag

SEQ ID NO: 1400188 - RNA, 18 nt, Human
cuugcuuuucaugcaaac

SEQ ID NO: 1400189 - RNA, 16 nt, Human
cuuguggacuaaaaga

SEQ ID NO: 1400190 - RNA, 17 nt, Human
cuuguggacuaaaagau

SEQ ID NO: 1400191 - RNA, 18 nt, Human
cuuguggacuaaaagaua

SEQ ID NO: 1400192 - RNA, 19 nt, Human
cuuguggacuaaaagauau

SEQ ID NO: 1400193 - RNA, 16 nt, Human
cuuguuuuugcacaug

SEQ ID NO: 1400194 - RNA, 12 nt, Human
cuuguuuuugca

SEQ ID NO: 1400195 - RNA, 14 nt, Human
cuuguuuuggaugc

SEQ ID NO: 1400196 - RNA, 13 nt, Human
cuuguuuuggaug

SEQ ID NO: 1400197 - RNA, 14 nt, Human
cuuguuuuggacag

SEQ ID NO: 1400198 - RNA, 23 nt, Human
cuuguuuuuuguuuguuuguugc

SEQ ID NO: 1400199 - RNA, 23 nt, Human
cuuuagaaacagugcaacacugg

SEQ ID NO: 1400200 - RNA, 14 nt, Human
cuuuagaaacagug

SEQ ID NO: 1400201 - RNA, 14 nt, Human
cuuuacuuuuaaac

SEQ ID NO: 1400202 - RNA, 20 nt, Human
cuuuagaaucccagcccccu

SEQ ID NO: 1400203 - RNA, 18 nt, Human
cuuuagaaucccagcccc

SEQ ID NO: 1400204 - RNA, 15 nt, Human
cuuuagaagccugca

SEQ ID NO: 1400205 - RNA, 15 nt, Human
cuuuagaaucccagc

SEQ ID NO: 1400206 - RNA, 14 nt, Human
cuuuagaagccugc

SEQ ID NO: 1400207 - RNA, 16 nt, Human
cuuuagaauaugccuu

SEQ ID NO: 1400208 - RNA, 17 nt, Human
cuuuauuaaaaacugag

SEQ ID NO: 1400209 - RNA, 14 nt, Human
cuuuauuaaaaacu

SEQ ID NO: 1400210 - RNA, 20 nt, Human
cuuuauguuacuacaugcac

SEQ ID NO: 1400211 - RNA, 20 nt, Human
cuuuauuccagaaugcugua

SEQ ID NO: 1400212 - RNA, 18 nt, Human
cuuuauaagaaagccuga

SEQ ID NO: 1400213 - RNA, 16 nt, Human
cuuuauaagaaagccu

SEQ ID NO: 1400214 - RNA, 15 nt, Human
cuuuauaagaaagcc

SEQ ID NO: 1400215 - RNA, 13 nt, Human
cuuuauaagaaag

SEQ ID NO: 1400216 - RNA, 12 nt, Human
cuuuauaagaaa

SEQ ID NO: 1400217 - RNA, 13 nt, Human
cuuuauaaaugua

SEQ ID NO: 1400218 - RNA, 18 nt, Human
cuuuauaacuaacauguc

SEQ ID NO: 1400219 - RNA, 19 nt, Human
cuuuauaagaaagccugag

SEQ ID NO: 1400220 - RNA, 18 nt, Human
cuuuauuggcugagauau

SEQ ID NO: 1400221 - RNA, 16 nt, Human
cuuuauuguguuuguc

SEQ ID NO: 1400222 - RNA, 18 nt, Human
cuuuauuguguuugucau

SEQ ID NO: 1400223 - RNA, 19 nt, Human
cuuuauuguguuugucauu

SEQ ID NO: 1400224 - RNA, 20 nt, Human
cuuuauuguguuugucauua

SEQ ID NO: 1400225 - RNA, 23 nt, Human
cuuuauuguguuugucauuagcc

SEQ ID NO: 1400226 - RNA, 16 nt, Human
cuuuauuggcugagau

SEQ ID NO: 1400227 - RNA, 18 nt, Human
cuuuauuccuucauuuca

SEQ ID NO: 1400228 - RNA, 23 nt, Human
cuuuauuccagaaugcuguacau

SEQ ID NO: 1400229 - RNA, 22 nt, Human
cuuuauuuuaaccuuugauaga

SEQ ID NO: 1400230 - RNA, 22 nt, Human
cuuuauuuguuaauaguuccug

SEQ ID NO: 1400231 - RNA, 21 nt, Human
cuuuauuuucuauaauuuaaa

SEQ ID NO: 1400232 - RNA, 18 nt, Human
cuuucaucacacugggug

SEQ ID NO: 1400233 - RNA, 15 nt, Human
cuuucauuucuucua

SEQ ID NO: 1400234 - RNA, 19 nt, Human
cuuucaucacacugggugg

SEQ ID NO: 1400235 - RNA, 16 nt, Human
cuuucaucacacuggg

SEQ ID NO: 1400236 - RNA, 23 nt, Human
cuuucauauaguuagcuaauaaa

SEQ ID NO: 1400237 - RNA, 23 nt, Human
cuuucauauuuuaaacagaggau

SEQ ID NO: 1400238 - RNA, 19 nt, Human
cuuucauauuuuaaacaga

SEQ ID NO: 1400239 - RNA, 16 nt, Human
cuuucauauuuuaaac

SEQ ID NO: 1400240 - RNA, 13 nt, Human
cuuucauauaguu

SEQ ID NO: 1400241 - RNA, 19 nt, Human
cuuucauuuucucucaggu

SEQ ID NO: 1400242 - RNA, 21 nt, Human
cuuucauuuucucucagguga

SEQ ID NO: 1400243 - RNA, 18 nt, Human
cuuucauuuucucucagg

SEQ ID NO: 1400244 - RNA, 17 nt, Human
cuuucauuuucucucag

SEQ ID NO: 1400245 - RNA, 18 nt, Human
cuuucauuugcuuuggaa

SEQ ID NO: 1400246 - RNA, 14 nt, Human
cuuucauuugcuuu

SEQ ID NO: 1400247 - RNA, 23 nt, Human
cuuuccaccacagccagcaccug

SEQ ID NO: 1400248 - RNA, 22 nt, Human
cuuuccaccacagccagcaccu

SEQ ID NO: 1400249 - RNA, 21 nt, Human
cuuuccaccacagccagcacc

SEQ ID NO: 1400250 - RNA, 17 nt, Human
cuuuccaccacagccag

SEQ ID NO: 1400251 - RNA, 15 nt, Human
cuuuccaccacagcc

SEQ ID NO: 1400252 - RNA, 17 nt, Human
cuuucccaacaccucuu

SEQ ID NO: 1400253 - RNA, 13 nt, Human
cuuuccacagaag

SEQ ID NO: 1400254 - RNA, 21 nt, Human
gaagccuuggggcugaugcag

SEQ ID NO: 1400255 - RNA, 23 nt, Human
gaagccuuccccuuauccucccu

SEQ ID NO: 1400256 - RNA, 14 nt, Human
gaagcuuuggugag

SEQ ID NO: 1400257 - RNA, 19 nt, Human
gaagcuuggggaagaccca

SEQ ID NO: 1400258 - RNA, 18 nt, Human
gaagcuuggggaagaccc

SEQ ID NO: 1400259 - RNA, 20 nt, Human
gaagcuuuggugagaaccug

SEQ ID NO: 1400260 - RNA, 18 nt, Human
gaagcuuuuaugugaaac

SEQ ID NO: 1400261 - RNA, 17 nt, Human
gaagcccagagggucug

SEQ ID NO: 1400262 - RNA, 13 nt, Human
gaagcccagaggg

SEQ ID NO: 1400263 - RNA, 18 nt, Human
gaagcccaauugcuggag

SEQ ID NO: 1400264 - RNA, 14 nt, Human
gaagcccagagggu

SEQ ID NO: 1400265 - RNA, 16 nt, Human
gaagccucagauuccu

SEQ ID NO: 1400266 - RNA, 20 nt, Human
gaagccgugcucgccccagc

SEQ ID NO: 1400267 - RNA, 22 nt, Human
gaagccguccuggcgccuggca

SEQ ID NO: 1400268 - RNA, 22 nt, Human
gaagccucagauuccuucccau

SEQ ID NO: 1400269 - RNA, 21 nt, Human
gaagccucagauuccuuccca

SEQ ID NO: 1400270 - RNA, 20 nt, Human
gaagccucagauuccuuccc

SEQ ID NO: 1400271 - RNA, 19 nt, Human
gaagccucagauuccuucc

SEQ ID NO: 1400272 - RNA, 19 nt, Human
gaagccuccuuagaaaaaa

SEQ ID NO: 1400273 - RNA, 23 nt, Human
gaagccaugaguuccagaaagua

SEQ ID NO: 1400274 - RNA, 22 nt, Human
gaagccaucaccucagauggca

SEQ ID NO: 1400275 - RNA, 20 nt, Human
gaagccaucaccucagaugg

SEQ ID NO: 1400276 - RNA, 18 nt, Human
gaagccaucaccucagau

SEQ ID NO: 1400277 - RNA, 17 nt, Human
gaagccaucaccucaga

SEQ ID NO: 1400278 - RNA, 22 nt, Human
gaagccagcuuguuuacaugcu

SEQ ID NO: 1400279 - RNA, 24 nt, Human
gaagccaggaauuucccaggaccc

SEQ ID NO: 1400280 - RNA, 23 nt, Human
gaagccaggaauuucccaggacc

SEQ ID NO: 1400281 - RNA, 21 nt, Human
gaagccaggaauuucccagga

SEQ ID NO: 1400282 - RNA, 19 nt, Human
gaagccaggaauuucccag

SEQ ID NO: 1400283 - RNA, 22 nt, Human
gaagccagcuuucccugccucu

SEQ ID NO: 1400284 - RNA, 18 nt, Human
gaagccagcuuguuuaca

SEQ ID NO: 1400285 - RNA, 13 nt, Human
gaagccagcuugu

SEQ ID NO: 1400286 - RNA, 20 nt, Human
gaagccacgggugccagaag

SEQ ID NO: 1400287 - RNA, 17 nt, Human
gaagacugcauuauauu

SEQ ID NO: 1400288 - RNA, 15 nt, Human
gaagacuccuagcug

SEQ ID NO: 1400289 - RNA, 22 nt, Human
gaagccacgguguucugugaua

SEQ ID NO: 1400290 - RNA, 18 nt, Human
gaaggagcugccuggacc

SEQ ID NO: 1400291 - RNA, 19 nt, Human
gaaggagcugccuggaccc

SEQ ID NO: 1400292 - RNA, 17 nt, Human
gaaggagcugccuggac

SEQ ID NO: 1400293 - RNA, 16 nt, Human
gaaggagcugccugga

SEQ ID NO: 1400294 - RNA, 15 nt, Human
gaaggagcugccugg

SEQ ID NO: 1400295 - RNA, 14 nt, Human
gaaggagcugccug

SEQ ID NO: 1400296 - RNA, 12 nt, Human
gaaggagcugcc

SEQ ID NO: 1400297 - RNA, 22 nt, Human
gaaggagccccauuccugggaa

SEQ ID NO: 1400298 - RNA, 21 nt, Human
gaaggagccccauuccuggga

SEQ ID NO: 1400299 - RNA, 20 nt, Human
gaaggagccccauuccuggg

SEQ ID NO: 1400300 - RNA, 15 nt, Human
gaaggcaaagcacga

SEQ ID NO: 1400301 - RNA, 19 nt, Human
gaaggaucccaugagcucc

SEQ ID NO: 1400302 - RNA, 21 nt, Human
gaaggauacaaaagcauguga

SEQ ID NO: 1400303 - RNA, 12 nt, Human
gaaggauacaaa

SEQ ID NO: 1400304 - RNA, 19 nt, Human
gaaggauacaaaagcaugu

SEQ ID NO: 1400305 - RNA, 20 nt, Human
gaaggacuaauagaaaagua

SEQ ID NO: 1400306 - RNA, 21 nt, Human
gaaggacuaugaaaagcuaga

SEQ ID NO: 1400307 - RNA, 19 nt, Human
gaaggacuaauagaaaagu

SEQ ID NO: 1400308 - RNA, 18 nt, Human
gaaggagaaucaucagga

SEQ ID NO: 1400309 - RNA, 22 nt, Human
gaaggagaaucaucaggacccu

SEQ ID NO: 1400310 - RNA, 17 nt, Human
gaagguaaauaaaaaga

SEQ ID NO: 1400311 - RNA, 13 nt, Human
gaagguaaauaaa

SEQ ID NO: 1400312 - RNA, 14 nt, Human
gaaggguaaacaau

SEQ ID NO: 1400313 - RNA, 20 nt, Human
gaagguuaucagugcuuccc

SEQ ID NO: 1400314 - RNA, 22 nt, Human
gaagguaaauaaaaagaaaggc

SEQ ID NO: 1400315 - RNA, 17 nt, Human
gaaggguaaacaauaua

SEQ ID NO: 1400316 - RNA, 13 nt, Human
gaaggguaaacaa

SEQ ID NO: 1400317 - RNA, 17 nt, Human
gaagggguuggauugca

SEQ ID NO: 1400318 - RNA, 15 nt, Human
gaaggcaggcagggc

SEQ ID NO: 1400319 - RNA, 14 nt, Human
gaaggcaggcaggg

SEQ ID NO: 1400320 - RNA, 13 nt, Human
gaaggcaggcagg

SEQ ID NO: 1400321 - RNA, 23 nt, Human
gaaggcaggcagggcucuccugg

SEQ ID NO: 1400322 - RNA, 22 nt, Human
gaaggcaggcagggcucuccug

SEQ ID NO: 1400323 - RNA, 21 nt, Human
gaaggcaggcagggcucuccu

SEQ ID NO: 1400324 - RNA, 19 nt, Human
gaaggcaggcagggcucuc

SEQ ID NO: 1400325 - RNA, 18 nt, Human
gaaggcaggcagggcucu

SEQ ID NO: 1400326 - RNA, 17 nt, Human
gaaggcaggcagggcuc

SEQ ID NO: 1400327 - RNA, 16 nt, Human
gaaggcaggcagggcu

SEQ ID NO: 1400328 - RNA, 14 nt, Human
gaaggcagggagga

SEQ ID NO: 1400329 - RNA, 16 nt, Human
gaaggcagggaggagg

SEQ ID NO: 1400330 - RNA, 17 nt, Human
gaaggcagggaggaggc

SEQ ID NO: 1400331 - RNA, 18 nt, Human
gaaggcagggaggaggca

SEQ ID NO: 1400332 - RNA, 20 nt, Human
gaaggcagggaggaggcaga

SEQ ID NO: 1400333 - RNA, 23 nt, Human
gaaucuugguuugccuuccagaa

SEQ ID NO: 1400334 - RNA, 20 nt, Human
gaaucuugguuugccuucca

SEQ ID NO: 1400335 - RNA, 15 nt, Human
gaaucuugguuugcc

SEQ ID NO: 1400336 - RNA, 22 nt, Human
gaaucuuaagguguagccacac

SEQ ID NO: 1400337 - RNA, 13 nt, Human
gaaucuugucuca

SEQ ID NO: 1400338 - RNA, 14 nt, Human
gaaucuugucucaa

SEQ ID NO: 1400339 - RNA, 15 nt, Human
gaaucuugucucaau

SEQ ID NO: 1400340 - RNA, 16 nt, Human
gaaucuugucucaaug

SEQ ID NO: 1400341 - RNA, 18 nt, Human
gaaucuugucucaaugcu

SEQ ID NO: 1400342 - RNA, 20 nt, Human
gaaucuugucucaaugcuca

SEQ ID NO: 1400343 - RNA, 21 nt, Human
gaaucuugucucaaugcucau

SEQ ID NO: 1400344 - RNA, 22 nt, Human
gaaucuugucucaaugcucaua

SEQ ID NO: 1400345 - RNA, 14 nt, Human
gaauccugucgauu

SEQ ID NO: 1400346 - RNA, 20 nt, Human
gaauccuaggcuccacccca

SEQ ID NO: 1400347 - RNA, 21 nt, Human
gaaucccuuaacaguuguauu

SEQ ID NO: 1400348 - RNA, 19 nt, Human
gaaucccuuaacaguugua

SEQ ID NO: 1400349 - RNA, 21 nt, Human
gaaucuuaagguguagccaca

SEQ ID NO: 1400350 - RNA, 14 nt, Human
gaaucugugugaaa

SEQ ID NO: 1400351 - RNA, 20 nt, Human
gaaucugugggucugggagu

SEQ ID NO: 1400352 - RNA, 19 nt, Human
gaaucugugggucugggag

SEQ ID NO: 1400353 - RNA, 23 nt, Human
gaaucucaguugauuuucuggau

SEQ ID NO: 1400354 - RNA, 24 nt, Human
gaaucauuuagcauguuguugaaa

SEQ ID NO: 1400355 - RNA, 22 nt, Human
gaaucauuucuauuucuccucc

SEQ ID NO: 1400356 - RNA, 13 nt, Human
gaaucauuuagca

SEQ ID NO: 1400357 - RNA, 20 nt, Human
gaaucauuguauguggucau

SEQ ID NO: 1400358 - RNA, 18 nt, Human
gaaucagccuacaggccu

SEQ ID NO: 1400359 - RNA, 23 nt, Human
gaaucagagaccuuccagaaaua

SEQ ID NO: 1400360 - RNA, 13 nt, Human
gaaucagaacuca

SEQ ID NO: 1400361 - RNA, 16 nt, Human
gaaucccuuaacaguu

SEQ ID NO: 1400362 - RNA, 19 nt, Human
gaauccccaacaugcacug

SEQ ID NO: 1400363 - RNA, 22 nt, Human
gaaucccagcccccugaccacu

SEQ ID NO: 1400364 - RNA, 19 nt, Human
gaaucccagcccccugacc

SEQ ID NO: 1400365 - RNA, 16 nt, Human
gaauccacauuucuaa

SEQ ID NO: 1400366 - RNA, 18 nt, Human
gaauccacauuucuaaaa

SEQ ID NO: 1400367 - RNA, 17 nt, Human
gaauccacauuucuaaa

SEQ ID NO: 1400368 - RNA, 20 nt, Human
gaaucacuguuuagaacaca

SEQ ID NO: 1400369 - RNA, 21 nt, Human
gaaucaauaauauauuuucug

SEQ ID NO: 1400370 - RNA, 23 nt, Human
gaauagccauauuuguaaaauga

SEQ ID NO: 1400371 - RNA, 16 nt, Human
gaauagauaugaaagc

SEQ ID NO: 1400372 - RNA, 20 nt, Human
gaauacuuugaauguguuuc

SEQ ID NO: 1400373 - RNA, 18 nt, Human
gaauagaagcuaagguuu

SEQ ID NO: 1400374 - RNA, 15 nt, Human
gaauagcaugucacu

SEQ ID NO: 1400375 - RNA, 18 nt, Human
gaauagccauauuuguaa

SEQ ID NO: 1400376 - RNA, 19 nt, Human
gaauagauaugaaagcuga

SEQ ID NO: 1400377 - RNA, 23 nt, Human
gaauagccacauuuggaauacuu

SEQ ID NO: 1400378 - RNA, 18 nt, Human
gaauagccacauuuggaa

SEQ ID NO: 1400379 - RNA, 15 nt, Human
gaauagccacauuug

SEQ ID NO: 1400380 - RNA, 20 nt, Human
gaaguaaacuuuuuguucug

SEQ ID NO: 1400381 - RNA, 13 nt, Human
gaaguaaacuuuu

SEQ ID NO: 1400382 - RNA, 19 nt, Human
gaaguaaaagcaaaaaaga

SEQ ID NO: 1400383 - RNA, 16 nt, Human
gaaguaaacuuuuugu

SEQ ID NO: 1400384 - RNA, 17 nt, Human
gaaguuuagcucugaga

SEQ ID NO: 1400385 - RNA, 11 nt, Human
gaaguuucauc

SEQ ID NO: 1400386 - RNA, 12 nt, Human
gaauaaaauuuu

SEQ ID NO: 1400387 - RNA, 20 nt, Human
gaauaaaggcaguuuucuaa

SEQ ID NO: 1400388 - RNA, 19 nt, Human
gaauaaaggcaguuuucua

SEQ ID NO: 1400389 - RNA, 17 nt, Human
gaauaaaggcaguuuuc

SEQ ID NO: 1400390 - RNA, 16 nt, Human
gaauaaaggcaguuuu

SEQ ID NO: 1400391 - RNA, 15 nt, Human
gaauaaaggcaguuu

SEQ ID NO: 1400392 - RNA, 17 nt, Human
gaauaaagaaugaaugg

SEQ ID NO: 1400393 - RNA, 11 nt, Human
gaauaaagcaa

SEQ ID NO: 1400394 - RNA, 13 nt, Human
gaauaaagcaauu

SEQ ID NO: 1400395 - RNA, 19 nt, Human
gaauaaguuauugcaguuu

SEQ ID NO: 1400396 - RNA, 18 nt, Human
gaauaaguuauugcaguu

SEQ ID NO: 1400397 - RNA, 16 nt, Human
gaauaaguuauugcag

SEQ ID NO: 1400398 - RNA, 14 nt, Human
gaauaaguuauugc

SEQ ID NO: 1400399 - RNA, 13 nt, Human
gaauaaguuauug

SEQ ID NO: 1400400 - RNA, 12 nt, Human
gaauaaguuauu

SEQ ID NO: 1400401 - RNA, 23 nt, Human
gaauaagguacaagaagcauuuu

SEQ ID NO: 1400402 - RNA, 20 nt, Human
gaauaagguacaagaagcau

SEQ ID NO: 1400403 - RNA, 19 nt, Human
gaauaagguacaagaagca

SEQ ID NO: 1400404 - RNA, 17 nt, Human
gaauaagguacaagaag

SEQ ID NO: 1400405 - RNA, 23 nt, Human
gaauaaaugucacuuuuugaggc

SEQ ID NO: 1400406 - RNA, 18 nt, Human
gaauaaaugucacuuuuu

SEQ ID NO: 1400407 - RNA, 16 nt, Human
gaauaaaugucacuuu

SEQ ID NO: 1400408 - RNA, 15 nt, Human
gaauaaaugucacuu

SEQ ID NO: 1400409 - RNA, 14 nt, Human
gaauaaaugucacu

SEQ ID NO: 1400410 - RNA, 19 nt, Human
gaauaaauuguacagccgg

SEQ ID NO: 1400411 - RNA, 17 nt, Human
gaauaaauuguacagcc

SEQ ID NO: 1400412 - RNA, 16 nt, Human
gaauaaauugauuuuu

SEQ ID NO: 1400413 - RNA, 18 nt, Human
gaauaagcucccagggcc

SEQ ID NO: 1400414 - RNA, 20 nt, Human
gaauaaauuguacagccggc

SEQ ID NO: 1400415 - RNA, 17 nt, Human
gaauagaagcuaagguu

SEQ ID NO: 1400416 - RNA, 23 nt, Human
gaauagaaauaaaggaugugauu

SEQ ID NO: 1400417 - RNA, 20 nt, Human
gaauacuuuuuacaauuaaa

SEQ ID NO: 1400418 - RNA, 14 nt, Human
gaauacuuuuuaca

SEQ ID NO: 1400419 - RNA, 19 nt, Human
gaauacuuuugcccuuuga

SEQ ID NO: 1400420 - RNA, 24 nt, Human
gaauacuuugcagcacagcugaga

SEQ ID NO: 1400421 - RNA, 18 nt, Human
gaauacuuugaauguguu

SEQ ID NO: 1400422 - RNA, 17 nt, Human
gaauacuuugaaugugu

SEQ ID NO: 1400423 - RNA, 16 nt, Human
gaauacuuugaaugug

SEQ ID NO: 1400424 - RNA, 13 nt, Human
gaauacugcuaca

SEQ ID NO: 1400425 - RNA, 22 nt, Human
gaauacugaacaucugaguccu

SEQ ID NO: 1400426 - RNA, 14 nt, Human
gaauacuuuauaaa

SEQ ID NO: 1400427 - RNA, 19 nt, Human
gaaauagcuuaugaaaaga

SEQ ID NO: 1400428 - RNA, 21 nt, Human
gaaauagcuuaugaaaagaau

SEQ ID NO: 1400429 - RNA, 18 nt, Human
gaaauagcuuaugaaaag

SEQ ID NO: 1400430 - RNA, 15 nt, Human
gaaauagcuuaugaa

SEQ ID NO: 1400431 - RNA, 18 nt, Human
gaaauagacagcaugaga

SEQ ID NO: 1400432 - RNA, 16 nt, Human
gaaauagaauuauaac

SEQ ID NO: 1400433 - RNA, 15 nt, Human
gaaauacuauuuaaa

SEQ ID NO: 1400434 - RNA, 14 nt, Human
gaaauacuauuuaa

SEQ ID NO: 1400435 - RNA, 17 nt, Human
gaaauacuacuguguaa

SEQ ID NO: 1400436 - RNA, 19 nt, Human
gaaauacaguucugcucug

SEQ ID NO: 1400437 - RNA, 17 nt, Human
gaaauacaguucugcuc

SEQ ID NO: 1400438 - RNA, 17 nt, Human
gaaauacagacuggaug

SEQ ID NO: 1400439 - RNA, 17 nt, Human
gaaauacagauuuugau

SEQ ID NO: 1400440 - RNA, 22 nt, Human
gaaauacagauuuugauagcaa

SEQ ID NO: 1400441 - RNA, 14 nt, Human
gaaauacaaaaaua

SEQ ID NO: 1400442 - RNA, 13 nt, Human
gaaauacaaaaau

SEQ ID NO: 1400443 - RNA, 21 nt, Human
gaaauaauuguuguucuguua

SEQ ID NO: 1400444 - RNA, 18 nt, Human
gaaauacaaaaauacuca

SEQ ID NO: 1400445 - RNA, 18 nt, Human
gaaauaugcacaauagca

SEQ ID NO: 1400446 - RNA, 17 nt, Human
gaaauaugcacaauagc

SEQ ID NO: 1400447 - RNA, 20 nt, Human
gaaauaugaagaacugagga

SEQ ID NO: 1400448 - RNA, 19 nt, Human
gaaauaucuucacuuguca

SEQ ID NO: 1400449 - RNA, 23 nt, Human
gaaauauacuuuuacaaguaaca

SEQ ID NO: 1400450 - RNA, 21 nt, Human
gaaauauacuuuuacaaguaa

SEQ ID NO: 1400451 - RNA, 17 nt, Human
gaaauauaggaacuuaa

SEQ ID NO: 1400452 - RNA, 22 nt, Human
gaaauaauuguuguucuguuaa

SEQ ID NO: 1400453 - RNA, 20 nt, Human
gaaauaauuguuguucuguu

SEQ ID NO: 1400454 - RNA, 19 nt, Human
gaaauaauuguuguucugu

SEQ ID NO: 1400455 - RNA, 15 nt, Human
gaaauaauuguuguu

SEQ ID NO: 1400456 - RNA, 13 nt, Human
gaaauaauuguug

SEQ ID NO: 1400457 - RNA, 22 nt, Human
gaaauaauguguaguucaugua

SEQ ID NO: 1400458 - RNA, 13 nt, Human
gaaauaaugugua

SEQ ID NO: 1400459 - RNA, 12 nt, Human
gaaauaaugugu

SEQ ID NO: 1400460 - RNA, 21 nt, Human
gaaauaaguuuuuguuucaca

SEQ ID NO: 1400461 - RNA, 20 nt, Human
gaaauaagugcccucuccca

SEQ ID NO: 1400462 - RNA, 18 nt, Human
gaaauaagugcccucucc

SEQ ID NO: 1400463 - RNA, 23 nt, Human
gaaauaagcuauuugauguaaua

SEQ ID NO: 1400464 - RNA, 20 nt, Human
gaaauaagcuauuugaugua

SEQ ID NO: 1400465 - RNA, 19 nt, Human
gaaauaagcuauuugaugu

SEQ ID NO: 1400466 - RNA, 18 nt, Human
gaaauaagcuauuugaug

SEQ ID NO: 1400467 - RNA, 15 nt, Human
gaaauaagcuauuug

SEQ ID NO: 1400468 - RNA, 21 nt, Human
gaaauaaauguaucauagaaa

SEQ ID NO: 1400469 - RNA, 23 nt, Human
gaaacaguugguaacuuuuguga

SEQ ID NO: 1400470 - RNA, 21 nt, Human
gaaacaguugguaacuuuugu

SEQ ID NO: 1400471 - RNA, 20 nt, Human
gaaacaguugguaacuuuug

SEQ ID NO: 1400472 - RNA, 19 nt, Human
gaaacaguugguaacuuuu

SEQ ID NO: 1400473 - RNA, 18 nt, Human
gaaacaguugguaacuuu

SEQ ID NO: 1400474 - RNA, 23 nt, Human
gaaacaguugcauguaguaacac

SEQ ID NO: 1400475 - RNA, 20 nt, Human
gaaacaguugcauguaguaa

SEQ ID NO: 1400476 - RNA, 19 nt, Human
gaaacaguugcauguagua

SEQ ID NO: 1400477 - RNA, 17 nt, Human
gaaacaguugcauguag

SEQ ID NO: 1400478 - RNA, 19 nt, Human
gaaauaaagucagauggaa

SEQ ID NO: 1400479 - RNA, 14 nt, Human
gaaauaaagucaga

SEQ ID NO: 1400480 - RNA, 13 nt, Human
gaaacauuuauau

SEQ ID NO: 1400481 - RNA, 11 nt, Human
gaaacauuugg

SEQ ID NO: 1400482 - RNA, 18 nt, Human
gaaauuuagcauuguagu

SEQ ID NO: 1400483 - RNA, 16 nt, Human
gaaauuuagcauugua

SEQ ID NO: 1400484 - RNA, 14 nt, Human
gaaauuuagcauug

SEQ ID NO: 1400485 - RNA, 12 nt, Human
gaaauuuagcau

SEQ ID NO: 1400486 - RNA, 23 nt, Human
gaaauuuaaagcagguucuuguu

SEQ ID NO: 1400487 - RNA, 22 nt, Human
gaaauuuaaagcagguucuugu

SEQ ID NO: 1400488 - RNA, 14 nt, Human
gaaauuuaaagcag

SEQ ID NO: 1400489 - RNA, 13 nt, Human
gaaauuuaaagca

SEQ ID NO: 1400490 - RNA, 23 nt, Human
gaaauuuaaacuauaagcaagaa

SEQ ID NO: 1400491 - RNA, 20 nt, Human
gaaauuuaaacuauaagcaa

SEQ ID NO: 1400492 - RNA, 14 nt, Human
gaaauuuaaacuau

SEQ ID NO: 1400493 - RNA, 13 nt, Human
gaaauuuaaacua

SEQ ID NO: 1400494 - RNA, 23 nt, Human
gaacacuggggacuuggccucuc

SEQ ID NO: 1400495 - RNA, 22 nt, Human
gaacacuggggacuuggccucu

SEQ ID NO: 1400496 - RNA, 13 nt, Human
gaacacuggggac

SEQ ID NO: 1400497 - RNA, 22 nt, Human
gaaauuuuauaugcuuacugau

SEQ ID NO: 1400498 - RNA, 19 nt, Human
gaaauuuuauaugcuuacu

SEQ ID NO: 1400499 - RNA, 15 nt, Human
gaaauuuuauaugcu

SEQ ID NO: 1400500 - RNA, 22 nt, Human
gaaauuuuaaccuaugauauuu

SEQ ID NO: 1400501 - RNA, 21 nt, Human
gaaauugaauacuuugaaugu

SEQ ID NO: 1400502 - RNA, 22 nt, Human
gaaauugaauacuuugaaugug

SEQ ID NO: 1400503 - RNA, 20 nt, Human
gaaauugaauacuuugaaug

SEQ ID NO: 1400504 - RNA, 19 nt, Human
gaaauugaauacuuugaau

SEQ ID NO: 1400505 - RNA, 18 nt, Human
gaaauugaauacuuugaa

SEQ ID NO: 1400506 - RNA, 17 nt, Human
gaaauugaauacuuuga

SEQ ID NO: 1400507 - RNA, 16 nt, Human
gaaauugaauacuuug

SEQ ID NO: 1400508 - RNA, 13 nt, Human
gaaauugaauacu

SEQ ID NO: 1400509 - RNA, 21 nt, Human
gaaauugaaccuuugugcccu

SEQ ID NO: 1400510 - RNA, 17 nt, Human
gaaauugaaccuuugug

SEQ ID NO: 1400511 - RNA, 14 nt, Human
gaaauugaaccuuu

SEQ ID NO: 1400512 - RNA, 23 nt, Human
gaaauucuuucccagucugucga

SEQ ID NO: 1400513 - RNA, 22 nt, Human
gaaauucuuucccagucugucg

SEQ ID NO: 1400514 - RNA, 17 nt, Human
gaaauucguguguuuuu

SEQ ID NO: 1400515 - RNA, 17 nt, Human
gaaauucuccuggaggu

SEQ ID NO: 1400516 - RNA, 15 nt, Human
gaaauugauuuugaa

SEQ ID NO: 1400517 - RNA, 17 nt, Human
gaaauugccugacgaac

SEQ ID NO: 1400518 - RNA, 18 nt, Human
gaaauugcuuuguauugu

SEQ ID NO: 1400519 - RNA, 16 nt, Human
gaaauuggaagagcac

SEQ ID NO: 1400520 - RNA, 16 nt, Human
gaaauucuccuggagg

SEQ ID NO: 1400521 - RNA, 15 nt, Human
gaaauucuccuggag

SEQ ID NO: 1400522 - RNA, 14 nt, Human
gaaauucuccugga

SEQ ID NO: 1400523 - RNA, 19 nt, Human
gaaauucguguguuuuuuu

SEQ ID NO: 1400524 - RNA, 15 nt, Human
gaaauucguguguuu

SEQ ID NO: 1400525 - RNA, 15 nt, Human
gaaauuaccugugga

SEQ ID NO: 1400526 - RNA, 17 nt, Human
gaaauuacacccaaaga

SEQ ID NO: 1400527 - RNA, 23 nt, Human
gaaauuaagacuuuauguaguuu

SEQ ID NO: 1400528 - RNA, 22 nt, Human
gaaauuaagaaggcaaaaaugu

SEQ ID NO: 1400529 - RNA, 18 nt, Human
gaaauuaagaaggcaaaa

SEQ ID NO: 1400530 - RNA, 17 nt, Human
gaaauuaagaaggcaaa

SEQ ID NO: 1400531 - RNA, 22 nt, Human
gaaauguuuuuaauaaaagaaa

SEQ ID NO: 1400532 - RNA, 21 nt, Human
gaaauguuuuuaauaaaagaa

SEQ ID NO: 1400533 - RNA, 19 nt, Human
gaaauguuuuuaauaaaag

SEQ ID NO: 1400534 - RNA, 22 nt, Human
gaaauguuauuuuuuaauuauu

SEQ ID NO: 1400535 - RNA, 21 nt, Human
gaaauguuauuuuuuaauuau

SEQ ID NO: 1400536 - RNA, 14 nt, Human
gaaauguaaggcug

SEQ ID NO: 1400537 - RNA, 21 nt, Human
gaaauguaaggcuguguaaga

SEQ ID NO: 1400538 - RNA, 13 nt, Human
gaaaugguuguau

SEQ ID NO: 1400539 - RNA, 14 nt, Human
gaaaugguuguauu

SEQ ID NO: 1400540 - RNA, 15 nt, Human
gaaaugguuguauua

SEQ ID NO: 1400541 - RNA, 17 nt, Human
gaaaugguuguauuaga

SEQ ID NO: 1400542 - RNA, 18 nt, Human
gaaaugguuguauuagau

SEQ ID NO: 1400543 - RNA, 19 nt, Human
gaaaugguuguauuagaug

SEQ ID NO: 1400544 - RNA, 20 nt, Human
gaaaugguuguauuagaugu

SEQ ID NO: 1400545 - RNA, 18 nt, Human
gaaaugguacuguacagc

SEQ ID NO: 1400546 - RNA, 21 nt, Human
gaaaugguacuguacagcugg

SEQ ID NO: 1400547 - RNA, 16 nt, Human
gaaauggcuuugugau

SEQ ID NO: 1400548 - RNA, 15 nt, Human
gaaauauucccuaga

SEQ ID NO: 1400549 - RNA, 16 nt, Human
gaaauauuauguuaaa

SEQ ID NO: 1400550 - RNA, 13 nt, Human
gaaauauuauguu

SEQ ID NO: 1400551 - RNA, 22 nt, Human
gaacuugccugccuuuccaucc

SEQ ID NO: 1400552 - RNA, 24 nt, Human
gaacuugcgagaaauucguguguu

SEQ ID NO: 1400553 - RNA, 22 nt, Human
gaacuugcugcugagugcacca

SEQ ID NO: 1400554 - RNA, 21 nt, Human
gaacuuguaaaggaauuuaaa

SEQ ID NO: 1400555 - RNA, 21 nt, Human
gaagaagcaccaaucaugaau

SEQ ID NO: 1400556 - RNA, 20 nt, Human
gaagaaacaagguuuucagu

SEQ ID NO: 1400557 - RNA, 16 nt, Human
gaagaaagaacggaag

SEQ ID NO: 1400558 - RNA, 19 nt, Human
gaagaaagaacggaagaag

SEQ ID NO: 1400559 - RNA, 14 nt, Human
gaagaaaaagaagc

SEQ ID NO: 1400560 - RNA, 13 nt, Human
gaagaaaaagaag

SEQ ID NO: 1400561 - RNA, 22 nt, Human
gaacuuguaaaggaauuuaaaa

SEQ ID NO: 1400562 - RNA, 16 nt, Human
gaacucaacuuugaca

SEQ ID NO: 1400563 - RNA, 23 nt, Human
gaacucaaauggggccagaucca

SEQ ID NO: 1400564 - RNA, 22 nt, Human
gaacucaaauggggccagaucc

SEQ ID NO: 1400565 - RNA, 20 nt, Human
gaacucaaauggggccagau

SEQ ID NO: 1400566 - RNA, 19 nt, Human
gaacucaaauggggccaga

SEQ ID NO: 1400567 - RNA, 16 nt, Human
gaacucaaauggggcc

SEQ ID NO: 1400568 - RNA, 20 nt, Human
gaacuauuuucaaagacuua

SEQ ID NO: 1400569 - RNA, 19 nt, Human
gaacuauuuucaaagacuu

SEQ ID NO: 1400570 - RNA, 22 nt, Human
gaacuauuuucaaagacuuaag

SEQ ID NO: 1400571 - RNA, 15 nt, Human
gaacucaacuuugac

SEQ ID NO: 1400572 - RNA, 17 nt, Human
gaacugucucucaugaa

SEQ ID NO: 1400573 - RNA, 20 nt, Human
gaacuuagauuuuacaugaa

SEQ ID NO: 1400574 - RNA, 21 nt, Human
gaacugucucucaugaaccuc

SEQ ID NO: 1400575 - RNA, 18 nt, Human
gaacuucagaaagacuug

SEQ ID NO: 1400576 - RNA, 14 nt, Human
gaacuucagaaaga

SEQ ID NO: 1400577 - RNA, 13 nt, Human
gaacuucagaaag

SEQ ID NO: 1400578 - RNA, 19 nt, Human
gaacuuagauuuuacauga

SEQ ID NO: 1400579 - RNA, 17 nt, Human
gaacuuagauuuuacau

SEQ ID NO: 1400580 - RNA, 16 nt, Human
gaacuuagauuuuaca

SEQ ID NO: 1400581 - RNA, 22 nt, Human
gaacuuccagauccuggaaauc

SEQ ID NO: 1400582 - RNA, 23 nt, Human
gaacuuccagguguuacuguaau

SEQ ID NO: 1400583 - RNA, 15 nt, Human
gaacuugacccugag

SEQ ID NO: 1400584 - RNA, 13 nt, Human
gaacuugaggaca

SEQ ID NO: 1400585 - RNA, 14 nt, Human
gaacuugaggacac

SEQ ID NO: 1400586 - RNA, 15 nt, Human
gaacuugaggacaca

SEQ ID NO: 1400587 - RNA, 16 nt, Human
gaacuugaggacacau

SEQ ID NO: 1400588 - RNA, 17 nt, Human
gaacuugaggacacaug

SEQ ID NO: 1400589 - RNA, 19 nt, Human
gaacuugccugccuuucca

SEQ ID NO: 1400590 - RNA, 17 nt, Human
gaacuugccugccuuuc

SEQ ID NO: 1400591 - RNA, 16 nt, Human
gaacuugccugccuuu

SEQ ID NO: 1400592 - RNA, 11 nt, Human
gaacuugccug

SEQ ID NO: 1400593 - RNA, 23 nt, Human
gaacuugcauugugauuggccug

SEQ ID NO: 1400594 - RNA, 15 nt, Human
gaacuugcauuguga

SEQ ID NO: 1400595 - RNA, 18 nt, Human
gaacuugaggacacaugu

SEQ ID NO: 1400596 - RNA, 19 nt, Human
gaacuugaggacacauguc

SEQ ID NO: 1400597 - RNA, 21 nt, Human
gaacuugaggacacaugucca

SEQ ID NO: 1400598 - RNA, 23 nt, Human
gaacagaacauagacagaagaaa

SEQ ID NO: 1400599 - RNA, 23 nt, Human
gaaccuacaguuuuaacugugga

SEQ ID NO: 1400600 - RNA, 21 nt, Human
gaaccuacaguuuuaacugug

SEQ ID NO: 1400601 - RNA, 19 nt, Human
gaaccuacaguuuuaacug

SEQ ID NO: 1400602 - RNA, 18 nt, Human
gaaccuacaguuuuaacu

SEQ ID NO: 1400603 - RNA, 19 nt, Human
gaaccuaauucaauucaaa

SEQ ID NO: 1400604 - RNA, 19 nt, Human
gaaccguuuugaagcuacu

SEQ ID NO: 1400605 - RNA, 18 nt, Human
gaaccguuuugaagcuac

SEQ ID NO: 1400606 - RNA, 17 nt, Human
gaaccguuuugaagcua

SEQ ID NO: 1400607 - RNA, 20 nt, Human
gaaccugaugaaaauaaaga

SEQ ID NO: 1400608 - RNA, 15 nt, Human
gaaccugaugaaaau

SEQ ID NO: 1400609 - RNA, 16 nt, Human
gaaccggagagccagc

SEQ ID NO: 1400610 - RNA, 17 nt, Human
gaaccggagagccagcu

SEQ ID NO: 1400611 - RNA, 15 nt, Human
gaacgucuuaucuaa

SEQ ID NO: 1400612 - RNA, 22 nt, Human
gaacuagaguuuagcuggaaaa

SEQ ID NO: 1400613 - RNA, 12 nt, Human
gaaccugugucc

SEQ ID NO: 1400614 - RNA, 21 nt, Human
gaaccuggguugcagacagga

SEQ ID NO: 1400615 - RNA, 14 nt, Human
gaaccuggccuuca

SEQ ID NO: 1400616 - RNA, 16 nt, Human
gaaccuggccuucagu

SEQ ID NO: 1400617 - RNA, 13 nt, Human
gaaccuggccuuc

SEQ ID NO: 1400618 - RNA, 12 nt, Human
gaaccuggccuu

SEQ ID NO: 1400619 - RNA, 11 nt, Human
gaaccuggccu

SEQ ID NO: 1400620 - RNA, 16 nt, Human
gaaccuggaacuuggg

SEQ ID NO: 1400621 - RNA, 16 nt, Human
gaaccugaugaaaaua

SEQ ID NO: 1400622 - RNA, 15 nt, Human
gagcccagggaggcc

SEQ ID NO: 1400623 - RNA, 11 nt, Human
gagcccaggga

SEQ ID NO: 1400624 - RNA, 22 nt, Human
gagcccaggcucggccugcccc

SEQ ID NO: 1400625 - RNA, 21 nt, Human
gagcccaggcucggccugccc

SEQ ID NO: 1400626 - RNA, 12 nt, Human
gagcccaggcuc

SEQ ID NO: 1400627 - RNA, 11 nt, Human
gagcccaggcu

SEQ ID NO: 1400628 - RNA, 14 nt, Human
gagcccaagggaau

SEQ ID NO: 1400629 - RNA, 24 nt, Human
gagcccaggccaggacucugcagc

SEQ ID NO: 1400630 - RNA, 13 nt, Human
gagccauuugaga

SEQ ID NO: 1400631 - RNA, 12 nt, Human
gagccauguuuc

SEQ ID NO: 1400632 - RNA, 22 nt, Human
gagccaugucuucucccuggaa

SEQ ID NO: 1400633 - RNA, 18 nt, Human
gagccaugucuucucccu

SEQ ID NO: 1400634 - RNA, 17 nt, Human
gagccaugcgcccccuc

SEQ ID NO: 1400635 - RNA, 15 nt, Human
gagccacuccucuga

SEQ ID NO: 1400636 - RNA, 14 nt, Human
gagccacuccucug

SEQ ID NO: 1400637 - RNA, 18 nt, Human
gagcagaaggggagaugg

SEQ ID NO: 1400638 - RNA, 17 nt, Human
gagcagaaggggagaug

SEQ ID NO: 1400639 - RNA, 16 nt, Human
gagcagaagcagcaac

SEQ ID NO: 1400640 - RNA, 14 nt, Human
gagcagaagcagca

SEQ ID NO: 1400641 - RNA, 12 nt, Human
gagcagaagcag

SEQ ID NO: 1400642 - RNA, 23 nt, Human
gagcagaaaacccuugggccaga

SEQ ID NO: 1400643 - RNA, 22 nt, Human
gagcagaaaacccuugggccag

SEQ ID NO: 1400644 - RNA, 13 nt, Human
gagcacugcucca

SEQ ID NO: 1400645 - RNA, 17 nt, Human
gagcaccugcugucugg

SEQ ID NO: 1400646 - RNA, 14 nt, Human
gagcagaggucucc

SEQ ID NO: 1400647 - RNA, 22 nt, Human
gagcagaccaccccgccugccc

SEQ ID NO: 1400648 - RNA, 18 nt, Human
gagcagcaggagggggga

SEQ ID NO: 1400649 - RNA, 22 nt, Human
gagcagcaccuccucagccuga

SEQ ID NO: 1400650 - RNA, 21 nt, Human
gagcagcaccuccucagccug

SEQ ID NO: 1400651 - RNA, 20 nt, Human
gagcagcaccuccucagccu

SEQ ID NO: 1400652 - RNA, 19 nt, Human
gagcagcaccuccucagcc

SEQ ID NO: 1400653 - RNA, 15 nt, Human
gagcagcaccuccuc

SEQ ID NO: 1400654 - RNA, 14 nt, Human
gagcagcaccuccu

SEQ ID NO: 1400655 - RNA, 11 nt, Human
gagcagcaccu

SEQ ID NO: 1400656 - RNA, 19 nt, Human
gagcaggcagccagcaucu

SEQ ID NO: 1400657 - RNA, 17 nt, Human
gagcaggcagccagcau

SEQ ID NO: 1400658 - RNA, 16 nt, Human
gagcaggcagccagca

SEQ ID NO: 1400659 - RNA, 11 nt, Human
gagcaggcagc

SEQ ID NO: 1400660 - RNA, 20 nt, Human
gagcaggaggccuaggaggg

SEQ ID NO: 1400661 - RNA, 21 nt, Human
gagcaggaggccuaggagggu

SEQ ID NO: 1400662 - RNA, 21 nt, Human
gagcagcaggaggggggaggg

SEQ ID NO: 1400663 - RNA, 22 nt, Human
gagcagcaggaggggggaggga

SEQ ID NO: 1400664 - RNA, 20 nt, Human
gagcaggacugaugucuccu

SEQ ID NO: 1400665 - RNA, 14 nt, Human
gagccaccaguucu

SEQ ID NO: 1400666 - RNA, 20 nt, Human
gagcacaauaaauggcugua

SEQ ID NO: 1400667 - RNA, 22 nt, Human
gagcaaagccuguucauggcag

SEQ ID NO: 1400668 - RNA, 22 nt, Human
gagcacaagaggagauccaggg

SEQ ID NO: 1400669 - RNA, 14 nt, Human
gagcaaagccuguu

SEQ ID NO: 1400670 - RNA, 13 nt, Human
gagcaaagccugu

SEQ ID NO: 1400671 - RNA, 19 nt, Human
gagcaccuccacauccucc

SEQ ID NO: 1400672 - RNA, 14 nt, Human
gagcaccuccacau

SEQ ID NO: 1400673 - RNA, 22 nt, Human
gagcaccgccugugaaauacca

SEQ ID NO: 1400674 - RNA, 16 nt, Human
gagcaccugcugucug

SEQ ID NO: 1400675 - RNA, 15 nt, Human
gagcaccugcugucu

SEQ ID NO: 1400676 - RNA, 14 nt, Human
gagcaccugcuguc

SEQ ID NO: 1400677 - RNA, 23 nt, Human
gagcaaagccuguucauggcaga

SEQ ID NO: 1400678 - RNA, 12 nt, Human
gagcaaagccug

SEQ ID NO: 1400679 - RNA, 23 nt, Human
gagcaaacugcaugcccagagac

SEQ ID NO: 1400680 - RNA, 22 nt, Human
gagcaaacugcaugcccagaga

SEQ ID NO: 1400681 - RNA, 20 nt, Human
gagcaaacugcaugcccaga

SEQ ID NO: 1400682 - RNA, 19 nt, Human
gagcaaacugcaugcccag

SEQ ID NO: 1400683 - RNA, 12 nt, Human
gagcaaaauaau

SEQ ID NO: 1400684 - RNA, 13 nt, Human
gaaugcuguacau

SEQ ID NO: 1400685 - RNA, 19 nt, Human
gaaugcugggacucagccu

SEQ ID NO: 1400686 - RNA, 18 nt, Human
gaaugcugggacucagcc

SEQ ID NO: 1400687 - RNA, 17 nt, Human
gaaugcugggacucagc

SEQ ID NO: 1400688 - RNA, 16 nt, Human
gaaugcugggacucag

SEQ ID NO: 1400689 - RNA, 14 nt, Human
gaaugcugggacuc

SEQ ID NO: 1400690 - RNA, 13 nt, Human
gaaugcugggacu

SEQ ID NO: 1400691 - RNA, 20 nt, Human
gaaugcuguacaucuauuuu

SEQ ID NO: 1400692 - RNA, 17 nt, Human
gaaugcuguacaucuau

SEQ ID NO: 1400693 - RNA, 15 nt, Human
gaaugcuguacaucu

SEQ ID NO: 1400694 - RNA, 14 nt, Human
gaaugcuguacauc

SEQ ID NO: 1400695 - RNA, 18 nt, Human
gagauauuaaugcccaga

SEQ ID NO: 1400696 - RNA, 11 nt, Human
gagauauuaau

SEQ ID NO: 1400697 - RNA, 14 nt, Human
gagaucaaagauga

SEQ ID NO: 1400698 - RNA, 13 nt, Human
gagaucaaagaug

SEQ ID NO: 1400699 - RNA, 19 nt, Human
gagauauuaaugcccagac

SEQ ID NO: 1400700 - RNA, 11 nt, Human
gagauauuuac

SEQ ID NO: 1400701 - RNA, 22 nt, Human
gagauauuuacaugaauugcau

SEQ ID NO: 1400702 - RNA, 20 nt, Human
gagaucaaagaugaaaagua

SEQ ID NO: 1400703 - RNA, 15 nt, Human
gagaucaaagaugaa

SEQ ID NO: 1400704 - RNA, 15 nt, Human
gagauccuuaucgaa

SEQ ID NO: 1400705 - RNA, 17 nt, Human
gagauccuccugcagac

SEQ ID NO: 1400706 - RNA, 23 nt, Human
gagauccuccugcagaccacgcc

SEQ ID NO: 1400707 - RNA, 14 nt, Human
gagauccuccugca

SEQ ID NO: 1400708 - RNA, 13 nt, Human
gagauccuccugc

SEQ ID NO: 1400709 - RNA, 13 nt, Human
gagaucaggaaga

SEQ ID NO: 1400710 - RNA, 20 nt, Human
gagaucaggaagagaaggag

SEQ ID NO: 1400711 - RNA, 23 nt, Human
gagccuggggcucuaacgccuga

SEQ ID NO: 1400712 - RNA, 15 nt, Human
gagccuggggcucua

SEQ ID NO: 1400713 - RNA, 13 nt, Human
gagccuggggcuc

SEQ ID NO: 1400714 - RNA, 11 nt, Human
gagccuggggc

SEQ ID NO: 1400715 - RNA, 23 nt, Human
gagccuggcuccguccaggagcc

SEQ ID NO: 1400716 - RNA, 19 nt, Human
gagcgugagcugagcaggc

SEQ ID NO: 1400717 - RNA, 17 nt, Human
gagcgugagcugagcag

SEQ ID NO: 1400718 - RNA, 16 nt, Human
gagcgugagcugagca

SEQ ID NO: 1400719 - RNA, 23 nt, Human
gagccugugaacccaggacaagc

SEQ ID NO: 1400720 - RNA, 21 nt, Human
gagccugugaacccaggacaa

SEQ ID NO: 1400721 - RNA, 20 nt, Human
gagccugugaacccaggaca

SEQ ID NO: 1400722 - RNA, 19 nt, Human
gagccugugaacccaggac

SEQ ID NO: 1400723 - RNA, 18 nt, Human
gagccugugaacccagga

SEQ ID NO: 1400724 - RNA, 17 nt, Human
gagccugugaacccagg

SEQ ID NO: 1400725 - RNA, 16 nt, Human
gagccugugaacccag

SEQ ID NO: 1400726 - RNA, 21 nt, Human
gagccuguccugccuguggcc

SEQ ID NO: 1400727 - RNA, 19 nt, Human
gagccuguccugccugugg

SEQ ID NO: 1400728 - RNA, 18 nt, Human
gagccuguccugccugug

SEQ ID NO: 1400729 - RNA, 17 nt, Human
gagccuguccugccugu

SEQ ID NO: 1400730 - RNA, 15 nt, Human
gagccuguccugccu

SEQ ID NO: 1400731 - RNA, 12 nt, Human
gagccuguccug

SEQ ID NO: 1400732 - RNA, 11 nt, Human
gagccuguccu

SEQ ID NO: 1400733 - RNA, 15 nt, Human
gagccuguaaacuuu

SEQ ID NO: 1400734 - RNA, 12 nt, Human
gagcuacaaaug

SEQ ID NO: 1400735 - RNA, 13 nt, Human
gagcuacaaaugc

SEQ ID NO: 1400736 - RNA, 18 nt, Human
gagccuccuuucuggcuu

SEQ ID NO: 1400737 - RNA, 13 nt, Human
gagccugcaggau

SEQ ID NO: 1400738 - RNA, 15 nt, Human
gagccugcaggaucu

SEQ ID NO: 1400739 - RNA, 17 nt, Human
gagcuucccugacucau

SEQ ID NO: 1400740 - RNA, 13 nt, Human
gagcuucccugac

SEQ ID NO: 1400741 - RNA, 19 nt, Human
gagcuucauggcagaaggc

SEQ ID NO: 1400742 - RNA, 16 nt, Human
gagcuucauggcagaa

SEQ ID NO: 1400743 - RNA, 22 nt, Human
gagcuuaaucuuugaaagguua

SEQ ID NO: 1400744 - RNA, 21 nt, Human
gagcuuaaucuuugaaagguu

SEQ ID NO: 1400745 - RNA, 17 nt, Human
gagcuuaaaauacaaga

SEQ ID NO: 1400746 - RNA, 16 nt, Human
gagcuuaaaauacaag

SEQ ID NO: 1400747 - RNA, 15 nt, Human
gagcuuaaaauacaa

SEQ ID NO: 1400748 - RNA, 17 nt, Human
gagcugcccacagcagg

SEQ ID NO: 1400749 - RNA, 18 nt, Human
gagcugcccacagcaggc

SEQ ID NO: 1400750 - RNA, 19 nt, Human
gagcugcccacagcaggcc

SEQ ID NO: 1400751 - RNA, 23 nt, Human
gagcucugagaggcccuggauca

SEQ ID NO: 1400752 - RNA, 22 nt, Human
gagcucugagaggcccuggauc

SEQ ID NO: 1400753 - RNA, 21 nt, Human
gagcucugagaggcccuggau

SEQ ID NO: 1400754 - RNA, 17 nt, Human
gagcucuucauguuuca

SEQ ID NO: 1400755 - RNA, 18 nt, Human
gagcugauggagaaggaa

SEQ ID NO: 1400756 - RNA, 19 nt, Human
gagcugauggagaaggaag

SEQ ID NO: 1400757 - RNA, 23 nt, Human
gagcuccucccucucaacaccca

SEQ ID NO: 1400758 - RNA, 12 nt, Human
gagcuccucccu

SEQ ID NO: 1400759 - RNA, 18 nt, Human
gagcuccccuccccaacu

SEQ ID NO: 1400760 - RNA, 19 nt, Human
gagcuccccuccccaacug

SEQ ID NO: 1400761 - RNA, 17 nt, Human
gagcuccccuccccaac

SEQ ID NO: 1400762 - RNA, 15 nt, Human
gagcuccccucccca

SEQ ID NO: 1400763 - RNA, 21 nt, Human
gagcuccacucugcuucucug

SEQ ID NO: 1400764 - RNA, 18 nt, Human
gagcuccacucugcuucu

SEQ ID NO: 1400765 - RNA, 16 nt, Human
gagcuccacucugcuu

SEQ ID NO: 1400766 - RNA, 13 nt, Human
gagcuccacucug

SEQ ID NO: 1400767 - RNA, 12 nt, Human
gagcuccacucu

SEQ ID NO: 1400768 - RNA, 23 nt, Human
gagcucaggaugagggaaaagaa

SEQ ID NO: 1400769 - RNA, 13 nt, Human
gagcucaggauga

SEQ ID NO: 1400770 - RNA, 12 nt, Human
gagcucaggaug

SEQ ID NO: 1400771 - RNA, 20 nt, Human
gagcucugagaggcccugga

SEQ ID NO: 1400772 - RNA, 19 nt, Human
gagcucugagaggcccugg

SEQ ID NO: 1400773 - RNA, 18 nt, Human
gagcucugagaggcccug

SEQ ID NO: 1400774 - RNA, 17 nt, Human
gagcucugagaggcccu

SEQ ID NO: 1400775 - RNA, 16 nt, Human
gagcucugagaggccc

SEQ ID NO: 1400776 - RNA, 15 nt, Human
gagcucugagaggcc

SEQ ID NO: 1400777 - RNA, 14 nt, Human
gagcucugagaggc

SEQ ID NO: 1400778 - RNA, 13 nt, Human
gagcucugagagg

SEQ ID NO: 1400779 - RNA, 12 nt, Human
gagcucugagag

SEQ ID NO: 1400780 - RNA, 11 nt, Human
gagcucugaga

SEQ ID NO: 1400781 - RNA, 17 nt, Human
gagcucucugcccuuga

SEQ ID NO: 1400782 - RNA, 15 nt, Human
gagcucucugcccuu

SEQ ID NO: 1400783 - RNA, 19 nt, Human
gagcuccuguccccugcua

SEQ ID NO: 1400784 - RNA, 19 nt, Human
gagcucuauuaugaaugug

SEQ ID NO: 1400785 - RNA, 14 nt, Human
gagcuccucuucca

SEQ ID NO: 1400786 - RNA, 13 nt, Human
gagcuccucuucc

SEQ ID NO: 1400787 - RNA, 17 nt, Human
gagcuccuguccccugc

SEQ ID NO: 1400788 - RNA, 19 nt, Human
gagcuccucuuccaugcug

SEQ ID NO: 1400789 - RNA, 15 nt, Human
gagcuacguauuuaa

SEQ ID NO: 1400790 - RNA, 22 nt, Human
gagcuaccuguguggacaggac

SEQ ID NO: 1400791 - RNA, 20 nt, Human
gagcuaccuguguggacagg

SEQ ID NO: 1400792 - RNA, 19 nt, Human
gagcuaccuguguggacag

SEQ ID NO: 1400793 - RNA, 14 nt, Human
gagcuaccugugug

SEQ ID NO: 1400794 - RNA, 15 nt, Human
gagcuacauaauuua

SEQ ID NO: 1400795 - RNA, 13 nt, Human
gagcuaaggcucu

SEQ ID NO: 1400796 - RNA, 18 nt, Human
gagcuacccgcagaguuc

SEQ ID NO: 1400797 - RNA, 14 nt, Human
gagcuaaggcucua

SEQ ID NO: 1400798 - RNA, 11 nt, Human
gagcucaggau

SEQ ID NO: 1400799 - RNA, 20 nt, Human
gagcuacguauuuaauagca

SEQ ID NO: 1400800 - RNA, 11 nt, Human
gagcuacugcc

SEQ ID NO: 1400801 - RNA, 17 nt, Human
gagcuagaacccucugu

SEQ ID NO: 1400802 - RNA, 23 nt, Human
gagcucaggaaccgaggcaggga

SEQ ID NO: 1400803 - RNA, 11 nt, Human
gagcuaaggcu

SEQ ID NO: 1400804 - RNA, 14 nt, Human
gagcuacaaaugca

SEQ ID NO: 1400805 - RNA, 23 nt, Human
gaggcccuggaucagcguggccu

SEQ ID NO: 1400806 - RNA, 22 nt, Human
gaggcccuggaucagcguggcc

SEQ ID NO: 1400807 - RNA, 14 nt, Human
gaggcccuggauca

SEQ ID NO: 1400808 - RNA, 13 nt, Human
gaggcccuggauc

SEQ ID NO: 1400809 - RNA, 12 nt, Human
gaggcccuggau

SEQ ID NO: 1400810 - RNA, 21 nt, Human
gaggcccuccacaccugcggc

SEQ ID NO: 1400811 - RNA, 17 nt, Human
gaggcccucgcugccag

SEQ ID NO: 1400812 - RNA, 22 nt, Human
gaggcccuccacaccugcggcc

SEQ ID NO: 1400813 - RNA, 19 nt, Human
gaggcccuccacaccugcg

SEQ ID NO: 1400814 - RNA, 18 nt, Human
gaggcccuccacaccugc

SEQ ID NO: 1400815 - RNA, 17 nt, Human
gaggcccuccacaccug

SEQ ID NO: 1400816 - RNA, 12 nt, Human
gaggcccuccac

SEQ ID NO: 1400817 - RNA, 20 nt, Human
gaggcccgcaugcggcccag

SEQ ID NO: 1400818 - RNA, 20 nt, Human
gaggcccccagcccagggcu

SEQ ID NO: 1400819 - RNA, 19 nt, Human
gaggcccccagcccagggc

SEQ ID NO: 1400820 - RNA, 17 nt, Human
gaggcccccagcccagg

SEQ ID NO: 1400821 - RNA, 16 nt, Human
gaggcccccagcccag

SEQ ID NO: 1400822 - RNA, 15 nt, Human
gaggcccccagccca

SEQ ID NO: 1400823 - RNA, 22 nt, Human
gaggccagccuggccuccugcc

SEQ ID NO: 1400824 - RNA, 19 nt, Human
gaggccagggcagagugag

SEQ ID NO: 1400825 - RNA, 21 nt, Human
gaggcccccagcccagggcuc

SEQ ID NO: 1400826 - RNA, 20 nt, Human
gaggccccugucucagggug

SEQ ID NO: 1400827 - RNA, 18 nt, Human
gaggccuggacuuuccug

SEQ ID NO: 1400828 - RNA, 13 nt, Human
gaggccuggacuu

SEQ ID NO: 1400829 - RNA, 21 nt, Human
gaggccguggcugcuguggga

SEQ ID NO: 1400830 - RNA, 14 nt, Human
gaggccguggcugc

SEQ ID NO: 1400831 - RNA, 18 nt, Human
gaggccgaagcuaacagg

SEQ ID NO: 1400832 - RNA, 22 nt, Human
gaggcccugugccccuugacaa

SEQ ID NO: 1400833 - RNA, 21 nt, Human
gaggccuuacuuaaacccagc

SEQ ID NO: 1400834 - RNA, 19 nt, Human
gaggccuguuuggccucuc

SEQ ID NO: 1400835 - RNA, 17 nt, Human
gaggccugggcugggaa

SEQ ID NO: 1400836 - RNA, 18 nt, Human
gaggccugggcugggaaa

SEQ ID NO: 1400837 - RNA, 13 nt, Human
gaggccugggcug

SEQ ID NO: 1400838 - RNA, 22 nt, Human
gaggccugggccgcugccacgu

SEQ ID NO: 1400839 - RNA, 21 nt, Human
gaggccugggccgcugccacg

SEQ ID NO: 1400840 - RNA, 20 nt, Human
gaggccugggccgcugccac

SEQ ID NO: 1400841 - RNA, 16 nt, Human
gaggccugggccgcug

SEQ ID NO: 1400842 - RNA, 14 nt, Human
gaggccugggccgc

SEQ ID NO: 1400843 - RNA, 20 nt, Human
gaggccuggacuuuccugca

SEQ ID NO: 1400844 - RNA, 19 nt, Human
gaggccuggacuuuccugc

SEQ ID NO: 1400845 - RNA, 14 nt, Human
gaggcuuccuucau

SEQ ID NO: 1400846 - RNA, 17 nt, Human
gaggcuguucccaccag

SEQ ID NO: 1400847 - RNA, 18 nt, Human
gaggcuacuguaaggcaa

SEQ ID NO: 1400848 - RNA, 16 nt, Human
gagggcagagcuggug

SEQ ID NO: 1400849 - RNA, 17 nt, Human
gagggcagagcuggugc

SEQ ID NO: 1400850 - RNA, 14 nt, Human
gagggcagagcugg

SEQ ID NO: 1400851 - RNA, 22 nt, Human
gaggggccugccaccuggaccc

SEQ ID NO: 1400852 - RNA, 21 nt, Human
gaggggccugccaccuggacc

SEQ ID NO: 1400853 - RNA, 20 nt, Human
gaggggccugccaccuggac

SEQ ID NO: 1400854 - RNA, 19 nt, Human
gaggggccugccaccugga

SEQ ID NO: 1400855 - RNA, 17 nt, Human
gaggggccugccaccug

SEQ ID NO: 1400856 - RNA, 15 nt, Human
gaggggccugccacc

SEQ ID NO: 1400857 - RNA, 13 nt, Human
gaggggccugcca

SEQ ID NO: 1400858 - RNA, 23 nt, Human
gagggacaugcuuagcagucccc

SEQ ID NO: 1400859 - RNA, 22 nt, Human
gagggacaaaggagccugugaa

SEQ ID NO: 1400860 - RNA, 21 nt, Human
gagggacaaaggagccuguga

SEQ ID NO: 1400861 - RNA, 20 nt, Human
gagggacaaaggagccugug

SEQ ID NO: 1400862 - RNA, 19 nt, Human
gagggacaaaggagccugu

SEQ ID NO: 1400863 - RNA, 18 nt, Human
gagggacaaaggagccug

SEQ ID NO: 1400864 - RNA, 17 nt, Human
gagggacaaaggagccu

SEQ ID NO: 1400865 - RNA, 16 nt, Human
gagggacaaaggagcc

SEQ ID NO: 1400866 - RNA, 14 nt, Human
gagggaaugugaaa

SEQ ID NO: 1400867 - RNA, 19 nt, Human
gagggaagggagccaaggg

SEQ ID NO: 1400868 - RNA, 20 nt, Human
gagggaagggagccaaggga

SEQ ID NO: 1400869 - RNA, 17 nt, Human
gagggaagggagccaag

SEQ ID NO: 1400870 - RNA, 16 nt, Human
gagggaagggagccaa

SEQ ID NO: 1400871 - RNA, 15 nt, Human
gagggaagggagcca

SEQ ID NO: 1400872 - RNA, 14 nt, Human
gagggaagggagcc

SEQ ID NO: 1400873 - RNA, 16 nt, Human
gagggaaaggccagca

SEQ ID NO: 1400874 - RNA, 14 nt, Human
gaggcuuuccaugg

SEQ ID NO: 1400875 - RNA, 20 nt, Human
gaggcuuuggauuugacauu

SEQ ID NO: 1400876 - RNA, 16 nt, Human
gaggcuuuggauuuga

SEQ ID NO: 1400877 - RNA, 14 nt, Human
gaggcuuuggauuu

SEQ ID NO: 1400878 - RNA, 23 nt, Human
gaggcuuuaugauaauagauucu

SEQ ID NO: 1400879 - RNA, 14 nt, Human
gaggcuugguuccu

SEQ ID NO: 1400880 - RNA, 15 nt, Human
gagggacugucgcug

SEQ ID NO: 1400881 - RNA, 23 nt, Human
gagggacgccugggggugccagg

SEQ ID NO: 1400882 - RNA, 16 nt, Human
gagggacgccuggggg

SEQ ID NO: 1400883 - RNA, 15 nt, Human
gagggacgccugggg

SEQ ID NO: 1400884 - RNA, 14 nt, Human
gagggacgccuggg

SEQ ID NO: 1400885 - RNA, 15 nt, Human
gagggagaaauaguc

SEQ ID NO: 1400886 - RNA, 17 nt, Human
gaggccagccuggccuc

SEQ ID NO: 1400887 - RNA, 23 nt, Human
gagggacugucgcugcuucgugg

SEQ ID NO: 1400888 - RNA, 18 nt, Human
gagggacugucgcugcuu

SEQ ID NO: 1400889 - RNA, 16 nt, Human
gagggagaacaagacc

SEQ ID NO: 1400890 - RNA, 13 nt, Human
gaggauacgacag

SEQ ID NO: 1400891 - RNA, 21 nt, Human
gaggauguaaagaucaauaaa

SEQ ID NO: 1400892 - RNA, 21 nt, Human
gaggaguaacaauacaaaugg

SEQ ID NO: 1400893 - RNA, 20 nt, Human
gaggaguaacaauacaaaug

SEQ ID NO: 1400894 - RNA, 12 nt, Human
gaggaguaacaa

SEQ ID NO: 1400895 - RNA, 11 nt, Human
gaggaguaaca

SEQ ID NO: 1400896 - RNA, 22 nt, Human
gaggaggugucucaggcugccu

SEQ ID NO: 1400897 - RNA, 23 nt, Human
gaggaggugucucaggcugccug

SEQ ID NO: 1400898 - RNA, 21 nt, Human
gaggaggugucucaggcugcc

SEQ ID NO: 1400899 - RNA, 19 nt, Human
gaggaggugucucaggcug

SEQ ID NO: 1400900 - RNA, 21 nt, Human
gaggagggucggugccuucaa

SEQ ID NO: 1400901 - RNA, 19 nt, Human
gaggagguaaugaauuaaa

SEQ ID NO: 1400902 - RNA, 20 nt, Human
gaggagggucggugccuuca

SEQ ID NO: 1400903 - RNA, 23 nt, Human
gaggagucugagguccugagcac

SEQ ID NO: 1400904 - RNA, 22 nt, Human
gaggagucugagguccugagca

SEQ ID NO: 1400905 - RNA, 21 nt, Human
gaggagucugagguccugagc

SEQ ID NO: 1400906 - RNA, 20 nt, Human
gaggagucugagguccugag

SEQ ID NO: 1400907 - RNA, 19 nt, Human
gaggagucugagguccuga

SEQ ID NO: 1400908 - RNA, 18 nt, Human
gaggagucugagguccug

SEQ ID NO: 1400909 - RNA, 15 nt, Human
gaggagucugagguc

SEQ ID NO: 1400910 - RNA, 14 nt, Human
gaggagucugaggu

SEQ ID NO: 1400911 - RNA, 13 nt, Human
gaggagucugagg

SEQ ID NO: 1400912 - RNA, 22 nt, Human
gaggaguaacaauacaaaugga

SEQ ID NO: 1400913 - RNA, 15 nt, Human
gaggccagggcagag

SEQ ID NO: 1400914 - RNA, 13 nt, Human
gaggccagggcag

SEQ ID NO: 1400915 - RNA, 20 nt, Human
gaggccagccuggccuccug

SEQ ID NO: 1400916 - RNA, 19 nt, Human
gaggccagccuggccuccu

SEQ ID NO: 1400917 - RNA, 18 nt, Human
gaggccagccuggccucc

SEQ ID NO: 1400918 - RNA, 12 nt, Human
gaggcagcccgc

SEQ ID NO: 1400919 - RNA, 16 nt, Human
gaggcagcccaggaag

SEQ ID NO: 1400920 - RNA, 13 nt, Human
gaggcagcccagg

SEQ ID NO: 1400921 - RNA, 12 nt, Human
gaggcagcccag

SEQ ID NO: 1400922 - RNA, 15 nt, Human
gaggcagcaggacug

SEQ ID NO: 1400923 - RNA, 17 nt, Human
gaggcagcaggacuguc

SEQ ID NO: 1400924 - RNA, 18 nt, Human
gaggcacugaagugcuua

SEQ ID NO: 1400925 - RNA, 20 nt, Human
gaggcaccugguggccaugc

SEQ ID NO: 1400926 - RNA, 17 nt, Human
gaggcaccaggaagccg

SEQ ID NO: 1400927 - RNA, 13 nt, Human
gaggcaccaggaa

SEQ ID NO: 1400928 - RNA, 17 nt, Human
gaggcacaugucagcaa

SEQ ID NO: 1400929 - RNA, 21 nt, Human
gaggcaauuagacacuuugga

SEQ ID NO: 1400930 - RNA, 22 nt, Human
gaggcagcagugugaggccagg

SEQ ID NO: 1400931 - RNA, 21 nt, Human
gaggcagcagugugaggccag

SEQ ID NO: 1400932 - RNA, 20 nt, Human
gaggcagcagugugaggcca

SEQ ID NO: 1400933 - RNA, 13 nt, Human
gaggcagcagugu

SEQ ID NO: 1400934 - RNA, 17 nt, Human
gaggaauacugaacauc

SEQ ID NO: 1400935 - RNA, 21 nt, Human
gaggaauaagcucccagggcc

SEQ ID NO: 1400936 - RNA, 19 nt, Human
gaggaaggggccagaggcu

SEQ ID NO: 1400937 - RNA, 16 nt, Human
gaggaaggacuucccu

SEQ ID NO: 1400938 - RNA, 22 nt, Human
gagcuugaaacccguggcgcuu

SEQ ID NO: 1400939 - RNA, 16 nt, Human
gaggaaggaggaccca

SEQ ID NO: 1400940 - RNA, 18 nt, Human
gaggaaggaggacccagg

SEQ ID NO: 1400941 - RNA, 21 nt, Human
gaggaaggaggacccaggaca

SEQ ID NO: 1400942 - RNA, 20 nt, Human
gaggaaucugugggucuggg

SEQ ID NO: 1400943 - RNA, 19 nt, Human
gaggaaucugugggucugg

SEQ ID NO: 1400944 - RNA, 22 nt, Human
gaggaaucugugggucugggag

SEQ ID NO: 1400945 - RNA, 21 nt, Human
gaggaaucugugggucuggga

SEQ ID NO: 1400946 - RNA, 15 nt, Human
gaggacaaccauucc

SEQ ID NO: 1400947 - RNA, 14 nt, Human
gaggaauuucaccu

SEQ ID NO: 1400948 - RNA, 22 nt, Human
gaggaauuuucuuuguguagcu

SEQ ID NO: 1400949 - RNA, 13 nt, Human
gaggacacagaga

SEQ ID NO: 1400950 - RNA, 18 nt, Human
gaggacaagagaaaaaag

SEQ ID NO: 1400951 - RNA, 11 nt, Human
gaggacacaug

SEQ ID NO: 1400952 - RNA, 12 nt, Human
gaggacacaugu

SEQ ID NO: 1400953 - RNA, 13 nt, Human
gaggacacauguc

SEQ ID NO: 1400954 - RNA, 14 nt, Human
gaggacacaugucc

SEQ ID NO: 1400955 - RNA, 14 nt, Human
gaggagccuguccu

SEQ ID NO: 1400956 - RNA, 12 nt, Human
gaggagccuguc

SEQ ID NO: 1400957 - RNA, 23 nt, Human
gaggagcccccacccuguuccug

SEQ ID NO: 1400958 - RNA, 21 nt, Human
gaggagcccccacccuguucc

SEQ ID NO: 1400959 - RNA, 20 nt, Human
gaggagcccccacccuguuc

SEQ ID NO: 1400960 - RNA, 15 nt, Human
gaggagccccagcua

SEQ ID NO: 1400961 - RNA, 14 nt, Human
gaggagccccagcu

SEQ ID NO: 1400962 - RNA, 21 nt, Human
gaggagcccaggccaggacuc

SEQ ID NO: 1400963 - RNA, 20 nt, Human
gaggagcccaggccaggacu

SEQ ID NO: 1400964 - RNA, 18 nt, Human
gaggagcccaggccagga

SEQ ID NO: 1400965 - RNA, 13 nt, Human
gaggagcccaggc

SEQ ID NO: 1400966 - RNA, 12 nt, Human
gaggagcccagg

SEQ ID NO: 1400967 - RNA, 23 nt, Human
gaggagcccacgacacugcagcc

SEQ ID NO: 1400968 - RNA, 18 nt, Human
gaggagccaccaguucuc

SEQ ID NO: 1400969 - RNA, 16 nt, Human
gaggagccaccaguuc

SEQ ID NO: 1400970 - RNA, 22 nt, Human
gaggacagaugccuccuuccuc

SEQ ID NO: 1400971 - RNA, 21 nt, Human
gaggacagaugccuccuuccu

SEQ ID NO: 1400972 - RNA, 20 nt, Human
gaggacagaugccuccuucc

SEQ ID NO: 1400973 - RNA, 17 nt, Human
gaggacagaugccuccu

SEQ ID NO: 1400974 - RNA, 16 nt, Human
gaggacagaugccucc

SEQ ID NO: 1400975 - RNA, 18 nt, Human
gaggaggcuccagagggc

SEQ ID NO: 1400976 - RNA, 12 nt, Human
gaggaggcagca

SEQ ID NO: 1400977 - RNA, 13 nt, Human
gaggaggcagcag

SEQ ID NO: 1400978 - RNA, 14 nt, Human
gaggaggcagcagg

SEQ ID NO: 1400979 - RNA, 15 nt, Human
gaggaggcagcagga

SEQ ID NO: 1400980 - RNA, 16 nt, Human
gaggaggcagcaggac

SEQ ID NO: 1400981 - RNA, 15 nt, Human
gaggagggcaggcau

SEQ ID NO: 1400982 - RNA, 14 nt, Human
gaggagggcaggca

SEQ ID NO: 1400983 - RNA, 13 nt, Human
gaggagggcaggc

SEQ ID NO: 1400984 - RNA, 19 nt, Human
gaggagccuguccugccug

SEQ ID NO: 1400985 - RNA, 22 nt, Human
gaggagccuguccugccugugg

SEQ ID NO: 1400986 - RNA, 18 nt, Human
gaggagccuguccugccu

SEQ ID NO: 1400987 - RNA, 16 nt, Human
gaggagccuguccugc

SEQ ID NO: 1400988 - RNA, 18 nt, Human
gaggaggaaaucccuuca

SEQ ID NO: 1400989 - RNA, 19 nt, Human
gaggaggaaaucccuucau

SEQ ID NO: 1400990 - RNA, 16 nt, Human
gaggaggcagagaaga

SEQ ID NO: 1400991 - RNA, 20 nt, Human
gaggaggcagagaagaaaga

SEQ ID NO: 1400992 - RNA, 23 nt, Human
gauauauuuuacaauuuuuuauc

SEQ ID NO: 1400993 - RNA, 14 nt, Human
gauauauuuuacaa

SEQ ID NO: 1400994 - RNA, 19 nt, Human
gauauagaaguauaaagaa

SEQ ID NO: 1400995 - RNA, 17 nt, Human
gauauacucuagaugaa

SEQ ID NO: 1400996 - RNA, 23 nt, Human
gauagauaggucagugcaaauac

SEQ ID NO: 1400997 - RNA, 21 nt, Human
gauauaaguguguguuuuuca

SEQ ID NO: 1400998 - RNA, 13 nt, Human
gauaaugaacaga

SEQ ID NO: 1400999 - RNA, 14 nt, Human
gauaaugaacagaa

SEQ ID NO: 1401000 - RNA, 21 nt, Human
gauaaaacaucuuugaaauua

SEQ ID NO: 1401001 - RNA, 16 nt, Human
gaguuuuuuguaccaa

SEQ ID NO: 1401002 - RNA, 17 nt, Human
gaguuuuguuuccucug

SEQ ID NO: 1401003 - RNA, 22 nt, Human
gaguuuuguguuuguuguagau

SEQ ID NO: 1401004 - RNA, 18 nt, Human
gaguuuuguguuuguugu

SEQ ID NO: 1401005 - RNA, 15 nt, Human
gaguuuuguguuugu

SEQ ID NO: 1401006 - RNA, 13 nt, Human
gaguuuuguguuu

SEQ ID NO: 1401007 - RNA, 14 nt, Human
gauagaaugacagu

SEQ ID NO: 1401008 - RNA, 13 nt, Human
gauacaaugcugu

SEQ ID NO: 1401009 - RNA, 18 nt, Human
gauacaaugcugugcccu

SEQ ID NO: 1401010 - RNA, 23 nt, Human
gauagagacuggaacacuagaca

SEQ ID NO: 1401011 - RNA, 23 nt, Human
gagucugagguccugagcacugc

SEQ ID NO: 1401012 - RNA, 22 nt, Human
gagucugagguccugagcacug

SEQ ID NO: 1401013 - RNA, 19 nt, Human
gagucugagguccugagca

SEQ ID NO: 1401014 - RNA, 18 nt, Human
gagucugagguccugagc

SEQ ID NO: 1401015 - RNA, 17 nt, Human
gagucugagguccugag

SEQ ID NO: 1401016 - RNA, 16 nt, Human
gagucugagguccuga

SEQ ID NO: 1401017 - RNA, 15 nt, Human
gagucugagguccug

SEQ ID NO: 1401018 - RNA, 14 nt, Human
gagucugagguccu

SEQ ID NO: 1401019 - RNA, 13 nt, Human
gagucugaggucc

SEQ ID NO: 1401020 - RNA, 21 nt, Human
gagucugccagggccccucuc

SEQ ID NO: 1401021 - RNA, 20 nt, Human
gagucugccagggccccucu

SEQ ID NO: 1401022 - RNA, 13 nt, Human
gagucugccaggg

SEQ ID NO: 1401023 - RNA, 12 nt, Human
gagucugccagg

SEQ ID NO: 1401024 - RNA, 18 nt, Human
gagucugccacccaggau

SEQ ID NO: 1401025 - RNA, 16 nt, Human
gagucugccacccagg

SEQ ID NO: 1401026 - RNA, 22 nt, Human
gaguggcccuuucggauccagg

SEQ ID NO: 1401027 - RNA, 13 nt, Human
gagugggaagccc

SEQ ID NO: 1401028 - RNA, 12 nt, Human
gagugggaagcc

SEQ ID NO: 1401029 - RNA, 11 nt, Human
gagugggaagc

SEQ ID NO: 1401030 - RNA, 21 nt, Human
gagugucuuuccacggagcca

SEQ ID NO: 1401031 - RNA, 19 nt, Human
gagugucuuuccacggagc

SEQ ID NO: 1401032 - RNA, 15 nt, Human
gagugucuuuccacg

SEQ ID NO: 1401033 - RNA, 13 nt, Human
gagugucuuucca

SEQ ID NO: 1401034 - RNA, 21 nt, Human
gaguuagggacugaccagcag

SEQ ID NO: 1401035 - RNA, 19 nt, Human
gaguuagggacugaccagc

SEQ ID NO: 1401036 - RNA, 20 nt, Human
gagugugaccaaaaguuaca

SEQ ID NO: 1401037 - RNA, 21 nt, Human
gagugugaccaaaaguuacau

SEQ ID NO: 1401038 - RNA, 12 nt, Human
gaguuagacugu

SEQ ID NO: 1401039 - RNA, 14 nt, Human
gaguuagacuguug

SEQ ID NO: 1401040 - RNA, 12 nt, Human
gagugugaccaa

SEQ ID NO: 1401041 - RNA, 22 nt, Human
gagugucuuuccacggagccac

SEQ ID NO: 1401042 - RNA, 21 nt, Human
gaguucuuuuugaaguauuua

SEQ ID NO: 1401043 - RNA, 19 nt, Human
gaguucuuuuugaaguauu

SEQ ID NO: 1401044 - RNA, 17 nt, Human
gaguucuuuuugaagua

SEQ ID NO: 1401045 - RNA, 14 nt, Human
gaguuccugcaugc

SEQ ID NO: 1401046 - RNA, 15 nt, Human
gaguuccagaaagua

SEQ ID NO: 1401047 - RNA, 16 nt, Human
gaguuccagaaaguaa

SEQ ID NO: 1401048 - RNA, 12 nt, Human
gaguuccugcau

SEQ ID NO: 1401049 - RNA, 18 nt, Human
gaguuuuccauggcagga

SEQ ID NO: 1401050 - RNA, 16 nt, Human
gaguuuuggaugcagu

SEQ ID NO: 1401051 - RNA, 21 nt, Human
gaguuuuccauggcaggaagg

SEQ ID NO: 1401052 - RNA, 21 nt, Human
gaguugaaaaucuuauaauuu

SEQ ID NO: 1401053 - RNA, 16 nt, Human
gagguuugcaguccca

SEQ ID NO: 1401054 - RNA, 19 nt, Human
gagguucaaagauauuuug

SEQ ID NO: 1401055 - RNA, 18 nt, Human
gaguaaagaauuauuuug

SEQ ID NO: 1401056 - RNA, 16 nt, Human
gaguacguugugcauu

SEQ ID NO: 1401057 - RNA, 21 nt, Human
gagguuuuauuucauuuuuca

SEQ ID NO: 1401058 - RNA, 16 nt, Human
gagguuuuauuucauu

SEQ ID NO: 1401059 - RNA, 22 nt, Human
gagguuugcagucccaagcggu

SEQ ID NO: 1401060 - RNA, 19 nt, Human
gagguuugcagucccaagc

SEQ ID NO: 1401061 - RNA, 15 nt, Human
gaguagcugagcuca

SEQ ID NO: 1401062 - RNA, 17 nt, Human
gaguaauuuuggauuuu

SEQ ID NO: 1401063 - RNA, 22 nt, Human
gaguaccccugcuuugggcuug

SEQ ID NO: 1401064 - RNA, 17 nt, Human
gaguacguugugcauuu

SEQ ID NO: 1401065 - RNA, 18 nt, Human
gaguacguugugcauuug

SEQ ID NO: 1401066 - RNA, 20 nt, Human
gaguacguugugcauuuggu

SEQ ID NO: 1401067 - RNA, 19 nt, Human
gagguccugagcacugcca

SEQ ID NO: 1401068 - RNA, 18 nt, Human
gagguccugagcacugcc

SEQ ID NO: 1401069 - RNA, 17 nt, Human
gagguccugagcacugc

SEQ ID NO: 1401070 - RNA, 16 nt, Human
gagguccugagcacug

SEQ ID NO: 1401071 - RNA, 14 nt, Human
gagguccugagcac

SEQ ID NO: 1401072 - RNA, 13 nt, Human
gagguccugagca

SEQ ID NO: 1401073 - RNA, 12 nt, Human
gagguccugagc

SEQ ID NO: 1401074 - RNA, 17 nt, Human
gaggugggccagucugu

SEQ ID NO: 1401075 - RNA, 22 nt, Human
gagguccugagcacugccagga

SEQ ID NO: 1401076 - RNA, 23 nt, Human
gagguccugagcacugccaggag

SEQ ID NO: 1401077 - RNA, 21 nt, Human
gagguccugagcacugccagg

SEQ ID NO: 1401078 - RNA, 20 nt, Human
gagguccugagcacugccag

SEQ ID NO: 1401079 - RNA, 21 nt, Human
gagggggucguggagagcuag

SEQ ID NO: 1401080 - RNA, 19 nt, Human
gagggggucguggagagcu

SEQ ID NO: 1401081 - RNA, 18 nt, Human
gagggggucguggagagc

SEQ ID NO: 1401082 - RNA, 17 nt, Human
gagggggucguggagag

SEQ ID NO: 1401083 - RNA, 15 nt, Human
gagucccugccugga

SEQ ID NO: 1401084 - RNA, 14 nt, Human
gagucccugccugg

SEQ ID NO: 1401085 - RNA, 19 nt, Human
gaguccccucaccuccucu

SEQ ID NO: 1401086 - RNA, 18 nt, Human
gaguccccucaccuccuc

SEQ ID NO: 1401087 - RNA, 22 nt, Human
gagucccagguuggcucugcca

SEQ ID NO: 1401088 - RNA, 23 nt, Human
gagucccagguuggcucugccag

SEQ ID NO: 1401089 - RNA, 21 nt, Human
gagucccagguuggcucugcc

SEQ ID NO: 1401090 - RNA, 18 nt, Human
gagucccagguuggcucu

SEQ ID NO: 1401091 - RNA, 17 nt, Human
gaguccccucaccuccu

SEQ ID NO: 1401092 - RNA, 16 nt, Human
gaguccccucaccucc

SEQ ID NO: 1401093 - RNA, 11 nt, Human
gaguccccuca

SEQ ID NO: 1401094 - RNA, 14 nt, Human
gaguagcugagcuc

SEQ ID NO: 1401095 - RNA, 13 nt, Human
gaguagcugagcu

SEQ ID NO: 1401096 - RNA, 19 nt, Human
gaguagcugggacuacagg

SEQ ID NO: 1401097 - RNA, 19 nt, Human
gagucaaaugguaggcauu

SEQ ID NO: 1401098 - RNA, 19 nt, Human
gagucaaaacuacaaauca

SEQ ID NO: 1401099 - RNA, 20 nt, Human
gagucaaaacacuuguaauu

SEQ ID NO: 1401100 - RNA, 17 nt, Human
gagucaaaacacuugua

SEQ ID NO: 1401101 - RNA, 14 nt, Human
gagucaaaacacuu

SEQ ID NO: 1401102 - RNA, 14 nt, Human
gagucaaaaagaac

SEQ ID NO: 1401103 - RNA, 15 nt, Human
gagucaaaaauuaaa

SEQ ID NO: 1401104 - RNA, 17 nt, Human
gagucguggggugugcu

SEQ ID NO: 1401105 - RNA, 22 nt, Human
gagucguacagaaagcugccug

SEQ ID NO: 1401106 - RNA, 17 nt, Human
gagucguacagaaagcu

SEQ ID NO: 1401107 - RNA, 19 nt, Human
gagucccugccuggaccag

SEQ ID NO: 1401108 - RNA, 16 nt, Human
gagucccugccuggac

SEQ ID NO: 1401109 - RNA, 21 nt, Human
gagucguggggugugcuggga

SEQ ID NO: 1401110 - RNA, 20 nt, Human
gagucguggggugugcuggg

SEQ ID NO: 1401111 - RNA, 19 nt, Human
gagucguggggugugcugg

SEQ ID NO: 1401112 - RNA, 18 nt, Human
gagucguggggugugcug

SEQ ID NO: 1401113 - RNA, 13 nt, Human
gagucucucuggg

SEQ ID NO: 1401114 - RNA, 13 nt, Human
gagucucccaggg

SEQ ID NO: 1401115 - RNA, 14 nt, Human
gagucucccaggga

SEQ ID NO: 1401116 - RNA, 15 nt, Human
gagucucccagggag

SEQ ID NO: 1401117 - RNA, 14 nt, Human
gagucucucugggc

SEQ ID NO: 1401118 - RNA, 16 nt, Human
gagucucugaggggcu

SEQ ID NO: 1401119 - RNA, 18 nt, Human
gauccuauccuccuaccu

SEQ ID NO: 1401120 - RNA, 16 nt, Human
gauauauuuucuuucu

SEQ ID NO: 1401121 - RNA, 15 nt, Human
gauauauuuucuuuc

SEQ ID NO: 1401122 - RNA, 11 nt, Human
gaugaaaauaa

SEQ ID NO: 1401123 - RNA, 23 nt, Human
gaugaaaaguauauugauaaccu

SEQ ID NO: 1401124 - RNA, 21 nt, Human
gaugaaaaguauauugauaac

SEQ ID NO: 1401125 - RNA, 20 nt, Human
gaugaaaaauugcugacugu

SEQ ID NO: 1401126 - RNA, 18 nt, Human
gaugaaaaauugcugacu

SEQ ID NO: 1401127 - RNA, 14 nt, Human
gaucuuuuuuguca

SEQ ID NO: 1401128 - RNA, 13 nt, Human
gaucuuagauucu

SEQ ID NO: 1401129 - RNA, 14 nt, Human
gaucuuagauucuc

SEQ ID NO: 1401130 - RNA, 20 nt, Human
gaucuguuuugaaggcaaaa

SEQ ID NO: 1401131 - RNA, 12 nt, Human
gaucgccuuccc

SEQ ID NO: 1401132 - RNA, 17 nt, Human
gaucgaaccguuuugaa

SEQ ID NO: 1401133 - RNA, 20 nt, Human
gauccuguguggagagggaa

SEQ ID NO: 1401134 - RNA, 19 nt, Human
gauccuguguggagaggga

SEQ ID NO: 1401135 - RNA, 18 nt, Human
gauggcagcuuuuaaaag

SEQ ID NO: 1401136 - RNA, 18 nt, Human
gauggcaaccagaccauu

SEQ ID NO: 1401137 - RNA, 22 nt, Human
gauggcaacagaucuggaaccu

SEQ ID NO: 1401138 - RNA, 21 nt, Human
gauggcaacagaucuggaacc

SEQ ID NO: 1401139 - RNA, 17 nt, Human
gauggcaacagaucugg

SEQ ID NO: 1401140 - RNA, 16 nt, Human
gauggcaacagaucug

SEQ ID NO: 1401141 - RNA, 15 nt, Human
gauggcaacagaucu

SEQ ID NO: 1401142 - RNA, 17 nt, Human
gauggcagcuuuuaaaa

SEQ ID NO: 1401143 - RNA, 22 nt, Human
gaugggacauuccaaagaacag

SEQ ID NO: 1401144 - RNA, 22 nt, Human
gaugcuccaagauucuagauga

SEQ ID NO: 1401145 - RNA, 20 nt, Human
gaugcuccaagauucuagau

SEQ ID NO: 1401146 - RNA, 19 nt, Human
gaugcuccaagauucuaga

SEQ ID NO: 1401147 - RNA, 17 nt, Human
gaugcuccaagauucua

SEQ ID NO: 1401148 - RNA, 16 nt, Human
gaugcuccaagauucu

SEQ ID NO: 1401149 - RNA, 15 nt, Human
gaugccuccuuccuc

SEQ ID NO: 1401150 - RNA, 16 nt, Human
gaugccuccuuccucu

SEQ ID NO: 1401151 - RNA, 21 nt, Human
gaugccuggcgggguggggug

SEQ ID NO: 1401152 - RNA, 20 nt, Human
gaugcaucagaaagggaggg

SEQ ID NO: 1401153 - RNA, 13 nt, Human
gaugcaaugaaca

SEQ ID NO: 1401154 - RNA, 21 nt, Human
gaugcacagaguuguuacauu

SEQ ID NO: 1401155 - RNA, 18 nt, Human
gaugcaguucugaagaag

SEQ ID NO: 1401156 - RNA, 18 nt, Human
gaugacuaaaauauuuau

SEQ ID NO: 1401157 - RNA, 15 nt, Human
gaugacuaaaauauu

SEQ ID NO: 1401158 - RNA, 12 nt, Human
gaugacuaaaau

SEQ ID NO: 1401159 - RNA, 16 nt, Human
gaugaaaauaaagaau

SEQ ID NO: 1401160 - RNA, 15 nt, Human
gaugaaaauaaagaa

SEQ ID NO: 1401161 - RNA, 14 nt, Human
gaugaaaauaaaga

SEQ ID NO: 1401162 - RNA, 14 nt, Human
gaugacuauggaaa

SEQ ID NO: 1401163 - RNA, 15 nt, Human
gauucuaaugaugau

SEQ ID NO: 1401164 - RNA, 15 nt, Human
gauucuaaaggucca

SEQ ID NO: 1401165 - RNA, 20 nt, Human
gauucuaaagauucuauagu

SEQ ID NO: 1401166 - RNA, 17 nt, Human
gauucuaaagauucuau

SEQ ID NO: 1401167 - RNA, 16 nt, Human
gauucuaaagauucua

SEQ ID NO: 1401168 - RNA, 15 nt, Human
gauucuaaagauucu

SEQ ID NO: 1401169 - RNA, 15 nt, Human
gauuccugagccagu

SEQ ID NO: 1401170 - RNA, 18 nt, Human
gauuccggauccuaagca

SEQ ID NO: 1401171 - RNA, 22 nt, Human
gauuccggauccuaagcaucua

SEQ ID NO: 1401172 - RNA, 15 nt, Human
gauuccggauccuaa

SEQ ID NO: 1401173 - RNA, 19 nt, Human
gauucccucucccaggccc

SEQ ID NO: 1401174 - RNA, 20 nt, Human
gauucccucucccaggcccc

SEQ ID NO: 1401175 - RNA, 18 nt, Human
gauucccucucccaggcc

SEQ ID NO: 1401176 - RNA, 17 nt, Human
gauucccucucccaggc

SEQ ID NO: 1401177 - RNA, 14 nt, Human
gauucccucuccca

SEQ ID NO: 1401178 - RNA, 20 nt, Human
gauuccccaucucaggccag

SEQ ID NO: 1401179 - RNA, 17 nt, Human
gauuccccaucucaggc

SEQ ID NO: 1401180 - RNA, 19 nt, Human
gauucccagagcaaaauaa

SEQ ID NO: 1401181 - RNA, 13 nt, Human
gauucccagagca

SEQ ID NO: 1401182 - RNA, 15 nt, Human
gauucacaucucauu

SEQ ID NO: 1401183 - RNA, 16 nt, Human
gauucacaucucauuu

SEQ ID NO: 1401184 - RNA, 19 nt, Human
gauucaaucuguaaacugu

SEQ ID NO: 1401185 - RNA, 18 nt, Human
gauucaaucuguaaacug

SEQ ID NO: 1401186 - RNA, 16 nt, Human
gauucaaucuguaaac

SEQ ID NO: 1401187 - RNA, 14 nt, Human
gauucaaucuguaa

SEQ ID NO: 1401188 - RNA, 19 nt, Human
gauucaaagguucuagguu

SEQ ID NO: 1401189 - RNA, 18 nt, Human
gauucaaagguucuaggu

SEQ ID NO: 1401190 - RNA, 15 nt, Human
gauucaaagguucua

SEQ ID NO: 1401191 - RNA, 13 nt, Human
gauucaaagguuc

SEQ ID NO: 1401192 - RNA, 23 nt, Human
gauucagaaaauguucuguuugc

SEQ ID NO: 1401193 - RNA, 18 nt, Human
gauucagaaaugaggcca

SEQ ID NO: 1401194 - RNA, 21 nt, Human
gauucagaaaauguucuguuu

SEQ ID NO: 1401195 - RNA, 21 nt, Human
gauucacccuguccaaacugc

SEQ ID NO: 1401196 - RNA, 15 nt, Human
gauugucuuaauauu

SEQ ID NO: 1401197 - RNA, 18 nt, Human
gauuguccuuuugcaaag

SEQ ID NO: 1401198 - RNA, 17 nt, Human
gauuguccuuuugcaaa

SEQ ID NO: 1401199 - RNA, 16 nt, Human
gauuguccuuuugcaa

SEQ ID NO: 1401200 - RNA, 15 nt, Human
gauuguauuguugaa

SEQ ID NO: 1401201 - RNA, 20 nt, Human
gauuguauuguugaaaaagu

SEQ ID NO: 1401202 - RNA, 10 nt, Human
gauuguauug

SEQ ID NO: 1401203 - RNA, 11 nt, Human
gauuguaacuc

SEQ ID NO: 1401204 - RNA, 23 nt, Human
gauuguaauauguaaaugguaug

SEQ ID NO: 1401205 - RNA, 22 nt, Human
gauuggauacgcaucagacaga

SEQ ID NO: 1401206 - RNA, 23 nt, Human
gauugaaguauuuugcuggaaua

SEQ ID NO: 1401207 - RNA, 21 nt, Human
gauugaaguauuuugcuggaa

SEQ ID NO: 1401208 - RNA, 20 nt, Human
gauugaaaauguccaggaaa

SEQ ID NO: 1401209 - RNA, 19 nt, Human
gauugaaaauguccaggaa

SEQ ID NO: 1401210 - RNA, 18 nt, Human
gauugaaaauguccagga

SEQ ID NO: 1401211 - RNA, 19 nt, Human
gauucuauaguucuagaca

SEQ ID NO: 1401212 - RNA, 18 nt, Human
gauucuauaguucuagac

SEQ ID NO: 1401213 - RNA, 17 nt, Human
gauucuauaguucuaga

SEQ ID NO: 1401214 - RNA, 15 nt, Human
gauucuauaguucua

SEQ ID NO: 1401215 - RNA, 23 nt, Human
gauucuagaucagaugcuccaag

SEQ ID NO: 1401216 - RNA, 21 nt, Human
gauucuagaucagaugcucca

SEQ ID NO: 1401217 - RNA, 19 nt, Human
gauucuagaucagaugcuc

SEQ ID NO: 1401218 - RNA, 18 nt, Human
gauucuagaucagaugcu

SEQ ID NO: 1401219 - RNA, 23 nt, Human
gauugacgggacuguugguauug

SEQ ID NO: 1401220 - RNA, 17 nt, Human
gauguguccugacacug

SEQ ID NO: 1401221 - RNA, 13 nt, Human
gauguguccugac

SEQ ID NO: 1401222 - RNA, 11 nt, Human
gauguguccug

SEQ ID NO: 1401223 - RNA, 19 nt, Human
gauguggaacugcugccac

SEQ ID NO: 1401224 - RNA, 21 nt, Human
gauguggaacugcugccacug

SEQ ID NO: 1401225 - RNA, 18 nt, Human
gauguggaacugcugcca

SEQ ID NO: 1401226 - RNA, 23 nt, Human
gauguguguugauacuguugcac

SEQ ID NO: 1401227 - RNA, 22 nt, Human
gauguguguugauacuguugca

SEQ ID NO: 1401228 - RNA, 21 nt, Human
gauguguguugauacuguugc

SEQ ID NO: 1401229 - RNA, 20 nt, Human
gauguguguugauacuguug

SEQ ID NO: 1401230 - RNA, 17 nt, Human
gauguguguugauacug

SEQ ID NO: 1401231 - RNA, 14 nt, Human
gauguguguugaua

SEQ ID NO: 1401232 - RNA, 12 nt, Human
gauguguguuga

SEQ ID NO: 1401233 - RNA, 19 nt, Human
gauguguccugacacugca

SEQ ID NO: 1401234 - RNA, 18 nt, Human
gauguguccugacacugc

SEQ ID NO: 1401235 - RNA, 16 nt, Human
gauguguuugcuuucu

SEQ ID NO: 1401236 - RNA, 14 nt, Human
gauguguuugcuuu

SEQ ID NO: 1401237 - RNA, 22 nt, Human
gaugggcaugguguucuccugc

SEQ ID NO: 1401238 - RNA, 20 nt, Human
gaugggcaugguguucuccu

SEQ ID NO: 1401239 - RNA, 13 nt, Human
gaugggcuuccca

SEQ ID NO: 1401240 - RNA, 15 nt, Human
gaugggcuucccaag

SEQ ID NO: 1401241 - RNA, 21 nt, Human
gauggugucucuucuuuagaa

SEQ ID NO: 1401242 - RNA, 15 nt, Human
gaugguggagggcca

SEQ ID NO: 1401243 - RNA, 14 nt, Human
gaugguggagggcc

SEQ ID NO: 1401244 - RNA, 18 nt, Human
gauguguuugcuuucuga

SEQ ID NO: 1401245 - RNA, 22 nt, Human
gauguuaaaaaaauaagaagaa

SEQ ID NO: 1401246 - RNA, 12 nt, Human
gauuaaauucuu

SEQ ID NO: 1401247 - RNA, 19 nt, Human
gauuaaauucuugcaaagu

SEQ ID NO: 1401248 - RNA, 21 nt, Human
gauuaaaugacacucauauaa

SEQ ID NO: 1401249 - RNA, 17 nt, Human
gauuaaccucugcacua

SEQ ID NO: 1401250 - RNA, 14 nt, Human
gauuaaccucugca

SEQ ID NO: 1401251 - RNA, 21 nt, Human
gauuaacagguaugaaccacc

SEQ ID NO: 1401252 - RNA, 23 nt, Human
gcaggacuccaggcccaaggcuc

SEQ ID NO: 1401253 - RNA, 22 nt, Human
gcaggacuccaggcccaaggcu

SEQ ID NO: 1401254 - RNA, 18 nt, Human
gcaggacuccaggcccaa

SEQ ID NO: 1401255 - RNA, 17 nt, Human
gcaggacuccaggccca

SEQ ID NO: 1401256 - RNA, 14 nt, Human
gcaggacuccaggc

SEQ ID NO: 1401257 - RNA, 13 nt, Human
gcaggacuccagg

SEQ ID NO: 1401258 - RNA, 21 nt, Human
gcaggaccuucgggcugugcc

SEQ ID NO: 1401259 - RNA, 23 nt, Human
gcaggaaggacuaugaaaagcua

SEQ ID NO: 1401260 - RNA, 16 nt, Human
gcaggaagcugugaga

SEQ ID NO: 1401261 - RNA, 23 nt, Human
gcagccucugggggguggccagg

SEQ ID NO: 1401262 - RNA, 16 nt, Human
gcagccucuccccagg

SEQ ID NO: 1401263 - RNA, 12 nt, Human
gcagccucuccc

SEQ ID NO: 1401264 - RNA, 21 nt, Human
gcagccucgccccuggcagag

SEQ ID NO: 1401265 - RNA, 19 nt, Human
gcagccucgccccuggcag

SEQ ID NO: 1401266 - RNA, 16 nt, Human
gcagccucgccccugg

SEQ ID NO: 1401267 - RNA, 22 nt, Human
gcagccucugggggguggccag

SEQ ID NO: 1401268 - RNA, 15 nt, Human
gcagccucugggggg

SEQ ID NO: 1401269 - RNA, 14 nt, Human
gcagccucuggggg

SEQ ID NO: 1401270 - RNA, 20 nt, Human
gcagccucgccccuggcaga

SEQ ID NO: 1401271 - RNA, 20 nt, Human
gcagccucuccccaggucca

SEQ ID NO: 1401272 - RNA, 21 nt, Human
gcagccucccauccagggccc

SEQ ID NO: 1401273 - RNA, 20 nt, Human
gcagccucccauccagggcc

SEQ ID NO: 1401274 - RNA, 18 nt, Human
gcagccucccauccaggg

SEQ ID NO: 1401275 - RNA, 21 nt, Human
gcagccucaggacugggagcc

SEQ ID NO: 1401276 - RNA, 19 nt, Human
gcagccucaggacugggag

SEQ ID NO: 1401277 - RNA, 15 nt, Human
gcagccucaggacug

SEQ ID NO: 1401278 - RNA, 13 nt, Human
gcagccucaggac

SEQ ID NO: 1401279 - RNA, 23 nt, Human
gcagccucagagacaucagcccu

SEQ ID NO: 1401280 - RNA, 15 nt, Human
gcagccucagagaca

SEQ ID NO: 1401281 - RNA, 19 nt, Human
gcagccggcacagggucug

SEQ ID NO: 1401282 - RNA, 18 nt, Human
gcagccggcacagggucu

SEQ ID NO: 1401283 - RNA, 17 nt, Human
gcagccgcugagcgagg

SEQ ID NO: 1401284 - RNA, 16 nt, Human
gcagccgcugagcgag

SEQ ID NO: 1401285 - RNA, 14 nt, Human
gcagcccuuccaaa

SEQ ID NO: 1401286 - RNA, 19 nt, Human
gcagcaggaggggggaggg

SEQ ID NO: 1401287 - RNA, 15 nt, Human
gcagcaggagggggg

SEQ ID NO: 1401288 - RNA, 14 nt, Human
gcagcaggaggggg

SEQ ID NO: 1401289 - RNA, 13 nt, Human
gcagcaggagggg

SEQ ID NO: 1401290 - RNA, 22 nt, Human
gcagcagccucgccccuggcag

SEQ ID NO: 1401291 - RNA, 18 nt, Human
gcagcaggacuguccccu

SEQ ID NO: 1401292 - RNA, 23 nt, Human
gcagcagccucgccccuggcaga

SEQ ID NO: 1401293 - RNA, 20 nt, Human
gcagcagccucgccccuggc

SEQ ID NO: 1401294 - RNA, 13 nt, Human
gcagcagccccca

SEQ ID NO: 1401295 - RNA, 22 nt, Human
gcagcagcccccagcucccacc

SEQ ID NO: 1401296 - RNA, 22 nt, Human
gcagcagccagcccugccugga

SEQ ID NO: 1401297 - RNA, 23 nt, Human
gcagcagccagcccugccuggag

SEQ ID NO: 1401298 - RNA, 21 nt, Human
gcagcagccagcccugccugg

SEQ ID NO: 1401299 - RNA, 20 nt, Human
gcagcagccagcccugccug

SEQ ID NO: 1401300 - RNA, 19 nt, Human
gcagcagccagcccugccu

SEQ ID NO: 1401301 - RNA, 18 nt, Human
gcagcagccagcccugcc

SEQ ID NO: 1401302 - RNA, 17 nt, Human
gcagcagccagcccugc

SEQ ID NO: 1401303 - RNA, 16 nt, Human
gcagcagccagcccug

SEQ ID NO: 1401304 - RNA, 15 nt, Human
gcagcagccagcccu

SEQ ID NO: 1401305 - RNA, 14 nt, Human
gcagcagccagccc

SEQ ID NO: 1401306 - RNA, 13 nt, Human
gcagcagccagcc

SEQ ID NO: 1401307 - RNA, 12 nt, Human
gcagcagccagc

SEQ ID NO: 1401308 - RNA, 11 nt, Human
gcagcagccag

SEQ ID NO: 1401309 - RNA, 21 nt, Human
gcagcaggaggggggagggaa

SEQ ID NO: 1401310 - RNA, 18 nt, Human
gcagacuucccagcuagg

SEQ ID NO: 1401311 - RNA, 16 nt, Human
gcagacuucccagcua

SEQ ID NO: 1401312 - RNA, 15 nt, Human
gcagacuucccagcu

SEQ ID NO: 1401313 - RNA, 11 nt, Human
gcagacuggcg

SEQ ID NO: 1401314 - RNA, 20 nt, Human
gcagacucuuuaugcuugca

SEQ ID NO: 1401315 - RNA, 14 nt, Human
gcagaggggcagag

SEQ ID NO: 1401316 - RNA, 15 nt, Human
gcagaggggcagagg

SEQ ID NO: 1401317 - RNA, 13 nt, Human
gcagaggggcaga

SEQ ID NO: 1401318 - RNA, 23 nt, Human
gcacuucuuuuucucgcuguccu

SEQ ID NO: 1401319 - RNA, 15 nt, Human
gcagauccaggacua

SEQ ID NO: 1401320 - RNA, 14 nt, Human
gcagauguaggagg

SEQ ID NO: 1401321 - RNA, 13 nt, Human
gcagauguaggag

SEQ ID NO: 1401322 - RNA, 19 nt, Human
gcagauguaggagggacug

SEQ ID NO: 1401323 - RNA, 17 nt, Human
gcagauguaggagggac

SEQ ID NO: 1401324 - RNA, 16 nt, Human
gcagauguaggaggga

SEQ ID NO: 1401325 - RNA, 15 nt, Human
gcagauguaggaggg

SEQ ID NO: 1401326 - RNA, 19 nt, Human
gcacguguguuuuucuauu

SEQ ID NO: 1401327 - RNA, 23 nt, Human
gcacguguguuuuucuauuaaaa

SEQ ID NO: 1401328 - RNA, 18 nt, Human
gcacguguguuuuucuau

SEQ ID NO: 1401329 - RNA, 16 nt, Human
gcacguguguuuuucu

SEQ ID NO: 1401330 - RNA, 14 nt, Human
gcacguguguuuuu

SEQ ID NO: 1401331 - RNA, 18 nt, Human
gcacgugguaaaacacuu

SEQ ID NO: 1401332 - RNA, 15 nt, Human
gcacgcgugugcagg

SEQ ID NO: 1401333 - RNA, 20 nt, Human
gcacgcggagugaguuuuuu

SEQ ID NO: 1401334 - RNA, 15 nt, Human
gcacgcacacugucu

SEQ ID NO: 1401335 - RNA, 16 nt, Human
gcacgcacacugucug

SEQ ID NO: 1401336 - RNA, 20 nt, Human
gcacccucauacacagaaac

SEQ ID NO: 1401337 - RNA, 17 nt, Human
gcacccucauacacaga

SEQ ID NO: 1401338 - RNA, 16 nt, Human
gcacuacauucauuua

SEQ ID NO: 1401339 - RNA, 12 nt, Human
gcacuacauuca

SEQ ID NO: 1401340 - RNA, 19 nt, Human
gcacuguucccccugugca

SEQ ID NO: 1401341 - RNA, 18 nt, Human
gcacuguucccccugugc

SEQ ID NO: 1401342 - RNA, 15 nt, Human
gcacuguucccccug

SEQ ID NO: 1401343 - RNA, 20 nt, Human
gcacuguucccccugugcag

SEQ ID NO: 1401344 - RNA, 15 nt, Human
gcacugggcuccgga

SEQ ID NO: 1401345 - RNA, 13 nt, Human
gcacugggcauga

SEQ ID NO: 1401346 - RNA, 20 nt, Human
gcacugggaggcuccccuuc

SEQ ID NO: 1401347 - RNA, 18 nt, Human
gcacugggaggcuccccu

SEQ ID NO: 1401348 - RNA, 15 nt, Human
gcacuggccccaccc

SEQ ID NO: 1401349 - RNA, 15 nt, Human
gcacuggcgaggaga

SEQ ID NO: 1401350 - RNA, 16 nt, Human
gcacuggcgaggagag

SEQ ID NO: 1401351 - RNA, 23 nt, Human
gcaccaaaucaaaaucucuccac

SEQ ID NO: 1401352 - RNA, 22 nt, Human
gcaccaaaucaaaaucucucca

SEQ ID NO: 1401353 - RNA, 21 nt, Human
gcaccaaaucaaaaucucucc

SEQ ID NO: 1401354 - RNA, 20 nt, Human
gcaccaaaucaaaaucucuc

SEQ ID NO: 1401355 - RNA, 23 nt, Human
gcacagggucugcucuuucucug

SEQ ID NO: 1401356 - RNA, 18 nt, Human
gcacagggucugcucuuu

SEQ ID NO: 1401357 - RNA, 17 nt, Human
gcacagggucugcucuu

SEQ ID NO: 1401358 - RNA, 12 nt, Human
gcacagggucug

SEQ ID NO: 1401359 - RNA, 20 nt, Human
gcaccagacacccaggacuu

SEQ ID NO: 1401360 - RNA, 19 nt, Human
gcaccagacacccaggacu

SEQ ID NO: 1401361 - RNA, 18 nt, Human
gcaccagacacccaggac

SEQ ID NO: 1401362 - RNA, 17 nt, Human
gcaccagacacccagga

SEQ ID NO: 1401363 - RNA, 16 nt, Human
gcaccagacacccagg

SEQ ID NO: 1401364 - RNA, 15 nt, Human
gcaccagacacccag

SEQ ID NO: 1401365 - RNA, 17 nt, Human
gcaccaccaagccaagg

SEQ ID NO: 1401366 - RNA, 14 nt, Human
gcaccaccaagcca

SEQ ID NO: 1401367 - RNA, 15 nt, Human
gcaccaagcaggaaa

SEQ ID NO: 1401368 - RNA, 13 nt, Human
gcaccaccaagcc

SEQ ID NO: 1401369 - RNA, 22 nt, Human
gcaccaagugcggguccggcag

SEQ ID NO: 1401370 - RNA, 19 nt, Human
gcacccccugcagcuugua

SEQ ID NO: 1401371 - RNA, 24 nt, Human
gcacccccugcagcuuguagccag

SEQ ID NO: 1401372 - RNA, 15 nt, Human
gcacccccugcagcu

SEQ ID NO: 1401373 - RNA, 14 nt, Human
gcacccccugcagc

SEQ ID NO: 1401374 - RNA, 13 nt, Human
gcacccccugcag

SEQ ID NO: 1401375 - RNA, 16 nt, Human
gcacccccgucaagag

SEQ ID NO: 1401376 - RNA, 20 nt, Human
gcaccaucucugauuuucaa

SEQ ID NO: 1401377 - RNA, 21 nt, Human
gcaccagacacccaggacuua

SEQ ID NO: 1401378 - RNA, 14 nt, Human
gcacaggacaugcg

SEQ ID NO: 1401379 - RNA, 22 nt, Human
gcacagcuugaccugaggcugu

SEQ ID NO: 1401380 - RNA, 21 nt, Human
gcacagcuugaccugaggcug

SEQ ID NO: 1401381 - RNA, 20 nt, Human
gcacagcuugaccugaggcu

SEQ ID NO: 1401382 - RNA, 19 nt, Human
gcacagcuugaccugaggc

SEQ ID NO: 1401383 - RNA, 18 nt, Human
gcacagcuugaccugagg

SEQ ID NO: 1401384 - RNA, 14 nt, Human
gcacagcuugaccu

SEQ ID NO: 1401385 - RNA, 11 nt, Human
gcacagcccuu

SEQ ID NO: 1401386 - RNA, 18 nt, Human
gcacagccucuuagaugc

SEQ ID NO: 1401387 - RNA, 22 nt, Human
gcacagcagccuggggcuggcc

SEQ ID NO: 1401388 - RNA, 22 nt, Human
gcacagcacaaauuaguuauau

SEQ ID NO: 1401389 - RNA, 23 nt, Human
gcacagauggccagccccuuaga

SEQ ID NO: 1401390 - RNA, 19 nt, Human
gcacagauggccagccccu

SEQ ID NO: 1401391 - RNA, 14 nt, Human
gcacagauggccag

SEQ ID NO: 1401392 - RNA, 15 nt, Human
gcacagcagccuggg

SEQ ID NO: 1401393 - RNA, 17 nt, Human
gcacagccaaauuuaaa

SEQ ID NO: 1401394 - RNA, 22 nt, Human
gcacagccaacacgcaccugcc

SEQ ID NO: 1401395 - RNA, 15 nt, Human
gcacagccucuuaga

SEQ ID NO: 1401396 - RNA, 17 nt, Human
gcauugacuuuccccac

SEQ ID NO: 1401397 - RNA, 15 nt, Human
gcauugacuuucccc

SEQ ID NO: 1401398 - RNA, 19 nt, Human
gcauugaauggcuauguuu

SEQ ID NO: 1401399 - RNA, 12 nt, Human
gcauugacuuuc

SEQ ID NO: 1401400 - RNA, 23 nt, Human
gcauugaccgcgacuaauuucaa

SEQ ID NO: 1401401 - RNA, 22 nt, Human
gcauugaccgcgacuaauuuca

SEQ ID NO: 1401402 - RNA, 16 nt, Human
gcauugacuuucccca

SEQ ID NO: 1401403 - RNA, 18 nt, Human
gcauuugaggucuguucu

SEQ ID NO: 1401404 - RNA, 21 nt, Human
gcauugaauggcuauguuuuu

SEQ ID NO: 1401405 - RNA, 23 nt, Human
gcauugaacacaaacuguaaaua

SEQ ID NO: 1401406 - RNA, 22 nt, Human
gcauugaacacaaacuguaaau

SEQ ID NO: 1401407 - RNA, 21 nt, Human
gcauugaacacaaacuguaaa

SEQ ID NO: 1401408 - RNA, 15 nt, Human
gcauuaaauuacaga

SEQ ID NO: 1401409 - RNA, 23 nt, Human
gcauuaaauuuuagcaaagauau

SEQ ID NO: 1401410 - RNA, 18 nt, Human
gcauuaaauucacaaacu

SEQ ID NO: 1401411 - RNA, 22 nt, Human
gcauuaaauucacaaacuuuua

SEQ ID NO: 1401412 - RNA, 14 nt, Human
gcauuaaauuacag

SEQ ID NO: 1401413 - RNA, 20 nt, Human
gcauuaugcaauuuuuauau

SEQ ID NO: 1401414 - RNA, 19 nt, Human
gcauuaugcaauuuuuaua

SEQ ID NO: 1401415 - RNA, 18 nt, Human
gcauuaugcaauuuuuau

SEQ ID NO: 1401416 - RNA, 13 nt, Human
gcauuaugcaauu

SEQ ID NO: 1401417 - RNA, 22 nt, Human
gcauuaucuagauacuguauca

SEQ ID NO: 1401418 - RNA, 24 nt, Human
gcauuaucuagauacuguaucaug

SEQ ID NO: 1401419 - RNA, 14 nt, Human
gcaucugggccuug

SEQ ID NO: 1401420 - RNA, 12 nt, Human
gcaucugggccu

SEQ ID NO: 1401421 - RNA, 19 nt, Human
gcaucuggccuggccagug

SEQ ID NO: 1401422 - RNA, 18 nt, Human
gcaucuggccuggccagu

SEQ ID NO: 1401423 - RNA, 17 nt, Human
gcaucuggccuggccag

SEQ ID NO: 1401424 - RNA, 16 nt, Human
gcaucuggccuggcca

SEQ ID NO: 1401425 - RNA, 15 nt, Human
gcaucuggccuggcc

SEQ ID NO: 1401426 - RNA, 16 nt, Human
gcaucuggagagaaca

SEQ ID NO: 1401427 - RNA, 15 nt, Human
gcaucuggagagaac

SEQ ID NO: 1401428 - RNA, 23 nt, Human
gcaucucugggcuggaugagcuc

SEQ ID NO: 1401429 - RNA, 20 nt, Human
gcaucucugggcuggaugag

SEQ ID NO: 1401430 - RNA, 16 nt, Human
gcaucucugggcugga

SEQ ID NO: 1401431 - RNA, 14 nt, Human
gcaucucugggcug

SEQ ID NO: 1401432 - RNA, 13 nt, Human
gcaucucugggcu

SEQ ID NO: 1401433 - RNA, 22 nt, Human
gcaucucuaccuucuccccagc

SEQ ID NO: 1401434 - RNA, 18 nt, Human
gcaucucuaccuucuccc

SEQ ID NO: 1401435 - RNA, 21 nt, Human
gcaucucccagauaaugugaa

SEQ ID NO: 1401436 - RNA, 13 nt, Human
gcaucucccagau

SEQ ID NO: 1401437 - RNA, 12 nt, Human
gcaucucccaga

SEQ ID NO: 1401438 - RNA, 20 nt, Human
gcaucuccaagcagcuuaga

SEQ ID NO: 1401439 - RNA, 19 nt, Human
gcaucuccaagcagcuuag

SEQ ID NO: 1401440 - RNA, 17 nt, Human
gcaucuccaagcagcuu

SEQ ID NO: 1401441 - RNA, 17 nt, Human
gcaucucaguaugaauu

SEQ ID NO: 1401442 - RNA, 16 nt, Human
gcaucugucccccuuu

SEQ ID NO: 1401443 - RNA, 23 nt, Human
gcaugaaguaauaugcacacauu

SEQ ID NO: 1401444 - RNA, 21 nt, Human
gcaucugggccuuggccugga

SEQ ID NO: 1401445 - RNA, 22 nt, Human
gcaucugggccuuggccuggag

SEQ ID NO: 1401446 - RNA, 20 nt, Human
gcaugaaguaauaugcacac

SEQ ID NO: 1401447 - RNA, 21 nt, Human
gcaugaaguaauaugcacaca

SEQ ID NO: 1401448 - RNA, 22 nt, Human
gcaugaaguaauaugcacacau

SEQ ID NO: 1401449 - RNA, 12 nt, Human
gcaucaggguua

SEQ ID NO: 1401450 - RNA, 20 nt, Human
gcaucauuauuuauguauug

SEQ ID NO: 1401451 - RNA, 19 nt, Human
gcaucauuauuuauguauu

SEQ ID NO: 1401452 - RNA, 17 nt, Human
gcaucauuauuuaugua

SEQ ID NO: 1401453 - RNA, 13 nt, Human
gcaucauggcuau

SEQ ID NO: 1401454 - RNA, 21 nt, Human
gcaucaugccucugaggccag

SEQ ID NO: 1401455 - RNA, 20 nt, Human
gcaucaugccucugaggcca

SEQ ID NO: 1401456 - RNA, 18 nt, Human
gcaucaugccucugaggc

SEQ ID NO: 1401457 - RNA, 17 nt, Human
gcaucaugccucugagg

SEQ ID NO: 1401458 - RNA, 16 nt, Human
gcaucaugccucugag

SEQ ID NO: 1401459 - RNA, 15 nt, Human
gcaucaugccucuga

SEQ ID NO: 1401460 - RNA, 14 nt, Human
gcaucaugccucug

SEQ ID NO: 1401461 - RNA, 13 nt, Human
gcaucaugccucu

SEQ ID NO: 1401462 - RNA, 12 nt, Human
gcaucaugccuc

SEQ ID NO: 1401463 - RNA, 15 nt, Human
gcaucaucucagcuc

SEQ ID NO: 1401464 - RNA, 22 nt, Human
gcaguucccacauuaaagaaga

SEQ ID NO: 1401465 - RNA, 19 nt, Human
gcauacguacacauuuuau

SEQ ID NO: 1401466 - RNA, 21 nt, Human
gcaguucccacauuaaagaag

SEQ ID NO: 1401467 - RNA, 19 nt, Human
gcaguucccacauuaaaga

SEQ ID NO: 1401468 - RNA, 22 nt, Human
gcaguggugguuuucuguucuu

SEQ ID NO: 1401469 - RNA, 19 nt, Human
gcaguggugguuuucuguu

SEQ ID NO: 1401470 - RNA, 20 nt, Human
gcaguggugguuuucuguuc

SEQ ID NO: 1401471 - RNA, 21 nt, Human
gcaguggugguuuucuguucu

SEQ ID NO: 1401472 - RNA, 19 nt, Human
gcaguggcugguccagggc

SEQ ID NO: 1401473 - RNA, 18 nt, Human
gcaguggcugguccaggg

SEQ ID NO: 1401474 - RNA, 15 nt, Human
gcaguggcuggucca

SEQ ID NO: 1401475 - RNA, 14 nt, Human
gcaguggcuggucc

SEQ ID NO: 1401476 - RNA, 14 nt, Human
gcagugggaaaaau

SEQ ID NO: 1401477 - RNA, 17 nt, Human
gcagggucuagaaggcu

SEQ ID NO: 1401478 - RNA, 20 nt, Human
gcaguggcugguccagggcu

SEQ ID NO: 1401479 - RNA, 19 nt, Human
gcagugggaaaaauguagg

SEQ ID NO: 1401480 - RNA, 17 nt, Human
gcagugggaaaaaugua

SEQ ID NO: 1401481 - RNA, 21 nt, Human
gcaggguccucuucugggccu

SEQ ID NO: 1401482 - RNA, 23 nt, Human
gcaggucccuaauaaagcugugu

SEQ ID NO: 1401483 - RNA, 20 nt, Human
gcaggucccuaauaaagcug

SEQ ID NO: 1401484 - RNA, 21 nt, Human
gcaggucccuaauaaagcugu

SEQ ID NO: 1401485 - RNA, 16 nt, Human
gcaggucccuaauaaa

SEQ ID NO: 1401486 - RNA, 17 nt, Human
gcaggucccuaauaaag

SEQ ID NO: 1401487 - RNA, 18 nt, Human
gcaggucccuaauaaagc

SEQ ID NO: 1401488 - RNA, 19 nt, Human
gcaggucccuaauaaagcu

SEQ ID NO: 1401489 - RNA, 16 nt, Human
gcaggcccuggccucc

SEQ ID NO: 1401490 - RNA, 15 nt, Human
gcaggcccuggccuc

SEQ ID NO: 1401491 - RNA, 14 nt, Human
gcaggcccuggccu

SEQ ID NO: 1401492 - RNA, 12 nt, Human
gcaggcccuggc

SEQ ID NO: 1401493 - RNA, 19 nt, Human
gcaggccagguccagagag

SEQ ID NO: 1401494 - RNA, 22 nt, Human
gcaggccagcugugguuuucuu

SEQ ID NO: 1401495 - RNA, 22 nt, Human
gcaggccaccuggcucucaccu

SEQ ID NO: 1401496 - RNA, 21 nt, Human
gcaggccaccuggcucucacc

SEQ ID NO: 1401497 - RNA, 18 nt, Human
gcaggccaccuggcucuc

SEQ ID NO: 1401498 - RNA, 17 nt, Human
gcaggccaccuggcucu

SEQ ID NO: 1401499 - RNA, 23 nt, Human
gcaggccacacuucaaacuacuu

SEQ ID NO: 1401500 - RNA, 21 nt, Human
gcaggccacacuucaaacuac

SEQ ID NO: 1401501 - RNA, 20 nt, Human
gcaggccacacuucaaacua

SEQ ID NO: 1401502 - RNA, 20 nt, Human
gcaggccaagucaggcccuu

SEQ ID NO: 1401503 - RNA, 23 nt, Human
gcaggcaucggggagccgggagc

SEQ ID NO: 1401504 - RNA, 14 nt, Human
gcaggcagggcucu

SEQ ID NO: 1401505 - RNA, 13 nt, Human
gcaggcagggcuc

SEQ ID NO: 1401506 - RNA, 12 nt, Human
gcaggcagggcu

SEQ ID NO: 1401507 - RNA, 17 nt, Human
gcaggcaggcucccagg

SEQ ID NO: 1401508 - RNA, 18 nt, Human
gcaggcaggcucccaggg

SEQ ID NO: 1401509 - RNA, 15 nt, Human
gcaggcaggcuccca

SEQ ID NO: 1401510 - RNA, 22 nt, Human
gcaggcagggcucuccuggcuu

SEQ ID NO: 1401511 - RNA, 20 nt, Human
gcaggcagggcucuccuggc

SEQ ID NO: 1401512 - RNA, 19 nt, Human
gcaggcagggcucuccugg

SEQ ID NO: 1401513 - RNA, 16 nt, Human
gcaggcagggcucucc

SEQ ID NO: 1401514 - RNA, 15 nt, Human
gcaggcagggcucuc

SEQ ID NO: 1401515 - RNA, 22 nt, Human
gcaggcaucggggagccgggag

SEQ ID NO: 1401516 - RNA, 21 nt, Human
gcaggcaucggggagccggga

SEQ ID NO: 1401517 - RNA, 23 nt, Human
gcaggacugaugucuccuaagca

SEQ ID NO: 1401518 - RNA, 15 nt, Human
gcaggacuguccccu

SEQ ID NO: 1401519 - RNA, 18 nt, Human
gcaggacuguccccuuga

SEQ ID NO: 1401520 - RNA, 19 nt, Human
gcaggacugaugucuccua

SEQ ID NO: 1401521 - RNA, 18 nt, Human
gcaggacugaugucuccu

SEQ ID NO: 1401522 - RNA, 14 nt, Human
gcaggacugauguc

SEQ ID NO: 1401523 - RNA, 13 nt, Human
gcaggacugaugu

SEQ ID NO: 1401524 - RNA, 16 nt, Human
gcagggcucuccuggc

SEQ ID NO: 1401525 - RNA, 15 nt, Human
gcagggcucuccugg

SEQ ID NO: 1401526 - RNA, 14 nt, Human
gcagggcucuccug

SEQ ID NO: 1401527 - RNA, 12 nt, Human
gcagggcucucc

SEQ ID NO: 1401528 - RNA, 23 nt, Human
gcagggauguggguuccacagac

SEQ ID NO: 1401529 - RNA, 22 nt, Human
gcagggauuaaccucugcacua

SEQ ID NO: 1401530 - RNA, 19 nt, Human
gcagggauuaaccucugca

SEQ ID NO: 1401531 - RNA, 22 nt, Human
gcagggauguggguuccacaga

SEQ ID NO: 1401532 - RNA, 13 nt, Human
gcagggauguggg

SEQ ID NO: 1401533 - RNA, 20 nt, Human
gcaggccgugacgucugggu

SEQ ID NO: 1401534 - RNA, 19 nt, Human
gcaggccgugacgucuggg

SEQ ID NO: 1401535 - RNA, 18 nt, Human
gcagggcucuccuggcuu

SEQ ID NO: 1401536 - RNA, 19 nt, Human
gcagggguuggggaaacag

SEQ ID NO: 1401537 - RNA, 14 nt, Human
gcaggucccuaaua

SEQ ID NO: 1401538 - RNA, 15 nt, Human
gcaggucccuaauaa

SEQ ID NO: 1401539 - RNA, 18 nt, Human
gcccagccccacuccucu

SEQ ID NO: 1401540 - RNA, 23 nt, Human
gcccagccccacuccucugcuga

SEQ ID NO: 1401541 - RNA, 17 nt, Human
gcccagccccacuccuc

SEQ ID NO: 1401542 - RNA, 16 nt, Human
gcccagcccauggaga

SEQ ID NO: 1401543 - RNA, 22 nt, Human
gcccagccagcgucggucugug

SEQ ID NO: 1401544 - RNA, 14 nt, Human
gcccagccagcguc

SEQ ID NO: 1401545 - RNA, 13 nt, Human
gcccagccagcgu

SEQ ID NO: 1401546 - RNA, 12 nt, Human
gcccagccagcg

SEQ ID NO: 1401547 - RNA, 21 nt, Human
gcccagcacugcuugaggaaa

SEQ ID NO: 1401548 - RNA, 20 nt, Human
gcccagcacugcuugaggaa

SEQ ID NO: 1401549 - RNA, 19 nt, Human
gcccagcacaugugcugcc

SEQ ID NO: 1401550 - RNA, 18 nt, Human
gcccagagggucuggggg

SEQ ID NO: 1401551 - RNA, 19 nt, Human
gcccagagggucugggggc

SEQ ID NO: 1401552 - RNA, 15 nt, Human
gcccagagggucugg

SEQ ID NO: 1401553 - RNA, 14 nt, Human
gcccagagggucug

SEQ ID NO: 1401554 - RNA, 18 nt, Human
gcccagagcccagcucca

SEQ ID NO: 1401555 - RNA, 17 nt, Human
gcccagagcccagcucc

SEQ ID NO: 1401556 - RNA, 23 nt, Human
gcccagagacccagcggacacac

SEQ ID NO: 1401557 - RNA, 23 nt, Human
gcccagagacauacuugaagggc

SEQ ID NO: 1401558 - RNA, 19 nt, Human
gcccagagacccaagcugc

SEQ ID NO: 1401559 - RNA, 20 nt, Human
gcccagagacauacuugaag

SEQ ID NO: 1401560 - RNA, 10 nt, Human
gcccagagac

SEQ ID NO: 1401561 - RNA, 13 nt, Human
gcccagagaagcc

SEQ ID NO: 1401562 - RNA, 15 nt, Human
gcccagagaagccaa

SEQ ID NO: 1401563 - RNA, 16 nt, Human
gcccagagcccagcuc

SEQ ID NO: 1401564 - RNA, 15 nt, Human
gcccagagcccagcu

SEQ ID NO: 1401565 - RNA, 14 nt, Human
gcccagagcccagc

SEQ ID NO: 1401566 - RNA, 16 nt, Human
gcccagagacccagcg

SEQ ID NO: 1401567 - RNA, 14 nt, Human
gcccaaugaaauga

SEQ ID NO: 1401568 - RNA, 13 nt, Human
gcccaggcuggga

SEQ ID NO: 1401569 - RNA, 16 nt, Human
gcccaggcugguuucg

SEQ ID NO: 1401570 - RNA, 15 nt, Human
gcccaggcugggaac

SEQ ID NO: 1401571 - RNA, 17 nt, Human
gcccagccuuuguuccc

SEQ ID NO: 1401572 - RNA, 23 nt, Human
gcccagccuuuguuccccacugg

SEQ ID NO: 1401573 - RNA, 13 nt, Human
gcccagccgaccc

SEQ ID NO: 1401574 - RNA, 19 nt, Human
gcccagccgacccccucuc

SEQ ID NO: 1401575 - RNA, 21 nt, Human
gcccagcggcuugccugccug

SEQ ID NO: 1401576 - RNA, 18 nt, Human
gcccagcugggucaggca

SEQ ID NO: 1401577 - RNA, 15 nt, Human
gcccagcugggucag

SEQ ID NO: 1401578 - RNA, 14 nt, Human
gcccagcuggguca

SEQ ID NO: 1401579 - RNA, 13 nt, Human
gcccagcuggguc

SEQ ID NO: 1401580 - RNA, 20 nt, Human
gcccagcugggucaggcagg

SEQ ID NO: 1401581 - RNA, 19 nt, Human
gcccagcugggucaggcag

SEQ ID NO: 1401582 - RNA, 16 nt, Human
gcccagcccuaaacau

SEQ ID NO: 1401583 - RNA, 11 nt, Human
gccagauccag

SEQ ID NO: 1401584 - RNA, 14 nt, Human
gccagauccagccu

SEQ ID NO: 1401585 - RNA, 19 nt, Human
gccagauuuuccugaaaac

SEQ ID NO: 1401586 - RNA, 22 nt, Human
gccaggcugaccacagcacagc

SEQ ID NO: 1401587 - RNA, 16 nt, Human
gccaggcuggagugca

SEQ ID NO: 1401588 - RNA, 13 nt, Human
gccaggcuggguc

SEQ ID NO: 1401589 - RNA, 20 nt, Human
gccagggagaagcuccucuc

SEQ ID NO: 1401590 - RNA, 16 nt, Human
gccagggagaagcucc

SEQ ID NO: 1401591 - RNA, 15 nt, Human
gccagggagaagcuc

SEQ ID NO: 1401592 - RNA, 14 nt, Human
gccagggagaagcu

SEQ ID NO: 1401593 - RNA, 18 nt, Human
gccaggcuggagugcagu

SEQ ID NO: 1401594 - RNA, 19 nt, Human
gccaggcuggagugcagug

SEQ ID NO: 1401595 - RNA, 15 nt, Human
gccaguauuuuaaaa

SEQ ID NO: 1401596 - RNA, 23 nt, Human
gccagguucuccguuagcuccug

SEQ ID NO: 1401597 - RNA, 15 nt, Human
gccagggucuccaga

SEQ ID NO: 1401598 - RNA, 12 nt, Human
gccaguaaaugg

SEQ ID NO: 1401599 - RNA, 19 nt, Human
gccagggucuccagaaagc

SEQ ID NO: 1401600 - RNA, 22 nt, Human
gccagggggagcugggccuggu

SEQ ID NO: 1401601 - RNA, 22 nt, Human
gccaggggggugaggagcuggg

SEQ ID NO: 1401602 - RNA, 21 nt, Human
gccaggggggugaggagcugg

SEQ ID NO: 1401603 - RNA, 20 nt, Human
gccaggggggugaggagcug

SEQ ID NO: 1401604 - RNA, 19 nt, Human
gccaggggggugaggagcu

SEQ ID NO: 1401605 - RNA, 20 nt, Human
gccagggggagcugggccug

SEQ ID NO: 1401606 - RNA, 20 nt, Human
gccaggggagcagaggggca

SEQ ID NO: 1401607 - RNA, 21 nt, Human
gccaggggagcagaggggcag

SEQ ID NO: 1401608 - RNA, 14 nt, Human
gccaggggagcaga

SEQ ID NO: 1401609 - RNA, 15 nt, Human
gccagggccccucuc

SEQ ID NO: 1401610 - RNA, 14 nt, Human
gccagggccccucu

SEQ ID NO: 1401611 - RNA, 22 nt, Human
gccagggccccucacccugccu

SEQ ID NO: 1401612 - RNA, 13 nt, Human
gccagggccccuc

SEQ ID NO: 1401613 - RNA, 20 nt, Human
gccagggccacgcuccagcu

SEQ ID NO: 1401614 - RNA, 22 nt, Human
gccagggccacgcuccagcugc

SEQ ID NO: 1401615 - RNA, 19 nt, Human
gccagggccacgcuccagc

SEQ ID NO: 1401616 - RNA, 15 nt, Human
gccagggccacgcuc

SEQ ID NO: 1401617 - RNA, 19 nt, Human
gccagggcagggccccagg

SEQ ID NO: 1401618 - RNA, 14 nt, Human
gccagggcagggcc

SEQ ID NO: 1401619 - RNA, 21 nt, Human
gccagggcagagugagaccca

SEQ ID NO: 1401620 - RNA, 16 nt, Human
gccagggcagagugag

SEQ ID NO: 1401621 - RNA, 15 nt, Human
gccagggcagaguga

SEQ ID NO: 1401622 - RNA, 20 nt, Human
gccagggcaaugaugaauga

SEQ ID NO: 1401623 - RNA, 17 nt, Human
gccagggagagcccagg

SEQ ID NO: 1401624 - RNA, 16 nt, Human
gccagggagagcccag

SEQ ID NO: 1401625 - RNA, 15 nt, Human
gccagggagagccca

SEQ ID NO: 1401626 - RNA, 13 nt, Human
gccagggagagcc

SEQ ID NO: 1401627 - RNA, 22 nt, Human
gccagggagagcccaggagcuc

SEQ ID NO: 1401628 - RNA, 21 nt, Human
gccagggagagcccaggagcu

SEQ ID NO: 1401629 - RNA, 20 nt, Human
gccagggagagcccaggagc

SEQ ID NO: 1401630 - RNA, 19 nt, Human
gccagggagagcccaggag

SEQ ID NO: 1401631 - RNA, 14 nt, Human
gccagggagcgagu

SEQ ID NO: 1401632 - RNA, 18 nt, Human
gccagugcccugagccag

SEQ ID NO: 1401633 - RNA, 17 nt, Human
gccagugcccugagcca

SEQ ID NO: 1401634 - RNA, 16 nt, Human
gccagugcccugagcc

SEQ ID NO: 1401635 - RNA, 18 nt, Human
gccagugcccugauccca

SEQ ID NO: 1401636 - RNA, 15 nt, Human
gccagugcccugagc

SEQ ID NO: 1401637 - RNA, 14 nt, Human
gccagugcccugag

SEQ ID NO: 1401638 - RNA, 13 nt, Human
gccagugcccuga

SEQ ID NO: 1401639 - RNA, 17 nt, Human
gccaguauuuuaaaaua

SEQ ID NO: 1401640 - RNA, 17 nt, Human
gccagugaccaaccuuu

SEQ ID NO: 1401641 - RNA, 21 nt, Human
gccaucugcgugacaauaaaa

SEQ ID NO: 1401642 - RNA, 23 nt, Human
gccaugagaugauacauccaaag

SEQ ID NO: 1401643 - RNA, 23 nt, Human
gccaugacccugccucucccagg

SEQ ID NO: 1401644 - RNA, 22 nt, Human
gccaugacccugccucucccag

SEQ ID NO: 1401645 - RNA, 15 nt, Human
gccaugcagaaagca

SEQ ID NO: 1401646 - RNA, 16 nt, Human
gcccaacccuucccuc

SEQ ID NO: 1401647 - RNA, 20 nt, Human
gcccaaguucaugcagcugu

SEQ ID NO: 1401648 - RNA, 19 nt, Human
gcccaaguucaugcagcug

SEQ ID NO: 1401649 - RNA, 19 nt, Human
gccauggacucuguccuga

SEQ ID NO: 1401650 - RNA, 21 nt, Human
gccaugcugaggccugggccg

SEQ ID NO: 1401651 - RNA, 20 nt, Human
gccaugcugaggccugggcc

SEQ ID NO: 1401652 - RNA, 19 nt, Human
gccaugcugaggccugggc

SEQ ID NO: 1401653 - RNA, 18 nt, Human
gccaugcugaggccuggg

SEQ ID NO: 1401654 - RNA, 17 nt, Human
gccaugcugaggccugg

SEQ ID NO: 1401655 - RNA, 14 nt, Human
gccaugcugaggcc

SEQ ID NO: 1401656 - RNA, 13 nt, Human
gccaugcugaggc

SEQ ID NO: 1401657 - RNA, 18 nt, Human
gccauggacucuguccug

SEQ ID NO: 1401658 - RNA, 17 nt, Human
gccauggacucuguccu

SEQ ID NO: 1401659 - RNA, 16 nt, Human
gccauggacucugucc

SEQ ID NO: 1401660 - RNA, 19 nt, Human
gccaugggcacugugggua

SEQ ID NO: 1401661 - RNA, 19 nt, Human
gccacaaggacuuccuguc

SEQ ID NO: 1401662 - RNA, 18 nt, Human
gccacaaggacuuccugu

SEQ ID NO: 1401663 - RNA, 17 nt, Human
gccacaaggacuuccug

SEQ ID NO: 1401664 - RNA, 14 nt, Human
gccacaaggacuuc

SEQ ID NO: 1401665 - RNA, 21 nt, Human
gccacaaugaacaucccuuuu

SEQ ID NO: 1401666 - RNA, 21 nt, Human
gccacaaggacuuccugucca

SEQ ID NO: 1401667 - RNA, 21 nt, Human
gccacaccaggauagagacug

SEQ ID NO: 1401668 - RNA, 15 nt, Human
gccacacagcugccg

SEQ ID NO: 1401669 - RNA, 15 nt, Human
gccacacaguauuuu

SEQ ID NO: 1401670 - RNA, 14 nt, Human
gccacacagcugcc

SEQ ID NO: 1401671 - RNA, 13 nt, Human
gccacacagcugc

SEQ ID NO: 1401672 - RNA, 20 nt, Human
gccaauuucaaguuccaagu

SEQ ID NO: 1401673 - RNA, 13 nt, Human
gccaauuccuaua

SEQ ID NO: 1401674 - RNA, 18 nt, Human
gccaauucagacaggcaa

SEQ ID NO: 1401675 - RNA, 17 nt, Human
gccaauucagacaggca

SEQ ID NO: 1401676 - RNA, 15 nt, Human
gccaauucagacagg

SEQ ID NO: 1401677 - RNA, 20 nt, Human
gccaauuauguuaaacuagc

SEQ ID NO: 1401678 - RNA, 14 nt, Human
gccaauuauguuaa

SEQ ID NO: 1401679 - RNA, 15 nt, Human
gccaauuauguuaaa

SEQ ID NO: 1401680 - RNA, 16 nt, Human
gccaauuauguuaaac

SEQ ID NO: 1401681 - RNA, 17 nt, Human
gccaauuauguuaaacu

SEQ ID NO: 1401682 - RNA, 19 nt, Human
gccaauuauguuaaacuag

SEQ ID NO: 1401683 - RNA, 15 nt, Human
gccacaaaaacaggu

SEQ ID NO: 1401684 - RNA, 16 nt, Human
gccacagcuuuugcaa

SEQ ID NO: 1401685 - RNA, 18 nt, Human
gccacagcuuuugcaacu

SEQ ID NO: 1401686 - RNA, 15 nt, Human
gccacagcuuuugca

SEQ ID NO: 1401687 - RNA, 13 nt, Human
gccacagcuuuug

SEQ ID NO: 1401688 - RNA, 12 nt, Human
gccacagcuuuu

SEQ ID NO: 1401689 - RNA, 10 nt, Human
gccacagcuu

SEQ ID NO: 1401690 - RNA, 16 nt, Human
gccacagccuccccug

SEQ ID NO: 1401691 - RNA, 21 nt, Human
gccacagccuccccugccagg

SEQ ID NO: 1401692 - RNA, 21 nt, Human
gccacagcccugucagcauga

SEQ ID NO: 1401693 - RNA, 15 nt, Human
gccacagcccuguca

SEQ ID NO: 1401694 - RNA, 14 nt, Human
gccacagcccuguc

SEQ ID NO: 1401695 - RNA, 14 nt, Human
gccacagccagggg

SEQ ID NO: 1401696 - RNA, 12 nt, Human
gccacagccagg

SEQ ID NO: 1401697 - RNA, 23 nt, Human
gccacacuucucaggacacaggc

SEQ ID NO: 1401698 - RNA, 22 nt, Human
gccacacuucucaggacacagg

SEQ ID NO: 1401699 - RNA, 17 nt, Human
gccacacucagcacaag

SEQ ID NO: 1401700 - RNA, 16 nt, Human
gccacacucagcacaa

SEQ ID NO: 1401701 - RNA, 13 nt, Human
gccacacucagca

SEQ ID NO: 1401702 - RNA, 16 nt, Human
gccacaccaggauaga

SEQ ID NO: 1401703 - RNA, 13 nt, Human
gccacaccaggau

SEQ ID NO: 1401704 - RNA, 19 nt, Human
gccacacucagcacaaggc

SEQ ID NO: 1401705 - RNA, 20 nt, Human
gccacacucuuucuccugcu

SEQ ID NO: 1401706 - RNA, 21 nt, Human
gccacacucuuucuccugcuu

SEQ ID NO: 1401707 - RNA, 19 nt, Human
gccacacuucucaggacac

SEQ ID NO: 1401708 - RNA, 17 nt, Human
gccacacuucucaggac

SEQ ID NO: 1401709 - RNA, 16 nt, Human
gccacacuucucagga

SEQ ID NO: 1401710 - RNA, 19 nt, Human
gccacacuucaaacuacuu

SEQ ID NO: 1401711 - RNA, 22 nt, Human
gccaauauuaguaggauuuuug

SEQ ID NO: 1401712 - RNA, 18 nt, Human
gccaauauuaaaucugcu

SEQ ID NO: 1401713 - RNA, 19 nt, Human
gccaaugcaccuaaagaaa

SEQ ID NO: 1401714 - RNA, 21 nt, Human
gccaaugcaccuaaagaaaaa

SEQ ID NO: 1401715 - RNA, 22 nt, Human
gccaaucccucaccuucugagu

SEQ ID NO: 1401716 - RNA, 21 nt, Human
gccaaucccucaccuucugag

SEQ ID NO: 1401717 - RNA, 16 nt, Human
gccaaguuccucuaac

SEQ ID NO: 1401718 - RNA, 12 nt, Human
gccaaguuccuc

SEQ ID NO: 1401719 - RNA, 22 nt, Human
gccaaguccagguccugguggg

SEQ ID NO: 1401720 - RNA, 21 nt, Human
gccaaguccagguccuggugg

SEQ ID NO: 1401721 - RNA, 19 nt, Human
gccaaguccagguccuggu

SEQ ID NO: 1401722 - RNA, 18 nt, Human
gccaaguccagguccugg

SEQ ID NO: 1401723 - RNA, 17 nt, Human
gccaaguccagguccug

SEQ ID NO: 1401724 - RNA, 16 nt, Human
gccaaguccagguccu

SEQ ID NO: 1401725 - RNA, 15 nt, Human
gccaaguccaggucc

SEQ ID NO: 1401726 - RNA, 23 nt, Human
gccaagguguccuacagaaaaac

SEQ ID NO: 1401727 - RNA, 16 nt, Human
gccaauagugucaucc

SEQ ID NO: 1401728 - RNA, 20 nt, Human
gccaagguuuuauaaggcug

SEQ ID NO: 1401729 - RNA, 21 nt, Human
gccaagguguccuacagaaaa

SEQ ID NO: 1401730 - RNA, 20 nt, Human
gccaagguguccuacagaaa

SEQ ID NO: 1401731 - RNA, 19 nt, Human
gccaagguguccuacagaa

SEQ ID NO: 1401732 - RNA, 18 nt, Human
gccaagguguccuacaga

SEQ ID NO: 1401733 - RNA, 16 nt, Human
gccaagguguccuaca

SEQ ID NO: 1401734 - RNA, 14 nt, Human
gccaagguguccua

SEQ ID NO: 1401735 - RNA, 13 nt, Human
gccaagguguccu

SEQ ID NO: 1401736 - RNA, 21 nt, Human
gccaagggccgacuaagagaa

SEQ ID NO: 1401737 - RNA, 18 nt, Human
gccaaggggcuucagguc

SEQ ID NO: 1401738 - RNA, 16 nt, Human
gccaagggcuuuguuu

SEQ ID NO: 1401739 - RNA, 19 nt, Human
gccaagggcauaaauuauu

SEQ ID NO: 1401740 - RNA, 22 nt, Human
gccaagggcaacagaucaguaa

SEQ ID NO: 1401741 - RNA, 21 nt, Human
gccaagggauggacaucuugu

SEQ ID NO: 1401742 - RNA, 19 nt, Human
gccaagggaaccugugucc

SEQ ID NO: 1401743 - RNA, 18 nt, Human
gccaagggaaccuguguc

SEQ ID NO: 1401744 - RNA, 21 nt, Human
gcauuugaggucuguucuuuc

SEQ ID NO: 1401745 - RNA, 19 nt, Human
gcauuugaggucuguucuu

SEQ ID NO: 1401746 - RNA, 20 nt, Human
gcauuugaggucuguucuuu

SEQ ID NO: 1401747 - RNA, 22 nt, Human
gcauuuggugguuucagaaaug

SEQ ID NO: 1401748 - RNA, 23 nt, Human
gcauuuggugguuucagaaaugu

SEQ ID NO: 1401749 - RNA, 21 nt, Human
gccagacuucccacggcuccu

SEQ ID NO: 1401750 - RNA, 18 nt, Human
gccacuccuuccugcccc

SEQ ID NO: 1401751 - RNA, 17 nt, Human
gccacuccuuccugccc

SEQ ID NO: 1401752 - RNA, 15 nt, Human
gccacuccuuccugc

SEQ ID NO: 1401753 - RNA, 14 nt, Human
gccacuccuuccug

SEQ ID NO: 1401754 - RNA, 13 nt, Human
gccacuccuuccu

SEQ ID NO: 1401755 - RNA, 23 nt, Human
gccacuccucugacucagggcuc

SEQ ID NO: 1401756 - RNA, 15 nt, Human
gccacaucaaagagg

SEQ ID NO: 1401757 - RNA, 18 nt, Human
gccacaguagucuugaug

SEQ ID NO: 1401758 - RNA, 23 nt, Human
gccaccucagaccccggggugag

SEQ ID NO: 1401759 - RNA, 21 nt, Human
gccaccucuaacagcaccaaa

SEQ ID NO: 1401760 - RNA, 19 nt, Human
gccaccucuaacagcacca

SEQ ID NO: 1401761 - RNA, 18 nt, Human
gccaccucuaacagcacc

SEQ ID NO: 1401762 - RNA, 17 nt, Human
gccaccucuaacagcac

SEQ ID NO: 1401763 - RNA, 16 nt, Human
gccaccugaauaaaga

SEQ ID NO: 1401764 - RNA, 17 nt, Human
gccacgcuccagcugcc

SEQ ID NO: 1401765 - RNA, 15 nt, Human
gccacgcuccagcug

SEQ ID NO: 1401766 - RNA, 14 nt, Human
gccacgcuccagcu

SEQ ID NO: 1401767 - RNA, 13 nt, Human
gccacgcuccagc

SEQ ID NO: 1401768 - RNA, 16 nt, Human
gccacgcuccagcugc

SEQ ID NO: 1401769 - RNA, 23 nt, Human
gccacgggugccagaagcuacug

SEQ ID NO: 1401770 - RNA, 18 nt, Human
gccacggggacucagccc

SEQ ID NO: 1401771 - RNA, 12 nt, Human
gccaccuggacc

SEQ ID NO: 1401772 - RNA, 20 nt, Human
gccaccuggcucucaccucu

SEQ ID NO: 1401773 - RNA, 19 nt, Human
gccaccuggaccccugcau

SEQ ID NO: 1401774 - RNA, 16 nt, Human
gccaccuggaccccug

SEQ ID NO: 1401775 - RNA, 15 nt, Human
gccaccuggaccccu

SEQ ID NO: 1401776 - RNA, 14 nt, Human
gccaccuggacccc

SEQ ID NO: 1401777 - RNA, 13 nt, Human
gccaccuggaccc

SEQ ID NO: 1401778 - RNA, 18 nt, Human
gccaccuggaccccugca

SEQ ID NO: 1401779 - RNA, 14 nt, Human
gccaccugucuguc

SEQ ID NO: 1401780 - RNA, 15 nt, Human
gccaccugucugucu

SEQ ID NO: 1401781 - RNA, 10 nt, Human
gccaccuguc

SEQ ID NO: 1401782 - RNA, 12 nt, Human
gccaccugucug

SEQ ID NO: 1401783 - RNA, 13 nt, Human
gccaccugucugu

SEQ ID NO: 1401784 - RNA, 16 nt, Human
gccugggccgcugcca

SEQ ID NO: 1401785 - RNA, 14 nt, Human
gccugggcagugga

SEQ ID NO: 1401786 - RNA, 13 nt, Human
gccugggcagugg

SEQ ID NO: 1401787 - RNA, 16 nt, Human
gccugggcaggaggga

SEQ ID NO: 1401788 - RNA, 16 nt, Human
gccuggccccaugguc

SEQ ID NO: 1401789 - RNA, 18 nt, Human
gccuggcccaccccaccc

SEQ ID NO: 1401790 - RNA, 17 nt, Human
gccugggcuccuggacc

SEQ ID NO: 1401791 - RNA, 15 nt, Human
gccugggcuccugga

SEQ ID NO: 1401792 - RNA, 14 nt, Human
gccugggcuccugg

SEQ ID NO: 1401793 - RNA, 13 nt, Human
gccugggcuccug

SEQ ID NO: 1401794 - RNA, 21 nt, Human
gccugggcgcugguccuuucu

SEQ ID NO: 1401795 - RNA, 10 nt, Human
gccugggcuc

SEQ ID NO: 1401796 - RNA, 20 nt, Human
gccugggcgcugguccuuuc

SEQ ID NO: 1401797 - RNA, 17 nt, Human
gccugggcgcugguccu

SEQ ID NO: 1401798 - RNA, 23 nt, Human
gccugggccuauggagagcccug

SEQ ID NO: 1401799 - RNA, 22 nt, Human
gccugggccuauggagagcccu

SEQ ID NO: 1401800 - RNA, 21 nt, Human
gccugggccuauggagagccc

SEQ ID NO: 1401801 - RNA, 20 nt, Human
gccugggccuauggagagcc

SEQ ID NO: 1401802 - RNA, 19 nt, Human
gccugggccuauggagagc

SEQ ID NO: 1401803 - RNA, 18 nt, Human
gccugggccuauggagag

SEQ ID NO: 1401804 - RNA, 14 nt, Human
gccugggccuaugg

SEQ ID NO: 1401805 - RNA, 18 nt, Human
gccugggccgcugccacg

SEQ ID NO: 1401806 - RNA, 17 nt, Human
gccugggccgcugccac

SEQ ID NO: 1401807 - RNA, 16 nt, Human
gccugggcuccuggac

SEQ ID NO: 1401808 - RNA, 15 nt, Human
gccugggcugggaaa

SEQ ID NO: 1401809 - RNA, 20 nt, Human
gccugguauauccaaaagcu

SEQ ID NO: 1401810 - RNA, 20 nt, Human
gccuggguuugguguauggu

SEQ ID NO: 1401811 - RNA, 12 nt, Human
gccugucucaag

SEQ ID NO: 1401812 - RNA, 19 nt, Human
gccuguccugccuguggcc

SEQ ID NO: 1401813 - RNA, 16 nt, Human
gccuguacugccugcu

SEQ ID NO: 1401814 - RNA, 15 nt, Human
gccuguccugccugu

SEQ ID NO: 1401815 - RNA, 15 nt, Human
gccuguacugccugc

SEQ ID NO: 1401816 - RNA, 14 nt, Human
gccuguacugccug

SEQ ID NO: 1401817 - RNA, 13 nt, Human
gccuguacugccu

SEQ ID NO: 1401818 - RNA, 11 nt, Human
gccuguacugc

SEQ ID NO: 1401819 - RNA, 19 nt, Human
gccuggguuugguguaugg

SEQ ID NO: 1401820 - RNA, 17 nt, Human
gccuggaagagcagccc

SEQ ID NO: 1401821 - RNA, 15 nt, Human
gccuggaagagcagc

SEQ ID NO: 1401822 - RNA, 21 nt, Human
gccugcugcugagaaccuggc

SEQ ID NO: 1401823 - RNA, 20 nt, Human
gccugcugcugagaaccugg

SEQ ID NO: 1401824 - RNA, 19 nt, Human
gccugcugcugagaaccug

SEQ ID NO: 1401825 - RNA, 18 nt, Human
gccugcugcugagaaccu

SEQ ID NO: 1401826 - RNA, 17 nt, Human
gccugcugcugagaacc

SEQ ID NO: 1401827 - RNA, 15 nt, Human
gccugcugcugagaa

SEQ ID NO: 1401828 - RNA, 14 nt, Human
gccugcugcugaga

SEQ ID NO: 1401829 - RNA, 13 nt, Human
gccugcugcugag

SEQ ID NO: 1401830 - RNA, 12 nt, Human
gccugcugcuga

SEQ ID NO: 1401831 - RNA, 21 nt, Human
gccugcucccauccugugugu

SEQ ID NO: 1401832 - RNA, 21 nt, Human
gccugcauccauucuccugag

SEQ ID NO: 1401833 - RNA, 22 nt, Human
gccugcauccauucuccugagg

SEQ ID NO: 1401834 - RNA, 23 nt, Human
gccugcauaggaguuuggaggaa

SEQ ID NO: 1401835 - RNA, 22 nt, Human
gccugcauaggaguuuggagga

SEQ ID NO: 1401836 - RNA, 17 nt, Human
gccugcaguccuggaag

SEQ ID NO: 1401837 - RNA, 23 nt, Human
gccuggacccguucaugggggag

SEQ ID NO: 1401838 - RNA, 17 nt, Human
gccuggaccagccucuc

SEQ ID NO: 1401839 - RNA, 16 nt, Human
gccuggaccagccucu

SEQ ID NO: 1401840 - RNA, 18 nt, Human
gccuggcaagugggugaa

SEQ ID NO: 1401841 - RNA, 23 nt, Human
gccugcaggaucucaccaggcag

SEQ ID NO: 1401842 - RNA, 16 nt, Human
gccugcaggaucucac

SEQ ID NO: 1401843 - RNA, 13 nt, Human
gccugcaggaucu

SEQ ID NO: 1401844 - RNA, 24 nt, Human
gccugcaggaucucaccaggcagc

SEQ ID NO: 1401845 - RNA, 15 nt, Human
gccugagggaaaggc

SEQ ID NO: 1401846 - RNA, 14 nt, Human
gccugagggaaagg

SEQ ID NO: 1401847 - RNA, 10 nt, Human
gccugaggga

SEQ ID NO: 1401848 - RNA, 20 nt, Human
gccuuguaauucuaaaugaa

SEQ ID NO: 1401849 - RNA, 17 nt, Human
gccuuguaauucuaaau

SEQ ID NO: 1401850 - RNA, 23 nt, Human
gccuugguuuuuacugcucugag

SEQ ID NO: 1401851 - RNA, 22 nt, Human
gccuugguuuuuacugcucuga

SEQ ID NO: 1401852 - RNA, 17 nt, Human
gccuugguuuuuacugc

SEQ ID NO: 1401853 - RNA, 15 nt, Human
gccuuguuuuuuucu

SEQ ID NO: 1401854 - RNA, 12 nt, Human
gccuuguucugu

SEQ ID NO: 1401855 - RNA, 16 nt, Human
gccuuguucugucacc

SEQ ID NO: 1401856 - RNA, 23 nt, Human
gccuugugaugucauacagagaa

SEQ ID NO: 1401857 - RNA, 22 nt, Human
gccuugugaugucauacagaga

SEQ ID NO: 1401858 - RNA, 21 nt, Human
gccuugugaugucauacagag

SEQ ID NO: 1401859 - RNA, 12 nt, Human
gccuuguguaca

SEQ ID NO: 1401860 - RNA, 17 nt, Human
gccuugucacgccagac

SEQ ID NO: 1401861 - RNA, 16 nt, Human
gccuugucacgccaga

SEQ ID NO: 1401862 - RNA, 15 nt, Human
gccuugucacgccag

SEQ ID NO: 1401863 - RNA, 22 nt, Human
gccuuccuccugggcccucucu

SEQ ID NO: 1401864 - RNA, 17 nt, Human
gccuuccuccugggccc

SEQ ID NO: 1401865 - RNA, 16 nt, Human
gccuuccuccugggcc

SEQ ID NO: 1401866 - RNA, 14 nt, Human
gccuuccuccuggg

SEQ ID NO: 1401867 - RNA, 13 nt, Human
gccuuccuccugg

SEQ ID NO: 1401868 - RNA, 17 nt, Human
gccugugaacccaggac

SEQ ID NO: 1401869 - RNA, 16 nt, Human
gccugugaacccagga

SEQ ID NO: 1401870 - RNA, 15 nt, Human
gccugugaacccagg

SEQ ID NO: 1401871 - RNA, 14 nt, Human
gccugugaacccag

SEQ ID NO: 1401872 - RNA, 17 nt, Human
gccugucuuaauuuucu

SEQ ID NO: 1401873 - RNA, 16 nt, Human
gccugucuuaauuuuc

SEQ ID NO: 1401874 - RNA, 20 nt, Human
gccuuuccauccauggccag

SEQ ID NO: 1401875 - RNA, 21 nt, Human
gccuuuccauccauggccagc

SEQ ID NO: 1401876 - RNA, 19 nt, Human
gccuuuccauccauggcca

SEQ ID NO: 1401877 - RNA, 15 nt, Human
gccuuuccauccaug

SEQ ID NO: 1401878 - RNA, 18 nt, Human
gccuuucaggaucuauuu

SEQ ID NO: 1401879 - RNA, 16 nt, Human
gccuuguuuuuuucua

SEQ ID NO: 1401880 - RNA, 13 nt, Human
gccuuuaaaauuu

SEQ ID NO: 1401881 - RNA, 17 nt, Human
gccuuucuucucuccag

SEQ ID NO: 1401882 - RNA, 17 nt, Human
gcgaagcguuguccuca

SEQ ID NO: 1401883 - RNA, 23 nt, Human
gcgguagccagcacacagggcag

SEQ ID NO: 1401884 - RNA, 22 nt, Human
gcgguagccagcacacagggca

SEQ ID NO: 1401885 - RNA, 21 nt, Human
gcgguagccagcacacagggc

SEQ ID NO: 1401886 - RNA, 15 nt, Human
gcgguagccagcaca

SEQ ID NO: 1401887 - RNA, 17 nt, Human
gcggaccacccucacug

SEQ ID NO: 1401888 - RNA, 13 nt, Human
gcgcaucagacug

SEQ ID NO: 1401889 - RNA, 22 nt, Human
gcgcaguuuuuuuuuucuuguc

SEQ ID NO: 1401890 - RNA, 18 nt, Human
gcgcaguguggaggccac

SEQ ID NO: 1401891 - RNA, 22 nt, Human
gcgcccccuccgcccugccacu

SEQ ID NO: 1401892 - RNA, 21 nt, Human
gcgcccccuccgcccugccac

SEQ ID NO: 1401893 - RNA, 22 nt, Human
gcgccccaacccguggaggcug

SEQ ID NO: 1401894 - RNA, 21 nt, Human
gcgccccaacccguggaggcu

SEQ ID NO: 1401895 - RNA, 18 nt, Human
gcgccccaacccguggag

SEQ ID NO: 1401896 - RNA, 15 nt, Human
gcgccugugguucug

SEQ ID NO: 1401897 - RNA, 21 nt, Human
gcgccucgccggaucugaggg

SEQ ID NO: 1401898 - RNA, 19 nt, Human
gcgccuccauccaaggcca

SEQ ID NO: 1401899 - RNA, 18 nt, Human
gcgcccugcagacccugc

SEQ ID NO: 1401900 - RNA, 16 nt, Human
gcgcccugcagacccu

SEQ ID NO: 1401901 - RNA, 14 nt, Human
gcgcccugcagacc

SEQ ID NO: 1401902 - RNA, 13 nt, Human
gcgcccugcagac

SEQ ID NO: 1401903 - RNA, 12 nt, Human
gcgcccugcaga

SEQ ID NO: 1401904 - RNA, 22 nt, Human
gcgcccuuaacugcauccagcc

SEQ ID NO: 1401905 - RNA, 13 nt, Human
gcuagauguaugu

SEQ ID NO: 1401906 - RNA, 21 nt, Human
gcuauaaagcaguauuuuucu

SEQ ID NO: 1401907 - RNA, 19 nt, Human
gcuauaaagcaguauuuuu

SEQ ID NO: 1401908 - RNA, 16 nt, Human
gcuagauguauguacu

SEQ ID NO: 1401909 - RNA, 14 nt, Human
gcuagauguaugua

SEQ ID NO: 1401910 - RNA, 21 nt, Human
gcuauacugcauacuuuuuaa

SEQ ID NO: 1401911 - RNA, 17 nt, Human
gcuauauaagacaagaa

SEQ ID NO: 1401912 - RNA, 12 nt, Human
gcuauccaccaa

SEQ ID NO: 1401913 - RNA, 13 nt, Human
gcucacacaccug

SEQ ID NO: 1401914 - RNA, 22 nt, Human
gcucacaaggcagcaaggcccg

SEQ ID NO: 1401915 - RNA, 21 nt, Human
gcucacaaggcagcaaggccc

SEQ ID NO: 1401916 - RNA, 20 nt, Human
gcucacaaggcagcaaggcc

SEQ ID NO: 1401917 - RNA, 19 nt, Human
gcucacaaggcagcaaggc

SEQ ID NO: 1401918 - RNA, 15 nt, Human
gcucacaaggcagca

SEQ ID NO: 1401919 - RNA, 14 nt, Human
gcucacaaggcagc

SEQ ID NO: 1401920 - RNA, 13 nt, Human
gcucacaaggcag

SEQ ID NO: 1401921 - RNA, 14 nt, Human
gcucacaaaccaug

SEQ ID NO: 1401922 - RNA, 17 nt, Human
gcucaauggacuggaag

SEQ ID NO: 1401923 - RNA, 20 nt, Human
gcucaaugagcauguuuaga

SEQ ID NO: 1401924 - RNA, 19 nt, Human
gcucaaugagcauguuuag

SEQ ID NO: 1401925 - RNA, 14 nt, Human
gcucaaugagcaug

SEQ ID NO: 1401926 - RNA, 13 nt, Human
gcucaaugagcau

SEQ ID NO: 1401927 - RNA, 20 nt, Human
gcucaaucccugaggacuga

SEQ ID NO: 1401928 - RNA, 16 nt, Human
gcucaaucccugagga

SEQ ID NO: 1401929 - RNA, 14 nt, Human
gcucaaggccagcu

SEQ ID NO: 1401930 - RNA, 18 nt, Human
gcucaagcgauucuccug

SEQ ID NO: 1401931 - RNA, 17 nt, Human
gcuaucguaaaauuaag

SEQ ID NO: 1401932 - RNA, 15 nt, Human
gcuaucguaaaauua

SEQ ID NO: 1401933 - RNA, 16 nt, Human
gcuaucguaaaauuaa

SEQ ID NO: 1401934 - RNA, 21 nt, Human
gcucagccccaccccagggca

SEQ ID NO: 1401935 - RNA, 20 nt, Human
gcucagccccaccccagggc

SEQ ID NO: 1401936 - RNA, 15 nt, Human
gcucagccccacccc

SEQ ID NO: 1401937 - RNA, 21 nt, Human
gcucagccaucccgucuucuc

SEQ ID NO: 1401938 - RNA, 15 nt, Human
gcucagccagcacuu

SEQ ID NO: 1401939 - RNA, 22 nt, Human
gcucagccccaccccagggcag

SEQ ID NO: 1401940 - RNA, 12 nt, Human
gcucagcccugc

SEQ ID NO: 1401941 - RNA, 15 nt, Human
gcucagcccugagga

SEQ ID NO: 1401942 - RNA, 12 nt, Human
gcucagcccuga

SEQ ID NO: 1401943 - RNA, 19 nt, Human
gcucagcugcauuccgcag

SEQ ID NO: 1401944 - RNA, 12 nt, Human
gcucagcugcau

SEQ ID NO: 1401945 - RNA, 17 nt, Human
gcucagcucugggccau

SEQ ID NO: 1401946 - RNA, 16 nt, Human
gcucagcucugggcca

SEQ ID NO: 1401947 - RNA, 18 nt, Human
gcucagcucauccaugcc

SEQ ID NO: 1401948 - RNA, 16 nt, Human
gcucagcccugcacca

SEQ ID NO: 1401949 - RNA, 19 nt, Human
gcucagcugucaaggcuca

SEQ ID NO: 1401950 - RNA, 15 nt, Human
gcucaucugcugguc

SEQ ID NO: 1401951 - RNA, 14 nt, Human
gcucaucugcuggu

SEQ ID NO: 1401952 - RNA, 13 nt, Human
gcucaucugcugg

SEQ ID NO: 1401953 - RNA, 20 nt, Human
gcucaucauucucugucuca

SEQ ID NO: 1401954 - RNA, 19 nt, Human
gcucaucauucucugucuc

SEQ ID NO: 1401955 - RNA, 18 nt, Human
gcucaucauucucugucu

SEQ ID NO: 1401956 - RNA, 16 nt, Human
gcucaucauucucugu

SEQ ID NO: 1401957 - RNA, 23 nt, Human
gcucaucugcugguccgugggac

SEQ ID NO: 1401958 - RNA, 21 nt, Human
gcucaucugcugguccguggg

SEQ ID NO: 1401959 - RNA, 16 nt, Human
gcucaucugcuggucc

SEQ ID NO: 1401960 - RNA, 18 nt, Human
gcucauggacuucugcca

SEQ ID NO: 1401961 - RNA, 21 nt, Human
gcuccagguggcucugaggug

SEQ ID NO: 1401962 - RNA, 18 nt, Human
gcuccagguggcucugag

SEQ ID NO: 1401963 - RNA, 16 nt, Human
gcuccagguggcucug

SEQ ID NO: 1401964 - RNA, 15 nt, Human
gcuccagguggcucu

SEQ ID NO: 1401965 - RNA, 15 nt, Human
gcucccacaagccuc

SEQ ID NO: 1401966 - RNA, 21 nt, Human
gcucccaaggggccugagcag

SEQ ID NO: 1401967 - RNA, 20 nt, Human
gcucccaaggggccugagca

SEQ ID NO: 1401968 - RNA, 19 nt, Human
gcucccaaggggccugagc

SEQ ID NO: 1401969 - RNA, 17 nt, Human
gcucccaaggggccuga

SEQ ID NO: 1401970 - RNA, 16 nt, Human
gcucccaaggggccug

SEQ ID NO: 1401971 - RNA, 15 nt, Human
gcucccaaggggccu

SEQ ID NO: 1401972 - RNA, 19 nt, Human
gcuccaguguccugagcuc

SEQ ID NO: 1401973 - RNA, 17 nt, Human
gcuccaguguccugagc

SEQ ID NO: 1401974 - RNA, 16 nt, Human
gcuccaguguccugag

SEQ ID NO: 1401975 - RNA, 15 nt, Human
gcuccaguguccuga

SEQ ID NO: 1401976 - RNA, 13 nt, Human
gcucccacagaac

SEQ ID NO: 1401977 - RNA, 19 nt, Human
gcucccacaagccugaggg

SEQ ID NO: 1401978 - RNA, 18 nt, Human
gcucccacaagccugagg

SEQ ID NO: 1401979 - RNA, 17 nt, Human
gcucccacaagccugag

SEQ ID NO: 1401980 - RNA, 16 nt, Human
gcucccacaagccuga

SEQ ID NO: 1401981 - RNA, 15 nt, Human
gcucccacaagccug

SEQ ID NO: 1401982 - RNA, 23 nt, Human
gcucccacaagccucugcccagg

SEQ ID NO: 1401983 - RNA, 16 nt, Human
gcuccgaggacccagg

SEQ ID NO: 1401984 - RNA, 15 nt, Human
gcuccgaggacccag

SEQ ID NO: 1401985 - RNA, 14 nt, Human
gcucccuucuuccc

SEQ ID NO: 1401986 - RNA, 21 nt, Human
gcucccuucuacagccucaga

SEQ ID NO: 1401987 - RNA, 19 nt, Human
gcucccacagaacacagca

SEQ ID NO: 1401988 - RNA, 22 nt, Human
gcucaugugugcaacaggguau

SEQ ID NO: 1401989 - RNA, 17 nt, Human
gcucaugugugcaacag

SEQ ID NO: 1401990 - RNA, 14 nt, Human
gcucauuucaggau

SEQ ID NO: 1401991 - RNA, 23 nt, Human
gcuccuuccuggagacugcccag

SEQ ID NO: 1401992 - RNA, 14 nt, Human
gcuccuuccuggag

SEQ ID NO: 1401993 - RNA, 13 nt, Human
gcuccuucccauc

SEQ ID NO: 1401994 - RNA, 18 nt, Human
gcuccuucccaucgcugu

SEQ ID NO: 1401995 - RNA, 22 nt, Human
gcuccuguuuugcacagccaaa

SEQ ID NO: 1401996 - RNA, 21 nt, Human
gcuccuuaaggcucuuuugua

SEQ ID NO: 1401997 - RNA, 17 nt, Human
gcuccuuaaggcucuuu

SEQ ID NO: 1401998 - RNA, 15 nt, Human
gcuccuuaaggcucu

SEQ ID NO: 1401999 - RNA, 16 nt, Human
gcucgaggggugggcu

SEQ ID NO: 1402000 - RNA, 21 nt, Human
gcuccuugugggccugggcuc

SEQ ID NO: 1402001 - RNA, 22 nt, Human
gcuccuugugggccugggcucc

SEQ ID NO: 1402002 - RNA, 20 nt, Human
gcuccuugugggccugggcu

SEQ ID NO: 1402003 - RNA, 18 nt, Human
gcuccuugugggccuggg

SEQ ID NO: 1402004 - RNA, 17 nt, Human
gcuccuugugggccugg

SEQ ID NO: 1402005 - RNA, 16 nt, Human
gcuccuugugggccug

SEQ ID NO: 1402006 - RNA, 15 nt, Human
gcuccuugugggccu

SEQ ID NO: 1402007 - RNA, 15 nt, Human
gcuccuugugccaga

SEQ ID NO: 1402008 - RNA, 19 nt, Human
gcuccuugggcccuuugag

SEQ ID NO: 1402009 - RNA, 17 nt, Human
gcuccuugggcccuuug

SEQ ID NO: 1402010 - RNA, 14 nt, Human
gcuccuugggcccu

SEQ ID NO: 1402011 - RNA, 23 nt, Human
gcuccguccaggagccugugccu

SEQ ID NO: 1402012 - RNA, 22 nt, Human
gcuccguccaggagccugugcc

SEQ ID NO: 1402013 - RNA, 23 nt, Human
gcuccggaggacucaccacugcc

SEQ ID NO: 1402014 - RNA, 15 nt, Human
gcuccgccuggccug

SEQ ID NO: 1402015 - RNA, 17 nt, Human
gcuccgccuggccuggc

SEQ ID NO: 1402016 - RNA, 22 nt, Human
gcuccgugugggagaccggccu

SEQ ID NO: 1402017 - RNA, 23 nt, Human
gcuccgugugggagaccggccug

SEQ ID NO: 1402018 - RNA, 20 nt, Human
gcuccucagggacucaggug

SEQ ID NO: 1402019 - RNA, 19 nt, Human
gcuccucagggacucaggu

SEQ ID NO: 1402020 - RNA, 18 nt, Human
gcuccucagggacucagg

SEQ ID NO: 1402021 - RNA, 22 nt, Human
gcuccucaaccccuccccucca

SEQ ID NO: 1402022 - RNA, 21 nt, Human
gcuccucaaccccuccccucc

SEQ ID NO: 1402023 - RNA, 21 nt, Human
gcuccuauucaacacacacau

SEQ ID NO: 1402024 - RNA, 21 nt, Human
gcuccuguggccccacccugg

SEQ ID NO: 1402025 - RNA, 20 nt, Human
gcuccuguggccccacccug

SEQ ID NO: 1402026 - RNA, 15 nt, Human
gcuccuguggcccca

SEQ ID NO: 1402027 - RNA, 13 nt, Human
gcuccuguggccc

SEQ ID NO: 1402028 - RNA, 17 nt, Human
gcuccuguccccugcua

SEQ ID NO: 1402029 - RNA, 19 nt, Human
gcuccuguccccugcuaca

SEQ ID NO: 1402030 - RNA, 14 nt, Human
gcuccuguccccug

SEQ ID NO: 1402031 - RNA, 21 nt, Human
gcuccuggucaccuaggaagc

SEQ ID NO: 1402032 - RNA, 15 nt, Human
gcuccuccccuggag

SEQ ID NO: 1402033 - RNA, 20 nt, Human
gcuccuccagggugugugcu

SEQ ID NO: 1402034 - RNA, 11 nt, Human
gcuccucccac

SEQ ID NO: 1402035 - RNA, 21 nt, Human
gcuccuccaggguggcagcaa

SEQ ID NO: 1402036 - RNA, 22 nt, Human
gcuccuccaggguggcagcaac

SEQ ID NO: 1402037 - RNA, 21 nt, Human
gcuuacugauauauuuuacaa

SEQ ID NO: 1402038 - RNA, 17 nt, Human
gcuuacugauauauuuu

SEQ ID NO: 1402039 - RNA, 22 nt, Human
gcuuaccuggcccaucagggua

SEQ ID NO: 1402040 - RNA, 12 nt, Human
gcuuaccuggcc

SEQ ID NO: 1402041 - RNA, 11 nt, Human
gcuuauaucug

SEQ ID NO: 1402042 - RNA, 23 nt, Human
gcuuauacgaaauaauuguuguu

SEQ ID NO: 1402043 - RNA, 22 nt, Human
gcuuauacgaaauaauuguugu

SEQ ID NO: 1402044 - RNA, 19 nt, Human
gcuuauacgaaauaauugu

SEQ ID NO: 1402045 - RNA, 18 nt, Human
gcuuauacgaaauaauug

SEQ ID NO: 1402046 - RNA, 17 nt, Human
gcuuauacgaaauaauu

SEQ ID NO: 1402047 - RNA, 20 nt, Human
gcuuauaucuggccucugcu

SEQ ID NO: 1402048 - RNA, 17 nt, Human
gcuuauaucuggccucu

SEQ ID NO: 1402049 - RNA, 15 nt, Human
gcuuauaucuggccu

SEQ ID NO: 1402050 - RNA, 18 nt, Human
gcuucaugugucccagaa

SEQ ID NO: 1402051 - RNA, 17 nt, Human
gcuucaugugucccaga

SEQ ID NO: 1402052 - RNA, 16 nt, Human
gcuucaugugucccag

SEQ ID NO: 1402053 - RNA, 15 nt, Human
gcuucauguguccca

SEQ ID NO: 1402054 - RNA, 14 nt, Human
gcuucauguguccc

SEQ ID NO: 1402055 - RNA, 17 nt, Human
gcuucauggcagaaggc

SEQ ID NO: 1402056 - RNA, 14 nt, Human
gcuucaugccagcu

SEQ ID NO: 1402057 - RNA, 14 nt, Human
gcuucaucuggcaa

SEQ ID NO: 1402058 - RNA, 18 nt, Human
gcuuaucaacuaaugauu

SEQ ID NO: 1402059 - RNA, 21 nt, Human
gcuuccacguacugcagccuc

SEQ ID NO: 1402060 - RNA, 12 nt, Human
gcuuccaauuuu

SEQ ID NO: 1402061 - RNA, 22 nt, Human
gcuucauucaagucagcucuuc

SEQ ID NO: 1402062 - RNA, 23 nt, Human
gcuuccagauugacgacaagugc

SEQ ID NO: 1402063 - RNA, 22 nt, Human
gcuuccagauugacgacaagug

SEQ ID NO: 1402064 - RNA, 21 nt, Human
gcuucucagauuucugaggaa

SEQ ID NO: 1402065 - RNA, 16 nt, Human
gcuucucauccugcag

SEQ ID NO: 1402066 - RNA, 22 nt, Human
gcuucucagauuucugaggaaa

SEQ ID NO: 1402067 - RNA, 22 nt, Human
gcuucugcuggggccugggaca

SEQ ID NO: 1402068 - RNA, 21 nt, Human
gcuucugcuggggccugggac

SEQ ID NO: 1402069 - RNA, 20 nt, Human
gcuucugcuggggccuggga

SEQ ID NO: 1402070 - RNA, 18 nt, Human
gcuucugcuggggccugg

SEQ ID NO: 1402071 - RNA, 16 nt, Human
gcuucugcuggggccu

SEQ ID NO: 1402072 - RNA, 15 nt, Human
gcuucugcuggggcc

SEQ ID NO: 1402073 - RNA, 18 nt, Human
gcuucucauccugcaggc

SEQ ID NO: 1402074 - RNA, 17 nt, Human
gcuucucauccugcagg

SEQ ID NO: 1402075 - RNA, 14 nt, Human
gcuucuggccagga

SEQ ID NO: 1402076 - RNA, 19 nt, Human
gcuucuguuuuauaauuuu

SEQ ID NO: 1402077 - RNA, 14 nt, Human
gcuuguuaaauuuu

SEQ ID NO: 1402078 - RNA, 19 nt, Human
gcuuguggggccugggagg

SEQ ID NO: 1402079 - RNA, 18 nt, Human
gcuuguggggccugggag

SEQ ID NO: 1402080 - RNA, 17 nt, Human
gcuuguggggccuggga

SEQ ID NO: 1402081 - RNA, 16 nt, Human
gcuuguggggccuggg

SEQ ID NO: 1402082 - RNA, 13 nt, Human
gcuuguggggccu

SEQ ID NO: 1402083 - RNA, 18 nt, Human
gcuuguggcaagugaauu

SEQ ID NO: 1402084 - RNA, 16 nt, Human
gcuuggagcagagggg

SEQ ID NO: 1402085 - RNA, 14 nt, Human
gcuuggagcagagg

SEQ ID NO: 1402086 - RNA, 21 nt, Human
gcuugcuuuucaugcaaacuc

SEQ ID NO: 1402087 - RNA, 23 nt, Human
gcuugcuuuucaugcaaacucuu

SEQ ID NO: 1402088 - RNA, 14 nt, Human
gcuugcuuuucaug

SEQ ID NO: 1402089 - RNA, 20 nt, Human
gcuugcuauucugucccuag

SEQ ID NO: 1402090 - RNA, 18 nt, Human
gcuugcuauucugucccu

SEQ ID NO: 1402091 - RNA, 14 nt, Human
gcuugcuauucugu

SEQ ID NO: 1402092 - RNA, 16 nt, Human
gcuugccugccugcuc

SEQ ID NO: 1402093 - RNA, 14 nt, Human
gcuugccugcaggc

SEQ ID NO: 1402094 - RNA, 13 nt, Human
gcuugccugcagg

SEQ ID NO: 1402095 - RNA, 16 nt, Human
gcuuguuuacaugcuu

SEQ ID NO: 1402096 - RNA, 19 nt, Human
gcuuguuuacaugcuuauu

SEQ ID NO: 1402097 - RNA, 15 nt, Human
gcuuguuuacaugcu

SEQ ID NO: 1402098 - RNA, 11 nt, Human
gcuuguuuaca

SEQ ID NO: 1402099 - RNA, 16 nt, Human
gcuuguugugcuuuua

SEQ ID NO: 1402100 - RNA, 13 nt, Human
gcuuguugugcuu

SEQ ID NO: 1402101 - RNA, 12 nt, Human
gcuuucauguaa

SEQ ID NO: 1402102 - RNA, 18 nt, Human
gcuuucagggaggcccug

SEQ ID NO: 1402103 - RNA, 18 nt, Human
gcuuuaacuuaaauagua

SEQ ID NO: 1402104 - RNA, 18 nt, Human
gcuuucauuuucucucag

SEQ ID NO: 1402105 - RNA, 17 nt, Human
gcuuucauuuucucuca

SEQ ID NO: 1402106 - RNA, 21 nt, Human
gcuuucauguaaacugugcac

SEQ ID NO: 1402107 - RNA, 20 nt, Human
gcuuucauguaaacugugca

SEQ ID NO: 1402108 - RNA, 15 nt, Human
gcuuucauguaaacu

SEQ ID NO: 1402109 - RNA, 19 nt, Human
gcuuucauuuucucucagg

SEQ ID NO: 1402110 - RNA, 21 nt, Human
gcuuucauuuucucucaggug

SEQ ID NO: 1402111 - RNA, 15 nt, Human
gcuuuccaugggacc

SEQ ID NO: 1402112 - RNA, 16 nt, Human
gcuuugguuuaaaaga

SEQ ID NO: 1402113 - RNA, 17 nt, Human
gcuuuggugagaaccug

SEQ ID NO: 1402114 - RNA, 15 nt, Human
gcuuugggcuugggc

SEQ ID NO: 1402115 - RNA, 19 nt, Human
gcuuuccauucgugaaaac

SEQ ID NO: 1402116 - RNA, 21 nt, Human
gcuuuuaguauuuuagugaac

SEQ ID NO: 1402117 - RNA, 17 nt, Human
gcuuuggucucuugcuu

SEQ ID NO: 1402118 - RNA, 13 nt, Human
gcuuuuaugugaa

SEQ ID NO: 1402119 - RNA, 15 nt, Human
gcuuuuaugugaaac

SEQ ID NO: 1402120 - RNA, 23 nt, Human
gcuggggaccugguacccuccug

SEQ ID NO: 1402121 - RNA, 16 nt, Human
gcuggggaccugguac

SEQ ID NO: 1402122 - RNA, 18 nt, Human
gcuggggacagguccuca

SEQ ID NO: 1402123 - RNA, 21 nt, Human
gcuggggaagacaguggcccc

SEQ ID NO: 1402124 - RNA, 24 nt, Human
gcugguaucucagaaagugccuga

SEQ ID NO: 1402125 - RNA, 18 nt, Human
gcugguaucucagaaagu

SEQ ID NO: 1402126 - RNA, 16 nt, Human
gcugguaucucagaaa

SEQ ID NO: 1402127 - RNA, 20 nt, Human
gcugguccuauggccucaug

SEQ ID NO: 1402128 - RNA, 20 nt, Human
gcuggucucaaacuccugac

SEQ ID NO: 1402129 - RNA, 18 nt, Human
gcuggucuagucacgcau

SEQ ID NO: 1402130 - RNA, 17 nt, Human
gcugguccuuucuuccg

SEQ ID NO: 1402131 - RNA, 19 nt, Human
gcugguccuauggccucau

SEQ ID NO: 1402132 - RNA, 16 nt, Human
gcugguccgugggacg

SEQ ID NO: 1402133 - RNA, 15 nt, Human
gcugguccgugggac

SEQ ID NO: 1402134 - RNA, 19 nt, Human
gcugguccagggcuaguga

SEQ ID NO: 1402135 - RNA, 14 nt, Human
gcugguccagggcu

SEQ ID NO: 1402136 - RNA, 16 nt, Human
gcuggggaagacagug

SEQ ID NO: 1402137 - RNA, 15 nt, Human
gcuggggaagacagu

SEQ ID NO: 1402138 - RNA, 14 nt, Human
gcuggggaagacag

SEQ ID NO: 1402139 - RNA, 23 nt, Human
gcuggggaaaucaaaagggccaa

SEQ ID NO: 1402140 - RNA, 13 nt, Human
gcugggcucugca

SEQ ID NO: 1402141 - RNA, 18 nt, Human
gcugggauagagggguca

SEQ ID NO: 1402142 - RNA, 18 nt, Human
gcugggaguaguugucuu

SEQ ID NO: 1402143 - RNA, 21 nt, Human
gcugggaggagggcaggcauc

SEQ ID NO: 1402144 - RNA, 15 nt, Human
gcuguccccccacuc

SEQ ID NO: 1402145 - RNA, 21 nt, Human
gcuguccccccacucccucac

SEQ ID NO: 1402146 - RNA, 14 nt, Human
gcuguccccccacu

SEQ ID NO: 1402147 - RNA, 18 nt, Human
gcuguccagaaagguuug

SEQ ID NO: 1402148 - RNA, 22 nt, Human
gcugucaucugugcacugccca

SEQ ID NO: 1402149 - RNA, 14 nt, Human
gcugucccggaggc

SEQ ID NO: 1402150 - RNA, 16 nt, Human
gcugucaucugugcac

SEQ ID NO: 1402151 - RNA, 15 nt, Human
gcugucaucugugca

SEQ ID NO: 1402152 - RNA, 14 nt, Human
gcugucaucugugc

SEQ ID NO: 1402153 - RNA, 18 nt, Human
gcugucaucaauuaaagg

SEQ ID NO: 1402154 - RNA, 23 nt, Human
gcugucaggauugcgagagaugu

SEQ ID NO: 1402155 - RNA, 24 nt, Human
gcugucaggauugcgagagaugug

SEQ ID NO: 1402156 - RNA, 22 nt, Human
gcugucaggauugcgagagaug

SEQ ID NO: 1402157 - RNA, 18 nt, Human
gcugucaggauugcgaga

SEQ ID NO: 1402158 - RNA, 23 nt, Human
gcugguguagcuacagagaaacc

SEQ ID NO: 1402159 - RNA, 18 nt, Human
gcugguguagcuacagag

SEQ ID NO: 1402160 - RNA, 17 nt, Human
gcugguguagcuacaga

SEQ ID NO: 1402161 - RNA, 15 nt, Human
gcugguguagcuaca

SEQ ID NO: 1402162 - RNA, 12 nt, Human
gcugguguagcu

SEQ ID NO: 1402163 - RNA, 22 nt, Human
gcugguguagcuacagagaaac

SEQ ID NO: 1402164 - RNA, 21 nt, Human
gcugguguagcuacagagaaa

SEQ ID NO: 1402165 - RNA, 20 nt, Human
gcugguguagcuacagagaa

SEQ ID NO: 1402166 - RNA, 19 nt, Human
gcugguguagcuacagaga

SEQ ID NO: 1402167 - RNA, 23 nt, Human
gcuguuagggguuauugguguaa

SEQ ID NO: 1402168 - RNA, 23 nt, Human
gcuguuaaauacaggaaacaguu

SEQ ID NO: 1402169 - RNA, 22 nt, Human
gcuguuaaauacaggaaacagu

SEQ ID NO: 1402170 - RNA, 16 nt, Human
gcuguuaaauacagga

SEQ ID NO: 1402171 - RNA, 15 nt, Human
gcuguuaaauacagg

SEQ ID NO: 1402172 - RNA, 13 nt, Human
gcuguuaaauaca

SEQ ID NO: 1402173 - RNA, 23 nt, Human
gcuguguuuggcuuucagggagg

SEQ ID NO: 1402174 - RNA, 18 nt, Human
gcugugugcuuuuuuugu

SEQ ID NO: 1402175 - RNA, 18 nt, Human
gcuguggccaggaggugc

SEQ ID NO: 1402176 - RNA, 20 nt, Human
gcuguggccaggaggugcca

SEQ ID NO: 1402177 - RNA, 16 nt, Human
gcuguggccaggaggu

SEQ ID NO: 1402178 - RNA, 15 nt, Human
gcuguggccaggagg

SEQ ID NO: 1402179 - RNA, 15 nt, Human
gcugugggaaauggu

SEQ ID NO: 1402180 - RNA, 20 nt, Human
gcuguggccuaaccugccga

SEQ ID NO: 1402181 - RNA, 19 nt, Human
gcuguggccuaaccugccg

SEQ ID NO: 1402182 - RNA, 20 nt, Human
gcugugugaauaccugcuca

SEQ ID NO: 1402183 - RNA, 18 nt, Human
gcugugugaauaccugcu

SEQ ID NO: 1402184 - RNA, 16 nt, Human
gcuguguggcagucug

SEQ ID NO: 1402185 - RNA, 21 nt, Human
gcugccuuauucagggaagga

SEQ ID NO: 1402186 - RNA, 19 nt, Human
gcugccuuauucagggaag

SEQ ID NO: 1402187 - RNA, 23 nt, Human
gcugcuaauauuuuccuccugag

SEQ ID NO: 1402188 - RNA, 24 nt, Human
gcugcuaauauuuuccuccugagu

SEQ ID NO: 1402189 - RNA, 22 nt, Human
gcugcuaauauuuuccuccuga

SEQ ID NO: 1402190 - RNA, 21 nt, Human
gcugcuaauauuuuccuccug

SEQ ID NO: 1402191 - RNA, 18 nt, Human
gcugcuaauauuuuccuc

SEQ ID NO: 1402192 - RNA, 14 nt, Human
gcugcuacuuauau

SEQ ID NO: 1402193 - RNA, 18 nt, Human
gcuggaagauccugcggg

SEQ ID NO: 1402194 - RNA, 17 nt, Human
gcuggaagauccugcgg

SEQ ID NO: 1402195 - RNA, 15 nt, Human
gcuggaagauccugc

SEQ ID NO: 1402196 - RNA, 14 nt, Human
gcuggaagauccug

SEQ ID NO: 1402197 - RNA, 17 nt, Human
gcuggaagauagcugug

SEQ ID NO: 1402198 - RNA, 23 nt, Human
gcuggaagacgcaagggccugau

SEQ ID NO: 1402199 - RNA, 21 nt, Human
gcuggaagacgcaagggccug

SEQ ID NO: 1402200 - RNA, 17 nt, Human
gcuggaagcugggaggu

SEQ ID NO: 1402201 - RNA, 16 nt, Human
gcuggaagcugggagg

SEQ ID NO: 1402202 - RNA, 18 nt, Human
gcuggaagauagcuguga

SEQ ID NO: 1402203 - RNA, 22 nt, Human
gcuggaaaauaauacugcugag

SEQ ID NO: 1402204 - RNA, 17 nt, Human
gcuggaaaauaauacug

SEQ ID NO: 1402205 - RNA, 23 nt, Human
gcuggaaaaguauguuagugcaa

SEQ ID NO: 1402206 - RNA, 21 nt, Human
gcuggaaaaguauguuagugc

SEQ ID NO: 1402207 - RNA, 19 nt, Human
gcuggccauggagaaagcu

SEQ ID NO: 1402208 - RNA, 20 nt, Human
gcuggccauggagaaagcug

SEQ ID NO: 1402209 - RNA, 18 nt, Human
gcuggccauggagaaagc

SEQ ID NO: 1402210 - RNA, 17 nt, Human
gcuggccauggagaaag

SEQ ID NO: 1402211 - RNA, 16 nt, Human
gcuggccauggagaaa

SEQ ID NO: 1402212 - RNA, 15 nt, Human
gcuggccauggagaa

SEQ ID NO: 1402213 - RNA, 17 nt, Human
gcuggccaguccaggcu

SEQ ID NO: 1402214 - RNA, 16 nt, Human
gcuggccaguccaggc

SEQ ID NO: 1402215 - RNA, 15 nt, Human
gcuggccaguccagg

SEQ ID NO: 1402216 - RNA, 14 nt, Human
gcuggccaguccag

SEQ ID NO: 1402217 - RNA, 16 nt, Human
gcuggccagcgagcgc

SEQ ID NO: 1402218 - RNA, 18 nt, Human
gcuggccgcccccagccc

SEQ ID NO: 1402219 - RNA, 20 nt, Human
gcuggacccugaccagcucc

SEQ ID NO: 1402220 - RNA, 15 nt, Human
gcuggacccugacca

SEQ ID NO: 1402221 - RNA, 14 nt, Human
gcuggacccugacc

SEQ ID NO: 1402222 - RNA, 21 nt, Human
gcuggacccagccaggcccag

SEQ ID NO: 1402223 - RNA, 20 nt, Human
gcuggacccagccaggccca

SEQ ID NO: 1402224 - RNA, 15 nt, Human
gcuggacccagccag

SEQ ID NO: 1402225 - RNA, 14 nt, Human
gcuggacccagcca

SEQ ID NO: 1402226 - RNA, 13 nt, Human
gcuggacccagcc

SEQ ID NO: 1402227 - RNA, 12 nt, Human
gcuggacccagc

SEQ ID NO: 1402228 - RNA, 23 nt, Human
gcuggacccugaccagcuccccc

SEQ ID NO: 1402229 - RNA, 22 nt, Human
gcuggacccugaccagcucccc

SEQ ID NO: 1402230 - RNA, 21 nt, Human
gcuggacccugaccagcuccc

SEQ ID NO: 1402231 - RNA, 17 nt, Human
gcuggaccucaccaagc

SEQ ID NO: 1402232 - RNA, 17 nt, Human
gcuggcaguccuggaag

SEQ ID NO: 1402233 - RNA, 16 nt, Human
gcuggcauuacaggug

SEQ ID NO: 1402234 - RNA, 9 nt, Human
gcugagacu

SEQ ID NO: 1402235 - RNA, 18 nt, Human
gcugagaaccuggccuuc

SEQ ID NO: 1402236 - RNA, 21 nt, Human
gcugagaaccuggccuucagu

SEQ ID NO: 1402237 - RNA, 17 nt, Human
gcugagaaccuggccuu

SEQ ID NO: 1402238 - RNA, 16 nt, Human
gcugagaaccuggccu

SEQ ID NO: 1402239 - RNA, 15 nt, Human
gcugagaaccuggcc

SEQ ID NO: 1402240 - RNA, 14 nt, Human
gcugagaaccuggc

SEQ ID NO: 1402241 - RNA, 13 nt, Human
gcugagaaccugg

SEQ ID NO: 1402242 - RNA, 22 nt, Human
gcugacuuggcuggugugguac

SEQ ID NO: 1402243 - RNA, 23 nt, Human
gcugacuuggcuggugugguaca

SEQ ID NO: 1402244 - RNA, 15 nt, Human
gcugaucgccuuccc

SEQ ID NO: 1402245 - RNA, 17 nt, Human
gcugauauuuucucuag

SEQ ID NO: 1402246 - RNA, 15 nt, Human
gcugauaauuuuaaa

SEQ ID NO: 1402247 - RNA, 16 nt, Human
gcugaucagugggccu

SEQ ID NO: 1402248 - RNA, 14 nt, Human
gcugauaauuuuaa

SEQ ID NO: 1402249 - RNA, 13 nt, Human
gcugauaauuuua

SEQ ID NO: 1402250 - RNA, 19 nt, Human
gcugauaauuuuaaauucu

SEQ ID NO: 1402251 - RNA, 12 nt, Human
gcugauaauuuu

SEQ ID NO: 1402252 - RNA, 19 nt, Human
gcugaucgccuuccccacc

SEQ ID NO: 1402253 - RNA, 17 nt, Human
gcugaucgccuucccca

SEQ ID NO: 1402254 - RNA, 16 nt, Human
gcugaucgccuucccc

SEQ ID NO: 1402255 - RNA, 15 nt, Human
gcugauuaaaugaca

SEQ ID NO: 1402256 - RNA, 13 nt, Human
gcugauuucuagg

SEQ ID NO: 1402257 - RNA, 23 nt, Human
gcugauuucuagguaggaaaugu

SEQ ID NO: 1402258 - RNA, 19 nt, Human
gcugcauuuaaaagauaca

SEQ ID NO: 1402259 - RNA, 18 nt, Human
gcugcauuuaaaagauac

SEQ ID NO: 1402260 - RNA, 18 nt, Human
gcugcaguucgacucugu

SEQ ID NO: 1402261 - RNA, 17 nt, Human
gcugcaguucgacucug

SEQ ID NO: 1402262 - RNA, 11 nt, Human
gcugauuuuuu

SEQ ID NO: 1402263 - RNA, 22 nt, Human
gcugcccuccugugcucagccc

SEQ ID NO: 1402264 - RNA, 23 nt, Human
gcugcccuccugugcucagcccu

SEQ ID NO: 1402265 - RNA, 17 nt, Human
gcugaccugcugaccug

SEQ ID NO: 1402266 - RNA, 13 nt, Human
gcugaccugcuga

SEQ ID NO: 1402267 - RNA, 12 nt, Human
gcugaccugcug

SEQ ID NO: 1402268 - RNA, 21 nt, Human
gcugaccagccgugagcaugu

SEQ ID NO: 1402269 - RNA, 12 nt, Human
gcugaccagaca

SEQ ID NO: 1402270 - RNA, 19 nt, Human
gcugaccacagcacagcca

SEQ ID NO: 1402271 - RNA, 17 nt, Human
gcugaccacagcacagc

SEQ ID NO: 1402272 - RNA, 16 nt, Human
gcugaccacagcacag

SEQ ID NO: 1402273 - RNA, 14 nt, Human
gcugaccacagcac

SEQ ID NO: 1402274 - RNA, 18 nt, Human
gcugacuuggcuggugug

SEQ ID NO: 1402275 - RNA, 17 nt, Human
gcugacuuggcuggugu

SEQ ID NO: 1402276 - RNA, 16 nt, Human
gcugacuuggcuggug

SEQ ID NO: 1402277 - RNA, 15 nt, Human
gcugacuuggcuggu

SEQ ID NO: 1402278 - RNA, 14 nt, Human
gcugacuuggcugg

SEQ ID NO: 1402279 - RNA, 24 nt, Human
gcugacuucaucucccaccuagca

SEQ ID NO: 1402280 - RNA, 19 nt, Human
gcugacuucaucucccacc

SEQ ID NO: 1402281 - RNA, 20 nt, Human
gcugacuaaacuuuuuuucu

SEQ ID NO: 1402282 - RNA, 19 nt, Human
gcugacgggacccacaugc

SEQ ID NO: 1402283 - RNA, 15 nt, Human
gcugacggccaggga

SEQ ID NO: 1402284 - RNA, 13 nt, Human
gcugacggccagg

SEQ ID NO: 1402285 - RNA, 13 nt, Human
gcugaccacagca

SEQ ID NO: 1402286 - RNA, 17 nt, Human
gcugacauucaccugcc

SEQ ID NO: 1402287 - RNA, 16 nt, Human
gcugacauucaccugc

SEQ ID NO: 1402288 - RNA, 21 nt, Human
gcugacaugaagcuguugugu

SEQ ID NO: 1402289 - RNA, 17 nt, Human
gcugacaugaagcuguu

SEQ ID NO: 1402290 - RNA, 18 nt, Human
gcucuuugucagggagug

SEQ ID NO: 1402291 - RNA, 16 nt, Human
gcucuuugucagggag

SEQ ID NO: 1402292 - RNA, 15 nt, Human
gcucuuugucaggga

SEQ ID NO: 1402293 - RNA, 22 nt, Human
gcucuuugguagaaaaggcuag

SEQ ID NO: 1402294 - RNA, 18 nt, Human
gcucuuugguagaaaagg

SEQ ID NO: 1402295 - RNA, 13 nt, Human
gcucuuugguaga

SEQ ID NO: 1402296 - RNA, 22 nt, Human
gcucgauguggucacagcugua

SEQ ID NO: 1402297 - RNA, 20 nt, Human
gcucgauguggucacagcug

SEQ ID NO: 1402298 - RNA, 12 nt, Human
gcucucaguucu

SEQ ID NO: 1402299 - RNA, 16 nt, Human
gcucuccaaaccacuu

SEQ ID NO: 1402300 - RNA, 17 nt, Human
gcucuccaaaccacuuu

SEQ ID NO: 1402301 - RNA, 12 nt, Human
gcucuucuuaaa

SEQ ID NO: 1402302 - RNA, 22 nt, Human
gcucuccaaaccacuuuuugca

SEQ ID NO: 1402303 - RNA, 13 nt, Human
gcucuuugagaaa

SEQ ID NO: 1402304 - RNA, 21 nt, Human
gcucuuucucugccagugaca

SEQ ID NO: 1402305 - RNA, 18 nt, Human
gcucuuucucugccagug

SEQ ID NO: 1402306 - RNA, 21 nt, Human
gcucuuggcuggacccagcca

SEQ ID NO: 1402307 - RNA, 23 nt, Human
gcucuuggcuggacccagccagg

SEQ ID NO: 1402308 - RNA, 20 nt, Human
gcucuuggcuggacccagcc

SEQ ID NO: 1402309 - RNA, 18 nt, Human
gcucuuggcuggacccag

SEQ ID NO: 1402310 - RNA, 15 nt, Human
gcucuuggcuggacc

SEQ ID NO: 1402311 - RNA, 14 nt, Human
gcucuuggcuggac

SEQ ID NO: 1402312 - RNA, 13 nt, Human
gcucuuggcugga

SEQ ID NO: 1402313 - RNA, 17 nt, Human
gcucuuggagcugugag

SEQ ID NO: 1402314 - RNA, 20 nt, Human
gcucuugauaccccccucug

SEQ ID NO: 1402315 - RNA, 19 nt, Human
gcucuugauaccccccucu

SEQ ID NO: 1402316 - RNA, 17 nt, Human
gcucuugauaccccccu

SEQ ID NO: 1402317 - RNA, 19 nt, Human
gcucuugaugccuggcggg

SEQ ID NO: 1402318 - RNA, 22 nt, Human
ggcccaccccacccacuucugc

SEQ ID NO: 1402319 - RNA, 23 nt, Human
ggcccaccccacccacuucugca

SEQ ID NO: 1402320 - RNA, 19 nt, Human
ggcccaccccacccacuuc

SEQ ID NO: 1402321 - RNA, 18 nt, Human
ggcccaccccacccacuu

SEQ ID NO: 1402322 - RNA, 15 nt, Human
ggcccaccagggucc

SEQ ID NO: 1402323 - RNA, 14 nt, Human
ggcccaccaggguc

SEQ ID NO: 1402324 - RNA, 18 nt, Human
ggcccacauuggaagagc

SEQ ID NO: 1402325 - RNA, 16 nt, Human
ggcccacauuggaaga

SEQ ID NO: 1402326 - RNA, 21 nt, Human
ggccauggagaaagcugacuu

SEQ ID NO: 1402327 - RNA, 18 nt, Human
ggccauggagaaagcuga

SEQ ID NO: 1402328 - RNA, 16 nt, Human
ggccauggagaaagcu

SEQ ID NO: 1402329 - RNA, 15 nt, Human
ggccauggagaaagc

SEQ ID NO: 1402330 - RNA, 22 nt, Human
ggccauggacucuguccugaag

SEQ ID NO: 1402331 - RNA, 21 nt, Human
ggccauggacucuguccugaa

SEQ ID NO: 1402332 - RNA, 18 nt, Human
ggccauggacucuguccu

SEQ ID NO: 1402333 - RNA, 17 nt, Human
ggccauggacucugucc

SEQ ID NO: 1402334 - RNA, 14 nt, Human
ggccauggacucug

SEQ ID NO: 1402335 - RNA, 22 nt, Human
ggccaugcugaggccugggccg

SEQ ID NO: 1402336 - RNA, 19 nt, Human
ggccaugcugaggccuggg

SEQ ID NO: 1402337 - RNA, 18 nt, Human
ggccaugcugaggccugg

SEQ ID NO: 1402338 - RNA, 15 nt, Human
ggccaugcugaggcc

SEQ ID NO: 1402339 - RNA, 14 nt, Human
ggccaugcugaggc

SEQ ID NO: 1402340 - RNA, 13 nt, Human
ggccaugcugagg

SEQ ID NO: 1402341 - RNA, 21 nt, Human
ggccaugcuccucuuccccag

SEQ ID NO: 1402342 - RNA, 22 nt, Human
ggccaugcuccucuuccccaga

SEQ ID NO: 1402343 - RNA, 18 nt, Human
ggccaugcuccucuuccc

SEQ ID NO: 1402344 - RNA, 17 nt, Human
ggccaugcuccucuucc

SEQ ID NO: 1402345 - RNA, 15 nt, Human
ggccaugcuccucuu

SEQ ID NO: 1402346 - RNA, 13 nt, Human
ggccaugcuccuc

SEQ ID NO: 1402347 - RNA, 21 nt, Human
ggccaggacucugcagccuca

SEQ ID NO: 1402348 - RNA, 20 nt, Human
ggccaggacucugcagccuc

SEQ ID NO: 1402349 - RNA, 18 nt, Human
ggccaggacucugcagcc

SEQ ID NO: 1402350 - RNA, 16 nt, Human
ggccaggacucugcag

SEQ ID NO: 1402351 - RNA, 15 nt, Human
ggccaggacucugca

SEQ ID NO: 1402352 - RNA, 14 nt, Human
ggccaggacucugc

SEQ ID NO: 1402353 - RNA, 18 nt, Human
ggccagacaugccacaag

SEQ ID NO: 1402354 - RNA, 15 nt, Human
ggccagacaugccac

SEQ ID NO: 1402355 - RNA, 18 nt, Human
ggccagacacaggcccuc

SEQ ID NO: 1402356 - RNA, 17 nt, Human
ggccagacacaggcccu

SEQ ID NO: 1402357 - RNA, 16 nt, Human
ggccagacacaggccc

SEQ ID NO: 1402358 - RNA, 12 nt, Human
ggccagaaguac

SEQ ID NO: 1402359 - RNA, 16 nt, Human
ggccagaaguaccaga

SEQ ID NO: 1402360 - RNA, 20 nt, Human
ggccacuguuuggaaauaaa

SEQ ID NO: 1402361 - RNA, 16 nt, Human
ggccacuguguuccuu

SEQ ID NO: 1402362 - RNA, 17 nt, Human
ggccaccuccccagcau

SEQ ID NO: 1402363 - RNA, 16 nt, Human
ggccaccuccccagca

SEQ ID NO: 1402364 - RNA, 13 nt, Human
ggccaccucccca

SEQ ID NO: 1402365 - RNA, 19 nt, Human
ggccacaucaaagaggcug

SEQ ID NO: 1402366 - RNA, 16 nt, Human
ggccacaucaaagagg

SEQ ID NO: 1402367 - RNA, 20 nt, Human
ggccacaguagucuugauga

SEQ ID NO: 1402368 - RNA, 13 nt, Human
ggccacagccagg

SEQ ID NO: 1402369 - RNA, 11 nt, Human
ggccacagcca

SEQ ID NO: 1402370 - RNA, 12 nt, Human
ggccacagccag

SEQ ID NO: 1402371 - RNA, 20 nt, Human
ggccacacuucaaacuacuu

SEQ ID NO: 1402372 - RNA, 17 nt, Human
ggccacacuucaaacua

SEQ ID NO: 1402373 - RNA, 21 nt, Human
ggccacacucagcacaaggcc

SEQ ID NO: 1402374 - RNA, 23 nt, Human
ggcauguuagcccuuccuccaau

SEQ ID NO: 1402375 - RNA, 16 nt, Human
ggccacacucagcaca

SEQ ID NO: 1402376 - RNA, 23 nt, Human
ggcauguguuuacuuuauguuac

SEQ ID NO: 1402377 - RNA, 13 nt, Human
ggcaguaccugag

SEQ ID NO: 1402378 - RNA, 14 nt, Human
ggcaguaauaaaaa

SEQ ID NO: 1402379 - RNA, 17 nt, Human
ggcagggguuagagcag

SEQ ID NO: 1402380 - RNA, 19 nt, Human
ggcagaguuacaguucugu

SEQ ID NO: 1402381 - RNA, 18 nt, Human
ggcagaguuacaguucug

SEQ ID NO: 1402382 - RNA, 13 nt, Human
ggcagaguuacag

SEQ ID NO: 1402383 - RNA, 21 nt, Human
ggcagaguucuauaauguaaa

SEQ ID NO: 1402384 - RNA, 16 nt, Human
ggcaguccgugggacg

SEQ ID NO: 1402385 - RNA, 19 nt, Human
ggcagucgauagagcugua

SEQ ID NO: 1402386 - RNA, 15 nt, Human
ggcaguccgugggac

SEQ ID NO: 1402387 - RNA, 20 nt, Human
ggcagucauuggcugucucc

SEQ ID NO: 1402388 - RNA, 22 nt, Human
ggcaguauccuguuugaggaaa

SEQ ID NO: 1402389 - RNA, 23 nt, Human
ggcaguaccugggcaagcuggcg

SEQ ID NO: 1402390 - RNA, 17 nt, Human
ggcaguaccugggcaag

SEQ ID NO: 1402391 - RNA, 20 nt, Human
ggcaguaccugagggucugu

SEQ ID NO: 1402392 - RNA, 16 nt, Human
ggcaguaccugagggu

SEQ ID NO: 1402393 - RNA, 15 nt, Human
ggcagugggaaaaau

SEQ ID NO: 1402394 - RNA, 13 nt, Human
ggcagugggaaaa

SEQ ID NO: 1402395 - RNA, 15 nt, Human
ggcauggucugcccu

SEQ ID NO: 1402396 - RNA, 23 nt, Human
ggcaugagggguuccuccccucc

SEQ ID NO: 1402397 - RNA, 20 nt, Human
ggcaugagggguuccucccc

SEQ ID NO: 1402398 - RNA, 13 nt, Human
ggcaugagaaaua

SEQ ID NO: 1402399 - RNA, 24 nt, Human
ggcaugucaacagcguuccuagag

SEQ ID NO: 1402400 - RNA, 22 nt, Human
ggcaugguguucuccugcugcu

SEQ ID NO: 1402401 - RNA, 16 nt, Human
ggcaugguguucuccu

SEQ ID NO: 1402402 - RNA, 17 nt, Human
ggcaccagggguuucuc

SEQ ID NO: 1402403 - RNA, 15 nt, Human
ggcaccaggaagccg

SEQ ID NO: 1402404 - RNA, 14 nt, Human
ggcaccaggaagcc

SEQ ID NO: 1402405 - RNA, 18 nt, Human
ggcaaggacuuuguacau

SEQ ID NO: 1402406 - RNA, 13 nt, Human
ggauugagucugu

SEQ ID NO: 1402407 - RNA, 20 nt, Human
ggauugaucggagccuccuc

SEQ ID NO: 1402408 - RNA, 12 nt, Human
ggauucuuuaaa

SEQ ID NO: 1402409 - RNA, 19 nt, Human
ggauugaaaauguccagga

SEQ ID NO: 1402410 - RNA, 19 nt, Human
ggauugaaggaugcugucu

SEQ ID NO: 1402411 - RNA, 14 nt, Human
ggauucuuuccauu

SEQ ID NO: 1402412 - RNA, 23 nt, Human
ggauucuguacaugcauugagcu

SEQ ID NO: 1402413 - RNA, 19 nt, Human
ggauucugguuccaggguc

SEQ ID NO: 1402414 - RNA, 18 nt, Human
ggauucugguuccagggu

SEQ ID NO: 1402415 - RNA, 14 nt, Human
ggauucugguucca

SEQ ID NO: 1402416 - RNA, 13 nt, Human
ggcagagggcugg

SEQ ID NO: 1402417 - RNA, 12 nt, Human
ggcagagggcug

SEQ ID NO: 1402418 - RNA, 11 nt, Human
ggcagagcugg

SEQ ID NO: 1402419 - RNA, 19 nt, Human
ggcagagcuggcucugagc

SEQ ID NO: 1402420 - RNA, 17 nt, Human
ggcagagcuggcucuga

SEQ ID NO: 1402421 - RNA, 16 nt, Human
ggcagagcuggcucug

SEQ ID NO: 1402422 - RNA, 21 nt, Human
ggcagagggcuggaggcccag

SEQ ID NO: 1402423 - RNA, 20 nt, Human
ggcagagggcuggaggccca

SEQ ID NO: 1402424 - RNA, 14 nt, Human
ggcagagggcugga

SEQ ID NO: 1402425 - RNA, 12 nt, Human
ggcagagccagg

SEQ ID NO: 1402426 - RNA, 13 nt, Human
ggcagagccagga

SEQ ID NO: 1402427 - RNA, 14 nt, Human
ggcagagccaggaa

SEQ ID NO: 1402428 - RNA, 16 nt, Human
ggcagagcccaaggga

SEQ ID NO: 1402429 - RNA, 12 nt, Human
ggcagagcccaa

SEQ ID NO: 1402430 - RNA, 16 nt, Human
ggcagagccaggaaga

SEQ ID NO: 1402431 - RNA, 17 nt, Human
ggcagagccaggaagau

SEQ ID NO: 1402432 - RNA, 20 nt, Human
ggaugagggaaaagaaaaag

SEQ ID NO: 1402433 - RNA, 23 nt, Human
ggaugagcucccacaagccugag

SEQ ID NO: 1402434 - RNA, 22 nt, Human
ggaugagcucccacaagccuga

SEQ ID NO: 1402435 - RNA, 21 nt, Human
ggaugagcucccacaagccug

SEQ ID NO: 1402436 - RNA, 14 nt, Human
ggaugagcucccac

SEQ ID NO: 1402437 - RNA, 20 nt, Human
ggaugagaguuuuggaugca

SEQ ID NO: 1402438 - RNA, 22 nt, Human
ggaugagaguuuuggaugcagu

SEQ ID NO: 1402439 - RNA, 15 nt, Human
ggaguccccucaccu

SEQ ID NO: 1402440 - RNA, 13 nt, Human
ggaguccccucac

SEQ ID NO: 1402441 - RNA, 14 nt, Human
ggagucacugagac

SEQ ID NO: 1402442 - RNA, 18 nt, Human
ggaugaugacuauggaaa

SEQ ID NO: 1402443 - RNA, 11 nt, Human
ggaugccuccu

SEQ ID NO: 1402444 - RNA, 19 nt, Human
ggauuauuagaaucaaaca

SEQ ID NO: 1402445 - RNA, 19 nt, Human
ggauuaugggucacaggaa

SEQ ID NO: 1402446 - RNA, 12 nt, Human
ggauuauauuau

SEQ ID NO: 1402447 - RNA, 20 nt, Human
ggauucaggaaaaggccugg

SEQ ID NO: 1402448 - RNA, 21 nt, Human
ggauucaggaaaaggccuggg

SEQ ID NO: 1402449 - RNA, 19 nt, Human
ggauucaggaaaaggccug

SEQ ID NO: 1402450 - RNA, 18 nt, Human
ggauucugcuggccucug

SEQ ID NO: 1402451 - RNA, 18 nt, Human
ggauuccccaucucaggc

SEQ ID NO: 1402452 - RNA, 22 nt, Human
ggauuccacucguguguuucua

SEQ ID NO: 1402453 - RNA, 18 nt, Human
ggacagaggccccagccu

SEQ ID NO: 1402454 - RNA, 17 nt, Human
ggacagaggccccagcc

SEQ ID NO: 1402455 - RNA, 16 nt, Human
ggacagaggccccagc

SEQ ID NO: 1402456 - RNA, 15 nt, Human
ggacagaggccccag

SEQ ID NO: 1402457 - RNA, 14 nt, Human
ggacagaggcccca

SEQ ID NO: 1402458 - RNA, 23 nt, Human
ggacagaggccccagccucccug

SEQ ID NO: 1402459 - RNA, 20 nt, Human
ggacagaggccccagccucc

SEQ ID NO: 1402460 - RNA, 16 nt, Human
ggacacuuaauacuac

SEQ ID NO: 1402461 - RNA, 14 nt, Human
ggacacucagaccu

SEQ ID NO: 1402462 - RNA, 14 nt, Human
gcuuuucaaacaaa

SEQ ID NO: 1402463 - RNA, 13 nt, Human
gcuuuucaaacaa

SEQ ID NO: 1402464 - RNA, 22 nt, Human
gcuuuuauuaaugcacuuucua

SEQ ID NO: 1402465 - RNA, 19 nt, Human
gcuuuuauuaaugcacuuu

SEQ ID NO: 1402466 - RNA, 19 nt, Human
gcuuuuaugugaaacaugu

SEQ ID NO: 1402467 - RNA, 20 nt, Human
gcuuuuaugugaaacauguu

SEQ ID NO: 1402468 - RNA, 18 nt, Human
gcuuuuauuaaugcacuu

SEQ ID NO: 1402469 - RNA, 15 nt, Human
gcuuuuauuaaugca

SEQ ID NO: 1402470 - RNA, 21 nt, Human
gcuuuuaugugaaacauguuu

SEQ ID NO: 1402471 - RNA, 16 nt, Human
ggacagccccacccug

SEQ ID NO: 1402472 - RNA, 15 nt, Human
ggacagccccacccu

SEQ ID NO: 1402473 - RNA, 14 nt, Human
ggacagccccaccc

SEQ ID NO: 1402474 - RNA, 13 nt, Human
ggaccagcucagg

SEQ ID NO: 1402475 - RNA, 22 nt, Human
ggaccagccuggcccaccccac

SEQ ID NO: 1402476 - RNA, 15 nt, Human
ggaccagccuggccc

SEQ ID NO: 1402477 - RNA, 13 nt, Human
ggaccagccuggc

SEQ ID NO: 1402478 - RNA, 12 nt, Human
ggaccagccugg

SEQ ID NO: 1402479 - RNA, 19 nt, Human
ggaccagcagccccacacc

SEQ ID NO: 1402480 - RNA, 12 nt, Human
ggaccagccucu

SEQ ID NO: 1402481 - RNA, 20 nt, Human
ggacauuugcucauggaauu

SEQ ID NO: 1402482 - RNA, 16 nt, Human
ggacagccgccuggag

SEQ ID NO: 1402483 - RNA, 17 nt, Human
ggacagccccacccugg

SEQ ID NO: 1402484 - RNA, 17 nt, Human
ggacauuugcucaugga

SEQ ID NO: 1402485 - RNA, 22 nt, Human
ggaccauggaguggcagcccag

SEQ ID NO: 1402486 - RNA, 21 nt, Human
ggaccauggaguggcagccca

SEQ ID NO: 1402487 - RNA, 18 nt, Human
ggaccagucccagagcag

SEQ ID NO: 1402488 - RNA, 17 nt, Human
ggaccagucccagagca

SEQ ID NO: 1402489 - RNA, 16 nt, Human
ggaccagucccagagc

SEQ ID NO: 1402490 - RNA, 19 nt, Human
ggaccagucaaccugggca

SEQ ID NO: 1402491 - RNA, 18 nt, Human
ggaccaggcaccaggcag

SEQ ID NO: 1402492 - RNA, 15 nt, Human
ggaccaggcuguagg

SEQ ID NO: 1402493 - RNA, 16 nt, Human
ggaccagccuggccca

SEQ ID NO: 1402494 - RNA, 23 nt, Human
ggaccaggaguggguggggagug

SEQ ID NO: 1402495 - RNA, 14 nt, Human
ggacgcacugagca

SEQ ID NO: 1402496 - RNA, 23 nt, Human
ggacgacacggucggggcaucug

SEQ ID NO: 1402497 - RNA, 20 nt, Human
ggaccuuuccaccacagcca

SEQ ID NO: 1402498 - RNA, 22 nt, Human
ggaccuuuccaccacagccagc

SEQ ID NO: 1402499 - RNA, 19 nt, Human
ggaccuuuccaccacagcc

SEQ ID NO: 1402500 - RNA, 18 nt, Human
ggaccuuuccaccacagc

SEQ ID NO: 1402501 - RNA, 19 nt, Human
ggacugaauuaugaaacuu

SEQ ID NO: 1402502 - RNA, 17 nt, Human
ggacugaauuaugaaac

SEQ ID NO: 1402503 - RNA, 15 nt, Human
ggacugaccagcagc

SEQ ID NO: 1402504 - RNA, 14 nt, Human
ggacugaccagcag

SEQ ID NO: 1402505 - RNA, 14 nt, Human
ggacugagaaauuu

SEQ ID NO: 1402506 - RNA, 13 nt, Human
ggagaagucucag

SEQ ID NO: 1402507 - RNA, 18 nt, Human
ggagaagugacauugcau

SEQ ID NO: 1402508 - RNA, 22 nt, Human
ggagaagucucagcuaagcuca

SEQ ID NO: 1402509 - RNA, 19 nt, Human
ggagacagguuagcugcuc

SEQ ID NO: 1402510 - RNA, 19 nt, Human
ggagaagcuccucucccca

SEQ ID NO: 1402511 - RNA, 12 nt, Human
ggagaaggaagg

SEQ ID NO: 1402512 - RNA, 23 nt, Human
ggagaagaaagaggugaccccag

SEQ ID NO: 1402513 - RNA, 14 nt, Human
ggagaagaacugaa

SEQ ID NO: 1402514 - RNA, 11 nt, Human
ggagaagaacu

SEQ ID NO: 1402515 - RNA, 20 nt, Human
ggagaagaaagaggugaccc

SEQ ID NO: 1402516 - RNA, 15 nt, Human
ggacugagugggaag

SEQ ID NO: 1402517 - RNA, 18 nt, Human
ggacugagaaauuuauaa

SEQ ID NO: 1402518 - RNA, 22 nt, Human
ggaguaacaauacaaauggauu

SEQ ID NO: 1402519 - RNA, 15 nt, Human
ggagguugggugggc

SEQ ID NO: 1402520 - RNA, 14 nt, Human
ggagggggaauggc

SEQ ID NO: 1402521 - RNA, 19 nt, Human
ggagggggaauggcagcag

SEQ ID NO: 1402522 - RNA, 18 nt, Human
ggaggggcuccuuuccau

SEQ ID NO: 1402523 - RNA, 15 nt, Human
ggagucacugagacc

SEQ ID NO: 1402524 - RNA, 16 nt, Human
ggaguagcugagcuca

SEQ ID NO: 1402525 - RNA, 17 nt, Human
ggaguagcugagcucac

SEQ ID NO: 1402526 - RNA, 15 nt, Human
ggaguagcugagcuc

SEQ ID NO: 1402527 - RNA, 14 nt, Human
ggaguagcugagcu

SEQ ID NO: 1402528 - RNA, 21 nt, Human
ggagucacacaguguuggagg

SEQ ID NO: 1402529 - RNA, 13 nt, Human
ggagucacacagu

SEQ ID NO: 1402530 - RNA, 16 nt, Human
ggagucaaaaauuaaa

SEQ ID NO: 1402531 - RNA, 21 nt, Human
ggagggcggcaggggccugga

SEQ ID NO: 1402532 - RNA, 20 nt, Human
ggagggcggcaggggccugg

SEQ ID NO: 1402533 - RNA, 23 nt, Human
ggagggccacaugggaggcucac

SEQ ID NO: 1402534 - RNA, 19 nt, Human
ggagggccacaugggaggc

SEQ ID NO: 1402535 - RNA, 13 nt, Human
ggaggggaggggg

SEQ ID NO: 1402536 - RNA, 12 nt, Human
ggaggggcagag

SEQ ID NO: 1402537 - RNA, 13 nt, Human
ggaggggcagagc

SEQ ID NO: 1402538 - RNA, 15 nt, Human
ggaggggcagagcca

SEQ ID NO: 1402539 - RNA, 16 nt, Human
ggaggggcagagccag

SEQ ID NO: 1402540 - RNA, 22 nt, Human
ggaggaccugagccugccgagc

SEQ ID NO: 1402541 - RNA, 19 nt, Human
ggaggaccugagccugccg

SEQ ID NO: 1402542 - RNA, 18 nt, Human
ggaggaccugagccugcc

SEQ ID NO: 1402543 - RNA, 17 nt, Human
ggaggaccugagccugc

SEQ ID NO: 1402544 - RNA, 16 nt, Human
ggaggaccugagccug

SEQ ID NO: 1402545 - RNA, 15 nt, Human
ggaggaccugagccu

SEQ ID NO: 1402546 - RNA, 14 nt, Human
ggaggaccugagcc

SEQ ID NO: 1402547 - RNA, 13 nt, Human
ggaggaccugagc

SEQ ID NO: 1402548 - RNA, 18 nt, Human
ggaggacccagggcucug

SEQ ID NO: 1402549 - RNA, 19 nt, Human
ggaggacccagggcucugu

SEQ ID NO: 1402550 - RNA, 15 nt, Human
ggaggacccaggaca

SEQ ID NO: 1402551 - RNA, 14 nt, Human
ggaggacccaggac

SEQ ID NO: 1402552 - RNA, 16 nt, Human
ggaggacccagggcuc

SEQ ID NO: 1402553 - RNA, 15 nt, Human
ggaggacccagggcu

SEQ ID NO: 1402554 - RNA, 16 nt, Human
ggaggacccaggacag

SEQ ID NO: 1402555 - RNA, 22 nt, Human
ggagggauucugguuccagggu

SEQ ID NO: 1402556 - RNA, 17 nt, Human
ggagggauucugguucc

SEQ ID NO: 1402557 - RNA, 14 nt, Human
ggaggcagagaaga

SEQ ID NO: 1402558 - RNA, 15 nt, Human
ggaggcagagaagaa

SEQ ID NO: 1402559 - RNA, 17 nt, Human
ggaggcaggaguuucgu

SEQ ID NO: 1402560 - RNA, 18 nt, Human
ggaggcaggggcuuccug

SEQ ID NO: 1402561 - RNA, 17 nt, Human
ggaggcaggggcuuccu

SEQ ID NO: 1402562 - RNA, 13 nt, Human
ggaggcaggggcu

SEQ ID NO: 1402563 - RNA, 19 nt, Human
ggaggcagagaagaaagaa

SEQ ID NO: 1402564 - RNA, 13 nt, Human
ggaggcagcagga

SEQ ID NO: 1402565 - RNA, 14 nt, Human
ggaggcagcaggac

SEQ ID NO: 1402566 - RNA, 16 nt, Human
ggaggcagcaggacug

SEQ ID NO: 1402567 - RNA, 12 nt, Human
ggagaccaccag

SEQ ID NO: 1402568 - RNA, 19 nt, Human
ggagacaugugacauuuau

SEQ ID NO: 1402569 - RNA, 15 nt, Human
ggagacaugugacau

SEQ ID NO: 1402570 - RNA, 14 nt, Human
ggagacaugugaca

SEQ ID NO: 1402571 - RNA, 22 nt, Human
ggagacauaaccacugcuucca

SEQ ID NO: 1402572 - RNA, 17 nt, Human
ggagcacaaagacccug

SEQ ID NO: 1402573 - RNA, 17 nt, Human
ggagaccccaccagccu

SEQ ID NO: 1402574 - RNA, 21 nt, Human
ggagcacaauaaauggcugua

SEQ ID NO: 1402575 - RNA, 22 nt, Human
ggagcacaaagacccuggcuuu

SEQ ID NO: 1402576 - RNA, 21 nt, Human
ggagcacaaagacccuggcuu

SEQ ID NO: 1402577 - RNA, 20 nt, Human
ggagcacaaagacccuggcu

SEQ ID NO: 1402578 - RNA, 18 nt, Human
ggagcacaaagacccugg

SEQ ID NO: 1402579 - RNA, 16 nt, Human
ggagcccugggaggcu

SEQ ID NO: 1402580 - RNA, 19 nt, Human
ggagcccugggaggcucug

SEQ ID NO: 1402581 - RNA, 17 nt, Human
ggagccgggucugccuc

SEQ ID NO: 1402582 - RNA, 18 nt, Human
ggagccgggucugccucu

SEQ ID NO: 1402583 - RNA, 23 nt, Human
ggagcccugucuccucucucugu

SEQ ID NO: 1402584 - RNA, 22 nt, Human
ggagcacggcucuguccccagc

SEQ ID NO: 1402585 - RNA, 23 nt, Human
ggagcacggcucuguccccagcc

SEQ ID NO: 1402586 - RNA, 18 nt, Human
ggagcccugucuccucuc

SEQ ID NO: 1402587 - RNA, 20 nt, Human
ggagcccugggaggcucugg

SEQ ID NO: 1402588 - RNA, 22 nt, Human
ggagcgagcaugucguggacac

SEQ ID NO: 1402589 - RNA, 21 nt, Human
ggagccugugaacccaggaca

SEQ ID NO: 1402590 - RNA, 22 nt, Human
ggagccugugaacccaggacaa

SEQ ID NO: 1402591 - RNA, 20 nt, Human
ggagccugugaacccaggac

SEQ ID NO: 1402592 - RNA, 19 nt, Human
ggagccugugaacccagga

SEQ ID NO: 1402593 - RNA, 18 nt, Human
ggagccugugaacccagg

SEQ ID NO: 1402594 - RNA, 17 nt, Human
ggagccugugaacccag

SEQ ID NO: 1402595 - RNA, 14 nt, Human
ggagccugugaacc

SEQ ID NO: 1402596 - RNA, 20 nt, Human
ggagccuguccugccugugg

SEQ ID NO: 1402597 - RNA, 16 nt, Human
ggagccuguccugccu

SEQ ID NO: 1402598 - RNA, 14 nt, Human
ggagccuguccugc

SEQ ID NO: 1402599 - RNA, 13 nt, Human
ggagccuguccug

SEQ ID NO: 1402600 - RNA, 11 nt, Human
ggagccugucc

SEQ ID NO: 1402601 - RNA, 10 nt, Human
ggagccuguc

SEQ ID NO: 1402602 - RNA, 18 nt, Human
ggagccucgcaacccgug

SEQ ID NO: 1402603 - RNA, 22 nt, Human
ggagccucgcaacccgugccaa

SEQ ID NO: 1402604 - RNA, 14 nt, Human
ggagcuaccugugu

SEQ ID NO: 1402605 - RNA, 20 nt, Human
ggagcuaaggcucuaugagu

SEQ ID NO: 1402606 - RNA, 15 nt, Human
ggagcuaaggcucua

SEQ ID NO: 1402607 - RNA, 12 nt, Human
ggagcuaaggcu

SEQ ID NO: 1402608 - RNA, 18 nt, Human
ggagcgggucugcuccca

SEQ ID NO: 1402609 - RNA, 20 nt, Human
ggagcgggucugcucccaag

SEQ ID NO: 1402610 - RNA, 14 nt, Human
ggagcgggucugcu

SEQ ID NO: 1402611 - RNA, 20 nt, Human
ggagcggccggccagccccu

SEQ ID NO: 1402612 - RNA, 15 nt, Human
ggagcggcagauggg

SEQ ID NO: 1402613 - RNA, 12 nt, Human
ggagcuauuuuc

SEQ ID NO: 1402614 - RNA, 17 nt, Human
ggagcuccacucugcuu

SEQ ID NO: 1402615 - RNA, 21 nt, Human
ggagcucaggaaccgaggcag

SEQ ID NO: 1402616 - RNA, 23 nt, Human
ggagcuaccuguguggacaggac

SEQ ID NO: 1402617 - RNA, 22 nt, Human
ggagcuaccuguguggacagga

SEQ ID NO: 1402618 - RNA, 19 nt, Human
ggagcuaccuguguggaca

SEQ ID NO: 1402619 - RNA, 14 nt, Human
ggagcuagaauuug

SEQ ID NO: 1402620 - RNA, 22 nt, Human
ggcuccagagggcacucugcuu

SEQ ID NO: 1402621 - RNA, 13 nt, Human
ggcuccagagggc

SEQ ID NO: 1402622 - RNA, 17 nt, Human
ggcucacgccuguaauc

SEQ ID NO: 1402623 - RNA, 18 nt, Human
ggcucaccuugugcuggg

SEQ ID NO: 1402624 - RNA, 22 nt, Human
ggcucacccccuucuccaucca

SEQ ID NO: 1402625 - RNA, 17 nt, Human
ggcucacccccuucucc

SEQ ID NO: 1402626 - RNA, 12 nt, Human
ggcuaugcauuu

SEQ ID NO: 1402627 - RNA, 13 nt, Human
ggcuaugcauuug

SEQ ID NO: 1402628 - RNA, 14 nt, Human
ggcuaugcauuuga

SEQ ID NO: 1402629 - RNA, 13 nt, Human
ggcuagguacaca

SEQ ID NO: 1402630 - RNA, 19 nt, Human
ggcggggguggcggcggcc

SEQ ID NO: 1402631 - RNA, 14 nt, Human
ggcggggguggcgg

SEQ ID NO: 1402632 - RNA, 12 nt, Human
ggcggggguggc

SEQ ID NO: 1402633 - RNA, 16 nt, Human
ggcggggaggaggaaa

SEQ ID NO: 1402634 - RNA, 17 nt, Human
ggcgggcagagggcugg

SEQ ID NO: 1402635 - RNA, 18 nt, Human
ggcgggcagagggcugga

SEQ ID NO: 1402636 - RNA, 19 nt, Human
ggcuagguggguugaaagc

SEQ ID NO: 1402637 - RNA, 20 nt, Human
ggcuagugacuuguguccca

SEQ ID NO: 1402638 - RNA, 23 nt, Human
ggcuagugacuugugucccauga

SEQ ID NO: 1402639 - RNA, 19 nt, Human
ggcgccccaacccguggag

SEQ ID NO: 1402640 - RNA, 23 nt, Human
ggcgccccaacccguggaggcug

SEQ ID NO: 1402641 - RNA, 18 nt, Human
ggcgccccaacccgugga

SEQ ID NO: 1402642 - RNA, 16 nt, Human
ggcgccccaacccgug

SEQ ID NO: 1402643 - RNA, 24 nt, Human
ggcggcuggggucccagcagcugc

SEQ ID NO: 1402644 - RNA, 20 nt, Human
ggcggcuggggucccagcag

SEQ ID NO: 1402645 - RNA, 19 nt, Human
ggcggcuggggucccagca

SEQ ID NO: 1402646 - RNA, 17 nt, Human
ggcucuccuggcuuccc

SEQ ID NO: 1402647 - RNA, 16 nt, Human
ggcucuccuggcuucc

SEQ ID NO: 1402648 - RNA, 13 nt, Human
ggcucuccuggcu

SEQ ID NO: 1402649 - RNA, 14 nt, Human
ggcucuccuggccc

SEQ ID NO: 1402650 - RNA, 12 nt, Human
ggcucuccuggc

SEQ ID NO: 1402651 - RNA, 16 nt, Human
ggcucccccaggggcu

SEQ ID NO: 1402652 - RNA, 22 nt, Human
ggcuccccauguguccugguuc

SEQ ID NO: 1402653 - RNA, 21 nt, Human
ggcuccccauguguccugguu

SEQ ID NO: 1402654 - RNA, 17 nt, Human
ggcuccccauguguccu

SEQ ID NO: 1402655 - RNA, 22 nt, Human
ggcucccaggggcucccuccgc

SEQ ID NO: 1402656 - RNA, 23 nt, Human
ggcucccaggggcucccuccgcc

SEQ ID NO: 1402657 - RNA, 13 nt, Human
ggcucccaggggc

SEQ ID NO: 1402658 - RNA, 17 nt, Human
ggcucccagggacaccu

SEQ ID NO: 1402659 - RNA, 16 nt, Human
ggcuccagagggcacu

SEQ ID NO: 1402660 - RNA, 22 nt, Human
ggcucugaugaaaaauugcuga

SEQ ID NO: 1402661 - RNA, 23 nt, Human
ggcucugaggugccugucccacc

SEQ ID NO: 1402662 - RNA, 20 nt, Human
ggcucugaggugccuguccc

SEQ ID NO: 1402663 - RNA, 19 nt, Human
ggcucugaggugccugucc

SEQ ID NO: 1402664 - RNA, 17 nt, Human
ggcucugaggugccugu

SEQ ID NO: 1402665 - RNA, 14 nt, Human
ggcucugaggcgcc

SEQ ID NO: 1402666 - RNA, 12 nt, Human
ggcucugaggcg

SEQ ID NO: 1402667 - RNA, 15 nt, Human
ggcucugagcgccuc

SEQ ID NO: 1402668 - RNA, 14 nt, Human
ggcucugagcgccu

SEQ ID NO: 1402669 - RNA, 22 nt, Human
ggcucugagagucuagauucuc

SEQ ID NO: 1402670 - RNA, 20 nt, Human
ggcucugagagucuagauuc

SEQ ID NO: 1402671 - RNA, 18 nt, Human
ggcucugagagucuagau

SEQ ID NO: 1402672 - RNA, 15 nt, Human
ggcucugagagucua

SEQ ID NO: 1402673 - RNA, 20 nt, Human
ggcucugccaguccuguccu

SEQ ID NO: 1402674 - RNA, 17 nt, Human
ggcucugccaguccugu

SEQ ID NO: 1402675 - RNA, 16 nt, Human
ggcucugccaguccug

SEQ ID NO: 1402676 - RNA, 12 nt, Human
ggcucugccagu

SEQ ID NO: 1402677 - RNA, 20 nt, Human
ggcucugcaauuccccucug

SEQ ID NO: 1402678 - RNA, 19 nt, Human
ggcucugcaauuccccucu

SEQ ID NO: 1402679 - RNA, 16 nt, Human
ggcucuggagcccacu

SEQ ID NO: 1402680 - RNA, 17 nt, Human
ggcucuggagcccacug

SEQ ID NO: 1402681 - RNA, 19 nt, Human
ggcucuggagcccacugua

SEQ ID NO: 1402682 - RNA, 20 nt, Human
ggccucugcgagugguuucu

SEQ ID NO: 1402683 - RNA, 20 nt, Human
ggccugaccaaacagccaac

SEQ ID NO: 1402684 - RNA, 19 nt, Human
ggccugagcaguccuuggc

SEQ ID NO: 1402685 - RNA, 17 nt, Human
ggccugggcaggaggga

SEQ ID NO: 1402686 - RNA, 15 nt, Human
ggccugggcaggagg

SEQ ID NO: 1402687 - RNA, 17 nt, Human
ggccugagcaguccuug

SEQ ID NO: 1402688 - RNA, 15 nt, Human
ggccugggccgcugc

SEQ ID NO: 1402689 - RNA, 18 nt, Human
ggccugggcaguggaugg

SEQ ID NO: 1402690 - RNA, 19 nt, Human
ggccugggcaggagggagg

SEQ ID NO: 1402691 - RNA, 14 nt, Human
ggccugggcuccug

SEQ ID NO: 1402692 - RNA, 16 nt, Human
ggccugggcuccugga

SEQ ID NO: 1402693 - RNA, 12 nt, Human
ggcgcacuguga

SEQ ID NO: 1402694 - RNA, 15 nt, Human
ggccuguacugccug

SEQ ID NO: 1402695 - RNA, 16 nt, Human
ggccuguacugccugc

SEQ ID NO: 1402696 - RNA, 14 nt, Human
ggccuguacugccu

SEQ ID NO: 1402697 - RNA, 23 nt, Human
ggccugguuaaauaaggcagggu

SEQ ID NO: 1402698 - RNA, 22 nt, Human
ggccugguuaaauaaggcaggg

SEQ ID NO: 1402699 - RNA, 21 nt, Human
ggccugguuaaauaaggcagg

SEQ ID NO: 1402700 - RNA, 23 nt, Human
ggccuggucucacccuggaggca

SEQ ID NO: 1402701 - RNA, 19 nt, Human
ggccuggucucacccugga

SEQ ID NO: 1402702 - RNA, 14 nt, Human
ggccuggucccugu

SEQ ID NO: 1402703 - RNA, 11 nt, Human
ggccugguccc

SEQ ID NO: 1402704 - RNA, 21 nt, Human
ggccuggggugacccggcacc

SEQ ID NO: 1402705 - RNA, 19 nt, Human
ggccuggggugacccggca

SEQ ID NO: 1402706 - RNA, 18 nt, Human
ggccuggggugacccggc

SEQ ID NO: 1402707 - RNA, 15 nt, Human
ggccuggggugaccc

SEQ ID NO: 1402708 - RNA, 11 nt, Human
ggccuggggug

SEQ ID NO: 1402709 - RNA, 14 nt, Human
ggcgcaggccguga

SEQ ID NO: 1402710 - RNA, 11 nt, Human
ggcgcaggagg

SEQ ID NO: 1402711 - RNA, 23 nt, Human
ggccucucuauccucucuuccuc

SEQ ID NO: 1402712 - RNA, 14 nt, Human
ggccucucucuagg

SEQ ID NO: 1402713 - RNA, 22 nt, Human
ggccucucuauccucucuuccu

SEQ ID NO: 1402714 - RNA, 13 nt, Human
ggccucucuaucc

SEQ ID NO: 1402715 - RNA, 20 nt, Human
ggccucucccuccuccagga

SEQ ID NO: 1402716 - RNA, 23 nt, Human
ggccucucccuccuccaggaagc

SEQ ID NO: 1402717 - RNA, 14 nt, Human
ggccuccuucugag

SEQ ID NO: 1402718 - RNA, 22 nt, Human
ggccuccuucugagcuccuguc

SEQ ID NO: 1402719 - RNA, 15 nt, Human
ggccuccugccucua

SEQ ID NO: 1402720 - RNA, 14 nt, Human
ggccuccugccucu

SEQ ID NO: 1402721 - RNA, 13 nt, Human
ggccuccugccuc

SEQ ID NO: 1402722 - RNA, 23 nt, Human
ggccuagcauacguacacauuuu

SEQ ID NO: 1402723 - RNA, 22 nt, Human
ggccuagcauacguacacauuu

SEQ ID NO: 1402724 - RNA, 14 nt, Human
ggccuagaccagca

SEQ ID NO: 1402725 - RNA, 13 nt, Human
ggccuagaccagc

SEQ ID NO: 1402726 - RNA, 20 nt, Human
ggccuagcauacguacacau

SEQ ID NO: 1402727 - RNA, 17 nt, Human
ggcccagagcccagcuc

SEQ ID NO: 1402728 - RNA, 16 nt, Human
ggcccagagcccagcu

SEQ ID NO: 1402729 - RNA, 15 nt, Human
ggcccagagcccagc

SEQ ID NO: 1402730 - RNA, 14 nt, Human
ggcccagagcccag

SEQ ID NO: 1402731 - RNA, 13 nt, Human
ggcccagagccca

SEQ ID NO: 1402732 - RNA, 12 nt, Human
ggcccagagccc

SEQ ID NO: 1402733 - RNA, 19 nt, Human
ggcccagagcccagcucca

SEQ ID NO: 1402734 - RNA, 18 nt, Human
ggcccagagcccagcucc

SEQ ID NO: 1402735 - RNA, 15 nt, Human
ggccguggcugcugu

SEQ ID NO: 1402736 - RNA, 14 nt, Human
ggccguggcugcug

SEQ ID NO: 1402737 - RNA, 13 nt, Human
ggccguggcugcu

SEQ ID NO: 1402738 - RNA, 21 nt, Human
ggccuaaccugccgagagucc

SEQ ID NO: 1402739 - RNA, 16 nt, Human
ggccuaaccugccgag

SEQ ID NO: 1402740 - RNA, 15 nt, Human
ggccuaaccugccga

SEQ ID NO: 1402741 - RNA, 22 nt, Human
ggccggcuucaugccagcuacu

SEQ ID NO: 1402742 - RNA, 21 nt, Human
ggccggggaacuggccaagcu

SEQ ID NO: 1402743 - RNA, 20 nt, Human
ggccggggaacuggccaagc

SEQ ID NO: 1402744 - RNA, 19 nt, Human
ggccggggaacuggccaag

SEQ ID NO: 1402745 - RNA, 18 nt, Human
ggccggggaacuggccaa

SEQ ID NO: 1402746 - RNA, 19 nt, Human
ggccggcuugccacacccc

SEQ ID NO: 1402747 - RNA, 18 nt, Human
ggcugaggcuggcacagg

SEQ ID NO: 1402748 - RNA, 17 nt, Human
ggcugaggcuggcacag

SEQ ID NO: 1402749 - RNA, 14 nt, Human
ggcugaggcuggca

SEQ ID NO: 1402750 - RNA, 16 nt, Human
ggcugaggccuggacu

SEQ ID NO: 1402751 - RNA, 14 nt, Human
ggcugaggccugga

SEQ ID NO: 1402752 - RNA, 13 nt, Human
ggcugaggagcag

SEQ ID NO: 1402753 - RNA, 16 nt, Human
ggcucuguccccagcc

SEQ ID NO: 1402754 - RNA, 14 nt, Human
ggcucuguccccag

SEQ ID NO: 1402755 - RNA, 16 nt, Human
ggcuccccaguacacc

SEQ ID NO: 1402756 - RNA, 14 nt, Human
ggcugagcugccca

SEQ ID NO: 1402757 - RNA, 20 nt, Human
ggcugagcugcccacagcag

SEQ ID NO: 1402758 - RNA, 23 nt, Human
ggcucuggagcccacuguacuug

SEQ ID NO: 1402759 - RNA, 13 nt, Human
ggcugaggccacc

SEQ ID NO: 1402760 - RNA, 15 nt, Human
ggcugagggagccug

SEQ ID NO: 1402761 - RNA, 19 nt, Human
ggcuggaggcccaggcugg

SEQ ID NO: 1402762 - RNA, 15 nt, Human
ggcuggaggcccagg

SEQ ID NO: 1402763 - RNA, 14 nt, Human
ggcuggaggcccag

SEQ ID NO: 1402764 - RNA, 13 nt, Human
ggcuggaggccca

SEQ ID NO: 1402765 - RNA, 16 nt, Human
ggcuggaggagcccag

SEQ ID NO: 1402766 - RNA, 17 nt, Human
ggcuggaggagcccagg

SEQ ID NO: 1402767 - RNA, 15 nt, Human
ggcuggaggagccca

SEQ ID NO: 1402768 - RNA, 14 nt, Human
ggcuggaggagccc

SEQ ID NO: 1402769 - RNA, 11 nt, Human
ggcuggaggag

SEQ ID NO: 1402770 - RNA, 18 nt, Human
ggcuggagcuagaauuug

SEQ ID NO: 1402771 - RNA, 23 nt, Human
ggcugggaguaguugucuuuccu

SEQ ID NO: 1402772 - RNA, 21 nt, Human
ggcugggaggagggcaggcau

SEQ ID NO: 1402773 - RNA, 20 nt, Human
ggcugggaggagggcaggca

SEQ ID NO: 1402774 - RNA, 13 nt, Human
ggcugggaggagg

SEQ ID NO: 1402775 - RNA, 20 nt, Human
ggcuggagugcaguggugca

SEQ ID NO: 1402776 - RNA, 23 nt, Human
ggcuggaguuagggacugaccag

SEQ ID NO: 1402777 - RNA, 20 nt, Human
ggcuggagugcaguggugug

SEQ ID NO: 1402778 - RNA, 20 nt, Human
ggcuggagugcaguggcgcg

SEQ ID NO: 1402779 - RNA, 17 nt, Human
ggcugucccggaggcgg

SEQ ID NO: 1402780 - RNA, 22 nt, Human
ggcuguccuguacauuguggga

SEQ ID NO: 1402781 - RNA, 13 nt, Human
ggcuguccuguac

SEQ ID NO: 1402782 - RNA, 15 nt, Human
ggcugucccggaggc

SEQ ID NO: 1402783 - RNA, 14 nt, Human
ggcugucugaggcu

SEQ ID NO: 1402784 - RNA, 17 nt, Human
ggcugucuguuguauuc

SEQ ID NO: 1402785 - RNA, 23 nt, Human
ggcuguggaccauggaguggcag

SEQ ID NO: 1402786 - RNA, 17 nt, Human
ggcuguggaccauggag

SEQ ID NO: 1402787 - RNA, 15 nt, Human
ggcuguggucacagc

SEQ ID NO: 1402788 - RNA, 23 nt, Human
ggcuguggcauccagagucccug

SEQ ID NO: 1402789 - RNA, 21 nt, Human
ggcuguggcauccagaguccc

SEQ ID NO: 1402790 - RNA, 18 nt, Human
ggcuguguuuccaucuca

SEQ ID NO: 1402791 - RNA, 11 nt, Human
ggcugugugug

SEQ ID NO: 1402792 - RNA, 22 nt, Human
ggcuguguaagauuuguuuuua

SEQ ID NO: 1402793 - RNA, 20 nt, Human
ggcuguguaagauuuguuuu

SEQ ID NO: 1402794 - RNA, 18 nt, Human
ggcuugggccuaggcugc

SEQ ID NO: 1402795 - RNA, 16 nt, Human
ggcuugggccuaggcu

SEQ ID NO: 1402796 - RNA, 13 nt, Human
ggcuugggccuag

SEQ ID NO: 1402797 - RNA, 17 nt, Human
ggcuugggauuugcugu

SEQ ID NO: 1402798 - RNA, 12 nt, Human
ggcuugggauuu

SEQ ID NO: 1402799 - RNA, 18 nt, Human
ggcuuggccacagccagg

SEQ ID NO: 1402800 - RNA, 19 nt, Human
ggcuuggccacagccaggg

SEQ ID NO: 1402801 - RNA, 17 nt, Human
ggcuuggccacagccag

SEQ ID NO: 1402802 - RNA, 15 nt, Human
ggcuugccugcaggc

SEQ ID NO: 1402803 - RNA, 14 nt, Human
ggcuugccugcagg

SEQ ID NO: 1402804 - RNA, 15 nt, Human
ggcuugcuauucugu

SEQ ID NO: 1402805 - RNA, 14 nt, Human
ggcuugccacaccc

SEQ ID NO: 1402806 - RNA, 13 nt, Human
ggcuugccugcag

SEQ ID NO: 1402807 - RNA, 15 nt, Human
ggcuugccacacccc

SEQ ID NO: 1402808 - RNA, 15 nt, Human
gggagcccccagccu

SEQ ID NO: 1402809 - RNA, 13 nt, Human
gggagcccccagc

SEQ ID NO: 1402810 - RNA, 21 nt, Human
gggagcccacuguccugggcc

SEQ ID NO: 1402811 - RNA, 20 nt, Human
gggagcccacuguccugggc

SEQ ID NO: 1402812 - RNA, 12 nt, Human
gggacugagaga

SEQ ID NO: 1402813 - RNA, 23 nt, Human
gggacugagagaugcagaaauau

SEQ ID NO: 1402814 - RNA, 19 nt, Human
gggagcccacuguccuggg

SEQ ID NO: 1402815 - RNA, 11 nt, Human
gggacugagag

SEQ ID NO: 1402816 - RNA, 19 nt, Human
gggacguggcucagccagc

SEQ ID NO: 1402817 - RNA, 18 nt, Human
gggacguggcucagccag

SEQ ID NO: 1402818 - RNA, 14 nt, Human
gggacguggcucag

SEQ ID NO: 1402819 - RNA, 15 nt, Human
gggacugagaaauuu

SEQ ID NO: 1402820 - RNA, 23 nt, Human
gggaccaggaguggguggggagu

SEQ ID NO: 1402821 - RNA, 13 nt, Human
gggaccuggaagg

SEQ ID NO: 1402822 - RNA, 21 nt, Human
gggaccugguacccuccuggc

SEQ ID NO: 1402823 - RNA, 18 nt, Human
gggaccugguacccuccu

SEQ ID NO: 1402824 - RNA, 17 nt, Human
gggacggugcccaagcc

SEQ ID NO: 1402825 - RNA, 22 nt, Human
gggacgccugggggugccagga

SEQ ID NO: 1402826 - RNA, 21 nt, Human
gggacgccugggggugccagg

SEQ ID NO: 1402827 - RNA, 14 nt, Human
gggaccaggcacca

SEQ ID NO: 1402828 - RNA, 19 nt, Human
gggaccaggaguggguggg

SEQ ID NO: 1402829 - RNA, 14 nt, Human
gggacaccuaggcu

SEQ ID NO: 1402830 - RNA, 22 nt, Human
gggacaaguggacucagggcag

SEQ ID NO: 1402831 - RNA, 14 nt, Human
gggaauugaggaca

SEQ ID NO: 1402832 - RNA, 11 nt, Human
gggaaugugaa

SEQ ID NO: 1402833 - RNA, 14 nt, Human
gggaaucagaacuc

SEQ ID NO: 1402834 - RNA, 18 nt, Human
gggaauauuugaaucuug

SEQ ID NO: 1402835 - RNA, 22 nt, Human
gggaauaugagugcguggugcg

SEQ ID NO: 1402836 - RNA, 13 nt, Human
gggaauauuugaa

SEQ ID NO: 1402837 - RNA, 14 nt, Human
gggaauauuugaau

SEQ ID NO: 1402838 - RNA, 19 nt, Human
ggcuuuuauuaaugcacuu

SEQ ID NO: 1402839 - RNA, 20 nt, Human
ggcuuuuauuaaugcacuuu

SEQ ID NO: 1402840 - RNA, 23 nt, Human
gggaagugaagacuggaagcuaa

SEQ ID NO: 1402841 - RNA, 16 nt, Human
ggcuuugauguuccuu

SEQ ID NO: 1402842 - RNA, 17 nt, Human
ggcuugggccuaggcug

SEQ ID NO: 1402843 - RNA, 12 nt, Human
ggcuuuggauuu

SEQ ID NO: 1402844 - RNA, 22 nt, Human
gggagcgggucugcucccaagg

SEQ ID NO: 1402845 - RNA, 22 nt, Human
gggagcucaggaaccgaggcag

SEQ ID NO: 1402846 - RNA, 12 nt, Human
gggagcucagga

SEQ ID NO: 1402847 - RNA, 23 nt, Human
gggagcuccacucugcuucucug

SEQ ID NO: 1402848 - RNA, 19 nt, Human
gggagcuccacucugcuuc

SEQ ID NO: 1402849 - RNA, 23 nt, Human
gggagcucaggaaccgaggcagg

SEQ ID NO: 1402850 - RNA, 21 nt, Human
gggagccucgcaacccgugcc

SEQ ID NO: 1402851 - RNA, 19 nt, Human
gggagccccuucugcucag

SEQ ID NO: 1402852 - RNA, 21 nt, Human
gggagcccccagccugucaga

SEQ ID NO: 1402853 - RNA, 17 nt, Human
gggagcccccagccugu

SEQ ID NO: 1402854 - RNA, 16 nt, Human
gggagcccccagccug

SEQ ID NO: 1402855 - RNA, 13 nt, Human
gggagccgggagc

SEQ ID NO: 1402856 - RNA, 19 nt, Human
gggagcugguuagaaaugc

SEQ ID NO: 1402857 - RNA, 14 nt, Human
gggagcugggcuuc

SEQ ID NO: 1402858 - RNA, 18 nt, Human
gggagcugggccuggucu

SEQ ID NO: 1402859 - RNA, 17 nt, Human
gggagcugggccugguc

SEQ ID NO: 1402860 - RNA, 16 nt, Human
gggagcugggccuggu

SEQ ID NO: 1402861 - RNA, 15 nt, Human
gggagcugggccugg

SEQ ID NO: 1402862 - RNA, 14 nt, Human
gggagcugggccug

SEQ ID NO: 1402863 - RNA, 12 nt, Human
gggagcugaggc

SEQ ID NO: 1402864 - RNA, 17 nt, Human
gggagucugccagggcc

SEQ ID NO: 1402865 - RNA, 14 nt, Human
gggagucugccagg

SEQ ID NO: 1402866 - RNA, 16 nt, Human
gggaggagggcaggca

SEQ ID NO: 1402867 - RNA, 12 nt, Human
gggaggagggca

SEQ ID NO: 1402868 - RNA, 14 nt, Human
gggaggagaaugag

SEQ ID NO: 1402869 - RNA, 15 nt, Human
gggaggaggcagaga

SEQ ID NO: 1402870 - RNA, 17 nt, Human
ucagggccaugcugagg

SEQ ID NO: 1402871 - RNA, 14 nt, Human
ucagggccaugcug

SEQ ID NO: 1402872 - RNA, 13 nt, Human
ucagggccaugcu

SEQ ID NO: 1402873 - RNA, 17 nt, Human
ucagggccaggccucuc

SEQ ID NO: 1402874 - RNA, 13 nt, Human
ucagggccaggcc

SEQ ID NO: 1402875 - RNA, 19 nt, Human
ucagggcagcgccaggcug

SEQ ID NO: 1402876 - RNA, 15 nt, Human
ucagggcagcgccag

SEQ ID NO: 1402877 - RNA, 22 nt, Human
ucagggcaaagccaggucccuc

SEQ ID NO: 1402878 - RNA, 21 nt, Human
ucagggcaaagccaggucccu

SEQ ID NO: 1402879 - RNA, 20 nt, Human
ucagggcaaagccagguccc

SEQ ID NO: 1402880 - RNA, 16 nt, Human
ucagggcaaagccagg

SEQ ID NO: 1402881 - RNA, 15 nt, Human
ucagggcaaagccag

SEQ ID NO: 1402882 - RNA, 19 nt, Human
ucagggaguguucccuauc

SEQ ID NO: 1402883 - RNA, 22 nt, Human
ucagggaggcccugugccccuu

SEQ ID NO: 1402884 - RNA, 19 nt, Human
ucagggaggcccugugccc

SEQ ID NO: 1402885 - RNA, 15 nt, Human
ucagggaggucauuu

SEQ ID NO: 1402886 - RNA, 21 nt, Human
ucagggagugggcuaagcacg

SEQ ID NO: 1402887 - RNA, 15 nt, Human
ucagggaggcccugu

SEQ ID NO: 1402888 - RNA, 18 nt, Human
ucagggaaagugggacag

SEQ ID NO: 1402889 - RNA, 23 nt, Human
ucagggccaugcugaggccuggg

SEQ ID NO: 1402890 - RNA, 21 nt, Human
ucagggccaugcugaggccug

SEQ ID NO: 1402891 - RNA, 19 nt, Human
ucagggccaugcugaggcc

SEQ ID NO: 1402892 - RNA, 18 nt, Human
ucagggccaugcugaggc

SEQ ID NO: 1402893 - RNA, 18 nt, Human
ucaggcacugggcaugag

SEQ ID NO: 1402894 - RNA, 14 nt, Human
ucaggcacacagcu

SEQ ID NO: 1402895 - RNA, 13 nt, Human
ucaggcacacagc

SEQ ID NO: 1402896 - RNA, 23 nt, Human
ucaggauugcgagagaugugugu

SEQ ID NO: 1402897 - RNA, 22 nt, Human
ucaggauugcgagagaugugug

SEQ ID NO: 1402898 - RNA, 21 nt, Human
ucaggauugcgagagaugugu

SEQ ID NO: 1402899 - RNA, 20 nt, Human
ucaggauugcgagagaugug

SEQ ID NO: 1402900 - RNA, 18 nt, Human
ucaggauugcgagagaug

SEQ ID NO: 1402901 - RNA, 17 nt, Human
ucaggcuagauguaugu

SEQ ID NO: 1402902 - RNA, 12 nt, Human
ucagcugccagu

SEQ ID NO: 1402903 - RNA, 18 nt, Human
ucagcugcauuccgcagc

SEQ ID NO: 1402904 - RNA, 22 nt, Human
ucagcugcaagguacucuggug

SEQ ID NO: 1402905 - RNA, 21 nt, Human
ucagcugcaagguacucuggu

SEQ ID NO: 1402906 - RNA, 20 nt, Human
ucagcugcaagguacucugg

SEQ ID NO: 1402907 - RNA, 19 nt, Human
ucaggagcccugggaggcu

SEQ ID NO: 1402908 - RNA, 18 nt, Human
ucaggagcccugggaggc

SEQ ID NO: 1402909 - RNA, 15 nt, Human
ucaggauugcgagag

SEQ ID NO: 1402910 - RNA, 13 nt, Human
ucaggauugcgag

SEQ ID NO: 1402911 - RNA, 14 nt, Human
ucaggagccuguga

SEQ ID NO: 1402912 - RNA, 20 nt, Human
ucagcugcauuccgcagccc

SEQ ID NO: 1402913 - RNA, 20 nt, Human
ucaggagcccugggaggcuc

SEQ ID NO: 1402914 - RNA, 23 nt, Human
ucaggagcccugggaggcucugg

SEQ ID NO: 1402915 - RNA, 20 nt, Human
ucagcucccacaagccucug

SEQ ID NO: 1402916 - RNA, 18 nt, Human
ucagccuggccagacaca

SEQ ID NO: 1402917 - RNA, 17 nt, Human
ucagccuggccagacac

SEQ ID NO: 1402918 - RNA, 16 nt, Human
ucagccuggccagaca

SEQ ID NO: 1402919 - RNA, 15 nt, Human
ucagccuggccagac

SEQ ID NO: 1402920 - RNA, 14 nt, Human
ucagccuggccaga

SEQ ID NO: 1402921 - RNA, 12 nt, Human
ucagccuggcca

SEQ ID NO: 1402922 - RNA, 16 nt, Human
ucagccucccaaagug

SEQ ID NO: 1402923 - RNA, 20 nt, Human
ucagccuccugaguagcugg

SEQ ID NO: 1402924 - RNA, 20 nt, Human
ucagccucccgaguagcugg

SEQ ID NO: 1402925 - RNA, 22 nt, Human
ucagauaucuuggacaaaucac

SEQ ID NO: 1402926 - RNA, 21 nt, Human
ucagauaucuuggacaaauca

SEQ ID NO: 1402927 - RNA, 21 nt, Human
ucagcaugucuauucagcuuc

SEQ ID NO: 1402928 - RNA, 19 nt, Human
ucagcaugucuauucagcu

SEQ ID NO: 1402929 - RNA, 16 nt, Human
ucagcaugucuauuca

SEQ ID NO: 1402930 - RNA, 12 nt, Human
ucagcaugucua

SEQ ID NO: 1402931 - RNA, 15 nt, Human
ucagcaugcaauaca

SEQ ID NO: 1402932 - RNA, 19 nt, Human
ucagcaugaauuuguaaug

SEQ ID NO: 1402933 - RNA, 18 nt, Human
ucagcaugaauuuguaau

SEQ ID NO: 1402934 - RNA, 17 nt, Human
ucagcaugaauuuguaa

SEQ ID NO: 1402935 - RNA, 15 nt, Human
ucagcaugaauuugu

SEQ ID NO: 1402936 - RNA, 14 nt, Human
ucagcaugaauuug

SEQ ID NO: 1402937 - RNA, 23 nt, Human
ucagauaucuuggacaaaucaca

SEQ ID NO: 1402938 - RNA, 13 nt, Human
ucagcaugaauuu

SEQ ID NO: 1402939 - RNA, 16 nt, Human
ucagauaugauucaaa

SEQ ID NO: 1402940 - RNA, 15 nt, Human
ucagauaugauucaa

SEQ ID NO: 1402941 - RNA, 20 nt, Human
ucacuguagaaugauuucau

SEQ ID NO: 1402942 - RNA, 20 nt, Human
ucacugguagaccaaaauaa

SEQ ID NO: 1402943 - RNA, 19 nt, Human
ucacugguagaccaaaaua

SEQ ID NO: 1402944 - RNA, 18 nt, Human
ucacugguagaccaaaau

SEQ ID NO: 1402945 - RNA, 16 nt, Human
ucacuggagcacaaua

SEQ ID NO: 1402946 - RNA, 15 nt, Human
ucacuggagcacaau

SEQ ID NO: 1402947 - RNA, 14 nt, Human
ucacuggagcacaa

SEQ ID NO: 1402948 - RNA, 13 nt, Human
ucacuggagcaca

SEQ ID NO: 1402949 - RNA, 11 nt, Human
ucacuggagca

SEQ ID NO: 1402950 - RNA, 18 nt, Human
ucacuggaccacugggca

SEQ ID NO: 1402951 - RNA, 14 nt, Human
ucacugcucacacu

SEQ ID NO: 1402952 - RNA, 14 nt, Human
ucacugcuuaacuu

SEQ ID NO: 1402953 - RNA, 23 nt, Human
ucaccccuaaaagaaacccugca

SEQ ID NO: 1402954 - RNA, 20 nt, Human
ucacucuguucauuccucca

SEQ ID NO: 1402955 - RNA, 21 nt, Human
ucacucuguucauuccuccag

SEQ ID NO: 1402956 - RNA, 20 nt, Human
ucacucuuaugcuguaccca

SEQ ID NO: 1402957 - RNA, 15 nt, Human
ucacucuuaugcugu

SEQ ID NO: 1402958 - RNA, 22 nt, Human
ucacucuguucauuccuccagg

SEQ ID NO: 1402959 - RNA, 18 nt, Human
ucagacagaaccccuaca

SEQ ID NO: 1402960 - RNA, 23 nt, Human
ucagaauuuuauacuuucccuac

SEQ ID NO: 1402961 - RNA, 22 nt, Human
ucagaauuuuauacuuucccua

SEQ ID NO: 1402962 - RNA, 21 nt, Human
ucagaauuuuauacuuucccu

SEQ ID NO: 1402963 - RNA, 20 nt, Human
ucagaauuuuauacuuuccc

SEQ ID NO: 1402964 - RNA, 21 nt, Human
ucagaauuuaguguauccaua

SEQ ID NO: 1402965 - RNA, 14 nt, Human
ucagaauuuagugu

SEQ ID NO: 1402966 - RNA, 15 nt, Human
ucagaaauguguuau

SEQ ID NO: 1402967 - RNA, 23 nt, Human
ucagaauucucuaguuugauuaa

SEQ ID NO: 1402968 - RNA, 15 nt, Human
ucagaaaccagacuc

SEQ ID NO: 1402969 - RNA, 10 nt, Human
ucagaaaugu

SEQ ID NO: 1402970 - RNA, 21 nt, Human
ucacuuuacacaauagaauua

SEQ ID NO: 1402971 - RNA, 20 nt, Human
ucacuuguuuuauuuaaccu

SEQ ID NO: 1402972 - RNA, 19 nt, Human
ucagaaacacccucacacu

SEQ ID NO: 1402973 - RNA, 21 nt, Human
ucagaaacacccucacacugg

SEQ ID NO: 1402974 - RNA, 22 nt, Human
ucagaaacacccucacacuggg

SEQ ID NO: 1402975 - RNA, 14 nt, Human
ucagacuguuuagu

SEQ ID NO: 1402976 - RNA, 16 nt, Human
ucagacgccugaggaa

SEQ ID NO: 1402977 - RNA, 17 nt, Human
ucagacgccugaggaac

SEQ ID NO: 1402978 - RNA, 12 nt, Human
ucagacccugga

SEQ ID NO: 1402979 - RNA, 14 nt, Human
ucagacccuggagg

SEQ ID NO: 1402980 - RNA, 23 nt, Human
ucagaccauaauguuacauuauu

SEQ ID NO: 1402981 - RNA, 15 nt, Human
ucagaccauaauguu

SEQ ID NO: 1402982 - RNA, 22 nt, Human
ucagacagagaggacuguaggg

SEQ ID NO: 1402983 - RNA, 17 nt, Human
ucagacagagaggacug

SEQ ID NO: 1402984 - RNA, 14 nt, Human
ucagagaaggaaca

SEQ ID NO: 1402985 - RNA, 13 nt, Human
ucagacuggggca

SEQ ID NO: 1402986 - RNA, 12 nt, Human
ucagagaauuuc

SEQ ID NO: 1402987 - RNA, 19 nt, Human
ucagaggguguccugcacc

SEQ ID NO: 1402988 - RNA, 21 nt, Human
ucagaguaauccaagcaaaug

SEQ ID NO: 1402989 - RNA, 22 nt, Human
ucagaguaauccaagcaaaugu

SEQ ID NO: 1402990 - RNA, 15 nt, Human
uccacacugcacaau

SEQ ID NO: 1402991 - RNA, 13 nt, Human
uccacacugcaca

SEQ ID NO: 1402992 - RNA, 22 nt, Human
uccaaaauguuggucauuuuau

SEQ ID NO: 1402993 - RNA, 15 nt, Human
uccaaaaugugccua

SEQ ID NO: 1402994 - RNA, 18 nt, Human
uccaaaaucuugaucagu

SEQ ID NO: 1402995 - RNA, 21 nt, Human
ucauuucuauuucuccuccau

SEQ ID NO: 1402996 - RNA, 17 nt, Human
ucauuucuauuucuccu

SEQ ID NO: 1402997 - RNA, 20 nt, Human
uccaaaauaaaacuuuuuaa

SEQ ID NO: 1402998 - RNA, 18 nt, Human
uccaaaauaaaacuuuuu

SEQ ID NO: 1402999 - RNA, 18 nt, Human
uccaauuuucuggaauac

SEQ ID NO: 1403000 - RNA, 14 nt, Human
uccaauuuucugga

SEQ ID NO: 1403001 - RNA, 16 nt, Human
uccaaaaugugccuau

SEQ ID NO: 1403002 - RNA, 23 nt, Human
uccaccugguacucccucucagg

SEQ ID NO: 1403003 - RNA, 21 nt, Human
uccaccugguacucccucuca

SEQ ID NO: 1403004 - RNA, 20 nt, Human
uccaccugguacucccucuc

SEQ ID NO: 1403005 - RNA, 22 nt, Human
uccaccccuuucuagaccaaua

SEQ ID NO: 1403006 - RNA, 21 nt, Human
uccaccccuuucuagaccaau

SEQ ID NO: 1403007 - RNA, 17 nt, Human
uccacagcaaccccagg

SEQ ID NO: 1403008 - RNA, 19 nt, Human
uccacagaggacacagaga

SEQ ID NO: 1403009 - RNA, 17 nt, Human
uccacagaggacacaga

SEQ ID NO: 1403010 - RNA, 15 nt, Human
uccacagaggacaca

SEQ ID NO: 1403011 - RNA, 22 nt, Human
uccacagacggaaggguaaaca

SEQ ID NO: 1403012 - RNA, 23 nt, Human
uccacagacggaaggguaaacaa

SEQ ID NO: 1403013 - RNA, 10 nt, Human
uccacagacg

SEQ ID NO: 1403014 - RNA, 14 nt, Human
uccacacugcacaa

SEQ ID NO: 1403015 - RNA, 19 nt, Human
uccacagaagcuccaggua

SEQ ID NO: 1403016 - RNA, 15 nt, Human
uccaccuucccacuu

SEQ ID NO: 1403017 - RNA, 12 nt, Human
uccaccuuccca

SEQ ID NO: 1403018 - RNA, 24 nt, Human
uccagccaucaagagacugaguca

SEQ ID NO: 1403019 - RNA, 21 nt, Human
uccagccaucaagagacugag

SEQ ID NO: 1403020 - RNA, 20 nt, Human
uccagccaucaagagacuga

SEQ ID NO: 1403021 - RNA, 19 nt, Human
uccagccaucaagagacug

SEQ ID NO: 1403022 - RNA, 20 nt, Human
uccagcuguugagccccucc

SEQ ID NO: 1403023 - RNA, 21 nt, Human
uccagcuguccccccacuccc

SEQ ID NO: 1403024 - RNA, 17 nt, Human
uccagcuguccccccac

SEQ ID NO: 1403025 - RNA, 16 nt, Human
uccagcugucccccca

SEQ ID NO: 1403026 - RNA, 14 nt, Human
uccagcuguccccc

SEQ ID NO: 1403027 - RNA, 16 nt, Human
uccagguguuacugua

SEQ ID NO: 1403028 - RNA, 17 nt, Human
uccagcuuuccuguauu

SEQ ID NO: 1403029 - RNA, 18 nt, Human
uccagggucccucugugu

SEQ ID NO: 1403030 - RNA, 17 nt, Human
uccagggucccucugug

SEQ ID NO: 1403031 - RNA, 16 nt, Human
uccagggucccucugu

SEQ ID NO: 1403032 - RNA, 14 nt, Human
uccaggguggcagc

SEQ ID NO: 1403033 - RNA, 15 nt, Human
uccaggguggcagca

SEQ ID NO: 1403034 - RNA, 18 nt, Human
uccaggguggcagcaaca

SEQ ID NO: 1403035 - RNA, 20 nt, Human
uccaggguggcagcaacaau

SEQ ID NO: 1403036 - RNA, 19 nt, Human
ucaucagaaaggaaaaaca

SEQ ID NO: 1403037 - RNA, 21 nt, Human
ucaucacuuugaccuaaauua

SEQ ID NO: 1403038 - RNA, 14 nt, Human
ucaucacacugggu

SEQ ID NO: 1403039 - RNA, 16 nt, Human
ucaucagaaaggaaaa

SEQ ID NO: 1403040 - RNA, 19 nt, Human
ucaucaggacccuggaccu

SEQ ID NO: 1403041 - RNA, 16 nt, Human
ucaucuucuucaccau

SEQ ID NO: 1403042 - RNA, 20 nt, Human
ucaucuucaguugucucuga

SEQ ID NO: 1403043 - RNA, 18 nt, Human
ucaucuucaguugucucu

SEQ ID NO: 1403044 - RNA, 14 nt, Human
ucagggcuccuggg

SEQ ID NO: 1403045 - RNA, 14 nt, Human
ucauagcccaguag

SEQ ID NO: 1403046 - RNA, 22 nt, Human
ucauagcccaguagaccuuguu

SEQ ID NO: 1403047 - RNA, 14 nt, Human
ucauagcuaaaaaa

SEQ ID NO: 1403048 - RNA, 13 nt, Human
ucauuucuauuuc

SEQ ID NO: 1403049 - RNA, 13 nt, Human
ucauuuccucaaa

SEQ ID NO: 1403050 - RNA, 15 nt, Human
ucauuucauuuccua

SEQ ID NO: 1403051 - RNA, 16 nt, Human
ucauuuccaagcaagu

SEQ ID NO: 1403052 - RNA, 13 nt, Human
ucauuuccaagca

SEQ ID NO: 1403053 - RNA, 12 nt, Human
ucauugugaaau

SEQ ID NO: 1403054 - RNA, 15 nt, Human
ucauugugaaauuau

SEQ ID NO: 1403055 - RNA, 17 nt, Human
ucauugugaaauuauuc

SEQ ID NO: 1403056 - RNA, 18 nt, Human
ucauugugaaauuauuca

SEQ ID NO: 1403057 - RNA, 20 nt, Human
ucauuguguuaccuguagau

SEQ ID NO: 1403058 - RNA, 16 nt, Human
ucauuccauucuggaa

SEQ ID NO: 1403059 - RNA, 19 nt, Human
ucauuccauucuggaagug

SEQ ID NO: 1403060 - RNA, 21 nt, Human
ucauuucagaaguuaguuugu

SEQ ID NO: 1403061 - RNA, 13 nt, Human
ucauuucagaagu

SEQ ID NO: 1403062 - RNA, 12 nt, Human
ucauuucaucua

SEQ ID NO: 1403063 - RNA, 12 nt, Human
ucauuucaggau

SEQ ID NO: 1403064 - RNA, 23 nt, Human
ucauuauucguagauauuggaca

SEQ ID NO: 1403065 - RNA, 19 nt, Human
ucauuauuacuuuugcugu

SEQ ID NO: 1403066 - RNA, 19 nt, Human
ucauuagucauguuuaucu

SEQ ID NO: 1403067 - RNA, 18 nt, Human
ucaugcugggauuuccaa

SEQ ID NO: 1403068 - RNA, 22 nt, Human
ucauuagucauguuuaucugcu

SEQ ID NO: 1403069 - RNA, 14 nt, Human
ucaugcugggauuu

SEQ ID NO: 1403070 - RNA, 12 nt, Human
ucaugcugccuu

SEQ ID NO: 1403071 - RNA, 22 nt, Human
ucauucaaguguaaaauauuuu

SEQ ID NO: 1403072 - RNA, 14 nt, Human
ucauuauuuaugua

SEQ ID NO: 1403073 - RNA, 16 nt, Human
ucauuauuuauguauu

SEQ ID NO: 1403074 - RNA, 17 nt, Human
ucauuauuuauguauug

SEQ ID NO: 1403075 - RNA, 20 nt, Human
ucauucacaucgcagauucu

SEQ ID NO: 1403076 - RNA, 22 nt, Human
ucauucacaucgcagauucucc

SEQ ID NO: 1403077 - RNA, 14 nt, Human
ucauucauuuuugu

SEQ ID NO: 1403078 - RNA, 16 nt, Human
ucauuccaugugccca

SEQ ID NO: 1403079 - RNA, 20 nt, Human
ucauuccaugugcccaguua

SEQ ID NO: 1403080 - RNA, 19 nt, Human
ucauuccaugugcccaguu

SEQ ID NO: 1403081 - RNA, 18 nt, Human
ucauuccaugugcccagu

SEQ ID NO: 1403082 - RNA, 17 nt, Human
ucauuccaugugcccag

SEQ ID NO: 1403083 - RNA, 14 nt, Human
ucauuccauucugg

SEQ ID NO: 1403084 - RNA, 15 nt, Human
ucauuccauucugga

SEQ ID NO: 1403085 - RNA, 22 nt, Human
ucaccacaaacuguaauacaau

SEQ ID NO: 1403086 - RNA, 12 nt, Human
ucaccacaaacu

SEQ ID NO: 1403087 - RNA, 23 nt, Human
ucaccaauguacccaccgggcca

SEQ ID NO: 1403088 - RNA, 15 nt, Human
ucaccaauguaccca

SEQ ID NO: 1403089 - RNA, 21 nt, Human
ucaccagauuugcuaauuuau

SEQ ID NO: 1403090 - RNA, 15 nt, Human
ucaccagauuugcua

SEQ ID NO: 1403091 - RNA, 18 nt, Human
ucaccagaucugauuugu

SEQ ID NO: 1403092 - RNA, 18 nt, Human
ucacauuuuccuuuucaa

SEQ ID NO: 1403093 - RNA, 17 nt, Human
ucacauuuuccuuuuca

SEQ ID NO: 1403094 - RNA, 16 nt, Human
ucacauuuuccuuuuc

SEQ ID NO: 1403095 - RNA, 14 nt, Human
ucacauuuuccuuu

SEQ ID NO: 1403096 - RNA, 11 nt, Human
ucacauuuucc

SEQ ID NO: 1403097 - RNA, 17 nt, Human
ucacagugggagccagg

SEQ ID NO: 1403098 - RNA, 18 nt, Human
ucacagugggagccaggg

SEQ ID NO: 1403099 - RNA, 17 nt, Human
ucacagugcucuuuucu

SEQ ID NO: 1403100 - RNA, 16 nt, Human
ucacagugaacacuca

SEQ ID NO: 1403101 - RNA, 18 nt, Human
ucacagugcuuuuaagug

SEQ ID NO: 1403102 - RNA, 16 nt, Human
ucacagugcuuuuaag

SEQ ID NO: 1403103 - RNA, 20 nt, Human
ucacagugcucuuuucuccu

SEQ ID NO: 1403104 - RNA, 18 nt, Human
ucacagugcucuuuucuc

SEQ ID NO: 1403105 - RNA, 20 nt, Human
ucacaccugaacugaacacc

SEQ ID NO: 1403106 - RNA, 22 nt, Human
ucacacccaacuugguuuugcu

SEQ ID NO: 1403107 - RNA, 20 nt, Human
ucaauuacugguccaaaaga

SEQ ID NO: 1403108 - RNA, 16 nt, Human
ucaauuacugguccaa

SEQ ID NO: 1403109 - RNA, 13 nt, Human
ucaauuacugguc

SEQ ID NO: 1403110 - RNA, 13 nt, Human
ucaauuaccacac

SEQ ID NO: 1403111 - RNA, 23 nt, Human
ucaaccuuaagaccuacuguucu

SEQ ID NO: 1403112 - RNA, 15 nt, Human
ucaaccuuaagaccu

SEQ ID NO: 1403113 - RNA, 18 nt, Human
ucaaccugggcaaagccu

SEQ ID NO: 1403114 - RNA, 21 nt, Human
ucaaguugauuagaaagacca

SEQ ID NO: 1403115 - RNA, 17 nt, Human
ucaaguugaggggcuuc

SEQ ID NO: 1403116 - RNA, 15 nt, Human
ucaaguugaggggcu

SEQ ID NO: 1403117 - RNA, 19 nt, Human
ucaaguucuaagauucuaa

SEQ ID NO: 1403118 - RNA, 18 nt, Human
ucaaguucuaagauucua

SEQ ID NO: 1403119 - RNA, 17 nt, Human
ucaaguucuaagauucu

SEQ ID NO: 1403120 - RNA, 16 nt, Human
ucaaguucuaagauuc

SEQ ID NO: 1403121 - RNA, 15 nt, Human
ucaaguucuaagauu

SEQ ID NO: 1403122 - RNA, 14 nt, Human
ucaaguucuaagau

SEQ ID NO: 1403123 - RNA, 13 nt, Human
ucaaguucuaaga

SEQ ID NO: 1403124 - RNA, 23 nt, Human
ucaaguuguuccuuaagucagaa

SEQ ID NO: 1403125 - RNA, 16 nt, Human
ucaaguugauuagaaa

SEQ ID NO: 1403126 - RNA, 13 nt, Human
ucaaguugugcca

SEQ ID NO: 1403127 - RNA, 21 nt, Human
ucaauaaaauccauacauuug

SEQ ID NO: 1403128 - RNA, 20 nt, Human
ucaauaauauauuuucuguu

SEQ ID NO: 1403129 - RNA, 19 nt, Human
ucaauaauauauuuucugu

SEQ ID NO: 1403130 - RNA, 18 nt, Human
ucaauaauauauuuucug

SEQ ID NO: 1403131 - RNA, 15 nt, Human
ucaauaauauauuuu

SEQ ID NO: 1403132 - RNA, 22 nt, Human
ucaauaagccucagcuuucuaa

SEQ ID NO: 1403133 - RNA, 11 nt, Human
ucaauaaagua

SEQ ID NO: 1403134 - RNA, 14 nt, Human
ucaauaaaguauuu

SEQ ID NO: 1403135 - RNA, 15 nt, Human
ucaauaaaguauuua

SEQ ID NO: 1403136 - RNA, 16 nt, Human
ucaauaaaguauuuaa

SEQ ID NO: 1403137 - RNA, 17 nt, Human
ucaauaaaguauuuaau

SEQ ID NO: 1403138 - RNA, 18 nt, Human
ucaauaaaguauuuaauu

SEQ ID NO: 1403139 - RNA, 20 nt, Human
ucaauaaaguauuuaauuag

SEQ ID NO: 1403140 - RNA, 22 nt, Human
ucaauaaaguauuuaauuagug

SEQ ID NO: 1403141 - RNA, 22 nt, Human
ucaaugccccugaauuuaaaua

SEQ ID NO: 1403142 - RNA, 20 nt, Human
ucaaugccccugaauuuaaa

SEQ ID NO: 1403143 - RNA, 18 nt, Human
ucaaugccccugaauuua

SEQ ID NO: 1403144 - RNA, 19 nt, Human
ucaaugcaguugucucugu

SEQ ID NO: 1403145 - RNA, 18 nt, Human
ucaaugcaguugucucug

SEQ ID NO: 1403146 - RNA, 17 nt, Human
ucaaugcaguugucucu

SEQ ID NO: 1403147 - RNA, 15 nt, Human
ucaaugcaguugucu

SEQ ID NO: 1403148 - RNA, 17 nt, Human
ucaaugccccugaauuu

SEQ ID NO: 1403149 - RNA, 17 nt, Human
uauuuuauuaugaagaa

SEQ ID NO: 1403150 - RNA, 14 nt, Human
uauuuuauuaugca

SEQ ID NO: 1403151 - RNA, 17 nt, Human
uauuuuauuaugcauga

SEQ ID NO: 1403152 - RNA, 13 nt, Human
uauuuuccaggcu

SEQ ID NO: 1403153 - RNA, 17 nt, Human
uauuuucaaaaccaggu

SEQ ID NO: 1403154 - RNA, 14 nt, Human
uauuuucaaaacca

SEQ ID NO: 1403155 - RNA, 16 nt, Human
uauuuucaaaaccagg

SEQ ID NO: 1403156 - RNA, 17 nt, Human
uauuuuauguugcauag

SEQ ID NO: 1403157 - RNA, 23 nt, Human
uauuuauauauguauuuauaaau

SEQ ID NO: 1403158 - RNA, 16 nt, Human
uauuuauauauguauu

SEQ ID NO: 1403159 - RNA, 13 nt, Human
uauuuuauuauga

SEQ ID NO: 1403160 - RNA, 18 nt, Human
uauuuuuuuuuaagcucu

SEQ ID NO: 1403161 - RNA, 17 nt, Human
uauuuuuuuuaaguauu

SEQ ID NO: 1403162 - RNA, 17 nt, Human
uauuuuuuucuuuucuu

SEQ ID NO: 1403163 - RNA, 14 nt, Human
uauuuuuuuacuaa

SEQ ID NO: 1403164 - RNA, 21 nt, Human
uauuuuccuauauuacgguuu

SEQ ID NO: 1403165 - RNA, 19 nt, Human
uauuuuuucuuuucuuuac

SEQ ID NO: 1403166 - RNA, 16 nt, Human
uauuuuuucaguauua

SEQ ID NO: 1403167 - RNA, 21 nt, Human
uauuuucugugccugaauauu

SEQ ID NO: 1403168 - RNA, 17 nt, Human
uauuuuuuguauaauug

SEQ ID NO: 1403169 - RNA, 16 nt, Human
uauuuuuuguauaauu

SEQ ID NO: 1403170 - RNA, 14 nt, Human
uauuuuuuguauaa

SEQ ID NO: 1403171 - RNA, 13 nt, Human
uauuuuuugaaaa

SEQ ID NO: 1403172 - RNA, 22 nt, Human
ucaaauugugcaguacuuugug

SEQ ID NO: 1403173 - RNA, 15 nt, Human
ucaaauugugugaaa

SEQ ID NO: 1403174 - RNA, 21 nt, Human
ucaaauucuucugaacucaaa

SEQ ID NO: 1403175 - RNA, 16 nt, Human
ucaaauucuucugaac

SEQ ID NO: 1403176 - RNA, 14 nt, Human
ucaaauugugugaa

SEQ ID NO: 1403177 - RNA, 17 nt, Human
ucaaauuguaagcaugc

SEQ ID NO: 1403178 - RNA, 20 nt, Human
ucaaauuguaagcaugcaca

SEQ ID NO: 1403179 - RNA, 15 nt, Human
ucaaauucuucugaa

SEQ ID NO: 1403180 - RNA, 14 nt, Human
ucaaauucuucuga

SEQ ID NO: 1403181 - RNA, 13 nt, Human
ucaaauucaaaua

SEQ ID NO: 1403182 - RNA, 19 nt, Human
ucaaauggggccagaucca

SEQ ID NO: 1403183 - RNA, 18 nt, Human
ucaaauggggccagaucc

SEQ ID NO: 1403184 - RNA, 22 nt, Human
ucaaaugaguaacauuugcugu

SEQ ID NO: 1403185 - RNA, 16 nt, Human
ucaaaugaguaacauu

SEQ ID NO: 1403186 - RNA, 15 nt, Human
ucaaauccuugaaga

SEQ ID NO: 1403187 - RNA, 19 nt, Human
ucaaaacagauuguuugca

SEQ ID NO: 1403188 - RNA, 16 nt, Human
ucaaaacagauuguuu

SEQ ID NO: 1403189 - RNA, 14 nt, Human
ucaaaacagauugu

SEQ ID NO: 1403190 - RNA, 24 nt, Human
ucaaaacacuuguaauuuuguauc

SEQ ID NO: 1403191 - RNA, 17 nt, Human
ucaaaacacuuguaauu

SEQ ID NO: 1403192 - RNA, 14 nt, Human
ucaaaacacuugua

SEQ ID NO: 1403193 - RNA, 16 nt, Human
ucaaaacaaaggccua

SEQ ID NO: 1403194 - RNA, 12 nt, Human
ucaaaaauuaaa

SEQ ID NO: 1403195 - RNA, 20 nt, Human
ucaaaaauuaucuauagcua

SEQ ID NO: 1403196 - RNA, 23 nt, Human
ucaaaaauuaaaccggaccaucu

SEQ ID NO: 1403197 - RNA, 14 nt, Human
ucaaagaaggcauu

SEQ ID NO: 1403198 - RNA, 22 nt, Human
ucaaauauauucagccuggcuu

SEQ ID NO: 1403199 - RNA, 23 nt, Human
ucaaauauauucagccuggcuuc

SEQ ID NO: 1403200 - RNA, 20 nt, Human
ucaaaucaaucuguaaaacu

SEQ ID NO: 1403201 - RNA, 15 nt, Human
uauuaaugcccagac

SEQ ID NO: 1403202 - RNA, 20 nt, Human
uauuaaugcacuuucuaucc

SEQ ID NO: 1403203 - RNA, 17 nt, Human
uauuaaugcacuuucua

SEQ ID NO: 1403204 - RNA, 14 nt, Human
uauuaaugcacuuu

SEQ ID NO: 1403205 - RNA, 13 nt, Human
uauuaaugcacuu

SEQ ID NO: 1403206 - RNA, 12 nt, Human
uauuaaugcacu

SEQ ID NO: 1403207 - RNA, 13 nt, Human
uauuaaugaaaau

SEQ ID NO: 1403208 - RNA, 18 nt, Human
uauuaaucuuaguguaug

SEQ ID NO: 1403209 - RNA, 17 nt, Human
uauuaaucuuaguguau

SEQ ID NO: 1403210 - RNA, 14 nt, Human
uauuaaucuuagug

SEQ ID NO: 1403211 - RNA, 22 nt, Human
uauuaauauauauuaucuuuuc

SEQ ID NO: 1403212 - RNA, 23 nt, Human
uauuaauauauauuaucuuuuca

SEQ ID NO: 1403213 - RNA, 18 nt, Human
uauuaauauauauuaucu

SEQ ID NO: 1403214 - RNA, 14 nt, Human
uauuaagaaaggaa

SEQ ID NO: 1403215 - RNA, 13 nt, Human
uauuaagaaagga

SEQ ID NO: 1403216 - RNA, 12 nt, Human
uauuaagaaagg

SEQ ID NO: 1403217 - RNA, 23 nt, Human
uauuaaauuuuuuguugacauua

SEQ ID NO: 1403218 - RNA, 24 nt, Human
uauuaagaaaggaagcauuguaaa

SEQ ID NO: 1403219 - RNA, 23 nt, Human
uauuaagaaaggaagcauuguaa

SEQ ID NO: 1403220 - RNA, 21 nt, Human
uauuaagaaaggaagcauugu

SEQ ID NO: 1403221 - RNA, 20 nt, Human
uauuaagaaaggaagcauug

SEQ ID NO: 1403222 - RNA, 20 nt, Human
uauuaaauuuuuuguugaca

SEQ ID NO: 1403223 - RNA, 19 nt, Human
uauuaaauuuuuuguugac

SEQ ID NO: 1403224 - RNA, 22 nt, Human
uauuaaauuuuuuaaaaagcaa

SEQ ID NO: 1403225 - RNA, 20 nt, Human
uauuaaauuuuuuaaaaagc

SEQ ID NO: 1403226 - RNA, 16 nt, Human
uauguugcauagaaua

SEQ ID NO: 1403227 - RNA, 21 nt, Human
uauguauuauuuacauuuaau

SEQ ID NO: 1403228 - RNA, 19 nt, Human
uauguauuauuuacauuua

SEQ ID NO: 1403229 - RNA, 21 nt, Human
uauguauugugcaauguguau

SEQ ID NO: 1403230 - RNA, 20 nt, Human
uauguauugugcaaugugua

SEQ ID NO: 1403231 - RNA, 17 nt, Human
uauguauugugcaaugu

SEQ ID NO: 1403232 - RNA, 15 nt, Human
uauguauugugcaau

SEQ ID NO: 1403233 - RNA, 12 nt, Human
uauguauuuaua

SEQ ID NO: 1403234 - RNA, 16 nt, Human
uaugucauuucauuuc

SEQ ID NO: 1403235 - RNA, 12 nt, Human
uauguugcauag

SEQ ID NO: 1403236 - RNA, 20 nt, Human
uauggcaaccauuauaaccu

SEQ ID NO: 1403237 - RNA, 16 nt, Human
uauggauucuaaaaug

SEQ ID NO: 1403238 - RNA, 13 nt, Human
uauguaaaacauu

SEQ ID NO: 1403239 - RNA, 22 nt, Human
uaugguuuuugagauauuaaug

SEQ ID NO: 1403240 - RNA, 17 nt, Human
uaugguggauccaaacu

SEQ ID NO: 1403241 - RNA, 23 nt, Human
uauggugcucugucuacuugcuc

SEQ ID NO: 1403242 - RNA, 15 nt, Human
uauggugcucugucu

SEQ ID NO: 1403243 - RNA, 15 nt, Human
uauggauucuaaaau

SEQ ID NO: 1403244 - RNA, 14 nt, Human
uauggauucuaaaa

SEQ ID NO: 1403245 - RNA, 13 nt, Human
uauggauucuaaa

SEQ ID NO: 1403246 - RNA, 15 nt, Human
uauggauguccccag

SEQ ID NO: 1403247 - RNA, 16 nt, Human
uauggauguccccagc

SEQ ID NO: 1403248 - RNA, 15 nt, Human
uauguaaaacauuua

SEQ ID NO: 1403249 - RNA, 15 nt, Human
uauguaaauuaugua

SEQ ID NO: 1403250 - RNA, 21 nt, Human
uauguaaaugguaugucauuc

SEQ ID NO: 1403251 - RNA, 20 nt, Human
uauguaaaugguaugucauu

SEQ ID NO: 1403252 - RNA, 17 nt, Human
uauguauggugcaaugu

SEQ ID NO: 1403253 - RNA, 23 nt, Human
uauguauggguaggguaaaucag

SEQ ID NO: 1403254 - RNA, 22 nt, Human
uauguauggguaggguaaauca

SEQ ID NO: 1403255 - RNA, 20 nt, Human
uauguaguaauugacaugug

SEQ ID NO: 1403256 - RNA, 17 nt, Human
uauguaguaauugacau

SEQ ID NO: 1403257 - RNA, 14 nt, Human
uauguaguaauuga

SEQ ID NO: 1403258 - RNA, 15 nt, Human
uauguagcucuuugu

SEQ ID NO: 1403259 - RNA, 15 nt, Human
uauguagcaaaauac

SEQ ID NO: 1403260 - RNA, 14 nt, Human
uauguagauaacaa

SEQ ID NO: 1403261 - RNA, 23 nt, Human
uauguagaaaaaaguaaauguga

SEQ ID NO: 1403262 - RNA, 14 nt, Human
uauguaccaagaau

SEQ ID NO: 1403263 - RNA, 15 nt, Human
uauguacaugagaag

SEQ ID NO: 1403264 - RNA, 12 nt, Human
uauguacaguua

SEQ ID NO: 1403265 - RNA, 12 nt, Human
uauguaacaugu

SEQ ID NO: 1403266 - RNA, 11 nt, Human
uauguaacaug

SEQ ID NO: 1403267 - RNA, 20 nt, Human
uauguacccucugaaauaca

SEQ ID NO: 1403268 - RNA, 19 nt, Human
uauguacccucugaaauac

SEQ ID NO: 1403269 - RNA, 18 nt, Human
uauguacccucugaaaua

SEQ ID NO: 1403270 - RNA, 16 nt, Human
uauguacccucugaaa

SEQ ID NO: 1403271 - RNA, 10 nt, Human
uauguaccaa

SEQ ID NO: 1403272 - RNA, 16 nt, Human
uauguaccauguacau

SEQ ID NO: 1403273 - RNA, 17 nt, Human
uauguacuucaugcugu

SEQ ID NO: 1403274 - RNA, 13 nt, Human
uauguacuucaug

SEQ ID NO: 1403275 - RNA, 14 nt, Human
uauugcuagagcuc

SEQ ID NO: 1403276 - RNA, 13 nt, Human
uauugccucacuu

SEQ ID NO: 1403277 - RNA, 16 nt, Human
uauucuccuccucccu

SEQ ID NO: 1403278 - RNA, 18 nt, Human
uauucucuccuguaccuc

SEQ ID NO: 1403279 - RNA, 16 nt, Human
uauucuccuauguuug

SEQ ID NO: 1403280 - RNA, 17 nt, Human
uauucucuccuguaccu

SEQ ID NO: 1403281 - RNA, 16 nt, Human
uauuguguuuguguau

SEQ ID NO: 1403282 - RNA, 21 nt, Human
uauuguguuugucauuagccu

SEQ ID NO: 1403283 - RNA, 17 nt, Human
uauuguguuugucauua

SEQ ID NO: 1403284 - RNA, 18 nt, Human
uauuguguuugucauuag

SEQ ID NO: 1403285 - RNA, 14 nt, Human
uauuguguuuguca

SEQ ID NO: 1403286 - RNA, 16 nt, Human
uauuguguuugucauu

SEQ ID NO: 1403287 - RNA, 19 nt, Human
uauuggccaaggaaaggca

SEQ ID NO: 1403288 - RNA, 17 nt, Human
uauuggacaaagaaccu

SEQ ID NO: 1403289 - RNA, 15 nt, Human
uauuggaacuugcga

SEQ ID NO: 1403290 - RNA, 16 nt, Human
uauuggaauauaauug

SEQ ID NO: 1403291 - RNA, 20 nt, Human
uauugcuagagcuccucccu

SEQ ID NO: 1403292 - RNA, 16 nt, Human
uauugcuagagcuccu

SEQ ID NO: 1403293 - RNA, 15 nt, Human
uauugcuagagcucc

SEQ ID NO: 1403294 - RNA, 17 nt, Human
uauuguucagcaugcaa

SEQ ID NO: 1403295 - RNA, 22 nt, Human
uauuguuacguagccuaaggcu

SEQ ID NO: 1403296 - RNA, 14 nt, Human
uauuguuuuacaau

SEQ ID NO: 1403297 - RNA, 15 nt, Human
uauuguuuuacaaua

SEQ ID NO: 1403298 - RNA, 17 nt, Human
uauuguuuuacaauagu

SEQ ID NO: 1403299 - RNA, 20 nt, Human
uauuguuuuacaauaguucu

SEQ ID NO: 1403300 - RNA, 22 nt, Human
uauuguuuuacaauaguucugu

SEQ ID NO: 1403301 - RNA, 21 nt, Human
uauuuaaaauagcaaaagaag

SEQ ID NO: 1403302 - RNA, 23 nt, Human
uauuuaaaauagcaaaagaagaa

SEQ ID NO: 1403303 - RNA, 15 nt, Human
uauuuaaaauagcaa

SEQ ID NO: 1403304 - RNA, 14 nt, Human
uauuuaaaauagca

SEQ ID NO: 1403305 - RNA, 15 nt, Human
uauuuaaaaguguca

SEQ ID NO: 1403306 - RNA, 13 nt, Human
uauuuaaaacuug

SEQ ID NO: 1403307 - RNA, 12 nt, Human
uauuuaaaacuu

SEQ ID NO: 1403308 - RNA, 23 nt, Human
uauuuaaaaauaagucaacagua

SEQ ID NO: 1403309 - RNA, 17 nt, Human
uauuuaaaaauaaguca

SEQ ID NO: 1403310 - RNA, 13 nt, Human
uauuuaaaaauaa

SEQ ID NO: 1403311 - RNA, 20 nt, Human
uauuuaaaaaacuaaaaacu

SEQ ID NO: 1403312 - RNA, 21 nt, Human
uauuuaaaaaacuaaaaacua

SEQ ID NO: 1403313 - RNA, 16 nt, Human
uauuuaaaaaacuaaa

SEQ ID NO: 1403314 - RNA, 14 nt, Human
uauuuaaaaaacua

SEQ ID NO: 1403315 - RNA, 24 nt, Human
uauuuaaacucuguugcaagugca

SEQ ID NO: 1403316 - RNA, 21 nt, Human
uauuuaaaccgcuaaaagaaa

SEQ ID NO: 1403317 - RNA, 24 nt, Human
uauuuauaaaaauaaaaaacacug

SEQ ID NO: 1403318 - RNA, 19 nt, Human
uauuuauaaauauauuuaa

SEQ ID NO: 1403319 - RNA, 17 nt, Human
uauuuauaaauauauuu

SEQ ID NO: 1403320 - RNA, 16 nt, Human
uauuuauaaauauauu

SEQ ID NO: 1403321 - RNA, 19 nt, Human
uauuuaaaccgcuaaaaga

SEQ ID NO: 1403322 - RNA, 22 nt, Human
uauuuaguuguaaaccaaguga

SEQ ID NO: 1403323 - RNA, 22 nt, Human
uauuccagcuguccccccacuc

SEQ ID NO: 1403324 - RNA, 17 nt, Human
uauuccagcuguccccc

SEQ ID NO: 1403325 - RNA, 23 nt, Human
uauuccagaaugcuguacaucua

SEQ ID NO: 1403326 - RNA, 21 nt, Human
uauuccagaaugcuguacauc

SEQ ID NO: 1403327 - RNA, 20 nt, Human
uauuccagaaugcuguacau

SEQ ID NO: 1403328 - RNA, 17 nt, Human
uauuccagaaugcugua

SEQ ID NO: 1403329 - RNA, 16 nt, Human
uauuccagaaugcugu

SEQ ID NO: 1403330 - RNA, 19 nt, Human
uauuccaagacaugucugu

SEQ ID NO: 1403331 - RNA, 15 nt, Human
uauuccaugacugcu

SEQ ID NO: 1403332 - RNA, 14 nt, Human
uauuccaugacugc

SEQ ID NO: 1403333 - RNA, 12 nt, Human
uauuccaugacu

SEQ ID NO: 1403334 - RNA, 17 nt, Human
uauuccccauucuuccu

SEQ ID NO: 1403335 - RNA, 16 nt, Human
uauuccaugacugcuu

SEQ ID NO: 1403336 - RNA, 23 nt, Human
uauuccaugacugcuugcccuaa

SEQ ID NO: 1403337 - RNA, 21 nt, Human
uauuaauuuuaguuuuucauu

SEQ ID NO: 1403338 - RNA, 14 nt, Human
uauuaauuuuaguu

SEQ ID NO: 1403339 - RNA, 17 nt, Human
uauuaauuuaugcagaa

SEQ ID NO: 1403340 - RNA, 14 nt, Human
uauuacaaugauca

SEQ ID NO: 1403341 - RNA, 19 nt, Human
uauuacacucuguaauuga

SEQ ID NO: 1403342 - RNA, 16 nt, Human
uauuacacucuguaau

SEQ ID NO: 1403343 - RNA, 15 nt, Human
uauuacaaugaucac

SEQ ID NO: 1403344 - RNA, 15 nt, Human
uauuauuauaaucuu

SEQ ID NO: 1403345 - RNA, 22 nt, Human
uauuauuauaaucuuauaauug

SEQ ID NO: 1403346 - RNA, 19 nt, Human
uauuauuaguuuugauuua

SEQ ID NO: 1403347 - RNA, 12 nt, Human
uauuauuagggc

SEQ ID NO: 1403348 - RNA, 17 nt, Human
uauuauuacuuguaaau

SEQ ID NO: 1403349 - RNA, 18 nt, Human
uauuauuacuuguaaaua

SEQ ID NO: 1403350 - RNA, 14 nt, Human
uauuauuacuugua

SEQ ID NO: 1403351 - RNA, 19 nt, Human
uauuauuacuuauuuuuga

SEQ ID NO: 1403352 - RNA, 17 nt, Human
uauuauuaacauaccua

SEQ ID NO: 1403353 - RNA, 20 nt, Human
uauucgccacacaguauuuu

SEQ ID NO: 1403354 - RNA, 19 nt, Human
uauucgccacacaguauuu

SEQ ID NO: 1403355 - RNA, 22 nt, Human
uauucgauacugcgacuuucug

SEQ ID NO: 1403356 - RNA, 22 nt, Human
uauuccugaccuccgccaucca

SEQ ID NO: 1403357 - RNA, 18 nt, Human
uauuccuccugcucauau

SEQ ID NO: 1403358 - RNA, 16 nt, Human
uauuccucaaaaaauu

SEQ ID NO: 1403359 - RNA, 14 nt, Human
uauuccuauugugc

SEQ ID NO: 1403360 - RNA, 21 nt, Human
uauucccuagaaacuuccaaa

SEQ ID NO: 1403361 - RNA, 20 nt, Human
uauucuauuacauuuucagu

SEQ ID NO: 1403362 - RNA, 23 nt, Human
uauucuaagacuuacucuaagau

SEQ ID NO: 1403363 - RNA, 22 nt, Human
uauucuaagacuuacucuaaga

SEQ ID NO: 1403364 - RNA, 21 nt, Human
uauucuaagacuuacucuaag

SEQ ID NO: 1403365 - RNA, 13 nt, Human
uauucuaagacuu

SEQ ID NO: 1403366 - RNA, 12 nt, Human
uauucuaagacu

SEQ ID NO: 1403367 - RNA, 11 nt, Human
uauucuaagac

SEQ ID NO: 1403368 - RNA, 17 nt, Human
uauucguuaucuaauag

SEQ ID NO: 1403369 - RNA, 22 nt, Human
uccuaauaauaucccacuggga

SEQ ID NO: 1403370 - RNA, 19 nt, Human
uccuaauaauaucccacug

SEQ ID NO: 1403371 - RNA, 18 nt, Human
uccuaauaaaguucugua

SEQ ID NO: 1403372 - RNA, 15 nt, Human
uccuaauacugucau

SEQ ID NO: 1403373 - RNA, 14 nt, Human
uccuaauacuguca

SEQ ID NO: 1403374 - RNA, 14 nt, Human
uccuaccaagucaa

SEQ ID NO: 1403375 - RNA, 22 nt, Human
uccucaucccguguucuccuuu

SEQ ID NO: 1403376 - RNA, 14 nt, Human
uccucaucccgugu

SEQ ID NO: 1403377 - RNA, 17 nt, Human
uccucaugaauguaaau

SEQ ID NO: 1403378 - RNA, 15 nt, Human
uccucaugaauguaa

SEQ ID NO: 1403379 - RNA, 14 nt, Human
uccucaugaaugua

SEQ ID NO: 1403380 - RNA, 11 nt, Human
uccuauguuug

SEQ ID NO: 1403381 - RNA, 19 nt, Human
uccuauguuuuuguucaaa

SEQ ID NO: 1403382 - RNA, 18 nt, Human
uccuauguuuuuguucaa

SEQ ID NO: 1403383 - RNA, 16 nt, Human
uccuaguucuucaucc

SEQ ID NO: 1403384 - RNA, 18 nt, Human
uccuaguucuguagaaau

SEQ ID NO: 1403385 - RNA, 19 nt, Human
uccuaguucuguagaaaug

SEQ ID NO: 1403386 - RNA, 22 nt, Human
uccuaguucuagaaaaacaggc

SEQ ID NO: 1403387 - RNA, 16 nt, Human
uccuaguucuguagaa

SEQ ID NO: 1403388 - RNA, 17 nt, Human
uccuaguucuguagaaa

SEQ ID NO: 1403389 - RNA, 18 nt, Human
uccuaguucuagaaaaac

SEQ ID NO: 1403390 - RNA, 17 nt, Human
uccuaguucuagaaaaa

SEQ ID NO: 1403391 - RNA, 16 nt, Human
uccuaguucuagaaaa

SEQ ID NO: 1403392 - RNA, 15 nt, Human
uccuaguucuagaaa

SEQ ID NO: 1403393 - RNA, 13 nt, Human
uccuaguucuaga

SEQ ID NO: 1403394 - RNA, 13 nt, Human
uccuaguuuucuc

SEQ ID NO: 1403395 - RNA, 20 nt, Human
uccuaguuuucuccucccag

SEQ ID NO: 1403396 - RNA, 19 nt, Human
uccuaguucuagaaaaaca

SEQ ID NO: 1403397 - RNA, 23 nt, Human
uccuaguucuguagaaaugguug

SEQ ID NO: 1403398 - RNA, 19 nt, Human
uccuauacgcagcgugcuu

SEQ ID NO: 1403399 - RNA, 18 nt, Human
uccuauacgcagcgugcu

SEQ ID NO: 1403400 - RNA, 13 nt, Human
uccuccuucuuca

SEQ ID NO: 1403401 - RNA, 16 nt, Human
uccuccuguauuccug

SEQ ID NO: 1403402 - RNA, 22 nt, Human
uccuccugggcccucucugcuc

SEQ ID NO: 1403403 - RNA, 20 nt, Human
uccuccugggcccucucugc

SEQ ID NO: 1403404 - RNA, 20 nt, Human
uccucaugaauguaaauuug

SEQ ID NO: 1403405 - RNA, 23 nt, Human
uccuccacguucugcucaucauu

SEQ ID NO: 1403406 - RNA, 22 nt, Human
uccuccacguucugcucaucau

SEQ ID NO: 1403407 - RNA, 21 nt, Human
uccuccacguucugcucauca

SEQ ID NO: 1403408 - RNA, 21 nt, Human
uccucaugaauguaaauuugu

SEQ ID NO: 1403409 - RNA, 18 nt, Human
uccucuacuaacaaucag

SEQ ID NO: 1403410 - RNA, 17 nt, Human
uccucuacuaacaauca

SEQ ID NO: 1403411 - RNA, 16 nt, Human
uccucuaacuuggcuc

SEQ ID NO: 1403412 - RNA, 16 nt, Human
uccucguuuguguucu

SEQ ID NO: 1403413 - RNA, 15 nt, Human
uccucguuuguguuc

SEQ ID NO: 1403414 - RNA, 14 nt, Human
uccucguuuguguu

SEQ ID NO: 1403415 - RNA, 13 nt, Human
uccucguuugugu

SEQ ID NO: 1403416 - RNA, 19 nt, Human
uccucuacuaacaaucagc

SEQ ID NO: 1403417 - RNA, 24 nt, Human
uccucgccugacaaccacuggucu

SEQ ID NO: 1403418 - RNA, 15 nt, Human
uccucgccugacaac

SEQ ID NO: 1403419 - RNA, 13 nt, Human
uccucgccugaca

SEQ ID NO: 1403420 - RNA, 21 nt, Human
uccucuagcugugggggugag

SEQ ID NO: 1403421 - RNA, 15 nt, Human
uccucuagcuguggg

SEQ ID NO: 1403422 - RNA, 14 nt, Human
uccucuucccucuc

SEQ ID NO: 1403423 - RNA, 18 nt, Human
uccucuucccucucugca

SEQ ID NO: 1403424 - RNA, 18 nt, Human
uccucuuccccagacgcc

SEQ ID NO: 1403425 - RNA, 17 nt, Human
uccucuucccccaagau

SEQ ID NO: 1403426 - RNA, 14 nt, Human
uccucuuccccaga

SEQ ID NO: 1403427 - RNA, 13 nt, Human
uccucuuccccag

SEQ ID NO: 1403428 - RNA, 12 nt, Human
uccucuucccca

SEQ ID NO: 1403429 - RNA, 23 nt, Human
uccucuucuacucacuuuuccca

SEQ ID NO: 1403430 - RNA, 19 nt, Human
uccucuucuauuuuguaaa

SEQ ID NO: 1403431 - RNA, 22 nt, Human
uccucuucuacucacuuuuccc

SEQ ID NO: 1403432 - RNA, 20 nt, Human
uccucuucuacucacuuuuc

SEQ ID NO: 1403433 - RNA, 23 nt, Human
ucccugcacagugacuucugaga

SEQ ID NO: 1403434 - RNA, 22 nt, Human
ucccugcacagugacuucugag

SEQ ID NO: 1403435 - RNA, 20 nt, Human
ucccugcacagugacuucug

SEQ ID NO: 1403436 - RNA, 17 nt, Human
ucccugcacagugacuu

SEQ ID NO: 1403437 - RNA, 15 nt, Human
ucccucucucacucc

SEQ ID NO: 1403438 - RNA, 14 nt, Human
ucccucucguaaga

SEQ ID NO: 1403439 - RNA, 16 nt, Human
ucccucucucauaccc

SEQ ID NO: 1403440 - RNA, 18 nt, Human
ucccugccuccugccggc

SEQ ID NO: 1403441 - RNA, 16 nt, Human
ucccugccuccugccg

SEQ ID NO: 1403442 - RNA, 13 nt, Human
ucccugccuccug

SEQ ID NO: 1403443 - RNA, 23 nt, Human
ucccugccucucaucaacugaau

SEQ ID NO: 1403444 - RNA, 17 nt, Human
ucccugccucucaucaa

SEQ ID NO: 1403445 - RNA, 13 nt, Human
ucccugccuggac

SEQ ID NO: 1403446 - RNA, 20 nt, Human
ucccuggaaaccuuccaccc

SEQ ID NO: 1403447 - RNA, 22 nt, Human
ucccuggaaaccuuccacccag

SEQ ID NO: 1403448 - RNA, 22 nt, Human
ucccuggaaugaguugaggcca

SEQ ID NO: 1403449 - RNA, 18 nt, Human
ucccuggaaggacaucca

SEQ ID NO: 1403450 - RNA, 23 nt, Human
ucccuggaaaccuuccacccagu

SEQ ID NO: 1403451 - RNA, 19 nt, Human
ucccuuccuuccucuccug

SEQ ID NO: 1403452 - RNA, 16 nt, Human
ucccuuccuuccucuc

SEQ ID NO: 1403453 - RNA, 20 nt, Human
ucccuggaugacauuaaaga

SEQ ID NO: 1403454 - RNA, 18 nt, Human
ucccuggaugacauuaaa

SEQ ID NO: 1403455 - RNA, 20 nt, Human
ucccuggaaugaguugaggc

SEQ ID NO: 1403456 - RNA, 19 nt, Human
ucccugcuuuuuguguuuu

SEQ ID NO: 1403457 - RNA, 20 nt, Human
ucccuggcccccucccugga

SEQ ID NO: 1403458 - RNA, 18 nt, Human
ucccuggcccccucccug

SEQ ID NO: 1403459 - RNA, 21 nt, Human
ucccuucaucuggaaccauca

SEQ ID NO: 1403460 - RNA, 17 nt, Human
ucccuucaugcauggaa

SEQ ID NO: 1403461 - RNA, 18 nt, Human
ucccuucaugcauggaaa

SEQ ID NO: 1403462 - RNA, 16 nt, Human
ucccuugaugaagaag

SEQ ID NO: 1403463 - RNA, 14 nt, Human
ucccuugagcccuc

SEQ ID NO: 1403464 - RNA, 19 nt, Human
ucccuuccugccagccccu

SEQ ID NO: 1403465 - RNA, 15 nt, Human
ucccuugaugaagaa

SEQ ID NO: 1403466 - RNA, 22 nt, Human
uccccuuauccucccuguaacu

SEQ ID NO: 1403467 - RNA, 20 nt, Human
uccccuuauccucccuguaa

SEQ ID NO: 1403468 - RNA, 23 nt, Human
uccccuuauccucccuguaacuu

SEQ ID NO: 1403469 - RNA, 13 nt, Human
uccccuucacucc

SEQ ID NO: 1403470 - RNA, 19 nt, Human
uccccuuauccucccugua

SEQ ID NO: 1403471 - RNA, 18 nt, Human
uccccuuauccucccugu

SEQ ID NO: 1403472 - RNA, 17 nt, Human
uccccuuauccucccug

SEQ ID NO: 1403473 - RNA, 13 nt, Human
uccccuuauccuc

SEQ ID NO: 1403474 - RNA, 20 nt, Human
uccagguucccucccagagg

SEQ ID NO: 1403475 - RNA, 18 nt, Human
uccagguucccucccaga

SEQ ID NO: 1403476 - RNA, 17 nt, Human
uccagguucccucccag

SEQ ID NO: 1403477 - RNA, 18 nt, Human
uccagguguuacuguaau

SEQ ID NO: 1403478 - RNA, 20 nt, Human
ucccgucaccccuguuucug

SEQ ID NO: 1403479 - RNA, 16 nt, Human
ucccggggccagcacu

SEQ ID NO: 1403480 - RNA, 21 nt, Human
ucccggggccagcacuuccau

SEQ ID NO: 1403481 - RNA, 20 nt, Human
ucccguuucuccaccuagac

SEQ ID NO: 1403482 - RNA, 15 nt, Human
ucccguguucuccuu

SEQ ID NO: 1403483 - RNA, 15 nt, Human
ucccuaauaaagcug

SEQ ID NO: 1403484 - RNA, 17 nt, Human
ucccuauacugcuugga

SEQ ID NO: 1403485 - RNA, 15 nt, Human
ucccuauacugcuug

SEQ ID NO: 1403486 - RNA, 14 nt, Human
ucccuauacugcuu

SEQ ID NO: 1403487 - RNA, 16 nt, Human
ucccuauccaaucaau

SEQ ID NO: 1403488 - RNA, 14 nt, Human
ucccuauggaaaga

SEQ ID NO: 1403489 - RNA, 21 nt, Human
ucccuaucacugaagcuuuuu

SEQ ID NO: 1403490 - RNA, 20 nt, Human
ucccuaucacugaagcuuuu

SEQ ID NO: 1403491 - RNA, 19 nt, Human
ucccuaucuuugccacccu

SEQ ID NO: 1403492 - RNA, 23 nt, Human
ucccuagguguuuuguucaccau

SEQ ID NO: 1403493 - RNA, 24 nt, Human
ucccuacauguauugcacauugua

SEQ ID NO: 1403494 - RNA, 13 nt, Human
ucccuacauguau

SEQ ID NO: 1403495 - RNA, 14 nt, Human
ucccuaauguguuu

SEQ ID NO: 1403496 - RNA, 23 nt, Human
ucccuaaucuauggucgggagac

SEQ ID NO: 1403497 - RNA, 16 nt, Human
ucccuaaucuaugguc

SEQ ID NO: 1403498 - RNA, 16 nt, Human
ucccuaauaaagcugu

SEQ ID NO: 1403499 - RNA, 14 nt, Human
ucccuccuguuggg

SEQ ID NO: 1403500 - RNA, 22 nt, Human
ucccucuacagagcuucccuga

SEQ ID NO: 1403501 - RNA, 21 nt, Human
ucccucuacagagcuucccug

SEQ ID NO: 1403502 - RNA, 21 nt, Human
ucccucucccaggccccauga

SEQ ID NO: 1403503 - RNA, 20 nt, Human
ucccucucccaggccccaug

SEQ ID NO: 1403504 - RNA, 17 nt, Human
ucccucucccaggcccc

SEQ ID NO: 1403505 - RNA, 16 nt, Human
ucccuccucugcccgg

SEQ ID NO: 1403506 - RNA, 11 nt, Human
ucccuccuggg

SEQ ID NO: 1403507 - RNA, 19 nt, Human
ucccuccugggaaugaagc

SEQ ID NO: 1403508 - RNA, 21 nt, Human
uccugucgauuagacuggaca

SEQ ID NO: 1403509 - RNA, 17 nt, Human
uccugucgauuagacug

SEQ ID NO: 1403510 - RNA, 22 nt, Human
uccuguccuuuaccaaagauga

SEQ ID NO: 1403511 - RNA, 19 nt, Human
uccuguccuuuaccaaaga

SEQ ID NO: 1403512 - RNA, 19 nt, Human
uccugucggagcccugucu

SEQ ID NO: 1403513 - RNA, 22 nt, Human
uccugucggagcccugucuccu

SEQ ID NO: 1403514 - RNA, 20 nt, Human
uccuguccucuuucagcucc

SEQ ID NO: 1403515 - RNA, 21 nt, Human
uccuguccucuuucagcuccu

SEQ ID NO: 1403516 - RNA, 19 nt, Human
uccuguccucuuucagcuc

SEQ ID NO: 1403517 - RNA, 18 nt, Human
uccuguccucuuucagcu

SEQ ID NO: 1403518 - RNA, 17 nt, Human
uccuguccucuuucagc

SEQ ID NO: 1403519 - RNA, 15 nt, Human
uccuguccucuuuca

SEQ ID NO: 1403520 - RNA, 14 nt, Human
uccuguacauugug

SEQ ID NO: 1403521 - RNA, 20 nt, Human
uccuguacauugugggaugu

SEQ ID NO: 1403522 - RNA, 22 nt, Human
uccuguaccucuugagccuuga

SEQ ID NO: 1403523 - RNA, 20 nt, Human
uccuguaccucuugagccuu

SEQ ID NO: 1403524 - RNA, 19 nt, Human
uccugccuauuaucuguca

SEQ ID NO: 1403525 - RNA, 17 nt, Human
uccucuucugggccuga

SEQ ID NO: 1403526 - RNA, 13 nt, Human
uccucuucugggc

SEQ ID NO: 1403527 - RNA, 15 nt, Human
uccucuuccaugcug

SEQ ID NO: 1403528 - RNA, 19 nt, Human
uccugagcacugccaggag

SEQ ID NO: 1403529 - RNA, 18 nt, Human
uccugagcacugccagga

SEQ ID NO: 1403530 - RNA, 17 nt, Human
uccugagcacugccagg

SEQ ID NO: 1403531 - RNA, 16 nt, Human
uccugagcacugccag

SEQ ID NO: 1403532 - RNA, 15 nt, Human
uccugagcacugcca

SEQ ID NO: 1403533 - RNA, 14 nt, Human
uccugagcacugcc

SEQ ID NO: 1403534 - RNA, 13 nt, Human
uccugagcacugc

SEQ ID NO: 1403535 - RNA, 12 nt, Human
uccugagcacug

SEQ ID NO: 1403536 - RNA, 14 nt, Human
uccugccucagccu

SEQ ID NO: 1403537 - RNA, 23 nt, Human
uccugagcacugccaggagggac

SEQ ID NO: 1403538 - RNA, 22 nt, Human
uccugagcacugccaggaggga

SEQ ID NO: 1403539 - RNA, 21 nt, Human
uccugagcacugccaggaggg

SEQ ID NO: 1403540 - RNA, 20 nt, Human
uccugagcacugccaggagg

SEQ ID NO: 1403541 - RNA, 17 nt, Human
uccugccucagccuccc

SEQ ID NO: 1403542 - RNA, 17 nt, Human
uccuugcuuccugucuu

SEQ ID NO: 1403543 - RNA, 21 nt, Human
uccuugaaggacuaauagaaa

SEQ ID NO: 1403544 - RNA, 23 nt, Human
uccuugaagaacugcaggcccug

SEQ ID NO: 1403545 - RNA, 21 nt, Human
uccuugaagaacugcaggccc

SEQ ID NO: 1403546 - RNA, 20 nt, Human
uccuugaagaacugcaggcc

SEQ ID NO: 1403547 - RNA, 22 nt, Human
uccugucgauuagacuggacag

SEQ ID NO: 1403548 - RNA, 21 nt, Human
uccuuuucauaggucugaaau

SEQ ID NO: 1403549 - RNA, 20 nt, Human
uccuuuucauaggucugaaa

SEQ ID NO: 1403550 - RNA, 14 nt, Human
uccuuuucauaggu

SEQ ID NO: 1403551 - RNA, 16 nt, Human
ucgaaagcucuagaau

SEQ ID NO: 1403552 - RNA, 14 nt, Human
ucgaaagcucuaga

SEQ ID NO: 1403553 - RNA, 18 nt, Human
ucgaaacacagaaaccuu

SEQ ID NO: 1403554 - RNA, 15 nt, Human
uccuuuuccucucuc

SEQ ID NO: 1403555 - RNA, 19 nt, Human
ucgaaagcucuagaaucug

SEQ ID NO: 1403556 - RNA, 18 nt, Human
ucgaaccguuuugaagcu

SEQ ID NO: 1403557 - RNA, 15 nt, Human
ucgaaccguuuugaa

SEQ ID NO: 1403558 - RNA, 24 nt, Human
uccuuuguucuuaccuguaugucu

SEQ ID NO: 1403559 - RNA, 16 nt, Human
uccuuuguucuuaccu

SEQ ID NO: 1403560 - RNA, 14 nt, Human
uccuuuuaaagaaa

SEQ ID NO: 1403561 - RNA, 17 nt, Human
uccuuuuaauuuuccug

SEQ ID NO: 1403562 - RNA, 23 nt, Human
uccuuuuaaagaaaaaaauugaa

SEQ ID NO: 1403563 - RNA, 13 nt, Human
uccuuuuaaagaa

SEQ ID NO: 1403564 - RNA, 12 nt, Human
uccuuuuaaaga

SEQ ID NO: 1403565 - RNA, 21 nt, Human
uccuuggcaggcugauuucua

SEQ ID NO: 1403566 - RNA, 23 nt, Human
uccuuggcaggcugauuucuagg

SEQ ID NO: 1403567 - RNA, 10 nt, Human
uccuuuguuc

SEQ ID NO: 1403568 - RNA, 16 nt, Human
uccuuggccaugcaga

SEQ ID NO: 1403569 - RNA, 20 nt, Human
ucuaucaaccccagacacug

SEQ ID NO: 1403570 - RNA, 19 nt, Human
ucuaucaaccccagacacu

SEQ ID NO: 1403571 - RNA, 15 nt, Human
ucuaucaaguauuau

SEQ ID NO: 1403572 - RNA, 21 nt, Human
ucuaucaaguauuauaccuuu

SEQ ID NO: 1403573 - RNA, 22 nt, Human
ucuaucaaguauuauaccuuuu

SEQ ID NO: 1403574 - RNA, 18 nt, Human
ucuaugagucuagauguu

SEQ ID NO: 1403575 - RNA, 22 nt, Human
ucuaucaaccccagacacuggu

SEQ ID NO: 1403576 - RNA, 18 nt, Human
ucuaugaaauauuauguu

SEQ ID NO: 1403577 - RNA, 17 nt, Human
ucuaugaaauauuaugu

SEQ ID NO: 1403578 - RNA, 14 nt, Human
ucuaugaaauauua

SEQ ID NO: 1403579 - RNA, 16 nt, Human
ucucaaaggagcgagc

SEQ ID NO: 1403580 - RNA, 15 nt, Human
ucuaugcauuuucug

SEQ ID NO: 1403581 - RNA, 14 nt, Human
ucuaugcauuuucu

SEQ ID NO: 1403582 - RNA, 21 nt, Human
ucuaucaaccccagacacugg

SEQ ID NO: 1403583 - RNA, 13 nt, Human
ucuaugccugucu

SEQ ID NO: 1403584 - RNA, 22 nt, Human
ucuagaaaaacaggcacuuggc

SEQ ID NO: 1403585 - RNA, 18 nt, Human
ucuagaaaaacaggcacu

SEQ ID NO: 1403586 - RNA, 17 nt, Human
ucuagaaaaacaggcac

SEQ ID NO: 1403587 - RNA, 16 nt, Human
ucuagaaaaacaggca

SEQ ID NO: 1403588 - RNA, 20 nt, Human
ucuacuuugaagucauacca

SEQ ID NO: 1403589 - RNA, 12 nt, Human
ucuacuuugaag

SEQ ID NO: 1403590 - RNA, 19 nt, Human
ucuaauucuauuaaagugc

SEQ ID NO: 1403591 - RNA, 21 nt, Human
ucuaauuauguagcucuuugu

SEQ ID NO: 1403592 - RNA, 16 nt, Human
ucuaauucacagugcu

SEQ ID NO: 1403593 - RNA, 19 nt, Human
ucuaauuauguagcucuuu

SEQ ID NO: 1403594 - RNA, 18 nt, Human
ucuaauuauguagcucuu

SEQ ID NO: 1403595 - RNA, 17 nt, Human
ucuaauuaauuguaauc

SEQ ID NO: 1403596 - RNA, 15 nt, Human
ucuaauuaauuguaa

SEQ ID NO: 1403597 - RNA, 19 nt, Human
ucuagugagcagucaggaa

SEQ ID NO: 1403598 - RNA, 19 nt, Human
ucuaggagggagacacugg

SEQ ID NO: 1403599 - RNA, 22 nt, Human
ucuagugagcagucaggaaaga

SEQ ID NO: 1403600 - RNA, 16 nt, Human
ucuagaacacaggcaa

SEQ ID NO: 1403601 - RNA, 15 nt, Human
ucuagaacacaggca

SEQ ID NO: 1403602 - RNA, 13 nt, Human
ucuagaacacagg

SEQ ID NO: 1403603 - RNA, 19 nt, Human
ucuagaaagagaaacaguu

SEQ ID NO: 1403604 - RNA, 23 nt, Human
ucuaggaccaugguuaagagucc

SEQ ID NO: 1403605 - RNA, 16 nt, Human
ucuaggacugaauuau

SEQ ID NO: 1403606 - RNA, 23 nt, Human
ucuaggacugaauuaugaaacuu

SEQ ID NO: 1403607 - RNA, 15 nt, Human
ucggccugcccccac

SEQ ID NO: 1403608 - RNA, 14 nt, Human
ucggccugccccca

SEQ ID NO: 1403609 - RNA, 19 nt, Human
ucggccucccaaagugcug

SEQ ID NO: 1403610 - RNA, 20 nt, Human
ucgaggggugggcugguauc

SEQ ID NO: 1403611 - RNA, 15 nt, Human
ucgugagcucuugug

SEQ ID NO: 1403612 - RNA, 16 nt, Human
ucgugagcucuuguga

SEQ ID NO: 1403613 - RNA, 22 nt, Human
ucgugagcucuugugaggaaag

SEQ ID NO: 1403614 - RNA, 21 nt, Human
ucgugccuguguccaugcgcu

SEQ ID NO: 1403615 - RNA, 15 nt, Human
ucgugccugugucca

SEQ ID NO: 1403616 - RNA, 14 nt, Human
ucgugccugugucc

SEQ ID NO: 1403617 - RNA, 13 nt, Human
ucgugccuguguc

SEQ ID NO: 1403618 - RNA, 12 nt, Human
ucgugccugugu

SEQ ID NO: 1403619 - RNA, 22 nt, Human
ucgugggacagucaccucaugg

SEQ ID NO: 1403620 - RNA, 17 nt, Human
ucguggacacacacaga

SEQ ID NO: 1403621 - RNA, 21 nt, Human
ucguggaacaguuaccucugc

SEQ ID NO: 1403622 - RNA, 23 nt, Human
ucuaacagcccuccucugcacuc

SEQ ID NO: 1403623 - RNA, 22 nt, Human
ucuaacagcccuccucugcacu

SEQ ID NO: 1403624 - RNA, 21 nt, Human
ucuaacagcccuccucugcac

SEQ ID NO: 1403625 - RNA, 20 nt, Human
ucuaacagcccuccucugca

SEQ ID NO: 1403626 - RNA, 13 nt, Human
ucuaacagcccuc

SEQ ID NO: 1403627 - RNA, 12 nt, Human
ucuaacagcccu

SEQ ID NO: 1403628 - RNA, 22 nt, Human
ucuaacagcaccaaaucaaaau

SEQ ID NO: 1403629 - RNA, 14 nt, Human
ucuaacagcaccaa

SEQ ID NO: 1403630 - RNA, 13 nt, Human
ucuaacagcacca

SEQ ID NO: 1403631 - RNA, 13 nt, Human
ucuaacagauuag

SEQ ID NO: 1403632 - RNA, 13 nt, Human
ucuaacaaugaca

SEQ ID NO: 1403633 - RNA, 23 nt, Human
ucuaacaagucauagguuaauau

SEQ ID NO: 1403634 - RNA, 22 nt, Human
ucuaaaucuccaaaauaaaacu

SEQ ID NO: 1403635 - RNA, 14 nt, Human
ucuaauauggccac

SEQ ID NO: 1403636 - RNA, 16 nt, Human
ucuaauagggcaauua

SEQ ID NO: 1403637 - RNA, 22 nt, Human
ucuaauagggcaauuaauuccu

SEQ ID NO: 1403638 - RNA, 16 nt, Human
ucuaaauauggacugc

SEQ ID NO: 1403639 - RNA, 17 nt, Human
ucuaaauaaaaugcuag

SEQ ID NO: 1403640 - RNA, 15 nt, Human
ucuaaauaaaaugcu

SEQ ID NO: 1403641 - RNA, 21 nt, Human
ucuaaaucuccaaaauaaaac

SEQ ID NO: 1403642 - RNA, 18 nt, Human
ucguggggugugcuggga

SEQ ID NO: 1403643 - RNA, 15 nt, Human
ucguggggugugcug

SEQ ID NO: 1403644 - RNA, 12 nt, Human
ucguggggaggu

SEQ ID NO: 1403645 - RNA, 21 nt, Human
ucgugucuggcacagccuggc

SEQ ID NO: 1403646 - RNA, 14 nt, Human
ucgugucuggcaca

SEQ ID NO: 1403647 - RNA, 13 nt, Human
ucguuaauuugua

SEQ ID NO: 1403648 - RNA, 21 nt, Human
ucguguguuucuauuuuuuga

SEQ ID NO: 1403649 - RNA, 13 nt, Human
ucucuguugucgu

SEQ ID NO: 1403650 - RNA, 18 nt, Human
ucucuguugucguaaaga

SEQ ID NO: 1403651 - RNA, 18 nt, Human
ucucuguucauuuccuca

SEQ ID NO: 1403652 - RNA, 17 nt, Human
ucucuguucauuuccuc

SEQ ID NO: 1403653 - RNA, 16 nt, Human
ucucuguucauuuccu

SEQ ID NO: 1403654 - RNA, 14 nt, Human
ucucuguucauuuc

SEQ ID NO: 1403655 - RNA, 13 nt, Human
ucucuguucauuu

SEQ ID NO: 1403656 - RNA, 23 nt, Human
ucucugugucuaagauucuagau

SEQ ID NO: 1403657 - RNA, 10 nt, Human
ucucuguguu

SEQ ID NO: 1403658 - RNA, 18 nt, Human
ucucugugugcacaaaua

SEQ ID NO: 1403659 - RNA, 22 nt, Human
ucucugugucuaagauucuaga

SEQ ID NO: 1403660 - RNA, 21 nt, Human
ucucugugucuaagauucuag

SEQ ID NO: 1403661 - RNA, 20 nt, Human
ucucugugucuaagauucua

SEQ ID NO: 1403662 - RNA, 17 nt, Human
ucucugugucuaagauu

SEQ ID NO: 1403663 - RNA, 16 nt, Human
ucucugugucuaagau

SEQ ID NO: 1403664 - RNA, 15 nt, Human
ucucugugucuaaga

SEQ ID NO: 1403665 - RNA, 14 nt, Human
ucugaaaauauaac

SEQ ID NO: 1403666 - RNA, 13 nt, Human
ucugaaaauauaa

SEQ ID NO: 1403667 - RNA, 20 nt, Human
ucugaaaagugaagacagaa

SEQ ID NO: 1403668 - RNA, 19 nt, Human
ucugaaaagugaagacaga

SEQ ID NO: 1403669 - RNA, 18 nt, Human
ucugaaaagugaagacag

SEQ ID NO: 1403670 - RNA, 14 nt, Human
ucugaaaauugaug

SEQ ID NO: 1403671 - RNA, 12 nt, Human
ucugaaagagaa

SEQ ID NO: 1403672 - RNA, 20 nt, Human
ucugaaaccaguguuaggga

SEQ ID NO: 1403673 - RNA, 15 nt, Human
ucugaaaccaguguu

SEQ ID NO: 1403674 - RNA, 18 nt, Human
ucugaaaauauaaccagc

SEQ ID NO: 1403675 - RNA, 22 nt, Human
ucugaaaauugaugggauuugg

SEQ ID NO: 1403676 - RNA, 13 nt, Human
ucugacagccuca

SEQ ID NO: 1403677 - RNA, 12 nt, Human
ucugacagccuc

SEQ ID NO: 1403678 - RNA, 22 nt, Human
ucugacagcagcaucucuaccu

SEQ ID NO: 1403679 - RNA, 17 nt, Human
ucugacagcagcaucuc

SEQ ID NO: 1403680 - RNA, 14 nt, Human
ucugacagcagcau

SEQ ID NO: 1403681 - RNA, 13 nt, Human
ucugacagcagca

SEQ ID NO: 1403682 - RNA, 15 nt, Human
ucugacauaaguauu

SEQ ID NO: 1403683 - RNA, 14 nt, Human
ucugacagccucag

SEQ ID NO: 1403684 - RNA, 13 nt, Human
ucugacauaaucc

SEQ ID NO: 1403685 - RNA, 19 nt, Human
ucugacauaauccaguaaa

SEQ ID NO: 1403686 - RNA, 23 nt, Human
ucugacauaauccaguaaaauaa

SEQ ID NO: 1403687 - RNA, 13 nt, Human
ucugaacuaaagu

SEQ ID NO: 1403688 - RNA, 20 nt, Human
ucugaacagcugguguagcu

SEQ ID NO: 1403689 - RNA, 21 nt, Human
ucugaacagcugguguagcua

SEQ ID NO: 1403690 - RNA, 17 nt, Human
ucugaacagcuggugua

SEQ ID NO: 1403691 - RNA, 16 nt, Human
ucugaacagcuggugu

SEQ ID NO: 1403692 - RNA, 15 nt, Human
ucugaacagcuggug

SEQ ID NO: 1403693 - RNA, 14 nt, Human
ucugaacagcuggu

SEQ ID NO: 1403694 - RNA, 12 nt, Human
ucugaacagcug

SEQ ID NO: 1403695 - RNA, 15 nt, Human
ucugaacacgaagcu

SEQ ID NO: 1403696 - RNA, 13 nt, Human
ucugaacacauug

SEQ ID NO: 1403697 - RNA, 12 nt, Human
ucugaacacauu

SEQ ID NO: 1403698 - RNA, 20 nt, Human
ucugaaauuuuucuucuuga

SEQ ID NO: 1403699 - RNA, 17 nt, Human
ucugaaauuuuucuucu

SEQ ID NO: 1403700 - RNA, 15 nt, Human
ucugaaauuuuucuu

SEQ ID NO: 1403701 - RNA, 14 nt, Human
ucugaaauuuuucu

SEQ ID NO: 1403702 - RNA, 20 nt, Human
ucugaaauuuccugggagcu

SEQ ID NO: 1403703 - RNA, 18 nt, Human
ucugaaauuuccugggag

SEQ ID NO: 1403704 - RNA, 17 nt, Human
ucugaaauuuccuggga

SEQ ID NO: 1403705 - RNA, 21 nt, Human
ucugcauccucuggagccagc

SEQ ID NO: 1403706 - RNA, 14 nt, Human
ucugcauccucugg

SEQ ID NO: 1403707 - RNA, 19 nt, Human
ucugcauccucuggagcca

SEQ ID NO: 1403708 - RNA, 15 nt, Human
ucugccacccaggau

SEQ ID NO: 1403709 - RNA, 13 nt, Human
ucugccacccagg

SEQ ID NO: 1403710 - RNA, 17 nt, Human
ucugccaaccuaaaacu

SEQ ID NO: 1403711 - RNA, 18 nt, Human
ucugccaaccuaaaacuc

SEQ ID NO: 1403712 - RNA, 14 nt, Human
ucugccaaccuaaa

SEQ ID NO: 1403713 - RNA, 19 nt, Human
ucugccaaaggaugugaua

SEQ ID NO: 1403714 - RNA, 16 nt, Human
ucugcauucuaguacu

SEQ ID NO: 1403715 - RNA, 20 nt, Human
ucugaggccagccuggccuc

SEQ ID NO: 1403716 - RNA, 18 nt, Human
ucugaggccagccuggcc

SEQ ID NO: 1403717 - RNA, 17 nt, Human
ucugaggccagccuggc

SEQ ID NO: 1403718 - RNA, 16 nt, Human
ucugaggccagccugg

SEQ ID NO: 1403719 - RNA, 15 nt, Human
ucugaggccagccug

SEQ ID NO: 1403720 - RNA, 14 nt, Human
ucugaggccagccu

SEQ ID NO: 1403721 - RNA, 13 nt, Human
ucugaggccagcc

SEQ ID NO: 1403722 - RNA, 12 nt, Human
ucugaggccagc

SEQ ID NO: 1403723 - RNA, 22 nt, Human
ucugcacaucuguaaaucuaca

SEQ ID NO: 1403724 - RNA, 21 nt, Human
ucugaggcgccccaacccgug

SEQ ID NO: 1403725 - RNA, 19 nt, Human
ucugaggccagccuggccu

SEQ ID NO: 1403726 - RNA, 15 nt, Human
ucugcaacucugaag

SEQ ID NO: 1403727 - RNA, 14 nt, Human
ucugcaacucugaa

SEQ ID NO: 1403728 - RNA, 22 nt, Human
ucucuaggaccaugguuaagag

SEQ ID NO: 1403729 - RNA, 19 nt, Human
ucucuaacuucaccauauu

SEQ ID NO: 1403730 - RNA, 14 nt, Human
ucucuaacagugga

SEQ ID NO: 1403731 - RNA, 20 nt, Human
ucucuaacaguggacaaagu

SEQ ID NO: 1403732 - RNA, 12 nt, Human
ucucuaacuuca

SEQ ID NO: 1403733 - RNA, 21 nt, Human
ucucguccucguuuguguucu

SEQ ID NO: 1403734 - RNA, 14 nt, Human
ucucgucucuuuua

SEQ ID NO: 1403735 - RNA, 19 nt, Human
ucucguccucguuuguguu

SEQ ID NO: 1403736 - RNA, 18 nt, Human
ucuccuggcuucccaucc

SEQ ID NO: 1403737 - RNA, 21 nt, Human
ucucggcuccccauguguccu

SEQ ID NO: 1403738 - RNA, 15 nt, Human
ucuccuggcuuccca

SEQ ID NO: 1403739 - RNA, 13 nt, Human
ucuccuggcuucc

SEQ ID NO: 1403740 - RNA, 22 nt, Human
ucuccuggcuucccauccccag

SEQ ID NO: 1403741 - RNA, 19 nt, Human
ucuccuguaccucuugagc

SEQ ID NO: 1403742 - RNA, 16 nt, Human
ucuccuguaccucuug

SEQ ID NO: 1403743 - RNA, 17 nt, Human
ucuccuguaccucuuga

SEQ ID NO: 1403744 - RNA, 21 nt, Human
ucuccugcugcucccucagac

SEQ ID NO: 1403745 - RNA, 20 nt, Human
ucuccugcugcucccucaga

SEQ ID NO: 1403746 - RNA, 19 nt, Human
ucuccugcugcucccucag

SEQ ID NO: 1403747 - RNA, 18 nt, Human
ucuccugcugcucccuca

SEQ ID NO: 1403748 - RNA, 17 nt, Human
ucuccugcugcucccuc

SEQ ID NO: 1403749 - RNA, 14 nt, Human
ucuccugcugcucc

SEQ ID NO: 1403750 - RNA, 19 nt, Human
ucuccugccucagccuccc

SEQ ID NO: 1403751 - RNA, 12 nt, Human
ucuccuggcuuc

SEQ ID NO: 1403752 - RNA, 11 nt, Human
ucuccuggagg

SEQ ID NO: 1403753 - RNA, 15 nt, Human
ucuccuguaccucuu

SEQ ID NO: 1403754 - RNA, 21 nt, Human
ucuccuggaagugcuaauuuu

SEQ ID NO: 1403755 - RNA, 15 nt, Human
ucucaaguucuaaga

SEQ ID NO: 1403756 - RNA, 14 nt, Human
ucucaaguucuaag

SEQ ID NO: 1403757 - RNA, 13 nt, Human
ucucaaguucuaa

SEQ ID NO: 1403758 - RNA, 12 nt, Human
ucucaaguucua

SEQ ID NO: 1403759 - RNA, 15 nt, Human
ucucaagcucuuccu

SEQ ID NO: 1403760 - RNA, 13 nt, Human
ucucaagcccugc

SEQ ID NO: 1403761 - RNA, 15 nt, Human
ucucaagagcccugu

SEQ ID NO: 1403762 - RNA, 18 nt, Human
ucucaauauucaauaaag

SEQ ID NO: 1403763 - RNA, 13 nt, Human
ucucaaugcucau

SEQ ID NO: 1403764 - RNA, 20 nt, Human
ucucaaguucuaagauucua

SEQ ID NO: 1403765 - RNA, 18 nt, Human
ucucaaguucuaagauuc

SEQ ID NO: 1403766 - RNA, 17 nt, Human
ucucaaguucuaagauu

SEQ ID NO: 1403767 - RNA, 16 nt, Human
ucucaaguucuaagau

SEQ ID NO: 1403768 - RNA, 22 nt, Human
ucucaaguucuaagauucuaau

SEQ ID NO: 1403769 - RNA, 21 nt, Human
ucucaaguucuaagauucuaa

SEQ ID NO: 1403770 - RNA, 17 nt, Human
ucucaauauucaauaaa

SEQ ID NO: 1403771 - RNA, 20 nt, Human
ucucaauauucaauaaagcu

SEQ ID NO: 1403772 - RNA, 16 nt, Human
ucucucugcccaaccc

SEQ ID NO: 1403773 - RNA, 14 nt, Human
ucucucugcccaac

SEQ ID NO: 1403774 - RNA, 12 nt, Human
ucucucugccca

SEQ ID NO: 1403775 - RNA, 14 nt, Human
ucucucucuacaaa

SEQ ID NO: 1403776 - RNA, 13 nt, Human
ucucucucuacaa

SEQ ID NO: 1403777 - RNA, 17 nt, Human
ucucuaguuccacgccu

SEQ ID NO: 1403778 - RNA, 16 nt, Human
ucucuaguuugauuaa

SEQ ID NO: 1403779 - RNA, 15 nt, Human
ucucuaguuugauua

SEQ ID NO: 1403780 - RNA, 13 nt, Human
ucucugacuucug

SEQ ID NO: 1403781 - RNA, 13 nt, Human
ucucugaagccac

SEQ ID NO: 1403782 - RNA, 15 nt, Human
ucucugauacagaaa

SEQ ID NO: 1403783 - RNA, 21 nt, Human
ucucugaggggcuaccaggaa

SEQ ID NO: 1403784 - RNA, 22 nt, Human
ucucugaggggcuaccaggaaa

SEQ ID NO: 1403785 - RNA, 13 nt, Human
ucucugcaggucc

SEQ ID NO: 1403786 - RNA, 14 nt, Human
ucucugcagguccc

SEQ ID NO: 1403787 - RNA, 11 nt, Human
ucucugugcuu

SEQ ID NO: 1403788 - RNA, 17 nt, Human
ucucugugccuucgucu

SEQ ID NO: 1403789 - RNA, 12 nt, Human
ucucugugccuu

SEQ ID NO: 1403790 - RNA, 23 nt, Human
ucucugucucauccaucaucaug

SEQ ID NO: 1403791 - RNA, 21 nt, Human
ucucugucucauccaucauca

SEQ ID NO: 1403792 - RNA, 14 nt, Human
ucucuguaaagcua

SEQ ID NO: 1403793 - RNA, 12 nt, Human
ucucuguaaagc

SEQ ID NO: 1403794 - RNA, 22 nt, Human
ucucuguaauaaacucauuucu

SEQ ID NO: 1403795 - RNA, 21 nt, Human
ucucugggggcugaggagcag

SEQ ID NO: 1403796 - RNA, 18 nt, Human
ucucuguaauaaacucau

SEQ ID NO: 1403797 - RNA, 16 nt, Human
ucucugucucauccau

SEQ ID NO: 1403798 - RNA, 15 nt, Human
ucucugucucaucca

SEQ ID NO: 1403799 - RNA, 14 nt, Human
ucucugucucaucc

SEQ ID NO: 1403800 - RNA, 12 nt, Human
ucucugucucau

SEQ ID NO: 1403801 - RNA, 17 nt, Human
ucucugguaauauugac

SEQ ID NO: 1403802 - RNA, 18 nt, Human
ucucugggggcugaggag

SEQ ID NO: 1403803 - RNA, 16 nt, Human
ucucugggggcugagg

SEQ ID NO: 1403804 - RNA, 20 nt, Human
ucucugggcuggaugagcuc

SEQ ID NO: 1403805 - RNA, 17 nt, Human
ucucugggcuggaugag

SEQ ID NO: 1403806 - RNA, 16 nt, Human
ucucugggcuggauga

SEQ ID NO: 1403807 - RNA, 22 nt, Human
ucucugggcuggaugagcuccc

SEQ ID NO: 1403808 - RNA, 15 nt, Human
ucucugggcuggaug

SEQ ID NO: 1403809 - RNA, 13 nt, Human
ucucugggcugga

SEQ ID NO: 1403810 - RNA, 12 nt, Human
ucucugggcugg

SEQ ID NO: 1403811 - RNA, 23 nt, Human
ucucuggcuguaaggcucuagau

SEQ ID NO: 1403812 - RNA, 22 nt, Human
ucucuggcuguaaggcucuaga

SEQ ID NO: 1403813 - RNA, 20 nt, Human
ucucuggcuguaaggcucua

SEQ ID NO: 1403814 - RNA, 19 nt, Human
ucucuggcuguaaggcucu

SEQ ID NO: 1403815 - RNA, 15 nt, Human
ucucugcaggucccu

SEQ ID NO: 1403816 - RNA, 16 nt, Human
ucucugcaggucccua

SEQ ID NO: 1403817 - RNA, 18 nt, Human
ucucugcaggucccuaau

SEQ ID NO: 1403818 - RNA, 15 nt, Human
ucucugaugcagcuu

SEQ ID NO: 1403819 - RNA, 16 nt, Human
ucucugaugcagcuua

SEQ ID NO: 1403820 - RNA, 23 nt, Human
ucucugaggggcuaccaggaaag

SEQ ID NO: 1403821 - RNA, 15 nt, Human
ucuucaucccacucc

SEQ ID NO: 1403822 - RNA, 22 nt, Human
ucuuccuggccgccugggucca

SEQ ID NO: 1403823 - RNA, 22 nt, Human
ucuuaggguuaugauuaaguaa

SEQ ID NO: 1403824 - RNA, 18 nt, Human
ucuucagaucucuaacuu

SEQ ID NO: 1403825 - RNA, 23 nt, Human
ucuucagaucucuaacuucacca

SEQ ID NO: 1403826 - RNA, 23 nt, Human
ucuucucguccucguuuguguuc

SEQ ID NO: 1403827 - RNA, 15 nt, Human
ucuucucccuggaau

SEQ ID NO: 1403828 - RNA, 13 nt, Human
ucuugaaaaaugc

SEQ ID NO: 1403829 - RNA, 19 nt, Human
ucuucuccauccuaccaca

SEQ ID NO: 1403830 - RNA, 16 nt, Human
ucuucucccaauucau

SEQ ID NO: 1403831 - RNA, 23 nt, Human
ucuuccuuacuuuuuauauauau

SEQ ID NO: 1403832 - RNA, 22 nt, Human
ucuuccuugaagaacugcaggc

SEQ ID NO: 1403833 - RNA, 20 nt, Human
ucuuccuuacuuuuuauaua

SEQ ID NO: 1403834 - RNA, 14 nt, Human
ucuuccuucccugc

SEQ ID NO: 1403835 - RNA, 15 nt, Human
ucuuccuucccugcu

SEQ ID NO: 1403836 - RNA, 21 nt, Human
ucuuccuugaagaacugcagg

SEQ ID NO: 1403837 - RNA, 17 nt, Human
ucuuccuucccugcugu

SEQ ID NO: 1403838 - RNA, 18 nt, Human
ucuguuuuucuaacuggg

SEQ ID NO: 1403839 - RNA, 21 nt, Human
ucuguuuuguuucgcucuuug

SEQ ID NO: 1403840 - RNA, 19 nt, Human
ucuguuuuguuucgcucuu

SEQ ID NO: 1403841 - RNA, 12 nt, Human
ucuuaaacuaaa

SEQ ID NO: 1403842 - RNA, 16 nt, Human
ucuuaaaccuucaguu

SEQ ID NO: 1403843 - RNA, 16 nt, Human
ucuuaaacacuugcaa

SEQ ID NO: 1403844 - RNA, 18 nt, Human
ucuuaaaguauucuucuc

SEQ ID NO: 1403845 - RNA, 19 nt, Human
ucuuaaagugccaguauuu

SEQ ID NO: 1403846 - RNA, 22 nt, Human
ucuuaaaguauucuucucuucc

SEQ ID NO: 1403847 - RNA, 17 nt, Human
ucuguuuugaaggcaaa

SEQ ID NO: 1403848 - RNA, 12 nt, Human
ucugucuugaag

SEQ ID NO: 1403849 - RNA, 14 nt, Human
ucugucuucuggac

SEQ ID NO: 1403850 - RNA, 13 nt, Human
ucugucugguggc

SEQ ID NO: 1403851 - RNA, 14 nt, Human
ucugucuggcaaug

SEQ ID NO: 1403852 - RNA, 19 nt, Human
ucugucuggaagaugggga

SEQ ID NO: 1403853 - RNA, 21 nt, Human
ucugucugccaaccuaaaacu

SEQ ID NO: 1403854 - RNA, 18 nt, Human
ucugucugccaaccuaaa

SEQ ID NO: 1403855 - RNA, 17 nt, Human
ucugucugguggccccg

SEQ ID NO: 1403856 - RNA, 16 nt, Human
ucugucugguggcccc

SEQ ID NO: 1403857 - RNA, 14 nt, Human
ucugucugucccaa

SEQ ID NO: 1403858 - RNA, 15 nt, Human
ucugucugucccaaa

SEQ ID NO: 1403859 - RNA, 16 nt, Human
ucugucugucccaaag

SEQ ID NO: 1403860 - RNA, 15 nt, Human
ucugucugucugucc

SEQ ID NO: 1403861 - RNA, 18 nt, Human
ucugucugucugucccaa

SEQ ID NO: 1403862 - RNA, 16 nt, Human
ucuuaaccagaucauu

SEQ ID NO: 1403863 - RNA, 17 nt, Human
ucuuaaccagaucauug

SEQ ID NO: 1403864 - RNA, 19 nt, Human
ucuuaaauaagaaacuuuu

SEQ ID NO: 1403865 - RNA, 18 nt, Human
ucuuaaauaagaaacuuu

SEQ ID NO: 1403866 - RNA, 16 nt, Human
ucuuaaauaagaaacu

SEQ ID NO: 1403867 - RNA, 15 nt, Human
ucuuaaauaagaaac

SEQ ID NO: 1403868 - RNA, 21 nt, Human
ucuuaaagugccaguauuuua

SEQ ID NO: 1403869 - RNA, 15 nt, Human
ucuuaaauaaaccuu

SEQ ID NO: 1403870 - RNA, 23 nt, Human
ucuuagcugucugcucagacaga

SEQ ID NO: 1403871 - RNA, 18 nt, Human
ucuuagcugucugcucag

SEQ ID NO: 1403872 - RNA, 15 nt, Human
ucuuagcugucugcu

SEQ ID NO: 1403873 - RNA, 18 nt, Human
ucuuaagaagacugcauu

SEQ ID NO: 1403874 - RNA, 23 nt, Human
ucuuaacuucuugcuucuuucua

SEQ ID NO: 1403875 - RNA, 16 nt, Human
ucuuaacuucuugcuu

SEQ ID NO: 1403876 - RNA, 12 nt, Human
ucuuaagaagac

SEQ ID NO: 1403877 - RNA, 12 nt, Human
ucuuaacuucuu

SEQ ID NO: 1403878 - RNA, 22 nt, Human
ucuuaaccagaucauugugaaa

SEQ ID NO: 1403879 - RNA, 15 nt, Human
ucugccaggagacag

SEQ ID NO: 1403880 - RNA, 13 nt, Human
ucugccagugaca

SEQ ID NO: 1403881 - RNA, 14 nt, Human
ucugccaguccugu

SEQ ID NO: 1403882 - RNA, 24 nt, Human
ucugccagggccccucuccccagg

SEQ ID NO: 1403883 - RNA, 23 nt, Human
ucugccagggccccucuccccag

SEQ ID NO: 1403884 - RNA, 22 nt, Human
ucugccagggccccucucccca

SEQ ID NO: 1403885 - RNA, 20 nt, Human
ucugccagggccccucuccc

SEQ ID NO: 1403886 - RNA, 19 nt, Human
ucugccagggccccucucc

SEQ ID NO: 1403887 - RNA, 21 nt, Human
ucugccagugacagacaggcu

SEQ ID NO: 1403888 - RNA, 19 nt, Human
ucugccagugacagacagg

SEQ ID NO: 1403889 - RNA, 22 nt, Human
ucugcuccccuaaagccucaaa

SEQ ID NO: 1403890 - RNA, 23 nt, Human
ucugcucccaaggggccugagca

SEQ ID NO: 1403891 - RNA, 22 nt, Human
ucugcucccaaggggccugagc

SEQ ID NO: 1403892 - RNA, 20 nt, Human
ucugcucccaaggggccuga

SEQ ID NO: 1403893 - RNA, 19 nt, Human
ucugcucccaaggggccug

SEQ ID NO: 1403894 - RNA, 17 nt, Human
ucugccaguccuguccu

SEQ ID NO: 1403895 - RNA, 23 nt, Human
ucugccagugacagacaggcucu

SEQ ID NO: 1403896 - RNA, 19 nt, Human
ucugcuggggccugggaca

SEQ ID NO: 1403897 - RNA, 16 nt, Human
ucugcuggggccuggg

SEQ ID NO: 1403898 - RNA, 22 nt, Human
ucuggaauacaugaaauauaga

SEQ ID NO: 1403899 - RNA, 14 nt, Human
ucuggaauacauga

SEQ ID NO: 1403900 - RNA, 23 nt, Human
ucugcuggggccugggacaacug

SEQ ID NO: 1403901 - RNA, 19 nt, Human
ucugcuggccucugcgagu

SEQ ID NO: 1403902 - RNA, 17 nt, Human
ucugcuggccucugcga

SEQ ID NO: 1403903 - RNA, 16 nt, Human
ucugcuggccucugcg

SEQ ID NO: 1403904 - RNA, 14 nt, Human
ucugcuggccucug

SEQ ID NO: 1403905 - RNA, 13 nt, Human
ucugcuggccucu

SEQ ID NO: 1403906 - RNA, 19 nt, Human
ucugcugaccugcugaccu

SEQ ID NO: 1403907 - RNA, 20 nt, Human
ucugcugaccugcugaccug

SEQ ID NO: 1403908 - RNA, 18 nt, Human
ucugcugaccugcugacc

SEQ ID NO: 1403909 - RNA, 15 nt, Human
ucugcugaccugcug

SEQ ID NO: 1403910 - RNA, 16 nt, Human
ucugggaccucaguuu

SEQ ID NO: 1403911 - RNA, 13 nt, Human
ucugggaccucag

SEQ ID NO: 1403912 - RNA, 16 nt, Human
ucuggcucuaauucac

SEQ ID NO: 1403913 - RNA, 15 nt, Human
ucuggcucuaauuca

SEQ ID NO: 1403914 - RNA, 12 nt, Human
ucuggcucuaau

SEQ ID NO: 1403915 - RNA, 19 nt, Human
ucuggcuaugcauuugaaa

SEQ ID NO: 1403916 - RNA, 22 nt, Human
ucuggcuaugcauuugaaaauu

SEQ ID NO: 1403917 - RNA, 21 nt, Human
ucugguguuggacaagcuucu

SEQ ID NO: 1403918 - RNA, 16 nt, Human
ucugguggucuguugg

SEQ ID NO: 1403919 - RNA, 14 nt, Human
ucugguggccccgu

SEQ ID NO: 1403920 - RNA, 12 nt, Human
ucugguggcccc

SEQ ID NO: 1403921 - RNA, 16 nt, Human
ucuggugccuccagag

SEQ ID NO: 1403922 - RNA, 15 nt, Human
ucuggugccuccaga

SEQ ID NO: 1403923 - RNA, 13 nt, Human
ucuggugccucca

SEQ ID NO: 1403924 - RNA, 20 nt, Human
ucuggugagucaccacuuca

SEQ ID NO: 1403925 - RNA, 17 nt, Human
ucuggugagucaccacu

SEQ ID NO: 1403926 - RNA, 14 nt, Human
ucugguucucaauu

SEQ ID NO: 1403927 - RNA, 14 nt, Human
ucugguuccagggu

SEQ ID NO: 1403928 - RNA, 13 nt, Human
ucugguuccaggg

SEQ ID NO: 1403929 - RNA, 12 nt, Human
ucugguuccagg

SEQ ID NO: 1403930 - RNA, 23 nt, Human
ucugguuccagggucccucugug

SEQ ID NO: 1403931 - RNA, 21 nt, Human
ucugguuccagggucccucug

SEQ ID NO: 1403932 - RNA, 13 nt, Human
ucugguucuaaca

SEQ ID NO: 1403933 - RNA, 11 nt, Human
ucugguucuaa

SEQ ID NO: 1403934 - RNA, 15 nt, Human
ucuguccuugaagga

SEQ ID NO: 1403935 - RNA, 21 nt, Human
ucugucucgagcgcccugcag

SEQ ID NO: 1403936 - RNA, 22 nt, Human
ucugucucgagcgcccugcaga

SEQ ID NO: 1403937 - RNA, 18 nt, Human
ucuguccuugaaggacua

SEQ ID NO: 1403938 - RNA, 22 nt, Human
ucugucucuggauuauauuaug

SEQ ID NO: 1403939 - RNA, 20 nt, Human
ugcaauguguguauauggac

SEQ ID NO: 1403940 - RNA, 21 nt, Human
ugcaauguguauaaacaagaa

SEQ ID NO: 1403941 - RNA, 20 nt, Human
ugcaauguguauaaacaaga

SEQ ID NO: 1403942 - RNA, 18 nt, Human
ugcaauguguauaaacaa

SEQ ID NO: 1403943 - RNA, 16 nt, Human
ugcaauguguauaaac

SEQ ID NO: 1403944 - RNA, 15 nt, Human
ugcaauguguauaaa

SEQ ID NO: 1403945 - RNA, 14 nt, Human
ugcaauguguauaa

SEQ ID NO: 1403946 - RNA, 13 nt, Human
ugcaauguguaua

SEQ ID NO: 1403947 - RNA, 22 nt, Human
ugcaauguaaauauuuuaaaga

SEQ ID NO: 1403948 - RNA, 11 nt, Human
ugcaaugaaca

SEQ ID NO: 1403949 - RNA, 20 nt, Human
ugcaauuucaagguucuaac

SEQ ID NO: 1403950 - RNA, 19 nt, Human
ugcaauuucaagguucuaa

SEQ ID NO: 1403951 - RNA, 18 nt, Human
ugcaauuucaagguucua

SEQ ID NO: 1403952 - RNA, 17 nt, Human
ugcaauuucaagguucu

SEQ ID NO: 1403953 - RNA, 13 nt, Human
ugcaauuucaagg

SEQ ID NO: 1403954 - RNA, 12 nt, Human
ugcaauuucaag

SEQ ID NO: 1403955 - RNA, 22 nt, Human
ugcaauuggcaccgaagcccag

SEQ ID NO: 1403956 - RNA, 23 nt, Human
ugcaauuggcaccgaagcccaga

SEQ ID NO: 1403957 - RNA, 21 nt, Human
ugcaauugccuuuuuucugua

SEQ ID NO: 1403958 - RNA, 18 nt, Human
ugcaauuccccucugcug

SEQ ID NO: 1403959 - RNA, 14 nt, Human
ugcaauuccccucu

SEQ ID NO: 1403960 - RNA, 13 nt, Human
ugcaauuccccuc

SEQ ID NO: 1403961 - RNA, 21 nt, Human
ugcaauucaaaaguuccaaga

SEQ ID NO: 1403962 - RNA, 19 nt, Human
ugcaauucaaaaguuccaa

SEQ ID NO: 1403963 - RNA, 18 nt, Human
ugcaauucaaaaguucca

SEQ ID NO: 1403964 - RNA, 17 nt, Human
ugcaauucaaaaguucc

SEQ ID NO: 1403965 - RNA, 16 nt, Human
ugcaauucaaaaguuc

SEQ ID NO: 1403966 - RNA, 14 nt, Human
ugcaauucaaaagu

SEQ ID NO: 1403967 - RNA, 19 nt, Human
ugcaauguguguauaugga

SEQ ID NO: 1403968 - RNA, 19 nt, Human
ugcacaaaacccagaccug

SEQ ID NO: 1403969 - RNA, 18 nt, Human
ugcacaaaacccagaccu

SEQ ID NO: 1403970 - RNA, 17 nt, Human
ugcacagaguuguuaca

SEQ ID NO: 1403971 - RNA, 18 nt, Human
ugcacagaguuguuacau

SEQ ID NO: 1403972 - RNA, 19 nt, Human
ugcacagaguuguuacauu

SEQ ID NO: 1403973 - RNA, 15 nt, Human
ugcacugugaaggac

SEQ ID NO: 1403974 - RNA, 18 nt, Human
ugcaccuuucuaguugaa

SEQ ID NO: 1403975 - RNA, 17 nt, Human
ugcacgcacacugucug

SEQ ID NO: 1403976 - RNA, 18 nt, Human
ugcacuuacuugcuuauu

SEQ ID NO: 1403977 - RNA, 16 nt, Human
ugcacuuacuugcuua

SEQ ID NO: 1403978 - RNA, 15 nt, Human
ugcacuuacuugcuu

SEQ ID NO: 1403979 - RNA, 23 nt, Human
ugcacuguucccccugugcagcc

SEQ ID NO: 1403980 - RNA, 21 nt, Human
ugcacuguucccccugugcag

SEQ ID NO: 1403981 - RNA, 20 nt, Human
ugcacuguucccccugugca

SEQ ID NO: 1403982 - RNA, 19 nt, Human
ugcacuguucccccugugc

SEQ ID NO: 1403983 - RNA, 14 nt, Human
ugcacuguuccccc

SEQ ID NO: 1403984 - RNA, 13 nt, Human
ugcacuguucccc

SEQ ID NO: 1403985 - RNA, 18 nt, Human
ugcacugugaaggacccu

SEQ ID NO: 1403986 - RNA, 15 nt, Human
ugcacuucaaauuca

SEQ ID NO: 1403987 - RNA, 14 nt, Human
ugcacuucuuacaa

SEQ ID NO: 1403988 - RNA, 22 nt, Human
ugcacuuauuuaugaaccugcc

SEQ ID NO: 1403989 - RNA, 18 nt, Human
ugcacgaccgccccaguu

SEQ ID NO: 1403990 - RNA, 14 nt, Human
ugcaccuuucuagu

SEQ ID NO: 1403991 - RNA, 16 nt, Human
ugcacgcacacugucu

SEQ ID NO: 1403992 - RNA, 20 nt, Human
ugcacagugacuucugagau

SEQ ID NO: 1403993 - RNA, 17 nt, Human
ugcaccuggaauauaua

SEQ ID NO: 1403994 - RNA, 20 nt, Human
ugcaccuggaauauauaacc

SEQ ID NO: 1403995 - RNA, 22 nt, Human
ugcaccuggaauauauaaccag

SEQ ID NO: 1403996 - RNA, 16 nt, Human
ugcacagugacuucug

SEQ ID NO: 1403997 - RNA, 15 nt, Human
ugcacagugacuucu

SEQ ID NO: 1403998 - RNA, 17 nt, Human
ugcacagucacugcucu

SEQ ID NO: 1403999 - RNA, 23 nt, Human
ugcacaguauuuguaauuaaaag

SEQ ID NO: 1404000 - RNA, 20 nt, Human
ugcacaguauuuguaauuaa

SEQ ID NO: 1404001 - RNA, 19 nt, Human
ugcacaguauuuguaauua

SEQ ID NO: 1404002 - RNA, 18 nt, Human
ugcacaguauuuguaauu

SEQ ID NO: 1404003 - RNA, 17 nt, Human
ugcacaguauuuguaau

SEQ ID NO: 1404004 - RNA, 21 nt, Human
ugcacagugacuucugagauc

SEQ ID NO: 1404005 - RNA, 19 nt, Human
ugcacagugacuucugaga

SEQ ID NO: 1404006 - RNA, 17 nt, Human
ugcacagugacuucuga

SEQ ID NO: 1404007 - RNA, 21 nt, Human
ugcacaaauauuuauuuucuu

SEQ ID NO: 1404008 - RNA, 16 nt, Human
ugcacaguauuuguaa

SEQ ID NO: 1404009 - RNA, 14 nt, Human
ugcacaguaaaaau

SEQ ID NO: 1404010 - RNA, 20 nt, Human
ugcacagaguuguuacauuu

SEQ ID NO: 1404011 - RNA, 22 nt, Human
ugcaaaaggacucucaggacca

SEQ ID NO: 1404012 - RNA, 17 nt, Human
ugcaaccaggaacagca

SEQ ID NO: 1404013 - RNA, 12 nt, Human
ugcaaccaggaa

SEQ ID NO: 1404014 - RNA, 15 nt, Human
ugcaacaugaugagg

SEQ ID NO: 1404015 - RNA, 24 nt, Human
ugcaacaggguauggacuaucugu

SEQ ID NO: 1404016 - RNA, 16 nt, Human
ugcaaccauuugaaac

SEQ ID NO: 1404017 - RNA, 20 nt, Human
ugcaaccaggaacagcaaau

SEQ ID NO: 1404018 - RNA, 16 nt, Human
ugcaaccgucuguuau

SEQ ID NO: 1404019 - RNA, 13 nt, Human
ugcaaccuccacc

SEQ ID NO: 1404020 - RNA, 21 nt, Human
ugcaaccuccaccuccugggu

SEQ ID NO: 1404021 - RNA, 20 nt, Human
ugcaaccuccaccuccuggg

SEQ ID NO: 1404022 - RNA, 19 nt, Human
ugcaaccuccaccuccugg

SEQ ID NO: 1404023 - RNA, 18 nt, Human
ugcaaccuccaccuccug

SEQ ID NO: 1404024 - RNA, 15 nt, Human
ugcaaccuccaccuc

SEQ ID NO: 1404025 - RNA, 20 nt, Human
ugcaaccucgcuggacucuc

SEQ ID NO: 1404026 - RNA, 19 nt, Human
ugcaaccucgcuggacucu

SEQ ID NO: 1404027 - RNA, 14 nt, Human
ugcaaccucgcugg

SEQ ID NO: 1404028 - RNA, 18 nt, Human
ugcaaccucuuggccuga

SEQ ID NO: 1404029 - RNA, 22 nt, Human
ugcaaccucgcuggacucucag

SEQ ID NO: 1404030 - RNA, 14 nt, Human
ugcaaccucugccu

SEQ ID NO: 1404031 - RNA, 17 nt, Human
ugcaacucaaggacuuu

SEQ ID NO: 1404032 - RNA, 16 nt, Human
ugcaacucaaggacuu

SEQ ID NO: 1404033 - RNA, 14 nt, Human
ugcaaccuucaccu

SEQ ID NO: 1404034 - RNA, 22 nt, Human
ugcaacucugaaggguaauuau

SEQ ID NO: 1404035 - RNA, 18 nt, Human
ugcaacuuuguauaaaag

SEQ ID NO: 1404036 - RNA, 14 nt, Human
ugaugugaagccaa

SEQ ID NO: 1404037 - RNA, 22 nt, Human
ugaugugaagccaauucagaca

SEQ ID NO: 1404038 - RNA, 20 nt, Human
ugaugucuccuaagcaccug

SEQ ID NO: 1404039 - RNA, 23 nt, Human
ugaugucuuuguuaagacugcug

SEQ ID NO: 1404040 - RNA, 16 nt, Human
ugaugucuccuaagca

SEQ ID NO: 1404041 - RNA, 12 nt, Human
ugaugucuccua

SEQ ID NO: 1404042 - RNA, 19 nt, Human
ugaugugcacguaaaguac

SEQ ID NO: 1404043 - RNA, 20 nt, Human
ugauuuuaggagcuaaggcu

SEQ ID NO: 1404044 - RNA, 19 nt, Human
ugauuuuagccuucucugu

SEQ ID NO: 1404045 - RNA, 15 nt, Human
ugauuuuagccuucu

SEQ ID NO: 1404046 - RNA, 22 nt, Human
ugauuuuaaguuucucugcaga

SEQ ID NO: 1404047 - RNA, 19 nt, Human
ugauuuuaaguuucucugc

SEQ ID NO: 1404048 - RNA, 19 nt, Human
ugauuuuaagaauccaaac

SEQ ID NO: 1404049 - RNA, 23 nt, Human
ugauuuugaaccugaugaaaaua

SEQ ID NO: 1404050 - RNA, 11 nt, Human
ugauuuugaac

SEQ ID NO: 1404051 - RNA, 13 nt, Human
ugauuuucuggau

SEQ ID NO: 1404052 - RNA, 20 nt, Human
ugauuuucaaagcuuuuucc

SEQ ID NO: 1404053 - RNA, 22 nt, Human
ugauuuuaggagcuaaggcucu

SEQ ID NO: 1404054 - RNA, 16 nt, Human
ugauuuuuuuuccuuu

SEQ ID NO: 1404055 - RNA, 17 nt, Human
ugauuuuuuuuaauuac

SEQ ID NO: 1404056 - RNA, 22 nt, Human
ugauuuuugccucuuccagucu

SEQ ID NO: 1404057 - RNA, 21 nt, Human
ugauuuuugccucuuccaguc

SEQ ID NO: 1404058 - RNA, 14 nt, Human
ugauuuuucuuuac

SEQ ID NO: 1404059 - RNA, 15 nt, Human
ugauuuuucuuuaca

SEQ ID NO: 1404060 - RNA, 23 nt, Human
ugauuuuuauaaauacugcaaau

SEQ ID NO: 1404061 - RNA, 18 nt, Human
ugauuuuuaugccaccug

SEQ ID NO: 1404062 - RNA, 21 nt, Human
ugauuuuuuuuuuuuuuuccu

SEQ ID NO: 1404063 - RNA, 20 nt, Human
ugauuuuuuuuuuuuuuucc

SEQ ID NO: 1404064 - RNA, 22 nt, Human
ugauuuuuuuuucauacacuua

SEQ ID NO: 1404065 - RNA, 18 nt, Human
ugauuuuuuuuucauaca

SEQ ID NO: 1404066 - RNA, 19 nt, Human
ugcaaaaggacucucagga

SEQ ID NO: 1404067 - RNA, 21 nt, Human
ugcaaaaacucuuugagaggg

SEQ ID NO: 1404068 - RNA, 19 nt, Human
ugcaaaaacuacaaccaau

SEQ ID NO: 1404069 - RNA, 14 nt, Human
ugcaaaaaggguca

SEQ ID NO: 1404070 - RNA, 17 nt, Human
ugccucgaaacacagaa

SEQ ID NO: 1404071 - RNA, 13 nt, Human
ugccucgaaacac

SEQ ID NO: 1404072 - RNA, 24 nt, Human
ugccuccucacccccagcuuugcu

SEQ ID NO: 1404073 - RNA, 19 nt, Human
ugccuccucacccccagcu

SEQ ID NO: 1404074 - RNA, 21 nt, Human
ugccucgaaacacagaaaccu

SEQ ID NO: 1404075 - RNA, 21 nt, Human
ugccucugugcugugugugac

SEQ ID NO: 1404076 - RNA, 13 nt, Human
ugccuaagcccuc

SEQ ID NO: 1404077 - RNA, 14 nt, Human
ugccucccugagcu

SEQ ID NO: 1404078 - RNA, 23 nt, Human
ugccucccucucguaagauuucc

SEQ ID NO: 1404079 - RNA, 22 nt, Human
ugccucccucucguaagauuuc

SEQ ID NO: 1404080 - RNA, 12 nt, Human
ugccuccucacc

SEQ ID NO: 1404081 - RNA, 23 nt, Human
ugccuccguccccugcccaugcu

SEQ ID NO: 1404082 - RNA, 19 nt, Human
ugccuccguccccugccca

SEQ ID NO: 1404083 - RNA, 19 nt, Human
ugccucccuuguggcagca

SEQ ID NO: 1404084 - RNA, 13 nt, Human
ugccucccugagc

SEQ ID NO: 1404085 - RNA, 16 nt, Human
ugccucccuucaugca

SEQ ID NO: 1404086 - RNA, 23 nt, Human
ugccugguauauccaaaagcuuu

SEQ ID NO: 1404087 - RNA, 20 nt, Human
ugccugguauauccaaaagc

SEQ ID NO: 1404088 - RNA, 15 nt, Human
ugccugguacaguau

SEQ ID NO: 1404089 - RNA, 14 nt, Human
ugccugguacagua

SEQ ID NO: 1404090 - RNA, 19 nt, Human
ugccugccagcugcacuga

SEQ ID NO: 1404091 - RNA, 15 nt, Human
ugccugccagcugca

SEQ ID NO: 1404092 - RNA, 23 nt, Human
ugccugcauaggaguuuggagga

SEQ ID NO: 1404093 - RNA, 16 nt, Human
ugccugccagcugcac

SEQ ID NO: 1404094 - RNA, 13 nt, Human
ugccucuucuggg

SEQ ID NO: 1404095 - RNA, 17 nt, Human
ugccucuuccuugaaga

SEQ ID NO: 1404096 - RNA, 23 nt, Human
ugccucuuccagucuuccugaca

SEQ ID NO: 1404097 - RNA, 21 nt, Human
ugccucuuccagucuuccuga

SEQ ID NO: 1404098 - RNA, 14 nt, Human
ugccucuucauucu

SEQ ID NO: 1404099 - RNA, 14 nt, Human
ugccucuucccucu

SEQ ID NO: 1404100 - RNA, 23 nt, Human
ugccguggggccgccgccucuuu

SEQ ID NO: 1404101 - RNA, 22 nt, Human
ugccguggauugcacguggccu

SEQ ID NO: 1404102 - RNA, 20 nt, Human
ugccguggauugcacguggc

SEQ ID NO: 1404103 - RNA, 19 nt, Human
ugccgucagugcugugcug

SEQ ID NO: 1404104 - RNA, 14 nt, Human
ugccguaauuuaac

SEQ ID NO: 1404105 - RNA, 22 nt, Human
ugcccugguggcccucuccccu

SEQ ID NO: 1404106 - RNA, 21 nt, Human
ugcccugguggcccucucccc

SEQ ID NO: 1404107 - RNA, 16 nt, Human
ugcccugguggcccuc

SEQ ID NO: 1404108 - RNA, 21 nt, Human
ugcccggggaaaggcaagguc

SEQ ID NO: 1404109 - RNA, 21 nt, Human
ugcccagaauaaguuauugca

SEQ ID NO: 1404110 - RNA, 19 nt, Human
ugcccagaauaaguuauug

SEQ ID NO: 1404111 - RNA, 17 nt, Human
ugcccagaauaaguuau

SEQ ID NO: 1404112 - RNA, 17 nt, Human
ugcccgggagcucagga

SEQ ID NO: 1404113 - RNA, 18 nt, Human
ugcccggggaaaggcaag

SEQ ID NO: 1404114 - RNA, 18 nt, Human
ugcccgggagcucaggaa

SEQ ID NO: 1404115 - RNA, 14 nt, Human
ugcccugcccugcc

SEQ ID NO: 1404116 - RNA, 15 nt, Human
ugcccugcccugcca

SEQ ID NO: 1404117 - RNA, 18 nt, Human
ugcccugcccugccaccu

SEQ ID NO: 1404118 - RNA, 17 nt, Human
ugcccuaaaguguauuu

SEQ ID NO: 1404119 - RNA, 19 nt, Human
ugcccuaaaguguauuuuu

SEQ ID NO: 1404120 - RNA, 23 nt, Human
ugccagggccccucuccccaggg

SEQ ID NO: 1404121 - RNA, 21 nt, Human
ugccagggccccucuccccag

SEQ ID NO: 1404122 - RNA, 18 nt, Human
ugccagggccccucuccc

SEQ ID NO: 1404123 - RNA, 17 nt, Human
ugccagggccccucucc

SEQ ID NO: 1404124 - RNA, 16 nt, Human
ugccagggcagggccc

SEQ ID NO: 1404125 - RNA, 15 nt, Human
ugccagggcagggcc

SEQ ID NO: 1404126 - RNA, 17 nt, Human
ugccaggugaggucagc

SEQ ID NO: 1404127 - RNA, 22 nt, Human
ugccacugaggggggauccagu

SEQ ID NO: 1404128 - RNA, 22 nt, Human
ugccacucacuaggcccccacu

SEQ ID NO: 1404129 - RNA, 21 nt, Human
ugccacucacuaggcccccac

SEQ ID NO: 1404130 - RNA, 20 nt, Human
ugccacucacuaggccccca

SEQ ID NO: 1404131 - RNA, 19 nt, Human
ugccacucacuaggccccc

SEQ ID NO: 1404132 - RNA, 18 nt, Human
ugccacucacuaggcccc

SEQ ID NO: 1404133 - RNA, 17 nt, Human
ugccacucacuaggccc

SEQ ID NO: 1404134 - RNA, 15 nt, Human
ugccacucacuaggc

SEQ ID NO: 1404135 - RNA, 14 nt, Human
ugccacucacuagg

SEQ ID NO: 1404136 - RNA, 13 nt, Human
ugccacucacuag

SEQ ID NO: 1404137 - RNA, 19 nt, Human
ugcccacggagucgugggg

SEQ ID NO: 1404138 - RNA, 17 nt, Human
ugccaugucaaacaaau

SEQ ID NO: 1404139 - RNA, 18 nt, Human
ugccaugucaaacaaaua

SEQ ID NO: 1404140 - RNA, 19 nt, Human
ugccaugaugccucugucu

SEQ ID NO: 1404141 - RNA, 17 nt, Human
ugccaugaugccucugu

SEQ ID NO: 1404142 - RNA, 18 nt, Human
ugccauguacaguauguu

SEQ ID NO: 1404143 - RNA, 16 nt, Human
ugccaugaugccucug

SEQ ID NO: 1404144 - RNA, 20 nt, Human
ugccaugacaacuucuaauu

SEQ ID NO: 1404145 - RNA, 23 nt, Human
ugcaucccaaaccacgccucuug

SEQ ID NO: 1404146 - RNA, 22 nt, Human
ugcaucccaaaccacgccucuu

SEQ ID NO: 1404147 - RNA, 19 nt, Human
ugcauccauucuccugagg

SEQ ID NO: 1404148 - RNA, 18 nt, Human
ugcauccauucuccugag

SEQ ID NO: 1404149 - RNA, 18 nt, Human
ugcagauggugagagaua

SEQ ID NO: 1404150 - RNA, 12 nt, Human
ugcauguaguaa

SEQ ID NO: 1404151 - RNA, 17 nt, Human
ugcauguacuguauauu

SEQ ID NO: 1404152 - RNA, 18 nt, Human
ugcaugguuucagcacua

SEQ ID NO: 1404153 - RNA, 23 nt, Human
ugcauguaacgcaaguucccagu

SEQ ID NO: 1404154 - RNA, 22 nt, Human
ugcaugguuucagcacuagcca

SEQ ID NO: 1404155 - RNA, 17 nt, Human
ugcaugguuucagcacu

SEQ ID NO: 1404156 - RNA, 16 nt, Human
ugcaugguuucagcac

SEQ ID NO: 1404157 - RNA, 15 nt, Human
ugcaugguuucagca

SEQ ID NO: 1404158 - RNA, 14 nt, Human
ugcaugguuucagc

SEQ ID NO: 1404159 - RNA, 14 nt, Human
ugcauguaguaaca

SEQ ID NO: 1404160 - RNA, 17 nt, Human
ugcauguaguaacacua

SEQ ID NO: 1404161 - RNA, 20 nt, Human
ugcauguugucuaagaaauu

SEQ ID NO: 1404162 - RNA, 19 nt, Human
ugcauguugucuaagaaau

SEQ ID NO: 1404163 - RNA, 18 nt, Human
ugcauguugucuaagaaa

SEQ ID NO: 1404164 - RNA, 15 nt, Human
ugcauguuugugauu

SEQ ID NO: 1404165 - RNA, 21 nt, Human
ugcauuuguuuuguuuacaga

SEQ ID NO: 1404166 - RNA, 22 nt, Human
ugcauuuguuuauguaauuuca

SEQ ID NO: 1404167 - RNA, 21 nt, Human
ugcauuuguuuauguaauuuc

SEQ ID NO: 1404168 - RNA, 20 nt, Human
ugcauuuguuuauguaauuu

SEQ ID NO: 1404169 - RNA, 19 nt, Human
ugcauuuguuuauguaauu

SEQ ID NO: 1404170 - RNA, 18 nt, Human
ugcauuuguuuauguaau

SEQ ID NO: 1404171 - RNA, 13 nt, Human
ugcauuuguuuau

SEQ ID NO: 1404172 - RNA, 22 nt, Human
ugcauuauaucaaaucuaccac

SEQ ID NO: 1404173 - RNA, 22 nt, Human
ugcauuagggaugccuccuuuc

SEQ ID NO: 1404174 - RNA, 19 nt, Human
ugcauuagggaugccuccu

SEQ ID NO: 1404175 - RNA, 23 nt, Human
ugcauuuuggagaguuuccugaa

SEQ ID NO: 1404176 - RNA, 18 nt, Human
ugcauuuuguuugguauu

SEQ ID NO: 1404177 - RNA, 22 nt, Human
ugcauuuuguuugguauuguau

SEQ ID NO: 1404178 - RNA, 18 nt, Human
ugcauuacugcaugcacu

SEQ ID NO: 1404179 - RNA, 17 nt, Human
ugcauuacugcaugcac

SEQ ID NO: 1404180 - RNA, 15 nt, Human
ugcauuacugcaugc

SEQ ID NO: 1404181 - RNA, 21 nt, Human
ugcauguugucuaagaaauug

SEQ ID NO: 1404182 - RNA, 14 nt, Human
ugcauuauauuuau

SEQ ID NO: 1404183 - RNA, 12 nt, Human
ugcauuaucuag

SEQ ID NO: 1404184 - RNA, 17 nt, Human
ugcauuaucuagauacu

SEQ ID NO: 1404185 - RNA, 18 nt, Human
ugcauuaucuagauacug

SEQ ID NO: 1404186 - RNA, 17 nt, Human
ugaccuccgccauccac

SEQ ID NO: 1404187 - RNA, 18 nt, Human
ugaccucugcagcaauaa

SEQ ID NO: 1404188 - RNA, 21 nt, Human
ugaccucugcagcaauaaagc

SEQ ID NO: 1404189 - RNA, 23 nt, Human
ugaccucugcagcaauaaagcag

SEQ ID NO: 1404190 - RNA, 18 nt, Human
ugaccuccagcuuuccug

SEQ ID NO: 1404191 - RNA, 13 nt, Human
ugaccuccagcuu

SEQ ID NO: 1404192 - RNA, 19 nt, Human
ugaccuccgccauccaccc

SEQ ID NO: 1404193 - RNA, 18 nt, Human
ugaccucgugauccaccc

SEQ ID NO: 1404194 - RNA, 13 nt, Human
ugaccucugcagc

SEQ ID NO: 1404195 - RNA, 16 nt, Human
ugaccucugcagcaau

SEQ ID NO: 1404196 - RNA, 14 nt, Human
ugacccugagcuga

SEQ ID NO: 1404197 - RNA, 15 nt, Human
ugacccugaagugag

SEQ ID NO: 1404198 - RNA, 17 nt, Human
ugacccugagcugacca

SEQ ID NO: 1404199 - RNA, 22 nt, Human
ugacccuccaccgcagaaggaa

SEQ ID NO: 1404200 - RNA, 23 nt, Human
ugacccuccaccgcagaaggaag

SEQ ID NO: 1404201 - RNA, 22 nt, Human
ugacccugccucucccaggcag

SEQ ID NO: 1404202 - RNA, 19 nt, Human
ugacccugccucucccagg

SEQ ID NO: 1404203 - RNA, 18 nt, Human
ugacccugccucucccag

SEQ ID NO: 1404204 - RNA, 13 nt, Human
ugacccugccucu

SEQ ID NO: 1404205 - RNA, 12 nt, Human
ugacccugccuc

SEQ ID NO: 1404206 - RNA, 17 nt, Human
ugaccuaaauuauuuac

SEQ ID NO: 1404207 - RNA, 23 nt, Human
ugaccuauaccuguguuucuugc

SEQ ID NO: 1404208 - RNA, 17 nt, Human
ugaccuauaccuguguu

SEQ ID NO: 1404209 - RNA, 22 nt, Human
ugaccuaguuuuccaugcgugu

SEQ ID NO: 1404210 - RNA, 17 nt, Human
ugaccuaguuuuccaug

SEQ ID NO: 1404211 - RNA, 20 nt, Human
ugaccucaagugaucugccc

SEQ ID NO: 1404212 - RNA, 13 nt, Human
ucuugaaggugcu

SEQ ID NO: 1404213 - RNA, 16 nt, Human
ucuugaauaauguaag

SEQ ID NO: 1404214 - RNA, 19 nt, Human
ugacggccagggagaagcu

SEQ ID NO: 1404215 - RNA, 23 nt, Human
ugacgccaggguaugaagagugu

SEQ ID NO: 1404216 - RNA, 20 nt, Human
ugacgacaagugcugaacag

SEQ ID NO: 1404217 - RNA, 15 nt, Human
ugacgacaagugcug

SEQ ID NO: 1404218 - RNA, 23 nt, Human
ugaccuuuuauguaguaauugac

SEQ ID NO: 1404219 - RNA, 18 nt, Human
ugaccuuuuauguaguaa

SEQ ID NO: 1404220 - RNA, 17 nt, Human
ugaccuuuuauguagua

SEQ ID NO: 1404221 - RNA, 18 nt, Human
ugacgucuggguggcccu

SEQ ID NO: 1404222 - RNA, 24 nt, Human
ugacgugaccggacuuuucugcaa

SEQ ID NO: 1404223 - RNA, 22 nt, Human
ugacgugaccggacuuuucugc

SEQ ID NO: 1404224 - RNA, 17 nt, Human
ugacgugaccggacuuu

SEQ ID NO: 1404225 - RNA, 15 nt, Human
ugacgucuggguggc

SEQ ID NO: 1404226 - RNA, 14 nt, Human
ugacgucugggugg

SEQ ID NO: 1404227 - RNA, 12 nt, Human
ugacucuuaaga

SEQ ID NO: 1404228 - RNA, 13 nt, Human
ugacugaauuucu

SEQ ID NO: 1404229 - RNA, 20 nt, Human
ugacugagggugaguuggcu

SEQ ID NO: 1404230 - RNA, 13 nt, Human
ugacucuuaagaa

SEQ ID NO: 1404231 - RNA, 14 nt, Human
ugacugaauuucuu

SEQ ID NO: 1404232 - RNA, 15 nt, Human
ugacugaauuucuuu

SEQ ID NO: 1404233 - RNA, 23 nt, Human
ugacugguguuaucaccgugggc

SEQ ID NO: 1404234 - RNA, 22 nt, Human
ugacugccaagacugcuguggc

SEQ ID NO: 1404235 - RNA, 21 nt, Human
ugacugccaagacugcugugg

SEQ ID NO: 1404236 - RNA, 14 nt, Human
ugacugccaagacu

SEQ ID NO: 1404237 - RNA, 17 nt, Human
ugagaaauuuaaacuau

SEQ ID NO: 1404238 - RNA, 15 nt, Human
ugagaaauuuaaacu

SEQ ID NO: 1404239 - RNA, 14 nt, Human
ugagaaauuuaaac

SEQ ID NO: 1404240 - RNA, 13 nt, Human
ugagaaauuuaaa

SEQ ID NO: 1404241 - RNA, 17 nt, Human
ugacuguagcuuuggaa

SEQ ID NO: 1404242 - RNA, 17 nt, Human
ugagaaaucuaaaaaac

SEQ ID NO: 1404243 - RNA, 12 nt, Human
ugagaggcccug

SEQ ID NO: 1404244 - RNA, 20 nt, Human
ugagaccuaaucucuguaaa

SEQ ID NO: 1404245 - RNA, 19 nt, Human
ugagaccuaaucucuguaa

SEQ ID NO: 1404246 - RNA, 18 nt, Human
ugagaccuaaucucugua

SEQ ID NO: 1404247 - RNA, 20 nt, Human
ugagaugauacauccaaagc

SEQ ID NO: 1404248 - RNA, 22 nt, Human
ugagagguuugacuagaugaug

SEQ ID NO: 1404249 - RNA, 18 nt, Human
ugagauccuuccuuuuga

SEQ ID NO: 1404250 - RNA, 14 nt, Human
ugagagguuugacu

SEQ ID NO: 1404251 - RNA, 23 nt, Human
ugagaggcccuggaucagcgugg

SEQ ID NO: 1404252 - RNA, 17 nt, Human
ugagaggcccuggauca

SEQ ID NO: 1404253 - RNA, 16 nt, Human
ugagaggcccuggauc

SEQ ID NO: 1404254 - RNA, 14 nt, Human
ugagaggcccugga

SEQ ID NO: 1404255 - RNA, 13 nt, Human
ugagaggcccugg

SEQ ID NO: 1404256 - RNA, 18 nt, Human
ugagcucuucauguuuca

SEQ ID NO: 1404257 - RNA, 13 nt, Human
ugagcucuuguga

SEQ ID NO: 1404258 - RNA, 18 nt, Human
ugagcucuugugaggaaa

SEQ ID NO: 1404259 - RNA, 22 nt, Human
ugagcucuugugaggaaaguca

SEQ ID NO: 1404260 - RNA, 16 nt, Human
ugagcucuucauguuu

SEQ ID NO: 1404261 - RNA, 15 nt, Human
ugagcucuucauguu

SEQ ID NO: 1404262 - RNA, 12 nt, Human
ugagcucuucau

SEQ ID NO: 1404263 - RNA, 22 nt, Human
ugagcucugagaggcccuggau

SEQ ID NO: 1404264 - RNA, 23 nt, Human
ugagcucugagaggcccuggauc

SEQ ID NO: 1404265 - RNA, 21 nt, Human
ugagcucugagaggcccugga

SEQ ID NO: 1404266 - RNA, 20 nt, Human
ugagcucugagaggcccugg

SEQ ID NO: 1404267 - RNA, 19 nt, Human
ugagcucugagaggcccug

SEQ ID NO: 1404268 - RNA, 18 nt, Human
ugagcucugagaggcccu

SEQ ID NO: 1404269 - RNA, 17 nt, Human
ugagcucugagaggccc

SEQ ID NO: 1404270 - RNA, 15 nt, Human
ugagcucugagaggc

SEQ ID NO: 1404271 - RNA, 12 nt, Human
ugagcucugaga

SEQ ID NO: 1404272 - RNA, 13 nt, Human
ugagcucucugcc

SEQ ID NO: 1404273 - RNA, 12 nt, Human
ugagcucucugu

SEQ ID NO: 1404274 - RNA, 21 nt, Human
ugagcucccacaagccugagg

SEQ ID NO: 1404275 - RNA, 20 nt, Human
ugagcucccacaagccugag

SEQ ID NO: 1404276 - RNA, 19 nt, Human
ugagcucccacaagccuga

SEQ ID NO: 1404277 - RNA, 18 nt, Human
ugagcucccacaagccug

SEQ ID NO: 1404278 - RNA, 15 nt, Human
ugagcucccacaagc

SEQ ID NO: 1404279 - RNA, 13 nt, Human
ugagcccagggag

SEQ ID NO: 1404280 - RNA, 12 nt, Human
ugagcccaggga

SEQ ID NO: 1404281 - RNA, 11 nt, Human
ugagcccaggg

SEQ ID NO: 1404282 - RNA, 21 nt, Human
ugagcccagcugggucaggca

SEQ ID NO: 1404283 - RNA, 17 nt, Human
ugagcccagcuggguca

SEQ ID NO: 1404284 - RNA, 17 nt, Human
ugagcccagggaggccg

SEQ ID NO: 1404285 - RNA, 15 nt, Human
ugagcccagggaggc

SEQ ID NO: 1404286 - RNA, 14 nt, Human
ugagcccagggagg

SEQ ID NO: 1404287 - RNA, 17 nt, Human
ugagcaguccuuggccu

SEQ ID NO: 1404288 - RNA, 16 nt, Human
ugagcaguccuuggcc

SEQ ID NO: 1404289 - RNA, 14 nt, Human
ugagcaguccuugg

SEQ ID NO: 1404290 - RNA, 20 nt, Human
ugagcagucaggaaagagaa

SEQ ID NO: 1404291 - RNA, 17 nt, Human
ugagcagucaggaaaga

SEQ ID NO: 1404292 - RNA, 20 nt, Human
ugauaaagccucaagguuuu

SEQ ID NO: 1404293 - RNA, 13 nt, Human
ugauaaagccuca

SEQ ID NO: 1404294 - RNA, 20 nt, Human
ugauaaagauuuuuuaauaa

SEQ ID NO: 1404295 - RNA, 19 nt, Human
ugauaaagauuuuuuaaua

SEQ ID NO: 1404296 - RNA, 18 nt, Human
ugauaaagauuuuuuaau

SEQ ID NO: 1404297 - RNA, 15 nt, Human
ugauaaagagacagu

SEQ ID NO: 1404298 - RNA, 16 nt, Human
ugauaaaaccauguag

SEQ ID NO: 1404299 - RNA, 11 nt, Human
ugaguuuccua

SEQ ID NO: 1404300 - RNA, 23 nt, Human
ugaguuuaccuuguauacuguag

SEQ ID NO: 1404301 - RNA, 16 nt, Human
ugaguuuaccuuguau

SEQ ID NO: 1404302 - RNA, 21 nt, Human
ugaguuggggucuggcagccu

SEQ ID NO: 1404303 - RNA, 19 nt, Human
ugaguuggggucuggcagc

SEQ ID NO: 1404304 - RNA, 17 nt, Human
ugaguuggggucuggca

SEQ ID NO: 1404305 - RNA, 22 nt, Human
ugaguuggcuuaccuggcccau

SEQ ID NO: 1404306 - RNA, 17 nt, Human
ugauagucuuuugcuuu

SEQ ID NO: 1404307 - RNA, 16 nt, Human
ugauagucuuuugcuu

SEQ ID NO: 1404308 - RNA, 22 nt, Human
ugauagguuauuuugauguaaa

SEQ ID NO: 1404309 - RNA, 19 nt, Human
ugauaggguuugugacagg

SEQ ID NO: 1404310 - RNA, 22 nt, Human
ugauaggaagaggggaagcaga

SEQ ID NO: 1404311 - RNA, 16 nt, Human
ugaggagccccagcua

SEQ ID NO: 1404312 - RNA, 14 nt, Human
ugaggagccccagc

SEQ ID NO: 1404313 - RNA, 11 nt, Human
ugaggagcccc

SEQ ID NO: 1404314 - RNA, 22 nt, Human
ugaggagcagcaggagggggga

SEQ ID NO: 1404315 - RNA, 18 nt, Human
ugaggagauucugccuuu

SEQ ID NO: 1404316 - RNA, 15 nt, Human
ugaggagacacaccu

SEQ ID NO: 1404317 - RNA, 19 nt, Human
ugaggagacacaccugagg

SEQ ID NO: 1404318 - RNA, 17 nt, Human
ugaggacugauuucaga

SEQ ID NO: 1404319 - RNA, 23 nt, Human
ugagcucuugugaggaaagucau

SEQ ID NO: 1404320 - RNA, 11 nt, Human
ugaggcuggca

SEQ ID NO: 1404321 - RNA, 17 nt, Human
ugaggcuggcacaggac

SEQ ID NO: 1404322 - RNA, 15 nt, Human
ugaggcuggcacagg

SEQ ID NO: 1404323 - RNA, 14 nt, Human
ugaggcuggcacag

SEQ ID NO: 1404324 - RNA, 19 nt, Human
ugaggcuuuccaugggacc

SEQ ID NO: 1404325 - RNA, 17 nt, Human
ugagggaaaagaaaaag

SEQ ID NO: 1404326 - RNA, 23 nt, Human
ugaggcuuuggauuugacauugc

SEQ ID NO: 1404327 - RNA, 18 nt, Human
ugaggcuuuggauuugac

SEQ ID NO: 1404328 - RNA, 13 nt, Human
ugaggcuuuggau

SEQ ID NO: 1404329 - RNA, 14 nt, Human
ugaggcuuuccaug

SEQ ID NO: 1404330 - RNA, 19 nt, Human
ugaggagcagcaggagggg

SEQ ID NO: 1404331 - RNA, 21 nt, Human
ugaggcuguggucacagcgga

SEQ ID NO: 1404332 - RNA, 11 nt, Human
ugaggcugugg

SEQ ID NO: 1404333 - RNA, 18 nt, Human
ugaggcuguccuguacau

SEQ ID NO: 1404334 - RNA, 16 nt, Human
ugaggucuguuccuuu

SEQ ID NO: 1404335 - RNA, 14 nt, Human
ugaggucuguuccu

SEQ ID NO: 1404336 - RNA, 13 nt, Human
ugaggucuguucc

SEQ ID NO: 1404337 - RNA, 20 nt, Human
ugaggucuguucuuuccaaa

SEQ ID NO: 1404338 - RNA, 14 nt, Human
ugaggucuguucuu

SEQ ID NO: 1404339 - RNA, 15 nt, Human
ugaggucuguucuuu

SEQ ID NO: 1404340 - RNA, 17 nt, Human
ugagguuacuggaaauu

SEQ ID NO: 1404341 - RNA, 14 nt, Human
ugagguuacuggaa

SEQ ID NO: 1404342 - RNA, 15 nt, Human
ugaggugugucacaa

SEQ ID NO: 1404343 - RNA, 21 nt, Human
ugaguccuggaugauacuaau

SEQ ID NO: 1404344 - RNA, 19 nt, Human
ugaguccuggaugauacua

SEQ ID NO: 1404345 - RNA, 17 nt, Human
ugaguccuggaugauac

SEQ ID NO: 1404346 - RNA, 21 nt, Human
ugaucaguuuuuucaccugga

SEQ ID NO: 1404347 - RNA, 20 nt, Human
ugaucaguuaagaaauuuca

SEQ ID NO: 1404348 - RNA, 19 nt, Human
ugaucucagcucacugcaa

SEQ ID NO: 1404349 - RNA, 18 nt, Human
ugaucucagcucacugca

SEQ ID NO: 1404350 - RNA, 19 nt, Human
ugauaugcauauuuguuua

SEQ ID NO: 1404351 - RNA, 18 nt, Human
ugauaugcauauuuguuu

SEQ ID NO: 1404352 - RNA, 15 nt, Human
ugauaugcacaaugu

SEQ ID NO: 1404353 - RNA, 23 nt, Human
ugauaugcacaauguagauaagu

SEQ ID NO: 1404354 - RNA, 15 nt, Human
ugauauauuuuacaa

SEQ ID NO: 1404355 - RNA, 16 nt, Human
ugauaucccccagccu

SEQ ID NO: 1404356 - RNA, 23 nt, Human
ugaucagagccgugguccuuugg

SEQ ID NO: 1404357 - RNA, 22 nt, Human
ugaucagagccgugguccuuug

SEQ ID NO: 1404358 - RNA, 21 nt, Human
ugaucagagccgugguccuuu

SEQ ID NO: 1404359 - RNA, 18 nt, Human
ugaucagaccauaauguu

SEQ ID NO: 1404360 - RNA, 14 nt, Human
ugauauauuuuaca

SEQ ID NO: 1404361 - RNA, 13 nt, Human
ugauauauuuuac

SEQ ID NO: 1404362 - RNA, 22 nt, Human
ugauauauaaguguacauaugu

SEQ ID NO: 1404363 - RNA, 19 nt, Human
ugauauauaaguguacaua

SEQ ID NO: 1404364 - RNA, 18 nt, Human
ugauauauaaguguacau

SEQ ID NO: 1404365 - RNA, 21 nt, Human
ugauauagaaguauaaagaau

SEQ ID NO: 1404366 - RNA, 16 nt, Human
ugauauagaaguauaa

SEQ ID NO: 1404367 - RNA, 19 nt, Human
ugauauaaaucagauucuu

SEQ ID NO: 1404368 - RNA, 17 nt, Human
ugauauaaguguguguu

SEQ ID NO: 1404369 - RNA, 23 nt, Human
ugauauaaguguguguuuuucau

SEQ ID NO: 1404370 - RNA, 19 nt, Human
ugaugaaaauaaagaaugg

SEQ ID NO: 1404371 - RNA, 17 nt, Human
ugaugaaaauaaagaau

SEQ ID NO: 1404372 - RNA, 16 nt, Human
ugaugaaaauaaagaa

SEQ ID NO: 1404373 - RNA, 15 nt, Human
ugaugaaaauaaaga

SEQ ID NO: 1404374 - RNA, 21 nt, Human
ugaugccaaaaaaaaauacau

SEQ ID NO: 1404375 - RNA, 18 nt, Human
ugaugccaaaaaaaaaua

SEQ ID NO: 1404376 - RNA, 14 nt, Human
ugaugccaaaaaaa

SEQ ID NO: 1404377 - RNA, 13 nt, Human
ugaugaaaauaaa

SEQ ID NO: 1404378 - RNA, 12 nt, Human
ugaugaaaauaa

SEQ ID NO: 1404379 - RNA, 21 nt, Human
ugaugaaaaauugcugacugu

SEQ ID NO: 1404380 - RNA, 19 nt, Human
ugaugaaaaauugcugacu

SEQ ID NO: 1404381 - RNA, 14 nt, Human
ugaucuggaaccca

SEQ ID NO: 1404382 - RNA, 13 nt, Human
ugaucuggaaccc

SEQ ID NO: 1404383 - RNA, 22 nt, Human
ugaucugauaggguuugugaca

SEQ ID NO: 1404384 - RNA, 20 nt, Human
ugaucugauaggguuuguga

SEQ ID NO: 1404385 - RNA, 15 nt, Human
ugaugcugccccuca

SEQ ID NO: 1404386 - RNA, 23 nt, Human
ugauguaaaaucuugucaugugu

SEQ ID NO: 1404387 - RNA, 19 nt, Human
ugauguaaaaucuugucau

SEQ ID NO: 1404388 - RNA, 16 nt, Human
ugauguaaaaucuugu

SEQ ID NO: 1404389 - RNA, 15 nt, Human
ugauguaaaaucuug

SEQ ID NO: 1404390 - RNA, 11 nt, Human
ugauguaaaau

SEQ ID NO: 1404391 - RNA, 21 nt, Human
ugauguaaaaucuugucaugu

SEQ ID NO: 1404392 - RNA, 21 nt, Human
ugauguaaggaugggcauggu

SEQ ID NO: 1404393 - RNA, 22 nt, Human
ugauguaaucuugaauuguaac

SEQ ID NO: 1404394 - RNA, 13 nt, Human
ugauguacaugua

SEQ ID NO: 1404395 - RNA, 16 nt, Human
uggagaguuuccugaa

SEQ ID NO: 1404396 - RNA, 15 nt, Human
uggagaguuuccuga

SEQ ID NO: 1404397 - RNA, 22 nt, Human
uggagagcuaggagcaaagccu

SEQ ID NO: 1404398 - RNA, 23 nt, Human
uggagagcuaggagcaaagccug

SEQ ID NO: 1404399 - RNA, 17 nt, Human
uggagagcuaggagcaa

SEQ ID NO: 1404400 - RNA, 15 nt, Human
uggagagcuaggagc

SEQ ID NO: 1404401 - RNA, 14 nt, Human
uggagagcuaggag

SEQ ID NO: 1404402 - RNA, 18 nt, Human
uggagagcccugggaccg

SEQ ID NO: 1404403 - RNA, 20 nt, Human
uggagagcccugggaccgcu

SEQ ID NO: 1404404 - RNA, 16 nt, Human
uggagagcccugggac

SEQ ID NO: 1404405 - RNA, 15 nt, Human
uggagagcccuggga

SEQ ID NO: 1404406 - RNA, 14 nt, Human
uggagagcccuggg

SEQ ID NO: 1404407 - RNA, 13 nt, Human
uggagagcccugg

SEQ ID NO: 1404408 - RNA, 20 nt, Human
uggagaccccaccagccuca

SEQ ID NO: 1404409 - RNA, 13 nt, Human
uggagaccaccag

SEQ ID NO: 1404410 - RNA, 17 nt, Human
uggagaccaccagggca

SEQ ID NO: 1404411 - RNA, 14 nt, Human
uggacugguuuuca

SEQ ID NO: 1404412 - RNA, 21 nt, Human
uggacugucauagaaauuaca

SEQ ID NO: 1404413 - RNA, 15 nt, Human
uggacugucauagaa

SEQ ID NO: 1404414 - RNA, 23 nt, Human
uggacucuguccugaaggccuga

SEQ ID NO: 1404415 - RNA, 22 nt, Human
uggacucuguccugaaggccug

SEQ ID NO: 1404416 - RNA, 17 nt, Human
uggacucuguccugaag

SEQ ID NO: 1404417 - RNA, 15 nt, Human
uggacucuguccuga

SEQ ID NO: 1404418 - RNA, 13 nt, Human
uggacucuguccu

SEQ ID NO: 1404419 - RNA, 22 nt, Human
uggacucuggugccuccagagg

SEQ ID NO: 1404420 - RNA, 21 nt, Human
uggacucuggugccuccagag

SEQ ID NO: 1404421 - RNA, 16 nt, Human
uggaagaaggggcagg

SEQ ID NO: 1404422 - RNA, 21 nt, Human
uggaacuugccugccuuucca

SEQ ID NO: 1404423 - RNA, 18 nt, Human
uggaacuugccugccuuu

SEQ ID NO: 1404424 - RNA, 15 nt, Human
uggaacuugccugcc

SEQ ID NO: 1404425 - RNA, 13 nt, Human
uggacuaaaagau

SEQ ID NO: 1404426 - RNA, 14 nt, Human
uggacuaaaagaua

SEQ ID NO: 1404427 - RNA, 15 nt, Human
uggacuaaaagauau

SEQ ID NO: 1404428 - RNA, 21 nt, Human
uggacuaaaagauauaagugc

SEQ ID NO: 1404429 - RNA, 22 nt, Human
uggacuaaaagauauaagugcu

SEQ ID NO: 1404430 - RNA, 23 nt, Human
uggacuaaaagauauaagugcug

SEQ ID NO: 1404431 - RNA, 16 nt, Human
uggcaaccagaccauu

SEQ ID NO: 1404432 - RNA, 20 nt, Human
uggauuuaaaagccugcuca

SEQ ID NO: 1404433 - RNA, 18 nt, Human
uggauuuaaaagccugcu

SEQ ID NO: 1404434 - RNA, 16 nt, Human
uggauuuaaaagccug

SEQ ID NO: 1404435 - RNA, 17 nt, Human
uggauuuaacagaaaug

SEQ ID NO: 1404436 - RNA, 15 nt, Human
uggauuuaacagaaa

SEQ ID NO: 1404437 - RNA, 14 nt, Human
uggaugcagugcuc

SEQ ID NO: 1404438 - RNA, 16 nt, Human
uggcaaggaaaaacag

SEQ ID NO: 1404439 - RNA, 21 nt, Human
uggcaaggacuuuguacauuu

SEQ ID NO: 1404440 - RNA, 20 nt, Human
uggcaaggacuuuguacauu

SEQ ID NO: 1404441 - RNA, 19 nt, Human
uggcaaggacuuuguacau

SEQ ID NO: 1404442 - RNA, 13 nt, Human
uggcaaggacuuu

SEQ ID NO: 1404443 - RNA, 19 nt, Human
uggagggggaauggcagca

SEQ ID NO: 1404444 - RNA, 23 nt, Human
uggaggggcagagccaggaagau

SEQ ID NO: 1404445 - RNA, 13 nt, Human
uggaggggcagag

SEQ ID NO: 1404446 - RNA, 14 nt, Human
uggaggggcagagc

SEQ ID NO: 1404447 - RNA, 16 nt, Human
uggaggggcagagcca

SEQ ID NO: 1404448 - RNA, 18 nt, Human
uggaggggcagagccagg

SEQ ID NO: 1404449 - RNA, 21 nt, Human
uggaggggcagagccaggaag

SEQ ID NO: 1404450 - RNA, 18 nt, Human
uggagauccuccugcaga

SEQ ID NO: 1404451 - RNA, 16 nt, Human
uggagauccuccugca

SEQ ID NO: 1404452 - RNA, 14 nt, Human
uggagauccuccug

SEQ ID NO: 1404453 - RNA, 23 nt, Human
uggagaucaccaguguguggcuu

SEQ ID NO: 1404454 - RNA, 17 nt, Human
uggagaguuuccugaaa

SEQ ID NO: 1404455 - RNA, 21 nt, Human
uggagauccuccugcagacca

SEQ ID NO: 1404456 - RNA, 20 nt, Human
uggagauccuccugcagacc

SEQ ID NO: 1404457 - RNA, 14 nt, Human
uggagaugaggcca

SEQ ID NO: 1404458 - RNA, 15 nt, Human
uggagaugaggccag

SEQ ID NO: 1404459 - RNA, 16 nt, Human
uggagaugaggccaga

SEQ ID NO: 1404460 - RNA, 17 nt, Human
uggagaugaggccagac

SEQ ID NO: 1404461 - RNA, 13 nt, Human
uggauauuuguau

SEQ ID NO: 1404462 - RNA, 11 nt, Human
uggauauuugu

SEQ ID NO: 1404463 - RNA, 14 nt, Human
uggauauuguuacg

SEQ ID NO: 1404464 - RNA, 17 nt, Human
uggauauguaaaacauu

SEQ ID NO: 1404465 - RNA, 21 nt, Human
uggauauguaaaacauuuauu

SEQ ID NO: 1404466 - RNA, 16 nt, Human
uggauauguaaaacau

SEQ ID NO: 1404467 - RNA, 17 nt, Human
uggauauaguuuuacuu

SEQ ID NO: 1404468 - RNA, 16 nt, Human
uggaucacaagaugga

SEQ ID NO: 1404469 - RNA, 15 nt, Human
uggaucacaaagugg

SEQ ID NO: 1404470 - RNA, 14 nt, Human
uggaucacaaagug

SEQ ID NO: 1404471 - RNA, 19 nt, Human
uggaucaaauccagccugc

SEQ ID NO: 1404472 - RNA, 15 nt, Human
uggaugcagugcucg

SEQ ID NO: 1404473 - RNA, 18 nt, Human
ugcuguuuugauuuguac

SEQ ID NO: 1404474 - RNA, 23 nt, Human
ugcuguuuuaaacauuaauagca

SEQ ID NO: 1404475 - RNA, 19 nt, Human
ugccugucccacccccacc

SEQ ID NO: 1404476 - RNA, 16 nt, Human
ugccugucccaccccc

SEQ ID NO: 1404477 - RNA, 17 nt, Human
ugcuuaaaauaagcagg

SEQ ID NO: 1404478 - RNA, 15 nt, Human
ugcuuaaaauaagca

SEQ ID NO: 1404479 - RNA, 14 nt, Human
ugcuuaaaauaagc

SEQ ID NO: 1404480 - RNA, 18 nt, Human
ugcuguuuuguuauauaa

SEQ ID NO: 1404481 - RNA, 19 nt, Human
ugcuguuuuguuauauaau

SEQ ID NO: 1404482 - RNA, 16 nt, Human
ugcuguuuuguuauau

SEQ ID NO: 1404483 - RNA, 13 nt, Human
ugcuguuuuguua

SEQ ID NO: 1404484 - RNA, 12 nt, Human
ugcuguuuuguu

SEQ ID NO: 1404485 - RNA, 19 nt, Human
ugcuuaaaauaagcaggug

SEQ ID NO: 1404486 - RNA, 15 nt, Human
ugcuuaauaaauugu

SEQ ID NO: 1404487 - RNA, 19 nt, Human
ugcuuaacuucacauauug

SEQ ID NO: 1404488 - RNA, 16 nt, Human
ugcuuaauucaaauaa

SEQ ID NO: 1404489 - RNA, 17 nt, Human
ugcuuaauucaaauaau

SEQ ID NO: 1404490 - RNA, 18 nt, Human
ugcuuaauucaaauaaua

SEQ ID NO: 1404491 - RNA, 20 nt, Human
ugcuuaauucaaauaauaau

SEQ ID NO: 1404492 - RNA, 13 nt, Human
ugcuuaacuucac

SEQ ID NO: 1404493 - RNA, 14 nt, Human
ugcuuaacuucaca

SEQ ID NO: 1404494 - RNA, 17 nt, Human
ugcuuaacuucacauau

SEQ ID NO: 1404495 - RNA, 18 nt, Human
ugcuuaacuucacauauu

SEQ ID NO: 1404496 - RNA, 15 nt, Human
ugcuucccuaaucua

SEQ ID NO: 1404497 - RNA, 12 nt, Human
ugcuuccagugu

SEQ ID NO: 1404498 - RNA, 22 nt, Human
ugcuuaccucucagccuuagcu

SEQ ID NO: 1404499 - RNA, 14 nt, Human
ugcuuaccucucag

SEQ ID NO: 1404500 - RNA, 13 nt, Human
ugcuuccuccugg

SEQ ID NO: 1404501 - RNA, 12 nt, Human
ugcuuccuccug

SEQ ID NO: 1404502 - RNA, 16 nt, Human
ugcuucccuuuccuga

SEQ ID NO: 1404503 - RNA, 13 nt, Human
ugcuucgggcccu

SEQ ID NO: 1404504 - RNA, 22 nt, Human
ugcuuccugucuuauccuccac

SEQ ID NO: 1404505 - RNA, 15 nt, Human
ugcuuccuccuggaa

SEQ ID NO: 1404506 - RNA, 14 nt, Human
ugcuuccuccugga

SEQ ID NO: 1404507 - RNA, 21 nt, Human
ugcuucucagauuucugagga

SEQ ID NO: 1404508 - RNA, 22 nt, Human
ugcuucucagauuucugaggaa

SEQ ID NO: 1404509 - RNA, 17 nt, Human
ugcuucuguuuuauaau

SEQ ID NO: 1404510 - RNA, 13 nt, Human
ugcuucucugacu

SEQ ID NO: 1404511 - RNA, 12 nt, Human
ugcuucucugac

SEQ ID NO: 1404512 - RNA, 22 nt, Human
ugcuucucccaggcaaggcugu

SEQ ID NO: 1404513 - RNA, 21 nt, Human
ugcuucucccaggcaaggcug

SEQ ID NO: 1404514 - RNA, 20 nt, Human
ugcuucucccaggcaaggcu

SEQ ID NO: 1404515 - RNA, 17 nt, Human
ugcuucucccaggcaag

SEQ ID NO: 1404516 - RNA, 16 nt, Human
ugcuucucccaggcaa

SEQ ID NO: 1404517 - RNA, 13 nt, Human
ugcuucucccagg

SEQ ID NO: 1404518 - RNA, 13 nt, Human
ugcuucuccagcc

SEQ ID NO: 1404519 - RNA, 19 nt, Human
uggaaaccuuccacccagu

SEQ ID NO: 1404520 - RNA, 16 nt, Human
uggaaaccuuccaccc

SEQ ID NO: 1404521 - RNA, 22 nt, Human
uggaaaaguauguuagugcaaa

SEQ ID NO: 1404522 - RNA, 13 nt, Human
uggaacacuucga

SEQ ID NO: 1404523 - RNA, 18 nt, Human
uggaacauaaaaaggaca

SEQ ID NO: 1404524 - RNA, 23 nt, Human
uggaaccucagccuggccagaca

SEQ ID NO: 1404525 - RNA, 19 nt, Human
uggaaccucagccuggcca

SEQ ID NO: 1404526 - RNA, 18 nt, Human
uggaaccucagccuggcc

SEQ ID NO: 1404527 - RNA, 20 nt, Human
uggaacauaaaaaggacauc

SEQ ID NO: 1404528 - RNA, 22 nt, Human
uggaacuugccugccuuuccau

SEQ ID NO: 1404529 - RNA, 16 nt, Human
uggaacuugaacugau

SEQ ID NO: 1404530 - RNA, 15 nt, Human
uggaacuugaacuga

SEQ ID NO: 1404531 - RNA, 13 nt, Human
uggaacuugaacu

SEQ ID NO: 1404532 - RNA, 13 nt, Human
uggaaccuuguuu

SEQ ID NO: 1404533 - RNA, 21 nt, Human
ugcuuuccauucgugaaaaca

SEQ ID NO: 1404534 - RNA, 20 nt, Human
ugcuuuccauucgugaaaac

SEQ ID NO: 1404535 - RNA, 19 nt, Human
ugcuuuccauucgugaaaa

SEQ ID NO: 1404536 - RNA, 22 nt, Human
ugcuucuguuuuauaauuuugu

SEQ ID NO: 1404537 - RNA, 13 nt, Human
ugcuuugauauuu

SEQ ID NO: 1404538 - RNA, 15 nt, Human
ugcuuugccccugag

SEQ ID NO: 1404539 - RNA, 17 nt, Human
ugcuuugauauuucaau

SEQ ID NO: 1404540 - RNA, 15 nt, Human
ugcuuugagagagaa

SEQ ID NO: 1404541 - RNA, 14 nt, Human
ugcuuucugaucaa

SEQ ID NO: 1404542 - RNA, 22 nt, Human
ugcuuucuccuuuaauuguaaa

SEQ ID NO: 1404543 - RNA, 20 nt, Human
ugcuuucuccuuuaauugua

SEQ ID NO: 1404544 - RNA, 15 nt, Human
ugcuuucuccuuuaa

SEQ ID NO: 1404545 - RNA, 18 nt, Human
ugcuuucgaacugcuagu

SEQ ID NO: 1404546 - RNA, 22 nt, Human
ugcuuugcccuucuuucuaccc

SEQ ID NO: 1404547 - RNA, 17 nt, Human
ugcuuuggaaaacccag

SEQ ID NO: 1404548 - RNA, 22 nt, Human
uggccuaagaggcugcccuccu

SEQ ID NO: 1404549 - RNA, 21 nt, Human
uggccuaagaggcugcccucc

SEQ ID NO: 1404550 - RNA, 15 nt, Human
uggccccucucccuu

SEQ ID NO: 1404551 - RNA, 23 nt, Human
uggccuaaccugccgagagucca

SEQ ID NO: 1404552 - RNA, 20 nt, Human
uggccuagcauacguacaca

SEQ ID NO: 1404553 - RNA, 20 nt, Human
uggccccugaacaagaauug

SEQ ID NO: 1404554 - RNA, 14 nt, Human
uggccccugaacaa

SEQ ID NO: 1404555 - RNA, 18 nt, Human
uggccccucugaccugca

SEQ ID NO: 1404556 - RNA, 16 nt, Human
uggccccucugaccug

SEQ ID NO: 1404557 - RNA, 14 nt, Human
uggccccucugacc

SEQ ID NO: 1404558 - RNA, 13 nt, Human
uggccccucugac

SEQ ID NO: 1404559 - RNA, 12 nt, Human
uggccccucuga

SEQ ID NO: 1404560 - RNA, 10 nt, Human
uggccccucu

SEQ ID NO: 1404561 - RNA, 19 nt, Human
uggccccucccccugccag

SEQ ID NO: 1404562 - RNA, 20 nt, Human
uggccccaggaccuggcugc

SEQ ID NO: 1404563 - RNA, 15 nt, Human
uggccccaggaccug

SEQ ID NO: 1404564 - RNA, 12 nt, Human
uggccccaggac

SEQ ID NO: 1404565 - RNA, 19 nt, Human
uggccccagcacagcuuga

SEQ ID NO: 1404566 - RNA, 18 nt, Human
uggccccagcacagcuug

SEQ ID NO: 1404567 - RNA, 17 nt, Human
uggccccagcacagcuu

SEQ ID NO: 1404568 - RNA, 14 nt, Human
uggccccagcacag

SEQ ID NO: 1404569 - RNA, 13 nt, Human
uggccccagcaca

SEQ ID NO: 1404570 - RNA, 22 nt, Human
uggcagcucuggacagccccac

SEQ ID NO: 1404571 - RNA, 21 nt, Human
uggcagcucuggacagcccca

SEQ ID NO: 1404572 - RNA, 11 nt, Human
uggcagcucug

SEQ ID NO: 1404573 - RNA, 15 nt, Human
uggccucucucuagg

SEQ ID NO: 1404574 - RNA, 23 nt, Human
uggccucucuauccucucuuccu

SEQ ID NO: 1404575 - RNA, 17 nt, Human
uggccucucuauccucu

SEQ ID NO: 1404576 - RNA, 14 nt, Human
uggccucucuaucc

SEQ ID NO: 1404577 - RNA, 21 nt, Human
uggccuccugccucuacuggg

SEQ ID NO: 1404578 - RNA, 16 nt, Human
uggccuccugccucua

SEQ ID NO: 1404579 - RNA, 15 nt, Human
uggccuccugccucu

SEQ ID NO: 1404580 - RNA, 14 nt, Human
uggccuccugccuc

SEQ ID NO: 1404581 - RNA, 13 nt, Human
uggccuccugccu

SEQ ID NO: 1404582 - RNA, 20 nt, Human
uggccucccaaaugagccau

SEQ ID NO: 1404583 - RNA, 22 nt, Human
uggccucacccaccccugcaca

SEQ ID NO: 1404584 - RNA, 15 nt, Human
uggccucacccaccc

SEQ ID NO: 1404585 - RNA, 21 nt, Human
uggccuagaccagcagacaga

SEQ ID NO: 1404586 - RNA, 18 nt, Human
uggccuagaccagcagac

SEQ ID NO: 1404587 - RNA, 23 nt, Human
uggccuagcauacguacacauuu

SEQ ID NO: 1404588 - RNA, 21 nt, Human
uggcuccagaugcagggcagu

SEQ ID NO: 1404589 - RNA, 20 nt, Human
uggcuccagaugcagggcag

SEQ ID NO: 1404590 - RNA, 23 nt, Human
uggcuccagaugcagggcaguca

SEQ ID NO: 1404591 - RNA, 22 nt, Human
uggccucucucuaggguacaug

SEQ ID NO: 1404592 - RNA, 23 nt, Human
uggcugggacguggcucagccag

SEQ ID NO: 1404593 - RNA, 19 nt, Human
uggcugggacguggcucag

SEQ ID NO: 1404594 - RNA, 15 nt, Human
uggcugggacguggc

SEQ ID NO: 1404595 - RNA, 17 nt, Human
uggcuggcugagggcag

SEQ ID NO: 1404596 - RNA, 18 nt, Human
uggcuggcugagggcagu

SEQ ID NO: 1404597 - RNA, 15 nt, Human
uggcuggcugagggc

SEQ ID NO: 1404598 - RNA, 14 nt, Human
uggcuggcugaggg

SEQ ID NO: 1404599 - RNA, 13 nt, Human
uggcuggcugagg

SEQ ID NO: 1404600 - RNA, 12 nt, Human
uggcuggcugag

SEQ ID NO: 1404601 - RNA, 15 nt, Human
uggcuggccucaccc

SEQ ID NO: 1404602 - RNA, 19 nt, Human
uggcuggccucacccaccc

SEQ ID NO: 1404603 - RNA, 23 nt, Human
uggcuugggacuaaaugcccugc

SEQ ID NO: 1404604 - RNA, 18 nt, Human
uggcuugggacuaaaugc

SEQ ID NO: 1404605 - RNA, 22 nt, Human
uggcuuggccacagccagggga

SEQ ID NO: 1404606 - RNA, 23 nt, Human
uggcuuggccacagccaggggag

SEQ ID NO: 1404607 - RNA, 20 nt, Human
uggcuuggccacagccaggg

SEQ ID NO: 1404608 - RNA, 19 nt, Human
uggcuuggccacagccagg

SEQ ID NO: 1404609 - RNA, 18 nt, Human
uggcuuggccacagccag

SEQ ID NO: 1404610 - RNA, 17 nt, Human
uggcuuggccacagcca

SEQ ID NO: 1404611 - RNA, 16 nt, Human
uggcuugggcagcauc

SEQ ID NO: 1404612 - RNA, 14 nt, Human
ugggaaugaagcaa

SEQ ID NO: 1404613 - RNA, 14 nt, Human
uggcuuuaaugaau

SEQ ID NO: 1404614 - RNA, 16 nt, Human
uggggcagcuccucug

SEQ ID NO: 1404615 - RNA, 15 nt, Human
uggggcagcuccucu

SEQ ID NO: 1404616 - RNA, 18 nt, Human
ugggccugcugcugagaa

SEQ ID NO: 1404617 - RNA, 17 nt, Human
ugggccugcugcugaga

SEQ ID NO: 1404618 - RNA, 16 nt, Human
ugggccugcugcugag

SEQ ID NO: 1404619 - RNA, 15 nt, Human
ugggccugcugcuga

SEQ ID NO: 1404620 - RNA, 14 nt, Human
ugggccugcugcug

SEQ ID NO: 1404621 - RNA, 13 nt, Human
ugggccugcugcu

SEQ ID NO: 1404622 - RNA, 12 nt, Human
ugggccugcugc

SEQ ID NO: 1404623 - RNA, 20 nt, Human
ugggccugcuccagaccuga

SEQ ID NO: 1404624 - RNA, 19 nt, Human
ugggccugcuccagaccug

SEQ ID NO: 1404625 - RNA, 18 nt, Human
ugggccugcuccagaccu

SEQ ID NO: 1404626 - RNA, 16 nt, Human
ugggccugcuccagac

SEQ ID NO: 1404627 - RNA, 15 nt, Human
ugggccugcuccaga

SEQ ID NO: 1404628 - RNA, 14 nt, Human
ugggccugcuccag

SEQ ID NO: 1404629 - RNA, 13 nt, Human
ugggccugcagaa

SEQ ID NO: 1404630 - RNA, 21 nt, Human
ugggccuauggagagcccugg

SEQ ID NO: 1404631 - RNA, 23 nt, Human
ugggccugcugcugagaaccugg

SEQ ID NO: 1404632 - RNA, 21 nt, Human
uggggccagauccagccuggg

SEQ ID NO: 1404633 - RNA, 18 nt, Human
ugggggcagcacaggagg

SEQ ID NO: 1404634 - RNA, 15 nt, Human
ugggggccuggcugg

SEQ ID NO: 1404635 - RNA, 13 nt, Human
ugggggccuggcu

SEQ ID NO: 1404636 - RNA, 12 nt, Human
ugggggccuggc

SEQ ID NO: 1404637 - RNA, 11 nt, Human
ugggggccugg

SEQ ID NO: 1404638 - RNA, 18 nt, Human
uggggccagauccagccu

SEQ ID NO: 1404639 - RNA, 16 nt, Human
uggggccagauccagc

SEQ ID NO: 1404640 - RNA, 15 nt, Human
uggggccagauccag

SEQ ID NO: 1404641 - RNA, 14 nt, Human
uggggccagaucca

SEQ ID NO: 1404642 - RNA, 13 nt, Human
uggggccagaucc

SEQ ID NO: 1404643 - RNA, 20 nt, Human
uggggcagcuccucugucuc

SEQ ID NO: 1404644 - RNA, 17 nt, Human
uggggccaggcuggguc

SEQ ID NO: 1404645 - RNA, 20 nt, Human
uggggccagauccagccugg

SEQ ID NO: 1404646 - RNA, 19 nt, Human
uggggccagauccagccug

SEQ ID NO: 1404647 - RNA, 20 nt, Human
uggggccaggcugggucgcc

SEQ ID NO: 1404648 - RNA, 19 nt, Human
ugggggccuggcuggcuga

SEQ ID NO: 1404649 - RNA, 17 nt, Human
ugggggccuggcuggcu

SEQ ID NO: 1404650 - RNA, 20 nt, Human
ugggggccuggcuggcugag

SEQ ID NO: 1404651 - RNA, 21 nt, Human
ugggggcggggugggaaagau

SEQ ID NO: 1404652 - RNA, 18 nt, Human
ugggguuaucucuguguu

SEQ ID NO: 1404653 - RNA, 15 nt, Human
uggggugugcuggga

SEQ ID NO: 1404654 - RNA, 13 nt, Human
uggggugugcugg

SEQ ID NO: 1404655 - RNA, 13 nt, Human
uggggggggugcu

SEQ ID NO: 1404656 - RNA, 15 nt, Human
ugggguggguauaaa

SEQ ID NO: 1404657 - RNA, 19 nt, Human
ugggguggguauaaaagau

SEQ ID NO: 1404658 - RNA, 19 nt, Human
ugggguuaucucuguguua

SEQ ID NO: 1404659 - RNA, 22 nt, Human
ugggccuauggagagcccuggg

SEQ ID NO: 1404660 - RNA, 20 nt, Human
ugggccuauggagagcccug

SEQ ID NO: 1404661 - RNA, 19 nt, Human
ugggccuauggagagcccu

SEQ ID NO: 1404662 - RNA, 18 nt, Human
ugggccuauggagagccc

SEQ ID NO: 1404663 - RNA, 17 nt, Human
ugggccuauggagagcc

SEQ ID NO: 1404664 - RNA, 15 nt, Human
ugggccuauggagag

SEQ ID NO: 1404665 - RNA, 15 nt, Human
ugggccuaggcugca

SEQ ID NO: 1404666 - RNA, 14 nt, Human
ugggccuaggcugc

SEQ ID NO: 1404667 - RNA, 21 nt, Human
ugggccggcuucaugccagcu

SEQ ID NO: 1404668 - RNA, 14 nt, Human
ugggccgcugccac

SEQ ID NO: 1404669 - RNA, 13 nt, Human
ugggccgcugcca

SEQ ID NO: 1404670 - RNA, 13 nt, Human
ugggcccuuugag

SEQ ID NO: 1404671 - RNA, 22 nt, Human
ugggcccuggggccuguacugc

SEQ ID NO: 1404672 - RNA, 19 nt, Human
ugggcccuggggccuguac

SEQ ID NO: 1404673 - RNA, 16 nt, Human
ugggcccuggggccug

SEQ ID NO: 1404674 - RNA, 14 nt, Human
ugggcccuggggcc

SEQ ID NO: 1404675 - RNA, 13 nt, Human
ugggcccuggggc

SEQ ID NO: 1404676 - RNA, 17 nt, Human
ugggcccugggcuggaa

SEQ ID NO: 1404677 - RNA, 16 nt, Human
ugggcccugggcugga

SEQ ID NO: 1404678 - RNA, 14 nt, Human
ugggcccugggcug

SEQ ID NO: 1404679 - RNA, 17 nt, Human
ugggaugguggagggcc

SEQ ID NO: 1404680 - RNA, 16 nt, Human
ugggaugguggagggc

SEQ ID NO: 1404681 - RNA, 18 nt, Human
ugggaugguggagggcca

SEQ ID NO: 1404682 - RNA, 17 nt, Human
ugggcagcaauuuaaau

SEQ ID NO: 1404683 - RNA, 18 nt, Human
ugggcagcaauuuaaaug

SEQ ID NO: 1404684 - RNA, 19 nt, Human
ugggcagcaauuuaaaugu

SEQ ID NO: 1404685 - RNA, 21 nt, Human
ugggcagcaauuuaaauguua

SEQ ID NO: 1404686 - RNA, 16 nt, Human
ugggacagcaaccugu

SEQ ID NO: 1404687 - RNA, 17 nt, Human
ugggaggagggcaggca

SEQ ID NO: 1404688 - RNA, 14 nt, Human
ugggaggagggcag

SEQ ID NO: 1404689 - RNA, 20 nt, Human
ugggaguuuuuaugagaaac

SEQ ID NO: 1404690 - RNA, 19 nt, Human
ugggaugagaguuuuggau

SEQ ID NO: 1404691 - RNA, 14 nt, Human
ugggaguuguaguu

SEQ ID NO: 1404692 - RNA, 22 nt, Human
ugggaguugaucgccuuuccca

SEQ ID NO: 1404693 - RNA, 18 nt, Human
ugggaguguugagcaucu

SEQ ID NO: 1404694 - RNA, 18 nt, Human
ugggaggagggcaggcau

SEQ ID NO: 1404695 - RNA, 16 nt, Human
ugggaguugucauuaa

SEQ ID NO: 1404696 - RNA, 17 nt, Human
uguaugacugcacauga

SEQ ID NO: 1404697 - RNA, 16 nt, Human
uguaugacugcacaug

SEQ ID NO: 1404698 - RNA, 17 nt, Human
uguauaagauccuagau

SEQ ID NO: 1404699 - RNA, 15 nt, Human
uguauaacuaggagc

SEQ ID NO: 1404700 - RNA, 16 nt, Human
uguauaacuaggagcu

SEQ ID NO: 1404701 - RNA, 19 nt, Human
uguauaaaugucuuuaaug

SEQ ID NO: 1404702 - RNA, 23 nt, Human
uguauaaacaagaaaaauaaaga

SEQ ID NO: 1404703 - RNA, 17 nt, Human
uguauaaacaagaaaaa

SEQ ID NO: 1404704 - RNA, 16 nt, Human
uguauaaacaagaaaa

SEQ ID NO: 1404705 - RNA, 15 nt, Human
uguauaguaaaucac

SEQ ID NO: 1404706 - RNA, 15 nt, Human
uguauagcugcuucc

SEQ ID NO: 1404707 - RNA, 23 nt, Human
uguagcuuuggaaguuuagcucu

SEQ ID NO: 1404708 - RNA, 15 nt, Human
uguagcuuugcucuu

SEQ ID NO: 1404709 - RNA, 13 nt, Human
uguagcuuugcuc

SEQ ID NO: 1404710 - RNA, 12 nt, Human
uguagcuuugcu

SEQ ID NO: 1404711 - RNA, 23 nt, Human
uguagcugugaccugcugagcuc

SEQ ID NO: 1404712 - RNA, 22 nt, Human
uguagcugugaccugcugagcu

SEQ ID NO: 1404713 - RNA, 17 nt, Human
uguacagcuggcucuac

SEQ ID NO: 1404714 - RNA, 23 nt, Human
uguacagcaaggagauuuacaac

SEQ ID NO: 1404715 - RNA, 22 nt, Human
uguacagcaaggagauuuacaa

SEQ ID NO: 1404716 - RNA, 18 nt, Human
uguauaaaagugugaaau

SEQ ID NO: 1404717 - RNA, 13 nt, Human
uguauaaaagugu

SEQ ID NO: 1404718 - RNA, 22 nt, Human
uguaguguuggagaagaacuga

SEQ ID NO: 1404719 - RNA, 13 nt, Human
uguauaaaauaau

SEQ ID NO: 1404720 - RNA, 15 nt, Human
uguauaaaauagaca

SEQ ID NO: 1404721 - RNA, 14 nt, Human
uguauaaaaucagc

SEQ ID NO: 1404722 - RNA, 16 nt, Human
uguauaaaaucagcca

SEQ ID NO: 1404723 - RNA, 13 nt, Human
uguauaaaauaga

SEQ ID NO: 1404724 - RNA, 21 nt, Human
uguauaaaagugugaaauaaa

SEQ ID NO: 1404725 - RNA, 14 nt, Human
uguauaaaauaauu

SEQ ID NO: 1404726 - RNA, 21 nt, Human
uguaguguuggagaagaacug

SEQ ID NO: 1404727 - RNA, 20 nt, Human
uguaguguuggagaagaacu

SEQ ID NO: 1404728 - RNA, 16 nt, Human
ugucauccucaaagaa

SEQ ID NO: 1404729 - RNA, 21 nt, Human
ugucaucaucauggccagcug

SEQ ID NO: 1404730 - RNA, 19 nt, Human
ugucaucaucauggccagc

SEQ ID NO: 1404731 - RNA, 18 nt, Human
ugucaucaucauggccag

SEQ ID NO: 1404732 - RNA, 17 nt, Human
ugucaucaucauggcca

SEQ ID NO: 1404733 - RNA, 21 nt, Human
ugucacugguagaccaaaaua

SEQ ID NO: 1404734 - RNA, 23 nt, Human
ugucacugguagaccaaaauaaa

SEQ ID NO: 1404735 - RNA, 21 nt, Human
ugucacaaugagauugaauuu

SEQ ID NO: 1404736 - RNA, 16 nt, Human
ugucacaaugagauug

SEQ ID NO: 1404737 - RNA, 23 nt, Human
uguaugguuuuugagauauuaau

SEQ ID NO: 1404738 - RNA, 22 nt, Human
uguaugguuuuugagauauuaa

SEQ ID NO: 1404739 - RNA, 21 nt, Human
uguaugguuuuugagauauua

SEQ ID NO: 1404740 - RNA, 22 nt, Human
uguauggguaggguaaaucagu

SEQ ID NO: 1404741 - RNA, 20 nt, Human
uguauggguaggguaaauca

SEQ ID NO: 1404742 - RNA, 23 nt, Human
uguauggaaauaaauguaucaua

SEQ ID NO: 1404743 - RNA, 18 nt, Human
uguauggaaauaaaugua

SEQ ID NO: 1404744 - RNA, 16 nt, Human
ugucaauuucuguguu

SEQ ID NO: 1404745 - RNA, 15 nt, Human
ugucaauuucugugu

SEQ ID NO: 1404746 - RNA, 19 nt, Human
uguauuuuaaaagaaugau

SEQ ID NO: 1404747 - RNA, 18 nt, Human
uguauuuuaaaagaauga

SEQ ID NO: 1404748 - RNA, 14 nt, Human
ugucuauucagcuu

SEQ ID NO: 1404749 - RNA, 13 nt, Human
ugucuauucagcu

SEQ ID NO: 1404750 - RNA, 13 nt, Human
ugucuauaaagca

SEQ ID NO: 1404751 - RNA, 18 nt, Human
ugucuauuaccuguuagu

SEQ ID NO: 1404752 - RNA, 16 nt, Human
ugucucaccuggacuu

SEQ ID NO: 1404753 - RNA, 17 nt, Human
ugucucaggcugccuga

SEQ ID NO: 1404754 - RNA, 16 nt, Human
ugucucaggcugccug

SEQ ID NO: 1404755 - RNA, 13 nt, Human
ugucucaggcugc

SEQ ID NO: 1404756 - RNA, 20 nt, Human
ugucuacauaugaucugucu

SEQ ID NO: 1404757 - RNA, 12 nt, Human
ugucuauaaagc

SEQ ID NO: 1404758 - RNA, 14 nt, Human
ugucuauaaagcau

SEQ ID NO: 1404759 - RNA, 20 nt, Human
ugucuauggauuugccuucu

SEQ ID NO: 1404760 - RNA, 20 nt, Human
ugucuuaaacuaaaugugca

SEQ ID NO: 1404761 - RNA, 14 nt, Human
ugucuuaaugaagu

SEQ ID NO: 1404762 - RNA, 15 nt, Human
ugucuuaaugaaguu

SEQ ID NO: 1404763 - RNA, 18 nt, Human
ugucuuaaugaaguuuga

SEQ ID NO: 1404764 - RNA, 19 nt, Human
ugucuuaaugaaguuugaa

SEQ ID NO: 1404765 - RNA, 20 nt, Human
ugucuuaaugaaguuugaau

SEQ ID NO: 1404766 - RNA, 21 nt, Human
ugucuuaaugaaguuugaaug

SEQ ID NO: 1404767 - RNA, 22 nt, Human
ugucuuaaugaaguuugaaugu

SEQ ID NO: 1404768 - RNA, 16 nt, Human
ugucuguuguauucau

SEQ ID NO: 1404769 - RNA, 21 nt, Human
ugucuguucuacauagaugcu

SEQ ID NO: 1404770 - RNA, 15 nt, Human
ugucuguucuacaua

SEQ ID NO: 1404771 - RNA, 18 nt, Human
ugucuuaaacuaaaugug

SEQ ID NO: 1404772 - RNA, 21 nt, Human
ugucugaucguucaaagcaug

SEQ ID NO: 1404773 - RNA, 20 nt, Human
ugucucaggcugccugaguc

SEQ ID NO: 1404774 - RNA, 19 nt, Human
ugucucaggcugccugagu

SEQ ID NO: 1404775 - RNA, 18 nt, Human
ugucucaggcugccugag

SEQ ID NO: 1404776 - RNA, 20 nt, Human
ugucugagacagaaucucag

SEQ ID NO: 1404777 - RNA, 13 nt, Human
ugucuguucuaca

SEQ ID NO: 1404778 - RNA, 20 nt, Human
ugucuguguuuugaaagaau

SEQ ID NO: 1404779 - RNA, 15 nt, Human
ugucuguggauuuuu

SEQ ID NO: 1404780 - RNA, 19 nt, Human
ugucuguggcaaaaguuua

SEQ ID NO: 1404781 - RNA, 20 nt, Human
ugucugugacuuuugugaaa

SEQ ID NO: 1404782 - RNA, 14 nt, Human
ugucugucuguccc

SEQ ID NO: 1404783 - RNA, 15 nt, Human
ugucugucuguccca

SEQ ID NO: 1404784 - RNA, 15 nt, Human
ugucugucugucugu

SEQ ID NO: 1404785 - RNA, 16 nt, Human
ugucugucugucuguc

SEQ ID NO: 1404786 - RNA, 19 nt, Human
uguccugagccccagggag

SEQ ID NO: 1404787 - RNA, 18 nt, Human
uguccugagccccaggga

SEQ ID NO: 1404788 - RNA, 17 nt, Human
uguccugagccccaggg

SEQ ID NO: 1404789 - RNA, 14 nt, Human
uguccugagcccca

SEQ ID NO: 1404790 - RNA, 17 nt, Human
uguccugaccugucuca

SEQ ID NO: 1404791 - RNA, 21 nt, Human
uguccucccgagcuccucuuc

SEQ ID NO: 1404792 - RNA, 17 nt, Human
uguccucccgagcuccu

SEQ ID NO: 1404793 - RNA, 13 nt, Human
uguccucagcccc

SEQ ID NO: 1404794 - RNA, 23 nt, Human
uguccuccaacaccaagcacagc

SEQ ID NO: 1404795 - RNA, 20 nt, Human
uguccuaucuccagcggccc

SEQ ID NO: 1404796 - RNA, 22 nt, Human
uguccuagcacagauggccagc

SEQ ID NO: 1404797 - RNA, 21 nt, Human
uguccuagcacagauggccag

SEQ ID NO: 1404798 - RNA, 18 nt, Human
uguccuagcacagauggc

SEQ ID NO: 1404799 - RNA, 22 nt, Human
ugucauccucaaagaaagugua

SEQ ID NO: 1404800 - RNA, 21 nt, Human
ugucauccucaaagaaagugu

SEQ ID NO: 1404801 - RNA, 20 nt, Human
ugucauccucaaagaaagug

SEQ ID NO: 1404802 - RNA, 19 nt, Human
ugucauccucaaagaaagu

SEQ ID NO: 1404803 - RNA, 14 nt, Human
ugucauccucacag

SEQ ID NO: 1404804 - RNA, 23 nt, Human
ugucauccucaaagaaaguguau

SEQ ID NO: 1404805 - RNA, 12 nt, Human
uguccugccugu

SEQ ID NO: 1404806 - RNA, 24 nt, Human
uguccugccacccagccccagcca

SEQ ID NO: 1404807 - RNA, 24 nt, Human
uguccugccuauuaucugucagcu

SEQ ID NO: 1404808 - RNA, 17 nt, Human
uguccugccuauuaucu

SEQ ID NO: 1404809 - RNA, 22 nt, Human
uguccugccacccagccccagc

SEQ ID NO: 1404810 - RNA, 18 nt, Human
uguccugccacccagccc

SEQ ID NO: 1404811 - RNA, 16 nt, Human
uguccugagcucagcg

SEQ ID NO: 1404812 - RNA, 17 nt, Human
uguccugagcucagcgu

SEQ ID NO: 1404813 - RNA, 15 nt, Human
uguccugagcucagc

SEQ ID NO: 1404814 - RNA, 14 nt, Human
uguccugagcucag

SEQ ID NO: 1404815 - RNA, 12 nt, Human
uguccugagcuc

SEQ ID NO: 1404816 - RNA, 21 nt, Human
uguccugagccccagggagag

SEQ ID NO: 1404817 - RNA, 18 nt, Human
uguccugcaccggggccu

SEQ ID NO: 1404818 - RNA, 16 nt, Human
uguccugccuguggcc

SEQ ID NO: 1404819 - RNA, 17 nt, Human
uguccugggccugcaga

SEQ ID NO: 1404820 - RNA, 15 nt, Human
uguccugggccugca

SEQ ID NO: 1404821 - RNA, 14 nt, Human
uguccugggccugc

SEQ ID NO: 1404822 - RNA, 18 nt, Human
ugucuaagauucuagauc

SEQ ID NO: 1404823 - RNA, 13 nt, Human
uguccugguggua

SEQ ID NO: 1404824 - RNA, 17 nt, Human
ugucuaagauucuagau

SEQ ID NO: 1404825 - RNA, 22 nt, Human
ugucuacacuaagagagaauga

SEQ ID NO: 1404826 - RNA, 23 nt, Human
ugucuacacagauguucacccaa

SEQ ID NO: 1404827 - RNA, 17 nt, Human
ugucuacacuaagagag

SEQ ID NO: 1404828 - RNA, 22 nt, Human
uggugcaaguugaggacuucuu

SEQ ID NO: 1404829 - RNA, 19 nt, Human
uggugcaaguugaggacuu

SEQ ID NO: 1404830 - RNA, 16 nt, Human
uggugcaaguugagga

SEQ ID NO: 1404831 - RNA, 15 nt, Human
ugguggccaugcucc

SEQ ID NO: 1404832 - RNA, 14 nt, Human
ugguggccaugcuc

SEQ ID NO: 1404833 - RNA, 23 nt, Human
uggugcaaguugaggacuucuug

SEQ ID NO: 1404834 - RNA, 21 nt, Human
uggguagaaagagauacagag

SEQ ID NO: 1404835 - RNA, 14 nt, Human
uggguagacacaca

SEQ ID NO: 1404836 - RNA, 23 nt, Human
uggugggccaacaaagaacacua

SEQ ID NO: 1404837 - RNA, 20 nt, Human
uggugggccaacaaagaaca

SEQ ID NO: 1404838 - RNA, 16 nt, Human
ugguggccuggucccu

SEQ ID NO: 1404839 - RNA, 22 nt, Human
ugguggcccucuccccugcccc

SEQ ID NO: 1404840 - RNA, 23 nt, Human
ugguggcccucuccccugccccc

SEQ ID NO: 1404841 - RNA, 21 nt, Human
ugguggcccucuccccugccc

SEQ ID NO: 1404842 - RNA, 19 nt, Human
ugguggcccucuccccugc

SEQ ID NO: 1404843 - RNA, 16 nt, Human
ugguggcccucucccc

SEQ ID NO: 1404844 - RNA, 14 nt, Human
ugguggcccucucc

SEQ ID NO: 1404845 - RNA, 21 nt, Human
ugguggccaugcuccucuucc

SEQ ID NO: 1404846 - RNA, 20 nt, Human
ugguggccaugcuccucuuc

SEQ ID NO: 1404847 - RNA, 15 nt, Human
ugguggccugguccc

SEQ ID NO: 1404848 - RNA, 18 nt, Human
ugguguaagguacuuuca

SEQ ID NO: 1404849 - RNA, 19 nt, Human
uggugguuuucuguucuuu

SEQ ID NO: 1404850 - RNA, 17 nt, Human
uggugguuucagaaaug

SEQ ID NO: 1404851 - RNA, 18 nt, Human
uggugguuucagaaaugu

SEQ ID NO: 1404852 - RNA, 18 nt, Human
ugguggguccaugggcag

SEQ ID NO: 1404853 - RNA, 17 nt, Human
ugguggguccaugggca

SEQ ID NO: 1404854 - RNA, 16 nt, Human
ugguggguccaugggc

SEQ ID NO: 1404855 - RNA, 14 nt, Human
ugguggggcagcuc

SEQ ID NO: 1404856 - RNA, 15 nt, Human
ugguggucuguuggc

SEQ ID NO: 1404857 - RNA, 15 nt, Human
ugguggucccugggu

SEQ ID NO: 1404858 - RNA, 14 nt, Human
ugguggucccuggg

SEQ ID NO: 1404859 - RNA, 16 nt, Human
uggugguauuuucaau

SEQ ID NO: 1404860 - RNA, 23 nt, Human
uggugggugccuaggccugggca

SEQ ID NO: 1404861 - RNA, 14 nt, Human
uggugguagagaag

SEQ ID NO: 1404862 - RNA, 22 nt, Human
ugguuccagggucccucugugu

SEQ ID NO: 1404863 - RNA, 21 nt, Human
ugguuccagggucccucugug

SEQ ID NO: 1404864 - RNA, 12 nt, Human
ugguuccagggu

SEQ ID NO: 1404865 - RNA, 16 nt, Human
ugguucauuaauucua

SEQ ID NO: 1404866 - RNA, 21 nt, Human
ugguguccagacagagcccug

SEQ ID NO: 1404867 - RNA, 18 nt, Human
ugguguccagacagagcc

SEQ ID NO: 1404868 - RNA, 19 nt, Human
uggugucagacccuggagg

SEQ ID NO: 1404869 - RNA, 18 nt, Human
uggugucagacccuggag

SEQ ID NO: 1404870 - RNA, 20 nt, Human
ugguguagcuacagagaaac

SEQ ID NO: 1404871 - RNA, 18 nt, Human
ugguguagcuacagagaa

SEQ ID NO: 1404872 - RNA, 17 nt, Human
ugguguagcuacagaga

SEQ ID NO: 1404873 - RNA, 16 nt, Human
ugguguagcuacagag

SEQ ID NO: 1404874 - RNA, 15 nt, Human
ugguguagcuacaga

SEQ ID NO: 1404875 - RNA, 17 nt, Human
ugguguagaacacuaau

SEQ ID NO: 1404876 - RNA, 21 nt, Human
ugguguagaacacuaauucau

SEQ ID NO: 1404877 - RNA, 15 nt, Human
ugguguagaacacua

SEQ ID NO: 1404878 - RNA, 22 nt, Human
ugguguagcuacagagaaacca

SEQ ID NO: 1404879 - RNA, 23 nt, Human
ugguucuugaggggaccaggagu

SEQ ID NO: 1404880 - RNA, 21 nt, Human
ugguucuugaggggaccagga

SEQ ID NO: 1404881 - RNA, 15 nt, Human
ugguucuugagggga

SEQ ID NO: 1404882 - RNA, 17 nt, Human
ugguucuggcuguuuga

SEQ ID NO: 1404883 - RNA, 22 nt, Human
ugguucugagauggcucccagg

SEQ ID NO: 1404884 - RNA, 18 nt, Human
ugguucugagauggcucc

SEQ ID NO: 1404885 - RNA, 18 nt, Human
ugguucucaauuccaaca

SEQ ID NO: 1404886 - RNA, 23 nt, Human
ugguucucaauuccaacaguuua

SEQ ID NO: 1404887 - RNA, 16 nt, Human
ugguucucaauuccaa

SEQ ID NO: 1404888 - RNA, 23 nt, Human
ugguugaacucugguggcacagg

SEQ ID NO: 1404889 - RNA, 16 nt, Human
ugguugaaaauaaaaa

SEQ ID NO: 1404890 - RNA, 19 nt, Human
ugguucuuguguuggcugu

SEQ ID NO: 1404891 - RNA, 22 nt, Human
ugguucuugaggggaccaggag

SEQ ID NO: 1404892 - RNA, 12 nt, Human
ugguugaggaaa

SEQ ID NO: 1404893 - RNA, 22 nt, Human
ugguucuaaggaccugaaauuc

SEQ ID NO: 1404894 - RNA, 17 nt, Human
ugguucuaaggaccuga

SEQ ID NO: 1404895 - RNA, 16 nt, Human
ugguuccccaguagag

SEQ ID NO: 1404896 - RNA, 20 nt, Human
ugguucccuugaugaagaag

SEQ ID NO: 1404897 - RNA, 17 nt, Human
ugguucccuugaugaag

SEQ ID NO: 1404898 - RNA, 20 nt, Human
ugguucccguuucuccaccu

SEQ ID NO: 1404899 - RNA, 18 nt, Human
ugguucccguuucuccac

SEQ ID NO: 1404900 - RNA, 16 nt, Human
ugguucccuugaugaa

SEQ ID NO: 1404901 - RNA, 20 nt, Human
uguaaaauauuuugaaucaa

SEQ ID NO: 1404902 - RNA, 19 nt, Human
uguaaaauauuuugaauca

SEQ ID NO: 1404903 - RNA, 16 nt, Human
uguaaaauaauucuga

SEQ ID NO: 1404904 - RNA, 12 nt, Human
uguaaaauaauu

SEQ ID NO: 1404905 - RNA, 19 nt, Human
uguaaaagcauuuuguaau

SEQ ID NO: 1404906 - RNA, 18 nt, Human
uguaaaagcauuuuguaa

SEQ ID NO: 1404907 - RNA, 17 nt, Human
uguaaaagcauuuugua

SEQ ID NO: 1404908 - RNA, 19 nt, Human
uguaaaacauuuauuuuga

SEQ ID NO: 1404909 - RNA, 22 nt, Human
uguaaaacagguagaauuaucu

SEQ ID NO: 1404910 - RNA, 14 nt, Human
uguaaaacagguag

SEQ ID NO: 1404911 - RNA, 13 nt, Human
uguaaaacaggua

SEQ ID NO: 1404912 - RNA, 12 nt, Human
uguaaaacaggu

SEQ ID NO: 1404913 - RNA, 20 nt, Human
uguaaaaucuugucaugugu

SEQ ID NO: 1404914 - RNA, 19 nt, Human
uguaaaaucuugucaugug

SEQ ID NO: 1404915 - RNA, 13 nt, Human
uguaaaaucuuuc

SEQ ID NO: 1404916 - RNA, 14 nt, Human
uguaaaaucuuucu

SEQ ID NO: 1404917 - RNA, 21 nt, Human
uguaaaaucuuucuuucuuag

SEQ ID NO: 1404918 - RNA, 18 nt, Human
uguaaaaucuugucaugu

SEQ ID NO: 1404919 - RNA, 16 nt, Human
uguaaaaucuugucau

SEQ ID NO: 1404920 - RNA, 15 nt, Human
uguaaaaucuuguca

SEQ ID NO: 1404921 - RNA, 12 nt, Human
uguaaaaucuug

SEQ ID NO: 1404922 - RNA, 21 nt, Human
uguaaaauauuuugaaucaau

SEQ ID NO: 1404923 - RNA, 12 nt, Human
uguaaaaugaca

SEQ ID NO: 1404924 - RNA, 22 nt, Human
uguaaaaucuugucauguguau

SEQ ID NO: 1404925 - RNA, 22 nt, Human
uguaaaaucuuucuuucuuaga

SEQ ID NO: 1404926 - RNA, 23 nt, Human
uguaaaaucuuucuuucuuagaa

SEQ ID NO: 1404927 - RNA, 20 nt, Human
uguaaacucaaaauauuugu

SEQ ID NO: 1404928 - RNA, 15 nt, Human
uguaaacucaaaaua

SEQ ID NO: 1404929 - RNA, 19 nt, Human
uguaaaccugagucguaca

SEQ ID NO: 1404930 - RNA, 21 nt, Human
uguaaaaugacaaucaugugu

SEQ ID NO: 1404931 - RNA, 19 nt, Human
uguaaaaugacaaucaugu

SEQ ID NO: 1404932 - RNA, 16 nt, Human
uguaaaaugacaauca

SEQ ID NO: 1404933 - RNA, 20 nt, Human
ugguuuuuacugcucugaga

SEQ ID NO: 1404934 - RNA, 21 nt, Human
ugguuuuuacugcucugagaa

SEQ ID NO: 1404935 - RNA, 18 nt, Human
ugguuuuuacugcucuga

SEQ ID NO: 1404936 - RNA, 19 nt, Human
ugguuuucuuuugccauga

SEQ ID NO: 1404937 - RNA, 18 nt, Human
ugguuuucuuuugccaug

SEQ ID NO: 1404938 - RNA, 21 nt, Human
ugguuuucuucuucucguccu

SEQ ID NO: 1404939 - RNA, 16 nt, Human
ugguugguuuucuucu

SEQ ID NO: 1404940 - RNA, 18 nt, Human
ugguugaugccaaaaaaa

SEQ ID NO: 1404941 - RNA, 14 nt, Human
ugguugaugccaaa

SEQ ID NO: 1404942 - RNA, 17 nt, Human
ugguugguuuucuucuu

SEQ ID NO: 1404943 - RNA, 12 nt, Human
ugguuguauuag

SEQ ID NO: 1404944 - RNA, 14 nt, Human
ugguuguauuagau

SEQ ID NO: 1404945 - RNA, 16 nt, Human
ugguuguauuagaugu

SEQ ID NO: 1404946 - RNA, 20 nt, Human
ugguuguacauauaagugau

SEQ ID NO: 1404947 - RNA, 16 nt, Human
ugguuuucuguucuuu

SEQ ID NO: 1404948 - RNA, 18 nt, Human
ugguuguauuagauguuc

SEQ ID NO: 1404949 - RNA, 11 nt, Human
uguaacaugua

SEQ ID NO: 1404950 - RNA, 17 nt, Human
uguaacauacuggccug

SEQ ID NO: 1404951 - RNA, 18 nt, Human
uguaaacuguguauucca

SEQ ID NO: 1404952 - RNA, 14 nt, Human
uguaaacuguguau

SEQ ID NO: 1404953 - RNA, 13 nt, Human
uguaaacugugua

SEQ ID NO: 1404954 - RNA, 15 nt, Human
uguaaacugugcacc

SEQ ID NO: 1404955 - RNA, 14 nt, Human
uguaaacugugcac

SEQ ID NO: 1404956 - RNA, 23 nt, Human
uguaaacucaaaauauuuguaca

SEQ ID NO: 1404957 - RNA, 13 nt, Human
uguaaauuuguac

SEQ ID NO: 1404958 - RNA, 22 nt, Human
uguaacaauuguguagccuuuu

SEQ ID NO: 1404959 - RNA, 21 nt, Human
uguaacaauuguguagccuuu

SEQ ID NO: 1404960 - RNA, 20 nt, Human
uguaacaauuguguagccuu

SEQ ID NO: 1404961 - RNA, 19 nt, Human
uguaacaauuguguagccu

SEQ ID NO: 1404962 - RNA, 16 nt, Human
uguaacaauuguguag

SEQ ID NO: 1404963 - RNA, 15 nt, Human
uguaacaauugugua

SEQ ID NO: 1404964 - RNA, 18 nt, Human
uguaacaagccagauuuu

SEQ ID NO: 1404965 - RNA, 14 nt, Human
uguaacaagccaga

SEQ ID NO: 1404966 - RNA, 14 nt, Human
uguaaauuuguacu

SEQ ID NO: 1404967 - RNA, 18 nt, Human
uguaaauuuguacuauuu

SEQ ID NO: 1404968 - RNA, 16 nt, Human
uguacaagaugaagga

SEQ ID NO: 1404969 - RNA, 11 nt, Human
uguaaugaaaa

SEQ ID NO: 1404970 - RNA, 19 nt, Human
uguaauaauaaagaauagc

SEQ ID NO: 1404971 - RNA, 12 nt, Human
uguaaugaaaac

SEQ ID NO: 1404972 - RNA, 13 nt, Human
uguaaugaaaacc

SEQ ID NO: 1404973 - RNA, 17 nt, Human
uguaaugaaaaccacau

SEQ ID NO: 1404974 - RNA, 11 nt, Human
uguaauacaau

SEQ ID NO: 1404975 - RNA, 23 nt, Human
uuguaaauuauuaauuuaugcag

SEQ ID NO: 1404976 - RNA, 16 nt, Human
uuguaaauuauuaauu

SEQ ID NO: 1404977 - RNA, 14 nt, Human
uuguaaauuggcau

SEQ ID NO: 1404978 - RNA, 13 nt, Human
uuguaaauuggca

SEQ ID NO: 1404979 - RNA, 12 nt, Human
uuguaaauuggc

SEQ ID NO: 1404980 - RNA, 18 nt, Human
uuguacauaaugcgugca

SEQ ID NO: 1404981 - RNA, 15 nt, Human
uuguaaauuaacuuu

SEQ ID NO: 1404982 - RNA, 16 nt, Human
uuguaaauuaacuuuu

SEQ ID NO: 1404983 - RNA, 18 nt, Human
uuguaaauuaacuuuuau

SEQ ID NO: 1404984 - RNA, 23 nt, Human
uuguaaauuaacuuuuauaaacu

SEQ ID NO: 1404985 - RNA, 20 nt, Human
uuguaaaagcauuuuguaau

SEQ ID NO: 1404986 - RNA, 19 nt, Human
uuguaaaagcauuuuguaa

SEQ ID NO: 1404987 - RNA, 18 nt, Human
uuguaaaagcauuuugua

SEQ ID NO: 1404988 - RNA, 17 nt, Human
uuguaaaagcauuuugu

SEQ ID NO: 1404989 - RNA, 14 nt, Human
uuguaaaacaggua

SEQ ID NO: 1404990 - RNA, 15 nt, Human
uuguaaaacagguag

SEQ ID NO: 1404991 - RNA, 16 nt, Human
uuguaaauauaaagac

SEQ ID NO: 1404992 - RNA, 17 nt, Human
uuguaaauauaaagacg

SEQ ID NO: 1404993 - RNA, 13 nt, Human
uuguaaauauaaa

SEQ ID NO: 1404994 - RNA, 12 nt, Human
uuguaaauauaa

SEQ ID NO: 1404995 - RNA, 11 nt, Human
uuguaaauaua

SEQ ID NO: 1404996 - RNA, 13 nt, Human
uuguaaaacaggu

SEQ ID NO: 1404997 - RNA, 15 nt, Human
uugguccaagauucc

SEQ ID NO: 1404998 - RNA, 21 nt, Human
uugguauuguauuuauucaau

SEQ ID NO: 1404999 - RNA, 12 nt, Human
uugguauuguau

SEQ ID NO: 1405000 - RNA, 13 nt, Human
uugguauuguauu

SEQ ID NO: 1405001 - RNA, 14 nt, Human
uugguauuguauuu

SEQ ID NO: 1405002 - RNA, 15 nt, Human
uugcacuaucuuuca

SEQ ID NO: 1405003 - RNA, 22 nt, Human
uugcacguguguuuuucuauua

SEQ ID NO: 1405004 - RNA, 23 nt, Human
uugcacguguguuuuucuauuaa

SEQ ID NO: 1405005 - RNA, 21 nt, Human
uugcacguguguuuuucuauu

SEQ ID NO: 1405006 - RNA, 20 nt, Human
uugcacguguguuuuucuau

SEQ ID NO: 1405007 - RNA, 18 nt, Human
uugcacguguguuuuucu

SEQ ID NO: 1405008 - RNA, 14 nt, Human
uugcacguguguuu

SEQ ID NO: 1405009 - RNA, 15 nt, Human
uugcacguggccucu

SEQ ID NO: 1405010 - RNA, 18 nt, Human
uuggguuagaccuacagg

SEQ ID NO: 1405011 - RNA, 16 nt, Human
uuggguuagaccuaca

SEQ ID NO: 1405012 - RNA, 19 nt, Human
uugguaccagauaacuuuu

SEQ ID NO: 1405013 - RNA, 15 nt, Human
uuggguuagaccuac

SEQ ID NO: 1405014 - RNA, 12 nt, Human
uuggguuagacc

SEQ ID NO: 1405015 - RNA, 15 nt, Human
uugucucaugccagu

SEQ ID NO: 1405016 - RNA, 15 nt, Human
uugucuagugaaacu

SEQ ID NO: 1405017 - RNA, 16 nt, Human
uugucucaaugcucau

SEQ ID NO: 1405018 - RNA, 17 nt, Human
uugucucaaugcucaua

SEQ ID NO: 1405019 - RNA, 13 nt, Human
uugucucagagca

SEQ ID NO: 1405020 - RNA, 18 nt, Human
uugucucaaugcucauaa

SEQ ID NO: 1405021 - RNA, 13 nt, Human
uugucuuuuuaga

SEQ ID NO: 1405022 - RNA, 20 nt, Human
uugucuggcaaggacuuugu

SEQ ID NO: 1405023 - RNA, 19 nt, Human
uugucuuuuuagaugccca

SEQ ID NO: 1405024 - RNA, 20 nt, Human
uugucuuuguucuucuacca

SEQ ID NO: 1405025 - RNA, 21 nt, Human
uugucuggcaaggacuuugua

SEQ ID NO: 1405026 - RNA, 13 nt, Human
uugugaaauuauu

SEQ ID NO: 1405027 - RNA, 12 nt, Human
uugugauuuuug

SEQ ID NO: 1405028 - RNA, 16 nt, Human
uugugauuuuuguaau

SEQ ID NO: 1405029 - RNA, 17 nt, Human
uugugauuuuuguaauu

SEQ ID NO: 1405030 - RNA, 14 nt, Human
uuguauuacaaauc

SEQ ID NO: 1405031 - RNA, 15 nt, Human
uuguauucucuccug

SEQ ID NO: 1405032 - RNA, 16 nt, Human
uuguauucucuccugu

SEQ ID NO: 1405033 - RNA, 17 nt, Human
uugucguaaagauuugg

SEQ ID NO: 1405034 - RNA, 21 nt, Human
uuguauucucuccuguaccuc

SEQ ID NO: 1405035 - RNA, 19 nt, Human
uuguauucucuccuguacc

SEQ ID NO: 1405036 - RNA, 18 nt, Human
uugucuacacacccugca

SEQ ID NO: 1405037 - RNA, 21 nt, Human
uugucuaagaaauugaauacu

SEQ ID NO: 1405038 - RNA, 19 nt, Human
uugucuaagaaauugaaua

SEQ ID NO: 1405039 - RNA, 13 nt, Human
uugucuaagaaau

SEQ ID NO: 1405040 - RNA, 16 nt, Human
uuguacauaguuauuu

SEQ ID NO: 1405041 - RNA, 18 nt, Human
uuguaaauuggcauggaa

SEQ ID NO: 1405042 - RNA, 13 nt, Human
uuguacuauuuaa

SEQ ID NO: 1405043 - RNA, 16 nt, Human
uuguacuaaagccaaa

SEQ ID NO: 1405044 - RNA, 23 nt, Human
uuguacuaaagccaaacauauau

SEQ ID NO: 1405045 - RNA, 22 nt, Human
uuguacuauuuaacugacuauu

SEQ ID NO: 1405046 - RNA, 19 nt, Human
uuguacuauuuaacugacu

SEQ ID NO: 1405047 - RNA, 16 nt, Human
uuguacuauuuaacug

SEQ ID NO: 1405048 - RNA, 14 nt, Human
uuguuucuccccca

SEQ ID NO: 1405049 - RNA, 23 nt, Human
uuguuucuacuuugauaugacug

SEQ ID NO: 1405050 - RNA, 14 nt, Human
uuguuucuacuuug

SEQ ID NO: 1405051 - RNA, 16 nt, Human
uuguuucguggggagg

SEQ ID NO: 1405052 - RNA, 22 nt, Human
uuguuucgcucuuugagaaaua

SEQ ID NO: 1405053 - RNA, 19 nt, Human
uuguuucgcucuuugagaa

SEQ ID NO: 1405054 - RNA, 18 nt, Human
uuguuucgcucuuugaga

SEQ ID NO: 1405055 - RNA, 15 nt, Human
uuguuucgcucuuug

SEQ ID NO: 1405056 - RNA, 13 nt, Human
uuguuucgcucuu

SEQ ID NO: 1405057 - RNA, 23 nt, Human
uuguuuccuccccuaucuguauu

SEQ ID NO: 1405058 - RNA, 23 nt, Human
uuguuucaaugagguguccaacu

SEQ ID NO: 1405059 - RNA, 16 nt, Human
uuguuucaauugcauc

SEQ ID NO: 1405060 - RNA, 21 nt, Human
uuguuucaaugagguguccaa

SEQ ID NO: 1405061 - RNA, 15 nt, Human
uuguuuaaaaaguaa

SEQ ID NO: 1405062 - RNA, 22 nt, Human
uuguuaucagucaauauuuuua

SEQ ID NO: 1405063 - RNA, 16 nt, Human
uuguuaucagucaaua

SEQ ID NO: 1405064 - RNA, 15 nt, Human
uuguuauauaauuua

SEQ ID NO: 1405065 - RNA, 16 nt, Human
uuguuauauaaucauu

SEQ ID NO: 1405066 - RNA, 13 nt, Human
uuguuauauaauc

SEQ ID NO: 1405067 - RNA, 22 nt, Human
uuguuaguaugaggcauuuguu

SEQ ID NO: 1405068 - RNA, 14 nt, Human
uuguugugcuuuua

SEQ ID NO: 1405069 - RNA, 18 nt, Human
uuguuauguagauaacaa

SEQ ID NO: 1405070 - RNA, 15 nt, Human
uuguuguuucuugcc

SEQ ID NO: 1405071 - RNA, 21 nt, Human
uuguuguucuguuaacugaau

SEQ ID NO: 1405072 - RNA, 14 nt, Human
uuguuguucuguua

SEQ ID NO: 1405073 - RNA, 13 nt, Human
uuguuguucuguu

SEQ ID NO: 1405074 - RNA, 15 nt, Human
uuguuguucuguuaa

SEQ ID NO: 1405075 - RNA, 22 nt, Human
uuguuaauuuuuccuauauugc

SEQ ID NO: 1405076 - RNA, 21 nt, Human
uuguuaauuuagaaaacuuua

SEQ ID NO: 1405077 - RNA, 22 nt, Human
uuguuaauuuagaaaacuuuaa

SEQ ID NO: 1405078 - RNA, 20 nt, Human
uuguuaauuuagaaaacuuu

SEQ ID NO: 1405079 - RNA, 19 nt, Human
uuguuaauuuagaaaacuu

SEQ ID NO: 1405080 - RNA, 14 nt, Human
uuguuacauuuuua

SEQ ID NO: 1405081 - RNA, 14 nt, Human
uuguuacuucugag

SEQ ID NO: 1405082 - RNA, 16 nt, Human
uuguuacguagccuaa

SEQ ID NO: 1405083 - RNA, 19 nt, Human
uuguuaguaugaggcauuu

SEQ ID NO: 1405084 - RNA, 21 nt, Human
uuguuaguaugaggcauuugu

SEQ ID NO: 1405085 - RNA, 17 nt, Human
uuguguuuguguauuua

SEQ ID NO: 1405086 - RNA, 15 nt, Human
uuguguuugucauua

SEQ ID NO: 1405087 - RNA, 20 nt, Human
uuguguuugucauuagccug

SEQ ID NO: 1405088 - RNA, 18 nt, Human
uuguguuuugcaagccag

SEQ ID NO: 1405089 - RNA, 14 nt, Human
uuguguuugucauu

SEQ ID NO: 1405090 - RNA, 12 nt, Human
uuguuaaauuuu

SEQ ID NO: 1405091 - RNA, 15 nt, Human
uuguuaaaaauguca

SEQ ID NO: 1405092 - RNA, 16 nt, Human
uuguuaauaguuccug

SEQ ID NO: 1405093 - RNA, 18 nt, Human
uuguuaaucuucaauagu

SEQ ID NO: 1405094 - RNA, 14 nt, Human
uugugcauucugga

SEQ ID NO: 1405095 - RNA, 11 nt, Human
uugugcagaga

SEQ ID NO: 1405096 - RNA, 12 nt, Human
uugugcauuugg

SEQ ID NO: 1405097 - RNA, 22 nt, Human
uugugcauuaucuagauacugu

SEQ ID NO: 1405098 - RNA, 23 nt, Human
uugugcauuaucuagauacugua

SEQ ID NO: 1405099 - RNA, 21 nt, Human
uugugcaauguguauaaacaa

SEQ ID NO: 1405100 - RNA, 20 nt, Human
uugugcaauguguauaaaca

SEQ ID NO: 1405101 - RNA, 19 nt, Human
uugugcaauguguauaaac

SEQ ID NO: 1405102 - RNA, 23 nt, Human
uugugcaauguaaauauuuuaaa

SEQ ID NO: 1405103 - RNA, 22 nt, Human
uugugcaauguaaauauuuuaa

SEQ ID NO: 1405104 - RNA, 18 nt, Human
uugugcaauguaaauauu

SEQ ID NO: 1405105 - RNA, 17 nt, Human
uugugcaauguaaauau

SEQ ID NO: 1405106 - RNA, 16 nt, Human
uugugcacauuuauuu

SEQ ID NO: 1405107 - RNA, 18 nt, Human
uugugcacauuuauuucc

SEQ ID NO: 1405108 - RNA, 17 nt, Human
uugugcauuaucuagau

SEQ ID NO: 1405109 - RNA, 21 nt, Human
uugugccaugucaaacaaaua

SEQ ID NO: 1405110 - RNA, 22 nt, Human
uugugcccccaaccauuuccuc

SEQ ID NO: 1405111 - RNA, 23 nt, Human
uugugcuucuuucuuugggaaua

SEQ ID NO: 1405112 - RNA, 21 nt, Human
uuguggaauugggagcuuggg

SEQ ID NO: 1405113 - RNA, 22 nt, Human
uuguggaauggagauucaguuu

SEQ ID NO: 1405114 - RNA, 20 nt, Human
uuguggauuuaacagaaaug

SEQ ID NO: 1405115 - RNA, 21 nt, Human
uuguggauuuaacagaaaugu

SEQ ID NO: 1405116 - RNA, 13 nt, Human
uuguggacuaaaa

SEQ ID NO: 1405117 - RNA, 16 nt, Human
uuguggacuaaaagau

SEQ ID NO: 1405118 - RNA, 18 nt, Human
uuguggacuaaaagauau

SEQ ID NO: 1405119 - RNA, 22 nt, Human
uuguggacuaaaagauauaagu

SEQ ID NO: 1405120 - RNA, 15 nt, Human
uuguguucuguuuug

SEQ ID NO: 1405121 - RNA, 18 nt, Human
uuguggcaagugaauuug

SEQ ID NO: 1405122 - RNA, 20 nt, Human
uuguguucccauuucagcug

SEQ ID NO: 1405123 - RNA, 22 nt, Human
uuguggcaagugaauuugccug

SEQ ID NO: 1405124 - RNA, 16 nt, Human
uuguggcaagugaauu

SEQ ID NO: 1405125 - RNA, 22 nt, Human
uuguggauuuaacagaaaugua

SEQ ID NO: 1405126 - RNA, 23 nt, Human
uuguggauuuaacagaaauguac

SEQ ID NO: 1405127 - RNA, 20 nt, Human
uuguguugaagagguuuuaa

SEQ ID NO: 1405128 - RNA, 13 nt, Human
uuuaacuuaaaua

SEQ ID NO: 1405129 - RNA, 14 nt, Human
uuuaacuuaaauag

SEQ ID NO: 1405130 - RNA, 18 nt, Human
uuuaacuguggauauugu

SEQ ID NO: 1405131 - RNA, 17 nt, Human
uuuaacuguggauauug

SEQ ID NO: 1405132 - RNA, 21 nt, Human
uuuaacuuuguuuuauuuuca

SEQ ID NO: 1405133 - RNA, 17 nt, Human
uuuaacuuuguuuuauu

SEQ ID NO: 1405134 - RNA, 12 nt, Human
uuuaacuuuguu

SEQ ID NO: 1405135 - RNA, 18 nt, Human
uuuaagaaaaaggaugca

SEQ ID NO: 1405136 - RNA, 15 nt, Human
uuuaagaauugagua

SEQ ID NO: 1405137 - RNA, 20 nt, Human
uuuaagaauugaguaauggu

SEQ ID NO: 1405138 - RNA, 21 nt, Human
uuuaagaauaucuguaauggu

SEQ ID NO: 1405139 - RNA, 15 nt, Human
uuuaagaauaucugu

SEQ ID NO: 1405140 - RNA, 14 nt, Human
uuuaagaaauagaa

SEQ ID NO: 1405141 - RNA, 22 nt, Human
uuuaagaaaaaggaugcacaga

SEQ ID NO: 1405142 - RNA, 13 nt, Human
uuuaauaauguuu

SEQ ID NO: 1405143 - RNA, 15 nt, Human
uuuaauaauauacuu

SEQ ID NO: 1405144 - RNA, 14 nt, Human
uuuaauaaauuuau

SEQ ID NO: 1405145 - RNA, 12 nt, Human
uuuaauaaaaga

SEQ ID NO: 1405146 - RNA, 20 nt, Human
uuuaagacgaaacauuuguu

SEQ ID NO: 1405147 - RNA, 15 nt, Human
uuuaacuguggauau

SEQ ID NO: 1405148 - RNA, 13 nt, Human
uuuaacuguggau

SEQ ID NO: 1405149 - RNA, 12 nt, Human
uuuaacugugga

SEQ ID NO: 1405150 - RNA, 21 nt, Human
uuuaacugccguaauuuaacu

SEQ ID NO: 1405151 - RNA, 12 nt, Human
uuuaacugccgu

SEQ ID NO: 1405152 - RNA, 11 nt, Human
uuuaacugacu

SEQ ID NO: 1405153 - RNA, 14 nt, Human
uuuaacugccuugu

SEQ ID NO: 1405154 - RNA, 23 nt, Human
uuuaacugacuauucuugaugua

SEQ ID NO: 1405155 - RNA, 19 nt, Human
uuuaacugacaagccaucu

SEQ ID NO: 1405156 - RNA, 14 nt, Human
uuuaacugacaagc

SEQ ID NO: 1405157 - RNA, 20 nt, Human
uuuaacucccauuaccaugu

SEQ ID NO: 1405158 - RNA, 12 nt, Human
uuuaacauuccu

SEQ ID NO: 1405159 - RNA, 16 nt, Human
uuuaaccuuugauaga

SEQ ID NO: 1405160 - RNA, 18 nt, Human
uuuaacauaagcuauuuu

SEQ ID NO: 1405161 - RNA, 19 nt, Human
uuuaacauaagcuauuuuu

SEQ ID NO: 1405162 - RNA, 17 nt, Human
uuuaacauaagcuauuu

SEQ ID NO: 1405163 - RNA, 16 nt, Human
uuuaacauaagcuauu

SEQ ID NO: 1405164 - RNA, 14 nt, Human
uuuaacauaagcua

SEQ ID NO: 1405165 - RNA, 13 nt, Human
uuuaacauaagcu

SEQ ID NO: 1405166 - RNA, 19 nt, Human
uuuaacucuauaauguguu

SEQ ID NO: 1405167 - RNA, 21 nt, Human
uuuaacagaaauuguauauug

SEQ ID NO: 1405168 - RNA, 19 nt, Human
uuuaacagaaauuguauau

SEQ ID NO: 1405169 - RNA, 16 nt, Human
uuuaacagaaauugua

SEQ ID NO: 1405170 - RNA, 14 nt, Human
uuuaacagaaauug

SEQ ID NO: 1405171 - RNA, 13 nt, Human
uuuaacagaaauu

SEQ ID NO: 1405172 - RNA, 20 nt, Human
uuuaacaacauguuuccagc

SEQ ID NO: 1405173 - RNA, 18 nt, Human
uuuaacagaaauguacag

SEQ ID NO: 1405174 - RNA, 18 nt, Human
uuuaaauuuuuuuccuua

SEQ ID NO: 1405175 - RNA, 14 nt, Human
uuuaacaacauguu

SEQ ID NO: 1405176 - RNA, 21 nt, Human
uuuagaaagauaauucacugu

SEQ ID NO: 1405177 - RNA, 13 nt, Human
uuuagaaagcauu

SEQ ID NO: 1405178 - RNA, 15 nt, Human
uuuagaaagauaauu

SEQ ID NO: 1405179 - RNA, 15 nt, Human
uuuagaaagaauauu

SEQ ID NO: 1405180 - RNA, 14 nt, Human
uuuagaaagcauuu

SEQ ID NO: 1405181 - RNA, 16 nt, Human
uuuagaaagcauuuga

SEQ ID NO: 1405182 - RNA, 18 nt, Human
uuuagaaagcauuugaau

SEQ ID NO: 1405183 - RNA, 19 nt, Human
uuuagaaagcauuugaaug

SEQ ID NO: 1405184 - RNA, 16 nt, Human
uuuagaaaucauuuug

SEQ ID NO: 1405185 - RNA, 13 nt, Human
uuuagaaaucauu

SEQ ID NO: 1405186 - RNA, 22 nt, Human
uuuagaaagcauuugaaugcau

SEQ ID NO: 1405187 - RNA, 15 nt, Human
uuuacuuguuucaga

SEQ ID NO: 1405188 - RNA, 17 nt, Human
uuuacuuguuucagagu

SEQ ID NO: 1405189 - RNA, 13 nt, Human
uuuaccagaaagc

SEQ ID NO: 1405190 - RNA, 18 nt, Human
uuuagaaaucauuuugca

SEQ ID NO: 1405191 - RNA, 16 nt, Human
uuuaguuuuucauuaa

SEQ ID NO: 1405192 - RNA, 15 nt, Human
uuuaguuuuucauua

SEQ ID NO: 1405193 - RNA, 13 nt, Human
uuuaguuuuucau

SEQ ID NO: 1405194 - RNA, 12 nt, Human
uuuaguuuuuca

SEQ ID NO: 1405195 - RNA, 21 nt, Human
uuuauaaaaauaaaaaacacu

SEQ ID NO: 1405196 - RNA, 23 nt, Human
uuuauaaaaauaaaaaacacugg

SEQ ID NO: 1405197 - RNA, 16 nt, Human
uuuacacucuuuguaa

SEQ ID NO: 1405198 - RNA, 16 nt, Human
uuuacacgcuuuugug

SEQ ID NO: 1405199 - RNA, 17 nt, Human
uuuacacgcuuuuguga

SEQ ID NO: 1405200 - RNA, 15 nt, Human
uuuacacgcuuuugu

SEQ ID NO: 1405201 - RNA, 19 nt, Human
uuuacacaauagaauuaua

SEQ ID NO: 1405202 - RNA, 17 nt, Human
uuuaauagcaaagaauu

SEQ ID NO: 1405203 - RNA, 18 nt, Human
uuuacacaauagaauuau

SEQ ID NO: 1405204 - RNA, 18 nt, Human
uuuaauagcaaagaauug

SEQ ID NO: 1405205 - RNA, 21 nt, Human
uuuaauagguuuggacaaaau

SEQ ID NO: 1405206 - RNA, 14 nt, Human
uuuaauaauguuuc

SEQ ID NO: 1405207 - RNA, 11 nt, Human
uuuaauaauuu

SEQ ID NO: 1405208 - RNA, 17 nt, Human
uuuaauaauauacuugu

SEQ ID NO: 1405209 - RNA, 19 nt, Human
uuuacaggaacuucaucau

SEQ ID NO: 1405210 - RNA, 18 nt, Human
uuuacaggaacuucauca

SEQ ID NO: 1405211 - RNA, 14 nt, Human
uuuacaggaacuuc

SEQ ID NO: 1405212 - RNA, 19 nt, Human
uuuacagaauugcuuguuu

SEQ ID NO: 1405213 - RNA, 14 nt, Human
uuuacagaauugcu

SEQ ID NO: 1405214 - RNA, 13 nt, Human
uuuacagaauuuu

SEQ ID NO: 1405215 - RNA, 16 nt, Human
uuuacauuguugagcu

SEQ ID NO: 1405216 - RNA, 13 nt, Human
uuuaccacuugug

SEQ ID NO: 1405217 - RNA, 22 nt, Human
uuucaaggcacucuagauucca

SEQ ID NO: 1405218 - RNA, 21 nt, Human
uuucaaggcacucuagauucc

SEQ ID NO: 1405219 - RNA, 20 nt, Human
uuucaaggcacucuagauuc

SEQ ID NO: 1405220 - RNA, 19 nt, Human
uuucaaggcacucuagauu

SEQ ID NO: 1405221 - RNA, 18 nt, Human
uuucaaggcacucuagau

SEQ ID NO: 1405222 - RNA, 17 nt, Human
uuucaaggcacucuaga

SEQ ID NO: 1405223 - RNA, 15 nt, Human
uuucaaggcacucua

SEQ ID NO: 1405224 - RNA, 19 nt, Human
uuucaaggaaguagaaaca

SEQ ID NO: 1405225 - RNA, 11 nt, Human
uuucaaggaag

SEQ ID NO: 1405226 - RNA, 23 nt, Human
uuucaagcagucgugccuguguc

SEQ ID NO: 1405227 - RNA, 22 nt, Human
uuucaagcagucgugccugugu

SEQ ID NO: 1405228 - RNA, 23 nt, Human
uuucaagaggagcccccacccug

SEQ ID NO: 1405229 - RNA, 23 nt, Human
uuucaagaauaaucacgcuuucc

SEQ ID NO: 1405230 - RNA, 17 nt, Human
uuucaagaaacugagga

SEQ ID NO: 1405231 - RNA, 19 nt, Human
uuucaagaaacugaggaau

SEQ ID NO: 1405232 - RNA, 23 nt, Human
uuucaacggaaagugcugucuua

SEQ ID NO: 1405233 - RNA, 15 nt, Human
uuucaacggaaagug

SEQ ID NO: 1405234 - RNA, 15 nt, Human
uuuauugacacagaa

SEQ ID NO: 1405235 - RNA, 14 nt, Human
uuuauugacacaga

SEQ ID NO: 1405236 - RNA, 13 nt, Human
uuuauugacacag

SEQ ID NO: 1405237 - RNA, 12 nt, Human
uuuauugacaca

SEQ ID NO: 1405238 - RNA, 18 nt, Human
uuuauucuucuagaguuc

SEQ ID NO: 1405239 - RNA, 16 nt, Human
uuuauucuucuagagu

SEQ ID NO: 1405240 - RNA, 15 nt, Human
uuuauucuucuagag

SEQ ID NO: 1405241 - RNA, 14 nt, Human
uuuauucuucuaga

SEQ ID NO: 1405242 - RNA, 16 nt, Human
uuuauuaugcauuaua

SEQ ID NO: 1405243 - RNA, 17 nt, Human
uuuauuaugcauuauau

SEQ ID NO: 1405244 - RNA, 22 nt, Human
uuuauuuaaaaaacuaaaaacu

SEQ ID NO: 1405245 - RNA, 22 nt, Human
uuuauuuaacuuuuaguaaagu

SEQ ID NO: 1405246 - RNA, 19 nt, Human
uuuauuuaaugcuguggca

SEQ ID NO: 1405247 - RNA, 14 nt, Human
uuuauggcuuuugu

SEQ ID NO: 1405248 - RNA, 16 nt, Human
uuuauggcuuuugugc

SEQ ID NO: 1405249 - RNA, 20 nt, Human
uuuauggcuuuugugcauua

SEQ ID NO: 1405250 - RNA, 13 nt, Human
uuuauuauggcac

SEQ ID NO: 1405251 - RNA, 16 nt, Human
uuuauaagcaucauua

SEQ ID NO: 1405252 - RNA, 14 nt, Human
uuuauaagcaucau

SEQ ID NO: 1405253 - RNA, 13 nt, Human
uuuauaagcauca

SEQ ID NO: 1405254 - RNA, 12 nt, Human
uuuauaagcauc

SEQ ID NO: 1405255 - RNA, 16 nt, Human
uuuauaagaaagccug

SEQ ID NO: 1405256 - RNA, 23 nt, Human
uuuauaagaaagccugaguacuc

SEQ ID NO: 1405257 - RNA, 15 nt, Human
uuuauaagaaagccu

SEQ ID NO: 1405258 - RNA, 20 nt, Human
uuuauaauucucauuaaaag

SEQ ID NO: 1405259 - RNA, 22 nt, Human
uuuauaagcaucauuauuuaug

SEQ ID NO: 1405260 - RNA, 23 nt, Human
uuuauaagcaucauuauuuaugu

SEQ ID NO: 1405261 - RNA, 21 nt, Human
uuuauaagcaucauuauuuau

SEQ ID NO: 1405262 - RNA, 20 nt, Human
uuuauaagcaucauuauuua

SEQ ID NO: 1405263 - RNA, 18 nt, Human
uuuauaagcaucauuauu

SEQ ID NO: 1405264 - RNA, 17 nt, Human
uuuauaagcaucauuau

SEQ ID NO: 1405265 - RNA, 17 nt, Human
uuuauaauucucauuaa

SEQ ID NO: 1405266 - RNA, 22 nt, Human
uuuauaauuuugugaagcaaaa

SEQ ID NO: 1405267 - RNA, 19 nt, Human
uuuccaacuacuaauagaa

SEQ ID NO: 1405268 - RNA, 18 nt, Human
uuuccaacuacuaauaga

SEQ ID NO: 1405269 - RNA, 17 nt, Human
uuucauuuaucuauaau

SEQ ID NO: 1405270 - RNA, 12 nt, Human
uuuccaacuacu

SEQ ID NO: 1405271 - RNA, 19 nt, Human
uuuccaaccggcuuugugg

SEQ ID NO: 1405272 - RNA, 14 nt, Human
uuucauuuaucuau

SEQ ID NO: 1405273 - RNA, 19 nt, Human
uuucauuuagucaugugac

SEQ ID NO: 1405274 - RNA, 18 nt, Human
uuucaguucuaggaaaau

SEQ ID NO: 1405275 - RNA, 20 nt, Human
uuucagauucccagagcaaa

SEQ ID NO: 1405276 - RNA, 18 nt, Human
uuucagaugugaaccauu

SEQ ID NO: 1405277 - RNA, 11 nt, Human
uuucagaugug

SEQ ID NO: 1405278 - RNA, 20 nt, Human
uuucagcacuagccaaaccu

SEQ ID NO: 1405279 - RNA, 12 nt, Human
uuucagcacuag

SEQ ID NO: 1405280 - RNA, 22 nt, Human
uuucagcacuagccaaaccuca

SEQ ID NO: 1405281 - RNA, 23 nt, Human
uuucagcacuagccaaaccucac

SEQ ID NO: 1405282 - RNA, 15 nt, Human
uuucaguucuaggaa

SEQ ID NO: 1405283 - RNA, 21 nt, Human
uuucaguggggcagucauuau

SEQ ID NO: 1405284 - RNA, 11 nt, Human
uuucagugagg

SEQ ID NO: 1405285 - RNA, 13 nt, Human
uuucaauagccac

SEQ ID NO: 1405286 - RNA, 15 nt, Human
uuucaauagcacaua

SEQ ID NO: 1405287 - RNA, 16 nt, Human
uuucaauacagauaua

SEQ ID NO: 1405288 - RNA, 22 nt, Human
uuucaaguuccaaguugcuaau

SEQ ID NO: 1405289 - RNA, 16 nt, Human
uuucaagguucuaacc

SEQ ID NO: 1405290 - RNA, 14 nt, Human
uuucaagguucuaa

SEQ ID NO: 1405291 - RNA, 13 nt, Human
uuucaagguucua

SEQ ID NO: 1405292 - RNA, 21 nt, Human
uuucaauagccacuaaccuug

SEQ ID NO: 1405293 - RNA, 14 nt, Human
uuucaauagccacu

SEQ ID NO: 1405294 - RNA, 23 nt, Human
uuucacaacagccugacaacauu

SEQ ID NO: 1405295 - RNA, 23 nt, Human
uuucagauaucuuggacaaauca

SEQ ID NO: 1405296 - RNA, 14 nt, Human
uuucacaaggucuu

SEQ ID NO: 1405297 - RNA, 22 nt, Human
uucagcuucguuuauuuucaag

SEQ ID NO: 1405298 - RNA, 20 nt, Human
uucagcugucuuuuggagga

SEQ ID NO: 1405299 - RNA, 16 nt, Human
uucagcugucuuuugg

SEQ ID NO: 1405300 - RNA, 20 nt, Human
uucaguguauggaaauaaau

SEQ ID NO: 1405301 - RNA, 14 nt, Human
uucaguggggcagu

SEQ ID NO: 1405302 - RNA, 20 nt, Human
uucaucgaaucuacuaauuc

SEQ ID NO: 1405303 - RNA, 23 nt, Human
uucaucgaaucuacuaauuccac

SEQ ID NO: 1405304 - RNA, 18 nt, Human
uucaucgaaucuacuaau

SEQ ID NO: 1405305 - RNA, 22 nt, Human
uucaguguuaaaugugaugaau

SEQ ID NO: 1405306 - RNA, 18 nt, Human
uucaguguuaaaugugau

SEQ ID NO: 1405307 - RNA, 12 nt, Human
uucaguguuaaa

SEQ ID NO: 1405308 - RNA, 23 nt, Human
uucaguuauuauauuuacaaaug

SEQ ID NO: 1405309 - RNA, 16 nt, Human
uucaguucuaggaaaa

SEQ ID NO: 1405310 - RNA, 19 nt, Human
uucaguucuaggaaaauaa

SEQ ID NO: 1405311 - RNA, 16 nt, Human
uucaguuuugauauuu

SEQ ID NO: 1405312 - RNA, 20 nt, Human
uucauaaauaaaguuuguug

SEQ ID NO: 1405313 - RNA, 21 nt, Human
uuccaugcguguuucugacuc

SEQ ID NO: 1405314 - RNA, 18 nt, Human
uuccaugcguguuucuga

SEQ ID NO: 1405315 - RNA, 20 nt, Human
uuccauccauggccagcagc

SEQ ID NO: 1405316 - RNA, 18 nt, Human
uuccauccauggccagca

SEQ ID NO: 1405317 - RNA, 17 nt, Human
uuccauccauggccagc

SEQ ID NO: 1405318 - RNA, 15 nt, Human
uuccauccauggcca

SEQ ID NO: 1405319 - RNA, 19 nt, Human
uuccauccaccuuucccaa

SEQ ID NO: 1405320 - RNA, 19 nt, Human
uuccagauccuggaaauca

SEQ ID NO: 1405321 - RNA, 14 nt, Human
uuccagaccugaag

SEQ ID NO: 1405322 - RNA, 19 nt, Human
uuccagaaugcuguacauc

SEQ ID NO: 1405323 - RNA, 18 nt, Human
uuccagaaugcuguacau

SEQ ID NO: 1405324 - RNA, 16 nt, Human
uuccagaaugcuguac

SEQ ID NO: 1405325 - RNA, 15 nt, Human
uuccagaaugcugua

SEQ ID NO: 1405326 - RNA, 14 nt, Human
uuccagaaugcugu

SEQ ID NO: 1405327 - RNA, 20 nt, Human
uuccagaagugugacuggcu

SEQ ID NO: 1405328 - RNA, 23 nt, Human
uuccagacugcuuccaauuuucu

SEQ ID NO: 1405329 - RNA, 17 nt, Human
uuccagaccugaagaau

SEQ ID NO: 1405330 - RNA, 16 nt, Human
uuccagaccugaagaa

SEQ ID NO: 1405331 - RNA, 18 nt, Human
uuccagagcacugcucca

SEQ ID NO: 1405332 - RNA, 20 nt, Human
uuccagaggcuauuauuuuc

SEQ ID NO: 1405333 - RNA, 19 nt, Human
uuccagaggcuauuauuuu

SEQ ID NO: 1405334 - RNA, 18 nt, Human
uuccagauccuggaaauc

SEQ ID NO: 1405335 - RNA, 20 nt, Human
uuccaacaagaagggacuga

SEQ ID NO: 1405336 - RNA, 17 nt, Human
uuccaaagucucuaauu

SEQ ID NO: 1405337 - RNA, 16 nt, Human
uuccaaagucucuaau

SEQ ID NO: 1405338 - RNA, 14 nt, Human
uuccaaagucucua

SEQ ID NO: 1405339 - RNA, 16 nt, Human
uuccaaaguacacugu

SEQ ID NO: 1405340 - RNA, 22 nt, Human
uuccaaagaguagaauugcauu

SEQ ID NO: 1405341 - RNA, 13 nt, Human
uuccaaaguacac

SEQ ID NO: 1405342 - RNA, 18 nt, Human
uucaugcuaucucugugu

SEQ ID NO: 1405343 - RNA, 17 nt, Human
uucaugcuaucucugug

SEQ ID NO: 1405344 - RNA, 22 nt, Human
uucaugccagcuacuuccuccu

SEQ ID NO: 1405345 - RNA, 21 nt, Human
uucaugccagcuacuuccucc

SEQ ID NO: 1405346 - RNA, 20 nt, Human
uucaugcuguucaugaaaga

SEQ ID NO: 1405347 - RNA, 12 nt, Human
uucaucuggaac

SEQ ID NO: 1405348 - RNA, 23 nt, Human
uucaucuggaaccaucagaaaca

SEQ ID NO: 1405349 - RNA, 19 nt, Human
uucaucuggcaacaucuuu

SEQ ID NO: 1405350 - RNA, 17 nt, Human
uucaucuggaaccauca

SEQ ID NO: 1405351 - RNA, 14 nt, Human
uucaugcauggaaa

SEQ ID NO: 1405352 - RNA, 17 nt, Human
uucaucuucaguugucu

SEQ ID NO: 1405353 - RNA, 21 nt, Human
uucaugccaauuagcaauuga

SEQ ID NO: 1405354 - RNA, 15 nt, Human
uucaugcauggaaau

SEQ ID NO: 1405355 - RNA, 16 nt, Human
uucaugcauggaaauu

SEQ ID NO: 1405356 - RNA, 22 nt, Human
uucacaacagccugacaacauu

SEQ ID NO: 1405357 - RNA, 22 nt, Human
uucacaaacuuuuauacucuuu

SEQ ID NO: 1405358 - RNA, 17 nt, Human
uucacaaacuuuuauac

SEQ ID NO: 1405359 - RNA, 16 nt, Human
uucacaaacuuuuaua

SEQ ID NO: 1405360 - RNA, 19 nt, Human
uucaauauaagcuuuucuu

SEQ ID NO: 1405361 - RNA, 18 nt, Human
uucaauauaagcuuuucu

SEQ ID NO: 1405362 - RNA, 17 nt, Human
uucaauagccacuaacc

SEQ ID NO: 1405363 - RNA, 15 nt, Human
uucaauagccacuaa

SEQ ID NO: 1405364 - RNA, 14 nt, Human
uucaauagccacua

SEQ ID NO: 1405365 - RNA, 17 nt, Human
uucaauagcacauaugg

SEQ ID NO: 1405366 - RNA, 18 nt, Human
uucaauacagauauauuu

SEQ ID NO: 1405367 - RNA, 17 nt, Human
uucaauacagauauauu

SEQ ID NO: 1405368 - RNA, 16 nt, Human
uucaauacagauauau

SEQ ID NO: 1405369 - RNA, 14 nt, Human
uucaauacagauau

SEQ ID NO: 1405370 - RNA, 12 nt, Human
uucaauacagau

SEQ ID NO: 1405371 - RNA, 18 nt, Human
uucaccuaccgaguucaa

SEQ ID NO: 1405372 - RNA, 22 nt, Human
uucacccuguccaaacugccua

SEQ ID NO: 1405373 - RNA, 19 nt, Human
uucacgccugaggcaauua

SEQ ID NO: 1405374 - RNA, 17 nt, Human
uuauuagagugucuuuc

SEQ ID NO: 1405375 - RNA, 21 nt, Human
uuauuagagauuaccuccuga

SEQ ID NO: 1405376 - RNA, 21 nt, Human
uuauuagaaucaaacauuuug

SEQ ID NO: 1405377 - RNA, 20 nt, Human
uuauuagaaucaaacauuuu

SEQ ID NO: 1405378 - RNA, 18 nt, Human
uuauuuguaauagauguu

SEQ ID NO: 1405379 - RNA, 17 nt, Human
uuauuuguaauagaugu

SEQ ID NO: 1405380 - RNA, 16 nt, Human
uuauuuguaauagaug

SEQ ID NO: 1405381 - RNA, 12 nt, Human
uuauuuguaaua

SEQ ID NO: 1405382 - RNA, 23 nt, Human
uuauuuggaaccuuguuuuggac

SEQ ID NO: 1405383 - RNA, 18 nt, Human
uuauuuggaaccuuguuu

SEQ ID NO: 1405384 - RNA, 11 nt, Human
uuauuugcaua

SEQ ID NO: 1405385 - RNA, 13 nt, Human
uuauuugcaugug

SEQ ID NO: 1405386 - RNA, 20 nt, Human
uuauuuuaauaauguuucaa

SEQ ID NO: 1405387 - RNA, 18 nt, Human
uuauuuuauuaugcauga

SEQ ID NO: 1405388 - RNA, 22 nt, Human
uuauuuguguuuuaauuuaaac

SEQ ID NO: 1405389 - RNA, 14 nt, Human
uuauuuguugagag

SEQ ID NO: 1405390 - RNA, 12 nt, Human
uuauuuguugag

SEQ ID NO: 1405391 - RNA, 19 nt, Human
uuauuuguugagaguguga

SEQ ID NO: 1405392 - RNA, 19 nt, Human
uuauuuuaauaauguuuca

SEQ ID NO: 1405393 - RNA, 22 nt, Human
uuauuuugugaugcaaauaaau

SEQ ID NO: 1405394 - RNA, 22 nt, Human
uuauuuugccaagggcauaaau

SEQ ID NO: 1405395 - RNA, 12 nt, Human
uuauuuugcaac

SEQ ID NO: 1405396 - RNA, 17 nt, Human
uuauuuucaaaaccagg

SEQ ID NO: 1405397 - RNA, 13 nt, Human
uuauuuucaagaa

SEQ ID NO: 1405398 - RNA, 18 nt, Human
uuauuuucaagaaacuga

SEQ ID NO: 1405399 - RNA, 21 nt, Human
uucaacauguuauuuguaaua

SEQ ID NO: 1405400 - RNA, 17 nt, Human
uucaacauguuauuugu

SEQ ID NO: 1405401 - RNA, 19 nt, Human
uucaacagugaagacagaa

SEQ ID NO: 1405402 - RNA, 18 nt, Human
uucaacagugaagacaga

SEQ ID NO: 1405403 - RNA, 16 nt, Human
uucaacagugaagaca

SEQ ID NO: 1405404 - RNA, 19 nt, Human
uucaaauucuucugaacuc

SEQ ID NO: 1405405 - RNA, 16 nt, Human
uucaaauucuucugaa

SEQ ID NO: 1405406 - RNA, 18 nt, Human
uucaaauguauuacagug

SEQ ID NO: 1405407 - RNA, 23 nt, Human
uucaaauuguaagcaugcacaaa

SEQ ID NO: 1405408 - RNA, 21 nt, Human
uuaucuaaguuaauuuaaagu

SEQ ID NO: 1405409 - RNA, 16 nt, Human
uuaucguuuucuuaaa

SEQ ID NO: 1405410 - RNA, 18 nt, Human
uuaucguuuucuuaaagu

SEQ ID NO: 1405411 - RNA, 17 nt, Human
uuaucuaauuuauaaaa

SEQ ID NO: 1405412 - RNA, 16 nt, Human
uuaucuaauuuauaaa

SEQ ID NO: 1405413 - RNA, 11 nt, Human
uuaucuaauuu

SEQ ID NO: 1405414 - RNA, 22 nt, Human
uuaucuaaucaugaaacucccu

SEQ ID NO: 1405415 - RNA, 18 nt, Human
uuaucuaaucaugaaacu

SEQ ID NO: 1405416 - RNA, 20 nt, Human
uuaucuacuuccaaacuaau

SEQ ID NO: 1405417 - RNA, 19 nt, Human
uuaucuacuuccaaacuaa

SEQ ID NO: 1405418 - RNA, 14 nt, Human
uuaucuagauacug

SEQ ID NO: 1405419 - RNA, 18 nt, Human
uuaucuauagcuaaguac

SEQ ID NO: 1405420 - RNA, 16 nt, Human
uuaucuuaaaacuccu

SEQ ID NO: 1405421 - RNA, 16 nt, Human
uuaucuugaauaaugu

SEQ ID NO: 1405422 - RNA, 19 nt, Human
uuaucuucucaaguucuaa

SEQ ID NO: 1405423 - RNA, 22 nt, Human
uuaucuucucaaguucuaagau

SEQ ID NO: 1405424 - RNA, 18 nt, Human
uuaucuucucaaguucua

SEQ ID NO: 1405425 - RNA, 20 nt, Human
uuaucuucaggacacucacu

SEQ ID NO: 1405426 - RNA, 14 nt, Human
uuaucuugaauaau

SEQ ID NO: 1405427 - RNA, 14 nt, Human
uuaucgaaacucau

SEQ ID NO: 1405428 - RNA, 15 nt, Human
uuauccuuucauaua

SEQ ID NO: 1405429 - RNA, 16 nt, Human
uuauccugaaauuuca

SEQ ID NO: 1405430 - RNA, 17 nt, Human
uuauccugaaauuucag

SEQ ID NO: 1405431 - RNA, 18 nt, Human
uuauccucuuuagaguua

SEQ ID NO: 1405432 - RNA, 20 nt, Human
uuauccucuuuagaguuaga

SEQ ID NO: 1405433 - RNA, 14 nt, Human
uuauccucccugua

SEQ ID NO: 1405434 - RNA, 18 nt, Human
uuauccucccuguaacuu

SEQ ID NO: 1405435 - RNA, 14 nt, Human
uuauccucuuuaga

SEQ ID NO: 1405436 - RNA, 15 nt, Human
uuauccucuuuagag

SEQ ID NO: 1405437 - RNA, 17 nt, Human
uuauccucuuuagaguu

SEQ ID NO: 1405438 - RNA, 13 nt, Human
uuauccucccugu

SEQ ID NO: 1405439 - RNA, 11 nt, Human
uuauccucccu

SEQ ID NO: 1405440 - RNA, 16 nt, Human
uuauccuccaccgucu

SEQ ID NO: 1405441 - RNA, 22 nt, Human
uuauauuucuauuuuauuauga

SEQ ID NO: 1405442 - RNA, 15 nt, Human
uuauauuugaaauau

SEQ ID NO: 1405443 - RNA, 13 nt, Human
uuauauuugaaau

SEQ ID NO: 1405444 - RNA, 12 nt, Human
uuauauuugaaa

SEQ ID NO: 1405445 - RNA, 13 nt, Human
uuauauuuaacuc

SEQ ID NO: 1405446 - RNA, 20 nt, Human
uuauauuuauuacuguaaga

SEQ ID NO: 1405447 - RNA, 17 nt, Human
uuauauugauaagaucu

SEQ ID NO: 1405448 - RNA, 16 nt, Human
uuauauuuacaaaugg

SEQ ID NO: 1405449 - RNA, 17 nt, Human
uuauguugcauagaaua

SEQ ID NO: 1405450 - RNA, 19 nt, Human
uuauggagucauuuuuaca

SEQ ID NO: 1405451 - RNA, 18 nt, Human
uuauggcuuuugugcauu

SEQ ID NO: 1405452 - RNA, 17 nt, Human
uuauggcuuuugugcau

SEQ ID NO: 1405453 - RNA, 18 nt, Human
uuauggagucauuuuuac

SEQ ID NO: 1405454 - RNA, 23 nt, Human
uuauggaauugauuugcauugaa

SEQ ID NO: 1405455 - RNA, 21 nt, Human
uuauggaauugauuugcauug

SEQ ID NO: 1405456 - RNA, 20 nt, Human
uuauggaauugauuugcauu

SEQ ID NO: 1405457 - RNA, 14 nt, Human
uuauggcacaucag

SEQ ID NO: 1405458 - RNA, 16 nt, Human
uuauggcuuuugugca

SEQ ID NO: 1405459 - RNA, 19 nt, Human
uuauggaauugauuugcau

SEQ ID NO: 1405460 - RNA, 14 nt, Human
uuauggaauugauu

SEQ ID NO: 1405461 - RNA, 17 nt, Human
uuaugcaaaagcaagcu

SEQ ID NO: 1405462 - RNA, 21 nt, Human
uuaugcaaaagcaagcugauu

SEQ ID NO: 1405463 - RNA, 15 nt, Human
uuaugcaaaagcaag

SEQ ID NO: 1405464 - RNA, 19 nt, Human
uuaugauuuuuuuuucaua

SEQ ID NO: 1405465 - RNA, 18 nt, Human
uuaugauuuuuuuuucau

SEQ ID NO: 1405466 - RNA, 15 nt, Human
uuauuaacuuuaaug

SEQ ID NO: 1405467 - RNA, 21 nt, Human
uuauuaacgauguccaacccg

SEQ ID NO: 1405468 - RNA, 18 nt, Human
uuauuaacauaggugaaa

SEQ ID NO: 1405469 - RNA, 19 nt, Human
uuauuaacaauuaggcaga

SEQ ID NO: 1405470 - RNA, 16 nt, Human
uuauuaacaauuaggc

SEQ ID NO: 1405471 - RNA, 22 nt, Human
uuauguuuucgaaaaucaaaug

SEQ ID NO: 1405472 - RNA, 23 nt, Human
uuauuaaaaaucucaaauuucua

SEQ ID NO: 1405473 - RNA, 21 nt, Human
uuauuacguaugucugguucu

SEQ ID NO: 1405474 - RNA, 18 nt, Human
uuauuacguaugucuggu

SEQ ID NO: 1405475 - RNA, 18 nt, Human
uuauuagaaucaaacauu

SEQ ID NO: 1405476 - RNA, 20 nt, Human
uuauuacuuguaaauauaaa

SEQ ID NO: 1405477 - RNA, 18 nt, Human
uuauuacuuguaaauaua

SEQ ID NO: 1405478 - RNA, 16 nt, Human
uuauuacuuguaaaua

SEQ ID NO: 1405479 - RNA, 14 nt, Human
uuauuacuuuugcu

SEQ ID NO: 1405480 - RNA, 15 nt, Human
uuauuacuuguaaau

SEQ ID NO: 1405481 - RNA, 23 nt, Human
uuauuacguaugucugguucuca

SEQ ID NO: 1405482 - RNA, 19 nt, Human
uuauuaauauauauuaucu

SEQ ID NO: 1405483 - RNA, 20 nt, Human
uuauuaauauauauuaucuu

SEQ ID NO: 1405484 - RNA, 13 nt, Human
uuauuacaguguu

SEQ ID NO: 1405485 - RNA, 12 nt, Human
uuauuacagugu

SEQ ID NO: 1405486 - RNA, 19 nt, Human
uuauuacaguguuuauccu

SEQ ID NO: 1405487 - RNA, 18 nt, Human
uuaguguaugauuacugg

SEQ ID NO: 1405488 - RNA, 13 nt, Human
uuaguguauccau

SEQ ID NO: 1405489 - RNA, 23 nt, Human
uuaguggcucaacauuguguucc

SEQ ID NO: 1405490 - RNA, 20 nt, Human
uuaguggcucaacauugugu

SEQ ID NO: 1405491 - RNA, 16 nt, Human
uuaguggcucaacauu

SEQ ID NO: 1405492 - RNA, 21 nt, Human
uuagugcuaagugugaacugg

SEQ ID NO: 1405493 - RNA, 16 nt, Human
uuagugcuaaguguga

SEQ ID NO: 1405494 - RNA, 17 nt, Human
uuagugcuaagugugaa

SEQ ID NO: 1405495 - RNA, 19 nt, Human
uuagugcuaagugugaacu

SEQ ID NO: 1405496 - RNA, 20 nt, Human
uuagugcuaagugugaacug

SEQ ID NO: 1405497 - RNA, 19 nt, Human
uuauaagcaucauuauuua

SEQ ID NO: 1405498 - RNA, 17 nt, Human
uuauaagcaucauuauu

SEQ ID NO: 1405499 - RNA, 13 nt, Human
uuauaagcaucau

SEQ ID NO: 1405500 - RNA, 14 nt, Human
uuauaagacucuca

SEQ ID NO: 1405501 - RNA, 20 nt, Human
uuauaagacucucacacuca

SEQ ID NO: 1405502 - RNA, 13 nt, Human
uuauaagacucuc

SEQ ID NO: 1405503 - RNA, 12 nt, Human
uuauaagacucu

SEQ ID NO: 1405504 - RNA, 16 nt, Human
uuauaagaaagccuga

SEQ ID NO: 1405505 - RNA, 15 nt, Human
uuauaagaaagccug

SEQ ID NO: 1405506 - RNA, 18 nt, Human
uuauaaguagcaggccaa

SEQ ID NO: 1405507 - RNA, 21 nt, Human
uuauaagcaucauuauuuaug

SEQ ID NO: 1405508 - RNA, 22 nt, Human
uuauaagcaucauuauuuaugu

SEQ ID NO: 1405509 - RNA, 19 nt, Human
uuagugccacuuaauguau

SEQ ID NO: 1405510 - RNA, 18 nt, Human
uuagugccacuuaaugua

SEQ ID NO: 1405511 - RNA, 12 nt, Human
uuagugcuaagu

SEQ ID NO: 1405512 - RNA, 15 nt, Human
uuagugcuaagugug

SEQ ID NO: 1405513 - RNA, 19 nt, Human
ugucuuuucccauuuaucu

SEQ ID NO: 1405514 - RNA, 20 nt, Human
ugucuuuucccauuuaucua

SEQ ID NO: 1405515 - RNA, 18 nt, Human
uuauaauaaaggacugua

SEQ ID NO: 1405516 - RNA, 19 nt, Human
uuauaauaaaggacuguaa

SEQ ID NO: 1405517 - RNA, 13 nt, Human
uuauaauauacua

SEQ ID NO: 1405518 - RNA, 21 nt, Human
uuauaauaaaggacuguaauc

SEQ ID NO: 1405519 - RNA, 14 nt, Human
uuauaauucucauu

SEQ ID NO: 1405520 - RNA, 18 nt, Human
uuauaaucuuauaauugu

SEQ ID NO: 1405521 - RNA, 11 nt, Human
uuauaaucuuu

SEQ ID NO: 1405522 - RNA, 15 nt, Human
uuauaauuuugugaa

SEQ ID NO: 1405523 - RNA, 14 nt, Human
uuauaauuuuguga

SEQ ID NO: 1405524 - RNA, 17 nt, Human
uuauaauuuuaaauguu

SEQ ID NO: 1405525 - RNA, 21 nt, Human
uuauaauuuuaaauguuuuuu

SEQ ID NO: 1405526 - RNA, 12 nt, Human
uuauaauuuaaa

SEQ ID NO: 1405527 - RNA, 23 nt, Human
uuauaauucuuucaauacagaua

SEQ ID NO: 1405528 - RNA, 21 nt, Human
uuauaauucuuucaauacaga

SEQ ID NO: 1405529 - RNA, 14 nt, Human
uuauaauucuuuca

SEQ ID NO: 1405530 - RNA, 17 nt, Human
uuauaauucucauuaaa

SEQ ID NO: 1405531 - RNA, 12 nt, Human
uuauaauuuuaa

SEQ ID NO: 1405532 - RNA, 19 nt, Human
uuauauauuauauggaaau

SEQ ID NO: 1405533 - RNA, 16 nt, Human
uuauauauuauaugga

SEQ ID NO: 1405534 - RNA, 13 nt, Human
uuauauauuauau

SEQ ID NO: 1405535 - RNA, 21 nt, Human
uuauacagcuguauugucuga

SEQ ID NO: 1405536 - RNA, 13 nt, Human
uuauacauaaaca

SEQ ID NO: 1405537 - RNA, 15 nt, Human
uuauacagcuguauu

SEQ ID NO: 1405538 - RNA, 13 nt, Human
uuauacagcugua

SEQ ID NO: 1405539 - RNA, 11 nt, Human
uuauacauaaa

SEQ ID NO: 1405540 - RNA, 17 nt, Human
uuauauauuauauggaa

SEQ ID NO: 1405541 - RNA, 16 nt, Human
uuauauauuuaaaagu

SEQ ID NO: 1405542 - RNA, 23 nt, Human
uuauaucuauauuuuacauaaau

SEQ ID NO: 1405543 - RNA, 19 nt, Human
uuauaucuauauuuuacau

SEQ ID NO: 1405544 - RNA, 20 nt, Human
uuauacacuguguaaauacc

SEQ ID NO: 1405545 - RNA, 13 nt, Human
uuauacacugugu

SEQ ID NO: 1405546 - RNA, 16 nt, Human
uuauaauuuuccuaau

SEQ ID NO: 1405547 - RNA, 14 nt, Human
uuauaauuuuccua

SEQ ID NO: 1405548 - RNA, 18 nt, Human
uuauaauuuugugaagca

SEQ ID NO: 1405549 - RNA, 17 nt, Human
uuauaauuuugugaagc

SEQ ID NO: 1405550 - RNA, 16 nt, Human
uuauaauuuugugaag

SEQ ID NO: 1405551 - RNA, 16 nt, Human
uuauaucuggccucug

SEQ ID NO: 1405552 - RNA, 19 nt, Human
uuauaugaagaaaaucacu

SEQ ID NO: 1405553 - RNA, 15 nt, Human
uuauaugaagaaaau

SEQ ID NO: 1405554 - RNA, 22 nt, Human
uuauauggaaauauauauuaua

SEQ ID NO: 1405555 - RNA, 20 nt, Human
uuauauggaaauauauauua

SEQ ID NO: 1405556 - RNA, 19 nt, Human
uuauauggaaauauauauu

SEQ ID NO: 1405557 - RNA, 18 nt, Human
uuauauggaaauauauau

SEQ ID NO: 1405558 - RNA, 15 nt, Human
uuauauggaaauaua

SEQ ID NO: 1405559 - RNA, 10 nt, Human
uuauauggaa

SEQ ID NO: 1405560 - RNA, 19 nt, Human
uuauaugcuuacugauaua

SEQ ID NO: 1405561 - RNA, 13 nt, Human
uuauaugcuuacu

SEQ ID NO: 1405562 - RNA, 18 nt, Human
uuauauguuguaauauuu

SEQ ID NO: 1405563 - RNA, 18 nt, Human
uuauauguuguaagcaac

SEQ ID NO: 1405564 - RNA, 19 nt, Human
uuauauguacaugagaagg

SEQ ID NO: 1405565 - RNA, 16 nt, Human
uuauauguacaugaga

SEQ ID NO: 1405566 - RNA, 13 nt, Human
uuauauggaaauu

SEQ ID NO: 1405567 - RNA, 14 nt, Human
uuauauggaaauuc

SEQ ID NO: 1405568 - RNA, 24 nt, Human
uuauauguacccucugaaauacau

SEQ ID NO: 1405569 - RNA, 22 nt, Human
uuauauguacccucugaaauac

SEQ ID NO: 1405570 - RNA, 19 nt, Human
uuauauguacccucugaaa

SEQ ID NO: 1405571 - RNA, 14 nt, Human
uuauauguaccgua

SEQ ID NO: 1405572 - RNA, 16 nt, Human
uuauauguaccguagg

SEQ ID NO: 1405573 - RNA, 17 nt, Human
uuauauuaaccagauau

SEQ ID NO: 1405574 - RNA, 16 nt, Human
uuauauuaugaagcuu

SEQ ID NO: 1405575 - RNA, 15 nt, Human
uugcaaagaaagaaa

SEQ ID NO: 1405576 - RNA, 19 nt, Human
uugcaaagaaagaaaaaaa

SEQ ID NO: 1405577 - RNA, 13 nt, Human
uugcaaagaaaga

SEQ ID NO: 1405578 - RNA, 20 nt, Human
uugauuuuagccuucucugu

SEQ ID NO: 1405579 - RNA, 19 nt, Human
uugauuugcauugaacaca

SEQ ID NO: 1405580 - RNA, 17 nt, Human
uugauuugcauugaaca

SEQ ID NO: 1405581 - RNA, 15 nt, Human
uugauuugcauugaa

SEQ ID NO: 1405582 - RNA, 14 nt, Human
uugauuugcauuga

SEQ ID NO: 1405583 - RNA, 13 nt, Human
uugauuugcauug

SEQ ID NO: 1405584 - RNA, 18 nt, Human
uugauuugaagaacaugu

SEQ ID NO: 1405585 - RNA, 15 nt, Human
uugcaccuuucuagu

SEQ ID NO: 1405586 - RNA, 17 nt, Human
uugcaaaucuugaaauu

SEQ ID NO: 1405587 - RNA, 16 nt, Human
uugcaaaucuugaaau

SEQ ID NO: 1405588 - RNA, 15 nt, Human
uugcaaaucuugaaa

SEQ ID NO: 1405589 - RNA, 12 nt, Human
uugcaaaucuug

SEQ ID NO: 1405590 - RNA, 21 nt, Human
uugcaaaguaucccuacugua

SEQ ID NO: 1405591 - RNA, 14 nt, Human
uugauuugaagaac

SEQ ID NO: 1405592 - RNA, 13 nt, Human
uugauuugaagaa

SEQ ID NO: 1405593 - RNA, 14 nt, Human
uugauugauuugaa

SEQ ID NO: 1405594 - RNA, 13 nt, Human
uugauugauuuga

SEQ ID NO: 1405595 - RNA, 20 nt, Human
uugauucugcaguaaaucuu

SEQ ID NO: 1405596 - RNA, 12 nt, Human
uugauucugcag

SEQ ID NO: 1405597 - RNA, 13 nt, Human
uugaggucucagc

SEQ ID NO: 1405598 - RNA, 18 nt, Human
uugauauagaaguauaaa

SEQ ID NO: 1405599 - RNA, 15 nt, Human
uugaggucucagccc

SEQ ID NO: 1405600 - RNA, 15 nt, Human
uugaggucuguucuu

SEQ ID NO: 1405601 - RNA, 20 nt, Human
uugaugaccaaaguccuuuu

SEQ ID NO: 1405602 - RNA, 20 nt, Human
uugauauagaaguauaaaga

SEQ ID NO: 1405603 - RNA, 22 nt, Human
uugauauagaaguauaaagaau

SEQ ID NO: 1405604 - RNA, 23 nt, Human
uugaugaagaaguugauaugccu

SEQ ID NO: 1405605 - RNA, 14 nt, Human
uugaugaagaaguu

SEQ ID NO: 1405606 - RNA, 21 nt, Human
uugacucuuuugccauuaaac

SEQ ID NO: 1405607 - RNA, 15 nt, Human
uugacucuuuugcca

SEQ ID NO: 1405608 - RNA, 20 nt, Human
uugacucaggagccugugac

SEQ ID NO: 1405609 - RNA, 14 nt, Human
uugacucaggagcc

SEQ ID NO: 1405610 - RNA, 13 nt, Human
uugacucaggagc

SEQ ID NO: 1405611 - RNA, 16 nt, Human
uugaccucugcagcaa

SEQ ID NO: 1405612 - RNA, 20 nt, Human
uugaccgcgacuaauuucaa

SEQ ID NO: 1405613 - RNA, 16 nt, Human
uugacccuugcuguga

SEQ ID NO: 1405614 - RNA, 14 nt, Human
uugaccucugcagc

SEQ ID NO: 1405615 - RNA, 15 nt, Human
uugaccucugcagca

SEQ ID NO: 1405616 - RNA, 13 nt, Human
uugaacugauuca

SEQ ID NO: 1405617 - RNA, 13 nt, Human
uugaacuuugacc

SEQ ID NO: 1405618 - RNA, 22 nt, Human
uugaauuuuuuuuaacauuccu

SEQ ID NO: 1405619 - RNA, 19 nt, Human
uugaauuuuuuuuaacauu

SEQ ID NO: 1405620 - RNA, 18 nt, Human
uugacaacuggcaggcag

SEQ ID NO: 1405621 - RNA, 16 nt, Human
uugacaaccaugagac

SEQ ID NO: 1405622 - RNA, 18 nt, Human
uugacaaaggcaagcacu

SEQ ID NO: 1405623 - RNA, 17 nt, Human
uugaauuucacugucuu

SEQ ID NO: 1405624 - RNA, 12 nt, Human
uugaauuuuaca

SEQ ID NO: 1405625 - RNA, 23 nt, Human
uucugugucuuucacagcuccuc

SEQ ID NO: 1405626 - RNA, 22 nt, Human
uucugugucuuucacagcuccu

SEQ ID NO: 1405627 - RNA, 12 nt, Human
uucugugucuuu

SEQ ID NO: 1405628 - RNA, 22 nt, Human
uucugugguuucauguuaguua

SEQ ID NO: 1405629 - RNA, 18 nt, Human
uucugugguuucauguua

SEQ ID NO: 1405630 - RNA, 17 nt, Human
uucugucuucuacagau

SEQ ID NO: 1405631 - RNA, 13 nt, Human
uucugucccuagg

SEQ ID NO: 1405632 - RNA, 21 nt, Human
uucugucccuagguguuuugu

SEQ ID NO: 1405633 - RNA, 21 nt, Human
uucuggauuccccaucucagg

SEQ ID NO: 1405634 - RNA, 17 nt, Human
uucuggaccucuggguu

SEQ ID NO: 1405635 - RNA, 16 nt, Human
uucuggaccucugggu

SEQ ID NO: 1405636 - RNA, 18 nt, Human
uucuggaccucuggguug

SEQ ID NO: 1405637 - RNA, 15 nt, Human
uucuggaccucuggg

SEQ ID NO: 1405638 - RNA, 19 nt, Human
uucuggacccguucaacuu

SEQ ID NO: 1405639 - RNA, 22 nt, Human
uucuggaauguaaucaauguuu

SEQ ID NO: 1405640 - RNA, 20 nt, Human
uucuggaauguaaucaaugu

SEQ ID NO: 1405641 - RNA, 16 nt, Human
uucuggaauguaauca

SEQ ID NO: 1405642 - RNA, 15 nt, Human
uucuggaauguaauc

SEQ ID NO: 1405643 - RNA, 19 nt, Human
uucuggaauacaugaaaua

SEQ ID NO: 1405644 - RNA, 17 nt, Human
uucuggaauacaugaaa

SEQ ID NO: 1405645 - RNA, 14 nt, Human
uucugcuuugcucu

SEQ ID NO: 1405646 - RNA, 21 nt, Human
uucugcuggggccugggacaa

SEQ ID NO: 1405647 - RNA, 20 nt, Human
uucugcuggggccugggaca

SEQ ID NO: 1405648 - RNA, 18 nt, Human
uucugcuggccucugcga

SEQ ID NO: 1405649 - RNA, 15 nt, Human
uucugcuggccucug

SEQ ID NO: 1405650 - RNA, 23 nt, Human
uucugcucugguuguuucuguuc

SEQ ID NO: 1405651 - RNA, 22 nt, Human
uucugcucugguuguuucuguu

SEQ ID NO: 1405652 - RNA, 21 nt, Human
uucugcucugguuguuucugu

SEQ ID NO: 1405653 - RNA, 17 nt, Human
uucugcucugguuguuu

SEQ ID NO: 1405654 - RNA, 16 nt, Human
uucugcuccuucccca

SEQ ID NO: 1405655 - RNA, 20 nt, Human
uucugcuggccucugcgagu

SEQ ID NO: 1405656 - RNA, 13 nt, Human
uucuuccucagcc

SEQ ID NO: 1405657 - RNA, 12 nt, Human
uucuuccucagc

SEQ ID NO: 1405658 - RNA, 18 nt, Human
uucuuccuaccaagucaa

SEQ ID NO: 1405659 - RNA, 15 nt, Human
uucuuccggccccuc

SEQ ID NO: 1405660 - RNA, 14 nt, Human
uucuuccaucugau

SEQ ID NO: 1405661 - RNA, 13 nt, Human
uucuuccaucuga

SEQ ID NO: 1405662 - RNA, 17 nt, Human
uucuuguuggugcacag

SEQ ID NO: 1405663 - RNA, 14 nt, Human
uucuuguuggugca

SEQ ID NO: 1405664 - RNA, 17 nt, Human
uucuuccucagccagcc

SEQ ID NO: 1405665 - RNA, 20 nt, Human
uucuuccucagccagccucg

SEQ ID NO: 1405666 - RNA, 16 nt, Human
uucuuccucagccagc

SEQ ID NO: 1405667 - RNA, 14 nt, Human
uucuuccucagcca

SEQ ID NO: 1405668 - RNA, 23 nt, Human
uucuuuaaaaaacaacuauggau

SEQ ID NO: 1405669 - RNA, 20 nt, Human
uucuuuaaaauguaaagcca

SEQ ID NO: 1405670 - RNA, 15 nt, Human
uucuuuaaaauuaca

SEQ ID NO: 1405671 - RNA, 14 nt, Human
uucuuuccaaagua

SEQ ID NO: 1405672 - RNA, 20 nt, Human
uugaaaaaauagagccugag

SEQ ID NO: 1405673 - RNA, 13 nt, Human
uugaaaaaaaaua

SEQ ID NO: 1405674 - RNA, 14 nt, Human
uucuuucauuucuu

SEQ ID NO: 1405675 - RNA, 18 nt, Human
uucuuuccacagaagcuc

SEQ ID NO: 1405676 - RNA, 21 nt, Human
uucuuuccaaaguacacuguu

SEQ ID NO: 1405677 - RNA, 15 nt, Human
uugaaaaaguuuguu

SEQ ID NO: 1405678 - RNA, 13 nt, Human
uugaaaaagcgaa

SEQ ID NO: 1405679 - RNA, 16 nt, Human
uugaaaaagacauuca

SEQ ID NO: 1405680 - RNA, 14 nt, Human
uugaaaaagacauu

SEQ ID NO: 1405681 - RNA, 13 nt, Human
uucuuucauuucu

SEQ ID NO: 1405682 - RNA, 22 nt, Human
uugaaaaaauagagccugaggg

SEQ ID NO: 1405683 - RNA, 15 nt, Human
uugaaaaaugcaugu

SEQ ID NO: 1405684 - RNA, 21 nt, Human
uugaacguuuucuaauugcuu

SEQ ID NO: 1405685 - RNA, 17 nt, Human
uugaaaagcagacauuu

SEQ ID NO: 1405686 - RNA, 13 nt, Human
uugaaaagagcug

SEQ ID NO: 1405687 - RNA, 15 nt, Human
uugaaaagcagacau

SEQ ID NO: 1405688 - RNA, 22 nt, Human
uucucauuuuuuaaaaaagcuu

SEQ ID NO: 1405689 - RNA, 21 nt, Human
uucuccaccuagacuguaaac

SEQ ID NO: 1405690 - RNA, 23 nt, Human
uucucauuuuuuaaaaaagcuua

SEQ ID NO: 1405691 - RNA, 17 nt, Human
uucucauuuuuuaaaaa

SEQ ID NO: 1405692 - RNA, 18 nt, Human
uucucauuggaaauuuag

SEQ ID NO: 1405693 - RNA, 15 nt, Human
uucucauuaaaagaa

SEQ ID NO: 1405694 - RNA, 21 nt, Human
uucucauuggaaauuuagcau

SEQ ID NO: 1405695 - RNA, 20 nt, Human
uucucauguugaagccacug

SEQ ID NO: 1405696 - RNA, 21 nt, Human
uucuaugaaauauuauguuaa

SEQ ID NO: 1405697 - RNA, 15 nt, Human
uucuauccucuguaa

SEQ ID NO: 1405698 - RNA, 14 nt, Human
uucuauccucugua

SEQ ID NO: 1405699 - RNA, 14 nt, Human
uucuaugaaauauu

SEQ ID NO: 1405700 - RNA, 20 nt, Human
uucucugaggacaagagaaa

SEQ ID NO: 1405701 - RNA, 16 nt, Human
uucucugaggacaaga

SEQ ID NO: 1405702 - RNA, 13 nt, Human
uucucugaggaca

SEQ ID NO: 1405703 - RNA, 18 nt, Human
uucucugagcugugcagg

SEQ ID NO: 1405704 - RNA, 17 nt, Human
uucucugagcugugcag

SEQ ID NO: 1405705 - RNA, 16 nt, Human
uucucugagcugugca

SEQ ID NO: 1405706 - RNA, 20 nt, Human
uucuccagcugggcucugca

SEQ ID NO: 1405707 - RNA, 22 nt, Human
uucucuccuguaccucuugagc

SEQ ID NO: 1405708 - RNA, 19 nt, Human
uucucuccuguaccucuug

SEQ ID NO: 1405709 - RNA, 15 nt, Human
uucuccagcugggcu

SEQ ID NO: 1405710 - RNA, 14 nt, Human
uucuccagcugggc

SEQ ID NO: 1405711 - RNA, 12 nt, Human
uucuccagcugg

SEQ ID NO: 1405712 - RNA, 19 nt, Human
uucuccagccucagccucc

SEQ ID NO: 1405713 - RNA, 14 nt, Human
uucucuccuguacc

SEQ ID NO: 1405714 - RNA, 18 nt, Human
uucucuccuguaccucuu

SEQ ID NO: 1405715 - RNA, 16 nt, Human
uucugcuccagacagg

SEQ ID NO: 1405716 - RNA, 15 nt, Human
uucugcuccagacag

SEQ ID NO: 1405717 - RNA, 21 nt, Human
uucugcucaucauucucuguc

SEQ ID NO: 1405718 - RNA, 20 nt, Human
uucugcucaucauucucugu

SEQ ID NO: 1405719 - RNA, 19 nt, Human
uucugcucaucauucucug

SEQ ID NO: 1405720 - RNA, 14 nt, Human
uucugcucaucauu

SEQ ID NO: 1405721 - RNA, 13 nt, Human
uucugcucaucau

SEQ ID NO: 1405722 - RNA, 20 nt, Human
uucugcucagcucugggcca

SEQ ID NO: 1405723 - RNA, 15 nt, Human
uucugcucagcucug

SEQ ID NO: 1405724 - RNA, 14 nt, Human
uucugcucagcucu

SEQ ID NO: 1405725 - RNA, 21 nt, Human
uucugcuacuuugcugcuaug

SEQ ID NO: 1405726 - RNA, 22 nt, Human
uucugccuuuggggacuuuucu

SEQ ID NO: 1405727 - RNA, 21 nt, Human
uucugccuuugccaggugacu

SEQ ID NO: 1405728 - RNA, 15 nt, Human
uucugccuuugccag

SEQ ID NO: 1405729 - RNA, 14 nt, Human
uucugccuuugcca

SEQ ID NO: 1405730 - RNA, 13 nt, Human
uucugccuuugcc

SEQ ID NO: 1405731 - RNA, 16 nt, Human
uucugccuucucauga

SEQ ID NO: 1405732 - RNA, 14 nt, Human
uucugccuucucau

SEQ ID NO: 1405733 - RNA, 24 nt, Human
uucugauuuuaggagcuaaggcuc

SEQ ID NO: 1405734 - RNA, 23 nt, Human
uucugauuuuaggagcuaaggcu

SEQ ID NO: 1405735 - RNA, 17 nt, Human
uucugauuuuaggagcu

SEQ ID NO: 1405736 - RNA, 21 nt, Human
uucugauucgaaugacacugu

SEQ ID NO: 1405737 - RNA, 22 nt, Human
uucugaucaaggccuuauugga

SEQ ID NO: 1405738 - RNA, 15 nt, Human
uucugaucaaggccu

SEQ ID NO: 1405739 - RNA, 14 nt, Human
uucugaucaaggcc

SEQ ID NO: 1405740 - RNA, 15 nt, Human
uucugaguuccugca

SEQ ID NO: 1405741 - RNA, 12 nt, Human
uucugaguuccu

SEQ ID NO: 1405742 - RNA, 13 nt, Human
uucugaguacaga

SEQ ID NO: 1405743 - RNA, 17 nt, Human
uucugaggugcacuggg

SEQ ID NO: 1405744 - RNA, 16 nt, Human
uucugaggcuuuauga

SEQ ID NO: 1405745 - RNA, 23 nt, Human
uucugagauggcucccaggggcu

SEQ ID NO: 1405746 - RNA, 19 nt, Human
uucugagauggcucccagg

SEQ ID NO: 1405747 - RNA, 16 nt, Human
uucugagaucuguuga

SEQ ID NO: 1405748 - RNA, 22 nt, Human
uucugagacgucaugaggagau

SEQ ID NO: 1405749 - RNA, 19 nt, Human
uucugagacgucaugagga

SEQ ID NO: 1405750 - RNA, 17 nt, Human
uucugagacgucaugag

SEQ ID NO: 1405751 - RNA, 18 nt, Human
uucugauaaaagauggcc

SEQ ID NO: 1405752 - RNA, 23 nt, Human
uucugaguuuuguguuuguugua

SEQ ID NO: 1405753 - RNA, 22 nt, Human
uucugaguuuuguguuuguugu

SEQ ID NO: 1405754 - RNA, 21 nt, Human
uucugaguuuuguguuuguug

SEQ ID NO: 1405755 - RNA, 19 nt, Human
uucugaguuuuguguuugu

SEQ ID NO: 1405756 - RNA, 16 nt, Human
uucugaguuuuguguu

SEQ ID NO: 1405757 - RNA, 15 nt, Human
uucugaguuuugugu

SEQ ID NO: 1405758 - RNA, 14 nt, Human
uucugaguuuugug

SEQ ID NO: 1405759 - RNA, 19 nt, Human
uucugauaaaagauggcca

SEQ ID NO: 1405760 - RNA, 16 nt, Human
uucugauaaugaaaau

SEQ ID NO: 1405761 - RNA, 15 nt, Human
uucuaauuuuuaaga

SEQ ID NO: 1405762 - RNA, 21 nt, Human
uucuacaacucauacacucgu

SEQ ID NO: 1405763 - RNA, 15 nt, Human
uucuacauagaugcu

SEQ ID NO: 1405764 - RNA, 14 nt, Human
uucuaccauuucag

SEQ ID NO: 1405765 - RNA, 19 nt, Human
uucuaccaaggucuucuua

SEQ ID NO: 1405766 - RNA, 12 nt, Human
uucgucuguugu

SEQ ID NO: 1405767 - RNA, 15 nt, Human
uucguagauauugga

SEQ ID NO: 1405768 - RNA, 13 nt, Human
uucguaacacagc

SEQ ID NO: 1405769 - RNA, 13 nt, Human
uucggugugcacc

SEQ ID NO: 1405770 - RNA, 16 nt, Human
uucuaauugcuuauuu

SEQ ID NO: 1405771 - RNA, 17 nt, Human
uucuaauuggcaugaag

SEQ ID NO: 1405772 - RNA, 14 nt, Human
uucuaauugcuuau

SEQ ID NO: 1405773 - RNA, 13 nt, Human
uucuaauugcuua

SEQ ID NO: 1405774 - RNA, 15 nt, Human
uucuaauugccaugu

SEQ ID NO: 1405775 - RNA, 14 nt, Human
uucuaauugccaug

SEQ ID NO: 1405776 - RNA, 23 nt, Human
uucuaauuauguagcucuuuguc

SEQ ID NO: 1405777 - RNA, 16 nt, Human
uucuaauuauguagcu

SEQ ID NO: 1405778 - RNA, 13 nt, Human
uucguggggaggu

SEQ ID NO: 1405779 - RNA, 13 nt, Human
uucguuaucuaau

SEQ ID NO: 1405780 - RNA, 18 nt, Human
uucuaccauuucagagag

SEQ ID NO: 1405781 - RNA, 15 nt, Human
uucuaccauuucaga

SEQ ID NO: 1405782 - RNA, 21 nt, Human
uucuacucacuuuucccacuc

SEQ ID NO: 1405783 - RNA, 20 nt, Human
uucuacucacuuuucccacu

SEQ ID NO: 1405784 - RNA, 19 nt, Human
uucuacucacuuuucccac

SEQ ID NO: 1405785 - RNA, 20 nt, Human
uucuacugcucuccuccacc

SEQ ID NO: 1405786 - RNA, 19 nt, Human
uucuacuuugauaugacug

SEQ ID NO: 1405787 - RNA, 13 nt, Human
uucuacugcucuc

SEQ ID NO: 1405788 - RNA, 16 nt, Human
uucuauaguucuagac

SEQ ID NO: 1405789 - RNA, 17 nt, Human
uucuauaguucuagaca

SEQ ID NO: 1405790 - RNA, 15 nt, Human
uucuauaguucuaga

SEQ ID NO: 1405791 - RNA, 14 nt, Human
uucuauaguucuag

SEQ ID NO: 1405792 - RNA, 16 nt, Human
uucuauaguuauuaag

SEQ ID NO: 1405793 - RNA, 23 nt, Human
uucuauagccaaaaauagcuaaa

SEQ ID NO: 1405794 - RNA, 21 nt, Human
uucuauagccaaaaauagcua

SEQ ID NO: 1405795 - RNA, 17 nt, Human
uucuauagccaaaaaua

SEQ ID NO: 1405796 - RNA, 15 nt, Human
uucuauagccaaaaa

SEQ ID NO: 1405797 - RNA, 14 nt, Human
uucuauagccaaaa

SEQ ID NO: 1405798 - RNA, 14 nt, Human
uucuauagcuuuuc

SEQ ID NO: 1405799 - RNA, 21 nt, Human
uuccugcugcugucugggugc

SEQ ID NO: 1405800 - RNA, 20 nt, Human
uuccugcugcugucugggug

SEQ ID NO: 1405801 - RNA, 18 nt, Human
uuccugcugcugucuggg

SEQ ID NO: 1405802 - RNA, 17 nt, Human
uuccugcugcugucugg

SEQ ID NO: 1405803 - RNA, 15 nt, Human
uuccugcugcugucu

SEQ ID NO: 1405804 - RNA, 14 nt, Human
uuccugcugcuguc

SEQ ID NO: 1405805 - RNA, 13 nt, Human
uuccugcugcugu

SEQ ID NO: 1405806 - RNA, 12 nt, Human
uuccugcugcug

SEQ ID NO: 1405807 - RNA, 11 nt, Human
uuccugcugcu

SEQ ID NO: 1405808 - RNA, 21 nt, Human
uuccugccuuggccucccaag

SEQ ID NO: 1405809 - RNA, 13 nt, Human
uuccugcuugcca

SEQ ID NO: 1405810 - RNA, 19 nt, Human
uuccuggacacucagaccu

SEQ ID NO: 1405811 - RNA, 15 nt, Human
uuccuggacacucag

SEQ ID NO: 1405812 - RNA, 15 nt, Human
uuccugcuuuucccc

SEQ ID NO: 1405813 - RNA, 22 nt, Human
uuccuuuaacaacauguuucca

SEQ ID NO: 1405814 - RNA, 17 nt, Human
uuccuuuaacaacaugu

SEQ ID NO: 1405815 - RNA, 16 nt, Human
uuccuugucacuggua

SEQ ID NO: 1405816 - RNA, 17 nt, Human
uucggggcugggaaguc

SEQ ID NO: 1405817 - RNA, 13 nt, Human
uucggggcuggga

SEQ ID NO: 1405818 - RNA, 21 nt, Human
uuccuuuaacaacauguuucc

SEQ ID NO: 1405819 - RNA, 19 nt, Human
uuccuuuaacaacauguuu

SEQ ID NO: 1405820 - RNA, 18 nt, Human
uuccuuuaacaacauguu

SEQ ID NO: 1405821 - RNA, 18 nt, Human
uucggugagcuacaaaug

SEQ ID NO: 1405822 - RNA, 22 nt, Human
uuccugacacuuuaauuaccaa

SEQ ID NO: 1405823 - RNA, 13 nt, Human
uuccugacacuuu

SEQ ID NO: 1405824 - RNA, 18 nt, Human
uuccugaauccaaacuaa

SEQ ID NO: 1405825 - RNA, 13 nt, Human
uuccugaauccaa

SEQ ID NO: 1405826 - RNA, 21 nt, Human
uuccauggugugaucgucuga

SEQ ID NO: 1405827 - RNA, 12 nt, Human
uuccaugggaau

SEQ ID NO: 1405828 - RNA, 22 nt, Human
uuccaugggaccacaacuauuu

SEQ ID NO: 1405829 - RNA, 16 nt, Human
uuccauggccucuuca

SEQ ID NO: 1405830 - RNA, 17 nt, Human
uuccauggcaggaaggc

SEQ ID NO: 1405831 - RNA, 19 nt, Human
uuccauggcaggaaggcuu

SEQ ID NO: 1405832 - RNA, 23 nt, Human
uuccaugcugugcgcccagggcu

SEQ ID NO: 1405833 - RNA, 14 nt, Human
uuccaugcugugcg

SEQ ID NO: 1405834 - RNA, 12 nt, Human
uuccauggccuc

SEQ ID NO: 1405835 - RNA, 20 nt, Human
uuccugcaacucaaggacuu

SEQ ID NO: 1405836 - RNA, 19 nt, Human
uuccugcaacucaaggacu

SEQ ID NO: 1405837 - RNA, 20 nt, Human
uuccugaccuccgccaucca

SEQ ID NO: 1405838 - RNA, 22 nt, Human
uuccugagucccaucccugcgu

SEQ ID NO: 1405839 - RNA, 14 nt, Human
uuuuuuuuguuugu

SEQ ID NO: 1405840 - RNA, 12 nt, Human
uuuuuuuugcag

SEQ ID NO: 1405841 - RNA, 11 nt, Human
uuuuuuuugca

SEQ ID NO: 1405842 - RNA, 13 nt, Human
uuuuuuuguuugu

SEQ ID NO: 1405843 - RNA, 14 nt, Human
uuuuuuuuaaacua

SEQ ID NO: 1405844 - RNA, 13 nt, Human
uuuuuuuugacaa

SEQ ID NO: 1405845 - RNA, 16 nt, Human
uuuuuuguuuguuugu

SEQ ID NO: 1405846 - RNA, 10 nt, Human
uuuuuuccuu

SEQ ID NO: 1405847 - RNA, 11 nt, Human
uuuuuuuacua

SEQ ID NO: 1405848 - RNA, 22 nt, Human
uuuuuuccaucuuuacaaaacu

SEQ ID NO: 1405849 - RNA, 13 nt, Human
uuuuuuccaucuu

SEQ ID NO: 1405850 - RNA, 12 nt, Human
uuuuuuccccag

SEQ ID NO: 1405851 - RNA, 10 nt, Human
uuuuuuugca

SEQ ID NO: 1405852 - RNA, 11 nt, Human
uuuuuuugcag

SEQ ID NO: 1405853 - RNA, 12 nt, Human
uuuuuuugugug

SEQ ID NO: 1405854 - RNA, 14 nt, Human
uuuuuuuguuauua

SEQ ID NO: 1405855 - RNA, 12 nt, Human
uuuuuuuuaaga

SEQ ID NO: 1405856 - RNA, 12 nt, Human
uuuuuuucuuua

SEQ ID NO: 1405857 - RNA, 10 nt, Human
uuuuuuuccu

SEQ ID NO: 1405858 - RNA, 12 nt, Human
uuuuuuucaguu

SEQ ID NO: 1405859 - RNA, 12 nt, Human
uuuuuuuacauu

SEQ ID NO: 1405860 - RNA, 17 nt, Human
uuuuuuaagaauaucug

SEQ ID NO: 1405861 - RNA, 10 nt, Human
uuuuuuaaga

SEQ ID NO: 1405862 - RNA, 12 nt, Human
uuuuuuaacauu

SEQ ID NO: 1405863 - RNA, 15 nt, Human
uuuuuccguaaaaau

SEQ ID NO: 1405864 - RNA, 16 nt, Human
uuuuuccguaaaaaug

SEQ ID NO: 1405865 - RNA, 14 nt, Human
uuuuuccguaaaaa

SEQ ID NO: 1405866 - RNA, 18 nt, Human
uuuuucccuaucacugaa

SEQ ID NO: 1405867 - RNA, 21 nt, Human
uuuuuccccagacuuguuggc

SEQ ID NO: 1405868 - RNA, 17 nt, Human
uuuuuccccagacuugu

SEQ ID NO: 1405869 - RNA, 13 nt, Human
uuuuuccaucuuu

SEQ ID NO: 1405870 - RNA, 14 nt, Human
uuuuuuccaaaauc

SEQ ID NO: 1405871 - RNA, 12 nt, Human
uuuuuuccaaaa

SEQ ID NO: 1405872 - RNA, 13 nt, Human
uuuuuucaucuuc

SEQ ID NO: 1405873 - RNA, 11 nt, Human
uuuuuucaucu

SEQ ID NO: 1405874 - RNA, 12 nt, Human
uuuuuucaguug

SEQ ID NO: 1405875 - RNA, 12 nt, Human
uuuuuuacuaau

SEQ ID NO: 1405876 - RNA, 12 nt, Human
uuuuuuaauuga

SEQ ID NO: 1405877 - RNA, 19 nt, Human
uuuuuuaauccgccaauau

SEQ ID NO: 1405878 - RNA, 15 nt, Human
uuuuuuaauaaauuu

SEQ ID NO: 1405879 - RNA, 11 nt, Human
uuuuuuacauu

SEQ ID NO: 1405880 - RNA, 12 nt, Human
uuuuuuacauuu

SEQ ID NO: 1405881 - RNA, 23 nt, Human
uuuugacaguguugaaaauguuc

SEQ ID NO: 1405882 - RNA, 19 nt, Human
uuuugacaguguugaaaau

SEQ ID NO: 1405883 - RNA, 14 nt, Human
uuuugaaguauuua

SEQ ID NO: 1405884 - RNA, 14 nt, Human
uuuugaaggcaaaa

SEQ ID NO: 1405885 - RNA, 13 nt, Human
uuuugaaggcaaa

SEQ ID NO: 1405886 - RNA, 13 nt, Human
uuuugacugcuug

SEQ ID NO: 1405887 - RNA, 15 nt, Human
uuuugacauaaaguu

SEQ ID NO: 1405888 - RNA, 24 nt, Human
uuuugacaguguugaaaauguuca

SEQ ID NO: 1405889 - RNA, 20 nt, Human
uuuuuaaauguaaagauauu

SEQ ID NO: 1405890 - RNA, 15 nt, Human
uuuuuaaauguauac

SEQ ID NO: 1405891 - RNA, 23 nt, Human
uuuuuaaauguauacuauaguac

SEQ ID NO: 1405892 - RNA, 12 nt, Human
uuuuuaagaaaa

SEQ ID NO: 1405893 - RNA, 23 nt, Human
uuuuuaagaaaaaggaugcacag

SEQ ID NO: 1405894 - RNA, 16 nt, Human
uuuuuaagugcugcau

SEQ ID NO: 1405895 - RNA, 17 nt, Human
uuuuuaagugcugcauu

SEQ ID NO: 1405896 - RNA, 18 nt, Human
uuuuuaagugcugcauuu

SEQ ID NO: 1405897 - RNA, 19 nt, Human
uuuuuaagugcugcauuua

SEQ ID NO: 1405898 - RNA, 22 nt, Human
uuuuuaagugcugcauuuaaaa

SEQ ID NO: 1405899 - RNA, 23 nt, Human
uuuuuaagugcugcauuuaaaag

SEQ ID NO: 1405900 - RNA, 13 nt, Human
uuuuucacauuuu

SEQ ID NO: 1405901 - RNA, 18 nt, Human
uuuuuaauguauaguaaa

SEQ ID NO: 1405902 - RNA, 19 nt, Human
uuuuuaauccgccaauauu

SEQ ID NO: 1405903 - RNA, 14 nt, Human
uuuuuaauaugcuu

SEQ ID NO: 1405904 - RNA, 14 nt, Human
uuuuuaauaauuua

SEQ ID NO: 1405905 - RNA, 16 nt, Human
uuuuuaauaaauuuca

SEQ ID NO: 1405906 - RNA, 13 nt, Human
uuuuuaaucuuua

SEQ ID NO: 1405907 - RNA, 16 nt, Human
uuuuucaugauaauga

SEQ ID NO: 1405908 - RNA, 23 nt, Human
uuuuucaucuucaguugucucug

SEQ ID NO: 1405909 - RNA, 20 nt, Human
uuuuucaucuucaguugucu

SEQ ID NO: 1405910 - RNA, 16 nt, Human
uuuuucaucuucaguu

SEQ ID NO: 1405911 - RNA, 15 nt, Human
uuuuucaucuucagu

SEQ ID NO: 1405912 - RNA, 16 nt, Human
uuuuucaguuguucuu

SEQ ID NO: 1405913 - RNA, 20 nt, Human
uuuuucaguuguucuuuuua

SEQ ID NO: 1405914 - RNA, 11 nt, Human
uuuuucaguug

SEQ ID NO: 1405915 - RNA, 18 nt, Human
uuuuucaguauuauaugu

SEQ ID NO: 1405916 - RNA, 17 nt, Human
uuuuucaguauuauaug

SEQ ID NO: 1405917 - RNA, 23 nt, Human
uuuuuccaacuacuaauagaaua

SEQ ID NO: 1405918 - RNA, 21 nt, Human
uuuuuccaacuacuaauagaa

SEQ ID NO: 1405919 - RNA, 11 nt, Human
uuuuuccaaca

SEQ ID NO: 1405920 - RNA, 22 nt, Human
uuuuucauuaaauaaauuugac

SEQ ID NO: 1405921 - RNA, 20 nt, Human
uuuuucauuaaauaaauuug

SEQ ID NO: 1405922 - RNA, 17 nt, Human
uuuguauaaaauaauuu

SEQ ID NO: 1405923 - RNA, 19 nt, Human
uuuguauaaaauaauuuuu

SEQ ID NO: 1405924 - RNA, 18 nt, Human
uuuguauaaaauaauuuu

SEQ ID NO: 1405925 - RNA, 21 nt, Human
uuugguccuucaaaggcuugu

SEQ ID NO: 1405926 - RNA, 15 nt, Human
uuuggucaacacuaa

SEQ ID NO: 1405927 - RNA, 13 nt, Human
uuugguauuguau

SEQ ID NO: 1405928 - RNA, 14 nt, Human
uuugguauuguauu

SEQ ID NO: 1405929 - RNA, 13 nt, Human
uuugugugucuua

SEQ ID NO: 1405930 - RNA, 16 nt, Human
uuuguguguauuugcu

SEQ ID NO: 1405931 - RNA, 14 nt, Human
uuugugugcucucc

SEQ ID NO: 1405932 - RNA, 16 nt, Human
uuugugugcucuccau

SEQ ID NO: 1405933 - RNA, 20 nt, Human
uuugugucucuuauggaugu

SEQ ID NO: 1405934 - RNA, 21 nt, Human
uuuguauuguuucaauugcau

SEQ ID NO: 1405935 - RNA, 19 nt, Human
uuuggucgaggaguaacaa

SEQ ID NO: 1405936 - RNA, 18 nt, Human
uuuggucgaggaguaaca

SEQ ID NO: 1405937 - RNA, 16 nt, Human
uuuggucgaggaguaa

SEQ ID NO: 1405938 - RNA, 17 nt, Human
uuugguccgucauaacc

SEQ ID NO: 1405939 - RNA, 16 nt, Human
uuuguauucucugagc

SEQ ID NO: 1405940 - RNA, 14 nt, Human
uuuguauucucuga

SEQ ID NO: 1405941 - RNA, 22 nt, Human
uuuggucgaggaguaacaauac

SEQ ID NO: 1405942 - RNA, 14 nt, Human
uuuguauuguauau

SEQ ID NO: 1405943 - RNA, 20 nt, Human
uuuguugacauucugaaugc

SEQ ID NO: 1405944 - RNA, 19 nt, Human
uuuguugacauucugaaug

SEQ ID NO: 1405945 - RNA, 18 nt, Human
uuuguugacauucugaau

SEQ ID NO: 1405946 - RNA, 15 nt, Human
uuuguuauuuugcaa

SEQ ID NO: 1405947 - RNA, 14 nt, Human
uuuguugcuguuuu

SEQ ID NO: 1405948 - RNA, 22 nt, Human
uuuguugcguuccuuucuuuuc

SEQ ID NO: 1405949 - RNA, 22 nt, Human
uuuguuaauuuagaaaacuuua

SEQ ID NO: 1405950 - RNA, 23 nt, Human
uuuguuaauuuagaaaacuuuaa

SEQ ID NO: 1405951 - RNA, 17 nt, Human
uuuguguguugucucuu

SEQ ID NO: 1405952 - RNA, 18 nt, Human
uuuguuauauaauuuaga

SEQ ID NO: 1405953 - RNA, 22 nt, Human
uuuguuaguaugaggcauuugu

SEQ ID NO: 1405954 - RNA, 13 nt, Human
uuuguugguuggu

SEQ ID NO: 1405955 - RNA, 22 nt, Human
uuuuaaaaucagcuauuuugug

SEQ ID NO: 1405956 - RNA, 14 nt, Human
uuuuaaaaucagcu

SEQ ID NO: 1405957 - RNA, 21 nt, Human
uuuuaaaauagcguucuugua

SEQ ID NO: 1405958 - RNA, 14 nt, Human
uuuuaaaauccacu

SEQ ID NO: 1405959 - RNA, 16 nt, Human
uuuuaaacuguacagu

SEQ ID NO: 1405960 - RNA, 15 nt, Human
uuuuaaacuguacag

SEQ ID NO: 1405961 - RNA, 14 nt, Human
uuuuaaacuguaca

SEQ ID NO: 1405962 - RNA, 13 nt, Human
uuuuaaacuguac

SEQ ID NO: 1405963 - RNA, 23 nt, Human
uuuuaaacauuaauagcagccuu

SEQ ID NO: 1405964 - RNA, 21 nt, Human
uuuuaaacaucaaucuuuaaa

SEQ ID NO: 1405965 - RNA, 18 nt, Human
uuuuaaacacauuaggaa

SEQ ID NO: 1405966 - RNA, 19 nt, Human
uuuuaaacagugagccuga

SEQ ID NO: 1405967 - RNA, 13 nt, Human
uuuuaaacaguga

SEQ ID NO: 1405968 - RNA, 13 nt, Human
uuuuaaacacauu

SEQ ID NO: 1405969 - RNA, 23 nt, Human
uuuuaaaauccacuuuaucuuga

SEQ ID NO: 1405970 - RNA, 18 nt, Human
uuugcacugauauaucau

SEQ ID NO: 1405971 - RNA, 21 nt, Human
uuugcaccuuucuaguugaaa

SEQ ID NO: 1405972 - RNA, 20 nt, Human
uuugcaccuuucuaguugaa

SEQ ID NO: 1405973 - RNA, 17 nt, Human
uuugcaccuuucuaguu

SEQ ID NO: 1405974 - RNA, 16 nt, Human
uuugcaccuuucuagu

SEQ ID NO: 1405975 - RNA, 14 nt, Human
uuugagugcucuga

SEQ ID NO: 1405976 - RNA, 13 nt, Human
uuugagugcucug

SEQ ID NO: 1405977 - RNA, 22 nt, Human
uuuccguaaaaaugauuucagu

SEQ ID NO: 1405978 - RNA, 15 nt, Human
uuucccuuugccuuc

SEQ ID NO: 1405979 - RNA, 20 nt, Human
uuucccuuguagcuccuccc

SEQ ID NO: 1405980 - RNA, 15 nt, Human
uuuccguuaaaauac

SEQ ID NO: 1405981 - RNA, 20 nt, Human
uuuccuaaauauauuuuaag

SEQ ID NO: 1405982 - RNA, 17 nt, Human
uuuccguuaaaauacca

SEQ ID NO: 1405983 - RNA, 18 nt, Human
uuucccuuguagcuccuc

SEQ ID NO: 1405984 - RNA, 17 nt, Human
uuucccuuguagcuccu

SEQ ID NO: 1405985 - RNA, 19 nt, Human
uuuccaccacagccagcac

SEQ ID NO: 1405986 - RNA, 15 nt, Human
uuuccacagaagcuc

SEQ ID NO: 1405987 - RNA, 22 nt, Human
uuuggaaaguacacucugcugu

SEQ ID NO: 1405988 - RNA, 21 nt, Human
uuuggaaaguacacucugcug

SEQ ID NO: 1405989 - RNA, 20 nt, Human
uuuggaaaguacacucugcu

SEQ ID NO: 1405990 - RNA, 15 nt, Human
uuuggaaaguacacu

SEQ ID NO: 1405991 - RNA, 13 nt, Human
uuuggaaaguaca

SEQ ID NO: 1405992 - RNA, 16 nt, Human
uuuggaaagacuggac

SEQ ID NO: 1405993 - RNA, 23 nt, Human
uuugcauuuaaaacagacacugg

SEQ ID NO: 1405994 - RNA, 16 nt, Human
uuuggacaguuuacca

SEQ ID NO: 1405995 - RNA, 13 nt, Human
uuuggacaguuua

SEQ ID NO: 1405996 - RNA, 21 nt, Human
uuugcauuuaaaacagacacu

SEQ ID NO: 1405997 - RNA, 19 nt, Human
uuugcauuuaaaacagaca

SEQ ID NO: 1405998 - RNA, 17 nt, Human
uuugcauuuaaaacaga

SEQ ID NO: 1405999 - RNA, 16 nt, Human
uuugcauuuaaaacag

SEQ ID NO: 1406000 - RNA, 19 nt, Human
uuugcauugaacacaaacu

SEQ ID NO: 1406001 - RNA, 22 nt, Human
uuugcauuaaauucacaaacuu

SEQ ID NO: 1406002 - RNA, 21 nt, Human
uuugcauuaaauucacaaacu

SEQ ID NO: 1406003 - RNA, 18 nt, Human
uuugcauuaaauucacaa

SEQ ID NO: 1406004 - RNA, 17 nt, Human
uuugcauuaaauucaca

SEQ ID NO: 1406005 - RNA, 22 nt, Human
uuugcauaacaauuccucuacu

SEQ ID NO: 1406006 - RNA, 20 nt, Human
uuugcauaacaauuccucua

SEQ ID NO: 1406007 - RNA, 14 nt, Human
uuugcaguaacugu

SEQ ID NO: 1406008 - RNA, 12 nt, Human
uuugcaguaacu

SEQ ID NO: 1406009 - RNA, 10 nt, Human
uuugcaguaa

SEQ ID NO: 1406010 - RNA, 9 nt, Human
uuugcagua

SEQ ID NO: 1406011 - RNA, 22 nt, Human
uuugcagguggccaaguuccuc

SEQ ID NO: 1406012 - RNA, 22 nt, Human
uuugcaggguccucuucugggc

SEQ ID NO: 1406013 - RNA, 18 nt, Human
uuugcauaacaauuccuc

SEQ ID NO: 1406014 - RNA, 17 nt, Human
uuugcauaacaauuccu

SEQ ID NO: 1406015 - RNA, 16 nt, Human
uuugcauaacaauucc

SEQ ID NO: 1406016 - RNA, 17 nt, Human
uuugcaguaacuguuuu

SEQ ID NO: 1406017 - RNA, 18 nt, Human
uuugcauaacguauaaaa

SEQ ID NO: 1406018 - RNA, 17 nt, Human
uuuuccuagcccucuca

SEQ ID NO: 1406019 - RNA, 14 nt, Human
uuuucccuuugccu

SEQ ID NO: 1406020 - RNA, 15 nt, Human
uuuucccuguacagu

SEQ ID NO: 1406021 - RNA, 22 nt, Human
uuuucccucuuuggcuccccug

SEQ ID NO: 1406022 - RNA, 20 nt, Human
uuuuccuaauaaaguucugu

SEQ ID NO: 1406023 - RNA, 13 nt, Human
uuuucuugucuau

SEQ ID NO: 1406024 - RNA, 20 nt, Human
uuuucuuuacaaaacaaacu

SEQ ID NO: 1406025 - RNA, 18 nt, Human
uuuucuuuaacugccgua

SEQ ID NO: 1406026 - RNA, 14 nt, Human
uuuucuuuaacugc

SEQ ID NO: 1406027 - RNA, 20 nt, Human
uuuucuugucuauaaagcau

SEQ ID NO: 1406028 - RNA, 19 nt, Human
uuuucuuuauaagaaagcc

SEQ ID NO: 1406029 - RNA, 13 nt, Human
uuuucuuuauaag

SEQ ID NO: 1406030 - RNA, 17 nt, Human
uuuugaaauuaaccucu

SEQ ID NO: 1406031 - RNA, 20 nt, Human
uuuugaaauuaugugacauu

SEQ ID NO: 1406032 - RNA, 16 nt, Human
uuuucccccuuugugc

SEQ ID NO: 1406033 - RNA, 14 nt, Human
uuuuccccagacuu

SEQ ID NO: 1406034 - RNA, 22 nt, Human
uuuucccauuuaucuaaauaug

SEQ ID NO: 1406035 - RNA, 20 nt, Human
uuuucccauuuaucuaaaua

SEQ ID NO: 1406036 - RNA, 23 nt, Human
uuuucaccuggaagcauuuguuu

SEQ ID NO: 1406037 - RNA, 19 nt, Human
uuuucaccagauuugcuaa

SEQ ID NO: 1406038 - RNA, 12 nt, Human
uuuucacauuuu

SEQ ID NO: 1406039 - RNA, 18 nt, Human
uuuucacauuagaagaca

SEQ ID NO: 1406040 - RNA, 16 nt, Human
uuuucacauuggaaac

SEQ ID NO: 1406041 - RNA, 22 nt, Human
uuuucaacagugaagacagaag

SEQ ID NO: 1406042 - RNA, 18 nt, Human
uuuucaacagugaagaca

SEQ ID NO: 1406043 - RNA, 20 nt, Human
uuuucaaacaaagaugccac

SEQ ID NO: 1406044 - RNA, 16 nt, Human
uuuucaaacaaagaug

SEQ ID NO: 1406045 - RNA, 14 nt, Human
uuuucaaaauggag

SEQ ID NO: 1406046 - RNA, 22 nt, Human
uuuucaaaaccagguccaauga

SEQ ID NO: 1406047 - RNA, 21 nt, Human
uuuucaaaauuguuacaaauu

SEQ ID NO: 1406048 - RNA, 21 nt, Human
uuuuauaauuuugugaagcaa

SEQ ID NO: 1406049 - RNA, 15 nt, Human
uuuuacuaauagaca

SEQ ID NO: 1406050 - RNA, 23 nt, Human
uuuuauaauuuugugaagcaaaa

SEQ ID NO: 1406051 - RNA, 16 nt, Human
uuuuacaauguaauua

SEQ ID NO: 1406052 - RNA, 22 nt, Human
uuuuacccuggccccucucccu

SEQ ID NO: 1406053 - RNA, 14 nt, Human
uuuuaccuuucaua

SEQ ID NO: 1406054 - RNA, 19 nt, Human
uuuuacguccaucucuugu

SEQ ID NO: 1406055 - RNA, 18 nt, Human
uuuuacaaguaacaaaaa

SEQ ID NO: 1406056 - RNA, 12 nt, Human
uuuuacaaguaa

SEQ ID NO: 1406057 - RNA, 14 nt, Human
uuuuacaaauguua

SEQ ID NO: 1406058 - RNA, 22 nt, Human
uuuuacaaauguuaaaaugugu

SEQ ID NO: 1406059 - RNA, 12 nt, Human
uuuuacaaaugu

SEQ ID NO: 1406060 - RNA, 23 nt, Human
uuuuacaauguaauuauuuaugu

SEQ ID NO: 1406061 - RNA, 17 nt, Human
uuuuacaaguaacaaaa

SEQ ID NO: 1406062 - RNA, 17 nt, Human
uuuuaaaguuaguaucu

SEQ ID NO: 1406063 - RNA, 12 nt, Human
uuuuacaaagcc

SEQ ID NO: 1406064 - RNA, 23 nt, Human
uuuuaaagaaaaaaauugaaaug

SEQ ID NO: 1406065 - RNA, 23 nt, Human
uuuuaaacuguguacauaacuga

SEQ ID NO: 1406066 - RNA, 20 nt, Human
uuuuaaacuguguacauaac

SEQ ID NO: 1406067 - RNA, 13 nt, Human
uuuuaaacugugu

SEQ ID NO: 1406068 - RNA, 20 nt, Human
uuuuaaacuguacagugucu

SEQ ID NO: 1406069 - RNA, 17 nt, Human
uuuuaaacuguacagug

SEQ ID NO: 1406070 - RNA, 21 nt, Human
uuuuaaaguaacccuacaaaa

SEQ ID NO: 1406071 - RNA, 19 nt, Human
uuuuauacucuuucuguau

SEQ ID NO: 1406072 - RNA, 18 nt, Human
uuuuauacucuuucugua

SEQ ID NO: 1406073 - RNA, 13 nt, Human
uuuuauacucuuu

SEQ ID NO: 1406074 - RNA, 13 nt, Human
uuuuauacauaaa

SEQ ID NO: 1406075 - RNA, 21 nt, Human
uuuuauacauaaacaagacca

SEQ ID NO: 1406076 - RNA, 18 nt, Human
uuuuauauuugaaauauu

SEQ ID NO: 1406077 - RNA, 13 nt, Human
uuuuauauuugaa

SEQ ID NO: 1406078 - RNA, 18 nt, Human
uuuuauacuuucccuacc

SEQ ID NO: 1406079 - RNA, 9 nt, Human
uuuuauaua

SEQ ID NO: 1406080 - RNA, 19 nt, Human
uuuuaugagaaagccuucu

SEQ ID NO: 1406081 - RNA, 20 nt, Human
uuuuaucugaguuacagaaa

SEQ ID NO: 1406082 - RNA, 23 nt, Human
uuuuaucugaauuuuuaaacaag

SEQ ID NO: 1406083 - RNA, 21 nt, Human
uuuuaucugaaaucaauuaaa

SEQ ID NO: 1406084 - RNA, 20 nt, Human
uuuuaucugaaaucaauuaa

SEQ ID NO: 1406085 - RNA, 19 nt, Human
uuuuaucugaaaucaauua

SEQ ID NO: 1406086 - RNA, 14 nt, Human
uuuuauuuugccaa

SEQ ID NO: 1406087 - RNA, 14 nt, Human
uuuucaaaagaaag

SEQ ID NO: 1406088 - RNA, 15 nt, Human
auaacaauuccucua

SEQ ID NO: 1406089 - RNA, 14 nt, Human
auaacaauuccucu

SEQ ID NO: 1406090 - RNA, 16 nt, Human
auaacaaugugcucuc

SEQ ID NO: 1406091 - RNA, 21 nt, Human
auaacaaugcuguauuuuaaa

SEQ ID NO: 1406092 - RNA, 20 nt, Human
auaacaaugcuguauuuuaa

SEQ ID NO: 1406093 - RNA, 19 nt, Human
auaacaaugcuguauuuua

SEQ ID NO: 1406094 - RNA, 17 nt, Human
auaacaaugcuguauuu

SEQ ID NO: 1406095 - RNA, 15 nt, Human
auaacaaugcuguau

SEQ ID NO: 1406096 - RNA, 14 nt, Human
auaacaaugaaagu

SEQ ID NO: 1406097 - RNA, 21 nt, Human
auaaauuugacuuuucuguaa

SEQ ID NO: 1406098 - RNA, 20 nt, Human
auaaauuugacuuuucugua

SEQ ID NO: 1406099 - RNA, 18 nt, Human
auaaauuugacuuuucug

SEQ ID NO: 1406100 - RNA, 12 nt, Human
auaaauuugacu

SEQ ID NO: 1406101 - RNA, 18 nt, Human
auaaauuucuauuuuuau

SEQ ID NO: 1406102 - RNA, 21 nt, Human
auaaagauuuuuuaauaauuu

SEQ ID NO: 1406103 - RNA, 17 nt, Human
auaaagauuuuuuaaua

SEQ ID NO: 1406104 - RNA, 16 nt, Human
auaaagauuuuuuaau

SEQ ID NO: 1406105 - RNA, 13 nt, Human
auaaagauuuuuu

SEQ ID NO: 1406106 - RNA, 18 nt, Human
auaaagauuuuuuaauaa

SEQ ID NO: 1406107 - RNA, 11 nt, Human
auaaagcaauu

SEQ ID NO: 1406108 - RNA, 16 nt, Human
auaaauuguauauuca

SEQ ID NO: 1406109 - RNA, 17 nt, Human
auaaauuguauauucac

SEQ ID NO: 1406110 - RNA, 18 nt, Human
auaaauuguauauucacu

SEQ ID NO: 1406111 - RNA, 19 nt, Human
auaaauuguauauucacuu

SEQ ID NO: 1406112 - RNA, 12 nt, Human
aguuugaauguu

SEQ ID NO: 1406113 - RNA, 14 nt, Human
aguuugaauguuaa

SEQ ID NO: 1406114 - RNA, 15 nt, Human
aguuugaauguuaaa

SEQ ID NO: 1406115 - RNA, 18 nt, Human
aguuugaaauaagcuauu

SEQ ID NO: 1406116 - RNA, 13 nt, Human
aguuugaaauaag

SEQ ID NO: 1406117 - RNA, 12 nt, Human
aguuugaaauaa

SEQ ID NO: 1406118 - RNA, 13 nt, Human
aguuucuugcuug

SEQ ID NO: 1406119 - RNA, 15 nt, Human
aguuguuagauuaag

SEQ ID NO: 1406120 - RNA, 20 nt, Human
aguuguuacauuuuuaagug

SEQ ID NO: 1406121 - RNA, 22 nt, Human
aguuguuacauuuuuaagugcu

SEQ ID NO: 1406122 - RNA, 16 nt, Human
aguuugaauguuaaau

SEQ ID NO: 1406123 - RNA, 21 nt, Human
aguuugaauguuaaauaaauu

SEQ ID NO: 1406124 - RNA, 17 nt, Human
aguuugauuaaauucuu

SEQ ID NO: 1406125 - RNA, 18 nt, Human
aguuugauuaaauucuug

SEQ ID NO: 1406126 - RNA, 20 nt, Human
aguuugauuaaauucuugca

SEQ ID NO: 1406127 - RNA, 22 nt, Human
aguuugauuaaauucuugcaaa

SEQ ID NO: 1406128 - RNA, 14 nt, Human
aguuuggauaugua

SEQ ID NO: 1406129 - RNA, 12 nt, Human
aguuuggaggaa

SEQ ID NO: 1406130 - RNA, 22 nt, Human
aguuuggagagagcagacuggc

SEQ ID NO: 1406131 - RNA, 15 nt, Human
aguuugcuuugcccu

SEQ ID NO: 1406132 - RNA, 22 nt, Human
aguuuggauauguaaaacauuu

SEQ ID NO: 1406133 - RNA, 17 nt, Human
aguuuggauauguaaaa

SEQ ID NO: 1406134 - RNA, 16 nt, Human
aguuuggauauguaaa

SEQ ID NO: 1406135 - RNA, 20 nt, Human
aguuuggauauguaaaacau

SEQ ID NO: 1406136 - RNA, 17 nt, Human
aguuugcaaaaaauguu

SEQ ID NO: 1406137 - RNA, 23 nt, Human
aguuugauuauucagugucacug

SEQ ID NO: 1406138 - RNA, 18 nt, Human
aguuugauuauucagugu

SEQ ID NO: 1406139 - RNA, 17 nt, Human
aguuugauuauucagug

SEQ ID NO: 1406140 - RNA, 14 nt, Human
aguuugauuauuca

SEQ ID NO: 1406141 - RNA, 23 nt, Human
aguuugauuaaauucuugcaaag

SEQ ID NO: 1406142 - RNA, 21 nt, Human
auaaaaagcuuccaugauucu

SEQ ID NO: 1406143 - RNA, 17 nt, Human
auaaaaagcuuccauga

SEQ ID NO: 1406144 - RNA, 11 nt, Human
auaaaaaggac

SEQ ID NO: 1406145 - RNA, 14 nt, Human
auaaaaaggacauc

SEQ ID NO: 1406146 - RNA, 13 nt, Human
auaaaacauuaau

SEQ ID NO: 1406147 - RNA, 19 nt, Human
auaaaaaggacaucagcaa

SEQ ID NO: 1406148 - RNA, 11 nt, Human
auaaggcuuca

SEQ ID NO: 1406149 - RNA, 14 nt, Human
auaauguuguuauu

SEQ ID NO: 1406150 - RNA, 19 nt, Human
auaauguaaacaauaucag

SEQ ID NO: 1406151 - RNA, 13 nt, Human
auaauguuucaaa

SEQ ID NO: 1406152 - RNA, 16 nt, Human
auaagguaaaaugcca

SEQ ID NO: 1406153 - RNA, 23 nt, Human
auaagggucccccacucuaaagc

SEQ ID NO: 1406154 - RNA, 17 nt, Human
auaaggugcucucuuuc

SEQ ID NO: 1406155 - RNA, 20 nt, Human
auaaggugcucucuuucugu

SEQ ID NO: 1406156 - RNA, 18 nt, Human
auaagguaaaaugccaug

SEQ ID NO: 1406157 - RNA, 13 nt, Human
auaauggucagag

SEQ ID NO: 1406158 - RNA, 19 nt, Human
auaauguuguuauuuaaag

SEQ ID NO: 1406159 - RNA, 18 nt, Human
auaauguuucaaacauau

SEQ ID NO: 1406160 - RNA, 14 nt, Human
auacaaugcugugc

SEQ ID NO: 1406161 - RNA, 17 nt, Human
auacaaugcugugcccu

SEQ ID NO: 1406162 - RNA, 22 nt, Human
auacacuuauuggaacucugcu

SEQ ID NO: 1406163 - RNA, 13 nt, Human
auaccccccucug

SEQ ID NO: 1406164 - RNA, 23 nt, Human
auacacuuuuucucuuuccauga

SEQ ID NO: 1406165 - RNA, 13 nt, Human
auacagaaaaguu

SEQ ID NO: 1406166 - RNA, 21 nt, Human
auaucauaauggggguaaagu

SEQ ID NO: 1406167 - RNA, 14 nt, Human
auaugcacuuauaa

SEQ ID NO: 1406168 - RNA, 13 nt, Human
auaugcacuuaua

SEQ ID NO: 1406169 - RNA, 19 nt, Human
auaugcuuaaaauaagcag

SEQ ID NO: 1406170 - RNA, 18 nt, Human
auaugcuuaaaauaagca

SEQ ID NO: 1406171 - RNA, 16 nt, Human
auaugcuuaaaauaag

SEQ ID NO: 1406172 - RNA, 13 nt, Human
auauggccacagu

SEQ ID NO: 1406173 - RNA, 13 nt, Human
auauuauguuaaa

SEQ ID NO: 1406174 - RNA, 13 nt, Human
auauucaauaaag

SEQ ID NO: 1406175 - RNA, 15 nt, Human
auauucaauaaagcu

SEQ ID NO: 1406176 - RNA, 20 nt, Human
auauucaauaaagcugcuga

SEQ ID NO: 1406177 - RNA, 16 nt, Human
auauuauguuaaaacu

SEQ ID NO: 1406178 - RNA, 14 nt, Human
auauuauguuaaaa

SEQ ID NO: 1406179 - RNA, 15 nt, Human
auauuauuuuauguu

SEQ ID NO: 1406180 - RNA, 22 nt, Human
auauuauuuuauguugcauaga

SEQ ID NO: 1406181 - RNA, 18 nt, Human
auauauuuuuuucugaaa

SEQ ID NO: 1406182 - RNA, 14 nt, Human
auacuuguaauuau

SEQ ID NO: 1406183 - RNA, 13 nt, Human
auacuuguaauua

SEQ ID NO: 1406184 - RNA, 22 nt, Human
auacuuggauuuaguuucagua

SEQ ID NO: 1406185 - RNA, 17 nt, Human
auacuuggauuuaguuu

SEQ ID NO: 1406186 - RNA, 16 nt, Human
auacuuggauuuaguu

SEQ ID NO: 1406187 - RNA, 13 nt, Human
auacuuggauuua

SEQ ID NO: 1406188 - RNA, 12 nt, Human
auacuuggauuu

SEQ ID NO: 1406189 - RNA, 23 nt, Human
auacuugaagggccagagccagg

SEQ ID NO: 1406190 - RNA, 22 nt, Human
auagaaaaguauguucuaaccu

SEQ ID NO: 1406191 - RNA, 22 nt, Human
auacuuugcagcacagcugaga

SEQ ID NO: 1406192 - RNA, 23 nt, Human
auacuuugaauguguuucacagu

SEQ ID NO: 1406193 - RNA, 22 nt, Human
auacuuugaauguguuucacag

SEQ ID NO: 1406194 - RNA, 20 nt, Human
auacuuugaauguguuucac

SEQ ID NO: 1406195 - RNA, 19 nt, Human
auacuuugaauguguuuca

SEQ ID NO: 1406196 - RNA, 17 nt, Human
auacuuugaauguguuu

SEQ ID NO: 1406197 - RNA, 15 nt, Human
auacuuugaaugugu

SEQ ID NO: 1406198 - RNA, 13 nt, Human
auacuuugaaugu

SEQ ID NO: 1406199 - RNA, 12 nt, Human
auacuuugaaug

SEQ ID NO: 1406200 - RNA, 23 nt, Human
auacuuugaaaggagaugucuug

SEQ ID NO: 1406201 - RNA, 22 nt, Human
auacuuugaaaggagaugucuu

SEQ ID NO: 1406202 - RNA, 24 nt, Human
auacuuucccuacccucuagagaa

SEQ ID NO: 1406203 - RNA, 23 nt, Human
auacuuucccuacccucuagaga

SEQ ID NO: 1406204 - RNA, 22 nt, Human
auacuuucccuacccucuagag

SEQ ID NO: 1406205 - RNA, 21 nt, Human
auacuuucccuacccucuaga

SEQ ID NO: 1406206 - RNA, 15 nt, Human
auacuuucccuaccc

SEQ ID NO: 1406207 - RNA, 21 nt, Human
auacuuguaauuauggaguca

SEQ ID NO: 1406208 - RNA, 16 nt, Human
auacuuguaauuaugg

SEQ ID NO: 1406209 - RNA, 15 nt, Human
auacuuguaauuaug

SEQ ID NO: 1406210 - RNA, 17 nt, Human
auacuuguaauuaugga

SEQ ID NO: 1406211 - RNA, 13 nt, Human
auacuuguggacu

SEQ ID NO: 1406212 - RNA, 14 nt, Human
auacuuguggacua

SEQ ID NO: 1406213 - RNA, 20 nt, Human
auacuuguggacuaaaagau

SEQ ID NO: 1406214 - RNA, 21 nt, Human
auacuuguggacuaaaagaua

SEQ ID NO: 1406215 - RNA, 16 nt, Human
auagcccuguccuggu

SEQ ID NO: 1406216 - RNA, 15 nt, Human
auagcccuguccugg

SEQ ID NO: 1406217 - RNA, 14 nt, Human
auagcccuguccug

SEQ ID NO: 1406218 - RNA, 15 nt, Human
auagcauuguaaaag

SEQ ID NO: 1406219 - RNA, 19 nt, Human
auagcagccuuucucucuu

SEQ ID NO: 1406220 - RNA, 13 nt, Human
auagcagccuuuc

SEQ ID NO: 1406221 - RNA, 14 nt, Human
auagcacaggcuaa

SEQ ID NO: 1406222 - RNA, 13 nt, Human
auagcaugcaucu

SEQ ID NO: 1406223 - RNA, 16 nt, Human
auagcagacaguguuu

SEQ ID NO: 1406224 - RNA, 17 nt, Human
auagcacaggcuaauuu

SEQ ID NO: 1406225 - RNA, 17 nt, Human
auagaaaugccaagcac

SEQ ID NO: 1406226 - RNA, 16 nt, Human
auagaaaugccaagca

SEQ ID NO: 1406227 - RNA, 12 nt, Human
auagaaaugcca

SEQ ID NO: 1406228 - RNA, 19 nt, Human
auagaaaugccaagcacuu

SEQ ID NO: 1406229 - RNA, 22 nt, Human
auagaaauaaaggaugugauug

SEQ ID NO: 1406230 - RNA, 12 nt, Human
auagaaagcuau

SEQ ID NO: 1406231 - RNA, 15 nt, Human
auauacagcucagaa

SEQ ID NO: 1406232 - RNA, 21 nt, Human
auaguaacuucuuauggaauu

SEQ ID NO: 1406233 - RNA, 19 nt, Human
auaguaacuucuuauggaa

SEQ ID NO: 1406234 - RNA, 13 nt, Human
auaguaaaucacg

SEQ ID NO: 1406235 - RNA, 19 nt, Human
auaguaaaucacgcuuuuu

SEQ ID NO: 1406236 - RNA, 18 nt, Human
auagcccuguccuggugg

SEQ ID NO: 1406237 - RNA, 23 nt, Human
auagcccuguccuggugguauuu

SEQ ID NO: 1406238 - RNA, 23 nt, Human
auagccucugucuggcaaugcca

SEQ ID NO: 1406239 - RNA, 16 nt, Human
auagccucugucuggc

SEQ ID NO: 1406240 - RNA, 15 nt, Human
auagccucugucugg

SEQ ID NO: 1406241 - RNA, 24 nt, Human
auagguuuggacaaaauggaauac

SEQ ID NO: 1406242 - RNA, 17 nt, Human
auauaaucaucaaguaa

SEQ ID NO: 1406243 - RNA, 14 nt, Human
auauaaucauuauu

SEQ ID NO: 1406244 - RNA, 21 nt, Human
auauaauaaauguacauuaau

SEQ ID NO: 1406245 - RNA, 23 nt, Human
auaguagaacgcuaucugggaag

SEQ ID NO: 1406246 - RNA, 17 nt, Human
auaguaccaaucauuuu

SEQ ID NO: 1406247 - RNA, 20 nt, Human
auaguacaugauaaaugaua

SEQ ID NO: 1406248 - RNA, 20 nt, Human
aguucagaguccuuaaaaug

SEQ ID NO: 1406249 - RNA, 21 nt, Human
aguucagcauccgcaggugcu

SEQ ID NO: 1406250 - RNA, 21 nt, Human
aguucagcgcugucaggauug

SEQ ID NO: 1406251 - RNA, 22 nt, Human
aguugugaguuuaccuuguaua

SEQ ID NO: 1406252 - RNA, 17 nt, Human
aguugucucugaugcag

SEQ ID NO: 1406253 - RNA, 22 nt, Human
aguugucucugaugcagcuuau

SEQ ID NO: 1406254 - RNA, 16 nt, Human
aguugucucugaugca

SEQ ID NO: 1406255 - RNA, 13 nt, Human
aguugucucugau

SEQ ID NO: 1406256 - RNA, 12 nt, Human
aguugucucuga

SEQ ID NO: 1406257 - RNA, 11 nt, Human
aguugucucug

SEQ ID NO: 1406258 - RNA, 20 nt, Human
aguugucccgauuguaacuc

SEQ ID NO: 1406259 - RNA, 19 nt, Human
aguugucccgauuguaacu

SEQ ID NO: 1406260 - RNA, 13 nt, Human
aguugaggccacu

SEQ ID NO: 1406261 - RNA, 11 nt, Human
aguugaggcca

SEQ ID NO: 1406262 - RNA, 15 nt, Human
aguugaggacuucuu

SEQ ID NO: 1406263 - RNA, 16 nt, Human
aguugaggacuucuug

SEQ ID NO: 1406264 - RNA, 23 nt, Human
aguugauaaagauuuuuuaauaa

SEQ ID NO: 1406265 - RNA, 21 nt, Human
aguugauaaagauuuuuuaau

SEQ ID NO: 1406266 - RNA, 17 nt, Human
aguugauaaagauuuuu

SEQ ID NO: 1406267 - RNA, 16 nt, Human
aguugauacuacaguu

SEQ ID NO: 1406268 - RNA, 21 nt, Human
aguugaauuuuuuuuaacauu

SEQ ID NO: 1406269 - RNA, 18 nt, Human
aguugaauuuuuuuuaac

SEQ ID NO: 1406270 - RNA, 13 nt, Human
aguugaauuuuuu

SEQ ID NO: 1406271 - RNA, 22 nt, Human
aguugaauuuuuuuuaacauuc

SEQ ID NO: 1406272 - RNA, 23 nt, Human
aguugaauuuuuuuuaacauucc

SEQ ID NO: 1406273 - RNA, 15 nt, Human
aguugacuuauagua

SEQ ID NO: 1406274 - RNA, 17 nt, Human
aguugagacaagaaaau

SEQ ID NO: 1406275 - RNA, 18 nt, Human
aguugagauaguuuucau

SEQ ID NO: 1406276 - RNA, 14 nt, Human
aguugagacaagaa

SEQ ID NO: 1406277 - RNA, 17 nt, Human
aguugacuuauaguaca

SEQ ID NO: 1406278 - RNA, 18 nt, Human
aguugacuuauaguacau

SEQ ID NO: 1406279 - RNA, 21 nt, Human
aguugacuuauaguacaugau

SEQ ID NO: 1406280 - RNA, 18 nt, Human
agugggaaaaauguagga

SEQ ID NO: 1406281 - RNA, 17 nt, Human
agugggaaaaauguagg

SEQ ID NO: 1406282 - RNA, 14 nt, Human
agugggaaaaaugu

SEQ ID NO: 1406283 - RNA, 22 nt, Human
agugggaagcccauccugacca

SEQ ID NO: 1406284 - RNA, 21 nt, Human
agugggaagcccauccugacc

SEQ ID NO: 1406285 - RNA, 17 nt, Human
agugggaagcccauccu

SEQ ID NO: 1406286 - RNA, 12 nt, Human
agugggaagccc

SEQ ID NO: 1406287 - RNA, 19 nt, Human
agugggaaaaauguaggag

SEQ ID NO: 1406288 - RNA, 15 nt, Human
agugucaggcacugg

SEQ ID NO: 1406289 - RNA, 14 nt, Human
agugucaggcacug

SEQ ID NO: 1406290 - RNA, 14 nt, Human
agugucaggaggaa

SEQ ID NO: 1406291 - RNA, 16 nt, Human
agugucacucaaggcg

SEQ ID NO: 1406292 - RNA, 18 nt, Human
agugucauuucucaucca

SEQ ID NO: 1406293 - RNA, 22 nt, Human
aguguccuuggcaggcugauuu

SEQ ID NO: 1406294 - RNA, 20 nt, Human
agugucauuucucauccaca

SEQ ID NO: 1406295 - RNA, 14 nt, Human
agugggcaaaagcu

SEQ ID NO: 1406296 - RNA, 24 nt, Human
agugggcaaaagcuuacaaauacu

SEQ ID NO: 1406297 - RNA, 22 nt, Human
agugggaggguaccagcagaaa

SEQ ID NO: 1406298 - RNA, 16 nt, Human
agugauccuuacaagu

SEQ ID NO: 1406299 - RNA, 17 nt, Human
agugaucugcccgccuc

SEQ ID NO: 1406300 - RNA, 15 nt, Human
agugcuaauuuugaa

SEQ ID NO: 1406301 - RNA, 15 nt, Human
agugcuaagugugaa

SEQ ID NO: 1406302 - RNA, 16 nt, Human
agugcuaagugugaac

SEQ ID NO: 1406303 - RNA, 17 nt, Human
agugcuaagugugaacu

SEQ ID NO: 1406304 - RNA, 18 nt, Human
agugcuaagugugaacug

SEQ ID NO: 1406305 - RNA, 15 nt, Human
agugcugaacagugg

SEQ ID NO: 1406306 - RNA, 14 nt, Human
agugcugaacagug

SEQ ID NO: 1406307 - RNA, 17 nt, Human
agugcucuuuucuccuc

SEQ ID NO: 1406308 - RNA, 14 nt, Human
agugcucuuuucuc

SEQ ID NO: 1406309 - RNA, 21 nt, Human
agugcucugaucccucuacag

SEQ ID NO: 1406310 - RNA, 17 nt, Human
agugcucugaucccucu

SEQ ID NO: 1406311 - RNA, 16 nt, Human
agugcucugaucccuc

SEQ ID NO: 1406312 - RNA, 11 nt, Human
agugcucugau

SEQ ID NO: 1406313 - RNA, 22 nt, Human
agugcucgcuguugcugaauag

SEQ ID NO: 1406314 - RNA, 23 nt, Human
agugcucgcuguugcugaauagg

SEQ ID NO: 1406315 - RNA, 18 nt, Human
agugcuaauuuugaaaaa

SEQ ID NO: 1406316 - RNA, 20 nt, Human
agugcuaauuuugaaaaacu

SEQ ID NO: 1406317 - RNA, 19 nt, Human
agugcuaagugugaacugg

SEQ ID NO: 1406318 - RNA, 22 nt, Human
agugcuaagugugaacuggacc

SEQ ID NO: 1406319 - RNA, 15 nt, Human
agugcucgcuguugc

SEQ ID NO: 1406320 - RNA, 16 nt, Human
agugcucgcuguugcu

SEQ ID NO: 1406321 - RNA, 17 nt, Human
agugcucgcuguugcug

SEQ ID NO: 1406322 - RNA, 18 nt, Human
agugcucgcuguugcuga

SEQ ID NO: 1406323 - RNA, 19 nt, Human
agugcucgcuguugcugaa

SEQ ID NO: 1406324 - RNA, 20 nt, Human
agugcucgcuguugcugaau

SEQ ID NO: 1406325 - RNA, 23 nt, Human
aguacuuagcuaguuuuauucuu

SEQ ID NO: 1406326 - RNA, 16 nt, Human
aguacugggauuacag

SEQ ID NO: 1406327 - RNA, 20 nt, Human
aguacugggauuacaggcgu

SEQ ID NO: 1406328 - RNA, 20 nt, Human
aguacuggcugauggaguaa

SEQ ID NO: 1406329 - RNA, 16 nt, Human
aguacguugugcauuu

SEQ ID NO: 1406330 - RNA, 17 nt, Human
aguacguugugcauuug

SEQ ID NO: 1406331 - RNA, 18 nt, Human
aguacguugugcauuugg

SEQ ID NO: 1406332 - RNA, 15 nt, Human
aguaacauuugcugu

SEQ ID NO: 1406333 - RNA, 17 nt, Human
aguaacauuugcuguuu

SEQ ID NO: 1406334 - RNA, 17 nt, Human
aguaacacuaauauauu

SEQ ID NO: 1406335 - RNA, 23 nt, Human
aguaacacuaauauauuuaaaaa

SEQ ID NO: 1406336 - RNA, 16 nt, Human
aguaacacuaauauau

SEQ ID NO: 1406337 - RNA, 13 nt, Human
aguaacacuaaua

SEQ ID NO: 1406338 - RNA, 12 nt, Human
aguaacacuaau

SEQ ID NO: 1406339 - RNA, 19 nt, Human
aguaacaauacaaauggau

SEQ ID NO: 1406340 - RNA, 13 nt, Human
aguaacaaaaaua

SEQ ID NO: 1406341 - RNA, 15 nt, Human
aguaacaaaaauaaa

SEQ ID NO: 1406342 - RNA, 12 nt, Human
aguaacaaaaau

SEQ ID NO: 1406343 - RNA, 14 nt, Human
aguaagagguguua

SEQ ID NO: 1406344 - RNA, 15 nt, Human
aguacguugugcauu

SEQ ID NO: 1406345 - RNA, 15 nt, Human
aguaaaucuuuuaca

SEQ ID NO: 1406346 - RNA, 20 nt, Human
aguaacaauacaaauggauu

SEQ ID NO: 1406347 - RNA, 20 nt, Human
aguaaaugugauucaccucu

SEQ ID NO: 1406348 - RNA, 18 nt, Human
aguaaaugggggugcauu

SEQ ID NO: 1406349 - RNA, 19 nt, Human
aguaaaucacgcuuuuuga

SEQ ID NO: 1406350 - RNA, 20 nt, Human
aguaaaucacgcuuuuugaa

SEQ ID NO: 1406351 - RNA, 16 nt, Human
aggucuguucuuucca

SEQ ID NO: 1406352 - RNA, 13 nt, Human
aggucuguucuuu

SEQ ID NO: 1406353 - RNA, 15 nt, Human
aggucuguucuuucc

SEQ ID NO: 1406354 - RNA, 11 nt, Human
agucacacagu

SEQ ID NO: 1406355 - RNA, 18 nt, Human
agucaaugacaugaauuu

SEQ ID NO: 1406356 - RNA, 15 nt, Human
agucaaugacaugaa

SEQ ID NO: 1406357 - RNA, 18 nt, Human
agucaaucaagucuguuu

SEQ ID NO: 1406358 - RNA, 12 nt, Human
agucaaucaagu

SEQ ID NO: 1406359 - RNA, 24 nt, Human
agucaaucaagucuguuuacugca

SEQ ID NO: 1406360 - RNA, 17 nt, Human
agucaaaacuacaaauc

SEQ ID NO: 1406361 - RNA, 14 nt, Human
agucaaaaagaacc

SEQ ID NO: 1406362 - RNA, 12 nt, Human
agucaaaaagaa

SEQ ID NO: 1406363 - RNA, 22 nt, Human
aguauuuuuuguauaauuggau

SEQ ID NO: 1406364 - RNA, 19 nt, Human
agucaaaacacuuguaauu

SEQ ID NO: 1406365 - RNA, 15 nt, Human
agucaaaaauuaaac

SEQ ID NO: 1406366 - RNA, 14 nt, Human
aguauccacuuugc

SEQ ID NO: 1406367 - RNA, 14 nt, Human
aguacuuguaguuc

SEQ ID NO: 1406368 - RNA, 17 nt, Human
aguacuuguaguuccac

SEQ ID NO: 1406369 - RNA, 13 nt, Human
aguacuuguaguu

SEQ ID NO: 1406370 - RNA, 23 nt, Human
aguacuugggagaccuguaauca

SEQ ID NO: 1406371 - RNA, 20 nt, Human
aguaugaggcauuuguuuga

SEQ ID NO: 1406372 - RNA, 21 nt, Human
aguaugaggcauuuguuugaa

SEQ ID NO: 1406373 - RNA, 20 nt, Human
aguauuuuuuguauaauugg

SEQ ID NO: 1406374 - RNA, 19 nt, Human
aguauuuuuuguauaauug

SEQ ID NO: 1406375 - RNA, 13 nt, Human
aguauuuuuugua

SEQ ID NO: 1406376 - RNA, 21 nt, Human
aguauuuuuucaguauuauau

SEQ ID NO: 1406377 - RNA, 16 nt, Human
aguauuuuuucaguau

SEQ ID NO: 1406378 - RNA, 19 nt, Human
aguauuuuuauauuuaaau

SEQ ID NO: 1406379 - RNA, 21 nt, Human
aguauuuuuauauuuaaaugu

SEQ ID NO: 1406380 - RNA, 14 nt, Human
aguauuuuguuuca

SEQ ID NO: 1406381 - RNA, 23 nt, Human
aguaugaggcauuuguuugaacu

SEQ ID NO: 1406382 - RNA, 17 nt, Human
aguauuuuguuucagug

SEQ ID NO: 1406383 - RNA, 22 nt, Human
agucauuuuuacaauguaauua

SEQ ID NO: 1406384 - RNA, 14 nt, Human
agucauuuuuacaa

SEQ ID NO: 1406385 - RNA, 19 nt, Human
agucauguuuaucugcuua

SEQ ID NO: 1406386 - RNA, 14 nt, Human
agucauguuuaucu

SEQ ID NO: 1406387 - RNA, 12 nt, Human
agucaugugacc

SEQ ID NO: 1406388 - RNA, 20 nt, Human
aguccugaucagagccgugg

SEQ ID NO: 1406389 - RNA, 14 nt, Human
aguccugaaggaca

SEQ ID NO: 1406390 - RNA, 14 nt, Human
aguccaagaaucca

SEQ ID NO: 1406391 - RNA, 21 nt, Human
agucauuuuuacaauguaauu

SEQ ID NO: 1406392 - RNA, 15 nt, Human
agugacuaauggcau

SEQ ID NO: 1406393 - RNA, 15 nt, Human
agugacccuggcucc

SEQ ID NO: 1406394 - RNA, 17 nt, Human
agucuguggaucagaga

SEQ ID NO: 1406395 - RNA, 14 nt, Human
agucuguggaucag

SEQ ID NO: 1406396 - RNA, 20 nt, Human
agucugugccacguguuugu

SEQ ID NO: 1406397 - RNA, 20 nt, Human
agucugagguccugagcacu

SEQ ID NO: 1406398 - RNA, 22 nt, Human
agucugagguccugagcacugc

SEQ ID NO: 1406399 - RNA, 19 nt, Human
agucugagguccugagcac

SEQ ID NO: 1406400 - RNA, 18 nt, Human
agucugagguccugagca

SEQ ID NO: 1406401 - RNA, 17 nt, Human
agucugagguccugagc

SEQ ID NO: 1406402 - RNA, 16 nt, Human
agucugagguccugag

SEQ ID NO: 1406403 - RNA, 15 nt, Human
agucugagguccuga

SEQ ID NO: 1406404 - RNA, 14 nt, Human
agucugagguccug

SEQ ID NO: 1406405 - RNA, 23 nt, Human
agucugagagaggccauucuuuc

SEQ ID NO: 1406406 - RNA, 16 nt, Human
agucugaauuuuuaaa

SEQ ID NO: 1406407 - RNA, 16 nt, Human
agucugagagaggcca

SEQ ID NO: 1406408 - RNA, 23 nt, Human
agugaauucccucacucgucucc

SEQ ID NO: 1406409 - RNA, 14 nt, Human
agugaauucccuca

SEQ ID NO: 1406410 - RNA, 19 nt, Human
agugaaugcugggacucag

SEQ ID NO: 1406411 - RNA, 17 nt, Human
agucuguuuacugcaag

SEQ ID NO: 1406412 - RNA, 16 nt, Human
agucuguugauuaaag

SEQ ID NO: 1406413 - RNA, 14 nt, Human
agugaauuugccug

SEQ ID NO: 1406414 - RNA, 17 nt, Human
agugaauucccucacuc

SEQ ID NO: 1406415 - RNA, 16 nt, Human
agugaauucccucacu

SEQ ID NO: 1406416 - RNA, 15 nt, Human
agugaauucccucac

SEQ ID NO: 1406417 - RNA, 14 nt, Human
agugacccugcucu

SEQ ID NO: 1406418 - RNA, 16 nt, Human
agugacccuggcuccu

SEQ ID NO: 1406419 - RNA, 17 nt, Human
agugacccugcucucac

SEQ ID NO: 1406420 - RNA, 19 nt, Human
augaaaacagaaugucucu

SEQ ID NO: 1406421 - RNA, 15 nt, Human
augaaaacagaaugu

SEQ ID NO: 1406422 - RNA, 16 nt, Human
augaaaacacauuuuu

SEQ ID NO: 1406423 - RNA, 14 nt, Human
augaaaacacauuu

SEQ ID NO: 1406424 - RNA, 15 nt, Human
augaaaacacauuuu

SEQ ID NO: 1406425 - RNA, 22 nt, Human
augagggguuccuccccuccag

SEQ ID NO: 1406426 - RNA, 17 nt, Human
augagggguuccucccc

SEQ ID NO: 1406427 - RNA, 22 nt, Human
augagggcagcagccagcccug

SEQ ID NO: 1406428 - RNA, 23 nt, Human
augagggcagcagccagcccugc

SEQ ID NO: 1406429 - RNA, 20 nt, Human
augagggcagcagccagccc

SEQ ID NO: 1406430 - RNA, 19 nt, Human
augagggcagcagccagcc

SEQ ID NO: 1406431 - RNA, 18 nt, Human
augagggcagcagccagc

SEQ ID NO: 1406432 - RNA, 17 nt, Human
augagggcagcagccag

SEQ ID NO: 1406433 - RNA, 16 nt, Human
augagggcagcagcca

SEQ ID NO: 1406434 - RNA, 15 nt, Human
augagggcagcagcc

SEQ ID NO: 1406435 - RNA, 14 nt, Human
augagggcagcagc

SEQ ID NO: 1406436 - RNA, 13 nt, Human
augagggcagcag

SEQ ID NO: 1406437 - RNA, 21 nt, Human
augacuguuuuucggacaguu

SEQ ID NO: 1406438 - RNA, 22 nt, Human
augacuguuuuucggacaguuu

SEQ ID NO: 1406439 - RNA, 15 nt, Human
augagggaaaagaaa

SEQ ID NO: 1406440 - RNA, 20 nt, Human
augagggguuccuccccucc

SEQ ID NO: 1406441 - RNA, 19 nt, Human
augacuguuuuucggacag

SEQ ID NO: 1406442 - RNA, 21 nt, Human
augacugcuugcccuaagcag

SEQ ID NO: 1406443 - RNA, 17 nt, Human
augacugcuugcccuaa

SEQ ID NO: 1406444 - RNA, 22 nt, Human
augacugcuugcccuaagcaga

SEQ ID NO: 1406445 - RNA, 13 nt, Human
augacugcuugcc

SEQ ID NO: 1406446 - RNA, 12 nt, Human
augacugcuugc

SEQ ID NO: 1406447 - RNA, 21 nt, Human
augacugccaagacugcugug

SEQ ID NO: 1406448 - RNA, 16 nt, Human
augacugccaagacug

SEQ ID NO: 1406449 - RNA, 15 nt, Human
augacugccaagacu

SEQ ID NO: 1406450 - RNA, 13 nt, Human
augacugaauggg

SEQ ID NO: 1406451 - RNA, 13 nt, Human
augacugcacaug

SEQ ID NO: 1406452 - RNA, 13 nt, Human
augaggcauuugu

SEQ ID NO: 1406453 - RNA, 14 nt, Human
augaggcauuuguu

SEQ ID NO: 1406454 - RNA, 21 nt, Human
augaggcauuuguuugaacug

SEQ ID NO: 1406455 - RNA, 22 nt, Human
augaggcauuuguuugaacuga

SEQ ID NO: 1406456 - RNA, 13 nt, Human
augaaaaugucuu

SEQ ID NO: 1406457 - RNA, 14 nt, Human
augaaaauguccau

SEQ ID NO: 1406458 - RNA, 17 nt, Human
augaaaacagaaugucu

SEQ ID NO: 1406459 - RNA, 15 nt, Human
augaaaaugucuugu

SEQ ID NO: 1406460 - RNA, 12 nt, Human
augaaguauuuu

SEQ ID NO: 1406461 - RNA, 14 nt, Human
augaaaaugucuug

SEQ ID NO: 1406462 - RNA, 23 nt, Human
augaaguccaagcauuuagaugu

SEQ ID NO: 1406463 - RNA, 20 nt, Human
augaaguccaagcauuuaga

SEQ ID NO: 1406464 - RNA, 15 nt, Human
augaaguuguaggua

SEQ ID NO: 1406465 - RNA, 19 nt, Human
augaccacuuuuuagaaag

SEQ ID NO: 1406466 - RNA, 13 nt, Human
augaccaguaaag

SEQ ID NO: 1406467 - RNA, 21 nt, Human
aucuucuaaacccaauccaaa

SEQ ID NO: 1406468 - RNA, 13 nt, Human
aucuucuaaaugg

SEQ ID NO: 1406469 - RNA, 22 nt, Human
aucuggggagcaggcagccagc

SEQ ID NO: 1406470 - RNA, 23 nt, Human
aucuggggagcaggcagccagca

SEQ ID NO: 1406471 - RNA, 18 nt, Human
aucugggggccucuucug

SEQ ID NO: 1406472 - RNA, 20 nt, Human
aucuuauucauuuucucuaa

SEQ ID NO: 1406473 - RNA, 18 nt, Human
aucuuauucauuuucucu

SEQ ID NO: 1406474 - RNA, 13 nt, Human
aucuuauucauuu

SEQ ID NO: 1406475 - RNA, 13 nt, Human
aucuuauuuagga

SEQ ID NO: 1406476 - RNA, 18 nt, Human
aucucugaagccacaaau

SEQ ID NO: 1406477 - RNA, 19 nt, Human
aucucugaagccacaaaua

SEQ ID NO: 1406478 - RNA, 14 nt, Human
aucuggagagaaca

SEQ ID NO: 1406479 - RNA, 16 nt, Human
aucuggagagaacagg

SEQ ID NO: 1406480 - RNA, 21 nt, Human
aucuggggagcaggcagccag

SEQ ID NO: 1406481 - RNA, 19 nt, Human
aucuggggagcaggcagcc

SEQ ID NO: 1406482 - RNA, 18 nt, Human
aucuggggagcaggcagc

SEQ ID NO: 1406483 - RNA, 16 nt, Human
aucuggggagcaggca

SEQ ID NO: 1406484 - RNA, 16 nt, Human
aucuggcaacaucuuu

SEQ ID NO: 1406485 - RNA, 15 nt, Human
aucuggauuccagag

SEQ ID NO: 1406486 - RNA, 20 nt, Human
aucucuccacuuucagcugu

SEQ ID NO: 1406487 - RNA, 21 nt, Human
aucucuccacuuucagcuguc

SEQ ID NO: 1406488 - RNA, 19 nt, Human
aucucuccacuuucagcug

SEQ ID NO: 1406489 - RNA, 18 nt, Human
aucucuccacuuucagcu

SEQ ID NO: 1406490 - RNA, 17 nt, Human
aucucuccacuuucagc

SEQ ID NO: 1406491 - RNA, 20 nt, Human
aucuccugccuuccuccugg

SEQ ID NO: 1406492 - RNA, 17 nt, Human
aucuccugccuuccucc

SEQ ID NO: 1406493 - RNA, 16 nt, Human
aucuccugccuuccuc

SEQ ID NO: 1406494 - RNA, 12 nt, Human
aucuccugaaaa

SEQ ID NO: 1406495 - RNA, 22 nt, Human
aucuauuuuggauuguauauug

SEQ ID NO: 1406496 - RNA, 14 nt, Human
aucuauuuuggauu

SEQ ID NO: 1406497 - RNA, 15 nt, Human
aucuccguggcuuug

SEQ ID NO: 1406498 - RNA, 20 nt, Human
aucuccgucaacucauauuu

SEQ ID NO: 1406499 - RNA, 19 nt, Human
aucuauuucauguuuuuga

SEQ ID NO: 1406500 - RNA, 14 nt, Human
aucuauauuuuaca

SEQ ID NO: 1406501 - RNA, 15 nt, Human
aucuauauuuaacaa

SEQ ID NO: 1406502 - RNA, 21 nt, Human
aucuauaggaagauugaaccu

SEQ ID NO: 1406503 - RNA, 16 nt, Human
aucuauagaacugaau

SEQ ID NO: 1406504 - RNA, 17 nt, Human
aucuauagaaagcuaua

SEQ ID NO: 1406505 - RNA, 22 nt, Human
aucuaguuauuuacaggaacuu

SEQ ID NO: 1406506 - RNA, 15 nt, Human
aucuauaaacuauaa

SEQ ID NO: 1406507 - RNA, 13 nt, Human
aucuauaauuuac

SEQ ID NO: 1406508 - RNA, 11 nt, Human
aucuauaauuu

SEQ ID NO: 1406509 - RNA, 23 nt, Human
aucuauaaggugcucucuuucug

SEQ ID NO: 1406510 - RNA, 23 nt, Human
aucuauaauuuaccuaagauuac

SEQ ID NO: 1406511 - RNA, 16 nt, Human
aucuauaauuuaccua

SEQ ID NO: 1406512 - RNA, 16 nt, Human
aucuauagaaagcuau

SEQ ID NO: 1406513 - RNA, 21 nt, Human
aucaugaauuaguuuuauaug

SEQ ID NO: 1406514 - RNA, 17 nt, Human
aucaugaauuaguuuua

SEQ ID NO: 1406515 - RNA, 14 nt, Human
aucaugugaaauca

SEQ ID NO: 1406516 - RNA, 12 nt, Human
aucaugugaaau

SEQ ID NO: 1406517 - RNA, 22 nt, Human
aucaccucagauggcagcuuuu

SEQ ID NO: 1406518 - RNA, 19 nt, Human
aucaccucagauggcagcu

SEQ ID NO: 1406519 - RNA, 16 nt, Human
aucaccucagauggca

SEQ ID NO: 1406520 - RNA, 15 nt, Human
aucaccucagauggc

SEQ ID NO: 1406521 - RNA, 22 nt, Human
aucaccuauuuccauucaacaa

SEQ ID NO: 1406522 - RNA, 15 nt, Human
aucaccuauuuccau

SEQ ID NO: 1406523 - RNA, 14 nt, Human
aucaccuauuucca

SEQ ID NO: 1406524 - RNA, 23 nt, Human
aucaccuagcugaauguuuuucu

SEQ ID NO: 1406525 - RNA, 21 nt, Human
aucaccuagcugaauguuuuu

SEQ ID NO: 1406526 - RNA, 20 nt, Human
aucaccuagcugaauguuuu

SEQ ID NO: 1406527 - RNA, 16 nt, Human
aucaccuagcugaaug

SEQ ID NO: 1406528 - RNA, 19 nt, Human
aucaccuacucacacaggc

SEQ ID NO: 1406529 - RNA, 13 nt, Human
aucagcuuauugu

SEQ ID NO: 1406530 - RNA, 23 nt, Human
aucaccucagauggcagcuuuua

SEQ ID NO: 1406531 - RNA, 14 nt, Human
aucaggaagagaag

SEQ ID NO: 1406532 - RNA, 17 nt, Human
aucaggaagagaaggag

SEQ ID NO: 1406533 - RNA, 19 nt, Human
aucaggaagagaaggagca

SEQ ID NO: 1406534 - RNA, 16 nt, Human
aucacagcccagcccg

SEQ ID NO: 1406535 - RNA, 15 nt, Human
aucacagcccagccc

SEQ ID NO: 1406536 - RNA, 13 nt, Human
aucacagcccagc

SEQ ID NO: 1406537 - RNA, 20 nt, Human
aucacacacauugcugugaa

SEQ ID NO: 1406538 - RNA, 13 nt, Human
aucacacacauug

SEQ ID NO: 1406539 - RNA, 22 nt, Human
aucaaauauauucagccuggcu

SEQ ID NO: 1406540 - RNA, 22 nt, Human
aucacaugaauuauuacagugu

SEQ ID NO: 1406541 - RNA, 20 nt, Human
aucacaugaauuauuacagu

SEQ ID NO: 1406542 - RNA, 23 nt, Human
aucaccacaaacuguaauacaau

SEQ ID NO: 1406543 - RNA, 22 nt, Human
aucaccgugggcucccugacug

SEQ ID NO: 1406544 - RNA, 20 nt, Human
aucaccgugggcucccugac

SEQ ID NO: 1406545 - RNA, 19 nt, Human
aucaccgugggcucccuga

SEQ ID NO: 1406546 - RNA, 23 nt, Human
aucacccagacauaaaggaaaag

SEQ ID NO: 1406547 - RNA, 15 nt, Human
aucacccagacauaa

SEQ ID NO: 1406548 - RNA, 16 nt, Human
aucacccaacgcucca

SEQ ID NO: 1406549 - RNA, 16 nt, Human
aucaccgacugaaaau

SEQ ID NO: 1406550 - RNA, 17 nt, Human
aucaaaaucucuccacu

SEQ ID NO: 1406551 - RNA, 16 nt, Human
aucaaaaucucuccac

SEQ ID NO: 1406552 - RNA, 15 nt, Human
aucaaaaucucucca

SEQ ID NO: 1406553 - RNA, 13 nt, Human
aucaaaaucucuc

SEQ ID NO: 1406554 - RNA, 23 nt, Human
aucaaaaucucuccacuuucagc

SEQ ID NO: 1406555 - RNA, 22 nt, Human
aucaaaaugcuuuuuauuucug

SEQ ID NO: 1406556 - RNA, 12 nt, Human
aucaaaaugcuu

SEQ ID NO: 1406557 - RNA, 16 nt, Human
aucaaacauuuucugg

SEQ ID NO: 1406558 - RNA, 15 nt, Human
aucaaacauuuucug

SEQ ID NO: 1406559 - RNA, 23 nt, Human
aucaaacaccaacauaaaaauga

SEQ ID NO: 1406560 - RNA, 13 nt, Human
aucaaaaugcuuu

SEQ ID NO: 1406561 - RNA, 22 nt, Human
aucaaacaccaacauaaaaaug

SEQ ID NO: 1406562 - RNA, 18 nt, Human
aucaaagcaucuugcauu

SEQ ID NO: 1406563 - RNA, 12 nt, Human
aucaaagaugaa

SEQ ID NO: 1406564 - RNA, 14 nt, Human
aucaaauauauuca

SEQ ID NO: 1406565 - RNA, 13 nt, Human
aucgccuucccca

SEQ ID NO: 1406566 - RNA, 12 nt, Human
aucgccuucccc

SEQ ID NO: 1406567 - RNA, 17 nt, Human
auccuuucauauaguua

SEQ ID NO: 1406568 - RNA, 20 nt, Human
auccuuucauauaguuagcu

SEQ ID NO: 1406569 - RNA, 14 nt, Human
auccuugucuuauu

SEQ ID NO: 1406570 - RNA, 12 nt, Human
aucgccuuuccc

SEQ ID NO: 1406571 - RNA, 17 nt, Human
aucgcuccaccuugcag

SEQ ID NO: 1406572 - RNA, 21 nt, Human
aucgcuccaccuugcagcucu

SEQ ID NO: 1406573 - RNA, 22 nt, Human
aucgcuccugcagccccagccc

SEQ ID NO: 1406574 - RNA, 15 nt, Human
aucgccuuccccacc

SEQ ID NO: 1406575 - RNA, 14 nt, Human
auccuuagaucugg

SEQ ID NO: 1406576 - RNA, 18 nt, Human
auccuuagaucuggcaug

SEQ ID NO: 1406577 - RNA, 13 nt, Human
auccuuacaaguu

SEQ ID NO: 1406578 - RNA, 15 nt, Human
auccucaauccagcu

SEQ ID NO: 1406579 - RNA, 12 nt, Human
auccucaaucca

SEQ ID NO: 1406580 - RNA, 16 nt, Human
auccucacagugaaca

SEQ ID NO: 1406581 - RNA, 18 nt, Human
auccucaaaugcggggug

SEQ ID NO: 1406582 - RNA, 22 nt, Human
auccuugccaauagugucaucc

SEQ ID NO: 1406583 - RNA, 16 nt, Human
auccuugagucaaaaa

SEQ ID NO: 1406584 - RNA, 22 nt, Human
auccuucaucuggauuccagag

SEQ ID NO: 1406585 - RNA, 17 nt, Human
auccaccugccuuggcu

SEQ ID NO: 1406586 - RNA, 21 nt, Human
auccagagucccugccuggac

SEQ ID NO: 1406587 - RNA, 20 nt, Human
auccagagucccugccugga

SEQ ID NO: 1406588 - RNA, 19 nt, Human
auccagagucccugccugg

SEQ ID NO: 1406589 - RNA, 17 nt, Human
auccccaaggcacuuga

SEQ ID NO: 1406590 - RNA, 12 nt, Human
aucccuacaugu

SEQ ID NO: 1406591 - RNA, 16 nt, Human
aucccguguucuccuu

SEQ ID NO: 1406592 - RNA, 13 nt, Human
aucccguguucuc

SEQ ID NO: 1406593 - RNA, 18 nt, Human
aucccuacauguauugca

SEQ ID NO: 1406594 - RNA, 15 nt, Human
aucccuacauguauu

SEQ ID NO: 1406595 - RNA, 14 nt, Human
aucccuacauguau

SEQ ID NO: 1406596 - RNA, 13 nt, Human
aucccuacaugua

SEQ ID NO: 1406597 - RNA, 19 nt, Human
auccucaguuuuugugaaa

SEQ ID NO: 1406598 - RNA, 23 nt, Human
auggucccacaucccugggccug

SEQ ID NO: 1406599 - RNA, 22 nt, Human
auggucccacaucccugggccu

SEQ ID NO: 1406600 - RNA, 20 nt, Human
auggucccacaucccugggc

SEQ ID NO: 1406601 - RNA, 19 nt, Human
auggucccacaucccuggg

SEQ ID NO: 1406602 - RNA, 17 nt, Human
auggucccacaucccug

SEQ ID NO: 1406603 - RNA, 20 nt, Human
augguccaauuaguuuccuu

SEQ ID NO: 1406604 - RNA, 19 nt, Human
augguccaggagaaggcca

SEQ ID NO: 1406605 - RNA, 18 nt, Human
augguccaggagaaggcc

SEQ ID NO: 1406606 - RNA, 16 nt, Human
augguccaggagaagg

SEQ ID NO: 1406607 - RNA, 13 nt, Human
augguccaggaga

SEQ ID NO: 1406608 - RNA, 18 nt, Human
augguaggcauuuccuau

SEQ ID NO: 1406609 - RNA, 17 nt, Human
augguaggcauuuccua

SEQ ID NO: 1406610 - RNA, 23 nt, Human
augguacuguacagcuggcucua

SEQ ID NO: 1406611 - RNA, 21 nt, Human
augguacugacuuugcuugcu

SEQ ID NO: 1406612 - RNA, 16 nt, Human
augguaccagaugcag

SEQ ID NO: 1406613 - RNA, 14 nt, Human
augguaauuguugc

SEQ ID NO: 1406614 - RNA, 23 nt, Human
augguaacugcuuucuguuccaa

SEQ ID NO: 1406615 - RNA, 20 nt, Human
augguaacugcuuucuguuc

SEQ ID NO: 1406616 - RNA, 15 nt, Human
augguaacugcuuuc

SEQ ID NO: 1406617 - RNA, 14 nt, Human
augguaacugcuuu

SEQ ID NO: 1406618 - RNA, 18 nt, Human
augguaaaaaauuuauaa

SEQ ID NO: 1406619 - RNA, 22 nt, Human
auggguuuuucccuguacagua

SEQ ID NO: 1406620 - RNA, 16 nt, Human
augguaaaaaauuuau

SEQ ID NO: 1406621 - RNA, 13 nt, Human
auggguggaaagg

SEQ ID NO: 1406622 - RNA, 22 nt, Human
auggguuagggaaaacauucca

SEQ ID NO: 1406623 - RNA, 24 nt, Human
auguauugugcaauguguauaaac

SEQ ID NO: 1406624 - RNA, 22 nt, Human
auguauugugcaauguguauaa

SEQ ID NO: 1406625 - RNA, 20 nt, Human
auguauugugcaauguguau

SEQ ID NO: 1406626 - RNA, 19 nt, Human
auguauugugcaaugugua

SEQ ID NO: 1406627 - RNA, 18 nt, Human
auguauugugcaaugugu

SEQ ID NO: 1406628 - RNA, 17 nt, Human
auguauugugcaaugug

SEQ ID NO: 1406629 - RNA, 15 nt, Human
auguauugugcaaug

SEQ ID NO: 1406630 - RNA, 20 nt, Human
auguacaaaaaaaaaacccu

SEQ ID NO: 1406631 - RNA, 23 nt, Human
auguaauuuuguguaagaaauac

SEQ ID NO: 1406632 - RNA, 22 nt, Human
auguaauuuuguguaagaaaua

SEQ ID NO: 1406633 - RNA, 17 nt, Human
auguaauuuuguguaag

SEQ ID NO: 1406634 - RNA, 16 nt, Human
auguaauuuuguguaa

SEQ ID NO: 1406635 - RNA, 15 nt, Human
auguaauuuugugua

SEQ ID NO: 1406636 - RNA, 17 nt, Human
auguauuuauaaauaua

SEQ ID NO: 1406637 - RNA, 21 nt, Human
augucaaucagccuaguugau

SEQ ID NO: 1406638 - RNA, 12 nt, Human
auguaauuuugu

SEQ ID NO: 1406639 - RNA, 21 nt, Human
auguaauuucaggaggaauac

SEQ ID NO: 1406640 - RNA, 23 nt, Human
auguaauuauuuauguauggugc

SEQ ID NO: 1406641 - RNA, 17 nt, Human
auguaauuauuuaugua

SEQ ID NO: 1406642 - RNA, 15 nt, Human
auguaauuauuuaug

SEQ ID NO: 1406643 - RNA, 14 nt, Human
auguaacuuuugua

SEQ ID NO: 1406644 - RNA, 18 nt, Human
auguaacugccuagaaac

SEQ ID NO: 1406645 - RNA, 19 nt, Human
auguaacugccuagaaaca

SEQ ID NO: 1406646 - RNA, 17 nt, Human
auguaacugccuagaaa

SEQ ID NO: 1406647 - RNA, 15 nt, Human
auguaacugccuaga

SEQ ID NO: 1406648 - RNA, 19 nt, Human
auguaaauuuguacuauuu

SEQ ID NO: 1406649 - RNA, 21 nt, Human
auguaaauuuguacuauuuaa

SEQ ID NO: 1406650 - RNA, 17 nt, Human
auguaaauuuguacuau

SEQ ID NO: 1406651 - RNA, 15 nt, Human
auguaaauuuguacu

SEQ ID NO: 1406652 - RNA, 14 nt, Human
auguaaauuuguac

SEQ ID NO: 1406653 - RNA, 19 nt, Human
augucaauuucuguguugc

SEQ ID NO: 1406654 - RNA, 16 nt, Human
augucaauuucugugu

SEQ ID NO: 1406655 - RNA, 14 nt, Human
augugaaacauguu

SEQ ID NO: 1406656 - RNA, 21 nt, Human
augugaaaaugguccaggaga

SEQ ID NO: 1406657 - RNA, 15 nt, Human
augugaaacauguuu

SEQ ID NO: 1406658 - RNA, 23 nt, Human
augugaaauuuacaucauuucuu

SEQ ID NO: 1406659 - RNA, 22 nt, Human
augugaaaaugguccaggagaa

SEQ ID NO: 1406660 - RNA, 20 nt, Human
augugaaauuuacaucauuu

SEQ ID NO: 1406661 - RNA, 17 nt, Human
augugaaaucauucauu

SEQ ID NO: 1406662 - RNA, 18 nt, Human
augugaaaucauucauuu

SEQ ID NO: 1406663 - RNA, 15 nt, Human
auguuucuucuaggu

SEQ ID NO: 1406664 - RNA, 12 nt, Human
auguuucuggau

SEQ ID NO: 1406665 - RNA, 20 nt, Human
auguuuccucuaguucuuug

SEQ ID NO: 1406666 - RNA, 14 nt, Human
auguuuccucuagu

SEQ ID NO: 1406667 - RNA, 21 nt, Human
auguuuccagcauucccaggu

SEQ ID NO: 1406668 - RNA, 20 nt, Human
auguuuccagcauucccagg

SEQ ID NO: 1406669 - RNA, 19 nt, Human
auguuuccagcauucccag

SEQ ID NO: 1406670 - RNA, 18 nt, Human
auguuuccagcauuccca

SEQ ID NO: 1406671 - RNA, 16 nt, Human
auguuuccagcauucc

SEQ ID NO: 1406672 - RNA, 15 nt, Human
auguuuccagcauuc

SEQ ID NO: 1406673 - RNA, 13 nt, Human
auguuuccagcau

SEQ ID NO: 1406674 - RNA, 17 nt, Human
auguucuguuugcugug

SEQ ID NO: 1406675 - RNA, 16 nt, Human
auguucuguuugcugu

SEQ ID NO: 1406676 - RNA, 13 nt, Human
auguucuguuugc

SEQ ID NO: 1406677 - RNA, 14 nt, Human
auguucuuaauucu

SEQ ID NO: 1406678 - RNA, 23 nt, Human
auguucugucccuugccccccug

SEQ ID NO: 1406679 - RNA, 20 nt, Human
auguucugucccuugccccc

SEQ ID NO: 1406680 - RNA, 14 nt, Human
auguucugucccuu

SEQ ID NO: 1406681 - RNA, 13 nt, Human
auguucugucccu

SEQ ID NO: 1406682 - RNA, 14 nt, Human
auguguauaaacaa

SEQ ID NO: 1406683 - RNA, 13 nt, Human
auguguauaaaca

SEQ ID NO: 1406684 - RNA, 12 nt, Human
auguguauaaac

SEQ ID NO: 1406685 - RNA, 23 nt, Human
auguguauaaaaauaaaaaagau

SEQ ID NO: 1406686 - RNA, 13 nt, Human
auguguauaaaaa

SEQ ID NO: 1406687 - RNA, 19 nt, Human
auguguaguucauguaaau

SEQ ID NO: 1406688 - RNA, 20 nt, Human
auguguaguucauguaaaua

SEQ ID NO: 1406689 - RNA, 18 nt, Human
auguguaguucauguaaa

SEQ ID NO: 1406690 - RNA, 16 nt, Human
auguguaguucaugua

SEQ ID NO: 1406691 - RNA, 15 nt, Human
auguguauaaacaag

SEQ ID NO: 1406692 - RNA, 15 nt, Human
auguguaugcacagu

SEQ ID NO: 1406693 - RNA, 19 nt, Human
auguguaugcacaguaaaa

SEQ ID NO: 1406694 - RNA, 14 nt, Human
auguuccauuaaac

SEQ ID NO: 1406695 - RNA, 15 nt, Human
auguuccauuaaacg

SEQ ID NO: 1406696 - RNA, 20 nt, Human
auguguaugcacaguaaaaa

SEQ ID NO: 1406697 - RNA, 16 nt, Human
augugguuuuagauuu

SEQ ID NO: 1406698 - RNA, 21 nt, Human
auguguaaacaauuuuauaua

SEQ ID NO: 1406699 - RNA, 19 nt, Human
auguguaagacaaaaagcu

SEQ ID NO: 1406700 - RNA, 17 nt, Human
auguguaagacaaaaag

SEQ ID NO: 1406701 - RNA, 23 nt, Human
augcugccuuauucagggaagga

SEQ ID NO: 1406702 - RNA, 20 nt, Human
augcugacauucaccugccc

SEQ ID NO: 1406703 - RNA, 19 nt, Human
augcugacauucaccugcc

SEQ ID NO: 1406704 - RNA, 23 nt, Human
augcugaauauacagcaggugcu

SEQ ID NO: 1406705 - RNA, 22 nt, Human
augcugacauucaccugcccca

SEQ ID NO: 1406706 - RNA, 22 nt, Human
augcugaggccugggccgcugc

SEQ ID NO: 1406707 - RNA, 18 nt, Human
augcugaggccugggccg

SEQ ID NO: 1406708 - RNA, 17 nt, Human
augcugaggccugggcc

SEQ ID NO: 1406709 - RNA, 15 nt, Human
augcugaggccuggg

SEQ ID NO: 1406710 - RNA, 14 nt, Human
augcugaggccugg

SEQ ID NO: 1406711 - RNA, 21 nt, Human
augcugagauuacagguguga

SEQ ID NO: 1406712 - RNA, 16 nt, Human
augcuuguacauaaug

SEQ ID NO: 1406713 - RNA, 12 nt, Human
auggaggccugu

SEQ ID NO: 1406714 - RNA, 16 nt, Human
auggagggaauaauac

SEQ ID NO: 1406715 - RNA, 15 nt, Human
auggaggccuguccu

SEQ ID NO: 1406716 - RNA, 14 nt, Human
auggaggggcagag

SEQ ID NO: 1406717 - RNA, 15 nt, Human
auggaggggcagagc

SEQ ID NO: 1406718 - RNA, 17 nt, Human
auggagguucuaaggcc

SEQ ID NO: 1406719 - RNA, 16 nt, Human
auggagguucuaaggc

SEQ ID NO: 1406720 - RNA, 15 nt, Human
auggagguucuaagg

SEQ ID NO: 1406721 - RNA, 13 nt, Human
auggagguucuaa

SEQ ID NO: 1406722 - RNA, 12 nt, Human
auggagguucua

SEQ ID NO: 1406723 - RNA, 19 nt, Human
auggaggggcagagccagg

SEQ ID NO: 1406724 - RNA, 16 nt, Human
auggauccuggaggau

SEQ ID NO: 1406725 - RNA, 22 nt, Human
auggauauaguuuuacuuuuaa

SEQ ID NO: 1406726 - RNA, 16 nt, Human
auggaucacaagaugg

SEQ ID NO: 1406727 - RNA, 15 nt, Human
auggaucacaagaug

SEQ ID NO: 1406728 - RNA, 18 nt, Human
auggauaggcacaggaaa

SEQ ID NO: 1406729 - RNA, 15 nt, Human
auggagucuugcucu

SEQ ID NO: 1406730 - RNA, 17 nt, Human
auggauaggcacaggaa

SEQ ID NO: 1406731 - RNA, 17 nt, Human
auggcuuugugauucaa

SEQ ID NO: 1406732 - RNA, 18 nt, Human
auggcuuuugugcauuau

SEQ ID NO: 1406733 - RNA, 16 nt, Human
auggcuuuugugcauu

SEQ ID NO: 1406734 - RNA, 17 nt, Human
auggcuuuugugcauua

SEQ ID NO: 1406735 - RNA, 17 nt, Human
augcauucuucucuguu

SEQ ID NO: 1406736 - RNA, 19 nt, Human
augcauucuucucuguugu

SEQ ID NO: 1406737 - RNA, 14 nt, Human
augcauucuucucu

SEQ ID NO: 1406738 - RNA, 22 nt, Human
augcauuauaggaucauuuguu

SEQ ID NO: 1406739 - RNA, 18 nt, Human
augcauuauaucaaaucu

SEQ ID NO: 1406740 - RNA, 21 nt, Human
augcauuauaggaucauuugu

SEQ ID NO: 1406741 - RNA, 13 nt, Human
augcacacauuuu

SEQ ID NO: 1406742 - RNA, 14 nt, Human
augcacacauuuuu

SEQ ID NO: 1406743 - RNA, 15 nt, Human
augcacacauuuuuu

SEQ ID NO: 1406744 - RNA, 19 nt, Human
augcacagaguuguuacau

SEQ ID NO: 1406745 - RNA, 21 nt, Human
augcacagaguuguuacauuu

SEQ ID NO: 1406746 - RNA, 22 nt, Human
augcacagaguuguuacauuuu

SEQ ID NO: 1406747 - RNA, 23 nt, Human
augcacagaguuguuacauuuuu

SEQ ID NO: 1406748 - RNA, 18 nt, Human
augccuuacucuucuuga

SEQ ID NO: 1406749 - RNA, 16 nt, Human
augccuuacucuucuu

SEQ ID NO: 1406750 - RNA, 19 nt, Human
augccugucuuaauuuucu

SEQ ID NO: 1406751 - RNA, 24 nt, Human
augccuugguuuuuacugcucuga

SEQ ID NO: 1406752 - RNA, 18 nt, Human
augccuuguuucauauuu

SEQ ID NO: 1406753 - RNA, 20 nt, Human
augaugaucaauuauaguuu

SEQ ID NO: 1406754 - RNA, 15 nt, Human
augaugaaugagaau

SEQ ID NO: 1406755 - RNA, 12 nt, Human
augaugaaugag

SEQ ID NO: 1406756 - RNA, 19 nt, Human
augauggcaauuuuguaac

SEQ ID NO: 1406757 - RNA, 19 nt, Human
augauggaugccaauauua

SEQ ID NO: 1406758 - RNA, 15 nt, Human
augauggaugccaau

SEQ ID NO: 1406759 - RNA, 16 nt, Human
augauggguguuuuua

SEQ ID NO: 1406760 - RNA, 16 nt, Human
augcacaagaauggau

SEQ ID NO: 1406761 - RNA, 21 nt, Human
augcacaauguagauaagugu

SEQ ID NO: 1406762 - RNA, 23 nt, Human
augcacaaauucugucucuggau

SEQ ID NO: 1406763 - RNA, 15 nt, Human
augcacaaauucugu

SEQ ID NO: 1406764 - RNA, 22 nt, Human
augcacaaauucugucucugga

SEQ ID NO: 1406765 - RNA, 14 nt, Human
agggcgcaggccgu

SEQ ID NO: 1406766 - RNA, 13 nt, Human
agggcgcaggccg

SEQ ID NO: 1406767 - RNA, 13 nt, Human
agggccugcugga

SEQ ID NO: 1406768 - RNA, 14 nt, Human
aggggccuggagau

SEQ ID NO: 1406769 - RNA, 13 nt, Human
aggggccuggaga

SEQ ID NO: 1406770 - RNA, 13 nt, Human
aggggccugccca

SEQ ID NO: 1406771 - RNA, 22 nt, Human
aggggccugccaccuggacccc

SEQ ID NO: 1406772 - RNA, 21 nt, Human
aggggccugccaccuggaccc

SEQ ID NO: 1406773 - RNA, 20 nt, Human
aggggccugccaccuggacc

SEQ ID NO: 1406774 - RNA, 19 nt, Human
aggggccugccaccuggac

SEQ ID NO: 1406775 - RNA, 17 nt, Human
aggggccugccaccugg

SEQ ID NO: 1406776 - RNA, 15 nt, Human
aggggccugccaccu

SEQ ID NO: 1406777 - RNA, 14 nt, Human
aggggccugagcag

SEQ ID NO: 1406778 - RNA, 13 nt, Human
aggggccugagca

SEQ ID NO: 1406779 - RNA, 12 nt, Human
aggggccugagc

SEQ ID NO: 1406780 - RNA, 19 nt, Human
aggggccccucucagcccu

SEQ ID NO: 1406781 - RNA, 14 nt, Human
aggggccccucuca

SEQ ID NO: 1406782 - RNA, 13 nt, Human
aggggccccucuc

SEQ ID NO: 1406783 - RNA, 15 nt, Human
agggucggugccuuc

SEQ ID NO: 1406784 - RNA, 22 nt, Human
agggucgaaagcucuagaaucu

SEQ ID NO: 1406785 - RNA, 18 nt, Human
agggucgaaagcucuaga

SEQ ID NO: 1406786 - RNA, 16 nt, Human
agggucgaaagcucua

SEQ ID NO: 1406787 - RNA, 15 nt, Human
agggucgaaagcucu

SEQ ID NO: 1406788 - RNA, 14 nt, Human
agggucgaaagcuc

SEQ ID NO: 1406789 - RNA, 22 nt, Human
aggguccuuuugacacugcucu

SEQ ID NO: 1406790 - RNA, 17 nt, Human
aggguccuuuugacacu

SEQ ID NO: 1406791 - RNA, 19 nt, Human
agggucagacgccugagga

SEQ ID NO: 1406792 - RNA, 16 nt, Human
aggguaugaagagugu

SEQ ID NO: 1406793 - RNA, 21 nt, Human
aggguauggacuaucugucug

SEQ ID NO: 1406794 - RNA, 15 nt, Human
aggguaugaagagug

SEQ ID NO: 1406795 - RNA, 14 nt, Human
aggggccugcccag

SEQ ID NO: 1406796 - RNA, 22 nt, Human
aggggccuggagauccuccugc

SEQ ID NO: 1406797 - RNA, 21 nt, Human
aggggccuggagauccuccug

SEQ ID NO: 1406798 - RNA, 18 nt, Human
aggggccuggagauccuc

SEQ ID NO: 1406799 - RNA, 22 nt, Human
agggacugucgcugcuucgugg

SEQ ID NO: 1406800 - RNA, 16 nt, Human
agggacugucgcugcu

SEQ ID NO: 1406801 - RNA, 20 nt, Human
agggacuguaaacacagaca

SEQ ID NO: 1406802 - RNA, 19 nt, Human
agggauuaaccucugcacu

SEQ ID NO: 1406803 - RNA, 21 nt, Human
agggcaaagccaggucccucu

SEQ ID NO: 1406804 - RNA, 14 nt, Human
agggcaaagccagg

SEQ ID NO: 1406805 - RNA, 13 nt, Human
agggcaaagccag

SEQ ID NO: 1406806 - RNA, 11 nt, Human
agggcaaagcc

SEQ ID NO: 1406807 - RNA, 17 nt, Human
agggauuuucagcccuc

SEQ ID NO: 1406808 - RNA, 22 nt, Human
agggauuuucagcccucagaau

SEQ ID NO: 1406809 - RNA, 22 nt, Human
agggaucccucaucugucccuc

SEQ ID NO: 1406810 - RNA, 19 nt, Human
agggaucccucaucugucc

SEQ ID NO: 1406811 - RNA, 16 nt, Human
agggaucccucaucug

SEQ ID NO: 1406812 - RNA, 15 nt, Human
agggaucccucaucu

SEQ ID NO: 1406813 - RNA, 18 nt, Human
agggauuaaccucugcac

SEQ ID NO: 1406814 - RNA, 17 nt, Human
agggauuaaccucugca

SEQ ID NO: 1406815 - RNA, 22 nt, Human
agggauguggguuccacagacg

SEQ ID NO: 1406816 - RNA, 21 nt, Human
agggauguggguuccacagac

SEQ ID NO: 1406817 - RNA, 13 nt, Human
agggauguggguu

SEQ ID NO: 1406818 - RNA, 21 nt, Human
agggccugaugggguggaagg

SEQ ID NO: 1406819 - RNA, 18 nt, Human
agggcaacagaucaguaa

SEQ ID NO: 1406820 - RNA, 20 nt, Human
agggcaaagccaggucccuc

SEQ ID NO: 1406821 - RNA, 18 nt, Human
agggcaaagccagguccc

SEQ ID NO: 1406822 - RNA, 15 nt, Human
agggcaaagccaggu

SEQ ID NO: 1406823 - RNA, 19 nt, Human
agggccugaugggguggaa

SEQ ID NO: 1406824 - RNA, 14 nt, Human
agggccugaugggg

SEQ ID NO: 1406825 - RNA, 16 nt, Human
agggucggugccuuca

SEQ ID NO: 1406826 - RNA, 15 nt, Human
aggguuuuaacuuug

SEQ ID NO: 1406827 - RNA, 16 nt, Human
aggguuuuaacuuugu

SEQ ID NO: 1406828 - RNA, 21 nt, Human
aggguuugugacagggcgggg

SEQ ID NO: 1406829 - RNA, 13 nt, Human
aggucucccugga

SEQ ID NO: 1406830 - RNA, 13 nt, Human
aggucucagcccc

SEQ ID NO: 1406831 - RNA, 14 nt, Human
aggucucagccccu

SEQ ID NO: 1406832 - RNA, 12 nt, Human
aggucucagccc

SEQ ID NO: 1406833 - RNA, 22 nt, Human
aggucgguagguucagccaagg

SEQ ID NO: 1406834 - RNA, 18 nt, Human
agguccugagcacugcca

SEQ ID NO: 1406835 - RNA, 17 nt, Human
agguccugagcacugcc

SEQ ID NO: 1406836 - RNA, 16 nt, Human
agguccugagcacugc

SEQ ID NO: 1406837 - RNA, 15 nt, Human
agguccugagcacug

SEQ ID NO: 1406838 - RNA, 13 nt, Human
agguccugagcac

SEQ ID NO: 1406839 - RNA, 12 nt, Human
agguccugagca

SEQ ID NO: 1406840 - RNA, 23 nt, Human
agguccucugucagucacagcca

SEQ ID NO: 1406841 - RNA, 19 nt, Human
agguccucugucagucaca

SEQ ID NO: 1406842 - RNA, 14 nt, Human
agguccucugucag

SEQ ID NO: 1406843 - RNA, 13 nt, Human
agguccucuguca

SEQ ID NO: 1406844 - RNA, 15 nt, Human
agguccucagagaau

SEQ ID NO: 1406845 - RNA, 21 nt, Human
agguccucaguguccucaggg

SEQ ID NO: 1406846 - RNA, 19 nt, Human
agguacgaugacaguguuc

SEQ ID NO: 1406847 - RNA, 19 nt, Human
agguaacuaacugcauaca

SEQ ID NO: 1406848 - RNA, 18 nt, Human
agguaacuaacugcauac

SEQ ID NO: 1406849 - RNA, 19 nt, Human
agguccgguguucuaagau

SEQ ID NO: 1406850 - RNA, 18 nt, Human
agguccgguguucuaaga

SEQ ID NO: 1406851 - RNA, 12 nt, Human
agguacuauuau

SEQ ID NO: 1406852 - RNA, 22 nt, Human
aggccauggacucuguccugaa

SEQ ID NO: 1406853 - RNA, 21 nt, Human
aggccauggacucuguccuga

SEQ ID NO: 1406854 - RNA, 20 nt, Human
aggccauggacucuguccug

SEQ ID NO: 1406855 - RNA, 19 nt, Human
aggccauggacucuguccu

SEQ ID NO: 1406856 - RNA, 18 nt, Human
aggccauggacucugucc

SEQ ID NO: 1406857 - RNA, 17 nt, Human
aggccauggacucuguc

SEQ ID NO: 1406858 - RNA, 13 nt, Human
aggccauggacuc

SEQ ID NO: 1406859 - RNA, 22 nt, Human
aggccaucugggcuccuccagg

SEQ ID NO: 1406860 - RNA, 21 nt, Human
aggccaucugggcuccuccag

SEQ ID NO: 1406861 - RNA, 16 nt, Human
aggccauaaaacaggu

SEQ ID NO: 1406862 - RNA, 15 nt, Human
aggccagguccagag

SEQ ID NO: 1406863 - RNA, 16 nt, Human
aggccagguccagaga

SEQ ID NO: 1406864 - RNA, 17 nt, Human
aggccagguccagagag

SEQ ID NO: 1406865 - RNA, 22 nt, Human
aggccaggacucugcagccuca

SEQ ID NO: 1406866 - RNA, 11 nt, Human
aggccaggcau

SEQ ID NO: 1406867 - RNA, 23 nt, Human
aggccaggacucugcagccucag

SEQ ID NO: 1406868 - RNA, 21 nt, Human
aggccaggacucugcagccuc

SEQ ID NO: 1406869 - RNA, 20 nt, Human
aggccaggacucugcagccu

SEQ ID NO: 1406870 - RNA, 19 nt, Human
aggccaggacucugcagcc

SEQ ID NO: 1406871 - RNA, 18 nt, Human
aggccaggacucugcagc

SEQ ID NO: 1406872 - RNA, 17 nt, Human
aggccaggacucugcag

SEQ ID NO: 1406873 - RNA, 15 nt, Human
aggccaggacucugc

SEQ ID NO: 1406874 - RNA, 23 nt, Human
aggccagcugugguuuucuuuug

SEQ ID NO: 1406875 - RNA, 21 nt, Human
aggccagcugugguuuucuuu

SEQ ID NO: 1406876 - RNA, 20 nt, Human
aggccagcugugguuuucuu

SEQ ID NO: 1406877 - RNA, 16 nt, Human
aggccagcugugguuu

SEQ ID NO: 1406878 - RNA, 13 nt, Human
aggcccugugccc

SEQ ID NO: 1406879 - RNA, 23 nt, Human
aggcccuggccuccccugccacc

SEQ ID NO: 1406880 - RNA, 22 nt, Human
aggcccuggccuccccugccac

SEQ ID NO: 1406881 - RNA, 21 nt, Human
aggcccuggccuccccugcca

SEQ ID NO: 1406882 - RNA, 15 nt, Human
aggcccuggccuccc

SEQ ID NO: 1406883 - RNA, 14 nt, Human
aggcccuggccucc

SEQ ID NO: 1406884 - RNA, 23 nt, Human
aggcccuggaucagcguggccuu

SEQ ID NO: 1406885 - RNA, 21 nt, Human
aggcccuggaucagcguggcc

SEQ ID NO: 1406886 - RNA, 18 nt, Human
aggcccuggaucagcgug

SEQ ID NO: 1406887 - RNA, 13 nt, Human
aggcccuggauca

SEQ ID NO: 1406888 - RNA, 23 nt, Human
aggccaugggcacuguggguaga

SEQ ID NO: 1406889 - RNA, 21 nt, Human
aggccaugggcacugugggua

SEQ ID NO: 1406890 - RNA, 23 nt, Human
aggcagcagugugaggccagggc

SEQ ID NO: 1406891 - RNA, 22 nt, Human
aggcagcagugugaggccaggg

SEQ ID NO: 1406892 - RNA, 20 nt, Human
aggcagcagugugaggccag

SEQ ID NO: 1406893 - RNA, 19 nt, Human
aggcagcagugugaggcca

SEQ ID NO: 1406894 - RNA, 23 nt, Human
aggcagcaaggcccgagcagcug

SEQ ID NO: 1406895 - RNA, 18 nt, Human
aggcagcaaggcccgagc

SEQ ID NO: 1406896 - RNA, 17 nt, Human
aggcagcaaggcccgag

SEQ ID NO: 1406897 - RNA, 16 nt, Human
aggcagcaaggcccga

SEQ ID NO: 1406898 - RNA, 15 nt, Human
aggcagcaaggcccg

SEQ ID NO: 1406899 - RNA, 17 nt, Human
aggcagaggccugggcu

SEQ ID NO: 1406900 - RNA, 12 nt, Human
aggcauggugga

SEQ ID NO: 1406901 - RNA, 20 nt, Human
aggcaccugguggccaugcu

SEQ ID NO: 1406902 - RNA, 21 nt, Human
aggcaccugguggccaugcuc

SEQ ID NO: 1406903 - RNA, 20 nt, Human
aggagaggcaacauccaaaa

SEQ ID NO: 1406904 - RNA, 21 nt, Human
aggagaggcaacauccaaaau

SEQ ID NO: 1406905 - RNA, 20 nt, Human
aggagagggcgcuccucucu

SEQ ID NO: 1406906 - RNA, 23 nt, Human
aggcacugagauaccagcgagga

SEQ ID NO: 1406907 - RNA, 17 nt, Human
aggcacugaagugcuua

SEQ ID NO: 1406908 - RNA, 22 nt, Human
aggcagacucuuuaugcuugca

SEQ ID NO: 1406909 - RNA, 17 nt, Human
aggcacucuagauucca

SEQ ID NO: 1406910 - RNA, 15 nt, Human
aggcacucuagauuc

SEQ ID NO: 1406911 - RNA, 14 nt, Human
aggcacucuagauu

SEQ ID NO: 1406912 - RNA, 18 nt, Human
aggcagaggccugggcug

SEQ ID NO: 1406913 - RNA, 14 nt, Human
aggcagaggccugg

SEQ ID NO: 1406914 - RNA, 22 nt, Human
aggcagaggcccaggcugccgu

SEQ ID NO: 1406915 - RNA, 21 nt, Human
aggcagaggcccaggcugccg

SEQ ID NO: 1406916 - RNA, 20 nt, Human
aggcagaggcccaggcugcc

SEQ ID NO: 1406917 - RNA, 19 nt, Human
aggcagaggcccaggcugc

SEQ ID NO: 1406918 - RNA, 17 nt, Human
aggcagaggcccaggcu

SEQ ID NO: 1406919 - RNA, 14 nt, Human
aggcagaggcccag

SEQ ID NO: 1406920 - RNA, 13 nt, Human
aggcagagaagaa

SEQ ID NO: 1406921 - RNA, 14 nt, Human
aggcagagaagaaa

SEQ ID NO: 1406922 - RNA, 15 nt, Human
aggcagagaagaaag

SEQ ID NO: 1406923 - RNA, 22 nt, Human
aggcuacagagaagccuucaag

SEQ ID NO: 1406924 - RNA, 20 nt, Human
aggcuacagagaagccuuca

SEQ ID NO: 1406925 - RNA, 19 nt, Human
aggcuacagagaagccuuc

SEQ ID NO: 1406926 - RNA, 18 nt, Human
aggcuacagagaagccuu

SEQ ID NO: 1406927 - RNA, 17 nt, Human
aggcuacagagaagccu

SEQ ID NO: 1406928 - RNA, 16 nt, Human
aggcuacagagaagcc

SEQ ID NO: 1406929 - RNA, 15 nt, Human
aggcuacagagaagc

SEQ ID NO: 1406930 - RNA, 14 nt, Human
aggcuacagagaag

SEQ ID NO: 1406931 - RNA, 13 nt, Human
aggcuacagagaa

SEQ ID NO: 1406932 - RNA, 12 nt, Human
aggcuacagaga

SEQ ID NO: 1406933 - RNA, 22 nt, Human
aggcuaauuuuuuuguauuuua

SEQ ID NO: 1406934 - RNA, 23 nt, Human
aggcuaauuuuuuuguauuuuag

SEQ ID NO: 1406935 - RNA, 12 nt, Human
aggcuaauuuuu

SEQ ID NO: 1406936 - RNA, 14 nt, Human
aggcugaccacagc

SEQ ID NO: 1406937 - RNA, 13 nt, Human
aggcugaccacag

SEQ ID NO: 1406938 - RNA, 15 nt, Human
aggcuaccuuuguau

SEQ ID NO: 1406939 - RNA, 13 nt, Human
aggcuaccuuugu

SEQ ID NO: 1406940 - RNA, 14 nt, Human
aggcuaccuuugua

SEQ ID NO: 1406941 - RNA, 21 nt, Human
aggcugaccacagcacagcca

SEQ ID NO: 1406942 - RNA, 18 nt, Human
aggcugaccacagcacag

SEQ ID NO: 1406943 - RNA, 17 nt, Human
aggcugaccacagcaca

SEQ ID NO: 1406944 - RNA, 16 nt, Human
aggcugaccacagcac

SEQ ID NO: 1406945 - RNA, 17 nt, Human
aggcugaggccuggacu

SEQ ID NO: 1406946 - RNA, 16 nt, Human
aggcugaggccuggac

SEQ ID NO: 1406947 - RNA, 15 nt, Human
aggcugaggccugga

SEQ ID NO: 1406948 - RNA, 14 nt, Human
aggcugaggccugg

SEQ ID NO: 1406949 - RNA, 13 nt, Human
aggcugaggccug

SEQ ID NO: 1406950 - RNA, 17 nt, Human
aggcugaggcuggcaca

SEQ ID NO: 1406951 - RNA, 16 nt, Human
aggcugaggcuggcac

SEQ ID NO: 1406952 - RNA, 15 nt, Human
aggcugaggcuggca

SEQ ID NO: 1406953 - RNA, 14 nt, Human
aggcugaggcuggc

SEQ ID NO: 1406954 - RNA, 22 nt, Human
aggcuggucucaaacuccugac

SEQ ID NO: 1406955 - RNA, 17 nt, Human
aggcugguccuauggcc

SEQ ID NO: 1406956 - RNA, 17 nt, Human
aggcuggucuaaaacuc

SEQ ID NO: 1406957 - RNA, 23 nt, Human
aggcugguccuauggccucaugu

SEQ ID NO: 1406958 - RNA, 13 nt, Human
agggacccagcua

SEQ ID NO: 1406959 - RNA, 18 nt, Human
agggaccacacccuguac

SEQ ID NO: 1406960 - RNA, 20 nt, Human
agggacugagagaugcagaa

SEQ ID NO: 1406961 - RNA, 13 nt, Human
agggacugagaga

SEQ ID NO: 1406962 - RNA, 14 nt, Human
agggaccggcggac

SEQ ID NO: 1406963 - RNA, 14 nt, Human
aggcuaagcugccg

SEQ ID NO: 1406964 - RNA, 21 nt, Human
aggcuaaagcccagagacagc

SEQ ID NO: 1406965 - RNA, 16 nt, Human
aggcggugggccuggu

SEQ ID NO: 1406966 - RNA, 18 nt, Human
aggcggggcuugccuucu

SEQ ID NO: 1406967 - RNA, 16 nt, Human
aggcggggcuugccuu

SEQ ID NO: 1406968 - RNA, 15 nt, Human
aggcggggcuugccu

SEQ ID NO: 1406969 - RNA, 14 nt, Human
aggcggggcuugcc

SEQ ID NO: 1406970 - RNA, 19 nt, Human
aggcggggcuugccuucug

SEQ ID NO: 1406971 - RNA, 19 nt, Human
aggccggcuugccacaccc

SEQ ID NO: 1406972 - RNA, 20 nt, Human
aggccggcuugccacacccc

SEQ ID NO: 1406973 - RNA, 21 nt, Human
aggccggcuugccacaccccc

SEQ ID NO: 1406974 - RNA, 21 nt, Human
agcucagcacugccugcuccc

SEQ ID NO: 1406975 - RNA, 23 nt, Human
agcucagcacugccugcucccau

SEQ ID NO: 1406976 - RNA, 20 nt, Human
agcucagcacugccugcucc

SEQ ID NO: 1406977 - RNA, 17 nt, Human
agcucagcacugccugc

SEQ ID NO: 1406978 - RNA, 15 nt, Human
agcuccccuccccaa

SEQ ID NO: 1406979 - RNA, 18 nt, Human
agcuccccuccccaacug

SEQ ID NO: 1406980 - RNA, 14 nt, Human
agcuccccucccca

SEQ ID NO: 1406981 - RNA, 22 nt, Human
agcuccuguggccccacccugg

SEQ ID NO: 1406982 - RNA, 19 nt, Human
agcuccuguggccccaccc

SEQ ID NO: 1406983 - RNA, 16 nt, Human
agcuccuguggcccca

SEQ ID NO: 1406984 - RNA, 15 nt, Human
agcuccuguggcccc

SEQ ID NO: 1406985 - RNA, 13 nt, Human
agcuccuguggcc

SEQ ID NO: 1406986 - RNA, 12 nt, Human
agcuccuguggc

SEQ ID NO: 1406987 - RNA, 18 nt, Human
agcuccuuaaggcucuuu

SEQ ID NO: 1406988 - RNA, 17 nt, Human
agcuccuuaaggcucuu

SEQ ID NO: 1406989 - RNA, 16 nt, Human
agcuccuuaaggcucu

SEQ ID NO: 1406990 - RNA, 17 nt, Human
agcugaggccacacuca

SEQ ID NO: 1406991 - RNA, 13 nt, Human
agcugaggccaca

SEQ ID NO: 1406992 - RNA, 17 nt, Human
agcugaggcagcagugu

SEQ ID NO: 1406993 - RNA, 16 nt, Human
agcugaggcagcagug

SEQ ID NO: 1406994 - RNA, 15 nt, Human
agcugaggcagcagu

SEQ ID NO: 1406995 - RNA, 21 nt, Human
agcugagcucacaaggcagca

SEQ ID NO: 1406996 - RNA, 20 nt, Human
agcugagcucacaaggcagc

SEQ ID NO: 1406997 - RNA, 22 nt, Human
agcugagcucacaaggcagcaa

SEQ ID NO: 1406998 - RNA, 19 nt, Human
agcugagcucacaaggcag

SEQ ID NO: 1406999 - RNA, 18 nt, Human
agcugagcucacaaggca

SEQ ID NO: 1407000 - RNA, 17 nt, Human
agcugagcucacaaggc

SEQ ID NO: 1407001 - RNA, 17 nt, Human
agcugagcgccaggaug

SEQ ID NO: 1407002 - RNA, 15 nt, Human
agcugagcgccagga

SEQ ID NO: 1407003 - RNA, 14 nt, Human
agcugagcgccagg

SEQ ID NO: 1407004 - RNA, 12 nt, Human
agcugagcgcca

SEQ ID NO: 1407005 - RNA, 18 nt, Human
agcugaauguuuuucuaa

SEQ ID NO: 1407006 - RNA, 17 nt, Human
agcugaauguuuuucua

SEQ ID NO: 1407007 - RNA, 16 nt, Human
agcugaauguuuuucu

SEQ ID NO: 1407008 - RNA, 15 nt, Human
agcugaauguuuuuc

SEQ ID NO: 1407009 - RNA, 23 nt, Human
agcugaagguuguggccuuugcg

SEQ ID NO: 1407010 - RNA, 20 nt, Human
agcugguuuaauguuuuggc

SEQ ID NO: 1407011 - RNA, 21 nt, Human
agcugaggccacacucagcac

SEQ ID NO: 1407012 - RNA, 17 nt, Human
agcgacuccguuggcca

SEQ ID NO: 1407013 - RNA, 16 nt, Human
agcgacuccguuggcc

SEQ ID NO: 1407014 - RNA, 22 nt, Human
agcgaccuuccucauccacccc

SEQ ID NO: 1407015 - RNA, 17 nt, Human
agcgaccgcccccuccu

SEQ ID NO: 1407016 - RNA, 16 nt, Human
agcgaccgcccccucc

SEQ ID NO: 1407017 - RNA, 15 nt, Human
agcgaccgcccccuc

SEQ ID NO: 1407018 - RNA, 14 nt, Human
agcgaccgcccccu

SEQ ID NO: 1407019 - RNA, 23 nt, Human
agccuuuucccucuuuggcuccc

SEQ ID NO: 1407020 - RNA, 18 nt, Human
agccuuuucccucuuugg

SEQ ID NO: 1407021 - RNA, 23 nt, Human
agccuuuguuccccacuggagca

SEQ ID NO: 1407022 - RNA, 24 nt, Human
agccuuuguuccccacuggagcag

SEQ ID NO: 1407023 - RNA, 22 nt, Human
agccuuuguuccccacuggagc

SEQ ID NO: 1407024 - RNA, 21 nt, Human
agccuuuguuccccacuggag

SEQ ID NO: 1407025 - RNA, 20 nt, Human
agccuuuguuccccacugga

SEQ ID NO: 1407026 - RNA, 14 nt, Human
agccuuuguucccc

SEQ ID NO: 1407027 - RNA, 14 nt, Human
agccuggggcuggc

SEQ ID NO: 1407028 - RNA, 22 nt, Human
agcgauucccucucccaggccc

SEQ ID NO: 1407029 - RNA, 21 nt, Human
agcgauucccucucccaggcc

SEQ ID NO: 1407030 - RNA, 20 nt, Human
agcgauucccucucccaggc

SEQ ID NO: 1407031 - RNA, 19 nt, Human
agcgauucccucucccagg

SEQ ID NO: 1407032 - RNA, 21 nt, Human
agcgaguggagucugccaccc

SEQ ID NO: 1407033 - RNA, 22 nt, Human
agcgaguggagucugccaccca

SEQ ID NO: 1407034 - RNA, 19 nt, Human
agcgaguggagucugccac

SEQ ID NO: 1407035 - RNA, 15 nt, Human
agcgagggcgugucu

SEQ ID NO: 1407036 - RNA, 19 nt, Human
agcgaggaggcuccagagg

SEQ ID NO: 1407037 - RNA, 15 nt, Human
agcgaggaggcucca

SEQ ID NO: 1407038 - RNA, 20 nt, Human
agcgaggagaugcuccuugg

SEQ ID NO: 1407039 - RNA, 19 nt, Human
agcgagcgcccagcuccug

SEQ ID NO: 1407040 - RNA, 21 nt, Human
agcgacuccguuggccacucc

SEQ ID NO: 1407041 - RNA, 20 nt, Human
agcgacuccguuggccacuc

SEQ ID NO: 1407042 - RNA, 19 nt, Human
agcgacuccguuggccacu

SEQ ID NO: 1407043 - RNA, 19 nt, Human
agccugggaaagccccugc

SEQ ID NO: 1407044 - RNA, 24 nt, Human
agccugggccuauggagagcccug

SEQ ID NO: 1407045 - RNA, 22 nt, Human
agccugggccuauggagagccc

SEQ ID NO: 1407046 - RNA, 21 nt, Human
agccugggccuauggagagcc

SEQ ID NO: 1407047 - RNA, 20 nt, Human
agccugggccuauggagagc

SEQ ID NO: 1407048 - RNA, 19 nt, Human
agccugggccuauggagag

SEQ ID NO: 1407049 - RNA, 12 nt, Human
agccugggccua

SEQ ID NO: 1407050 - RNA, 17 nt, Human
agccugggaaagccccu

SEQ ID NO: 1407051 - RNA, 13 nt, Human
agccuggggcucu

SEQ ID NO: 1407052 - RNA, 23 nt, Human
agccugggccuauggagagcccu

SEQ ID NO: 1407053 - RNA, 18 nt, Human
agccugggcgcugguccu

SEQ ID NO: 1407054 - RNA, 21 nt, Human
agccuggggcucuaacgccug

SEQ ID NO: 1407055 - RNA, 16 nt, Human
agccuggggcucuaac

SEQ ID NO: 1407056 - RNA, 15 nt, Human
agccuggggcucuaa

SEQ ID NO: 1407057 - RNA, 14 nt, Human
agccuggggcucua

SEQ ID NO: 1407058 - RNA, 23 nt, Human
agccuggggcucuaacgccugag

SEQ ID NO: 1407059 - RNA, 22 nt, Human
agccuggggcucuaacgccuga

SEQ ID NO: 1407060 - RNA, 17 nt, Human
agccuggggcugaggcu

SEQ ID NO: 1407061 - RNA, 17 nt, Human
agccuggcuucaaauug

SEQ ID NO: 1407062 - RNA, 18 nt, Human
agccuggcuucaaauugu

SEQ ID NO: 1407063 - RNA, 15 nt, Human
agcucacaaggcagc

SEQ ID NO: 1407064 - RNA, 16 nt, Human
agcucacaaggcagca

SEQ ID NO: 1407065 - RNA, 13 nt, Human
agcucagcacugc

SEQ ID NO: 1407066 - RNA, 22 nt, Human
agcucagaggcgcacugugacc

SEQ ID NO: 1407067 - RNA, 19 nt, Human
agcucagaggcgcacugug

SEQ ID NO: 1407068 - RNA, 21 nt, Human
agcucagaaaauaucccuccu

SEQ ID NO: 1407069 - RNA, 19 nt, Human
agcucacuccccaaccccc

SEQ ID NO: 1407070 - RNA, 20 nt, Human
agcucacguccugagaaagc

SEQ ID NO: 1407071 - RNA, 21 nt, Human
agcucacguccugagaaagcu

SEQ ID NO: 1407072 - RNA, 19 nt, Human
agcucagaaaauaucccuc

SEQ ID NO: 1407073 - RNA, 18 nt, Human
agcucagaaaauaucccu

SEQ ID NO: 1407074 - RNA, 23 nt, Human
agcucacuucugggcuucaucug

SEQ ID NO: 1407075 - RNA, 13 nt, Human
agcucacuucugg

SEQ ID NO: 1407076 - RNA, 19 nt, Human
agcucacugcaaccuccac

SEQ ID NO: 1407077 - RNA, 12 nt, Human
agcucaaugagc

SEQ ID NO: 1407078 - RNA, 23 nt, Human
agcucaacucucuuauugccuca

SEQ ID NO: 1407079 - RNA, 22 nt, Human
agcucaacucucuuauugccuc

SEQ ID NO: 1407080 - RNA, 14 nt, Human
agcucaacucucuu

SEQ ID NO: 1407081 - RNA, 21 nt, Human
agcucaaagguuuggaaggag

SEQ ID NO: 1407082 - RNA, 23 nt, Human
agcucaaagguuuggaaggagca

SEQ ID NO: 1407083 - RNA, 20 nt, Human
agcucaaagguuuggaagga

SEQ ID NO: 1407084 - RNA, 14 nt, Human
agcucaaagguuug

SEQ ID NO: 1407085 - RNA, 14 nt, Human
agcucacaaggcag

SEQ ID NO: 1407086 - RNA, 23 nt, Human
agcucaaugagcauguuuagacu

SEQ ID NO: 1407087 - RNA, 14 nt, Human
agcucaauggacug

SEQ ID NO: 1407088 - RNA, 17 nt, Human
agcucaaugagcauguu

SEQ ID NO: 1407089 - RNA, 15 nt, Human
agcucaaugagcaug

SEQ ID NO: 1407090 - RNA, 14 nt, Human
agcucaaugagcau

SEQ ID NO: 1407091 - RNA, 13 nt, Human
agcucaaugagca

SEQ ID NO: 1407092 - RNA, 21 nt, Human
agcuaauucuacucacagugc

SEQ ID NO: 1407093 - RNA, 14 nt, Human
agcuaauuugcauu

SEQ ID NO: 1407094 - RNA, 13 nt, Human
agcuaauuugcau

SEQ ID NO: 1407095 - RNA, 17 nt, Human
agcuauuuuucuaacua

SEQ ID NO: 1407096 - RNA, 20 nt, Human
agcuauuuuucuaacuacaa

SEQ ID NO: 1407097 - RNA, 15 nt, Human
agcuauuuuucuaac

SEQ ID NO: 1407098 - RNA, 22 nt, Human
agcuaauuugcauuaaauucac

SEQ ID NO: 1407099 - RNA, 20 nt, Human
agcuaauuugcauuaaauuc

SEQ ID NO: 1407100 - RNA, 12 nt, Human
agcuacaaaugc

SEQ ID NO: 1407101 - RNA, 18 nt, Human
agcuaauaacaugugaaa

SEQ ID NO: 1407102 - RNA, 23 nt, Human
agcuaauaaaaagcuuuugucua

SEQ ID NO: 1407103 - RNA, 21 nt, Human
agcuaauaaaaagcuuuuguc

SEQ ID NO: 1407104 - RNA, 19 nt, Human
agcuaauaaaaagcuuuug

SEQ ID NO: 1407105 - RNA, 18 nt, Human
agcuaauaaaaagcuuuu

SEQ ID NO: 1407106 - RNA, 16 nt, Human
agcuaauaaaaagcuu

SEQ ID NO: 1407107 - RNA, 16 nt, Human
agcuaauaacugaucu

SEQ ID NO: 1407108 - RNA, 18 nt, Human
agcguucuuguaauuuua

SEQ ID NO: 1407109 - RNA, 12 nt, Human
agcguucuugua

SEQ ID NO: 1407110 - RNA, 11 nt, Human
agcguucuugu

SEQ ID NO: 1407111 - RNA, 11 nt, Human
agcguuuuuua

SEQ ID NO: 1407112 - RNA, 14 nt, Human
agcguuuuuuaaau

SEQ ID NO: 1407113 - RNA, 17 nt, Human
agcguuuuuuaaaugua

SEQ ID NO: 1407114 - RNA, 17 nt, Human
agcuaaacggauuccaa

SEQ ID NO: 1407115 - RNA, 19 nt, Human
agcuaaaauaaagaaauag

SEQ ID NO: 1407116 - RNA, 12 nt, Human
agcuaaaauaaa

SEQ ID NO: 1407117 - RNA, 18 nt, Human
agcguuuuuuaaauguau

SEQ ID NO: 1407118 - RNA, 19 nt, Human
agcguuuuuuaaauguaua

SEQ ID NO: 1407119 - RNA, 20 nt, Human
agcguuuuuuaaauguauac

SEQ ID NO: 1407120 - RNA, 23 nt, Human
agcguuuuuuaaauguauacuau

SEQ ID NO: 1407121 - RNA, 20 nt, Human
aggaauauuuuccaaagagu

SEQ ID NO: 1407122 - RNA, 16 nt, Human
aggaauauuuuccaaa

SEQ ID NO: 1407123 - RNA, 15 nt, Human
aggaauauuuuccaa

SEQ ID NO: 1407124 - RNA, 18 nt, Human
aggaauagcaugucacua

SEQ ID NO: 1407125 - RNA, 24 nt, Human
aggaccagcucaggacagaugcca

SEQ ID NO: 1407126 - RNA, 14 nt, Human
aggagagaguugaa

SEQ ID NO: 1407127 - RNA, 14 nt, Human
aggagagacacugg

SEQ ID NO: 1407128 - RNA, 20 nt, Human
aggagacuguuuggaaauug

SEQ ID NO: 1407129 - RNA, 17 nt, Human
aggaccuggcugccaua

SEQ ID NO: 1407130 - RNA, 16 nt, Human
aggaccuggcugccau

SEQ ID NO: 1407131 - RNA, 13 nt, Human
aggaccuggcugc

SEQ ID NO: 1407132 - RNA, 19 nt, Human
aggaccugagccugccgag

SEQ ID NO: 1407133 - RNA, 21 nt, Human
aggaccugagccugccgagca

SEQ ID NO: 1407134 - RNA, 17 nt, Human
aggaccagucccagagc

SEQ ID NO: 1407135 - RNA, 20 nt, Human
aggaccagucaaccugggca

SEQ ID NO: 1407136 - RNA, 19 nt, Human
aggaccagucaaccugggc

SEQ ID NO: 1407137 - RNA, 18 nt, Human
aggaccugagccugccga

SEQ ID NO: 1407138 - RNA, 17 nt, Human
aggaccugagccugccg

SEQ ID NO: 1407139 - RNA, 16 nt, Human
aggaccugagccugcc

SEQ ID NO: 1407140 - RNA, 15 nt, Human
aggaccugagccugc

SEQ ID NO: 1407141 - RNA, 14 nt, Human
aggaccugagccug

SEQ ID NO: 1407142 - RNA, 13 nt, Human
aggaccugagccu

SEQ ID NO: 1407143 - RNA, 12 nt, Human
aggaccugagcc

SEQ ID NO: 1407144 - RNA, 16 nt, Human
aggaccugagaccuga

SEQ ID NO: 1407145 - RNA, 20 nt, Human
aggaccugaaauuccaaagu

SEQ ID NO: 1407146 - RNA, 18 nt, Human
aggaccugaaauuccaaa

SEQ ID NO: 1407147 - RNA, 17 nt, Human
aggaccugaaauuccaa

SEQ ID NO: 1407148 - RNA, 19 nt, Human
aggacccugaaggggccau

SEQ ID NO: 1407149 - RNA, 15 nt, Human
aggacccugaagggg

SEQ ID NO: 1407150 - RNA, 16 nt, Human
aggaccagucccagag

SEQ ID NO: 1407151 - RNA, 22 nt, Human
agcuguaaacuuccaauuucua

SEQ ID NO: 1407152 - RNA, 13 nt, Human
agcuucugagacg

SEQ ID NO: 1407153 - RNA, 12 nt, Human
agcuucugagac

SEQ ID NO: 1407154 - RNA, 17 nt, Human
agcuucugcccccugca

SEQ ID NO: 1407155 - RNA, 19 nt, Human
agcuucugcccccugcaga

SEQ ID NO: 1407156 - RNA, 15 nt, Human
agcuucugcccccug

SEQ ID NO: 1407157 - RNA, 19 nt, Human
agcuucugagacgucauga

SEQ ID NO: 1407158 - RNA, 16 nt, Human
agcuuuuaaaagauuu

SEQ ID NO: 1407159 - RNA, 19 nt, Human
agcuucauggcagaaggca

SEQ ID NO: 1407160 - RNA, 18 nt, Human
agcuucacaguacccaaa

SEQ ID NO: 1407161 - RNA, 18 nt, Human
agcuucacuguaaaauaa

SEQ ID NO: 1407162 - RNA, 20 nt, Human
agcuuauuuccucauuuuua

SEQ ID NO: 1407163 - RNA, 20 nt, Human
aggaagucucaucuggggag

SEQ ID NO: 1407164 - RNA, 19 nt, Human
aggaagucucaucugggga

SEQ ID NO: 1407165 - RNA, 16 nt, Human
aggaagucucaucugg

SEQ ID NO: 1407166 - RNA, 18 nt, Human
aggaagucaaagcaagga

SEQ ID NO: 1407167 - RNA, 15 nt, Human
aggaaguaggaagua

SEQ ID NO: 1407168 - RNA, 14 nt, Human
aggaaguaggaagu

SEQ ID NO: 1407169 - RNA, 20 nt, Human
aggaagggguuggauugcaa

SEQ ID NO: 1407170 - RNA, 20 nt, Human
aggaaggggccagaggcucg

SEQ ID NO: 1407171 - RNA, 18 nt, Human
aggaaggggccagaggcu

SEQ ID NO: 1407172 - RNA, 16 nt, Human
aggaaggggccagagg

SEQ ID NO: 1407173 - RNA, 21 nt, Human
aggaaggcuuguugugcuuuu

SEQ ID NO: 1407174 - RNA, 22 nt, Human
aggaaggcuuguugugcuuuua

SEQ ID NO: 1407175 - RNA, 19 nt, Human
aggaaggcuuguugugcuu

SEQ ID NO: 1407176 - RNA, 23 nt, Human
aggaacuuaaauaaugugaaacu

SEQ ID NO: 1407177 - RNA, 17 nt, Human
aggaauacugaacaucu

SEQ ID NO: 1407178 - RNA, 18 nt, Human
aggaaguugacuuauagu

SEQ ID NO: 1407179 - RNA, 22 nt, Human
aggaaguugacuuauaguacau

SEQ ID NO: 1407180 - RNA, 23 nt, Human
aggaaguugacuuauaguacaug

SEQ ID NO: 1407181 - RNA, 19 nt, Human
aggaacccuuacaguagga

SEQ ID NO: 1407182 - RNA, 16 nt, Human
aggaaccgaggcaggg

SEQ ID NO: 1407183 - RNA, 21 nt, Human
aggaacuuaaauaaugugaaa

SEQ ID NO: 1407184 - RNA, 13 nt, Human
aggaaccaacaau

SEQ ID NO: 1407185 - RNA, 21 nt, Human
aggaaccaacaaucuuccugu

SEQ ID NO: 1407186 - RNA, 22 nt, Human
aggaaauucuuucccagucugu

SEQ ID NO: 1407187 - RNA, 15 nt, Human
agcuuuuaugugaaa

SEQ ID NO: 1407188 - RNA, 21 nt, Human
agcuuuuaugugaaacauguu

SEQ ID NO: 1407189 - RNA, 23 nt, Human
aggaaauguuuuuaauaaaagaa

SEQ ID NO: 1407190 - RNA, 20 nt, Human
agccaaggagucacugagac

SEQ ID NO: 1407191 - RNA, 16 nt, Human
agccaagcucugcagu

SEQ ID NO: 1407192 - RNA, 21 nt, Human
agccaaggagucacugagacc

SEQ ID NO: 1407193 - RNA, 19 nt, Human
agccaaggagucacugaga

SEQ ID NO: 1407194 - RNA, 15 nt, Human
agccaagcucugcag

SEQ ID NO: 1407195 - RNA, 11 nt, Human
agccaaagagu

SEQ ID NO: 1407196 - RNA, 21 nt, Human
agccaaaccucaccaacuccu

SEQ ID NO: 1407197 - RNA, 22 nt, Human
agcccaccauuuggcaucccug

SEQ ID NO: 1407198 - RNA, 21 nt, Human
agcccaccauuuggcaucccu

SEQ ID NO: 1407199 - RNA, 16 nt, Human
agcccaaugaaaugaa

SEQ ID NO: 1407200 - RNA, 21 nt, Human
agcccacuccaucugguagaa

SEQ ID NO: 1407201 - RNA, 16 nt, Human
agcccacuccaucugg

SEQ ID NO: 1407202 - RNA, 18 nt, Human
agcccacgcucacccccu

SEQ ID NO: 1407203 - RNA, 20 nt, Human
agcccacgacacugcagccc

SEQ ID NO: 1407204 - RNA, 19 nt, Human
agcccacgacacugcagcc

SEQ ID NO: 1407205 - RNA, 21 nt, Human
agcaggaaaugaaaaugucuu

SEQ ID NO: 1407206 - RNA, 15 nt, Human
agcaggaaaugaaaa

SEQ ID NO: 1407207 - RNA, 21 nt, Human
agcagcuuuagaaucccagcc

SEQ ID NO: 1407208 - RNA, 23 nt, Human
agcaggaaaugaaaaugucuugu

SEQ ID NO: 1407209 - RNA, 23 nt, Human
agccccacaccagggccagccuc

SEQ ID NO: 1407210 - RNA, 22 nt, Human
agccccacaccagggccagccu

SEQ ID NO: 1407211 - RNA, 16 nt, Human
agcagcuuccagauug

SEQ ID NO: 1407212 - RNA, 14 nt, Human
agcagcuuccagau

SEQ ID NO: 1407213 - RNA, 12 nt, Human
agcagcuuccag

SEQ ID NO: 1407214 - RNA, 19 nt, Human
agcagccugagcaacucuu

SEQ ID NO: 1407215 - RNA, 13 nt, Human
agcagccugagca

SEQ ID NO: 1407216 - RNA, 23 nt, Human
agcagccucgccccuggcagaga

SEQ ID NO: 1407217 - RNA, 21 nt, Human
agcagccucuccccaggucca

SEQ ID NO: 1407218 - RNA, 20 nt, Human
agcagccucuccccaggucc

SEQ ID NO: 1407219 - RNA, 18 nt, Human
agcagccucuccccaggu

SEQ ID NO: 1407220 - RNA, 15 nt, Human
agcagccucucccca

SEQ ID NO: 1407221 - RNA, 22 nt, Human
agcagccucgccccuggcagag

SEQ ID NO: 1407222 - RNA, 21 nt, Human
agcagccucgccccuggcaga

SEQ ID NO: 1407223 - RNA, 20 nt, Human
agcagccucgccccuggcag

SEQ ID NO: 1407224 - RNA, 17 nt, Human
agcagccucgccccugg

SEQ ID NO: 1407225 - RNA, 15 nt, Human
agcacuucuuuuucu

SEQ ID NO: 1407226 - RNA, 22 nt, Human
agcacuugcaaccgucuguuau

SEQ ID NO: 1407227 - RNA, 15 nt, Human
agcacuuauuuaaug

SEQ ID NO: 1407228 - RNA, 21 nt, Human
agcacggcucuguccccagcc

SEQ ID NO: 1407229 - RNA, 20 nt, Human
agcacggcucuguccccagc

SEQ ID NO: 1407230 - RNA, 15 nt, Human
agcacggcucugucc

SEQ ID NO: 1407231 - RNA, 14 nt, Human
agcacacagggcag

SEQ ID NO: 1407232 - RNA, 17 nt, Human
agcacgauuucuguuua

SEQ ID NO: 1407233 - RNA, 19 nt, Human
agcacgauuucuguuuaga

SEQ ID NO: 1407234 - RNA, 21 nt, Human
agcacgauuucuguuuagaua

SEQ ID NO: 1407235 - RNA, 15 nt, Human
agcaauccucccacu

SEQ ID NO: 1407236 - RNA, 15 nt, Human
agcaaugccugccca

SEQ ID NO: 1407237 - RNA, 18 nt, Human
agcacaauaaauggcugu

SEQ ID NO: 1407238 - RNA, 17 nt, Human
agcacaauaaauggcug

SEQ ID NO: 1407239 - RNA, 21 nt, Human
agcacaaguuauuuaaaucug

SEQ ID NO: 1407240 - RNA, 13 nt, Human
agcacaaauuagu

SEQ ID NO: 1407241 - RNA, 19 nt, Human
agcacaaguuauuuaaauc

SEQ ID NO: 1407242 - RNA, 18 nt, Human
agcacaaguuauuuaaau

SEQ ID NO: 1407243 - RNA, 17 nt, Human
agcacaaguuauuuaaa

SEQ ID NO: 1407244 - RNA, 19 nt, Human
agcacaaauuaguuauaua

SEQ ID NO: 1407245 - RNA, 19 nt, Human
agcacaaagacccuggcuu

SEQ ID NO: 1407246 - RNA, 18 nt, Human
agcacaaagacccuggcu

SEQ ID NO: 1407247 - RNA, 21 nt, Human
agcaauuacaacggagucaaa

SEQ ID NO: 1407248 - RNA, 21 nt, Human
agcaaaugucaugcugccuua

SEQ ID NO: 1407249 - RNA, 20 nt, Human
agcaaaugucaugcugccuu

SEQ ID NO: 1407250 - RNA, 19 nt, Human
agcaaaugucaugcugccu

SEQ ID NO: 1407251 - RNA, 20 nt, Human
agcaaauggccucaugucaa

SEQ ID NO: 1407252 - RNA, 15 nt, Human
agcaaauggccucau

SEQ ID NO: 1407253 - RNA, 22 nt, Human
agcaaaugcaaaaacucuuuga

SEQ ID NO: 1407254 - RNA, 14 nt, Human
agcaaaugcaaaaa

SEQ ID NO: 1407255 - RNA, 13 nt, Human
agcaaaugcaaaa

SEQ ID NO: 1407256 - RNA, 22 nt, Human
agcaaaucgaaugaaauuaacu

SEQ ID NO: 1407257 - RNA, 20 nt, Human
agcaaaucgaaugaaauuaa

SEQ ID NO: 1407258 - RNA, 22 nt, Human
agcaaagccuguucauggcaga

SEQ ID NO: 1407259 - RNA, 21 nt, Human
agcaaagccuguucauggcag

SEQ ID NO: 1407260 - RNA, 12 nt, Human
agcaaagccugu

SEQ ID NO: 1407261 - RNA, 23 nt, Human
agauugaccuggauggggcaggc

SEQ ID NO: 1407262 - RNA, 20 nt, Human
agauugaaccugaauauugc

SEQ ID NO: 1407263 - RNA, 22 nt, Human
agcaaagcccccagagcccagg

SEQ ID NO: 1407264 - RNA, 21 nt, Human
agcaaagcccccagagcccag

SEQ ID NO: 1407265 - RNA, 17 nt, Human
agcaaagcccccagagc

SEQ ID NO: 1407266 - RNA, 16 nt, Human
agcaaagcccccagag

SEQ ID NO: 1407267 - RNA, 15 nt, Human
agcaaagcccccaga

SEQ ID NO: 1407268 - RNA, 13 nt, Human
agcaaaccuguaa

SEQ ID NO: 1407269 - RNA, 21 nt, Human
agcaaaagaauggcagaaaag

SEQ ID NO: 1407270 - RNA, 17 nt, Human
agcaaaagaauggcaga

SEQ ID NO: 1407271 - RNA, 14 nt, Human
agcaaaagaagaag

SEQ ID NO: 1407272 - RNA, 13 nt, Human
agauugaccugga

SEQ ID NO: 1407273 - RNA, 21 nt, Human
agcaaaauaauuuuaaacaaa

SEQ ID NO: 1407274 - RNA, 24 nt, Human
agcaaaauuuuuucucuaggaaau

SEQ ID NO: 1407275 - RNA, 21 nt, Human
agagugcuguccgguggagau

SEQ ID NO: 1407276 - RNA, 22 nt, Human
agagugauagucuuuugcuuuu

SEQ ID NO: 1407277 - RNA, 20 nt, Human
agagugauagucuuuugcuu

SEQ ID NO: 1407278 - RNA, 15 nt, Human
agaugaaguuuuaca

SEQ ID NO: 1407279 - RNA, 16 nt, Human
agaugaaggagaggca

SEQ ID NO: 1407280 - RNA, 17 nt, Human
agaucuguccucagccu

SEQ ID NO: 1407281 - RNA, 15 nt, Human
agaucuguccucagc

SEQ ID NO: 1407282 - RNA, 18 nt, Human
agaucuguccucagccuu

SEQ ID NO: 1407283 - RNA, 14 nt, Human
agaucuguccucag

SEQ ID NO: 1407284 - RNA, 13 nt, Human
agaucuggcaugu

SEQ ID NO: 1407285 - RNA, 20 nt, Human
agaucuggaaccucagccug

SEQ ID NO: 1407286 - RNA, 19 nt, Human
agaucuggaaccucagccu

SEQ ID NO: 1407287 - RNA, 17 nt, Human
agaucuggaaccucagc

SEQ ID NO: 1407288 - RNA, 15 nt, Human
agaucuggaaccuca

SEQ ID NO: 1407289 - RNA, 14 nt, Human
agaucuggaaccuc

SEQ ID NO: 1407290 - RNA, 13 nt, Human
agaucuggaaccu

SEQ ID NO: 1407291 - RNA, 14 nt, Human
agaugguggcagua

SEQ ID NO: 1407292 - RNA, 20 nt, Human
agaugauacauccaaagcag

SEQ ID NO: 1407293 - RNA, 16 nt, Human
agaugauacauccaaa

SEQ ID NO: 1407294 - RNA, 18 nt, Human
agaugauaaagagacagu

SEQ ID NO: 1407295 - RNA, 16 nt, Human
agaugauaaagagaca

SEQ ID NO: 1407296 - RNA, 14 nt, Human
agaugauaaagaga

SEQ ID NO: 1407297 - RNA, 19 nt, Human
agaugaaguuuuacauugu

SEQ ID NO: 1407298 - RNA, 14 nt, Human
agaugagugagcau

SEQ ID NO: 1407299 - RNA, 17 nt, Human
agauguaaaagguauua

SEQ ID NO: 1407300 - RNA, 13 nt, Human
agauucugccuuu

SEQ ID NO: 1407301 - RNA, 14 nt, Human
agauucugauuuua

SEQ ID NO: 1407302 - RNA, 23 nt, Human
agauucucugugucuaagauucu

SEQ ID NO: 1407303 - RNA, 22 nt, Human
agauucucugugucuaagauuc

SEQ ID NO: 1407304 - RNA, 20 nt, Human
agauucucugugucuaagau

SEQ ID NO: 1407305 - RNA, 19 nt, Human
agauucucugugucuaaga

SEQ ID NO: 1407306 - RNA, 19 nt, Human
agauucugccuuugccagg

SEQ ID NO: 1407307 - RNA, 17 nt, Human
agauucucugugucuaa

SEQ ID NO: 1407308 - RNA, 16 nt, Human
agauucucugugucua

SEQ ID NO: 1407309 - RNA, 23 nt, Human
agauucucuggcuguaaggcucu

SEQ ID NO: 1407310 - RNA, 20 nt, Human
agauucucauaacuugagac

SEQ ID NO: 1407311 - RNA, 21 nt, Human
agauucucuggcuguaaggcu

SEQ ID NO: 1407312 - RNA, 17 nt, Human
agauucucccuugcucu

SEQ ID NO: 1407313 - RNA, 19 nt, Human
agauucucauaacuugaga

SEQ ID NO: 1407314 - RNA, 13 nt, Human
agauucucaaagg

SEQ ID NO: 1407315 - RNA, 21 nt, Human
agauguagccccucuccugga

SEQ ID NO: 1407316 - RNA, 19 nt, Human
agacaaauagaaaaugguc

SEQ ID NO: 1407317 - RNA, 21 nt, Human
agacaaacuuugcaucucagu

SEQ ID NO: 1407318 - RNA, 18 nt, Human
agacaaagguuuuccucu

SEQ ID NO: 1407319 - RNA, 15 nt, Human
agacaaacuuugcau

SEQ ID NO: 1407320 - RNA, 19 nt, Human
agacaaacaccucccagga

SEQ ID NO: 1407321 - RNA, 20 nt, Human
agacaaugacuuacuguaca

SEQ ID NO: 1407322 - RNA, 21 nt, Human
agacaaugacuuacuguacau

SEQ ID NO: 1407323 - RNA, 22 nt, Human
agacaaugacuuacuguacaug

SEQ ID NO: 1407324 - RNA, 23 nt, Human
agacaaugacuuacuguacauga

SEQ ID NO: 1407325 - RNA, 13 nt, Human
agacgccuggcug

SEQ ID NO: 1407326 - RNA, 15 nt, Human
agacgccugaggaac

SEQ ID NO: 1407327 - RNA, 13 nt, Human
agacgccugagga

SEQ ID NO: 1407328 - RNA, 23 nt, Human
agacgcacuuuggcuuauaauuc

SEQ ID NO: 1407329 - RNA, 14 nt, Human
agacccagcggaca

SEQ ID NO: 1407330 - RNA, 19 nt, Human
agacccagcccucaucccg

SEQ ID NO: 1407331 - RNA, 18 nt, Human
agacccagcccucauccc

SEQ ID NO: 1407332 - RNA, 17 nt, Human
agacccagcccucaucc

SEQ ID NO: 1407333 - RNA, 20 nt, Human
agaccagcagacagagccag

SEQ ID NO: 1407334 - RNA, 21 nt, Human
agaccagcagacagagccagg

SEQ ID NO: 1407335 - RNA, 16 nt, Human
agaccagcagacagag

SEQ ID NO: 1407336 - RNA, 15 nt, Human
agaccagcagacaga

SEQ ID NO: 1407337 - RNA, 18 nt, Human
agacagaggcccucaagu

SEQ ID NO: 1407338 - RNA, 16 nt, Human
agacagaggcccucaa

SEQ ID NO: 1407339 - RNA, 15 nt, Human
agacagaggcccuca

SEQ ID NO: 1407340 - RNA, 14 nt, Human
agaccacugccaua

SEQ ID NO: 1407341 - RNA, 22 nt, Human
agacagccaacuauggccugug

SEQ ID NO: 1407342 - RNA, 20 nt, Human
agaauggaucacaagaugga

SEQ ID NO: 1407343 - RNA, 16 nt, Human
agaauggcagaaaagu

SEQ ID NO: 1407344 - RNA, 19 nt, Human
agaauggaucacaagaugg

SEQ ID NO: 1407345 - RNA, 14 nt, Human
agaaugcuuaauca

SEQ ID NO: 1407346 - RNA, 20 nt, Human
agaaugcuuaaucagauaga

SEQ ID NO: 1407347 - RNA, 20 nt, Human
agaaugcuguacaucuauuu

SEQ ID NO: 1407348 - RNA, 15 nt, Human
agaaugcuguacauc

SEQ ID NO: 1407349 - RNA, 14 nt, Human
agaaugcuguacau

SEQ ID NO: 1407350 - RNA, 13 nt, Human
agaaugcuguaca

SEQ ID NO: 1407351 - RNA, 14 nt, Human
agaaugauuucaug

SEQ ID NO: 1407352 - RNA, 13 nt, Human
agaaugauuucau

SEQ ID NO: 1407353 - RNA, 23 nt, Human
agaauggcuuuggucucuugcuu

SEQ ID NO: 1407354 - RNA, 18 nt, Human
agaauggcuuuggucucu

SEQ ID NO: 1407355 - RNA, 14 nt, Human
agaaugagacaucc

SEQ ID NO: 1407356 - RNA, 17 nt, Human
agaaugauuaugaauua

SEQ ID NO: 1407357 - RNA, 22 nt, Human
agaaugagagacacacugaaga

SEQ ID NO: 1407358 - RNA, 17 nt, Human
agaaugagagacacacu

SEQ ID NO: 1407359 - RNA, 21 nt, Human
agaagugaaugcugggacuca

SEQ ID NO: 1407360 - RNA, 19 nt, Human
agaagugaaugcugggacu

SEQ ID NO: 1407361 - RNA, 17 nt, Human
agaagugaaugcuggga

SEQ ID NO: 1407362 - RNA, 16 nt, Human
agaagugaaugcuggg

SEQ ID NO: 1407363 - RNA, 15 nt, Human
agaagugaagaaugc

SEQ ID NO: 1407364 - RNA, 22 nt, Human
agaagucaucuugcuaccagua

SEQ ID NO: 1407365 - RNA, 16 nt, Human
agaagucaucuugcua

SEQ ID NO: 1407366 - RNA, 15 nt, Human
agaagucaucuugcu

SEQ ID NO: 1407367 - RNA, 22 nt, Human
agaagucacauuccugaacagg

SEQ ID NO: 1407368 - RNA, 13 nt, Human
agaagacaggcug

SEQ ID NO: 1407369 - RNA, 18 nt, Human
agaagacaggcuggaaga

SEQ ID NO: 1407370 - RNA, 15 nt, Human
agaagacaauugaca

SEQ ID NO: 1407371 - RNA, 19 nt, Human
acuuuccuccugaggcuuu

SEQ ID NO: 1407372 - RNA, 23 nt, Human
acuuuccccaccagaugcugaaa

SEQ ID NO: 1407373 - RNA, 21 nt, Human
acuuucccuacccucuagaga

SEQ ID NO: 1407374 - RNA, 21 nt, Human
acuuuccccaccagaugcuga

SEQ ID NO: 1407375 - RNA, 20 nt, Human
acuuuccccaccagaugcug

SEQ ID NO: 1407376 - RNA, 19 nt, Human
acuuuccccaccagaugcu

SEQ ID NO: 1407377 - RNA, 17 nt, Human
acuuuccccaccagaug

SEQ ID NO: 1407378 - RNA, 21 nt, Human
acuuuccauuacaaguauuuu

SEQ ID NO: 1407379 - RNA, 17 nt, Human
acuuuccauuacaagua

SEQ ID NO: 1407380 - RNA, 15 nt, Human
acuuuccauuacaag

SEQ ID NO: 1407381 - RNA, 13 nt, Human
acuuucccuaccc

SEQ ID NO: 1407382 - RNA, 17 nt, Human
agaagaccugagaaugu

SEQ ID NO: 1407383 - RNA, 18 nt, Human
agaagacugcauuauauu

SEQ ID NO: 1407384 - RNA, 20 nt, Human
agaagguugcucuagauuga

SEQ ID NO: 1407385 - RNA, 16 nt, Human
agaagguugcucuaga

SEQ ID NO: 1407386 - RNA, 16 nt, Human
agaaguaccagacuag

SEQ ID NO: 1407387 - RNA, 14 nt, Human
agaaguaccagacu

SEQ ID NO: 1407388 - RNA, 15 nt, Human
agaaguaaaagcaaa

SEQ ID NO: 1407389 - RNA, 22 nt, Human
agaaguaaaagcaaaaaagaaa

SEQ ID NO: 1407390 - RNA, 13 nt, Human
agaaguauacaua

SEQ ID NO: 1407391 - RNA, 19 nt, Human
agaaguauaaagaauugug

SEQ ID NO: 1407392 - RNA, 16 nt, Human
agaaguauaaagaauu

SEQ ID NO: 1407393 - RNA, 15 nt, Human
agaaguauaaagaau

SEQ ID NO: 1407394 - RNA, 17 nt, Human
agaaguagaaaucauag

SEQ ID NO: 1407395 - RNA, 21 nt, Human
agaagucacauuccugaacag

SEQ ID NO: 1407396 - RNA, 20 nt, Human
agaagucacauuccugaaca

SEQ ID NO: 1407397 - RNA, 18 nt, Human
agaagucacauuccugaa

SEQ ID NO: 1407398 - RNA, 17 nt, Human
agaagagaucaggaaga

SEQ ID NO: 1407399 - RNA, 15 nt, Human
agaaggggagaugga

SEQ ID NO: 1407400 - RNA, 18 nt, Human
agagccggguguccccaa

SEQ ID NO: 1407401 - RNA, 23 nt, Human
agagccggggugggguggcugca

SEQ ID NO: 1407402 - RNA, 22 nt, Human
agagccggggugggguggcugc

SEQ ID NO: 1407403 - RNA, 19 nt, Human
agagccaugucuucucccu

SEQ ID NO: 1407404 - RNA, 22 nt, Human
agagccaugucuucucccugga

SEQ ID NO: 1407405 - RNA, 11 nt, Human
agagccugagg

SEQ ID NO: 1407406 - RNA, 20 nt, Human
agagccuccuuucuggcuuu

SEQ ID NO: 1407407 - RNA, 20 nt, Human
agagaggccuuuuggaaugu

SEQ ID NO: 1407408 - RNA, 14 nt, Human
agagaggccuuuug

SEQ ID NO: 1407409 - RNA, 23 nt, Human
agagagagggccugcuggagagc

SEQ ID NO: 1407410 - RNA, 14 nt, Human
agagagagagggcc

SEQ ID NO: 1407411 - RNA, 17 nt, Human
agacuggacagcuugug

SEQ ID NO: 1407412 - RNA, 16 nt, Human
agacuggacagcuugu

SEQ ID NO: 1407413 - RNA, 15 nt, Human
agacuggacagcuug

SEQ ID NO: 1407414 - RNA, 14 nt, Human
agacuggacagcuu

SEQ ID NO: 1407415 - RNA, 13 nt, Human
agacuggacagcu

SEQ ID NO: 1407416 - RNA, 11 nt, Human
agacuggacag

SEQ ID NO: 1407417 - RNA, 23 nt, Human
agacuggaacuugaacugauuca

SEQ ID NO: 1407418 - RNA, 21 nt, Human
agacuggaagcuaauuugcau

SEQ ID NO: 1407419 - RNA, 15 nt, Human
agacuggaacacuag

SEQ ID NO: 1407420 - RNA, 18 nt, Human
agacuggaacuugaacug

SEQ ID NO: 1407421 - RNA, 17 nt, Human
agacuggaacuugaacu

SEQ ID NO: 1407422 - RNA, 13 nt, Human
agacuggaacuug

SEQ ID NO: 1407423 - RNA, 18 nt, Human
agacuggaacacuagaca

SEQ ID NO: 1407424 - RNA, 20 nt, Human
agacuggauaguccgucucu

SEQ ID NO: 1407425 - RNA, 16 nt, Human
agacuggauaguccgu

SEQ ID NO: 1407426 - RNA, 19 nt, Human
agacugcuuccaauuuucu

SEQ ID NO: 1407427 - RNA, 21 nt, Human
agacugcuguggccaggaggu

SEQ ID NO: 1407428 - RNA, 20 nt, Human
agacugcuguggccaggagg

SEQ ID NO: 1407429 - RNA, 19 nt, Human
agacugcuguggccaggag

SEQ ID NO: 1407430 - RNA, 18 nt, Human
agacugcuguggccagga

SEQ ID NO: 1407431 - RNA, 17 nt, Human
agacugcuguggccagg

SEQ ID NO: 1407432 - RNA, 16 nt, Human
agacugcuguggccag

SEQ ID NO: 1407433 - RNA, 22 nt, Human
agacugaguacguugugcauuu

SEQ ID NO: 1407434 - RNA, 23 nt, Human
agacugaguacguugugcauuug

SEQ ID NO: 1407435 - RNA, 22 nt, Human
agacucuugccuguuucccagg

SEQ ID NO: 1407436 - RNA, 18 nt, Human
agacucuugccuguuucc

SEQ ID NO: 1407437 - RNA, 17 nt, Human
agacucuugccuguuuc

SEQ ID NO: 1407438 - RNA, 14 nt, Human
agacugacgccagg

SEQ ID NO: 1407439 - RNA, 14 nt, Human
agacucuuuaugcu

SEQ ID NO: 1407440 - RNA, 20 nt, Human
agacugaguacguugugcau

SEQ ID NO: 1407441 - RNA, 18 nt, Human
agacgccuuucuccucca

SEQ ID NO: 1407442 - RNA, 15 nt, Human
agacgccuggcugcu

SEQ ID NO: 1407443 - RNA, 14 nt, Human
agacgccuggcugc

SEQ ID NO: 1407444 - RNA, 15 nt, Human
agacgcugcugucac

SEQ ID NO: 1407445 - RNA, 20 nt, Human
agaggaaggggccagaggcu

SEQ ID NO: 1407446 - RNA, 18 nt, Human
agaggaaggggccagagg

SEQ ID NO: 1407447 - RNA, 16 nt, Human
agaggaaggggccaga

SEQ ID NO: 1407448 - RNA, 23 nt, Human
agaggaaggggccagaggcucgu

SEQ ID NO: 1407449 - RNA, 20 nt, Human
agagggcucgaggggugggc

SEQ ID NO: 1407450 - RNA, 16 nt, Human
agagggcgcaggccgu

SEQ ID NO: 1407451 - RNA, 14 nt, Human
agagggcgcaggcc

SEQ ID NO: 1407452 - RNA, 10 nt, Human
agagggcugc

SEQ ID NO: 1407453 - RNA, 16 nt, Human
agagggggcugguggg

SEQ ID NO: 1407454 - RNA, 19 nt, Human
agagggggcuggugggugc

SEQ ID NO: 1407455 - RNA, 14 nt, Human
agagggggcuggug

SEQ ID NO: 1407456 - RNA, 19 nt, Human
agagggcuggaggcccagg

SEQ ID NO: 1407457 - RNA, 18 nt, Human
agagggcuggaggcccag

SEQ ID NO: 1407458 - RNA, 17 nt, Human
agagggcuggaggccca

SEQ ID NO: 1407459 - RNA, 12 nt, Human
agagggcuggag

SEQ ID NO: 1407460 - RNA, 11 nt, Human
agagggcugga

SEQ ID NO: 1407461 - RNA, 12 nt, Human
agaggaggcagc

SEQ ID NO: 1407462 - RNA, 16 nt, Human
agaggaggcagcagga

SEQ ID NO: 1407463 - RNA, 18 nt, Human
agaggaauuacgugcucu

SEQ ID NO: 1407464 - RNA, 20 nt, Human
aaaucugacccagugccccc

SEQ ID NO: 1407465 - RNA, 14 nt, Human
aaaucugacccagu

SEQ ID NO: 1407466 - RNA, 23 nt, Human
aaaucucuccacuuucagcuguc

SEQ ID NO: 1407467 - RNA, 21 nt, Human
aaaucucuccacuuucagcug

SEQ ID NO: 1407468 - RNA, 20 nt, Human
aaaucucuccacuuucagcu

SEQ ID NO: 1407469 - RNA, 19 nt, Human
aaaucucuccacuuucagc

SEQ ID NO: 1407470 - RNA, 17 nt, Human
aaaucucuccacuuuca

SEQ ID NO: 1407471 - RNA, 13 nt, Human
aaaucucuccacu

SEQ ID NO: 1407472 - RNA, 20 nt, Human
aaaucucccauuuuggaauu

SEQ ID NO: 1407473 - RNA, 18 nt, Human
aaaucucccauuuuggaa

SEQ ID NO: 1407474 - RNA, 21 nt, Human
aaaucucccauuuuggaauuu

SEQ ID NO: 1407475 - RNA, 16 nt, Human
aaaucucccauuuugg

SEQ ID NO: 1407476 - RNA, 22 nt, Human
aaaucuccaaaauaaaacuuuu

SEQ ID NO: 1407477 - RNA, 18 nt, Human
aaaugcuagguucuaccu

SEQ ID NO: 1407478 - RNA, 16 nt, Human
aaaugcuagguucuac

SEQ ID NO: 1407479 - RNA, 15 nt, Human
aaaugcuagguucua

SEQ ID NO: 1407480 - RNA, 19 nt, Human
aaaucugugccugagaaca

SEQ ID NO: 1407481 - RNA, 11 nt, Human
aaaucugccac

SEQ ID NO: 1407482 - RNA, 18 nt, Human
aaaucugacccagugccc

SEQ ID NO: 1407483 - RNA, 20 nt, Human
aaaucugcuggaguuucaug

SEQ ID NO: 1407484 - RNA, 19 nt, Human
aaaucugccacaaaaacag

SEQ ID NO: 1407485 - RNA, 22 nt, Human
aaaucugcuggaguuucaugua

SEQ ID NO: 1407486 - RNA, 16 nt, Human
aacaaauagucuauca

SEQ ID NO: 1407487 - RNA, 16 nt, Human
aacaaagguugagaug

SEQ ID NO: 1407488 - RNA, 22 nt, Human
aacaaaggccuaauucuaugcc

SEQ ID NO: 1407489 - RNA, 16 nt, Human
aacaaacucguuuuuu

SEQ ID NO: 1407490 - RNA, 20 nt, Human
aacaaacucguuuuuuacaa

SEQ ID NO: 1407491 - RNA, 23 nt, Human
aacaaaugccaaauuaaaaaaga

SEQ ID NO: 1407492 - RNA, 17 nt, Human
aacaaaugccaaauuaa

SEQ ID NO: 1407493 - RNA, 19 nt, Human
aacaaaugccaaauuaaaa

SEQ ID NO: 1407494 - RNA, 16 nt, Human
aacacuaauucauaau

SEQ ID NO: 1407495 - RNA, 15 nt, Human
aacacuaauucauaa

SEQ ID NO: 1407496 - RNA, 14 nt, Human
aacacuaauucaua

SEQ ID NO: 1407497 - RNA, 23 nt, Human
aacacuaauauauuuaaaaauaa

SEQ ID NO: 1407498 - RNA, 22 nt, Human
aacacuaauauauuuaaaaaua

SEQ ID NO: 1407499 - RNA, 20 nt, Human
aacacuaauauauuuaaaaa

SEQ ID NO: 1407500 - RNA, 14 nt, Human
aacacuaauauauu

SEQ ID NO: 1407501 - RNA, 13 nt, Human
aacacuaauauau

SEQ ID NO: 1407502 - RNA, 18 nt, Human
aacacuaacuaugcaugg

SEQ ID NO: 1407503 - RNA, 17 nt, Human
aacacccauuuuuccuu

SEQ ID NO: 1407504 - RNA, 16 nt, Human
aacaccuccucaugua

SEQ ID NO: 1407505 - RNA, 23 nt, Human
aacaccucccaggagacaguuca

SEQ ID NO: 1407506 - RNA, 13 nt, Human
aacaccucccagg

SEQ ID NO: 1407507 - RNA, 21 nt, Human
aacacccauuuuuccuuuugc

SEQ ID NO: 1407508 - RNA, 16 nt, Human
aacacccauuuuuccu

SEQ ID NO: 1407509 - RNA, 16 nt, Human
aacacccuauauuuug

SEQ ID NO: 1407510 - RNA, 17 nt, Human
aacacccucacacuggg

SEQ ID NO: 1407511 - RNA, 21 nt, Human
aacacccucacacugggacuu

SEQ ID NO: 1407512 - RNA, 21 nt, Human
aaauuaacuggguaaugaaac

SEQ ID NO: 1407513 - RNA, 20 nt, Human
aaauuaacuggguaaugaaa

SEQ ID NO: 1407514 - RNA, 16 nt, Human
aaauuaaaaaagauaa

SEQ ID NO: 1407515 - RNA, 20 nt, Human
aaauuaaaaaagauaaacac

SEQ ID NO: 1407516 - RNA, 12 nt, Human
aaauuaacuuuu

SEQ ID NO: 1407517 - RNA, 15 nt, Human
aaauuaaaaaagaua

SEQ ID NO: 1407518 - RNA, 14 nt, Human
aaauuaaaaaagau

SEQ ID NO: 1407519 - RNA, 12 nt, Human
aaauuaaaaaag

SEQ ID NO: 1407520 - RNA, 23 nt, Human
aaauguuuuuggucuuuuauaau

SEQ ID NO: 1407521 - RNA, 22 nt, Human
aaauguuuuuuuuuaaagacuu

SEQ ID NO: 1407522 - RNA, 13 nt, Human
aaauuaacuuuua

SEQ ID NO: 1407523 - RNA, 14 nt, Human
aaauuaacuuuuau

SEQ ID NO: 1407524 - RNA, 19 nt, Human
aaauuaacuuuuauaaacu

SEQ ID NO: 1407525 - RNA, 18 nt, Human
aacaaacauuugcugaau

SEQ ID NO: 1407526 - RNA, 23 nt, Human
aaauugagcuggaccucaccaag

SEQ ID NO: 1407527 - RNA, 18 nt, Human
aaauugaugggauuuggu

SEQ ID NO: 1407528 - RNA, 23 nt, Human
aaauguugaaauaugauguuaaa

SEQ ID NO: 1407529 - RNA, 11 nt, Human
aaauguucuuu

SEQ ID NO: 1407530 - RNA, 15 nt, Human
aaauguucuguuugc

SEQ ID NO: 1407531 - RNA, 21 nt, Human
aaauguucuaaguuucuaaga

SEQ ID NO: 1407532 - RNA, 19 nt, Human
aaauguucuaaguuucuaa

SEQ ID NO: 1407533 - RNA, 17 nt, Human
aaauguucuaaguuucu

SEQ ID NO: 1407534 - RNA, 14 nt, Human
aaauguucuaaguu

SEQ ID NO: 1407535 - RNA, 13 nt, Human
aaauguucuaagu

SEQ ID NO: 1407536 - RNA, 18 nt, Human
aaauguuuuuuuuuaaag

SEQ ID NO: 1407537 - RNA, 21 nt, Human
aaauguuuuuuuuuaaagacu

SEQ ID NO: 1407538 - RNA, 12 nt, Human
aacgccugagcc

SEQ ID NO: 1407539 - RNA, 11 nt, Human
aacgccugagc

SEQ ID NO: 1407540 - RNA, 21 nt, Human
aacgagacuuuccauuacaag

SEQ ID NO: 1407541 - RNA, 16 nt, Human
aacgagacuuuccauu

SEQ ID NO: 1407542 - RNA, 16 nt, Human
aacgaaaaugaaagcu

SEQ ID NO: 1407543 - RNA, 21 nt, Human
aacucaaaugugaguguuuuu

SEQ ID NO: 1407544 - RNA, 23 nt, Human
aacucaaauggggccagauccag

SEQ ID NO: 1407545 - RNA, 22 nt, Human
aacucaaauggggccagaucca

SEQ ID NO: 1407546 - RNA, 21 nt, Human
aacucaaauggggccagaucc

SEQ ID NO: 1407547 - RNA, 18 nt, Human
aacucaaauggggccaga

SEQ ID NO: 1407548 - RNA, 22 nt, Human
aacucaaacugaggaauuucac

SEQ ID NO: 1407549 - RNA, 16 nt, Human
aacucaaaauauuugu

SEQ ID NO: 1407550 - RNA, 13 nt, Human
aacggugcucagg

SEQ ID NO: 1407551 - RNA, 15 nt, Human
aacguauaaaagccu

SEQ ID NO: 1407552 - RNA, 18 nt, Human
aacgccugagcccaggga

SEQ ID NO: 1407553 - RNA, 17 nt, Human
aacgccugagcccaggg

SEQ ID NO: 1407554 - RNA, 13 nt, Human
aacgccugagccc

SEQ ID NO: 1407555 - RNA, 19 nt, Human
aacgccugagcccagggag

SEQ ID NO: 1407556 - RNA, 20 nt, Human
aacgcuccaaagucauaauu

SEQ ID NO: 1407557 - RNA, 16 nt, Human
aacgcuccaaagucau

SEQ ID NO: 1407558 - RNA, 16 nt, Human
aacgcuaucugggaag

SEQ ID NO: 1407559 - RNA, 16 nt, Human
aacugaggaauuuucu

SEQ ID NO: 1407560 - RNA, 18 nt, Human
aacugaggaauuucaccu

SEQ ID NO: 1407561 - RNA, 13 nt, Human
aacugaggaauuu

SEQ ID NO: 1407562 - RNA, 12 nt, Human
aacugaggaauu

SEQ ID NO: 1407563 - RNA, 14 nt, Human
aacugaauaccacu

SEQ ID NO: 1407564 - RNA, 13 nt, Human
aacugaauaccac

SEQ ID NO: 1407565 - RNA, 19 nt, Human
aacugaagggggcggccua

SEQ ID NO: 1407566 - RNA, 21 nt, Human
aacugaauaccacucuguaau

SEQ ID NO: 1407567 - RNA, 18 nt, Human
aacugaauaccacucugu

SEQ ID NO: 1407568 - RNA, 17 nt, Human
aacugaauaccacucug

SEQ ID NO: 1407569 - RNA, 15 nt, Human
aacugaauaccacuc

SEQ ID NO: 1407570 - RNA, 24 nt, Human
aacugaauaccacucuguaauugc

SEQ ID NO: 1407571 - RNA, 12 nt, Human
aacugaaugaga

SEQ ID NO: 1407572 - RNA, 18 nt, Human
aacucauauuuucaugcu

SEQ ID NO: 1407573 - RNA, 16 nt, Human
aacucauauuuucaug

SEQ ID NO: 1407574 - RNA, 15 nt, Human
aacucauauuuucau

SEQ ID NO: 1407575 - RNA, 21 nt, Human
aacugaagcagccucucccca

SEQ ID NO: 1407576 - RNA, 22 nt, Human
aacucaucuagguaaauuacag

SEQ ID NO: 1407577 - RNA, 16 nt, Human
aaccgcuaaaagaaac

SEQ ID NO: 1407578 - RNA, 22 nt, Human
aaccgccagcucuguucuuccu

SEQ ID NO: 1407579 - RNA, 17 nt, Human
aaccgccagcucuguuc

SEQ ID NO: 1407580 - RNA, 15 nt, Human
aaccgccagcucugu

SEQ ID NO: 1407581 - RNA, 14 nt, Human
aaccgccagcucug

SEQ ID NO: 1407582 - RNA, 16 nt, Human
aacaucugaguccugg

SEQ ID NO: 1407583 - RNA, 21 nt, Human
aacaucugagaaaagcuuuga

SEQ ID NO: 1407584 - RNA, 22 nt, Human
aaccagguccaaugagcuuucu

SEQ ID NO: 1407585 - RNA, 21 nt, Human
aaccagguccaaugagcuuuc

SEQ ID NO: 1407586 - RNA, 17 nt, Human
aaccagguccaaugagc

SEQ ID NO: 1407587 - RNA, 16 nt, Human
aaccagguccaaugag

SEQ ID NO: 1407588 - RNA, 22 nt, Human
aaccauagcacaggcuaauuuu

SEQ ID NO: 1407589 - RNA, 22 nt, Human
aaccauacaaaaauuccuuuuc

SEQ ID NO: 1407590 - RNA, 18 nt, Human
aaccauaacaacuucaua

SEQ ID NO: 1407591 - RNA, 19 nt, Human
aaccaguguuguggauuua

SEQ ID NO: 1407592 - RNA, 19 nt, Human
aacacuagacaagccagaa

SEQ ID NO: 1407593 - RNA, 18 nt, Human
aacacuagacaagccaga

SEQ ID NO: 1407594 - RNA, 17 nt, Human
aacacuaauucauaauc

SEQ ID NO: 1407595 - RNA, 15 nt, Human
aacagauuuggaaag

SEQ ID NO: 1407596 - RNA, 14 nt, Human
aacagauuuggaaa

SEQ ID NO: 1407597 - RNA, 13 nt, Human
aacagauuuggaa

SEQ ID NO: 1407598 - RNA, 16 nt, Human
aacagauuguuugcaa

SEQ ID NO: 1407599 - RNA, 15 nt, Human
aacagauuguuugca

SEQ ID NO: 1407600 - RNA, 13 nt, Human
aacagcgcccaaa

SEQ ID NO: 1407601 - RNA, 20 nt, Human
aacagcaaaugcaaaaacuc

SEQ ID NO: 1407602 - RNA, 23 nt, Human
aacagcguuccuagagaagacag

SEQ ID NO: 1407603 - RNA, 19 nt, Human
aacagcguuccuagagaag

SEQ ID NO: 1407604 - RNA, 20 nt, Human
aacaggaaacuccugugacc

SEQ ID NO: 1407605 - RNA, 17 nt, Human
aacaucccuuuuucaau

SEQ ID NO: 1407606 - RNA, 20 nt, Human
aacaggaucaguuaacuauu

SEQ ID NO: 1407607 - RNA, 13 nt, Human
aaaauuaagaaag

SEQ ID NO: 1407608 - RNA, 20 nt, Human
aaaauuaagaaaggauaaag

SEQ ID NO: 1407609 - RNA, 19 nt, Human
aaaauccauacauuugugu

SEQ ID NO: 1407610 - RNA, 20 nt, Human
aaaauuaaaccggaccaucu

SEQ ID NO: 1407611 - RNA, 22 nt, Human
aaaauuaacaugaauauuuagu

SEQ ID NO: 1407612 - RNA, 12 nt, Human
aaaauuaagaaa

SEQ ID NO: 1407613 - RNA, 23 nt, Human
aaaauuagacugugauucagaaa

SEQ ID NO: 1407614 - RNA, 14 nt, Human
aaaauuacuguuua

SEQ ID NO: 1407615 - RNA, 14 nt, Human
aaaauuacaacuaa

SEQ ID NO: 1407616 - RNA, 14 nt, Human
aaaauuauuugcau

SEQ ID NO: 1407617 - RNA, 13 nt, Human
aaaauuauuugca

SEQ ID NO: 1407618 - RNA, 13 nt, Human
aaaauuauuuaaa

SEQ ID NO: 1407619 - RNA, 16 nt, Human
aaaauuauagaaguuu

SEQ ID NO: 1407620 - RNA, 13 nt, Human
aaaauuaucuaua

SEQ ID NO: 1407621 - RNA, 13 nt, Human
aaaaucaaauggu

SEQ ID NO: 1407622 - RNA, 16 nt, Human
aaaauaaaaaagaucc

SEQ ID NO: 1407623 - RNA, 20 nt, Human
aaaauaaaaagaucacuuuc

SEQ ID NO: 1407624 - RNA, 21 nt, Human
aaaauccacuuuaucuugaau

SEQ ID NO: 1407625 - RNA, 14 nt, Human
aaaaucagccaauu

SEQ ID NO: 1407626 - RNA, 17 nt, Human
aaaaucagccaauuaug

SEQ ID NO: 1407627 - RNA, 18 nt, Human
aaaaucagccaauuaugu

SEQ ID NO: 1407628 - RNA, 19 nt, Human
aaaaucagccaauuauguu

SEQ ID NO: 1407629 - RNA, 20 nt, Human
aaaaucagccaauuauguua

SEQ ID NO: 1407630 - RNA, 21 nt, Human
aaaaucagccaauuauguuaa

SEQ ID NO: 1407631 - RNA, 20 nt, Human
aaaaguuuuuuauuaugcau

SEQ ID NO: 1407632 - RNA, 12 nt, Human
aaaaguuuguuu

SEQ ID NO: 1407633 - RNA, 21 nt, Human
aaaauaaaaaagaucccaaau

SEQ ID NO: 1407634 - RNA, 15 nt, Human
aaaauaaaaaacacu

SEQ ID NO: 1407635 - RNA, 14 nt, Human
aaaauuccacucaa

SEQ ID NO: 1407636 - RNA, 13 nt, Human
aaaauuccacuca

SEQ ID NO: 1407637 - RNA, 13 nt, Human
aaaauucauuuuu

SEQ ID NO: 1407638 - RNA, 21 nt, Human
aaaauugaaugcaaaccauag

SEQ ID NO: 1407639 - RNA, 21 nt, Human
aaaauugaaauguaaggcugu

SEQ ID NO: 1407640 - RNA, 18 nt, Human
aaaauugaaauguaaggc

SEQ ID NO: 1407641 - RNA, 17 nt, Human
aaaauugaaauguaagg

SEQ ID NO: 1407642 - RNA, 16 nt, Human
aaaauugaaauguaag

SEQ ID NO: 1407643 - RNA, 14 nt, Human
aaaauugaaaugua

SEQ ID NO: 1407644 - RNA, 23 nt, Human
aaaauucugugccuuguuuuuug

SEQ ID NO: 1407645 - RNA, 14 nt, Human
aaaauucugugccu

SEQ ID NO: 1407646 - RNA, 14 nt, Human
aaaauugaaugcaa

SEQ ID NO: 1407647 - RNA, 12 nt, Human
aaaauugaaugc

SEQ ID NO: 1407648 - RNA, 23 nt, Human
aaacaggcacuuggcagccuugu

SEQ ID NO: 1407649 - RNA, 15 nt, Human
aaacaggcacuuggc

SEQ ID NO: 1407650 - RNA, 17 nt, Human
aaacaggcacugcccug

SEQ ID NO: 1407651 - RNA, 16 nt, Human
aaacaggcacugcccu

SEQ ID NO: 1407652 - RNA, 12 nt, Human
aaacaggaucag

SEQ ID NO: 1407653 - RNA, 21 nt, Human
aaagauacagaacucuuucaa

SEQ ID NO: 1407654 - RNA, 20 nt, Human
aaagaggugaccccagggca

SEQ ID NO: 1407655 - RNA, 15 nt, Human
aaagauacaguuacu

SEQ ID NO: 1407656 - RNA, 18 nt, Human
aaagaggucgcuugggaa

SEQ ID NO: 1407657 - RNA, 23 nt, Human
aaagaggcugccccucucaccaa

SEQ ID NO: 1407658 - RNA, 22 nt, Human
aaagaggcugccccucucacca

SEQ ID NO: 1407659 - RNA, 21 nt, Human
aaagaggugaccccagggcac

SEQ ID NO: 1407660 - RNA, 19 nt, Human
aaagaggugaccccagggc

SEQ ID NO: 1407661 - RNA, 18 nt, Human
aaagaggugaccccaggg

SEQ ID NO: 1407662 - RNA, 17 nt, Human
aaacccaguugccaucu

SEQ ID NO: 1407663 - RNA, 15 nt, Human
aaaccccccagauau

SEQ ID NO: 1407664 - RNA, 22 nt, Human
aaacccauauuguaaaacaggu

SEQ ID NO: 1407665 - RNA, 20 nt, Human
aaaccccaccuuuauuccuu

SEQ ID NO: 1407666 - RNA, 21 nt, Human
aaaccgcuaaaagaaacuuuc

SEQ ID NO: 1407667 - RNA, 23 nt, Human
aaaccgcuaaaagaaacuuucuu

SEQ ID NO: 1407668 - RNA, 18 nt, Human
aaaccgcuaaaagaaacu

SEQ ID NO: 1407669 - RNA, 16 nt, Human
aaaccgcuaaaagaaa

SEQ ID NO: 1407670 - RNA, 15 nt, Human
aaaccgcuaaaagaa

SEQ ID NO: 1407671 - RNA, 14 nt, Human
aaaccgcuaaaaga

SEQ ID NO: 1407672 - RNA, 19 nt, Human
aaaccgccagcucuguucu

SEQ ID NO: 1407673 - RNA, 19 nt, Human
aaacccuugccaugugcua

SEQ ID NO: 1407674 - RNA, 18 nt, Human
aaaccgccagcucuguuc

SEQ ID NO: 1407675 - RNA, 21 nt, Human
aaacugaagcagccucucccc

SEQ ID NO: 1407676 - RNA, 18 nt, Human
aaacugaagcagccucuc

SEQ ID NO: 1407677 - RNA, 13 nt, Human
aaacucuuuuccc

SEQ ID NO: 1407678 - RNA, 21 nt, Human
aaacucuuuggucguuuuuuu

SEQ ID NO: 1407679 - RNA, 20 nt, Human
aaacucuuuggucguuuuuu

SEQ ID NO: 1407680 - RNA, 13 nt, Human
aaacugagugacu

SEQ ID NO: 1407681 - RNA, 22 nt, Human
aaacugaagcagccucucccca

SEQ ID NO: 1407682 - RNA, 22 nt, Human
aaacugauccaguauaagacua

SEQ ID NO: 1407683 - RNA, 13 nt, Human
aaagaaaauuaca

SEQ ID NO: 1407684 - RNA, 18 nt, Human
aaagaaaaugauacagca

SEQ ID NO: 1407685 - RNA, 12 nt, Human
aaagaaaauuuu

SEQ ID NO: 1407686 - RNA, 19 nt, Human
aaagaaaauuuuuguagua

SEQ ID NO: 1407687 - RNA, 20 nt, Human
aaagaggcugccccucucac

SEQ ID NO: 1407688 - RNA, 18 nt, Human
aaagaggcugccccucuc

SEQ ID NO: 1407689 - RNA, 14 nt, Human
aaagaggcugcccc

SEQ ID NO: 1407690 - RNA, 19 nt, Human
aaagaggcugaggcuggca

SEQ ID NO: 1407691 - RNA, 21 nt, Human
aaagaggcugaggccuggacu

SEQ ID NO: 1407692 - RNA, 20 nt, Human
aaagaggcugaggccuggac

SEQ ID NO: 1407693 - RNA, 19 nt, Human
aaagaggcugaggccugga

SEQ ID NO: 1407694 - RNA, 12 nt, Human
aaagaggcugag

SEQ ID NO: 1407695 - RNA, 15 nt, Human
aaagaagacaaacuu

SEQ ID NO: 1407696 - RNA, 12 nt, Human
aaagaaacuuuc

SEQ ID NO: 1407697 - RNA, 13 nt, Human
aaagaaacauuug

SEQ ID NO: 1407698 - RNA, 18 nt, Human
aaagaacgcugauuuaaa

SEQ ID NO: 1407699 - RNA, 15 nt, Human
aaagaacgcugauuu

SEQ ID NO: 1407700 - RNA, 13 nt, Human
aaagaaccacuug

SEQ ID NO: 1407701 - RNA, 23 nt, Human
aaagaaccaacaaccucaacugc

SEQ ID NO: 1407702 - RNA, 20 nt, Human
aaagaacgcugauuuaaaga

SEQ ID NO: 1407703 - RNA, 15 nt, Human
aaagaacggaagaag

SEQ ID NO: 1407704 - RNA, 23 nt, Human
aaagaacguggucagaguagaac

SEQ ID NO: 1407705 - RNA, 19 nt, Human
aaagaacggaagaagagau

SEQ ID NO: 1407706 - RNA, 23 nt, Human
aaagcauuuaaccccccuguaca

SEQ ID NO: 1407707 - RNA, 13 nt, Human
aaagcauuugaau

SEQ ID NO: 1407708 - RNA, 14 nt, Human
aaagcauuugaaug

SEQ ID NO: 1407709 - RNA, 15 nt, Human
aaagcauuugaaugc

SEQ ID NO: 1407710 - RNA, 15 nt, Human
aaagcauuuuguaau

SEQ ID NO: 1407711 - RNA, 14 nt, Human
aaagcauuuuguaa

SEQ ID NO: 1407712 - RNA, 13 nt, Human
aaagcauuuugua

SEQ ID NO: 1407713 - RNA, 23 nt, Human
aaagcauuugaaugcauuuuguu

SEQ ID NO: 1407714 - RNA, 17 nt, Human
aaagcauuugaaugcau

SEQ ID NO: 1407715 - RNA, 19 nt, Human
aaagcauuugaaugcauuu

SEQ ID NO: 1407716 - RNA, 20 nt, Human
aaagcauuugaaugcauuuu

SEQ ID NO: 1407717 - RNA, 22 nt, Human
aaagcauuugaaugcauuuugu

SEQ ID NO: 1407718 - RNA, 15 nt, Human
aaagccaaacauaua

SEQ ID NO: 1407719 - RNA, 21 nt, Human
aaagcauuuuguaauaauaaa

SEQ ID NO: 1407720 - RNA, 20 nt, Human
aaaggcuaugauugucuuug

SEQ ID NO: 1407721 - RNA, 19 nt, Human
aaaggcuagguacacagcu

SEQ ID NO: 1407722 - RNA, 17 nt, Human
aaaggcuaccuuuguau

SEQ ID NO: 1407723 - RNA, 14 nt, Human
aaaggcuaccuuug

SEQ ID NO: 1407724 - RNA, 22 nt, Human
aaagcccccagagcccaggcuc

SEQ ID NO: 1407725 - RNA, 21 nt, Human
aaagcccccagagcccaggcu

SEQ ID NO: 1407726 - RNA, 14 nt, Human
aaagcccccagagc

SEQ ID NO: 1407727 - RNA, 23 nt, Human
aaaggcaguuugcaaaaaauguu

SEQ ID NO: 1407728 - RNA, 16 nt, Human
aaaggcaguuuucuaa

SEQ ID NO: 1407729 - RNA, 14 nt, Human
aaaggcaguuuucu

SEQ ID NO: 1407730 - RNA, 13 nt, Human
aaaggcaguuuuc

SEQ ID NO: 1407731 - RNA, 23 nt, Human
aaaggcaguuaccauuaaaccau

SEQ ID NO: 1407732 - RNA, 15 nt, Human
aaaggcaguuaccau

SEQ ID NO: 1407733 - RNA, 15 nt, Human
aaagcccagagacag

SEQ ID NO: 1407734 - RNA, 22 nt, Human
aaagcccauaugcuaccaccag

SEQ ID NO: 1407735 - RNA, 16 nt, Human
aaagcccauucauucc

SEQ ID NO: 1407736 - RNA, 17 nt, Human
aaagcccauucauucca

SEQ ID NO: 1407737 - RNA, 16 nt, Human
aaauaaauguaucaua

SEQ ID NO: 1407738 - RNA, 13 nt, Human
aaauaaauuguau

SEQ ID NO: 1407739 - RNA, 21 nt, Human
aaauaaauguaucauagaaau

SEQ ID NO: 1407740 - RNA, 14 nt, Human
aaauaaauuguaua

SEQ ID NO: 1407741 - RNA, 15 nt, Human
aaauaaauuguauau

SEQ ID NO: 1407742 - RNA, 18 nt, Human
aaauaaauuguauauuca

SEQ ID NO: 1407743 - RNA, 19 nt, Human
aaauaaauuguauauucac

SEQ ID NO: 1407744 - RNA, 17 nt, Human
aaauaaacgucuuaaau

SEQ ID NO: 1407745 - RNA, 20 nt, Human
aaauaaauuguauauucacu

SEQ ID NO: 1407746 - RNA, 21 nt, Human
aaauaaauuguauauucacuu

SEQ ID NO: 1407747 - RNA, 22 nt, Human
aaauaaauuguauauucacuuu

SEQ ID NO: 1407748 - RNA, 20 nt, Human
aaagugccugacacacuaac

SEQ ID NO: 1407749 - RNA, 19 nt, Human
aaagugccaguauuuuaaa

SEQ ID NO: 1407750 - RNA, 15 nt, Human
aaagugccaguauuu

SEQ ID NO: 1407751 - RNA, 19 nt, Human
aaagugccauuaacaaaug

SEQ ID NO: 1407752 - RNA, 17 nt, Human
aaagucauaauugcauu

SEQ ID NO: 1407753 - RNA, 15 nt, Human
aaaggcuguuaaaua

SEQ ID NO: 1407754 - RNA, 15 nt, Human
aaagucauaauugca

SEQ ID NO: 1407755 - RNA, 14 nt, Human
aaauaaaaccagcu

SEQ ID NO: 1407756 - RNA, 13 nt, Human
aaagugcuaaggu

SEQ ID NO: 1407757 - RNA, 22 nt, Human
aaagugccuuucaggaucuauu

SEQ ID NO: 1407758 - RNA, 23 nt, Human
aaagugccuuucaggaucuauuu

SEQ ID NO: 1407759 - RNA, 20 nt, Human
aaagugccuuucaggaucua

SEQ ID NO: 1407760 - RNA, 19 nt, Human
aaagugccuuucaggaucu

SEQ ID NO: 1407761 - RNA, 17 nt, Human
aaagugccuuucaggau

SEQ ID NO: 1407762 - RNA, 16 nt, Human
aaagugccuuucagga

SEQ ID NO: 1407763 - RNA, 15 nt, Human
aaagugccuuucagg

SEQ ID NO: 1407764 - RNA, 14 nt, Human
aaagugccuuucag

SEQ ID NO: 1407765 - RNA, 18 nt, Human
aaauaaacaaauaacaau

SEQ ID NO: 1407766 - RNA, 19 nt, Human
aaauaaaauuuguugcaua

SEQ ID NO: 1407767 - RNA, 18 nt, Human
aaauaaaauuuguugcau

SEQ ID NO: 1407768 - RNA, 21 nt, Human
aaauaaaacccguugauuacu

SEQ ID NO: 1407769 - RNA, 16 nt, Human
aaauaaacgucuuaaa

SEQ ID NO: 1407770 - RNA, 15 nt, Human
aaauaaacgucuuaa

SEQ ID NO: 1407771 - RNA, 14 nt, Human
aaugcccuucacug

SEQ ID NO: 1407772 - RNA, 17 nt, Human
aaugcccuucacuguca

SEQ ID NO: 1407773 - RNA, 13 nt, Human
aaugcccuucacu

SEQ ID NO: 1407774 - RNA, 22 nt, Human
aaugccugacuagggagccaug

SEQ ID NO: 1407775 - RNA, 21 nt, Human
aaugcgugcauaccacuuuug

SEQ ID NO: 1407776 - RNA, 23 nt, Human
aaugcgugcauaccacuuuuguu

SEQ ID NO: 1407777 - RNA, 17 nt, Human
aauggggccagauccag

SEQ ID NO: 1407778 - RNA, 19 nt, Human
aaugggcacuuaaagcuuu

SEQ ID NO: 1407779 - RNA, 14 nt, Human
aaugggcacuuaaa

SEQ ID NO: 1407780 - RNA, 21 nt, Human
aaugggagcugaggccacacu

SEQ ID NO: 1407781 - RNA, 16 nt, Human
aaugcucauaacggau

SEQ ID NO: 1407782 - RNA, 22 nt, Human
aauggggccagauccagccugg

SEQ ID NO: 1407783 - RNA, 12 nt, Human
aaugguaucuuu

SEQ ID NO: 1407784 - RNA, 16 nt, Human
aauggguuuuucccug

SEQ ID NO: 1407785 - RNA, 15 nt, Human
aauggguuacuugau

SEQ ID NO: 1407786 - RNA, 15 nt, Human
aaugggggugcauuu

SEQ ID NO: 1407787 - RNA, 17 nt, Human
aaugggggugcauuuga

SEQ ID NO: 1407788 - RNA, 19 nt, Human
aaugguccaggagaaggcc

SEQ ID NO: 1407789 - RNA, 14 nt, Human
aaugguccaggaga

SEQ ID NO: 1407790 - RNA, 20 nt, Human
aaugguccaauuaguuuccu

SEQ ID NO: 1407791 - RNA, 22 nt, Human
aauggucacguuuggugcuucu

SEQ ID NO: 1407792 - RNA, 23 nt, Human
aauggucacguuuggugcuucuc

SEQ ID NO: 1407793 - RNA, 18 nt, Human
aaugauaugcuuguaacu

SEQ ID NO: 1407794 - RNA, 19 nt, Human
aaugauaugcuuguaacua

SEQ ID NO: 1407795 - RNA, 17 nt, Human
aaugauaugcuuguaac

SEQ ID NO: 1407796 - RNA, 15 nt, Human
aaugauaugcuugua

SEQ ID NO: 1407797 - RNA, 18 nt, Human
aaugaacacucuuuugcu

SEQ ID NO: 1407798 - RNA, 15 nt, Human
aaugaacacucuuuu

SEQ ID NO: 1407799 - RNA, 21 nt, Human
aaugaacacucuuuugcuuua

SEQ ID NO: 1407800 - RNA, 17 nt, Human
aaugauaacuggaaacu

SEQ ID NO: 1407801 - RNA, 12 nt, Human
aaugaacagaac

SEQ ID NO: 1407802 - RNA, 21 nt, Human
aaugauagacaauugagguaa

SEQ ID NO: 1407803 - RNA, 16 nt, Human
aaugauaacuggaaac

SEQ ID NO: 1407804 - RNA, 15 nt, Human
aaugauaacuggaaa

SEQ ID NO: 1407805 - RNA, 16 nt, Human
aaugaacaagagaagc

SEQ ID NO: 1407806 - RNA, 14 nt, Human
aaugaacaagagaa

SEQ ID NO: 1407807 - RNA, 13 nt, Human
aaugaacaagaga

SEQ ID NO: 1407808 - RNA, 12 nt, Human
aaugaacaagag

SEQ ID NO: 1407809 - RNA, 12 nt, Human
aaugaacaaaug

SEQ ID NO: 1407810 - RNA, 14 nt, Human
aaugaaauuaacug

SEQ ID NO: 1407811 - RNA, 22 nt, Human
aaugaacaagagaagcauucuc

SEQ ID NO: 1407812 - RNA, 18 nt, Human
aaugaacaagagaagcau

SEQ ID NO: 1407813 - RNA, 17 nt, Human
aaugaacaagagaagca

SEQ ID NO: 1407814 - RNA, 14 nt, Human
aaugauaacuggaa

SEQ ID NO: 1407815 - RNA, 22 nt, Human
aaucucccauuuuggaauuugc

SEQ ID NO: 1407816 - RNA, 16 nt, Human
aaucucccauuuugga

SEQ ID NO: 1407817 - RNA, 18 nt, Human
aaucucccauuuuggaau

SEQ ID NO: 1407818 - RNA, 17 nt, Human
aauccauacauuugugu

SEQ ID NO: 1407819 - RNA, 16 nt, Human
aauccauacauuugug

SEQ ID NO: 1407820 - RNA, 16 nt, Human
aauccacauuucuaaa

SEQ ID NO: 1407821 - RNA, 15 nt, Human
aauccacauuucuaa

SEQ ID NO: 1407822 - RNA, 22 nt, Human
aauccaagauauuuuaaaaucu

SEQ ID NO: 1407823 - RNA, 13 nt, Human
aauccaaauggcg

SEQ ID NO: 1407824 - RNA, 20 nt, Human
aauccaaauggcgucuggaa

SEQ ID NO: 1407825 - RNA, 22 nt, Human
aaucauuuuaauuauuauucuu

SEQ ID NO: 1407826 - RNA, 20 nt, Human
aaucauuuuaauuauuauuc

SEQ ID NO: 1407827 - RNA, 19 nt, Human
aaucauuuuaauuauuauu

SEQ ID NO: 1407828 - RNA, 17 nt, Human
aaucauuuuaauuauua

SEQ ID NO: 1407829 - RNA, 16 nt, Human
aaucauuuuaauuauu

SEQ ID NO: 1407830 - RNA, 15 nt, Human
aaucauuuuaauuau

SEQ ID NO: 1407831 - RNA, 17 nt, Human
aaucauuuguuuaaaaa

SEQ ID NO: 1407832 - RNA, 13 nt, Human
aaucauuuugcaa

SEQ ID NO: 1407833 - RNA, 15 nt, Human
aaucauuuguuuaaa

SEQ ID NO: 1407834 - RNA, 19 nt, Human
aaucaaauuuguaggguuu

SEQ ID NO: 1407835 - RNA, 12 nt, Human
aaucaaaugaau

SEQ ID NO: 1407836 - RNA, 22 nt, Human
aauauaaaugcaaauaacaaau

SEQ ID NO: 1407837 - RNA, 20 nt, Human
aauauaaaugcaaauaacaa

SEQ ID NO: 1407838 - RNA, 19 nt, Human
aauauaaaugcaaauaaca

SEQ ID NO: 1407839 - RNA, 18 nt, Human
aauauaaaugcaaauaac

SEQ ID NO: 1407840 - RNA, 17 nt, Human
aauauaaaugcaaauaa

SEQ ID NO: 1407841 - RNA, 16 nt, Human
aauauaaaugcaaaua

SEQ ID NO: 1407842 - RNA, 15 nt, Human
aauauaaaugcaaau

SEQ ID NO: 1407843 - RNA, 14 nt, Human
aauauaaaugcaaa

SEQ ID NO: 1407844 - RNA, 13 nt, Human
aauauaaaugcaa

SEQ ID NO: 1407845 - RNA, 12 nt, Human
aauauaaaugca

SEQ ID NO: 1407846 - RNA, 11 nt, Human
aauauaaaugc

SEQ ID NO: 1407847 - RNA, 22 nt, Human
aauauaaaguuuuauauauuau

SEQ ID NO: 1407848 - RNA, 21 nt, Human
aauauaaaguuuuauauauua

SEQ ID NO: 1407849 - RNA, 20 nt, Human
aauauaaaguuuuauauauu

SEQ ID NO: 1407850 - RNA, 15 nt, Human
aauauaaaguuuuau

SEQ ID NO: 1407851 - RNA, 18 nt, Human
aauauaaagacguuuuau

SEQ ID NO: 1407852 - RNA, 23 nt, Human
aauauaaagacguuuuauaagca

SEQ ID NO: 1407853 - RNA, 12 nt, Human
aauauaaagacg

SEQ ID NO: 1407854 - RNA, 11 nt, Human
aauauaaagac

SEQ ID NO: 1407855 - RNA, 21 nt, Human
aauauagaucaguuauaagua

SEQ ID NO: 1407856 - RNA, 18 nt, Human
aauauacuuuuacaagua

SEQ ID NO: 1407857 - RNA, 19 nt, Human
aauauacuuuuacaaguaa

SEQ ID NO: 1407858 - RNA, 17 nt, Human
aauauacuuguggacua

SEQ ID NO: 1407859 - RNA, 22 nt, Human
aauauacuuguggacuaaaaga

SEQ ID NO: 1407860 - RNA, 23 nt, Human
aauauacuuguggacuaaaagau

SEQ ID NO: 1407861 - RNA, 16 nt, Human
aauauaggaacuuaaa

SEQ ID NO: 1407862 - RNA, 22 nt, Human
aauaugcuuaaaauaagcaggu

SEQ ID NO: 1407863 - RNA, 19 nt, Human
aauaugcuuaaaauaagca

SEQ ID NO: 1407864 - RNA, 16 nt, Human
aauaugcuuaaaauaa

SEQ ID NO: 1407865 - RNA, 23 nt, Human
aauaugcuuaaaauaagcaggug

SEQ ID NO: 1407866 - RNA, 23 nt, Human
aauauaaaauaugaagacauaaa

SEQ ID NO: 1407867 - RNA, 14 nt, Human
aauauaaaauauga

SEQ ID NO: 1407868 - RNA, 14 nt, Human
aauaguuuggauau

SEQ ID NO: 1407869 - RNA, 22 nt, Human
aauagaagcuaagguuuagaua

SEQ ID NO: 1407870 - RNA, 13 nt, Human
aauagaacacagu

SEQ ID NO: 1407871 - RNA, 17 nt, Human
aauagaacaaggcugag

SEQ ID NO: 1407872 - RNA, 17 nt, Human
aauagaaauggggaacu

SEQ ID NO: 1407873 - RNA, 22 nt, Human
aauagaaauaaaggaugugauu

SEQ ID NO: 1407874 - RNA, 15 nt, Human
aauagaaaauggucc

SEQ ID NO: 1407875 - RNA, 14 nt, Human
aauagaaaaugguc

SEQ ID NO: 1407876 - RNA, 13 nt, Human
aauagaaaauggu

SEQ ID NO: 1407877 - RNA, 21 nt, Human
aauacuucuuguguguaugca

SEQ ID NO: 1407878 - RNA, 19 nt, Human
aauacuucuuguguguaug

SEQ ID NO: 1407879 - RNA, 17 nt, Human
aauacuucuugugugua

SEQ ID NO: 1407880 - RNA, 14 nt, Human
aauacuucuugugu

SEQ ID NO: 1407881 - RNA, 13 nt, Human
aauacuucuugug

SEQ ID NO: 1407882 - RNA, 22 nt, Human
aauacuucucauuuuuuaaaaa

SEQ ID NO: 1407883 - RNA, 16 nt, Human
aauacuucucauuuuu

SEQ ID NO: 1407884 - RNA, 14 nt, Human
aauacuucucauuu

SEQ ID NO: 1407885 - RNA, 13 nt, Human
aauacuaaugaaa

SEQ ID NO: 1407886 - RNA, 16 nt, Human
aauacuaccuugaaaa

SEQ ID NO: 1407887 - RNA, 15 nt, Human
aauacuaccuugaaa

SEQ ID NO: 1407888 - RNA, 14 nt, Human
aauacuaccuugaa

SEQ ID NO: 1407889 - RNA, 15 nt, Human
aauacuaaggaacca

SEQ ID NO: 1407890 - RNA, 20 nt, Human
aauacgugggcauucaaaug

SEQ ID NO: 1407891 - RNA, 19 nt, Human
aauacgugggcauucaaau

SEQ ID NO: 1407892 - RNA, 15 nt, Human
aaguauacauaaguu

SEQ ID NO: 1407893 - RNA, 13 nt, Human
aaguaggaaguaa

SEQ ID NO: 1407894 - RNA, 13 nt, Human
aagugcugagauu

SEQ ID NO: 1407895 - RNA, 21 nt, Human
aagugcuaagguucuaaggcc

SEQ ID NO: 1407896 - RNA, 20 nt, Human
aagugcuaagguucuaaggc

SEQ ID NO: 1407897 - RNA, 19 nt, Human
aagugcuaagguucuaagg

SEQ ID NO: 1407898 - RNA, 18 nt, Human
aagugcuaagguucuaag

SEQ ID NO: 1407899 - RNA, 17 nt, Human
aagugcuaagguucuaa

SEQ ID NO: 1407900 - RNA, 16 nt, Human
aagugcuaagguucua

SEQ ID NO: 1407901 - RNA, 15 nt, Human
aagugcuaagguucu

SEQ ID NO: 1407902 - RNA, 19 nt, Human
aagugcugcacucaaauga

SEQ ID NO: 1407903 - RNA, 15 nt, Human
aagugcugcacucaa

SEQ ID NO: 1407904 - RNA, 14 nt, Human
aagugcugcacuca

SEQ ID NO: 1407905 - RNA, 14 nt, Human
aagugcugagauua

SEQ ID NO: 1407906 - RNA, 14 nt, Human
aagugcugcauuua

SEQ ID NO: 1407907 - RNA, 13 nt, Human
aagugcugcauuu

SEQ ID NO: 1407908 - RNA, 19 nt, Human
aaguggguacccccaggac

SEQ ID NO: 1407909 - RNA, 15 nt, Human
aaguggguaccccca

SEQ ID NO: 1407910 - RNA, 16 nt, Human
aagugggcuugauucu

SEQ ID NO: 1407911 - RNA, 12 nt, Human
aagugggcuuga

SEQ ID NO: 1407912 - RNA, 11 nt, Human
aagugggacag

SEQ ID NO: 1407913 - RNA, 22 nt, Human
aagugggcuugauucugcagua

SEQ ID NO: 1407914 - RNA, 19 nt, Human
aaguucuguacucaaaugu

SEQ ID NO: 1407915 - RNA, 22 nt, Human
aaguugauaugccuuuucccaa

SEQ ID NO: 1407916 - RNA, 15 nt, Human
aauaaacgucuuaaa

SEQ ID NO: 1407917 - RNA, 11 nt, Human
aauaaagcugu

SEQ ID NO: 1407918 - RNA, 19 nt, Human
aauaaagcuguguggcagu

SEQ ID NO: 1407919 - RNA, 14 nt, Human
aauaaagcugcuga

SEQ ID NO: 1407920 - RNA, 11 nt, Human
aauaaaggacu

SEQ ID NO: 1407921 - RNA, 18 nt, Human
aauaaaggacuguaaucu

SEQ ID NO: 1407922 - RNA, 16 nt, Human
aauaaaggaugugauu

SEQ ID NO: 1407923 - RNA, 22 nt, Human
aauaaaggacuguaaucuuauu

SEQ ID NO: 1407924 - RNA, 14 nt, Human
aauaaaauuuguug

SEQ ID NO: 1407925 - RNA, 13 nt, Human
aauaaaauuuguu

SEQ ID NO: 1407926 - RNA, 12 nt, Human
aauaaaauuugu

SEQ ID NO: 1407927 - RNA, 11 nt, Human
aauaaaauuug

SEQ ID NO: 1407928 - RNA, 19 nt, Human
aaguugcagcuguuuuguu

SEQ ID NO: 1407929 - RNA, 21 nt, Human
aaguugcagcuguuuuguuga

SEQ ID NO: 1407930 - RNA, 17 nt, Human
aaguugcagcuguuuug

SEQ ID NO: 1407931 - RNA, 15 nt, Human
aaguugcagcuguuu

SEQ ID NO: 1407932 - RNA, 14 nt, Human
aaguugcagcuguu

SEQ ID NO: 1407933 - RNA, 14 nt, Human
aaguugauuagaaa

SEQ ID NO: 1407934 - RNA, 13 nt, Human
aauaaacaaauaa

SEQ ID NO: 1407935 - RNA, 16 nt, Human
aauaaaauuuguugca

SEQ ID NO: 1407936 - RNA, 17 nt, Human
aauaaaauuuguugcau

SEQ ID NO: 1407937 - RNA, 12 nt, Human
aauaaaauuuuu

SEQ ID NO: 1407938 - RNA, 13 nt, Human
aauaauauacuug

SEQ ID NO: 1407939 - RNA, 16 nt, Human
aauaauauacuugugg

SEQ ID NO: 1407940 - RNA, 16 nt, Human
aauaauacugcugaga

SEQ ID NO: 1407941 - RNA, 12 nt, Human
aauaauauacuu

SEQ ID NO: 1407942 - RNA, 18 nt, Human
aauaauaccuaagccuuc

SEQ ID NO: 1407943 - RNA, 17 nt, Human
aauaauacauuauauuu

SEQ ID NO: 1407944 - RNA, 19 nt, Human
aauaauauauuuucuguuu

SEQ ID NO: 1407945 - RNA, 17 nt, Human
aauaauauauuuucugu

SEQ ID NO: 1407946 - RNA, 15 nt, Human
aauaauauauuuucu

SEQ ID NO: 1407947 - RNA, 12 nt, Human
aauaauguuuca

SEQ ID NO: 1407948 - RNA, 19 nt, Human
aauaauguuucaaacauau

SEQ ID NO: 1407949 - RNA, 14 nt, Human
aauaauguuucaaa

SEQ ID NO: 1407950 - RNA, 19 nt, Human
aagcagguucccaagcuca

SEQ ID NO: 1407951 - RNA, 18 nt, Human
aagcagguucccaagcuc

SEQ ID NO: 1407952 - RNA, 23 nt, Human
aagccagauuuuuuaaaauuuau

SEQ ID NO: 1407953 - RNA, 22 nt, Human
aagccagcaccggaccagccug

SEQ ID NO: 1407954 - RNA, 17 nt, Human
aagccagcaccggacca

SEQ ID NO: 1407955 - RNA, 23 nt, Human
aagccagcaccggaccagccugg

SEQ ID NO: 1407956 - RNA, 12 nt, Human
aaggcaaaauug

SEQ ID NO: 1407957 - RNA, 19 nt, Human
aaggacuaauagaaaagua

SEQ ID NO: 1407958 - RNA, 15 nt, Human
aaggacuaauagaaa

SEQ ID NO: 1407959 - RNA, 14 nt, Human
aaggacgcacugag

SEQ ID NO: 1407960 - RNA, 19 nt, Human
aaggaccugaaauuccaaa

SEQ ID NO: 1407961 - RNA, 18 nt, Human
aaggaccugaaauuccaa

SEQ ID NO: 1407962 - RNA, 12 nt, Human
aaggaccuaaaa

SEQ ID NO: 1407963 - RNA, 14 nt, Human
aaggacccugugag

SEQ ID NO: 1407964 - RNA, 23 nt, Human
aaggaauuucuuaacuucuugcu

SEQ ID NO: 1407965 - RNA, 20 nt, Human
aaggaauuucuuaacuucuu

SEQ ID NO: 1407966 - RNA, 19 nt, Human
aaggaauuucuuaacuucu

SEQ ID NO: 1407967 - RNA, 17 nt, Human
aaggaauuucuuaacuu

SEQ ID NO: 1407968 - RNA, 16 nt, Human
aaggaauuucuuaacu

SEQ ID NO: 1407969 - RNA, 12 nt, Human
aaggaauuuuau

SEQ ID NO: 1407970 - RNA, 19 nt, Human
aaggcacucuagauuccau

SEQ ID NO: 1407971 - RNA, 16 nt, Human
aaggcacucuagauuc

SEQ ID NO: 1407972 - RNA, 15 nt, Human
aaggcacucuagauu

SEQ ID NO: 1407973 - RNA, 14 nt, Human
aaggcacucuagau

SEQ ID NO: 1407974 - RNA, 20 nt, Human
aaggcaaagcacgaaauguu

SEQ ID NO: 1407975 - RNA, 20 nt, Human
aaggcaaacccaucaacaaa

SEQ ID NO: 1407976 - RNA, 15 nt, Human
aaggcaaacccauca

SEQ ID NO: 1407977 - RNA, 18 nt, Human
aaggacuaauagaaaagu

SEQ ID NO: 1407978 - RNA, 19 nt, Human
aaggcaaaauugcaaaucu

SEQ ID NO: 1407979 - RNA, 15 nt, Human
aaggcaaaauugcaa

SEQ ID NO: 1407980 - RNA, 14 nt, Human
aaggcaaaauugca

SEQ ID NO: 1407981 - RNA, 18 nt, Human
aaggcagaggccugggcu

SEQ ID NO: 1407982 - RNA, 17 nt, Human
aaggcagaggccugggc

SEQ ID NO: 1407983 - RNA, 16 nt, Human
aaggcagaggccuggg

SEQ ID NO: 1407984 - RNA, 15 nt, Human
aaggcagaggccugg

SEQ ID NO: 1407985 - RNA, 14 nt, Human
aaggcagaggccug

SEQ ID NO: 1407986 - RNA, 16 nt, Human
aaggcacuugaggggg

SEQ ID NO: 1407987 - RNA, 19 nt, Human
aaggcagccgugggcccca

SEQ ID NO: 1407988 - RNA, 16 nt, Human
aaggcagcaaggcccg

SEQ ID NO: 1407989 - RNA, 19 nt, Human
aaggcagcaaggcccgagc

SEQ ID NO: 1407990 - RNA, 14 nt, Human
aaggcagcaaggcc

SEQ ID NO: 1407991 - RNA, 19 nt, Human
aaggcagaggccugggcug

SEQ ID NO: 1407992 - RNA, 23 nt, Human
aaggcagccgugggccccacccu

SEQ ID NO: 1407993 - RNA, 18 nt, Human
aagcugcaucuagaggcu

SEQ ID NO: 1407994 - RNA, 14 nt, Human
aaggaauuucuuaa

SEQ ID NO: 1407995 - RNA, 15 nt, Human
aagcugcccugccca

SEQ ID NO: 1407996 - RNA, 21 nt, Human
aagcugcugagaaucuagccu

SEQ ID NO: 1407997 - RNA, 17 nt, Human
aagcuggagugcagugg

SEQ ID NO: 1407998 - RNA, 17 nt, Human
aagggauggacaucuug

SEQ ID NO: 1407999 - RNA, 16 nt, Human
aagggauggacaucuu

SEQ ID NO: 1408000 - RNA, 15 nt, Human
aagggauuuucagcc

SEQ ID NO: 1408001 - RNA, 20 nt, Human
aagggcaacagaucaguaaa

SEQ ID NO: 1408002 - RNA, 22 nt, Human
aagggcaacagaucaguaaaga

SEQ ID NO: 1408003 - RNA, 21 nt, Human
aagggauuuucagcccucaga

SEQ ID NO: 1408004 - RNA, 23 nt, Human
aagggauuuucagcccucagaau

SEQ ID NO: 1408005 - RNA, 16 nt, Human
aagggagucugccagg

SEQ ID NO: 1408006 - RNA, 15 nt, Human
aagggagucugccag

SEQ ID NO: 1408007 - RNA, 17 nt, Human
aagggaggugggccgug

SEQ ID NO: 1408008 - RNA, 12 nt, Human
aagggagguggg

SEQ ID NO: 1408009 - RNA, 21 nt, Human
aagggacugagagaugcagaa

SEQ ID NO: 1408010 - RNA, 13 nt, Human
aagggagggggag

SEQ ID NO: 1408011 - RNA, 15 nt, Human
aagggacugagaaau

SEQ ID NO: 1408012 - RNA, 17 nt, Human
aagggacugagaaauuu

SEQ ID NO: 1408013 - RNA, 21 nt, Human
aagguucucagguguugccaa

SEQ ID NO: 1408014 - RNA, 13 nt, Human
aagguucuagguu

SEQ ID NO: 1408015 - RNA, 12 nt, Human
aagguucuaggu

SEQ ID NO: 1408016 - RNA, 14 nt, Human
aagguucuaaggcc

SEQ ID NO: 1408017 - RNA, 13 nt, Human
aagguucuaaggc

SEQ ID NO: 1408018 - RNA, 11 nt, Human
aagguucuaag

SEQ ID NO: 1408019 - RNA, 23 nt, Human
aagguuccgcuuggagcagaggg

SEQ ID NO: 1408020 - RNA, 17 nt, Human
aagguucccguugcauu

SEQ ID NO: 1408021 - RNA, 18 nt, Human
aagguuaucagugcuucc

SEQ ID NO: 1408022 - RNA, 15 nt, Human
aagguuaucagugcu

SEQ ID NO: 1408023 - RNA, 18 nt, Human
aagguuagagaauaaauu

SEQ ID NO: 1408024 - RNA, 15 nt, Human
aaggugugagacugg

SEQ ID NO: 1408025 - RNA, 15 nt, Human
aaguagaugcauuug

SEQ ID NO: 1408026 - RNA, 20 nt, Human
aagguguccuacagaaaaac

SEQ ID NO: 1408027 - RNA, 18 nt, Human
aagguguccuacagaaaa

SEQ ID NO: 1408028 - RNA, 16 nt, Human
aagguguccuacagaa

SEQ ID NO: 1408029 - RNA, 15 nt, Human
aagguguccuacaga

SEQ ID NO: 1408030 - RNA, 20 nt, Human
aagguguagccacaccagga

SEQ ID NO: 1408031 - RNA, 15 nt, Human
aaggugguguuucug

SEQ ID NO: 1408032 - RNA, 13 nt, Human
aagguggggugga

SEQ ID NO: 1408033 - RNA, 19 nt, Human
aaggugacaucggaaaaau

SEQ ID NO: 1408034 - RNA, 15 nt, Human
aaggugaauagccau

SEQ ID NO: 1408035 - RNA, 19 nt, Human
aaggucuuugguucagcua

SEQ ID NO: 1408036 - RNA, 13 nt, Human
aaggucuuugguu

SEQ ID NO: 1408037 - RNA, 12 nt, Human
aaggucugcuuu

SEQ ID NO: 1408038 - RNA, 14 nt, Human
aagcagguggaucu

SEQ ID NO: 1408039 - RNA, 22 nt, Human
aagcagguggaucuauuucaug

SEQ ID NO: 1408040 - RNA, 20 nt, Human
aagcagguggaucuauuuca

SEQ ID NO: 1408041 - RNA, 19 nt, Human
aagcagguggaucuauuuc

SEQ ID NO: 1408042 - RNA, 16 nt, Human
aagcagaaauccaagc

SEQ ID NO: 1408043 - RNA, 15 nt, Human
aagcagaaauccaag

SEQ ID NO: 1408044 - RNA, 23 nt, Human
aagcagaaagugccuuucaggau

SEQ ID NO: 1408045 - RNA, 20 nt, Human
aagcagaaagugccuuucag

SEQ ID NO: 1408046 - RNA, 19 nt, Human
aagcagaaagugccuuuca

SEQ ID NO: 1408047 - RNA, 18 nt, Human
aagcagaaagugccuuuc

SEQ ID NO: 1408048 - RNA, 17 nt, Human
aagcagaaagugccuuu

SEQ ID NO: 1408049 - RNA, 15 nt, Human
aagcagaaagugccu

SEQ ID NO: 1408050 - RNA, 13 nt, Human
aagcagaaagugc

SEQ ID NO: 1408051 - RNA, 12 nt, Human
aagcagaaagug

SEQ ID NO: 1408052 - RNA, 15 nt, Human
aagauugcugaaauu

SEQ ID NO: 1408053 - RNA, 12 nt, Human
aagauugcugaa

SEQ ID NO: 1408054 - RNA, 19 nt, Human
aagauugagcucucugccc

SEQ ID NO: 1408055 - RNA, 13 nt, Human
aagauucuuuccc

SEQ ID NO: 1408056 - RNA, 16 nt, Human
aagauucuuucccaau

SEQ ID NO: 1408057 - RNA, 21 nt, Human
aagauuauagauucuaaagau

SEQ ID NO: 1408058 - RNA, 21 nt, Human
aagauucaaugccccugaauu

SEQ ID NO: 1408059 - RNA, 20 nt, Human
aagauucaaugccccugaau

SEQ ID NO: 1408060 - RNA, 14 nt, Human
aagauuauagauuc

SEQ ID NO: 1408061 - RNA, 20 nt, Human
aagauuauagauucuaaaga

SEQ ID NO: 1408062 - RNA, 17 nt, Human
aagauuauagauucuaa

SEQ ID NO: 1408063 - RNA, 16 nt, Human
aagauuauagauucua

SEQ ID NO: 1408064 - RNA, 15 nt, Human
aagauuauagauucu

SEQ ID NO: 1408065 - RNA, 17 nt, Human
aagauacuuaagugcug

SEQ ID NO: 1408066 - RNA, 14 nt, Human
aagauacuuaagug

SEQ ID NO: 1408067 - RNA, 20 nt, Human
aagauacugaaauaaacguc

SEQ ID NO: 1408068 - RNA, 16 nt, Human
aagauacugaaauaaa

SEQ ID NO: 1408069 - RNA, 19 nt, Human
aagacaugucuguucuaca

SEQ ID NO: 1408070 - RNA, 17 nt, Human
aagacaugucuguucua

SEQ ID NO: 1408071 - RNA, 16 nt, Human
aagacaugucuguucu

SEQ ID NO: 1408072 - RNA, 16 nt, Human
aagacauucaggacug

SEQ ID NO: 1408073 - RNA, 13 nt, Human
aagacaugucugu

SEQ ID NO: 1408074 - RNA, 12 nt, Human
aagacaugucug

SEQ ID NO: 1408075 - RNA, 14 nt, Human
aagacaguggcccc

SEQ ID NO: 1408076 - RNA, 23 nt, Human
aagacagugaaagaaaauaacaa

SEQ ID NO: 1408077 - RNA, 22 nt, Human
aagacagcuucucauccugcag

SEQ ID NO: 1408078 - RNA, 19 nt, Human
aacuuagauuuuacaugaa

SEQ ID NO: 1408079 - RNA, 16 nt, Human
aacuuagauuuuacau

SEQ ID NO: 1408080 - RNA, 21 nt, Human
aacuuaccaggcaccaaaaga

SEQ ID NO: 1408081 - RNA, 19 nt, Human
aacuuaccugggcauucuu

SEQ ID NO: 1408082 - RNA, 19 nt, Human
aacuguuggaauggauuuu

SEQ ID NO: 1408083 - RNA, 18 nt, Human
aacuguuguagaagacaa

SEQ ID NO: 1408084 - RNA, 19 nt, Human
aacuguuguagaagacaaa

SEQ ID NO: 1408085 - RNA, 18 nt, Human
aagagagccugcaggauc

SEQ ID NO: 1408086 - RNA, 21 nt, Human
aagagacaaacaccucccagg

SEQ ID NO: 1408087 - RNA, 19 nt, Human
aagagacaaacaccuccca

SEQ ID NO: 1408088 - RNA, 22 nt, Human
aagagaaugcccuucuccuuau

SEQ ID NO: 1408089 - RNA, 15 nt, Human
aagagaacuuccaga

SEQ ID NO: 1408090 - RNA, 15 nt, Human
aagacuuuuaugaua

SEQ ID NO: 1408091 - RNA, 23 nt, Human
aagagaaugcccuucuccuuauu

SEQ ID NO: 1408092 - RNA, 21 nt, Human
aagagaaguuguaaaguaugu

SEQ ID NO: 1408093 - RNA, 13 nt, Human
aagagaaguagaa

SEQ ID NO: 1408094 - RNA, 13 nt, Human
aagagaaggagca

SEQ ID NO: 1408095 - RNA, 18 nt, Human
acuggaaggggaagggac

SEQ ID NO: 1408096 - RNA, 20 nt, Human
acuggaagcuaauuugcauu

SEQ ID NO: 1408097 - RNA, 18 nt, Human
acugccaggcucucuuug

SEQ ID NO: 1408098 - RNA, 17 nt, Human
acugccaggcucucuuu

SEQ ID NO: 1408099 - RNA, 14 nt, Human
acugccaggcucuc

SEQ ID NO: 1408100 - RNA, 13 nt, Human
acugccaggcucu

SEQ ID NO: 1408101 - RNA, 21 nt, Human
acugccauauuaaauuuuuug

SEQ ID NO: 1408102 - RNA, 16 nt, Human
acugccauauuaaauu

SEQ ID NO: 1408103 - RNA, 19 nt, Human
acugccauaugauuuacau

SEQ ID NO: 1408104 - RNA, 13 nt, Human
acugccauaugau

SEQ ID NO: 1408105 - RNA, 21 nt, Human
acucuaagaucuuagauucuc

SEQ ID NO: 1408106 - RNA, 20 nt, Human
acucuaagaucuuagauucu

SEQ ID NO: 1408107 - RNA, 17 nt, Human
acucuaagaucuuagau

SEQ ID NO: 1408108 - RNA, 13 nt, Human
acucuaagaucuu

SEQ ID NO: 1408109 - RNA, 12 nt, Human
acucuaagaucu

SEQ ID NO: 1408110 - RNA, 15 nt, Human
acucuaagaaagaac

SEQ ID NO: 1408111 - RNA, 14 nt, Human
acucuaagaaagaa

SEQ ID NO: 1408112 - RNA, 13 nt, Human
acucuaagaaaga

SEQ ID NO: 1408113 - RNA, 14 nt, Human
acucuaaagucugu

SEQ ID NO: 1408114 - RNA, 18 nt, Human
acucuaaagcaaauuuau

SEQ ID NO: 1408115 - RNA, 14 nt, Human
acucuaaagcaaau

SEQ ID NO: 1408116 - RNA, 13 nt, Human
acucuaaagcaaa

SEQ ID NO: 1408117 - RNA, 22 nt, Human
acuauuuucagaugugaaccau

SEQ ID NO: 1408118 - RNA, 12 nt, Human
acuauuuucaga

SEQ ID NO: 1408119 - RNA, 14 nt, Human
acuauuuuucagaa

SEQ ID NO: 1408120 - RNA, 21 nt, Human
acucuacuuaauccaaugggu

SEQ ID NO: 1408121 - RNA, 19 nt, Human
acucuacuuaauccaaugg

SEQ ID NO: 1408122 - RNA, 22 nt, Human
acucuagaugaaguuuuacauu

SEQ ID NO: 1408123 - RNA, 21 nt, Human
acucuagaugaaguuuuacau

SEQ ID NO: 1408124 - RNA, 20 nt, Human
acucuagaguccaagguuua

SEQ ID NO: 1408125 - RNA, 14 nt, Human
acucuagaguccaa

SEQ ID NO: 1408126 - RNA, 20 nt, Human
acugaauaccacucuguaau

SEQ ID NO: 1408127 - RNA, 19 nt, Human
acugaauaccacucuguaa

SEQ ID NO: 1408128 - RNA, 18 nt, Human
acugaauaccacucugua

SEQ ID NO: 1408129 - RNA, 17 nt, Human
acugaauaccacucugu

SEQ ID NO: 1408130 - RNA, 14 nt, Human
acugaauaccacuc

SEQ ID NO: 1408131 - RNA, 13 nt, Human
acugaauaccacu

SEQ ID NO: 1408132 - RNA, 23 nt, Human
acugaauaaauuguacagccggc

SEQ ID NO: 1408133 - RNA, 22 nt, Human
acugaauaaauuguacagccgg

SEQ ID NO: 1408134 - RNA, 20 nt, Human
acucuuaagaagacugcauu

SEQ ID NO: 1408135 - RNA, 20 nt, Human
acucuguucauuccuccagg

SEQ ID NO: 1408136 - RNA, 15 nt, Human
acucuuaagaagacu

SEQ ID NO: 1408137 - RNA, 14 nt, Human
acucuuaagaagac

SEQ ID NO: 1408138 - RNA, 14 nt, Human
acucuagauuccau

SEQ ID NO: 1408139 - RNA, 13 nt, Human
acucuagauucca

SEQ ID NO: 1408140 - RNA, 19 nt, Human
acucuagaguccaagguuu

SEQ ID NO: 1408141 - RNA, 15 nt, Human
acucuguucauuccu

SEQ ID NO: 1408142 - RNA, 16 nt, Human
acucuguucauuccuc

SEQ ID NO: 1408143 - RNA, 18 nt, Human
acucuguucauuccucca

SEQ ID NO: 1408144 - RNA, 19 nt, Human
acucuguucauuccuccag

SEQ ID NO: 1408145 - RNA, 15 nt, Human
acugaugcuuagaug

SEQ ID NO: 1408146 - RNA, 20 nt, Human
acugaugcugccccucaucu

SEQ ID NO: 1408147 - RNA, 19 nt, Human
acugaugcugccccucauc

SEQ ID NO: 1408148 - RNA, 15 nt, Human
acugaugcugccccu

SEQ ID NO: 1408149 - RNA, 14 nt, Human
acugaugcugcccc

SEQ ID NO: 1408150 - RNA, 12 nt, Human
acugaugcugcc

SEQ ID NO: 1408151 - RNA, 11 nt, Human
acugaugcugc

SEQ ID NO: 1408152 - RNA, 14 nt, Human
acugaccagaacua

SEQ ID NO: 1408153 - RNA, 12 nt, Human
acugaccagaac

SEQ ID NO: 1408154 - RNA, 15 nt, Human
acugaccagcagcuu

SEQ ID NO: 1408155 - RNA, 14 nt, Human
acugaccagcagcu

SEQ ID NO: 1408156 - RNA, 21 nt, Human
acugaauaccacucuguaauu

SEQ ID NO: 1408157 - RNA, 22 nt, Human
acugaauaccacucuguaauug

SEQ ID NO: 1408158 - RNA, 21 nt, Human
acugcaaaucaggcuuuuguu

SEQ ID NO: 1408159 - RNA, 20 nt, Human
acugcaaaucaggcuuuugu

SEQ ID NO: 1408160 - RNA, 18 nt, Human
acugcaaaucaggcuuuu

SEQ ID NO: 1408161 - RNA, 22 nt, Human
acugcaaaaagaaaaucuuuau

SEQ ID NO: 1408162 - RNA, 15 nt, Human
acugauuucagagug

SEQ ID NO: 1408163 - RNA, 12 nt, Human
acugauuucaga

SEQ ID NO: 1408164 - RNA, 20 nt, Human
acugauucacaucucauuuu

SEQ ID NO: 1408165 - RNA, 19 nt, Human
acugauucacaucucauuu

SEQ ID NO: 1408166 - RNA, 14 nt, Human
acuuuccauuacaa

SEQ ID NO: 1408167 - RNA, 22 nt, Human
acuuucagcugucuuuuggagg

SEQ ID NO: 1408168 - RNA, 15 nt, Human
acuuucagcugucuu

SEQ ID NO: 1408169 - RNA, 13 nt, Human
acuuucagcuguc

SEQ ID NO: 1408170 - RNA, 11 nt, Human
acuuucagcug

SEQ ID NO: 1408171 - RNA, 13 nt, Human
acuuuauguaguu

SEQ ID NO: 1408172 - RNA, 15 nt, Human
acuuuauuuuguguu

SEQ ID NO: 1408173 - RNA, 20 nt, Human
acuugggagaccuguaauca

SEQ ID NO: 1408174 - RNA, 13 nt, Human
acuugggaauaua

SEQ ID NO: 1408175 - RNA, 20 nt, Human
acuggaccacugggcaauga

SEQ ID NO: 1408176 - RNA, 16 nt, Human
acuggaccacugggca

SEQ ID NO: 1408177 - RNA, 15 nt, Human
acuggacagcuugug

SEQ ID NO: 1408178 - RNA, 14 nt, Human
acuggacagcuugu

SEQ ID NO: 1408179 - RNA, 13 nt, Human
acuggacagcuug

SEQ ID NO: 1408180 - RNA, 12 nt, Human
acuggacagcuu

SEQ ID NO: 1408181 - RNA, 17 nt, Human
acuggaauccuuucagc

SEQ ID NO: 1408182 - RNA, 16 nt, Human
acuggaauccuuucag

SEQ ID NO: 1408183 - RNA, 21 nt, Human
acuggaaucagcucaggacug

SEQ ID NO: 1408184 - RNA, 21 nt, Human
acuggaccacugggcaaugau

SEQ ID NO: 1408185 - RNA, 15 nt, Human
acuggacccuguugc

SEQ ID NO: 1408186 - RNA, 22 nt, Human
acuuaaagcuuucagaauaugu

SEQ ID NO: 1408187 - RNA, 16 nt, Human
acuuaaagcuuucaga

SEQ ID NO: 1408188 - RNA, 19 nt, Human
acuuaaacuugcaucacuu

SEQ ID NO: 1408189 - RNA, 14 nt, Human
acuuaaauaaugug

SEQ ID NO: 1408190 - RNA, 15 nt, Human
acuuaaauaauguga

SEQ ID NO: 1408191 - RNA, 16 nt, Human
acuucugccuggagac

SEQ ID NO: 1408192 - RNA, 13 nt, Human
acuucugccugga

SEQ ID NO: 1408193 - RNA, 12 nt, Human
acuucugccugg

SEQ ID NO: 1408194 - RNA, 23 nt, Human
acuuggcuggugugguacagaga

SEQ ID NO: 1408195 - RNA, 22 nt, Human
acuuggcuggugugguacagag

SEQ ID NO: 1408196 - RNA, 19 nt, Human
acuuggcuggugugguaca

SEQ ID NO: 1408197 - RNA, 14 nt, Human
acuuggcuggugug

SEQ ID NO: 1408198 - RNA, 13 nt, Human
acuuggcuggugu

SEQ ID NO: 1408199 - RNA, 16 nt, Human
acuuggcugcaggaau

SEQ ID NO: 1408200 - RNA, 23 nt, Human
acuuggcucgaaucucugugccu

SEQ ID NO: 1408201 - RNA, 22 nt, Human
acuuggcucgaaucucugugcc

SEQ ID NO: 1408202 - RNA, 19 nt, Human
acuucagcgguuuauauaa

SEQ ID NO: 1408203 - RNA, 18 nt, Human
acuucagcgguuuauaua

SEQ ID NO: 1408204 - RNA, 23 nt, Human
acuucaagcauggcuauuuuaua

SEQ ID NO: 1408205 - RNA, 19 nt, Human
acuucaagcauggcuauuu

SEQ ID NO: 1408206 - RNA, 20 nt, Human
acuucaaauccuugaagauu

SEQ ID NO: 1408207 - RNA, 15 nt, Human
accucaucuucuuca

SEQ ID NO: 1408208 - RNA, 18 nt, Human
accucaguuuuaucauuu

SEQ ID NO: 1408209 - RNA, 17 nt, Human
accucaguuuuaucauu

SEQ ID NO: 1408210 - RNA, 18 nt, Human
accccaaccugcucuccu

SEQ ID NO: 1408211 - RNA, 15 nt, Human
accucaggugaucca

SEQ ID NO: 1408212 - RNA, 13 nt, Human
accccaauccucc

SEQ ID NO: 1408213 - RNA, 21 nt, Human
accccaauuucggauuuuuuc

SEQ ID NO: 1408214 - RNA, 20 nt, Human
accccaauuucggauuuuuu

SEQ ID NO: 1408215 - RNA, 19 nt, Human
accccaaccugcucuccuc

SEQ ID NO: 1408216 - RNA, 20 nt, Human
accccaaccugcucuccucu

SEQ ID NO: 1408217 - RNA, 19 nt, Human
acccuuacaguaggagccc

SEQ ID NO: 1408218 - RNA, 13 nt, Human
acccuuacaguag

SEQ ID NO: 1408219 - RNA, 18 nt, Human
acccuguuccugcugcug

SEQ ID NO: 1408220 - RNA, 14 nt, Human
acccuguugcuaag

SEQ ID NO: 1408221 - RNA, 15 nt, Human
acccuguugcuaagc

SEQ ID NO: 1408222 - RNA, 21 nt, Human
acccuguuccugcugcugucu

SEQ ID NO: 1408223 - RNA, 12 nt, Human
acccuguugcua

SEQ ID NO: 1408224 - RNA, 17 nt, Human
acccuguuccugcugcu

SEQ ID NO: 1408225 - RNA, 16 nt, Human
acccuguuccugcugc

SEQ ID NO: 1408226 - RNA, 15 nt, Human
acccuguuccugcug

SEQ ID NO: 1408227 - RNA, 14 nt, Human
acccuguuccugcu

SEQ ID NO: 1408228 - RNA, 13 nt, Human
acccuguuccugc

SEQ ID NO: 1408229 - RNA, 17 nt, Human
acccuguggucuuccuc

SEQ ID NO: 1408230 - RNA, 14 nt, Human
accgguggggcugg

SEQ ID NO: 1408231 - RNA, 16 nt, Human
accggcucucaccugg

SEQ ID NO: 1408232 - RNA, 19 nt, Human
accggggccugggcaggag

SEQ ID NO: 1408233 - RNA, 17 nt, Human
accggccugccaggagg

SEQ ID NO: 1408234 - RNA, 15 nt, Human
accggccugccagga

SEQ ID NO: 1408235 - RNA, 13 nt, Human
accggccugccag

SEQ ID NO: 1408236 - RNA, 21 nt, Human
accggcucucaccuggcccug

SEQ ID NO: 1408237 - RNA, 14 nt, Human
accggcucucaccu

SEQ ID NO: 1408238 - RNA, 16 nt, Human
accggccugccaggag

SEQ ID NO: 1408239 - RNA, 23 nt, Human
accggcggaccccagccauccag

SEQ ID NO: 1408240 - RNA, 20 nt, Human
accucugccucagaaaacaa

SEQ ID NO: 1408241 - RNA, 19 nt, Human
accugcccuaccugcccca

SEQ ID NO: 1408242 - RNA, 12 nt, Human
accugcccugcc

SEQ ID NO: 1408243 - RNA, 13 nt, Human
accugcccugccc

SEQ ID NO: 1408244 - RNA, 16 nt, Human
accugcccugcccugc

SEQ ID NO: 1408245 - RNA, 17 nt, Human
accugcccugcccugcc

SEQ ID NO: 1408246 - RNA, 18 nt, Human
accugcccugcccugcca

SEQ ID NO: 1408247 - RNA, 20 nt, Human
accugcccugcccugccacc

SEQ ID NO: 1408248 - RNA, 21 nt, Human
accugcccugcccugccaccu

SEQ ID NO: 1408249 - RNA, 22 nt, Human
accugcccugcccugccaccug

SEQ ID NO: 1408250 - RNA, 18 nt, Human
accugcccuaccugcccc

SEQ ID NO: 1408251 - RNA, 23 nt, Human
accugcccugcccugccaccugu

SEQ ID NO: 1408252 - RNA, 14 nt, Human
accugucugucugu

SEQ ID NO: 1408253 - RNA, 18 nt, Human
accugucugucugucugu

SEQ ID NO: 1408254 - RNA, 20 nt, Human
accugucugucugucugucc

SEQ ID NO: 1408255 - RNA, 18 nt, Human
accucugccucagaaaac

SEQ ID NO: 1408256 - RNA, 17 nt, Human
accucugccucagaaaa

SEQ ID NO: 1408257 - RNA, 17 nt, Human
accucuugagccuugaa

SEQ ID NO: 1408258 - RNA, 19 nt, Human
accucuugagccuugaacu

SEQ ID NO: 1408259 - RNA, 20 nt, Human
accucuugagccuugaacuu

SEQ ID NO: 1408260 - RNA, 21 nt, Human
accucuugagccuugaacuuu

SEQ ID NO: 1408261 - RNA, 19 nt, Human
accuguguggacaggacua

SEQ ID NO: 1408262 - RNA, 16 nt, Human
accuguguggacagga

SEQ ID NO: 1408263 - RNA, 18 nt, Human
accugugagcccagcugg

SEQ ID NO: 1408264 - RNA, 17 nt, Human
accugugagcccagcug

SEQ ID NO: 1408265 - RNA, 15 nt, Human
accugugagcccagc

SEQ ID NO: 1408266 - RNA, 14 nt, Human
acguggcucagcca

SEQ ID NO: 1408267 - RNA, 16 nt, Human
acguggccucuugagc

SEQ ID NO: 1408268 - RNA, 15 nt, Human
acguggcccagagaa

SEQ ID NO: 1408269 - RNA, 20 nt, Human
acggagccacuccucugacu

SEQ ID NO: 1408270 - RNA, 19 nt, Human
acggagccacuccucugac

SEQ ID NO: 1408271 - RNA, 18 nt, Human
acggagccacuccucuga

SEQ ID NO: 1408272 - RNA, 23 nt, Human
acggaccaaagggagucugccag

SEQ ID NO: 1408273 - RNA, 17 nt, Human
acgucuggguggcccuu

SEQ ID NO: 1408274 - RNA, 19 nt, Human
acuaauauauuuaaaaaua

SEQ ID NO: 1408275 - RNA, 20 nt, Human
acuaauauauuuaaaaauaa

SEQ ID NO: 1408276 - RNA, 18 nt, Human
acuaauauauuuaaaaau

SEQ ID NO: 1408277 - RNA, 17 nt, Human
acuaauauauuuaaaaa

SEQ ID NO: 1408278 - RNA, 23 nt, Human
acuaacuaugcauggugccccag

SEQ ID NO: 1408279 - RNA, 15 nt, Human
acuaacuaugcaugg

SEQ ID NO: 1408280 - RNA, 15 nt, Human
acuaauagacaauuu

SEQ ID NO: 1408281 - RNA, 22 nt, Human
acuaaccuugccugguacagua

SEQ ID NO: 1408282 - RNA, 21 nt, Human
acuaaccuugccugguacagu

SEQ ID NO: 1408283 - RNA, 17 nt, Human
acuaaccuugccuggua

SEQ ID NO: 1408284 - RNA, 15 nt, Human
acuaaccuugccugg

SEQ ID NO: 1408285 - RNA, 18 nt, Human
acuaacguugagccccug

SEQ ID NO: 1408286 - RNA, 22 nt, Human
acuaacuagacaccaaaguucu

SEQ ID NO: 1408287 - RNA, 20 nt, Human
acuaacuagacaccaaaguu

SEQ ID NO: 1408288 - RNA, 19 nt, Human
acguggcucagccagcacu

SEQ ID NO: 1408289 - RNA, 17 nt, Human
acguggcucagccagca

SEQ ID NO: 1408290 - RNA, 18 nt, Human
acgcuggcaacacagagg

SEQ ID NO: 1408291 - RNA, 21 nt, Human
acggacaguuccagaagugug

SEQ ID NO: 1408292 - RNA, 17 nt, Human
acggacagagaccaaga

SEQ ID NO: 1408293 - RNA, 22 nt, Human
acggaaggguaaacaauauagu

SEQ ID NO: 1408294 - RNA, 16 nt, Human
acggaaggguaaacaa

SEQ ID NO: 1408295 - RNA, 23 nt, Human
acgcacugagcaacgcuauucca

SEQ ID NO: 1408296 - RNA, 15 nt, Human
acgcacggcagccac

SEQ ID NO: 1408297 - RNA, 17 nt, Human
acgcaccugccucagga

SEQ ID NO: 1408298 - RNA, 17 nt, Human
acgcacggcagccacag

SEQ ID NO: 1408299 - RNA, 18 nt, Human
acuaaugaaaacagaaug

SEQ ID NO: 1408300 - RNA, 19 nt, Human
acuaaugccuuacucuucu

SEQ ID NO: 1408301 - RNA, 22 nt, Human
acuaggccuugcggcuccucag

SEQ ID NO: 1408302 - RNA, 23 nt, Human
acuaggccuugcggcuccucagg

SEQ ID NO: 1408303 - RNA, 23 nt, Human
acuaggcccccacuugccucuuc

SEQ ID NO: 1408304 - RNA, 19 nt, Human
acuagggagccauuugaga

SEQ ID NO: 1408305 - RNA, 22 nt, Human
acuagggagccauguuucacaa

SEQ ID NO: 1408306 - RNA, 19 nt, Human
acuagggagccauguuuca

SEQ ID NO: 1408307 - RNA, 18 nt, Human
acuagggagccauguuuc

SEQ ID NO: 1408308 - RNA, 15 nt, Human
acuagggagccaugu

SEQ ID NO: 1408309 - RNA, 14 nt, Human
acuagggagccaug

SEQ ID NO: 1408310 - RNA, 14 nt, Human
acuauuguuacauu

SEQ ID NO: 1408311 - RNA, 22 nt, Human
acuauucuugauguaaaaucuu

SEQ ID NO: 1408312 - RNA, 20 nt, Human
acuauucuugauguaaaauc

SEQ ID NO: 1408313 - RNA, 23 nt, Human
acuauucuugauguaaaaucuug

SEQ ID NO: 1408314 - RNA, 15 nt, Human
acuauugcauuuaua

SEQ ID NO: 1408315 - RNA, 17 nt, Human
acuauugcuugcacaaa

SEQ ID NO: 1408316 - RNA, 18 nt, Human
acuagggaucccucaucu

SEQ ID NO: 1408317 - RNA, 16 nt, Human
acuagggaucccucau

SEQ ID NO: 1408318 - RNA, 18 nt, Human
acuaguauuucuaugaaa

SEQ ID NO: 1408319 - RNA, 19 nt, Human
acuauucuugauguaaaau

SEQ ID NO: 1408320 - RNA, 17 nt, Human
acuauucuugauguaaa

SEQ ID NO: 1408321 - RNA, 19 nt, Human
acuaguauuucuaugaaau

SEQ ID NO: 1408322 - RNA, 23 nt, Human
acacggucggggcaucuggccug

SEQ ID NO: 1408323 - RNA, 15 nt, Human
acacgggccugucca

SEQ ID NO: 1408324 - RNA, 20 nt, Human
acacggccacaucaaagagg

SEQ ID NO: 1408325 - RNA, 13 nt, Human
acacgggccuguc

SEQ ID NO: 1408326 - RNA, 14 nt, Human
acacggccacauca

SEQ ID NO: 1408327 - RNA, 12 nt, Human
acacggccacau

SEQ ID NO: 1408328 - RNA, 21 nt, Human
acaccacuacauucuguuaau

SEQ ID NO: 1408329 - RNA, 18 nt, Human
acaauuuuuuuuauuagu

SEQ ID NO: 1408330 - RNA, 24 nt, Human
acaauuuuuuuuauuaguauuguu

SEQ ID NO: 1408331 - RNA, 17 nt, Human
acaauuuuuuuuauuag

SEQ ID NO: 1408332 - RNA, 22 nt, Human
acaauuuuuuaucaugcauguc

SEQ ID NO: 1408333 - RNA, 16 nt, Human
acaauuuuuuaucaug

SEQ ID NO: 1408334 - RNA, 14 nt, Human
acacauuuuuuaaa

SEQ ID NO: 1408335 - RNA, 16 nt, Human
acacauuuuuuaaaug

SEQ ID NO: 1408336 - RNA, 18 nt, Human
acacauuuuuuaaaugca

SEQ ID NO: 1408337 - RNA, 19 nt, Human
acacauuuuuuaaaugcac

SEQ ID NO: 1408338 - RNA, 15 nt, Human
acaccacuacauucu

SEQ ID NO: 1408339 - RNA, 17 nt, Human
acaccacuacauucugu

SEQ ID NO: 1408340 - RNA, 20 nt, Human
acaccacuacauucuguuaa

SEQ ID NO: 1408341 - RNA, 21 nt, Human
acaauuaggcagacucuuuau

SEQ ID NO: 1408342 - RNA, 24 nt, Human
acaauucuaaaaugauuguaguaa

SEQ ID NO: 1408343 - RNA, 23 nt, Human
acaauucuaaaaugauuguagua

SEQ ID NO: 1408344 - RNA, 17 nt, Human
acaauucuaaaaugauu

SEQ ID NO: 1408345 - RNA, 14 nt, Human
acaauucuaaaaug

SEQ ID NO: 1408346 - RNA, 12 nt, Human
acaauucuaaaa

SEQ ID NO: 1408347 - RNA, 23 nt, Human
acaauuccucuacuaacaaucag

SEQ ID NO: 1408348 - RNA, 22 nt, Human
acaauuccucuacuaacaauca

SEQ ID NO: 1408349 - RNA, 18 nt, Human
acaauuuaugaauugaau

SEQ ID NO: 1408350 - RNA, 13 nt, Human
acaauuuauuaug

SEQ ID NO: 1408351 - RNA, 14 nt, Human
acaauuuauuaugg

SEQ ID NO: 1408352 - RNA, 22 nt, Human
acaaggauagaugcuggcccag

SEQ ID NO: 1408353 - RNA, 14 nt, Human
acagaacuucagaa

SEQ ID NO: 1408354 - RNA, 20 nt, Human
acagaacucuuucaaaaccu

SEQ ID NO: 1408355 - RNA, 18 nt, Human
acagaacucuuucaaaac

SEQ ID NO: 1408356 - RNA, 16 nt, Human
acagaacauagacaga

SEQ ID NO: 1408357 - RNA, 17 nt, Human
acagaaccccuacauga

SEQ ID NO: 1408358 - RNA, 18 nt, Human
acacuguguacugcaguu

SEQ ID NO: 1408359 - RNA, 18 nt, Human
acacuggggacuuggccu

SEQ ID NO: 1408360 - RNA, 22 nt, Human
acacuggggacuuggccucucu

SEQ ID NO: 1408361 - RNA, 17 nt, Human
acacuggggacuuggcc

SEQ ID NO: 1408362 - RNA, 23 nt, Human
acacuguguaaauacccauaugu

SEQ ID NO: 1408363 - RNA, 13 nt, Human
acacugggacuug

SEQ ID NO: 1408364 - RNA, 18 nt, Human
acacugggacuugcaaaa

SEQ ID NO: 1408365 - RNA, 19 nt, Human
acacugggacuugcaaaaa

SEQ ID NO: 1408366 - RNA, 20 nt, Human
acacugggagaaaugaaaaa

SEQ ID NO: 1408367 - RNA, 16 nt, Human
acagaggacacagaga

SEQ ID NO: 1408368 - RNA, 13 nt, Human
acagaggcagccc

SEQ ID NO: 1408369 - RNA, 23 nt, Human
acagaagggagggcagagcuggu

SEQ ID NO: 1408370 - RNA, 22 nt, Human
acagaagggagggcagagcugg

SEQ ID NO: 1408371 - RNA, 21 nt, Human
acagaagggagggcagagcug

SEQ ID NO: 1408372 - RNA, 19 nt, Human
acagaagggagggcagagc

SEQ ID NO: 1408373 - RNA, 17 nt, Human
acagaagggagggcaga

SEQ ID NO: 1408374 - RNA, 16 nt, Human
acagaagggagggcag

SEQ ID NO: 1408375 - RNA, 12 nt, Human
acagaagaaaca

SEQ ID NO: 1408376 - RNA, 21 nt, Human
acagaacuucagaaagacuug

SEQ ID NO: 1408377 - RNA, 20 nt, Human
acagaacuucagaaagacuu

SEQ ID NO: 1408378 - RNA, 19 nt, Human
acagaacuucagaaagacu

SEQ ID NO: 1408379 - RNA, 18 nt, Human
acagaacuucagaaagac

SEQ ID NO: 1408380 - RNA, 17 nt, Human
acagaacuucagaaaga

SEQ ID NO: 1408381 - RNA, 16 nt, Human
acagaagcuccaggua

SEQ ID NO: 1408382 - RNA, 12 nt, Human
aauuuuggauuu

SEQ ID NO: 1408383 - RNA, 14 nt, Human
aauuuugauguuuu

SEQ ID NO: 1408384 - RNA, 18 nt, Human
aauuuugugaagcaaaau

SEQ ID NO: 1408385 - RNA, 17 nt, Human
aauuuugugaagcaaaa

SEQ ID NO: 1408386 - RNA, 18 nt, Human
aauuuucaucuaggauuu

SEQ ID NO: 1408387 - RNA, 15 nt, Human
acaaacuuugcaucu

SEQ ID NO: 1408388 - RNA, 13 nt, Human
acaaacuuugcau

SEQ ID NO: 1408389 - RNA, 15 nt, Human
acaaaauggaauacu

SEQ ID NO: 1408390 - RNA, 14 nt, Human
acaaaauggaauac

SEQ ID NO: 1408391 - RNA, 13 nt, Human
acaaaauggaaua

SEQ ID NO: 1408392 - RNA, 20 nt, Human
acaaagaaacaaagauguua

SEQ ID NO: 1408393 - RNA, 17 nt, Human
acaaagaaacaaagaug

SEQ ID NO: 1408394 - RNA, 19 nt, Human
acaaacuuugcaucucagu

SEQ ID NO: 1408395 - RNA, 13 nt, Human
acaaacuuuuaua

SEQ ID NO: 1408396 - RNA, 12 nt, Human
acaaagaaauua

SEQ ID NO: 1408397 - RNA, 14 nt, Human
acaaagaaauuaug

SEQ ID NO: 1408398 - RNA, 16 nt, Human
acaaagaaauuaugug

SEQ ID NO: 1408399 - RNA, 16 nt, Human
acaaccucaacugccu

SEQ ID NO: 1408400 - RNA, 18 nt, Human
acaaagaaacaaagaugu

SEQ ID NO: 1408401 - RNA, 15 nt, Human
acaaccucaacugcc

SEQ ID NO: 1408402 - RNA, 21 nt, Human
acaaggaugaauuaaguuuuu

SEQ ID NO: 1408403 - RNA, 16 nt, Human
aauuguauuuuaguaa

SEQ ID NO: 1408404 - RNA, 14 nt, Human
aauuguauauugua

SEQ ID NO: 1408405 - RNA, 13 nt, Human
aauuguauauuca

SEQ ID NO: 1408406 - RNA, 14 nt, Human
aauuguauauucac

SEQ ID NO: 1408407 - RNA, 16 nt, Human
aauuguauauucacuu

SEQ ID NO: 1408408 - RNA, 17 nt, Human
aauuguauauucacuuu

SEQ ID NO: 1408409 - RNA, 16 nt, Human
aauuguaacuguucuu

SEQ ID NO: 1408410 - RNA, 14 nt, Human
aauuguaacuguuc

SEQ ID NO: 1408411 - RNA, 12 nt, Human
aauuguauauuc

SEQ ID NO: 1408412 - RNA, 21 nt, Human
aauuguaaaguaaaagcuaua

SEQ ID NO: 1408413 - RNA, 20 nt, Human
aauugugauuagacagaaca

SEQ ID NO: 1408414 - RNA, 18 nt, Human
aauugugauuagacagaa

SEQ ID NO: 1408415 - RNA, 21 nt, Human
aauugugcaguacuuugugca

SEQ ID NO: 1408416 - RNA, 16 nt, Human
aauuguguagccuuuu

SEQ ID NO: 1408417 - RNA, 15 nt, Human
aauuguguagccuuu

SEQ ID NO: 1408418 - RNA, 17 nt, Human
aauugugguuuauauau

SEQ ID NO: 1408419 - RNA, 16 nt, Human
aauugugguuuauaua

SEQ ID NO: 1408420 - RNA, 21 nt, Human
aauugugauuagacagaacac

SEQ ID NO: 1408421 - RNA, 17 nt, Human
aauuguguagccuuuuu

SEQ ID NO: 1408422 - RNA, 21 nt, Human
aauuguguagccuuuuuguau

SEQ ID NO: 1408423 - RNA, 12 nt, Human
aauugucugaaa

SEQ ID NO: 1408424 - RNA, 18 nt, Human
aauugucccuuaaacaaa

SEQ ID NO: 1408425 - RNA, 16 nt, Human
aauugucccuuaaaca

SEQ ID NO: 1408426 - RNA, 11 nt, Human
aauugucccuu

SEQ ID NO: 1408427 - RNA, 23 nt, Human
aauuuauuugaaugauuuuucuu

SEQ ID NO: 1408428 - RNA, 19 nt, Human
aauuuauuuccuaguucug

SEQ ID NO: 1408429 - RNA, 22 nt, Human
aauuuauuuccuaguucuguag

SEQ ID NO: 1408430 - RNA, 16 nt, Human
aauuuauuuccuaguu

SEQ ID NO: 1408431 - RNA, 13 nt, Human
aauuuauuauuaa

SEQ ID NO: 1408432 - RNA, 20 nt, Human
aauuucggauuuuuuccaaa

SEQ ID NO: 1408433 - RNA, 18 nt, Human
aauuucggauuuuuucca

SEQ ID NO: 1408434 - RNA, 17 nt, Human
aauuucggauuuuuucc

SEQ ID NO: 1408435 - RNA, 21 nt, Human
aauuucggauuuuuuccaaaa

SEQ ID NO: 1408436 - RNA, 16 nt, Human
aauuucaccuguaaac

SEQ ID NO: 1408437 - RNA, 17 nt, Human
aauuucaagguucuaac

SEQ ID NO: 1408438 - RNA, 16 nt, Human
aauuucaagguucuaa

SEQ ID NO: 1408439 - RNA, 15 nt, Human
aauuucaagguucua

SEQ ID NO: 1408440 - RNA, 14 nt, Human
aauuucaagguucu

SEQ ID NO: 1408441 - RNA, 16 nt, Human
aauuucaaaaugcuuu

SEQ ID NO: 1408442 - RNA, 12 nt, Human
aauuucaaaaug

SEQ ID NO: 1408443 - RNA, 13 nt, Human
aauuuauuuucuu

SEQ ID NO: 1408444 - RNA, 21 nt, Human
aauuucaggaggaauacugaa

SEQ ID NO: 1408445 - RNA, 23 nt, Human
aauuucacugucuuuaauucugu

SEQ ID NO: 1408446 - RNA, 23 nt, Human
aauuucagacucccauuccugaa

SEQ ID NO: 1408447 - RNA, 13 nt, Human
aauuucagacucc

SEQ ID NO: 1408448 - RNA, 18 nt, Human
aauuucaagguucuaacc

SEQ ID NO: 1408449 - RNA, 20 nt, Human
aauuucaccuguaaaccuga

SEQ ID NO: 1408450 - RNA, 19 nt, Human
aauuucaccuguaaaccug

SEQ ID NO: 1408451 - RNA, 21 nt, Human
aauuuccugggagcuuuugua

SEQ ID NO: 1408452 - RNA, 18 nt, Human
aauuuccugggagcuuuu

SEQ ID NO: 1408453 - RNA, 18 nt, Human
acaugccauuuguacuga

SEQ ID NO: 1408454 - RNA, 17 nt, Human
acaugccauuuguacug

SEQ ID NO: 1408455 - RNA, 21 nt, Human
acaugccauuuguacugaccc

SEQ ID NO: 1408456 - RNA, 14 nt, Human
acaugccacaagga

SEQ ID NO: 1408457 - RNA, 23 nt, Human
acaugauuuccuugaauguggcu

SEQ ID NO: 1408458 - RNA, 18 nt, Human
acaugcaaggucauuuuu

SEQ ID NO: 1408459 - RNA, 17 nt, Human
acaugcaaggucauuuu

SEQ ID NO: 1408460 - RNA, 15 nt, Human
acaucauucauuuuu

SEQ ID NO: 1408461 - RNA, 21 nt, Human
acaucauuacuauaagaacuu

SEQ ID NO: 1408462 - RNA, 18 nt, Human
acaucauuacuauaagaa

SEQ ID NO: 1408463 - RNA, 15 nt, Human
acaucauuacuauaa

SEQ ID NO: 1408464 - RNA, 15 nt, Human
acauccuccucccac

SEQ ID NO: 1408465 - RNA, 13 nt, Human
acauccuccuccc

SEQ ID NO: 1408466 - RNA, 21 nt, Human
acauccuccacguucugcuca

SEQ ID NO: 1408467 - RNA, 21 nt, Human
acaugauuuccuugaaugugg

SEQ ID NO: 1408468 - RNA, 16 nt, Human
acaugcaaggucauuu

SEQ ID NO: 1408469 - RNA, 17 nt, Human
acauaauucacucugag

SEQ ID NO: 1408470 - RNA, 16 nt, Human
acauaauucacucuga

SEQ ID NO: 1408471 - RNA, 23 nt, Human
acauaauuauccaggaagggaau

SEQ ID NO: 1408472 - RNA, 17 nt, Human
acauaauuauccaggaa

SEQ ID NO: 1408473 - RNA, 19 nt, Human
acauaagcuauuuuucuaa

SEQ ID NO: 1408474 - RNA, 20 nt, Human
acauaagcuauuuuucuaac

SEQ ID NO: 1408475 - RNA, 18 nt, Human
acauaagcuauuuuucua

SEQ ID NO: 1408476 - RNA, 17 nt, Human
acauaagcuauuuuucu

SEQ ID NO: 1408477 - RNA, 13 nt, Human
acauaagcuauuu

SEQ ID NO: 1408478 - RNA, 12 nt, Human
acauaagcuauu

SEQ ID NO: 1408479 - RNA, 18 nt, Human
acauaagccauuauucac

SEQ ID NO: 1408480 - RNA, 15 nt, Human
acauaagccauuauu

SEQ ID NO: 1408481 - RNA, 16 nt, Human
acaucagguuuuuccc

SEQ ID NO: 1408482 - RNA, 15 nt, Human
acaucagguuuuucc

SEQ ID NO: 1408483 - RNA, 12 nt, Human
acaucagcccuu

SEQ ID NO: 1408484 - RNA, 21 nt, Human
acauaauuuaguuucauauaa

SEQ ID NO: 1408485 - RNA, 20 nt, Human
acauaauucacucugagugu

SEQ ID NO: 1408486 - RNA, 18 nt, Human
acauaauucacucugagu

SEQ ID NO: 1408487 - RNA, 14 nt, Human
acagcugccucuuc

SEQ ID NO: 1408488 - RNA, 21 nt, Human
acagugagccugaauuuuguu

SEQ ID NO: 1408489 - RNA, 18 nt, Human
acagugagccugaauuuu

SEQ ID NO: 1408490 - RNA, 23 nt, Human
acagugagcuuggaaaggaccag

SEQ ID NO: 1408491 - RNA, 18 nt, Human
acaggugcuaauuuguuu

SEQ ID NO: 1408492 - RNA, 16 nt, Human
acaggucuucaucgaa

SEQ ID NO: 1408493 - RNA, 15 nt, Human
acagcugccucuucc

SEQ ID NO: 1408494 - RNA, 16 nt, Human
acagggcggggguggc

SEQ ID NO: 1408495 - RNA, 21 nt, Human
acagggccuuuggcaggugca

SEQ ID NO: 1408496 - RNA, 14 nt, Human
acagugcagugcgc

SEQ ID NO: 1408497 - RNA, 19 nt, Human
acaguggggaaugaagaua

SEQ ID NO: 1408498 - RNA, 15 nt, Human
acaguggggaaugaa

SEQ ID NO: 1408499 - RNA, 22 nt, Human
accagcagacagagccaggaga

SEQ ID NO: 1408500 - RNA, 20 nt, Human
accagcagacagagccagga

SEQ ID NO: 1408501 - RNA, 19 nt, Human
accagcagacagagccagg

SEQ ID NO: 1408502 - RNA, 19 nt, Human
accacgacuggccagggcc

SEQ ID NO: 1408503 - RNA, 24 nt, Human
accacgacuggccagggccacgcu

SEQ ID NO: 1408504 - RNA, 16 nt, Human
accacgacuggccagg

SEQ ID NO: 1408505 - RNA, 13 nt, Human
accacgacuggcc

SEQ ID NO: 1408506 - RNA, 22 nt, Human
accaccuuuguuucucccccau

SEQ ID NO: 1408507 - RNA, 20 nt, Human
accaccuuuguuucuccccc

SEQ ID NO: 1408508 - RNA, 14 nt, Human
accagcagaaaugc

SEQ ID NO: 1408509 - RNA, 14 nt, Human
accacccugagccg

SEQ ID NO: 1408510 - RNA, 13 nt, Human
accacccugagcc

SEQ ID NO: 1408511 - RNA, 12 nt, Human
accacccugagc

SEQ ID NO: 1408512 - RNA, 19 nt, Human
accacccucacuggcucuc

SEQ ID NO: 1408513 - RNA, 20 nt, Human
accacccucacuggcucucc

SEQ ID NO: 1408514 - RNA, 13 nt, Human
accacccucacug

SEQ ID NO: 1408515 - RNA, 22 nt, Human
accaccccgccugcccucaugg

SEQ ID NO: 1408516 - RNA, 20 nt, Human
accaagauacuuaagugcug

SEQ ID NO: 1408517 - RNA, 15 nt, Human
accaagauacuuaag

SEQ ID NO: 1408518 - RNA, 21 nt, Human
accaagauacuuaagugcugc

SEQ ID NO: 1408519 - RNA, 22 nt, Human
accaacuuuucuauuaaaagug

SEQ ID NO: 1408520 - RNA, 21 nt, Human
accaacuuuucuauuaaaagu

SEQ ID NO: 1408521 - RNA, 23 nt, Human
acauuucucuaagagaacaaugu

SEQ ID NO: 1408522 - RNA, 12 nt, Human
acauuucucaau

SEQ ID NO: 1408523 - RNA, 20 nt, Human
acauuucuauagccaaaaau

SEQ ID NO: 1408524 - RNA, 13 nt, Human
acauuucuaaaau

SEQ ID NO: 1408525 - RNA, 18 nt, Human
acauuuccuuacagaacu

SEQ ID NO: 1408526 - RNA, 18 nt, Human
acaugugaaaagaauaga

SEQ ID NO: 1408527 - RNA, 17 nt, Human
acaugugaaaagaauag

SEQ ID NO: 1408528 - RNA, 14 nt, Human
acaugugaaaagaa

SEQ ID NO: 1408529 - RNA, 16 nt, Human
acauuuccuaaauaua

SEQ ID NO: 1408530 - RNA, 17 nt, Human
acauuuccuaaauauau

SEQ ID NO: 1408531 - RNA, 15 nt, Human
acccaucaacaaaaa

SEQ ID NO: 1408532 - RNA, 20 nt, Human
acccauauuguaaaacaggu

SEQ ID NO: 1408533 - RNA, 16 nt, Human
acccauauuguaaaac

SEQ ID NO: 1408534 - RNA, 23 nt, Human
acccauauccuuacccuccuugg

SEQ ID NO: 1408535 - RNA, 22 nt, Human
acccaguuucuaaacuggagac

SEQ ID NO: 1408536 - RNA, 23 nt, Human
acccaguuucuaaacuggagacu

SEQ ID NO: 1408537 - RNA, 22 nt, Human
acccaccgggccacuccuuccu

SEQ ID NO: 1408538 - RNA, 19 nt, Human
acccaccgggccacuccuu

SEQ ID NO: 1408539 - RNA, 18 nt, Human
acccaccgggccacuccu

SEQ ID NO: 1408540 - RNA, 16 nt, Human
acccaccgggccacuc

SEQ ID NO: 1408541 - RNA, 14 nt, Human
acccaccgggccac

SEQ ID NO: 1408542 - RNA, 17 nt, Human
acccaccaacccucagg

SEQ ID NO: 1408543 - RNA, 14 nt, Human
acccacaugcucca

SEQ ID NO: 1408544 - RNA, 23 nt, Human
acccacaugccauuuguacugac

SEQ ID NO: 1408545 - RNA, 22 nt, Human
acccacacucagauccuccuca

SEQ ID NO: 1408546 - RNA, 23 nt, Human
acccacacucagauccuccucau

SEQ ID NO: 1408547 - RNA, 18 nt, Human
acccaccaacccucaggg

SEQ ID NO: 1408548 - RNA, 19 nt, Human
acccaccaacccucagggc

SEQ ID NO: 1408549 - RNA, 16 nt, Human
acccaccaguugaauu

SEQ ID NO: 1408550 - RNA, 12 nt, Human
acccacccagaa

SEQ ID NO: 1408551 - RNA, 12 nt, Human
acccaccccugc

SEQ ID NO: 1408552 - RNA, 15 nt, Human
acccaccccugcaca

SEQ ID NO: 1408553 - RNA, 15 nt, Human
acccacccagaauga

SEQ ID NO: 1408554 - RNA, 22 nt, Human
accauagcacaggcuaauuuuu

SEQ ID NO: 1408555 - RNA, 17 nt, Human
accaucaaguugugcca

SEQ ID NO: 1408556 - RNA, 22 nt, Human
accaucaccagaauuaauuuua

SEQ ID NO: 1408557 - RNA, 13 nt, Human
accaucacugagu

SEQ ID NO: 1408558 - RNA, 20 nt, Human
accaucagaaacacccucac

SEQ ID NO: 1408559 - RNA, 23 nt, Human
accaucagaaacacccucacacu

SEQ ID NO: 1408560 - RNA, 15 nt, Human
accauccaccaggcc

SEQ ID NO: 1408561 - RNA, 15 nt, Human
accaucucuccaacu

SEQ ID NO: 1408562 - RNA, 22 nt, Human
ggcucagccccaccccagggca

SEQ ID NO: 1408563 - RNA, 23 nt, Human
ggcucagccccaccccagggcag

SEQ ID NO: 1408564 - RNA, 15 nt, Human
ggcucagccagcacu

SEQ ID NO: 1408565 - RNA, 22 nt, Human
ggcguaggcuacagagaagccu

SEQ ID NO: 1408566 - RNA, 21 nt, Human
ggcguaggcuacagagaagcc

SEQ ID NO: 1408567 - RNA, 20 nt, Human
ggcguaggcuacagagaagc

SEQ ID NO: 1408568 - RNA, 19 nt, Human
ggcguaggcuacagagaag

SEQ ID NO: 1408569 - RNA, 17 nt, Human
ggcguaggcuacagaga

SEQ ID NO: 1408570 - RNA, 15 nt, Human
ggcguaggcuacaga

SEQ ID NO: 1408571 - RNA, 21 nt, Human
ggcguaaguacagagaagcca

SEQ ID NO: 1408572 - RNA, 22 nt, Human
ggcguaaguacagagaagccau

SEQ ID NO: 1408573 - RNA, 20 nt, Human
ggcguaaguacagagaagcc

SEQ ID NO: 1408574 - RNA, 19 nt, Human
ggcguaaguacagagaagc

SEQ ID NO: 1408575 - RNA, 18 nt, Human
ggcguaaguacagagaag

SEQ ID NO: 1408576 - RNA, 16 nt, Human
ggcguaaguacagaga

SEQ ID NO: 1408577 - RNA, 15 nt, Human
ggcguaaguacagag

SEQ ID NO: 1408578 - RNA, 14 nt, Human
ggcguaaguacaga

SEQ ID NO: 1408579 - RNA, 11 nt, Human
ggcgaccuccu

SEQ ID NO: 1408580 - RNA, 18 nt, Human
ggcgagaagggcugcuuc

SEQ ID NO: 1408581 - RNA, 22 nt, Human
ggcgaagcguuguccucagccc

SEQ ID NO: 1408582 - RNA, 15 nt, Human
ggccuuuuucauuua

SEQ ID NO: 1408583 - RNA, 23 nt, Human
ggccuuugcgcuccuggcccagc

SEQ ID NO: 1408584 - RNA, 14 nt, Human
ggccuuugcgcucc

SEQ ID NO: 1408585 - RNA, 16 nt, Human
ggccuuugagcucaga

SEQ ID NO: 1408586 - RNA, 14 nt, Human
ggccuuggccugga

SEQ ID NO: 1408587 - RNA, 19 nt, Human
ggccuugcggcuccucagg

SEQ ID NO: 1408588 - RNA, 18 nt, Human
ggccuugcggcuccucag

SEQ ID NO: 1408589 - RNA, 17 nt, Human
ggccuugcggcuccuca

SEQ ID NO: 1408590 - RNA, 18 nt, Human
ggccuuguucugucacca

SEQ ID NO: 1408591 - RNA, 14 nt, Human
ggccuuuaaaauuu

SEQ ID NO: 1408592 - RNA, 22 nt, Human
ggccuuuaaaauuuuuuuagaa

SEQ ID NO: 1408593 - RNA, 16 nt, Human
ggccuuguucugucac

SEQ ID NO: 1408594 - RNA, 13 nt, Human
ggccuuguucugu

SEQ ID NO: 1408595 - RNA, 12 nt, Human
ggccuugggcuc

SEQ ID NO: 1408596 - RNA, 13 nt, Human
ggccuugggcucc

SEQ ID NO: 1408597 - RNA, 18 nt, Human
ggccuuggccuggagcac

SEQ ID NO: 1408598 - RNA, 17 nt, Human
ggccuuggccuggagca

SEQ ID NO: 1408599 - RNA, 16 nt, Human
ggccuuggccuggagc

SEQ ID NO: 1408600 - RNA, 15 nt, Human
ggccuuggccuggag

SEQ ID NO: 1408601 - RNA, 13 nt, Human
ggccuuugagcuc

SEQ ID NO: 1408602 - RNA, 22 nt, Human
ggccuguguucuuccuggccgc

SEQ ID NO: 1408603 - RNA, 21 nt, Human
ggccuguguucuuccuggccg

SEQ ID NO: 1408604 - RNA, 19 nt, Human
ggccuguguucuuccuggc

SEQ ID NO: 1408605 - RNA, 16 nt, Human
ggccuguguucuuccu

SEQ ID NO: 1408606 - RNA, 23 nt, Human
ggccuguguagcugugaccugcu

SEQ ID NO: 1408607 - RNA, 22 nt, Human
ggccuguguagcugugaccugc

SEQ ID NO: 1408608 - RNA, 21 nt, Human
ggccuguguagcugugaccug

SEQ ID NO: 1408609 - RNA, 20 nt, Human
ggccuggccagugcccugau

SEQ ID NO: 1408610 - RNA, 19 nt, Human
ggccuggccagugcccuga

SEQ ID NO: 1408611 - RNA, 16 nt, Human
ggccuggccagugccc

SEQ ID NO: 1408612 - RNA, 14 nt, Human
ggccuggccagugc

SEQ ID NO: 1408613 - RNA, 20 nt, Human
ggccuguguagcugugaccu

SEQ ID NO: 1408614 - RNA, 19 nt, Human
ggccuguguagcugugacc

SEQ ID NO: 1408615 - RNA, 17 nt, Human
ggccuguguagcuguga

SEQ ID NO: 1408616 - RNA, 21 nt, Human
ggccuggacuuuccugcaacu

SEQ ID NO: 1408617 - RNA, 18 nt, Human
ggccuggacuuuccugca

SEQ ID NO: 1408618 - RNA, 20 nt, Human
ggccugaucagaccacggcu

SEQ ID NO: 1408619 - RNA, 18 nt, Human
ggccugaucagaccacgg

SEQ ID NO: 1408620 - RNA, 15 nt, Human
ggccugaucagacca

SEQ ID NO: 1408621 - RNA, 18 nt, Human
ggccuggagauccuccug

SEQ ID NO: 1408622 - RNA, 19 nt, Human
ggccuggagauccuccugc

SEQ ID NO: 1408623 - RNA, 17 nt, Human
ggccuggagauccuccu

SEQ ID NO: 1408624 - RNA, 15 nt, Human
ggccuggagauccuc

SEQ ID NO: 1408625 - RNA, 14 nt, Human
ggccuggagauccu

SEQ ID NO: 1408626 - RNA, 11 nt, Human
ggccuggagau

SEQ ID NO: 1408627 - RNA, 20 nt, Human
ggccucauguggcuggaaga

SEQ ID NO: 1408628 - RNA, 19 nt, Human
ggccucauguggcuggaag

SEQ ID NO: 1408629 - RNA, 17 nt, Human
ggccucauguggcugga

SEQ ID NO: 1408630 - RNA, 16 nt, Human
ggccucauguggcugg

SEQ ID NO: 1408631 - RNA, 15 nt, Human
ggccucauguggcug

SEQ ID NO: 1408632 - RNA, 15 nt, Human
ggccggccagccccu

SEQ ID NO: 1408633 - RNA, 19 nt, Human
ggcccuucccacaggacau

SEQ ID NO: 1408634 - RNA, 20 nt, Human
ggcccuuaugacugccaaga

SEQ ID NO: 1408635 - RNA, 12 nt, Human
ggccgcugccac

SEQ ID NO: 1408636 - RNA, 17 nt, Human
ggccgcugaguggcagg

SEQ ID NO: 1408637 - RNA, 23 nt, Human
ggccgcccccagcccccuccugg

SEQ ID NO: 1408638 - RNA, 12 nt, Human
ggccgcccccug

SEQ ID NO: 1408639 - RNA, 15 nt, Human
ggccgaugcccagag

SEQ ID NO: 1408640 - RNA, 16 nt, Human
ggccgaguccaagcug

SEQ ID NO: 1408641 - RNA, 13 nt, Human
ggccgaguccaag

SEQ ID NO: 1408642 - RNA, 18 nt, Human
ggcccagggcccagagcc

SEQ ID NO: 1408643 - RNA, 17 nt, Human
ggcccagggcccagagc

SEQ ID NO: 1408644 - RNA, 16 nt, Human
ggcccagggcccagag

SEQ ID NO: 1408645 - RNA, 15 nt, Human
ggccccagcacagcu

SEQ ID NO: 1408646 - RNA, 17 nt, Human
ggccccacccucgggga

SEQ ID NO: 1408647 - RNA, 23 nt, Human
ggccccacccugggcccugggcu

SEQ ID NO: 1408648 - RNA, 21 nt, Human
ggccccacccugggcccuggg

SEQ ID NO: 1408649 - RNA, 17 nt, Human
ggccccacccugggccc

SEQ ID NO: 1408650 - RNA, 15 nt, Human
ggccccacccugggc

SEQ ID NO: 1408651 - RNA, 20 nt, Human
ggcccaggucagccacuguu

SEQ ID NO: 1408652 - RNA, 18 nt, Human
ggcccaggucagccacug

SEQ ID NO: 1408653 - RNA, 22 nt, Human
ggcccagggcccagagcccagc

SEQ ID NO: 1408654 - RNA, 21 nt, Human
ggcccagggcccagagcccag

SEQ ID NO: 1408655 - RNA, 19 nt, Human
ggcccagggcccagagccc

SEQ ID NO: 1408656 - RNA, 12 nt, Human
ggccccacccuc

SEQ ID NO: 1408657 - RNA, 13 nt, Human
ggccccacccugg

SEQ ID NO: 1408658 - RNA, 23 nt, Human
ggccccacccucguggacaccug

SEQ ID NO: 1408659 - RNA, 22 nt, Human
ggccaugacccugccucuccca

SEQ ID NO: 1408660 - RNA, 20 nt, Human
ggccaugacccugccucucc

SEQ ID NO: 1408661 - RNA, 18 nt, Human
ggccaugacccugccucu

SEQ ID NO: 1408662 - RNA, 17 nt, Human
ggccaugacccugccuc

SEQ ID NO: 1408663 - RNA, 16 nt, Human
ggccaugacccugccu

SEQ ID NO: 1408664 - RNA, 22 nt, Human
ggccaucugggcuccuccaggg

SEQ ID NO: 1408665 - RNA, 17 nt, Human
ggccaucugcuccugga

SEQ ID NO: 1408666 - RNA, 16 nt, Human
ggccaucugcuccugg

SEQ ID NO: 1408667 - RNA, 14 nt, Human
ggccaucugcuccu

SEQ ID NO: 1408668 - RNA, 13 nt, Human
ggccaucugcucc

SEQ ID NO: 1408669 - RNA, 22 nt, Human
ggccaugauggcaacagaucug

SEQ ID NO: 1408670 - RNA, 18 nt, Human
ggccaugauggcaacaga

SEQ ID NO: 1408671 - RNA, 15 nt, Human
ggccaugauggcaac

SEQ ID NO: 1408672 - RNA, 23 nt, Human
ggccagggccccucacccugccu

SEQ ID NO: 1408673 - RNA, 21 nt, Human
ggccagggccacgcuccagcu

SEQ ID NO: 1408674 - RNA, 20 nt, Human
ggccagggccacgcuccagc

SEQ ID NO: 1408675 - RNA, 13 nt, Human
ggccagggcagag

SEQ ID NO: 1408676 - RNA, 20 nt, Human
ggccagugcccugaucccag

SEQ ID NO: 1408677 - RNA, 19 nt, Human
ggccagugcccugauccca

SEQ ID NO: 1408678 - RNA, 22 nt, Human
ggccauauuuaccucagccugg

SEQ ID NO: 1408679 - RNA, 21 nt, Human
ggccauauuuaccucagccug

SEQ ID NO: 1408680 - RNA, 20 nt, Human
ggccauauuuaccucagccu

SEQ ID NO: 1408681 - RNA, 19 nt, Human
ggccauauuuaccucagcc

SEQ ID NO: 1408682 - RNA, 18 nt, Human
ggccauauuuaccucagc

SEQ ID NO: 1408683 - RNA, 21 nt, Human
ggccagugcccugaucccaga

SEQ ID NO: 1408684 - RNA, 19 nt, Human
ggccagcagcaccugcccu

SEQ ID NO: 1408685 - RNA, 18 nt, Human
ggccagcagcaccugccc

SEQ ID NO: 1408686 - RNA, 12 nt, Human
ggccagcagcac

SEQ ID NO: 1408687 - RNA, 19 nt, Human
ggccagaggcccccagccc

SEQ ID NO: 1408688 - RNA, 18 nt, Human
ggccagaggcccccagcc

SEQ ID NO: 1408689 - RNA, 16 nt, Human
ggccagaggcccccag

SEQ ID NO: 1408690 - RNA, 15 nt, Human
ggccagagcccacuc

SEQ ID NO: 1408691 - RNA, 17 nt, Human
ggccagagcccacucca

SEQ ID NO: 1408692 - RNA, 22 nt, Human
ggccagagcuacccgcagaguu

SEQ ID NO: 1408693 - RNA, 13 nt, Human
ggccagagcccac

SEQ ID NO: 1408694 - RNA, 12 nt, Human
ggccagagccca

SEQ ID NO: 1408695 - RNA, 14 nt, Human
ggccagagccaggg

SEQ ID NO: 1408696 - RNA, 13 nt, Human
ggccagagccagg

SEQ ID NO: 1408697 - RNA, 12 nt, Human
ggccagagccag

SEQ ID NO: 1408698 - RNA, 14 nt, Human
ggccagagccaagg

SEQ ID NO: 1408699 - RNA, 11 nt, Human
ggccagagcca

SEQ ID NO: 1408700 - RNA, 21 nt, Human
ggcauuuuuaccaucacugag

SEQ ID NO: 1408701 - RNA, 18 nt, Human
ggccagggagaagcuccu

SEQ ID NO: 1408702 - RNA, 17 nt, Human
ggccagggagaagcucc

SEQ ID NO: 1408703 - RNA, 16 nt, Human
ggccagggagaagcuc

SEQ ID NO: 1408704 - RNA, 15 nt, Human
ggccagggagaagcu

SEQ ID NO: 1408705 - RNA, 19 nt, Human
ggccaggcuggucuaaaac

SEQ ID NO: 1408706 - RNA, 18 nt, Human
ggccaggcuugucucgaa

SEQ ID NO: 1408707 - RNA, 15 nt, Human
ggcauuuuuauuuua

SEQ ID NO: 1408708 - RNA, 21 nt, Human
ggcaucuggccuggccagugc

SEQ ID NO: 1408709 - RNA, 18 nt, Human
ggcaucuggccuggccag

SEQ ID NO: 1408710 - RNA, 16 nt, Human
ggcaucuggccuggcc

SEQ ID NO: 1408711 - RNA, 16 nt, Human
ggcaucucugggcugg

SEQ ID NO: 1408712 - RNA, 17 nt, Human
ggcaucucugggcugga

SEQ ID NO: 1408713 - RNA, 14 nt, Human
ggcaucucugggcu

SEQ ID NO: 1408714 - RNA, 13 nt, Human
ggcaucucugggc

SEQ ID NO: 1408715 - RNA, 12 nt, Human
ggcaucucuggg

SEQ ID NO: 1408716 - RNA, 20 nt, Human
ggcauccuuccucacaccag

SEQ ID NO: 1408717 - RNA, 17 nt, Human
ggcauccucuuuuucca

SEQ ID NO: 1408718 - RNA, 16 nt, Human
ggcauccuccagcccc

SEQ ID NO: 1408719 - RNA, 14 nt, Human
ggcauccuccagcc

SEQ ID NO: 1408720 - RNA, 13 nt, Human
ggcaucccugggc

SEQ ID NO: 1408721 - RNA, 14 nt, Human
ggcaucccugggcc

SEQ ID NO: 1408722 - RNA, 12 nt, Human
ggcaucccuggg

SEQ ID NO: 1408723 - RNA, 22 nt, Human
ggcauccagagucccugccugg

SEQ ID NO: 1408724 - RNA, 15 nt, Human
ggcauagcucugggg

SEQ ID NO: 1408725 - RNA, 13 nt, Human
ggcauagcucugg

SEQ ID NO: 1408726 - RNA, 20 nt, Human
ggcaccagacacccaggacu

SEQ ID NO: 1408727 - RNA, 19 nt, Human
ggcaccagacacccaggac

SEQ ID NO: 1408728 - RNA, 18 nt, Human
ggcaccagacacccagga

SEQ ID NO: 1408729 - RNA, 17 nt, Human
ggcaccagacacccagg

SEQ ID NO: 1408730 - RNA, 16 nt, Human
ggcacugggcaugagg

SEQ ID NO: 1408731 - RNA, 15 nt, Human
ggcacugggcaugag

SEQ ID NO: 1408732 - RNA, 15 nt, Human
ggcacuggggcaggg

SEQ ID NO: 1408733 - RNA, 16 nt, Human
ggcacuggcgaggaga

SEQ ID NO: 1408734 - RNA, 22 nt, Human
ggagcccaggccaggacucugc

SEQ ID NO: 1408735 - RNA, 24 nt, Human
ggagcccaggccaggacucugcag

SEQ ID NO: 1408736 - RNA, 16 nt, Human
ggagcccaggccagga

SEQ ID NO: 1408737 - RNA, 15 nt, Human
ggagcccaggccagg

SEQ ID NO: 1408738 - RNA, 14 nt, Human
ggagcccaggccag

SEQ ID NO: 1408739 - RNA, 16 nt, Human
ggagcccagcucugaa

SEQ ID NO: 1408740 - RNA, 23 nt, Human
ggagcccacuguccugggccugc

SEQ ID NO: 1408741 - RNA, 22 nt, Human
ggagcccacuguccugggccug

SEQ ID NO: 1408742 - RNA, 20 nt, Human
ggagcccacuguccugggcc

SEQ ID NO: 1408743 - RNA, 18 nt, Human
ggagcccacuguccuggg

SEQ ID NO: 1408744 - RNA, 17 nt, Human
ggagcccacuguccugg

SEQ ID NO: 1408745 - RNA, 14 nt, Human
ggagcccacugucc

SEQ ID NO: 1408746 - RNA, 12 nt, Human
ggagccagcucu

SEQ ID NO: 1408747 - RNA, 14 nt, Human
ggagccagccgagc

SEQ ID NO: 1408748 - RNA, 21 nt, Human
ggagccacuccucugacucag

SEQ ID NO: 1408749 - RNA, 19 nt, Human
ggagccacuccucugacuc

SEQ ID NO: 1408750 - RNA, 16 nt, Human
ggagccacuccucuga

SEQ ID NO: 1408751 - RNA, 15 nt, Human
ggagccaccaguucu

SEQ ID NO: 1408752 - RNA, 14 nt, Human
ggagccaccaguuc

SEQ ID NO: 1408753 - RNA, 16 nt, Human
ggagccaagggaugga

SEQ ID NO: 1408754 - RNA, 18 nt, Human
ggagccaagggauggaca

SEQ ID NO: 1408755 - RNA, 16 nt, Human
ggagcugccuggaccc

SEQ ID NO: 1408756 - RNA, 15 nt, Human
ggagcugccuggacc

SEQ ID NO: 1408757 - RNA, 14 nt, Human
ggagcugccuggac

SEQ ID NO: 1408758 - RNA, 13 nt, Human
ggagcugccugga

SEQ ID NO: 1408759 - RNA, 11 nt, Human
ggagcugccug

SEQ ID NO: 1408760 - RNA, 18 nt, Human
ggagcccccagccuguca

SEQ ID NO: 1408761 - RNA, 17 nt, Human
ggagcccccagccuguc

SEQ ID NO: 1408762 - RNA, 16 nt, Human
ggagcccccagccugu

SEQ ID NO: 1408763 - RNA, 15 nt, Human
ggagcccccagccug

SEQ ID NO: 1408764 - RNA, 14 nt, Human
ggagcccccagccu

SEQ ID NO: 1408765 - RNA, 13 nt, Human
ggagcccccagcc

SEQ ID NO: 1408766 - RNA, 22 nt, Human
ggagcccccacccuguuccugc

SEQ ID NO: 1408767 - RNA, 20 nt, Human
ggagcugugaguucucccug

SEQ ID NO: 1408768 - RNA, 23 nt, Human
ggagcugguuagaaaugcagaau

SEQ ID NO: 1408769 - RNA, 18 nt, Human
ggagcugguuagaaaugc

SEQ ID NO: 1408770 - RNA, 17 nt, Human
ggagcuggggaucccuc

SEQ ID NO: 1408771 - RNA, 14 nt, Human
ggagcugggccugg

SEQ ID NO: 1408772 - RNA, 13 nt, Human
ggagcugggccug

SEQ ID NO: 1408773 - RNA, 18 nt, Human
ggagcugggcagaaggcc

SEQ ID NO: 1408774 - RNA, 19 nt, Human
ggagcugggcagaaggcca

SEQ ID NO: 1408775 - RNA, 17 nt, Human
ggagcugccuggacccg

SEQ ID NO: 1408776 - RNA, 21 nt, Human
ggaggaaggcuuacacccaca

SEQ ID NO: 1408777 - RNA, 20 nt, Human
ggagcuucauggcagaaggc

SEQ ID NO: 1408778 - RNA, 18 nt, Human
ggaggaaggaggacccag

SEQ ID NO: 1408779 - RNA, 12 nt, Human
ggaggaauacug

SEQ ID NO: 1408780 - RNA, 23 nt, Human
ggaggaauaagcucccagggccu

SEQ ID NO: 1408781 - RNA, 12 nt, Human
ggaggacccagg

SEQ ID NO: 1408782 - RNA, 13 nt, Human
ggaggacccagga

SEQ ID NO: 1408783 - RNA, 22 nt, Human
ggaggccccaacccuguccucc

SEQ ID NO: 1408784 - RNA, 15 nt, Human
ggagggguguggcuc

SEQ ID NO: 1408785 - RNA, 16 nt, Human
ggagggguaggggcug

SEQ ID NO: 1408786 - RNA, 18 nt, Human
ggagggguaggggcuggg

SEQ ID NO: 1408787 - RNA, 15 nt, Human
ggagggguaggggcu

SEQ ID NO: 1408788 - RNA, 22 nt, Human
ggagggggucguggagagcuag

SEQ ID NO: 1408789 - RNA, 13 nt, Human
ggaggguaggcag

SEQ ID NO: 1408790 - RNA, 15 nt, Human
ggaggguaggcagga

SEQ ID NO: 1408791 - RNA, 20 nt, Human
ggaggccuaggaggguccuc

SEQ ID NO: 1408792 - RNA, 23 nt, Human
ggaggcccugugccccuugacaa

SEQ ID NO: 1408793 - RNA, 12 nt, Human
ggaggccgaagc

SEQ ID NO: 1408794 - RNA, 15 nt, Human
ggaggcccugugccc

SEQ ID NO: 1408795 - RNA, 16 nt, Human
ggaggugccacuggag

SEQ ID NO: 1408796 - RNA, 17 nt, Human
ggaggugagaccaccuc

SEQ ID NO: 1408797 - RNA, 18 nt, Human
ggagcaugagaggaggca

SEQ ID NO: 1408798 - RNA, 15 nt, Human
ggcacaggcccccuu

SEQ ID NO: 1408799 - RNA, 14 nt, Human
ggcacaggcccccu

SEQ ID NO: 1408800 - RNA, 20 nt, Human
ggcacaggaguguccucuuc

SEQ ID NO: 1408801 - RNA, 19 nt, Human
ggcacaggaguguccucuu

SEQ ID NO: 1408802 - RNA, 19 nt, Human
ggcacaggagcuaccugug

SEQ ID NO: 1408803 - RNA, 16 nt, Human
ggcaccagacacccag

SEQ ID NO: 1408804 - RNA, 13 nt, Human
ggcaccagacacc

SEQ ID NO: 1408805 - RNA, 20 nt, Human
ggcacaggagcuaccugugu

SEQ ID NO: 1408806 - RNA, 17 nt, Human
ggcacaggagcuaccug

SEQ ID NO: 1408807 - RNA, 16 nt, Human
ggcacaggagcuaccu

SEQ ID NO: 1408808 - RNA, 13 nt, Human
ggcacaggagcua

SEQ ID NO: 1408809 - RNA, 13 nt, Human
ggcacagccuggc

SEQ ID NO: 1408810 - RNA, 12 nt, Human
ggcacagccugg

SEQ ID NO: 1408811 - RNA, 14 nt, Human
ggcacaagacugac

SEQ ID NO: 1408812 - RNA, 14 nt, Human
ggcaauuuuguaac

SEQ ID NO: 1408813 - RNA, 15 nt, Human
ggcaauuuugugguu

SEQ ID NO: 1408814 - RNA, 13 nt, Human
ggcacaagacuga

SEQ ID NO: 1408815 - RNA, 14 nt, Human
ggcacacaccacca

SEQ ID NO: 1408816 - RNA, 22 nt, Human
ggcaauguuaauuuaguggaaa

SEQ ID NO: 1408817 - RNA, 17 nt, Human
ggcaauuaauuccuuca

SEQ ID NO: 1408818 - RNA, 20 nt, Human
ggcaauuaauuccuucagca

SEQ ID NO: 1408819 - RNA, 11 nt, Human
ggcaauuuugu

SEQ ID NO: 1408820 - RNA, 19 nt, Human
ggcaauuaauuccuucagc

SEQ ID NO: 1408821 - RNA, 13 nt, Human
ggauguccccagc

SEQ ID NO: 1408822 - RNA, 13 nt, Human
ggauggggcuccc

SEQ ID NO: 1408823 - RNA, 12 nt, Human
ggaugucccugg

SEQ ID NO: 1408824 - RNA, 15 nt, Human
ggauguccccagcag

SEQ ID NO: 1408825 - RNA, 14 nt, Human
ggauguccccagca

SEQ ID NO: 1408826 - RNA, 16 nt, Human
ggauguccccagcaga

SEQ ID NO: 1408827 - RNA, 14 nt, Human
ggauggccccagca

SEQ ID NO: 1408828 - RNA, 13 nt, Human
ggauggccccagc

SEQ ID NO: 1408829 - RNA, 16 nt, Human
ggauggccccagcaca

SEQ ID NO: 1408830 - RNA, 22 nt, Human
ggaguugaucuggaacccagac

SEQ ID NO: 1408831 - RNA, 21 nt, Human
ggaguugaucuggaacccaga

SEQ ID NO: 1408832 - RNA, 17 nt, Human
ggaguugaucuggaacc

SEQ ID NO: 1408833 - RNA, 14 nt, Human
ggaguugaucugga

SEQ ID NO: 1408834 - RNA, 23 nt, Human
ggaguugaucgccuuucccaggu

SEQ ID NO: 1408835 - RNA, 20 nt, Human
ggaguugaucgccuuuccca

SEQ ID NO: 1408836 - RNA, 20 nt, Human
ggaguggcagcccagccagc

SEQ ID NO: 1408837 - RNA, 19 nt, Human
ggaguggcagcccagccag

SEQ ID NO: 1408838 - RNA, 17 nt, Human
ggaguggcagcccagcc

SEQ ID NO: 1408839 - RNA, 16 nt, Human
ggaguggcagcccagc

SEQ ID NO: 1408840 - RNA, 18 nt, Human
ggagugcggaccacccuc

SEQ ID NO: 1408841 - RNA, 21 nt, Human
ggagugcuguuuuguuauaua

SEQ ID NO: 1408842 - RNA, 22 nt, Human
ggagugcggaccacccucacug

SEQ ID NO: 1408843 - RNA, 12 nt, Human
ggagugcagugg

SEQ ID NO: 1408844 - RNA, 14 nt, Human
ggaguuucuaaggu

SEQ ID NO: 1408845 - RNA, 12 nt, Human
ggaguuucuaag

SEQ ID NO: 1408846 - RNA, 21 nt, Human
ggaguuuauguuccauuaaac

SEQ ID NO: 1408847 - RNA, 20 nt, Human
ggaguuuagggaacaauuug

SEQ ID NO: 1408848 - RNA, 18 nt, Human
ggaguuuuuaugagaaac

SEQ ID NO: 1408849 - RNA, 16 nt, Human
ggaguuuuuuguacca

SEQ ID NO: 1408850 - RNA, 17 nt, Human
ggaguuuuguuuccucu

SEQ ID NO: 1408851 - RNA, 15 nt, Human
ggaguuuugcaaagu

SEQ ID NO: 1408852 - RNA, 18 nt, Human
aaaacagguauauacuuu

SEQ ID NO: 1408853 - RNA, 21 nt, Human
aaaacaggucuucaucgaauc

SEQ ID NO: 1408854 - RNA, 19 nt, Human
aaaacagguauauacuuug

SEQ ID NO: 1408855 - RNA, 14 nt, Human
aaaaaucucaaauu

SEQ ID NO: 1408856 - RNA, 17 nt, Human
aaaaaucucaaauuucu

SEQ ID NO: 1408857 - RNA, 19 nt, Human
aaaacauguuuauuuuucu

SEQ ID NO: 1408858 - RNA, 24 nt, Human
aaaacauaaucuucugccuucuca

SEQ ID NO: 1408859 - RNA, 20 nt, Human
aaaacauaaucuucugccuu

SEQ ID NO: 1408860 - RNA, 18 nt, Human
aaaacauaaucuucugcc

SEQ ID NO: 1408861 - RNA, 17 nt, Human
aaaacauaaucuucugc

SEQ ID NO: 1408862 - RNA, 19 nt, Human
aaaacaguggaucacaaag

SEQ ID NO: 1408863 - RNA, 22 nt, Human
aaaacauuuauuuugacauaaa

SEQ ID NO: 1408864 - RNA, 12 nt, Human
aaaacauuuauu

SEQ ID NO: 1408865 - RNA, 15 nt, Human
aaaacauguuuauuu

SEQ ID NO: 1408866 - RNA, 16 nt, Human
aaaacauuccauccuu

SEQ ID NO: 1408867 - RNA, 15 nt, Human
aaaacucuacuuaau

SEQ ID NO: 1408868 - RNA, 12 nt, Human
aaaacucuacuu

SEQ ID NO: 1408869 - RNA, 16 nt, Human
aaaacuccaccuuccc

SEQ ID NO: 1408870 - RNA, 17 nt, Human
aaaacuccaccuuccca

SEQ ID NO: 1408871 - RNA, 19 nt, Human
aaaacucuacuuaauccaa

SEQ ID NO: 1408872 - RNA, 18 nt, Human
aaaacucuacuuaaucca

SEQ ID NO: 1408873 - RNA, 18 nt, Human
aaaaccugagauuuauua

SEQ ID NO: 1408874 - RNA, 19 nt, Human
aaaacuauauguaugguuu

SEQ ID NO: 1408875 - RNA, 22 nt, Human
aaaacuagaggugagaaauuua

SEQ ID NO: 1408876 - RNA, 15 nt, Human
aaaaccugagauuua

SEQ ID NO: 1408877 - RNA, 20 nt, Human
aaaacccuugggccagaagu

SEQ ID NO: 1408878 - RNA, 19 nt, Human
aaaacccuugggccagaag

SEQ ID NO: 1408879 - RNA, 16 nt, Human
aaaacccuugggccag

SEQ ID NO: 1408880 - RNA, 20 nt, Human
aaaaccccccagauaucauc

SEQ ID NO: 1408881 - RNA, 18 nt, Human
aaaaccccccagauauca

SEQ ID NO: 1408882 - RNA, 17 nt, Human
aaaaccccccagauauc

SEQ ID NO: 1408883 - RNA, 13 nt, Human
aaaacccccaaac

SEQ ID NO: 1408884 - RNA, 16 nt, Human
aaaacauuuauuuuga

SEQ ID NO: 1408885 - RNA, 13 nt, Human
aaaacauuuauuu

SEQ ID NO: 1408886 - RNA, 15 nt, Human
aaaacccagauaaag

SEQ ID NO: 1408887 - RNA, 18 nt, Human
gggaagcccauccugacc

SEQ ID NO: 1408888 - RNA, 17 nt, Human
gggaagcagcagccucg

SEQ ID NO: 1408889 - RNA, 13 nt, Human
gggaagcagcagc

SEQ ID NO: 1408890 - RNA, 12 nt, Human
gggaagaggccu

SEQ ID NO: 1408891 - RNA, 22 nt, Human
gggaagagagccugcaggaucu

SEQ ID NO: 1408892 - RNA, 15 nt, Human
gggaaggaggagccu

SEQ ID NO: 1408893 - RNA, 15 nt, Human
gggaagcuagucuuu

SEQ ID NO: 1408894 - RNA, 19 nt, Human
gggaagcccauccugacca

SEQ ID NO: 1408895 - RNA, 13 nt, Human
gggaaggauacaa

SEQ ID NO: 1408896 - RNA, 16 nt, Human
gggaaggauacaaaag

SEQ ID NO: 1408897 - RNA, 14 nt, Human
aaaaauaguuugga

SEQ ID NO: 1408898 - RNA, 23 nt, Human
aaaaauaguuuggauauguaaaa

SEQ ID NO: 1408899 - RNA, 21 nt, Human
aaaaauagcuaaauaccucaa

SEQ ID NO: 1408900 - RNA, 21 nt, Human
gggacauuugcucauggaauu

SEQ ID NO: 1408901 - RNA, 20 nt, Human
gggacauuugcucauggaau

SEQ ID NO: 1408902 - RNA, 17 nt, Human
aaaaauauauguauaua

SEQ ID NO: 1408903 - RNA, 15 nt, Human
aaaaauauauacuaa

SEQ ID NO: 1408904 - RNA, 22 nt, Human
gggcagcuccucugucucgagc

SEQ ID NO: 1408905 - RNA, 21 nt, Human
gggcagcuccucugucucgag

SEQ ID NO: 1408906 - RNA, 17 nt, Human
gggcagcuccucugucu

SEQ ID NO: 1408907 - RNA, 14 nt, Human
gggcagcuccucug

SEQ ID NO: 1408908 - RNA, 12 nt, Human
gggcagcuccuc

SEQ ID NO: 1408909 - RNA, 16 nt, Human
gggcagcgccaggcug

SEQ ID NO: 1408910 - RNA, 15 nt, Human
gggcagcgccaggcu

SEQ ID NO: 1408911 - RNA, 13 nt, Human
gggcagcgccagg

SEQ ID NO: 1408912 - RNA, 22 nt, Human
gggcagccagggagagcccagg

SEQ ID NO: 1408913 - RNA, 13 nt, Human
gggcagccccagg

SEQ ID NO: 1408914 - RNA, 12 nt, Human
gggcaaagccag

SEQ ID NO: 1408915 - RNA, 20 nt, Human
gggcagccagggagagccca

SEQ ID NO: 1408916 - RNA, 16 nt, Human
gggcagauuuucagca

SEQ ID NO: 1408917 - RNA, 17 nt, Human
gggcagagugagaccca

SEQ ID NO: 1408918 - RNA, 22 nt, Human
gggcagagggcuggaggcccag

SEQ ID NO: 1408919 - RNA, 16 nt, Human
gggcagagggcuggag

SEQ ID NO: 1408920 - RNA, 15 nt, Human
gggcagagggcugga

SEQ ID NO: 1408921 - RNA, 14 nt, Human
gggcagagggcugg

SEQ ID NO: 1408922 - RNA, 13 nt, Human
gggcagagggcug

SEQ ID NO: 1408923 - RNA, 21 nt, Human
gggcagaggcaguaccugggc

SEQ ID NO: 1408924 - RNA, 16 nt, Human
gggcaggcugggccau

SEQ ID NO: 1408925 - RNA, 15 nt, Human
gggcaggcugggcca

SEQ ID NO: 1408926 - RNA, 14 nt, Human
gggcaggcugggcc

SEQ ID NO: 1408927 - RNA, 13 nt, Human
gggcaggcugggc

SEQ ID NO: 1408928 - RNA, 12 nt, Human
gggcaggcuggg

SEQ ID NO: 1408929 - RNA, 23 nt, Human
gggcaggccaccuggcucucacc

SEQ ID NO: 1408930 - RNA, 15 nt, Human
gggcaggccagagcu

SEQ ID NO: 1408931 - RNA, 21 nt, Human
gggcaggccaccuggcucuca

SEQ ID NO: 1408932 - RNA, 20 nt, Human
gggcaggaguagcugagcuc

SEQ ID NO: 1408933 - RNA, 12 nt, Human
gggcagggagcg

SEQ ID NO: 1408934 - RNA, 14 nt, Human
aaaagggaggggga

SEQ ID NO: 1408935 - RNA, 22 nt, Human
aaaagggccaaagaaccaaaga

SEQ ID NO: 1408936 - RNA, 14 nt, Human
gggcaaagccuagu

SEQ ID NO: 1408937 - RNA, 20 nt, Human
gggcaaagccaggucccucu

SEQ ID NO: 1408938 - RNA, 16 nt, Human
gggcaaagccaggucc

SEQ ID NO: 1408939 - RNA, 13 nt, Human
gggcaaagccagg

SEQ ID NO: 1408940 - RNA, 17 nt, Human
gggauuaugggucacag

SEQ ID NO: 1408941 - RNA, 20 nt, Human
gggauuacaggcgugagcca

SEQ ID NO: 1408942 - RNA, 14 nt, Human
gggaugguaguuuu

SEQ ID NO: 1408943 - RNA, 19 nt, Human
gggauggacgaucucccac

SEQ ID NO: 1408944 - RNA, 16 nt, Human
gggauggacaucuugu

SEQ ID NO: 1408945 - RNA, 15 nt, Human
gggaggcucaggucc

SEQ ID NO: 1408946 - RNA, 16 nt, Human
gggauuaaccucugca

SEQ ID NO: 1408947 - RNA, 22 nt, Human
gggauguucagcacugucccuu

SEQ ID NO: 1408948 - RNA, 18 nt, Human
gggauguguccugacacu

SEQ ID NO: 1408949 - RNA, 13 nt, Human
gggauguguccug

SEQ ID NO: 1408950 - RNA, 12 nt, Human
gggauguguccu

SEQ ID NO: 1408951 - RNA, 17 nt, Human
gggaugguggagggcca

SEQ ID NO: 1408952 - RNA, 18 nt, Human
gggaugguggagggccac

SEQ ID NO: 1408953 - RNA, 22 nt, Human
gggaggcucuggagcccacugu

SEQ ID NO: 1408954 - RNA, 13 nt, Human
gggaggcucaggu

SEQ ID NO: 1408955 - RNA, 13 nt, Human
gggagcaggcagc

SEQ ID NO: 1408956 - RNA, 14 nt, Human
gggagcaggcagcc

SEQ ID NO: 1408957 - RNA, 12 nt, Human
gggagcaggcag

SEQ ID NO: 1408958 - RNA, 19 nt, Human
gggagcaaacugcaugccc

SEQ ID NO: 1408959 - RNA, 17 nt, Human
gggagauucaagggacc

SEQ ID NO: 1408960 - RNA, 20 nt, Human
gggagagggcgcaggccgug

SEQ ID NO: 1408961 - RNA, 17 nt, Human
gggagaggggccucaaa

SEQ ID NO: 1408962 - RNA, 19 nt, Human
gggagaccucagaaguaaa

SEQ ID NO: 1408963 - RNA, 22 nt, Human
gggagaccggccugccaggagg

SEQ ID NO: 1408964 - RNA, 21 nt, Human
gggagaccggccugccaggag

SEQ ID NO: 1408965 - RNA, 20 nt, Human
gggagaccggccugccagga

SEQ ID NO: 1408966 - RNA, 17 nt, Human
gggagaccggccugcca

SEQ ID NO: 1408967 - RNA, 15 nt, Human
gggagacaugugaca

SEQ ID NO: 1408968 - RNA, 12 nt, Human
gggagacagcau

SEQ ID NO: 1408969 - RNA, 19 nt, Human
gggagacacuggccccuca

SEQ ID NO: 1408970 - RNA, 14 nt, Human
gggagacacuggcc

SEQ ID NO: 1408971 - RNA, 12 nt, Human
gggagaagcucc

SEQ ID NO: 1408972 - RNA, 14 nt, Human
aaaagcagacauuu

SEQ ID NO: 1408973 - RNA, 19 nt, Human
aaaagaugcuuuuaacaga

SEQ ID NO: 1408974 - RNA, 19 nt, Human
aaaagauggggucuguaaa

SEQ ID NO: 1408975 - RNA, 21 nt, Human
aaaagauggggucuguaaaau

SEQ ID NO: 1408976 - RNA, 13 nt, Human
aaaagaugcuuuu

SEQ ID NO: 1408977 - RNA, 22 nt, Human
aaaagaugcacuuugcuuuaau

SEQ ID NO: 1408978 - RNA, 18 nt, Human
aaaagaugcacuuugcuu

SEQ ID NO: 1408979 - RNA, 18 nt, Human
aaaagaugaaagagcagu

SEQ ID NO: 1408980 - RNA, 14 nt, Human
aaaagcaacauuca

SEQ ID NO: 1408981 - RNA, 14 nt, Human
aaaagcaaaucauu

SEQ ID NO: 1408982 - RNA, 13 nt, Human
aaaagcagacauu

SEQ ID NO: 1408983 - RNA, 19 nt, Human
aaaaugaaagcuacucaua

SEQ ID NO: 1408984 - RNA, 14 nt, Human
aaaaugaaagcuac

SEQ ID NO: 1408985 - RNA, 17 nt, Human
aaaaucuuucuuucuua

SEQ ID NO: 1408986 - RNA, 19 nt, Human
aaaaucuuucuuucuuaga

SEQ ID NO: 1408987 - RNA, 20 nt, Human
aaaaucuuucuuucuuagaa

SEQ ID NO: 1408988 - RNA, 21 nt, Human
aaaaucuuucuuucuuagaaa

SEQ ID NO: 1408989 - RNA, 22 nt, Human
aaaaucuuucuuucuuagaaau

SEQ ID NO: 1408990 - RNA, 23 nt, Human
aaaaucuuucuuucuuagaaauu

SEQ ID NO: 1408991 - RNA, 14 nt, Human
aaaaugauacagca

SEQ ID NO: 1408992 - RNA, 19 nt, Human
aaaaucuugucauguguau

SEQ ID NO: 1408993 - RNA, 13 nt, Human
aaaaucuugucau

SEQ ID NO: 1408994 - RNA, 12 nt, Human
aaaaucuuguca

SEQ ID NO: 1408995 - RNA, 11 nt, Human
aaaaucuuguc

SEQ ID NO: 1408996 - RNA, 15 nt, Human
aaaaucuugaucagu

SEQ ID NO: 1408997 - RNA, 18 nt, Human
aaaaucuugaucaguuaa

SEQ ID NO: 1408998 - RNA, 20 nt, Human
aaaaucuuauaguucuaggc

SEQ ID NO: 1408999 - RNA, 19 nt, Human
aaaaucuuauaguucuagg

SEQ ID NO: 1409000 - RNA, 18 nt, Human
aaaaucuuauaguucuag

SEQ ID NO: 1409001 - RNA, 23 nt, Human
aaaaguauguucuaaccuuuaca

SEQ ID NO: 1409002 - RNA, 19 nt, Human
aaaaguauguuagugcaaa

SEQ ID NO: 1409003 - RNA, 15 nt, Human
aaaaugcuagguucu

SEQ ID NO: 1409004 - RNA, 13 nt, Human
aaaaugcuagguu

SEQ ID NO: 1409005 - RNA, 22 nt, Human
aaaaugcgguuauaaaaaaugg

SEQ ID NO: 1409006 - RNA, 18 nt, Human
aaaaugcgguuauaaaaa

SEQ ID NO: 1409007 - RNA, 16 nt, Human
aaaaugcuagguucua

SEQ ID NO: 1409008 - RNA, 19 nt, Human
aaaaugcuggcuauagaug

SEQ ID NO: 1409009 - RNA, 19 nt, Human
gggccagauccagccuggg

SEQ ID NO: 1409010 - RNA, 12 nt, Human
gggccagccucu

SEQ ID NO: 1409011 - RNA, 11 nt, Human
gggccagccuc

SEQ ID NO: 1409012 - RNA, 22 nt, Human
gggccagucuguggaucagaga

SEQ ID NO: 1409013 - RNA, 21 nt, Human
gggccaggcugggucgcccug

SEQ ID NO: 1409014 - RNA, 14 nt, Human
gggccaggcugggu

SEQ ID NO: 1409015 - RNA, 15 nt, Human
gggccaggcuggguc

SEQ ID NO: 1409016 - RNA, 21 nt, Human
gggccuauggagagcccuggg

SEQ ID NO: 1409017 - RNA, 20 nt, Human
gggccuauggagagcccugg

SEQ ID NO: 1409018 - RNA, 19 nt, Human
gggccuauggagagcccug

SEQ ID NO: 1409019 - RNA, 18 nt, Human
gggccuauggagagcccu

SEQ ID NO: 1409020 - RNA, 16 nt, Human
gggccuauggagagcc

SEQ ID NO: 1409021 - RNA, 14 nt, Human
gggccuauggagag

SEQ ID NO: 1409022 - RNA, 15 nt, Human
gggccuaggcugcau

SEQ ID NO: 1409023 - RNA, 17 nt, Human
gggccuacuagagucug

SEQ ID NO: 1409024 - RNA, 16 nt, Human
gggccgaugcccagag

SEQ ID NO: 1409025 - RNA, 17 nt, Human
gggccgaugcccagaga

SEQ ID NO: 1409026 - RNA, 15 nt, Human
gggccgaugcccaga

SEQ ID NO: 1409027 - RNA, 14 nt, Human
gggccgacuaagag

SEQ ID NO: 1409028 - RNA, 17 nt, Human
gggcccuuugagugcag

SEQ ID NO: 1409029 - RNA, 20 nt, Human
gggcccuggggccuguacug

SEQ ID NO: 1409030 - RNA, 17 nt, Human
gggcccuggggccugua

SEQ ID NO: 1409031 - RNA, 15 nt, Human
gggcccuggggccug

SEQ ID NO: 1409032 - RNA, 14 nt, Human
gggcccuggggccu

SEQ ID NO: 1409033 - RNA, 12 nt, Human
gggcccuggggc

SEQ ID NO: 1409034 - RNA, 17 nt, Human
gggccaugcugaggccu

SEQ ID NO: 1409035 - RNA, 18 nt, Human
gggcccuggggccuguac

SEQ ID NO: 1409036 - RNA, 22 nt, Human
gggcccuggugguggcucggga

SEQ ID NO: 1409037 - RNA, 15 nt, Human
gggccaugcugaggc

SEQ ID NO: 1409038 - RNA, 14 nt, Human
gggccaugcugagg

SEQ ID NO: 1409039 - RNA, 23 nt, Human
gggccaugauggcaacagaucug

SEQ ID NO: 1409040 - RNA, 22 nt, Human
gggccaugauggcaacagaucu

SEQ ID NO: 1409041 - RNA, 21 nt, Human
gggccugagcaguccuuggcc

SEQ ID NO: 1409042 - RNA, 20 nt, Human
gggccugagcaguccuuggc

SEQ ID NO: 1409043 - RNA, 12 nt, Human
gggccugagcag

SEQ ID NO: 1409044 - RNA, 20 nt, Human
gggccuccaugggccccagg

SEQ ID NO: 1409045 - RNA, 20 nt, Human
gggccucaaaggcccgcucu

SEQ ID NO: 1409046 - RNA, 19 nt, Human
gggccucaaaggcccgcuc

SEQ ID NO: 1409047 - RNA, 22 nt, Human
gggccuauggagagcccuggga

SEQ ID NO: 1409048 - RNA, 22 nt, Human
gggcggccuaugacuugggcac

SEQ ID NO: 1409049 - RNA, 21 nt, Human
gggcggcaggggccuggagau

SEQ ID NO: 1409050 - RNA, 17 nt, Human
gggcggcaggggccugg

SEQ ID NO: 1409051 - RNA, 14 nt, Human
gggcggggguggcg

SEQ ID NO: 1409052 - RNA, 17 nt, Human
gggcgggcagagggcug

SEQ ID NO: 1409053 - RNA, 13 nt, Human
gggcuaauuuaac

SEQ ID NO: 1409054 - RNA, 21 nt, Human
gggcuacccugagcugaggca

SEQ ID NO: 1409055 - RNA, 19 nt, Human
gggcuacccugagcugagg

SEQ ID NO: 1409056 - RNA, 16 nt, Human
gggcuacccugagcug

SEQ ID NO: 1409057 - RNA, 12 nt, Human
gggcuaccagga

SEQ ID NO: 1409058 - RNA, 13 nt, Human
gggcuacccugag

SEQ ID NO: 1409059 - RNA, 15 nt, Human
gggcuaccaggaaag

SEQ ID NO: 1409060 - RNA, 14 nt, Human
gggcucacacaccu

SEQ ID NO: 1409061 - RNA, 19 nt, Human
gggcugcaguucgacucug

SEQ ID NO: 1409062 - RNA, 18 nt, Human
gggcucaaucucuggggg

SEQ ID NO: 1409063 - RNA, 21 nt, Human
gggcuauuuuguuugcuucau

SEQ ID NO: 1409064 - RNA, 20 nt, Human
gggcuacccugagcugaggc

SEQ ID NO: 1409065 - RNA, 11 nt, Human
gggcuggcugg

SEQ ID NO: 1409066 - RNA, 13 nt, Human
gggcugggaaguc

SEQ ID NO: 1409067 - RNA, 14 nt, Human
aaaauuuguugcau

SEQ ID NO: 1409068 - RNA, 13 nt, Human
aaaauuuguugca

SEQ ID NO: 1409069 - RNA, 14 nt, Human
aaaauuuuuuuaga

SEQ ID NO: 1409070 - RNA, 20 nt, Human
aaaauuuguucuuguauuua

SEQ ID NO: 1409071 - RNA, 19 nt, Human
aaaauuuguucuuguauuu

SEQ ID NO: 1409072 - RNA, 16 nt, Human
aaaauuuguucuugua

SEQ ID NO: 1409073 - RNA, 18 nt, Human
aaaauuuguuauuuugca

SEQ ID NO: 1409074 - RNA, 18 nt, Human
aaaauguuaucuucucaa

SEQ ID NO: 1409075 - RNA, 21 nt, Human
aaaaugugggauuauggguca

SEQ ID NO: 1409076 - RNA, 22 nt, Human
aaaaugugggauuaugggucac

SEQ ID NO: 1409077 - RNA, 20 nt, Human
aaaaugugcuauacugcaua

SEQ ID NO: 1409078 - RNA, 19 nt, Human
aaaaugugcuauacugcau

SEQ ID NO: 1409079 - RNA, 21 nt, Human
aaaaugugauguucuaaggcu

SEQ ID NO: 1409080 - RNA, 20 nt, Human
aaaaugugauguucuaaggc

SEQ ID NO: 1409081 - RNA, 19 nt, Human
aaaaugugauguucuaagg

SEQ ID NO: 1409082 - RNA, 17 nt, Human
aaaaugugauguucuaa

SEQ ID NO: 1409083 - RNA, 15 nt, Human
aaaaugugauguucu

SEQ ID NO: 1409084 - RNA, 18 nt, Human
aaaaugucuuguguuacc

SEQ ID NO: 1409085 - RNA, 14 nt, Human
gggcugguucugua

SEQ ID NO: 1409086 - RNA, 19 nt, Human
gggcuggugggugccuagg

SEQ ID NO: 1409087 - RNA, 17 nt, Human
aaacaucuuugaaauua

SEQ ID NO: 1409088 - RNA, 16 nt, Human
aaacaucuuugaaauu

SEQ ID NO: 1409089 - RNA, 19 nt, Human
aaacaucauucauuuuugu

SEQ ID NO: 1409090 - RNA, 21 nt, Human
aaacaugacccuaaaucuuga

SEQ ID NO: 1409091 - RNA, 19 nt, Human
aaacaugacccuaaaucuu

SEQ ID NO: 1409092 - RNA, 22 nt, Human
aaacaucuuugaaauuauguaa

SEQ ID NO: 1409093 - RNA, 12 nt, Human
ggggccagaggc

SEQ ID NO: 1409094 - RNA, 15 nt, Human
ggggcaucuggccug

SEQ ID NO: 1409095 - RNA, 16 nt, Human
ggggcaucuggccugg

SEQ ID NO: 1409096 - RNA, 16 nt, Human
aaacaugcuacacacu

SEQ ID NO: 1409097 - RNA, 19 nt, Human
ggggccuggagauccuccu

SEQ ID NO: 1409098 - RNA, 23 nt, Human
ggggccugcccagugcacuugcu

SEQ ID NO: 1409099 - RNA, 20 nt, Human
ggggccugccaccuggaccc

SEQ ID NO: 1409100 - RNA, 19 nt, Human
ggggccugccaccuggacc

SEQ ID NO: 1409101 - RNA, 18 nt, Human
ggggccugccaccuggac

SEQ ID NO: 1409102 - RNA, 12 nt, Human
ggggccugccac

SEQ ID NO: 1409103 - RNA, 23 nt, Human
ggggccugagcaguccuuggccu

SEQ ID NO: 1409104 - RNA, 17 nt, Human
ggggccugagcaguccu

SEQ ID NO: 1409105 - RNA, 12 nt, Human
ggggccugagca

SEQ ID NO: 1409106 - RNA, 17 nt, Human
ggggccagauccagccu

SEQ ID NO: 1409107 - RNA, 14 nt, Human
ggggccagauccag

SEQ ID NO: 1409108 - RNA, 13 nt, Human
ggggccagaucca

SEQ ID NO: 1409109 - RNA, 13 nt, Human
ggggccagaggcu

SEQ ID NO: 1409110 - RNA, 21 nt, Human
ggggccuccaugggccccagg

SEQ ID NO: 1409111 - RNA, 12 nt, Human
ggggccucccug

SEQ ID NO: 1409112 - RNA, 19 nt, Human
ggggccagauccagccugg

SEQ ID NO: 1409113 - RNA, 13 nt, Human
ggggccaggcugg

SEQ ID NO: 1409114 - RNA, 19 nt, Human
aaacaaaaauuaaaauccu

SEQ ID NO: 1409115 - RNA, 13 nt, Human
aaacaaaaacacu

SEQ ID NO: 1409116 - RNA, 16 nt, Human
aaaauuuuuuuagaaa

SEQ ID NO: 1409117 - RNA, 20 nt, Human
aaacaagaccacguuucuaa

SEQ ID NO: 1409118 - RNA, 20 nt, Human
aaacaagcacuaaacaaaga

SEQ ID NO: 1409119 - RNA, 16 nt, Human
aaacacauuuuucuua

SEQ ID NO: 1409120 - RNA, 20 nt, Human
aaacaguugcauguaguaac

SEQ ID NO: 1409121 - RNA, 23 nt, Human
aaacaguggaucacaaaguggaa

SEQ ID NO: 1409122 - RNA, 19 nt, Human
aaacaguugcauguaguaa

SEQ ID NO: 1409123 - RNA, 18 nt, Human
aaacaguugcauguagua

SEQ ID NO: 1409124 - RNA, 14 nt, Human
aaacagugagccug

SEQ ID NO: 1409125 - RNA, 19 nt, Human
aaacaccaacauguuggga

SEQ ID NO: 1409126 - RNA, 19 nt, Human
aaacaccaacauaaaaaug

SEQ ID NO: 1409127 - RNA, 15 nt, Human
aaacaccaacauaaa

SEQ ID NO: 1409128 - RNA, 18 nt, Human
aaacaccuccucauguac

SEQ ID NO: 1409129 - RNA, 15 nt, Human
aaacacccucacacu

SEQ ID NO: 1409130 - RNA, 22 nt, Human
gguagcgggggaggguaggcag

SEQ ID NO: 1409131 - RNA, 17 nt, Human
gguaccagauaacuuuu

SEQ ID NO: 1409132 - RNA, 14 nt, Human
gguaccagaugcag

SEQ ID NO: 1409133 - RNA, 18 nt, Human
gguacaugguguuugugg

SEQ ID NO: 1409134 - RNA, 16 nt, Human
gguacauggugcuggg

SEQ ID NO: 1409135 - RNA, 17 nt, Human
gguacaguauggggguu

SEQ ID NO: 1409136 - RNA, 21 nt, Human
gguacagagaagccagcuugu

SEQ ID NO: 1409137 - RNA, 16 nt, Human
gguacagagaagccag

SEQ ID NO: 1409138 - RNA, 15 nt, Human
gguacagagaagcca

SEQ ID NO: 1409139 - RNA, 14 nt, Human
gguacagagaagcc

SEQ ID NO: 1409140 - RNA, 13 nt, Human
gguacagagaagc

SEQ ID NO: 1409141 - RNA, 12 nt, Human
gguacagagaag

SEQ ID NO: 1409142 - RNA, 10 nt, Human
gguacagaga

SEQ ID NO: 1409143 - RNA, 22 nt, Human
gguaauuguugcuaaucuucuu

SEQ ID NO: 1409144 - RNA, 15 nt, Human
ggguuuuaacuuugu

SEQ ID NO: 1409145 - RNA, 16 nt, Human
ggguuuuaacuuuguu

SEQ ID NO: 1409146 - RNA, 17 nt, Human
ggguuugugacagggcg

SEQ ID NO: 1409147 - RNA, 15 nt, Human
ggguuucugcccugc

SEQ ID NO: 1409148 - RNA, 19 nt, Human
ggguuucugcccugcccac

SEQ ID NO: 1409149 - RNA, 15 nt, Human
gggugggcaguuuuu

SEQ ID NO: 1409150 - RNA, 22 nt, Human
ggggccugccaccuggaccccu

SEQ ID NO: 1409151 - RNA, 21 nt, Human
gggugucuugggcagagcugg

SEQ ID NO: 1409152 - RNA, 15 nt, Human
gggugucuugggcag

SEQ ID NO: 1409153 - RNA, 23 nt, Human
ggguguccugcaccggggccugg

SEQ ID NO: 1409154 - RNA, 13 nt, Human
gggugugcuggga

SEQ ID NO: 1409155 - RNA, 23 nt, Human
gggugucuugggcagagcuggcu

SEQ ID NO: 1409156 - RNA, 16 nt, Human
gggugggguggcugca

SEQ ID NO: 1409157 - RNA, 12 nt, Human
ggguggguauaa

SEQ ID NO: 1409158 - RNA, 18 nt, Human
ggguggggggggugcugg

SEQ ID NO: 1409159 - RNA, 13 nt, Human
gguccaugggcag

SEQ ID NO: 1409160 - RNA, 22 nt, Human
aaacuuuaccuuuuuuauacau

SEQ ID NO: 1409161 - RNA, 24 nt, Human
aaagaaguguggggauuuucacug

SEQ ID NO: 1409162 - RNA, 16 nt, Human
gguccaugggcagagc

SEQ ID NO: 1409163 - RNA, 14 nt, Human
gguccaugggcaga

SEQ ID NO: 1409164 - RNA, 18 nt, Human
aaacuuuacuauggcccu

SEQ ID NO: 1409165 - RNA, 12 nt, Human
aaacuuuacuau

SEQ ID NO: 1409166 - RNA, 22 nt, Human
aaagacacauuuuuuaggaaau

SEQ ID NO: 1409167 - RNA, 16 nt, Human
aaagaauagaagcuaa

SEQ ID NO: 1409168 - RNA, 16 nt, Human
aaagaaugauuaugaa

SEQ ID NO: 1409169 - RNA, 12 nt, Human
gguccagggcua

SEQ ID NO: 1409170 - RNA, 13 nt, Human
gguccaggcugug

SEQ ID NO: 1409171 - RNA, 18 nt, Human
gguccacaggucuagacu

SEQ ID NO: 1409172 - RNA, 18 nt, Human
gguccaauuaguuuccuu

SEQ ID NO: 1409173 - RNA, 17 nt, Human
gguccaauuaguuuccu

SEQ ID NO: 1409174 - RNA, 13 nt, Human
gguaugaagagug

SEQ ID NO: 1409175 - RNA, 23 nt, Human
gguaugaacuugaggacacaugu

SEQ ID NO: 1409176 - RNA, 12 nt, Human
gguaggaaaugu

SEQ ID NO: 1409177 - RNA, 17 nt, Human
gguaugaagaguguuau

SEQ ID NO: 1409178 - RNA, 21 nt, Human
gguaugaacuugaggacacau

SEQ ID NO: 1409179 - RNA, 22 nt, Human
gguaugaacuugaggacacaug

SEQ ID NO: 1409180 - RNA, 21 nt, Human
ggugcuucuaguucugccagg

SEQ ID NO: 1409181 - RNA, 22 nt, Human
gguggauggccccagcacagcu

SEQ ID NO: 1409182 - RNA, 14 nt, Human
gguggauggcccca

SEQ ID NO: 1409183 - RNA, 18 nt, Human
gguggcacaggcccccuu

SEQ ID NO: 1409184 - RNA, 23 nt, Human
gguggcacaggaguguccucuuc

SEQ ID NO: 1409185 - RNA, 17 nt, Human
gguggcacaggcccccu

SEQ ID NO: 1409186 - RNA, 16 nt, Human
aaagcagcguuucuau

SEQ ID NO: 1409187 - RNA, 18 nt, Human
aaagcagcguuucuauga

SEQ ID NO: 1409188 - RNA, 22 nt, Human
aaagcagcguuucuaugacaca

SEQ ID NO: 1409189 - RNA, 19 nt, Human
aaagcaggcagaacucauc

SEQ ID NO: 1409190 - RNA, 17 nt, Human
aaagcaggcagaacuca

SEQ ID NO: 1409191 - RNA, 20 nt, Human
aaagcaucauggcuaucugu

SEQ ID NO: 1409192 - RNA, 12 nt, Human
aaagcaucccuc

SEQ ID NO: 1409193 - RNA, 15 nt, Human
aaagcaucccucacc

SEQ ID NO: 1409194 - RNA, 22 nt, Human
aaagcaucuugcauuaugcaau

SEQ ID NO: 1409195 - RNA, 17 nt, Human
aaagcaucccucaccca

SEQ ID NO: 1409196 - RNA, 24 nt, Human
aaagcaucccucacccauccuaga

SEQ ID NO: 1409197 - RNA, 15 nt, Human
ggucuuacagcaggc

SEQ ID NO: 1409198 - RNA, 12 nt, Human
ggucuguuugca

SEQ ID NO: 1409199 - RNA, 20 nt, Human
ggucuguuggcaggcuggcc

SEQ ID NO: 1409200 - RNA, 19 nt, Human
ggucuguuggcaggcuggc

SEQ ID NO: 1409201 - RNA, 12 nt, Human
ggugccagaagc

SEQ ID NO: 1409202 - RNA, 10 nt, Human
ggugccaccu

SEQ ID NO: 1409203 - RNA, 23 nt, Human
ggugccaauuucaaguuccaagu

SEQ ID NO: 1409204 - RNA, 23 nt, Human
ggugccaaacaaaaagguucuca

SEQ ID NO: 1409205 - RNA, 13 nt, Human
ggugcaauuucaa

SEQ ID NO: 1409206 - RNA, 22 nt, Human
ggugcaauguguguauauggac

SEQ ID NO: 1409207 - RNA, 21 nt, Human
ggugcaauguguguauaugga

SEQ ID NO: 1409208 - RNA, 13 nt, Human
ggugcuggucccg

SEQ ID NO: 1409209 - RNA, 16 nt, Human
ggugcuggggccuggu

SEQ ID NO: 1409210 - RNA, 20 nt, Human
ggugcugggccccugccucu

SEQ ID NO: 1409211 - RNA, 21 nt, Human
aaagauugcugaaauuuuaua

SEQ ID NO: 1409212 - RNA, 19 nt, Human
aaagauugcugaaauuuua

SEQ ID NO: 1409213 - RNA, 15 nt, Human
aaagauugagagaau

SEQ ID NO: 1409214 - RNA, 23 nt, Human
aaagauugaaguauuuugcugga

SEQ ID NO: 1409215 - RNA, 22 nt, Human
aaagauucugaccuuaaaugca

SEQ ID NO: 1409216 - RNA, 21 nt, Human
aaagauucuauaguucuagac

SEQ ID NO: 1409217 - RNA, 20 nt, Human
aaagacguuuuauaagcauc

SEQ ID NO: 1409218 - RNA, 14 nt, Human
aaagcaaaucauuu

SEQ ID NO: 1409219 - RNA, 17 nt, Human
aaagcaaagcacagaga

SEQ ID NO: 1409220 - RNA, 11 nt, Human
aaagcaaagca

SEQ ID NO: 1409221 - RNA, 15 nt, Human
aaagcaaaccuguaa

SEQ ID NO: 1409222 - RNA, 19 nt, Human
gguccuccuccagggacag

SEQ ID NO: 1409223 - RNA, 17 nt, Human
gguccuccuccagggac

SEQ ID NO: 1409224 - RNA, 14 nt, Human
gguccuccuccagg

SEQ ID NO: 1409225 - RNA, 16 nt, Human
gguccuauggccucau

SEQ ID NO: 1409226 - RNA, 14 nt, Human
gguccucagagaau

SEQ ID NO: 1409227 - RNA, 21 nt, Human
gguccucagagaauuucuacc

SEQ ID NO: 1409228 - RNA, 20 nt, Human
aaagcaagcauucagaagaa

SEQ ID NO: 1409229 - RNA, 14 nt, Human
aaagcaagaaucag

SEQ ID NO: 1409230 - RNA, 18 nt, Human
aaagcaagaaucagagaa

SEQ ID NO: 1409231 - RNA, 19 nt, Human
gguccugagcacugccagg

SEQ ID NO: 1409232 - RNA, 18 nt, Human
gguccugagcacugccag

SEQ ID NO: 1409233 - RNA, 16 nt, Human
gguccugagcacugcc

SEQ ID NO: 1409234 - RNA, 15 nt, Human
gguccugagcacugc

SEQ ID NO: 1409235 - RNA, 19 nt, Human
gguccucuucugggccuga

SEQ ID NO: 1409236 - RNA, 22 nt, Human
gguccucuucugggccugacca

SEQ ID NO: 1409237 - RNA, 23 nt, Human
gguccucugucagucacagccac

SEQ ID NO: 1409238 - RNA, 21 nt, Human
gguccucugucagucacagcc

SEQ ID NO: 1409239 - RNA, 13 nt, Human
gguccucugucag

SEQ ID NO: 1409240 - RNA, 18 nt, Human
gguccuccuccagggaca

SEQ ID NO: 1409241 - RNA, 15 nt, Human
gguccugggaggaga

SEQ ID NO: 1409242 - RNA, 21 nt, Human
gguccuggagcagaccacccc

SEQ ID NO: 1409243 - RNA, 17 nt, Human
gguccuggagcagacca

SEQ ID NO: 1409244 - RNA, 19 nt, Human
gguccugguggggcagcuc

SEQ ID NO: 1409245 - RNA, 14 nt, Human
ggucgcuccugccc

SEQ ID NO: 1409246 - RNA, 13 nt, Human
ggucgcuccugcc

SEQ ID NO: 1409247 - RNA, 12 nt, Human
ggucgcuccugc

SEQ ID NO: 1409248 - RNA, 18 nt, Human
gguccugguggggcagcu

SEQ ID NO: 1409249 - RNA, 17 nt, Human
gguccugguggggcagc

SEQ ID NO: 1409250 - RNA, 13 nt, Human
ggucggaaaacau

SEQ ID NO: 1409251 - RNA, 19 nt, Human
ggucguggagagcuaggag

SEQ ID NO: 1409252 - RNA, 14 nt, Human
ggucguuuuuuuca

SEQ ID NO: 1409253 - RNA, 18 nt, Human
ggucgcuugggaauuuua

SEQ ID NO: 1409254 - RNA, 19 nt, Human
ggucgcccuuugcugcaug

SEQ ID NO: 1409255 - RNA, 13 nt, Human
ggucggaccagcu

SEQ ID NO: 1409256 - RNA, 14 nt, Human
ggucggaaaacaug

SEQ ID NO: 1409257 - RNA, 20 nt, Human
ggucguggagagcuaggagc

SEQ ID NO: 1409258 - RNA, 15 nt, Human
ggucguggagagcua

SEQ ID NO: 1409259 - RNA, 14 nt, Human
ggucguggagagcu

SEQ ID NO: 1409260 - RNA, 15 nt, Human
ggucggugccuucaa

SEQ ID NO: 1409261 - RNA, 14 nt, Human
ggucggugccuuca

SEQ ID NO: 1409262 - RNA, 20 nt, Human
ggucgguagguucagccaag

SEQ ID NO: 1409263 - RNA, 20 nt, Human
ggucggggcaucuggccugg

SEQ ID NO: 1409264 - RNA, 14 nt, Human
ggucggggcaucug

SEQ ID NO: 1409265 - RNA, 14 nt, Human
ggucggaccagcuu

SEQ ID NO: 1409266 - RNA, 17 nt, Human
ggugugcaccaggguug

SEQ ID NO: 1409267 - RNA, 16 nt, Human
ggugugcaccaggguu

SEQ ID NO: 1409268 - RNA, 18 nt, Human
ggugugaucgucugacug

SEQ ID NO: 1409269 - RNA, 15 nt, Human
ggugugaucgucuga

SEQ ID NO: 1409270 - RNA, 20 nt, Human
ggugucuugggcagagcugg

SEQ ID NO: 1409271 - RNA, 21 nt, Human
ggugucucaggcugccugagu

SEQ ID NO: 1409272 - RNA, 16 nt, Human
ggugugacugaauuuc

SEQ ID NO: 1409273 - RNA, 20 nt, Human
ggugucucaggcugccugag

SEQ ID NO: 1409274 - RNA, 18 nt, Human
ggugucucaggcugccug

SEQ ID NO: 1409275 - RNA, 17 nt, Human
ggugucucaggcugccu

SEQ ID NO: 1409276 - RNA, 16 nt, Human
ggugucucaggcugcc

SEQ ID NO: 1409277 - RNA, 15 nt, Human
ggugucucaggcugc

SEQ ID NO: 1409278 - RNA, 20 nt, Human
gguggggguagggggcugga

SEQ ID NO: 1409279 - RNA, 23 nt, Human
gguggggguaggguuucccuacu

SEQ ID NO: 1409280 - RNA, 10 nt, Human
ggugggggua

SEQ ID NO: 1409281 - RNA, 15 nt, Human
gguggggcagcuccu

SEQ ID NO: 1409282 - RNA, 13 nt, Human
gguggggcagcuc

SEQ ID NO: 1409283 - RNA, 12 nt, Human
gguggggcagcu

SEQ ID NO: 1409284 - RNA, 17 nt, Human
gguggggggggugcugg

SEQ ID NO: 1409285 - RNA, 16 nt, Human
aaagcgaaaaaaucag

SEQ ID NO: 1409286 - RNA, 12 nt, Human
aaagcgaaaaaa

SEQ ID NO: 1409287 - RNA, 16 nt, Human
aaagccuuuauuuguu

SEQ ID NO: 1409288 - RNA, 11 nt, Human
aaagccuucuu

SEQ ID NO: 1409289 - RNA, 18 nt, Human
aaagccuucuuuuggggg

SEQ ID NO: 1409290 - RNA, 15 nt, Human
aaagcaucuugcauu

SEQ ID NO: 1409291 - RNA, 16 nt, Human
aaagccuguuuaagag

SEQ ID NO: 1409292 - RNA, 18 nt, Human
aaagccuguuuaagagac

SEQ ID NO: 1409293 - RNA, 17 nt, Human
gguucccguuucuccac

SEQ ID NO: 1409294 - RNA, 12 nt, Human
gguuccacagac

SEQ ID NO: 1409295 - RNA, 19 nt, Human
gguuccguguccaccccca

SEQ ID NO: 1409296 - RNA, 17 nt, Human
gguuccguguccacccc

SEQ ID NO: 1409297 - RNA, 16 nt, Human
gguuccggcauggaca

SEQ ID NO: 1409298 - RNA, 13 nt, Human
gguucaggcccgg

SEQ ID NO: 1409299 - RNA, 12 nt, Human
gguucaggcccg

SEQ ID NO: 1409300 - RNA, 22 nt, Human
ggugugcugggagcuccacucu

SEQ ID NO: 1409301 - RNA, 19 nt, Human
ggugugcugggagcuccac

SEQ ID NO: 1409302 - RNA, 12 nt, Human
ggugugcuggga

SEQ ID NO: 1409303 - RNA, 13 nt, Human
gguucuggcuguu

SEQ ID NO: 1409304 - RNA, 19 nt, Human
gguucugccugccagcugc

SEQ ID NO: 1409305 - RNA, 20 nt, Human
gguucugccugccagcugca

SEQ ID NO: 1409306 - RNA, 18 nt, Human
gguucugagauggcuccc

SEQ ID NO: 1409307 - RNA, 17 nt, Human
gguucugagauggcucc

SEQ ID NO: 1409308 - RNA, 21 nt, Human
gguucuccguuagcuccugug

SEQ ID NO: 1409309 - RNA, 20 nt, Human
gguucuccguuagcuccugu

SEQ ID NO: 1409310 - RNA, 19 nt, Human
gguucuccguuagcuccug

SEQ ID NO: 1409311 - RNA, 18 nt, Human
gguucucagguguugcca

SEQ ID NO: 1409312 - RNA, 22 nt, Human
gguucucaauuccaacaguuua

SEQ ID NO: 1409313 - RNA, 23 nt, Human
gguucucacagugggagccaggg

SEQ ID NO: 1409314 - RNA, 18 nt, Human
gguuccuccccuccagcu

SEQ ID NO: 1409315 - RNA, 14 nt, Human
gguuucugcccugc

SEQ ID NO: 1409316 - RNA, 17 nt, Human
gguuucugaguuccugc

SEQ ID NO: 1409317 - RNA, 20 nt, Human
gguuucaccauguuggccag

SEQ ID NO: 1409318 - RNA, 21 nt, Human
gguuucucgcauaggaccuuu

SEQ ID NO: 1409319 - RNA, 14 nt, Human
gguuucagaaaugu

SEQ ID NO: 1409320 - RNA, 15 nt, Human
gguuucagaaaugug

SEQ ID NO: 1409321 - RNA, 19 nt, Human
gguuucaccauguugccca

SEQ ID NO: 1409322 - RNA, 20 nt, Human
gguuucaaagaugcugugag

SEQ ID NO: 1409323 - RNA, 18 nt, Human
gguuucaaagaugcugug

SEQ ID NO: 1409324 - RNA, 16 nt, Human
gguuucaaagaugcug

SEQ ID NO: 1409325 - RNA, 19 nt, Human
gguuucaccauguuggcca

SEQ ID NO: 1409326 - RNA, 12 nt, Human
gguuucagaaau

SEQ ID NO: 1409327 - RNA, 13 nt, Human
gguuucagaaaug

SEQ ID NO: 1409328 - RNA, 19 nt, Human
aaaguuuagccccugaaag

SEQ ID NO: 1409329 - RNA, 18 nt, Human
aaaguuuuauauauuaua

SEQ ID NO: 1409330 - RNA, 17 nt, Human
aaaguuuuauauauuau

SEQ ID NO: 1409331 - RNA, 16 nt, Human
aaaguuuuauauauua

SEQ ID NO: 1409332 - RNA, 15 nt, Human
aaaguuuuauauauu

SEQ ID NO: 1409333 - RNA, 14 nt, Human
aaaguuuuauauau

SEQ ID NO: 1409334 - RNA, 13 nt, Human
aaaguuuuauaua

SEQ ID NO: 1409335 - RNA, 14 nt, Human
aaaguuuguuugcu

SEQ ID NO: 1409336 - RNA, 16 nt, Human
aaaguuuguugaaaca

SEQ ID NO: 1409337 - RNA, 23 nt, Human
aaaguugauaaagauuuuuuaau

SEQ ID NO: 1409338 - RNA, 18 nt, Human
aaaguugauaaagauuuu

SEQ ID NO: 1409339 - RNA, 17 nt, Human
aaaguugauaaagauuu

SEQ ID NO: 1409340 - RNA, 16 nt, Human
aaaguugaauuuuaca

SEQ ID NO: 1409341 - RNA, 12 nt, Human
aaaguucuaaga

SEQ ID NO: 1409342 - RNA, 11 nt, Human
aaaguucuaag

SEQ ID NO: 1409343 - RNA, 22 nt, Human
aaaguuccaagagucuaaagau

SEQ ID NO: 1409344 - RNA, 20 nt, Human
aaaguugcagcuguuuuguu

SEQ ID NO: 1409345 - RNA, 18 nt, Human
aaaguugcagcuguuuug

SEQ ID NO: 1409346 - RNA, 17 nt, Human
aaaguugcagcuguuuu

SEQ ID NO: 1409347 - RNA, 20 nt, Human
aaaguugauaaagauuuuuu

SEQ ID NO: 1409348 - RNA, 19 nt, Human
aaaguugcagcuguuuugu

SEQ ID NO: 1409349 - RNA, 15 nt, Human
aaaguuuaaucagag

SEQ ID NO: 1409350 - RNA, 21 nt, Human
aaagugugaaauaaauuuuuu

SEQ ID NO: 1409351 - RNA, 23 nt, Human
aaaguguauuuggaaauaaaguc

SEQ ID NO: 1409352 - RNA, 22 nt, Human
aaaguguauuuggaaauaaagu

SEQ ID NO: 1409353 - RNA, 15 nt, Human
aaaguguauuuggaa

SEQ ID NO: 1409354 - RNA, 14 nt, Human
aaaguguauuugga

SEQ ID NO: 1409355 - RNA, 10 nt, Human
aaaguguauu

SEQ ID NO: 1409356 - RNA, 18 nt, Human
aaaguucaacauguuauu

SEQ ID NO: 1409357 - RNA, 21 nt, Human
aaaguuccaagagucuaaaga

SEQ ID NO: 1409358 - RNA, 20 nt, Human
aaaguuccaagagucuaaag

SEQ ID NO: 1409359 - RNA, 18 nt, Human
aaaguuccaagagucuaa

SEQ ID NO: 1409360 - RNA, 16 nt, Human
aaaguuccaagagucu

SEQ ID NO: 1409361 - RNA, 18 nt, Human
gguuucugcccugcccac

SEQ ID NO: 1409362 - RNA, 17 nt, Human
gguuucugcccugccca

SEQ ID NO: 1409363 - RNA, 15 nt, Human
gguuucugcccugcc

SEQ ID NO: 1409364 - RNA, 20 nt, Human
gguuuggacaaaauggaaua

SEQ ID NO: 1409365 - RNA, 13 nt, Human
aaauaagucaaca

SEQ ID NO: 1409366 - RNA, 19 nt, Human
aaauaaggcacccaucugu

SEQ ID NO: 1409367 - RNA, 22 nt, Human
aaauaaggcacccaucugucug

SEQ ID NO: 1409368 - RNA, 22 nt, Human
aaauaagcuauuugauguaaua

SEQ ID NO: 1409369 - RNA, 16 nt, Human
aaauaaggaaaagcuu

SEQ ID NO: 1409370 - RNA, 18 nt, Human
aaauaagcuauuugaugu

SEQ ID NO: 1409371 - RNA, 17 nt, Human
aaauaagcuauuugaug

SEQ ID NO: 1409372 - RNA, 12 nt, Human
aaauaagcuauu

SEQ ID NO: 1409373 - RNA, 22 nt, Human
aaauaagcagguggaucuauuu

SEQ ID NO: 1409374 - RNA, 15 nt, Human
aaauaagcaggugga

SEQ ID NO: 1409375 - RNA, 13 nt, Human
aaauaagcaggug

SEQ ID NO: 1409376 - RNA, 16 nt, Human
aaauaagauucuaacg

SEQ ID NO: 1409377 - RNA, 15 nt, Human
aaauaagauucuaac

SEQ ID NO: 1409378 - RNA, 14 nt, Human
aaauaagauucuaa

SEQ ID NO: 1409379 - RNA, 13 nt, Human
aaauaagauucua

SEQ ID NO: 1409380 - RNA, 15 nt, Human
aaauaaaaaagaucc

SEQ ID NO: 1409381 - RNA, 16 nt, Human
aaauaaaaaagauccc

SEQ ID NO: 1409382 - RNA, 22 nt, Human
aaaguuuuuuauuaugcauuau

SEQ ID NO: 1409383 - RNA, 22 nt, Human
aaaguuuuauauauuauaugga

SEQ ID NO: 1409384 - RNA, 23 nt, Human
aaaguuuuauauauuauauggaa

SEQ ID NO: 1409385 - RNA, 21 nt, Human
aaaguuuuauauauuauaugg

SEQ ID NO: 1409386 - RNA, 20 nt, Human
aaaguuuuauauauuauaug

SEQ ID NO: 1409387 - RNA, 11 nt, Human
aaaguuuuuua

SEQ ID NO: 1409388 - RNA, 13 nt, Human
aaauaaugcuuug

SEQ ID NO: 1409389 - RNA, 12 nt, Human
aaauaaugcuuu

SEQ ID NO: 1409390 - RNA, 12 nt, Human
aaauaaugugaa

SEQ ID NO: 1409391 - RNA, 18 nt, Human
aaauaagucaacaguaaa

SEQ ID NO: 1409392 - RNA, 21 nt, Human
aaauaagucaacaguaaacca

SEQ ID NO: 1409393 - RNA, 15 nt, Human
aaauaagucaacagu

SEQ ID NO: 1409394 - RNA, 14 nt, Human
aaauaagucaacag

SEQ ID NO: 1409395 - RNA, 19 nt, Human
aaauaagugcccucuccca

SEQ ID NO: 1409396 - RNA, 19 nt, Human
aaauaaugaauacauuucc

SEQ ID NO: 1409397 - RNA, 20 nt, Human
aaauaauuuuuauauuugaa

SEQ ID NO: 1409398 - RNA, 18 nt, Human
aaauaauuuuuauauuug

SEQ ID NO: 1409399 - RNA, 13 nt, Human
aaauaaugugaaa

SEQ ID NO: 1409400 - RNA, 21 nt, Human
guaaagauguuuauuucaggc

SEQ ID NO: 1409401 - RNA, 16 nt, Human
guaaagaucaauaaaa

SEQ ID NO: 1409402 - RNA, 22 nt, Human
guaaagauauuuuuaucuuuau

SEQ ID NO: 1409403 - RNA, 19 nt, Human
guaaagauauuuuuaucuu

SEQ ID NO: 1409404 - RNA, 15 nt, Human
guaaagaauuauuuu

SEQ ID NO: 1409405 - RNA, 15 nt, Human
guaaagacuggcuuu

SEQ ID NO: 1409406 - RNA, 19 nt, Human
guaaagacuggcuuuuauu

SEQ ID NO: 1409407 - RNA, 14 nt, Human
guaaagacuggcuu

SEQ ID NO: 1409408 - RNA, 14 nt, Human
guaaagaauuauuu

SEQ ID NO: 1409409 - RNA, 13 nt, Human
guaaagaauuauu

SEQ ID NO: 1409410 - RNA, 18 nt, Human
guaaaaugugggauuaug

SEQ ID NO: 1409411 - RNA, 19 nt, Human
guaaauuggcauggaaauu

SEQ ID NO: 1409412 - RNA, 22 nt, Human
guaaauuauuaauuuaugcaga

SEQ ID NO: 1409413 - RNA, 12 nt, Human
guaaagccaugc

SEQ ID NO: 1409414 - RNA, 19 nt, Human
guaacaauacaaauggauu

SEQ ID NO: 1409415 - RNA, 21 nt, Human
guaaaaugacaaucaugugug

SEQ ID NO: 1409416 - RNA, 22 nt, Human
guaaaaugacaaucaugugugu

SEQ ID NO: 1409417 - RNA, 16 nt, Human
guaaaaugacaaucau

SEQ ID NO: 1409418 - RNA, 14 nt, Human
guaaaaucuuucuu

SEQ ID NO: 1409419 - RNA, 15 nt, Human
guaaaaucuuucuuu

SEQ ID NO: 1409420 - RNA, 21 nt, Human
guaaaaucuuucuuucuuaga

SEQ ID NO: 1409421 - RNA, 23 nt, Human
guaaaaucuugucauguguauaa

SEQ ID NO: 1409422 - RNA, 22 nt, Human
guaaaaucuugucauguguaua

SEQ ID NO: 1409423 - RNA, 21 nt, Human
guaaaaucuugucauguguau

SEQ ID NO: 1409424 - RNA, 20 nt, Human
guaaaaucuugucaugugua

SEQ ID NO: 1409425 - RNA, 19 nt, Human
guaaaaucuugucaugugu

SEQ ID NO: 1409426 - RNA, 18 nt, Human
guaaaaucuugucaugug

SEQ ID NO: 1409427 - RNA, 16 nt, Human
guaaaaucuugucaug

SEQ ID NO: 1409428 - RNA, 15 nt, Human
guaaaaucuugucau

SEQ ID NO: 1409429 - RNA, 12 nt, Human
guaaaaucuugu

SEQ ID NO: 1409430 - RNA, 21 nt, Human
guaaaauauuuugaaucaaua

SEQ ID NO: 1409431 - RNA, 19 nt, Human
guaaaauauuuugaaucaa

SEQ ID NO: 1409432 - RNA, 18 nt, Human
guaaaauauuuugaauca

SEQ ID NO: 1409433 - RNA, 15 nt, Human
guaaaauauuuugaa

SEQ ID NO: 1409434 - RNA, 13 nt, Human
guaaaauacuuuu

SEQ ID NO: 1409435 - RNA, 22 nt, Human
guaaaauacuuuuacucugccu

SEQ ID NO: 1409436 - RNA, 12 nt, Human
guaaaauacuuu

SEQ ID NO: 1409437 - RNA, 16 nt, Human
aaauaaugcuuugaaa

SEQ ID NO: 1409438 - RNA, 21 nt, Human
aaauaauuuuuauauuugaaa

SEQ ID NO: 1409439 - RNA, 14 nt, Human
aaauaaugugaaac

SEQ ID NO: 1409440 - RNA, 18 nt, Human
gcuggagaugaggccaga

SEQ ID NO: 1409441 - RNA, 20 nt, Human
gcuggagaugaggccagacc

SEQ ID NO: 1409442 - RNA, 21 nt, Human
gcuggagaugaggccagacca

SEQ ID NO: 1409443 - RNA, 24 nt, Human
gcugcugucugggugcuacugggg

SEQ ID NO: 1409444 - RNA, 22 nt, Human
gcugcugucugggugcuacugg

SEQ ID NO: 1409445 - RNA, 21 nt, Human
gcugcugucugggugcuacug

SEQ ID NO: 1409446 - RNA, 20 nt, Human
gcugcuccgaggacccagga

SEQ ID NO: 1409447 - RNA, 21 nt, Human
gcugcucccucagacuggggc

SEQ ID NO: 1409448 - RNA, 19 nt, Human
gcugcucccucagacuggg

SEQ ID NO: 1409449 - RNA, 16 nt, Human
gcugcucccucagacu

SEQ ID NO: 1409450 - RNA, 15 nt, Human
gcugcucccucagac

SEQ ID NO: 1409451 - RNA, 14 nt, Human
gcugcucccucaga

SEQ ID NO: 1409452 - RNA, 13 nt, Human
gcugcucccucag

SEQ ID NO: 1409453 - RNA, 12 nt, Human
gcugcucccuca

SEQ ID NO: 1409454 - RNA, 22 nt, Human
gcugcuccccacgucagcuggg

SEQ ID NO: 1409455 - RNA, 13 nt, Human
gcugcuccccacg

SEQ ID NO: 1409456 - RNA, 21 nt, Human
gcugcuggggaagacaguggc

SEQ ID NO: 1409457 - RNA, 20 nt, Human
gcugcuggggaagacagugg

SEQ ID NO: 1409458 - RNA, 19 nt, Human
gcugcuggggaagacagug

SEQ ID NO: 1409459 - RNA, 18 nt, Human
gcugcuggggaagacagu

SEQ ID NO: 1409460 - RNA, 20 nt, Human
gcugcugggcucagugaagu

SEQ ID NO: 1409461 - RNA, 19 nt, Human
gcugcugggcucagugaag

SEQ ID NO: 1409462 - RNA, 16 nt, Human
gcugcugggcucagug

SEQ ID NO: 1409463 - RNA, 13 nt, Human
gcugcugggcuca

SEQ ID NO: 1409464 - RNA, 20 nt, Human
gcugcugucugggugcuacu

SEQ ID NO: 1409465 - RNA, 16 nt, Human
gcugcugucugggugc

SEQ ID NO: 1409466 - RNA, 13 nt, Human
gcugcugucuggg

SEQ ID NO: 1409467 - RNA, 23 nt, Human
gcugcugucccucccccuugucc

SEQ ID NO: 1409468 - RNA, 22 nt, Human
gcugcugucccucccccuuguc

SEQ ID NO: 1409469 - RNA, 18 nt, Human
gcugcugucccucccccu

SEQ ID NO: 1409470 - RNA, 16 nt, Human
gcugcugucccucccc

SEQ ID NO: 1409471 - RNA, 15 nt, Human
gcugcugucccuccc

SEQ ID NO: 1409472 - RNA, 21 nt, Human
gcugcugagaaccuggccuuc

SEQ ID NO: 1409473 - RNA, 22 nt, Human
gcugcugagaaccuggccuuca

SEQ ID NO: 1409474 - RNA, 20 nt, Human
gcugcugagaaccuggccuu

SEQ ID NO: 1409475 - RNA, 19 nt, Human
gcugcugagaaccuggccu

SEQ ID NO: 1409476 - RNA, 18 nt, Human
gcugcugagaaccuggcc

SEQ ID NO: 1409477 - RNA, 17 nt, Human
gcugcugagaaccuggc

SEQ ID NO: 1409478 - RNA, 16 nt, Human
gcugcugagaaccugg

SEQ ID NO: 1409479 - RNA, 15 nt, Human
gcugcugagaaccug

SEQ ID NO: 1409480 - RNA, 14 nt, Human
gcugcugagaaccu

SEQ ID NO: 1409481 - RNA, 13 nt, Human
gcugcugagaacc

SEQ ID NO: 1409482 - RNA, 20 nt, Human
gcugcacugaugcugccccu

SEQ ID NO: 1409483 - RNA, 17 nt, Human
gcugcaggaaucuuuaa

SEQ ID NO: 1409484 - RNA, 22 nt, Human
gcugcaggaaucuuuaaaagau

SEQ ID NO: 1409485 - RNA, 21 nt, Human
gcugcagccugcgccaccgcc

SEQ ID NO: 1409486 - RNA, 22 nt, Human
gcugcagaggccagaggccccc

SEQ ID NO: 1409487 - RNA, 18 nt, Human
gcugcagaggccagaggc

SEQ ID NO: 1409488 - RNA, 15 nt, Human
gcugcagaggccaga

SEQ ID NO: 1409489 - RNA, 19 nt, Human
gcugccaguguccugagcc

SEQ ID NO: 1409490 - RNA, 18 nt, Human
gcugccaguguccugagc

SEQ ID NO: 1409491 - RNA, 13 nt, Human
gcugaggcuggca

SEQ ID NO: 1409492 - RNA, 23 nt, Human
gcugaggccugggccgcugccac

SEQ ID NO: 1409493 - RNA, 20 nt, Human
gcugaggccugggccgcugc

SEQ ID NO: 1409494 - RNA, 17 nt, Human
gcugaggccugggccgc

SEQ ID NO: 1409495 - RNA, 16 nt, Human
gcugaguauuaaaaug

SEQ ID NO: 1409496 - RNA, 17 nt, Human
gcugaguauuaaaaugu

SEQ ID NO: 1409497 - RNA, 21 nt, Human
gcucuuuguuuugugucucuu

SEQ ID NO: 1409498 - RNA, 22 nt, Human
gcugaacaguggaggaagaggg

SEQ ID NO: 1409499 - RNA, 13 nt, Human
gcugaacagugga

SEQ ID NO: 1409500 - RNA, 12 nt, Human
gcugaacaucac

SEQ ID NO: 1409501 - RNA, 18 nt, Human
gcugaaaauguccuugug

SEQ ID NO: 1409502 - RNA, 19 nt, Human
gcucugucuacuugcucag

SEQ ID NO: 1409503 - RNA, 13 nt, Human
gcucugucuacuu

SEQ ID NO: 1409504 - RNA, 17 nt, Human
gcucuguccccagccug

SEQ ID NO: 1409505 - RNA, 15 nt, Human
gcucuguccccagcc

SEQ ID NO: 1409506 - RNA, 21 nt, Human
gcucugucuacuugcucaggu

SEQ ID NO: 1409507 - RNA, 23 nt, Human
gcucuguaucaggacccagagga

SEQ ID NO: 1409508 - RNA, 22 nt, Human
gcucuguaucaggacccagagg

SEQ ID NO: 1409509 - RNA, 19 nt, Human
gcucuguaucaggacccag

SEQ ID NO: 1409510 - RNA, 18 nt, Human
gcucuguaucaggaccca

SEQ ID NO: 1409511 - RNA, 14 nt, Human
gcucuguccccagc

SEQ ID NO: 1409512 - RNA, 13 nt, Human
gcucuguccccag

SEQ ID NO: 1409513 - RNA, 23 nt, Human
gcucuguagugcuacagggucca

SEQ ID NO: 1409514 - RNA, 17 nt, Human
gcucuguagugcuacag

SEQ ID NO: 1409515 - RNA, 22 nt, Human
gcucugguuguuucuguuccaa

SEQ ID NO: 1409516 - RNA, 23 nt, Human
gcucuguaaguagaugcauuugg

SEQ ID NO: 1409517 - RNA, 21 nt, Human
gcucugguuguuucuguucca

SEQ ID NO: 1409518 - RNA, 20 nt, Human
gcucugguuguuucuguucc

SEQ ID NO: 1409519 - RNA, 19 nt, Human
gcucugguuguuucuguuc

SEQ ID NO: 1409520 - RNA, 17 nt, Human
gcucuggagcccacugu

SEQ ID NO: 1409521 - RNA, 16 nt, Human
gcugaggccugggccg

SEQ ID NO: 1409522 - RNA, 15 nt, Human
gcugaggccugggcc

SEQ ID NO: 1409523 - RNA, 14 nt, Human
gcugaggccugggc

SEQ ID NO: 1409524 - RNA, 13 nt, Human
gcugaggccuggg

SEQ ID NO: 1409525 - RNA, 21 nt, Human
gcugaggccuggacuuuccug

SEQ ID NO: 1409526 - RNA, 14 nt, Human
gcugaggccuggac

SEQ ID NO: 1409527 - RNA, 13 nt, Human
gcugaggccugga

SEQ ID NO: 1409528 - RNA, 12 nt, Human
gcugaggccugg

SEQ ID NO: 1409529 - RNA, 23 nt, Human
gcugagcgaggagaugcuccuug

SEQ ID NO: 1409530 - RNA, 17 nt, Human
gcugacaccuaacucuu

SEQ ID NO: 1409531 - RNA, 16 nt, Human
gcugacaccuaacucu

SEQ ID NO: 1409532 - RNA, 17 nt, Human
gcugaagguuguggccu

SEQ ID NO: 1409533 - RNA, 20 nt, Human
gcugaagguuguggccuuug

SEQ ID NO: 1409534 - RNA, 18 nt, Human
gcugaagaauuauuuuuu

SEQ ID NO: 1409535 - RNA, 17 nt, Human
gcugaauuucccucucu

SEQ ID NO: 1409536 - RNA, 24 nt, Human
gcugaauuucccucucucauaccc

SEQ ID NO: 1409537 - RNA, 20 nt, Human
gcucucugugggcuggcagu

SEQ ID NO: 1409538 - RNA, 17 nt, Human
gcucugaaagagaaaca

SEQ ID NO: 1409539 - RNA, 16 nt, Human
gcucugaaaccagugu

SEQ ID NO: 1409540 - RNA, 15 nt, Human
gcucucuuucugucu

SEQ ID NO: 1409541 - RNA, 14 nt, Human
gcucucuuucuguc

SEQ ID NO: 1409542 - RNA, 19 nt, Human
gcucucugugggcuggcag

SEQ ID NO: 1409543 - RNA, 13 nt, Human
gcucugccagucc

SEQ ID NO: 1409544 - RNA, 17 nt, Human
gcucugccaguccuguc

SEQ ID NO: 1409545 - RNA, 16 nt, Human
gcucugccaguccugu

SEQ ID NO: 1409546 - RNA, 18 nt, Human
gcucugccaguccugucc

SEQ ID NO: 1409547 - RNA, 15 nt, Human
gcucuggagcccacu

SEQ ID NO: 1409548 - RNA, 16 nt, Human
gcucuggagcccacug

SEQ ID NO: 1409549 - RNA, 14 nt, Human
gcuccucccucuca

SEQ ID NO: 1409550 - RNA, 17 nt, Human
gcucccauccugugugu

SEQ ID NO: 1409551 - RNA, 22 nt, Human
gcuccucccucucaacacccag

SEQ ID NO: 1409552 - RNA, 17 nt, Human
gcuccuccuucugcugc

SEQ ID NO: 1409553 - RNA, 18 nt, Human
gcuccucgagaucccaac

SEQ ID NO: 1409554 - RNA, 15 nt, Human
gcuccucuccccagc

SEQ ID NO: 1409555 - RNA, 20 nt, Human
gcucccaggggcucccuccg

SEQ ID NO: 1409556 - RNA, 21 nt, Human
gcucccaggggcucccuccgc

SEQ ID NO: 1409557 - RNA, 19 nt, Human
gcucccaggggcucccucc

SEQ ID NO: 1409558 - RNA, 22 nt, Human
gcucccagggacaccugggaga

SEQ ID NO: 1409559 - RNA, 11 nt, Human
gcucccagggc

SEQ ID NO: 1409560 - RNA, 17 nt, Human
gcuccagccugacauca

SEQ ID NO: 1409561 - RNA, 13 nt, Human
gcuccagccugac

SEQ ID NO: 1409562 - RNA, 12 nt, Human
gcuccagccuga

SEQ ID NO: 1409563 - RNA, 16 nt, Human
gcuccagccccucuug

SEQ ID NO: 1409564 - RNA, 22 nt, Human
gcuccagaugcagggcagucau

SEQ ID NO: 1409565 - RNA, 21 nt, Human
gcuccagaugcagggcaguca

SEQ ID NO: 1409566 - RNA, 19 nt, Human
gcuccagaugcagggcagu

SEQ ID NO: 1409567 - RNA, 18 nt, Human
gcuccagaugcagggcag

SEQ ID NO: 1409568 - RNA, 17 nt, Human
gcuccagaugcagggca

SEQ ID NO: 1409569 - RNA, 21 nt, Human
gcuccagagggcacucugcuu

SEQ ID NO: 1409570 - RNA, 20 nt, Human
gcuccagagggcacucugcu

SEQ ID NO: 1409571 - RNA, 12 nt, Human
gcuccagagggc

SEQ ID NO: 1409572 - RNA, 23 nt, Human
gcuccagaccugauccuggaggc

SEQ ID NO: 1409573 - RNA, 22 nt, Human
gcuccagaccugauccuggagg

SEQ ID NO: 1409574 - RNA, 21 nt, Human
gcuccagaccugauccuggag

SEQ ID NO: 1409575 - RNA, 20 nt, Human
gcuccagaccugauccugga

SEQ ID NO: 1409576 - RNA, 13 nt, Human
gcuccagaccuga

SEQ ID NO: 1409577 - RNA, 12 nt, Human
gcuccagaccug

SEQ ID NO: 1409578 - RNA, 14 nt, Human
gcuccagacaggga

SEQ ID NO: 1409579 - RNA, 16 nt, Human
gcucuauuaugaaugu

SEQ ID NO: 1409580 - RNA, 21 nt, Human
gcucuaugagucuagauguuu

SEQ ID NO: 1409581 - RNA, 18 nt, Human
gcucuaugagucuagaug

SEQ ID NO: 1409582 - RNA, 14 nt, Human
gcucuaugagucua

SEQ ID NO: 1409583 - RNA, 13 nt, Human
gcucuaugagucu

SEQ ID NO: 1409584 - RNA, 19 nt, Human
gcucuagguacgaugacag

SEQ ID NO: 1409585 - RNA, 20 nt, Human
gcucuagaucauaaggcuuc

SEQ ID NO: 1409586 - RNA, 23 nt, Human
gcucuagauugagagaagagaca

SEQ ID NO: 1409587 - RNA, 22 nt, Human
gcucuagaucauaaggcuucaa

SEQ ID NO: 1409588 - RNA, 21 nt, Human
gcucucacggccacacagcug

SEQ ID NO: 1409589 - RNA, 23 nt, Human
gcucucacggccacacagcugcc

SEQ ID NO: 1409590 - RNA, 12 nt, Human
gcucucaccucu

SEQ ID NO: 1409591 - RNA, 17 nt, Human
gcucucaccuggcccug

SEQ ID NO: 1409592 - RNA, 22 nt, Human
gcucuauuaugaaugugaagcc

SEQ ID NO: 1409593 - RNA, 23 nt, Human
gcucuauuaugaaugugaagccu

SEQ ID NO: 1409594 - RNA, 21 nt, Human
gcucuauuaugaaugugaagc

SEQ ID NO: 1409595 - RNA, 18 nt, Human
gcucuauuaugaauguga

SEQ ID NO: 1409596 - RNA, 13 nt, Human
gcucuagaaucug

SEQ ID NO: 1409597 - RNA, 23 nt, Human
gcucuacuuccccauggcccuga

SEQ ID NO: 1409598 - RNA, 22 nt, Human
gcucuacuuccccauggcccug

SEQ ID NO: 1409599 - RNA, 16 nt, Human
gcucuacuuccccaug

SEQ ID NO: 1409600 - RNA, 15 nt, Human
gcucuacuuccccau

SEQ ID NO: 1409601 - RNA, 21 nt, Human
gcucuacuggucuuguggaau

SEQ ID NO: 1409602 - RNA, 20 nt, Human
gcucuacaucuucugccuua

SEQ ID NO: 1409603 - RNA, 19 nt, Human
gcucuacaucuucugccuu

SEQ ID NO: 1409604 - RNA, 18 nt, Human
gcucuacaucuucugccu

SEQ ID NO: 1409605 - RNA, 23 nt, Human
gcuccucuccccagcccagagac

SEQ ID NO: 1409606 - RNA, 22 nt, Human
gcuccucuccccagcccagaga

SEQ ID NO: 1409607 - RNA, 21 nt, Human
gcuccucuccccagcccagag

SEQ ID NO: 1409608 - RNA, 20 nt, Human
gcuccucuccccagcccaga

SEQ ID NO: 1409609 - RNA, 19 nt, Human
gcuccucuccccagcccag

SEQ ID NO: 1409610 - RNA, 18 nt, Human
gcuccucuccccagccca

SEQ ID NO: 1409611 - RNA, 16 nt, Human
gcuccucuccccagcc

SEQ ID NO: 1409612 - RNA, 16 nt, Human
gcuggaguuucaugua

SEQ ID NO: 1409613 - RNA, 21 nt, Human
gcuggaguuagggacugacca

SEQ ID NO: 1409614 - RNA, 17 nt, Human
gcuggaguuagggacug

SEQ ID NO: 1409615 - RNA, 20 nt, Human
gcuggagugcagugguguga

SEQ ID NO: 1409616 - RNA, 19 nt, Human
gcuggagugcaguggugca

SEQ ID NO: 1409617 - RNA, 20 nt, Human
gcuggagugcaguggcgcga

SEQ ID NO: 1409618 - RNA, 15 nt, Human
gcugguuuaauguuu

SEQ ID NO: 1409619 - RNA, 12 nt, Human
gcugguucugua

SEQ ID NO: 1409620 - RNA, 22 nt, Human
gcuguacaucuauuuuggauug

SEQ ID NO: 1409621 - RNA, 20 nt, Human
gcuguacaucuauuuuggau

SEQ ID NO: 1409622 - RNA, 16 nt, Human
gcuguacaucuauuuu

SEQ ID NO: 1409623 - RNA, 12 nt, Human
gcuguacaucua

SEQ ID NO: 1409624 - RNA, 16 nt, Human
gcuguacccaguuucu

SEQ ID NO: 1409625 - RNA, 13 nt, Human
gcuguacccaguu

SEQ ID NO: 1409626 - RNA, 23 nt, Human
gcuguacaucuauuuuggauugu

SEQ ID NO: 1409627 - RNA, 13 nt, Human
gcuguagaaaaaa

SEQ ID NO: 1409628 - RNA, 15 nt, Human
gcuguauugucugaa

SEQ ID NO: 1409629 - RNA, 14 nt, Human
gcuguauugucuga

SEQ ID NO: 1409630 - RNA, 12 nt, Human
gcuguauugucu

SEQ ID NO: 1409631 - RNA, 18 nt, Human
gcuguauuuuaaaagaau

SEQ ID NO: 1409632 - RNA, 13 nt, Human
gcuguauuuuaaa

SEQ ID NO: 1409633 - RNA, 12 nt, Human
gcuguauuuuaa

SEQ ID NO: 1409634 - RNA, 23 nt, Human
gcugugccucgcuccccacucug

SEQ ID NO: 1409635 - RNA, 18 nt, Human
gcugugccucgcucccca

SEQ ID NO: 1409636 - RNA, 15 nt, Human
gcugugccucgcucc

SEQ ID NO: 1409637 - RNA, 14 nt, Human
gcuguugcugaaua

SEQ ID NO: 1409638 - RNA, 15 nt, Human
gcuguugcugaauag

SEQ ID NO: 1409639 - RNA, 16 nt, Human
gcuguugcugaauagg

SEQ ID NO: 1409640 - RNA, 19 nt, Human
gcuguugcugaauaggcga

SEQ ID NO: 1409641 - RNA, 16 nt, Human
gcuguuuuguuauaua

SEQ ID NO: 1409642 - RNA, 14 nt, Human
gcuguuuuguuaua

SEQ ID NO: 1409643 - RNA, 13 nt, Human
gcuguuuuguuau

SEQ ID NO: 1409644 - RNA, 16 nt, Human
gcuguuuuaaacauua

SEQ ID NO: 1409645 - RNA, 19 nt, Human
gcuguuuuguugacauucu

SEQ ID NO: 1409646 - RNA, 14 nt, Human
gcuguuuuguugac

SEQ ID NO: 1409647 - RNA, 19 nt, Human
gcuguuuuguuauauaauu

SEQ ID NO: 1409648 - RNA, 23 nt, Human
gcuguuuuguuauauaauuuaga

SEQ ID NO: 1409649 - RNA, 23 nt, Human
gcuguuuuguugacauucugaau

SEQ ID NO: 1409650 - RNA, 13 nt, Human
gcuguuuuuuugu

SEQ ID NO: 1409651 - RNA, 20 nt, Human
gcuuaauggcugauaauuuu

SEQ ID NO: 1409652 - RNA, 14 nt, Human
gcuuaauucaaaua

SEQ ID NO: 1409653 - RNA, 15 nt, Human
gcuuaauucaaauaa

SEQ ID NO: 1409654 - RNA, 15 nt, Human
gcuucagguccaggc

SEQ ID NO: 1409655 - RNA, 21 nt, Human
gcuucagguccaggcuguguu

SEQ ID NO: 1409656 - RNA, 23 nt, Human
gcuucaggcccccgccuuggccu

SEQ ID NO: 1409657 - RNA, 16 nt, Human
gcuucaaauuguaagc

SEQ ID NO: 1409658 - RNA, 20 nt, Human
gcuuucugaacagcuggugu

SEQ ID NO: 1409659 - RNA, 17 nt, Human
gcuuucugaucaaggcc

SEQ ID NO: 1409660 - RNA, 21 nt, Human
gcuuucugaacagcuggugua

SEQ ID NO: 1409661 - RNA, 19 nt, Human
gcuuucugaacagcuggug

SEQ ID NO: 1409662 - RNA, 18 nt, Human
gcuuucugaacagcuggu

SEQ ID NO: 1409663 - RNA, 15 nt, Human
gcuuucuguuccaaa

SEQ ID NO: 1409664 - RNA, 14 nt, Human
gcuuucuguuccaa

SEQ ID NO: 1409665 - RNA, 13 nt, Human
gcuuucuguucca

SEQ ID NO: 1409666 - RNA, 12 nt, Human
gcuuucuguucc

SEQ ID NO: 1409667 - RNA, 22 nt, Human
gcuuugagagagaaaggacucc

SEQ ID NO: 1409668 - RNA, 16 nt, Human
gcuuucuguuccaaau

SEQ ID NO: 1409669 - RNA, 15 nt, Human
gcuuucccugccucu

SEQ ID NO: 1409670 - RNA, 16 nt, Human
gcuuucugaacagcug

SEQ ID NO: 1409671 - RNA, 19 nt, Human
gcuuucuccuuuaauugua

SEQ ID NO: 1409672 - RNA, 15 nt, Human
gcuugguuccuuccc

SEQ ID NO: 1409673 - RNA, 16 nt, Human
gcuugguuccuuccca

SEQ ID NO: 1409674 - RNA, 14 nt, Human
gcuugaccugaggc

SEQ ID NO: 1409675 - RNA, 22 nt, Human
gcuuccuucagagagcagugcu

SEQ ID NO: 1409676 - RNA, 19 nt, Human
gcuuccaugauucuauuua

SEQ ID NO: 1409677 - RNA, 18 nt, Human
gcuuccaugauucuauuu

SEQ ID NO: 1409678 - RNA, 15 nt, Human
gcuuccaugauucua

SEQ ID NO: 1409679 - RNA, 14 nt, Human
gcuuccaugauucu

SEQ ID NO: 1409680 - RNA, 13 nt, Human
gcuuccuucauuu

SEQ ID NO: 1409681 - RNA, 20 nt, Human
gcuuccuucagagagcagug

SEQ ID NO: 1409682 - RNA, 19 nt, Human
gcuuccuucagagagcagu

SEQ ID NO: 1409683 - RNA, 17 nt, Human
gcuuccuucagagagca

SEQ ID NO: 1409684 - RNA, 16 nt, Human
gcuuccuucagagagc

SEQ ID NO: 1409685 - RNA, 14 nt, Human
gcuuccuucagaga

SEQ ID NO: 1409686 - RNA, 13 nt, Human
gcuuccuucagag

SEQ ID NO: 1409687 - RNA, 16 nt, Human
gcuuccuggugcugga

SEQ ID NO: 1409688 - RNA, 14 nt, Human
gcuuccuggugcug

SEQ ID NO: 1409689 - RNA, 11 nt, Human
gcuuccuggug

SEQ ID NO: 1409690 - RNA, 22 nt, Human
gcuuccuggagcagaagcagca

SEQ ID NO: 1409691 - RNA, 18 nt, Human
gcuuccuggagcagaagc

SEQ ID NO: 1409692 - RNA, 15 nt, Human
gcuuccuggagcaga

SEQ ID NO: 1409693 - RNA, 13 nt, Human
gcuuccuggagca

SEQ ID NO: 1409694 - RNA, 12 nt, Human
gcuuccuggagc

SEQ ID NO: 1409695 - RNA, 21 nt, Human
gcuuccugcuugccaaggcag

SEQ ID NO: 1409696 - RNA, 14 nt, Human
gcuuccugcuugcc

SEQ ID NO: 1409697 - RNA, 13 nt, Human
gcuuccugcuugc

SEQ ID NO: 1409698 - RNA, 19 nt, Human
gcuuccuggcaauagucaa

SEQ ID NO: 1409699 - RNA, 18 nt, Human
ggaacaaggagucagaca

SEQ ID NO: 1409700 - RNA, 19 nt, Human
ggaaauucccuucaucugg

SEQ ID NO: 1409701 - RNA, 17 nt, Human
ggaaauuuagcauugua

SEQ ID NO: 1409702 - RNA, 14 nt, Human
ggaaauuuagcauu

SEQ ID NO: 1409703 - RNA, 21 nt, Human
ggaaauuuaaagcagguucuu

SEQ ID NO: 1409704 - RNA, 17 nt, Human
ggaaauuggaagagcac

SEQ ID NO: 1409705 - RNA, 16 nt, Human
ggaaauugauuuugaa

SEQ ID NO: 1409706 - RNA, 22 nt, Human
ggaaauucccuucaucuggaac

SEQ ID NO: 1409707 - RNA, 16 nt, Human
ggaaauucugcucaga

SEQ ID NO: 1409708 - RNA, 20 nt, Human
ggaaauucccuucaucugga

SEQ ID NO: 1409709 - RNA, 18 nt, Human
ggaaaccuuccacccagu

SEQ ID NO: 1409710 - RNA, 15 nt, Human
ggaaacgagacuuuc

SEQ ID NO: 1409711 - RNA, 21 nt, Human
ggaaacuaggugcauauuuau

SEQ ID NO: 1409712 - RNA, 14 nt, Human
ggaacugcugccac

SEQ ID NO: 1409713 - RNA, 13 nt, Human
ggaacugcugcca

SEQ ID NO: 1409714 - RNA, 12 nt, Human
ggaacugcugcc

SEQ ID NO: 1409715 - RNA, 20 nt, Human
ggaacugaagggggcggccu

SEQ ID NO: 1409716 - RNA, 21 nt, Human
ggaacugaagggggcggccua

SEQ ID NO: 1409717 - RNA, 12 nt, Human
ggaacugaaggg

SEQ ID NO: 1409718 - RNA, 21 nt, Human
ggaacaauugaaguaaacuuu

SEQ ID NO: 1409719 - RNA, 19 nt, Human
ggaacaauugaaguaaacu

SEQ ID NO: 1409720 - RNA, 15 nt, Human
ggaacaauugaagua

SEQ ID NO: 1409721 - RNA, 21 nt, Human
ggaacacuagacaagccagaa

SEQ ID NO: 1409722 - RNA, 20 nt, Human
ggaacacuagacaagccaga

SEQ ID NO: 1409723 - RNA, 14 nt, Human
ggaacacggccaca

SEQ ID NO: 1409724 - RNA, 15 nt, Human
ggaagaaagaagaca

SEQ ID NO: 1409725 - RNA, 21 nt, Human
ggaacugcugccacugagggg

SEQ ID NO: 1409726 - RNA, 17 nt, Human
ggaacugcugccacuga

SEQ ID NO: 1409727 - RNA, 16 nt, Human
ggaacugcugccacug

SEQ ID NO: 1409728 - RNA, 15 nt, Human
ggaacugcugccacu

SEQ ID NO: 1409729 - RNA, 23 nt, Human
ggaacuuggggaguuaagaccug

SEQ ID NO: 1409730 - RNA, 20 nt, Human
ggaagaagagaucaggaaga

SEQ ID NO: 1409731 - RNA, 21 nt, Human
ggaagaagagaucaggaagag

SEQ ID NO: 1409732 - RNA, 22 nt, Human
ggaagaagagaucaggaagaga

SEQ ID NO: 1409733 - RNA, 20 nt, Human
ggaagacccauuccuuccca

SEQ ID NO: 1409734 - RNA, 17 nt, Human
ggaagacccauuccuuc

SEQ ID NO: 1409735 - RNA, 18 nt, Human
ggaagacgcaagggccug

SEQ ID NO: 1409736 - RNA, 13 nt, Human
gcuuuuuccagag

SEQ ID NO: 1409737 - RNA, 17 nt, Human
gcuuuuuauuucugcau

SEQ ID NO: 1409738 - RNA, 21 nt, Human
gcuuuuuauuucugcauaugu

SEQ ID NO: 1409739 - RNA, 15 nt, Human
gcuuuuuauuucugc

SEQ ID NO: 1409740 - RNA, 19 nt, Human
gcuuuuuauuccuccugcu

SEQ ID NO: 1409741 - RNA, 19 nt, Human
gcuuuugugauggagugcu

SEQ ID NO: 1409742 - RNA, 20 nt, Human
gcuuuugucuacacacccug

SEQ ID NO: 1409743 - RNA, 21 nt, Human
gcuuuuggcggggaggaggaa

SEQ ID NO: 1409744 - RNA, 22 nt, Human
gcuuuuggcggggaggaggaaa

SEQ ID NO: 1409745 - RNA, 12 nt, Human
gcuuuugugcau

SEQ ID NO: 1409746 - RNA, 15 nt, Human
gcuuuuuuaucaugu

SEQ ID NO: 1409747 - RNA, 18 nt, Human
gcuuuuuuaucaugugaa

SEQ ID NO: 1409748 - RNA, 20 nt, Human
gcuuuuuuaucaugugaaau

SEQ ID NO: 1409749 - RNA, 17 nt, Human
ggaaaccuuccacccag

SEQ ID NO: 1409750 - RNA, 17 nt, Human
gcuuuuuuguuuuggcu

SEQ ID NO: 1409751 - RNA, 16 nt, Human
gcuuuuuguguuuuuu

SEQ ID NO: 1409752 - RNA, 23 nt, Human
gcuuuuugugauaugcacaaugu

SEQ ID NO: 1409753 - RNA, 22 nt, Human
gcuuuuuucucugauacagaaa

SEQ ID NO: 1409754 - RNA, 20 nt, Human
gcuuugauguuccuuccagu

SEQ ID NO: 1409755 - RNA, 19 nt, Human
gcuuugauguuccuuccag

SEQ ID NO: 1409756 - RNA, 15 nt, Human
gcuuugauguuccuu

SEQ ID NO: 1409757 - RNA, 14 nt, Human
gcgagagaugugug

SEQ ID NO: 1409758 - RNA, 13 nt, Human
gcgagagaugugu

SEQ ID NO: 1409759 - RNA, 12 nt, Human
gcgagagaugug

SEQ ID NO: 1409760 - RNA, 19 nt, Human
gcgagagaucaaagaugaa

SEQ ID NO: 1409761 - RNA, 17 nt, Human
gcgacuuucugccugga

SEQ ID NO: 1409762 - RNA, 16 nt, Human
gcgacuuucugccugg

SEQ ID NO: 1409763 - RNA, 22 nt, Human
gcgagagauguguguugauacu

SEQ ID NO: 1409764 - RNA, 16 nt, Human
gcgagagauguguguu

SEQ ID NO: 1409765 - RNA, 15 nt, Human
gcgagagaugugugu

SEQ ID NO: 1409766 - RNA, 18 nt, Human
gcgagcaugucguggaca

SEQ ID NO: 1409767 - RNA, 19 nt, Human
gcgagauaccccaccuccc

SEQ ID NO: 1409768 - RNA, 13 nt, Human
gcgauagagucuc

SEQ ID NO: 1409769 - RNA, 17 nt, Human
gcgauucuccugccuca

SEQ ID NO: 1409770 - RNA, 23 nt, Human
gcgauucuccugccucagccucc

SEQ ID NO: 1409771 - RNA, 18 nt, Human
gcgauucucuugccucaa

SEQ ID NO: 1409772 - RNA, 22 nt, Human
gcgauucccucucccaggcccc

SEQ ID NO: 1409773 - RNA, 22 nt, Human
gcggcccaauccaagguggggu

SEQ ID NO: 1409774 - RNA, 16 nt, Human
gcggcccaauccaagg

SEQ ID NO: 1409775 - RNA, 17 nt, Human
gcggaggggacagagcg

SEQ ID NO: 1409776 - RNA, 18 nt, Human
gcggccuaugacuugggc

SEQ ID NO: 1409777 - RNA, 13 nt, Human
gcggccggccagc

SEQ ID NO: 1409778 - RNA, 13 nt, Human
gcggcccugucau

SEQ ID NO: 1409779 - RNA, 14 nt, Human
gcggcccugucauc

SEQ ID NO: 1409780 - RNA, 13 nt, Human
gcggcccucagua

SEQ ID NO: 1409781 - RNA, 22 nt, Human
gcggcugggaggagggcaggca

SEQ ID NO: 1409782 - RNA, 19 nt, Human
gcggcugggaggagggcag

SEQ ID NO: 1409783 - RNA, 18 nt, Human
gcggcugggaggagggca

SEQ ID NO: 1409784 - RNA, 17 nt, Human
gcggcugggaggagggc

SEQ ID NO: 1409785 - RNA, 14 nt, Human
gcggcugggaggag

SEQ ID NO: 1409786 - RNA, 13 nt, Human
gcggcugggagga

SEQ ID NO: 1409787 - RNA, 14 nt, Human
gcggccuccuucug

SEQ ID NO: 1409788 - RNA, 19 nt, Human
gcggccuaugacuugggca

SEQ ID NO: 1409789 - RNA, 23 nt, Human
gcggccuaugacuugggcacccc

SEQ ID NO: 1409790 - RNA, 19 nt, Human
gcggccuccuucugagcuc

SEQ ID NO: 1409791 - RNA, 12 nt, Human
gcguggcugacu

SEQ ID NO: 1409792 - RNA, 21 nt, Human
gcguggccuuguucugucacc

SEQ ID NO: 1409793 - RNA, 22 nt, Human
gcguggagggguaggggcuggg

SEQ ID NO: 1409794 - RNA, 16 nt, Human
gcgugguggucccugg

SEQ ID NO: 1409795 - RNA, 16 nt, Human
gcggcuggggucccag

SEQ ID NO: 1409796 - RNA, 12 nt, Human
gcgugaucucag

SEQ ID NO: 1409797 - RNA, 15 nt, Human
gcgugaucucagcuc

SEQ ID NO: 1409798 - RNA, 15 nt, Human
gcggccuccuucuga

SEQ ID NO: 1409799 - RNA, 16 nt, Human
gcgugaucucagcuca

SEQ ID NO: 1409800 - RNA, 21 nt, Human
gcggagguguggagccgaggc

SEQ ID NO: 1409801 - RNA, 23 nt, Human
gcggaggaaggaggacccaggac

SEQ ID NO: 1409802 - RNA, 22 nt, Human
gcuacugccgucagugcugugc

SEQ ID NO: 1409803 - RNA, 18 nt, Human
gcuacugccgucagugcu

SEQ ID NO: 1409804 - RNA, 19 nt, Human
gcuaauuuuuuuguauuuu

SEQ ID NO: 1409805 - RNA, 20 nt, Human
gcuaauuuuuuguuguuucu

SEQ ID NO: 1409806 - RNA, 20 nt, Human
gcuaauuuuuguauuuuuag

SEQ ID NO: 1409807 - RNA, 18 nt, Human
gcuaauuuuuauuaauuu

SEQ ID NO: 1409808 - RNA, 21 nt, Human
gcuaauuuuuuuguauuuuag

SEQ ID NO: 1409809 - RNA, 17 nt, Human
gcuaauuuuuguaauuu

SEQ ID NO: 1409810 - RNA, 16 nt, Human
gcuaauuuuuguaauu

SEQ ID NO: 1409811 - RNA, 15 nt, Human
gcuaauuuuuguaau

SEQ ID NO: 1409812 - RNA, 12 nt, Human
gcuaauuuuuau

SEQ ID NO: 1409813 - RNA, 13 nt, Human
gcguggugcgagu

SEQ ID NO: 1409814 - RNA, 17 nt, Human
gcguuucuaugacacau

SEQ ID NO: 1409815 - RNA, 20 nt, Human
gcuaauuuguuuuggauaua

SEQ ID NO: 1409816 - RNA, 15 nt, Human
gcuaauuugcauuaa

SEQ ID NO: 1409817 - RNA, 13 nt, Human
gcuaauuugcauu

SEQ ID NO: 1409818 - RNA, 12 nt, Human
gcuaauuugcau

SEQ ID NO: 1409819 - RNA, 20 nt, Human
gcuaauuuauccugaaauuu

SEQ ID NO: 1409820 - RNA, 18 nt, Human
gcuaauuuugaaaaacug

SEQ ID NO: 1409821 - RNA, 21 nt, Human
gcuacugugugugugaaugaa

SEQ ID NO: 1409822 - RNA, 19 nt, Human
gcuacugugugugugaaug

SEQ ID NO: 1409823 - RNA, 18 nt, Human
gcuacugugugugugaau

SEQ ID NO: 1409824 - RNA, 15 nt, Human
gcuacugugugugug

SEQ ID NO: 1409825 - RNA, 23 nt, Human
gcuacuggggaaacuggccaugg

SEQ ID NO: 1409826 - RNA, 21 nt, Human
gcuacuggggaaacuggccau

SEQ ID NO: 1409827 - RNA, 20 nt, Human
gcuacuggggaaacuggcca

SEQ ID NO: 1409828 - RNA, 18 nt, Human
gcuacuggggaaacuggc

SEQ ID NO: 1409829 - RNA, 17 nt, Human
gcuacuggggaaacugg

SEQ ID NO: 1409830 - RNA, 16 nt, Human
gcuacuggggaaacug

SEQ ID NO: 1409831 - RNA, 18 nt, Human
gcuacuguaaggcaauca

SEQ ID NO: 1409832 - RNA, 19 nt, Human
gcuacuguaaggcaaucau

SEQ ID NO: 1409833 - RNA, 16 nt, Human
gcuacuuugcugcuau

SEQ ID NO: 1409834 - RNA, 23 nt, Human
gcuacuuugcugcuaugguuuuc

SEQ ID NO: 1409835 - RNA, 18 nt, Human
gcuacuucggggcuggga

SEQ ID NO: 1409836 - RNA, 19 nt, Human
gcuacuuccuccuccccac

SEQ ID NO: 1409837 - RNA, 18 nt, Human
gcuacuuccuccucccca

SEQ ID NO: 1409838 - RNA, 14 nt, Human
gcuagaacccucug

SEQ ID NO: 1409839 - RNA, 15 nt, Human
gcuagaacccucugu

SEQ ID NO: 1409840 - RNA, 14 nt, Human
gcuagaacaugguu

SEQ ID NO: 1409841 - RNA, 18 nt, Human
gccuccuucugagcuccu

SEQ ID NO: 1409842 - RNA, 12 nt, Human
gccuccuucuga

SEQ ID NO: 1409843 - RNA, 19 nt, Human
gccucauguggcuggaaga

SEQ ID NO: 1409844 - RNA, 18 nt, Human
gccucauguggcuggaag

SEQ ID NO: 1409845 - RNA, 19 nt, Human
gccucauuuuuuuccuugc

SEQ ID NO: 1409846 - RNA, 21 nt, Human
gccucauuuuuuuccuugcaa

SEQ ID NO: 1409847 - RNA, 15 nt, Human
gccucauuuuuuucc

SEQ ID NO: 1409848 - RNA, 16 nt, Human
gccuccaacccuagca

SEQ ID NO: 1409849 - RNA, 22 nt, Human
gccuccagaggggcucagguca

SEQ ID NO: 1409850 - RNA, 22 nt, Human
gccuccaauuuuuuaagugaaa

SEQ ID NO: 1409851 - RNA, 23 nt, Human
gccuccaaggaggggcuguaaaa

SEQ ID NO: 1409852 - RNA, 22 nt, Human
gccuccaaggaggggcuguaaa

SEQ ID NO: 1409853 - RNA, 20 nt, Human
gccuccaacccuagcaaaag

SEQ ID NO: 1409854 - RNA, 21 nt, Human
gccugcuccagaccugauccu

SEQ ID NO: 1409855 - RNA, 17 nt, Human
gccugcuccagaccuga

SEQ ID NO: 1409856 - RNA, 16 nt, Human
gccucgcuccccacuc

SEQ ID NO: 1409857 - RNA, 14 nt, Human
gccucgcuccccac

SEQ ID NO: 1409858 - RNA, 18 nt, Human
gccucgccccuggcagag

SEQ ID NO: 1409859 - RNA, 17 nt, Human
gccucgccccuggcaga

SEQ ID NO: 1409860 - RNA, 16 nt, Human
gccucgccccuggcag

SEQ ID NO: 1409861 - RNA, 14 nt, Human
gccucgccccuggc

SEQ ID NO: 1409862 - RNA, 13 nt, Human
gccucgccccugg

SEQ ID NO: 1409863 - RNA, 16 nt, Human
gccucgcccauccccu

SEQ ID NO: 1409864 - RNA, 20 nt, Human
gccucgcaacccgugccaag

SEQ ID NO: 1409865 - RNA, 23 nt, Human
gccucgcaacccgugccaagucc

SEQ ID NO: 1409866 - RNA, 18 nt, Human
gccucgcaacccgugcca

SEQ ID NO: 1409867 - RNA, 12 nt, Human
gccucgcaaccc

SEQ ID NO: 1409868 - RNA, 22 nt, Human
gccuccuucugagcuccugucc

SEQ ID NO: 1409869 - RNA, 21 nt, Human
gccuccuucugagcuccuguc

SEQ ID NO: 1409870 - RNA, 20 nt, Human
gccuccuucugagcuccugu

SEQ ID NO: 1409871 - RNA, 22 nt, Human
gccugcccucauggccccucug

SEQ ID NO: 1409872 - RNA, 21 nt, Human
gccugcccucauggccccucu

SEQ ID NO: 1409873 - RNA, 20 nt, Human
gccugcccucauggccccuc

SEQ ID NO: 1409874 - RNA, 24 nt, Human
gccucgcuccccacucugcucuga

SEQ ID NO: 1409875 - RNA, 23 nt, Human
gccucgcuccccacucugcucug

SEQ ID NO: 1409876 - RNA, 20 nt, Human
gccucgcuccccacucugcu

SEQ ID NO: 1409877 - RNA, 19 nt, Human
gccucgcuccccacucugc

SEQ ID NO: 1409878 - RNA, 18 nt, Human
gccucgcuccccacucug

SEQ ID NO: 1409879 - RNA, 14 nt, Human
gccugcccugguga

SEQ ID NO: 1409880 - RNA, 12 nt, Human
gccugcccuggu

SEQ ID NO: 1409881 - RNA, 16 nt, Human
gccugcuccagaccug

SEQ ID NO: 1409882 - RNA, 15 nt, Human
gccugcuccagaccu

SEQ ID NO: 1409883 - RNA, 14 nt, Human
gccugcuccagacc

SEQ ID NO: 1409884 - RNA, 13 nt, Human
gccugcuccagac

SEQ ID NO: 1409885 - RNA, 12 nt, Human
gccugcuccaga

SEQ ID NO: 1409886 - RNA, 20 nt, Human
gccugcuauuugaaguguaa

SEQ ID NO: 1409887 - RNA, 20 nt, Human
gccugcuaaggucuuggaac

SEQ ID NO: 1409888 - RNA, 16 nt, Human
gccaguguccugagcc

SEQ ID NO: 1409889 - RNA, 17 nt, Human
gccaguguuuaaaacuu

SEQ ID NO: 1409890 - RNA, 22 nt, Human
gccauaaaacagguaauauaaa

SEQ ID NO: 1409891 - RNA, 14 nt, Human
gccauacugugucc

SEQ ID NO: 1409892 - RNA, 17 nt, Human
gccauauuuucaccauu

SEQ ID NO: 1409893 - RNA, 18 nt, Human
gccauauuuguaaaauga

SEQ ID NO: 1409894 - RNA, 14 nt, Human
gccauauuuguaaa

SEQ ID NO: 1409895 - RNA, 13 nt, Human
gccauauuuguaa

SEQ ID NO: 1409896 - RNA, 21 nt, Human
gccauauuuaccucagccugg

SEQ ID NO: 1409897 - RNA, 22 nt, Human
gccauauuuaccucagccuggg

SEQ ID NO: 1409898 - RNA, 20 nt, Human
gccauauuuaccucagccug

SEQ ID NO: 1409899 - RNA, 19 nt, Human
gccauauuuaccucagccu

SEQ ID NO: 1409900 - RNA, 18 nt, Human
gccauauuuaccucagcc

SEQ ID NO: 1409901 - RNA, 17 nt, Human
gccauauuuaccucagc

SEQ ID NO: 1409902 - RNA, 16 nt, Human
gccauauuuaccucag

SEQ ID NO: 1409903 - RNA, 16 nt, Human
gccauaugaaaaggcu

SEQ ID NO: 1409904 - RNA, 14 nt, Human
gccaggcccagccg

SEQ ID NO: 1409905 - RNA, 14 nt, Human
gccaggcauguggc

SEQ ID NO: 1409906 - RNA, 16 nt, Human
gcccccucccuggaug

SEQ ID NO: 1409907 - RNA, 15 nt, Human
gcccccucccuggau

SEQ ID NO: 1409908 - RNA, 17 nt, Human
gccccugccucucugca

SEQ ID NO: 1409909 - RNA, 18 nt, Human
gccccugccucucugcag

SEQ ID NO: 1409910 - RNA, 16 nt, Human
gcccccuccgcccugc

SEQ ID NO: 1409911 - RNA, 14 nt, Human
gcccccucccugga

SEQ ID NO: 1409912 - RNA, 23 nt, Human
gcccccucacaguauugcucacc

SEQ ID NO: 1409913 - RNA, 17 nt, Human
gcccccgccuuggccug

SEQ ID NO: 1409914 - RNA, 15 nt, Human
gccccugccucucug

SEQ ID NO: 1409915 - RNA, 16 nt, Human
gccccugccucucugc

SEQ ID NO: 1409916 - RNA, 22 nt, Human
gccccaccccagggcagccagg

SEQ ID NO: 1409917 - RNA, 21 nt, Human
gccccaccccagggcagccag

SEQ ID NO: 1409918 - RNA, 20 nt, Human
gccccaccccagggcagcca

SEQ ID NO: 1409919 - RNA, 19 nt, Human
gccccaccccagggcagcc

SEQ ID NO: 1409920 - RNA, 18 nt, Human
gccccaccccagggcagc

SEQ ID NO: 1409921 - RNA, 17 nt, Human
gccccaccccagggcag

SEQ ID NO: 1409922 - RNA, 15 nt, Human
gccccaccccagggc

SEQ ID NO: 1409923 - RNA, 15 nt, Human
gccccacccucagau

SEQ ID NO: 1409924 - RNA, 18 nt, Human
gccccacccucagaugca

SEQ ID NO: 1409925 - RNA, 16 nt, Human
gccccacccaggccag

SEQ ID NO: 1409926 - RNA, 22 nt, Human
gccccacaccagggccagccuc

SEQ ID NO: 1409927 - RNA, 21 nt, Human
gccccacaccagggccagccu

SEQ ID NO: 1409928 - RNA, 20 nt, Human
gccccccugguccccuccuu

SEQ ID NO: 1409929 - RNA, 18 nt, Human
gccccccugguccccucc

SEQ ID NO: 1409930 - RNA, 19 nt, Human
gccccccuggccuccccca

SEQ ID NO: 1409931 - RNA, 13 nt, Human
gccccccuggccu

SEQ ID NO: 1409932 - RNA, 12 nt, Human
gccccccuggcc

SEQ ID NO: 1409933 - RNA, 22 nt, Human
gccccacccucggggauguguc

SEQ ID NO: 1409934 - RNA, 16 nt, Human
gccccacccucgggga

SEQ ID NO: 1409935 - RNA, 13 nt, Human
gccccacccucgg

SEQ ID NO: 1409936 - RNA, 12 nt, Human
gccccacccucg

SEQ ID NO: 1409937 - RNA, 20 nt, Human
gccccacccucguggacacc

SEQ ID NO: 1409938 - RNA, 21 nt, Human
gccccacccucguggacaccu

SEQ ID NO: 1409939 - RNA, 12 nt, Human
gccccacccugg

SEQ ID NO: 1409940 - RNA, 22 nt, Human
gccccacccucguggacaccug

SEQ ID NO: 1409941 - RNA, 23 nt, Human
gccccacccucguggacaccugc

SEQ ID NO: 1409942 - RNA, 20 nt, Human
gccccaacuccuuccagcua

SEQ ID NO: 1409943 - RNA, 21 nt, Human
gccccaacucuccccugaccu

SEQ ID NO: 1409944 - RNA, 21 nt, Human
gccccaacuccuuccagcuag

SEQ ID NO: 1409945 - RNA, 19 nt, Human
gccccaacuccuuccagcu

SEQ ID NO: 1409946 - RNA, 18 nt, Human
gccccaacuccuuccagc

SEQ ID NO: 1409947 - RNA, 17 nt, Human
gccccaacuccuuccag

SEQ ID NO: 1409948 - RNA, 14 nt, Human
gccccaacuccuuc

SEQ ID NO: 1409949 - RNA, 16 nt, Human
gcccauucauuccauu

SEQ ID NO: 1409950 - RNA, 19 nt, Human
gcccauucauuccauucug

SEQ ID NO: 1409951 - RNA, 23 nt, Human
gcccauucauuccauucuggaag

SEQ ID NO: 1409952 - RNA, 18 nt, Human
gcccucauggccccucug

SEQ ID NO: 1409953 - RNA, 16 nt, Human
gcccucauggccccuc

SEQ ID NO: 1409954 - RNA, 12 nt, Human
gcccucaucccg

SEQ ID NO: 1409955 - RNA, 23 nt, Human
gcccucaguagucccugcacagu

SEQ ID NO: 1409956 - RNA, 19 nt, Human
gcccucaguagucccugca

SEQ ID NO: 1409957 - RNA, 21 nt, Human
gcccuauuuagaugauaaaga

SEQ ID NO: 1409958 - RNA, 24 nt, Human
gcccaggagcuccccuccccaacu

SEQ ID NO: 1409959 - RNA, 16 nt, Human
gccaucaagagacuga

SEQ ID NO: 1409960 - RNA, 15 nt, Human
gccaucaagagacug

SEQ ID NO: 1409961 - RNA, 20 nt, Human
gccauauuuguaaaaugaca

SEQ ID NO: 1409962 - RNA, 19 nt, Human
gccaucaaaaugcuuuuua

SEQ ID NO: 1409963 - RNA, 18 nt, Human
gccaucaaaaugcuuuuu

SEQ ID NO: 1409964 - RNA, 16 nt, Human
gccaucaaaaugcuuu

SEQ ID NO: 1409965 - RNA, 15 nt, Human
gccaucaaaaugcuu

SEQ ID NO: 1409966 - RNA, 14 nt, Human
gccaucaaaaugcu

SEQ ID NO: 1409967 - RNA, 22 nt, Human
gccaugugcuaguaauuggaaa

SEQ ID NO: 1409968 - RNA, 21 nt, Human
gcccaggagcuccccucccca

SEQ ID NO: 1409969 - RNA, 20 nt, Human
gcccaggagcuccccucccc

SEQ ID NO: 1409970 - RNA, 17 nt, Human
gcccaggagcuccccuc

SEQ ID NO: 1409971 - RNA, 15 nt, Human
gcccaggagcucccc

SEQ ID NO: 1409972 - RNA, 14 nt, Human
gcccaggagcuccc

SEQ ID NO: 1409973 - RNA, 11 nt, Human
gcccaggagcu

SEQ ID NO: 1409974 - RNA, 17 nt, Human
gccauguguuuauccua

SEQ ID NO: 1409975 - RNA, 17 nt, Human
gacauuaugugguuuua

SEQ ID NO: 1409976 - RNA, 17 nt, Human
gacauucaccugcccca

SEQ ID NO: 1409977 - RNA, 16 nt, Human
gacauucaccugcccc

SEQ ID NO: 1409978 - RNA, 15 nt, Human
gacauucaccugccc

SEQ ID NO: 1409979 - RNA, 14 nt, Human
gacauucaccugcc

SEQ ID NO: 1409980 - RNA, 23 nt, Human
gacauuaugugguuuuagauuuu

SEQ ID NO: 1409981 - RNA, 22 nt, Human
gacauuaacucauuagacugga

SEQ ID NO: 1409982 - RNA, 21 nt, Human
gacauuaacucauuagacugg

SEQ ID NO: 1409983 - RNA, 14 nt, Human
gacauuaacucauu

SEQ ID NO: 1409984 - RNA, 22 nt, Human
gacagaaguuugcacuaucuuu

SEQ ID NO: 1409985 - RNA, 20 nt, Human
gacagaaguuugcacuaucu

SEQ ID NO: 1409986 - RNA, 15 nt, Human
gacagaaguuugcac

SEQ ID NO: 1409987 - RNA, 20 nt, Human
gacacuuaauacuaccuuga

SEQ ID NO: 1409988 - RNA, 23 nt, Human
gacacuguucuuagcucaaugag

SEQ ID NO: 1409989 - RNA, 22 nt, Human
gacacuguucuuagcucaauga

SEQ ID NO: 1409990 - RNA, 18 nt, Human
gacacuguucuuagcuca

SEQ ID NO: 1409991 - RNA, 12 nt, Human
gacacuguucuu

SEQ ID NO: 1409992 - RNA, 16 nt, Human
gacacugccacacagg

SEQ ID NO: 1409993 - RNA, 18 nt, Human
gacagcuccacccuggcc

SEQ ID NO: 1409994 - RNA, 16 nt, Human
gacaggucccuccccu

SEQ ID NO: 1409995 - RNA, 16 nt, Human
gacagguuagcugcuc

SEQ ID NO: 1409996 - RNA, 12 nt, Human
gacagcuccacc

SEQ ID NO: 1409997 - RNA, 15 nt, Human
gacagucaaaaccaa

SEQ ID NO: 1409998 - RNA, 17 nt, Human
gacagucaccucaugga

SEQ ID NO: 1409999 - RNA, 13 nt, Human
gacagucucacuu

SEQ ID NO: 1410000 - RNA, 17 nt, Human
gacagucguucccagug

SEQ ID NO: 1410001 - RNA, 14 nt, Human
gacagugaaagaaa

SEQ ID NO: 1410002 - RNA, 22 nt, Human
gaauuuugcaaagauuuaaucu

SEQ ID NO: 1410003 - RNA, 21 nt, Human
gaauuuugcaaagauuuaauc

SEQ ID NO: 1410004 - RNA, 18 nt, Human
gaauuuuuaaacaaguau

SEQ ID NO: 1410005 - RNA, 17 nt, Human
gaauuuuuaaacaagua

SEQ ID NO: 1410006 - RNA, 15 nt, Human
gaauuuuguugcugu

SEQ ID NO: 1410007 - RNA, 17 nt, Human
gacaaacaccucccagg

SEQ ID NO: 1410008 - RNA, 15 nt, Human
gacaaaacuagagac

SEQ ID NO: 1410009 - RNA, 23 nt, Human
gacaaaaccccccagauaucauc

SEQ ID NO: 1410010 - RNA, 20 nt, Human
gacaaaaccccccagauauc

SEQ ID NO: 1410011 - RNA, 15 nt, Human
gacaaaauggaauac

SEQ ID NO: 1410012 - RNA, 23 nt, Human
gaauuuuauacuuucccuacccu

SEQ ID NO: 1410013 - RNA, 22 nt, Human
gaauuuuauacuuucccuaccc

SEQ ID NO: 1410014 - RNA, 21 nt, Human
gaauuuuauacuuucccuacc

SEQ ID NO: 1410015 - RNA, 20 nt, Human
gaauuuuauacuuucccuac

SEQ ID NO: 1410016 - RNA, 19 nt, Human
gaauuuuauacuuucccua

SEQ ID NO: 1410017 - RNA, 18 nt, Human
gaauuuuauacuuucccu

SEQ ID NO: 1410018 - RNA, 16 nt, Human
gaauuuuagcuuuugu

SEQ ID NO: 1410019 - RNA, 15 nt, Human
gaauuuuagcuuuug

SEQ ID NO: 1410020 - RNA, 18 nt, Human
gaauuuuauugacacagu

SEQ ID NO: 1410021 - RNA, 23 nt, Human
gaauuuucuuuguguagcuuugc

SEQ ID NO: 1410022 - RNA, 21 nt, Human
gaauuuucuuuguguagcuuu

SEQ ID NO: 1410023 - RNA, 14 nt, Human
gaauuauaacugua

SEQ ID NO: 1410024 - RNA, 13 nt, Human
gaauuauaacugu

SEQ ID NO: 1410025 - RNA, 20 nt, Human
gaauuauaacuggaaagaag

SEQ ID NO: 1410026 - RNA, 21 nt, Human
gaauuauaacuguaaagaugu

SEQ ID NO: 1410027 - RNA, 19 nt, Human
gaauuauaacuggaaagaa

SEQ ID NO: 1410028 - RNA, 14 nt, Human
gaauuaugaaacuu

SEQ ID NO: 1410029 - RNA, 20 nt, Human
gaauuaucuugguugaaaau

SEQ ID NO: 1410030 - RNA, 14 nt, Human
gaauuaucuaauuu

SEQ ID NO: 1410031 - RNA, 12 nt, Human
gaauuaugaaac

SEQ ID NO: 1410032 - RNA, 11 nt, Human
gaauuaguuuu

SEQ ID NO: 1410033 - RNA, 12 nt, Human
gacacacaugaa

SEQ ID NO: 1410034 - RNA, 15 nt, Human
gacacaccaggcgcu

SEQ ID NO: 1410035 - RNA, 16 nt, Human
gacaaacaccucccag

SEQ ID NO: 1410036 - RNA, 18 nt, Human
gacacaccaggcgcuaau

SEQ ID NO: 1410037 - RNA, 13 nt, Human
gacacacugaaga

SEQ ID NO: 1410038 - RNA, 19 nt, Human
gacacacuaaccaagcuga

SEQ ID NO: 1410039 - RNA, 18 nt, Human
gacacacuaaccaagcug

SEQ ID NO: 1410040 - RNA, 15 nt, Human
gacacacuaaccaag

SEQ ID NO: 1410041 - RNA, 14 nt, Human
gacacacugaagaa

SEQ ID NO: 1410042 - RNA, 22 nt, Human
gaaggcuacuucggggcuggga

SEQ ID NO: 1410043 - RNA, 21 nt, Human
gaaggcuacuucggggcuggg

SEQ ID NO: 1410044 - RNA, 19 nt, Human
gaaggcuacuucggggcug

SEQ ID NO: 1410045 - RNA, 16 nt, Human
gaagcugcccugccca

SEQ ID NO: 1410046 - RNA, 21 nt, Human
gaagcucccccagcaaagccc

SEQ ID NO: 1410047 - RNA, 12 nt, Human
gaagcuccccca

SEQ ID NO: 1410048 - RNA, 20 nt, Human
gaagcucccccagcaaagcc

SEQ ID NO: 1410049 - RNA, 15 nt, Human
gaagcucccccagca

SEQ ID NO: 1410050 - RNA, 14 nt, Human
gaagggacugagag

SEQ ID NO: 1410051 - RNA, 17 nt, Human
gaagggaauaagguaca

SEQ ID NO: 1410052 - RNA, 22 nt, Human
gaagggaauaagguacaagaag

SEQ ID NO: 1410053 - RNA, 19 nt, Human
gaaggcuuguugugcuuuu

SEQ ID NO: 1410054 - RNA, 17 nt, Human
gaaggcuuguugugcuu

SEQ ID NO: 1410055 - RNA, 20 nt, Human
gaaggcuuguugugcuuuua

SEQ ID NO: 1410056 - RNA, 21 nt, Human
gaaggcuugggauuugcugug

SEQ ID NO: 1410057 - RNA, 20 nt, Human
gaaggcuugggauuugcugu

SEQ ID NO: 1410058 - RNA, 17 nt, Human
gaaggcuugggauuugc

SEQ ID NO: 1410059 - RNA, 16 nt, Human
gaaggcuugggauuug

SEQ ID NO: 1410060 - RNA, 23 nt, Human
gaagggagccaagggauggacau

SEQ ID NO: 1410061 - RNA, 22 nt, Human
gaagggagccaagggauggaca

SEQ ID NO: 1410062 - RNA, 20 nt, Human
gaagggagccaagggaugga

SEQ ID NO: 1410063 - RNA, 16 nt, Human
gaagggagccaaggga

SEQ ID NO: 1410064 - RNA, 15 nt, Human
gaagggagccaaggg

SEQ ID NO: 1410065 - RNA, 14 nt, Human
gaagggagccaagg

SEQ ID NO: 1410066 - RNA, 13 nt, Human
gaagggagccaag

SEQ ID NO: 1410067 - RNA, 12 nt, Human
gaagggagccaa

SEQ ID NO: 1410068 - RNA, 16 nt, Human
gaagggaggggcugug

SEQ ID NO: 1410069 - RNA, 21 nt, Human
gaagggagggcagagcuggug

SEQ ID NO: 1410070 - RNA, 20 nt, Human
gaagggagggcagagcuggu

SEQ ID NO: 1410071 - RNA, 17 nt, Human
gaagggagggcagagcu

SEQ ID NO: 1410072 - RNA, 16 nt, Human
gaagggagggcagagc

SEQ ID NO: 1410073 - RNA, 15 nt, Human
gaagggagggcagag

SEQ ID NO: 1410074 - RNA, 14 nt, Human
gaagggagggcaga

SEQ ID NO: 1410075 - RNA, 23 nt, Human
gaagggagggcagagcuggugcg

SEQ ID NO: 1410076 - RNA, 13 nt, Human
gaagggcaaguuu

SEQ ID NO: 1410077 - RNA, 17 nt, Human
gaagugaaugcugggac

SEQ ID NO: 1410078 - RNA, 16 nt, Human
gaagugaaugcuggga

SEQ ID NO: 1410079 - RNA, 15 nt, Human
gaagugaaugcuggg

SEQ ID NO: 1410080 - RNA, 15 nt, Human
gaagugaagaaugca

SEQ ID NO: 1410081 - RNA, 14 nt, Human
gaagucuuuuguuc

SEQ ID NO: 1410082 - RNA, 13 nt, Human
gaagggccagagc

SEQ ID NO: 1410083 - RNA, 21 nt, Human
gaagugcuuaguguacuugga

SEQ ID NO: 1410084 - RNA, 20 nt, Human
gaagugcuguuuauuaaucu

SEQ ID NO: 1410085 - RNA, 18 nt, Human
gaagugcuguuuauuaau

SEQ ID NO: 1410086 - RNA, 21 nt, Human
gaagugcugccgcgcagugug

SEQ ID NO: 1410087 - RNA, 23 nt, Human
gaagugcaucuggagagaacagg

SEQ ID NO: 1410088 - RNA, 22 nt, Human
gaagugagggcucacucagcca

SEQ ID NO: 1410089 - RNA, 13 nt, Human
gaagugacuuugg

SEQ ID NO: 1410090 - RNA, 15 nt, Human
gaagugacuuuggcu

SEQ ID NO: 1410091 - RNA, 20 nt, Human
gaagugacuuuggcugcaug

SEQ ID NO: 1410092 - RNA, 16 nt, Human
gaagugagcacagccu

SEQ ID NO: 1410093 - RNA, 21 nt, Human
gaagugacuuuggcugcaugc

SEQ ID NO: 1410094 - RNA, 21 nt, Human
gaagcucagcugcauuccgca

SEQ ID NO: 1410095 - RNA, 17 nt, Human
gaagcuaauuugcauua

SEQ ID NO: 1410096 - RNA, 16 nt, Human
gaagcuaauuugcauu

SEQ ID NO: 1410097 - RNA, 15 nt, Human
gaagcuaauuugcau

SEQ ID NO: 1410098 - RNA, 14 nt, Human
gaagcuaauuugca

SEQ ID NO: 1410099 - RNA, 12 nt, Human
gaagcucagcug

SEQ ID NO: 1410100 - RNA, 23 nt, Human
gaagcuacugugugugugaauga

SEQ ID NO: 1410101 - RNA, 22 nt, Human
gaagcuacugugugugugaaug

SEQ ID NO: 1410102 - RNA, 20 nt, Human
gaagcuacugugugugugaa

SEQ ID NO: 1410103 - RNA, 15 nt, Human
gaagcuacugugugu

SEQ ID NO: 1410104 - RNA, 14 nt, Human
gaaauccauucaca

SEQ ID NO: 1410105 - RNA, 20 nt, Human
gaagugugccuucucucucc

SEQ ID NO: 1410106 - RNA, 15 nt, Human
gaagugugacuggcu

SEQ ID NO: 1410107 - RNA, 23 nt, Human
gaaugagagacacacugaagaag

SEQ ID NO: 1410108 - RNA, 22 nt, Human
gaaugagagacacacugaagaa

SEQ ID NO: 1410109 - RNA, 13 nt, Human
gaaugagccucgg

SEQ ID NO: 1410110 - RNA, 11 nt, Human
gaaugagccuc

SEQ ID NO: 1410111 - RNA, 13 nt, Human
gaaugagacaucc

SEQ ID NO: 1410112 - RNA, 15 nt, Human
gaaugagacauccag

SEQ ID NO: 1410113 - RNA, 12 nt, Human
gaaugacacugu

SEQ ID NO: 1410114 - RNA, 16 nt, Human
gaaugaauuaaauaaa

SEQ ID NO: 1410115 - RNA, 14 nt, Human
gaaugaauuaaaua

SEQ ID NO: 1410116 - RNA, 20 nt, Human
gaaugagagacacacugaag

SEQ ID NO: 1410117 - RNA, 16 nt, Human
gacuagggagccaugu

SEQ ID NO: 1410118 - RNA, 23 nt, Human
gacuaggccuugcggcuccucag

SEQ ID NO: 1410119 - RNA, 17 nt, Human
gacuagccuggcuuggg

SEQ ID NO: 1410120 - RNA, 22 nt, Human
gacuauucuugauguaaaaucu

SEQ ID NO: 1410121 - RNA, 21 nt, Human
gacuauucuugauguaaaauc

SEQ ID NO: 1410122 - RNA, 19 nt, Human
gacuaugaaaaugcuggcu

SEQ ID NO: 1410123 - RNA, 15 nt, Human
gacuaugaaaagcua

SEQ ID NO: 1410124 - RNA, 19 nt, Human
gacuaucuuacuauuucac

SEQ ID NO: 1410125 - RNA, 17 nt, Human
gacuaucuuacuauuuc

SEQ ID NO: 1410126 - RNA, 22 nt, Human
gacuauauuugggccugcucca

SEQ ID NO: 1410127 - RNA, 18 nt, Human
gacuaucugucugguggc

SEQ ID NO: 1410128 - RNA, 14 nt, Human
gacucaaaccaaau

SEQ ID NO: 1410129 - RNA, 17 nt, Human
gacucuuuugccauuaa

SEQ ID NO: 1410130 - RNA, 17 nt, Human
gacucuuuuccuucccu

SEQ ID NO: 1410131 - RNA, 16 nt, Human
gacucuuuaugcuugc

SEQ ID NO: 1410132 - RNA, 24 nt, Human
gacucuguccugaaggccugaggu

SEQ ID NO: 1410133 - RNA, 13 nt, Human
gacucuguccuga

SEQ ID NO: 1410134 - RNA, 18 nt, Human
gacucuggugccuccaga

SEQ ID NO: 1410135 - RNA, 16 nt, Human
gacucuuaagaagacu

SEQ ID NO: 1410136 - RNA, 18 nt, Human
gacucuuaagaagacugc

SEQ ID NO: 1410137 - RNA, 17 nt, Human
gacucuuaagaagacug

SEQ ID NO: 1410138 - RNA, 12 nt, Human
gacuuuugugaa

SEQ ID NO: 1410139 - RNA, 15 nt, Human
gacuuucugccugga

SEQ ID NO: 1410140 - RNA, 14 nt, Human
gacuuucugccugg

SEQ ID NO: 1410141 - RNA, 12 nt, Human
gacuuucugccu

SEQ ID NO: 1410142 - RNA, 20 nt, Human
gacuuuccccaccagaugcu

SEQ ID NO: 1410143 - RNA, 12 nt, Human
gacuuuccugca

SEQ ID NO: 1410144 - RNA, 11 nt, Human
gacuuuccugc

SEQ ID NO: 1410145 - RNA, 21 nt, Human
gacuuuccccaccagaugcug

SEQ ID NO: 1410146 - RNA, 18 nt, Human
gacuuuccccaccagaug

SEQ ID NO: 1410147 - RNA, 12 nt, Human
gacuuuccccac

SEQ ID NO: 1410148 - RNA, 11 nt, Human
gacuuucccca

SEQ ID NO: 1410149 - RNA, 14 nt, Human
gacuuuccauuaca

SEQ ID NO: 1410150 - RNA, 15 nt, Human
gacugaaaauauugu

SEQ ID NO: 1410151 - RNA, 21 nt, Human
gacuggguaggaaagaggaag

SEQ ID NO: 1410152 - RNA, 20 nt, Human
gagaagugaaugcugggacu

SEQ ID NO: 1410153 - RNA, 19 nt, Human
gagaagugaaugcugggac

SEQ ID NO: 1410154 - RNA, 17 nt, Human
gagaagugaaugcuggg

SEQ ID NO: 1410155 - RNA, 22 nt, Human
gagaagucucagcuaagcucac

SEQ ID NO: 1410156 - RNA, 21 nt, Human
gagaagucucagcuaagcuca

SEQ ID NO: 1410157 - RNA, 14 nt, Human
gagaagucucagcu

SEQ ID NO: 1410158 - RNA, 18 nt, Human
gagacccagcggacacac

SEQ ID NO: 1410159 - RNA, 11 nt, Human
gagacccagcg

SEQ ID NO: 1410160 - RNA, 18 nt, Human
gagaccccaccagccuca

SEQ ID NO: 1410161 - RNA, 18 nt, Human
gagacccagcccucaucc

SEQ ID NO: 1410162 - RNA, 14 nt, Human
gagaaucagacuga

SEQ ID NO: 1410163 - RNA, 15 nt, Human
gagaagucacagggc

SEQ ID NO: 1410164 - RNA, 14 nt, Human
gagaaucaucagga

SEQ ID NO: 1410165 - RNA, 18 nt, Human
gagaccucagaaguaaag

SEQ ID NO: 1410166 - RNA, 13 nt, Human
gagaccucagaag

SEQ ID NO: 1410167 - RNA, 21 nt, Human
gagaagccuucaagcucugag

SEQ ID NO: 1410168 - RNA, 22 nt, Human
gagaagccuucaagcucugagg

SEQ ID NO: 1410169 - RNA, 20 nt, Human
gagaagccuucaagcucuga

SEQ ID NO: 1410170 - RNA, 19 nt, Human
gagaagccuucaagcucug

SEQ ID NO: 1410171 - RNA, 13 nt, Human
gagaagucucagc

SEQ ID NO: 1410172 - RNA, 22 nt, Human
gagaagucacagggcaguaccu

SEQ ID NO: 1410173 - RNA, 18 nt, Human
gagaagucacagggcagu

SEQ ID NO: 1410174 - RNA, 17 nt, Human
gagaagucacagggcag

SEQ ID NO: 1410175 - RNA, 16 nt, Human
gagaagucacagggca

SEQ ID NO: 1410176 - RNA, 18 nt, Human
gagaaggaaaauuuuagc

SEQ ID NO: 1410177 - RNA, 18 nt, Human
gagaagccuucaagcucu

SEQ ID NO: 1410178 - RNA, 16 nt, Human
gagaagccuucaagcu

SEQ ID NO: 1410179 - RNA, 13 nt, Human
gagaagccuucaa

SEQ ID NO: 1410180 - RNA, 18 nt, Human
gagauggagucuugcucu

SEQ ID NO: 1410181 - RNA, 12 nt, Human
gagaugcuggcu

SEQ ID NO: 1410182 - RNA, 19 nt, Human
gagaugcuggcuugggcag

SEQ ID NO: 1410183 - RNA, 21 nt, Human
gagaugcaccaccaagccaag

SEQ ID NO: 1410184 - RNA, 18 nt, Human
gagaugcaccaccaagcc

SEQ ID NO: 1410185 - RNA, 21 nt, Human
gagaggcagcccaggaagucu

SEQ ID NO: 1410186 - RNA, 17 nt, Human
gagauuuauuaaagaaa

SEQ ID NO: 1410187 - RNA, 16 nt, Human
gagauuuauuaaagaa

SEQ ID NO: 1410188 - RNA, 14 nt, Human
gagauugaccugga

SEQ ID NO: 1410189 - RNA, 22 nt, Human
gagauugaauuucacugucuuu

SEQ ID NO: 1410190 - RNA, 14 nt, Human
gagauugaauuuca

SEQ ID NO: 1410191 - RNA, 13 nt, Human
gagauuuacaacu

SEQ ID NO: 1410192 - RNA, 21 nt, Human
gagauucugccuuugccaggu

SEQ ID NO: 1410193 - RNA, 15 nt, Human
gagauucugccuuug

SEQ ID NO: 1410194 - RNA, 14 nt, Human
gagauucugccuuu

SEQ ID NO: 1410195 - RNA, 23 nt, Human
gagauucucauaacuugagaccu

SEQ ID NO: 1410196 - RNA, 20 nt, Human
gagauucucauaacuugaga

SEQ ID NO: 1410197 - RNA, 21 nt, Human
gagauugcaccacugcacucc

SEQ ID NO: 1410198 - RNA, 17 nt, Human
gagaugggcuucccaag

SEQ ID NO: 1410199 - RNA, 14 nt, Human
gagaugggcuuccc

SEQ ID NO: 1410200 - RNA, 15 nt, Human
gagauggcucccagg

SEQ ID NO: 1410201 - RNA, 14 nt, Human
gagauggcucccag

SEQ ID NO: 1410202 - RNA, 17 nt, Human
gagauguaaaagguauu

SEQ ID NO: 1410203 - RNA, 16 nt, Human
gagauguaaaagguau

SEQ ID NO: 1410204 - RNA, 16 nt, Human
gagaugggcuucccaa

SEQ ID NO: 1410205 - RNA, 14 nt, Human
gagauguagccccu

SEQ ID NO: 1410206 - RNA, 18 nt, Human
gagcccccagccugucag

SEQ ID NO: 1410207 - RNA, 17 nt, Human
gagcccccagccuguca

SEQ ID NO: 1410208 - RNA, 16 nt, Human
gagcccccagccuguc

SEQ ID NO: 1410209 - RNA, 15 nt, Human
gagcccccagccugu

SEQ ID NO: 1410210 - RNA, 14 nt, Human
gagcccccagccug

SEQ ID NO: 1410211 - RNA, 13 nt, Human
gagcccccagccu

SEQ ID NO: 1410212 - RNA, 23 nt, Human
gagcccccacccuguuccugcug

SEQ ID NO: 1410213 - RNA, 22 nt, Human
gagcccccacccuguuccugcu

SEQ ID NO: 1410214 - RNA, 15 nt, Human
gagcccccacccugu

SEQ ID NO: 1410215 - RNA, 14 nt, Human
gagcccccacccug

SEQ ID NO: 1410216 - RNA, 18 nt, Human
gagccccauuccugggaa

SEQ ID NO: 1410217 - RNA, 17 nt, Human
gagccccauuccuggga

SEQ ID NO: 1410218 - RNA, 16 nt, Human
gagccccauuccuggg

SEQ ID NO: 1410219 - RNA, 18 nt, Human
gagccccaucagcuccag

SEQ ID NO: 1410220 - RNA, 23 nt, Human
gagccccagggagagggggcugg

SEQ ID NO: 1410221 - RNA, 14 nt, Human
gagccccagggaga

SEQ ID NO: 1410222 - RNA, 16 nt, Human
gagccccagcuacccu

SEQ ID NO: 1410223 - RNA, 22 nt, Human
gagcauguacugagccuuguaa

SEQ ID NO: 1410224 - RNA, 18 nt, Human
gagcauggaacacuucga

SEQ ID NO: 1410225 - RNA, 19 nt, Human
gagcauggaacacuucgag

SEQ ID NO: 1410226 - RNA, 14 nt, Human
gagcaucacagaau

SEQ ID NO: 1410227 - RNA, 13 nt, Human
gagcaucacagaa

SEQ ID NO: 1410228 - RNA, 12 nt, Human
gagcaucacaga

SEQ ID NO: 1410229 - RNA, 22 nt, Human
gagcauaggugauccauguaac

SEQ ID NO: 1410230 - RNA, 21 nt, Human
gagcauaggugauccauguaa

SEQ ID NO: 1410231 - RNA, 22 nt, Human
gagcagggccggggaacuggcc

SEQ ID NO: 1410232 - RNA, 21 nt, Human
gagcagggccggggaacuggc

SEQ ID NO: 1410233 - RNA, 16 nt, Human
gagcagggccggggaa

SEQ ID NO: 1410234 - RNA, 15 nt, Human
gagcagggccgggga

SEQ ID NO: 1410235 - RNA, 22 nt, Human
gagcagggauuaaccucugcac

SEQ ID NO: 1410236 - RNA, 21 nt, Human
gagcagggauuaaccucugca

SEQ ID NO: 1410237 - RNA, 20 nt, Human
gagcagggauuaaccucugc

SEQ ID NO: 1410238 - RNA, 17 nt, Human
gagcuggcucugagcgc

SEQ ID NO: 1410239 - RNA, 13 nt, Human
gagcuggcucuga

SEQ ID NO: 1410240 - RNA, 15 nt, Human
gagcgggucugcucc

SEQ ID NO: 1410241 - RNA, 17 nt, Human
gagcgggucugcuccca

SEQ ID NO: 1410242 - RNA, 23 nt, Human
gagccuuuucccucuuuggcucc

SEQ ID NO: 1410243 - RNA, 22 nt, Human
gagccuugaacuuugaccucug

SEQ ID NO: 1410244 - RNA, 15 nt, Human
gagcuggggaccugg

SEQ ID NO: 1410245 - RNA, 13 nt, Human
gagcuggggaccu

SEQ ID NO: 1410246 - RNA, 17 nt, Human
gagcugggccuggucuc

SEQ ID NO: 1410247 - RNA, 21 nt, Human
gagcugggccuggucucaccc

SEQ ID NO: 1410248 - RNA, 16 nt, Human
gagcugggccuggucu

SEQ ID NO: 1410249 - RNA, 14 nt, Human
gagcugggccuggu

SEQ ID NO: 1410250 - RNA, 13 nt, Human
gagcugggccugg

SEQ ID NO: 1410251 - RNA, 12 nt, Human
gagcugggccug

SEQ ID NO: 1410252 - RNA, 19 nt, Human
gagcugggcagaaggccaa

SEQ ID NO: 1410253 - RNA, 22 nt, Human
gagcuggcucugagcgccucca

SEQ ID NO: 1410254 - RNA, 17 nt, Human
gagcugggcagaaggcc

SEQ ID NO: 1410255 - RNA, 19 nt, Human
gagcuggggaccugguacc

SEQ ID NO: 1410256 - RNA, 13 nt, Human
gaugagaguuuug

SEQ ID NO: 1410257 - RNA, 18 nt, Human
gaugagaguuuuggaugc

SEQ ID NO: 1410258 - RNA, 13 nt, Human
gaugagcucccac

SEQ ID NO: 1410259 - RNA, 12 nt, Human
gaugagcuccca

SEQ ID NO: 1410260 - RNA, 21 nt, Human
gaugagaguuuuggaugcagu

SEQ ID NO: 1410261 - RNA, 15 nt, Human
gaugcuggcccaggg

SEQ ID NO: 1410262 - RNA, 14 nt, Human
gaugcuggcccagg

SEQ ID NO: 1410263 - RNA, 13 nt, Human
gaugcuggcccag

SEQ ID NO: 1410264 - RNA, 12 nt, Human
gaugcuggccca

SEQ ID NO: 1410265 - RNA, 17 nt, Human
gauauuuuuaucuuuau

SEQ ID NO: 1410266 - RNA, 15 nt, Human
gauauuuuuuucuuu

SEQ ID NO: 1410267 - RNA, 16 nt, Human
gauauuuugcuuugug

SEQ ID NO: 1410268 - RNA, 16 nt, Human
gauccaguauaagacu

SEQ ID NO: 1410269 - RNA, 20 nt, Human
gauccagggaggcugguccu

SEQ ID NO: 1410270 - RNA, 19 nt, Human
gauccagggaggcuggucc

SEQ ID NO: 1410271 - RNA, 22 nt, Human
gauccagggacagaggccccag

SEQ ID NO: 1410272 - RNA, 18 nt, Human
gauccagggacagaggcc

SEQ ID NO: 1410273 - RNA, 15 nt, Human
gauccagggacagag

SEQ ID NO: 1410274 - RNA, 14 nt, Human
gauccagggacaga

SEQ ID NO: 1410275 - RNA, 13 nt, Human
gauccagggacag

SEQ ID NO: 1410276 - RNA, 12 nt, Human
gauccagggaca

SEQ ID NO: 1410277 - RNA, 12 nt, Human
gauccaggacua

SEQ ID NO: 1410278 - RNA, 21 nt, Human
gauccagccuggggucuggag

SEQ ID NO: 1410279 - RNA, 13 nt, Human
gauccagccuggg

SEQ ID NO: 1410280 - RNA, 17 nt, Human
gauauuuuuuucuuuuc

SEQ ID NO: 1410281 - RNA, 19 nt, Human
gauccaggagcuccagugu

SEQ ID NO: 1410282 - RNA, 16 nt, Human
gauccaggagcuccag

SEQ ID NO: 1410283 - RNA, 15 nt, Human
gauccaggagcucca

SEQ ID NO: 1410284 - RNA, 13 nt, Human
gauccaggagcuc

SEQ ID NO: 1410285 - RNA, 23 nt, Human
gauccaggagcuccaguguccug

SEQ ID NO: 1410286 - RNA, 23 nt, Human
gauccaggccggcuugccacacc

SEQ ID NO: 1410287 - RNA, 21 nt, Human
gaucucauuggacccuuccau

SEQ ID NO: 1410288 - RNA, 15 nt, Human
gauccauuucuaauu

SEQ ID NO: 1410289 - RNA, 15 nt, Human
gaucucccugagaug

SEQ ID NO: 1410290 - RNA, 16 nt, Human
gaucucccugagaugg

SEQ ID NO: 1410291 - RNA, 15 nt, Human
gaucucuaacuucac

SEQ ID NO: 1410292 - RNA, 14 nt, Human
gauccauuucuaau

SEQ ID NO: 1410293 - RNA, 17 nt, Human
gauccauguaacugccu

SEQ ID NO: 1410294 - RNA, 14 nt, Human
gauccauguaacug

SEQ ID NO: 1410295 - RNA, 16 nt, Human
gaucccaacacugcca

SEQ ID NO: 1410296 - RNA, 12 nt, Human
gaucccaacacu

SEQ ID NO: 1410297 - RNA, 12 nt, Human
gauccaguuuug

SEQ ID NO: 1410298 - RNA, 17 nt, Human
gauccaguauaagacua

SEQ ID NO: 1410299 - RNA, 15 nt, Human
gauucucuugccuca

SEQ ID NO: 1410300 - RNA, 16 nt, Human
gauucucuugccucaa

SEQ ID NO: 1410301 - RNA, 14 nt, Human
gauucucuugccuc

SEQ ID NO: 1410302 - RNA, 23 nt, Human
gauucucugugucuaagauucua

SEQ ID NO: 1410303 - RNA, 22 nt, Human
gauucucugugucuaagauucu

SEQ ID NO: 1410304 - RNA, 18 nt, Human
gauucucugugucuaaga

SEQ ID NO: 1410305 - RNA, 15 nt, Human
gauucucugugucua

SEQ ID NO: 1410306 - RNA, 23 nt, Human
gauucucuggcuguaaggcucua

SEQ ID NO: 1410307 - RNA, 22 nt, Human
gauucucuggcuguaaggcucu

SEQ ID NO: 1410308 - RNA, 14 nt, Human
gauuacauuuuaaa

SEQ ID NO: 1410309 - RNA, 17 nt, Human
gauuaccuccugagaaa

SEQ ID NO: 1410310 - RNA, 14 nt, Human
gauuaccuccugag

SEQ ID NO: 1410311 - RNA, 13 nt, Human
gauuaccuccuga

SEQ ID NO: 1410312 - RNA, 18 nt, Human
gauuacugccuauuuuaa

SEQ ID NO: 1410313 - RNA, 15 nt, Human
gauuagaaauuaccu

SEQ ID NO: 1410314 - RNA, 22 nt, Human
gauuacuggccuuuuucauuua

SEQ ID NO: 1410315 - RNA, 22 nt, Human
gauuagaaauuaccuguggaua

SEQ ID NO: 1410316 - RNA, 20 nt, Human
gauuagaaauuaccugugga

SEQ ID NO: 1410317 - RNA, 20 nt, Human
gauuagacuggacagcuugu

SEQ ID NO: 1410318 - RNA, 19 nt, Human
gauuagacuggacagcuug

SEQ ID NO: 1410319 - RNA, 18 nt, Human
gauuagacuggacagcuu

SEQ ID NO: 1410320 - RNA, 19 nt, Human
gauuagacagaacaccuau

SEQ ID NO: 1410321 - RNA, 16 nt, Human
gauuagacagaacacc

SEQ ID NO: 1410322 - RNA, 14 nt, Human
gauuagacagaaca

SEQ ID NO: 1410323 - RNA, 23 nt, Human
gaugcuggcccagggcccagagc

SEQ ID NO: 1410324 - RNA, 22 nt, Human
gaugcuggcccagggcccagag

SEQ ID NO: 1410325 - RNA, 21 nt, Human
gaugcuggcccagggcccaga

SEQ ID NO: 1410326 - RNA, 19 nt, Human
gaugcuggcccagggccca

SEQ ID NO: 1410327 - RNA, 17 nt, Human
gaugcuggcccagggcc

SEQ ID NO: 1410328 - RNA, 16 nt, Human
gaugcuggcccagggc

SEQ ID NO: 1410329 - RNA, 23 nt, Human
gaugugaagccaauucagacagg

SEQ ID NO: 1410330 - RNA, 14 nt, Human
gaugugaagccaau

SEQ ID NO: 1410331 - RNA, 13 nt, Human
gaugugaagccaa

SEQ ID NO: 1410332 - RNA, 12 nt, Human
gaugugaagcca

SEQ ID NO: 1410333 - RNA, 22 nt, Human
gauuacaggugugagccaccac

SEQ ID NO: 1410334 - RNA, 19 nt, Human
gauuauuaacgauguccaa

SEQ ID NO: 1410335 - RNA, 19 nt, Human
gauuauguagcaaaauaca

SEQ ID NO: 1410336 - RNA, 18 nt, Human
gauuaugggucacaggaa

SEQ ID NO: 1410337 - RNA, 17 nt, Human
gauuaugggucacagga

SEQ ID NO: 1410338 - RNA, 16 nt, Human
gauuaugggucacagg

SEQ ID NO: 1410339 - RNA, 14 nt, Human
gauuaugggucaca

SEQ ID NO: 1410340 - RNA, 17 nt, Human
gauuagagccuguaaac

SEQ ID NO: 1410341 - RNA, 21 nt, Human
gauuauuuucuacacauacau

SEQ ID NO: 1410342 - RNA, 14 nt, Human
gagugcaguccuga

SEQ ID NO: 1410343 - RNA, 16 nt, Human
gaguccaucagccucc

SEQ ID NO: 1410344 - RNA, 15 nt, Human
gaguccaucagccuc

SEQ ID NO: 1410345 - RNA, 14 nt, Human
gaguccaucagccu

SEQ ID NO: 1410346 - RNA, 13 nt, Human
gaguccaucagcc

SEQ ID NO: 1410347 - RNA, 22 nt, Human
gaguccacuuuguuucgugggg

SEQ ID NO: 1410348 - RNA, 13 nt, Human
gaguccacuuugu

SEQ ID NO: 1410349 - RNA, 19 nt, Human
gaguccaagguuuaaagag

SEQ ID NO: 1410350 - RNA, 12 nt, Human
gagucacacagu

SEQ ID NO: 1410351 - RNA, 14 nt, Human
gagucaaguuguuc

SEQ ID NO: 1410352 - RNA, 13 nt, Human
gagucaauacaua

SEQ ID NO: 1410353 - RNA, 16 nt, Human
gaggugcccaggagaa

SEQ ID NO: 1410354 - RNA, 15 nt, Human
gaggugcccaggaga

SEQ ID NO: 1410355 - RNA, 14 nt, Human
gaggugcccaggag

SEQ ID NO: 1410356 - RNA, 13 nt, Human
gaggugcccagga

SEQ ID NO: 1410357 - RNA, 13 nt, Human
gaggugccacugg

SEQ ID NO: 1410358 - RNA, 14 nt, Human
gaggugccacugga

SEQ ID NO: 1410359 - RNA, 21 nt, Human
gaggugccugucccaccccca

SEQ ID NO: 1410360 - RNA, 15 nt, Human
gaggugccuguccca

SEQ ID NO: 1410361 - RNA, 13 nt, Human
gaggugccugucc

SEQ ID NO: 1410362 - RNA, 16 nt, Human
gaggugcacugggagg

SEQ ID NO: 1410363 - RNA, 18 nt, Human
gaggugcacugggaggcu

SEQ ID NO: 1410364 - RNA, 14 nt, Human
gaggugcacuggga

SEQ ID NO: 1410365 - RNA, 16 nt, Human
gaggucuguuccuuuu

SEQ ID NO: 1410366 - RNA, 14 nt, Human
gaggucuguuccuu

SEQ ID NO: 1410367 - RNA, 13 nt, Human
gaggucuguucuu

SEQ ID NO: 1410368 - RNA, 14 nt, Human
gaggucuguucuuu

SEQ ID NO: 1410369 - RNA, 22 nt, Human
gaguuugucgcucaugugugca

SEQ ID NO: 1410370 - RNA, 18 nt, Human
gaguuugucgcucaugug

SEQ ID NO: 1410371 - RNA, 17 nt, Human
gaguuugucgcucaugu

SEQ ID NO: 1410372 - RNA, 19 nt, Human
gaguuuggagagagcagac

SEQ ID NO: 1410373 - RNA, 22 nt, Human
gaguuuggagagagcagacugg

SEQ ID NO: 1410374 - RNA, 18 nt, Human
gagugcuugcuuuucaug

SEQ ID NO: 1410375 - RNA, 16 nt, Human
gaguuguuacauuuuu

SEQ ID NO: 1410376 - RNA, 20 nt, Human
gaguuguuacauuuuuaagu

SEQ ID NO: 1410377 - RNA, 22 nt, Human
gagugcaguccugaucagagcc

SEQ ID NO: 1410378 - RNA, 18 nt, Human
gagugcaguccugaucag

SEQ ID NO: 1410379 - RNA, 17 nt, Human
gagugcaguccugauca

SEQ ID NO: 1410380 - RNA, 15 nt, Human
gagugcguggugcga

SEQ ID NO: 1410381 - RNA, 18 nt, Human
gagugcggaccacccuca

SEQ ID NO: 1410382 - RNA, 21 nt, Human
gagugcucaguagucagacug

SEQ ID NO: 1410383 - RNA, 19 nt, Human
gagugcuugcuuuucaugc

SEQ ID NO: 1410384 - RNA, 15 nt, Human
gagugcuguuuuguu

SEQ ID NO: 1410385 - RNA, 12 nt, Human
gagugcuguuuu

SEQ ID NO: 1410386 - RNA, 19 nt, Human
gagugcugaaggaauggaa

SEQ ID NO: 1410387 - RNA, 17 nt, Human
gaguuugaugaggcccu

SEQ ID NO: 1410388 - RNA, 16 nt, Human
gaguuucuaagguccg

SEQ ID NO: 1410389 - RNA, 13 nt, Human
gaguuucuaaggu

SEQ ID NO: 1410390 - RNA, 12 nt, Human
gaguuucuaagg

SEQ ID NO: 1410391 - RNA, 17 nt, Human
gaguuuccuaugggaac

SEQ ID NO: 1410392 - RNA, 18 nt, Human
gaguuuauguuccauuaa

SEQ ID NO: 1410393 - RNA, 18 nt, Human
gaguuucauguacaagau

SEQ ID NO: 1410394 - RNA, 15 nt, Human
gaguuucauguacaa

SEQ ID NO: 1410395 - RNA, 22 nt, Human
gaguuuauguuccauuaaacga

SEQ ID NO: 1410396 - RNA, 22 nt, Human
gaguuuagggaacaauuuggca

SEQ ID NO: 1410397 - RNA, 20 nt, Human
gaguuuagggaacaauuugg

SEQ ID NO: 1410398 - RNA, 15 nt, Human
gaguuuagggugggg

SEQ ID NO: 1410399 - RNA, 14 nt, Human
gaguuuaggguggg

SEQ ID NO: 1410400 - RNA, 16 nt, Human
gaguuuagcuggaaaa

SEQ ID NO: 1410401 - RNA, 22 nt, Human
gaguuguuacauuuuuaagugc

SEQ ID NO: 1410402 - RNA, 22 nt, Human
gauacuaauaaacuaauaauug

SEQ ID NO: 1410403 - RNA, 13 nt, Human
gauacuaaggacg

SEQ ID NO: 1410404 - RNA, 16 nt, Human
gauacgcaucagacag

SEQ ID NO: 1410405 - RNA, 16 nt, Human
gauacuacaguuuguu

SEQ ID NO: 1410406 - RNA, 17 nt, Human
gauacgacaguacacug

SEQ ID NO: 1410407 - RNA, 16 nt, Human
gauacgacaguacacu

SEQ ID NO: 1410408 - RNA, 11 nt, Human
gauacuacagu

SEQ ID NO: 1410409 - RNA, 21 nt, Human
gauaccccccucugucuugug

SEQ ID NO: 1410410 - RNA, 13 nt, Human
gauaccccccucu

SEQ ID NO: 1410411 - RNA, 19 nt, Human
gauaccaugcuguaaggau

SEQ ID NO: 1410412 - RNA, 15 nt, Human
gauauuggaacuugc

SEQ ID NO: 1410413 - RNA, 13 nt, Human
gauauucuaagac

SEQ ID NO: 1410414 - RNA, 22 nt, Human
gauauuccuauugugcaaugua

SEQ ID NO: 1410415 - RNA, 12 nt, Human
gauauucuaaga

SEQ ID NO: 1410416 - RNA, 17 nt, Human
gauauuaaugcccagac

SEQ ID NO: 1410417 - RNA, 19 nt, Human
gauauuaaauuuuuuaaaa

SEQ ID NO: 1410418 - RNA, 18 nt, Human
gauauguauggguagggu

SEQ ID NO: 1410419 - RNA, 17 nt, Human
gauauguauggguaggg

SEQ ID NO: 1410420 - RNA, 18 nt, Human
gauauguaaaacauuuau

SEQ ID NO: 1410421 - RNA, 19 nt, Human
gauauguaaaacauuuauu

SEQ ID NO: 1410422 - RNA, 17 nt, Human
gauauguaaaacauuua

SEQ ID NO: 1410423 - RNA, 16 nt, Human
gauauguaaaacauuu

SEQ ID NO: 1410424 - RNA, 14 nt, Human
gauaugugaacagu

SEQ ID NO: 1410425 - RNA, 13 nt, Human
gauaugugaacag

SEQ ID NO: 1410426 - RNA, 20 nt, Human
gauacuuaagugcugcaauu

SEQ ID NO: 1410427 - RNA, 18 nt, Human
gauacuguugcacgugug

SEQ ID NO: 1410428 - RNA, 17 nt, Human
gauacuguugcacgugu

SEQ ID NO: 1410429 - RNA, 16 nt, Human
gauacuguugcacgug

SEQ ID NO: 1410430 - RNA, 15 nt, Human
gauacuguugcacgu

SEQ ID NO: 1410431 - RNA, 14 nt, Human
gauacuguugcacg

SEQ ID NO: 1410432 - RNA, 13 nt, Human
gauacuguugcac

SEQ ID NO: 1410433 - RNA, 12 nt, Human
gauacuguugca

SEQ ID NO: 1410434 - RNA, 19 nt, Human
gauacuucgacacuguucu

SEQ ID NO: 1410435 - RNA, 21 nt, Human
gauacuguugcacguguguuu

SEQ ID NO: 1410436 - RNA, 19 nt, Human
gauacuguugcacgugugu

SEQ ID NO: 1410437 - RNA, 16 nt, Human
gauacuugaaaauuaa

SEQ ID NO: 1410438 - RNA, 22 nt, Human
gauaugcuuguaacuaaaauaa

SEQ ID NO: 1410439 - RNA, 12 nt, Human
gauaugcuugua

SEQ ID NO: 1410440 - RNA, 14 nt, Human
gauaugcguauuau

SEQ ID NO: 1410441 - RNA, 17 nt, Human
gauaugcauauuuguuu

SEQ ID NO: 1410442 - RNA, 23 nt, Human
gauacuucgacacuguucuuagc

SEQ ID NO: 1410443 - RNA, 22 nt, Human
gauacuucgacacuguucuuag

SEQ ID NO: 1410444 - RNA, 20 nt, Human
gauacuucgacacuguucuu

SEQ ID NO: 1410445 - RNA, 17 nt, Human
gauacuugaaaauuaac

SEQ ID NO: 1410446 - RNA, 16 nt, Human
gcagcccaggaagucu

SEQ ID NO: 1410447 - RNA, 14 nt, Human
gcagcccagccagc

SEQ ID NO: 1410448 - RNA, 13 nt, Human
gcagcccagccag

SEQ ID NO: 1410449 - RNA, 22 nt, Human
gcagccccacaccagggccagc

SEQ ID NO: 1410450 - RNA, 14 nt, Human
gcagccccacccag

SEQ ID NO: 1410451 - RNA, 14 nt, Human
gcagcccaggaagu

SEQ ID NO: 1410452 - RNA, 12 nt, Human
gcagccccaggc

SEQ ID NO: 1410453 - RNA, 12 nt, Human
gcagcccagcca

SEQ ID NO: 1410454 - RNA, 15 nt, Human
gcagccagcaucugg

SEQ ID NO: 1410455 - RNA, 14 nt, Human
gcagccagcaucug

SEQ ID NO: 1410456 - RNA, 13 nt, Human
gcagccagcaucu

SEQ ID NO: 1410457 - RNA, 21 nt, Human
gcagccacccugaggagucug

SEQ ID NO: 1410458 - RNA, 20 nt, Human
gcagccacccugaggagucu

SEQ ID NO: 1410459 - RNA, 17 nt, Human
gcagccacccugaggag

SEQ ID NO: 1410460 - RNA, 16 nt, Human
gcagccacccugagga

SEQ ID NO: 1410461 - RNA, 15 nt, Human
gcagccacccugagg

SEQ ID NO: 1410462 - RNA, 14 nt, Human
gcagccacccugag

SEQ ID NO: 1410463 - RNA, 12 nt, Human
gcagccacccug

SEQ ID NO: 1410464 - RNA, 18 nt, Human
gcagagcugauggagaag

SEQ ID NO: 1410465 - RNA, 19 nt, Human
gcagagcugauggagaagg

SEQ ID NO: 1410466 - RNA, 16 nt, Human
gcagagcccaagggaa

SEQ ID NO: 1410467 - RNA, 16 nt, Human
gcagagccaggaagau

SEQ ID NO: 1410468 - RNA, 15 nt, Human
gcaguaccugagggu

SEQ ID NO: 1410469 - RNA, 14 nt, Human
gcaguaccugaggg

SEQ ID NO: 1410470 - RNA, 19 nt, Human
gcaguaccugggcaagcug

SEQ ID NO: 1410471 - RNA, 13 nt, Human
gcaguaauaaaaa

SEQ ID NO: 1410472 - RNA, 21 nt, Human
gcaguagaggcuauggacagg

SEQ ID NO: 1410473 - RNA, 22 nt, Human
gcagucacucuagucaaugaca

SEQ ID NO: 1410474 - RNA, 21 nt, Human
gcaguaucaugcccugugcaa

SEQ ID NO: 1410475 - RNA, 23 nt, Human
gcagguucuuguuggugcacagc

SEQ ID NO: 1410476 - RNA, 22 nt, Human
gcagguucuuguuggugcacag

SEQ ID NO: 1410477 - RNA, 17 nt, Human
gcagguucuuguuggug

SEQ ID NO: 1410478 - RNA, 13 nt, Human
gcagguucuuguu

SEQ ID NO: 1410479 - RNA, 17 nt, Human
gcagggagcugggcuuc

SEQ ID NO: 1410480 - RNA, 16 nt, Human
gcagggagcugggcuu

SEQ ID NO: 1410481 - RNA, 19 nt, Human
gcagggagcggccggccag

SEQ ID NO: 1410482 - RNA, 21 nt, Human
gcagggaaaauuauuugcaua

SEQ ID NO: 1410483 - RNA, 23 nt, Human
gcaggcugggccauguccaaaga

SEQ ID NO: 1410484 - RNA, 15 nt, Human
gcaggcugggccaug

SEQ ID NO: 1410485 - RNA, 14 nt, Human
gcaggcugggccau

SEQ ID NO: 1410486 - RNA, 13 nt, Human
gcaggcugggcca

SEQ ID NO: 1410487 - RNA, 12 nt, Human
gcaggcugggcc

SEQ ID NO: 1410488 - RNA, 11 nt, Human
gcaggcugggc

SEQ ID NO: 1410489 - RNA, 10 nt, Human
gcaggcuggg

SEQ ID NO: 1410490 - RNA, 20 nt, Human
gcauacgagagcagaggucu

SEQ ID NO: 1410491 - RNA, 18 nt, Human
gcauaccuccuauggguu

SEQ ID NO: 1410492 - RNA, 23 nt, Human
gcauaccagguuuuacacuugca

SEQ ID NO: 1410493 - RNA, 14 nt, Human
gcauacguacacau

SEQ ID NO: 1410494 - RNA, 16 nt, Human
gcaguuugcaaaaaau

SEQ ID NO: 1410495 - RNA, 12 nt, Human
gcaguuugcaaa

SEQ ID NO: 1410496 - RNA, 20 nt, Human
gcaguuuaucauucaagugu

SEQ ID NO: 1410497 - RNA, 16 nt, Human
gcaguuuaucauucaa

SEQ ID NO: 1410498 - RNA, 15 nt, Human
gcagucgugccugug

SEQ ID NO: 1410499 - RNA, 13 nt, Human
gcagucgugccug

SEQ ID NO: 1410500 - RNA, 18 nt, Human
gcaguccuuggccugcua

SEQ ID NO: 1410501 - RNA, 15 nt, Human
gcaguccuuggccug

SEQ ID NO: 1410502 - RNA, 14 nt, Human
gcaguccuuggccu

SEQ ID NO: 1410503 - RNA, 20 nt, Human
gcaguccuggaagccagcuu

SEQ ID NO: 1410504 - RNA, 18 nt, Human
gcaguccuggaagccagc

SEQ ID NO: 1410505 - RNA, 19 nt, Human
gcaguccugaucagagccg

SEQ ID NO: 1410506 - RNA, 23 nt, Human
gcaguccccuucccuccaagaag

SEQ ID NO: 1410507 - RNA, 21 nt, Human
gcaguccccuucccuccaaga

SEQ ID NO: 1410508 - RNA, 14 nt, Human
gcaguccccuuccc

SEQ ID NO: 1410509 - RNA, 16 nt, Human
gcagucccaagcggug

SEQ ID NO: 1410510 - RNA, 22 nt, Human
gcaguccacuucugacagccuc

SEQ ID NO: 1410511 - RNA, 23 nt, Human
gcaguccacuucugacagccuca

SEQ ID NO: 1410512 - RNA, 21 nt, Human
gcaguccacuucugacagccu

SEQ ID NO: 1410513 - RNA, 20 nt, Human
gcaguccacuucugacagcc

SEQ ID NO: 1410514 - RNA, 19 nt, Human
gcaguccacuucugacagc

SEQ ID NO: 1410515 - RNA, 18 nt, Human
gcaguccacuucugacag

SEQ ID NO: 1410516 - RNA, 19 nt, Human
gcagucauuauccagguaa

SEQ ID NO: 1410517 - RNA, 17 nt, Human
gcaguuuuuuuuuucuu

SEQ ID NO: 1410518 - RNA, 19 nt, Human
gcauaaccugucucaccug

SEQ ID NO: 1410519 - RNA, 14 nt, Human
gcauaaccugucuc

SEQ ID NO: 1410520 - RNA, 11 nt, Human
gcaguuuuuuu

SEQ ID NO: 1410521 - RNA, 17 nt, Human
gcauaccacuuuuguuc

SEQ ID NO: 1410522 - RNA, 20 nt, Human
gcauaccacuuuuguucuug

SEQ ID NO: 1410523 - RNA, 20 nt, Human
gcaguuuuuuuuuucuuguc

SEQ ID NO: 1410524 - RNA, 18 nt, Human
gcaguuuuuugaaaaugg

SEQ ID NO: 1410525 - RNA, 12 nt, Human
gcaguuuuuuga

SEQ ID NO: 1410526 - RNA, 13 nt, Human
gcaguuugcaaaa

SEQ ID NO: 1410527 - RNA, 22 nt, Human
gcauaacguauaaaagccuguu

SEQ ID NO: 1410528 - RNA, 16 nt, Human
gcagagaugccucccu

SEQ ID NO: 1410529 - RNA, 17 nt, Human
gcagagaugccucccug

SEQ ID NO: 1410530 - RNA, 15 nt, Human
gcagagaugccuccc

SEQ ID NO: 1410531 - RNA, 22 nt, Human
gcagagagguuugcagucccaa

SEQ ID NO: 1410532 - RNA, 21 nt, Human
gcagagagguuugcaguccca

SEQ ID NO: 1410533 - RNA, 14 nt, Human
gcagagccaggaag

SEQ ID NO: 1410534 - RNA, 15 nt, Human
gcagagccaggaaga

SEQ ID NO: 1410535 - RNA, 16 nt, Human
gcacuuguccagcuga

SEQ ID NO: 1410536 - RNA, 22 nt, Human
gcacuuggggguucaggcccgg

SEQ ID NO: 1410537 - RNA, 20 nt, Human
gcacugacugggaccaggca

SEQ ID NO: 1410538 - RNA, 19 nt, Human
gcacugacggacucaugau

SEQ ID NO: 1410539 - RNA, 18 nt, Human
gcacuuuagaauaugccu

SEQ ID NO: 1410540 - RNA, 19 nt, Human
gcacuuuagaauaugccuu

SEQ ID NO: 1410541 - RNA, 20 nt, Human
gcacuuuagaauaugccuug

SEQ ID NO: 1410542 - RNA, 16 nt, Human
gcagaaauccaagcac

SEQ ID NO: 1410543 - RNA, 20 nt, Human
gcagaaagugccuuucagga

SEQ ID NO: 1410544 - RNA, 23 nt, Human
gcagaaagugccuuucaggaucu

SEQ ID NO: 1410545 - RNA, 19 nt, Human
gcagaaagugccuuucagg

SEQ ID NO: 1410546 - RNA, 14 nt, Human
gcagaaagugccuu

SEQ ID NO: 1410547 - RNA, 13 nt, Human
gcagaaagugccu

SEQ ID NO: 1410548 - RNA, 20 nt, Human
gcagaaagcaucccucaccc

SEQ ID NO: 1410549 - RNA, 22 nt, Human
gcacugaauaaauuguacagcc

SEQ ID NO: 1410550 - RNA, 21 nt, Human
gcacugaauaaauuguacagc

SEQ ID NO: 1410551 - RNA, 16 nt, Human
gcaccuaauccaggca

SEQ ID NO: 1410552 - RNA, 15 nt, Human
gcaccuaauccaggc

SEQ ID NO: 1410553 - RNA, 14 nt, Human
gcaccuaaagaaaa

SEQ ID NO: 1410554 - RNA, 17 nt, Human
gcaccuaaagaaaaaca

SEQ ID NO: 1410555 - RNA, 15 nt, Human
gcaccguucugugca

SEQ ID NO: 1410556 - RNA, 14 nt, Human
gcaccguucugugc

SEQ ID NO: 1410557 - RNA, 20 nt, Human
gcaccggggccugggcagga

SEQ ID NO: 1410558 - RNA, 23 nt, Human
gcaccgaagcccagagggucugg

SEQ ID NO: 1410559 - RNA, 16 nt, Human
gcaccgaagcccagag

SEQ ID NO: 1410560 - RNA, 15 nt, Human
gcaccgaagcccaga

SEQ ID NO: 1410561 - RNA, 14 nt, Human
gcaccgaagcccag

SEQ ID NO: 1410562 - RNA, 22 nt, Human
gcacaucuguaaaucuacacac

SEQ ID NO: 1410563 - RNA, 16 nt, Human
gcacaugaacuuagau

SEQ ID NO: 1410564 - RNA, 21 nt, Human
gcacaugagcuggcgggauug

SEQ ID NO: 1410565 - RNA, 18 nt, Human
gcacaucugugucuuguu

SEQ ID NO: 1410566 - RNA, 17 nt, Human
gcacaucugugucuugu

SEQ ID NO: 1410567 - RNA, 21 nt, Human
gcacaucuguaaaucuacaca

SEQ ID NO: 1410568 - RNA, 13 nt, Human
gcacaugacucgg

SEQ ID NO: 1410569 - RNA, 19 nt, Human
gcacaucagcacgauuucu

SEQ ID NO: 1410570 - RNA, 20 nt, Human
gcacaucagcacgauuucug

SEQ ID NO: 1410571 - RNA, 21 nt, Human
gcacaucagcacgauuucugu

SEQ ID NO: 1410572 - RNA, 21 nt, Human
gcacaguugaagggaggggcu

SEQ ID NO: 1410573 - RNA, 19 nt, Human
gcacaauguagauaagugu

SEQ ID NO: 1410574 - RNA, 21 nt, Human
gauucugaccuuaaaugcaac

SEQ ID NO: 1410575 - RNA, 20 nt, Human
gauucugaccuuaaaugcaa

SEQ ID NO: 1410576 - RNA, 23 nt, Human
gauucugaccuuaaaugcaacca

SEQ ID NO: 1410577 - RNA, 21 nt, Human
gcaauaacguuuaagccaaaa

SEQ ID NO: 1410578 - RNA, 21 nt, Human
gcaauaaaucugacccagugc

SEQ ID NO: 1410579 - RNA, 19 nt, Human
gcaauaaaucugacccagu

SEQ ID NO: 1410580 - RNA, 18 nt, Human
gcaauaaaucugacccag

SEQ ID NO: 1410581 - RNA, 16 nt, Human
gcaauaaaucugaccc

SEQ ID NO: 1410582 - RNA, 13 nt, Human
gcaagugaauuug

SEQ ID NO: 1410583 - RNA, 21 nt, Human
gcaaguccuaagccuguuagc

SEQ ID NO: 1410584 - RNA, 16 nt, Human
gaaacuuucuuucuca

SEQ ID NO: 1410585 - RNA, 21 nt, Human
gaaacuuuucuuaaaaaguua

SEQ ID NO: 1410586 - RNA, 11 nt, Human
gaaacuuuucu

SEQ ID NO: 1410587 - RNA, 15 nt, Human
gaaacuuuuggaagg

SEQ ID NO: 1410588 - RNA, 13 nt, Human
gaaacuuuuggaa

SEQ ID NO: 1410589 - RNA, 18 nt, Human
gaaacuuuuuuauuuaaa

SEQ ID NO: 1410590 - RNA, 17 nt, Human
gaaacuuuuuuauuuaa

SEQ ID NO: 1410591 - RNA, 22 nt, Human
gaaaggcuguuaaauacaggaa

SEQ ID NO: 1410592 - RNA, 17 nt, Human
gaaaggggucggcugac

SEQ ID NO: 1410593 - RNA, 16 nt, Human
gaaaggugguguuucu

SEQ ID NO: 1410594 - RNA, 14 nt, Human
gaaaggugguguuu

SEQ ID NO: 1410595 - RNA, 17 nt, Human
gaaauauuuauuuuaau

SEQ ID NO: 1410596 - RNA, 20 nt, Human
gaaagguuagagaauaaauu

SEQ ID NO: 1410597 - RNA, 20 nt, Human
gaaaggugugagacugggaa

SEQ ID NO: 1410598 - RNA, 22 nt, Human
gaaaggugguguuucuguaaga

SEQ ID NO: 1410599 - RNA, 17 nt, Human
gaaaggugguguuucug

SEQ ID NO: 1410600 - RNA, 22 nt, Human
gaaauauuuauuuuaauaaugu

SEQ ID NO: 1410601 - RNA, 18 nt, Human
gaaauauuuauuuuaaua

SEQ ID NO: 1410602 - RNA, 21 nt, Human
gaaaauuuguuauuuugcaac

SEQ ID NO: 1410603 - RNA, 17 nt, Human
gaaaauuuguuauuuug

SEQ ID NO: 1410604 - RNA, 20 nt, Human
gaaaauucugugccuuguuu

SEQ ID NO: 1410605 - RNA, 22 nt, Human
gaaaauucugugccuuguuuuu

SEQ ID NO: 1410606 - RNA, 13 nt, Human
gaaaauucugugc

SEQ ID NO: 1410607 - RNA, 14 nt, Human
gaaaauucauuuuu

SEQ ID NO: 1410608 - RNA, 13 nt, Human
gaaaauucauuuu

SEQ ID NO: 1410609 - RNA, 23 nt, Human
gaaaaugguccaauuaguuuccu

SEQ ID NO: 1410610 - RNA, 22 nt, Human
gaaaauggucgagaaagaggca

SEQ ID NO: 1410611 - RNA, 18 nt, Human
gaaaaugguccaggagaa

SEQ ID NO: 1410612 - RNA, 22 nt, Human
gaaaaugguccaauuaguuucc

SEQ ID NO: 1410613 - RNA, 12 nt, Human
gaaaagaaaaag

SEQ ID NO: 1410614 - RNA, 15 nt, Human
gaaaaugcgguuaua

SEQ ID NO: 1410615 - RNA, 19 nt, Human
cuuuuuuucuguaccaguu

SEQ ID NO: 1410616 - RNA, 16 nt, Human
cuuuuuuucuguacca

SEQ ID NO: 1410617 - RNA, 14 nt, Human
cuuuuuuucuguac

SEQ ID NO: 1410618 - RNA, 19 nt, Human
cuuuuuuuccaucuuuaca

SEQ ID NO: 1410619 - RNA, 16 nt, Human
cuuuuuuuagagaagu

SEQ ID NO: 1410620 - RNA, 18 nt, Human
cuuuuuuuuuucuuuaua

SEQ ID NO: 1410621 - RNA, 16 nt, Human
cuuuuuuuuuucuuua

SEQ ID NO: 1410622 - RNA, 14 nt, Human
cuuuuuuuuuucuu

SEQ ID NO: 1410623 - RNA, 13 nt, Human
cuuuuuuguuuug

SEQ ID NO: 1410624 - RNA, 12 nt, Human
cuuuugugcauu

SEQ ID NO: 1410625 - RNA, 13 nt, Human
cuuuugugcauua

SEQ ID NO: 1410626 - RNA, 18 nt, Human
gaaaaacaggcacuuggc

SEQ ID NO: 1410627 - RNA, 11 nt, Human
gaaaaacaggu

SEQ ID NO: 1410628 - RNA, 13 nt, Human
gaaaaacaggcac

SEQ ID NO: 1410629 - RNA, 23 nt, Human
gaaaaacaaacucguuuuuuaca

SEQ ID NO: 1410630 - RNA, 21 nt, Human
gaaaaacaaacucguuuuuua

SEQ ID NO: 1410631 - RNA, 21 nt, Human
gaaaaaaaaccugagauuuau

SEQ ID NO: 1410632 - RNA, 18 nt, Human
gaaaaaaaaccugagauu

SEQ ID NO: 1410633 - RNA, 16 nt, Human
gaaaaaaaacagugga

SEQ ID NO: 1410634 - RNA, 18 nt, Human
gaaaaaaaaauucacaug

SEQ ID NO: 1410635 - RNA, 23 nt, Human
cuuuuuuuuuucuuuauaagaaa

SEQ ID NO: 1410636 - RNA, 13 nt, Human
gaaaaaaaauuau

SEQ ID NO: 1410637 - RNA, 15 nt, Human
cuuuugcccuuugau

SEQ ID NO: 1410638 - RNA, 16 nt, Human
cuuuugcccauuuuga

SEQ ID NO: 1410639 - RNA, 17 nt, Human
cuuuugcccauuuugaa

SEQ ID NO: 1410640 - RNA, 17 nt, Human
cuuuugccauuaaacuu

SEQ ID NO: 1410641 - RNA, 12 nt, Human
cuuuuggaggac

SEQ ID NO: 1410642 - RNA, 16 nt, Human
cuuuugccguuauuaa

SEQ ID NO: 1410643 - RNA, 22 nt, Human
cuuuugugauggagugcuguuu

SEQ ID NO: 1410644 - RNA, 21 nt, Human
cuuuugugauggagugcuguu

SEQ ID NO: 1410645 - RNA, 20 nt, Human
cuuuugugauggagugcugu

SEQ ID NO: 1410646 - RNA, 13 nt, Human
cuuuugugaauua

SEQ ID NO: 1410647 - RNA, 20 nt, Human
cuuuuguaagacaaagguuu

SEQ ID NO: 1410648 - RNA, 13 nt, Human
cuuuuguaagaca

SEQ ID NO: 1410649 - RNA, 10 nt, Human
cuuuuguaag

SEQ ID NO: 1410650 - RNA, 19 nt, Human
cuuuuguagaagucacauu

SEQ ID NO: 1410651 - RNA, 21 nt, Human
cuuuugguuaugaauacuuug

SEQ ID NO: 1410652 - RNA, 17 nt, Human
cuuuuggcggggaggag

SEQ ID NO: 1410653 - RNA, 15 nt, Human
cuuuuggcauuuuac

SEQ ID NO: 1410654 - RNA, 23 nt, Human
cuuuccuguauuuguucccaaga

SEQ ID NO: 1410655 - RNA, 23 nt, Human
cuuuccuggacacucagaccuga

SEQ ID NO: 1410656 - RNA, 20 nt, Human
cuuuccuggacacucagacc

SEQ ID NO: 1410657 - RNA, 19 nt, Human
cuuuccugccccaggccug

SEQ ID NO: 1410658 - RNA, 18 nt, Human
cuuuccugccccaggccu

SEQ ID NO: 1410659 - RNA, 14 nt, Human
cuuuccugccccag

SEQ ID NO: 1410660 - RNA, 13 nt, Human
cuuuccugcccca

SEQ ID NO: 1410661 - RNA, 12 nt, Human
cuuuccugcccc

SEQ ID NO: 1410662 - RNA, 10 nt, Human
cuuuccugcc

SEQ ID NO: 1410663 - RNA, 21 nt, Human
cuuuccugcaacucaaggacu

SEQ ID NO: 1410664 - RNA, 18 nt, Human
cuuuccugagucccaucc

SEQ ID NO: 1410665 - RNA, 20 nt, Human
cuuuccugagucccaucccu

SEQ ID NO: 1410666 - RNA, 22 nt, Human
cuuuccugagucccaucccugc

SEQ ID NO: 1410667 - RNA, 17 nt, Human
cuuucaggaucuauuuu

SEQ ID NO: 1410668 - RNA, 21 nt, Human
cuuucaggaucuauuuuugga

SEQ ID NO: 1410669 - RNA, 16 nt, Human
cuuucaggaucuauuu

SEQ ID NO: 1410670 - RNA, 15 nt, Human
cuuucaggaucuauu

SEQ ID NO: 1410671 - RNA, 22 nt, Human
cuuucagcugucuuuuggagga

SEQ ID NO: 1410672 - RNA, 17 nt, Human
cuuucagcugucuuuug

SEQ ID NO: 1410673 - RNA, 13 nt, Human
cuuucagcugucu

SEQ ID NO: 1410674 - RNA, 12 nt, Human
cuuucagcuguc

SEQ ID NO: 1410675 - RNA, 21 nt, Human
cuuucagcuccugaccaguug

SEQ ID NO: 1410676 - RNA, 19 nt, Human
cuuucagcuccugaccagu

SEQ ID NO: 1410677 - RNA, 17 nt, Human
cuuucagcuccugacca

SEQ ID NO: 1410678 - RNA, 15 nt, Human
cuuucagcuccugac

SEQ ID NO: 1410679 - RNA, 14 nt, Human
cuuucagcuccuga

SEQ ID NO: 1410680 - RNA, 13 nt, Human
cuuucagcuccug

SEQ ID NO: 1410681 - RNA, 12 nt, Human
cuuucagcuccu

SEQ ID NO: 1410682 - RNA, 17 nt, Human
cuuuccuugaguaguuu

SEQ ID NO: 1410683 - RNA, 15 nt, Human
cuuugauauuucaau

SEQ ID NO: 1410684 - RNA, 16 nt, Human
cuuucuagccuggcua

SEQ ID NO: 1410685 - RNA, 17 nt, Human
cuuucuagaccaauaaa

SEQ ID NO: 1410686 - RNA, 22 nt, Human
cuuucuagaaagagaaacaguu

SEQ ID NO: 1410687 - RNA, 16 nt, Human
cuuugggcuucagcug

SEQ ID NO: 1410688 - RNA, 13 nt, Human
cuuuguaaugaaa

SEQ ID NO: 1410689 - RNA, 13 nt, Human
cuuuuauaaacuu

SEQ ID NO: 1410690 - RNA, 14 nt, Human
cuuuuauaaacuuu

SEQ ID NO: 1410691 - RNA, 22 nt, Human
cuuuuaucccaaaguuguugua

SEQ ID NO: 1410692 - RNA, 14 nt, Human
cuuuuauaucccau

SEQ ID NO: 1410693 - RNA, 21 nt, Human
cuuuuauaggauuuauuuaaa

SEQ ID NO: 1410694 - RNA, 15 nt, Human
cuuuuauacugacac

SEQ ID NO: 1410695 - RNA, 20 nt, Human
cuuuuauacucuuucuguau

SEQ ID NO: 1410696 - RNA, 19 nt, Human
cuuuuauacucuuucugua

SEQ ID NO: 1410697 - RNA, 17 nt, Human
cuuuuauacucuuucug

SEQ ID NO: 1410698 - RNA, 12 nt, Human
cuuuuauacucu

SEQ ID NO: 1410699 - RNA, 23 nt, Human
cuuuuauguaguaauugacaugu

SEQ ID NO: 1410700 - RNA, 22 nt, Human
cuuuuauguaguaauugacaug

SEQ ID NO: 1410701 - RNA, 18 nt, Human
cuuuuauguaguaauuga

SEQ ID NO: 1410702 - RNA, 15 nt, Human
cuuuuauguaguaau

SEQ ID NO: 1410703 - RNA, 14 nt, Human
cuuuuaugugaaac

SEQ ID NO: 1410704 - RNA, 18 nt, Human
cuuuuaugugaaacaugu

SEQ ID NO: 1410705 - RNA, 22 nt, Human
cuucugagcuccuguccccugc

SEQ ID NO: 1410706 - RNA, 23 nt, Human
cuucugagcuccuguccccugcu

SEQ ID NO: 1410707 - RNA, 19 nt, Human
cuucugagcuccugucccc

SEQ ID NO: 1410708 - RNA, 16 nt, Human
cuucugagcuccuguc

SEQ ID NO: 1410709 - RNA, 15 nt, Human
cuucugagcuccugu

SEQ ID NO: 1410710 - RNA, 14 nt, Human
cuucugagcuccug

SEQ ID NO: 1410711 - RNA, 13 nt, Human
cuucugagcuccu

SEQ ID NO: 1410712 - RNA, 21 nt, Human
cuucucaaguucuaagauucu

SEQ ID NO: 1410713 - RNA, 23 nt, Human
cuucucaaguucuaagauucuaa

SEQ ID NO: 1410714 - RNA, 18 nt, Human
cuucucaaguucuaagau

SEQ ID NO: 1410715 - RNA, 17 nt, Human
cuucucaaguucuaaga

SEQ ID NO: 1410716 - RNA, 16 nt, Human
cuucucaaguucuaag

SEQ ID NO: 1410717 - RNA, 15 nt, Human
cuucucaaguucuaa

SEQ ID NO: 1410718 - RNA, 14 nt, Human
cuucucaaguucua

SEQ ID NO: 1410719 - RNA, 14 nt, Human
cuucuucagggacu

SEQ ID NO: 1410720 - RNA, 17 nt, Human
cuuccuccuccccacuu

SEQ ID NO: 1410721 - RNA, 16 nt, Human
cuuccuccuccccacu

SEQ ID NO: 1410722 - RNA, 17 nt, Human
cuucuauuuuguaaacu

SEQ ID NO: 1410723 - RNA, 16 nt, Human
cuucuauuuuguaaac

SEQ ID NO: 1410724 - RNA, 15 nt, Human
cuucuauuuuguaaa

SEQ ID NO: 1410725 - RNA, 14 nt, Human
cuucuauuuuguaa

SEQ ID NO: 1410726 - RNA, 23 nt, Human
cuucuauuuggggcuugaugacu

SEQ ID NO: 1410727 - RNA, 14 nt, Human
cuucuagaguucag

SEQ ID NO: 1410728 - RNA, 13 nt, Human
cuucuagaguuca

SEQ ID NO: 1410729 - RNA, 9 nt, Human
cuucuagag

SEQ ID NO: 1410730 - RNA, 18 nt, Human
cuucuaaguaaauacaau

SEQ ID NO: 1410731 - RNA, 21 nt, Human
cuucuaaguaaauacaauuuu

SEQ ID NO: 1410732 - RNA, 17 nt, Human
cuucuaaguaaauacaa

SEQ ID NO: 1410733 - RNA, 14 nt, Human
cuucuaaguaaaua

SEQ ID NO: 1410734 - RNA, 20 nt, Human
cuuccugccagccccugcca

SEQ ID NO: 1410735 - RNA, 18 nt, Human
cuuccugccagccccugc

SEQ ID NO: 1410736 - RNA, 17 nt, Human
cuuccugccagccccug

SEQ ID NO: 1410737 - RNA, 15 nt, Human
cuuccugccagcccc

SEQ ID NO: 1410738 - RNA, 14 nt, Human
cuuccugccagccc

SEQ ID NO: 1410739 - RNA, 21 nt, Human
cuucuacuuuuaaguugcuga

SEQ ID NO: 1410740 - RNA, 13 nt, Human
cuucuacuuuuaa

SEQ ID NO: 1410741 - RNA, 14 nt, Human
cuuccuccugggcc

SEQ ID NO: 1410742 - RNA, 12 nt, Human
cuuccuccuggg

SEQ ID NO: 1410743 - RNA, 14 nt, Human
cuuccuccuggaaa

SEQ ID NO: 1410744 - RNA, 13 nt, Human
cuuccuccuggaa

SEQ ID NO: 1410745 - RNA, 12 nt, Human
cuuccuccugga

SEQ ID NO: 1410746 - RNA, 22 nt, Human
cuuccuccugggcccucucugc

SEQ ID NO: 1410747 - RNA, 15 nt, Human
cuuccuccugggccc

SEQ ID NO: 1410748 - RNA, 21 nt, Human
cuugauaccccccucugucuu

SEQ ID NO: 1410749 - RNA, 20 nt, Human
cuugauaccccccucugucu

SEQ ID NO: 1410750 - RNA, 19 nt, Human
cuugauaccccccucuguc

SEQ ID NO: 1410751 - RNA, 18 nt, Human
cuugauaccccccucugu

SEQ ID NO: 1410752 - RNA, 17 nt, Human
cuugauaccccccucug

SEQ ID NO: 1410753 - RNA, 16 nt, Human
cuugauaccccccucu

SEQ ID NO: 1410754 - RNA, 21 nt, Human
cuugaguuugucgcucaugug

SEQ ID NO: 1410755 - RNA, 16 nt, Human
cuugauaaagggccaa

SEQ ID NO: 1410756 - RNA, 19 nt, Human
cuugauccauuucuaauua

SEQ ID NO: 1410757 - RNA, 20 nt, Human
cuugauccauuucuaauuau

SEQ ID NO: 1410758 - RNA, 14 nt, Human
cuugauagaaaugc

SEQ ID NO: 1410759 - RNA, 12 nt, Human
cuugauagaaau

SEQ ID NO: 1410760 - RNA, 22 nt, Human
cuugauagaaaugccaagcacu

SEQ ID NO: 1410761 - RNA, 17 nt, Human
cuugauagaaaugccaa

SEQ ID NO: 1410762 - RNA, 18 nt, Human
cuugauccauuucuaauu

SEQ ID NO: 1410763 - RNA, 12 nt, Human
cuugaugaagaa

SEQ ID NO: 1410764 - RNA, 20 nt, Human
cuuggcgaugccagccaagc

SEQ ID NO: 1410765 - RNA, 14 nt, Human
cuuggcagccuugu

SEQ ID NO: 1410766 - RNA, 16 nt, Human
cuuggcagccuuguga

SEQ ID NO: 1410767 - RNA, 21 nt, Human
cuugaugaccaaaguccuuuu

SEQ ID NO: 1410768 - RNA, 18 nt, Human
cuugaugaccaaaguccu

SEQ ID NO: 1410769 - RNA, 13 nt, Human
cuugaugaagaag

SEQ ID NO: 1410770 - RNA, 21 nt, Human
cuugaugcaugcacuguuccc

SEQ ID NO: 1410771 - RNA, 12 nt, Human
cuugaugccugg

SEQ ID NO: 1410772 - RNA, 20 nt, Human
cuugccuuauuagagugucu

SEQ ID NO: 1410773 - RNA, 18 nt, Human
cuugccuuauuagagugu

SEQ ID NO: 1410774 - RNA, 22 nt, Human
cuugccuguuucccaggcccac

SEQ ID NO: 1410775 - RNA, 20 nt, Human
cuugccuguuucccaggccc

SEQ ID NO: 1410776 - RNA, 18 nt, Human
cuugccugugccagguga

SEQ ID NO: 1410777 - RNA, 16 nt, Human
cuugccugugccaggu

SEQ ID NO: 1410778 - RNA, 15 nt, Human
cuugccugugccagg

SEQ ID NO: 1410779 - RNA, 14 nt, Human
cuugccugugccag

SEQ ID NO: 1410780 - RNA, 11 nt, Human
cuugccugugc

SEQ ID NO: 1410781 - RNA, 16 nt, Human
cuugccugguacagua

SEQ ID NO: 1410782 - RNA, 15 nt, Human
cuugccugguacagu

SEQ ID NO: 1410783 - RNA, 16 nt, Human
cuugccugccuuucca

SEQ ID NO: 1410784 - RNA, 15 nt, Human
cuugccugccuuucc

SEQ ID NO: 1410785 - RNA, 13 nt, Human
cuugccugccuuu

SEQ ID NO: 1410786 - RNA, 13 nt, Human
cuugccugcaggc

SEQ ID NO: 1410787 - RNA, 13 nt, Human
cuugaugccuggc

SEQ ID NO: 1410788 - RNA, 13 nt, Human
cuuggcagccuug

SEQ ID NO: 1410789 - RNA, 21 nt, Human
cuuggcaccagacacccagga

SEQ ID NO: 1410790 - RNA, 20 nt, Human
cuuggcaccagacacccagg

SEQ ID NO: 1410791 - RNA, 19 nt, Human
cuuggcaccagacacccag

SEQ ID NO: 1410792 - RNA, 16 nt, Human
cuuggcaccagacacc

SEQ ID NO: 1410793 - RNA, 15 nt, Human
cuugcggcuccucag

SEQ ID NO: 1410794 - RNA, 15 nt, Human
cuugccuucuggugu

SEQ ID NO: 1410795 - RNA, 21 nt, Human
cuugccuuauuagagugucuu

SEQ ID NO: 1410796 - RNA, 16 nt, Human
cuucaugacagccucc

SEQ ID NO: 1410797 - RNA, 13 nt, Human
cuucaugcaugga

SEQ ID NO: 1410798 - RNA, 15 nt, Human
cuucaugcauggaaa

SEQ ID NO: 1410799 - RNA, 17 nt, Human
cuuccagugucauuucu

SEQ ID NO: 1410800 - RNA, 21 nt, Human
cuucauaucauccacacauga

SEQ ID NO: 1410801 - RNA, 20 nt, Human
cuucauaucauccacacaug

SEQ ID NO: 1410802 - RNA, 18 nt, Human
cuucauaucauccacaca

SEQ ID NO: 1410803 - RNA, 17 nt, Human
cuucauaucauccacac

SEQ ID NO: 1410804 - RNA, 16 nt, Human
cuucauaucauccaca

SEQ ID NO: 1410805 - RNA, 23 nt, Human
cuucauacuugaacguuuucuaa

SEQ ID NO: 1410806 - RNA, 16 nt, Human
cuucauacuugaacgu

SEQ ID NO: 1410807 - RNA, 13 nt, Human
cuucauacuugaa

SEQ ID NO: 1410808 - RNA, 12 nt, Human
cuucauaaucca

SEQ ID NO: 1410809 - RNA, 11 nt, Human
cuucaucugga

SEQ ID NO: 1410810 - RNA, 12 nt, Human
cuucaucuggaa

SEQ ID NO: 1410811 - RNA, 13 nt, Human
cuucaucuggaac

SEQ ID NO: 1410812 - RNA, 15 nt, Human
cuucaucuggaacca

SEQ ID NO: 1410813 - RNA, 23 nt, Human
cuucaucuggcaacaucuuuauc

SEQ ID NO: 1410814 - RNA, 19 nt, Human
cuucaucuggcaacaucuu

SEQ ID NO: 1410815 - RNA, 14 nt, Human
cuucaucuggcaac

SEQ ID NO: 1410816 - RNA, 13 nt, Human
cuucaucuggcaa

SEQ ID NO: 1410817 - RNA, 19 nt, Human
cuucaucuggauuccagag

SEQ ID NO: 1410818 - RNA, 20 nt, Human
cuucaguuucacagaaaaua

SEQ ID NO: 1410819 - RNA, 17 nt, Human
cuucaguuucacagaaa

SEQ ID NO: 1410820 - RNA, 15 nt, Human
cuucaguuucacaga

SEQ ID NO: 1410821 - RNA, 20 nt, Human
cuucaguugucucugaugca

SEQ ID NO: 1410822 - RNA, 23 nt, Human
cuucaguugucucugaugcagcu

SEQ ID NO: 1410823 - RNA, 17 nt, Human
cuucaguugucucugau

SEQ ID NO: 1410824 - RNA, 15 nt, Human
cuucaguugucucug

SEQ ID NO: 1410825 - RNA, 14 nt, Human
cuucaguugucucu

SEQ ID NO: 1410826 - RNA, 13 nt, Human
cuucaguugucuc

SEQ ID NO: 1410827 - RNA, 19 nt, Human
cuucauaacaauuuuagga

SEQ ID NO: 1410828 - RNA, 15 nt, Human
cuucauaacaauuuu

SEQ ID NO: 1410829 - RNA, 12 nt, Human
cuucacugucac

SEQ ID NO: 1410830 - RNA, 19 nt, Human
cuucacucuucaaaugccu

SEQ ID NO: 1410831 - RNA, 15 nt, Human
cuucacuguaaaaua

SEQ ID NO: 1410832 - RNA, 21 nt, Human
cuuccaguuugcuuugcccuu

SEQ ID NO: 1410833 - RNA, 17 nt, Human
cuuccaguuugcuuugc

SEQ ID NO: 1410834 - RNA, 14 nt, Human
cuuccaguuugcuu

SEQ ID NO: 1410835 - RNA, 12 nt, Human
cuuaugcucuua

SEQ ID NO: 1410836 - RNA, 18 nt, Human
cuuaugcgguuaauuuug

SEQ ID NO: 1410837 - RNA, 17 nt, Human
cuuaugcgguuaauuuu

SEQ ID NO: 1410838 - RNA, 16 nt, Human
cuuaugcgguuaauuu

SEQ ID NO: 1410839 - RNA, 15 nt, Human
cuuaugcugauuuau

SEQ ID NO: 1410840 - RNA, 22 nt, Human
cuuaugcucuuaauugccaccu

SEQ ID NO: 1410841 - RNA, 19 nt, Human
cuuaugcucuuaauugcca

SEQ ID NO: 1410842 - RNA, 15 nt, Human
cuuaugcucuuaauu

SEQ ID NO: 1410843 - RNA, 18 nt, Human
cuuaugcuguacccaguu

SEQ ID NO: 1410844 - RNA, 14 nt, Human
cuuaugcuuaaauu

SEQ ID NO: 1410845 - RNA, 14 nt, Human
cuuauucccuuccu

SEQ ID NO: 1410846 - RNA, 19 nt, Human
cuuauuccaugacugcuug

SEQ ID NO: 1410847 - RNA, 18 nt, Human
cuuauuccaugacugcuu

SEQ ID NO: 1410848 - RNA, 17 nt, Human
cuuauuccaugacugcu

SEQ ID NO: 1410849 - RNA, 14 nt, Human
cuuauuccaugacu

SEQ ID NO: 1410850 - RNA, 19 nt, Human
cuuauucauuuucucuaau

SEQ ID NO: 1410851 - RNA, 15 nt, Human
cuuauucccuuccug

SEQ ID NO: 1410852 - RNA, 21 nt, Human
cuuauuagagugucuuuccac

SEQ ID NO: 1410853 - RNA, 20 nt, Human
cuuauuagagugucuuucca

SEQ ID NO: 1410854 - RNA, 14 nt, Human
cuuauuauuuuuga

SEQ ID NO: 1410855 - RNA, 18 nt, Human
cuuauucauuuucucuaa

SEQ ID NO: 1410856 - RNA, 17 nt, Human
cuuauucauuuucucua

SEQ ID NO: 1410857 - RNA, 16 nt, Human
cuuauucauuuucucu

SEQ ID NO: 1410858 - RNA, 14 nt, Human
cuuauucauuuucu

SEQ ID NO: 1410859 - RNA, 16 nt, Human
cuuauuauuuuugaga

SEQ ID NO: 1410860 - RNA, 20 nt, Human
cuuauuguagcauccuggaa

SEQ ID NO: 1410861 - RNA, 18 nt, Human
cuuauuggaacucugcuu

SEQ ID NO: 1410862 - RNA, 17 nt, Human
cuuauuggaacucugcu

SEQ ID NO: 1410863 - RNA, 15 nt, Human
cuuauuggaacucug

SEQ ID NO: 1410864 - RNA, 23 nt, Human
cuuauuguagcauccuggaauau

SEQ ID NO: 1410865 - RNA, 18 nt, Human
cugggacguggcucagcc

SEQ ID NO: 1410866 - RNA, 17 nt, Human
cugggacguggcucagc

SEQ ID NO: 1410867 - RNA, 16 nt, Human
cugggacguggcucag

SEQ ID NO: 1410868 - RNA, 15 nt, Human
cugggacguggcuca

SEQ ID NO: 1410869 - RNA, 24 nt, Human
cugggaccgcuacaccacucuggc

SEQ ID NO: 1410870 - RNA, 23 nt, Human
cugggaccgcuacaccacucugg

SEQ ID NO: 1410871 - RNA, 22 nt, Human
cugggaccgcuacaccacucug

SEQ ID NO: 1410872 - RNA, 20 nt, Human
cugggaccgcuacaccacuc

SEQ ID NO: 1410873 - RNA, 17 nt, Human
cugggaccgcuacacca

SEQ ID NO: 1410874 - RNA, 16 nt, Human
cugggaccgcuacacc

SEQ ID NO: 1410875 - RNA, 18 nt, Human
cuggcaggcaggcuccca

SEQ ID NO: 1410876 - RNA, 20 nt, Human
cuggcccccucccuggauga

SEQ ID NO: 1410877 - RNA, 24 nt, Human
cuggcaggcaggcucccagggaca

SEQ ID NO: 1410878 - RNA, 21 nt, Human
cuggcagcucuggacagcccc

SEQ ID NO: 1410879 - RNA, 20 nt, Human
cuggcagcucuggacagccc

SEQ ID NO: 1410880 - RNA, 18 nt, Human
cuggcagcucuggacagc

SEQ ID NO: 1410881 - RNA, 17 nt, Human
cuggcagcucuggacag

SEQ ID NO: 1410882 - RNA, 12 nt, Human
cuggcagcucug

SEQ ID NO: 1410883 - RNA, 15 nt, Human
cuggagacuuagggc

SEQ ID NO: 1410884 - RNA, 23 nt, Human
cuggagacugugugugcccucug

SEQ ID NO: 1410885 - RNA, 22 nt, Human
cuggagacugugugugcccucu

SEQ ID NO: 1410886 - RNA, 20 nt, Human
cuggagacugugugugcccu

SEQ ID NO: 1410887 - RNA, 22 nt, Human
cuggagaccaccagggcaucuc

SEQ ID NO: 1410888 - RNA, 19 nt, Human
cuggagaccaccagggcau

SEQ ID NO: 1410889 - RNA, 15 nt, Human
cuggagaccaccagg

SEQ ID NO: 1410890 - RNA, 19 nt, Human
cuggagaccccaccagccu

SEQ ID NO: 1410891 - RNA, 20 nt, Human
cuggagaccccaccagccuc

SEQ ID NO: 1410892 - RNA, 21 nt, Human
cuggagaccccaccagccuca

SEQ ID NO: 1410893 - RNA, 16 nt, Human
cuggacugugugcuca

SEQ ID NO: 1410894 - RNA, 20 nt, Human
cuggacugucauagaaauua

SEQ ID NO: 1410895 - RNA, 19 nt, Human
cuggacugucauagaaauu

SEQ ID NO: 1410896 - RNA, 21 nt, Human
cuggcuccagaugcagggcag

SEQ ID NO: 1410897 - RNA, 20 nt, Human
cuggcuccagaugcagggca

SEQ ID NO: 1410898 - RNA, 14 nt, Human
cuggcuccagaugc

SEQ ID NO: 1410899 - RNA, 18 nt, Human
cugggaccaggcaccagg

SEQ ID NO: 1410900 - RNA, 10 nt, Human
cugggacagg

SEQ ID NO: 1410901 - RNA, 21 nt, Human
cuggugaucacguggucacgg

SEQ ID NO: 1410902 - RNA, 24 nt, Human
cuggugagucaccacuucagggcu

SEQ ID NO: 1410903 - RNA, 14 nt, Human
cuggugagccaagc

SEQ ID NO: 1410904 - RNA, 23 nt, Human
cuggugcaaguugaggacuucuu

SEQ ID NO: 1410905 - RNA, 16 nt, Human
cuggugcacuggcccc

SEQ ID NO: 1410906 - RNA, 19 nt, Human
cuggugcacuggccccacc

SEQ ID NO: 1410907 - RNA, 13 nt, Human
cugggcagaccuu

SEQ ID NO: 1410908 - RNA, 17 nt, Human
cugggcagaaggccaag

SEQ ID NO: 1410909 - RNA, 14 nt, Human
cugggcagaaggcc

SEQ ID NO: 1410910 - RNA, 16 nt, Human
cugggcagaaggccaa

SEQ ID NO: 1410911 - RNA, 13 nt, Human
cugggcagaaggc

SEQ ID NO: 1410912 - RNA, 18 nt, Human
cuggggaagacaguggcc

SEQ ID NO: 1410913 - RNA, 17 nt, Human
cuggggaagacaguggc

SEQ ID NO: 1410914 - RNA, 16 nt, Human
cuggggaagacagugg

SEQ ID NO: 1410915 - RNA, 15 nt, Human
cuggggaagacagug

SEQ ID NO: 1410916 - RNA, 14 nt, Human
cuggggaagacagu

SEQ ID NO: 1410917 - RNA, 18 nt, Human
cuggggccaggcuggguc

SEQ ID NO: 1410918 - RNA, 17 nt, Human
cugguuugaagaauguu

SEQ ID NO: 1410919 - RNA, 24 nt, Human
cugucagauccaggagcuccagug

SEQ ID NO: 1410920 - RNA, 19 nt, Human
cugucagauccaggagcuc

SEQ ID NO: 1410921 - RNA, 18 nt, Human
cugucagauccaggagcu

SEQ ID NO: 1410922 - RNA, 13 nt, Human
cugucagauccag

SEQ ID NO: 1410923 - RNA, 22 nt, Human
cugucagcaugaauuuguaaug

SEQ ID NO: 1410924 - RNA, 16 nt, Human
cugucagcaugaauuu

SEQ ID NO: 1410925 - RNA, 15 nt, Human
cugucagcaugaauu

SEQ ID NO: 1410926 - RNA, 14 nt, Human
cugucagcaugaau

SEQ ID NO: 1410927 - RNA, 12 nt, Human
cugucagcauga

SEQ ID NO: 1410928 - RNA, 23 nt, Human
cugucagauccaggagcuccagu

SEQ ID NO: 1410929 - RNA, 22 nt, Human
cugucagauccaggagcuccag

SEQ ID NO: 1410930 - RNA, 21 nt, Human
cugucagauccaggagcucca

SEQ ID NO: 1410931 - RNA, 12 nt, Human
cugucagcugca

SEQ ID NO: 1410932 - RNA, 11 nt, Human
cuguccugccu

SEQ ID NO: 1410933 - RNA, 23 nt, Human
cuguccugccacccagccccagc

SEQ ID NO: 1410934 - RNA, 22 nt, Human
cuguccugccacccagccccag

SEQ ID NO: 1410935 - RNA, 17 nt, Human
cuguccugccacccagc

SEQ ID NO: 1410936 - RNA, 18 nt, Human
cuguccugccuguggcca

SEQ ID NO: 1410937 - RNA, 17 nt, Human
cuguccugccuguggcc

SEQ ID NO: 1410938 - RNA, 13 nt, Human
cuguccugccugu

SEQ ID NO: 1410939 - RNA, 20 nt, Human
cuguccugaaggccugaggu

SEQ ID NO: 1410940 - RNA, 18 nt, Human
cuguccugaccugucuca

SEQ ID NO: 1410941 - RNA, 19 nt, Human
cuguccugaaggccugagg

SEQ ID NO: 1410942 - RNA, 16 nt, Human
cuguccugaaggccug

SEQ ID NO: 1410943 - RNA, 15 nt, Human
cuguccugaaggccu

SEQ ID NO: 1410944 - RNA, 22 nt, Human
cuguccucuuucagcuccugac

SEQ ID NO: 1410945 - RNA, 20 nt, Human
cuguagggagggcggcaggg

SEQ ID NO: 1410946 - RNA, 22 nt, Human
cuguaggccucaggugaaacuc

SEQ ID NO: 1410947 - RNA, 13 nt, Human
cuguaggccucag

SEQ ID NO: 1410948 - RNA, 12 nt, Human
cuguaggccuca

SEQ ID NO: 1410949 - RNA, 18 nt, Human
cugucaccacccugcuca

SEQ ID NO: 1410950 - RNA, 16 nt, Human
cugucaccacccugcu

SEQ ID NO: 1410951 - RNA, 21 nt, Human
cuguagggagggcggcagggg

SEQ ID NO: 1410952 - RNA, 23 nt, Human
cugucaccacccugcucauccac

SEQ ID NO: 1410953 - RNA, 22 nt, Human
cugucacccagguuggagugca

SEQ ID NO: 1410954 - RNA, 15 nt, Human
cuguaaacacagaca

SEQ ID NO: 1410955 - RNA, 15 nt, Human
cuguaaaauguggga

SEQ ID NO: 1410956 - RNA, 10 nt, Human
cuguaaaauc

SEQ ID NO: 1410957 - RNA, 11 nt, Human
cuguaaaaucu

SEQ ID NO: 1410958 - RNA, 22 nt, Human
cuguaaaaucuuucuuucuuag

SEQ ID NO: 1410959 - RNA, 15 nt, Human
cuguaaaacagguua

SEQ ID NO: 1410960 - RNA, 13 nt, Human
cuguaaaacuaag

SEQ ID NO: 1410961 - RNA, 17 nt, Human
cuguaaaauaaaagguc

SEQ ID NO: 1410962 - RNA, 20 nt, Human
cuguaaaccucucgagggca

SEQ ID NO: 1410963 - RNA, 21 nt, Human
cuguaaaaugugggauuaugg

SEQ ID NO: 1410964 - RNA, 22 nt, Human
cuguacuugcucuugaugccug

SEQ ID NO: 1410965 - RNA, 23 nt, Human
cuguacuugcucuugaugccugg

SEQ ID NO: 1410966 - RNA, 23 nt, Human
cugucgauuagacuggacagcuu

SEQ ID NO: 1410967 - RNA, 20 nt, Human
cugucgauuagacuggacag

SEQ ID NO: 1410968 - RNA, 19 nt, Human
cugucgauuagacuggaca

SEQ ID NO: 1410969 - RNA, 17 nt, Human
cuguccuuuuuccucuc

SEQ ID NO: 1410970 - RNA, 18 nt, Human
cuguccuuuuuccucucc

SEQ ID NO: 1410971 - RNA, 20 nt, Human
cuguccuuuuuccucuccac

SEQ ID NO: 1410972 - RNA, 19 nt, Human
cuguccuuuuuccucucca

SEQ ID NO: 1410973 - RNA, 17 nt, Human
cugucgauuagacugga

SEQ ID NO: 1410974 - RNA, 15 nt, Human
cugucgauuagacug

SEQ ID NO: 1410975 - RNA, 14 nt, Human
cugugaaggacccu

SEQ ID NO: 1410976 - RNA, 18 nt, Human
cugagacuccagaccuga

SEQ ID NO: 1410977 - RNA, 16 nt, Human
cugagacuccagaccu

SEQ ID NO: 1410978 - RNA, 15 nt, Human
cugagacuccagacc

SEQ ID NO: 1410979 - RNA, 23 nt, Human
cugcauuauuggaauauaauugu

SEQ ID NO: 1410980 - RNA, 15 nt, Human
cugcauguuugugau

SEQ ID NO: 1410981 - RNA, 23 nt, Human
cugcauuggaacuggaggcaggg

SEQ ID NO: 1410982 - RNA, 22 nt, Human
cugcauuggaacuggaggcagg

SEQ ID NO: 1410983 - RNA, 21 nt, Human
cugcauuggaacuggaggcag

SEQ ID NO: 1410984 - RNA, 20 nt, Human
cugcauuuaaaagauacagu

SEQ ID NO: 1410985 - RNA, 22 nt, Human
cugcauuuaaaagauacaguua

SEQ ID NO: 1410986 - RNA, 22 nt, Human
cugcauucuucugagcacuguu

SEQ ID NO: 1410987 - RNA, 18 nt, Human
cugcauucuucugagcac

SEQ ID NO: 1410988 - RNA, 21 nt, Human
cugcauucugccucucuagga

SEQ ID NO: 1410989 - RNA, 13 nt, Human
cugcauuccgcag

SEQ ID NO: 1410990 - RNA, 12 nt, Human
cugcauuccgca

SEQ ID NO: 1410991 - RNA, 19 nt, Human
cugcauugaaaagagcuga

SEQ ID NO: 1410992 - RNA, 22 nt, Human
cugcauugaaaagagcugaagg

SEQ ID NO: 1410993 - RNA, 18 nt, Human
cugcauugaaaagagcug

SEQ ID NO: 1410994 - RNA, 17 nt, Human
cugcauugaaaagagcu

SEQ ID NO: 1410995 - RNA, 19 nt, Human
cugcauuggaacuggaggc

SEQ ID NO: 1410996 - RNA, 16 nt, Human
cugcauuggaacugga

SEQ ID NO: 1410997 - RNA, 15 nt, Human
cugcauuggaacugg

SEQ ID NO: 1410998 - RNA, 16 nt, Human
cugccaaccuaaaacu

SEQ ID NO: 1410999 - RNA, 22 nt, Human
cugccaaccuaaaacucuuucg

SEQ ID NO: 1411000 - RNA, 22 nt, Human
cugccaaaggaugugauauaua

SEQ ID NO: 1411001 - RNA, 19 nt, Human
cugccaaaggaugugauau

SEQ ID NO: 1411002 - RNA, 18 nt, Human
cugccaaaggaugugaua

SEQ ID NO: 1411003 - RNA, 16 nt, Human
cugccaaaggauguga

SEQ ID NO: 1411004 - RNA, 14 nt, Human
cugccaaaggaugu

SEQ ID NO: 1411005 - RNA, 20 nt, Human
cugccaagacugcuguggcc

SEQ ID NO: 1411006 - RNA, 21 nt, Human
cugccaagacugcuguggcca

SEQ ID NO: 1411007 - RNA, 17 nt, Human
cugccaagacugcugug

SEQ ID NO: 1411008 - RNA, 15 nt, Human
cugccccaggccuga

SEQ ID NO: 1411009 - RNA, 14 nt, Human
cugccccaggccug

SEQ ID NO: 1411010 - RNA, 13 nt, Human
cugccccaggccu

SEQ ID NO: 1411011 - RNA, 12 nt, Human
cugccccaggcc

SEQ ID NO: 1411012 - RNA, 21 nt, Human
cugcccuguaccccagcacuu

SEQ ID NO: 1411013 - RNA, 13 nt, Human
cugcccuguaccc

SEQ ID NO: 1411014 - RNA, 15 nt, Human
cugcuguuccagugg

SEQ ID NO: 1411015 - RNA, 23 nt, Human
cugcugugugcuuuuuuugugug

SEQ ID NO: 1411016 - RNA, 22 nt, Human
cugcugugugcuuuuuuugugu

SEQ ID NO: 1411017 - RNA, 21 nt, Human
cugcuguuugacaccucuuuu

SEQ ID NO: 1411018 - RNA, 20 nt, Human
cugcuuaacuucacauauug

SEQ ID NO: 1411019 - RNA, 15 nt, Human
cugcuuaacuucaca

SEQ ID NO: 1411020 - RNA, 17 nt, Human
cugcuuaacuucacaua

SEQ ID NO: 1411021 - RNA, 17 nt, Human
cugcuuuuuauggccug

SEQ ID NO: 1411022 - RNA, 13 nt, Human
cugcuuaacuuca

SEQ ID NO: 1411023 - RNA, 22 nt, Human
cugcuuuuuccaacucagaaau

SEQ ID NO: 1411024 - RNA, 18 nt, Human
cugcuuuuuauggccugu

SEQ ID NO: 1411025 - RNA, 21 nt, Human
cuggaaaucaggguuaguauu

SEQ ID NO: 1411026 - RNA, 20 nt, Human
cuggaacacuagacaagcca

SEQ ID NO: 1411027 - RNA, 21 nt, Human
cugcuguuccagugguaagcu

SEQ ID NO: 1411028 - RNA, 23 nt, Human
cuggaacacuagacaagccagaa

SEQ ID NO: 1411029 - RNA, 22 nt, Human
cuggaacacuagacaagccaga

SEQ ID NO: 1411030 - RNA, 21 nt, Human
cuggaacacuagacaagccag

SEQ ID NO: 1411031 - RNA, 15 nt, Human
cuggaaccaucagaa

SEQ ID NO: 1411032 - RNA, 13 nt, Human
cuggaacccagac

SEQ ID NO: 1411033 - RNA, 16 nt, Human
cuggaaccaucagaaa

SEQ ID NO: 1411034 - RNA, 23 nt, Human
cuggaaccucagccuggccagac

SEQ ID NO: 1411035 - RNA, 22 nt, Human
cuggaaccucagccuggccaga

SEQ ID NO: 1411036 - RNA, 20 nt, Human
cuggaaccucagccuggcca

SEQ ID NO: 1411037 - RNA, 18 nt, Human
cuggaaccucagccuggc

SEQ ID NO: 1411038 - RNA, 17 nt, Human
cuggaaccucagccugg

SEQ ID NO: 1411039 - RNA, 16 nt, Human
cuggaaccucagccug

SEQ ID NO: 1411040 - RNA, 15 nt, Human
cuggaaccucagccu

SEQ ID NO: 1411041 - RNA, 12 nt, Human
cuggaaccucag

SEQ ID NO: 1411042 - RNA, 22 nt, Human
cuggaacccagacucagacauu

SEQ ID NO: 1411043 - RNA, 19 nt, Human
cuggaacccagacucagac

SEQ ID NO: 1411044 - RNA, 18 nt, Human
cuggaacccagacucaga

SEQ ID NO: 1411045 - RNA, 16 nt, Human
cuggaacccagacuca

SEQ ID NO: 1411046 - RNA, 14 nt, Human
cuggaacccagacu

SEQ ID NO: 1411047 - RNA, 19 nt, Human
cuggaacuugaacugauuc

SEQ ID NO: 1411048 - RNA, 16 nt, Human
cuggaacuugaacuga

SEQ ID NO: 1411049 - RNA, 19 nt, Human
cuggaacugucucucauga

SEQ ID NO: 1411050 - RNA, 18 nt, Human
cuggaacugucucucaug

SEQ ID NO: 1411051 - RNA, 16 nt, Human
cuggaacugucucuca

SEQ ID NO: 1411052 - RNA, 18 nt, Human
cuggacugucauagaaau

SEQ ID NO: 1411053 - RNA, 13 nt, Human
cuggacugugugc

SEQ ID NO: 1411054 - RNA, 23 nt, Human
cugccuguggccaugacccugcc

SEQ ID NO: 1411055 - RNA, 23 nt, Human
cugccuguggcgccgucuccagg

SEQ ID NO: 1411056 - RNA, 22 nt, Human
cugccuguggcgccgucuccag

SEQ ID NO: 1411057 - RNA, 12 nt, Human
cugccuguggcg

SEQ ID NO: 1411058 - RNA, 21 nt, Human
cugccuguggccaugacccug

SEQ ID NO: 1411059 - RNA, 14 nt, Human
cugccuguggccau

SEQ ID NO: 1411060 - RNA, 20 nt, Human
cugccugguauauccaaaag

SEQ ID NO: 1411061 - RNA, 23 nt, Human
cugcuaauauuuuccuccugagu

SEQ ID NO: 1411062 - RNA, 24 nt, Human
cugcuaauauuuuccuccugagug

SEQ ID NO: 1411063 - RNA, 16 nt, Human
cugcuaauauuuuccu

SEQ ID NO: 1411064 - RNA, 15 nt, Human
cugcuaauauuuucc

SEQ ID NO: 1411065 - RNA, 22 nt, Human
cugcucagcucugggccauucu

SEQ ID NO: 1411066 - RNA, 16 nt, Human
cugcucagcucugggc

SEQ ID NO: 1411067 - RNA, 14 nt, Human
cugcucagcucugg

SEQ ID NO: 1411068 - RNA, 13 nt, Human
cugcucagcucug

SEQ ID NO: 1411069 - RNA, 21 nt, Human
cugcucagcccugcaccaugc

SEQ ID NO: 1411070 - RNA, 18 nt, Human
cugcucagcccugcacca

SEQ ID NO: 1411071 - RNA, 15 nt, Human
cugcucagcccugca

SEQ ID NO: 1411072 - RNA, 14 nt, Human
cugcucagcccugc

SEQ ID NO: 1411073 - RNA, 13 nt, Human
cugcucagacaga

SEQ ID NO: 1411074 - RNA, 20 nt, Human
cugcuacagcaauuucuaau

SEQ ID NO: 1411075 - RNA, 12 nt, Human
cugcuacagcaa

SEQ ID NO: 1411076 - RNA, 23 nt, Human
cugcuacaccuauuaucccagcu

SEQ ID NO: 1411077 - RNA, 20 nt, Human
cugcuacaccuauuauccca

SEQ ID NO: 1411078 - RNA, 15 nt, Human
cugcuacaauguccu

SEQ ID NO: 1411079 - RNA, 15 nt, Human
ccacacuucucagga

SEQ ID NO: 1411080 - RNA, 14 nt, Human
ccacacuucucagg

SEQ ID NO: 1411081 - RNA, 23 nt, Human
ccacacuucucaggacacaggcc

SEQ ID NO: 1411082 - RNA, 24 nt, Human
ccacacuucucaggacacaggccu

SEQ ID NO: 1411083 - RNA, 22 nt, Human
ccacacuucucaggacacaggc

SEQ ID NO: 1411084 - RNA, 21 nt, Human
ccacacuucucaggacacagg

SEQ ID NO: 1411085 - RNA, 18 nt, Human
ccacacuucucaggacac

SEQ ID NO: 1411086 - RNA, 17 nt, Human
ccacacuucucaggaca

SEQ ID NO: 1411087 - RNA, 14 nt, Human
ccaccagcuguguc

SEQ ID NO: 1411088 - RNA, 12 nt, Human
ccaccagaugcu

SEQ ID NO: 1411089 - RNA, 13 nt, Human
ccaccagaugcug

SEQ ID NO: 1411090 - RNA, 19 nt, Human
ccaccaggccaccucccca

SEQ ID NO: 1411091 - RNA, 13 nt, Human
ccaccaggccacc

SEQ ID NO: 1411092 - RNA, 15 nt, Human
ccaccagcugugucc

SEQ ID NO: 1411093 - RNA, 16 nt, Human
ccaccagcugugucca

SEQ ID NO: 1411094 - RNA, 12 nt, Human
ccacccugggcc

SEQ ID NO: 1411095 - RNA, 22 nt, Human
ccacccuggccgaguccaagcu

SEQ ID NO: 1411096 - RNA, 21 nt, Human
ccacccuggccgaguccaagc

SEQ ID NO: 1411097 - RNA, 20 nt, Human
ccacccuggccgaguccaag

SEQ ID NO: 1411098 - RNA, 21 nt, Human
ccaccaggccaccuccccagc

SEQ ID NO: 1411099 - RNA, 20 nt, Human
ccaccaggcugcucagggcu

SEQ ID NO: 1411100 - RNA, 19 nt, Human
ccaccguugucucaugcca

SEQ ID NO: 1411101 - RNA, 15 nt, Human
ccaccguugucucau

SEQ ID NO: 1411102 - RNA, 13 nt, Human
ccacccugggccc

SEQ ID NO: 1411103 - RNA, 18 nt, Human
ccaagcuguuuucuucua

SEQ ID NO: 1411104 - RNA, 17 nt, Human
ccaagcuguuuucuucu

SEQ ID NO: 1411105 - RNA, 14 nt, Human
ccaagcuguuuucu

SEQ ID NO: 1411106 - RNA, 23 nt, Human
ccaagcuuguccaacccgaggcc

SEQ ID NO: 1411107 - RNA, 20 nt, Human
ccaauuaguuuccuuuuuaa

SEQ ID NO: 1411108 - RNA, 16 nt, Human
ccaauuaguuuccuuu

SEQ ID NO: 1411109 - RNA, 15 nt, Human
ccaauuaguuuccuu

SEQ ID NO: 1411110 - RNA, 14 nt, Human
ccaauuaguuuccu

SEQ ID NO: 1411111 - RNA, 23 nt, Human
ccaauguuucaagaggagccccc

SEQ ID NO: 1411112 - RNA, 19 nt, Human
ccaaaaccgccagcucugu

SEQ ID NO: 1411113 - RNA, 18 nt, Human
ccaaaaccgccagcucug

SEQ ID NO: 1411114 - RNA, 17 nt, Human
ccaaaaccgccagcucu

SEQ ID NO: 1411115 - RNA, 16 nt, Human
ccaaaaccgccagcuc

SEQ ID NO: 1411116 - RNA, 15 nt, Human
ccaaaaccgccagcu

SEQ ID NO: 1411117 - RNA, 21 nt, Human
ccaaaaccgccagcucuguuc

SEQ ID NO: 1411118 - RNA, 22 nt, Human
ccaacuacuaauagaauaaagg

SEQ ID NO: 1411119 - RNA, 14 nt, Human
ccaacuacuaauag

SEQ ID NO: 1411120 - RNA, 20 nt, Human
ccaacuaaugccuuacucuu

SEQ ID NO: 1411121 - RNA, 19 nt, Human
ccaacuaaugccuuacucu

SEQ ID NO: 1411122 - RNA, 19 nt, Human
ccaaauucaguuucauaaa

SEQ ID NO: 1411123 - RNA, 18 nt, Human
ccaaauucaguuucauaa

SEQ ID NO: 1411124 - RNA, 15 nt, Human
ccaaauucaguuuca

SEQ ID NO: 1411125 - RNA, 13 nt, Human
ccaaauucaguuu

SEQ ID NO: 1411126 - RNA, 14 nt, Human
ccaacuaugauuau

SEQ ID NO: 1411127 - RNA, 17 nt, Human
ccaacuagccccugggg

SEQ ID NO: 1411128 - RNA, 15 nt, Human
ccaacuagccccugg

SEQ ID NO: 1411129 - RNA, 22 nt, Human
ccaacuacuguguuaugcaaaa

SEQ ID NO: 1411130 - RNA, 17 nt, Human
ccaacuuggcugcagga

SEQ ID NO: 1411131 - RNA, 17 nt, Human
ccaaauuaaaaaagaua

SEQ ID NO: 1411132 - RNA, 15 nt, Human
ccaaauuaaaaaaga

SEQ ID NO: 1411133 - RNA, 13 nt, Human
ccaaauuaaaaaa

SEQ ID NO: 1411134 - RNA, 18 nt, Human
ccaaauuaaaaaagauaa

SEQ ID NO: 1411135 - RNA, 12 nt, Human
ccaaauuaagag

SEQ ID NO: 1411136 - RNA, 14 nt, Human
ccaaaucuggaagc

SEQ ID NO: 1411137 - RNA, 21 nt, Human
ccaaauccuuagaucuggcau

SEQ ID NO: 1411138 - RNA, 20 nt, Human
ccaaauccuuagaucuggca

SEQ ID NO: 1411139 - RNA, 15 nt, Human
ccaaauccccuaagc

SEQ ID NO: 1411140 - RNA, 18 nt, Human
ccaaagugcugggauuaa

SEQ ID NO: 1411141 - RNA, 17 nt, Human
cauuaugugguuuuaga

SEQ ID NO: 1411142 - RNA, 21 nt, Human
cauuaugugguuuuagauuuu

SEQ ID NO: 1411143 - RNA, 19 nt, Human
cauuaugcaauuuuuauau

SEQ ID NO: 1411144 - RNA, 17 nt, Human
cauuagggaugccuccu

SEQ ID NO: 1411145 - RNA, 18 nt, Human
cauuaucuagauacugua

SEQ ID NO: 1411146 - RNA, 14 nt, Human
cauucuccacagca

SEQ ID NO: 1411147 - RNA, 22 nt, Human
cauucucauuggaaauuuagca

SEQ ID NO: 1411148 - RNA, 17 nt, Human
cauucucauuggaaauu

SEQ ID NO: 1411149 - RNA, 15 nt, Human
cauucucauuggaaa

SEQ ID NO: 1411150 - RNA, 16 nt, Human
cauucuccuuguguua

SEQ ID NO: 1411151 - RNA, 20 nt, Human
cauucuccuuguguuacuaa

SEQ ID NO: 1411152 - RNA, 20 nt, Human
cauuagggaugccuccuuuc

SEQ ID NO: 1411153 - RNA, 12 nt, Human
cauuaucuagau

SEQ ID NO: 1411154 - RNA, 16 nt, Human
cauuaucuagauacug

SEQ ID NO: 1411155 - RNA, 17 nt, Human
cauuaucuagauacugu

SEQ ID NO: 1411156 - RNA, 19 nt, Human
cauuaggaaaaguugcuau

SEQ ID NO: 1411157 - RNA, 23 nt, Human
cauuagccugaguagaaaggccu

SEQ ID NO: 1411158 - RNA, 18 nt, Human
cauuagccugaguagaaa

SEQ ID NO: 1411159 - RNA, 19 nt, Human
cauuagccugaguagaaag

SEQ ID NO: 1411160 - RNA, 9 nt, Human
cauuagccu

SEQ ID NO: 1411161 - RNA, 14 nt, Human
cauuagccugagua

SEQ ID NO: 1411162 - RNA, 17 nt, Human
cauuagccugaguagaa

SEQ ID NO: 1411163 - RNA, 23 nt, Human
cauguuauuuguaauagauguuu

SEQ ID NO: 1411164 - RNA, 14 nt, Human
cauguuauuuguaa

SEQ ID NO: 1411165 - RNA, 16 nt, Human
cauggcuaacuggcga

SEQ ID NO: 1411166 - RNA, 14 nt, Human
cauggcuaacuggc

SEQ ID NO: 1411167 - RNA, 20 nt, Human
cauggccugcaaacugggaa

SEQ ID NO: 1411168 - RNA, 19 nt, Human
cauggccugcaaacuggga

SEQ ID NO: 1411169 - RNA, 16 nt, Human
cauggccugcaaacug

SEQ ID NO: 1411170 - RNA, 16 nt, Human
caugcugcuggggaag

SEQ ID NO: 1411171 - RNA, 22 nt, Human
cauggcuggagcuagaauuuga

SEQ ID NO: 1411172 - RNA, 23 nt, Human
cauugcguuugaccuuuuaugua

SEQ ID NO: 1411173 - RNA, 21 nt, Human
cauugccuuaacuggagcccc

SEQ ID NO: 1411174 - RNA, 17 nt, Human
cauugccuuaacuggag

SEQ ID NO: 1411175 - RNA, 15 nt, Human
cauuucaacuguuug

SEQ ID NO: 1411176 - RNA, 14 nt, Human
cauuuauuuugaca

SEQ ID NO: 1411177 - RNA, 21 nt, Human
cauuucagaaguuaguuugua

SEQ ID NO: 1411178 - RNA, 13 nt, Human
cauuucagaaguu

SEQ ID NO: 1411179 - RNA, 19 nt, Human
cauuucacuugucaggagu

SEQ ID NO: 1411180 - RNA, 14 nt, Human
cauuucauuuccua

SEQ ID NO: 1411181 - RNA, 21 nt, Human
cauuggcaccuaauccaggca

SEQ ID NO: 1411182 - RNA, 20 nt, Human
cauuggcaccuaauccaggc

SEQ ID NO: 1411183 - RNA, 14 nt, Human
cauugcugugaaca

SEQ ID NO: 1411184 - RNA, 19 nt, Human
cauuggcuauuuaaaacuu

SEQ ID NO: 1411185 - RNA, 13 nt, Human
cauuggcuuuauc

SEQ ID NO: 1411186 - RNA, 22 nt, Human
cauuggcuuuauccucuuuaga

SEQ ID NO: 1411187 - RNA, 18 nt, Human
cauuggcuauuuaaaacu

SEQ ID NO: 1411188 - RNA, 14 nt, Human
cauuggcuauuuaa

SEQ ID NO: 1411189 - RNA, 21 nt, Human
cauuugguucauuaauucuau

SEQ ID NO: 1411190 - RNA, 20 nt, Human
cauuugguucauuaauucua

SEQ ID NO: 1411191 - RNA, 16 nt, Human
cauuugguucauuaau

SEQ ID NO: 1411192 - RNA, 12 nt, Human
cauuuccaagca

SEQ ID NO: 1411193 - RNA, 22 nt, Human
cauuuggugguuucagaaaugu

SEQ ID NO: 1411194 - RNA, 23 nt, Human
cauuuggugguuucagaaaugug

SEQ ID NO: 1411195 - RNA, 16 nt, Human
ccaaaaauaaauauau

SEQ ID NO: 1411196 - RNA, 13 nt, Human
ccaaaaauagcua

SEQ ID NO: 1411197 - RNA, 12 nt, Human
ccaaaaauagcu

SEQ ID NO: 1411198 - RNA, 16 nt, Human
ccaaaaagugaaauaa

SEQ ID NO: 1411199 - RNA, 14 nt, Human
ccaaaacaauguuu

SEQ ID NO: 1411200 - RNA, 20 nt, Human
cauuuuuguacuaacuagca

SEQ ID NO: 1411201 - RNA, 15 nt, Human
caguuuaaaagcacg

SEQ ID NO: 1411202 - RNA, 19 nt, Human
caguuguucuuuuuagaaa

SEQ ID NO: 1411203 - RNA, 15 nt, Human
caguuguucuuuuua

SEQ ID NO: 1411204 - RNA, 17 nt, Human
caguuugcaaaaaaugu

SEQ ID NO: 1411205 - RNA, 15 nt, Human
caguuugcaaaaaau

SEQ ID NO: 1411206 - RNA, 11 nt, Human
caguuugcaaa

SEQ ID NO: 1411207 - RNA, 17 nt, Human
caguuuauauuuaacuc

SEQ ID NO: 1411208 - RNA, 13 nt, Human
caguuuaucauuc

SEQ ID NO: 1411209 - RNA, 14 nt, Human
caguuuauauuuaa

SEQ ID NO: 1411210 - RNA, 19 nt, Human
caguuuauauuuaacucuc

SEQ ID NO: 1411211 - RNA, 18 nt, Human
caguuuaccaguugccuu

SEQ ID NO: 1411212 - RNA, 23 nt, Human
caguuuaccaguugccuuuuauc

SEQ ID NO: 1411213 - RNA, 23 nt, Human
caguuuacagacgcugcugucac

SEQ ID NO: 1411214 - RNA, 21 nt, Human
caguuuaaugaagaucuaaau

SEQ ID NO: 1411215 - RNA, 19 nt, Human
caguuuaaugaagaucuaa

SEQ ID NO: 1411216 - RNA, 18 nt, Human
caguuuaaugaagaucua

SEQ ID NO: 1411217 - RNA, 13 nt, Human
caguuuaaugaag

SEQ ID NO: 1411218 - RNA, 14 nt, Human
caguuuaaaagcac

SEQ ID NO: 1411219 - RNA, 16 nt, Human
caguuugcuuugcccu

SEQ ID NO: 1411220 - RNA, 14 nt, Human
caguuugcuuugcc

SEQ ID NO: 1411221 - RNA, 18 nt, Human
caguuuguagugccacug

SEQ ID NO: 1411222 - RNA, 20 nt, Human
caguuuggguaaaauacuuu

SEQ ID NO: 1411223 - RNA, 22 nt, Human
caguuuggguaaaauacuuuua

SEQ ID NO: 1411224 - RNA, 22 nt, Human
cauaaugcauucuucucuguug

SEQ ID NO: 1411225 - RNA, 21 nt, Human
cauaaugcauucuucucuguu

SEQ ID NO: 1411226 - RNA, 20 nt, Human
cauaaugcauucuucucugu

SEQ ID NO: 1411227 - RNA, 22 nt, Human
cauaaucuucugccuucucaug

SEQ ID NO: 1411228 - RNA, 21 nt, Human
cauaaucuucugccuucucau

SEQ ID NO: 1411229 - RNA, 15 nt, Human
cauaaucuucugccu

SEQ ID NO: 1411230 - RNA, 13 nt, Human
cauaaucuucugc

SEQ ID NO: 1411231 - RNA, 14 nt, Human
cauaaugcgugcau

SEQ ID NO: 1411232 - RNA, 17 nt, Human
cauaaugcgugcauacc

SEQ ID NO: 1411233 - RNA, 23 nt, Human
caguuugugugucuuaauuauua

SEQ ID NO: 1411234 - RNA, 21 nt, Human
caguuugugugucuuaauuau

SEQ ID NO: 1411235 - RNA, 16 nt, Human
caguuugugugucuua

SEQ ID NO: 1411236 - RNA, 15 nt, Human
caguuugugugucuu

SEQ ID NO: 1411237 - RNA, 21 nt, Human
caguuuguuaguaugaggcau

SEQ ID NO: 1411238 - RNA, 19 nt, Human
cauaggaguuuggaggaag

SEQ ID NO: 1411239 - RNA, 20 nt, Human
cauaggaguuuggaggaagu

SEQ ID NO: 1411240 - RNA, 17 nt, Human
cauaggaguuuggagga

SEQ ID NO: 1411241 - RNA, 16 nt, Human
cauaggaguuuggagg

SEQ ID NO: 1411242 - RNA, 18 nt, Human
cauaggaccuuuccacca

SEQ ID NO: 1411243 - RNA, 16 nt, Human
cauaggaccuuuccac

SEQ ID NO: 1411244 - RNA, 18 nt, Human
cauagcgggggccuaaaa

SEQ ID NO: 1411245 - RNA, 17 nt, Human
cauauuaccacagacau

SEQ ID NO: 1411246 - RNA, 20 nt, Human
cauauuaccacagacauacu

SEQ ID NO: 1411247 - RNA, 21 nt, Human
cauauuaccacagacauacua

SEQ ID NO: 1411248 - RNA, 22 nt, Human
cauauuaccacagacauacuaa

SEQ ID NO: 1411249 - RNA, 11 nt, Human
cauagcccagu

SEQ ID NO: 1411250 - RNA, 15 nt, Human
cauagccaggaaacu

SEQ ID NO: 1411251 - RNA, 15 nt, Human
cauagcccaguagac

SEQ ID NO: 1411252 - RNA, 21 nt, Human
cauaaugcgugcauaccacuu

SEQ ID NO: 1411253 - RNA, 14 nt, Human
caugcugcugggga

SEQ ID NO: 1411254 - RNA, 22 nt, Human
caugcugccuuauucagggaag

SEQ ID NO: 1411255 - RNA, 14 nt, Human
caugauucuauuua

SEQ ID NO: 1411256 - RNA, 22 nt, Human
caugauuccuuuaacaacaugu

SEQ ID NO: 1411257 - RNA, 16 nt, Human
caugauuccuuuaaca

SEQ ID NO: 1411258 - RNA, 13 nt, Human
caugauuccuuua

SEQ ID NO: 1411259 - RNA, 15 nt, Human
caugacccugccucu

SEQ ID NO: 1411260 - RNA, 18 nt, Human
caugauucauuuuaacau

SEQ ID NO: 1411261 - RNA, 17 nt, Human
caugcaaggucauuuuu

SEQ ID NO: 1411262 - RNA, 18 nt, Human
caugcaaggucauuuuuu

SEQ ID NO: 1411263 - RNA, 19 nt, Human
caugcugaggccugggccg

SEQ ID NO: 1411264 - RNA, 18 nt, Human
caugcugaggccugggcc

SEQ ID NO: 1411265 - RNA, 17 nt, Human
caugcugaggccugggc

SEQ ID NO: 1411266 - RNA, 16 nt, Human
caugcugaggccuggg

SEQ ID NO: 1411267 - RNA, 16 nt, Human
caugcaauacauacca

SEQ ID NO: 1411268 - RNA, 17 nt, Human
caugauuccuuuaacaa

SEQ ID NO: 1411269 - RNA, 21 nt, Human
caugauugguuucuaggcagu

SEQ ID NO: 1411270 - RNA, 22 nt, Human
caugcaaggucauuuuuuuuaa

SEQ ID NO: 1411271 - RNA, 18 nt, Human
caugaauuuguaaugucu

SEQ ID NO: 1411272 - RNA, 12 nt, Human
caugaauuugua

SEQ ID NO: 1411273 - RNA, 22 nt, Human
caugaauuuguaaugucuugag

SEQ ID NO: 1411274 - RNA, 19 nt, Human
caugaauuuguaaugucuu

SEQ ID NO: 1411275 - RNA, 16 nt, Human
caugaauuugugaagg

SEQ ID NO: 1411276 - RNA, 20 nt, Human
caugaauuauuacaguguuu

SEQ ID NO: 1411277 - RNA, 18 nt, Human
caugaauuauuacagugu

SEQ ID NO: 1411278 - RNA, 17 nt, Human
caugaauuauuacagug

SEQ ID NO: 1411279 - RNA, 14 nt, Human
caugaauuugugaa

SEQ ID NO: 1411280 - RNA, 16 nt, Human
caugaauuaguuuuau

SEQ ID NO: 1411281 - RNA, 14 nt, Human
caugauucauuuua

SEQ ID NO: 1411282 - RNA, 13 nt, Human
caugauucauuuu

SEQ ID NO: 1411283 - RNA, 21 nt, Human
caugauucaugccaauuagca

SEQ ID NO: 1411284 - RNA, 16 nt, Human
caugauucaugccaau

SEQ ID NO: 1411285 - RNA, 19 nt, Human
caugaccuaguuuuccaug

SEQ ID NO: 1411286 - RNA, 18 nt, Human
caugaccuaguuuuccau

SEQ ID NO: 1411287 - RNA, 14 nt, Human
caugacccugccuc

SEQ ID NO: 1411288 - RNA, 14 nt, Human
caugaccaguaaag

SEQ ID NO: 1411289 - RNA, 23 nt, Human
caucugucugccaaccuaaaacu

SEQ ID NO: 1411290 - RNA, 20 nt, Human
caucugucccuccgggaccu

SEQ ID NO: 1411291 - RNA, 18 nt, Human
caucugucccuccgggac

SEQ ID NO: 1411292 - RNA, 17 nt, Human
caucugucccuccggga

SEQ ID NO: 1411293 - RNA, 16 nt, Human
caucugucccuccggg

SEQ ID NO: 1411294 - RNA, 21 nt, Human
caucgaaucuacuaauuccac

SEQ ID NO: 1411295 - RNA, 13 nt, Human
cauccuugucuua

SEQ ID NO: 1411296 - RNA, 22 nt, Human
cauccuugucuuauucccuucc

SEQ ID NO: 1411297 - RNA, 14 nt, Human
cauccuugagucaa

SEQ ID NO: 1411298 - RNA, 12 nt, Human
caucccaugcug

SEQ ID NO: 1411299 - RNA, 19 nt, Human
caucagacugugaacccca

SEQ ID NO: 1411300 - RNA, 11 nt, Human
caucagcaaac

SEQ ID NO: 1411301 - RNA, 14 nt, Human
caucaggacccugg

SEQ ID NO: 1411302 - RNA, 15 nt, Human
caucaggacccugga

SEQ ID NO: 1411303 - RNA, 18 nt, Human
caucaggacccuggaccu

SEQ ID NO: 1411304 - RNA, 19 nt, Human
caucagcacgauuucuguu

SEQ ID NO: 1411305 - RNA, 17 nt, Human
caucagcacgauuucug

SEQ ID NO: 1411306 - RNA, 18 nt, Human
caucagcacgauuucugu

SEQ ID NO: 1411307 - RNA, 14 nt, Human
caucagacagaugg

SEQ ID NO: 1411308 - RNA, 14 nt, Human
cagagccuggggcu

SEQ ID NO: 1411309 - RNA, 13 nt, Human
cagagccuggggc

SEQ ID NO: 1411310 - RNA, 12 nt, Human
cagagccugggg

SEQ ID NO: 1411311 - RNA, 16 nt, Human
cagagccuggggcucu

SEQ ID NO: 1411312 - RNA, 22 nt, Human
cagagcgugagcugagcaggcc

SEQ ID NO: 1411313 - RNA, 19 nt, Human
cagagcgugagcugagcag

SEQ ID NO: 1411314 - RNA, 15 nt, Human
cagagcgugagcuga

SEQ ID NO: 1411315 - RNA, 20 nt, Human
cagagcuacccgcagaguuc

SEQ ID NO: 1411316 - RNA, 11 nt, Human
cagagccuggg

SEQ ID NO: 1411317 - RNA, 20 nt, Human
cagagaggacuguagggagg

SEQ ID NO: 1411318 - RNA, 18 nt, Human
cagagaggacuguaggga

SEQ ID NO: 1411319 - RNA, 20 nt, Human
cagagaggccuuuuggaaug

SEQ ID NO: 1411320 - RNA, 17 nt, Human
cagagagcagugcuuuu

SEQ ID NO: 1411321 - RNA, 14 nt, Human
cagagagcagugcu

SEQ ID NO: 1411322 - RNA, 11 nt, Human
cagagagcagu

SEQ ID NO: 1411323 - RNA, 13 nt, Human
cagaggucuccca

SEQ ID NO: 1411324 - RNA, 18 nt, Human
cagagcuggcucugagcg

SEQ ID NO: 1411325 - RNA, 17 nt, Human
cagagcuggcucugagc

SEQ ID NO: 1411326 - RNA, 13 nt, Human
cagagcuggcucu

SEQ ID NO: 1411327 - RNA, 17 nt, Human
cagagcuggagaugagg

SEQ ID NO: 1411328 - RNA, 21 nt, Human
cagagcuggagaugaggccag

SEQ ID NO: 1411329 - RNA, 22 nt, Human
cagagcuggagaugaggccaga

SEQ ID NO: 1411330 - RNA, 23 nt, Human
cagagcuggagaugaggccagac

SEQ ID NO: 1411331 - RNA, 17 nt, Human
cagauccagccuggggu

SEQ ID NO: 1411332 - RNA, 15 nt, Human
cagauccagccuggg

SEQ ID NO: 1411333 - RNA, 14 nt, Human
cagauccagccugg

SEQ ID NO: 1411334 - RNA, 13 nt, Human
cagauccagccug

SEQ ID NO: 1411335 - RNA, 18 nt, Human
cagauccagccugggguc

SEQ ID NO: 1411336 - RNA, 12 nt, Human
cagauccagccu

SEQ ID NO: 1411337 - RNA, 22 nt, Human
cagaucauugugaaauuauuca

SEQ ID NO: 1411338 - RNA, 22 nt, Human
cagauacggacagagaccaaga

SEQ ID NO: 1411339 - RNA, 21 nt, Human
cagauacggacagagaccaag

SEQ ID NO: 1411340 - RNA, 16 nt, Human
cagaucauugugaaau

SEQ ID NO: 1411341 - RNA, 13 nt, Human
cagccagcaccug

SEQ ID NO: 1411342 - RNA, 12 nt, Human
cagccagcaccu

SEQ ID NO: 1411343 - RNA, 16 nt, Human
cagccagcaccuggca

SEQ ID NO: 1411344 - RNA, 14 nt, Human
cagccagcaccugg

SEQ ID NO: 1411345 - RNA, 23 nt, Human
cagcacugccugcucccauccug

SEQ ID NO: 1411346 - RNA, 19 nt, Human
cagcacugcuugaggaaaa

SEQ ID NO: 1411347 - RNA, 18 nt, Human
cagcacugcuugaggaaa

SEQ ID NO: 1411348 - RNA, 16 nt, Human
cagcacugcuugagga

SEQ ID NO: 1411349 - RNA, 18 nt, Human
cagcacugccugcuccca

SEQ ID NO: 1411350 - RNA, 17 nt, Human
cagcacugccugcuccc

SEQ ID NO: 1411351 - RNA, 15 nt, Human
cagcacugccugcuc

SEQ ID NO: 1411352 - RNA, 14 nt, Human
cagcacugccugcu

SEQ ID NO: 1411353 - RNA, 22 nt, Human
cagcacucgcuagcaguggcag

SEQ ID NO: 1411354 - RNA, 19 nt, Human
cagcaccaaaucaaaaucu

SEQ ID NO: 1411355 - RNA, 15 nt, Human
cagcaccaaaucaaa

SEQ ID NO: 1411356 - RNA, 11 nt, Human
cagcaccaaau

SEQ ID NO: 1411357 - RNA, 21 nt, Human
cagcacagcuugaccugaggc

SEQ ID NO: 1411358 - RNA, 20 nt, Human
cagcacagcuugaccugagg

SEQ ID NO: 1411359 - RNA, 17 nt, Human
cagcacagcuugaccug

SEQ ID NO: 1411360 - RNA, 16 nt, Human
cagcacagcuugaccu

SEQ ID NO: 1411361 - RNA, 15 nt, Human
cagcacagcuugacc

SEQ ID NO: 1411362 - RNA, 13 nt, Human
cagcacagcuuga

SEQ ID NO: 1411363 - RNA, 17 nt, Human
cagcacagcuuagauuu

SEQ ID NO: 1411364 - RNA, 23 nt, Human
cagcaccaaaucaaaaucucucc

SEQ ID NO: 1411365 - RNA, 19 nt, Human
cagcacaucucaacaggcc

SEQ ID NO: 1411366 - RNA, 16 nt, Human
cagcacaggagggcgg

SEQ ID NO: 1411367 - RNA, 22 nt, Human
cagcacagcuugaccugaggcu

SEQ ID NO: 1411368 - RNA, 22 nt, Human
cagcacagcuuagauuucauag

SEQ ID NO: 1411369 - RNA, 16 nt, Human
cagcacaucucaacag

SEQ ID NO: 1411370 - RNA, 18 nt, Human
cagauuuggcuugacaaa

SEQ ID NO: 1411371 - RNA, 13 nt, Human
cagauuuggaaag

SEQ ID NO: 1411372 - RNA, 20 nt, Human
cagauuugcuaauuuauccu

SEQ ID NO: 1411373 - RNA, 17 nt, Human
cagccgcgcaucagacu

SEQ ID NO: 1411374 - RNA, 14 nt, Human
cagccucuccccag

SEQ ID NO: 1411375 - RNA, 24 nt, Human
cagccucuccacucaugugacucu

SEQ ID NO: 1411376 - RNA, 16 nt, Human
cagcccugucuuccua

SEQ ID NO: 1411377 - RNA, 18 nt, Human
cagcccugucagcaugaa

SEQ ID NO: 1411378 - RNA, 21 nt, Human
cagcccugucagcaugaauuu

SEQ ID NO: 1411379 - RNA, 17 nt, Human
cagcccugucagcauga

SEQ ID NO: 1411380 - RNA, 16 nt, Human
cagcccugucagcaug

SEQ ID NO: 1411381 - RNA, 18 nt, Human
cagccugcagacucacug

SEQ ID NO: 1411382 - RNA, 23 nt, Human
cagccucuccccagguccagcuc

SEQ ID NO: 1411383 - RNA, 20 nt, Human
cagccucuccccagguccag

SEQ ID NO: 1411384 - RNA, 19 nt, Human
cagccucuccccaggucca

SEQ ID NO: 1411385 - RNA, 16 nt, Human
cagccucuccccaggu

SEQ ID NO: 1411386 - RNA, 18 nt, Human
cagccucuccccugccug

SEQ ID NO: 1411387 - RNA, 21 nt, Human
cagcggcuugccugccugcuc

SEQ ID NO: 1411388 - RNA, 14 nt, Human
cagcggcccuguca

SEQ ID NO: 1411389 - RNA, 19 nt, Human
cagcgugcuuuaaaaaaua

SEQ ID NO: 1411390 - RNA, 21 nt, Human
cagcguuccuagagaagacag

SEQ ID NO: 1411391 - RNA, 19 nt, Human
cagcguuucuaugacacau

SEQ ID NO: 1411392 - RNA, 16 nt, Human
cagcguuucuaugaca

SEQ ID NO: 1411393 - RNA, 18 nt, Human
cagcguggccuuguucug

SEQ ID NO: 1411394 - RNA, 15 nt, Human
cagcguggccuuguu

SEQ ID NO: 1411395 - RNA, 14 nt, Human
cagcguggccuugu

SEQ ID NO: 1411396 - RNA, 13 nt, Human
cagcguggccuug

SEQ ID NO: 1411397 - RNA, 12 nt, Human
cagcguggccuu

SEQ ID NO: 1411398 - RNA, 23 nt, Human
cagcguggagggguaggggcugg

SEQ ID NO: 1411399 - RNA, 22 nt, Human
cagcguggagggguaggggcug

SEQ ID NO: 1411400 - RNA, 14 nt, Human
cagcguuucuauga

SEQ ID NO: 1411401 - RNA, 22 nt, Human
cagccccucuggucgcuccugc

SEQ ID NO: 1411402 - RNA, 21 nt, Human
cagccccucuggucgcuccug

SEQ ID NO: 1411403 - RNA, 18 nt, Human
cagccccucuggucgcuc

SEQ ID NO: 1411404 - RNA, 16 nt, Human
cagccccucuggucgc

SEQ ID NO: 1411405 - RNA, 14 nt, Human
cagccccucugguc

SEQ ID NO: 1411406 - RNA, 13 nt, Human
cagccccucuggu

SEQ ID NO: 1411407 - RNA, 13 nt, Human
cagcccugucagc

SEQ ID NO: 1411408 - RNA, 21 nt, Human
cagccccucuuggagaagucu

SEQ ID NO: 1411409 - RNA, 20 nt, Human
cagccccucuuggagaaguc

SEQ ID NO: 1411410 - RNA, 18 nt, Human
cagccccucuuggagaag

SEQ ID NO: 1411411 - RNA, 23 nt, Human
cagccccucuuggagaagucuca

SEQ ID NO: 1411412 - RNA, 24 nt, Human
cagccccucuuggagaagucucag

SEQ ID NO: 1411413 - RNA, 22 nt, Human
cagcccccugaccacucagaga

SEQ ID NO: 1411414 - RNA, 21 nt, Human
cagcccccugaccacucagag

SEQ ID NO: 1411415 - RNA, 20 nt, Human
cagcccccugaccacucaga

SEQ ID NO: 1411416 - RNA, 18 nt, Human
cagcccccugaccacuca

SEQ ID NO: 1411417 - RNA, 16 nt, Human
cagcccccugaccacu

SEQ ID NO: 1411418 - RNA, 14 nt, Human
cagcccccugacca

SEQ ID NO: 1411419 - RNA, 13 nt, Human
cagcccccugacc

SEQ ID NO: 1411420 - RNA, 12 nt, Human
cagcccccugac

SEQ ID NO: 1411421 - RNA, 22 nt, Human
cagcccccuccuggugccaccu

SEQ ID NO: 1411422 - RNA, 14 nt, Human
cagcccccuccugg

SEQ ID NO: 1411423 - RNA, 14 nt, Human
cagcccccucacag

SEQ ID NO: 1411424 - RNA, 12 nt, Human
cagcccccucac

SEQ ID NO: 1411425 - RNA, 19 nt, Human
cagcccccuaagagagcac

SEQ ID NO: 1411426 - RNA, 17 nt, Human
cagcccccuaagagagc

SEQ ID NO: 1411427 - RNA, 21 nt, Human
cagcccccagcucccaccucc

SEQ ID NO: 1411428 - RNA, 19 nt, Human
cagcccccagcucccaccu

SEQ ID NO: 1411429 - RNA, 18 nt, Human
cagcccccagcucccacc

SEQ ID NO: 1411430 - RNA, 24 nt, Human
cagccccgcguggaacucgugucu

SEQ ID NO: 1411431 - RNA, 18 nt, Human
cagcccccacccccaagg

SEQ ID NO: 1411432 - RNA, 21 nt, Human
cagcccccacugccuuugacc

SEQ ID NO: 1411433 - RNA, 16 nt, Human
caggaaaguggccaag

SEQ ID NO: 1411434 - RNA, 13 nt, Human
caggaaaauugaa

SEQ ID NO: 1411435 - RNA, 17 nt, Human
caggaaaauugaaugca

SEQ ID NO: 1411436 - RNA, 21 nt, Human
caggaaaaggccuggggugac

SEQ ID NO: 1411437 - RNA, 19 nt, Human
caggaaaaggccuggggug

SEQ ID NO: 1411438 - RNA, 18 nt, Human
caggaaaaggccuggggu

SEQ ID NO: 1411439 - RNA, 17 nt, Human
caggaaaaggccugggg

SEQ ID NO: 1411440 - RNA, 16 nt, Human
caggaaaaggccuggg

SEQ ID NO: 1411441 - RNA, 15 nt, Human
caggaaaaggccugg

SEQ ID NO: 1411442 - RNA, 14 nt, Human
caggaaaaggccug

SEQ ID NO: 1411443 - RNA, 13 nt, Human
caggaaaaggccu

SEQ ID NO: 1411444 - RNA, 21 nt, Human
cagcuuauacgaaauaauugu

SEQ ID NO: 1411445 - RNA, 19 nt, Human
cagcuuauacgaaauaauu

SEQ ID NO: 1411446 - RNA, 16 nt, Human
cagcuuauacgaaaua

SEQ ID NO: 1411447 - RNA, 13 nt, Human
cagcuuauacgaa

SEQ ID NO: 1411448 - RNA, 17 nt, Human
cagcuuagauuucauag

SEQ ID NO: 1411449 - RNA, 16 nt, Human
cagcuuagauuucaua

SEQ ID NO: 1411450 - RNA, 15 nt, Human
cagcuuagauuucau

SEQ ID NO: 1411451 - RNA, 19 nt, Human
cagcuuagauuucauaguu

SEQ ID NO: 1411452 - RNA, 14 nt, Human
cagcuuagauuuca

SEQ ID NO: 1411453 - RNA, 18 nt, Human
cagcuuagaguuggccau

SEQ ID NO: 1411454 - RNA, 22 nt, Human
cagcuguguccaaaaccgccag

SEQ ID NO: 1411455 - RNA, 23 nt, Human
cagcuguggcagaguuacaguuc

SEQ ID NO: 1411456 - RNA, 19 nt, Human
cagcuguggcagaguuaca

SEQ ID NO: 1411457 - RNA, 20 nt, Human
caggccaccuccccagcauu

SEQ ID NO: 1411458 - RNA, 19 nt, Human
caggccaccuccccagcau

SEQ ID NO: 1411459 - RNA, 16 nt, Human
caggccaccuccccag

SEQ ID NO: 1411460 - RNA, 15 nt, Human
caggccaccucccca

SEQ ID NO: 1411461 - RNA, 12 nt, Human
caggccaccucc

SEQ ID NO: 1411462 - RNA, 11 nt, Human
caggccaccuc

SEQ ID NO: 1411463 - RNA, 20 nt, Human
caggcacuuggcagccuugu

SEQ ID NO: 1411464 - RNA, 21 nt, Human
caggcacuuggcagccuugug

SEQ ID NO: 1411465 - RNA, 16 nt, Human
caggcacuuggcagcc

SEQ ID NO: 1411466 - RNA, 12 nt, Human
caggcacuuggc

SEQ ID NO: 1411467 - RNA, 18 nt, Human
caggcacugggcaugagg

SEQ ID NO: 1411468 - RNA, 17 nt, Human
caggcacugggcaugag

SEQ ID NO: 1411469 - RNA, 16 nt, Human
caggcacugggcauga

SEQ ID NO: 1411470 - RNA, 15 nt, Human
caggcacugcuaggc

SEQ ID NO: 1411471 - RNA, 22 nt, Human
caggccaccuggcucucaccuc

SEQ ID NO: 1411472 - RNA, 21 nt, Human
caggccaccuggcucucaccu

SEQ ID NO: 1411473 - RNA, 17 nt, Human
caggccaccuggcucuc

SEQ ID NO: 1411474 - RNA, 22 nt, Human
caggcacugcccugguggcccu

SEQ ID NO: 1411475 - RNA, 16 nt, Human
caggcacugcccuggu

SEQ ID NO: 1411476 - RNA, 15 nt, Human
caggcacugcccugg

SEQ ID NO: 1411477 - RNA, 13 nt, Human
caggcacugcccu

SEQ ID NO: 1411478 - RNA, 21 nt, Human
caggcacugcaaaccgccacc

SEQ ID NO: 1411479 - RNA, 14 nt, Human
caggcacugcaaac

SEQ ID NO: 1411480 - RNA, 23 nt, Human
caggcacugagauaccagcgagg

SEQ ID NO: 1411481 - RNA, 17 nt, Human
caggacagaugccacac

SEQ ID NO: 1411482 - RNA, 14 nt, Human
caggacagaugcca

SEQ ID NO: 1411483 - RNA, 13 nt, Human
caggacagaugcc

SEQ ID NO: 1411484 - RNA, 18 nt, Human
caggaggcaggaccuucg

SEQ ID NO: 1411485 - RNA, 15 nt, Human
caggaggcaggaccu

SEQ ID NO: 1411486 - RNA, 18 nt, Human
caggacccuggacccagc

SEQ ID NO: 1411487 - RNA, 22 nt, Human
caggacccuggacccagccaga

SEQ ID NO: 1411488 - RNA, 15 nt, Human
caggacccuggaccu

SEQ ID NO: 1411489 - RNA, 17 nt, Human
caggacccuggaccuga

SEQ ID NO: 1411490 - RNA, 17 nt, Human
caggacccuggacccag

SEQ ID NO: 1411491 - RNA, 14 nt, Human
caggacccuggacc

SEQ ID NO: 1411492 - RNA, 13 nt, Human
caggacccuggac

SEQ ID NO: 1411493 - RNA, 18 nt, Human
caggacccugaaggggcc

SEQ ID NO: 1411494 - RNA, 17 nt, Human
caggacccugaaggggc

SEQ ID NO: 1411495 - RNA, 20 nt, Human
caggaccagcucaggacaga

SEQ ID NO: 1411496 - RNA, 19 nt, Human
caggaccagcucaggacag

SEQ ID NO: 1411497 - RNA, 17 nt, Human
caggaccagcucaggac

SEQ ID NO: 1411498 - RNA, 16 nt, Human
caggaccagcucagga

SEQ ID NO: 1411499 - RNA, 15 nt, Human
caggaccagcucagg

SEQ ID NO: 1411500 - RNA, 23 nt, Human
caggacaugcgguagccagcaca

SEQ ID NO: 1411501 - RNA, 22 nt, Human
caggacaugcgguagccagcac

SEQ ID NO: 1411502 - RNA, 21 nt, Human
caggacaugcgguagccagca

SEQ ID NO: 1411503 - RNA, 20 nt, Human
caggacaugcgguagccagc

SEQ ID NO: 1411504 - RNA, 18 nt, Human
caggacaugcgguagcca

SEQ ID NO: 1411505 - RNA, 24 nt, Human
caggacagcccuucuuuccacaga

SEQ ID NO: 1411506 - RNA, 23 nt, Human
caggacagcccuucuuuccacag

SEQ ID NO: 1411507 - RNA, 16 nt, Human
cagggcugggaggaag

SEQ ID NO: 1411508 - RNA, 19 nt, Human
cagggcugggaggaaggac

SEQ ID NO: 1411509 - RNA, 14 nt, Human
cagggcugggagga

SEQ ID NO: 1411510 - RNA, 13 nt, Human
cagggcugggagg

SEQ ID NO: 1411511 - RNA, 21 nt, Human
cagggcuguaacugccaggcu

SEQ ID NO: 1411512 - RNA, 18 nt, Human
cagggcuguaacugccag

SEQ ID NO: 1411513 - RNA, 19 nt, Human
cagggcuguaacugccagg

SEQ ID NO: 1411514 - RNA, 16 nt, Human
cagggaggucauuuug

SEQ ID NO: 1411515 - RNA, 22 nt, Human
caggcugggccauguccaaaga

SEQ ID NO: 1411516 - RNA, 20 nt, Human
caggcugggccauguccaaa

SEQ ID NO: 1411517 - RNA, 18 nt, Human
caggcugggccaugucca

SEQ ID NO: 1411518 - RNA, 17 nt, Human
caggcugggccaugucc

SEQ ID NO: 1411519 - RNA, 13 nt, Human
caggcugggccau

SEQ ID NO: 1411520 - RNA, 12 nt, Human
caggcugggcca

SEQ ID NO: 1411521 - RNA, 11 nt, Human
caggcugggcc

SEQ ID NO: 1411522 - RNA, 23 nt, Human
caggcugggccauguccaaagag

SEQ ID NO: 1411523 - RNA, 21 nt, Human
cagggaggaggcagagaagaa

SEQ ID NO: 1411524 - RNA, 15 nt, Human
cagggaggaggcaga

SEQ ID NO: 1411525 - RNA, 20 nt, Human
caggccuggcaaguggguga

SEQ ID NO: 1411526 - RNA, 17 nt, Human
caggccuggcaaguggg

SEQ ID NO: 1411527 - RNA, 17 nt, Human
caguauuuaacuaauua

SEQ ID NO: 1411528 - RNA, 14 nt, Human
caguauuuaacuaa

SEQ ID NO: 1411529 - RNA, 13 nt, Human
caguauuuaacua

SEQ ID NO: 1411530 - RNA, 17 nt, Human
caguauuuagaagccaa

SEQ ID NO: 1411531 - RNA, 16 nt, Human
caguauuuagaagcca

SEQ ID NO: 1411532 - RNA, 15 nt, Human
caguauuuguaauua

SEQ ID NO: 1411533 - RNA, 14 nt, Human
caguauuuguaauu

SEQ ID NO: 1411534 - RNA, 13 nt, Human
caguauuuguaau

SEQ ID NO: 1411535 - RNA, 12 nt, Human
caguauuuguaa

SEQ ID NO: 1411536 - RNA, 23 nt, Human
caguauuuguaauuaaaagcaaa

SEQ ID NO: 1411537 - RNA, 18 nt, Human
caguauuuguaauuaaaa

SEQ ID NO: 1411538 - RNA, 14 nt, Human
caguauuauaugua

SEQ ID NO: 1411539 - RNA, 15 nt, Human
caguauuauauguac

SEQ ID NO: 1411540 - RNA, 13 nt, Human
caguauuauaugu

SEQ ID NO: 1411541 - RNA, 23 nt, Human
caguaaauaacuggaaaacagaa

SEQ ID NO: 1411542 - RNA, 19 nt, Human
caguaaaugggggugcauu

SEQ ID NO: 1411543 - RNA, 20 nt, Human
caguaaaugggggugcauuu

SEQ ID NO: 1411544 - RNA, 15 nt, Human
cagguuuuuccuuuu

SEQ ID NO: 1411545 - RNA, 11 nt, Human
caguaaaauug

SEQ ID NO: 1411546 - RNA, 13 nt, Human
cagguuuuuccuu

SEQ ID NO: 1411547 - RNA, 12 nt, Human
cagguuuuuccc

SEQ ID NO: 1411548 - RNA, 15 nt, Human
caguaaaauugccau

SEQ ID NO: 1411549 - RNA, 16 nt, Human
caguaaaauugccaua

SEQ ID NO: 1411550 - RNA, 18 nt, Human
caguaaaauugccauauu

SEQ ID NO: 1411551 - RNA, 20 nt, Human
caguaaaucuuuuacaacug

SEQ ID NO: 1411552 - RNA, 12 nt, Human
caguaaaucuuu

SEQ ID NO: 1411553 - RNA, 22 nt, Human
caguaaauaacuggaaaacaga

SEQ ID NO: 1411554 - RNA, 18 nt, Human
caguaaauaacuggaaaa

SEQ ID NO: 1411555 - RNA, 17 nt, Human
caguaaauaacuggaaa

SEQ ID NO: 1411556 - RNA, 16 nt, Human
caguaaauaacuggaa

SEQ ID NO: 1411557 - RNA, 18 nt, Human
caguaaaugggggugcau

SEQ ID NO: 1411558 - RNA, 19 nt, Human
caggugcucaauaaaugau

SEQ ID NO: 1411559 - RNA, 16 nt, Human
caggguuuuaacuuug

SEQ ID NO: 1411560 - RNA, 19 nt, Human
caggguuucaccauguugc

SEQ ID NO: 1411561 - RNA, 21 nt, Human
cagguucuuguuggugcacag

SEQ ID NO: 1411562 - RNA, 18 nt, Human
cagguucuuguuggugca

SEQ ID NO: 1411563 - RNA, 12 nt, Human
cagguucuuguu

SEQ ID NO: 1411564 - RNA, 24 nt, Human
cagguucuccguuagcuccugugg

SEQ ID NO: 1411565 - RNA, 23 nt, Human
cagguucuccguuagcuccugug

SEQ ID NO: 1411566 - RNA, 22 nt, Human
cagguucuccguuagcuccugu

SEQ ID NO: 1411567 - RNA, 21 nt, Human
cagguucuccguuagcuccug

SEQ ID NO: 1411568 - RNA, 15 nt, Human
caggguuuuaacuuu

SEQ ID NO: 1411569 - RNA, 23 nt, Human
caggugcugacuucaucucccac

SEQ ID NO: 1411570 - RNA, 21 nt, Human
caggugcugacuucaucuccc

SEQ ID NO: 1411571 - RNA, 20 nt, Human
caggugcugacuucaucucc

SEQ ID NO: 1411572 - RNA, 11 nt, Human
cagguuuuucc

SEQ ID NO: 1411573 - RNA, 19 nt, Human
cagggucuccagaaagccc

SEQ ID NO: 1411574 - RNA, 18 nt, Human
cagggucuccagaaagcc

SEQ ID NO: 1411575 - RNA, 20 nt, Human
cagggugcaguaucaugccc

SEQ ID NO: 1411576 - RNA, 12 nt, Human
caggguggcagc

SEQ ID NO: 1411577 - RNA, 22 nt, Human
caagcuaagcacugccacuggg

SEQ ID NO: 1411578 - RNA, 16 nt, Human
caagcuaagcacugcc

SEQ ID NO: 1411579 - RNA, 14 nt, Human
caagcuaagcacug

SEQ ID NO: 1411580 - RNA, 15 nt, Human
caaguccagguccug

SEQ ID NO: 1411581 - RNA, 13 nt, Human
caaguccaggucc

SEQ ID NO: 1411582 - RNA, 16 nt, Human
caaguauuuuuaauua

SEQ ID NO: 1411583 - RNA, 15 nt, Human
caaguauuuuuaauu

SEQ ID NO: 1411584 - RNA, 11 nt, Human
caaguauuuuu

SEQ ID NO: 1411585 - RNA, 22 nt, Human
caaguauuuguuaauuuagaaa

SEQ ID NO: 1411586 - RNA, 22 nt, Human
caaguaugugggcagauuuuca

SEQ ID NO: 1411587 - RNA, 20 nt, Human
caaguauuuguuaauuuaga

SEQ ID NO: 1411588 - RNA, 12 nt, Human
caaggcagccgu

SEQ ID NO: 1411589 - RNA, 13 nt, Human
caaggcagccgug

SEQ ID NO: 1411590 - RNA, 19 nt, Human
caaggcagcaaggcccgag

SEQ ID NO: 1411591 - RNA, 17 nt, Human
caaggcagcaaggcccg

SEQ ID NO: 1411592 - RNA, 16 nt, Human
caaggcagcaaggccc

SEQ ID NO: 1411593 - RNA, 15 nt, Human
caaggcagcaaggcc

SEQ ID NO: 1411594 - RNA, 18 nt, Human
caaguauacuagggagcc

SEQ ID NO: 1411595 - RNA, 14 nt, Human
caaggcagcaaggc

SEQ ID NO: 1411596 - RNA, 20 nt, Human
caaggcagaggccugggcug

SEQ ID NO: 1411597 - RNA, 19 nt, Human
caaggcagaggccugggcu

SEQ ID NO: 1411598 - RNA, 16 nt, Human
caaggcagaggccugg

SEQ ID NO: 1411599 - RNA, 15 nt, Human
caaggcagaggccug

SEQ ID NO: 1411600 - RNA, 14 nt, Human
caaggcagaggccu

SEQ ID NO: 1411601 - RNA, 13 nt, Human
caaggcagaggcc

SEQ ID NO: 1411602 - RNA, 20 nt, Human
caaggcacuugagggggaag

SEQ ID NO: 1411603 - RNA, 18 nt, Human
caaggcacuugaggggga

SEQ ID NO: 1411604 - RNA, 23 nt, Human
caagcucugagggaaagggcccu

SEQ ID NO: 1411605 - RNA, 17 nt, Human
caagcucugagggaaag

SEQ ID NO: 1411606 - RNA, 14 nt, Human
caagcucugaggga

SEQ ID NO: 1411607 - RNA, 14 nt, Human
caagcuccaagccc

SEQ ID NO: 1411608 - RNA, 13 nt, Human
caagcuccaagcc

SEQ ID NO: 1411609 - RNA, 19 nt, Human
caagcuccaagccccaucu

SEQ ID NO: 1411610 - RNA, 21 nt, Human
caagcucagaggcgcacugug

SEQ ID NO: 1411611 - RNA, 21 nt, Human
caagcucacuccccaaccccc

SEQ ID NO: 1411612 - RNA, 21 nt, Human
caagcuaggugcuauuuguca

SEQ ID NO: 1411613 - RNA, 15 nt, Human
caagcuauucaauuc

SEQ ID NO: 1411614 - RNA, 17 nt, Human
caaguccagguccuggu

SEQ ID NO: 1411615 - RNA, 16 nt, Human
caaguccagguccugg

SEQ ID NO: 1411616 - RNA, 24 nt, Human
caaguccagguccugguggggcag

SEQ ID NO: 1411617 - RNA, 13 nt, Human
caauaaagcaaug

SEQ ID NO: 1411618 - RNA, 15 nt, Human
caauaaagcugcuga

SEQ ID NO: 1411619 - RNA, 17 nt, Human
caauaaagcugcugaga

SEQ ID NO: 1411620 - RNA, 19 nt, Human
caauaaagcagcguuucua

SEQ ID NO: 1411621 - RNA, 23 nt, Human
caauaaagcugcugagaaucuag

SEQ ID NO: 1411622 - RNA, 22 nt, Human
caauaaagcugcugagaaucua

SEQ ID NO: 1411623 - RNA, 13 nt, Human
caauaaaguauuu

SEQ ID NO: 1411624 - RNA, 16 nt, Human
caauaaaguauuuaau

SEQ ID NO: 1411625 - RNA, 14 nt, Human
caauuuaugaauug

SEQ ID NO: 1411626 - RNA, 13 nt, Human
caauuuauuaugg

SEQ ID NO: 1411627 - RNA, 15 nt, Human
caauucuugccaaau

SEQ ID NO: 1411628 - RNA, 21 nt, Human
caauucuucccuaucuuugcc

SEQ ID NO: 1411629 - RNA, 22 nt, Human
caauucuucccuaucuuugcca

SEQ ID NO: 1411630 - RNA, 22 nt, Human
caauugaaagugggcaaaagcu

SEQ ID NO: 1411631 - RNA, 19 nt, Human
caauucuuuuaacuguugu

SEQ ID NO: 1411632 - RNA, 11 nt, Human
caauuuaaaug

SEQ ID NO: 1411633 - RNA, 13 nt, Human
caauuuaaauguu

SEQ ID NO: 1411634 - RNA, 14 nt, Human
caauuuaaauguua

SEQ ID NO: 1411635 - RNA, 17 nt, Human
caaugcuguauuuuaaa

SEQ ID NO: 1411636 - RNA, 16 nt, Human
caaugcuguauuuuaa

SEQ ID NO: 1411637 - RNA, 22 nt, Human
caauggaccggagagugggggu

SEQ ID NO: 1411638 - RNA, 23 nt, Human
caaugcuguauuuuaaaagaaug

SEQ ID NO: 1411639 - RNA, 14 nt, Human
caauggaccggaga

SEQ ID NO: 1411640 - RNA, 15 nt, Human
caaugcuguauuuua

SEQ ID NO: 1411641 - RNA, 19 nt, Human
cacaggugcaacagacuug

SEQ ID NO: 1411642 - RNA, 15 nt, Human
cacagggucugcucu

SEQ ID NO: 1411643 - RNA, 18 nt, Human
cacagggucccacagcca

SEQ ID NO: 1411644 - RNA, 17 nt, Human
cacagggucccacagcc

SEQ ID NO: 1411645 - RNA, 15 nt, Human
cacagggucccacag

SEQ ID NO: 1411646 - RNA, 13 nt, Human
cacaggccugugu

SEQ ID NO: 1411647 - RNA, 20 nt, Human
cacagcggagguguggagcc

SEQ ID NO: 1411648 - RNA, 21 nt, Human
cacagccucuuagaugcaguu

SEQ ID NO: 1411649 - RNA, 17 nt, Human
cacagccucuuagaugc

SEQ ID NO: 1411650 - RNA, 14 nt, Human
cacaguauuuguaa

SEQ ID NO: 1411651 - RNA, 15 nt, Human
cacagucacugcucu

SEQ ID NO: 1411652 - RNA, 19 nt, Human
cacaguauugcucacccag

SEQ ID NO: 1411653 - RNA, 15 nt, Human
cacaguauugcucac

SEQ ID NO: 1411654 - RNA, 15 nt, Human
cacaguauuuguaau

SEQ ID NO: 1411655 - RNA, 19 nt, Human
cacaguacgaaccuacagu

SEQ ID NO: 1411656 - RNA, 21 nt, Human
cacaguaaaaauggaaacuau

SEQ ID NO: 1411657 - RNA, 21 nt, Human
cacacaggcauuuccugggug

SEQ ID NO: 1411658 - RNA, 12 nt, Human
cacacagggcag

SEQ ID NO: 1411659 - RNA, 20 nt, Human
cacacaggcauuuccugggu

SEQ ID NO: 1411660 - RNA, 19 nt, Human
cacacaggcauuuccuggg

SEQ ID NO: 1411661 - RNA, 18 nt, Human
cacacaggcauuuccugg

SEQ ID NO: 1411662 - RNA, 17 nt, Human
cacacaggcauuuccug

SEQ ID NO: 1411663 - RNA, 16 nt, Human
cacacaggcauuuccu

SEQ ID NO: 1411664 - RNA, 10 nt, Human
cacacaggca

SEQ ID NO: 1411665 - RNA, 13 nt, Human
cacacagcugccg

SEQ ID NO: 1411666 - RNA, 14 nt, Human
cacacagcugccgg

SEQ ID NO: 1411667 - RNA, 12 nt, Human
cacacagcugcc

SEQ ID NO: 1411668 - RNA, 14 nt, Human
cacacaguauuuuu

SEQ ID NO: 1411669 - RNA, 13 nt, Human
cacacaguauuuu

SEQ ID NO: 1411670 - RNA, 23 nt, Human
cacacagggucugcaaggucuuu

SEQ ID NO: 1411671 - RNA, 18 nt, Human
cacacagugcucaaggcc

SEQ ID NO: 1411672 - RNA, 22 nt, Human
cacacaugaaguccaagcauuu

SEQ ID NO: 1411673 - RNA, 17 nt, Human
cacacaugaaguccaag

SEQ ID NO: 1411674 - RNA, 18 nt, Human
cacacaugcuucccuuuc

SEQ ID NO: 1411675 - RNA, 19 nt, Human
cacagacauacuaaccagc

SEQ ID NO: 1411676 - RNA, 21 nt, Human
cacagacauacuaaccagcag

SEQ ID NO: 1411677 - RNA, 18 nt, Human
caccccacgccuuauccc

SEQ ID NO: 1411678 - RNA, 15 nt, Human
caccccacucccaca

SEQ ID NO: 1411679 - RNA, 12 nt, Human
caccccaccucu

SEQ ID NO: 1411680 - RNA, 15 nt, Human
caccccaccucuucc

SEQ ID NO: 1411681 - RNA, 16 nt, Human
caccccaccucuuccu

SEQ ID NO: 1411682 - RNA, 20 nt, Human
caccugccucaggacugcga

SEQ ID NO: 1411683 - RNA, 14 nt, Human
caccugccucagga

SEQ ID NO: 1411684 - RNA, 13 nt, Human
caccugccucagg

SEQ ID NO: 1411685 - RNA, 17 nt, Human
cacccucauucuacuga

SEQ ID NO: 1411686 - RNA, 13 nt, Human
cacccucaugcug

SEQ ID NO: 1411687 - RNA, 14 nt, Human
cacccucaugcugu

SEQ ID NO: 1411688 - RNA, 16 nt, Human
cacccucaugcugugu

SEQ ID NO: 1411689 - RNA, 21 nt, Human
cacccucaugcugugugacuc

SEQ ID NO: 1411690 - RNA, 23 nt, Human
cacccugggcccugggcuggaau

SEQ ID NO: 1411691 - RNA, 21 nt, Human
cacccucuuccuacuggucuc

SEQ ID NO: 1411692 - RNA, 17 nt, Human
cacccucuuccuacugg

SEQ ID NO: 1411693 - RNA, 16 nt, Human
cacccucuuccuacug

SEQ ID NO: 1411694 - RNA, 15 nt, Human
cacccucuuccuacu

SEQ ID NO: 1411695 - RNA, 14 nt, Human
cacccucuuccuac

SEQ ID NO: 1411696 - RNA, 12 nt, Human
cacccucuuccu

SEQ ID NO: 1411697 - RNA, 11 nt, Human
cacccucuucc

SEQ ID NO: 1411698 - RNA, 21 nt, Human
cacccucguggacaccugccc

SEQ ID NO: 1411699 - RNA, 23 nt, Human
cacccucguggacaccugcccug

SEQ ID NO: 1411700 - RNA, 16 nt, Human
caccucagccucccaa

SEQ ID NO: 1411701 - RNA, 22 nt, Human
caccuaauccaggcagauccag

SEQ ID NO: 1411702 - RNA, 21 nt, Human
caccuaauccaggcagaucca

SEQ ID NO: 1411703 - RNA, 20 nt, Human
caccuaauccaggcagaucc

SEQ ID NO: 1411704 - RNA, 17 nt, Human
caccugcccugcccugc

SEQ ID NO: 1411705 - RNA, 18 nt, Human
caccugcccugcccugcc

SEQ ID NO: 1411706 - RNA, 19 nt, Human
caccugcccugcccugcca

SEQ ID NO: 1411707 - RNA, 20 nt, Human
caccugcccugcccugccac

SEQ ID NO: 1411708 - RNA, 21 nt, Human
caccugcccugcccugccacc

SEQ ID NO: 1411709 - RNA, 22 nt, Human
caccugcccugcccugccaccu

SEQ ID NO: 1411710 - RNA, 23 nt, Human
caccugcccugcccugccaccug

SEQ ID NO: 1411711 - RNA, 16 nt, Human
cacuccaagcccagcc

SEQ ID NO: 1411712 - RNA, 21 nt, Human
cacuccaagcccagcccaugg

SEQ ID NO: 1411713 - RNA, 15 nt, Human
cacuccaagcccagc

SEQ ID NO: 1411714 - RNA, 14 nt, Human
cacuaguauuucua

SEQ ID NO: 1411715 - RNA, 14 nt, Human
cacugaaaaaauau

SEQ ID NO: 1411716 - RNA, 13 nt, Human
cacugaaaaaaua

SEQ ID NO: 1411717 - RNA, 16 nt, Human
cacucuuucuccugcu

SEQ ID NO: 1411718 - RNA, 12 nt, Human
cacugaaaaaau

SEQ ID NO: 1411719 - RNA, 23 nt, Human
cacucuuuugcuuuauuccagaa

SEQ ID NO: 1411720 - RNA, 15 nt, Human
cacucuuuugcuuua

SEQ ID NO: 1411721 - RNA, 12 nt, Human
cacucuuuguaa

SEQ ID NO: 1411722 - RNA, 15 nt, Human
cacucuuuguaagag

SEQ ID NO: 1411723 - RNA, 14 nt, Human
cacucuuucuuuca

SEQ ID NO: 1411724 - RNA, 15 nt, Human
cacucuuucuuucaa

SEQ ID NO: 1411725 - RNA, 23 nt, Human
cacugguggggauaggccagccg

SEQ ID NO: 1411726 - RNA, 21 nt, Human
cacugguggggauaggccagc

SEQ ID NO: 1411727 - RNA, 14 nt, Human
cacugguuugaaga

SEQ ID NO: 1411728 - RNA, 22 nt, Human
cacugguggggauaggccagcc

SEQ ID NO: 1411729 - RNA, 14 nt, Human
cacuuacauuuaca

SEQ ID NO: 1411730 - RNA, 21 nt, Human
cacuuauuggaacucugcuug

SEQ ID NO: 1411731 - RNA, 19 nt, Human
cacuuauguuauacaauac

SEQ ID NO: 1411732 - RNA, 20 nt, Human
cacuuauuccccauucuucc

SEQ ID NO: 1411733 - RNA, 17 nt, Human
cacuuaucugaucagaa

SEQ ID NO: 1411734 - RNA, 16 nt, Human
cacuuaucugaucaga

SEQ ID NO: 1411735 - RNA, 14 nt, Human
cacuuauagccucu

SEQ ID NO: 1411736 - RNA, 16 nt, Human
cacuuauagccucugu

SEQ ID NO: 1411737 - RNA, 15 nt, Human
cacuuguccagcuga

SEQ ID NO: 1411738 - RNA, 14 nt, Human
cacuuguccagcug

SEQ ID NO: 1411739 - RNA, 22 nt, Human
cacuugucaggaguguguguga

SEQ ID NO: 1411740 - RNA, 20 nt, Human
cacuugucaggagugugugu

SEQ ID NO: 1411741 - RNA, 16 nt, Human
cacuugucaggagugu

SEQ ID NO: 1411742 - RNA, 19 nt, Human
cacuuguguuuugcaagcc

SEQ ID NO: 1411743 - RNA, 16 nt, Human
cacuugucaauaaaau

SEQ ID NO: 1411744 - RNA, 18 nt, Human
cacuugucauuguuauau

SEQ ID NO: 1411745 - RNA, 23 nt, Human
cacuuguccagcugagcgccagg

SEQ ID NO: 1411746 - RNA, 22 nt, Human
cacuuguguuuugcaagccaga

SEQ ID NO: 1411747 - RNA, 17 nt, Human
cacugcacucaaccuua

SEQ ID NO: 1411748 - RNA, 21 nt, Human
cacugcacucaaccuuaagac

SEQ ID NO: 1411749 - RNA, 12 nt, Human
cacugccacugg

SEQ ID NO: 1411750 - RNA, 13 nt, Human
cacugccaggagg

SEQ ID NO: 1411751 - RNA, 12 nt, Human
cacugccaggag

SEQ ID NO: 1411752 - RNA, 22 nt, Human
cacugccagcauuucccuuccu

SEQ ID NO: 1411753 - RNA, 18 nt, Human
cacugccagcauuucccu

SEQ ID NO: 1411754 - RNA, 18 nt, Human
cacugcagccccacccag

SEQ ID NO: 1411755 - RNA, 16 nt, Human
cacugcauguuuguga

SEQ ID NO: 1411756 - RNA, 22 nt, Human
cacugccaggagggacaaagga

SEQ ID NO: 1411757 - RNA, 17 nt, Human
cacugccaggagggaca

SEQ ID NO: 1411758 - RNA, 16 nt, Human
cacugccaggagggac

SEQ ID NO: 1411759 - RNA, 15 nt, Human
cacugccaggaggga

SEQ ID NO: 1411760 - RNA, 14 nt, Human
cacugccaggaggg

SEQ ID NO: 1411761 - RNA, 18 nt, Human
cacugggagaaaugaaaa

SEQ ID NO: 1411762 - RNA, 22 nt, Human
cacuggggcucagagccggggu

SEQ ID NO: 1411763 - RNA, 20 nt, Human
cacuggggcucagagccggg

SEQ ID NO: 1411764 - RNA, 19 nt, Human
cacuggggcucagagccgg

SEQ ID NO: 1411765 - RNA, 18 nt, Human
cacuggggcucagagccg

SEQ ID NO: 1411766 - RNA, 17 nt, Human
cacuggggcucagagcc

SEQ ID NO: 1411767 - RNA, 16 nt, Human
cacuggggcucagagc

SEQ ID NO: 1411768 - RNA, 15 nt, Human
cacuggggcucagag

SEQ ID NO: 1411769 - RNA, 12 nt, Human
cacuggggcuca

SEQ ID NO: 1411770 - RNA, 17 nt, Human
cacugggacuugcaaaa

SEQ ID NO: 1411771 - RNA, 19 nt, Human
cacuggggcaggggccggg

SEQ ID NO: 1411772 - RNA, 13 nt, Human
caaagcagccacg

SEQ ID NO: 1411773 - RNA, 12 nt, Human
caaagcagccac

SEQ ID NO: 1411774 - RNA, 19 nt, Human
caaagcagauucagaaaug

SEQ ID NO: 1411775 - RNA, 19 nt, Human
caaagcagacagcuccacc

SEQ ID NO: 1411776 - RNA, 17 nt, Human
caaagcagacagcucca

SEQ ID NO: 1411777 - RNA, 16 nt, Human
caaagcagacagcucc

SEQ ID NO: 1411778 - RNA, 15 nt, Human
caaagcagacagcuc

SEQ ID NO: 1411779 - RNA, 13 nt, Human
caaagcagacagc

SEQ ID NO: 1411780 - RNA, 12 nt, Human
caaagcagacag

SEQ ID NO: 1411781 - RNA, 22 nt, Human
caaagcacgaaauguuauuuuu

SEQ ID NO: 1411782 - RNA, 20 nt, Human
caaagcacgaaauguuauuu

SEQ ID NO: 1411783 - RNA, 14 nt, Human
caaagcacagagag

SEQ ID NO: 1411784 - RNA, 19 nt, Human
caaagcacagagagucugg

SEQ ID NO: 1411785 - RNA, 13 nt, Human
caaagcacagaga

SEQ ID NO: 1411786 - RNA, 11 nt, Human
caaagcacaga

SEQ ID NO: 1411787 - RNA, 23 nt, Human
caaagcaagcauucagaagaaaa

SEQ ID NO: 1411788 - RNA, 15 nt, Human
caaagcaaggaaacu

SEQ ID NO: 1411789 - RNA, 13 nt, Human
caaagcaaggaaa

SEQ ID NO: 1411790 - RNA, 22 nt, Human
caaagcaagcauucagaagaaa

SEQ ID NO: 1411791 - RNA, 14 nt, Human
caaagcaagacccu

SEQ ID NO: 1411792 - RNA, 16 nt, Human
caaagauuuaaucugc

SEQ ID NO: 1411793 - RNA, 13 nt, Human
caaagauuuaauc

SEQ ID NO: 1411794 - RNA, 16 nt, Human
caaagaugcugugagu

SEQ ID NO: 1411795 - RNA, 11 nt, Human
caaagaugcug

SEQ ID NO: 1411796 - RNA, 22 nt, Human
caaagauauuuugcuuugugau

SEQ ID NO: 1411797 - RNA, 23 nt, Human
caaagauauuuugcuuugugauu

SEQ ID NO: 1411798 - RNA, 21 nt, Human
caaagguuuggaaggagcaga

SEQ ID NO: 1411799 - RNA, 22 nt, Human
caaaguacacuguuucaaacuu

SEQ ID NO: 1411800 - RNA, 19 nt, Human
caaagguuuuccucuucua

SEQ ID NO: 1411801 - RNA, 11 nt, Human
caaagguuuuc

SEQ ID NO: 1411802 - RNA, 19 nt, Human
caaagguuuggaaggagca

SEQ ID NO: 1411803 - RNA, 18 nt, Human
caaagguuuggaaggagc

SEQ ID NO: 1411804 - RNA, 17 nt, Human
caaagguuuggaaggag

SEQ ID NO: 1411805 - RNA, 16 nt, Human
caaagguuuggaagga

SEQ ID NO: 1411806 - RNA, 23 nt, Human
caaagguuuaaaugaacaagaga

SEQ ID NO: 1411807 - RNA, 20 nt, Human
caaagguuuaaaugaacaag

SEQ ID NO: 1411808 - RNA, 16 nt, Human
caaagguuuaaaugaa

SEQ ID NO: 1411809 - RNA, 13 nt, Human
caaagguuuaaau

SEQ ID NO: 1411810 - RNA, 15 nt, Human
caaagguugagaugu

SEQ ID NO: 1411811 - RNA, 22 nt, Human
caaagguucuagguuucaaaga

SEQ ID NO: 1411812 - RNA, 21 nt, Human
caaagguucuagguuucaaag

SEQ ID NO: 1411813 - RNA, 19 nt, Human
caaagguucuagguuucaa

SEQ ID NO: 1411814 - RNA, 14 nt, Human
caaagguucuaggu

SEQ ID NO: 1411815 - RNA, 12 nt, Human
caaagguucuag

SEQ ID NO: 1411816 - RNA, 16 nt, Human
caaagugcugagauua

SEQ ID NO: 1411817 - RNA, 15 nt, Human
caaagugcugagauu

SEQ ID NO: 1411818 - RNA, 12 nt, Human
caaagugcaagg

SEQ ID NO: 1411819 - RNA, 16 nt, Human
caaagugcaaggaccu

SEQ ID NO: 1411820 - RNA, 15 nt, Human
caaagucucuaauuc

SEQ ID NO: 1411821 - RNA, 14 nt, Human
caaagucucuaauu

SEQ ID NO: 1411822 - RNA, 13 nt, Human
caaagucucuaau

SEQ ID NO: 1411823 - RNA, 12 nt, Human
caaagucucuaa

SEQ ID NO: 1411824 - RNA, 21 nt, Human
caaagucucuggaauuugaaa

SEQ ID NO: 1411825 - RNA, 13 nt, Human
caacacguuacua

SEQ ID NO: 1411826 - RNA, 16 nt, Human
caacacccauuuuucc

SEQ ID NO: 1411827 - RNA, 19 nt, Human
caacacgcaccugccucag

SEQ ID NO: 1411828 - RNA, 14 nt, Human
caacacuaacauga

SEQ ID NO: 1411829 - RNA, 21 nt, Human
caaauccuuagaucuggcaug

SEQ ID NO: 1411830 - RNA, 17 nt, Human
caaauccuuagaucugg

SEQ ID NO: 1411831 - RNA, 15 nt, Human
caaauccuugaagau

SEQ ID NO: 1411832 - RNA, 17 nt, Human
caacacgcaccugccuc

SEQ ID NO: 1411833 - RNA, 15 nt, Human
caacacgcaccugcc

SEQ ID NO: 1411834 - RNA, 22 nt, Human
caacaccaugauuccuuuaaca

SEQ ID NO: 1411835 - RNA, 19 nt, Human
caacaccaugauuccuuua

SEQ ID NO: 1411836 - RNA, 17 nt, Human
caacaccaugauuccuu

SEQ ID NO: 1411837 - RNA, 22 nt, Human
caacaccaagcacagcagccug

SEQ ID NO: 1411838 - RNA, 15 nt, Human
caacaccaagcacag

SEQ ID NO: 1411839 - RNA, 13 nt, Human
caacaauucuaaa

SEQ ID NO: 1411840 - RNA, 12 nt, Human
caacaauaaaua

SEQ ID NO: 1411841 - RNA, 20 nt, Human
caaaagauugcugaaauuuu

SEQ ID NO: 1411842 - RNA, 19 nt, Human
caaaagauugcugaaauuu

SEQ ID NO: 1411843 - RNA, 16 nt, Human
caaaagauugcugaaa

SEQ ID NO: 1411844 - RNA, 19 nt, Human
auuuuuuuuuuuucucuca

SEQ ID NO: 1411845 - RNA, 23 nt, Human
auuuuuuuuuuuuuuuuuuuaag

SEQ ID NO: 1411846 - RNA, 19 nt, Human
auuuuuuuuuuuuuuuccu

SEQ ID NO: 1411847 - RNA, 21 nt, Human
caaacccaccugcuaguguga

SEQ ID NO: 1411848 - RNA, 13 nt, Human
caaacccaguguu

SEQ ID NO: 1411849 - RNA, 20 nt, Human
caaaagggccaaagaaccaa

SEQ ID NO: 1411850 - RNA, 19 nt, Human
caaaagggccaaagaacca

SEQ ID NO: 1411851 - RNA, 20 nt, Human
caaacagccaacuagccccu

SEQ ID NO: 1411852 - RNA, 14 nt, Human
caaacaggcucaga

SEQ ID NO: 1411853 - RNA, 15 nt, Human
caaacaggcucagag

SEQ ID NO: 1411854 - RNA, 20 nt, Human
caaacaggaucaguuaacua

SEQ ID NO: 1411855 - RNA, 24 nt, Human
caaacccaguguuuuaggagcaug

SEQ ID NO: 1411856 - RNA, 20 nt, Human
caaagauauuuugcuuugug

SEQ ID NO: 1411857 - RNA, 16 nt, Human
auuugauugauuugaa

SEQ ID NO: 1411858 - RNA, 13 nt, Human
auuugauugauuu

SEQ ID NO: 1411859 - RNA, 22 nt, Human
auuugcauaacaauuccucuac

SEQ ID NO: 1411860 - RNA, 21 nt, Human
auuugcauaacaauuccucua

SEQ ID NO: 1411861 - RNA, 14 nt, Human
auuugcaggguccu

SEQ ID NO: 1411862 - RNA, 20 nt, Human
auuugcaagggaaaagucuc

SEQ ID NO: 1411863 - RNA, 15 nt, Human
auuugcaagggaaaa

SEQ ID NO: 1411864 - RNA, 23 nt, Human
auuugcauuaaauucacaaacuu

SEQ ID NO: 1411865 - RNA, 19 nt, Human
auuugcauuaaauucacaa

SEQ ID NO: 1411866 - RNA, 18 nt, Human
auuugcauuaaauucaca

SEQ ID NO: 1411867 - RNA, 22 nt, Human
auuugcauuuguuuauguaauu

SEQ ID NO: 1411868 - RNA, 13 nt, Human
auuugcauuuguu

SEQ ID NO: 1411869 - RNA, 12 nt, Human
auuugcauuugu

SEQ ID NO: 1411870 - RNA, 22 nt, Human
auuugcauugaacacaaacugu

SEQ ID NO: 1411871 - RNA, 21 nt, Human
auuugcauugaacacaaacug

SEQ ID NO: 1411872 - RNA, 16 nt, Human
auuugcauugaacaca

SEQ ID NO: 1411873 - RNA, 23 nt, Human
auuugcauuuguuuauguaauuu

SEQ ID NO: 1411874 - RNA, 21 nt, Human
auuugcauuuguuuauguaau

SEQ ID NO: 1411875 - RNA, 16 nt, Human
auuugcauuuguuuau

SEQ ID NO: 1411876 - RNA, 22 nt, Human
auuugccuguaacaagccagau

SEQ ID NO: 1411877 - RNA, 15 nt, Human
auuugccuguaacaa

SEQ ID NO: 1411878 - RNA, 13 nt, Human
auuugccuguaac

SEQ ID NO: 1411879 - RNA, 11 nt, Human
auuugccugua

SEQ ID NO: 1411880 - RNA, 19 nt, Human
auuugcuaauuuuuauuaa

SEQ ID NO: 1411881 - RNA, 16 nt, Human
auuugcuaauuuuuau

SEQ ID NO: 1411882 - RNA, 14 nt, Human
auuugcuaauuuuu

SEQ ID NO: 1411883 - RNA, 13 nt, Human
auuugcuaauuuu

SEQ ID NO: 1411884 - RNA, 16 nt, Human
auuugccuguaacaag

SEQ ID NO: 1411885 - RNA, 18 nt, Human
auuugcuuuuucaccaga

SEQ ID NO: 1411886 - RNA, 11 nt, Human
auuugcuuuuu

SEQ ID NO: 1411887 - RNA, 15 nt, Human
auuugcuuuggaagu

SEQ ID NO: 1411888 - RNA, 14 nt, Human
auuugcuuuggaag

SEQ ID NO: 1411889 - RNA, 13 nt, Human
auuugcuuuggaa

SEQ ID NO: 1411890 - RNA, 17 nt, Human
auuugcuuuuugugaua

SEQ ID NO: 1411891 - RNA, 17 nt, Human
auuugcucauggaauug

SEQ ID NO: 1411892 - RNA, 14 nt, Human
auuugcucauggaa

SEQ ID NO: 1411893 - RNA, 19 nt, Human
auuugugcccccaaccauu

SEQ ID NO: 1411894 - RNA, 18 nt, Human
auuugcuuuuugugauau

SEQ ID NO: 1411895 - RNA, 20 nt, Human
auuugugauacaaugcugug

SEQ ID NO: 1411896 - RNA, 22 nt, Human
auuuggaaauaaagucagaugg

SEQ ID NO: 1411897 - RNA, 17 nt, Human
auuuggaaauaaaguca

SEQ ID NO: 1411898 - RNA, 15 nt, Human
auuuggaaauaaagu

SEQ ID NO: 1411899 - RNA, 17 nt, Human
auuugugauacaaugcu

SEQ ID NO: 1411900 - RNA, 14 nt, Human
auuuguuggaauga

SEQ ID NO: 1411901 - RNA, 13 nt, Human
auuuguuggaaug

SEQ ID NO: 1411902 - RNA, 11 nt, Human
auuuguugcau

SEQ ID NO: 1411903 - RNA, 22 nt, Human
auuuguugagagugugaccaaa

SEQ ID NO: 1411904 - RNA, 13 nt, Human
auuuguugagagu

SEQ ID NO: 1411905 - RNA, 18 nt, Human
auuuguuuauguaauuuc

SEQ ID NO: 1411906 - RNA, 17 nt, Human
auuuguuuauguaauuu

SEQ ID NO: 1411907 - RNA, 13 nt, Human
auuuguuuaugua

SEQ ID NO: 1411908 - RNA, 22 nt, Human
auuuguuuaugguaaaaaauuu

SEQ ID NO: 1411909 - RNA, 20 nt, Human
auuuguuuaugguaaaaaau

SEQ ID NO: 1411910 - RNA, 16 nt, Human
auuuguuuaaaaagua

SEQ ID NO: 1411911 - RNA, 17 nt, Human
auuuguuuaaaaaguaa

SEQ ID NO: 1411912 - RNA, 15 nt, Human
auuuguuggaaugaa

SEQ ID NO: 1411913 - RNA, 22 nt, Human
auuuguuugaacugauaaagau

SEQ ID NO: 1411914 - RNA, 23 nt, Human
auuuguuugaacugauaaagaug

SEQ ID NO: 1411915 - RNA, 13 nt, Human
auuuguuucuacu

SEQ ID NO: 1411916 - RNA, 19 nt, Human
auuuguuuauguaauuuca

SEQ ID NO: 1411917 - RNA, 18 nt, Human
auuuguuucuuucucuga

SEQ ID NO: 1411918 - RNA, 19 nt, Human
auuuuauagcuacuaauuu

SEQ ID NO: 1411919 - RNA, 22 nt, Human
auuuuauaggcauaccuccuau

SEQ ID NO: 1411920 - RNA, 20 nt, Human
auucacagugcucuuuucuc

SEQ ID NO: 1411921 - RNA, 19 nt, Human
auucacagugcucuuuucu

SEQ ID NO: 1411922 - RNA, 21 nt, Human
auucacagugcucuuuucucc

SEQ ID NO: 1411923 - RNA, 22 nt, Human
auucacaguucuuugggccaga

SEQ ID NO: 1411924 - RNA, 21 nt, Human
auucauaauuauuauuuggcc

SEQ ID NO: 1411925 - RNA, 15 nt, Human
auuagggcccugugu

SEQ ID NO: 1411926 - RNA, 18 nt, Human
auuagggcccugugucug

SEQ ID NO: 1411927 - RNA, 15 nt, Human
auuagggaugccucc

SEQ ID NO: 1411928 - RNA, 16 nt, Human
auuaggugugacugaa

SEQ ID NO: 1411929 - RNA, 18 nt, Human
auuaggugugacugaauu

SEQ ID NO: 1411930 - RNA, 23 nt, Human
auuaucuuuucauacauuuucua

SEQ ID NO: 1411931 - RNA, 22 nt, Human
auuaucuuuucauacauuuucu

SEQ ID NO: 1411932 - RNA, 21 nt, Human
auuaggugugacugaauuucu

SEQ ID NO: 1411933 - RNA, 18 nt, Human
auuaugaaacuuuuggaa

SEQ ID NO: 1411934 - RNA, 17 nt, Human
auuaugaauuacauuug

SEQ ID NO: 1411935 - RNA, 14 nt, Human
auuaugaauuacau

SEQ ID NO: 1411936 - RNA, 14 nt, Human
auucaaaguguuau

SEQ ID NO: 1411937 - RNA, 23 nt, Human
auuaugcaugaaguaauaugcac

SEQ ID NO: 1411938 - RNA, 18 nt, Human
auuaugcaauuuuuauau

SEQ ID NO: 1411939 - RNA, 20 nt, Human
auuaugaaugugaagccuuc

SEQ ID NO: 1411940 - RNA, 19 nt, Human
auuaugaagaaggugaaua

SEQ ID NO: 1411941 - RNA, 18 nt, Human
auuaugaauuacauuugu

SEQ ID NO: 1411942 - RNA, 16 nt, Human
auucaauucaaagcug

SEQ ID NO: 1411943 - RNA, 20 nt, Human
auucaaugccccugaauuua

SEQ ID NO: 1411944 - RNA, 18 nt, Human
auucaaugccccugaauu

SEQ ID NO: 1411945 - RNA, 18 nt, Human
auucaaauguauuacagu

SEQ ID NO: 1411946 - RNA, 16 nt, Human
auucaaauguauuaca

SEQ ID NO: 1411947 - RNA, 13 nt, Human
auguuugguaaga

SEQ ID NO: 1411948 - RNA, 23 nt, Human
auguuuggcugcuagaacauggu

SEQ ID NO: 1411949 - RNA, 22 nt, Human
auguuucuucuagguucuaaaa

SEQ ID NO: 1411950 - RNA, 23 nt, Human
auuacaaaucagaagucaucuug

SEQ ID NO: 1411951 - RNA, 22 nt, Human
auuacaaaucagaagucaucuu

SEQ ID NO: 1411952 - RNA, 21 nt, Human
auuacaaaucagaagucaucu

SEQ ID NO: 1411953 - RNA, 19 nt, Human
auuacaaaucagaagucau

SEQ ID NO: 1411954 - RNA, 18 nt, Human
auuacaaaucagaaguca

SEQ ID NO: 1411955 - RNA, 16 nt, Human
auuacaaaucagaagu

SEQ ID NO: 1411956 - RNA, 14 nt, Human
auuacaaaucagaa

SEQ ID NO: 1411957 - RNA, 15 nt, Human
auuacaacggaguca

SEQ ID NO: 1411958 - RNA, 17 nt, Human
auuacaacggagucaaa

SEQ ID NO: 1411959 - RNA, 20 nt, Human
auuaauuccuguuugucuac

SEQ ID NO: 1411960 - RNA, 14 nt, Human
auuaauucuauaag

SEQ ID NO: 1411961 - RNA, 18 nt, Human
auuaauuccuguuugucu

SEQ ID NO: 1411962 - RNA, 13 nt, Human
auuaauucuauaa

SEQ ID NO: 1411963 - RNA, 22 nt, Human
auuaauuccuucagcacuuuag

SEQ ID NO: 1411964 - RNA, 22 nt, Human
auuacaggcgugagccaccucg

SEQ ID NO: 1411965 - RNA, 22 nt, Human
auuacaggcaccugccaccaug

SEQ ID NO: 1411966 - RNA, 20 nt, Human
auuacaggcaccugccacca

SEQ ID NO: 1411967 - RNA, 15 nt, Human
auuacagcuggagaa

SEQ ID NO: 1411968 - RNA, 21 nt, Human
auuacagaugggcaaauuaag

SEQ ID NO: 1411969 - RNA, 19 nt, Human
auuacagaugggcaaauua

SEQ ID NO: 1411970 - RNA, 17 nt, Human
auuacaggcgugagcca

SEQ ID NO: 1411971 - RNA, 19 nt, Human
auuacaguggggaaugaag

SEQ ID NO: 1411972 - RNA, 19 nt, Human
auuagauguucucuaucau

SEQ ID NO: 1411973 - RNA, 21 nt, Human
auuagauguucucuaucauuu

SEQ ID NO: 1411974 - RNA, 23 nt, Human
auuagauguucucuaucauuuaa

SEQ ID NO: 1411975 - RNA, 17 nt, Human
auuagccagugaaaaac

SEQ ID NO: 1411976 - RNA, 14 nt, Human
auuagccugaguag

SEQ ID NO: 1411977 - RNA, 16 nt, Human
auuagccugaguagaa

SEQ ID NO: 1411978 - RNA, 17 nt, Human
auuagccugaguagaaa

SEQ ID NO: 1411979 - RNA, 22 nt, Human
auuagcaauugacugucacugu

SEQ ID NO: 1411980 - RNA, 18 nt, Human
auuagcagucccuccaca

SEQ ID NO: 1411981 - RNA, 19 nt, Human
auuagcauuugucaacaaa

SEQ ID NO: 1411982 - RNA, 14 nt, Human
auucuugauguaaa

SEQ ID NO: 1411983 - RNA, 12 nt, Human
auucuugaugua

SEQ ID NO: 1411984 - RNA, 19 nt, Human
auucuuucccaacaccucu

SEQ ID NO: 1411985 - RNA, 16 nt, Human
auucuuucccaacacc

SEQ ID NO: 1411986 - RNA, 17 nt, Human
auucuucugagcacugu

SEQ ID NO: 1411987 - RNA, 21 nt, Human
auucuucugaacucaaacuga

SEQ ID NO: 1411988 - RNA, 22 nt, Human
auucuucuuccaacguggccca

SEQ ID NO: 1411989 - RNA, 16 nt, Human
auucugaaggagcccc

SEQ ID NO: 1411990 - RNA, 15 nt, Human
auucugaaggagccc

SEQ ID NO: 1411991 - RNA, 19 nt, Human
auucugaacuaaagugcug

SEQ ID NO: 1411992 - RNA, 22 nt, Human
auucugaacuaaagugcugcac

SEQ ID NO: 1411993 - RNA, 22 nt, Human
auucucuuguauaagauccuag

SEQ ID NO: 1411994 - RNA, 18 nt, Human
auucauaguaacuucuua

SEQ ID NO: 1411995 - RNA, 20 nt, Human
auucucuuguauaagauccu

SEQ ID NO: 1411996 - RNA, 17 nt, Human
auucauaguaacuucuu

SEQ ID NO: 1411997 - RNA, 16 nt, Human
auucauaguaacuucu

SEQ ID NO: 1411998 - RNA, 13 nt, Human
auucuucugaacu

SEQ ID NO: 1411999 - RNA, 14 nt, Human
auucugaccuuaaa

SEQ ID NO: 1412000 - RNA, 22 nt, Human
auucugaaugcuucuaaguaaa

SEQ ID NO: 1412001 - RNA, 19 nt, Human
auucugaaugcuucuaagu

SEQ ID NO: 1412002 - RNA, 17 nt, Human
auucugaaugcuucuaa

SEQ ID NO: 1412003 - RNA, 16 nt, Human
auucugaaugcuucua

SEQ ID NO: 1412004 - RNA, 15 nt, Human
auucugaaugcuucu

SEQ ID NO: 1412005 - RNA, 20 nt, Human
auucuuucccagucugucga

SEQ ID NO: 1412006 - RNA, 19 nt, Human
auucuuucccagucugucg

SEQ ID NO: 1412007 - RNA, 21 nt, Human
auucuuucccaauucacaucu

SEQ ID NO: 1412008 - RNA, 17 nt, Human
auucuugauguaaaauc

SEQ ID NO: 1412009 - RNA, 16 nt, Human
auucuugauguaaaau

SEQ ID NO: 1412010 - RNA, 19 nt, Human
auugcuagagcuccucccu

SEQ ID NO: 1412011 - RNA, 18 nt, Human
auugcuagagcuccuccc

SEQ ID NO: 1412012 - RNA, 16 nt, Human
auugcuagagcuccuc

SEQ ID NO: 1412013 - RNA, 23 nt, Human
auugcuagagcuccucccucuca

SEQ ID NO: 1412014 - RNA, 15 nt, Human
auugcuagagcuccu

SEQ ID NO: 1412015 - RNA, 14 nt, Human
auugcuagagcucc

SEQ ID NO: 1412016 - RNA, 18 nt, Human
auugauagaguguuauca

SEQ ID NO: 1412017 - RNA, 22 nt, Human
auugaguaaugguguagaacac

SEQ ID NO: 1412018 - RNA, 19 nt, Human
auugauaaccuugaaaaaa

SEQ ID NO: 1412019 - RNA, 16 nt, Human
auugaguuuucagugg

SEQ ID NO: 1412020 - RNA, 15 nt, Human
auugaguuuucagug

SEQ ID NO: 1412021 - RNA, 13 nt, Human
auugaguuggaau

SEQ ID NO: 1412022 - RNA, 15 nt, Human
auugagucaaauggu

SEQ ID NO: 1412023 - RNA, 20 nt, Human
auugaguaaugguguagaac

SEQ ID NO: 1412024 - RNA, 19 nt, Human
auugaguaaugguguagaa

SEQ ID NO: 1412025 - RNA, 19 nt, Human
auugcuuccuccuccccaa

SEQ ID NO: 1412026 - RNA, 16 nt, Human
auugcuuccuccuccc

SEQ ID NO: 1412027 - RNA, 23 nt, Human
auugcuuauuuauuguauucugg

SEQ ID NO: 1412028 - RNA, 20 nt, Human
auugcuuauuuauuguauuc

SEQ ID NO: 1412029 - RNA, 17 nt, Human
auugcuuauuuauugua

SEQ ID NO: 1412030 - RNA, 21 nt, Human
auugcugccccaucagugcuc

SEQ ID NO: 1412031 - RNA, 20 nt, Human
auugcugccccaucagugcu

SEQ ID NO: 1412032 - RNA, 16 nt, Human
auugcugacuguagcu

SEQ ID NO: 1412033 - RNA, 16 nt, Human
auugcugaaauuuuau

SEQ ID NO: 1412034 - RNA, 13 nt, Human
auugcugaaauuu

SEQ ID NO: 1412035 - RNA, 23 nt, Human
auugcucacccagugcccucucc

SEQ ID NO: 1412036 - RNA, 16 nt, Human
auugcucacccagugc

SEQ ID NO: 1412037 - RNA, 12 nt, Human
auugcugaaauu

SEQ ID NO: 1412038 - RNA, 12 nt, Human
auuguaaaguaa

SEQ ID NO: 1412039 - RNA, 23 nt, Human
auuguaaacaaacuguguaacug

SEQ ID NO: 1412040 - RNA, 20 nt, Human
auuguaaaauuauuucauga

SEQ ID NO: 1412041 - RNA, 12 nt, Human
auuguaaucacu

SEQ ID NO: 1412042 - RNA, 16 nt, Human
auuguaaucugaauaa

SEQ ID NO: 1412043 - RNA, 13 nt, Human
auuguaaucacug

SEQ ID NO: 1412044 - RNA, 19 nt, Human
auuguuacguagccuaagg

SEQ ID NO: 1412045 - RNA, 21 nt, Human
auuguuacauuauguggaaaa

SEQ ID NO: 1412046 - RNA, 20 nt, Human
auuguuacauuauguggaaa

SEQ ID NO: 1412047 - RNA, 19 nt, Human
auuguguggauucuuuaaa

SEQ ID NO: 1412048 - RNA, 15 nt, Human
auuguuguccuuuuc

SEQ ID NO: 1412049 - RNA, 13 nt, Human
auuguuguccuuu

SEQ ID NO: 1412050 - RNA, 14 nt, Human
auuguugcauugcu

SEQ ID NO: 1412051 - RNA, 16 nt, Human
auuguugcauugcuuu

SEQ ID NO: 1412052 - RNA, 12 nt, Human
auuguugcauua

SEQ ID NO: 1412053 - RNA, 19 nt, Human
auuguugagcuauugcugu

SEQ ID NO: 1412054 - RNA, 16 nt, Human
auuguugagcuauugc

SEQ ID NO: 1412055 - RNA, 18 nt, Human
auuguuguccuuuucaua

SEQ ID NO: 1412056 - RNA, 17 nt, Human
auuguuguccuuuucau

SEQ ID NO: 1412057 - RNA, 16 nt, Human
auuguuguccuuuuca

SEQ ID NO: 1412058 - RNA, 16 nt, Human
auuguugucugcaacu

SEQ ID NO: 1412059 - RNA, 20 nt, Human
ccucccaauuucagacuccc

SEQ ID NO: 1412060 - RNA, 19 nt, Human
ccucccaauuucagacucc

SEQ ID NO: 1412061 - RNA, 14 nt, Human
ccucccaagcaguu

SEQ ID NO: 1412062 - RNA, 21 nt, Human
ccuccaaggaggggcuguaaa

SEQ ID NO: 1412063 - RNA, 20 nt, Human
ccuccaaggaggggcuguaa

SEQ ID NO: 1412064 - RNA, 23 nt, Human
ccucauguggcuggaagauccug

SEQ ID NO: 1412065 - RNA, 18 nt, Human
ccucauguggcuggaaga

SEQ ID NO: 1412066 - RNA, 19 nt, Human
ccucauguucuuaauucuu

SEQ ID NO: 1412067 - RNA, 21 nt, Human
ccucagccucccaaagugcug

SEQ ID NO: 1412068 - RNA, 17 nt, Human
ccucauguggcuggaag

SEQ ID NO: 1412069 - RNA, 16 nt, Human
ccucauguggcuggaa

SEQ ID NO: 1412070 - RNA, 15 nt, Human
ccucauguggcugga

SEQ ID NO: 1412071 - RNA, 13 nt, Human
ccucauguggcug

SEQ ID NO: 1412072 - RNA, 13 nt, Human
ccucauguucuua

SEQ ID NO: 1412073 - RNA, 22 nt, Human
ccucagccucccaaguagcugg

SEQ ID NO: 1412074 - RNA, 19 nt, Human
ccucagccucccaaagugc

SEQ ID NO: 1412075 - RNA, 15 nt, Human
ccucaagcugcaucu

SEQ ID NO: 1412076 - RNA, 17 nt, Human
ccucaagaugaaggcaa

SEQ ID NO: 1412077 - RNA, 18 nt, Human
ccucaacguauuguuucg

SEQ ID NO: 1412078 - RNA, 19 nt, Human
ccucaacguugcuccccau

SEQ ID NO: 1412079 - RNA, 19 nt, Human
ccuauugugcaauguaaau

SEQ ID NO: 1412080 - RNA, 18 nt, Human
ccuauuuccauucaacaa

SEQ ID NO: 1412081 - RNA, 16 nt, Human
ccuauuuccagaaaua

SEQ ID NO: 1412082 - RNA, 15 nt, Human
ccuauuuuaauaaac

SEQ ID NO: 1412083 - RNA, 16 nt, Human
ccuagauuuaauauaa

SEQ ID NO: 1412084 - RNA, 16 nt, Human
ccuagauucagggaaa

SEQ ID NO: 1412085 - RNA, 21 nt, Human
ccuagauguauaacuaggagc

SEQ ID NO: 1412086 - RNA, 22 nt, Human
ccuagauguauaacuaggagcu

SEQ ID NO: 1412087 - RNA, 20 nt, Human
ccuagauguauaacuaggag

SEQ ID NO: 1412088 - RNA, 16 nt, Human
ccuagauccuaagggu

SEQ ID NO: 1412089 - RNA, 14 nt, Human
ccuagauccuaagg

SEQ ID NO: 1412090 - RNA, 12 nt, Human
ccuagaguccca

SEQ ID NO: 1412091 - RNA, 15 nt, Human
ccuagcacagauggc

SEQ ID NO: 1412092 - RNA, 14 nt, Human
ccuaggauucuaaa

SEQ ID NO: 1412093 - RNA, 11 nt, Human
ccuaggauucu

SEQ ID NO: 1412094 - RNA, 15 nt, Human
ccuaggaggguccuc

SEQ ID NO: 1412095 - RNA, 16 nt, Human
ccuaggcauucuggac

SEQ ID NO: 1412096 - RNA, 21 nt, Human
ccgucuccaggggcugcuucc

SEQ ID NO: 1412097 - RNA, 20 nt, Human
ccgucuccaggggcugcuuc

SEQ ID NO: 1412098 - RNA, 21 nt, Human
ccgucucaguguugagccuuu

SEQ ID NO: 1412099 - RNA, 18 nt, Human
ccguccaggagccugugc

SEQ ID NO: 1412100 - RNA, 16 nt, Human
ccguccaggagccugg

SEQ ID NO: 1412101 - RNA, 12 nt, Human
ccgucagugcug

SEQ ID NO: 1412102 - RNA, 17 nt, Human
ccgucaccccuguuucu

SEQ ID NO: 1412103 - RNA, 21 nt, Human
ccgucaccacgacuggccagg

SEQ ID NO: 1412104 - RNA, 20 nt, Human
ccgucaccacgacuggccag

SEQ ID NO: 1412105 - RNA, 19 nt, Human
ccgucaccacgacuggcca

SEQ ID NO: 1412106 - RNA, 22 nt, Human
ccgucaagagugaauucccuca

SEQ ID NO: 1412107 - RNA, 23 nt, Human
ccgucaagagugaauucccucac

SEQ ID NO: 1412108 - RNA, 22 nt, Human
ccgucaaaacagauuguuugca

SEQ ID NO: 1412109 - RNA, 18 nt, Human
ccggcuaauuuuuguaau

SEQ ID NO: 1412110 - RNA, 15 nt, Human
ccggcuaauuuuugu

SEQ ID NO: 1412111 - RNA, 19 nt, Human
ccggcuaauuuuuguauuu

SEQ ID NO: 1412112 - RNA, 16 nt, Human
ccguagguuauuuuca

SEQ ID NO: 1412113 - RNA, 20 nt, Human
ccuaagcagaaagugccuuu

SEQ ID NO: 1412114 - RNA, 19 nt, Human
ccuaagcagaaagugccuu

SEQ ID NO: 1412115 - RNA, 17 nt, Human
ccuaagcagaaagugcc

SEQ ID NO: 1412116 - RNA, 15 nt, Human
ccuaagcagaaagug

SEQ ID NO: 1412117 - RNA, 14 nt, Human
ccuaagcagaaagu

SEQ ID NO: 1412118 - RNA, 19 nt, Human
ccuaagaggcugcccuccu

SEQ ID NO: 1412119 - RNA, 16 nt, Human
ccuaagaggcugcccu

SEQ ID NO: 1412120 - RNA, 18 nt, Human
ccgucuggcccaccaggg

SEQ ID NO: 1412121 - RNA, 17 nt, Human
ccgucuggcccaccagg

SEQ ID NO: 1412122 - RNA, 16 nt, Human
ccgucuggcccaccag

SEQ ID NO: 1412123 - RNA, 16 nt, Human
ccuaagcaucuaaguu

SEQ ID NO: 1412124 - RNA, 12 nt, Human
ccuaagcaucua

SEQ ID NO: 1412125 - RNA, 23 nt, Human
ccuaagcagaaagugccuuucag

SEQ ID NO: 1412126 - RNA, 13 nt, Human
ccuaagcaucuaa

SEQ ID NO: 1412127 - RNA, 18 nt, Human
ccuaagcuggagugcagu

SEQ ID NO: 1412128 - RNA, 21 nt, Human
ccuaagggucgaaagcucuag

SEQ ID NO: 1412129 - RNA, 19 nt, Human
ccuaagggucgaaagcucu

SEQ ID NO: 1412130 - RNA, 19 nt, Human
ccuaagcuggagugcagug

SEQ ID NO: 1412131 - RNA, 22 nt, Human
ccuaagggucgaaagcucuaga

SEQ ID NO: 1412132 - RNA, 23 nt, Human
ccuaagggucgaaagcucuagaa

SEQ ID NO: 1412133 - RNA, 14 nt, Human
ccuaauaaagcugu

SEQ ID NO: 1412134 - RNA, 21 nt, Human
ccuagagucccagguuggcuc

SEQ ID NO: 1412135 - RNA, 15 nt, Human
ccuaauccaggcaga

SEQ ID NO: 1412136 - RNA, 14 nt, Human
ccuaauccaggcag

SEQ ID NO: 1412137 - RNA, 13 nt, Human
ccuaauccaggca

SEQ ID NO: 1412138 - RNA, 19 nt, Human
ccuaauaauaucccacugg

SEQ ID NO: 1412139 - RNA, 20 nt, Human
ccuaauaauaucccacuggg

SEQ ID NO: 1412140 - RNA, 21 nt, Human
ccuaauaaaguucuguacuca

SEQ ID NO: 1412141 - RNA, 16 nt, Human
ccuaauaaaguucugu

SEQ ID NO: 1412142 - RNA, 23 nt, Human
ccuaauaaagcuguguggcaguc

SEQ ID NO: 1412143 - RNA, 10 nt, Human
cccuggcuuu

SEQ ID NO: 1412144 - RNA, 24 nt, Human
cccuggcuuucauuuucucucagg

SEQ ID NO: 1412145 - RNA, 23 nt, Human
cccuggcuuucauuuucucucag

SEQ ID NO: 1412146 - RNA, 23 nt, Human
cccuggcugggacguggcucagc

SEQ ID NO: 1412147 - RNA, 17 nt, Human
cccuggccccucucccu

SEQ ID NO: 1412148 - RNA, 18 nt, Human
cccuggccccucucccuu

SEQ ID NO: 1412149 - RNA, 11 nt, Human
cccuggccccu

SEQ ID NO: 1412150 - RNA, 20 nt, Human
cccuggcccccucccuggau

SEQ ID NO: 1412151 - RNA, 21 nt, Human
cccuggcccccucccuggaug

SEQ ID NO: 1412152 - RNA, 13 nt, Human
cccuggcccccuc

SEQ ID NO: 1412153 - RNA, 14 nt, Human
cccuggccccagga

SEQ ID NO: 1412154 - RNA, 13 nt, Human
cccuggccccagg

SEQ ID NO: 1412155 - RNA, 9 nt, Human
cccuggccc

SEQ ID NO: 1412156 - RNA, 20 nt, Human
cccuggcaugucaacagcgu

SEQ ID NO: 1412157 - RNA, 22 nt, Human
cccuggcagagaugccucccug

SEQ ID NO: 1412158 - RNA, 21 nt, Human
cccuggcagagaugccucccu

SEQ ID NO: 1412159 - RNA, 12 nt, Human
cccuggcagaga

SEQ ID NO: 1412160 - RNA, 16 nt, Human
cccucacccugccuua

SEQ ID NO: 1412161 - RNA, 13 nt, Human
cccucacccugcc

SEQ ID NO: 1412162 - RNA, 20 nt, Human
cccuauuuagaugauaaaga

SEQ ID NO: 1412163 - RNA, 18 nt, Human
cccucacaguauugcuca

SEQ ID NO: 1412164 - RNA, 11 nt, Human
cccucacccau

SEQ ID NO: 1412165 - RNA, 13 nt, Human
cccucacccaucc

SEQ ID NO: 1412166 - RNA, 17 nt, Human
cccucacccauccuaga

SEQ ID NO: 1412167 - RNA, 17 nt, Human
cccugugccuccucccu

SEQ ID NO: 1412168 - RNA, 13 nt, Human
cccugugccccca

SEQ ID NO: 1412169 - RNA, 19 nt, Human
cccugugcccccagggucc

SEQ ID NO: 1412170 - RNA, 12 nt, Human
cccugugccccc

SEQ ID NO: 1412171 - RNA, 22 nt, Human
cccugugccuugucacgccaga

SEQ ID NO: 1412172 - RNA, 20 nt, Human
cccugugccuugucacgcca

SEQ ID NO: 1412173 - RNA, 15 nt, Human
cccugugccuuguca

SEQ ID NO: 1412174 - RNA, 19 nt, Human
cccugugccuccucccucc

SEQ ID NO: 1412175 - RNA, 13 nt, Human
cccuucucuguau

SEQ ID NO: 1412176 - RNA, 12 nt, Human
ccgcccccuccu

SEQ ID NO: 1412177 - RNA, 14 nt, Human
ccgcccccagguag

SEQ ID NO: 1412178 - RNA, 20 nt, Human
ccgcccccagcccccuccug

SEQ ID NO: 1412179 - RNA, 20 nt, Human
ccgccauucucaagcccugc

SEQ ID NO: 1412180 - RNA, 21 nt, Human
ccgccauucucaagcccugca

SEQ ID NO: 1412181 - RNA, 15 nt, Human
ccgccagcucuguuc

SEQ ID NO: 1412182 - RNA, 14 nt, Human
ccgccagcucuguu

SEQ ID NO: 1412183 - RNA, 13 nt, Human
ccgccagcucugu

SEQ ID NO: 1412184 - RNA, 16 nt, Human
ccgccacuggggcuca

SEQ ID NO: 1412185 - RNA, 20 nt, Human
ccgccacuggggcucagagc

SEQ ID NO: 1412186 - RNA, 14 nt, Human
ccgccacuggggcu

SEQ ID NO: 1412187 - RNA, 13 nt, Human
ccgccacuggggc

SEQ ID NO: 1412188 - RNA, 16 nt, Human
ccgaccccaagaguuu

SEQ ID NO: 1412189 - RNA, 14 nt, Human
ccgaaugugucuuu

SEQ ID NO: 1412190 - RNA, 13 nt, Human
ccgaaugugucuu

SEQ ID NO: 1412191 - RNA, 15 nt, Human
ccgaaugugucuuua

SEQ ID NO: 1412192 - RNA, 23 nt, Human
ccgaaucucuuuuugcuuucgaa

SEQ ID NO: 1412193 - RNA, 12 nt, Human
cccuucuucccu

SEQ ID NO: 1412194 - RNA, 23 nt, Human
cccuucugcucagcucugggcca

SEQ ID NO: 1412195 - RNA, 14 nt, Human
cccuucugcucagc

SEQ ID NO: 1412196 - RNA, 17 nt, Human
cccuucuuuccacagaa

SEQ ID NO: 1412197 - RNA, 17 nt, Human
ccuggccccucucccuu

SEQ ID NO: 1412198 - RNA, 20 nt, Human
ccuggccccucucccuuggg

SEQ ID NO: 1412199 - RNA, 16 nt, Human
ccuggccccucucccu

SEQ ID NO: 1412200 - RNA, 15 nt, Human
ccuggccccucuccc

SEQ ID NO: 1412201 - RNA, 14 nt, Human
ccuggccccucucc

SEQ ID NO: 1412202 - RNA, 13 nt, Human
ccuggccccucuc

SEQ ID NO: 1412203 - RNA, 20 nt, Human
ccuggccgcccccugccccc

SEQ ID NO: 1412204 - RNA, 15 nt, Human
ccuggccgcccccug

SEQ ID NO: 1412205 - RNA, 23 nt, Human
ccuggcccugcuuccugcuugcc

SEQ ID NO: 1412206 - RNA, 21 nt, Human
ccuggcccugcuuccugcuug

SEQ ID NO: 1412207 - RNA, 17 nt, Human
ccuggcccugcuuccug

SEQ ID NO: 1412208 - RNA, 16 nt, Human
ccuggcccugcuuccu

SEQ ID NO: 1412209 - RNA, 14 nt, Human
ccuggcccugcuuc

SEQ ID NO: 1412210 - RNA, 13 nt, Human
ccuggcccugcuu

SEQ ID NO: 1412211 - RNA, 14 nt, Human
ccuggccgcccccu

SEQ ID NO: 1412212 - RNA, 12 nt, Human
ccuggccgcccc

SEQ ID NO: 1412213 - RNA, 19 nt, Human
ccuggccgaguccaagcug

SEQ ID NO: 1412214 - RNA, 18 nt, Human
ccuggccgaguccaagcu

SEQ ID NO: 1412215 - RNA, 23 nt, Human
ccuggaggccccaacccuguccu

SEQ ID NO: 1412216 - RNA, 16 nt, Human
ccuggaggcccaguuc

SEQ ID NO: 1412217 - RNA, 14 nt, Human
ccuggaggcccagu

SEQ ID NO: 1412218 - RNA, 13 nt, Human
ccuggaggcccag

SEQ ID NO: 1412219 - RNA, 12 nt, Human
ccuggaggccca

SEQ ID NO: 1412220 - RNA, 22 nt, Human
ccuggaggcacugaagugcuua

SEQ ID NO: 1412221 - RNA, 14 nt, Human
ccuggaggcacuga

SEQ ID NO: 1412222 - RNA, 21 nt, Human
ccuggaggaccugagccugcc

SEQ ID NO: 1412223 - RNA, 22 nt, Human
ccuggaggaccugagccugccg

SEQ ID NO: 1412224 - RNA, 20 nt, Human
ccuggaggaccugagccugc

SEQ ID NO: 1412225 - RNA, 19 nt, Human
ccuggaggaccugagccug

SEQ ID NO: 1412226 - RNA, 18 nt, Human
ccuggaggaccugagccu

SEQ ID NO: 1412227 - RNA, 17 nt, Human
ccuggaggaccugagcc

SEQ ID NO: 1412228 - RNA, 16 nt, Human
ccuggaggaccugagc

SEQ ID NO: 1412229 - RNA, 15 nt, Human
ccuggaggaccugag

SEQ ID NO: 1412230 - RNA, 14 nt, Human
ccuggaggaccuga

SEQ ID NO: 1412231 - RNA, 13 nt, Human
ccuggaggaccug

SEQ ID NO: 1412232 - RNA, 12 nt, Human
ccuggaggaccu

SEQ ID NO: 1412233 - RNA, 21 nt, Human
ccuggagcccuggagacccca

SEQ ID NO: 1412234 - RNA, 21 nt, Human
ccugccccaacucuccccuga

SEQ ID NO: 1412235 - RNA, 17 nt, Human
ccugccccaacuccuuc

SEQ ID NO: 1412236 - RNA, 15 nt, Human
ccugccccaacuccu

SEQ ID NO: 1412237 - RNA, 14 nt, Human
ccugccccaacucc

SEQ ID NO: 1412238 - RNA, 16 nt, Human
ccugcccaugggagcu

SEQ ID NO: 1412239 - RNA, 22 nt, Human
ccugcccaguugcacucaggug

SEQ ID NO: 1412240 - RNA, 16 nt, Human
ccugcccaguugcacu

SEQ ID NO: 1412241 - RNA, 16 nt, Human
ccugcccauuggagag

SEQ ID NO: 1412242 - RNA, 22 nt, Human
ccugcccagugcacuugcugga

SEQ ID NO: 1412243 - RNA, 18 nt, Human
ccugcccagugcacuugc

SEQ ID NO: 1412244 - RNA, 22 nt, Human
ccugccccaacuccuuccagcu

SEQ ID NO: 1412245 - RNA, 21 nt, Human
ccuggagggggaauggcagca

SEQ ID NO: 1412246 - RNA, 22 nt, Human
ccuggagggggaauggcagcag

SEQ ID NO: 1412247 - RNA, 22 nt, Human
ccuggaguguaugacugcacau

SEQ ID NO: 1412248 - RNA, 14 nt, Human
ccuggaugauacua

SEQ ID NO: 1412249 - RNA, 16 nt, Human
ccuggaugacauuaaa

SEQ ID NO: 1412250 - RNA, 14 nt, Human
ccuggaucucccug

SEQ ID NO: 1412251 - RNA, 17 nt, Human
ccuggaucagcguggcc

SEQ ID NO: 1412252 - RNA, 16 nt, Human
ccuggaucagcguggc

SEQ ID NO: 1412253 - RNA, 14 nt, Human
ccuggaucagcgug

SEQ ID NO: 1412254 - RNA, 17 nt, Human
ccuggaucagaacagga

SEQ ID NO: 1412255 - RNA, 20 nt, Human
ccuggaucagcguggccuug

SEQ ID NO: 1412256 - RNA, 19 nt, Human
ccuggaucagcguggccuu

SEQ ID NO: 1412257 - RNA, 18 nt, Human
ccuggaucagcguggccu

SEQ ID NO: 1412258 - RNA, 18 nt, Human
ccucugcugaccugcuga

SEQ ID NO: 1412259 - RNA, 20 nt, Human
ccucugcugcugucccuccc

SEQ ID NO: 1412260 - RNA, 19 nt, Human
ccucugcugcugucccucc

SEQ ID NO: 1412261 - RNA, 14 nt, Human
ccucugcugcuguc

SEQ ID NO: 1412262 - RNA, 15 nt, Human
ccucugcuucucacg

SEQ ID NO: 1412263 - RNA, 17 nt, Human
ccucugcugaccugcug

SEQ ID NO: 1412264 - RNA, 23 nt, Human
ccucucugcagacuucccagcua

SEQ ID NO: 1412265 - RNA, 22 nt, Human
ccucucugcagacuucccagcu

SEQ ID NO: 1412266 - RNA, 23 nt, Human
ccucucugcaggucccuaauaaa

SEQ ID NO: 1412267 - RNA, 21 nt, Human
ccucucugcaggucccuaaua

SEQ ID NO: 1412268 - RNA, 22 nt, Human
ccucucugcaggucccuaauaa

SEQ ID NO: 1412269 - RNA, 13 nt, Human
ccucucugcaggu

SEQ ID NO: 1412270 - RNA, 21 nt, Human
ccucucugcagacuucccagc

SEQ ID NO: 1412271 - RNA, 17 nt, Human
ccucucugcagacuucc

SEQ ID NO: 1412272 - RNA, 15 nt, Human
ccucucugcaggucc

SEQ ID NO: 1412273 - RNA, 22 nt, Human
ccugcaggaaggagcugccugg

SEQ ID NO: 1412274 - RNA, 21 nt, Human
ccugcaggaaggagcugccug

SEQ ID NO: 1412275 - RNA, 23 nt, Human
ccugcaggaaggagcugccugga

SEQ ID NO: 1412276 - RNA, 20 nt, Human
ccugcaggaaggagcugccu

SEQ ID NO: 1412277 - RNA, 19 nt, Human
ccugcaggaaggagcugcc

SEQ ID NO: 1412278 - RNA, 17 nt, Human
ccugcaggaaggagcug

SEQ ID NO: 1412279 - RNA, 14 nt, Human
ccugcaggaaggag

SEQ ID NO: 1412280 - RNA, 18 nt, Human
ccugagagauuuaacauu

SEQ ID NO: 1412281 - RNA, 17 nt, Human
ccugagaaagcucaaag

SEQ ID NO: 1412282 - RNA, 14 nt, Human
ccugagaaagcuca

SEQ ID NO: 1412283 - RNA, 15 nt, Human
ccugagacaaaugga

SEQ ID NO: 1412284 - RNA, 19 nt, Human
ccugagacaaauggaggcc

SEQ ID NO: 1412285 - RNA, 20 nt, Human
ccugagacaaauggaggccu

SEQ ID NO: 1412286 - RNA, 21 nt, Human
ccugagacaaauggaggccug

SEQ ID NO: 1412287 - RNA, 14 nt, Human
ccugagguuacugg

SEQ ID NO: 1412288 - RNA, 21 nt, Human
ccugaguacuccacacugcac

SEQ ID NO: 1412289 - RNA, 21 nt, Human
ccugaguagaaaggccuuuaa

SEQ ID NO: 1412290 - RNA, 23 nt, Human
ccugaguacuccacacugcacaa

SEQ ID NO: 1412291 - RNA, 14 nt, Human
ccugaguagaaagg

SEQ ID NO: 1412292 - RNA, 20 nt, Human
ccugaguagaaaggccuuua

SEQ ID NO: 1412293 - RNA, 18 nt, Human
ccugaguacuccacacug

SEQ ID NO: 1412294 - RNA, 17 nt, Human
ccugaguacuccacacu

SEQ ID NO: 1412295 - RNA, 13 nt, Human
ccugcaggaagga

SEQ ID NO: 1412296 - RNA, 21 nt, Human
ccugcagcuuguagccagccg

SEQ ID NO: 1412297 - RNA, 20 nt, Human
ccugcagcuuguagccagcc

SEQ ID NO: 1412298 - RNA, 19 nt, Human
ccugcagcuuguagccagc

SEQ ID NO: 1412299 - RNA, 18 nt, Human
ccugcagcuuguagccag

SEQ ID NO: 1412300 - RNA, 17 nt, Human
ccugcagcuuguagcca

SEQ ID NO: 1412301 - RNA, 16 nt, Human
ccugcagcuuguagcc

SEQ ID NO: 1412302 - RNA, 12 nt, Human
ccugcagcuugu

SEQ ID NO: 1412303 - RNA, 15 nt, Human
ccugcagacucacug

SEQ ID NO: 1412304 - RNA, 18 nt, Human
ccugcagacccugcccuu

SEQ ID NO: 1412305 - RNA, 17 nt, Human
ccugcagacccugcccu

SEQ ID NO: 1412306 - RNA, 16 nt, Human
ccugcagacccugccc

SEQ ID NO: 1412307 - RNA, 15 nt, Human
ccugcagacccugcc

SEQ ID NO: 1412308 - RNA, 14 nt, Human
ccugcagacccugc

SEQ ID NO: 1412309 - RNA, 13 nt, Human
ccugcagacccug

SEQ ID NO: 1412310 - RNA, 16 nt, Human
ccugcagaauuugggu

SEQ ID NO: 1412311 - RNA, 23 nt, Human
ccugcagaaccggagagccagcu

SEQ ID NO: 1412312 - RNA, 22 nt, Human
ccugcagaaccggagagccagc

SEQ ID NO: 1412313 - RNA, 21 nt, Human
ccugcagaaccggagagccag

SEQ ID NO: 1412314 - RNA, 17 nt, Human
ccucuugagcaguggcu

SEQ ID NO: 1412315 - RNA, 16 nt, Human
ccucuugagcaguggc

SEQ ID NO: 1412316 - RNA, 15 nt, Human
ccucuugagcagugg

SEQ ID NO: 1412317 - RNA, 14 nt, Human
ccucuugagcagug

SEQ ID NO: 1412318 - RNA, 20 nt, Human
ccucuugaccaggcugccuc

SEQ ID NO: 1412319 - RNA, 13 nt, Human
ccucuugagccuu

SEQ ID NO: 1412320 - RNA, 19 nt, Human
ccucuugagccuugaacuu

SEQ ID NO: 1412321 - RNA, 15 nt, Human
ccugaccuggccccc

SEQ ID NO: 1412322 - RNA, 14 nt, Human
ccugaccugucuca

SEQ ID NO: 1412323 - RNA, 14 nt, Human
ccugaccuggcccc

SEQ ID NO: 1412324 - RNA, 24 nt, Human
ccucuugagcaguggcugguccag

SEQ ID NO: 1412325 - RNA, 19 nt, Human
ccucuugagcaguggcugg

SEQ ID NO: 1412326 - RNA, 13 nt, Human
ccugaccucaggc

SEQ ID NO: 1412327 - RNA, 23 nt, Human
ccugacccuccaccgcagaagga

SEQ ID NO: 1412328 - RNA, 12 nt, Human
ccucuuuagagu

SEQ ID NO: 1412329 - RNA, 17 nt, Human
ccucuuuagaguuagac

SEQ ID NO: 1412330 - RNA, 19 nt, Human
ccucuuuagaguuagacug

SEQ ID NO: 1412331 - RNA, 16 nt, Human
ccccgacuucauccca

SEQ ID NO: 1412332 - RNA, 13 nt, Human
ccccgacuggggc

SEQ ID NO: 1412333 - RNA, 14 nt, Human
ccccgacuuuuguu

SEQ ID NO: 1412334 - RNA, 13 nt, Human
ccccggcagcagc

SEQ ID NO: 1412335 - RNA, 18 nt, Human
ccccggcagcagccccca

SEQ ID NO: 1412336 - RNA, 22 nt, Human
ccccaaacaccuuccagcuccu

SEQ ID NO: 1412337 - RNA, 18 nt, Human
ccccaaacaccuuccagc

SEQ ID NO: 1412338 - RNA, 19 nt, Human
ccccaaaagcgugagcuua

SEQ ID NO: 1412339 - RNA, 20 nt, Human
cccauuuaaauuuuuuuccu

SEQ ID NO: 1412340 - RNA, 23 nt, Human
ccccaucucaugccccuggcugg

SEQ ID NO: 1412341 - RNA, 21 nt, Human
ccccaucucaugccccuggcu

SEQ ID NO: 1412342 - RNA, 17 nt, Human
ccccaucucaggccaga

SEQ ID NO: 1412343 - RNA, 14 nt, Human
ccccaucucaggcc

SEQ ID NO: 1412344 - RNA, 13 nt, Human
ccccaucucaggc

SEQ ID NO: 1412345 - RNA, 22 nt, Human
ccccaucguugcccccauuucu

SEQ ID NO: 1412346 - RNA, 19 nt, Human
ccccaucguugcccccauu

SEQ ID NO: 1412347 - RNA, 16 nt, Human
ccccaucugcauuccc

SEQ ID NO: 1412348 - RNA, 18 nt, Human
ccccauuuagguuucuga

SEQ ID NO: 1412349 - RNA, 14 nt, Human
ccccauuucugagg

SEQ ID NO: 1412350 - RNA, 16 nt, Human
ccccagagcccccggg

SEQ ID NO: 1412351 - RNA, 14 nt, Human
ccccagagcccagg

SEQ ID NO: 1412352 - RNA, 13 nt, Human
ccccagagcccag

SEQ ID NO: 1412353 - RNA, 23 nt, Human
ccccagacuuguuggcguaggcu

SEQ ID NO: 1412354 - RNA, 16 nt, Human
ccccagagcccaggcu

SEQ ID NO: 1412355 - RNA, 12 nt, Human
ccccucugucca

SEQ ID NO: 1412356 - RNA, 23 nt, Human
ccccucuggucgcuccugcccac

SEQ ID NO: 1412357 - RNA, 20 nt, Human
ccccucuggucgcuccugcc

SEQ ID NO: 1412358 - RNA, 19 nt, Human
ccccucuggucgcuccugc

SEQ ID NO: 1412359 - RNA, 12 nt, Human
ccccucuggucg

SEQ ID NO: 1412360 - RNA, 14 nt, Human
cccgggagcucagg

SEQ ID NO: 1412361 - RNA, 21 nt, Human
cccggcugcagaggccagagg

SEQ ID NO: 1412362 - RNA, 16 nt, Human
cccggcugcagaggcc

SEQ ID NO: 1412363 - RNA, 22 nt, Human
cccggcuccuggucaccuagga

SEQ ID NO: 1412364 - RNA, 18 nt, Human
cccggcuccuggucaccu

SEQ ID NO: 1412365 - RNA, 15 nt, Human
cccggcuccugguca

SEQ ID NO: 1412366 - RNA, 13 nt, Human
cccggcuccuggu

SEQ ID NO: 1412367 - RNA, 13 nt, Human
cccuauuaaccua

SEQ ID NO: 1412368 - RNA, 23 nt, Human
ccccuuuccuggacacucagacc

SEQ ID NO: 1412369 - RNA, 22 nt, Human
ccccuuuccuggacacucagac

SEQ ID NO: 1412370 - RNA, 10 nt, Human
ccccuuuccu

SEQ ID NO: 1412371 - RNA, 14 nt, Human
ccccuuucccaccc

SEQ ID NO: 1412372 - RNA, 13 nt, Human
ccccuuucccacc

SEQ ID NO: 1412373 - RNA, 19 nt, Human
ccccuuucacaggcagcca

SEQ ID NO: 1412374 - RNA, 21 nt, Human
ccccuuucacaggcagccagu

SEQ ID NO: 1412375 - RNA, 16 nt, Human
ccccuuucacaggcag

SEQ ID NO: 1412376 - RNA, 15 nt, Human
ccccuuucacaggca

SEQ ID NO: 1412377 - RNA, 20 nt, Human
ccccuuuagaucucugaagc

SEQ ID NO: 1412378 - RNA, 18 nt, Human
ccccuuguccuuucccuu

SEQ ID NO: 1412379 - RNA, 15 nt, Human
ccccuuguccuuucc

SEQ ID NO: 1412380 - RNA, 19 nt, Human
ccccuugggcccacaccuc

SEQ ID NO: 1412381 - RNA, 18 nt, Human
ccccuugggcccacaccu

SEQ ID NO: 1412382 - RNA, 16 nt, Human
ccccuugggcccacac

SEQ ID NO: 1412383 - RNA, 16 nt, Human
ccccuugccugugcca

SEQ ID NO: 1412384 - RNA, 11 nt, Human
ccccuugccug

SEQ ID NO: 1412385 - RNA, 22 nt, Human
ccccucuguccaggcacugaga

SEQ ID NO: 1412386 - RNA, 14 nt, Human
ccccucuguccagg

SEQ ID NO: 1412387 - RNA, 12 nt, Human
ccccucugucuu

SEQ ID NO: 1412388 - RNA, 22 nt, Human
ccccuuuucggccccauguauc

SEQ ID NO: 1412389 - RNA, 16 nt, Human
cccacuucugcacuug

SEQ ID NO: 1412390 - RNA, 14 nt, Human
cccacuucugcacu

SEQ ID NO: 1412391 - RNA, 12 nt, Human
cccacuucugca

SEQ ID NO: 1412392 - RNA, 12 nt, Human
cccacucccaca

SEQ ID NO: 1412393 - RNA, 19 nt, Human
cccacuccaucugguagaa

SEQ ID NO: 1412394 - RNA, 18 nt, Human
cccacuccaucugguaga

SEQ ID NO: 1412395 - RNA, 14 nt, Human
cccacuccaucugg

SEQ ID NO: 1412396 - RNA, 22 nt, Human
cccacuagcucuuguugagccg

SEQ ID NO: 1412397 - RNA, 15 nt, Human
cccacuagcucuugu

SEQ ID NO: 1412398 - RNA, 20 nt, Human
cccacccuggccuagaccag

SEQ ID NO: 1412399 - RNA, 13 nt, Human
cccacccuggccu

SEQ ID NO: 1412400 - RNA, 14 nt, Human
cccacucccucaca

SEQ ID NO: 1412401 - RNA, 13 nt, Human
cccacucccucac

SEQ ID NO: 1412402 - RNA, 16 nt, Human
cccacucccaggacca

SEQ ID NO: 1412403 - RNA, 14 nt, Human
cccacugccuuuga

SEQ ID NO: 1412404 - RNA, 14 nt, Human
cccacuuacauuua

SEQ ID NO: 1412405 - RNA, 22 nt, Human
cccacugugccucagagaccag

SEQ ID NO: 1412406 - RNA, 15 nt, Human
cccacugugccucag

SEQ ID NO: 1412407 - RNA, 16 nt, Human
cccacugugccucaga

SEQ ID NO: 1412408 - RNA, 13 nt, Human
cccacuucagccu

SEQ ID NO: 1412409 - RNA, 15 nt, Human
cccacuucagccucc

SEQ ID NO: 1412410 - RNA, 13 nt, Human
cccacccccagcu

SEQ ID NO: 1412411 - RNA, 15 nt, Human
cccacccucuuccua

SEQ ID NO: 1412412 - RNA, 13 nt, Human
cccacccucuucc

SEQ ID NO: 1412413 - RNA, 22 nt, Human
cccacccucguggacaccugcc

SEQ ID NO: 1412414 - RNA, 23 nt, Human
cccacccucguggacaccugccc

SEQ ID NO: 1412415 - RNA, 14 nt, Human
cccacccccggcag

SEQ ID NO: 1412416 - RNA, 21 nt, Human
cccacccucggggaugugucc

SEQ ID NO: 1412417 - RNA, 20 nt, Human
cccacccucguggacaccug

SEQ ID NO: 1412418 - RNA, 22 nt, Human
cccagggcccagagcccagcuc

SEQ ID NO: 1412419 - RNA, 20 nt, Human
cccagggcccagagcccagc

SEQ ID NO: 1412420 - RNA, 19 nt, Human
cccagggcccagagcccag

SEQ ID NO: 1412421 - RNA, 17 nt, Human
cccagggcccagagccc

SEQ ID NO: 1412422 - RNA, 16 nt, Human
cccagggcccagagcc

SEQ ID NO: 1412423 - RNA, 15 nt, Human
cccagggcccagagc

SEQ ID NO: 1412424 - RNA, 14 nt, Human
cccagggcccagag

SEQ ID NO: 1412425 - RNA, 13 nt, Human
cccagggcccaga

SEQ ID NO: 1412426 - RNA, 21 nt, Human
cccauaugcuaccaccagcug

SEQ ID NO: 1412427 - RNA, 20 nt, Human
cccauaugcuaccaccagcu

SEQ ID NO: 1412428 - RNA, 19 nt, Human
cccauauuguaaaacaggu

SEQ ID NO: 1412429 - RNA, 18 nt, Human
cccauauuguaaaacagg

SEQ ID NO: 1412430 - RNA, 15 nt, Human
cccauauuguaaaac

SEQ ID NO: 1412431 - RNA, 19 nt, Human
cccaggcuggagugcagug

SEQ ID NO: 1412432 - RNA, 16 nt, Human
cccaggaaaggcccag

SEQ ID NO: 1412433 - RNA, 19 nt, Human
cccaggaaaggcaggauug

SEQ ID NO: 1412434 - RNA, 14 nt, Human
cccauccuagaggc

SEQ ID NO: 1412435 - RNA, 19 nt, Human
ccauguccaaagaggcugc

SEQ ID NO: 1412436 - RNA, 18 nt, Human
ccauguccaaagaggcug

SEQ ID NO: 1412437 - RNA, 20 nt, Human
ccauguccaaagaggcugcc

SEQ ID NO: 1412438 - RNA, 20 nt, Human
ccauguaacugccuagaaac

SEQ ID NO: 1412439 - RNA, 16 nt, Human
ccaugucaaacaaaua

SEQ ID NO: 1412440 - RNA, 17 nt, Human
ccauguccaaagaggcu

SEQ ID NO: 1412441 - RNA, 14 nt, Human
ccauguccaaagag

SEQ ID NO: 1412442 - RNA, 13 nt, Human
ccauguccaaaga

SEQ ID NO: 1412443 - RNA, 20 nt, Human
ccaugacccugccucuccca

SEQ ID NO: 1412444 - RNA, 19 nt, Human
ccaugacccugccucuccc

SEQ ID NO: 1412445 - RNA, 18 nt, Human
ccaugacccugccucucc

SEQ ID NO: 1412446 - RNA, 17 nt, Human
ccaugacccugccucuc

SEQ ID NO: 1412447 - RNA, 16 nt, Human
ccaugacccugccucu

SEQ ID NO: 1412448 - RNA, 12 nt, Human
ccaugagcuccu

SEQ ID NO: 1412449 - RNA, 19 nt, Human
ccauguaacugccuagaaa

SEQ ID NO: 1412450 - RNA, 18 nt, Human
ccauguaacugccuagaa

SEQ ID NO: 1412451 - RNA, 17 nt, Human
ccauguaacugccuaga

SEQ ID NO: 1412452 - RNA, 14 nt, Human
ccauguaacugccu

SEQ ID NO: 1412453 - RNA, 11 nt, Human
ccauguaacug

SEQ ID NO: 1412454 - RNA, 20 nt, Human
ccaugguuaagaguccaaga

SEQ ID NO: 1412455 - RNA, 17 nt, Human
ccauggugcuaggaaga

SEQ ID NO: 1412456 - RNA, 19 nt, Human
ccauggugugaucgucuga

SEQ ID NO: 1412457 - RNA, 18 nt, Human
ccauggugugaucgucug

SEQ ID NO: 1412458 - RNA, 22 nt, Human
ccauggugcuaggaagaggagu

SEQ ID NO: 1412459 - RNA, 20 nt, Human
ccauggucggaaaacaugcu

SEQ ID NO: 1412460 - RNA, 15 nt, Human
ccaugacccugccuc

SEQ ID NO: 1412461 - RNA, 14 nt, Human
ccaugacaucaaga

SEQ ID NO: 1412462 - RNA, 22 nt, Human
ccaugacaacuucuaauugcca

SEQ ID NO: 1412463 - RNA, 21 nt, Human
ccaguuucuaaacuggagacu

SEQ ID NO: 1412464 - RNA, 20 nt, Human
ccaguuucuaaacuggagac

SEQ ID NO: 1412465 - RNA, 19 nt, Human
ccaguuucuaaacuggaga

SEQ ID NO: 1412466 - RNA, 17 nt, Human
ccaguuucuaaacugga

SEQ ID NO: 1412467 - RNA, 16 nt, Human
ccaguuuccuugggag

SEQ ID NO: 1412468 - RNA, 21 nt, Human
ccaguuguuagauuaagaaau

SEQ ID NO: 1412469 - RNA, 22 nt, Human
ccaguugucccgauuguaacuc

SEQ ID NO: 1412470 - RNA, 21 nt, Human
ccaguugucccgauuguaacu

SEQ ID NO: 1412471 - RNA, 13 nt, Human
ccaguucacccug

SEQ ID NO: 1412472 - RNA, 18 nt, Human
ccaguucauugcacuuug

SEQ ID NO: 1412473 - RNA, 17 nt, Human
ccaguucauugcacuuu

SEQ ID NO: 1412474 - RNA, 17 nt, Human
ccaggguaugaagagug

SEQ ID NO: 1412475 - RNA, 18 nt, Human
ccagggucccucugugua

SEQ ID NO: 1412476 - RNA, 17 nt, Human
ccagggucccucugugu

SEQ ID NO: 1412477 - RNA, 16 nt, Human
ccagggucccucugug

SEQ ID NO: 1412478 - RNA, 15 nt, Human
ccaggcaccaggcag

SEQ ID NO: 1412479 - RNA, 17 nt, Human
ccaggcaccaaaagaag

SEQ ID NO: 1412480 - RNA, 19 nt, Human
ccaggcagauccaggacua

SEQ ID NO: 1412481 - RNA, 18 nt, Human
ccaggcagauccaggacu

SEQ ID NO: 1412482 - RNA, 17 nt, Human
ccaggcagauccaggac

SEQ ID NO: 1412483 - RNA, 16 nt, Human
ccaggcagauccagga

SEQ ID NO: 1412484 - RNA, 15 nt, Human
ccaggcagauccagg

SEQ ID NO: 1412485 - RNA, 13 nt, Human
ccaggcagaucca

SEQ ID NO: 1412486 - RNA, 15 nt, Human
ccaggcacugucuua

SEQ ID NO: 1412487 - RNA, 16 nt, Human
ccaggcacugcuaggc

SEQ ID NO: 1412488 - RNA, 13 nt, Human
ccaggcacugcaa

SEQ ID NO: 1412489 - RNA, 12 nt, Human
ccaggcacugca

SEQ ID NO: 1412490 - RNA, 13 nt, Human
ccagggguuucuc

SEQ ID NO: 1412491 - RNA, 22 nt, Human
ccagggcuguaacugccaggcu

SEQ ID NO: 1412492 - RNA, 20 nt, Human
ccagggcuguaacugccagg

SEQ ID NO: 1412493 - RNA, 19 nt, Human
ccagggcuguaacugccag

SEQ ID NO: 1412494 - RNA, 21 nt, Human
ccagggcugggaggaaggacu

SEQ ID NO: 1412495 - RNA, 19 nt, Human
ccagggcugggaggaagga

SEQ ID NO: 1412496 - RNA, 18 nt, Human
ccagggcugggaggaagg

SEQ ID NO: 1412497 - RNA, 15 nt, Human
ccagggcugggagga

SEQ ID NO: 1412498 - RNA, 23 nt, Human
ccaggcucguggacugaguggga

SEQ ID NO: 1412499 - RNA, 21 nt, Human
ccaggcucguggacugagugg

SEQ ID NO: 1412500 - RNA, 20 nt, Human
ccaggcucguggacugagug

SEQ ID NO: 1412501 - RNA, 18 nt, Human
ccaggcucguggacugag

SEQ ID NO: 1412502 - RNA, 17 nt, Human
ccaggcucggccugccc

SEQ ID NO: 1412503 - RNA, 16 nt, Human
ccaggcucggccugcc

SEQ ID NO: 1412504 - RNA, 23 nt, Human
ccagcagcugccaggagcacggc

SEQ ID NO: 1412505 - RNA, 22 nt, Human
ccagcagcuuuagaaucccagc

SEQ ID NO: 1412506 - RNA, 20 nt, Human
ccagcagcugccaggagcac

SEQ ID NO: 1412507 - RNA, 10 nt, Human
ccagcagcug

SEQ ID NO: 1412508 - RNA, 14 nt, Human
ccagcagcaccugc

SEQ ID NO: 1412509 - RNA, 20 nt, Human
ccagcagcaccugcccuacc

SEQ ID NO: 1412510 - RNA, 18 nt, Human
ccagcagauuuccagccu

SEQ ID NO: 1412511 - RNA, 23 nt, Human
ccaggaaacucugcauucuagua

SEQ ID NO: 1412512 - RNA, 22 nt, Human
ccagcucaauggacuggaaggg

SEQ ID NO: 1412513 - RNA, 22 nt, Human
ccagcuacccuuuuucuccagc

SEQ ID NO: 1412514 - RNA, 21 nt, Human
ccagcuacccuuuuucuccag

SEQ ID NO: 1412515 - RNA, 16 nt, Human
ccagcuacccuuuuuc

SEQ ID NO: 1412516 - RNA, 20 nt, Human
ccagccccucuuggagaagu

SEQ ID NO: 1412517 - RNA, 21 nt, Human
ccagccccucuuggagaaguc

SEQ ID NO: 1412518 - RNA, 18 nt, Human
ccagccccucuuggagaa

SEQ ID NO: 1412519 - RNA, 13 nt, Human
ccagccccucuug

SEQ ID NO: 1412520 - RNA, 23 nt, Human
ccagccccucuggucgcuccugc

SEQ ID NO: 1412521 - RNA, 22 nt, Human
ccagccccucuggucgcuccug

SEQ ID NO: 1412522 - RNA, 17 nt, Human
ccagccccucuggucgc

SEQ ID NO: 1412523 - RNA, 15 nt, Human
ccagccccucugguc

SEQ ID NO: 1412524 - RNA, 10 nt, Human
ccaggaagcc

SEQ ID NO: 1412525 - RNA, 14 nt, Human
ccaggaacugggcc

SEQ ID NO: 1412526 - RNA, 17 nt, Human
ccaggaagaucccccag

SEQ ID NO: 1412527 - RNA, 18 nt, Human
ccaggaagaucccccaga

SEQ ID NO: 1412528 - RNA, 19 nt, Human
ccaggaagaucccccagaa

SEQ ID NO: 1412529 - RNA, 19 nt, Human
ccaggaacagcaaaugcaa

SEQ ID NO: 1412530 - RNA, 20 nt, Human
ccagcuuauagucauauaua

SEQ ID NO: 1412531 - RNA, 20 nt, Human
ccaggaaagcgccuccaacc

SEQ ID NO: 1412532 - RNA, 22 nt, Human
ccagagucccugccuggaccag

SEQ ID NO: 1412533 - RNA, 19 nt, Human
ccagagucccugccuggac

SEQ ID NO: 1412534 - RNA, 18 nt, Human
ccagagucccugccugga

SEQ ID NO: 1412535 - RNA, 17 nt, Human
ccagagucccugccugg

SEQ ID NO: 1412536 - RNA, 16 nt, Human
ccagagucccugccug

SEQ ID NO: 1412537 - RNA, 16 nt, Human
ccagauccagccuggg

SEQ ID NO: 1412538 - RNA, 15 nt, Human
ccagauccagccugg

SEQ ID NO: 1412539 - RNA, 14 nt, Human
ccagauccagccug

SEQ ID NO: 1412540 - RNA, 13 nt, Human
ccagauccagccu

SEQ ID NO: 1412541 - RNA, 15 nt, Human
ccagauccuggaaau

SEQ ID NO: 1412542 - RNA, 18 nt, Human
ccagagugcugaaggaau

SEQ ID NO: 1412543 - RNA, 20 nt, Human
ccuucugggcagaccuugac

SEQ ID NO: 1412544 - RNA, 16 nt, Human
ccuggccuccugccuc

SEQ ID NO: 1412545 - RNA, 11 nt, Human
ccuucugcugc

SEQ ID NO: 1412546 - RNA, 17 nt, Human
ccuucugcucagcucug

SEQ ID NO: 1412547 - RNA, 12 nt, Human
ccuucugcucag

SEQ ID NO: 1412548 - RNA, 22 nt, Human
ccuucugagcuccuguccccug

SEQ ID NO: 1412549 - RNA, 21 nt, Human
ccuucugagcuccuguccccu

SEQ ID NO: 1412550 - RNA, 17 nt, Human
ccuucugagcuccuguc

SEQ ID NO: 1412551 - RNA, 15 nt, Human
ccuucugagcuccug

SEQ ID NO: 1412552 - RNA, 14 nt, Human
ccuucugagcuccu

SEQ ID NO: 1412553 - RNA, 21 nt, Human
ccuggccuccugccucuacug

SEQ ID NO: 1412554 - RNA, 18 nt, Human
ccuggccuccugccucua

SEQ ID NO: 1412555 - RNA, 17 nt, Human
ccuggccuccugccucu

SEQ ID NO: 1412556 - RNA, 20 nt, Human
ccuugccucaaugccaguaa

SEQ ID NO: 1412557 - RNA, 19 nt, Human
ccuugccucaaugccagua

SEQ ID NO: 1412558 - RNA, 16 nt, Human
ccuugccucaaugcca

SEQ ID NO: 1412559 - RNA, 15 nt, Human
ccuugccucaaugcc

SEQ ID NO: 1412560 - RNA, 21 nt, Human
ccuuuugaaauuaaccucuca

SEQ ID NO: 1412561 - RNA, 14 nt, Human
ccuuuucuguucua

SEQ ID NO: 1412562 - RNA, 13 nt, Human
ccuuuucugacca

SEQ ID NO: 1412563 - RNA, 18 nt, Human
ccuuuucugaccaaagag

SEQ ID NO: 1412564 - RNA, 12 nt, Human
ccuuuucugacc

SEQ ID NO: 1412565 - RNA, 19 nt, Human
ccuuucccaggugcuacac

SEQ ID NO: 1412566 - RNA, 22 nt, Human
ccuuucccaccccaaccugcuc

SEQ ID NO: 1412567 - RNA, 18 nt, Human
ccuuucccaccccaaccu

SEQ ID NO: 1412568 - RNA, 12 nt, Human
ccuuucccaccc

SEQ ID NO: 1412569 - RNA, 11 nt, Human
ccuuucccacc

SEQ ID NO: 1412570 - RNA, 18 nt, Human
ccuuuccauccauggcca

SEQ ID NO: 1412571 - RNA, 22 nt, Human
ccuuuccauaaauccuugauga

SEQ ID NO: 1412572 - RNA, 20 nt, Human
ccuuuccauaaauccuugau

SEQ ID NO: 1412573 - RNA, 17 nt, Human
ccuuuagaucucugaag

SEQ ID NO: 1412574 - RNA, 17 nt, Human
ccuuggacauccuccuc

SEQ ID NO: 1412575 - RNA, 16 nt, Human
ccuuggacauccuccu

SEQ ID NO: 1412576 - RNA, 18 nt, Human
ccuuggacaacuuuucuc

SEQ ID NO: 1412577 - RNA, 12 nt, Human
ccuugcuuguua

SEQ ID NO: 1412578 - RNA, 13 nt, Human
ccuuuagguucuu

SEQ ID NO: 1412579 - RNA, 23 nt, Human
ccuuuccaccacagccagcaccu

SEQ ID NO: 1412580 - RNA, 16 nt, Human
ccuuuagaucucugaa

SEQ ID NO: 1412581 - RNA, 16 nt, Human
ccuuggacacgcucag

SEQ ID NO: 1412582 - RNA, 17 nt, Human
ccuuuuuuauacauaaa

SEQ ID NO: 1412583 - RNA, 18 nt, Human
ccuuuuuuauacauaaac

SEQ ID NO: 1412584 - RNA, 22 nt, Human
ccuuuuuuaggaagcaagcuua

SEQ ID NO: 1412585 - RNA, 21 nt, Human
cgacaguggaugcugggucca

SEQ ID NO: 1412586 - RNA, 19 nt, Human
ccuuuuuuauacauaaaca

SEQ ID NO: 1412587 - RNA, 16 nt, Human
ccuuuuucuccagcug

SEQ ID NO: 1412588 - RNA, 14 nt, Human
ccuuuuucuccagc

SEQ ID NO: 1412589 - RNA, 17 nt, Human
ccuuuuuccucuccaca

SEQ ID NO: 1412590 - RNA, 16 nt, Human
ccuuuuuccucuccac

SEQ ID NO: 1412591 - RNA, 15 nt, Human
ccuuuuuccucucca

SEQ ID NO: 1412592 - RNA, 13 nt, Human
ccuuuuuccucuc

SEQ ID NO: 1412593 - RNA, 12 nt, Human
ccuuuuuuauac

SEQ ID NO: 1412594 - RNA, 15 nt, Human
ccuuuuggguuucug

SEQ ID NO: 1412595 - RNA, 21 nt, Human
ccuuuuggguuucugcccugc

SEQ ID NO: 1412596 - RNA, 13 nt, Human
ccuuuuucauuua

SEQ ID NO: 1412597 - RNA, 13 nt, Human
cgaccgcccccuc

SEQ ID NO: 1412598 - RNA, 13 nt, Human
cgaccgccccagu

SEQ ID NO: 1412599 - RNA, 13 nt, Human
cgaccaucugauu

SEQ ID NO: 1412600 - RNA, 18 nt, Human
cgaguggagucugccacc

SEQ ID NO: 1412601 - RNA, 19 nt, Human
cgaguggagucugccaccc

SEQ ID NO: 1412602 - RNA, 14 nt, Human
cgaguggagucugc

SEQ ID NO: 1412603 - RNA, 15 nt, Human
cgagugcucauuuca

SEQ ID NO: 1412604 - RNA, 20 nt, Human
cgcccuuuccuccucaggca

SEQ ID NO: 1412605 - RNA, 15 nt, Human
cgccgucuccagggg

SEQ ID NO: 1412606 - RNA, 12 nt, Human
cgccgccucuuu

SEQ ID NO: 1412607 - RNA, 15 nt, Human
cgccggaucugaggg

SEQ ID NO: 1412608 - RNA, 21 nt, Human
cggagccacuccucugacuca

SEQ ID NO: 1412609 - RNA, 18 nt, Human
cggagccacuccucugac

SEQ ID NO: 1412610 - RNA, 17 nt, Human
cggagccacuccucuga

SEQ ID NO: 1412611 - RNA, 13 nt, Human
cggagccacuccu

SEQ ID NO: 1412612 - RNA, 11 nt, Human
cggagccacuc

SEQ ID NO: 1412613 - RNA, 20 nt, Human
cggcucggaggaagccccca

SEQ ID NO: 1412614 - RNA, 16 nt, Human
cggcucggaggaagcc

SEQ ID NO: 1412615 - RNA, 13 nt, Human
cggcuccugguca

SEQ ID NO: 1412616 - RNA, 19 nt, Human
cggcuccuggucaccuagg

SEQ ID NO: 1412617 - RNA, 11 nt, Human
cggcuccuggu

SEQ ID NO: 1412618 - RNA, 20 nt, Human
cggcuccucagggacucagg

SEQ ID NO: 1412619 - RNA, 14 nt, Human
cggcuccucaggga

SEQ ID NO: 1412620 - RNA, 13 nt, Human
cggcuccucaggg

SEQ ID NO: 1412621 - RNA, 23 nt, Human
cggcuccucgagaucccaacacu

SEQ ID NO: 1412622 - RNA, 17 nt, Human
cggcggccccuagcgcu

SEQ ID NO: 1412623 - RNA, 16 nt, Human
cggagguguggagccg

SEQ ID NO: 1412624 - RNA, 22 nt, Human
cggagguugggugggccggcuu

SEQ ID NO: 1412625 - RNA, 17 nt, Human
cggagucaaaaauuaaa

SEQ ID NO: 1412626 - RNA, 17 nt, Human
cuagccaaaccucacca

SEQ ID NO: 1412627 - RNA, 13 nt, Human
cuagccaaaccuc

SEQ ID NO: 1412628 - RNA, 19 nt, Human
cuagcauuucccaacacaa

SEQ ID NO: 1412629 - RNA, 23 nt, Human
cuagcauuguaaaauuauuucau

SEQ ID NO: 1412630 - RNA, 22 nt, Human
cuagcauuguaaaauuauuuca

SEQ ID NO: 1412631 - RNA, 21 nt, Human
cuagccaaaccucaccaacuc

SEQ ID NO: 1412632 - RNA, 20 nt, Human
cuagccaaaccucaccaacu

SEQ ID NO: 1412633 - RNA, 18 nt, Human
cuagccaaaccucaccaa

SEQ ID NO: 1412634 - RNA, 15 nt, Human
cuagccccuggggug

SEQ ID NO: 1412635 - RNA, 21 nt, Human
cuagcaguggcaggcagaggc

SEQ ID NO: 1412636 - RNA, 20 nt, Human
cuagcaguggcaggcagagg

SEQ ID NO: 1412637 - RNA, 18 nt, Human
cuagcaguggcaggcaga

SEQ ID NO: 1412638 - RNA, 15 nt, Human
cuagcaguggcaggc

SEQ ID NO: 1412639 - RNA, 13 nt, Human
cuagcaguggcag

SEQ ID NO: 1412640 - RNA, 22 nt, Human
cuagaacacaggcaaaauccuu

SEQ ID NO: 1412641 - RNA, 21 nt, Human
cuagaacacaggcaaaauccu

SEQ ID NO: 1412642 - RNA, 19 nt, Human
cuagaacacaggcaaaauc

SEQ ID NO: 1412643 - RNA, 14 nt, Human
cuagaacacaggca

SEQ ID NO: 1412644 - RNA, 20 nt, Human
cuaccugacacucccuuggg

SEQ ID NO: 1412645 - RNA, 19 nt, Human
cuaccugacacucccuugg

SEQ ID NO: 1412646 - RNA, 18 nt, Human
cuagggccaagcccagca

SEQ ID NO: 1412647 - RNA, 17 nt, Human
cuagggccaagcccagc

SEQ ID NO: 1412648 - RNA, 16 nt, Human
cuagggccaagcccag

SEQ ID NO: 1412649 - RNA, 23 nt, Human
cuagggaucccucaucugucccu

SEQ ID NO: 1412650 - RNA, 17 nt, Human
cuagggaucccucaucu

SEQ ID NO: 1412651 - RNA, 13 nt, Human
cuagggaucccuc

SEQ ID NO: 1412652 - RNA, 19 nt, Human
cuagcccucucacauuuau

SEQ ID NO: 1412653 - RNA, 18 nt, Human
cuagcccucucacauuua

SEQ ID NO: 1412654 - RNA, 13 nt, Human
cuagcccucucac

SEQ ID NO: 1412655 - RNA, 19 nt, Human
cuagcccuccuuuuuccaa

SEQ ID NO: 1412656 - RNA, 18 nt, Human
cuagcccuccuuuuucca

SEQ ID NO: 1412657 - RNA, 17 nt, Human
cuagcccuccuuuuucc

SEQ ID NO: 1412658 - RNA, 13 nt, Human
cuagccucagggg

SEQ ID NO: 1412659 - RNA, 20 nt, Human
cuagccucaggggucugagc

SEQ ID NO: 1412660 - RNA, 17 nt, Human
cuauaagaacuuugagc

SEQ ID NO: 1412661 - RNA, 16 nt, Human
cuauaaccagacacau

SEQ ID NO: 1412662 - RNA, 16 nt, Human
cuaguucuguagaaau

SEQ ID NO: 1412663 - RNA, 17 nt, Human
cuaguucuguagaaaug

SEQ ID NO: 1412664 - RNA, 23 nt, Human
cuaguucuguagaaaugguugua

SEQ ID NO: 1412665 - RNA, 21 nt, Human
cuaguucuucaucccacucca

SEQ ID NO: 1412666 - RNA, 22 nt, Human
cuaguucuuuguucauagccca

SEQ ID NO: 1412667 - RNA, 23 nt, Human
cuaguugaucagcuuauugucua

SEQ ID NO: 1412668 - RNA, 14 nt, Human
cuaagucuuuccau

SEQ ID NO: 1412669 - RNA, 11 nt, Human
cuaauuuaaca

SEQ ID NO: 1412670 - RNA, 22 nt, Human
cuaauuggcaugaaggugucau

SEQ ID NO: 1412671 - RNA, 18 nt, Human
cuaauugcuuauuuauug

SEQ ID NO: 1412672 - RNA, 14 nt, Human
cuaauugcuuauuu

SEQ ID NO: 1412673 - RNA, 13 nt, Human
cuaauugcuuauu

SEQ ID NO: 1412674 - RNA, 16 nt, Human
cuaagugauauaaauc

SEQ ID NO: 1412675 - RNA, 14 nt, Human
cuaagugauauaaa

SEQ ID NO: 1412676 - RNA, 12 nt, Human
cuaauugcuuau

SEQ ID NO: 1412677 - RNA, 11 nt, Human
cuaauugcuua

SEQ ID NO: 1412678 - RNA, 13 nt, Human
cuaagugauauaa

SEQ ID NO: 1412679 - RNA, 16 nt, Human
cuaagucuuuccauug

SEQ ID NO: 1412680 - RNA, 10 nt, Human
cuacaaauca

SEQ ID NO: 1412681 - RNA, 20 nt, Human
cuacaaagguuuaaaugaac

SEQ ID NO: 1412682 - RNA, 19 nt, Human
cuacaaagguuuaaaugaa

SEQ ID NO: 1412683 - RNA, 18 nt, Human
cuacaaagguuuaaauga

SEQ ID NO: 1412684 - RNA, 17 nt, Human
cuacaaagguuuaaaug

SEQ ID NO: 1412685 - RNA, 15 nt, Human
cuacaaagguuuaaa

SEQ ID NO: 1412686 - RNA, 15 nt, Human
cuacaaccaauggaa

SEQ ID NO: 1412687 - RNA, 22 nt, Human
cuacaaagguuuaaaugaacaa

SEQ ID NO: 1412688 - RNA, 21 nt, Human
cuacaaagguuuaaaugaaca

SEQ ID NO: 1412689 - RNA, 16 nt, Human
cuacaaccuccgccuc

SEQ ID NO: 1412690 - RNA, 18 nt, Human
cuaauuuuuauuuuugcu

SEQ ID NO: 1412691 - RNA, 17 nt, Human
cuaauuuuuauuaauuu

SEQ ID NO: 1412692 - RNA, 22 nt, Human
cuaauuuuuauuaauuuuaguu

SEQ ID NO: 1412693 - RNA, 22 nt, Human
cuaauuuuuaagaauugaguaa

SEQ ID NO: 1412694 - RNA, 12 nt, Human
cuaauuuauaaa

SEQ ID NO: 1412695 - RNA, 20 nt, Human
cuaauuuuuguaauuuuagu

SEQ ID NO: 1412696 - RNA, 14 nt, Human
cuaauuuuuguaau

SEQ ID NO: 1412697 - RNA, 21 nt, Human
cuaauuuuuauuuuugcugag

SEQ ID NO: 1412698 - RNA, 11 nt, Human
cuaauuuuugu

SEQ ID NO: 1412699 - RNA, 16 nt, Human
cuaauuuuuuguuguu

SEQ ID NO: 1412700 - RNA, 14 nt, Human
cuaauuuuuuguug

SEQ ID NO: 1412701 - RNA, 23 nt, Human
cuaauuuuuguauuuuuaguaga

SEQ ID NO: 1412702 - RNA, 13 nt, Human
cuaauuuuuguau

SEQ ID NO: 1412703 - RNA, 20 nt, Human
cuaauuuuuguauuuuuagu

SEQ ID NO: 1412704 - RNA, 21 nt, Human
cuaauuuuuuuguauuuuagc

SEQ ID NO: 1412705 - RNA, 20 nt, Human
cuaauuuuuuuguauuuuag

SEQ ID NO: 1412706 - RNA, 16 nt, Human
cuaauuuuuuuguauu

SEQ ID NO: 1412707 - RNA, 13 nt, Human
cuaauuuuuuugu

SEQ ID NO: 1412708 - RNA, 19 nt, Human
cuacaguuuuaacugugga

SEQ ID NO: 1412709 - RNA, 20 nt, Human
cuacaguuuuaacuguggau

SEQ ID NO: 1412710 - RNA, 18 nt, Human
cuacaguuuuaacugugg

SEQ ID NO: 1412711 - RNA, 17 nt, Human
cuacaguuuuaacugug

SEQ ID NO: 1412712 - RNA, 15 nt, Human
cuacauaauuuaguu

SEQ ID NO: 1412713 - RNA, 13 nt, Human
cuacaugagaaca

SEQ ID NO: 1412714 - RNA, 18 nt, Human
cuacaugaaacagaaaca

SEQ ID NO: 1412715 - RNA, 16 nt, Human
cuacaugaaacagaaa

SEQ ID NO: 1412716 - RNA, 15 nt, Human
cuacaugaaacagaa

SEQ ID NO: 1412717 - RNA, 17 nt, Human
cuacaugagaacaaaca

SEQ ID NO: 1412718 - RNA, 14 nt, Human
cuacaugagaacaa

SEQ ID NO: 1412719 - RNA, 18 nt, Human
cuaccucuccagccucag

SEQ ID NO: 1412720 - RNA, 21 nt, Human
cuaaagauggaguuucuaagg

SEQ ID NO: 1412721 - RNA, 20 nt, Human
cuaaagauggaguuucuaag

SEQ ID NO: 1412722 - RNA, 19 nt, Human
cuaaagauggaguuucuaa

SEQ ID NO: 1412723 - RNA, 18 nt, Human
cuaaagauggaguuucua

SEQ ID NO: 1412724 - RNA, 17 nt, Human
cuaaagauggaguuucu

SEQ ID NO: 1412725 - RNA, 21 nt, Human
cuaaccugccgagaguccauc

SEQ ID NO: 1412726 - RNA, 19 nt, Human
cuaaccugccgagagucca

SEQ ID NO: 1412727 - RNA, 17 nt, Human
cuaaagauucuauaguu

SEQ ID NO: 1412728 - RNA, 14 nt, Human
cuaaagauucuaua

SEQ ID NO: 1412729 - RNA, 12 nt, Human
cuaaagauucua

SEQ ID NO: 1412730 - RNA, 23 nt, Human
cuaaagauggaguuucuaagguc

SEQ ID NO: 1412731 - RNA, 12 nt, Human
cuaaccugccga

SEQ ID NO: 1412732 - RNA, 20 nt, Human
cuaaccuugccugguacagu

SEQ ID NO: 1412733 - RNA, 17 nt, Human
cuaaccuugccugguac

SEQ ID NO: 1412734 - RNA, 16 nt, Human
cuaaccuugccuggua

SEQ ID NO: 1412735 - RNA, 13 nt, Human
cuaaccuugccug

SEQ ID NO: 1412736 - RNA, 18 nt, Human
cuaaagauucuauaguuc

SEQ ID NO: 1412737 - RNA, 15 nt, Human
cuaacuucaccauau

SEQ ID NO: 1412738 - RNA, 21 nt, Human
cuaaccuuuacaugaggacuc

SEQ ID NO: 1412739 - RNA, 13 nt, Human
cuaaccuuuacau

SEQ ID NO: 1412740 - RNA, 21 nt, Human
cuaaccuugccugguacagua

SEQ ID NO: 1412741 - RNA, 16 nt, Human
cuaacuucaccauauu

SEQ ID NO: 1412742 - RNA, 15 nt, Human
cuaagaaagaacacg

SEQ ID NO: 1412743 - RNA, 12 nt, Human
cuaagaaagaac

SEQ ID NO: 1412744 - RNA, 21 nt, Human
cuaagaaacauuuauauugau

SEQ ID NO: 1412745 - RNA, 20 nt, Human
cuaagaaacauuuauauuga

SEQ ID NO: 1412746 - RNA, 19 nt, Human
cuaagaaacauuuauauug

SEQ ID NO: 1412747 - RNA, 22 nt, Human
cuaagaaacauuuauauugaua

SEQ ID NO: 1412748 - RNA, 16 nt, Human
cuaagaaacuuaaauu

SEQ ID NO: 1412749 - RNA, 23 nt, Human
cggcugaccaugcucaucugcug

SEQ ID NO: 1412750 - RNA, 22 nt, Human
cggcugaccaugcucaucugcu

SEQ ID NO: 1412751 - RNA, 16 nt, Human
cggcugaccaugcuca

SEQ ID NO: 1412752 - RNA, 15 nt, Human
cggcugaccaugcuc

SEQ ID NO: 1412753 - RNA, 14 nt, Human
cggcugaccaugcu

SEQ ID NO: 1412754 - RNA, 11 nt, Human
cggcugaccau

SEQ ID NO: 1412755 - RNA, 17 nt, Human
cggcucuguccccagcc

SEQ ID NO: 1412756 - RNA, 19 nt, Human
cggcucuguccccagccug

SEQ ID NO: 1412757 - RNA, 16 nt, Human
cggcucuguccccagc

SEQ ID NO: 1412758 - RNA, 15 nt, Human
cggcucuguccccag

SEQ ID NO: 1412759 - RNA, 14 nt, Human
cggcucugucccca

SEQ ID NO: 1412760 - RNA, 18 nt, Human
cggcucucaccuggcccu

SEQ ID NO: 1412761 - RNA, 16 nt, Human
cggcucucaccuggcc

SEQ ID NO: 1412762 - RNA, 13 nt, Human
cggcucucaccug

SEQ ID NO: 1412763 - RNA, 20 nt, Human
cgugacgucuggguggcccu

SEQ ID NO: 1412764 - RNA, 15 nt, Human
cgugacgucugggug

SEQ ID NO: 1412765 - RNA, 22 nt, Human
cgugaccugcuaggccagagcc

SEQ ID NO: 1412766 - RNA, 20 nt, Human
cgugaccggacuuuucugca

SEQ ID NO: 1412767 - RNA, 13 nt, Human
cgugggugugugc

SEQ ID NO: 1412768 - RNA, 18 nt, Human
cguggggugugcugggag

SEQ ID NO: 1412769 - RNA, 17 nt, Human
cguggggugugcuggga

SEQ ID NO: 1412770 - RNA, 15 nt, Human
cguggggugugcugg

SEQ ID NO: 1412771 - RNA, 20 nt, Human
cgugagcauguuuggaaggg

SEQ ID NO: 1412772 - RNA, 23 nt, Human
cgugugagaagugaaugcuggga

SEQ ID NO: 1412773 - RNA, 21 nt, Human
cgugugagaagugaaugcugg

SEQ ID NO: 1412774 - RNA, 22 nt, Human
cgugugagaagugaaugcuggg

SEQ ID NO: 1412775 - RNA, 21 nt, Human
cgugucuggcacagccuggcu

SEQ ID NO: 1412776 - RNA, 14 nt, Human
cgugucuggcacag

SEQ ID NO: 1412777 - RNA, 15 nt, Human
cguggugauuuagca

SEQ ID NO: 1412778 - RNA, 20 nt, Human
cuaaacuuccccaucuucua

SEQ ID NO: 1412779 - RNA, 16 nt, Human
cuaaacuuccccaucu

SEQ ID NO: 1412780 - RNA, 17 nt, Human
cuaaacuggagacugug

SEQ ID NO: 1412781 - RNA, 15 nt, Human
cuaaacuggagacug

SEQ ID NO: 1412782 - RNA, 14 nt, Human
cuaaacuggagacu

SEQ ID NO: 1412783 - RNA, 13 nt, Human
cuaaacuggagac

SEQ ID NO: 1412784 - RNA, 12 nt, Human
cuaaacuggaga

SEQ ID NO: 1412785 - RNA, 13 nt, Human
cgugugcaggagc

SEQ ID NO: 1412786 - RNA, 19 nt, Human
cuaaacuggagacugugug

SEQ ID NO: 1412787 - RNA, 12 nt, Human
cucccugagaug

SEQ ID NO: 1412788 - RNA, 20 nt, Human
cucccugcagaggggcugag

SEQ ID NO: 1412789 - RNA, 14 nt, Human
cucccuccucugcc

SEQ ID NO: 1412790 - RNA, 12 nt, Human
cucccuccucca

SEQ ID NO: 1412791 - RNA, 13 nt, Human
cucccuccucugc

SEQ ID NO: 1412792 - RNA, 19 nt, Human
cucccuccuaaccuagaga

SEQ ID NO: 1412793 - RNA, 20 nt, Human
cucccuccgcccccagguag

SEQ ID NO: 1412794 - RNA, 18 nt, Human
cucccuccgcccccaggu

SEQ ID NO: 1412795 - RNA, 16 nt, Human
cucccuccgcccccag

SEQ ID NO: 1412796 - RNA, 15 nt, Human
cucccuccgccccca

SEQ ID NO: 1412797 - RNA, 15 nt, Human
cuccccuccccaacu

SEQ ID NO: 1412798 - RNA, 16 nt, Human
cuccccuccccaacug

SEQ ID NO: 1412799 - RNA, 23 nt, Human
cuccccuccaucccuggcccccu

SEQ ID NO: 1412800 - RNA, 19 nt, Human
cuccccuccaucccuggcc

SEQ ID NO: 1412801 - RNA, 16 nt, Human
cuccccuccaucccug

SEQ ID NO: 1412802 - RNA, 15 nt, Human
cuccccuccaucccu

SEQ ID NO: 1412803 - RNA, 14 nt, Human
cuccccuccauccc

SEQ ID NO: 1412804 - RNA, 13 nt, Human
cuccccuccagcu

SEQ ID NO: 1412805 - RNA, 12 nt, Human
cuccccuccagc

SEQ ID NO: 1412806 - RNA, 20 nt, Human
cuccccuccaaaaugugccu

SEQ ID NO: 1412807 - RNA, 21 nt, Human
cuccccucagccucuccccug

SEQ ID NO: 1412808 - RNA, 16 nt, Human
cuccccucagccucuc

SEQ ID NO: 1412809 - RNA, 15 nt, Human
cuccccucagccucu

SEQ ID NO: 1412810 - RNA, 13 nt, Human
cuccccucagccu

SEQ ID NO: 1412811 - RNA, 12 nt, Human
cuccccucagcc

SEQ ID NO: 1412812 - RNA, 17 nt, Human
cuccccgauaaagaaug

SEQ ID NO: 1412813 - RNA, 19 nt, Human
cucccacccggcugcagag

SEQ ID NO: 1412814 - RNA, 17 nt, Human
cucccacccggcugcag

SEQ ID NO: 1412815 - RNA, 20 nt, Human
cucccacccucuuccuacug

SEQ ID NO: 1412816 - RNA, 18 nt, Human
cucccaccuagcagcacc

SEQ ID NO: 1412817 - RNA, 21 nt, Human
cucccacccucuuccuacugg

SEQ ID NO: 1412818 - RNA, 16 nt, Human
cucccacccucuuccu

SEQ ID NO: 1412819 - RNA, 15 nt, Human
cucccacccucuucc

SEQ ID NO: 1412820 - RNA, 14 nt, Human
cucccacccucuuc

SEQ ID NO: 1412821 - RNA, 12 nt, Human
cucccacccucu

SEQ ID NO: 1412822 - RNA, 16 nt, Human
cuccgccuggccuggc

SEQ ID NO: 1412823 - RNA, 15 nt, Human
cuccgcucuguagug

SEQ ID NO: 1412824 - RNA, 13 nt, Human
cuccaaccugcaa

SEQ ID NO: 1412825 - RNA, 23 nt, Human
cuccaggggcugcuuccuccugg

SEQ ID NO: 1412826 - RNA, 22 nt, Human
cuccaggggcugcuuccuccug

SEQ ID NO: 1412827 - RNA, 16 nt, Human
cuccagggugugugcu

SEQ ID NO: 1412828 - RNA, 19 nt, Human
cuccaggguggcagcaaca

SEQ ID NO: 1412829 - RNA, 23 nt, Human
cuccagguauucguuaucuaaua

SEQ ID NO: 1412830 - RNA, 21 nt, Human
cucaggcccccaccuggcuca

SEQ ID NO: 1412831 - RNA, 20 nt, Human
cucaggcccccaccuggcuc

SEQ ID NO: 1412832 - RNA, 21 nt, Human
cucagccuugccagagaucca

SEQ ID NO: 1412833 - RNA, 20 nt, Human
cucagccuugccagagaucc

SEQ ID NO: 1412834 - RNA, 19 nt, Human
cucagccuugccagagauc

SEQ ID NO: 1412835 - RNA, 18 nt, Human
cucagccuugccagagau

SEQ ID NO: 1412836 - RNA, 17 nt, Human
cucagccuugccagaga

SEQ ID NO: 1412837 - RNA, 16 nt, Human
cucagccuugccagag

SEQ ID NO: 1412838 - RNA, 15 nt, Human
cucagccuugccaga

SEQ ID NO: 1412839 - RNA, 19 nt, Human
cucagccuucagacagaga

SEQ ID NO: 1412840 - RNA, 17 nt, Human
cucagccuucagacaga

SEQ ID NO: 1412841 - RNA, 16 nt, Human
cucagccuucagacag

SEQ ID NO: 1412842 - RNA, 15 nt, Human
cucagccuucagaca

SEQ ID NO: 1412843 - RNA, 18 nt, Human
cucaggccagagccaagg

SEQ ID NO: 1412844 - RNA, 17 nt, Human
cucaggccagagccaag

SEQ ID NO: 1412845 - RNA, 16 nt, Human
cucaggccagagccaa

SEQ ID NO: 1412846 - RNA, 13 nt, Human
cucaggccagagc

SEQ ID NO: 1412847 - RNA, 22 nt, Human
cucagccuugccagagauccaa

SEQ ID NO: 1412848 - RNA, 17 nt, Human
cucagccucccaaagug

SEQ ID NO: 1412849 - RNA, 15 nt, Human
cucagccucccaaag

SEQ ID NO: 1412850 - RNA, 18 nt, Human
cucagccucccaaguaac

SEQ ID NO: 1412851 - RNA, 17 nt, Human
cucaucuucuucaccau

SEQ ID NO: 1412852 - RNA, 20 nt, Human
cucaguguccucaggggccu

SEQ ID NO: 1412853 - RNA, 12 nt, Human
cucaugaaugua

SEQ ID NO: 1412854 - RNA, 21 nt, Human
cucaugaaccucaagcugcau

SEQ ID NO: 1412855 - RNA, 12 nt, Human
cucaugaaccuc

SEQ ID NO: 1412856 - RNA, 14 nt, Human
cucaucuuuuuacu

SEQ ID NO: 1412857 - RNA, 16 nt, Human
cucaucuuucuuccaa

SEQ ID NO: 1412858 - RNA, 16 nt, Human
cucaguggggcagagg

SEQ ID NO: 1412859 - RNA, 22 nt, Human
cucaguggcccauggcauuuua

SEQ ID NO: 1412860 - RNA, 20 nt, Human
cucagucucugagcagugaa

SEQ ID NO: 1412861 - RNA, 14 nt, Human
cucagucucugagc

SEQ ID NO: 1412862 - RNA, 13 nt, Human
cucagucucugag

SEQ ID NO: 1412863 - RNA, 19 nt, Human
cucagucucucuucucucc

SEQ ID NO: 1412864 - RNA, 17 nt, Human
cucagucucucuucucu

SEQ ID NO: 1412865 - RNA, 12 nt, Human
cucagucucucu

SEQ ID NO: 1412866 - RNA, 14 nt, Human
cucaugaauguaaa

SEQ ID NO: 1412867 - RNA, 13 nt, Human
cucaugaauguaa

SEQ ID NO: 1412868 - RNA, 14 nt, Human
cucauguucuuaau

SEQ ID NO: 1412869 - RNA, 18 nt, Human
cucauguucuuaauucuu

SEQ ID NO: 1412870 - RNA, 19 nt, Human
cucauguucuuaauucuua

SEQ ID NO: 1412871 - RNA, 22 nt, Human
cuccaacaccaagcacagcagc

SEQ ID NO: 1412872 - RNA, 18 nt, Human
cuccaacaccaagcacag

SEQ ID NO: 1412873 - RNA, 16 nt, Human
cuccaacaccaagcac

SEQ ID NO: 1412874 - RNA, 15 nt, Human
cuccaacaccaagca

SEQ ID NO: 1412875 - RNA, 12 nt, Human
cuccaacaauaa

SEQ ID NO: 1412876 - RNA, 23 nt, Human
cuccaaagucauaauugcauuga

SEQ ID NO: 1412877 - RNA, 21 nt, Human
cuccaaagucauaauugcauu

SEQ ID NO: 1412878 - RNA, 20 nt, Human
cuccaaagucauaauugcau

SEQ ID NO: 1412879 - RNA, 19 nt, Human
cuccaaagucauaauugca

SEQ ID NO: 1412880 - RNA, 17 nt, Human
cuccaaagucauaauug

SEQ ID NO: 1412881 - RNA, 12 nt, Human
cuccaaagucau

SEQ ID NO: 1412882 - RNA, 16 nt, Human
cuccaaagucucugga

SEQ ID NO: 1412883 - RNA, 20 nt, Human
cuccaacccaaccucauccu

SEQ ID NO: 1412884 - RNA, 19 nt, Human
cuccaacaucacagcccag

SEQ ID NO: 1412885 - RNA, 21 nt, Human
cuccaacaccaccucuccaga

SEQ ID NO: 1412886 - RNA, 23 nt, Human
cuccaacaccaagcacagcagcc

SEQ ID NO: 1412887 - RNA, 18 nt, Human
cuccaacccuagcaaaag

SEQ ID NO: 1412888 - RNA, 18 nt, Human
cucugcuauuaggccagc

SEQ ID NO: 1412889 - RNA, 22 nt, Human
cucugcgugucaccugugcuuc

SEQ ID NO: 1412890 - RNA, 23 nt, Human
cucugcacucccaccugacacac

SEQ ID NO: 1412891 - RNA, 23 nt, Human
cucugcagcaauaaagcagcguu

SEQ ID NO: 1412892 - RNA, 18 nt, Human
cucugcagcaauaaagca

SEQ ID NO: 1412893 - RNA, 19 nt, Human
cucugcagcaauaaagcag

SEQ ID NO: 1412894 - RNA, 18 nt, Human
cucugcacuacugacaug

SEQ ID NO: 1412895 - RNA, 16 nt, Human
cucugcacuacugaca

SEQ ID NO: 1412896 - RNA, 20 nt, Human
cucugcacucccaccugaca

SEQ ID NO: 1412897 - RNA, 19 nt, Human
cucugcacucccaccugac

SEQ ID NO: 1412898 - RNA, 22 nt, Human
cucugcacuacugacauguggg

SEQ ID NO: 1412899 - RNA, 20 nt, Human
cucugcacuacugacaugug

SEQ ID NO: 1412900 - RNA, 23 nt, Human
cucuguaaguagaugcauuuggg

SEQ ID NO: 1412901 - RNA, 21 nt, Human
cucuguaaagcuaaaauaaag

SEQ ID NO: 1412902 - RNA, 15 nt, Human
cucuguaaagcuaaa

SEQ ID NO: 1412903 - RNA, 22 nt, Human
cucugguuguuucuguuccaaa

SEQ ID NO: 1412904 - RNA, 23 nt, Human
cucugguuguuucuguuccaaau

SEQ ID NO: 1412905 - RNA, 20 nt, Human
cucugguuguuucuguucca

SEQ ID NO: 1412906 - RNA, 18 nt, Human
cucugguuguuucuguuc

SEQ ID NO: 1412907 - RNA, 17 nt, Human
cucugguuguuucuguu

SEQ ID NO: 1412908 - RNA, 16 nt, Human
cucuguaauugcaaaa

SEQ ID NO: 1412909 - RNA, 15 nt, Human
cucuguaauugcaaa

SEQ ID NO: 1412910 - RNA, 14 nt, Human
cucuguaauugcaa

SEQ ID NO: 1412911 - RNA, 19 nt, Human
cucuguaauugaauauuau

SEQ ID NO: 1412912 - RNA, 18 nt, Human
cucuguaauugaauauua

SEQ ID NO: 1412913 - RNA, 22 nt, Human
cucuguaucaggacccagagga

SEQ ID NO: 1412914 - RNA, 20 nt, Human
cucugucacuccucaugccu

SEQ ID NO: 1412915 - RNA, 22 nt, Human
cucuguauuugaaucagccuac

SEQ ID NO: 1412916 - RNA, 15 nt, Human
cucuuagaugcaguu

SEQ ID NO: 1412917 - RNA, 18 nt, Human
cuccgugugggagaccgg

SEQ ID NO: 1412918 - RNA, 16 nt, Human
cuccguuagcuccugu

SEQ ID NO: 1412919 - RNA, 15 nt, Human
cuccguuagcuccug

SEQ ID NO: 1412920 - RNA, 14 nt, Human
cuccgugugggaga

SEQ ID NO: 1412921 - RNA, 12 nt, Human
cuccguguggga

SEQ ID NO: 1412922 - RNA, 22 nt, Human
cuccguccaggagccugugccu

SEQ ID NO: 1412923 - RNA, 20 nt, Human
cuccguccaggagccugugc

SEQ ID NO: 1412924 - RNA, 19 nt, Human
cuccguccaggagccuggc

SEQ ID NO: 1412925 - RNA, 18 nt, Human
cuccguccaggagccugg

SEQ ID NO: 1412926 - RNA, 19 nt, Human
cucugaagccacaaauagg

SEQ ID NO: 1412927 - RNA, 17 nt, Human
cucugaagccacaaaua

SEQ ID NO: 1412928 - RNA, 12 nt, Human
cucucuggagaa

SEQ ID NO: 1412929 - RNA, 16 nt, Human
cucuccccagguccag

SEQ ID NO: 1412930 - RNA, 15 nt, Human
cucuccccaggucca

SEQ ID NO: 1412931 - RNA, 22 nt, Human
cucuccccagggaagcagcagc

SEQ ID NO: 1412932 - RNA, 20 nt, Human
cucuccccagggaagcagca

SEQ ID NO: 1412933 - RNA, 20 nt, Human
cucuccccagcccagagaca

SEQ ID NO: 1412934 - RNA, 19 nt, Human
cucuccccagcccagagac

SEQ ID NO: 1412935 - RNA, 18 nt, Human
cucuccccagcccagaga

SEQ ID NO: 1412936 - RNA, 17 nt, Human
cucuccccagcccagag

SEQ ID NO: 1412937 - RNA, 16 nt, Human
cucuccccagcccaga

SEQ ID NO: 1412938 - RNA, 15 nt, Human
cucuccccagcccag

SEQ ID NO: 1412939 - RNA, 13 nt, Human
cucuccccagccc

SEQ ID NO: 1412940 - RNA, 21 nt, Human
cucucagcccucacacacccu

SEQ ID NO: 1412941 - RNA, 13 nt, Human
cucucagcccuca

SEQ ID NO: 1412942 - RNA, 22 nt, Human
cucuccuaggcauucuggaccu

SEQ ID NO: 1412943 - RNA, 21 nt, Human
cucuccuaggcauucuggacc

SEQ ID NO: 1412944 - RNA, 15 nt, Human
cucuccuagccccug

SEQ ID NO: 1412945 - RNA, 15 nt, Human
cucuccggucucucu

SEQ ID NO: 1412946 - RNA, 24 nt, Human
cucuccccagggaagcagcagccu

SEQ ID NO: 1412947 - RNA, 24 nt, Human
cucuccgacucacaccacuagccu

SEQ ID NO: 1412948 - RNA, 23 nt, Human
cucuccccagguccagcucugga

SEQ ID NO: 1412949 - RNA, 20 nt, Human
cucuccccagguccagcucu

SEQ ID NO: 1412950 - RNA, 18 nt, Human
cucuccccagguccagcu

SEQ ID NO: 1412951 - RNA, 15 nt, Human
cucuccccaugaugu

SEQ ID NO: 1412952 - RNA, 17 nt, Human
cucucaacacccaguuu

SEQ ID NO: 1412953 - RNA, 22 nt, Human
cucucaacaccaugauuccuuu

SEQ ID NO: 1412954 - RNA, 18 nt, Human
cucucaacaccaugauuc

SEQ ID NO: 1412955 - RNA, 15 nt, Human
cucucaacaccauga

SEQ ID NO: 1412956 - RNA, 14 nt, Human
cucucaacaccaug

SEQ ID NO: 1412957 - RNA, 17 nt, Human
cucucaaagcaaauaau

SEQ ID NO: 1412958 - RNA, 23 nt, Human
cucuauucgccacacaguauuuu

SEQ ID NO: 1412959 - RNA, 13 nt, Human
cucuauucuuuaa

SEQ ID NO: 1412960 - RNA, 20 nt, Human
cucuauucgccacacaguau

SEQ ID NO: 1412961 - RNA, 22 nt, Human
cucuauuaugaaugugaagccu

SEQ ID NO: 1412962 - RNA, 23 nt, Human
cucuauuaugaaugugaagccuu

SEQ ID NO: 1412963 - RNA, 21 nt, Human
cucuauuaugaaugugaagcc

SEQ ID NO: 1412964 - RNA, 15 nt, Human
cucuauuaugaaugu

SEQ ID NO: 1412965 - RNA, 14 nt, Human
cucuauuaugaaug

SEQ ID NO: 1412966 - RNA, 18 nt, Human
cucucaauauucaauaaa

SEQ ID NO: 1412967 - RNA, 10 nt, Human
cucucaauau

SEQ ID NO: 1412968 - RNA, 19 nt, Human
cucucaauauucaauaaag

SEQ ID NO: 1412969 - RNA, 15 nt, Human
cucucacucccuccc

SEQ ID NO: 1412970 - RNA, 21 nt, Human
cucucacuuguuuuauuuaac

SEQ ID NO: 1412971 - RNA, 19 nt, Human
cugaccuuaaaugcaacca

SEQ ID NO: 1412972 - RNA, 15 nt, Human
cugaccuuaaaugca

SEQ ID NO: 1412973 - RNA, 21 nt, Human
cugaccugugagcccagcugg

SEQ ID NO: 1412974 - RNA, 20 nt, Human
cugaccugugagcccagcug

SEQ ID NO: 1412975 - RNA, 18 nt, Human
cugaccugugagcccagc

SEQ ID NO: 1412976 - RNA, 17 nt, Human
cugaccugugagcccag

SEQ ID NO: 1412977 - RNA, 17 nt, Human
cugaccuccgccaucca

SEQ ID NO: 1412978 - RNA, 19 nt, Human
cugaccuccgccauccacc

SEQ ID NO: 1412979 - RNA, 16 nt, Human
cugaccuccgccaucc

SEQ ID NO: 1412980 - RNA, 14 nt, Human
cugaccuccgccau

SEQ ID NO: 1412981 - RNA, 17 nt, Human
cugaccucaagugaucu

SEQ ID NO: 1412982 - RNA, 19 nt, Human
cugaaggggccaugauggc

SEQ ID NO: 1412983 - RNA, 15 nt, Human
cugaaggggccauga

SEQ ID NO: 1412984 - RNA, 23 nt, Human
cugaaggggccaugauggcaaca

SEQ ID NO: 1412985 - RNA, 20 nt, Human
cugaagggggcggccuauga

SEQ ID NO: 1412986 - RNA, 17 nt, Human
cugaagggguucucaca

SEQ ID NO: 1412987 - RNA, 16 nt, Human
cugaagggggcggccu

SEQ ID NO: 1412988 - RNA, 15 nt, Human
cugaagggggcggcc

SEQ ID NO: 1412989 - RNA, 21 nt, Human
cugaagggguucucacagugg

SEQ ID NO: 1412990 - RNA, 21 nt, Human
cugaaggguugacuuuaccca

SEQ ID NO: 1412991 - RNA, 22 nt, Human
cucuugcuugugggacuagccu

SEQ ID NO: 1412992 - RNA, 15 nt, Human
cucuuggagaagucu

SEQ ID NO: 1412993 - RNA, 13 nt, Human
cucuuggagaagu

SEQ ID NO: 1412994 - RNA, 17 nt, Human
cugaaaacacugugcac

SEQ ID NO: 1412995 - RNA, 21 nt, Human
cucuuggagaagucucagcua

SEQ ID NO: 1412996 - RNA, 19 nt, Human
cucuuggagaagucucagc

SEQ ID NO: 1412997 - RNA, 18 nt, Human
cucuuggagaagucucag

SEQ ID NO: 1412998 - RNA, 13 nt, Human
cugaaaaugugcu

SEQ ID NO: 1412999 - RNA, 12 nt, Human
cugaaaaugugc

SEQ ID NO: 1413000 - RNA, 19 nt, Human
cugaaaauguccuugugau

SEQ ID NO: 1413001 - RNA, 18 nt, Human
cugaaaauguccuuguga

SEQ ID NO: 1413002 - RNA, 17 nt, Human
cugaaaauguccuugug

SEQ ID NO: 1413003 - RNA, 16 nt, Human
cugaaaauguccuugu

SEQ ID NO: 1413004 - RNA, 14 nt, Human
cugaaaauguccuu

SEQ ID NO: 1413005 - RNA, 17 nt, Human
cugaaaauuauuuaaac

SEQ ID NO: 1413006 - RNA, 22 nt, Human
cugaaaauugaugggauuuggu

SEQ ID NO: 1413007 - RNA, 21 nt, Human
cucuuagaugcaguucugaag

SEQ ID NO: 1413008 - RNA, 20 nt, Human
cucuuagaugcaguucugaa

SEQ ID NO: 1413009 - RNA, 19 nt, Human
gugcaauguguauaaacaa

SEQ ID NO: 1413010 - RNA, 17 nt, Human
gugcaauguguauaaac

SEQ ID NO: 1413011 - RNA, 15 nt, Human
gugcaauguguauaa

SEQ ID NO: 1413012 - RNA, 20 nt, Human
gugcaauguaaauauuuuaa

SEQ ID NO: 1413013 - RNA, 22 nt, Human
gugcaauguaaauauuuuaaag

SEQ ID NO: 1413014 - RNA, 17 nt, Human
gugcaauguaaauauuu

SEQ ID NO: 1413015 - RNA, 13 nt, Human
gugcaauguaaau

SEQ ID NO: 1413016 - RNA, 14 nt, Human
gugcaaggcagccg

SEQ ID NO: 1413017 - RNA, 15 nt, Human
gugcaaggcagccgu

SEQ ID NO: 1413018 - RNA, 12 nt, Human
gugcaaggcagc

SEQ ID NO: 1413019 - RNA, 19 nt, Human
gugcaaggaccuaaaacau

SEQ ID NO: 1413020 - RNA, 15 nt, Human
gugcaaggaccuaaa

SEQ ID NO: 1413021 - RNA, 23 nt, Human
gugcaaccucuuggccugaucag

SEQ ID NO: 1413022 - RNA, 18 nt, Human
gugcacaucugugucuug

SEQ ID NO: 1413023 - RNA, 14 nt, Human
gugcacaggagggg

SEQ ID NO: 1413024 - RNA, 13 nt, Human
gugcacaggaggg

SEQ ID NO: 1413025 - RNA, 12 nt, Human
gugcacaggagg

SEQ ID NO: 1413026 - RNA, 19 nt, Human
gugcacagcacaaauuagu

SEQ ID NO: 1413027 - RNA, 15 nt, Human
gugcacaaauauuua

SEQ ID NO: 1413028 - RNA, 18 nt, Human
gugcacaaaacccagacc

SEQ ID NO: 1413029 - RNA, 20 nt, Human
gugcaauuucaagguucuaa

SEQ ID NO: 1413030 - RNA, 19 nt, Human
gugcaauuucaagguucua

SEQ ID NO: 1413031 - RNA, 18 nt, Human
gugcaauuucaagguucu

SEQ ID NO: 1413032 - RNA, 23 nt, Human
gugcaauguguauaaacaagaaa

SEQ ID NO: 1413033 - RNA, 20 nt, Human
gugcaauguguguauaugga

SEQ ID NO: 1413034 - RNA, 20 nt, Human
gugcacaccccacucccaca

SEQ ID NO: 1413035 - RNA, 20 nt, Human
gugcacaaauauuuauuuuc

SEQ ID NO: 1413036 - RNA, 21 nt, Human
gugccucgcuccccacucugc

SEQ ID NO: 1413037 - RNA, 20 nt, Human
gugccucgcuccccacucug

SEQ ID NO: 1413038 - RNA, 19 nt, Human
gugccucgcuccccacucu

SEQ ID NO: 1413039 - RNA, 15 nt, Human
gugccucgcucccca

SEQ ID NO: 1413040 - RNA, 22 nt, Human
gugccuccucccucccucuccg

SEQ ID NO: 1413041 - RNA, 21 nt, Human
gugccuccucccucccucucc

SEQ ID NO: 1413042 - RNA, 16 nt, Human
gugccuccucccuccc

SEQ ID NO: 1413043 - RNA, 14 nt, Human
gugccuccucccuc

SEQ ID NO: 1413044 - RNA, 13 nt, Human
gugccuccucccu

SEQ ID NO: 1413045 - RNA, 23 nt, Human
gugccuccagaggggcucagguc

SEQ ID NO: 1413046 - RNA, 16 nt, Human
gugccagagaacccag

SEQ ID NO: 1413047 - RNA, 14 nt, Human
gugccagaagcuac

SEQ ID NO: 1413048 - RNA, 18 nt, Human
gugccacuuaauguaugu

SEQ ID NO: 1413049 - RNA, 15 nt, Human
gugccacuuaaugua

SEQ ID NO: 1413050 - RNA, 22 nt, Human
gugccuguguccaugcgcucag

SEQ ID NO: 1413051 - RNA, 13 nt, Human
gugccugugucca

SEQ ID NO: 1413052 - RNA, 20 nt, Human
gugccugucccacccccacc

SEQ ID NO: 1413053 - RNA, 15 nt, Human
gugccugucccaccc

SEQ ID NO: 1413054 - RNA, 21 nt, Human
gugccaauuucaaguuccaag

SEQ ID NO: 1413055 - RNA, 14 nt, Human
gugcauucuccagc

SEQ ID NO: 1413056 - RNA, 23 nt, Human
gugcauuaucuagauacuguauc

SEQ ID NO: 1413057 - RNA, 15 nt, Human
gugcauuaucuagau

SEQ ID NO: 1413058 - RNA, 19 nt, Human
gugcauuaucuagauacug

SEQ ID NO: 1413059 - RNA, 18 nt, Human
gugauggagugcuguuuu

SEQ ID NO: 1413060 - RNA, 23 nt, Human
gugauggagugcuguuuuguuau

SEQ ID NO: 1413061 - RNA, 16 nt, Human
gugauggagugcuguu

SEQ ID NO: 1413062 - RNA, 23 nt, Human
gugaugagggcagcagccagccc

SEQ ID NO: 1413063 - RNA, 22 nt, Human
gugaugagggcagcagccagcc

SEQ ID NO: 1413064 - RNA, 21 nt, Human
gugaugagggcagcagccagc

SEQ ID NO: 1413065 - RNA, 20 nt, Human
gugaugagggcagcagccag

SEQ ID NO: 1413066 - RNA, 19 nt, Human
gugaugagggcagcagcca

SEQ ID NO: 1413067 - RNA, 18 nt, Human
gugaugagggcagcagcc

SEQ ID NO: 1413068 - RNA, 17 nt, Human
gugaugagggcagcagc

SEQ ID NO: 1413069 - RNA, 16 nt, Human
gugaugagggcagcag

SEQ ID NO: 1413070 - RNA, 14 nt, Human
gugaugagggcagc

SEQ ID NO: 1413071 - RNA, 14 nt, Human
gugaugaauacugu

SEQ ID NO: 1413072 - RNA, 24 nt, Human
aacuucuuauggaauugauuugca

SEQ ID NO: 1413073 - RNA, 19 nt, Human
aacuucuuauggaauugau

SEQ ID NO: 1413074 - RNA, 17 nt, Human
aacuucuuauggaauug

SEQ ID NO: 1413075 - RNA, 16 nt, Human
aacuucuuauggaauu

SEQ ID NO: 1413076 - RNA, 15 nt, Human
aacuucuuauggaau

SEQ ID NO: 1413077 - RNA, 18 nt, Human
aacuucuugcuucuuucu

SEQ ID NO: 1413078 - RNA, 12 nt, Human
aacuucuugcuu

SEQ ID NO: 1413079 - RNA, 18 nt, Human
aacuguacagugucuuuu

SEQ ID NO: 1413080 - RNA, 17 nt, Human
aacuguacagugucuuu

SEQ ID NO: 1413081 - RNA, 16 nt, Human
aacuguacagugucuu

SEQ ID NO: 1413082 - RNA, 11 nt, Human
aacuguacagu

SEQ ID NO: 1413083 - RNA, 10 nt, Human
aacuguacag

SEQ ID NO: 1413084 - RNA, 13 nt, Human
aacuguaauacaa

SEQ ID NO: 1413085 - RNA, 14 nt, Human
aacuguaaagaugu

SEQ ID NO: 1413086 - RNA, 13 nt, Human
aacuguaaauaaa

SEQ ID NO: 1413087 - RNA, 18 nt, Human
aacuggguaaugaaacaa

SEQ ID NO: 1413088 - RNA, 20 nt, Human
aacuucauauaugaggacuu

SEQ ID NO: 1413089 - RNA, 19 nt, Human
aacuucaguuucacagaaa

SEQ ID NO: 1413090 - RNA, 16 nt, Human
aacuucauuucagagu

SEQ ID NO: 1413091 - RNA, 18 nt, Human
aacuuccccaucuucuaa

SEQ ID NO: 1413092 - RNA, 17 nt, Human
aacuuccccaucuucua

SEQ ID NO: 1413093 - RNA, 22 nt, Human
aacuuccagguguuacuguaau

SEQ ID NO: 1413094 - RNA, 19 nt, Human
aacuuccagguguuacugu

SEQ ID NO: 1413095 - RNA, 18 nt, Human
aacuuccagauccuggaa

SEQ ID NO: 1413096 - RNA, 19 nt, Human
aacuggaaucagcucagga

SEQ ID NO: 1413097 - RNA, 16 nt, Human
aacuggaaucagcuca

SEQ ID NO: 1413098 - RNA, 12 nt, Human
aacuggaaagaa

SEQ ID NO: 1413099 - RNA, 13 nt, Human
aacuggaaagaag

SEQ ID NO: 1413100 - RNA, 21 nt, Human
aacuggaaaacagaacacuua

SEQ ID NO: 1413101 - RNA, 20 nt, Human
aacuggaaaacagaacacuu

SEQ ID NO: 1413102 - RNA, 19 nt, Human
aacuggaaaacagaacacu

SEQ ID NO: 1413103 - RNA, 17 nt, Human
aacuggaaaacagaaca

SEQ ID NO: 1413104 - RNA, 15 nt, Human
aacuggaaaacagaa

SEQ ID NO: 1413105 - RNA, 20 nt, Human
aacugcuuucuguuccaaau

SEQ ID NO: 1413106 - RNA, 18 nt, Human
aacugcuuucuguuccaa

SEQ ID NO: 1413107 - RNA, 17 nt, Human
aacugcuuucuguucca

SEQ ID NO: 1413108 - RNA, 15 nt, Human
aacugcuuucuguuc

SEQ ID NO: 1413109 - RNA, 14 nt, Human
aacugcuuucuguu

SEQ ID NO: 1413110 - RNA, 13 nt, Human
aacugcugccacu

SEQ ID NO: 1413111 - RNA, 14 nt, Human
aacugcugccacug

SEQ ID NO: 1413112 - RNA, 12 nt, Human
aacugcugccac

SEQ ID NO: 1413113 - RNA, 13 nt, Human
aacugcuccuccu

SEQ ID NO: 1413114 - RNA, 17 nt, Human
aacugcucccaccuccu

SEQ ID NO: 1413115 - RNA, 20 nt, Human
aacugccucgaaacacagaa

SEQ ID NO: 1413116 - RNA, 17 nt, Human
aacugccuagaaacaac

SEQ ID NO: 1413117 - RNA, 14 nt, Human
aacugccuagaaac

SEQ ID NO: 1413118 - RNA, 13 nt, Human
aacugccuagaaa

SEQ ID NO: 1413119 - RNA, 13 nt, Human
aacugcaggcccu

SEQ ID NO: 1413120 - RNA, 22 nt, Human
aacugccuagaaacaacacugu

SEQ ID NO: 1413121 - RNA, 19 nt, Human
aacugcuaaucuacuuucu

SEQ ID NO: 1413122 - RNA, 18 nt, Human
aacuggccauggccugca

SEQ ID NO: 1413123 - RNA, 21 nt, Human
aacuggccaagcugaggugcc

SEQ ID NO: 1413124 - RNA, 19 nt, Human
aacuggccaagcugaggug

SEQ ID NO: 1413125 - RNA, 17 nt, Human
aacuggccaagcugagg

SEQ ID NO: 1413126 - RNA, 16 nt, Human
aacuggccaagcugag

SEQ ID NO: 1413127 - RNA, 14 nt, Human
aacuggcaggcagg

SEQ ID NO: 1413128 - RNA, 22 nt, Human
aacuggcaggcaggcucccagg

SEQ ID NO: 1413129 - RNA, 12 nt, Human
aacuggagcccc

SEQ ID NO: 1413130 - RNA, 16 nt, Human
aacuggauuaaacuua

SEQ ID NO: 1413131 - RNA, 15 nt, Human
aacuggauuaaacuu

SEQ ID NO: 1413132 - RNA, 14 nt, Human
aacuggacccuguu

SEQ ID NO: 1413133 - RNA, 17 nt, Human
aacuggacccuguugcu

SEQ ID NO: 1413134 - RNA, 18 nt, Human
aacuggacccuguugcua

SEQ ID NO: 1413135 - RNA, 19 nt, Human
aacuggacccuguugcuaa

SEQ ID NO: 1413136 - RNA, 20 nt, Human
aacuggacccuguugcuaag

SEQ ID NO: 1413137 - RNA, 21 nt, Human
aacuggacccuguugcuaagc

SEQ ID NO: 1413138 - RNA, 22 nt, Human
aacuggacccuguugcuaagcc

SEQ ID NO: 1413139 - RNA, 18 nt, Human
aacuggcccuauuuagau

SEQ ID NO: 1413140 - RNA, 22 nt, Human
aacuggcccuauuuagaugaua

SEQ ID NO: 1413141 - RNA, 17 nt, Human
aacugggacaggggaga

SEQ ID NO: 1413142 - RNA, 22 nt, Human
aacugggaaccccuuucccacc

SEQ ID NO: 1413143 - RNA, 21 nt, Human
aacugggaaccccuuucccac

SEQ ID NO: 1413144 - RNA, 20 nt, Human
aacugggaaccccuuuccca

SEQ ID NO: 1413145 - RNA, 18 nt, Human
aacugggaaccccuuucc

SEQ ID NO: 1413146 - RNA, 16 nt, Human
aacugggggaaaagau

SEQ ID NO: 1413147 - RNA, 16 nt, Human
aacuggggcuccucca

SEQ ID NO: 1413148 - RNA, 21 nt, Human
aacugggggagggugaaguga

SEQ ID NO: 1413149 - RNA, 22 nt, Human
aacugggggagggugaagugaa

SEQ ID NO: 1413150 - RNA, 16 nt, Human
gugagggucccaugug

SEQ ID NO: 1413151 - RNA, 15 nt, Human
gugagggucccaugu

SEQ ID NO: 1413152 - RNA, 18 nt, Human
gugaggguaaguauuuuc

SEQ ID NO: 1413153 - RNA, 17 nt, Human
gugagggggggcucccu

SEQ ID NO: 1413154 - RNA, 17 nt, Human
gugaggccagggcagag

SEQ ID NO: 1413155 - RNA, 15 nt, Human
gugaggccagggcag

SEQ ID NO: 1413156 - RNA, 14 nt, Human
gugaggccagggca

SEQ ID NO: 1413157 - RNA, 21 nt, Human
gugaacuggacccuguugcua

SEQ ID NO: 1413158 - RNA, 22 nt, Human
gugaacuggacccuguugcuaa

SEQ ID NO: 1413159 - RNA, 23 nt, Human
gugaacuggacccuguugcuaag

SEQ ID NO: 1413160 - RNA, 19 nt, Human
gugaacuggacccuguugc

SEQ ID NO: 1413161 - RNA, 20 nt, Human
gugaacuggacccuguugcu

SEQ ID NO: 1413162 - RNA, 19 nt, Human
gugagucuuugguucuaag

SEQ ID NO: 1413163 - RNA, 17 nt, Human
gugagucuuugguucua

SEQ ID NO: 1413164 - RNA, 22 nt, Human
gugagucucucugggccuuagg

SEQ ID NO: 1413165 - RNA, 18 nt, Human
gugagucucucugggccu

SEQ ID NO: 1413166 - RNA, 16 nt, Human
gugagucguuuccccu

SEQ ID NO: 1413167 - RNA, 22 nt, Human
aacucuguugcaagugcaauaa

SEQ ID NO: 1413168 - RNA, 19 nt, Human
aacucuguugcaagugcaa

SEQ ID NO: 1413169 - RNA, 23 nt, Human
aacucuguuacacuuuuuggaag

SEQ ID NO: 1413170 - RNA, 22 nt, Human
aacucuguuacacuuuuuggaa

SEQ ID NO: 1413171 - RNA, 15 nt, Human
aacucuuauaaauuu

SEQ ID NO: 1413172 - RNA, 22 nt, Human
aacucuuauaaauuucuauuuu

SEQ ID NO: 1413173 - RNA, 16 nt, Human
aacucuucaaggucug

SEQ ID NO: 1413174 - RNA, 19 nt, Human
aacucuucaaggucugcuu

SEQ ID NO: 1413175 - RNA, 13 nt, Human
aacugaaaauuau

SEQ ID NO: 1413176 - RNA, 12 nt, Human
aacugaaaauua

SEQ ID NO: 1413177 - RNA, 12 nt, Human
aacugaaaaugu

SEQ ID NO: 1413178 - RNA, 17 nt, Human
aacugaaaauuauuuaa

SEQ ID NO: 1413179 - RNA, 13 nt, Human
aacugaaaucaua

SEQ ID NO: 1413180 - RNA, 12 nt, Human
aacugaaaucau

SEQ ID NO: 1413181 - RNA, 20 nt, Human
aaccccggggugcccacagg

SEQ ID NO: 1413182 - RNA, 15 nt, Human
aaccccccuguacac

SEQ ID NO: 1413183 - RNA, 23 nt, Human
aaccccuccccuccaucccuggc

SEQ ID NO: 1413184 - RNA, 21 nt, Human
aaccccuccccuccaucccug

SEQ ID NO: 1413185 - RNA, 20 nt, Human
aaccccuccccuccaucccu

SEQ ID NO: 1413186 - RNA, 21 nt, Human
aaccccuacaugaaacagaaa

SEQ ID NO: 1413187 - RNA, 16 nt, Human
aacccagcccaccccc

SEQ ID NO: 1413188 - RNA, 14 nt, Human
aacccagacucaga

SEQ ID NO: 1413189 - RNA, 12 nt, Human
aacccagacuca

SEQ ID NO: 1413190 - RNA, 23 nt, Human
aacccagaccuguuagcagacag

SEQ ID NO: 1413191 - RNA, 22 nt, Human
aacccagaccuguuagcagaca

SEQ ID NO: 1413192 - RNA, 23 nt, Human
aacccacuuuaaaauaucuacau

SEQ ID NO: 1413193 - RNA, 19 nt, Human
aacccacuuuaaaauaucu

SEQ ID NO: 1413194 - RNA, 18 nt, Human
aacccagacucagacauu

SEQ ID NO: 1413195 - RNA, 16 nt, Human
aacccagacucagaca

SEQ ID NO: 1413196 - RNA, 15 nt, Human
aacccagacucagac

SEQ ID NO: 1413197 - RNA, 14 nt, Human
aacccagauaaagg

SEQ ID NO: 1413198 - RNA, 17 nt, Human
aaccugaccccugcuca

SEQ ID NO: 1413199 - RNA, 16 nt, Human
aaccugaccccugcuc

SEQ ID NO: 1413200 - RNA, 20 nt, Human
aaccugagauuuauuaaaga

SEQ ID NO: 1413201 - RNA, 15 nt, Human
aaccugagauuuauu

SEQ ID NO: 1413202 - RNA, 14 nt, Human
aaccugagauuuau

SEQ ID NO: 1413203 - RNA, 19 nt, Human
aaccugaccccugcucagu

SEQ ID NO: 1413204 - RNA, 19 nt, Human
aaccucgcuggacucucag

SEQ ID NO: 1413205 - RNA, 14 nt, Human
aaccucgcuggacu

SEQ ID NO: 1413206 - RNA, 16 nt, Human
aaccucgggccugcug

SEQ ID NO: 1413207 - RNA, 24 nt, Human
aaccucuaaauucuuucauuuuag

SEQ ID NO: 1413208 - RNA, 12 nt, Human
aaccucuaaauu

SEQ ID NO: 1413209 - RNA, 18 nt, Human
aaccccuuucccacccca

SEQ ID NO: 1413210 - RNA, 15 nt, Human
aacccgaggcccgca

SEQ ID NO: 1413211 - RNA, 16 nt, Human
aacccgaggcccgcau

SEQ ID NO: 1413212 - RNA, 17 nt, Human
aaccccuguaggccuca

SEQ ID NO: 1413213 - RNA, 20 nt, Human
aaccucagccuggccagaca

SEQ ID NO: 1413214 - RNA, 23 nt, Human
aacccgagucauucguucugugg

SEQ ID NO: 1413215 - RNA, 22 nt, Human
aacccgaggcugagaaucagac

SEQ ID NO: 1413216 - RNA, 13 nt, Human
aaccuccaccucc

SEQ ID NO: 1413217 - RNA, 20 nt, Human
aaccucauccuccuucuuca

SEQ ID NO: 1413218 - RNA, 14 nt, Human
aaccucaguaauuu

SEQ ID NO: 1413219 - RNA, 18 nt, Human
aaccucaguaauuuagaa

SEQ ID NO: 1413220 - RNA, 16 nt, Human
aaccucaucuucuuca

SEQ ID NO: 1413221 - RNA, 14 nt, Human
aaccucauccucuc

SEQ ID NO: 1413222 - RNA, 17 nt, Human
aaccauuaaccagaucu

SEQ ID NO: 1413223 - RNA, 19 nt, Human
aaccauuauaaccuuaauu

SEQ ID NO: 1413224 - RNA, 20 nt, Human
aaccauguguuauguuuucg

SEQ ID NO: 1413225 - RNA, 14 nt, Human
aacccaauccaaau

SEQ ID NO: 1413226 - RNA, 19 nt, Human
aacccaagguaccauccua

SEQ ID NO: 1413227 - RNA, 21 nt, Human
aacccaagaugcaagaaggag

SEQ ID NO: 1413228 - RNA, 19 nt, Human
aaccauuugaaaccccugu

SEQ ID NO: 1413229 - RNA, 16 nt, Human
aaccauuuccucagac

SEQ ID NO: 1413230 - RNA, 15 nt, Human
aaccauuuccucaga

SEQ ID NO: 1413231 - RNA, 12 nt, Human
aaccauuuccuc

SEQ ID NO: 1413232 - RNA, 20 nt, Human
gucucccuggaucagaacag

SEQ ID NO: 1413233 - RNA, 17 nt, Human
aacaguugguaacuuuu

SEQ ID NO: 1413234 - RNA, 20 nt, Human
aacaguugcauguaguaaca

SEQ ID NO: 1413235 - RNA, 18 nt, Human
aacaguugcauguaguaa

SEQ ID NO: 1413236 - RNA, 14 nt, Human
aacaguugcaugua

SEQ ID NO: 1413237 - RNA, 14 nt, Human
aacaguugguaacu

SEQ ID NO: 1413238 - RNA, 22 nt, Human
aacaguugcauguaguaacacu

SEQ ID NO: 1413239 - RNA, 21 nt, Human
aacaguugcauguaguaacac

SEQ ID NO: 1413240 - RNA, 19 nt, Human
gucucccuccucugcccgg

SEQ ID NO: 1413241 - RNA, 20 nt, Human
aaccaagcugaguuuccuau

SEQ ID NO: 1413242 - RNA, 19 nt, Human
aaccaagcugaguuuccua

SEQ ID NO: 1413243 - RNA, 18 nt, Human
aaccaagcugaguuuccu

SEQ ID NO: 1413244 - RNA, 20 nt, Human
aaccaagugaucaaacuaca

SEQ ID NO: 1413245 - RNA, 12 nt, Human
aacucauuucua

SEQ ID NO: 1413246 - RNA, 15 nt, Human
aacucauuagacugg

SEQ ID NO: 1413247 - RNA, 23 nt, Human
aacucauuagacuggaacuugaa

SEQ ID NO: 1413248 - RNA, 17 nt, Human
aacucaucugucaccaa

SEQ ID NO: 1413249 - RNA, 15 nt, Human
aacucgaaucugugu

SEQ ID NO: 1413250 - RNA, 16 nt, Human
aacucgaaucugugug

SEQ ID NO: 1413251 - RNA, 13 nt, Human
aacuccugugacc

SEQ ID NO: 1413252 - RNA, 21 nt, Human
aacuccugugaccacaacaug

SEQ ID NO: 1413253 - RNA, 19 nt, Human
aacucguauagcaugcauc

SEQ ID NO: 1413254 - RNA, 15 nt, Human
aacucguauagcaug

SEQ ID NO: 1413255 - RNA, 15 nt, Human
gugaacccaggacaa

SEQ ID NO: 1413256 - RNA, 13 nt, Human
gugaacccaggac

SEQ ID NO: 1413257 - RNA, 17 nt, Human
gugaacccaggacaagc

SEQ ID NO: 1413258 - RNA, 21 nt, Human
aacucguauagcaugcaucug

SEQ ID NO: 1413259 - RNA, 20 nt, Human
aacuacuaccuguaaugaca

SEQ ID NO: 1413260 - RNA, 17 nt, Human
aacuacuaauagaauaa

SEQ ID NO: 1413261 - RNA, 21 nt, Human
aaccuuggguuagaccuacag

SEQ ID NO: 1413262 - RNA, 18 nt, Human
aaccuugccugguacagu

SEQ ID NO: 1413263 - RNA, 19 nt, Human
aaccuugccugguacagua

SEQ ID NO: 1413264 - RNA, 16 nt, Human
aaccuugccugguaca

SEQ ID NO: 1413265 - RNA, 13 nt, Human
aaccuugccuggu

SEQ ID NO: 1413266 - RNA, 20 nt, Human
aaccuugaaaaaaaacagug

SEQ ID NO: 1413267 - RNA, 17 nt, Human
aaccuugaaaaaaaaca

SEQ ID NO: 1413268 - RNA, 11 nt, Human
aacuaucuugg

SEQ ID NO: 1413269 - RNA, 18 nt, Human
aacuaucuuggugaauuu

SEQ ID NO: 1413270 - RNA, 22 nt, Human
aacuagaggugagaaauuuaaa

SEQ ID NO: 1413271 - RNA, 23 nt, Human
aacuaugcauggugccccaggac

SEQ ID NO: 1413272 - RNA, 22 nt, Human
aacuaugcauggugccccagga

SEQ ID NO: 1413273 - RNA, 17 nt, Human
aacuaugcauggugccc

SEQ ID NO: 1413274 - RNA, 16 nt, Human
aacuaugauuauuaac

SEQ ID NO: 1413275 - RNA, 14 nt, Human
aacuacuguguuau

SEQ ID NO: 1413276 - RNA, 17 nt, Human
aacuacuguguuaugca

SEQ ID NO: 1413277 - RNA, 21 nt, Human
aacuagaggugagaaauuuaa

SEQ ID NO: 1413278 - RNA, 20 nt, Human
aacuagaggugagaaauuua

SEQ ID NO: 1413279 - RNA, 21 nt, Human
aacuagaguuuagcuggaaaa

SEQ ID NO: 1413280 - RNA, 16 nt, Human
gucuuuugguuaugaa

SEQ ID NO: 1413281 - RNA, 14 nt, Human
gucuuuuggaggac

SEQ ID NO: 1413282 - RNA, 12 nt, Human
gucuuuuggagg

SEQ ID NO: 1413283 - RNA, 16 nt, Human
gucuuuugcuuuuggc

SEQ ID NO: 1413284 - RNA, 22 nt, Human
gucuuuugcuuuugcccauuuu

SEQ ID NO: 1413285 - RNA, 14 nt, Human
gucuuuugcuuuug

SEQ ID NO: 1413286 - RNA, 13 nt, Human
gucuuuugcuuuu

SEQ ID NO: 1413287 - RNA, 12 nt, Human
gucuuuugcuuu

SEQ ID NO: 1413288 - RNA, 15 nt, Human
gucuuuuguucgcau

SEQ ID NO: 1413289 - RNA, 16 nt, Human
gucuuuuuagaugccc

SEQ ID NO: 1413290 - RNA, 23 nt, Human
gucuucuaaacuuccccaucuuc

SEQ ID NO: 1413291 - RNA, 14 nt, Human
gucuucuaaacuuc

SEQ ID NO: 1413292 - RNA, 16 nt, Human
gucuuucacagcuccu

SEQ ID NO: 1413293 - RNA, 15 nt, Human
gucuuucacagcucc

SEQ ID NO: 1413294 - RNA, 24 nt, Human
gucuuuagauagcccuguccuggu

SEQ ID NO: 1413295 - RNA, 22 nt, Human
gucuuuagauagcccuguccug

SEQ ID NO: 1413296 - RNA, 21 nt, Human
gucuuuagauagcccuguccu

SEQ ID NO: 1413297 - RNA, 16 nt, Human
gucuuuagauagcccu

SEQ ID NO: 1413298 - RNA, 17 nt, Human
gucuuugguucuaagga

SEQ ID NO: 1413299 - RNA, 15 nt, Human
gucuuugguucuaag

SEQ ID NO: 1413300 - RNA, 15 nt, Human
gucuuugguucagcu

SEQ ID NO: 1413301 - RNA, 22 nt, Human
gucuuuggagaaaugcuuagaa

SEQ ID NO: 1413302 - RNA, 18 nt, Human
gucuuuggagaaaugcuu

SEQ ID NO: 1413303 - RNA, 16 nt, Human
gucuuucacauuuaaa

SEQ ID NO: 1413304 - RNA, 20 nt, Human
aaccugaugaaaauaaagaa

SEQ ID NO: 1413305 - RNA, 19 nt, Human
aaccugaugaaaauaaaga

SEQ ID NO: 1413306 - RNA, 17 nt, Human
aaccugaugaaaauaaa

SEQ ID NO: 1413307 - RNA, 20 nt, Human
aaccugagucguacagaaag

SEQ ID NO: 1413308 - RNA, 22 nt, Human
aaccugagauuuauuaaagaaa

SEQ ID NO: 1413309 - RNA, 21 nt, Human
aaccugagauuuauuaaagaa

SEQ ID NO: 1413310 - RNA, 23 nt, Human
gucuggcaaugccacagcccugu

SEQ ID NO: 1413311 - RNA, 22 nt, Human
gucuggcaaugccacagcccug

SEQ ID NO: 1413312 - RNA, 23 nt, Human
aaccugaugaaaauaaagaaugg

SEQ ID NO: 1413313 - RNA, 18 nt, Human
gucuggcaaugccacagc

SEQ ID NO: 1413314 - RNA, 22 nt, Human
aaccugaugaaaauaaagaaug

SEQ ID NO: 1413315 - RNA, 21 nt, Human
aaccugaugaaaauaaagaau

SEQ ID NO: 1413316 - RNA, 19 nt, Human
gucuggcacagccuggcug

SEQ ID NO: 1413317 - RNA, 17 nt, Human
gucuggcacagccuggc

SEQ ID NO: 1413318 - RNA, 19 nt, Human
gucuggcaguuuauauuua

SEQ ID NO: 1413319 - RNA, 11 nt, Human
gucuguaaaau

SEQ ID NO: 1413320 - RNA, 12 nt, Human
gucuguaaaauc

SEQ ID NO: 1413321 - RNA, 13 nt, Human
gucuguaaaaucu

SEQ ID NO: 1413322 - RNA, 14 nt, Human
gucuguaaaaucuu

SEQ ID NO: 1413323 - RNA, 15 nt, Human
gucuguaaaaucuuu

SEQ ID NO: 1413324 - RNA, 18 nt, Human
gucuguaaaaucuuucuu

SEQ ID NO: 1413325 - RNA, 17 nt, Human
gucuggccccccugguc

SEQ ID NO: 1413326 - RNA, 15 nt, Human
gucuggcccaccagg

SEQ ID NO: 1413327 - RNA, 22 nt, Human
gucuggcagccucccauccagg

SEQ ID NO: 1413328 - RNA, 12 nt, Human
gucuggcagccu

SEQ ID NO: 1413329 - RNA, 20 nt, Human
gucuguagguugcacacuuu

SEQ ID NO: 1413330 - RNA, 22 nt, Human
gucuguagugucacucaaggcg

SEQ ID NO: 1413331 - RNA, 19 nt, Human
gucuguagguugcacacuu

SEQ ID NO: 1413332 - RNA, 18 nt, Human
gucuguagguugcacacu

SEQ ID NO: 1413333 - RNA, 17 nt, Human
gucuguagguugcacac

SEQ ID NO: 1413334 - RNA, 16 nt, Human
gucuguagguugcaca

SEQ ID NO: 1413335 - RNA, 14 nt, Human
gucugucugucugu

SEQ ID NO: 1413336 - RNA, 16 nt, Human
gucugucugucugucc

SEQ ID NO: 1413337 - RNA, 19 nt, Human
gucuuccugaguggugcca

SEQ ID NO: 1413338 - RNA, 15 nt, Human
aacagguaauauaaa

SEQ ID NO: 1413339 - RNA, 22 nt, Human
aacagggaaggcaggcagggcu

SEQ ID NO: 1413340 - RNA, 23 nt, Human
aacagggaaggcaggcagggcuc

SEQ ID NO: 1413341 - RNA, 20 nt, Human
aacagggaaggcaggcaggg

SEQ ID NO: 1413342 - RNA, 15 nt, Human
aacagggaaggcagg

SEQ ID NO: 1413343 - RNA, 13 nt, Human
aacagggaaggca

SEQ ID NO: 1413344 - RNA, 17 nt, Human
aacagugcaacacuggu

SEQ ID NO: 1413345 - RNA, 15 nt, Human
aacagguauauacuu

SEQ ID NO: 1413346 - RNA, 18 nt, Human
aacagguaauauaaaaag

SEQ ID NO: 1413347 - RNA, 21 nt, Human
aacagaucuggaaccucagcc

SEQ ID NO: 1413348 - RNA, 22 nt, Human
aacagaucuggaaccucagccu

SEQ ID NO: 1413349 - RNA, 13 nt, Human
aacagaucuggaa

SEQ ID NO: 1413350 - RNA, 14 nt, Human
aacagaucaguaaa

SEQ ID NO: 1413351 - RNA, 21 nt, Human
aacagaagggagggcagagcu

SEQ ID NO: 1413352 - RNA, 21 nt, Human
aacagaaugucucuuccuggu

SEQ ID NO: 1413353 - RNA, 22 nt, Human
aacagaagggagggcagagcug

SEQ ID NO: 1413354 - RNA, 18 nt, Human
aacagaagggagggcaga

SEQ ID NO: 1413355 - RNA, 19 nt, Human
gucccuuguauccccugca

SEQ ID NO: 1413356 - RNA, 20 nt, Human
gucccuuguauccccugcag

SEQ ID NO: 1413357 - RNA, 21 nt, Human
gucccuugccccccuggccuc

SEQ ID NO: 1413358 - RNA, 19 nt, Human
gucccuugccucaaugcca

SEQ ID NO: 1413359 - RNA, 14 nt, Human
gucccuugccucaa

SEQ ID NO: 1413360 - RNA, 13 nt, Human
gucccuugccuca

SEQ ID NO: 1413361 - RNA, 20 nt, Human
gucccuugccccccuggccu

SEQ ID NO: 1413362 - RNA, 19 nt, Human
gucccuugccccccuggcc

SEQ ID NO: 1413363 - RNA, 18 nt, Human
gucccuugccccccuggc

SEQ ID NO: 1413364 - RNA, 15 nt, Human
gucccuugccccccu

SEQ ID NO: 1413365 - RNA, 13 nt, Human
gucccuugccccc

SEQ ID NO: 1413366 - RNA, 13 nt, Human
guccccccacccu

SEQ ID NO: 1413367 - RNA, 22 nt, Human
guccccccacccucauucuacu

SEQ ID NO: 1413368 - RNA, 12 nt, Human
aacagaaaugua

SEQ ID NO: 1413369 - RNA, 13 nt, Human
aacagaaauguac

SEQ ID NO: 1413370 - RNA, 14 nt, Human
aacagaaauguaca

SEQ ID NO: 1413371 - RNA, 15 nt, Human
aacagaaauguacag

SEQ ID NO: 1413372 - RNA, 22 nt, Human
guccaagaauccacauuucuaa

SEQ ID NO: 1413373 - RNA, 18 nt, Human
guccaaaaccgccagcuc

SEQ ID NO: 1413374 - RNA, 17 nt, Human
guccaaaaccgccagcu

SEQ ID NO: 1413375 - RNA, 15 nt, Human
guccaaaaccgccag

SEQ ID NO: 1413376 - RNA, 20 nt, Human
gucauuuuuacaauguaauu

SEQ ID NO: 1413377 - RNA, 23 nt, Human
gucauuuuuuuucuuugaauaaa

SEQ ID NO: 1413378 - RNA, 22 nt, Human
gucauuuuuacaauguaauuau

SEQ ID NO: 1413379 - RNA, 17 nt, Human
gucauuuuuacaaugua

SEQ ID NO: 1413380 - RNA, 18 nt, Human
gucauuuugguacuuugg

SEQ ID NO: 1413381 - RNA, 20 nt, Human
gucauuuugguacuuuggug

SEQ ID NO: 1413382 - RNA, 19 nt, Human
gucauuuuuuuuaagaaaa

SEQ ID NO: 1413383 - RNA, 21 nt, Human
gucauuuuuuuuaagaaaaag

SEQ ID NO: 1413384 - RNA, 19 nt, Human
aacacagaaaccuuuuuaa

SEQ ID NO: 1413385 - RNA, 23 nt, Human
aacacacuaccgaaugugucuuu

SEQ ID NO: 1413386 - RNA, 19 nt, Human
aacacacuaccgaaugugu

SEQ ID NO: 1413387 - RNA, 17 nt, Human
aacacacuaccgaaugu

SEQ ID NO: 1413388 - RNA, 17 nt, Human
aacacaacuauauuguu

SEQ ID NO: 1413389 - RNA, 12 nt, Human
guccccccaccc

SEQ ID NO: 1413390 - RNA, 11 nt, Human
guccccccacc

SEQ ID NO: 1413391 - RNA, 20 nt, Human
gucccccacucuaaagcaaa

SEQ ID NO: 1413392 - RNA, 17 nt, Human
guccccauacuccuaug

SEQ ID NO: 1413393 - RNA, 16 nt, Human
guccccauacuccuau

SEQ ID NO: 1413394 - RNA, 13 nt, Human
guccccagccugg

SEQ ID NO: 1413395 - RNA, 23 nt, Human
gucccacccccacccccagcuca

SEQ ID NO: 1413396 - RNA, 22 nt, Human
gucccacccccacccccagcuc

SEQ ID NO: 1413397 - RNA, 21 nt, Human
gucccacccccacccccagcu

SEQ ID NO: 1413398 - RNA, 19 nt, Human
gucccacccccacccccag

SEQ ID NO: 1413399 - RNA, 15 nt, Human
gucccacccccaccc

SEQ ID NO: 1413400 - RNA, 14 nt, Human
gucccacccccacc

SEQ ID NO: 1413401 - RNA, 16 nt, Human
guccauaucacacaca

SEQ ID NO: 1413402 - RNA, 15 nt, Human
guccauaucacacac

SEQ ID NO: 1413403 - RNA, 14 nt, Human
guccauaucacaca

SEQ ID NO: 1413404 - RNA, 20 nt, Human
guccaagauuccggauccua

SEQ ID NO: 1413405 - RNA, 16 nt, Human
guccaagauuccggau

SEQ ID NO: 1413406 - RNA, 23 nt, Human
guccaagaauccacauuucuaaa

SEQ ID NO: 1413407 - RNA, 24 nt, Human
guccagugggaggugagaccaccu

SEQ ID NO: 1413408 - RNA, 15 nt, Human
guccaguguuucuuu

SEQ ID NO: 1413409 - RNA, 15 nt, Human
aacaaugcuguauuu

SEQ ID NO: 1413410 - RNA, 12 nt, Human
aacaauaaaaga

SEQ ID NO: 1413411 - RNA, 23 nt, Human
aacaauugaaguaaacuuuuugu

SEQ ID NO: 1413412 - RNA, 17 nt, Human
aacaauugaaguaaacu

SEQ ID NO: 1413413 - RNA, 16 nt, Human
aacaauugaaguaaac

SEQ ID NO: 1413414 - RNA, 19 nt, Human
aacaauucuaaaaugauug

SEQ ID NO: 1413415 - RNA, 22 nt, Human
aacaauucuaaaaugauuguag

SEQ ID NO: 1413416 - RNA, 14 nt, Human
aacaauucuaaaau

SEQ ID NO: 1413417 - RNA, 12 nt, Human
aacaauucuaaa

SEQ ID NO: 1413418 - RNA, 16 nt, Human
aacacaacuauauugu

SEQ ID NO: 1413419 - RNA, 15 nt, Human
aacacaacuauauug

SEQ ID NO: 1413420 - RNA, 22 nt, Human
aacaaugcuguauuuuaaaaga

SEQ ID NO: 1413421 - RNA, 17 nt, Human
aacaaugcuguauuuua

SEQ ID NO: 1413422 - RNA, 19 nt, Human
aacaagagcacuacauuca

SEQ ID NO: 1413423 - RNA, 21 nt, Human
aacaagagaagcauucucauu

SEQ ID NO: 1413424 - RNA, 17 nt, Human
aacaagagaagcauucu

SEQ ID NO: 1413425 - RNA, 16 nt, Human
aacaagagaagcauuc

SEQ ID NO: 1413426 - RNA, 15 nt, Human
aacaagagaagcauu

SEQ ID NO: 1413427 - RNA, 23 nt, Human
aacaagaccucagugccuuccug

SEQ ID NO: 1413428 - RNA, 22 nt, Human
aacaagaccucagugccuuccu

SEQ ID NO: 1413429 - RNA, 15 nt, Human
aaauuuuuuguugac

SEQ ID NO: 1413430 - RNA, 21 nt, Human
aaauuuuuuuagaaagcauuu

SEQ ID NO: 1413431 - RNA, 18 nt, Human
aaauuuuuuguugacauu

SEQ ID NO: 1413432 - RNA, 13 nt, Human
aaauuuuuuuaga

SEQ ID NO: 1413433 - RNA, 15 nt, Human
aaauuuuuuuagaaa

SEQ ID NO: 1413434 - RNA, 14 nt, Human
aaauuuuuuguuga

SEQ ID NO: 1413435 - RNA, 11 nt, Human
aaauuuuuugu

SEQ ID NO: 1413436 - RNA, 20 nt, Human
aaauuuuuguaguagcguuu

SEQ ID NO: 1413437 - RNA, 23 nt, Human
aaauuuuccuguccucuuucagc

SEQ ID NO: 1413438 - RNA, 22 nt, Human
aaauuuuccuguccucuuucag

SEQ ID NO: 1413439 - RNA, 23 nt, Human
aaauuuuagcgugcucacugacc

SEQ ID NO: 1413440 - RNA, 12 nt, Human
aaauuuuauaug

SEQ ID NO: 1413441 - RNA, 20 nt, Human
aaauuuuuucucuaggaaau

SEQ ID NO: 1413442 - RNA, 18 nt, Human
aaauuuugauguuuuaag

SEQ ID NO: 1413443 - RNA, 23 nt, Human
aaauuuugauguuuuaaggaugc

SEQ ID NO: 1413444 - RNA, 22 nt, Human
gucaggcccuuauuuucaagaa

SEQ ID NO: 1413445 - RNA, 21 nt, Human
gucaggcccuuauuuucaaga

SEQ ID NO: 1413446 - RNA, 13 nt, Human
gucaggcagggug

SEQ ID NO: 1413447 - RNA, 18 nt, Human
gucaggcacugggcauga

SEQ ID NO: 1413448 - RNA, 16 nt, Human
gucaggcacugggcau

SEQ ID NO: 1413449 - RNA, 23 nt, Human
gucaggauugcgagagaugugug

SEQ ID NO: 1413450 - RNA, 22 nt, Human
gucaggauugcgagagaugugu

SEQ ID NO: 1413451 - RNA, 21 nt, Human
gucaggauugcgagagaugug

SEQ ID NO: 1413452 - RNA, 19 nt, Human
gucaggauugcgagagaug

SEQ ID NO: 1413453 - RNA, 18 nt, Human
gucaggauugcgagagau

SEQ ID NO: 1413454 - RNA, 14 nt, Human
gucagacccuggag

SEQ ID NO: 1413455 - RNA, 13 nt, Human
gucaacaguaaac

SEQ ID NO: 1413456 - RNA, 12 nt, Human
gucacagccacc

SEQ ID NO: 1413457 - RNA, 20 nt, Human
gucacacaguguuggagguu

SEQ ID NO: 1413458 - RNA, 19 nt, Human
gucacacaguguuggaggu

SEQ ID NO: 1413459 - RNA, 13 nt, Human
gucagaauagaaa

SEQ ID NO: 1413460 - RNA, 17 nt, Human
gucagaauagaaauuag

SEQ ID NO: 1413461 - RNA, 22 nt, Human
gucaguaccuucaaacuagggc

SEQ ID NO: 1413462 - RNA, 13 nt, Human
gucagucacagcc

SEQ ID NO: 1413463 - RNA, 14 nt, Human
aaauuugauugauu

SEQ ID NO: 1413464 - RNA, 18 nt, Human
gucauaacuaaauaaagc

SEQ ID NO: 1413465 - RNA, 16 nt, Human
gucagucacagccacc

SEQ ID NO: 1413466 - RNA, 14 nt, Human
gucagucacagcca

SEQ ID NO: 1413467 - RNA, 15 nt, Human
aaauuuguucuugua

SEQ ID NO: 1413468 - RNA, 14 nt, Human
aaauuuguugcaua

SEQ ID NO: 1413469 - RNA, 13 nt, Human
aaauuuguugcau

SEQ ID NO: 1413470 - RNA, 18 nt, Human
aaauuuguucuuguauuu

SEQ ID NO: 1413471 - RNA, 19 nt, Human
aaauuuguuauuuugcaac

SEQ ID NO: 1413472 - RNA, 20 nt, Human
aaauuuguacuauuuaacug

SEQ ID NO: 1413473 - RNA, 19 nt, Human
aaauuuguacuauuuaacu

SEQ ID NO: 1413474 - RNA, 17 nt, Human
aaauuuguacuauuuaa

SEQ ID NO: 1413475 - RNA, 13 nt, Human
aaauuuguacuau

SEQ ID NO: 1413476 - RNA, 12 nt, Human
aaauuuguacua

SEQ ID NO: 1413477 - RNA, 11 nt, Human
aaauuuguacu

SEQ ID NO: 1413478 - RNA, 17 nt, Human
aaauuugcauuaaauua

SEQ ID NO: 1413479 - RNA, 17 nt, Human
aaauuugauugauuuga

SEQ ID NO: 1413480 - RNA, 15 nt, Human
aaauuugauugauuu

SEQ ID NO: 1413481 - RNA, 12 nt, Human
aaauuugccaag

SEQ ID NO: 1413482 - RNA, 20 nt, Human
guaacacuaauauauuuaaa

SEQ ID NO: 1413483 - RNA, 22 nt, Human
guaacacuaauauauuuaaaaa

SEQ ID NO: 1413484 - RNA, 19 nt, Human
guaacacuaauauauuuaa

SEQ ID NO: 1413485 - RNA, 17 nt, Human
guaacacuaauauauuu

SEQ ID NO: 1413486 - RNA, 16 nt, Human
guaacacuaauauauu

SEQ ID NO: 1413487 - RNA, 15 nt, Human
guaacacuaauauau

SEQ ID NO: 1413488 - RNA, 18 nt, Human
guaacaauacaaauggau

SEQ ID NO: 1413489 - RNA, 21 nt, Human
guaacaauuguguagccuuuu

SEQ ID NO: 1413490 - RNA, 17 nt, Human
guaacaauacaaaugga

SEQ ID NO: 1413491 - RNA, 14 nt, Human
guaacaauacaaau

SEQ ID NO: 1413492 - RNA, 22 nt, Human
guaaauuggcauggaaauuuaa

SEQ ID NO: 1413493 - RNA, 14 nt, Human
aaaugguccaggag

SEQ ID NO: 1413494 - RNA, 21 nt, Human
aaaugguccaauuaguuuccu

SEQ ID NO: 1413495 - RNA, 16 nt, Human
aaaugguaucuuuugg

SEQ ID NO: 1413496 - RNA, 19 nt, Human
aaaugguaggcauuuccua

SEQ ID NO: 1413497 - RNA, 18 nt, Human
aaaugguacuguacagcu

SEQ ID NO: 1413498 - RNA, 23 nt, Human
aaaugguucagaauuaaacuuuu

SEQ ID NO: 1413499 - RNA, 13 nt, Human
aaaugguuguauu

SEQ ID NO: 1413500 - RNA, 14 nt, Human
aaaugguucagaau

SEQ ID NO: 1413501 - RNA, 22 nt, Human
aaaugguccaauuaguuuccuu

SEQ ID NO: 1413502 - RNA, 20 nt, Human
aaauggucucuaacauuucc

SEQ ID NO: 1413503 - RNA, 20 nt, Human
aaauguaaggcuguguaaga

SEQ ID NO: 1413504 - RNA, 17 nt, Human
aaauguaaggcugugua

SEQ ID NO: 1413505 - RNA, 13 nt, Human
aaauguaaggcug

SEQ ID NO: 1413506 - RNA, 22 nt, Human
aaauguaagauuauagauucua

SEQ ID NO: 1413507 - RNA, 21 nt, Human
aaauguaagauuauagauucu

SEQ ID NO: 1413508 - RNA, 20 nt, Human
aaauguaagauuauagauuc

SEQ ID NO: 1413509 - RNA, 18 nt, Human
aaauguaacuuuuguaag

SEQ ID NO: 1413510 - RNA, 17 nt, Human
aaauguaacuuuuguaa

SEQ ID NO: 1413511 - RNA, 13 nt, Human
aaauguaaagcca

SEQ ID NO: 1413512 - RNA, 22 nt, Human
aaauguaaagauauuuuuaucu

SEQ ID NO: 1413513 - RNA, 15 nt, Human
aaaugguucagaauu

SEQ ID NO: 1413514 - RNA, 20 nt, Human
aaaugguuguauuagauguu

SEQ ID NO: 1413515 - RNA, 22 nt, Human
aaaugguuguauuagauguucu

SEQ ID NO: 1413516 - RNA, 14 nt, Human
aaaugguuguauua

SEQ ID NO: 1413517 - RNA, 16 nt, Human
aaaugguuguauuaga

SEQ ID NO: 1413518 - RNA, 17 nt, Human
aaaugguuguauuagau

SEQ ID NO: 1413519 - RNA, 19 nt, Human
aaaugguuguauuagaugu

SEQ ID NO: 1413520 - RNA, 20 nt, Human
guaguguuggagaagaacug

SEQ ID NO: 1413521 - RNA, 14 nt, Human
guaguugaauauug

SEQ ID NO: 1413522 - RNA, 18 nt, Human
aaauguaaggcuguguaa

SEQ ID NO: 1413523 - RNA, 17 nt, Human
guaguugccuuaaaaua

SEQ ID NO: 1413524 - RNA, 19 nt, Human
guauaaaaauaaaaaagau

SEQ ID NO: 1413525 - RNA, 16 nt, Human
guauaaaaauaaaaaa

SEQ ID NO: 1413526 - RNA, 17 nt, Human
guaguuuuuucaucuuc

SEQ ID NO: 1413527 - RNA, 15 nt, Human
guaguuuuuucaucu

SEQ ID NO: 1413528 - RNA, 14 nt, Human
guaguuuuuucauc

SEQ ID NO: 1413529 - RNA, 13 nt, Human
guaguuuuuucau

SEQ ID NO: 1413530 - RNA, 20 nt, Human
guaguuuuuauauguuguaa

SEQ ID NO: 1413531 - RNA, 16 nt, Human
guaguugucuuuccug

SEQ ID NO: 1413532 - RNA, 12 nt, Human
guaguugucuuu

SEQ ID NO: 1413533 - RNA, 19 nt, Human
guauaaaacuuuccucgcc

SEQ ID NO: 1413534 - RNA, 18 nt, Human
guauaaaacuuuccucgc

SEQ ID NO: 1413535 - RNA, 16 nt, Human
guauaaaacuuuccuc

SEQ ID NO: 1413536 - RNA, 15 nt, Human
guauaaaacuuuccu

SEQ ID NO: 1413537 - RNA, 19 nt, Human
guauaaaagggacugagaa

SEQ ID NO: 1413538 - RNA, 16 nt, Human
guaugcauguugucua

SEQ ID NO: 1413539 - RNA, 12 nt, Human
guaugcauguug

SEQ ID NO: 1413540 - RNA, 20 nt, Human
guauccagguucccucccag

SEQ ID NO: 1413541 - RNA, 19 nt, Human
guauccacuuugcacagcu

SEQ ID NO: 1413542 - RNA, 14 nt, Human
guauccacuuugca

SEQ ID NO: 1413543 - RNA, 18 nt, Human
guaucaugcccugugcaa

SEQ ID NO: 1413544 - RNA, 17 nt, Human
guaucaugcccugugca

SEQ ID NO: 1413545 - RNA, 13 nt, Human
guaucaucagugu

SEQ ID NO: 1413546 - RNA, 15 nt, Human
guaucauagaaaugu

SEQ ID NO: 1413547 - RNA, 12 nt, Human
guaucauagaaa

SEQ ID NO: 1413548 - RNA, 19 nt, Human
guaucaaauacauuuaaaa

SEQ ID NO: 1413549 - RNA, 15 nt, Human
guauauuuuccuaua

SEQ ID NO: 1413550 - RNA, 14 nt, Human
guauauuuuccuau

SEQ ID NO: 1413551 - RNA, 14 nt, Human
guaucaaauacauu

SEQ ID NO: 1413552 - RNA, 13 nt, Human
guaucaaauacau

SEQ ID NO: 1413553 - RNA, 23 nt, Human
guauaaaaauaaaaaagauccca

SEQ ID NO: 1413554 - RNA, 21 nt, Human
guauaaaacuuuccucgccug

SEQ ID NO: 1413555 - RNA, 11 nt, Human
guauaaaagau

SEQ ID NO: 1413556 - RNA, 21 nt, Human
guauaaaauaauuuuuauauu

SEQ ID NO: 1413557 - RNA, 15 nt, Human
guauaaaauaauuuu

SEQ ID NO: 1413558 - RNA, 20 nt, Human
guauauuguguuuguguauu

SEQ ID NO: 1413559 - RNA, 19 nt, Human
guauauuguguuuguguau

SEQ ID NO: 1413560 - RNA, 13 nt, Human
guauauuguguuu

SEQ ID NO: 1413561 - RNA, 13 nt, Human
aaauuauuuaaac

SEQ ID NO: 1413562 - RNA, 12 nt, Human
aaauuauuuaaa

SEQ ID NO: 1413563 - RNA, 20 nt, Human
aaauuauuguuuuucuuuuu

SEQ ID NO: 1413564 - RNA, 12 nt, Human
aaauuauuguuu

SEQ ID NO: 1413565 - RNA, 18 nt, Human
aaauuauuaauuuaugca

SEQ ID NO: 1413566 - RNA, 14 nt, Human
aaauuauuaaugaa

SEQ ID NO: 1413567 - RNA, 13 nt, Human
aaauuauagaagu

SEQ ID NO: 1413568 - RNA, 13 nt, Human
aaauuaguuauau

SEQ ID NO: 1413569 - RNA, 13 nt, Human
aaauuaagacuuu

SEQ ID NO: 1413570 - RNA, 15 nt, Human
aaauuaagaaggcaa

SEQ ID NO: 1413571 - RNA, 14 nt, Human
aaauuaagaaggca

SEQ ID NO: 1413572 - RNA, 14 nt, Human
aaauuaagaaagga

SEQ ID NO: 1413573 - RNA, 13 nt, Human
aaauguuaaaaug

SEQ ID NO: 1413574 - RNA, 20 nt, Human
aaaugugggauuauggguca

SEQ ID NO: 1413575 - RNA, 22 nt, Human
aaaugugggauuaugggucaca

SEQ ID NO: 1413576 - RNA, 22 nt, Human
aaaugugauguucuaaggcucu

SEQ ID NO: 1413577 - RNA, 20 nt, Human
aaaugugauguucuaaggcu

SEQ ID NO: 1413578 - RNA, 19 nt, Human
aaaugugauguucuaaggc

SEQ ID NO: 1413579 - RNA, 18 nt, Human
aaaugugauguucuaagg

SEQ ID NO: 1413580 - RNA, 15 nt, Human
aaaugugauguucua

SEQ ID NO: 1413581 - RNA, 21 nt, Human
aaaugugaugaauacuguauu

SEQ ID NO: 1413582 - RNA, 12 nt, Human
aaauguguuguu

SEQ ID NO: 1413583 - RNA, 13 nt, Human
aaaugugaugaau

SEQ ID NO: 1413584 - RNA, 16 nt, Human
aaaugugaguguuuuu

SEQ ID NO: 1413585 - RNA, 19 nt, Human
aaaugucuuuaaugcaaua

SEQ ID NO: 1413586 - RNA, 18 nt, Human
aaaugucuuuaaugcaau

SEQ ID NO: 1413587 - RNA, 14 nt, Human
aaaugucuuuaaug

SEQ ID NO: 1413588 - RNA, 13 nt, Human
aaaugucuugugu

SEQ ID NO: 1413589 - RNA, 18 nt, Human
aaaugucaugcugccuua

SEQ ID NO: 1413590 - RNA, 15 nt, Human
aaaugucaugcugcc

SEQ ID NO: 1413591 - RNA, 20 nt, Human
aaaugucacuuuuugaggca

SEQ ID NO: 1413592 - RNA, 22 nt, Human
aaaugucacuuuuugaggcaaa

SEQ ID NO: 1413593 - RNA, 16 nt, Human
aaaugucacuuuuuga

SEQ ID NO: 1413594 - RNA, 15 nt, Human
aaaugucacuuuuug

SEQ ID NO: 1413595 - RNA, 14 nt, Human
aaaugucacuuuuu

SEQ ID NO: 1413596 - RNA, 13 nt, Human
aaaugucacuuuu

SEQ ID NO: 1413597 - RNA, 15 nt, Human
aaauguccuugugau

SEQ ID NO: 1413598 - RNA, 22 nt, Human
aaauguccuugugaugugcacg

SEQ ID NO: 1413599 - RNA, 16 nt, Human
aaaugucaugcugccu

SEQ ID NO: 1413600 - RNA, 19 nt, Human
aaauguauuuuauguuaua

SEQ ID NO: 1413601 - RNA, 21 nt, Human
aaauguauuuuauguuauaua

SEQ ID NO: 1413602 - RNA, 18 nt, Human
aaauguauuuuauguuau

SEQ ID NO: 1413603 - RNA, 16 nt, Human
aaauguauuuuauguu

SEQ ID NO: 1413604 - RNA, 15 nt, Human
aaauguauuuuaugu

SEQ ID NO: 1413605 - RNA, 20 nt, Human
aaauguaugcauguugucua

SEQ ID NO: 1413606 - RNA, 19 nt, Human
aaauguaugcauguugucu

SEQ ID NO: 1413607 - RNA, 16 nt, Human
aaauguaugcauguug

SEQ ID NO: 1413608 - RNA, 15 nt, Human
aaauguaugcauguu

SEQ ID NO: 1413609 - RNA, 14 nt, Human
aaauguaugcaugu

SEQ ID NO: 1413610 - RNA, 13 nt, Human
aaauguaugcaug

SEQ ID NO: 1413611 - RNA, 13 nt, Human
guaugucuccagu

SEQ ID NO: 1413612 - RNA, 15 nt, Human
aaauguauuacagug

SEQ ID NO: 1413613 - RNA, 16 nt, Human
guaugguuuuguggau

SEQ ID NO: 1413614 - RNA, 15 nt, Human
guaugguugacacua

SEQ ID NO: 1413615 - RNA, 13 nt, Human
guauguauuauuu

SEQ ID NO: 1413616 - RNA, 18 nt, Human
guauguacuucaugcugu

SEQ ID NO: 1413617 - RNA, 21 nt, Human
gucaaacuuggauacuuggau

SEQ ID NO: 1413618 - RNA, 13 nt, Human
gucaaacuuggau

SEQ ID NO: 1413619 - RNA, 12 nt, Human
gucaaacaaaua

SEQ ID NO: 1413620 - RNA, 17 nt, Human
gucaaacuuggauacuu

SEQ ID NO: 1413621 - RNA, 17 nt, Human
gucaacacuaacaugau

SEQ ID NO: 1413622 - RNA, 18 nt, Human
gucaaaauagugccacua

SEQ ID NO: 1413623 - RNA, 20 nt, Human
gucaaaacagauuguuugca

SEQ ID NO: 1413624 - RNA, 15 nt, Human
gucaaaacagauugu

SEQ ID NO: 1413625 - RNA, 13 nt, Human
gucaaaacagauu

SEQ ID NO: 1413626 - RNA, 14 nt, Human
gucaaaacacuugu

SEQ ID NO: 1413627 - RNA, 13 nt, Human
guauuuuucuuga

SEQ ID NO: 1413628 - RNA, 22 nt, Human
aaauuuauuucaauauuagcaa

SEQ ID NO: 1413629 - RNA, 13 nt, Human
aaauuuauuuccu

SEQ ID NO: 1413630 - RNA, 20 nt, Human
aaauuuauuuccuaguucug

SEQ ID NO: 1413631 - RNA, 23 nt, Human
aaauugugcaguacuuugugcau

SEQ ID NO: 1413632 - RNA, 15 nt, Human
aaauuguacagccgg

SEQ ID NO: 1413633 - RNA, 14 nt, Human
aaauuguacagccg

SEQ ID NO: 1413634 - RNA, 14 nt, Human
aaauuguauauuca

SEQ ID NO: 1413635 - RNA, 15 nt, Human
aaauuguauauucac

SEQ ID NO: 1413636 - RNA, 16 nt, Human
aaauuguauauucacu

SEQ ID NO: 1413637 - RNA, 13 nt, Human
aaauuauuugcau

SEQ ID NO: 1413638 - RNA, 15 nt, Human
aaauucugcucagau

SEQ ID NO: 1413639 - RNA, 16 nt, Human
aaauucugucucugga

SEQ ID NO: 1413640 - RNA, 19 nt, Human
aaauuguaagcaugcacaa

SEQ ID NO: 1413641 - RNA, 18 nt, Human
aaauucugucucuggauu

SEQ ID NO: 1413642 - RNA, 20 nt, Human
aaauuguaagcaugcacaaa

SEQ ID NO: 1413643 - RNA, 22 nt, Human
aaauucugugccuuguuuuuug

SEQ ID NO: 1413644 - RNA, 16 nt, Human
aaauucugugccuugu

SEQ ID NO: 1413645 - RNA, 15 nt, Human
aagaggcugaggccu

SEQ ID NO: 1413646 - RNA, 22 nt, Human
aagaggcugaggcuggcacagg

SEQ ID NO: 1413647 - RNA, 20 nt, Human
aagaggcugaggccuggacu

SEQ ID NO: 1413648 - RNA, 18 nt, Human
aagaggcugaggccugga

SEQ ID NO: 1413649 - RNA, 21 nt, Human
aagaggcugccccucucacca

SEQ ID NO: 1413650 - RNA, 17 nt, Human
aagaggcugccccucuc

SEQ ID NO: 1413651 - RNA, 16 nt, Human
aagaggcugcccuccu

SEQ ID NO: 1413652 - RNA, 23 nt, Human
aagaggcugccccucucaccaaa

SEQ ID NO: 1413653 - RNA, 22 nt, Human
aagaggcugccccucucaccaa

SEQ ID NO: 1413654 - RNA, 15 nt, Human
aagaguagaauugca

SEQ ID NO: 1413655 - RNA, 20 nt, Human
aagaguagaaacugcaggga

SEQ ID NO: 1413656 - RNA, 18 nt, Human
aagaucuguccucagccu

SEQ ID NO: 1413657 - RNA, 17 nt, Human
aagaucuguccucagcc

SEQ ID NO: 1413658 - RNA, 23 nt, Human
aagaucugcagggggugugucug

SEQ ID NO: 1413659 - RNA, 11 nt, Human
aagaugaauga

SEQ ID NO: 1413660 - RNA, 23 nt, Human
aagaugaacccgaggcugagaau

SEQ ID NO: 1413661 - RNA, 22 nt, Human
aagaugaacccgaggcugagaa

SEQ ID NO: 1413662 - RNA, 23 nt, Human
aagaugaaggagaggcaacaucc

SEQ ID NO: 1413663 - RNA, 16 nt, Human
aagaugaaagagcagu

SEQ ID NO: 1413664 - RNA, 14 nt, Human
aagauggaguuucu

SEQ ID NO: 1413665 - RNA, 15 nt, Human
aagauggaguuucua

SEQ ID NO: 1413666 - RNA, 20 nt, Human
aagauggaauuuaucaaacc

SEQ ID NO: 1413667 - RNA, 12 nt, Human
aagaugcuuuua

SEQ ID NO: 1413668 - RNA, 22 nt, Human
aagaugcuuuuaacagagucug

SEQ ID NO: 1413669 - RNA, 19 nt, Human
guguguccaaaacugccuc

SEQ ID NO: 1413670 - RNA, 15 nt, Human
guguguauuugcuaa

SEQ ID NO: 1413671 - RNA, 18 nt, Human
guguguccaaaacugccu

SEQ ID NO: 1413672 - RNA, 20 nt, Human
gugugguacagagaagccag

SEQ ID NO: 1413673 - RNA, 19 nt, Human
gugugguacagagaagcca

SEQ ID NO: 1413674 - RNA, 18 nt, Human
gugugguacagagaagcc

SEQ ID NO: 1413675 - RNA, 17 nt, Human
gugugguacagagaagc

SEQ ID NO: 1413676 - RNA, 16 nt, Human
gugugguacagagaag

SEQ ID NO: 1413677 - RNA, 15 nt, Human
gugugguacagagaa

SEQ ID NO: 1413678 - RNA, 14 nt, Human
gugugguacagaga

SEQ ID NO: 1413679 - RNA, 24 nt, Human
guguccaaaaccgccagcucuguu

SEQ ID NO: 1413680 - RNA, 23 nt, Human
guguccaaaaccgccagcucugu

SEQ ID NO: 1413681 - RNA, 22 nt, Human
guguccaaaaccgccagcucug

SEQ ID NO: 1413682 - RNA, 20 nt, Human
guguccaaaaccgccagcuc

SEQ ID NO: 1413683 - RNA, 18 nt, Human
guguccaaaaccgccagc

SEQ ID NO: 1413684 - RNA, 17 nt, Human
guguccaaaaccgccag

SEQ ID NO: 1413685 - RNA, 16 nt, Human
gugucauuucucaucc

SEQ ID NO: 1413686 - RNA, 20 nt, Human
gugucauccucacagugaac

SEQ ID NO: 1413687 - RNA, 19 nt, Human
gugucaggcacugggcaug

SEQ ID NO: 1413688 - RNA, 22 nt, Human
gugucaggcacugggcaugagg

SEQ ID NO: 1413689 - RNA, 15 nt, Human
gugugaaugaacacu

SEQ ID NO: 1413690 - RNA, 14 nt, Human
gugugaaugaacac

SEQ ID NO: 1413691 - RNA, 12 nt, Human
guguccaccccc

SEQ ID NO: 1413692 - RNA, 11 nt, Human
guguccacccc

SEQ ID NO: 1413693 - RNA, 20 nt, Human
aagauggggaccagcagccc

SEQ ID NO: 1413694 - RNA, 18 nt, Human
aagauggggaccagcagc

SEQ ID NO: 1413695 - RNA, 22 nt, Human
aagaugggcaucuuuuguauua

SEQ ID NO: 1413696 - RNA, 20 nt, Human
aagaugggcaucuuuuguau

SEQ ID NO: 1413697 - RNA, 19 nt, Human
aagaugggcaucuuuugua

SEQ ID NO: 1413698 - RNA, 15 nt, Human
aagauggggucugua

SEQ ID NO: 1413699 - RNA, 17 nt, Human
aagauggggucuguaaa

SEQ ID NO: 1413700 - RNA, 18 nt, Human
aagauggggucuguaaaa

SEQ ID NO: 1413701 - RNA, 19 nt, Human
aagauggggucuguaaaau

SEQ ID NO: 1413702 - RNA, 20 nt, Human
aagauggggucuguaaaauc

SEQ ID NO: 1413703 - RNA, 21 nt, Human
aagauggggucuguaaaaucu

SEQ ID NO: 1413704 - RNA, 22 nt, Human
aagauggggucuguaaaaucuu

SEQ ID NO: 1413705 - RNA, 19 nt, Human
guguauuuggaaauaaagu

SEQ ID NO: 1413706 - RNA, 14 nt, Human
guguauuugcuuuu

SEQ ID NO: 1413707 - RNA, 19 nt, Human
guguauuugcuaauuuuua

SEQ ID NO: 1413708 - RNA, 10 nt, Human
guguauuugc

SEQ ID NO: 1413709 - RNA, 21 nt, Human
guguauuuacgcuuugauuca

SEQ ID NO: 1413710 - RNA, 17 nt, Human
guguauuuacgcuuuga

SEQ ID NO: 1413711 - RNA, 22 nt, Human
gugucacucaaggcggugcuug

SEQ ID NO: 1413712 - RNA, 19 nt, Human
gugucaacucuuuguuauu

SEQ ID NO: 1413713 - RNA, 21 nt, Human
gugucacucaaggcggugcuu

SEQ ID NO: 1413714 - RNA, 20 nt, Human
gugucagacccuggaggccc

SEQ ID NO: 1413715 - RNA, 21 nt, Human
guguauuuggaaauaaaguca

SEQ ID NO: 1413716 - RNA, 17 nt, Human
guguauuuuuuuacuaa

SEQ ID NO: 1413717 - RNA, 23 nt, Human
guguauuuuuuuacuaauagaca

SEQ ID NO: 1413718 - RNA, 16 nt, Human
aacuugccugccuuuc

SEQ ID NO: 1413719 - RNA, 13 nt, Human
aacuugccugccu

SEQ ID NO: 1413720 - RNA, 14 nt, Human
aacuugcaucacuu

SEQ ID NO: 1413721 - RNA, 19 nt, Human
aacuugauccauuucuaau

SEQ ID NO: 1413722 - RNA, 17 nt, Human
aacuugauccauuucua

SEQ ID NO: 1413723 - RNA, 23 nt, Human
aagagcaucaugccucugaggcc

SEQ ID NO: 1413724 - RNA, 24 nt, Human
aagagcaucaugccucugaggcca

SEQ ID NO: 1413725 - RNA, 22 nt, Human
aagagcaucaugccucugaggc

SEQ ID NO: 1413726 - RNA, 21 nt, Human
aagagcaucaugccucugagg

SEQ ID NO: 1413727 - RNA, 20 nt, Human
aagagcaucaugccucugag

SEQ ID NO: 1413728 - RNA, 19 nt, Human
aagagcaucaugccucuga

SEQ ID NO: 1413729 - RNA, 18 nt, Human
aagagcaucaugccucug

SEQ ID NO: 1413730 - RNA, 17 nt, Human
aagagcaucaugccucu

SEQ ID NO: 1413731 - RNA, 15 nt, Human
aagagcaucaugccu

SEQ ID NO: 1413732 - RNA, 17 nt, Human
aagagcaggacuccagg

SEQ ID NO: 1413733 - RNA, 22 nt, Human
aagagcaggacuccaggcccaa

SEQ ID NO: 1413734 - RNA, 22 nt, Human
aagagcagcaccuccucagccu

SEQ ID NO: 1413735 - RNA, 14 nt, Human
aagacuugacagug

SEQ ID NO: 1413736 - RNA, 23 nt, Human
aagacuugguugguaggguggga

SEQ ID NO: 1413737 - RNA, 13 nt, Human
aagacuugacagu

SEQ ID NO: 1413738 - RNA, 20 nt, Human
aagacuucucuuugccucaa

SEQ ID NO: 1413739 - RNA, 19 nt, Human
aagacuucucuuugccuca

SEQ ID NO: 1413740 - RNA, 18 nt, Human
aagacguuuuauaagcau

SEQ ID NO: 1413741 - RNA, 17 nt, Human
aagacguuuuauaagca

SEQ ID NO: 1413742 - RNA, 15 nt, Human
aagacguuuuauaag

SEQ ID NO: 1413743 - RNA, 20 nt, Human
aagacgugaugccaggacca

SEQ ID NO: 1413744 - RNA, 17 nt, Human
aagacgccuuucuccuc

SEQ ID NO: 1413745 - RNA, 22 nt, Human
aagacgcacuuuggcuuauaau

SEQ ID NO: 1413746 - RNA, 21 nt, Human
aagacuagaaaauuagacugu

SEQ ID NO: 1413747 - RNA, 23 nt, Human
aagacugaguacguugugcauuu

SEQ ID NO: 1413748 - RNA, 17 nt, Human
aagacugcauuauauuu

SEQ ID NO: 1413749 - RNA, 16 nt, Human
aagacugcacaucaaa

SEQ ID NO: 1413750 - RNA, 21 nt, Human
gugggaagcccauccugacca

SEQ ID NO: 1413751 - RNA, 20 nt, Human
gugggaagcccauccugacc

SEQ ID NO: 1413752 - RNA, 19 nt, Human
guggccuuugcgcuccugg

SEQ ID NO: 1413753 - RNA, 20 nt, Human
guggccuuugcgcuccuggc

SEQ ID NO: 1413754 - RNA, 17 nt, Human
guggccuuugcgcuccu

SEQ ID NO: 1413755 - RNA, 20 nt, Human
guggccuuguucugucacca

SEQ ID NO: 1413756 - RNA, 14 nt, Human
guggggccugggag

SEQ ID NO: 1413757 - RNA, 12 nt, Human
guggggccuggg

SEQ ID NO: 1413758 - RNA, 12 nt, Human
guggggcuuggg

SEQ ID NO: 1413759 - RNA, 17 nt, Human
guggggccgccgccucu

SEQ ID NO: 1413760 - RNA, 15 nt, Human
guggccuggucccug

SEQ ID NO: 1413761 - RNA, 14 nt, Human
guggccuggucccu

SEQ ID NO: 1413762 - RNA, 21 nt, Human
guggccucuugagcaguggcu

SEQ ID NO: 1413763 - RNA, 20 nt, Human
guggccucuugagcaguggc

SEQ ID NO: 1413764 - RNA, 17 nt, Human
guggccucuugagcagu

SEQ ID NO: 1413765 - RNA, 21 nt, Human
guggcccuuccuggacagcug

SEQ ID NO: 1413766 - RNA, 17 nt, Human
guggcccuuccuggaca

SEQ ID NO: 1413767 - RNA, 16 nt, Human
guggcccuuccuggac

SEQ ID NO: 1413768 - RNA, 15 nt, Human
guggcccuuccugga

SEQ ID NO: 1413769 - RNA, 14 nt, Human
guggcccuuccugg

SEQ ID NO: 1413770 - RNA, 13 nt, Human
guggcccuuccug

SEQ ID NO: 1413771 - RNA, 23 nt, Human
guggcccuuaugacugccaagac

SEQ ID NO: 1413772 - RNA, 20 nt, Human
guggcccuuaugacugccaa

SEQ ID NO: 1413773 - RNA, 15 nt, Human
aagaggcaccaggaa

SEQ ID NO: 1413774 - RNA, 23 nt, Human
guggcccuuucggauccagggag

SEQ ID NO: 1413775 - RNA, 18 nt, Human
guggcccuuccuggacag

SEQ ID NO: 1413776 - RNA, 22 nt, Human
guggccuaaccugccgagaguc

SEQ ID NO: 1413777 - RNA, 18 nt, Human
guggccgaaccagaacca

SEQ ID NO: 1413778 - RNA, 21 nt, Human
guggccuaaccugccgagagu

SEQ ID NO: 1413779 - RNA, 22 nt, Human
aagaggaggggaagaggccugu

SEQ ID NO: 1413780 - RNA, 21 nt, Human
aagaggaggggaagaggccug

SEQ ID NO: 1413781 - RNA, 20 nt, Human
aagaggaggggaagaggccu

SEQ ID NO: 1413782 - RNA, 17 nt, Human
aagaggaggggaagagg

SEQ ID NO: 1413783 - RNA, 23 nt, Human
aagaggagcccccacccuguucc

SEQ ID NO: 1413784 - RNA, 14 nt, Human
aagagccacugcca

SEQ ID NO: 1413785 - RNA, 19 nt, Human
aagaggaauuacgugcucu

SEQ ID NO: 1413786 - RNA, 19 nt, Human
aagccucagauuccuuccc

SEQ ID NO: 1413787 - RNA, 23 nt, Human
aagccucaagguuuuagguucua

SEQ ID NO: 1413788 - RNA, 21 nt, Human
aagccucaagguuuuagguuc

SEQ ID NO: 1413789 - RNA, 18 nt, Human
aagccucaaaacaaaggc

SEQ ID NO: 1413790 - RNA, 16 nt, Human
aagccucaaaacaaag

SEQ ID NO: 1413791 - RNA, 15 nt, Human
aagccucaaaacaaa

SEQ ID NO: 1413792 - RNA, 22 nt, Human
aagccuagugaaggcuucucuc

SEQ ID NO: 1413793 - RNA, 14 nt, Human
aagccuaagaaucu

SEQ ID NO: 1413794 - RNA, 18 nt, Human
guucaagcgauucucuug

SEQ ID NO: 1413795 - RNA, 17 nt, Human
guucaagcgauucucuu

SEQ ID NO: 1413796 - RNA, 19 nt, Human
guucagcuaagcuaggaau

SEQ ID NO: 1413797 - RNA, 22 nt, Human
guucagcgcugucaggauugcg

SEQ ID NO: 1413798 - RNA, 22 nt, Human
guucagcuaagcuaggaaugaa

SEQ ID NO: 1413799 - RNA, 22 nt, Human
aagccugcacaauaaaaauguu

SEQ ID NO: 1413800 - RNA, 21 nt, Human
aagccugcacaauaaaaaugu

SEQ ID NO: 1413801 - RNA, 15 nt, Human
aagccugaugcugac

SEQ ID NO: 1413802 - RNA, 22 nt, Human
aagccugaguacuccacacugc

SEQ ID NO: 1413803 - RNA, 24 nt, Human
aagccugagggaaaggccagcacu

SEQ ID NO: 1413804 - RNA, 22 nt, Human
aagccugagggaaaggccagca

SEQ ID NO: 1413805 - RNA, 21 nt, Human
aagccugagggaaaggccagc

SEQ ID NO: 1413806 - RNA, 16 nt, Human
aagccugagggaaagg

SEQ ID NO: 1413807 - RNA, 14 nt, Human
aagcuaggaaugaa

SEQ ID NO: 1413808 - RNA, 16 nt, Human
aagcuagcaaauagua

SEQ ID NO: 1413809 - RNA, 22 nt, Human
aagcucaaagguuuggaaggag

SEQ ID NO: 1413810 - RNA, 20 nt, Human
aagcucaaagguuuggaagg

SEQ ID NO: 1413811 - RNA, 21 nt, Human
aagcuauuuuucuaacuacaa

SEQ ID NO: 1413812 - RNA, 16 nt, Human
aagcuauuuuucuaac

SEQ ID NO: 1413813 - RNA, 14 nt, Human
aagcuauuuuucua

SEQ ID NO: 1413814 - RNA, 13 nt, Human
aagcuauuuuucu

SEQ ID NO: 1413815 - RNA, 23 nt, Human
aagcuauuugauguaauacuucu

SEQ ID NO: 1413816 - RNA, 18 nt, Human
aagcuauuugauguaaua

SEQ ID NO: 1413817 - RNA, 16 nt, Human
aagcuauuugauguaa

SEQ ID NO: 1413818 - RNA, 14 nt, Human
aagcuauuugaugu

SEQ ID NO: 1413819 - RNA, 13 nt, Human
aagcuauuuaaag

SEQ ID NO: 1413820 - RNA, 18 nt, Human
aagcuauuuaaagcaucu

SEQ ID NO: 1413821 - RNA, 21 nt, Human
aagcucaaagguuuggaagga

SEQ ID NO: 1413822 - RNA, 20 nt, Human
aagcucacagaccuuugaac

SEQ ID NO: 1413823 - RNA, 15 nt, Human
aagcucagcugcauu

SEQ ID NO: 1413824 - RNA, 14 nt, Human
aagcuccagguaga

SEQ ID NO: 1413825 - RNA, 13 nt, Human
aagcuccagguag

SEQ ID NO: 1413826 - RNA, 23 nt, Human
guucaacaaagaaacaaagaugu

SEQ ID NO: 1413827 - RNA, 22 nt, Human
guucaacaaagaaacaaagaug

SEQ ID NO: 1413828 - RNA, 13 nt, Human
guucaacaaagaa

SEQ ID NO: 1413829 - RNA, 14 nt, Human
guucaaagcugccu

SEQ ID NO: 1413830 - RNA, 13 nt, Human
guucaaagccagc

SEQ ID NO: 1413831 - RNA, 12 nt, Human
guucaaagccag

SEQ ID NO: 1413832 - RNA, 16 nt, Human
guucaagaaauaaguu

SEQ ID NO: 1413833 - RNA, 19 nt, Human
guucaacuuuuccuuugaa

SEQ ID NO: 1413834 - RNA, 14 nt, Human
guucaacuuauuaa

SEQ ID NO: 1413835 - RNA, 21 nt, Human
guuauuuuuuaauuauuauuu

SEQ ID NO: 1413836 - RNA, 20 nt, Human
guucaaagauauuuugcuuu

SEQ ID NO: 1413837 - RNA, 21 nt, Human
guucaaagauauuuugcuuug

SEQ ID NO: 1413838 - RNA, 22 nt, Human
guucaaagauauuuugcuuugu

SEQ ID NO: 1413839 - RNA, 17 nt, Human
guuauuuuguuuuuccu

SEQ ID NO: 1413840 - RNA, 13 nt, Human
guuauuuugcaac

SEQ ID NO: 1413841 - RNA, 16 nt, Human
guuauuuuuuaauuau

SEQ ID NO: 1413842 - RNA, 20 nt, Human
guuagggacugaccagcagc

SEQ ID NO: 1413843 - RNA, 22 nt, Human
guuauuaucugggcuuauaucu

SEQ ID NO: 1413844 - RNA, 17 nt, Human
guuauuaucugggcuua

SEQ ID NO: 1413845 - RNA, 19 nt, Human
guuagggacugaccagcag

SEQ ID NO: 1413846 - RNA, 23 nt, Human
guuagggaaaacauuccauccuu

SEQ ID NO: 1413847 - RNA, 19 nt, Human
guuagaaaugcagaauccu

SEQ ID NO: 1413848 - RNA, 14 nt, Human
guuacuucugaggu

SEQ ID NO: 1413849 - RNA, 19 nt, Human
guuaagacuugacagugga

SEQ ID NO: 1413850 - RNA, 20 nt, Human
guuagcuccuguggccccac

SEQ ID NO: 1413851 - RNA, 16 nt, Human
guuagcuccuguggcc

SEQ ID NO: 1413852 - RNA, 15 nt, Human
guuagggaaaacauu

SEQ ID NO: 1413853 - RNA, 20 nt, Human
guuagggaaaacauuccauc

SEQ ID NO: 1413854 - RNA, 18 nt, Human
aagccccugccccuccuc

SEQ ID NO: 1413855 - RNA, 19 nt, Human
aagcccccagagcccaggc

SEQ ID NO: 1413856 - RNA, 23 nt, Human
aagcccccagcuaagaaccugga

SEQ ID NO: 1413857 - RNA, 21 nt, Human
aagcccccagcuaagaaccug

SEQ ID NO: 1413858 - RNA, 16 nt, Human
aagcccccagcuaaga

SEQ ID NO: 1413859 - RNA, 18 nt, Human
aagcccccagagcccagg

SEQ ID NO: 1413860 - RNA, 17 nt, Human
aagcccccagagcccag

SEQ ID NO: 1413861 - RNA, 16 nt, Human
aagcccccagagccca

SEQ ID NO: 1413862 - RNA, 15 nt, Human
aagcccccagagccc

SEQ ID NO: 1413863 - RNA, 14 nt, Human
aagcccccagagcc

SEQ ID NO: 1413864 - RNA, 13 nt, Human
aagcccccagagc

SEQ ID NO: 1413865 - RNA, 12 nt, Human
aagcccccagag

SEQ ID NO: 1413866 - RNA, 20 nt, Human
aagcccccaccgugggcagg

SEQ ID NO: 1413867 - RNA, 14 nt, Human
aagcccccaccgug

SEQ ID NO: 1413868 - RNA, 20 nt, Human
aagcccucccagguguuaac

SEQ ID NO: 1413869 - RNA, 13 nt, Human
aagcccucccagg

SEQ ID NO: 1413870 - RNA, 18 nt, Human
aagcccggcuccugguca

SEQ ID NO: 1413871 - RNA, 22 nt, Human
aagcccggcuccuggucaccua

SEQ ID NO: 1413872 - RNA, 15 nt, Human
aagcccggcuccugg

SEQ ID NO: 1413873 - RNA, 17 nt, Human
guuaagacuugacagug

SEQ ID NO: 1413874 - RNA, 16 nt, Human
guuaagacuugacagu

SEQ ID NO: 1413875 - RNA, 15 nt, Human
guuaagacuugacag

SEQ ID NO: 1413876 - RNA, 16 nt, Human
guuaagaccuggcagc

SEQ ID NO: 1413877 - RNA, 14 nt, Human
guuaagaccuggca

SEQ ID NO: 1413878 - RNA, 13 nt, Human
guuaagaccuggc

SEQ ID NO: 1413879 - RNA, 22 nt, Human
guuaagacaugauuuccuugaa

SEQ ID NO: 1413880 - RNA, 19 nt, Human
guuaagacaugauuuccuu

SEQ ID NO: 1413881 - RNA, 17 nt, Human
guuaagacaugauuucc

SEQ ID NO: 1413882 - RNA, 13 nt, Human
aagccguccuggc

SEQ ID NO: 1413883 - RNA, 16 nt, Human
aagcccauccugacca

SEQ ID NO: 1413884 - RNA, 15 nt, Human
aagcccauccugacc

SEQ ID NO: 1413885 - RNA, 14 nt, Human
aagcccauccugac

SEQ ID NO: 1413886 - RNA, 22 nt, Human
aagcccagugcacugaaaguca

SEQ ID NO: 1413887 - RNA, 22 nt, Human
aagcccauaugcuaccaccagc

SEQ ID NO: 1413888 - RNA, 17 nt, Human
aagcccagugcacugaa

SEQ ID NO: 1413889 - RNA, 20 nt, Human
aagcccauccugaccagcug

SEQ ID NO: 1413890 - RNA, 18 nt, Human
aagcccauccugaccagc

SEQ ID NO: 1413891 - RNA, 16 nt, Human
aagcccauucauucca

SEQ ID NO: 1413892 - RNA, 21 nt, Human
aagcccauucauuccauucug

SEQ ID NO: 1413893 - RNA, 22 nt, Human
aagccccacccaggccaggcau

SEQ ID NO: 1413894 - RNA, 14 nt, Human
aagccccagcaagc

SEQ ID NO: 1413895 - RNA, 18 nt, Human
aagccccacccaggccag

SEQ ID NO: 1413896 - RNA, 17 nt, Human
aagccccacccaggcca

SEQ ID NO: 1413897 - RNA, 16 nt, Human
aagccccacccaggcc

SEQ ID NO: 1413898 - RNA, 23 nt, Human
aagcccauucauuccauucugga

SEQ ID NO: 1413899 - RNA, 15 nt, Human
aagcagguucuuguu

SEQ ID NO: 1413900 - RNA, 14 nt, Human
aagcagguucuugu

SEQ ID NO: 1413901 - RNA, 23 nt, Human
gugugugcccucugggcucugag

SEQ ID NO: 1413902 - RNA, 21 nt, Human
gugugugcccucugggcucug

SEQ ID NO: 1413903 - RNA, 19 nt, Human
gugugugcccucugggcuc

SEQ ID NO: 1413904 - RNA, 17 nt, Human
gugugugcccucugggc

SEQ ID NO: 1413905 - RNA, 14 nt, Human
gugugugcccucug

SEQ ID NO: 1413906 - RNA, 17 nt, Human
gugugugaaugaacacu

SEQ ID NO: 1413907 - RNA, 17 nt, Human
aagcaguauuuuucuug

SEQ ID NO: 1413908 - RNA, 19 nt, Human
aagcagguuucaaggaagu

SEQ ID NO: 1413909 - RNA, 17 nt, Human
aagcagguuucaaggaa

SEQ ID NO: 1413910 - RNA, 16 nt, Human
aagcagguuucaagga

SEQ ID NO: 1413911 - RNA, 19 nt, Human
aagcagucgugccuguguc

SEQ ID NO: 1413912 - RNA, 18 nt, Human
aagcagucgugccugugu

SEQ ID NO: 1413913 - RNA, 17 nt, Human
aagcagucgugccugug

SEQ ID NO: 1413914 - RNA, 18 nt, Human
aagcaguauuuuucuuga

SEQ ID NO: 1413915 - RNA, 22 nt, Human
aagcaucauuauuuauguauug

SEQ ID NO: 1413916 - RNA, 23 nt, Human
aagcaucauuauuuauguauugu

SEQ ID NO: 1413917 - RNA, 21 nt, Human
aagcaucauuauuuauguauu

SEQ ID NO: 1413918 - RNA, 23 nt, Human
aagcauaaaagaugaaagagcag

SEQ ID NO: 1413919 - RNA, 22 nt, Human
aagcauaaaagaugaaagagca

SEQ ID NO: 1413920 - RNA, 12 nt, Human
aagccaaaacaa

SEQ ID NO: 1413921 - RNA, 18 nt, Human
aagccaaaacaauguuua

SEQ ID NO: 1413922 - RNA, 17 nt, Human
aagcauuuuguaauaau

SEQ ID NO: 1413923 - RNA, 14 nt, Human
aagcauuuuguaau

SEQ ID NO: 1413924 - RNA, 17 nt, Human
aagcauuugaaugcauu

SEQ ID NO: 1413925 - RNA, 23 nt, Human
aagcauuuuguaaguugaagcaa

SEQ ID NO: 1413926 - RNA, 15 nt, Human
aagcauuugaaugca

SEQ ID NO: 1413927 - RNA, 16 nt, Human
aagcauuugaaugcau

SEQ ID NO: 1413928 - RNA, 16 nt, Human
aagcauuuagaaaacu

SEQ ID NO: 1413929 - RNA, 17 nt, Human
aagcauuguaaaauaau

SEQ ID NO: 1413930 - RNA, 15 nt, Human
aagcauuguaaaaua

SEQ ID NO: 1413931 - RNA, 14 nt, Human
aagcauuguaaaau

SEQ ID NO: 1413932 - RNA, 13 nt, Human
aagcauugaaugg

SEQ ID NO: 1413933 - RNA, 12 nt, Human
aagcauuugaau

SEQ ID NO: 1413934 - RNA, 13 nt, Human
aagcauuugaaug

SEQ ID NO: 1413935 - RNA, 14 nt, Human
aagcauuugaaugc

SEQ ID NO: 1413936 - RNA, 18 nt, Human
aagcauuguaaaauaauu

SEQ ID NO: 1413937 - RNA, 16 nt, Human
aagcauugaauggcua

SEQ ID NO: 1413938 - RNA, 13 nt, Human
aagcauucugucu

SEQ ID NO: 1413939 - RNA, 16 nt, Human
aagcauuuagauguau

SEQ ID NO: 1413940 - RNA, 23 nt, Human
aagcauucucauuggaaauuuag

SEQ ID NO: 1413941 - RNA, 22 nt, Human
aagcauucucauuggaaauuua

SEQ ID NO: 1413942 - RNA, 18 nt, Human
aagcauucucauuggaaa

SEQ ID NO: 1413943 - RNA, 17 nt, Human
aagcauucucauuggaa

SEQ ID NO: 1413944 - RNA, 15 nt, Human
aagcauucucauugg

SEQ ID NO: 1413945 - RNA, 15 nt, Human
aagcauucagaagaa

SEQ ID NO: 1413946 - RNA, 21 nt, Human
aagcauucagaagaaaaagaa

SEQ ID NO: 1413947 - RNA, 13 nt, Human
aagcauucacaac

SEQ ID NO: 1413948 - RNA, 12 nt, Human
aagcauucacaa

SEQ ID NO: 1413949 - RNA, 18 nt, Human
aagcaucuaaguuauaag

SEQ ID NO: 1413950 - RNA, 19 nt, Human
aagcaucuggcucuaauuc

SEQ ID NO: 1413951 - RNA, 17 nt, Human
aagcaucuggcucuaau

SEQ ID NO: 1413952 - RNA, 13 nt, Human
aagcaucuggcuc

SEQ ID NO: 1413953 - RNA, 13 nt, Human
aagcaucuaaguu

SEQ ID NO: 1413954 - RNA, 13 nt, Human
aagcaucccucac

SEQ ID NO: 1413955 - RNA, 14 nt, Human
aagcaucccucacc

SEQ ID NO: 1413956 - RNA, 23 nt, Human
aagcaucccucacccauccuaga

SEQ ID NO: 1413957 - RNA, 16 nt, Human
aagugaagacuggaag

SEQ ID NO: 1413958 - RNA, 13 nt, Human
aagugaagacugg

SEQ ID NO: 1413959 - RNA, 13 nt, Human
aagugaagacaga

SEQ ID NO: 1413960 - RNA, 17 nt, Human
aagugaagacaaugacu

SEQ ID NO: 1413961 - RNA, 19 nt, Human
aagugaagacaaugacuua

SEQ ID NO: 1413962 - RNA, 14 nt, Human
aagugaaauaaugu

SEQ ID NO: 1413963 - RNA, 16 nt, Human
aagugaaauaaugugu

SEQ ID NO: 1413964 - RNA, 11 nt, Human
aagugaaauaa

SEQ ID NO: 1413965 - RNA, 14 nt, Human
aagugaaaaugguc

SEQ ID NO: 1413966 - RNA, 14 nt, Human
aagugaaaauauag

SEQ ID NO: 1413967 - RNA, 12 nt, Human
aagugaaaauau

SEQ ID NO: 1413968 - RNA, 12 nt, Human
aagugaaaacuu

SEQ ID NO: 1413969 - RNA, 18 nt, Human
aagucuuuuguucgcaug

SEQ ID NO: 1413970 - RNA, 16 nt, Human
guuuuucggacaguuu

SEQ ID NO: 1413971 - RNA, 18 nt, Human
guuuuuccuuuuuuugua

SEQ ID NO: 1413972 - RNA, 22 nt, Human
guuuuuccuuccaaugucugga

SEQ ID NO: 1413973 - RNA, 18 nt, Human
guuuuucauuaaauaaau

SEQ ID NO: 1413974 - RNA, 15 nt, Human
guuuuucauaaagca

SEQ ID NO: 1413975 - RNA, 13 nt, Human
aagucauuggcuu

SEQ ID NO: 1413976 - RNA, 20 nt, Human
aagucauuggcuuuauccuc

SEQ ID NO: 1413977 - RNA, 13 nt, Human
aaguauuugggaa

SEQ ID NO: 1413978 - RNA, 22 nt, Human
aaguauuucaaauuggagcuuc

SEQ ID NO: 1413979 - RNA, 21 nt, Human
aaguauuucaaauuggagcuu

SEQ ID NO: 1413980 - RNA, 13 nt, Human
aaguauuucaaau

SEQ ID NO: 1413981 - RNA, 22 nt, Human
aaguauuuucauaaguauuuca

SEQ ID NO: 1413982 - RNA, 17 nt, Human
aaguauuuucauaagua

SEQ ID NO: 1413983 - RNA, 21 nt, Human
aaguauuuguuaauuuagaaa

SEQ ID NO: 1413984 - RNA, 19 nt, Human
aaguauuuguuaauuuaga

SEQ ID NO: 1413985 - RNA, 20 nt, Human
aaguauuuguuaauuuagaa

SEQ ID NO: 1413986 - RNA, 14 nt, Human
aagucuuuuguucg

SEQ ID NO: 1413987 - RNA, 23 nt, Human
aagucuuucucuuucccuggucc

SEQ ID NO: 1413988 - RNA, 22 nt, Human
aagucuuucucuuucccugguc

SEQ ID NO: 1413989 - RNA, 20 nt, Human
aagucuuucucuuucccugg

SEQ ID NO: 1413990 - RNA, 18 nt, Human
aagucuuucucuuucccu

SEQ ID NO: 1413991 - RNA, 17 nt, Human
aagucuuucucuuuccc

SEQ ID NO: 1413992 - RNA, 16 nt, Human
aagucuuucucuuucc

SEQ ID NO: 1413993 - RNA, 16 nt, Human
aagucuuucacauuua

SEQ ID NO: 1413994 - RNA, 13 nt, Human
guuucugcccugc

SEQ ID NO: 1413995 - RNA, 20 nt, Human
guuucugaguuccugcaugc

SEQ ID NO: 1413996 - RNA, 23 nt, Human
guuuuggcugaaauucuccugga

SEQ ID NO: 1413997 - RNA, 22 nt, Human
guuuuggcugaaauucuccugg

SEQ ID NO: 1413998 - RNA, 20 nt, Human
guuuuggcugaaauucuccu

SEQ ID NO: 1413999 - RNA, 17 nt, Human
guuuuggacaguuuacc

SEQ ID NO: 1414000 - RNA, 18 nt, Human
guuuuggacaguuuacca

SEQ ID NO: 1414001 - RNA, 17 nt, Human
guuuugcuacauaauua

SEQ ID NO: 1414002 - RNA, 19 nt, Human
aaguaaugauaacuggaaa

SEQ ID NO: 1414003 - RNA, 14 nt, Human
aaguaaugauaacu

SEQ ID NO: 1414004 - RNA, 13 nt, Human
aaguacacuguuu

SEQ ID NO: 1414005 - RNA, 18 nt, Human
aaguacacuguuucaaac

SEQ ID NO: 1414006 - RNA, 23 nt, Human
aaguacacuguuucaaacuuuac

SEQ ID NO: 1414007 - RNA, 19 nt, Human
aaguacacuguuucaaacu

SEQ ID NO: 1414008 - RNA, 20 nt, Human
aaguacacuguuucaaacuu

SEQ ID NO: 1414009 - RNA, 17 nt, Human
aaguacagagaagccau

SEQ ID NO: 1414010 - RNA, 22 nt, Human
aaguacagagaagccaucaccu

SEQ ID NO: 1414011 - RNA, 16 nt, Human
aaguacagagaagcca

SEQ ID NO: 1414012 - RNA, 15 nt, Human
aaguacagagaagcc

SEQ ID NO: 1414013 - RNA, 14 nt, Human
aaguacagagaagc

SEQ ID NO: 1414014 - RNA, 13 nt, Human
aaguacagagaag

SEQ ID NO: 1414015 - RNA, 12 nt, Human
aaguacagagaa

SEQ ID NO: 1414016 - RNA, 11 nt, Human
aaguacagaga

SEQ ID NO: 1414017 - RNA, 13 nt, Human
aaguaccagacua

SEQ ID NO: 1414018 - RNA, 12 nt, Human
aaguaccagacu

SEQ ID NO: 1414019 - RNA, 16 nt, Human
aaguauuuagguuuuu

SEQ ID NO: 1414020 - RNA, 11 nt, Human
aaguauuuagg

SEQ ID NO: 1414021 - RNA, 10 nt, Human
aaguauuuag

SEQ ID NO: 1414022 - RNA, 23 nt, Human
aaguauuuaauuagugcuaagug

SEQ ID NO: 1414023 - RNA, 19 nt, Human
aaguauuuaauuagugcua

SEQ ID NO: 1414024 - RNA, 20 nt, Human
aaguauuuaauuagugcuaa

SEQ ID NO: 1414025 - RNA, 21 nt, Human
aaguauuuaauuagugcuaag

SEQ ID NO: 1414026 - RNA, 22 nt, Human
aaguauuuaauuagugcuaagu

SEQ ID NO: 1414027 - RNA, 13 nt, Human
aaguauuagaaua

SEQ ID NO: 1414028 - RNA, 16 nt, Human
aaguauuuaauuagug

SEQ ID NO: 1414029 - RNA, 17 nt, Human
aaguauuuaauuagugc

SEQ ID NO: 1414030 - RNA, 18 nt, Human
aaguauuuaauuagugcu

SEQ ID NO: 1414031 - RNA, 19 nt, Human
aagugcccucucccacccu

SEQ ID NO: 1414032 - RNA, 23 nt, Human
aagugcccucucccacccucuuc

SEQ ID NO: 1414033 - RNA, 15 nt, Human
aagugcccucuccca

SEQ ID NO: 1414034 - RNA, 13 nt, Human
aagugcccucucc

SEQ ID NO: 1414035 - RNA, 18 nt, Human
aagugcccuccaggcuuu

SEQ ID NO: 1414036 - RNA, 12 nt, Human
aagugcccucca

SEQ ID NO: 1414037 - RNA, 20 nt, Human
uaaaauaugaagacauaaac

SEQ ID NO: 1414038 - RNA, 17 nt, Human
aagugagucucucuggg

SEQ ID NO: 1414039 - RNA, 21 nt, Human
aagugagggcucacucagcca

SEQ ID NO: 1414040 - RNA, 19 nt, Human
aagugagggcucacucagc

SEQ ID NO: 1414041 - RNA, 17 nt, Human
aagugagggcucacuca

SEQ ID NO: 1414042 - RNA, 21 nt, Human
aagugaucaaacuacauauug

SEQ ID NO: 1414043 - RNA, 19 nt, Human
uaaaauaugaagacauaaa

SEQ ID NO: 1414044 - RNA, 14 nt, Human
uaaaauaucuacau

SEQ ID NO: 1414045 - RNA, 20 nt, Human
uaaaauacuuuuacucugcc

SEQ ID NO: 1414046 - RNA, 21 nt, Human
uaaaauacuuuuacucugccu

SEQ ID NO: 1414047 - RNA, 19 nt, Human
uaaaauacuuuuacucugc

SEQ ID NO: 1414048 - RNA, 14 nt, Human
uaaaauacuuuuac

SEQ ID NO: 1414049 - RNA, 16 nt, Human
uaaaauaauucugagu

SEQ ID NO: 1414050 - RNA, 21 nt, Human
uaaaauaauuuuguaauguau

SEQ ID NO: 1414051 - RNA, 16 nt, Human
uaaaauaauuuuguaa

SEQ ID NO: 1414052 - RNA, 15 nt, Human
uaaaauaauuuugua

SEQ ID NO: 1414053 - RNA, 22 nt, Human
uaaaauaccagccaguaaaugg

SEQ ID NO: 1414054 - RNA, 20 nt, Human
uaaaauaauuuuuauauuug

SEQ ID NO: 1414055 - RNA, 14 nt, Human
uaaaauaauuuugu

SEQ ID NO: 1414056 - RNA, 13 nt, Human
uaaaauaauuuug

SEQ ID NO: 1414057 - RNA, 22 nt, Human
uaaaauaauuuuaucucuuucu

SEQ ID NO: 1414058 - RNA, 21 nt, Human
uaaaauaauuauauaacugua

SEQ ID NO: 1414059 - RNA, 20 nt, Human
uaaaauaauuauauaacugu

SEQ ID NO: 1414060 - RNA, 19 nt, Human
uaaaauaauuauauaacug

SEQ ID NO: 1414061 - RNA, 18 nt, Human
uaaaauaauuauauaacu

SEQ ID NO: 1414062 - RNA, 22 nt, Human
uaaaaguuuuuuauuaugcauu

SEQ ID NO: 1414063 - RNA, 21 nt, Human
uaaaaguuuuuuauuaugcau

SEQ ID NO: 1414064 - RNA, 23 nt, Human
uaaaagugggcuugauucugcag

SEQ ID NO: 1414065 - RNA, 16 nt, Human
uaaaagacucauccgu

SEQ ID NO: 1414066 - RNA, 22 nt, Human
uaaaagugggcuugauucugca

SEQ ID NO: 1414067 - RNA, 14 nt, Human
uaaaagacucaucc

SEQ ID NO: 1414068 - RNA, 13 nt, Human
uaaaagacucauc

SEQ ID NO: 1414069 - RNA, 12 nt, Human
uaaaagacucau

SEQ ID NO: 1414070 - RNA, 20 nt, Human
uaaaagacagugaaagaaaa

SEQ ID NO: 1414071 - RNA, 14 nt, Human
guuuuugagauauu

SEQ ID NO: 1414072 - RNA, 13 nt, Human
guuuuugagauau

SEQ ID NO: 1414073 - RNA, 17 nt, Human
uaaaaagugcuuuugug

SEQ ID NO: 1414074 - RNA, 16 nt, Human
guuuuugagauauuaa

SEQ ID NO: 1414075 - RNA, 18 nt, Human
uaaaaauaaaaaacacug

SEQ ID NO: 1414076 - RNA, 19 nt, Human
uaaaaauaaaaaacacugg

SEQ ID NO: 1414077 - RNA, 16 nt, Human
uaaaaauaagucaaca

SEQ ID NO: 1414078 - RNA, 19 nt, Human
uaaaaauaagucaacagua

SEQ ID NO: 1414079 - RNA, 15 nt, Human
uaaaaaucucaaauu

SEQ ID NO: 1414080 - RNA, 16 nt, Human
uaaaaaucucaaauuu

SEQ ID NO: 1414081 - RNA, 17 nt, Human
uaaaaaucucaaauuuc

SEQ ID NO: 1414082 - RNA, 17 nt, Human
uaaaaauaaaaaagauc

SEQ ID NO: 1414083 - RNA, 16 nt, Human
uaaaaauaaaaaagau

SEQ ID NO: 1414084 - RNA, 20 nt, Human
uaaaaaguuuuaguuuugau

SEQ ID NO: 1414085 - RNA, 21 nt, Human
uaaaaauaaaaaacacuggga

SEQ ID NO: 1414086 - RNA, 15 nt, Human
uaaaaauaagucaac

SEQ ID NO: 1414087 - RNA, 21 nt, Human
uaaaaauaaaaaagaucccaa

SEQ ID NO: 1414088 - RNA, 19 nt, Human
uaaaaauaaaaaagauccc

SEQ ID NO: 1414089 - RNA, 16 nt, Human
uaaaaauaaacauguu

SEQ ID NO: 1414090 - RNA, 18 nt, Human
uaaaacccguugauuacu

SEQ ID NO: 1414091 - RNA, 17 nt, Human
uaaaacccguugauuac

SEQ ID NO: 1414092 - RNA, 18 nt, Human
uaaaacgcaguugcaaac

SEQ ID NO: 1414093 - RNA, 11 nt, Human
uaaaacuaaga

SEQ ID NO: 1414094 - RNA, 19 nt, Human
uaaaaaucucaaauuucua

SEQ ID NO: 1414095 - RNA, 20 nt, Human
uaaaaaucucaaauuucuaa

SEQ ID NO: 1414096 - RNA, 21 nt, Human
uaaaaaucucaaauuucuaaa

SEQ ID NO: 1414097 - RNA, 19 nt, Human
uaaaacccauuuaaauuuu

SEQ ID NO: 1414098 - RNA, 15 nt, Human
uaaaacuuugaaguu

SEQ ID NO: 1414099 - RNA, 13 nt, Human
uaaaacuuuccuc

SEQ ID NO: 1414100 - RNA, 14 nt, Human
uaaaacuuugaagu

SEQ ID NO: 1414101 - RNA, 17 nt, Human
uaaaacuuuccucgccu

SEQ ID NO: 1414102 - RNA, 15 nt, Human
uaaaacuuuccucgc

SEQ ID NO: 1414103 - RNA, 12 nt, Human
uaaaagaaugau

SEQ ID NO: 1414104 - RNA, 22 nt, Human
guugggaucagggguaggaaug

SEQ ID NO: 1414105 - RNA, 17 nt, Human
guuggaauggauuuuuc

SEQ ID NO: 1414106 - RNA, 23 nt, Human
guugggagagggcgcaggccgug

SEQ ID NO: 1414107 - RNA, 15 nt, Human
guuggaauggauuuu

SEQ ID NO: 1414108 - RNA, 22 nt, Human
guuggaaugaauuaaauaaacc

SEQ ID NO: 1414109 - RNA, 17 nt, Human
guugcguuccuuucuuu

SEQ ID NO: 1414110 - RNA, 18 nt, Human
aaggccuaggauucuaaa

SEQ ID NO: 1414111 - RNA, 16 nt, Human
aaggccuaggauucua

SEQ ID NO: 1414112 - RNA, 15 nt, Human
aaggccuaggauucu

SEQ ID NO: 1414113 - RNA, 22 nt, Human
aaggccuaauucuaugccuguc

SEQ ID NO: 1414114 - RNA, 12 nt, Human
guugccuuuuau

SEQ ID NO: 1414115 - RNA, 20 nt, Human
aaggcccgagcagcugagca

SEQ ID NO: 1414116 - RNA, 19 nt, Human
aaggcccgagcagcugagc

SEQ ID NO: 1414117 - RNA, 18 nt, Human
aaggcccgagcagcugag

SEQ ID NO: 1414118 - RNA, 17 nt, Human
aaggcccgagcagcuga

SEQ ID NO: 1414119 - RNA, 16 nt, Human
aaggcccgagcagcug

SEQ ID NO: 1414120 - RNA, 21 nt, Human
aaggcccgagcagcugagcag

SEQ ID NO: 1414121 - RNA, 22 nt, Human
aaggccaucugggcuccuccag

SEQ ID NO: 1414122 - RNA, 24 nt, Human
aaggccauaaaacagguaauauaa

SEQ ID NO: 1414123 - RNA, 18 nt, Human
aaggccauaaaacaggua

SEQ ID NO: 1414124 - RNA, 17 nt, Human
aaggccauaaaacaggu

SEQ ID NO: 1414125 - RNA, 14 nt, Human
aaggccauaaaaca

SEQ ID NO: 1414126 - RNA, 13 nt, Human
aaggccagcacuc

SEQ ID NO: 1414127 - RNA, 19 nt, Human
aaggaguguagcaacuaca

SEQ ID NO: 1414128 - RNA, 18 nt, Human
aaggagucacugagacca

SEQ ID NO: 1414129 - RNA, 20 nt, Human
aaggagucagacauuuuaag

SEQ ID NO: 1414130 - RNA, 17 nt, Human
aaggagucacugagacc

SEQ ID NO: 1414131 - RNA, 14 nt, Human
aaggaguuuauguu

SEQ ID NO: 1414132 - RNA, 13 nt, Human
aaggaguuuaugu

SEQ ID NO: 1414133 - RNA, 12 nt, Human
aaggaguuuaug

SEQ ID NO: 1414134 - RNA, 11 nt, Human
aaggauaaagu

SEQ ID NO: 1414135 - RNA, 13 nt, Human
aaggauacaaaag

SEQ ID NO: 1414136 - RNA, 21 nt, Human
aaggauacaaaagcaugugag

SEQ ID NO: 1414137 - RNA, 19 nt, Human
aaggauagaugcuggccca

SEQ ID NO: 1414138 - RNA, 15 nt, Human
aaggauagaugcugg

SEQ ID NO: 1414139 - RNA, 17 nt, Human
aaggaguuuauguucca

SEQ ID NO: 1414140 - RNA, 17 nt, Human
aaggcaucugacaugca

SEQ ID NO: 1414141 - RNA, 22 nt, Human
aaggcaucgucaugcacaguau

SEQ ID NO: 1414142 - RNA, 17 nt, Human
aaggcauggcggccccc

SEQ ID NO: 1414143 - RNA, 19 nt, Human
aaggcauuauaaaaagaau

SEQ ID NO: 1414144 - RNA, 17 nt, Human
aaggagucaaaacuaca

SEQ ID NO: 1414145 - RNA, 17 nt, Human
aaggaggggcuguaaaa

SEQ ID NO: 1414146 - RNA, 18 nt, Human
aaggagcugccuggaccc

SEQ ID NO: 1414147 - RNA, 19 nt, Human
aaggagcugccuggacccg

SEQ ID NO: 1414148 - RNA, 18 nt, Human
aaggaggcuaugcucagg

SEQ ID NO: 1414149 - RNA, 17 nt, Human
aaggagcugccuggacc

SEQ ID NO: 1414150 - RNA, 16 nt, Human
aaggagcugccuggac

SEQ ID NO: 1414151 - RNA, 13 nt, Human
aaggagcugccug

SEQ ID NO: 1414152 - RNA, 12 nt, Human
aaggagcugccu

SEQ ID NO: 1414153 - RNA, 11 nt, Human
aaggagcugcc

SEQ ID NO: 1414154 - RNA, 21 nt, Human
aaggagccugugaacccagga

SEQ ID NO: 1414155 - RNA, 22 nt, Human
aaggagccugugaacccaggac

SEQ ID NO: 1414156 - RNA, 13 nt, Human
aaggagccuguga

SEQ ID NO: 1414157 - RNA, 12 nt, Human
aaggagccugug

SEQ ID NO: 1414158 - RNA, 10 nt, Human
aaggagccug

SEQ ID NO: 1414159 - RNA, 18 nt, Human
aaggagaugucuuggaac

SEQ ID NO: 1414160 - RNA, 17 nt, Human
aaggagauuuacaacug

SEQ ID NO: 1414161 - RNA, 14 nt, Human
aaggagauuuacaa

SEQ ID NO: 1414162 - RNA, 20 nt, Human
aaggagaggcaacauccaaa

SEQ ID NO: 1414163 - RNA, 23 nt, Human
aaggaagcauuguaaaauaauuc

SEQ ID NO: 1414164 - RNA, 18 nt, Human
aaggaagcauuguaaaau

SEQ ID NO: 1414165 - RNA, 22 nt, Human
aaggaagcauuguaaaauaauu

SEQ ID NO: 1414166 - RNA, 16 nt, Human
aaggaaccaacaaucu

SEQ ID NO: 1414167 - RNA, 17 nt, Human
aaggaaccaacaaucuu

SEQ ID NO: 1414168 - RNA, 13 nt, Human
aaggaaccaacaa

SEQ ID NO: 1414169 - RNA, 12 nt, Human
aaggaaagaaaa

SEQ ID NO: 1414170 - RNA, 13 nt, Human
aagcuccaagccc

SEQ ID NO: 1414171 - RNA, 15 nt, Human
aaggaaagaaaacau

SEQ ID NO: 1414172 - RNA, 19 nt, Human
guuuauuuucaagaauaau

SEQ ID NO: 1414173 - RNA, 13 nt, Human
guuucaaacuuua

SEQ ID NO: 1414174 - RNA, 14 nt, Human
guuucaaacuuuac

SEQ ID NO: 1414175 - RNA, 16 nt, Human
guuucaaacuuuacua

SEQ ID NO: 1414176 - RNA, 17 nt, Human
guuucaaacuuuacuau

SEQ ID NO: 1414177 - RNA, 11 nt, Human
guuuacagaau

SEQ ID NO: 1414178 - RNA, 20 nt, Human
guuuaaugaagaucuaaaua

SEQ ID NO: 1414179 - RNA, 22 nt, Human
guuuauuuaacuuuuaguaaag

SEQ ID NO: 1414180 - RNA, 14 nt, Human
guuuacaugcuuau

SEQ ID NO: 1414181 - RNA, 19 nt, Human
guuuacaugcuuauuccau

SEQ ID NO: 1414182 - RNA, 22 nt, Human
guugggcagggugacccugaag

SEQ ID NO: 1414183 - RNA, 19 nt, Human
guuuaauccccaguaaaau

SEQ ID NO: 1414184 - RNA, 21 nt, Human
guuuaauccccaguaaaauug

SEQ ID NO: 1414185 - RNA, 22 nt, Human
guuucugaggcuuuaugauaau

SEQ ID NO: 1414186 - RNA, 13 nt, Human
guuucugacucug

SEQ ID NO: 1414187 - RNA, 17 nt, Human
guuucugacucugagcu

SEQ ID NO: 1414188 - RNA, 12 nt, Human
guuucugacucu

SEQ ID NO: 1414189 - RNA, 17 nt, Human
guuucuauuuuuugaaa

SEQ ID NO: 1414190 - RNA, 18 nt, Human
aagguauuuaauagguuu

SEQ ID NO: 1414191 - RNA, 12 nt, Human
aaggucauuuuu

SEQ ID NO: 1414192 - RNA, 18 nt, Human
aaggucauuuuuuuuaag

SEQ ID NO: 1414193 - RNA, 16 nt, Human
aaguaaggaauuuuau

SEQ ID NO: 1414194 - RNA, 21 nt, Human
aaggcucugagagucuagauu

SEQ ID NO: 1414195 - RNA, 20 nt, Human
aaggcucugagagucuagau

SEQ ID NO: 1414196 - RNA, 17 nt, Human
aaggcucugagagucua

SEQ ID NO: 1414197 - RNA, 16 nt, Human
aaggcucugagagucu

SEQ ID NO: 1414198 - RNA, 14 nt, Human
aaggcucugagagu

SEQ ID NO: 1414199 - RNA, 13 nt, Human
aaggcucugagag

SEQ ID NO: 1414200 - RNA, 12 nt, Human
aaggcucugaga

SEQ ID NO: 1414201 - RNA, 21 nt, Human
aaggcucuaugagucuagaug

SEQ ID NO: 1414202 - RNA, 20 nt, Human
aaggcucuaugagucuagau

SEQ ID NO: 1414203 - RNA, 16 nt, Human
aaggcucuaugagucu

SEQ ID NO: 1414204 - RNA, 13 nt, Human
aaggcucuagauc

SEQ ID NO: 1414205 - RNA, 12 nt, Human
aaggcucuagau

SEQ ID NO: 1414206 - RNA, 11 nt, Human
aaggcucuaga

SEQ ID NO: 1414207 - RNA, 22 nt, Human
aaggcucugagagucuagauuc

SEQ ID NO: 1414208 - RNA, 14 nt, Human
aaggcucuuuugua

SEQ ID NO: 1414209 - RNA, 13 nt, Human
aaggggcuucagg

SEQ ID NO: 1414210 - RNA, 14 nt, Human
aaggggccugagca

SEQ ID NO: 1414211 - RNA, 15 nt, Human
aaggggccugagcag

SEQ ID NO: 1414212 - RNA, 13 nt, Human
aaggggccugagc

SEQ ID NO: 1414213 - RNA, 23 nt, Human
aaggggccucaccgagugggggc

SEQ ID NO: 1414214 - RNA, 17 nt, Human
aaggggccagaggcucg

SEQ ID NO: 1414215 - RNA, 22 nt, Human
aagggucgaaagcucuagaauc

SEQ ID NO: 1414216 - RNA, 21 nt, Human
aagggucgaaagcucuagaau

SEQ ID NO: 1414217 - RNA, 19 nt, Human
aagggucgaaagcucuaga

SEQ ID NO: 1414218 - RNA, 18 nt, Human
aagggucgaaagcucuag

SEQ ID NO: 1414219 - RNA, 22 nt, Human
aagguacuuucauauuuuaaac

SEQ ID NO: 1414220 - RNA, 19 nt, Human
aagguacuuucauauuuua

SEQ ID NO: 1414221 - RNA, 18 nt, Human
aagguacuuucauauuuu

SEQ ID NO: 1414222 - RNA, 14 nt, Human
aagguacuucaaau

SEQ ID NO: 1414223 - RNA, 20 nt, Human
aaucacucuaauuaauugua

SEQ ID NO: 1414224 - RNA, 21 nt, Human
aaucacucuaauuaauuguaa

SEQ ID NO: 1414225 - RNA, 18 nt, Human
aaucacucuaauuaauug

SEQ ID NO: 1414226 - RNA, 14 nt, Human
aauauuuucuuuuc

SEQ ID NO: 1414227 - RNA, 17 nt, Human
aaucagccuacaggccu

SEQ ID NO: 1414228 - RNA, 21 nt, Human
aaucagccaauuauguuaaac

SEQ ID NO: 1414229 - RNA, 16 nt, Human
aaucagccuaguugau

SEQ ID NO: 1414230 - RNA, 14 nt, Human
aaucagccaauuau

SEQ ID NO: 1414231 - RNA, 18 nt, Human
aaucagccaauuauguua

SEQ ID NO: 1414232 - RNA, 19 nt, Human
aaucagccaauuauguuaa

SEQ ID NO: 1414233 - RNA, 20 nt, Human
aaucagccaauuauguuaaa

SEQ ID NO: 1414234 - RNA, 20 nt, Human
aaucagcuccuuccuggaga

SEQ ID NO: 1414235 - RNA, 15 nt, Human
aaucagcuauuuugu

SEQ ID NO: 1414236 - RNA, 14 nt, Human
aaucaguaagaggu

SEQ ID NO: 1414237 - RNA, 22 nt, Human
aaucaguaagagguguuauuug

SEQ ID NO: 1414238 - RNA, 18 nt, Human
aaucagggaggucauuuu

SEQ ID NO: 1414239 - RNA, 20 nt, Human
aaucaggaauauuuuccaaa

SEQ ID NO: 1414240 - RNA, 18 nt, Human
aaucaggaauauuuucca

SEQ ID NO: 1414241 - RNA, 17 nt, Human
aaucagcuauuuuguga

SEQ ID NO: 1414242 - RNA, 16 nt, Human
aaucagcuauuuugug

SEQ ID NO: 1414243 - RNA, 15 nt, Human
aaucaggcuuuuguu

SEQ ID NO: 1414244 - RNA, 16 nt, Human
aaucagguggcuuuug

SEQ ID NO: 1414245 - RNA, 19 nt, Human
aaucagggaggucauuuug

SEQ ID NO: 1414246 - RNA, 16 nt, Human
uaagacucucacacuc

SEQ ID NO: 1414247 - RNA, 22 nt, Human
uaagacucaaauguucuaaguu

SEQ ID NO: 1414248 - RNA, 21 nt, Human
uaagacucaaauguucuaagu

SEQ ID NO: 1414249 - RNA, 19 nt, Human
uaagacucaaauguucuaa

SEQ ID NO: 1414250 - RNA, 18 nt, Human
uaagacucaaauguucua

SEQ ID NO: 1414251 - RNA, 15 nt, Human
uaagacucaaauguu

SEQ ID NO: 1414252 - RNA, 18 nt, Human
uaagacuuacucuaagau

SEQ ID NO: 1414253 - RNA, 17 nt, Human
uaagacuuacucuaaga

SEQ ID NO: 1414254 - RNA, 20 nt, Human
aauauuuugaaucaauaaua

SEQ ID NO: 1414255 - RNA, 22 nt, Human
aauauuuugaaucaauaauaua

SEQ ID NO: 1414256 - RNA, 18 nt, Human
aauauuuugaaucaauaa

SEQ ID NO: 1414257 - RNA, 16 nt, Human
aauauuuugaaucaau

SEQ ID NO: 1414258 - RNA, 15 nt, Human
aauauuuugaaucaa

SEQ ID NO: 1414259 - RNA, 14 nt, Human
aauauuuugaauca

SEQ ID NO: 1414260 - RNA, 13 nt, Human
aauauuuugaauc

SEQ ID NO: 1414261 - RNA, 20 nt, Human
aauauuuuccuccugagugc

SEQ ID NO: 1414262 - RNA, 15 nt, Human
aauauuuauuuuaau

SEQ ID NO: 1414263 - RNA, 18 nt, Human
uaagauuauagauucuaa

SEQ ID NO: 1414264 - RNA, 17 nt, Human
uaagauuauagauucua

SEQ ID NO: 1414265 - RNA, 16 nt, Human
uaagauuauagauucu

SEQ ID NO: 1414266 - RNA, 15 nt, Human
uaagauuauagauuc

SEQ ID NO: 1414267 - RNA, 22 nt, Human
uaagauuacaaaucagaaguca

SEQ ID NO: 1414268 - RNA, 19 nt, Human
uaagauuacaaaucagaag

SEQ ID NO: 1414269 - RNA, 17 nt, Human
aaucagucucagaaugu

SEQ ID NO: 1414270 - RNA, 24 nt, Human
aaucagucucagaaugucauuuug

SEQ ID NO: 1414271 - RNA, 22 nt, Human
uaagcucacguccugagaaagc

SEQ ID NO: 1414272 - RNA, 21 nt, Human
uaagcuauuuuucuaacuaca

SEQ ID NO: 1414273 - RNA, 17 nt, Human
uaagcuauuuuucuaac

SEQ ID NO: 1414274 - RNA, 16 nt, Human
uaagcuauuuuucuaa

SEQ ID NO: 1414275 - RNA, 14 nt, Human
uaagcuauuuuucu

SEQ ID NO: 1414276 - RNA, 23 nt, Human
uaagcuauuugauguaauacuuc

SEQ ID NO: 1414277 - RNA, 22 nt, Human
uaagcuauuugauguaauacuu

SEQ ID NO: 1414278 - RNA, 21 nt, Human
uaagcuauuugauguaauacu

SEQ ID NO: 1414279 - RNA, 19 nt, Human
uaagcuauuugauguaaua

SEQ ID NO: 1414280 - RNA, 18 nt, Human
uaagcuauuugauguaau

SEQ ID NO: 1414281 - RNA, 15 nt, Human
uaagcuauuugaugu

SEQ ID NO: 1414282 - RNA, 14 nt, Human
uaagcuauuugaug

SEQ ID NO: 1414283 - RNA, 23 nt, Human
uaagcauaaaagaugaaagagca

SEQ ID NO: 1414284 - RNA, 23 nt, Human
uaagauuauagauucuaaagauu

SEQ ID NO: 1414285 - RNA, 22 nt, Human
uaagauuauagauucuaaagau

SEQ ID NO: 1414286 - RNA, 21 nt, Human
uaagauuauagauucuaaaga

SEQ ID NO: 1414287 - RNA, 20 nt, Human
uaagauuauagauucuaaag

SEQ ID NO: 1414288 - RNA, 19 nt, Human
uaagauuauagauucuaaa

SEQ ID NO: 1414289 - RNA, 22 nt, Human
uaagcagguggaucuauuucau

SEQ ID NO: 1414290 - RNA, 18 nt, Human
uaagcagugucuguguuu

SEQ ID NO: 1414291 - RNA, 21 nt, Human
uaagcagguggaucuauuuca

SEQ ID NO: 1414292 - RNA, 21 nt, Human
uaagcauaagcuuaugcuuaa

SEQ ID NO: 1414293 - RNA, 17 nt, Human
uaaggaaccaacaaucu

SEQ ID NO: 1414294 - RNA, 14 nt, Human
uaaggaaccaacaa

SEQ ID NO: 1414295 - RNA, 20 nt, Human
uaaggaaaucaacuugcuua

SEQ ID NO: 1414296 - RNA, 19 nt, Human
uaaggaaaucaacuugcuu

SEQ ID NO: 1414297 - RNA, 12 nt, Human
uaagcucugagc

SEQ ID NO: 1414298 - RNA, 16 nt, Human
uaagcucugagcuguc

SEQ ID NO: 1414299 - RNA, 10 nt, Human
uaagcucuga

SEQ ID NO: 1414300 - RNA, 22 nt, Human
uaagcucccagggccugucuca

SEQ ID NO: 1414301 - RNA, 19 nt, Human
uaagcucacguccugagaa

SEQ ID NO: 1414302 - RNA, 22 nt, Human
uaaggaauuuuauuuuuuucug

SEQ ID NO: 1414303 - RNA, 22 nt, Human
uaaggaccugaaauuccaaagu

SEQ ID NO: 1414304 - RNA, 21 nt, Human
uaaggaccugaaauuccaaag

SEQ ID NO: 1414305 - RNA, 15 nt, Human
uaaggaccugaaauu

SEQ ID NO: 1414306 - RNA, 18 nt, Human
uaagguuuuaauuuagua

SEQ ID NO: 1414307 - RNA, 18 nt, Human
uaaggauccggaaagaag

SEQ ID NO: 1414308 - RNA, 17 nt, Human
uaaggauccggaaagaa

SEQ ID NO: 1414309 - RNA, 15 nt, Human
uaagguucuaaggcc

SEQ ID NO: 1414310 - RNA, 18 nt, Human
uaaggaugcuuguacaua

SEQ ID NO: 1414311 - RNA, 19 nt, Human
uaaggagaaaucuauagaa

SEQ ID NO: 1414312 - RNA, 17 nt, Human
uaagguuuuaauuuagu

SEQ ID NO: 1414313 - RNA, 20 nt, Human
uaaguaaugauaacuggaaa

SEQ ID NO: 1414314 - RNA, 22 nt, Human
uaaguacagagaagccaucacc

SEQ ID NO: 1414315 - RNA, 18 nt, Human
uaaguacagagaagccau

SEQ ID NO: 1414316 - RNA, 17 nt, Human
uaaguacagagaagcca

SEQ ID NO: 1414317 - RNA, 16 nt, Human
uaaguacagagaagcc

SEQ ID NO: 1414318 - RNA, 14 nt, Human
uaaguacagagaag

SEQ ID NO: 1414319 - RNA, 13 nt, Human
uaaguacagagaa

SEQ ID NO: 1414320 - RNA, 12 nt, Human
uaaguacagaga

SEQ ID NO: 1414321 - RNA, 11 nt, Human
uaaguacagag

SEQ ID NO: 1414322 - RNA, 18 nt, Human
uaaguacacaauaagcaa

SEQ ID NO: 1414323 - RNA, 15 nt, Human
uaauaaaaagcuuuu

SEQ ID NO: 1414324 - RNA, 16 nt, Human
uaauaaaaagauugaa

SEQ ID NO: 1414325 - RNA, 13 nt, Human
uaauaaaaagauu

SEQ ID NO: 1414326 - RNA, 23 nt, Human
uaaguuucuaagauucuaaaggu

SEQ ID NO: 1414327 - RNA, 21 nt, Human
uaaguuucuaagauucuaaag

SEQ ID NO: 1414328 - RNA, 20 nt, Human
uaaguuucuaagauucuaaa

SEQ ID NO: 1414329 - RNA, 19 nt, Human
uaaguuucuaagauucuaa

SEQ ID NO: 1414330 - RNA, 18 nt, Human
uaaguuucuaagauucua

SEQ ID NO: 1414331 - RNA, 17 nt, Human
uaaguuucuaagauucu

SEQ ID NO: 1414332 - RNA, 16 nt, Human
uaaguuucuaagauuc

SEQ ID NO: 1414333 - RNA, 15 nt, Human
uaaguuucuaagauu

SEQ ID NO: 1414334 - RNA, 14 nt, Human
uaaguuucuaagau

SEQ ID NO: 1414335 - RNA, 13 nt, Human
uaaguuucuaaga

SEQ ID NO: 1414336 - RNA, 12 nt, Human
uaaguuucuaag

SEQ ID NO: 1414337 - RNA, 18 nt, Human
uaaguuauagugaauacu

SEQ ID NO: 1414338 - RNA, 14 nt, Human
uaaguuauaagacu

SEQ ID NO: 1414339 - RNA, 20 nt, Human
uaaguuaguuccacugagac

SEQ ID NO: 1414340 - RNA, 20 nt, Human
uaaguauuuagguuuuuguu

SEQ ID NO: 1414341 - RNA, 12 nt, Human
uaaguauuuagg

SEQ ID NO: 1414342 - RNA, 21 nt, Human
uaaguacagagaagccaucac

SEQ ID NO: 1414343 - RNA, 19 nt, Human
uaaguuaguuccacugaga

SEQ ID NO: 1414344 - RNA, 17 nt, Human
uaaguuaguuccacuga

SEQ ID NO: 1414345 - RNA, 14 nt, Human
uaaguuaauuuaaa

SEQ ID NO: 1414346 - RNA, 13 nt, Human
uaaguauuucaaa

SEQ ID NO: 1414347 - RNA, 17 nt, Human
uaaguguguguuuuuca

SEQ ID NO: 1414348 - RNA, 19 nt, Human
aaucccagcccccugacca

SEQ ID NO: 1414349 - RNA, 23 nt, Human
aaucaguucauuagaaauauuuu

SEQ ID NO: 1414350 - RNA, 20 nt, Human
aaucaguucauuagaaauau

SEQ ID NO: 1414351 - RNA, 19 nt, Human
aaucaguucauuagaaaua

SEQ ID NO: 1414352 - RNA, 18 nt, Human
aaucaguucauuagaaau

SEQ ID NO: 1414353 - RNA, 17 nt, Human
aaucaguucauuagaaa

SEQ ID NO: 1414354 - RNA, 21 nt, Human
aaucccaaauuugauugauuu

SEQ ID NO: 1414355 - RNA, 13 nt, Human
uaauaaaaauaaa

SEQ ID NO: 1414356 - RNA, 22 nt, Human
aaucccugcuuuuuguguuuuu

SEQ ID NO: 1414357 - RNA, 14 nt, Human
aaucccugcuuuuu

SEQ ID NO: 1414358 - RNA, 13 nt, Human
aaucccugcuuuu

SEQ ID NO: 1414359 - RNA, 19 nt, Human
aaucccucaccuucugagu

SEQ ID NO: 1414360 - RNA, 23 nt, Human
aauccccuucuccccugcacugu

SEQ ID NO: 1414361 - RNA, 20 nt, Human
aauccccuucuccccugcac

SEQ ID NO: 1414362 - RNA, 17 nt, Human
aauccccuucuccccug

SEQ ID NO: 1414363 - RNA, 16 nt, Human
aauccccuucuccccu

SEQ ID NO: 1414364 - RNA, 15 nt, Human
aauccccuucucccc

SEQ ID NO: 1414365 - RNA, 16 nt, Human
aaucccgauucacccu

SEQ ID NO: 1414366 - RNA, 14 nt, Human
aauccccuucuccc

SEQ ID NO: 1414367 - RNA, 13 nt, Human
aauccccuucucc

SEQ ID NO: 1414368 - RNA, 18 nt, Human
aauccccaacaugcacug

SEQ ID NO: 1414369 - RNA, 15 nt, Human
aauccccaguaaaau

SEQ ID NO: 1414370 - RNA, 16 nt, Human
aauccccaguaaaauu

SEQ ID NO: 1414371 - RNA, 17 nt, Human
aauccccaguaaaauug

SEQ ID NO: 1414372 - RNA, 21 nt, Human
aauccccaguaaaauugccau

SEQ ID NO: 1414373 - RNA, 18 nt, Human
aauccucucucuguguua

SEQ ID NO: 1414374 - RNA, 14 nt, Human
aauccucccagaaa

SEQ ID NO: 1414375 - RNA, 12 nt, Human
aaucuaaaugga

SEQ ID NO: 1414376 - RNA, 21 nt, Human
aaucuauggucgggagacagc

SEQ ID NO: 1414377 - RNA, 12 nt, Human
aaucuguaaacu

SEQ ID NO: 1414378 - RNA, 11 nt, Human
aaucuguaaac

SEQ ID NO: 1414379 - RNA, 11 nt, Human
aaucuguaaaa

SEQ ID NO: 1414380 - RNA, 21 nt, Human
aaguguauuuggaaauaaagu

SEQ ID NO: 1414381 - RNA, 15 nt, Human
aaguguauuuggaaa

SEQ ID NO: 1414382 - RNA, 13 nt, Human
aaguguauuugga

SEQ ID NO: 1414383 - RNA, 22 nt, Human
aagugcguccacgagcuguuua

SEQ ID NO: 1414384 - RNA, 21 nt, Human
aagugccuuucaggaucuauu

SEQ ID NO: 1414385 - RNA, 20 nt, Human
aagugccuuucaggaucuau

SEQ ID NO: 1414386 - RNA, 19 nt, Human
aagugccuuucaggaucua

SEQ ID NO: 1414387 - RNA, 14 nt, Human
aagugccuuucagg

SEQ ID NO: 1414388 - RNA, 13 nt, Human
aagugccuuucag

SEQ ID NO: 1414389 - RNA, 13 nt, Human
uaaaugaacaaga

SEQ ID NO: 1414390 - RNA, 23 nt, Human
uaaaucuuuuauaggauuuauuu

SEQ ID NO: 1414391 - RNA, 19 nt, Human
uaaaucuuuuauaggauuu

SEQ ID NO: 1414392 - RNA, 18 nt, Human
aaguguauuuuuuuacua

SEQ ID NO: 1414393 - RNA, 21 nt, Human
aaguguauuuuuuuacuaaua

SEQ ID NO: 1414394 - RNA, 12 nt, Human
uaaaugaauguu

SEQ ID NO: 1414395 - RNA, 12 nt, Human
uaaaugaagaaa

SEQ ID NO: 1414396 - RNA, 23 nt, Human
uaaaugaacaagagaagcauucu

SEQ ID NO: 1414397 - RNA, 17 nt, Human
uaaaugaacaagagaag

SEQ ID NO: 1414398 - RNA, 16 nt, Human
uaaaugaacaagagaa

SEQ ID NO: 1414399 - RNA, 15 nt, Human
uaaaugaacaagaga

SEQ ID NO: 1414400 - RNA, 19 nt, Human
uaaauguuaugacuaugua

SEQ ID NO: 1414401 - RNA, 21 nt, Human
uaaauguuaugacuauguaaa

SEQ ID NO: 1414402 - RNA, 19 nt, Human
uaaauuaacuuuuauaaac

SEQ ID NO: 1414403 - RNA, 20 nt, Human
uaaauuaacuuuuauaaacu

SEQ ID NO: 1414404 - RNA, 20 nt, Human
uaacaaaauguaugucuggu

SEQ ID NO: 1414405 - RNA, 18 nt, Human
uaaauuauuguuuuucuu

SEQ ID NO: 1414406 - RNA, 19 nt, Human
uaacaaaauguaugucugg

SEQ ID NO: 1414407 - RNA, 16 nt, Human
uaacaaaauguauguc

SEQ ID NO: 1414408 - RNA, 15 nt, Human
uaacaaaauguaugu

SEQ ID NO: 1414409 - RNA, 16 nt, Human
uaaauuauguaaauua

SEQ ID NO: 1414410 - RNA, 13 nt, Human
uaaauuauguaaa

SEQ ID NO: 1414411 - RNA, 22 nt, Human
uaaauuaucaggcaaauuugca

SEQ ID NO: 1414412 - RNA, 20 nt, Human
uaaauguuaugacuauguaa

SEQ ID NO: 1414413 - RNA, 21 nt, Human
uaaauuaacuuuuauaaacuu

SEQ ID NO: 1414414 - RNA, 22 nt, Human
uaaauuaacuuuuauaaacuuu

SEQ ID NO: 1414415 - RNA, 14 nt, Human
uaacaaucagcucc

SEQ ID NO: 1414416 - RNA, 20 nt, Human
uaacaauacaaauggauuuu

SEQ ID NO: 1414417 - RNA, 19 nt, Human
uaacaauacaaauggauuu

SEQ ID NO: 1414418 - RNA, 18 nt, Human
uaacaauacaaauggauu

SEQ ID NO: 1414419 - RNA, 17 nt, Human
uaacaauacaaauggau

SEQ ID NO: 1414420 - RNA, 16 nt, Human
uaacaauacaaaugga

SEQ ID NO: 1414421 - RNA, 14 nt, Human
uaacaauacaaaug

SEQ ID NO: 1414422 - RNA, 13 nt, Human
uaacaauacaaau

SEQ ID NO: 1414423 - RNA, 13 nt, Human
uaacaaugcugua

SEQ ID NO: 1414424 - RNA, 15 nt, Human
aauagcaugucacua

SEQ ID NO: 1414425 - RNA, 12 nt, Human
aauagcauguca

SEQ ID NO: 1414426 - RNA, 14 nt, Human
aauagcagccuuuc

SEQ ID NO: 1414427 - RNA, 18 nt, Human
aauagcaaagaauugacu

SEQ ID NO: 1414428 - RNA, 15 nt, Human
aauagcaaagaauug

SEQ ID NO: 1414429 - RNA, 14 nt, Human
aauagcaaagaauu

SEQ ID NO: 1414430 - RNA, 20 nt, Human
aauagcaaaagaagaaguuu

SEQ ID NO: 1414431 - RNA, 19 nt, Human
aauagcaaaagaagaaguu

SEQ ID NO: 1414432 - RNA, 16 nt, Human
aauagcaaaagaagaa

SEQ ID NO: 1414433 - RNA, 13 nt, Human
aauagcaaaagaa

SEQ ID NO: 1414434 - RNA, 16 nt, Human
aauagagccugaggga

SEQ ID NO: 1414435 - RNA, 14 nt, Human
aauagagccugagg

SEQ ID NO: 1414436 - RNA, 16 nt, Human
aauagacuuaaaucuc

SEQ ID NO: 1414437 - RNA, 12 nt, Human
aauaccugcuca

SEQ ID NO: 1414438 - RNA, 21 nt, Human
aauaccacucuguaauugcaa

SEQ ID NO: 1414439 - RNA, 20 nt, Human
aauaccacucuguaauugca

SEQ ID NO: 1414440 - RNA, 21 nt, Human
aauacccaugucuacacagau

SEQ ID NO: 1414441 - RNA, 19 nt, Human
aauacauuauauuucuauu

SEQ ID NO: 1414442 - RNA, 23 nt, Human
aauacaugcuaagagaaguagaa

SEQ ID NO: 1414443 - RNA, 22 nt, Human
aauacaugcuaagagaaguaga

SEQ ID NO: 1414444 - RNA, 21 nt, Human
aauacaugcuaagagaaguag

SEQ ID NO: 1414445 - RNA, 23 nt, Human
aauacaugacauuuauuuuucau

SEQ ID NO: 1414446 - RNA, 17 nt, Human
aauacaugacauuuauu

SEQ ID NO: 1414447 - RNA, 16 nt, Human
aauacagggcauuuug

SEQ ID NO: 1414448 - RNA, 23 nt, Human
aauacaggaaacaguugcaugua

SEQ ID NO: 1414449 - RNA, 18 nt, Human
aauacaggaaacaguugc

SEQ ID NO: 1414450 - RNA, 16 nt, Human
aauacaggaaacaguu

SEQ ID NO: 1414451 - RNA, 15 nt, Human
aauacaggaaacagu

SEQ ID NO: 1414452 - RNA, 13 nt, Human
aauacaggaaaca

SEQ ID NO: 1414453 - RNA, 15 nt, Human
aauacagaucaucuu

SEQ ID NO: 1414454 - RNA, 18 nt, Human
aauacagcaacaauuuau

SEQ ID NO: 1414455 - RNA, 21 nt, Human
aauacagauuuugauagcaaa

SEQ ID NO: 1414456 - RNA, 23 nt, Human
aauacagauuuugauagcaaagc

SEQ ID NO: 1414457 - RNA, 16 nt, Human
aauacagaucaucuug

SEQ ID NO: 1414458 - RNA, 19 nt, Human
aauacagauuuugauagca

SEQ ID NO: 1414459 - RNA, 20 nt, Human
aauacagauuuugauagcaa

SEQ ID NO: 1414460 - RNA, 19 nt, Human
aauacagauauauuuucuu

SEQ ID NO: 1414461 - RNA, 15 nt, Human
aauacagauauauuu

SEQ ID NO: 1414462 - RNA, 14 nt, Human
aauacagauauauu

SEQ ID NO: 1414463 - RNA, 13 nt, Human
aauacagauauau

SEQ ID NO: 1414464 - RNA, 12 nt, Human
aauacagauaua

SEQ ID NO: 1414465 - RNA, 15 nt, Human
aauacagacuggaug

SEQ ID NO: 1414466 - RNA, 19 nt, Human
aauaccacucuguaauugc

SEQ ID NO: 1414467 - RNA, 18 nt, Human
aauaccacucuguaauug

SEQ ID NO: 1414468 - RNA, 17 nt, Human
aauaccacucuguaauu

SEQ ID NO: 1414469 - RNA, 17 nt, Human
aauaccagccaguaaau

SEQ ID NO: 1414470 - RNA, 19 nt, Human
aauaccagccaguaaaugg

SEQ ID NO: 1414471 - RNA, 23 nt, Human
aauacauuuaaaacauuaaaaua

SEQ ID NO: 1414472 - RNA, 22 nt, Human
aauacauuuaaaacauuaaaau

SEQ ID NO: 1414473 - RNA, 21 nt, Human
aauacauuuaaaacauuaaaa

SEQ ID NO: 1414474 - RNA, 20 nt, Human
aauacauuuaaaacauuaaa

SEQ ID NO: 1414475 - RNA, 17 nt, Human
aauacauuuaaaacauu

SEQ ID NO: 1414476 - RNA, 14 nt, Human
aauacauuuaaaac

SEQ ID NO: 1414477 - RNA, 23 nt, Human
aauaccacaggaaccacaagacu

SEQ ID NO: 1414478 - RNA, 17 nt, Human
aauagucggugaagaaa

SEQ ID NO: 1414479 - RNA, 16 nt, Human
aauaguggugugauuu

SEQ ID NO: 1414480 - RNA, 21 nt, Human
aauagcuaaauaccucaauca

SEQ ID NO: 1414481 - RNA, 19 nt, Human
aauagcguucuuguaauuu

SEQ ID NO: 1414482 - RNA, 18 nt, Human
aauagcguucuuguaauu

SEQ ID NO: 1414483 - RNA, 16 nt, Human
aauagcguucuuguaa

SEQ ID NO: 1414484 - RNA, 15 nt, Human
aauagcguucuugua

SEQ ID NO: 1414485 - RNA, 14 nt, Human
aauagcguucuugu

SEQ ID NO: 1414486 - RNA, 23 nt, Human
aauaguuaagacaugauuuccuu

SEQ ID NO: 1414487 - RNA, 22 nt, Human
aauaguuaagacaugauuuccu

SEQ ID NO: 1414488 - RNA, 21 nt, Human
aauaguuaagacaugauuucc

SEQ ID NO: 1414489 - RNA, 21 nt, Human
aauauauucagccuggcuuca

SEQ ID NO: 1414490 - RNA, 15 nt, Human
aauauauuuaagaua

SEQ ID NO: 1414491 - RNA, 16 nt, Human
aauauauuuaaaaaua

SEQ ID NO: 1414492 - RNA, 14 nt, Human
aauauauuuaaaaa

SEQ ID NO: 1414493 - RNA, 22 nt, Human
aauauauuauuacuuguaaaua

SEQ ID NO: 1414494 - RNA, 20 nt, Human
aauauauuuaagauaauuau

SEQ ID NO: 1414495 - RNA, 19 nt, Human
aauauauuuaagauaauua

SEQ ID NO: 1414496 - RNA, 21 nt, Human
aauauauuuuaagacgaaaca

SEQ ID NO: 1414497 - RNA, 20 nt, Human
uaacaugaauauuuaguguu

SEQ ID NO: 1414498 - RNA, 21 nt, Human
uaacaugaauauuuaguguuc

SEQ ID NO: 1414499 - RNA, 22 nt, Human
uaacauguccugccuauuaucu

SEQ ID NO: 1414500 - RNA, 15 nt, Human
uaacauguaggaagu

SEQ ID NO: 1414501 - RNA, 22 nt, Human
uaacauguguuaaguauuuuca

SEQ ID NO: 1414502 - RNA, 19 nt, Human
uaacaugugaaaagaauag

SEQ ID NO: 1414503 - RNA, 18 nt, Human
uaacgccugagcccaggg

SEQ ID NO: 1414504 - RNA, 14 nt, Human
uaacgccugagccc

SEQ ID NO: 1414505 - RNA, 13 nt, Human
uaacgccugagcc

SEQ ID NO: 1414506 - RNA, 12 nt, Human
uaacgccugagc

SEQ ID NO: 1414507 - RNA, 17 nt, Human
uaacgcaaguucccagu

SEQ ID NO: 1414508 - RNA, 22 nt, Human
uaacagggaaggcaggcagggc

SEQ ID NO: 1414509 - RNA, 23 nt, Human
uaacagggaaggcaggcagggcu

SEQ ID NO: 1414510 - RNA, 20 nt, Human
uaacagggaaggcaggcagg

SEQ ID NO: 1414511 - RNA, 19 nt, Human
uaacagggaaggcaggcag

SEQ ID NO: 1414512 - RNA, 19 nt, Human
aauauauuuuguuuacaaa

SEQ ID NO: 1414513 - RNA, 21 nt, Human
aauauauuuucuguuuucuuu

SEQ ID NO: 1414514 - RNA, 15 nt, Human
aauauauuuucuguu

SEQ ID NO: 1414515 - RNA, 19 nt, Human
uaacaugaauauuuagugu

SEQ ID NO: 1414516 - RNA, 12 nt, Human
uaacuaggagcu

SEQ ID NO: 1414517 - RNA, 20 nt, Human
uaacuucccugaaaaaucua

SEQ ID NO: 1414518 - RNA, 23 nt, Human
uaacuuccacagggucccacagc

SEQ ID NO: 1414519 - RNA, 20 nt, Human
uaacuuccacagggucccac

SEQ ID NO: 1414520 - RNA, 13 nt, Human
uaacuucacauau

SEQ ID NO: 1414521 - RNA, 16 nt, Human
uaacguugagccccug

SEQ ID NO: 1414522 - RNA, 23 nt, Human
uaacggucuguucuguuucaagg

SEQ ID NO: 1414523 - RNA, 22 nt, Human
uaacggucuguucuguuucaag

SEQ ID NO: 1414524 - RNA, 20 nt, Human
uaacguuuaagccaaaacaa

SEQ ID NO: 1414525 - RNA, 17 nt, Human
uaacguuuaagccaaaa

SEQ ID NO: 1414526 - RNA, 19 nt, Human
uaacgccugagcccaggga

SEQ ID NO: 1414527 - RNA, 21 nt, Human
uaacggaucagaaauacagau

SEQ ID NO: 1414528 - RNA, 14 nt, Human
uaacggaucagaaa

SEQ ID NO: 1414529 - RNA, 19 nt, Human
uaacggaucagaaauacag

SEQ ID NO: 1414530 - RNA, 14 nt, Human
uaacggaccaaagc

SEQ ID NO: 1414531 - RNA, 13 nt, Human
uaacggaucagaa

SEQ ID NO: 1414532 - RNA, 17 nt, Human
uaacgcgucuuccugag

SEQ ID NO: 1414533 - RNA, 16 nt, Human
uaacgcgucuuccuga

SEQ ID NO: 1414534 - RNA, 15 nt, Human
uaacgcgucuuccug

SEQ ID NO: 1414535 - RNA, 13 nt, Human
uaacguauaaaag

SEQ ID NO: 1414536 - RNA, 17 nt, Human
uaacguauaaaagccug

SEQ ID NO: 1414537 - RNA, 12 nt, Human
uaacuuggcuca

SEQ ID NO: 1414538 - RNA, 19 nt, Human
uaacuucuuauggaauuga

SEQ ID NO: 1414539 - RNA, 18 nt, Human
uaacuucuuauggaauug

SEQ ID NO: 1414540 - RNA, 17 nt, Human
uaacuucuuauggaauu

SEQ ID NO: 1414541 - RNA, 21 nt, Human
uaacuucccugaaaaaucuaa

SEQ ID NO: 1414542 - RNA, 16 nt, Human
uaacuuuaauguuuuu

SEQ ID NO: 1414543 - RNA, 17 nt, Human
uaagaaggcaaaaaugu

SEQ ID NO: 1414544 - RNA, 13 nt, Human
uaagaaggcaaaa

SEQ ID NO: 1414545 - RNA, 17 nt, Human
uaagaauuauuuugaug

SEQ ID NO: 1414546 - RNA, 12 nt, Human
uaagaauuauuu

SEQ ID NO: 1414547 - RNA, 18 nt, Human
uaagaaggcaaaaaugua

SEQ ID NO: 1414548 - RNA, 22 nt, Human
uaagaauugaguaaugguguag

SEQ ID NO: 1414549 - RNA, 21 nt, Human
uaagaauugaguaauggugua

SEQ ID NO: 1414550 - RNA, 20 nt, Human
uaagaauugaguaauggugu

SEQ ID NO: 1414551 - RNA, 19 nt, Human
uaagaauugaguaauggug

SEQ ID NO: 1414552 - RNA, 18 nt, Human
uaagaauugaguaauggu

SEQ ID NO: 1414553 - RNA, 16 nt, Human
uaagaauugaguaaug

SEQ ID NO: 1414554 - RNA, 15 nt, Human
uaagaauucagacau

SEQ ID NO: 1414555 - RNA, 16 nt, Human
uaagaauucagacauc

SEQ ID NO: 1414556 - RNA, 18 nt, Human
uaagaccuggcagcucug

SEQ ID NO: 1414557 - RNA, 17 nt, Human
uaagaccuggcagcucu

SEQ ID NO: 1414558 - RNA, 23 nt, Human
uaagacaaaaagcuacuuauugu

SEQ ID NO: 1414559 - RNA, 13 nt, Human
uaagacaaauaug

SEQ ID NO: 1414560 - RNA, 14 nt, Human
uaccaugucuuucu

SEQ ID NO: 1414561 - RNA, 15 nt, Human
uaccauguaauggca

SEQ ID NO: 1414562 - RNA, 18 nt, Human
uaccauguaauggcaguu

SEQ ID NO: 1414563 - RNA, 18 nt, Human
uaccaugcuucacaaugu

SEQ ID NO: 1414564 - RNA, 19 nt, Human
uaccaguuaauuuuuccaa

SEQ ID NO: 1414565 - RNA, 18 nt, Human
uaccaguuaauuuuucca

SEQ ID NO: 1414566 - RNA, 20 nt, Human
uaccauuaaaccaucucccu

SEQ ID NO: 1414567 - RNA, 16 nt, Human
uaccauuaaaccaucu

SEQ ID NO: 1414568 - RNA, 15 nt, Human
uaccauuaaaccauc

SEQ ID NO: 1414569 - RNA, 22 nt, Human
uaccauuaaaccaucucccugg

SEQ ID NO: 1414570 - RNA, 14 nt, Human
uaccauuaaaccau

SEQ ID NO: 1414571 - RNA, 20 nt, Human
uaccaguauuuagaagccaa

SEQ ID NO: 1414572 - RNA, 19 nt, Human
uaccaguauuuagaagcca

SEQ ID NO: 1414573 - RNA, 18 nt, Human
uaccaguauuuagaagcc

SEQ ID NO: 1414574 - RNA, 15 nt, Human
uaccaguauuuagaa

SEQ ID NO: 1414575 - RNA, 12 nt, Human
uaccaguauuua

SEQ ID NO: 1414576 - RNA, 21 nt, Human
uaccaggcaccaaaagaagua

SEQ ID NO: 1414577 - RNA, 18 nt, Human
uaccaggcaccaaaagaa

SEQ ID NO: 1414578 - RNA, 17 nt, Human
uaccaggcaccaaaaga

SEQ ID NO: 1414579 - RNA, 20 nt, Human
uaccagcgaggaggcuccag

SEQ ID NO: 1414580 - RNA, 15 nt, Human
uaccagcgaggaggc

SEQ ID NO: 1414581 - RNA, 13 nt, Human
uaccagcgaggag

SEQ ID NO: 1414582 - RNA, 12 nt, Human
uaccagaugcag

SEQ ID NO: 1414583 - RNA, 23 nt, Human
uaccagauaacuuuuuuuuuucu

SEQ ID NO: 1414584 - RNA, 15 nt, Human
uaccagauaacuuuu

SEQ ID NO: 1414585 - RNA, 14 nt, Human
uaccagauaacuuu

SEQ ID NO: 1414586 - RNA, 18 nt, Human
uaccagccaguaaauggg

SEQ ID NO: 1414587 - RNA, 15 nt, Human
uacauucauuuagcu

SEQ ID NO: 1414588 - RNA, 13 nt, Human
uacauucauuuag

SEQ ID NO: 1414589 - RNA, 13 nt, Human
aauguuuaaaaca

SEQ ID NO: 1414590 - RNA, 14 nt, Human
uacauuccaacucg

SEQ ID NO: 1414591 - RNA, 12 nt, Human
uacauucuguua

SEQ ID NO: 1414592 - RNA, 13 nt, Human
uacauuuccuaaa

SEQ ID NO: 1414593 - RNA, 15 nt, Human
aauguuguuauuuaa

SEQ ID NO: 1414594 - RNA, 22 nt, Human
aauguugggacugcuaaauaaa

SEQ ID NO: 1414595 - RNA, 12 nt, Human
aauuaacuuuua

SEQ ID NO: 1414596 - RNA, 13 nt, Human
aauuaacuuuuau

SEQ ID NO: 1414597 - RNA, 15 nt, Human
aauuaacuuuuauaa

SEQ ID NO: 1414598 - RNA, 16 nt, Human
aauuaacuuuuauaaa

SEQ ID NO: 1414599 - RNA, 21 nt, Human
aauguuauuuuuuaauuauua

SEQ ID NO: 1414600 - RNA, 23 nt, Human
aauguuggucauuuuauguuaag

SEQ ID NO: 1414601 - RNA, 21 nt, Human
aauguugggacugcuaaauaa

SEQ ID NO: 1414602 - RNA, 13 nt, Human
aauguugggacug

SEQ ID NO: 1414603 - RNA, 21 nt, Human
aauguuggacaccuuuagguu

SEQ ID NO: 1414604 - RNA, 20 nt, Human
aauguuggacaccuuuaggu

SEQ ID NO: 1414605 - RNA, 17 nt, Human
aauguucucagauuucu

SEQ ID NO: 1414606 - RNA, 20 nt, Human
aauguucuaaguuucuaaga

SEQ ID NO: 1414607 - RNA, 19 nt, Human
aauguucuaaguuucuaag

SEQ ID NO: 1414608 - RNA, 17 nt, Human
aauguucuaaguuucua

SEQ ID NO: 1414609 - RNA, 16 nt, Human
aauguucuaaguuucu

SEQ ID NO: 1414610 - RNA, 14 nt, Human
aauguucuaaguuu

SEQ ID NO: 1414611 - RNA, 13 nt, Human
aauguucuaaguu

SEQ ID NO: 1414612 - RNA, 23 nt, Human
aauguucuaaguuucuaagauuc

SEQ ID NO: 1414613 - RNA, 22 nt, Human
aauguucuaaguuucuaagauu

SEQ ID NO: 1414614 - RNA, 21 nt, Human
aauguucuaaguuucuaagau

SEQ ID NO: 1414615 - RNA, 21 nt, Human
aauguggccccugaacaagaa

SEQ ID NO: 1414616 - RNA, 22 nt, Human
aauguggcaaggaaaaacaggu

SEQ ID NO: 1414617 - RNA, 21 nt, Human
uacagggggucuggcuggugu

SEQ ID NO: 1414618 - RNA, 19 nt, Human
uacagggggucuggcuggu

SEQ ID NO: 1414619 - RNA, 18 nt, Human
uacagggggucuggcugg

SEQ ID NO: 1414620 - RNA, 22 nt, Human
uacagggggucuggcugguguu

SEQ ID NO: 1414621 - RNA, 17 nt, Human
uacagggggucuggcug

SEQ ID NO: 1414622 - RNA, 16 nt, Human
uacagggggucuggcu

SEQ ID NO: 1414623 - RNA, 14 nt, Human
uacagggggucugg

SEQ ID NO: 1414624 - RNA, 17 nt, Human
aauguuagccucaauuu

SEQ ID NO: 1414625 - RNA, 16 nt, Human
aauguuacauuauuau

SEQ ID NO: 1414626 - RNA, 15 nt, Human
aauguuacauuauua

SEQ ID NO: 1414627 - RNA, 20 nt, Human
aauguuauuuuuuaauuauu

SEQ ID NO: 1414628 - RNA, 19 nt, Human
aauguuauuuuuuaauuau

SEQ ID NO: 1414629 - RNA, 18 nt, Human
aauguucacaauauauuu

SEQ ID NO: 1414630 - RNA, 23 nt, Human
aauguuaucuucucaaguucuaa

SEQ ID NO: 1414631 - RNA, 22 nt, Human
aauguuaucuucucaaguucua

SEQ ID NO: 1414632 - RNA, 17 nt, Human
aauguuaucuucucaag

SEQ ID NO: 1414633 - RNA, 16 nt, Human
aauguuaucuucucaa

SEQ ID NO: 1414634 - RNA, 19 nt, Human
aauguuaugacuauguaaa

SEQ ID NO: 1414635 - RNA, 22 nt, Human
aauguuaugacuauguaaacua

SEQ ID NO: 1414636 - RNA, 13 nt, Human
aauucaauucaaa

SEQ ID NO: 1414637 - RNA, 15 nt, Human
aauucaauucaaagc

SEQ ID NO: 1414638 - RNA, 23 nt, Human
aauucaaggaauuucuuaacuuc

SEQ ID NO: 1414639 - RNA, 17 nt, Human
aauucaaggaauuucuu

SEQ ID NO: 1414640 - RNA, 16 nt, Human
aauucaaggaauuucu

SEQ ID NO: 1414641 - RNA, 12 nt, Human
aauuauuugcau

SEQ ID NO: 1414642 - RNA, 22 nt, Human
aauuauuucaugauuagaaauu

SEQ ID NO: 1414643 - RNA, 17 nt, Human
aauucauaaucacucua

SEQ ID NO: 1414644 - RNA, 16 nt, Human
aauucaguuucauaaa

SEQ ID NO: 1414645 - RNA, 15 nt, Human
aauucaguuucauaa

SEQ ID NO: 1414646 - RNA, 14 nt, Human
aauucaguuucaua

SEQ ID NO: 1414647 - RNA, 13 nt, Human
aauucaguuucau

SEQ ID NO: 1414648 - RNA, 19 nt, Human
aauucagguuuuuccuuuu

SEQ ID NO: 1414649 - RNA, 21 nt, Human
aauucagacaucugagguuuu

SEQ ID NO: 1414650 - RNA, 16 nt, Human
aauucagacaucugag

SEQ ID NO: 1414651 - RNA, 13 nt, Human
aauucacaaacuu

SEQ ID NO: 1414652 - RNA, 17 nt, Human
aauucaauuuggauuua

SEQ ID NO: 1414653 - RNA, 15 nt, Human
aauucagguuuuucc

SEQ ID NO: 1414654 - RNA, 14 nt, Human
aauucagcauuuga

SEQ ID NO: 1414655 - RNA, 22 nt, Human
aauucagacaucugagguuuua

SEQ ID NO: 1414656 - RNA, 21 nt, Human
aauuauuauucuucauaacaa

SEQ ID NO: 1414657 - RNA, 13 nt, Human
aauuauuauucuu

SEQ ID NO: 1414658 - RNA, 18 nt, Human
aauuauuacaguguuuau

SEQ ID NO: 1414659 - RNA, 14 nt, Human
aauuauuacagugu

SEQ ID NO: 1414660 - RNA, 23 nt, Human
aauuauuacaguguuuauccuuu

SEQ ID NO: 1414661 - RNA, 22 nt, Human
aauuauuaaugaaaauaagaau

SEQ ID NO: 1414662 - RNA, 17 nt, Human
aauuauuaaugaaaaua

SEQ ID NO: 1414663 - RNA, 16 nt, Human
aauuauuaaugaaaau

SEQ ID NO: 1414664 - RNA, 19 nt, Human
aauuauguuaaacuagcau

SEQ ID NO: 1414665 - RNA, 23 nt, Human
aauuauguuaaacuagcauaucu

SEQ ID NO: 1414666 - RNA, 21 nt, Human
aauuauuauuuauauauguau

SEQ ID NO: 1414667 - RNA, 18 nt, Human
aauuauuauuuauauaug

SEQ ID NO: 1414668 - RNA, 16 nt, Human
aauuauuauuuauaua

SEQ ID NO: 1414669 - RNA, 13 nt, Human
aauuauuauuuau

SEQ ID NO: 1414670 - RNA, 11 nt, Human
aauuauuauuu

SEQ ID NO: 1414671 - RNA, 22 nt, Human
aauuauuuaaaccgcuaaaaga

SEQ ID NO: 1414672 - RNA, 16 nt, Human
aauuauuguuuuucuu

SEQ ID NO: 1414673 - RNA, 17 nt, Human
aauuagacacuuuggaa

SEQ ID NO: 1414674 - RNA, 16 nt, Human
aauuagacacuuugga

SEQ ID NO: 1414675 - RNA, 23 nt, Human
aauuacuuuggggcuaauuuaac

SEQ ID NO: 1414676 - RNA, 21 nt, Human
aauuaccaugcuucacaaugu

SEQ ID NO: 1414677 - RNA, 21 nt, Human
aauuaccacaccaucucccau

SEQ ID NO: 1414678 - RNA, 15 nt, Human
aauuaccaaccuguu

SEQ ID NO: 1414679 - RNA, 22 nt, Human
aauuacuuuggggcuaauuuaa

SEQ ID NO: 1414680 - RNA, 23 nt, Human
aauuagacugugauucagaaaau

SEQ ID NO: 1414681 - RNA, 21 nt, Human
aauuagacugugauucagaaa

SEQ ID NO: 1414682 - RNA, 20 nt, Human
aauuagacugugauucagaa

SEQ ID NO: 1414683 - RNA, 19 nt, Human
aauuagacugugauucaga

SEQ ID NO: 1414684 - RNA, 15 nt, Human
aauuagacugugauu

SEQ ID NO: 1414685 - RNA, 15 nt, Human
aauuaugugacauuu

SEQ ID NO: 1414686 - RNA, 17 nt, Human
aauuaugugacauuuua

SEQ ID NO: 1414687 - RNA, 20 nt, Human
aauuaugugacauuuuacau

SEQ ID NO: 1414688 - RNA, 22 nt, Human
aauuaugugccagauuuaugca

SEQ ID NO: 1414689 - RNA, 22 nt, Human
aauuaugugacauuuuacauua

SEQ ID NO: 1414690 - RNA, 13 nt, Human
aauuauguuaaac

SEQ ID NO: 1414691 - RNA, 14 nt, Human
aauuauguuaaacu

SEQ ID NO: 1414692 - RNA, 15 nt, Human
aauuauguuaaacua

SEQ ID NO: 1414693 - RNA, 21 nt, Human
uaccuguugagcaucacagaa

SEQ ID NO: 1414694 - RNA, 14 nt, Human
uaccuguugagcau

SEQ ID NO: 1414695 - RNA, 13 nt, Human
uaccuguugagca

SEQ ID NO: 1414696 - RNA, 20 nt, Human
uaccuguguuucuugccuca

SEQ ID NO: 1414697 - RNA, 21 nt, Human
uaccuguguuucuugccucau

SEQ ID NO: 1414698 - RNA, 17 nt, Human
uaccuguguuucuugcc

SEQ ID NO: 1414699 - RNA, 16 nt, Human
uaccuguguggacagg

SEQ ID NO: 1414700 - RNA, 12 nt, Human
uaccuguggaua

SEQ ID NO: 1414701 - RNA, 12 nt, Human
uaccugugccug

SEQ ID NO: 1414702 - RNA, 18 nt, Human
uaccugauuuuuuuuccu

SEQ ID NO: 1414703 - RNA, 12 nt, Human
uaccugauuuuu

SEQ ID NO: 1414704 - RNA, 11 nt, Human
uaccugagggu

SEQ ID NO: 1414705 - RNA, 15 nt, Human
uaccugagggucugu

SEQ ID NO: 1414706 - RNA, 20 nt, Human
uaccugacacucccuugggc

SEQ ID NO: 1414707 - RNA, 14 nt, Human
aauuacauuuguau

SEQ ID NO: 1414708 - RNA, 13 nt, Human
aauuacauuugua

SEQ ID NO: 1414709 - RNA, 17 nt, Human
uaccugacacucccuug

SEQ ID NO: 1414710 - RNA, 21 nt, Human
uaccugaaaacacugugcaca

SEQ ID NO: 1414711 - RNA, 20 nt, Human
uaccugaaaacacugugcac

SEQ ID NO: 1414712 - RNA, 13 nt, Human
uaccugaaaacac

SEQ ID NO: 1414713 - RNA, 23 nt, Human
uaccugaagcuaucguaaaauua

SEQ ID NO: 1414714 - RNA, 15 nt, Human
uacccccugugccuu

SEQ ID NO: 1414715 - RNA, 14 nt, Human
uacccuaaccaagu

SEQ ID NO: 1414716 - RNA, 16 nt, Human
uacccuaaccaaguuc

SEQ ID NO: 1414717 - RNA, 17 nt, Human
uacccuaaccaaguucc

SEQ ID NO: 1414718 - RNA, 15 nt, Human
uacccucauguucuu

SEQ ID NO: 1414719 - RNA, 22 nt, Human
uaccucuugagccuugaacuuu

SEQ ID NO: 1414720 - RNA, 23 nt, Human
uaccucuugagccuugaacuuug

SEQ ID NO: 1414721 - RNA, 21 nt, Human
uacaauucauuguguuaccug

SEQ ID NO: 1414722 - RNA, 16 nt, Human
uacaauucauuguguu

SEQ ID NO: 1414723 - RNA, 19 nt, Human
uacaauuaaagcuguuauu

SEQ ID NO: 1414724 - RNA, 22 nt, Human
uacaauuaaaaaaaaagaucug

SEQ ID NO: 1414725 - RNA, 18 nt, Human
uacaauuaaaaaaaaaga

SEQ ID NO: 1414726 - RNA, 13 nt, Human
uacaaugcugugc

SEQ ID NO: 1414727 - RNA, 14 nt, Human
uacaaugcugugcc

SEQ ID NO: 1414728 - RNA, 16 nt, Human
uacaaugcugugcccu

SEQ ID NO: 1414729 - RNA, 23 nt, Human
uaauuuuuauuuuugcugagacu

SEQ ID NO: 1414730 - RNA, 14 nt, Human
uaauuuuuccaacu

SEQ ID NO: 1414731 - RNA, 13 nt, Human
uaauuuuuccaac

SEQ ID NO: 1414732 - RNA, 17 nt, Human
uaauuuuucacuucaaa

SEQ ID NO: 1414733 - RNA, 18 nt, Human
uaauuuuuauuucuuccu

SEQ ID NO: 1414734 - RNA, 17 nt, Human
uaauuuuuauuucuucc

SEQ ID NO: 1414735 - RNA, 16 nt, Human
uaauuuuuauuucuuc

SEQ ID NO: 1414736 - RNA, 22 nt, Human
uaauuuuuauuaauuuuaguuu

SEQ ID NO: 1414737 - RNA, 23 nt, Human
uaauuuuugauacuaagcauuga

SEQ ID NO: 1414738 - RNA, 16 nt, Human
uaauuuuuccuauauu

SEQ ID NO: 1414739 - RNA, 14 nt, Human
uaauuuuuguaauu

SEQ ID NO: 1414740 - RNA, 20 nt, Human
uaauuuuugauacuaagcau

SEQ ID NO: 1414741 - RNA, 21 nt, Human
uaauuuuugauacuaagcauu

SEQ ID NO: 1414742 - RNA, 21 nt, Human
uaauuuuuuucaccuagauuu

SEQ ID NO: 1414743 - RNA, 18 nt, Human
aaugcugggacucagccu

SEQ ID NO: 1414744 - RNA, 21 nt, Human
aaugcuguauuuuaaaagaau

SEQ ID NO: 1414745 - RNA, 22 nt, Human
aaugcuucuaaguaaauacaau

SEQ ID NO: 1414746 - RNA, 23 nt, Human
aaugcuucuaaguaaauacaauu

SEQ ID NO: 1414747 - RNA, 21 nt, Human
aaugcuucuaaguaaauacaa

SEQ ID NO: 1414748 - RNA, 20 nt, Human
aaugcuucuaaguaaauaca

SEQ ID NO: 1414749 - RNA, 19 nt, Human
aaugcuucuaaguaaauac

SEQ ID NO: 1414750 - RNA, 18 nt, Human
aaugcuucuaaguaaaua

SEQ ID NO: 1414751 - RNA, 14 nt, Human
aaugcuucuaagua

SEQ ID NO: 1414752 - RNA, 22 nt, Human
aaugcuguauuuuaaaagaaug

SEQ ID NO: 1414753 - RNA, 18 nt, Human
aauguaaggcuguguaag

SEQ ID NO: 1414754 - RNA, 17 nt, Human
aauguaaggcuguguaa

SEQ ID NO: 1414755 - RNA, 15 nt, Human
aauguaaggcugugu

SEQ ID NO: 1414756 - RNA, 13 nt, Human
aauguaaggcugu

SEQ ID NO: 1414757 - RNA, 22 nt, Human
aauguaaggcuguguaagauuu

SEQ ID NO: 1414758 - RNA, 21 nt, Human
aauguaaauauuuuaaagaau

SEQ ID NO: 1414759 - RNA, 20 nt, Human
aauguaaauauuuuaaagaa

SEQ ID NO: 1414760 - RNA, 19 nt, Human
aauguaaauauuuuaaaga

SEQ ID NO: 1414761 - RNA, 17 nt, Human
aauguaaauauuuuaaa

SEQ ID NO: 1414762 - RNA, 16 nt, Human
aauguaaauauuuuaa

SEQ ID NO: 1414763 - RNA, 19 nt, Human
aauguaaagcuugucugau

SEQ ID NO: 1414764 - RNA, 23 nt, Human
aauguaaaggagucaaaacuaca

SEQ ID NO: 1414765 - RNA, 21 nt, Human
aauguaaaggagucaaaacua

SEQ ID NO: 1414766 - RNA, 20 nt, Human
aauguaaaggagucaaaacu

SEQ ID NO: 1414767 - RNA, 15 nt, Human
aauguaaagccaugc

SEQ ID NO: 1414768 - RNA, 14 nt, Human
aauguaaagccaug

SEQ ID NO: 1414769 - RNA, 15 nt, Human
aauguaaagacaaaa

SEQ ID NO: 1414770 - RNA, 17 nt, Human
aauggaucacaagaugg

SEQ ID NO: 1414771 - RNA, 18 nt, Human
aauggaucacaagaugga

SEQ ID NO: 1414772 - RNA, 16 nt, Human
aauggaucacaagaug

SEQ ID NO: 1414773 - RNA, 13 nt, Human
aauggaucacaag

SEQ ID NO: 1414774 - RNA, 17 nt, Human
aauggaggccauugugu

SEQ ID NO: 1414775 - RNA, 19 nt, Human
aauggaggggcagagccag

SEQ ID NO: 1414776 - RNA, 20 nt, Human
aauggaggggcagagccagg

SEQ ID NO: 1414777 - RNA, 21 nt, Human
aauggaggggcagagccagga

SEQ ID NO: 1414778 - RNA, 22 nt, Human
aauggaggggcagagccaggaa

SEQ ID NO: 1414779 - RNA, 21 nt, Human
uacagagaagucacagggcag

SEQ ID NO: 1414780 - RNA, 22 nt, Human
uacagagaagucacagggcagu

SEQ ID NO: 1414781 - RNA, 20 nt, Human
uacagagaagucacagggca

SEQ ID NO: 1414782 - RNA, 13 nt, Human
uacagagaaguca

SEQ ID NO: 1414783 - RNA, 24 nt, Human
uacagagaagccuucaagcucuga

SEQ ID NO: 1414784 - RNA, 23 nt, Human
uacagagaagccuucaagcucug

SEQ ID NO: 1414785 - RNA, 22 nt, Human
uacagagaagccuucaagcucu

SEQ ID NO: 1414786 - RNA, 21 nt, Human
uacagagaagccuucaagcuc

SEQ ID NO: 1414787 - RNA, 20 nt, Human
uacagagaagccuucaagcu

SEQ ID NO: 1414788 - RNA, 19 nt, Human
uacagagaagccuucaagc

SEQ ID NO: 1414789 - RNA, 18 nt, Human
uacagagaagccuucaag

SEQ ID NO: 1414790 - RNA, 17 nt, Human
uacagagaagccuucaa

SEQ ID NO: 1414791 - RNA, 17 nt, Human
aauguaauuauuuaugu

SEQ ID NO: 1414792 - RNA, 22 nt, Human
aauguaauuauuuauguauggu

SEQ ID NO: 1414793 - RNA, 12 nt, Human
aauguaauuauu

SEQ ID NO: 1414794 - RNA, 19 nt, Human
aauguaaucaauguuucuu

SEQ ID NO: 1414795 - RNA, 14 nt, Human
uacacccaaagagg

SEQ ID NO: 1414796 - RNA, 11 nt, Human
uacacccagca

SEQ ID NO: 1414797 - RNA, 12 nt, Human
uacacccagcaa

SEQ ID NO: 1414798 - RNA, 16 nt, Human
uacacccuuuuccagc

SEQ ID NO: 1414799 - RNA, 15 nt, Human
uacacccuuuuccag

SEQ ID NO: 1414800 - RNA, 14 nt, Human
uacacccagcaaua

SEQ ID NO: 1414801 - RNA, 23 nt, Human
aaugauucaguguuaaaugugau

SEQ ID NO: 1414802 - RNA, 22 nt, Human
aaugauucaguguuaaauguga

SEQ ID NO: 1414803 - RNA, 21 nt, Human
aaugauucaguguuaaaugug

SEQ ID NO: 1414804 - RNA, 15 nt, Human
aaugauuguaguaau

SEQ ID NO: 1414805 - RNA, 22 nt, Human
aaugauuucaugcuaucucugu

SEQ ID NO: 1414806 - RNA, 13 nt, Human
aaugauuucaugc

SEQ ID NO: 1414807 - RNA, 17 nt, Human
aaugaguaacauuugcu

SEQ ID NO: 1414808 - RNA, 19 nt, Human
aaugaguaacauuugcugu

SEQ ID NO: 1414809 - RNA, 12 nt, Human
aaugaguaacau

SEQ ID NO: 1414810 - RNA, 14 nt, Human
aaugauucaguguu

SEQ ID NO: 1414811 - RNA, 13 nt, Human
aaugauucagugu

SEQ ID NO: 1414812 - RNA, 19 nt, Human
aaugaggucagcaugucua

SEQ ID NO: 1414813 - RNA, 15 nt, Human
aaugaggucagcaug

SEQ ID NO: 1414814 - RNA, 24 nt, Human
aaugaggcuuggggcuggagagga

SEQ ID NO: 1414815 - RNA, 22 nt, Human
aaugaggccauggacucugucc

SEQ ID NO: 1414816 - RNA, 16 nt, Human
aaugaggccauggacu

SEQ ID NO: 1414817 - RNA, 23 nt, Human
aaucuguaaacuguguauuccaa

SEQ ID NO: 1414818 - RNA, 21 nt, Human
aaucuguaaacuguguauucc

SEQ ID NO: 1414819 - RNA, 16 nt, Human
aaucuguaaacugugu

SEQ ID NO: 1414820 - RNA, 15 nt, Human
aaucuguaaacugug

SEQ ID NO: 1414821 - RNA, 14 nt, Human
aaucuguaaacugu

SEQ ID NO: 1414822 - RNA, 16 nt, Human
aaugagauugaauuuc

SEQ ID NO: 1414823 - RNA, 15 nt, Human
aaugagauugaauuu

SEQ ID NO: 1414824 - RNA, 17 nt, Human
aaugagagguuccuaag

SEQ ID NO: 1414825 - RNA, 16 nt, Human
aaugagcauguuuaga

SEQ ID NO: 1414826 - RNA, 22 nt, Human
aaugagcauguuuagacuuuaa

SEQ ID NO: 1414827 - RNA, 14 nt, Human
aaugagcauguuua

SEQ ID NO: 1414828 - RNA, 12 nt, Human
aaugagcauguu

SEQ ID NO: 1414829 - RNA, 14 nt, Human
aaugagaaccaaca

SEQ ID NO: 1414830 - RNA, 22 nt, Human
aaugagagacacacugaagaag

SEQ ID NO: 1414831 - RNA, 12 nt, Human
aaugagaaaucu

SEQ ID NO: 1414832 - RNA, 22 nt, Human
aaugagaaaucuaaaaaacgaa

SEQ ID NO: 1414833 - RNA, 16 nt, Human
aaugcaccuaaagaaa

SEQ ID NO: 1414834 - RNA, 15 nt, Human
aaugcaccuaaagaa

SEQ ID NO: 1414835 - RNA, 17 nt, Human
aaugcacaagaauggau

SEQ ID NO: 1414836 - RNA, 17 nt, Human
aaugcaaaaacucuuug

SEQ ID NO: 1414837 - RNA, 11 nt, Human
aaugauuucag

SEQ ID NO: 1414838 - RNA, 18 nt, Human
aaugauuuuucuuuacaa

SEQ ID NO: 1414839 - RNA, 17 nt, Human
aaugauuuuucuuuaca

SEQ ID NO: 1414840 - RNA, 15 nt, Human
aaugauuuuucuuua

SEQ ID NO: 1414841 - RNA, 15 nt, Human
aaugcacuuucuauc

SEQ ID NO: 1414842 - RNA, 13 nt, Human
aaugcacuuucua

SEQ ID NO: 1414843 - RNA, 11 nt, Human
aaugcacuuuc

SEQ ID NO: 1414844 - RNA, 13 nt, Human
aaugcaccuggaa

SEQ ID NO: 1414845 - RNA, 13 nt, Human
uaauuauuauuua

SEQ ID NO: 1414846 - RNA, 12 nt, Human
uaauuauuauuu

SEQ ID NO: 1414847 - RNA, 14 nt, Human
uaauuauuauucuu

SEQ ID NO: 1414848 - RNA, 12 nt, Human
uaauuauuauuc

SEQ ID NO: 1414849 - RNA, 15 nt, Human
uaauuauguagcucu

SEQ ID NO: 1414850 - RNA, 14 nt, Human
uaauuauguagcuc

SEQ ID NO: 1414851 - RNA, 16 nt, Human
uaauuauguagcucuu

SEQ ID NO: 1414852 - RNA, 22 nt, Human
aaugcacuuucuauccucugua

SEQ ID NO: 1414853 - RNA, 19 nt, Human
uaauuuaaacaccuccuca

SEQ ID NO: 1414854 - RNA, 17 nt, Human
uaauuuaaacaccuccu

SEQ ID NO: 1414855 - RNA, 11 nt, Human
uaauuuaaaca

SEQ ID NO: 1414856 - RNA, 19 nt, Human
uaauuccucaacguauugu

SEQ ID NO: 1414857 - RNA, 17 nt, Human
uaauuauuauuuguguu

SEQ ID NO: 1414858 - RNA, 14 nt, Human
uaauuauuauuugu

SEQ ID NO: 1414859 - RNA, 22 nt, Human
uaauuauuauuuauauauguau

SEQ ID NO: 1414860 - RNA, 17 nt, Human
uaauuauuauuuauaua

SEQ ID NO: 1414861 - RNA, 14 nt, Human
uaauuauuauuuau

SEQ ID NO: 1414862 - RNA, 22 nt, Human
uaauuccguagguuauuuucag

SEQ ID NO: 1414863 - RNA, 13 nt, Human
uaauuuauaaaaa

SEQ ID NO: 1414864 - RNA, 17 nt, Human
uaauuuaguuucauaua

SEQ ID NO: 1414865 - RNA, 16 nt, Human
uaauuuaguuucauau

SEQ ID NO: 1414866 - RNA, 16 nt, Human
uaauuuaguaaaccaa

SEQ ID NO: 1414867 - RNA, 21 nt, Human
uaauuuagacuuggauucuuu

SEQ ID NO: 1414868 - RNA, 17 nt, Human
uaauuuagacuuggauu

SEQ ID NO: 1414869 - RNA, 21 nt, Human
uaauuuagacuucaagcaugg

SEQ ID NO: 1414870 - RNA, 15 nt, Human
uaauuuagaaaucau

SEQ ID NO: 1414871 - RNA, 14 nt, Human
uaauuuagaaauca

SEQ ID NO: 1414872 - RNA, 21 nt, Human
uaauuuagaaaacuuuaaagc

SEQ ID NO: 1414873 - RNA, 17 nt, Human
uaauuuagaaaacuuua

SEQ ID NO: 1414874 - RNA, 16 nt, Human
uaauuuagaaaacuuu

SEQ ID NO: 1414875 - RNA, 15 nt, Human
uaauuuagaaaacuu

SEQ ID NO: 1414876 - RNA, 14 nt, Human
uaauuuagaaaacu

SEQ ID NO: 1414877 - RNA, 11 nt, Human
uaauuuaacuu

SEQ ID NO: 1414878 - RNA, 19 nt, Human
uaauuuaacuuucuggguu

SEQ ID NO: 1414879 - RNA, 21 nt, Human
uaauuuuuauauuugaaauau

SEQ ID NO: 1414880 - RNA, 19 nt, Human
uaauuuuuauauuugaaau

SEQ ID NO: 1414881 - RNA, 16 nt, Human
uaauuuauaaaaaggu

SEQ ID NO: 1414882 - RNA, 18 nt, Human
uaauuuuuauauuugaaa

SEQ ID NO: 1414883 - RNA, 22 nt, Human
uaugucugguucucaauuccaa

SEQ ID NO: 1414884 - RNA, 21 nt, Human
uaugucugguucucaauucca

SEQ ID NO: 1414885 - RNA, 18 nt, Human
uaugucugguucucaauu

SEQ ID NO: 1414886 - RNA, 17 nt, Human
uaugucugguucucaau

SEQ ID NO: 1414887 - RNA, 13 nt, Human
uaugucugguucu

SEQ ID NO: 1414888 - RNA, 19 nt, Human
uaugucucuucugagcuau

SEQ ID NO: 1414889 - RNA, 14 nt, Human
uaugucucuucuga

SEQ ID NO: 1414890 - RNA, 13 nt, Human
uauguccaggugu

SEQ ID NO: 1414891 - RNA, 23 nt, Human
acaggccuguguagcugugaccu

SEQ ID NO: 1414892 - RNA, 20 nt, Human
acaggccuguguagcuguga

SEQ ID NO: 1414893 - RNA, 19 nt, Human
acaggccuguguagcugug

SEQ ID NO: 1414894 - RNA, 15 nt, Human
acaggccucagggcu

SEQ ID NO: 1414895 - RNA, 18 nt, Human
acaggccucagggcuccu

SEQ ID NO: 1414896 - RNA, 14 nt, Human
acaggccucagggc

SEQ ID NO: 1414897 - RNA, 13 nt, Human
acaggccucaggg

SEQ ID NO: 1414898 - RNA, 16 nt, Human
acaggccgcccugcgg

SEQ ID NO: 1414899 - RNA, 19 nt, Human
acaggccucacacacaaug

SEQ ID NO: 1414900 - RNA, 23 nt, Human
acaggcccucccuguuccccaga

SEQ ID NO: 1414901 - RNA, 22 nt, Human
acaggcccucccuguuccccag

SEQ ID NO: 1414902 - RNA, 21 nt, Human
acaggcccucccuguucccca

SEQ ID NO: 1414903 - RNA, 21 nt, Human
acaggcccccuugaguggggu

SEQ ID NO: 1414904 - RNA, 12 nt, Human
acaggcccccuu

SEQ ID NO: 1414905 - RNA, 22 nt, Human
acaggcagccagugcccugagc

SEQ ID NO: 1414906 - RNA, 19 nt, Human
acaggcagccagugcccug

SEQ ID NO: 1414907 - RNA, 15 nt, Human
acaggcagccagugc

SEQ ID NO: 1414908 - RNA, 14 nt, Human
acaggagcuaccug

SEQ ID NO: 1414909 - RNA, 21 nt, Human
acaggcagccagugcccugag

SEQ ID NO: 1414910 - RNA, 23 nt, Human
acaggagcuaccuguguggacag

SEQ ID NO: 1414911 - RNA, 13 nt, Human
acaggagcuaccu

SEQ ID NO: 1414912 - RNA, 23 nt, Human
acagcuugaccugaggcuguggu

SEQ ID NO: 1414913 - RNA, 20 nt, Human
acaggaaacuccugugacca

SEQ ID NO: 1414914 - RNA, 22 nt, Human
acaggaaacuccugugaccaca

SEQ ID NO: 1414915 - RNA, 19 nt, Human
acaggaaacuccugugacc

SEQ ID NO: 1414916 - RNA, 22 nt, Human
acaggaaccacaagacugcaca

SEQ ID NO: 1414917 - RNA, 17 nt, Human
acagcuuguaggggagg

SEQ ID NO: 1414918 - RNA, 22 nt, Human
acagcuugaccugaggcugugg

SEQ ID NO: 1414919 - RNA, 21 nt, Human
acagcuugaccugaggcugug

SEQ ID NO: 1414920 - RNA, 19 nt, Human
acagcuugaccugaggcug

SEQ ID NO: 1414921 - RNA, 17 nt, Human
acagcuugaccugaggc

SEQ ID NO: 1414922 - RNA, 15 nt, Human
acagcuugaccugag

SEQ ID NO: 1414923 - RNA, 21 nt, Human
acagcuucucauccugcaggc

SEQ ID NO: 1414924 - RNA, 20 nt, Human
acagcuucucauccugcagg

SEQ ID NO: 1414925 - RNA, 17 nt, Human
acagcuuagauuucaua

SEQ ID NO: 1414926 - RNA, 21 nt, Human
acagcuucagccaggagcugg

SEQ ID NO: 1414927 - RNA, 22 nt, Human
acagcuucagccaggagcuggg

SEQ ID NO: 1414928 - RNA, 22 nt, Human
acagcuguauagcugcuuccag

SEQ ID NO: 1414929 - RNA, 23 nt, Human
acagcugguguagcuacagagaa

SEQ ID NO: 1414930 - RNA, 22 nt, Human
acagcugguguagcuacagaga

SEQ ID NO: 1414931 - RNA, 21 nt, Human
acagcugguguagcuacagag

SEQ ID NO: 1414932 - RNA, 20 nt, Human
acagcugguguagcuacaga

SEQ ID NO: 1414933 - RNA, 19 nt, Human
acagcugguguagcuacag

SEQ ID NO: 1414934 - RNA, 16 nt, Human
acagcugguguagcua

SEQ ID NO: 1414935 - RNA, 15 nt, Human
acagcugguguagcu

SEQ ID NO: 1414936 - RNA, 12 nt, Human
acagcuggugua

SEQ ID NO: 1414937 - RNA, 11 nt, Human
acagcuggugu

SEQ ID NO: 1414938 - RNA, 18 nt, Human
acagcucagaaguuucuu

SEQ ID NO: 1414939 - RNA, 23 nt, Human
acagcuacucuccccacgagggc

SEQ ID NO: 1414940 - RNA, 22 nt, Human
acagcuacucuccccacgaggg

SEQ ID NO: 1414941 - RNA, 14 nt, Human
acagcuacucuccc

SEQ ID NO: 1414942 - RNA, 21 nt, Human
acagcuaauucuacucacagu

SEQ ID NO: 1414943 - RNA, 13 nt, Human
acagcuacacaga

SEQ ID NO: 1414944 - RNA, 18 nt, Human
acagcuuagauuucauag

SEQ ID NO: 1414945 - RNA, 15 nt, Human
acagcuucagccagg

SEQ ID NO: 1414946 - RNA, 16 nt, Human
acagcuuagauuucau

SEQ ID NO: 1414947 - RNA, 14 nt, Human
acagcuuagauuuc

SEQ ID NO: 1414948 - RNA, 17 nt, Human
acagcuucagccaggag

SEQ ID NO: 1414949 - RNA, 18 nt, Human
acagcuucagccaggagc

SEQ ID NO: 1414950 - RNA, 16 nt, Human
acagcugugccucgcu

SEQ ID NO: 1414951 - RNA, 17 nt, Human
acagcugugccucgcuc

SEQ ID NO: 1414952 - RNA, 15 nt, Human
acagcugugccucgc

SEQ ID NO: 1414953 - RNA, 13 nt, Human
acagcugugccuc

SEQ ID NO: 1414954 - RNA, 12 nt, Human
acagcugugccu

SEQ ID NO: 1414955 - RNA, 20 nt, Human
acagcuguauugucugaacu

SEQ ID NO: 1414956 - RNA, 19 nt, Human
acagcuguauugucugaac

SEQ ID NO: 1414957 - RNA, 17 nt, Human
acagcuguauugucuga

SEQ ID NO: 1414958 - RNA, 23 nt, Human
acagcuguaugauucccagccag

SEQ ID NO: 1414959 - RNA, 20 nt, Human
acagcuguaugauucccagc

SEQ ID NO: 1414960 - RNA, 19 nt, Human
acagcuguaugauucccag

SEQ ID NO: 1414961 - RNA, 14 nt, Human
acagcuguaugauu

SEQ ID NO: 1414962 - RNA, 20 nt, Human
uaugaagcuuuuaugugaaa

SEQ ID NO: 1414963 - RNA, 22 nt, Human
uaugaagcuuuuaugugaaaca

SEQ ID NO: 1414964 - RNA, 21 nt, Human
uaugaaggcuguacacugcac

SEQ ID NO: 1414965 - RNA, 23 nt, Human
uaugaagcuuuuaugugaaacau

SEQ ID NO: 1414966 - RNA, 14 nt, Human
uaugaggcauuugu

SEQ ID NO: 1414967 - RNA, 15 nt, Human
uaugaggcauuuguu

SEQ ID NO: 1414968 - RNA, 21 nt, Human
uaugaggcauuuguuugaacu

SEQ ID NO: 1414969 - RNA, 23 nt, Human
uaugaggcauuuguuugaacuga

SEQ ID NO: 1414970 - RNA, 16 nt, Human
uaugauaauagauucu

SEQ ID NO: 1414971 - RNA, 19 nt, Human
acagcccugucagcaugaa

SEQ ID NO: 1414972 - RNA, 18 nt, Human
acagcccugucagcauga

SEQ ID NO: 1414973 - RNA, 17 nt, Human
acagcccugucagcaug

SEQ ID NO: 1414974 - RNA, 14 nt, Human
acagcccugucagc

SEQ ID NO: 1414975 - RNA, 13 nt, Human
acagcccugucag

SEQ ID NO: 1414976 - RNA, 12 nt, Human
acagcccuguca

SEQ ID NO: 1414977 - RNA, 23 nt, Human
acagcccuuaugcgguuaauuuu

SEQ ID NO: 1414978 - RNA, 22 nt, Human
acagcccuuaugcgguuaauuu

SEQ ID NO: 1414979 - RNA, 21 nt, Human
acagcccugucagcaugaauu

SEQ ID NO: 1414980 - RNA, 22 nt, Human
acagcccugucagcaugaauuu

SEQ ID NO: 1414981 - RNA, 19 nt, Human
acagcccuucuuuccacag

SEQ ID NO: 1414982 - RNA, 19 nt, Human
uaugaaaagcuagaauuga

SEQ ID NO: 1414983 - RNA, 14 nt, Human
uaugaaaagcuaga

SEQ ID NO: 1414984 - RNA, 15 nt, Human
uaugaaaaagaagaa

SEQ ID NO: 1414985 - RNA, 14 nt, Human
uaugaaaaagaaga

SEQ ID NO: 1414986 - RNA, 23 nt, Human
acagcagacucagcucugacauu

SEQ ID NO: 1414987 - RNA, 19 nt, Human
acagcagacucagcucuga

SEQ ID NO: 1414988 - RNA, 18 nt, Human
acagcagacucagcucug

SEQ ID NO: 1414989 - RNA, 13 nt, Human
acagcagacucag

SEQ ID NO: 1414990 - RNA, 13 nt, Human
acagcagcaucuc

SEQ ID NO: 1414991 - RNA, 14 nt, Human
acagcagcaucucu

SEQ ID NO: 1414992 - RNA, 13 nt, Human
acagcaccaaauc

SEQ ID NO: 1414993 - RNA, 12 nt, Human
acagcacagcca

SEQ ID NO: 1414994 - RNA, 14 nt, Human
acagcaauuucuaa

SEQ ID NO: 1414995 - RNA, 19 nt, Human
acagcaauuccucaggcua

SEQ ID NO: 1414996 - RNA, 17 nt, Human
acagcaauuccucaggc

SEQ ID NO: 1414997 - RNA, 15 nt, Human
acagcaauuccucag

SEQ ID NO: 1414998 - RNA, 12 nt, Human
acagcaagucag

SEQ ID NO: 1414999 - RNA, 16 nt, Human
acagcaagucaggguu

SEQ ID NO: 1415000 - RNA, 21 nt, Human
acagauuuggaaagacuggac

SEQ ID NO: 1415001 - RNA, 15 nt, Human
acagauuuggaaaga

SEQ ID NO: 1415002 - RNA, 14 nt, Human
acagauuuggaaag

SEQ ID NO: 1415003 - RNA, 15 nt, Human
uaucuauauuuuaca

SEQ ID NO: 1415004 - RNA, 17 nt, Human
acagauuuugauagcaa

SEQ ID NO: 1415005 - RNA, 19 nt, Human
acagauuuugauagcaaag

SEQ ID NO: 1415006 - RNA, 20 nt, Human
acagauuuugauagcaaagc

SEQ ID NO: 1415007 - RNA, 21 nt, Human
uaugguauuuauuuuuucuuu

SEQ ID NO: 1415008 - RNA, 20 nt, Human
uauggugcaauguguguaua

SEQ ID NO: 1415009 - RNA, 22 nt, Human
uauggugcaauguguguauaug

SEQ ID NO: 1415010 - RNA, 15 nt, Human
acagcggaggugugg

SEQ ID NO: 1415011 - RNA, 21 nt, Human
acagcgcccaaaggacgcacu

SEQ ID NO: 1415012 - RNA, 16 nt, Human
acagcggaggugugga

SEQ ID NO: 1415013 - RNA, 20 nt, Human
uauggcccuggccuagcaua

SEQ ID NO: 1415014 - RNA, 21 nt, Human
uauggcccuggccuagcauac

SEQ ID NO: 1415015 - RNA, 22 nt, Human
uauggcccuggccuagcauacg

SEQ ID NO: 1415016 - RNA, 16 nt, Human
uaugcauuauaucaaa

SEQ ID NO: 1415017 - RNA, 22 nt, Human
uaugcauguugucuaagaaauu

SEQ ID NO: 1415018 - RNA, 20 nt, Human
uaugcaugguuucagcacua

SEQ ID NO: 1415019 - RNA, 19 nt, Human
uaugcaugguuucagcacu

SEQ ID NO: 1415020 - RNA, 18 nt, Human
uaugcaugguuucagcac

SEQ ID NO: 1415021 - RNA, 17 nt, Human
uaugcaugguuucagca

SEQ ID NO: 1415022 - RNA, 16 nt, Human
uaugcaugguuucagc

SEQ ID NO: 1415023 - RNA, 23 nt, Human
uaugcauggugccccaggaccag

SEQ ID NO: 1415024 - RNA, 22 nt, Human
uaugcauggugccccaggacca

SEQ ID NO: 1415025 - RNA, 21 nt, Human
uaugcauggugccccaggacc

SEQ ID NO: 1415026 - RNA, 20 nt, Human
uaugcauggugccccaggac

SEQ ID NO: 1415027 - RNA, 18 nt, Human
uaugcauggugccccagg

SEQ ID NO: 1415028 - RNA, 22 nt, Human
uaugcaugaaguaauaugcaca

SEQ ID NO: 1415029 - RNA, 15 nt, Human
uaugauauuuucugu

SEQ ID NO: 1415030 - RNA, 23 nt, Human
uaugauacuucgacacuguucuu

SEQ ID NO: 1415031 - RNA, 22 nt, Human
uaugauauuuucugugccugaa

SEQ ID NO: 1415032 - RNA, 24 nt, Human
uaugauagguuauuuugauguaaa

SEQ ID NO: 1415033 - RNA, 20 nt, Human
uaugauacuucgacacuguu

SEQ ID NO: 1415034 - RNA, 17 nt, Human
uaugauaauagauucuc

SEQ ID NO: 1415035 - RNA, 17 nt, Human
uaugauacuugaaaauu

SEQ ID NO: 1415036 - RNA, 14 nt, Human
uaugcauuauauca

SEQ ID NO: 1415037 - RNA, 20 nt, Human
uaugccaccugaauaaagaa

SEQ ID NO: 1415038 - RNA, 17 nt, Human
uaugccauauaauucac

SEQ ID NO: 1415039 - RNA, 19 nt, Human
uaugccauugggguaguug

SEQ ID NO: 1415040 - RNA, 15 nt, Human
uaugccccauucaac

SEQ ID NO: 1415041 - RNA, 16 nt, Human
uaugcucaggggcccu

SEQ ID NO: 1415042 - RNA, 13 nt, Human
uauagaucagcca

SEQ ID NO: 1415043 - RNA, 20 nt, Human
uauacagcuguauugucuga

SEQ ID NO: 1415044 - RNA, 20 nt, Human
uauaauuuaccuaagauuac

SEQ ID NO: 1415045 - RNA, 18 nt, Human
uauaauuuaccuaagauu

SEQ ID NO: 1415046 - RNA, 17 nt, Human
uauaauuuaccuaagau

SEQ ID NO: 1415047 - RNA, 18 nt, Human
uauaauuguuuuaucuga

SEQ ID NO: 1415048 - RNA, 22 nt, Human
uauaauuguuuuaucugaauuu

SEQ ID NO: 1415049 - RNA, 14 nt, Human
uauaaguguacaua

SEQ ID NO: 1415050 - RNA, 13 nt, Human
uauaaguguacau

SEQ ID NO: 1415051 - RNA, 13 nt, Human
uauaagugcugua

SEQ ID NO: 1415052 - RNA, 14 nt, Human
uauaagugcuguau

SEQ ID NO: 1415053 - RNA, 15 nt, Human
uauaagugcuguaua

SEQ ID NO: 1415054 - RNA, 16 nt, Human
uauaagugcuguauaa

SEQ ID NO: 1415055 - RNA, 17 nt, Human
uauaagugcuguauaaa

SEQ ID NO: 1415056 - RNA, 19 nt, Human
uauaagugcuguauaaaau

SEQ ID NO: 1415057 - RNA, 20 nt, Human
uauaagugcuguauaaaauc

SEQ ID NO: 1415058 - RNA, 21 nt, Human
uauaagugcuguauaaaauca

SEQ ID NO: 1415059 - RNA, 16 nt, Human
uauaauuuaccuaaga

SEQ ID NO: 1415060 - RNA, 14 nt, Human
uauaauuuaccuaa

SEQ ID NO: 1415061 - RNA, 20 nt, Human
acacuaauauauuuaaaaau

SEQ ID NO: 1415062 - RNA, 19 nt, Human
acacuaauauauuuaaaaa

SEQ ID NO: 1415063 - RNA, 17 nt, Human
acacuaauauauuuaaa

SEQ ID NO: 1415064 - RNA, 14 nt, Human
acacuaauauauuu

SEQ ID NO: 1415065 - RNA, 13 nt, Human
acacuaauauauu

SEQ ID NO: 1415066 - RNA, 15 nt, Human
uagucaccagagacu

SEQ ID NO: 1415067 - RNA, 18 nt, Human
uagucaccagagacuuua

SEQ ID NO: 1415068 - RNA, 12 nt, Human
acacuaauucau

SEQ ID NO: 1415069 - RNA, 13 nt, Human
acacuaauucaua

SEQ ID NO: 1415070 - RNA, 22 nt, Human
acacuaauauauuuaaaaauaa

SEQ ID NO: 1415071 - RNA, 21 nt, Human
acacuaauauauuuaaaaaua

SEQ ID NO: 1415072 - RNA, 23 nt, Human
uauaacuguauuugaaauaagaa

SEQ ID NO: 1415073 - RNA, 13 nt, Human
uauaacuguauuu

SEQ ID NO: 1415074 - RNA, 16 nt, Human
uauaacuggaaagaag

SEQ ID NO: 1415075 - RNA, 19 nt, Human
uauaagugauugcugguuu

SEQ ID NO: 1415076 - RNA, 21 nt, Human
uauaggauuuauuuaaaauag

SEQ ID NO: 1415077 - RNA, 19 nt, Human
uauaggcauaccuccuaug

SEQ ID NO: 1415078 - RNA, 19 nt, Human
uauaggauuuauuuaaaau

SEQ ID NO: 1415079 - RNA, 15 nt, Human
uauaggaucauuugu

SEQ ID NO: 1415080 - RNA, 23 nt, Human
uauaggaacuuaaauaaugugaa

SEQ ID NO: 1415081 - RNA, 22 nt, Human
uauagcugcuuccaguguagac

SEQ ID NO: 1415082 - RNA, 17 nt, Human
uauagcugcuuccagug

SEQ ID NO: 1415083 - RNA, 17 nt, Human
uauagccaauauaacua

SEQ ID NO: 1415084 - RNA, 14 nt, Human
uauagccaauauaa

SEQ ID NO: 1415085 - RNA, 22 nt, Human
uauagccaaaaauagcuaaaua

SEQ ID NO: 1415086 - RNA, 19 nt, Human
uauagccaaaaauagcuaa

SEQ ID NO: 1415087 - RNA, 18 nt, Human
uauagccaaaaauagcua

SEQ ID NO: 1415088 - RNA, 15 nt, Human
uauagaugucuuuuc

SEQ ID NO: 1415089 - RNA, 18 nt, Human
uauagaugucuuuuccca

SEQ ID NO: 1415090 - RNA, 14 nt, Human
uauagaugucuuuu

SEQ ID NO: 1415091 - RNA, 22 nt, Human
uauagaugggggaaagcaaagc

SEQ ID NO: 1415092 - RNA, 23 nt, Human
uauagaugggggaaagcaaagca

SEQ ID NO: 1415093 - RNA, 23 nt, Human
acacucaguggcccauggcauuu

SEQ ID NO: 1415094 - RNA, 21 nt, Human
uauaucuaccccagacuagau

SEQ ID NO: 1415095 - RNA, 21 nt, Human
uauaucuauauuuuacauaaa

SEQ ID NO: 1415096 - RNA, 20 nt, Human
uauauauuuuuuucugaaau

SEQ ID NO: 1415097 - RNA, 19 nt, Human
uauauauuuuuuucugaaa

SEQ ID NO: 1415098 - RNA, 14 nt, Human
uauauauguacagu

SEQ ID NO: 1415099 - RNA, 22 nt, Human
uauauauggggaugguaguuuu

SEQ ID NO: 1415100 - RNA, 21 nt, Human
uauauagccaauauaacuauc

SEQ ID NO: 1415101 - RNA, 19 nt, Human
uauauauuuaaaaguguca

SEQ ID NO: 1415102 - RNA, 15 nt, Human
uauauauuuaaaagu

SEQ ID NO: 1415103 - RNA, 14 nt, Human
uauauauucuauua

SEQ ID NO: 1415104 - RNA, 18 nt, Human
uauauauuaucuuuucau

SEQ ID NO: 1415105 - RNA, 14 nt, Human
uauauauuaucuuu

SEQ ID NO: 1415106 - RNA, 17 nt, Human
uauauauuauauggaaa

SEQ ID NO: 1415107 - RNA, 16 nt, Human
uauauauuauauggaa

SEQ ID NO: 1415108 - RNA, 15 nt, Human
uauauauuauaugga

SEQ ID NO: 1415109 - RNA, 18 nt, Human
uauauauuauacuuguaa

SEQ ID NO: 1415110 - RNA, 16 nt, Human
uauauauuauacuugu

SEQ ID NO: 1415111 - RNA, 14 nt, Human
uauauauuauacuu

SEQ ID NO: 1415112 - RNA, 13 nt, Human
uauauauuauacu

SEQ ID NO: 1415113 - RNA, 17 nt, Human
uauauauguacaguuau

SEQ ID NO: 1415114 - RNA, 19 nt, Human
uauauauguacaguuaucu

SEQ ID NO: 1415115 - RNA, 21 nt, Human
uauauauguguaugcacagua

SEQ ID NO: 1415116 - RNA, 23 nt, Human
uauauauguguaugcacaguaaa

SEQ ID NO: 1415117 - RNA, 19 nt, Human
acagaaaaauauguaccaa

SEQ ID NO: 1415118 - RNA, 21 nt, Human
acagaaaaaccuuggguuaga

SEQ ID NO: 1415119 - RNA, 14 nt, Human
acagaaaaaccuug

SEQ ID NO: 1415120 - RNA, 11 nt, Human
acagaaaaacc

SEQ ID NO: 1415121 - RNA, 21 nt, Human
acacuuuuucucuuuccauga

SEQ ID NO: 1415122 - RNA, 21 nt, Human
acacuuguaauuuuguaucuu

SEQ ID NO: 1415123 - RNA, 14 nt, Human
acacuugguaauug

SEQ ID NO: 1415124 - RNA, 13 nt, Human
acacuugcaaccu

SEQ ID NO: 1415125 - RNA, 23 nt, Human
acacuucucaggacacaggccug

SEQ ID NO: 1415126 - RNA, 24 nt, Human
acacuucucaggacacaggccugu

SEQ ID NO: 1415127 - RNA, 22 nt, Human
acacuucucaggacacaggccu

SEQ ID NO: 1415128 - RNA, 20 nt, Human
acacuucucaggacacaggc

SEQ ID NO: 1415129 - RNA, 16 nt, Human
acacuucucaggacac

SEQ ID NO: 1415130 - RNA, 14 nt, Human
acacuucucaggac

SEQ ID NO: 1415131 - RNA, 13 nt, Human
acagaaagcugcc

SEQ ID NO: 1415132 - RNA, 24 nt, Human
acagaaaugauuacuaaggaagau

SEQ ID NO: 1415133 - RNA, 13 nt, Human
acagaaauguaca

SEQ ID NO: 1415134 - RNA, 18 nt, Human
acagacauacuaaccagc

SEQ ID NO: 1415135 - RNA, 19 nt, Human
acagacauacuaaccagca

SEQ ID NO: 1415136 - RNA, 14 nt, Human
acacuuaauacuac

SEQ ID NO: 1415137 - RNA, 20 nt, Human
acacuguuucaaacuuuacu

SEQ ID NO: 1415138 - RNA, 23 nt, Human
acacuguuucaaacuuuacuaug

SEQ ID NO: 1415139 - RNA, 17 nt, Human
acacuguuucaaacuuu

SEQ ID NO: 1415140 - RNA, 18 nt, Human
acacuguuucaaacuuua

SEQ ID NO: 1415141 - RNA, 16 nt, Human
acacuucaaacuacuu

SEQ ID NO: 1415142 - RNA, 20 nt, Human
acacuuauuggaacucugcu

SEQ ID NO: 1415143 - RNA, 17 nt, Human
acacuuacuuuuucugg

SEQ ID NO: 1415144 - RNA, 19 nt, Human
uaucaauuaccacaccauc

SEQ ID NO: 1415145 - RNA, 16 nt, Human
uaucaccuagcugaau

SEQ ID NO: 1415146 - RNA, 18 nt, Human
uaucaccuagcugaaugu

SEQ ID NO: 1415147 - RNA, 23 nt, Human
uaucaccgugggcucccugacug

SEQ ID NO: 1415148 - RNA, 19 nt, Human
uaucaccgugggcucccug

SEQ ID NO: 1415149 - RNA, 23 nt, Human
uaucacccagacauaaaggaaaa

SEQ ID NO: 1415150 - RNA, 22 nt, Human
uaucacccagacauaaaggaaa

SEQ ID NO: 1415151 - RNA, 20 nt, Human
uaucacccagacauaaagga

SEQ ID NO: 1415152 - RNA, 14 nt, Human
uaucacacaaagca

SEQ ID NO: 1415153 - RNA, 19 nt, Human
uaucacccagaagaaaaua

SEQ ID NO: 1415154 - RNA, 22 nt, Human
uaucacccagaagaaaauagug

SEQ ID NO: 1415155 - RNA, 15 nt, Human
uaucaaaucuaccac

SEQ ID NO: 1415156 - RNA, 23 nt, Human
uaucaaauacauuuaaaacauua

SEQ ID NO: 1415157 - RNA, 23 nt, Human
acagacggaaggguaaacaauau

SEQ ID NO: 1415158 - RNA, 15 nt, Human
acagacaggcucuua

SEQ ID NO: 1415159 - RNA, 13 nt, Human
acagacaggcucu

SEQ ID NO: 1415160 - RNA, 21 nt, Human
acagacggaaggguaaacaau

SEQ ID NO: 1415161 - RNA, 17 nt, Human
acagacggaaggguaaa

SEQ ID NO: 1415162 - RNA, 18 nt, Human
acagacgcugcugucaca

SEQ ID NO: 1415163 - RNA, 14 nt, Human
acagaccuuugaac

SEQ ID NO: 1415164 - RNA, 17 nt, Human
uaucagacuaagccagc

SEQ ID NO: 1415165 - RNA, 15 nt, Human
uauccaaucaaucuu

SEQ ID NO: 1415166 - RNA, 23 nt, Human
uauccaccaaaagggcucccuga

SEQ ID NO: 1415167 - RNA, 16 nt, Human
uauccccauuucuuuu

SEQ ID NO: 1415168 - RNA, 16 nt, Human
uaucccagcugccuag

SEQ ID NO: 1415169 - RNA, 20 nt, Human
uaucccaccuccaucccaga

SEQ ID NO: 1415170 - RNA, 22 nt, Human
uaucccaccugacauguccuuc

SEQ ID NO: 1415171 - RNA, 20 nt, Human
uauccccccaucuugcuucc

SEQ ID NO: 1415172 - RNA, 19 nt, Human
uauccccccaucuugcuuc

SEQ ID NO: 1415173 - RNA, 17 nt, Human
uauccccccaucuugcu

SEQ ID NO: 1415174 - RNA, 15 nt, Human
uauccccccaucuug

SEQ ID NO: 1415175 - RNA, 14 nt, Human
uaucccagcugccu

SEQ ID NO: 1415176 - RNA, 19 nt, Human
uaucuauaauuuaccuaag

SEQ ID NO: 1415177 - RNA, 16 nt, Human
uaucuauaauuuaccu

SEQ ID NO: 1415178 - RNA, 14 nt, Human
uaucuauaauuuac

SEQ ID NO: 1415179 - RNA, 13 nt, Human
uaucuauaauuua

SEQ ID NO: 1415180 - RNA, 13 nt, Human
uaucuauagcuaa

SEQ ID NO: 1415181 - RNA, 16 nt, Human
uaggguggagagccac

SEQ ID NO: 1415182 - RNA, 12 nt, Human
uaggguuuaauc

SEQ ID NO: 1415183 - RNA, 19 nt, Human
uaggguuuaauccccagua

SEQ ID NO: 1415184 - RNA, 21 nt, Human
uaggguuuaauccccaguaaa

SEQ ID NO: 1415185 - RNA, 22 nt, Human
uagggucuggaacaccaggcug

SEQ ID NO: 1415186 - RNA, 15 nt, Human
uaggguauauuuucc

SEQ ID NO: 1415187 - RNA, 19 nt, Human
uaggguacauggugcuggg

SEQ ID NO: 1415188 - RNA, 15 nt, Human
uaggguacauggugc

SEQ ID NO: 1415189 - RNA, 22 nt, Human
uaggguaaaucaguaagaggug

SEQ ID NO: 1415190 - RNA, 16 nt, Human
uaggguaaaucaguaa

SEQ ID NO: 1415191 - RNA, 13 nt, Human
uaggguaaaucag

SEQ ID NO: 1415192 - RNA, 12 nt, Human
uaggguaaauca

SEQ ID NO: 1415193 - RNA, 19 nt, Human
uaggguuugugacagggcg

SEQ ID NO: 1415194 - RNA, 19 nt, Human
uaggguuucccuacugaag

SEQ ID NO: 1415195 - RNA, 16 nt, Human
uagguaaauuacaguu

SEQ ID NO: 1415196 - RNA, 20 nt, Human
acaaugacuuacuguacaug

SEQ ID NO: 1415197 - RNA, 20 nt, Human
acaaugauccuguauucaga

SEQ ID NO: 1415198 - RNA, 21 nt, Human
acaaugaucaccgacugaaaa

SEQ ID NO: 1415199 - RNA, 22 nt, Human
acaaugacuuacuguacaugaa

SEQ ID NO: 1415200 - RNA, 22 nt, Human
acaaugauccuguauucagaca

SEQ ID NO: 1415201 - RNA, 18 nt, Human
acacaaauuaucuuaaaa

SEQ ID NO: 1415202 - RNA, 23 nt, Human
acacaagauugguguuuuuuucu

SEQ ID NO: 1415203 - RNA, 14 nt, Human
acacaacuauauug

SEQ ID NO: 1415204 - RNA, 13 nt, Human
acacaacuauauu

SEQ ID NO: 1415205 - RNA, 23 nt, Human
acacaaggauagaugcuggccca

SEQ ID NO: 1415206 - RNA, 19 nt, Human
acacaaggauagaugcugg

SEQ ID NO: 1415207 - RNA, 21 nt, Human
acacaagauugguguuuuuuu

SEQ ID NO: 1415208 - RNA, 14 nt, Human
acacaauaagcaaa

SEQ ID NO: 1415209 - RNA, 13 nt, Human
acacaauaagcaa

SEQ ID NO: 1415210 - RNA, 22 nt, Human
acacaggccuguguagcuguga

SEQ ID NO: 1415211 - RNA, 16 nt, Human
acacaggccuguguag

SEQ ID NO: 1415212 - RNA, 13 nt, Human
acacaggccugug

SEQ ID NO: 1415213 - RNA, 12 nt, Human
acacaggccugu

SEQ ID NO: 1415214 - RNA, 16 nt, Human
acacaggcccucccug

SEQ ID NO: 1415215 - RNA, 13 nt, Human
acacaggcccucc

SEQ ID NO: 1415216 - RNA, 23 nt, Human
acacaggcauuuccuggguggcu

SEQ ID NO: 1415217 - RNA, 20 nt, Human
acacaggcauuuccugggug

SEQ ID NO: 1415218 - RNA, 18 nt, Human
acacaggcauuuccuggg

SEQ ID NO: 1415219 - RNA, 16 nt, Human
acacaggcauuuccug

SEQ ID NO: 1415220 - RNA, 15 nt, Human
uagguuuuuguuugu

SEQ ID NO: 1415221 - RNA, 16 nt, Human
acacaggggcuugacu

SEQ ID NO: 1415222 - RNA, 22 nt, Human
acacaggggcuugacuuuuuca

SEQ ID NO: 1415223 - RNA, 11 nt, Human
acacagggcag

SEQ ID NO: 1415224 - RNA, 23 nt, Human
uagguuuuaauaauuuuuuaauu

SEQ ID NO: 1415225 - RNA, 19 nt, Human
acacaguaccauuuaaugg

SEQ ID NO: 1415226 - RNA, 14 nt, Human
uaguaauugacaug

SEQ ID NO: 1415227 - RNA, 14 nt, Human
uaguaaucugcauu

SEQ ID NO: 1415228 - RNA, 17 nt, Human
uaguaaucugcauuauu

SEQ ID NO: 1415229 - RNA, 12 nt, Human
uaguaaucauau

SEQ ID NO: 1415230 - RNA, 12 nt, Human
uaggcaacauag

SEQ ID NO: 1415231 - RNA, 22 nt, Human
uaggauuuuuuuuaauguuuaa

SEQ ID NO: 1415232 - RNA, 21 nt, Human
uaggauuuuuuuuaauguuua

SEQ ID NO: 1415233 - RNA, 21 nt, Human
uaggauuuauuuaaaauagca

SEQ ID NO: 1415234 - RNA, 22 nt, Human
uaggauuuauuuaaaauagcaa

SEQ ID NO: 1415235 - RNA, 17 nt, Human
uaggauuuauuuaaaau

SEQ ID NO: 1415236 - RNA, 16 nt, Human
uaggauuuauuuaaaa

SEQ ID NO: 1415237 - RNA, 14 nt, Human
uaggauucuaaaau

SEQ ID NO: 1415238 - RNA, 12 nt, Human
uaggauucuaaa

SEQ ID NO: 1415239 - RNA, 21 nt, Human
uaggauccagugauccuuaca

SEQ ID NO: 1415240 - RNA, 20 nt, Human
uaggaucauuuguuggaaug

SEQ ID NO: 1415241 - RNA, 23 nt, Human
uaggaguuuagggaacaauuugg

SEQ ID NO: 1415242 - RNA, 13 nt, Human
uaggaaaauaaaa

SEQ ID NO: 1415243 - RNA, 15 nt, Human
uagggaacaauuugg

SEQ ID NO: 1415244 - RNA, 14 nt, Human
uagggaacaauuug

SEQ ID NO: 1415245 - RNA, 13 nt, Human
uagggaacaauuu

SEQ ID NO: 1415246 - RNA, 21 nt, Human
uagggaaggauacaaaagcau

SEQ ID NO: 1415247 - RNA, 13 nt, Human
uagggaaaacauu

SEQ ID NO: 1415248 - RNA, 20 nt, Human
uaggcauucuggaccucugg

SEQ ID NO: 1415249 - RNA, 16 nt, Human
uagggaaaacauucca

SEQ ID NO: 1415250 - RNA, 18 nt, Human
uagggaaaacauuccauc

SEQ ID NO: 1415251 - RNA, 17 nt, Human
uagggaucccucaucug

SEQ ID NO: 1415252 - RNA, 15 nt, Human
uagggaugccuccuu

SEQ ID NO: 1415253 - RNA, 14 nt, Human
uagggaugccuccu

SEQ ID NO: 1415254 - RNA, 16 nt, Human
uagggaugccuccuuu

SEQ ID NO: 1415255 - RNA, 18 nt, Human
uagggcaauuaauuccuu

SEQ ID NO: 1415256 - RNA, 20 nt, Human
uagggcaccagggguuucuc

SEQ ID NO: 1415257 - RNA, 15 nt, Human
uagggcaccaggggu

SEQ ID NO: 1415258 - RNA, 21 nt, Human
uagggcaauuaauuccuucag

SEQ ID NO: 1415259 - RNA, 23 nt, Human
uagggcaauuaauuccuucagca

SEQ ID NO: 1415260 - RNA, 23 nt, Human
uagggccaagcccagcacugcuu

SEQ ID NO: 1415261 - RNA, 16 nt, Human
uagggccaagcccagc

SEQ ID NO: 1415262 - RNA, 20 nt, Human
uagggggcuggaggagccca

SEQ ID NO: 1415263 - RNA, 18 nt, Human
uagggggcuggaggagcc

SEQ ID NO: 1415264 - RNA, 16 nt, Human
uagggggcuggaggag

SEQ ID NO: 1415265 - RNA, 15 nt, Human
uagggggcuggagga

SEQ ID NO: 1415266 - RNA, 23 nt, Human
uaggggccccucucagcccucac

SEQ ID NO: 1415267 - RNA, 19 nt, Human
uaggggccccucucagccc

SEQ ID NO: 1415268 - RNA, 21 nt, Human
uaggggaggggcuccuuucca

SEQ ID NO: 1415269 - RNA, 18 nt, Human
uaggggaggggcuccuuu

SEQ ID NO: 1415270 - RNA, 14 nt, Human
uaggggcugggaac

SEQ ID NO: 1415271 - RNA, 11 nt, Human
uaggggcuggg

SEQ ID NO: 1415272 - RNA, 21 nt, Human
uaggggcuuauaauaaaggac

SEQ ID NO: 1415273 - RNA, 22 nt, Human
uaggggcuuauaauaaaggacu

SEQ ID NO: 1415274 - RNA, 23 nt, Human
uaggggcuuauaauaaaggacug

SEQ ID NO: 1415275 - RNA, 11 nt, Human
acaaaugaaaa

SEQ ID NO: 1415276 - RNA, 20 nt, Human
acaaaucagaagucaucuug

SEQ ID NO: 1415277 - RNA, 22 nt, Human
acaaucagcuccuuccuggaga

SEQ ID NO: 1415278 - RNA, 18 nt, Human
acaaucagcuccuuccug

SEQ ID NO: 1415279 - RNA, 16 nt, Human
uagcgugcucacugac

SEQ ID NO: 1415280 - RNA, 18 nt, Human
uagcgggauggggcuccc

SEQ ID NO: 1415281 - RNA, 21 nt, Human
uagcgcuaucucccugccucc

SEQ ID NO: 1415282 - RNA, 17 nt, Human
uagcguucuuguaauuu

SEQ ID NO: 1415283 - RNA, 16 nt, Human
uagcguucuuguaauu

SEQ ID NO: 1415284 - RNA, 15 nt, Human
uagcguucuuguaau

SEQ ID NO: 1415285 - RNA, 14 nt, Human
uagcguucuuguaa

SEQ ID NO: 1415286 - RNA, 13 nt, Human
uagcguucuugua

SEQ ID NO: 1415287 - RNA, 17 nt, Human
uagcgugcucacugacc

SEQ ID NO: 1415288 - RNA, 21 nt, Human
uagcguucuuguaauuuuaca

SEQ ID NO: 1415289 - RNA, 16 nt, Human
uagcguuuuuuaaaug

SEQ ID NO: 1415290 - RNA, 17 nt, Human
uagcguuuuuuaaaugu

SEQ ID NO: 1415291 - RNA, 18 nt, Human
uagcguuuuuuaaaugua

SEQ ID NO: 1415292 - RNA, 11 nt, Human
uagcuuugcuc

SEQ ID NO: 1415293 - RNA, 17 nt, Human
uagcuuuggaaguuuag

SEQ ID NO: 1415294 - RNA, 15 nt, Human
uagcuuugcucuuug

SEQ ID NO: 1415295 - RNA, 22 nt, Human
uagcuuuggaaguuuagcucug

SEQ ID NO: 1415296 - RNA, 19 nt, Human
uagcuuuugugggggacug

SEQ ID NO: 1415297 - RNA, 12 nt, Human
uagcuuuugugg

SEQ ID NO: 1415298 - RNA, 20 nt, Human
uagcuuuugugggggacugu

SEQ ID NO: 1415299 - RNA, 23 nt, Human
uagcuuuuuucucugauacagaa

SEQ ID NO: 1415300 - RNA, 13 nt, Human
uagcuuuuuucuc

SEQ ID NO: 1415301 - RNA, 23 nt, Human
uagcuuuaaugauaugcuuguaa

SEQ ID NO: 1415302 - RNA, 22 nt, Human
uagcuuuaacuuaaauaguauu

SEQ ID NO: 1415303 - RNA, 16 nt, Human
uagcuuuaacuuaaau

SEQ ID NO: 1415304 - RNA, 19 nt, Human
uagcuugauaaagggccaa

SEQ ID NO: 1415305 - RNA, 20 nt, Human
uagcuaaacggauuccaaag

SEQ ID NO: 1415306 - RNA, 19 nt, Human
uagcuaaacggauuccaaa

SEQ ID NO: 1415307 - RNA, 18 nt, Human
uagcuaaacggauuccaa

SEQ ID NO: 1415308 - RNA, 22 nt, Human
uagcguuuuuuaaauguauacu

SEQ ID NO: 1415309 - RNA, 18 nt, Human
uagcguucuuguaauuuu

SEQ ID NO: 1415310 - RNA, 14 nt, Human
uagcuaaguacaca

SEQ ID NO: 1415311 - RNA, 23 nt, Human
acaaaucagaagucaucuugcua

SEQ ID NO: 1415312 - RNA, 16 nt, Human
acaaaucagaagucau

SEQ ID NO: 1415313 - RNA, 15 nt, Human
acaaaucagaaguca

SEQ ID NO: 1415314 - RNA, 14 nt, Human
acaaaucagaaguc

SEQ ID NO: 1415315 - RNA, 21 nt, Human
uagccacuaaccuugccuggu

SEQ ID NO: 1415316 - RNA, 20 nt, Human
uagccacuaaccuugccugg

SEQ ID NO: 1415317 - RNA, 21 nt, Human
uagccacauuuggaauacuuu

SEQ ID NO: 1415318 - RNA, 20 nt, Human
uagccacauuuggaauacuu

SEQ ID NO: 1415319 - RNA, 17 nt, Human
uagccaaaccucaccaa

SEQ ID NO: 1415320 - RNA, 22 nt, Human
uagccaaaccucaccaacuccu

SEQ ID NO: 1415321 - RNA, 14 nt, Human
uagccaaaccucac

SEQ ID NO: 1415322 - RNA, 19 nt, Human
uagcacaaguuauuuaaau

SEQ ID NO: 1415323 - RNA, 13 nt, Human
uagcacaaguuau

SEQ ID NO: 1415324 - RNA, 16 nt, Human
uagcaaagauaucuca

SEQ ID NO: 1415325 - RNA, 14 nt, Human
uagcaaagaauuga

SEQ ID NO: 1415326 - RNA, 12 nt, Human
uagcaaagaauu

SEQ ID NO: 1415327 - RNA, 16 nt, Human
uagcaaaagaagaagu

SEQ ID NO: 1415328 - RNA, 14 nt, Human
uagcaaaagaagaa

SEQ ID NO: 1415329 - RNA, 23 nt, Human
uagagggaggagaaugagccucg

SEQ ID NO: 1415330 - RNA, 14 nt, Human
uagaggguguguaa

SEQ ID NO: 1415331 - RNA, 19 nt, Human
uagaggcuuccuucauuuc

SEQ ID NO: 1415332 - RNA, 18 nt, Human
uagaggcuuccuucauuu

SEQ ID NO: 1415333 - RNA, 17 nt, Human
uagaggcuuccuucauu

SEQ ID NO: 1415334 - RNA, 16 nt, Human
uagaggcuuccuucau

SEQ ID NO: 1415335 - RNA, 13 nt, Human
uagagcuccuccc

SEQ ID NO: 1415336 - RNA, 10 nt, Human
uagagcuccu

SEQ ID NO: 1415337 - RNA, 17 nt, Human
uagagccuguaaacuuu

SEQ ID NO: 1415338 - RNA, 21 nt, Human
uagagccggguguccccaaca

SEQ ID NO: 1415339 - RNA, 16 nt, Human
acaaauagaaaauggu

SEQ ID NO: 1415340 - RNA, 15 nt, Human
acaaauagaaaaugg

SEQ ID NO: 1415341 - RNA, 13 nt, Human
acaaauagaaaau

SEQ ID NO: 1415342 - RNA, 14 nt, Human
uagagccugaggga

SEQ ID NO: 1415343 - RNA, 18 nt, Human
uagagccgggugucccca

SEQ ID NO: 1415344 - RNA, 19 nt, Human
acaaauaggaugcuuggga

SEQ ID NO: 1415345 - RNA, 22 nt, Human
acaaagguuuaaaugaacaaga

SEQ ID NO: 1415346 - RNA, 20 nt, Human
acaaagguuuaaaugaacaa

SEQ ID NO: 1415347 - RNA, 19 nt, Human
acaaagguuuaaaugaaca

SEQ ID NO: 1415348 - RNA, 18 nt, Human
acaaagguuuaaaugaac

SEQ ID NO: 1415349 - RNA, 17 nt, Human
acaaagguuuaaaugaa

SEQ ID NO: 1415350 - RNA, 16 nt, Human
acaaagguuuaaauga

SEQ ID NO: 1415351 - RNA, 15 nt, Human
acaaagguuuaaaug

SEQ ID NO: 1415352 - RNA, 14 nt, Human
acaaagguuuaaau

SEQ ID NO: 1415353 - RNA, 24 nt, Human
acaaagguugagauguaaaaggua

SEQ ID NO: 1415354 - RNA, 20 nt, Human
acaaaaucagguaacuaacu

SEQ ID NO: 1415355 - RNA, 22 nt, Human
acaaaauaaccaauccuggaca

SEQ ID NO: 1415356 - RNA, 21 nt, Human
acaaagguuuuccucuucuau

SEQ ID NO: 1415357 - RNA, 16 nt, Human
acaaauaacaaugugc

SEQ ID NO: 1415358 - RNA, 16 nt, Human
acaaauacuaaaaaga

SEQ ID NO: 1415359 - RNA, 23 nt, Human
acaaagguuuaaaugaacaagag

SEQ ID NO: 1415360 - RNA, 13 nt, Human
acaaauaauuuag

SEQ ID NO: 1415361 - RNA, 14 nt, Human
acaaauaauuuaga

SEQ ID NO: 1415362 - RNA, 14 nt, Human
acaaaauaaacaaa

SEQ ID NO: 1415363 - RNA, 12 nt, Human
acaaaauaaaca

SEQ ID NO: 1415364 - RNA, 15 nt, Human
acaaaacuacaugag

SEQ ID NO: 1415365 - RNA, 20 nt, Human
acaaaaccccccagauauca

SEQ ID NO: 1415366 - RNA, 19 nt, Human
acaaaaccccccagauauc

SEQ ID NO: 1415367 - RNA, 13 nt, Human
acaaaacaaacuc

SEQ ID NO: 1415368 - RNA, 13 nt, Human
acaaaaauauaaa

SEQ ID NO: 1415369 - RNA, 16 nt, Human
acaaaaauacucagau

SEQ ID NO: 1415370 - RNA, 12 nt, Human
acaaaaauaaaa

SEQ ID NO: 1415371 - RNA, 20 nt, Human
acaaaaagguucucaggugu

SEQ ID NO: 1415372 - RNA, 14 nt, Human
acaaaaauuaaaau

SEQ ID NO: 1415373 - RNA, 19 nt, Human
acaaaaagcuaauaccagu

SEQ ID NO: 1415374 - RNA, 20 nt, Human
acaaaaagccacaaugaaca

SEQ ID NO: 1415375 - RNA, 16 nt, Human
acaaaaagcuacuuau

SEQ ID NO: 1415376 - RNA, 20 nt, Human
aauuuuacacgcuuuuguga

SEQ ID NO: 1415377 - RNA, 19 nt, Human
aauuuuacacgcuuuugug

SEQ ID NO: 1415378 - RNA, 20 nt, Human
aauuuuacauggcuggagcu

SEQ ID NO: 1415379 - RNA, 12 nt, Human
aauuuuacauuu

SEQ ID NO: 1415380 - RNA, 14 nt, Human
uagaccaaaauaaa

SEQ ID NO: 1415381 - RNA, 14 nt, Human
uagaccaagcuugu

SEQ ID NO: 1415382 - RNA, 13 nt, Human
uagaccaaaauaa

SEQ ID NO: 1415383 - RNA, 18 nt, Human
uagaccaagcuuguccaa

SEQ ID NO: 1415384 - RNA, 23 nt, Human
uagacauggagguucuaaggccu

SEQ ID NO: 1415385 - RNA, 22 nt, Human
uagacauggagguucuaaggcc

SEQ ID NO: 1415386 - RNA, 21 nt, Human
uagacauggagguucuaaggc

SEQ ID NO: 1415387 - RNA, 20 nt, Human
uagacauggagguucuaagg

SEQ ID NO: 1415388 - RNA, 19 nt, Human
uagacauggagguucuaag

SEQ ID NO: 1415389 - RNA, 18 nt, Human
uagacauggagguucuaa

SEQ ID NO: 1415390 - RNA, 17 nt, Human
uagacauggagguucua

SEQ ID NO: 1415391 - RNA, 19 nt, Human
uagacagaggcccucaagu

SEQ ID NO: 1415392 - RNA, 15 nt, Human
uagacagaggcccuc

SEQ ID NO: 1415393 - RNA, 15 nt, Human
uagacagaagaaaca

SEQ ID NO: 1415394 - RNA, 18 nt, Human
uagacagucucacuuugu

SEQ ID NO: 1415395 - RNA, 16 nt, Human
aauuuuaaugaagaaa

SEQ ID NO: 1415396 - RNA, 20 nt, Human
aauuugugauacaaugcugu

SEQ ID NO: 1415397 - RNA, 17 nt, Human
aauuugugauacaaugc

SEQ ID NO: 1415398 - RNA, 18 nt, Human
aauuugugauacaaugcu

SEQ ID NO: 1415399 - RNA, 15 nt, Human
aauuuggcaauuuug

SEQ ID NO: 1415400 - RNA, 18 nt, Human
aauuuggcaauuuugugg

SEQ ID NO: 1415401 - RNA, 13 nt, Human
aauuuggcaauuu

SEQ ID NO: 1415402 - RNA, 23 nt, Human
aauuuggauuuaaaagccugcuc

SEQ ID NO: 1415403 - RNA, 12 nt, Human
aauuuggauuua

SEQ ID NO: 1415404 - RNA, 14 nt, Human
aauuugugauacaa

SEQ ID NO: 1415405 - RNA, 14 nt, Human
uagacagaagaaac

SEQ ID NO: 1415406 - RNA, 12 nt, Human
uagacagaagaa

SEQ ID NO: 1415407 - RNA, 15 nt, Human
uagacagaacaccua

SEQ ID NO: 1415408 - RNA, 14 nt, Human
uagacagaacaccu

SEQ ID NO: 1415409 - RNA, 15 nt, Human
uagacacuuuggaag

SEQ ID NO: 1415410 - RNA, 21 nt, Human
uagacacuccccgaagucuuu

SEQ ID NO: 1415411 - RNA, 16 nt, Human
uagacacgcacggcag

SEQ ID NO: 1415412 - RNA, 21 nt, Human
uagacaccaaaguucuaauaa

SEQ ID NO: 1415413 - RNA, 20 nt, Human
uagacaccaaaguucuaaua

SEQ ID NO: 1415414 - RNA, 18 nt, Human
uagacaccaaaguucuaa

SEQ ID NO: 1415415 - RNA, 17 nt, Human
uagacaccaaaguucua

SEQ ID NO: 1415416 - RNA, 14 nt, Human
uagacaccaaaguu

SEQ ID NO: 1415417 - RNA, 21 nt, Human
uagacacaugaagguaaauaa

SEQ ID NO: 1415418 - RNA, 22 nt, Human
uagacacaugaagguaaauaaa

SEQ ID NO: 1415419 - RNA, 20 nt, Human
uagacacaugaagguaaaua

SEQ ID NO: 1415420 - RNA, 19 nt, Human
uagacacaugaagguaaau

SEQ ID NO: 1415421 - RNA, 13 nt, Human
uagacacaugaag

SEQ ID NO: 1415422 - RNA, 13 nt, Human
uagacacacauga

SEQ ID NO: 1415423 - RNA, 18 nt, Human
uagacaauuuauuauggc

SEQ ID NO: 1415424 - RNA, 17 nt, Human
uagaagggaaagcccau

SEQ ID NO: 1415425 - RNA, 23 nt, Human
uagaaggcuguggugagggaaga

SEQ ID NO: 1415426 - RNA, 18 nt, Human
uagaaggcuguggugagg

SEQ ID NO: 1415427 - RNA, 20 nt, Human
uagaagacaauugacaacag

SEQ ID NO: 1415428 - RNA, 19 nt, Human
uagaaguauaaagaauugu

SEQ ID NO: 1415429 - RNA, 20 nt, Human
uagaauuugauaugugaaca

SEQ ID NO: 1415430 - RNA, 13 nt, Human
uagaauuugauua

SEQ ID NO: 1415431 - RNA, 17 nt, Human
uagaaguauaaagaauu

SEQ ID NO: 1415432 - RNA, 16 nt, Human
uagaaguauaaagaau

SEQ ID NO: 1415433 - RNA, 22 nt, Human
uagaauuugauaugugaacagu

SEQ ID NO: 1415434 - RNA, 17 nt, Human
uacuuuggaauucuuag

SEQ ID NO: 1415435 - RNA, 22 nt, Human
uacuuugguggccacauaagcc

SEQ ID NO: 1415436 - RNA, 20 nt, Human
uacuuuggggcuaauuuaac

SEQ ID NO: 1415437 - RNA, 13 nt, Human
aauuccacucaaa

SEQ ID NO: 1415438 - RNA, 20 nt, Human
aauuccacaccuuuuauuga

SEQ ID NO: 1415439 - RNA, 16 nt, Human
aauuccacaccuuuua

SEQ ID NO: 1415440 - RNA, 21 nt, Human
aauucauuaaucugccucccu

SEQ ID NO: 1415441 - RNA, 14 nt, Human
uacuuuuuaaaugu

SEQ ID NO: 1415442 - RNA, 15 nt, Human
uacuuuugcccuuug

SEQ ID NO: 1415443 - RNA, 20 nt, Human
uacuuuuacaaguaacaaaa

SEQ ID NO: 1415444 - RNA, 23 nt, Human
uacuuuuacaaguaacaaaaaua

SEQ ID NO: 1415445 - RNA, 21 nt, Human
uacuuuuaaacuguguacaua

SEQ ID NO: 1415446 - RNA, 16 nt, Human
uagaaaacauaaucuu

SEQ ID NO: 1415447 - RNA, 16 nt, Human
uagaaaaacaggcacu

SEQ ID NO: 1415448 - RNA, 15 nt, Human
uagaaaaacaggcac

SEQ ID NO: 1415449 - RNA, 14 nt, Human
uagaaaaacaggca

SEQ ID NO: 1415450 - RNA, 14 nt, Human
uacuuuuuauauau

SEQ ID NO: 1415451 - RNA, 16 nt, Human
uacuuuuuauauauau

SEQ ID NO: 1415452 - RNA, 13 nt, Human
uacuuuuuauaua

SEQ ID NO: 1415453 - RNA, 15 nt, Human
uagaaaaaaaauuau

SEQ ID NO: 1415454 - RNA, 18 nt, Human
uagaagacaaaauguuca

SEQ ID NO: 1415455 - RNA, 17 nt, Human
uagaaaauuuaaaacau

SEQ ID NO: 1415456 - RNA, 12 nt, Human
uagaaaaugguc

SEQ ID NO: 1415457 - RNA, 18 nt, Human
uagaaaaguauguucuaa

SEQ ID NO: 1415458 - RNA, 16 nt, Human
uagaaaaguauguucu

SEQ ID NO: 1415459 - RNA, 21 nt, Human
uagaaaaggcuagguacacag

SEQ ID NO: 1415460 - RNA, 17 nt, Human
uagaaaaggacuauaag

SEQ ID NO: 1415461 - RNA, 15 nt, Human
uagaaaacuuuaaag

SEQ ID NO: 1415462 - RNA, 16 nt, Human
uagaaaacuuuaaagc

SEQ ID NO: 1415463 - RNA, 11 nt, Human
uagaaaacuuu

SEQ ID NO: 1415464 - RNA, 20 nt, Human
uagaaacaacacuguaguaa

SEQ ID NO: 1415465 - RNA, 19 nt, Human
uagaaacaacacuguagua

SEQ ID NO: 1415466 - RNA, 18 nt, Human
uagaaacaacacuguagu

SEQ ID NO: 1415467 - RNA, 17 nt, Human
uagaaacaacacuguag

SEQ ID NO: 1415468 - RNA, 16 nt, Human
uagaaacaacacugua

SEQ ID NO: 1415469 - RNA, 13 nt, Human
uagaaacaacacu

SEQ ID NO: 1415470 - RNA, 17 nt, Human
uagaaacaaaauacaau

SEQ ID NO: 1415471 - RNA, 16 nt, Human
uagaaacaaaauacaa

SEQ ID NO: 1415472 - RNA, 13 nt, Human
uagaaacaaaaua

SEQ ID NO: 1415473 - RNA, 16 nt, Human
uagaaaauuagacugu

SEQ ID NO: 1415474 - RNA, 23 nt, Human
uagaaaauuuguuauuuugcaac

SEQ ID NO: 1415475 - RNA, 22 nt, Human
uagaaaauuuguuauuuugcaa

SEQ ID NO: 1415476 - RNA, 22 nt, Human
uagaaaauuuaaaacauuacuc

SEQ ID NO: 1415477 - RNA, 16 nt, Human
uagaaacagugcaaca

SEQ ID NO: 1415478 - RNA, 15 nt, Human
uagaaacacaacuau

SEQ ID NO: 1415479 - RNA, 15 nt, Human
ucauuuucucucagg

SEQ ID NO: 1415480 - RNA, 14 nt, Human
ucauuuucucucag

SEQ ID NO: 1415481 - RNA, 16 nt, Human
ucauuuucucuaauau

SEQ ID NO: 1415482 - RNA, 15 nt, Human
ucauuuucucuaaua

SEQ ID NO: 1415483 - RNA, 13 nt, Human
ucauuuucucuaa

SEQ ID NO: 1415484 - RNA, 12 nt, Human
ucauuuucucua

SEQ ID NO: 1415485 - RNA, 20 nt, Human
ucauuugguucauuaauucu

SEQ ID NO: 1415486 - RNA, 15 nt, Human
ucauuugcuuuggaa

SEQ ID NO: 1415487 - RNA, 18 nt, Human
ucauuugguucauuaauu

SEQ ID NO: 1415488 - RNA, 16 nt, Human
ucauuugcuuuggaag

SEQ ID NO: 1415489 - RNA, 14 nt, Human
ucauuuugguacuu

SEQ ID NO: 1415490 - RNA, 22 nt, Human
ucauuuugguaaaauacuucuu

SEQ ID NO: 1415491 - RNA, 19 nt, Human
ucauuuuucaauagcacau

SEQ ID NO: 1415492 - RNA, 21 nt, Human
ucauuuuuacaauguaauuau

SEQ ID NO: 1415493 - RNA, 20 nt, Human
ucauuuuuacaauguaauua

SEQ ID NO: 1415494 - RNA, 12 nt, Human
ucauuuuuacaa

SEQ ID NO: 1415495 - RNA, 23 nt, Human
ucauuuuuuuucuuugaauaaau

SEQ ID NO: 1415496 - RNA, 22 nt, Human
ucauuuuuuuucuuugaauaaa

SEQ ID NO: 1415497 - RNA, 20 nt, Human
ucauuuuuuuucuuugaaua

SEQ ID NO: 1415498 - RNA, 15 nt, Human
ucauuuuuccguaaa

SEQ ID NO: 1415499 - RNA, 18 nt, Human
ucauuuuuuuuaagaaaa

SEQ ID NO: 1415500 - RNA, 17 nt, Human
accugcucagcccugca

SEQ ID NO: 1415501 - RNA, 16 nt, Human
accugcucagcccugc

SEQ ID NO: 1415502 - RNA, 20 nt, Human
accugcucacgucaaaugca

SEQ ID NO: 1415503 - RNA, 16 nt, Human
accugcucacgucaaa

SEQ ID NO: 1415504 - RNA, 22 nt, Human
accugcuaggccagagcccacu

SEQ ID NO: 1415505 - RNA, 21 nt, Human
accugcuaggccagagcccac

SEQ ID NO: 1415506 - RNA, 18 nt, Human
accugcuaggccagagcc

SEQ ID NO: 1415507 - RNA, 16 nt, Human
accugcggcccaaucc

SEQ ID NO: 1415508 - RNA, 21 nt, Human
accugccugacauuuggagug

SEQ ID NO: 1415509 - RNA, 23 nt, Human
accugccucggccucccaaagug

SEQ ID NO: 1415510 - RNA, 21 nt, Human
accugccucggccucccaaag

SEQ ID NO: 1415511 - RNA, 21 nt, Human
accugcugagcucugagaggc

SEQ ID NO: 1415512 - RNA, 23 nt, Human
accugcugagcucugagaggccc

SEQ ID NO: 1415513 - RNA, 20 nt, Human
accugcugagcucugagagg

SEQ ID NO: 1415514 - RNA, 19 nt, Human
accugcugagcucugagag

SEQ ID NO: 1415515 - RNA, 23 nt, Human
accugcucuccucuucuacucac

SEQ ID NO: 1415516 - RNA, 17 nt, Human
accugcucuccucuucu

SEQ ID NO: 1415517 - RNA, 18 nt, Human
accugcugagcucugaga

SEQ ID NO: 1415518 - RNA, 16 nt, Human
accugcucuccucuuc

SEQ ID NO: 1415519 - RNA, 15 nt, Human
accugcucuccucuu

SEQ ID NO: 1415520 - RNA, 14 nt, Human
accugcucuccucu

SEQ ID NO: 1415521 - RNA, 13 nt, Human
accugcucuccuc

SEQ ID NO: 1415522 - RNA, 12 nt, Human
accugcucuccu

SEQ ID NO: 1415523 - RNA, 22 nt, Human
accuggacuuaagcaucuggcu

SEQ ID NO: 1415524 - RNA, 21 nt, Human
accuggaccccugcauuggaa

SEQ ID NO: 1415525 - RNA, 20 nt, Human
accuggaccccugcauugga

SEQ ID NO: 1415526 - RNA, 16 nt, Human
accuggaccccugcau

SEQ ID NO: 1415527 - RNA, 15 nt, Human
accuggaccccugca

SEQ ID NO: 1415528 - RNA, 21 nt, Human
accugcugugauacgaugcuu

SEQ ID NO: 1415529 - RNA, 20 nt, Human
accugcugugauacgaugcu

SEQ ID NO: 1415530 - RNA, 21 nt, Human
accugcugucuggguggcuca

SEQ ID NO: 1415531 - RNA, 20 nt, Human
accuggaauauauaaccagu

SEQ ID NO: 1415532 - RNA, 14 nt, Human
accugagccugccg

SEQ ID NO: 1415533 - RNA, 13 nt, Human
accugagccugcc

SEQ ID NO: 1415534 - RNA, 12 nt, Human
accugagccugc

SEQ ID NO: 1415535 - RNA, 10 nt, Human
accugagccu

SEQ ID NO: 1415536 - RNA, 15 nt, Human
accugaccccugcuc

SEQ ID NO: 1415537 - RNA, 20 nt, Human
accugagauuuauuaaagaa

SEQ ID NO: 1415538 - RNA, 19 nt, Human
accugacacucccuugggc

SEQ ID NO: 1415539 - RNA, 17 nt, Human
accugacacucccuugg

SEQ ID NO: 1415540 - RNA, 16 nt, Human
accugacacucccuug

SEQ ID NO: 1415541 - RNA, 21 nt, Human
accugacacaccaggcgcuaa

SEQ ID NO: 1415542 - RNA, 19 nt, Human
accugacacaccaggcgcu

SEQ ID NO: 1415543 - RNA, 22 nt, Human
accugaagcuaucguaaaauua

SEQ ID NO: 1415544 - RNA, 16 nt, Human
accugaagaaucacaa

SEQ ID NO: 1415545 - RNA, 14 nt, Human
accugaagaaucac

SEQ ID NO: 1415546 - RNA, 11 nt, Human
accugaagaau

SEQ ID NO: 1415547 - RNA, 16 nt, Human
accugaacugaacacc

SEQ ID NO: 1415548 - RNA, 22 nt, Human
accugaaauuccaaagucucua

SEQ ID NO: 1415549 - RNA, 20 nt, Human
accugaaauuccaaagucuc

SEQ ID NO: 1415550 - RNA, 19 nt, Human
accugaaauuccaaagucu

SEQ ID NO: 1415551 - RNA, 20 nt, Human
ucauaaggcuucaaaauguu

SEQ ID NO: 1415552 - RNA, 16 nt, Human
ucauaauaaguugcau

SEQ ID NO: 1415553 - RNA, 22 nt, Human
accugaugaaaauaaagaaugg

SEQ ID NO: 1415554 - RNA, 21 nt, Human
accugaugaaaauaaagaaug

SEQ ID NO: 1415555 - RNA, 19 nt, Human
accugaugaaaauaaagaa

SEQ ID NO: 1415556 - RNA, 18 nt, Human
accugaugaaaauaaaga

SEQ ID NO: 1415557 - RNA, 15 nt, Human
accugaugaaaauaa

SEQ ID NO: 1415558 - RNA, 20 nt, Human
accugauuuuuuuuccuuuu

SEQ ID NO: 1415559 - RNA, 17 nt, Human
accugauuuuuuuuccu

SEQ ID NO: 1415560 - RNA, 16 nt, Human
accugauuuuuuuucc

SEQ ID NO: 1415561 - RNA, 11 nt, Human
accugauuuuu

SEQ ID NO: 1415562 - RNA, 14 nt, Human
accugaugaaaaua

SEQ ID NO: 1415563 - RNA, 13 nt, Human
accugaugaaaau

SEQ ID NO: 1415564 - RNA, 22 nt, Human
accugauccuggaggcccaguu

SEQ ID NO: 1415565 - RNA, 20 nt, Human
accugauccuggaggcccag

SEQ ID NO: 1415566 - RNA, 13 nt, Human
accugauccugga

SEQ ID NO: 1415567 - RNA, 14 nt, Human
accugaggcugugg

SEQ ID NO: 1415568 - RNA, 12 nt, Human
accugaggcugu

SEQ ID NO: 1415569 - RNA, 14 nt, Human
accugaggcugguu

SEQ ID NO: 1415570 - RNA, 16 nt, Human
accugagccugccgag

SEQ ID NO: 1415571 - RNA, 22 nt, Human
accugcaaagaucuguccucag

SEQ ID NO: 1415572 - RNA, 16 nt, Human
accugcaaagaucugu

SEQ ID NO: 1415573 - RNA, 15 nt, Human
accugcaaagaucug

SEQ ID NO: 1415574 - RNA, 22 nt, Human
accugccucccuucaugcaugg

SEQ ID NO: 1415575 - RNA, 21 nt, Human
accugccucccuucaugcaug

SEQ ID NO: 1415576 - RNA, 23 nt, Human
accugccucccuucaugcaugga

SEQ ID NO: 1415577 - RNA, 18 nt, Human
accuucgggcugugcccg

SEQ ID NO: 1415578 - RNA, 17 nt, Human
accuucgggcugugccc

SEQ ID NO: 1415579 - RNA, 16 nt, Human
accuucgggcugugcc

SEQ ID NO: 1415580 - RNA, 15 nt, Human
accuucgggcugugc

SEQ ID NO: 1415581 - RNA, 14 nt, Human
accuucgggcugug

SEQ ID NO: 1415582 - RNA, 19 nt, Human
accuucaguuaugauuuuu

SEQ ID NO: 1415583 - RNA, 23 nt, Human
accugggcccuggggccuguacu

SEQ ID NO: 1415584 - RNA, 21 nt, Human
accugggcccuggggccugua

SEQ ID NO: 1415585 - RNA, 20 nt, Human
accugggcccuggggccugu

SEQ ID NO: 1415586 - RNA, 15 nt, Human
accuugccugguaca

SEQ ID NO: 1415587 - RNA, 18 nt, Human
accuuuuuuauacauaaa

SEQ ID NO: 1415588 - RNA, 16 nt, Human
accuuuuuuauacaua

SEQ ID NO: 1415589 - RNA, 17 nt, Human
accuuuuuuauacauaa

SEQ ID NO: 1415590 - RNA, 15 nt, Human
accuucugaguacag

SEQ ID NO: 1415591 - RNA, 23 nt, Human
accuucucuauggggcauccucu

SEQ ID NO: 1415592 - RNA, 22 nt, Human
accuucucuauggggcauccuc

SEQ ID NO: 1415593 - RNA, 21 nt, Human
uccaaggggaaucagaacuca

SEQ ID NO: 1415594 - RNA, 20 nt, Human
uccaaggaggggcuguaaaa

SEQ ID NO: 1415595 - RNA, 23 nt, Human
uccaacaagaagggacugagaga

SEQ ID NO: 1415596 - RNA, 19 nt, Human
uccaaauucaguuucauaa

SEQ ID NO: 1415597 - RNA, 18 nt, Human
uccaaauucaguuucaua

SEQ ID NO: 1415598 - RNA, 16 nt, Human
uccaaauucaguuuca

SEQ ID NO: 1415599 - RNA, 14 nt, Human
uccaaauucaguuu

SEQ ID NO: 1415600 - RNA, 12 nt, Human
uccaaauucagu

SEQ ID NO: 1415601 - RNA, 20 nt, Human
uccaaauggcgucuggaagu

SEQ ID NO: 1415602 - RNA, 18 nt, Human
uccaaauggcgucuggaa

SEQ ID NO: 1415603 - RNA, 15 nt, Human
uccacaugggagccg

SEQ ID NO: 1415604 - RNA, 16 nt, Human
uccacauagguuuaga

SEQ ID NO: 1415605 - RNA, 19 nt, Human
uccacauccuccacguucu

SEQ ID NO: 1415606 - RNA, 13 nt, Human
uccacauccucca

SEQ ID NO: 1415607 - RNA, 12 nt, Human
uccacauccucc

SEQ ID NO: 1415608 - RNA, 19 nt, Human
uccacauacccugaccugg

SEQ ID NO: 1415609 - RNA, 22 nt, Human
uccaauuauaagaggauaugaa

SEQ ID NO: 1415610 - RNA, 23 nt, Human
uccaauuaguuuccuuuuuaaua

SEQ ID NO: 1415611 - RNA, 20 nt, Human
uccaauuaguuuccuuuuua

SEQ ID NO: 1415612 - RNA, 19 nt, Human
uccaauuaguuuccuuuuu

SEQ ID NO: 1415613 - RNA, 16 nt, Human
uccaauuaguuuccuu

SEQ ID NO: 1415614 - RNA, 18 nt, Human
uccaauguggcaaggaaa

SEQ ID NO: 1415615 - RNA, 23 nt, Human
uccaaugucuggagaccaccagg

SEQ ID NO: 1415616 - RNA, 15 nt, Human
uccaauuaguuuccu

SEQ ID NO: 1415617 - RNA, 18 nt, Human
uccaaugucuggagacca

SEQ ID NO: 1415618 - RNA, 17 nt, Human
uccaaugucuggagacc

SEQ ID NO: 1415619 - RNA, 16 nt, Human
uccaaugucuggagac

SEQ ID NO: 1415620 - RNA, 15 nt, Human
uccaaugucuggaga

SEQ ID NO: 1415621 - RNA, 20 nt, Human
uccaaugagcuuucugaaca

SEQ ID NO: 1415622 - RNA, 21 nt, Human
uccaaugagcuuucugaacag

SEQ ID NO: 1415623 - RNA, 19 nt, Human
accugggcccuggggccug

SEQ ID NO: 1415624 - RNA, 18 nt, Human
accugggcccuggggccu

SEQ ID NO: 1415625 - RNA, 16 nt, Human
accugggcccuggggc

SEQ ID NO: 1415626 - RNA, 15 nt, Human
accugggcccugggg

SEQ ID NO: 1415627 - RNA, 14 nt, Human
accugggcccuggg

SEQ ID NO: 1415628 - RNA, 13 nt, Human
accugggcccugg

SEQ ID NO: 1415629 - RNA, 17 nt, Human
accugggcaagcuggcg

SEQ ID NO: 1415630 - RNA, 22 nt, Human
accugggaggcggauguugaag

SEQ ID NO: 1415631 - RNA, 22 nt, Human
accugggagaaaucuggcuucu

SEQ ID NO: 1415632 - RNA, 16 nt, Human
accuggcugccauacu

SEQ ID NO: 1415633 - RNA, 19 nt, Human
accuggcccugcuuccugc

SEQ ID NO: 1415634 - RNA, 18 nt, Human
accuggcccugcuuccug

SEQ ID NO: 1415635 - RNA, 17 nt, Human
accuggcccugcuuccu

SEQ ID NO: 1415636 - RNA, 15 nt, Human
accuggcccugcuuc

SEQ ID NO: 1415637 - RNA, 18 nt, Human
accuggcccaucagggua

SEQ ID NO: 1415638 - RNA, 17 nt, Human
accuggcccaucagggu

SEQ ID NO: 1415639 - RNA, 22 nt, Human
uccaccccaucccuccccaguu

SEQ ID NO: 1415640 - RNA, 20 nt, Human
uccaccccaucccuccccag

SEQ ID NO: 1415641 - RNA, 12 nt, Human
uccaccccaucc

SEQ ID NO: 1415642 - RNA, 22 nt, Human
uccaccccaauccucccagaaa

SEQ ID NO: 1415643 - RNA, 22 nt, Human
uccacccaggggcagccccagg

SEQ ID NO: 1415644 - RNA, 12 nt, Human
uccacccagggg

SEQ ID NO: 1415645 - RNA, 18 nt, Human
uccacauuucccccuagc

SEQ ID NO: 1415646 - RNA, 19 nt, Human
acgaaccuacaguuuuaac

SEQ ID NO: 1415647 - RNA, 18 nt, Human
uccagggaggcugguccu

SEQ ID NO: 1415648 - RNA, 22 nt, Human
uccagggaggcugguccuaugg

SEQ ID NO: 1415649 - RNA, 17 nt, Human
uccagggaggcuggucc

SEQ ID NO: 1415650 - RNA, 14 nt, Human
uccagggaggcugg

SEQ ID NO: 1415651 - RNA, 13 nt, Human
uccagggacagca

SEQ ID NO: 1415652 - RNA, 14 nt, Human
uccagggacagcaa

SEQ ID NO: 1415653 - RNA, 12 nt, Human
uccagggacagc

SEQ ID NO: 1415654 - RNA, 23 nt, Human
uccagggacagaggccccagccu

SEQ ID NO: 1415655 - RNA, 21 nt, Human
uccagggacagaggccccagc

SEQ ID NO: 1415656 - RNA, 19 nt, Human
uccagggacagaggcccca

SEQ ID NO: 1415657 - RNA, 15 nt, Human
uccagggacagaggc

SEQ ID NO: 1415658 - RNA, 14 nt, Human
uccagggacagagg

SEQ ID NO: 1415659 - RNA, 14 nt, Human
acgaaggagcccau

SEQ ID NO: 1415660 - RNA, 13 nt, Human
acgaaggagccca

SEQ ID NO: 1415661 - RNA, 22 nt, Human
acgaauacuuuugcccuuugau

SEQ ID NO: 1415662 - RNA, 14 nt, Human
acgaauacuuuugc

SEQ ID NO: 1415663 - RNA, 22 nt, Human
uccacggagccacuccucugac

SEQ ID NO: 1415664 - RNA, 21 nt, Human
uccacggagccacuccucuga

SEQ ID NO: 1415665 - RNA, 20 nt, Human
uccacggagccacuccucug

SEQ ID NO: 1415666 - RNA, 15 nt, Human
uccacggagccacuc

SEQ ID NO: 1415667 - RNA, 14 nt, Human
uccacggagccacu

SEQ ID NO: 1415668 - RNA, 22 nt, Human
uccacgagcuguuuacuaggga

SEQ ID NO: 1415669 - RNA, 16 nt, Human
uccaggcugccguggg

SEQ ID NO: 1415670 - RNA, 21 nt, Human
acgaggggugucuugggcaga

SEQ ID NO: 1415671 - RNA, 20 nt, Human
acgaggggugucuugggcag

SEQ ID NO: 1415672 - RNA, 18 nt, Human
acgaggggugucuugggc

SEQ ID NO: 1415673 - RNA, 16 nt, Human
acgagggcuggcuggc

SEQ ID NO: 1415674 - RNA, 14 nt, Human
acgagggcuggcug

SEQ ID NO: 1415675 - RNA, 12 nt, Human
acgagggcuggc

SEQ ID NO: 1415676 - RNA, 11 nt, Human
acgagggcugg

SEQ ID NO: 1415677 - RNA, 20 nt, Human
acgagggcuggcuggccuca

SEQ ID NO: 1415678 - RNA, 12 nt, Human
acgacugucucc

SEQ ID NO: 1415679 - RNA, 13 nt, Human
acgacacugcagc

SEQ ID NO: 1415680 - RNA, 14 nt, Human
acgacacugcagcc

SEQ ID NO: 1415681 - RNA, 21 nt, Human
acgacacggucggggcaucug

SEQ ID NO: 1415682 - RNA, 18 nt, Human
acgcccuuuccuccucag

SEQ ID NO: 1415683 - RNA, 17 nt, Human
acgcccuuuccuccuca

SEQ ID NO: 1415684 - RNA, 21 nt, Human
acgcccuuuccuccucaggca

SEQ ID NO: 1415685 - RNA, 20 nt, Human
acgcccguccugccuguggc

SEQ ID NO: 1415686 - RNA, 19 nt, Human
acgcccguccugccugugg

SEQ ID NO: 1415687 - RNA, 18 nt, Human
acgcccguccugccugug

SEQ ID NO: 1415688 - RNA, 16 nt, Human
acgcccguccugccug

SEQ ID NO: 1415689 - RNA, 15 nt, Human
acgcccaggacccca

SEQ ID NO: 1415690 - RNA, 21 nt, Human
acggagccacuccucugacuc

SEQ ID NO: 1415691 - RNA, 12 nt, Human
acgcugcuguca

SEQ ID NO: 1415692 - RNA, 19 nt, Human
acggcaccugggcccuggg

SEQ ID NO: 1415693 - RNA, 14 nt, Human
acggauuuucaguu

SEQ ID NO: 1415694 - RNA, 15 nt, Human
acggauuuucaguua

SEQ ID NO: 1415695 - RNA, 12 nt, Human
acggauuccaaa

SEQ ID NO: 1415696 - RNA, 18 nt, Human
acggccagggagaagcuc

SEQ ID NO: 1415697 - RNA, 23 nt, Human
acggccagggagaagcuccucuc

SEQ ID NO: 1415698 - RNA, 17 nt, Human
acggccagggagaagcu

SEQ ID NO: 1415699 - RNA, 23 nt, Human
acggcaccugggcccuggggccu

SEQ ID NO: 1415700 - RNA, 21 nt, Human
acggcaccugggcccuggggc

SEQ ID NO: 1415701 - RNA, 20 nt, Human
acggcaccugggcccugggg

SEQ ID NO: 1415702 - RNA, 15 nt, Human
acggcagccacagcu

SEQ ID NO: 1415703 - RNA, 15 nt, Human
acgggugccagaagc

SEQ ID NO: 1415704 - RNA, 15 nt, Human
acgggguuucaccau

SEQ ID NO: 1415705 - RNA, 16 nt, Human
ucccaccuagcagcac

SEQ ID NO: 1415706 - RNA, 23 nt, Human
ucccaccgcccagcggcuugccu

SEQ ID NO: 1415707 - RNA, 24 nt, Human
ucccaccgcccagcggcuugccug

SEQ ID NO: 1415708 - RNA, 21 nt, Human
ucccacccucuuccuacuggu

SEQ ID NO: 1415709 - RNA, 15 nt, Human
ucccacccucuuccu

SEQ ID NO: 1415710 - RNA, 12 nt, Human
ucccacccucuu

SEQ ID NO: 1415711 - RNA, 23 nt, Human
ucccacccccacccccagcucaa

SEQ ID NO: 1415712 - RNA, 22 nt, Human
ucccacccccacccccagcuca

SEQ ID NO: 1415713 - RNA, 23 nt, Human
ucccaccccaaccugcucuccuc

SEQ ID NO: 1415714 - RNA, 21 nt, Human
ucccaccccaaccugcucucc

SEQ ID NO: 1415715 - RNA, 20 nt, Human
ucccaccccaaccugcucuc

SEQ ID NO: 1415716 - RNA, 19 nt, Human
ucccacaugggcccaggcc

SEQ ID NO: 1415717 - RNA, 16 nt, Human
ucccacaugggcccag

SEQ ID NO: 1415718 - RNA, 13 nt, Human
ucccacaugggcc

SEQ ID NO: 1415719 - RNA, 23 nt, Human
ucccacaucccugggccugcugc

SEQ ID NO: 1415720 - RNA, 22 nt, Human
ucccacaucccugggccugcug

SEQ ID NO: 1415721 - RNA, 21 nt, Human
ucccacaucccugggccugcu

SEQ ID NO: 1415722 - RNA, 20 nt, Human
ucccacaucccugggccugc

SEQ ID NO: 1415723 - RNA, 18 nt, Human
ucccacaucccugggccu

SEQ ID NO: 1415724 - RNA, 17 nt, Human
ucccacaucccugggcc

SEQ ID NO: 1415725 - RNA, 16 nt, Human
ucccacaucccugggc

SEQ ID NO: 1415726 - RNA, 15 nt, Human
ucccacaucccuggg

SEQ ID NO: 1415727 - RNA, 14 nt, Human
ucccacaucccugg

SEQ ID NO: 1415728 - RNA, 13 nt, Human
ucccacaucccug

SEQ ID NO: 1415729 - RNA, 22 nt, Human
ucccacauuaaagaagaccuga

SEQ ID NO: 1415730 - RNA, 19 nt, Human
ucccacauuaaagaagacc

SEQ ID NO: 1415731 - RNA, 15 nt, Human
ucccacauuaaagaa

SEQ ID NO: 1415732 - RNA, 22 nt, Human
ucccacaugggcccaggccuca

SEQ ID NO: 1415733 - RNA, 17 nt, Human
ucccaccaggcugcuca

SEQ ID NO: 1415734 - RNA, 19 nt, Human
ucccaccccaaccugcucu

SEQ ID NO: 1415735 - RNA, 19 nt, Human
ucccacccaauucaaaaca

SEQ ID NO: 1415736 - RNA, 22 nt, Human
ucccaccaggcugcucagggcu

SEQ ID NO: 1415737 - RNA, 15 nt, Human
uccauuugcauuugu

SEQ ID NO: 1415738 - RNA, 12 nt, Human
uccauuugcauu

SEQ ID NO: 1415739 - RNA, 15 nt, Human
uccauuugcaaggga

SEQ ID NO: 1415740 - RNA, 16 nt, Human
uccauuugcauuuguu

SEQ ID NO: 1415741 - RNA, 21 nt, Human
ucccacagucccaucugcuuc

SEQ ID NO: 1415742 - RNA, 18 nt, Human
ucccacagguucaggcga

SEQ ID NO: 1415743 - RNA, 21 nt, Human
ucccacaggacauuucucuaa

SEQ ID NO: 1415744 - RNA, 18 nt, Human
ucccacaggacauuucuc

SEQ ID NO: 1415745 - RNA, 17 nt, Human
ucccacaggacauuucu

SEQ ID NO: 1415746 - RNA, 20 nt, Human
ucccaauucauccucacuca

SEQ ID NO: 1415747 - RNA, 15 nt, Human
ucccaauucacaucu

SEQ ID NO: 1415748 - RNA, 21 nt, Human
ucccaaagugcugggauuaca

SEQ ID NO: 1415749 - RNA, 23 nt, Human
ucccaauuucagacucccauucc

SEQ ID NO: 1415750 - RNA, 18 nt, Human
ucccaauuucagacuccc

SEQ ID NO: 1415751 - RNA, 17 nt, Human
ucccaauuucagacucc

SEQ ID NO: 1415752 - RNA, 16 nt, Human
ucccaauugagaaaaa

SEQ ID NO: 1415753 - RNA, 24 nt, Human
uccaucccuggcccccucccugga

SEQ ID NO: 1415754 - RNA, 23 nt, Human
uccaucccuggcccccucccugg

SEQ ID NO: 1415755 - RNA, 22 nt, Human
uccaucccuggcccccucccug

SEQ ID NO: 1415756 - RNA, 20 nt, Human
uccauccuacccccugugcc

SEQ ID NO: 1415757 - RNA, 20 nt, Human
uccaucccuggcccccuccc

SEQ ID NO: 1415758 - RNA, 15 nt, Human
uccaucccuggcccc

SEQ ID NO: 1415759 - RNA, 14 nt, Human
uccaucccuggccc

SEQ ID NO: 1415760 - RNA, 13 nt, Human
uccaucccuggcc

SEQ ID NO: 1415761 - RNA, 16 nt, Human
uccauccuacccccug

SEQ ID NO: 1415762 - RNA, 23 nt, Human
uccagucuuccugacacuuuaau

SEQ ID NO: 1415763 - RNA, 22 nt, Human
uccagucuuccugacacuuuaa

SEQ ID NO: 1415764 - RNA, 21 nt, Human
uccagucuuccugacacuuua

SEQ ID NO: 1415765 - RNA, 19 nt, Human
uccagucuuccugacacuu

SEQ ID NO: 1415766 - RNA, 15 nt, Human
uccagucuuccugac

SEQ ID NO: 1415767 - RNA, 21 nt, Human
acggccuuucuagccuggcua

SEQ ID NO: 1415768 - RNA, 14 nt, Human
acggccuuucuagc

SEQ ID NO: 1415769 - RNA, 14 nt, Human
uccaugacaucaag

SEQ ID NO: 1415770 - RNA, 13 nt, Human
uccaucuuuacaa

SEQ ID NO: 1415771 - RNA, 22 nt, Human
uccaucugguagaagggaaagc

SEQ ID NO: 1415772 - RNA, 21 nt, Human
uccaucugguagaagggaaag

SEQ ID NO: 1415773 - RNA, 20 nt, Human
uccaugacugcuugcccuaa

SEQ ID NO: 1415774 - RNA, 19 nt, Human
uccaugacugcuugcccua

SEQ ID NO: 1415775 - RNA, 15 nt, Human
uccaugacugcuugc

SEQ ID NO: 1415776 - RNA, 13 nt, Human
uccaugacugcuu

SEQ ID NO: 1415777 - RNA, 15 nt, Human
uccaugacaucaaga

SEQ ID NO: 1415778 - RNA, 20 nt, Human
uccaugaccuaguuuuccau

SEQ ID NO: 1415779 - RNA, 19 nt, Human
uccauugguccaagauucc

SEQ ID NO: 1415780 - RNA, 18 nt, Human
uccauugguccaagauuc

SEQ ID NO: 1415781 - RNA, 16 nt, Human
uccauugguccaagau

SEQ ID NO: 1415782 - RNA, 15 nt, Human
uccauugguccaaga

SEQ ID NO: 1415783 - RNA, 16 nt, Human
uccauuggaucucauu

SEQ ID NO: 1415784 - RNA, 22 nt, Human
uccaugacugcuugcccuaagc

SEQ ID NO: 1415785 - RNA, 23 nt, Human
uccaugacugcuugcccuaagca

SEQ ID NO: 1415786 - RNA, 22 nt, Human
uccauugguccaagauuccgga

SEQ ID NO: 1415787 - RNA, 20 nt, Human
uccccucugcugcugucccu

SEQ ID NO: 1415788 - RNA, 17 nt, Human
uccccucugcugcuguc

SEQ ID NO: 1415789 - RNA, 15 nt, Human
uccccucugcugcug

SEQ ID NO: 1415790 - RNA, 14 nt, Human
uccccucugcugcu

SEQ ID NO: 1415791 - RNA, 13 nt, Human
uccccucugcugc

SEQ ID NO: 1415792 - RNA, 15 nt, Human
uccccuccuucccaa

SEQ ID NO: 1415793 - RNA, 22 nt, Human
uccccuaaagccucaaaacaaa

SEQ ID NO: 1415794 - RNA, 15 nt, Human
uccccuaaagccuca

SEQ ID NO: 1415795 - RNA, 16 nt, Human
uccccggacucaagcc

SEQ ID NO: 1415796 - RNA, 18 nt, Human
acucaaguugauuagaaa

SEQ ID NO: 1415797 - RNA, 13 nt, Human
acuagaugaugga

SEQ ID NO: 1415798 - RNA, 21 nt, Human
acuagagucugaacagcugua

SEQ ID NO: 1415799 - RNA, 20 nt, Human
acuagagucugaacagcugu

SEQ ID NO: 1415800 - RNA, 24 nt, Human
acuaugcauggugccccaggacca

SEQ ID NO: 1415801 - RNA, 23 nt, Human
acuaugcauggugccccaggacc

SEQ ID NO: 1415802 - RNA, 22 nt, Human
acuaugcauggugccccaggac

SEQ ID NO: 1415803 - RNA, 21 nt, Human
acuaugcauggugccccagga

SEQ ID NO: 1415804 - RNA, 20 nt, Human
acuaugcauggugccccagg

SEQ ID NO: 1415805 - RNA, 19 nt, Human
acuaugauuuaauuugaaa

SEQ ID NO: 1415806 - RNA, 15 nt, Human
acuaugauuauuaac

SEQ ID NO: 1415807 - RNA, 14 nt, Human
acuauguggaugug

SEQ ID NO: 1415808 - RNA, 11 nt, Human
acuauguaaac

SEQ ID NO: 1415809 - RNA, 12 nt, Human
acuauguaaacu

SEQ ID NO: 1415810 - RNA, 14 nt, Human
acuauguaacaugu

SEQ ID NO: 1415811 - RNA, 14 nt, Human
acuauguaaacuac

SEQ ID NO: 1415812 - RNA, 16 nt, Human
acuauguaaacuacuu

SEQ ID NO: 1415813 - RNA, 22 nt, Human
ucccccagcaaagcccccagag

SEQ ID NO: 1415814 - RNA, 21 nt, Human
ucccccagcaaagcccccaga

SEQ ID NO: 1415815 - RNA, 12 nt, Human
ucccccacuuuc

SEQ ID NO: 1415816 - RNA, 10 nt, Human
ucccccaaga

SEQ ID NO: 1415817 - RNA, 14 nt, Human
uccccaucuucuaa

SEQ ID NO: 1415818 - RNA, 14 nt, Human
uccccaucucaggc

SEQ ID NO: 1415819 - RNA, 13 nt, Human
uccccaucucagg

SEQ ID NO: 1415820 - RNA, 22 nt, Human
uccccaucguugcccccauuuc

SEQ ID NO: 1415821 - RNA, 18 nt, Human
uccccaucguugccccca

SEQ ID NO: 1415822 - RNA, 23 nt, Human
uccccauacuccuaugaucugag

SEQ ID NO: 1415823 - RNA, 15 nt, Human
uccccaguaaaauug

SEQ ID NO: 1415824 - RNA, 19 nt, Human
uccccacuguaucuaggca

SEQ ID NO: 1415825 - RNA, 15 nt, Human
uccccacuguaucua

SEQ ID NO: 1415826 - RNA, 14 nt, Human
uccccaguaaaauu

SEQ ID NO: 1415827 - RNA, 15 nt, Human
uccccacuggagcag

SEQ ID NO: 1415828 - RNA, 14 nt, Human
uccccacuggagca

SEQ ID NO: 1415829 - RNA, 13 nt, Human
uccccacuggagc

SEQ ID NO: 1415830 - RNA, 12 nt, Human
uccccacuggag

SEQ ID NO: 1415831 - RNA, 18 nt, Human
uccccacucugcucugau

SEQ ID NO: 1415832 - RNA, 20 nt, Human
uccccacucugcucugaugc

SEQ ID NO: 1415833 - RNA, 17 nt, Human
uccccacucugcucuga

SEQ ID NO: 1415834 - RNA, 16 nt, Human
uccccacucugcucug

SEQ ID NO: 1415835 - RNA, 12 nt, Human
acguacacauuu

SEQ ID NO: 1415836 - RNA, 13 nt, Human
acguacacauuuu

SEQ ID NO: 1415837 - RNA, 14 nt, Human
acguacacauuuua

SEQ ID NO: 1415838 - RNA, 23 nt, Human
ucccccagcaaagcccccagagc

SEQ ID NO: 1415839 - RNA, 22 nt, Human
acuaccuguaaugacaggccug

SEQ ID NO: 1415840 - RNA, 18 nt, Human
acuaccuugguuccccca

SEQ ID NO: 1415841 - RNA, 17 nt, Human
acuaccuugaaaauaag

SEQ ID NO: 1415842 - RNA, 19 nt, Human
acuacuaauagaauaaagg

SEQ ID NO: 1415843 - RNA, 13 nt, Human
acuacgccuggcu

SEQ ID NO: 1415844 - RNA, 16 nt, Human
acuacuuugcugcuaa

SEQ ID NO: 1415845 - RNA, 14 nt, Human
acuacuagggaaau

SEQ ID NO: 1415846 - RNA, 12 nt, Human
acuacuuuauaa

SEQ ID NO: 1415847 - RNA, 17 nt, Human
acuacuugggagcaccg

SEQ ID NO: 1415848 - RNA, 23 nt, Human
acuacuucuuuuuucaaaagaaa

SEQ ID NO: 1415849 - RNA, 20 nt, Human
acuagacaccaaaguucuaa

SEQ ID NO: 1415850 - RNA, 18 nt, Human
acuagacaccaaaguucu

SEQ ID NO: 1415851 - RNA, 17 nt, Human
acuagacaccaaaguuc

SEQ ID NO: 1415852 - RNA, 21 nt, Human
acuagacaagccagaacuuga

SEQ ID NO: 1415853 - RNA, 17 nt, Human
acuagacaagccagaac

SEQ ID NO: 1415854 - RNA, 15 nt, Human
acuagacaagccaga

SEQ ID NO: 1415855 - RNA, 12 nt, Human
acuagacaagcc

SEQ ID NO: 1415856 - RNA, 15 nt, Human
acuagagucugaaca

SEQ ID NO: 1415857 - RNA, 21 nt, Human
acuagaggugagaaauuuaaa

SEQ ID NO: 1415858 - RNA, 18 nt, Human
acuagaggugagaaauuu

SEQ ID NO: 1415859 - RNA, 14 nt, Human
acuagaggugagaa

SEQ ID NO: 1415860 - RNA, 20 nt, Human
acuagaguuuagcuggaaaa

SEQ ID NO: 1415861 - RNA, 23 nt, Human
ucccucuuuggcuccccuguacc

SEQ ID NO: 1415862 - RNA, 18 nt, Human
ucccucuuuggcuccccu

SEQ ID NO: 1415863 - RNA, 19 nt, Human
ucccugacucauucugaag

SEQ ID NO: 1415864 - RNA, 16 nt, Human
ucccugacucauucug

SEQ ID NO: 1415865 - RNA, 14 nt, Human
ucccugacucauuc

SEQ ID NO: 1415866 - RNA, 22 nt, Human
ucccugacucauucugaaggag

SEQ ID NO: 1415867 - RNA, 16 nt, Human
ucccucagacuggggc

SEQ ID NO: 1415868 - RNA, 14 nt, Human
ucccucagacuggg

SEQ ID NO: 1415869 - RNA, 12 nt, Human
ucccucagacug

SEQ ID NO: 1415870 - RNA, 18 nt, Human
ucccucacucgucucccc

SEQ ID NO: 1415871 - RNA, 22 nt, Human
ucccucaccuuggcaccagaca

SEQ ID NO: 1415872 - RNA, 21 nt, Human
ucccucacucgucucccccaa

SEQ ID NO: 1415873 - RNA, 22 nt, Human
ucccucacucgucucccccaac

SEQ ID NO: 1415874 - RNA, 20 nt, Human
ucccucacucgucuccccca

SEQ ID NO: 1415875 - RNA, 19 nt, Human
ucccucacucgucuccccc

SEQ ID NO: 1415876 - RNA, 14 nt, Human
ucccucccccuugu

SEQ ID NO: 1415877 - RNA, 12 nt, Human
ucccucccccuu

SEQ ID NO: 1415878 - RNA, 21 nt, Human
ucccucccccccaugcacugu

SEQ ID NO: 1415879 - RNA, 16 nt, Human
ucccucccccccaugc

SEQ ID NO: 1415880 - RNA, 14 nt, Human
ucccucccccccau

SEQ ID NO: 1415881 - RNA, 12 nt, Human
ucccuccccccc

SEQ ID NO: 1415882 - RNA, 23 nt, Human
ucccucccagaggagccaccagu

SEQ ID NO: 1415883 - RNA, 22 nt, Human
ucccucuuccuucccugcugug

SEQ ID NO: 1415884 - RNA, 21 nt, Human
ucccucuuccuucccugcugu

SEQ ID NO: 1415885 - RNA, 23 nt, Human
ucccucuuccuucccugcuguga

SEQ ID NO: 1415886 - RNA, 23 nt, Human
acucagaagccugggggccuggc

SEQ ID NO: 1415887 - RNA, 22 nt, Human
acucagaagccugggggccugg

SEQ ID NO: 1415888 - RNA, 21 nt, Human
acucagaagccugggggccug

SEQ ID NO: 1415889 - RNA, 14 nt, Human
acucagaauucucu

SEQ ID NO: 1415890 - RNA, 21 nt, Human
acucagaauucucuaguuuga

SEQ ID NO: 1415891 - RNA, 22 nt, Human
acucagaauucucuaguuugau

SEQ ID NO: 1415892 - RNA, 17 nt, Human
acucagaagccuggggg

SEQ ID NO: 1415893 - RNA, 16 nt, Human
acucagaagccugggg

SEQ ID NO: 1415894 - RNA, 15 nt, Human
acucagaagccuggg

SEQ ID NO: 1415895 - RNA, 14 nt, Human
acucagaagccugg

SEQ ID NO: 1415896 - RNA, 13 nt, Human
acucagaagccug

SEQ ID NO: 1415897 - RNA, 22 nt, Human
acucaccugcacuaacagagug

SEQ ID NO: 1415898 - RNA, 13 nt, Human
acucagaaauuca

SEQ ID NO: 1415899 - RNA, 20 nt, Human
acucagagacaugcagagau

SEQ ID NO: 1415900 - RNA, 17 nt, Human
acucagagacaugcaga

SEQ ID NO: 1415901 - RNA, 14 nt, Human
acucagagacaugc

SEQ ID NO: 1415902 - RNA, 12 nt, Human
acucagaccuga

SEQ ID NO: 1415903 - RNA, 18 nt, Human
acucagacauuggcaccu

SEQ ID NO: 1415904 - RNA, 22 nt, Human
acucagauaagguaaaaugcca

SEQ ID NO: 1415905 - RNA, 23 nt, Human
acucaucuagguaaauuacaguu

SEQ ID NO: 1415906 - RNA, 19 nt, Human
acucauuuuucaugauaau

SEQ ID NO: 1415907 - RNA, 19 nt, Human
acuccaaacagaccccugu

SEQ ID NO: 1415908 - RNA, 22 nt, Human
acuccaaacagaccccuguuca

SEQ ID NO: 1415909 - RNA, 22 nt, Human
acuccaaaauguuggucauuuu

SEQ ID NO: 1415910 - RNA, 13 nt, Human
acuccaaaauguu

SEQ ID NO: 1415911 - RNA, 20 nt, Human
acucauuuuucaugauaaug

SEQ ID NO: 1415912 - RNA, 23 nt, Human
acucauuuuucaugauaaugaac

SEQ ID NO: 1415913 - RNA, 21 nt, Human
acuccaaacugacucuuaaga

SEQ ID NO: 1415914 - RNA, 13 nt, Human
uccuaccgucuuu

SEQ ID NO: 1415915 - RNA, 13 nt, Human
acuccuuccugcc

SEQ ID NO: 1415916 - RNA, 23 nt, Human
acuccuugauuuuagccuucucu

SEQ ID NO: 1415917 - RNA, 11 nt, Human
acuccuuccug

SEQ ID NO: 1415918 - RNA, 13 nt, Human
acuccuuccagcu

SEQ ID NO: 1415919 - RNA, 12 nt, Human
acuccuuccagc

SEQ ID NO: 1415920 - RNA, 22 nt, Human
acuccuucaacaauucuaaaau

SEQ ID NO: 1415921 - RNA, 20 nt, Human
acuccuucaacaauucuaaa

SEQ ID NO: 1415922 - RNA, 19 nt, Human
acuccugugggagccucgc

SEQ ID NO: 1415923 - RNA, 20 nt, Human
acuccugugggagccucgca

SEQ ID NO: 1415924 - RNA, 18 nt, Human
acuccugugggagccucg

SEQ ID NO: 1415925 - RNA, 17 nt, Human
acuccugugggagccuc

SEQ ID NO: 1415926 - RNA, 16 nt, Human
acuccugugggagccu

SEQ ID NO: 1415927 - RNA, 15 nt, Human
acuccugugggagcc

SEQ ID NO: 1415928 - RNA, 15 nt, Human
acucgaaucugugug

SEQ ID NO: 1415929 - RNA, 23 nt, Human
acuccuuuuaaagaaaaaaauug

SEQ ID NO: 1415930 - RNA, 14 nt, Human
acuccuuuuaaaga

SEQ ID NO: 1415931 - RNA, 14 nt, Human
acuccuuucucauc

SEQ ID NO: 1415932 - RNA, 12 nt, Human
acuccuuccugc

SEQ ID NO: 1415933 - RNA, 15 nt, Human
uccuaccucaaaauu

SEQ ID NO: 1415934 - RNA, 15 nt, Human
uccguguccaccccc

SEQ ID NO: 1415935 - RNA, 19 nt, Human
uccguuagcuccuguggcc

SEQ ID NO: 1415936 - RNA, 17 nt, Human
uccguuagcuccugugg

SEQ ID NO: 1415937 - RNA, 16 nt, Human
uccguuagcuccugug

SEQ ID NO: 1415938 - RNA, 15 nt, Human
uccguuagcuccugu

SEQ ID NO: 1415939 - RNA, 16 nt, Human
uccgugugggagaccg

SEQ ID NO: 1415940 - RNA, 16 nt, Human
uccguguccaccccca

SEQ ID NO: 1415941 - RNA, 17 nt, Human
uccgugggacggugccc

SEQ ID NO: 1415942 - RNA, 15 nt, Human
uccguuaaaauacca

SEQ ID NO: 1415943 - RNA, 23 nt, Human
uccgugggacggugcccaagcca

SEQ ID NO: 1415944 - RNA, 16 nt, Human
uccgugggacggugcc

SEQ ID NO: 1415945 - RNA, 13 nt, Human
uccguuaaaauac

SEQ ID NO: 1415946 - RNA, 14 nt, Human
uccgugcuuaacca

SEQ ID NO: 1415947 - RNA, 21 nt, Human
uccgugcuuaaccaaagaagc

SEQ ID NO: 1415948 - RNA, 13 nt, Human
uccggcauggaca

SEQ ID NO: 1415949 - RNA, 19 nt, Human
uccggcauggacaauggac

SEQ ID NO: 1415950 - RNA, 19 nt, Human
uccggcagcuucugccccc

SEQ ID NO: 1415951 - RNA, 13 nt, Human
acuccaccuuccc

SEQ ID NO: 1415952 - RNA, 18 nt, Human
acuccagaaagugacaag

SEQ ID NO: 1415953 - RNA, 14 nt, Human
acuccagaaaguga

SEQ ID NO: 1415954 - RNA, 15 nt, Human
acucuucaaaugccu

SEQ ID NO: 1415955 - RNA, 16 nt, Human
acucugcuucucugac

SEQ ID NO: 1415956 - RNA, 14 nt, Human
acucugcuguuuga

SEQ ID NO: 1415957 - RNA, 15 nt, Human
acucugcuucucuga

SEQ ID NO: 1415958 - RNA, 14 nt, Human
acucugcuucucug

SEQ ID NO: 1415959 - RNA, 12 nt, Human
acucugcuucuc

SEQ ID NO: 1415960 - RNA, 16 nt, Human
acucugcucugaugca

SEQ ID NO: 1415961 - RNA, 15 nt, Human
acucugcucugaugc

SEQ ID NO: 1415962 - RNA, 14 nt, Human
acucugcucugaug

SEQ ID NO: 1415963 - RNA, 13 nt, Human
acucugcucugau

SEQ ID NO: 1415964 - RNA, 12 nt, Human
acucugcucuga

SEQ ID NO: 1415965 - RNA, 14 nt, Human
acucuucccucucu

SEQ ID NO: 1415966 - RNA, 15 nt, Human
acucuucacucuuca

SEQ ID NO: 1415967 - RNA, 20 nt, Human
acucuucaaggucugcuuuu

SEQ ID NO: 1415968 - RNA, 16 nt, Human
acucuucacucuucaa

SEQ ID NO: 1415969 - RNA, 19 nt, Human
acucuucaaggucugcuuu

SEQ ID NO: 1415970 - RNA, 23 nt, Human
acucuucugagcaccuacuuaca

SEQ ID NO: 1415971 - RNA, 16 nt, Human
acucuucuugaaauuu

SEQ ID NO: 1415972 - RNA, 15 nt, Human
acucuucuugaaauu

SEQ ID NO: 1415973 - RNA, 13 nt, Human
acucuugaaaaau

SEQ ID NO: 1415974 - RNA, 16 nt, Human
acucucagucucugag

SEQ ID NO: 1415975 - RNA, 14 nt, Human
acucucagucucug

SEQ ID NO: 1415976 - RNA, 13 nt, Human
acucucagucucu

SEQ ID NO: 1415977 - RNA, 22 nt, Human
acucucaggaccaaagcuuuca

SEQ ID NO: 1415978 - RNA, 18 nt, Human
acucucagucucugagca

SEQ ID NO: 1415979 - RNA, 17 nt, Human
acucucagucucugagc

SEQ ID NO: 1415980 - RNA, 11 nt, Human
acucugcucug

SEQ ID NO: 1415981 - RNA, 16 nt, Human
acucgguuucuccaaa

SEQ ID NO: 1415982 - RNA, 14 nt, Human
acucgguuucucca

SEQ ID NO: 1415983 - RNA, 12 nt, Human
acucgguuucuc

SEQ ID NO: 1415984 - RNA, 15 nt, Human
acucgucucccccaa

SEQ ID NO: 1415985 - RNA, 23 nt, Human
acucgugucuggcacagccuggc

SEQ ID NO: 1415986 - RNA, 22 nt, Human
acucgugucuggcacagccugg

SEQ ID NO: 1415987 - RNA, 14 nt, Human
acucuauucuuuaa

SEQ ID NO: 1415988 - RNA, 15 nt, Human
acucuauucuuuaac

SEQ ID NO: 1415989 - RNA, 19 nt, Human
acucguauagcaugcaucu

SEQ ID NO: 1415990 - RNA, 15 nt, Human
acucguguguuucua

SEQ ID NO: 1415991 - RNA, 13 nt, Human
acucuauucuuua

SEQ ID NO: 1415992 - RNA, 23 nt, Human
acucguguguuucuauuuuuuga

SEQ ID NO: 1415993 - RNA, 21 nt, Human
acucuugaaaaaugcauguug

SEQ ID NO: 1415994 - RNA, 14 nt, Human
acucuugaaaaaug

SEQ ID NO: 1415995 - RNA, 19 nt, Human
acucuugaaaaaugcaugu

SEQ ID NO: 1415996 - RNA, 14 nt, Human
uccucccuuccucc

SEQ ID NO: 1415997 - RNA, 15 nt, Human
uccucccuguaacuu

SEQ ID NO: 1415998 - RNA, 14 nt, Human
uccucccuguaacu

SEQ ID NO: 1415999 - RNA, 12 nt, Human
uccucccuguaa

SEQ ID NO: 1416000 - RNA, 11 nt, Human
uccucccugua

SEQ ID NO: 1416001 - RNA, 21 nt, Human
uccuccccacuuguccgcugg

SEQ ID NO: 1416002 - RNA, 19 nt, Human
acucuucuugaaauuuuaa

SEQ ID NO: 1416003 - RNA, 15 nt, Human
uccucugacucaggg

SEQ ID NO: 1416004 - RNA, 17 nt, Human
uccucucuuccucuucc

SEQ ID NO: 1416005 - RNA, 14 nt, Human
uccucucuuccucu

SEQ ID NO: 1416006 - RNA, 17 nt, Human
uccucugacucagggcu

SEQ ID NO: 1416007 - RNA, 16 nt, Human
uccucugacucagggc

SEQ ID NO: 1416008 - RNA, 16 nt, Human
uccucucucuguguua

SEQ ID NO: 1416009 - RNA, 17 nt, Human
uccucucgcggcccuca

SEQ ID NO: 1416010 - RNA, 19 nt, Human
uccucucgcggcccucagu

SEQ ID NO: 1416011 - RNA, 15 nt, Human
uccucucgcggcccu

SEQ ID NO: 1416012 - RNA, 17 nt, Human
uccucuccuagccccug

SEQ ID NO: 1416013 - RNA, 13 nt, Human
uccucuccugucu

SEQ ID NO: 1416014 - RNA, 23 nt, Human
uccucuccccagcccagagacau

SEQ ID NO: 1416015 - RNA, 21 nt, Human
uccucuccccagcccagagac

SEQ ID NO: 1416016 - RNA, 17 nt, Human
uccucuccccaugaugu

SEQ ID NO: 1416017 - RNA, 21 nt, Human
uccugaccaguugcagucacu

SEQ ID NO: 1416018 - RNA, 22 nt, Human
uccugaccaguugcagucacuc

SEQ ID NO: 1416019 - RNA, 14 nt, Human
uccugaccaguugc

SEQ ID NO: 1416020 - RNA, 11 nt, Human
uccugaccagc

SEQ ID NO: 1416021 - RNA, 17 nt, Human
uccugaaggccugaggu

SEQ ID NO: 1416022 - RNA, 22 nt, Human
uccugaauccaaacuaauccau

SEQ ID NO: 1416023 - RNA, 14 nt, Human
acucuuucuguaua

SEQ ID NO: 1416024 - RNA, 20 nt, Human
uccugaccugucucaccaug

SEQ ID NO: 1416025 - RNA, 15 nt, Human
uccugaccugucuca

SEQ ID NO: 1416026 - RNA, 20 nt, Human
uccugaccuccgccauccac

SEQ ID NO: 1416027 - RNA, 16 nt, Human
uccugaccuccgccau

SEQ ID NO: 1416028 - RNA, 15 nt, Human
uccugaccuccgcca

SEQ ID NO: 1416029 - RNA, 16 nt, Human
uccugaccucagguga

SEQ ID NO: 1416030 - RNA, 15 nt, Human
uccugaccucaggca

SEQ ID NO: 1416031 - RNA, 21 nt, Human
uccugaccccaaguuauccac

SEQ ID NO: 1416032 - RNA, 14 nt, Human
acucuuuggucguu

SEQ ID NO: 1416033 - RNA, 15 nt, Human
acucuuugcugcugc

SEQ ID NO: 1416034 - RNA, 12 nt, Human
acucuuugagag

SEQ ID NO: 1416035 - RNA, 18 nt, Human
acucuuugagaaacaaca

SEQ ID NO: 1416036 - RNA, 16 nt, Human
acucuuugagaaacaa

SEQ ID NO: 1416037 - RNA, 22 nt, Human
acucuuucuguauauacuuuuu

SEQ ID NO: 1416038 - RNA, 21 nt, Human
acucuuucuguauauacuuuu

SEQ ID NO: 1416039 - RNA, 13 nt, Human
acucuuugagaaa

SEQ ID NO: 1416040 - RNA, 19 nt, Human
acucuuucuuucaauaaaa

SEQ ID NO: 1416041 - RNA, 19 nt, Human
acugaaaaugugcuauacu

SEQ ID NO: 1416042 - RNA, 17 nt, Human
acugaaaauuauuuaaa

SEQ ID NO: 1416043 - RNA, 15 nt, Human
acugaaaaugugcua

SEQ ID NO: 1416044 - RNA, 20 nt, Human
acugaaaaggaggggucugg

SEQ ID NO: 1416045 - RNA, 18 nt, Human
acugaaaauauuguuuua

SEQ ID NO: 1416046 - RNA, 16 nt, Human
uccucugcacucccac

SEQ ID NO: 1416047 - RNA, 12 nt, Human
uccucugcacuc

SEQ ID NO: 1416048 - RNA, 18 nt, Human
uccucugacucagggcuc

SEQ ID NO: 1416049 - RNA, 22 nt, Human
uccucugcccgggagcucagga

SEQ ID NO: 1416050 - RNA, 16 nt, Human
uccucugcccgggagc

SEQ ID NO: 1416051 - RNA, 21 nt, Human
uccucugcugaccugcugacc

SEQ ID NO: 1416052 - RNA, 16 nt, Human
uccucuuucagcuccu

SEQ ID NO: 1416053 - RNA, 15 nt, Human
uccucuuucagcucc

SEQ ID NO: 1416054 - RNA, 14 nt, Human
uccucuuucagcuc

SEQ ID NO: 1416055 - RNA, 13 nt, Human
uccucuuucagcu

SEQ ID NO: 1416056 - RNA, 12 nt, Human
uccucuuucagc

SEQ ID NO: 1416057 - RNA, 15 nt, Human
uccucuuuagaguua

SEQ ID NO: 1416058 - RNA, 20 nt, Human
uccucuuuagaguuagacug

SEQ ID NO: 1416059 - RNA, 21 nt, Human
uccucuuuagaguuagacugu

SEQ ID NO: 1416060 - RNA, 23 nt, Human
uccugaagaaccaguccccccac

SEQ ID NO: 1416061 - RNA, 18 nt, Human
uccugaagaaccaguccc

SEQ ID NO: 1416062 - RNA, 16 nt, Human
uccugaagaaccaguc

SEQ ID NO: 1416063 - RNA, 14 nt, Human
uccugaagaaccag

SEQ ID NO: 1416064 - RNA, 13 nt, Human
uccugaagaacca

SEQ ID NO: 1416065 - RNA, 18 nt, Human
uccucuuuuccuucccaa

SEQ ID NO: 1416066 - RNA, 22 nt, Human
uccugaaaacccuugccaugug

SEQ ID NO: 1416067 - RNA, 21 nt, Human
uccugaaaacccuugccaugu

SEQ ID NO: 1416068 - RNA, 16 nt, Human
ucaguauuauauguac

SEQ ID NO: 1416069 - RNA, 15 nt, Human
ucaguauuauaugua

SEQ ID NO: 1416070 - RNA, 14 nt, Human
ucaguauuauaugu

SEQ ID NO: 1416071 - RNA, 15 nt, Human
ucaguagucccugca

SEQ ID NO: 1416072 - RNA, 13 nt, Human
ucaguagucagac

SEQ ID NO: 1416073 - RNA, 13 nt, Human
ucagugcugugcu

SEQ ID NO: 1416074 - RNA, 19 nt, Human
ucagugcucccucacaugu

SEQ ID NO: 1416075 - RNA, 13 nt, Human
ucagugcucccuc

SEQ ID NO: 1416076 - RNA, 12 nt, Human
ucagugcucccu

SEQ ID NO: 1416077 - RNA, 22 nt, Human
ucagugcugugcugugcuaugg

SEQ ID NO: 1416078 - RNA, 16 nt, Human
ucagugcugugcugug

SEQ ID NO: 1416079 - RNA, 14 nt, Human
ucagugcugugcug

SEQ ID NO: 1416080 - RNA, 17 nt, Human
ucaguuugugugucuua

SEQ ID NO: 1416081 - RNA, 16 nt, Human
ucaguuugugugucuu

SEQ ID NO: 1416082 - RNA, 15 nt, Human
ucaguuugugugucu

SEQ ID NO: 1416083 - RNA, 19 nt, Human
ucaguuucauaaaaggaga

SEQ ID NO: 1416084 - RNA, 14 nt, Human
ucaguuucauaaaa

SEQ ID NO: 1416085 - RNA, 19 nt, Human
ucaguuucacagaaaauaa

SEQ ID NO: 1416086 - RNA, 18 nt, Human
ucaguuucacagaaaaua

SEQ ID NO: 1416087 - RNA, 17 nt, Human
ucaguuucacagaaaau

SEQ ID NO: 1416088 - RNA, 19 nt, Human
ucaguuuaaaagcacgaca

SEQ ID NO: 1416089 - RNA, 15 nt, Human
ucaguuguucuuuuu

SEQ ID NO: 1416090 - RNA, 20 nt, Human
ucauaaguauuucaaauugg

SEQ ID NO: 1416091 - RNA, 15 nt, Human
ucauaaguauuucaa

SEQ ID NO: 1416092 - RNA, 20 nt, Human
ucauaaguauuaugucucuu

SEQ ID NO: 1416093 - RNA, 15 nt, Human
ucauaaggcuucaaa

SEQ ID NO: 1416094 - RNA, 14 nt, Human
ucauaaggcuucaa

SEQ ID NO: 1416095 - RNA, 24 nt, Human
ucauaaagcaggcagaacucaucu

SEQ ID NO: 1416096 - RNA, 18 nt, Human
ucauaaauaaaguuuguu

SEQ ID NO: 1416097 - RNA, 23 nt, Human
ucaguaggugcccagaauaaguu

SEQ ID NO: 1416098 - RNA, 17 nt, Human
ucaguagauugcagaaa

SEQ ID NO: 1416099 - RNA, 19 nt, Human
ucaguacccucucagcucc

SEQ ID NO: 1416100 - RNA, 17 nt, Human
ucaguacccucucagcu

SEQ ID NO: 1416101 - RNA, 16 nt, Human
ucaguacccucucagc

SEQ ID NO: 1416102 - RNA, 18 nt, Human
ucaguaauuuguuuaaaa

SEQ ID NO: 1416103 - RNA, 18 nt, Human
ucaguaauuugaggacaa

SEQ ID NO: 1416104 - RNA, 17 nt, Human
ucaguaauuugaggaca

SEQ ID NO: 1416105 - RNA, 15 nt, Human
ucaguaauuugagga

SEQ ID NO: 1416106 - RNA, 14 nt, Human
ucaguaauuugagg

SEQ ID NO: 1416107 - RNA, 20 nt, Human
ucaguaauuuagaaaucauu

SEQ ID NO: 1416108 - RNA, 19 nt, Human
ucaguaauuuagaaaucau

SEQ ID NO: 1416109 - RNA, 18 nt, Human
ucaguaauuuagaaauca

SEQ ID NO: 1416110 - RNA, 12 nt, Human
ucaguaagaggu

SEQ ID NO: 1416111 - RNA, 18 nt, Human
ucaguaaauaacuggaaa

SEQ ID NO: 1416112 - RNA, 17 nt, Human
ucaguaaauaacuggaa

SEQ ID NO: 1416113 - RNA, 22 nt, Human
ucagguuuuuccuuuuuuugua

SEQ ID NO: 1416114 - RNA, 14 nt, Human
ucagguguugccaa

SEQ ID NO: 1416115 - RNA, 17 nt, Human
acccuugguuccuaacu

SEQ ID NO: 1416116 - RNA, 20 nt, Human
acccuugggccagaaguacc

SEQ ID NO: 1416117 - RNA, 18 nt, Human
acccuugggccagaagua

SEQ ID NO: 1416118 - RNA, 17 nt, Human
acccuugggccagaagu

SEQ ID NO: 1416119 - RNA, 16 nt, Human
acccuugggccagaag

SEQ ID NO: 1416120 - RNA, 18 nt, Human
acccugcucauccacucu

SEQ ID NO: 1416121 - RNA, 23 nt, Human
acccugccucucccaggcagggg

SEQ ID NO: 1416122 - RNA, 17 nt, Human
acccuggaaaaugaauc

SEQ ID NO: 1416123 - RNA, 16 nt, Human
acccuugcugugaauu

SEQ ID NO: 1416124 - RNA, 21 nt, Human
accgaacugauguaaguaaac

SEQ ID NO: 1416125 - RNA, 20 nt, Human
ucaggggucugagcuccagc

SEQ ID NO: 1416126 - RNA, 17 nt, Human
ucagggggcgccugugg

SEQ ID NO: 1416127 - RNA, 15 nt, Human
ucagguauaccucac

SEQ ID NO: 1416128 - RNA, 17 nt, Human
ucagguauaccucacuu

SEQ ID NO: 1416129 - RNA, 14 nt, Human
ucagguacuuguaa

SEQ ID NO: 1416130 - RNA, 23 nt, Human
acccgauuccaccaaaugugcuu

SEQ ID NO: 1416131 - RNA, 15 nt, Human
acccgccccacuccc

SEQ ID NO: 1416132 - RNA, 21 nt, Human
ucaggcaggggccuccauggg

SEQ ID NO: 1416133 - RNA, 17 nt, Human
ucaggcaggggccucca

SEQ ID NO: 1416134 - RNA, 16 nt, Human
ucaggcaggggccucc

SEQ ID NO: 1416135 - RNA, 13 nt, Human
ucaggcagcucaa

SEQ ID NO: 1416136 - RNA, 19 nt, Human
ucaggcacugggcaugagg

SEQ ID NO: 1416137 - RNA, 12 nt, Human
acccccagcacu

SEQ ID NO: 1416138 - RNA, 12 nt, Human
acccccagccug

SEQ ID NO: 1416139 - RNA, 17 nt, Human
ucaggccagagccaagg

SEQ ID NO: 1416140 - RNA, 14 nt, Human
ucaggccagagcca

SEQ ID NO: 1416141 - RNA, 18 nt, Human
acccugccuuaucuugca

SEQ ID NO: 1416142 - RNA, 14 nt, Human
acccugccuuaucu

SEQ ID NO: 1416143 - RNA, 20 nt, Human
acccugccucucccaggcag

SEQ ID NO: 1416144 - RNA, 16 nt, Human
acccugccucucccag

SEQ ID NO: 1416145 - RNA, 13 nt, Human
acccugccucucc

SEQ ID NO: 1416146 - RNA, 17 nt, Human
acccugccccagcuggg

SEQ ID NO: 1416147 - RNA, 23 nt, Human
acccugauuuaggagaagccagg

SEQ ID NO: 1416148 - RNA, 22 nt, Human
acccugauuuaggagaagccag

SEQ ID NO: 1416149 - RNA, 20 nt, Human
acccugauuuaggagaagcc

SEQ ID NO: 1416150 - RNA, 19 nt, Human
acccugaguugcuuuucag

SEQ ID NO: 1416151 - RNA, 22 nt, Human
acccugcauggcugagcugccc

SEQ ID NO: 1416152 - RNA, 19 nt, Human
acccugauaggaagagggg

SEQ ID NO: 1416153 - RNA, 16 nt, Human
acccugaguugcuuuu

SEQ ID NO: 1416154 - RNA, 23 nt, Human
acccugaggagucugagguccug

SEQ ID NO: 1416155 - RNA, 22 nt, Human
acccugaggagucugagguccu

SEQ ID NO: 1416156 - RNA, 19 nt, Human
acccugaggagucugaggu

SEQ ID NO: 1416157 - RNA, 17 nt, Human
acccugaggagucugag

SEQ ID NO: 1416158 - RNA, 14 nt, Human
acccugaggagucu

SEQ ID NO: 1416159 - RNA, 13 nt, Human
acccugaggaguc

SEQ ID NO: 1416160 - RNA, 23 nt, Human
acccugagcugaggcagcagugu

SEQ ID NO: 1416161 - RNA, 22 nt, Human
acccugagcugaggcagcagug

SEQ ID NO: 1416162 - RNA, 17 nt, Human
acccugagcugaggcag

SEQ ID NO: 1416163 - RNA, 22 nt, Human
acccugagcugaccagccguga

SEQ ID NO: 1416164 - RNA, 12 nt, Human
acccugagccgg

SEQ ID NO: 1416165 - RNA, 20 nt, Human
acccugaccuggcccccuca

SEQ ID NO: 1416166 - RNA, 16 nt, Human
acccugaccuggcccc

SEQ ID NO: 1416167 - RNA, 13 nt, Human
acccugaccuggc

SEQ ID NO: 1416168 - RNA, 17 nt, Human
acccugaccagcucccc

SEQ ID NO: 1416169 - RNA, 14 nt, Human
acccucauguucuu

SEQ ID NO: 1416170 - RNA, 15 nt, Human
acccucauguucuua

SEQ ID NO: 1416171 - RNA, 17 nt, Human
acccucauguucuuaau

SEQ ID NO: 1416172 - RNA, 11 nt, Human
acccucccucc

SEQ ID NO: 1416173 - RNA, 17 nt, Human
acccucccucccuaccc

SEQ ID NO: 1416174 - RNA, 23 nt, Human
acccuccccgcaccccccaagcu

SEQ ID NO: 1416175 - RNA, 17 nt, Human
acccucauucuacugaa

SEQ ID NO: 1416176 - RNA, 20 nt, Human
acccucaugcugugugacuc

SEQ ID NO: 1416177 - RNA, 18 nt, Human
accccagggcacaggagc

SEQ ID NO: 1416178 - RNA, 16 nt, Human
ucagagccgugguccu

SEQ ID NO: 1416179 - RNA, 22 nt, Human
ucagagccaugucuucucccug

SEQ ID NO: 1416180 - RNA, 19 nt, Human
ucagagcaggugcuggcuc

SEQ ID NO: 1416181 - RNA, 22 nt, Human
ucagagaugcaccaccaagcca

SEQ ID NO: 1416182 - RNA, 21 nt, Human
ucagagaugcaccaccaagcc

SEQ ID NO: 1416183 - RNA, 16 nt, Human
ucagagaugcaccacc

SEQ ID NO: 1416184 - RNA, 16 nt, Human
ucagagaggccuuuug

SEQ ID NO: 1416185 - RNA, 18 nt, Human
ucagagagcagugcuuuu

SEQ ID NO: 1416186 - RNA, 20 nt, Human
ucagagagcagugcuuuugg

SEQ ID NO: 1416187 - RNA, 15 nt, Human
ucagagagcagugcu

SEQ ID NO: 1416188 - RNA, 12 nt, Human
ucagagagcagu

SEQ ID NO: 1416189 - RNA, 19 nt, Human
ucagagagaauggcuuugg

SEQ ID NO: 1416190 - RNA, 20 nt, Human
ucagagccgugguccuuugg

SEQ ID NO: 1416191 - RNA, 16 nt, Human
ucagaucucuaacuuc

SEQ ID NO: 1416192 - RNA, 22 nt, Human
ucagaugcuccaagauucuaga

SEQ ID NO: 1416193 - RNA, 20 nt, Human
ucagaugcuccaagauucua

SEQ ID NO: 1416194 - RNA, 19 nt, Human
ucagaugcuccaagauucu

SEQ ID NO: 1416195 - RNA, 18 nt, Human
ucagaugcuccaagauuc

SEQ ID NO: 1416196 - RNA, 16 nt, Human
ucagaugcuccaagau

SEQ ID NO: 1416197 - RNA, 15 nt, Human
ucagaugcuccaaga

SEQ ID NO: 1416198 - RNA, 14 nt, Human
ucagaugcuccaag

SEQ ID NO: 1416199 - RNA, 20 nt, Human
ucagagaccagggcuccagc

SEQ ID NO: 1416200 - RNA, 16 nt, Human
ucagagaccagggcuc

SEQ ID NO: 1416201 - RNA, 15 nt, Human
ucagagaccagggcu

SEQ ID NO: 1416202 - RNA, 14 nt, Human
ucagagaccagggc

SEQ ID NO: 1416203 - RNA, 15 nt, Human
ucagagacaugcaga

SEQ ID NO: 1416204 - RNA, 12 nt, Human
ucagagaccagg

SEQ ID NO: 1416205 - RNA, 19 nt, Human
ucagagacaucagcccuug

SEQ ID NO: 1416206 - RNA, 22 nt, Human
ucagaauuagagcaugggaggu

SEQ ID NO: 1416207 - RNA, 23 nt, Human
ucagagaauuucuaccauuucag

SEQ ID NO: 1416208 - RNA, 16 nt, Human
ucagaauucucuaguu

SEQ ID NO: 1416209 - RNA, 13 nt, Human
ucagagaauuucu

SEQ ID NO: 1416210 - RNA, 17 nt, Human
acccagccaggcccagc

SEQ ID NO: 1416211 - RNA, 18 nt, Human
acccagccaggcccagcc

SEQ ID NO: 1416212 - RNA, 14 nt, Human
acccagccaggccc

SEQ ID NO: 1416213 - RNA, 13 nt, Human
acccagccaggcc

SEQ ID NO: 1416214 - RNA, 14 nt, Human
acccagcaauagag

SEQ ID NO: 1416215 - RNA, 18 nt, Human
ucagaaucccuuaacagu

SEQ ID NO: 1416216 - RNA, 16 nt, Human
acccagcccacccccg

SEQ ID NO: 1416217 - RNA, 15 nt, Human
ucagaauaugucagu

SEQ ID NO: 1416218 - RNA, 23 nt, Human
ucagaauagccacauuuggaaua

SEQ ID NO: 1416219 - RNA, 22 nt, Human
ucagaauagccacauuuggaau

SEQ ID NO: 1416220 - RNA, 21 nt, Human
ucagaauagccacauuuggaa

SEQ ID NO: 1416221 - RNA, 15 nt, Human
acccagcccaccccc

SEQ ID NO: 1416222 - RNA, 14 nt, Human
acccagcccacccc

SEQ ID NO: 1416223 - RNA, 16 nt, Human
ucagaauagaaauuag

SEQ ID NO: 1416224 - RNA, 23 nt, Human
ucagcccuaggguggagagccac

SEQ ID NO: 1416225 - RNA, 13 nt, Human
ucagcccucagaa

SEQ ID NO: 1416226 - RNA, 23 nt, Human
acccaggacuuauuuaaacucug

SEQ ID NO: 1416227 - RNA, 17 nt, Human
acccaggacaggaucca

SEQ ID NO: 1416228 - RNA, 20 nt, Human
acccaggacaggauccaggc

SEQ ID NO: 1416229 - RNA, 14 nt, Human
acccaggacaggau

SEQ ID NO: 1416230 - RNA, 22 nt, Human
ucagauucccagagcaaaauaa

SEQ ID NO: 1416231 - RNA, 21 nt, Human
ucagauucccagagcaaaaua

SEQ ID NO: 1416232 - RNA, 19 nt, Human
ucagauucccagagcaaaa

SEQ ID NO: 1416233 - RNA, 20 nt, Human
ucagauggaaaauucauuuu

SEQ ID NO: 1416234 - RNA, 19 nt, Human
ucagauggaaaauucauuu

SEQ ID NO: 1416235 - RNA, 12 nt, Human
ucagauggaaaa

SEQ ID NO: 1416236 - RNA, 16 nt, Human
ucagauuccuucccau

SEQ ID NO: 1416237 - RNA, 14 nt, Human
ucagauuccuuccc

SEQ ID NO: 1416238 - RNA, 15 nt, Human
ucagauuccuuccca

SEQ ID NO: 1416239 - RNA, 18 nt, Human
ucagcccucacacacccu

SEQ ID NO: 1416240 - RNA, 12 nt, Human
ucagcccucaga

SEQ ID NO: 1416241 - RNA, 19 nt, Human
ucagcccuaggguggagag

SEQ ID NO: 1416242 - RNA, 15 nt, Human
ucagauuucugagga

SEQ ID NO: 1416243 - RNA, 19 nt, Human
acccccacccccagcucaa

SEQ ID NO: 1416244 - RNA, 18 nt, Human
acccccacccccagcuca

SEQ ID NO: 1416245 - RNA, 15 nt, Human
acccccacccccagc

SEQ ID NO: 1416246 - RNA, 14 nt, Human
acccccacccccag

SEQ ID NO: 1416247 - RNA, 21 nt, Human
accccagggcagccagggaga

SEQ ID NO: 1416248 - RNA, 16 nt, Human
accccagggcagccag

SEQ ID NO: 1416249 - RNA, 15 nt, Human
accccagggcagcca

SEQ ID NO: 1416250 - RNA, 19 nt, Human
accccagggcacaggagcu

SEQ ID NO: 1416251 - RNA, 23 nt, Human
accccagggcuguaacugccagg

SEQ ID NO: 1416252 - RNA, 22 nt, Human
accccagggcuguaacugccag

SEQ ID NO: 1416253 - RNA, 17 nt, Human
accccagggcagccagg

SEQ ID NO: 1416254 - RNA, 14 nt, Human
acccaggucucccu

SEQ ID NO: 1416255 - RNA, 15 nt, Human
acccaggggcagccc

SEQ ID NO: 1416256 - RNA, 21 nt, Human
acccaggggcagccccaggcc

SEQ ID NO: 1416257 - RNA, 15 nt, Human
acccagggcucugua

SEQ ID NO: 1416258 - RNA, 12 nt, Human
acccagggcucu

SEQ ID NO: 1416259 - RNA, 13 nt, Human
acccagggcucug

SEQ ID NO: 1416260 - RNA, 19 nt, Human
accccagcuggggccaggc

SEQ ID NO: 1416261 - RNA, 22 nt, Human
accccagcuggggccaggcugg

SEQ ID NO: 1416262 - RNA, 18 nt, Human
acccaaagagguauuuau

SEQ ID NO: 1416263 - RNA, 14 nt, Human
acccacuucugcac

SEQ ID NO: 1416264 - RNA, 13 nt, Human
acccacuucugca

SEQ ID NO: 1416265 - RNA, 21 nt, Human
accauucugacucgguuucuc

SEQ ID NO: 1416266 - RNA, 13 nt, Human
accauucugacuc

SEQ ID NO: 1416267 - RNA, 17 nt, Human
accauguguuauguuuu

SEQ ID NO: 1416268 - RNA, 23 nt, Human
accauguuggccaggcuugucuc

SEQ ID NO: 1416269 - RNA, 17 nt, Human
accaugcugcuggggaa

SEQ ID NO: 1416270 - RNA, 16 nt, Human
accaugcugcugggga

SEQ ID NO: 1416271 - RNA, 14 nt, Human
accaugcugcuggg

SEQ ID NO: 1416272 - RNA, 20 nt, Human
accaugccaggcuaauuuuu

SEQ ID NO: 1416273 - RNA, 20 nt, Human
accaugcucaucugcugguc

SEQ ID NO: 1416274 - RNA, 19 nt, Human
accaugcucaucugcuggu

SEQ ID NO: 1416275 - RNA, 22 nt, Human
accaugcccggcuaauuuuugu

SEQ ID NO: 1416276 - RNA, 20 nt, Human
accaugcccggcuaauuuuu

SEQ ID NO: 1416277 - RNA, 19 nt, Human
accaugccaggcuaauuuu

SEQ ID NO: 1416278 - RNA, 16 nt, Human
accaugcaaaugcuau

SEQ ID NO: 1416279 - RNA, 18 nt, Human
accaugauuccuuuaaca

SEQ ID NO: 1416280 - RNA, 15 nt, Human
accaugauuccuuua

SEQ ID NO: 1416281 - RNA, 21 nt, Human
accagguccaaugagcuuucu

SEQ ID NO: 1416282 - RNA, 19 nt, Human
accagguccaaugagcuuu

SEQ ID NO: 1416283 - RNA, 18 nt, Human
accagguccaaugagcuu

SEQ ID NO: 1416284 - RNA, 21 nt, Human
accaggguugaccccagagga

SEQ ID NO: 1416285 - RNA, 20 nt, Human
accaggguugaccccagagg

SEQ ID NO: 1416286 - RNA, 21 nt, Human
accaggguccuuuugacacug

SEQ ID NO: 1416287 - RNA, 17 nt, Human
accagggguuucucgca

SEQ ID NO: 1416288 - RNA, 16 nt, Human
accagggguuucucgc

SEQ ID NO: 1416289 - RNA, 14 nt, Human
accagggguuucuc

SEQ ID NO: 1416290 - RNA, 23 nt, Human
accaugcugcuggggaagacagu

SEQ ID NO: 1416291 - RNA, 22 nt, Human
accaugcugcuggggaagacag

SEQ ID NO: 1416292 - RNA, 21 nt, Human
accaugcugcuggggaagaca

SEQ ID NO: 1416293 - RNA, 19 nt, Human
accaugcugcuggggaaga

SEQ ID NO: 1416294 - RNA, 18 nt, Human
accaugcugcuggggaag

SEQ ID NO: 1416295 - RNA, 21 nt, Human
accauggacacuacacccagc

SEQ ID NO: 1416296 - RNA, 22 nt, Human
accauggacacuacacccagca

SEQ ID NO: 1416297 - RNA, 23 nt, Human
accauggacacuacacccagcaa

SEQ ID NO: 1416298 - RNA, 16 nt, Human
accauggaguggcagc

SEQ ID NO: 1416299 - RNA, 24 nt, Human
accauggacacuacacccagcaau

SEQ ID NO: 1416300 - RNA, 23 nt, Human
accauggaguggcagcccagcca

SEQ ID NO: 1416301 - RNA, 22 nt, Human
accauggaguggcagcccagcc

SEQ ID NO: 1416302 - RNA, 21 nt, Human
accauggaguggcagcccagc

SEQ ID NO: 1416303 - RNA, 20 nt, Human
accauggccagcuaauuuuu

SEQ ID NO: 1416304 - RNA, 14 nt, Human
accaugucuuucuc

SEQ ID NO: 1416305 - RNA, 16 nt, Human
accaugucuuucucuc

SEQ ID NO: 1416306 - RNA, 18 nt, Human
accaugucauuucagaag

SEQ ID NO: 1416307 - RNA, 15 nt, Human
accaugucauuucag

SEQ ID NO: 1416308 - RNA, 12 nt, Human
accaugucauuu

SEQ ID NO: 1416309 - RNA, 22 nt, Human
accaugucaaggguucaagauu

SEQ ID NO: 1416310 - RNA, 16 nt, Human
ucacuucauaauccag

SEQ ID NO: 1416311 - RNA, 21 nt, Human
ucacuucagguauaccucacu

SEQ ID NO: 1416312 - RNA, 21 nt, Human
ucacuuaggaaauggcuuugu

SEQ ID NO: 1416313 - RNA, 22 nt, Human
ucacuuaaguuaguuccacuga

SEQ ID NO: 1416314 - RNA, 22 nt, Human
ucacuuaaacuugcaucacuua

SEQ ID NO: 1416315 - RNA, 18 nt, Human
ucacugcaagcuccgccu

SEQ ID NO: 1416316 - RNA, 16 nt, Human
ucacugcaaccuucac

SEQ ID NO: 1416317 - RNA, 18 nt, Human
ucacugcaaccucugccu

SEQ ID NO: 1416318 - RNA, 23 nt, Human
ucacugaguuuuccauggcagga

SEQ ID NO: 1416319 - RNA, 17 nt, Human
ucacugaguuuuccaug

SEQ ID NO: 1416320 - RNA, 17 nt, Human
ucacugcaacaugauga

SEQ ID NO: 1416321 - RNA, 21 nt, Human
ucacugaguuuuccauggcag

SEQ ID NO: 1416322 - RNA, 14 nt, Human
ucacugcaaccucc

SEQ ID NO: 1416323 - RNA, 20 nt, Human
ucacugcaacaugaugaggu

SEQ ID NO: 1416324 - RNA, 18 nt, Human
ucacugcaaccuccaccu

SEQ ID NO: 1416325 - RNA, 21 nt, Human
ucacucaucaauggggccagu

SEQ ID NO: 1416326 - RNA, 20 nt, Human
ucacucagccacccugaguu

SEQ ID NO: 1416327 - RNA, 19 nt, Human
ucacucagccacccugagu

SEQ ID NO: 1416328 - RNA, 12 nt, Human
ucacucaaggcg

SEQ ID NO: 1416329 - RNA, 20 nt, Human
ucacucaaggcggugcuuga

SEQ ID NO: 1416330 - RNA, 19 nt, Human
ucacauuccugaacaggau

SEQ ID NO: 1416331 - RNA, 16 nt, Human
ucaccagcccuggcaa

SEQ ID NO: 1416332 - RNA, 16 nt, Human
ucacugaagcuuuuua

SEQ ID NO: 1416333 - RNA, 18 nt, Human
ucacugagaccaaggcuu

SEQ ID NO: 1416334 - RNA, 21 nt, Human
ucacugaacuuugcugagccu

SEQ ID NO: 1416335 - RNA, 17 nt, Human
accacaaugcagugccu

SEQ ID NO: 1416336 - RNA, 20 nt, Human
accacaacuauuuucagaug

SEQ ID NO: 1416337 - RNA, 17 nt, Human
accaaugaaaaaaugua

SEQ ID NO: 1416338 - RNA, 14 nt, Human
accaaugaaaaaau

SEQ ID NO: 1416339 - RNA, 13 nt, Human
accaauccuggac

SEQ ID NO: 1416340 - RNA, 17 nt, Human
accaauccuaugcaugg

SEQ ID NO: 1416341 - RNA, 14 nt, Human
accaacccucaggg

SEQ ID NO: 1416342 - RNA, 15 nt, Human
accaacccucagggc

SEQ ID NO: 1416343 - RNA, 13 nt, Human
accaacccucagg

SEQ ID NO: 1416344 - RNA, 21 nt, Human
accaauguacccaccgggcca

SEQ ID NO: 1416345 - RNA, 13 nt, Human
accaaugucuuga

SEQ ID NO: 1416346 - RNA, 12 nt, Human
accaaugucuug

SEQ ID NO: 1416347 - RNA, 14 nt, Human
accaauguacccac

SEQ ID NO: 1416348 - RNA, 21 nt, Human
accacaacaugaggccacugg

SEQ ID NO: 1416349 - RNA, 17 nt, Human
accacaacaugaggcca

SEQ ID NO: 1416350 - RNA, 13 nt, Human
accacaacaugag

SEQ ID NO: 1416351 - RNA, 22 nt, Human
accacaaacuguaauacaauga

SEQ ID NO: 1416352 - RNA, 16 nt, Human
accacaagacugcaca

SEQ ID NO: 1416353 - RNA, 20 nt, Human
accaacaaucuuccuguuua

SEQ ID NO: 1416354 - RNA, 20 nt, Human
accaaaugugcuuugagaag

SEQ ID NO: 1416355 - RNA, 23 nt, Human
accaacauaaaaaugaucuaaac

SEQ ID NO: 1416356 - RNA, 15 nt, Human
accaacauaaaaaug

SEQ ID NO: 1416357 - RNA, 14 nt, Human
accaacauaaaaau

SEQ ID NO: 1416358 - RNA, 23 nt, Human
accaaaucaaaaucucuccacuu

SEQ ID NO: 1416359 - RNA, 15 nt, Human
accaaaucuggaagc

SEQ ID NO: 1416360 - RNA, 13 nt, Human
accaaaucuggaa

SEQ ID NO: 1416361 - RNA, 22 nt, Human
accaaaucaaaaucucuccacu

SEQ ID NO: 1416362 - RNA, 20 nt, Human
accaaaucaaaaucucucca

SEQ ID NO: 1416363 - RNA, 15 nt, Human
accaaaucaaaaucu

SEQ ID NO: 1416364 - RNA, 14 nt, Human
accaaaucaaaauc

SEQ ID NO: 1416365 - RNA, 23 nt, Human
accaaaguucuaauaauuucuaa

SEQ ID NO: 1416366 - RNA, 21 nt, Human
accaaaguucuaauaauuucu

SEQ ID NO: 1416367 - RNA, 20 nt, Human
accaaaguucuaauaauuuc

SEQ ID NO: 1416368 - RNA, 15 nt, Human
accaaaguucuaaua

SEQ ID NO: 1416369 - RNA, 14 nt, Human
accaaaguucuaau

SEQ ID NO: 1416370 - RNA, 23 nt, Human
accaaaaaucucaauauuucaga

SEQ ID NO: 1416371 - RNA, 21 nt, Human
ucacaugaugcacuucaaauu

SEQ ID NO: 1416372 - RNA, 20 nt, Human
ucacaucagagugacaucca

SEQ ID NO: 1416373 - RNA, 22 nt, Human
ucacauauuuuaaaauuuguuc

SEQ ID NO: 1416374 - RNA, 14 nt, Human
ucacauauuuuaaa

SEQ ID NO: 1416375 - RNA, 18 nt, Human
ucacauauugauuuccgu

SEQ ID NO: 1416376 - RNA, 20 nt, Human
ucacauauugauuuccguua

SEQ ID NO: 1416377 - RNA, 16 nt, Human
ucacagcuccucccac

SEQ ID NO: 1416378 - RNA, 14 nt, Human
ucacagcuccuccc

SEQ ID NO: 1416379 - RNA, 11 nt, Human
ucacagcuccu

SEQ ID NO: 1416380 - RNA, 22 nt, Human
ucacagcuuauuuccucauuuu

SEQ ID NO: 1416381 - RNA, 15 nt, Human
ucacagcuucagcca

SEQ ID NO: 1416382 - RNA, 16 nt, Human
ucacagcuucagccag

SEQ ID NO: 1416383 - RNA, 17 nt, Human
ucacagcuucagccagg

SEQ ID NO: 1416384 - RNA, 19 nt, Human
ucacagcuucagccaggag

SEQ ID NO: 1416385 - RNA, 16 nt, Human
ucacauauugauuucc

SEQ ID NO: 1416386 - RNA, 15 nt, Human
ucacauuagaagaca

SEQ ID NO: 1416387 - RNA, 14 nt, Human
ucacauuagaagac

SEQ ID NO: 1416388 - RNA, 12 nt, Human
ucacauuagaag

SEQ ID NO: 1416389 - RNA, 21 nt, Human
ucacaugucaguaccuucaaa

SEQ ID NO: 1416390 - RNA, 20 nt, Human
ucacauuccugaacaggaua

SEQ ID NO: 1416391 - RNA, 22 nt, Human
ucacauuagaagacaauugaca

SEQ ID NO: 1416392 - RNA, 17 nt, Human
ucacauuccugaacagg

SEQ ID NO: 1416393 - RNA, 13 nt, Human
ucacauuccugaa

SEQ ID NO: 1416394 - RNA, 16 nt, Human
ucacagccaccccuga

SEQ ID NO: 1416395 - RNA, 13 nt, Human
ucacagcccagcc

SEQ ID NO: 1416396 - RNA, 15 nt, Human
ucacagcccagcccg

SEQ ID NO: 1416397 - RNA, 19 nt, Human
ucacagcuccaagaauuuc

SEQ ID NO: 1416398 - RNA, 16 nt, Human
ucacagccacuuggga

SEQ ID NO: 1416399 - RNA, 17 nt, Human
accacacccacacucag

SEQ ID NO: 1416400 - RNA, 23 nt, Human
ucacagaaguguuaacuuuucua

SEQ ID NO: 1416401 - RNA, 16 nt, Human
ucacagaccuuugaac

SEQ ID NO: 1416402 - RNA, 15 nt, Human
ucaauccagcuaugu

SEQ ID NO: 1416403 - RNA, 16 nt, Human
ucaaucauuucuauua

SEQ ID NO: 1416404 - RNA, 13 nt, Human
ucaaucauuucua

SEQ ID NO: 1416405 - RNA, 21 nt, Human
ucaaucagucucagaauguca

SEQ ID NO: 1416406 - RNA, 22 nt, Human
ucaaucagucucagaaugucau

SEQ ID NO: 1416407 - RNA, 19 nt, Human
ucaaucagucucagaaugu

SEQ ID NO: 1416408 - RNA, 17 nt, Human
ucaauauuuucuuuucc

SEQ ID NO: 1416409 - RNA, 16 nt, Human
ucaauauuuuuagaua

SEQ ID NO: 1416410 - RNA, 23 nt, Human
ucaauauuucagauaaucacaau

SEQ ID NO: 1416411 - RNA, 15 nt, Human
ucaaguaauacaaac

SEQ ID NO: 1416412 - RNA, 23 nt, Human
ucaagguuuuagguucuaaaguu

SEQ ID NO: 1416413 - RNA, 22 nt, Human
ucaagguuuuagguucuaaagu

SEQ ID NO: 1416414 - RNA, 21 nt, Human
ucaagguuuuagguucuaaag

SEQ ID NO: 1416415 - RNA, 20 nt, Human
ucaagaggagcccccacccu

SEQ ID NO: 1416416 - RNA, 18 nt, Human
acauucaacagagacuga

SEQ ID NO: 1416417 - RNA, 24 nt, Human
acauucaaaauaggguauauuuuc

SEQ ID NO: 1416418 - RNA, 18 nt, Human
acauuauuaucaacaaua

SEQ ID NO: 1416419 - RNA, 22 nt, Human
acauuaugugguuuuagauuuu

SEQ ID NO: 1416420 - RNA, 21 nt, Human
acauuaugugguuuuagauuu

SEQ ID NO: 1416421 - RNA, 19 nt, Human
acauuaugugguuuuagau

SEQ ID NO: 1416422 - RNA, 20 nt, Human
acauuauauuucuauuuuau

SEQ ID NO: 1416423 - RNA, 16 nt, Human
ucaagauuguuccugc

SEQ ID NO: 1416424 - RNA, 21 nt, Human
ucaagagugaauucccucacu

SEQ ID NO: 1416425 - RNA, 13 nt, Human
ucaagaggagccc

SEQ ID NO: 1416426 - RNA, 20 nt, Human
ucaagagugaauucccucac

SEQ ID NO: 1416427 - RNA, 19 nt, Human
ucaagagugaauucccuca

SEQ ID NO: 1416428 - RNA, 16 nt, Human
ucaaggcacucuagau

SEQ ID NO: 1416429 - RNA, 15 nt, Human
ucaaggcacucuaga

SEQ ID NO: 1416430 - RNA, 14 nt, Human
ucaaggcacucuag

SEQ ID NO: 1416431 - RNA, 13 nt, Human
ucaaggcacucua

SEQ ID NO: 1416432 - RNA, 22 nt, Human
ucaagcagcgaccgcccccucc

SEQ ID NO: 1416433 - RNA, 21 nt, Human
ucaagcagcgaccgcccccuc

SEQ ID NO: 1416434 - RNA, 18 nt, Human
ucaagcagcgaccgcccc

SEQ ID NO: 1416435 - RNA, 19 nt, Human
ucaagauuguuccugcuuu

SEQ ID NO: 1416436 - RNA, 17 nt, Human
ucaagcaagauuucaga

SEQ ID NO: 1416437 - RNA, 21 nt, Human
ucaaggcacucuagauuccau

SEQ ID NO: 1416438 - RNA, 20 nt, Human
ucaaggcacucuagauucca

SEQ ID NO: 1416439 - RNA, 18 nt, Human
ucaaggcacucuagauuc

SEQ ID NO: 1416440 - RNA, 17 nt, Human
ucaaggcacucuagauu

SEQ ID NO: 1416441 - RNA, 11 nt, Human
ucaaggcucag

SEQ ID NO: 1416442 - RNA, 16 nt, Human
ucaaggcggugcuuga

SEQ ID NO: 1416443 - RNA, 15 nt, Human
ucaaggucugcuuuu

SEQ ID NO: 1416444 - RNA, 20 nt, Human
ucaagguuuuagguucuaaa

SEQ ID NO: 1416445 - RNA, 18 nt, Human
ucaagguuuuagguucua

SEQ ID NO: 1416446 - RNA, 13 nt, Human
ucaagguuuuagg

SEQ ID NO: 1416447 - RNA, 14 nt, Human
ucaagguucuaacc

SEQ ID NO: 1416448 - RNA, 11 nt, Human
ucaagguucua

SEQ ID NO: 1416449 - RNA, 21 nt, Human
ucaaggucguuuuuuucauuc

SEQ ID NO: 1416450 - RNA, 14 nt, Human
ucaaggucugcuuu

SEQ ID NO: 1416451 - RNA, 20 nt, Human
acauuuuuuaggaaauguuu

SEQ ID NO: 1416452 - RNA, 16 nt, Human
acauuuuuuaggaaau

SEQ ID NO: 1416453 - RNA, 13 nt, Human
acauuuuucuuag

SEQ ID NO: 1416454 - RNA, 23 nt, Human
acauuuuucuuagggaaggauac

SEQ ID NO: 1416455 - RNA, 15 nt, Human
acauuuuuaagugcu

SEQ ID NO: 1416456 - RNA, 18 nt, Human
acauuuuuaagugcugca

SEQ ID NO: 1416457 - RNA, 19 nt, Human
acauuuuuaagugcugcau

SEQ ID NO: 1416458 - RNA, 15 nt, Human
acauuuuacauuaaa

SEQ ID NO: 1416459 - RNA, 18 nt, Human
acauuuuacauuaaauuu

SEQ ID NO: 1416460 - RNA, 15 nt, Human
acauuuacaaacuga

SEQ ID NO: 1416461 - RNA, 22 nt, Human
acauuuaaaacauuaaaauaua

SEQ ID NO: 1416462 - RNA, 21 nt, Human
acauuuacaaacugaagagua

SEQ ID NO: 1416463 - RNA, 17 nt, Human
acauuuacaaacugaag

SEQ ID NO: 1416464 - RNA, 16 nt, Human
acauuuacaaacugaa

SEQ ID NO: 1416465 - RNA, 14 nt, Human
acauuuuacauuaa

SEQ ID NO: 1416466 - RNA, 23 nt, Human
acauugcguuugaccuuuuaugu

SEQ ID NO: 1416467 - RNA, 15 nt, Human
acauugcguuugacc

SEQ ID NO: 1416468 - RNA, 22 nt, Human
acauuggcaccuaauccaggca

SEQ ID NO: 1416469 - RNA, 21 nt, Human
acauuggcaccuaauccaggc

SEQ ID NO: 1416470 - RNA, 17 nt, Human
acauuggaauguucuca

SEQ ID NO: 1416471 - RNA, 15 nt, Human
acauuggaauguucu

SEQ ID NO: 1416472 - RNA, 12 nt, Human
acauugcuuuuc

SEQ ID NO: 1416473 - RNA, 16 nt, Human
acauuggaaacaaguc

SEQ ID NO: 1416474 - RNA, 18 nt, Human
acauuuaaaacauuaaaa

SEQ ID NO: 1416475 - RNA, 14 nt, Human
acauuuaaaacauu

SEQ ID NO: 1416476 - RNA, 22 nt, Human
acauugguucuuucauuugcuu

SEQ ID NO: 1416477 - RNA, 21 nt, Human
acauguauugcacauuguaaa

SEQ ID NO: 1416478 - RNA, 15 nt, Human
acaugucuuaaugaa

SEQ ID NO: 1416479 - RNA, 19 nt, Human
acauguauugcacauugua

SEQ ID NO: 1416480 - RNA, 18 nt, Human
acauguauugcacauugu

SEQ ID NO: 1416481 - RNA, 21 nt, Human
acauguaucuaugcauuuucu

SEQ ID NO: 1416482 - RNA, 18 nt, Human
acauguaucuaugcauuu

SEQ ID NO: 1416483 - RNA, 18 nt, Human
acaugguuaccaugucuu

SEQ ID NO: 1416484 - RNA, 19 nt, Human
acaugguuaccaugucuuu

SEQ ID NO: 1416485 - RNA, 19 nt, Human
acaugguggguccaugggc

SEQ ID NO: 1416486 - RNA, 18 nt, Human
acaugguggguccauggg

SEQ ID NO: 1416487 - RNA, 23 nt, Human
acauggugcugggagaggcagcc

SEQ ID NO: 1416488 - RNA, 16 nt, Human
acauggugcugggaga

SEQ ID NO: 1416489 - RNA, 21 nt, Human
acauuagaagacaauugacaa

SEQ ID NO: 1416490 - RNA, 20 nt, Human
acauuagaagacaauugaca

SEQ ID NO: 1416491 - RNA, 15 nt, Human
acauuagaagacaau

SEQ ID NO: 1416492 - RNA, 14 nt, Human
acauuagaagacaa

SEQ ID NO: 1416493 - RNA, 19 nt, Human
acauuaauagcagccuuuc

SEQ ID NO: 1416494 - RNA, 18 nt, Human
acauuaauauacuugaau

SEQ ID NO: 1416495 - RNA, 18 nt, Human
acauuaauagcagccuuu

SEQ ID NO: 1416496 - RNA, 16 nt, Human
acaugucuuaaugaag

SEQ ID NO: 1416497 - RNA, 18 nt, Human
acaugucuuaaugaaguu

SEQ ID NO: 1416498 - RNA, 20 nt, Human
acaugucuuaaugaaguuug

SEQ ID NO: 1416499 - RNA, 21 nt, Human
acaugucuuaaugaaguuuga

SEQ ID NO: 1416500 - RNA, 22 nt, Human
acaugucuuaaugaaguuugaa

SEQ ID NO: 1416501 - RNA, 23 nt, Human
acaugucuuaaugaaguuugaau

SEQ ID NO: 1416502 - RNA, 13 nt, Human
acaugaggccacu

SEQ ID NO: 1416503 - RNA, 15 nt, Human
acaugaggccacugg

SEQ ID NO: 1416504 - RNA, 22 nt, Human
acaugaggacucuauucuuuaa

SEQ ID NO: 1416505 - RNA, 21 nt, Human
acaugaggacucuauucuuua

SEQ ID NO: 1416506 - RNA, 20 nt, Human
acaugaggacucuauucuuu

SEQ ID NO: 1416507 - RNA, 18 nt, Human
acaugaggacucuauucu

SEQ ID NO: 1416508 - RNA, 13 nt, Human
acaugaggacucu

SEQ ID NO: 1416509 - RNA, 19 nt, Human
acauggagguucuaaggcc

SEQ ID NO: 1416510 - RNA, 18 nt, Human
acauggagguucuaaggc

SEQ ID NO: 1416511 - RNA, 17 nt, Human
acauggagguucuaagg

SEQ ID NO: 1416512 - RNA, 16 nt, Human
acauggagguucuaag

SEQ ID NO: 1416513 - RNA, 15 nt, Human
acauggagguucuaa

SEQ ID NO: 1416514 - RNA, 14 nt, Human
acauggagguucua

SEQ ID NO: 1416515 - RNA, 22 nt, Human
acauggccccucccccugccag

SEQ ID NO: 1416516 - RNA, 21 nt, Human
acauggccccucccccugcca

SEQ ID NO: 1416517 - RNA, 13 nt, Human
acauggcacagag

SEQ ID NO: 1416518 - RNA, 22 nt, Human
acauggcuggagcuagaauuug

SEQ ID NO: 1416519 - RNA, 21 nt, Human
ucaaaaguuccaagagucuaa

SEQ ID NO: 1416520 - RNA, 17 nt, Human
ucaaaaguuccaagagu

SEQ ID NO: 1416521 - RNA, 15 nt, Human
ucaaaaguuccaaga

SEQ ID NO: 1416522 - RNA, 14 nt, Human
ucaaaaguuccaag

SEQ ID NO: 1416523 - RNA, 13 nt, Human
ucaaaaguuccaa

SEQ ID NO: 1416524 - RNA, 20 nt, Human
ucaaaagggccaaagaacca

SEQ ID NO: 1416525 - RNA, 21 nt, Human
ucaaaagggccaaagaaccaa

SEQ ID NO: 1416526 - RNA, 14 nt, Human
ucaaaagggccaaa

SEQ ID NO: 1416527 - RNA, 20 nt, Human
ucaaagcaaggaaacuaugu

SEQ ID NO: 1416528 - RNA, 16 nt, Human
ucaaagcaaggaaacu

SEQ ID NO: 1416529 - RNA, 15 nt, Human
ucaaagcaaggaaac

SEQ ID NO: 1416530 - RNA, 22 nt, Human
ucaaagcaagcauucagaagaa

SEQ ID NO: 1416531 - RNA, 21 nt, Human
ucaaagcaagcauucagaaga

SEQ ID NO: 1416532 - RNA, 19 nt, Human
ucaaagcaagcauucagaa

SEQ ID NO: 1416533 - RNA, 15 nt, Human
ucaaagcaagcauuc

SEQ ID NO: 1416534 - RNA, 13 nt, Human
ucaaagcaagcau

SEQ ID NO: 1416535 - RNA, 19 nt, Human
ucaaagaugcugugagucu

SEQ ID NO: 1416536 - RNA, 12 nt, Human
ucaaagaugcug

SEQ ID NO: 1416537 - RNA, 22 nt, Human
ucaaagauauuuugcuuuguga

SEQ ID NO: 1416538 - RNA, 13 nt, Human
ucaaagauauuuu

SEQ ID NO: 1416539 - RNA, 20 nt, Human
ucaaagauauuuugcuuugu

SEQ ID NO: 1416540 - RNA, 21 nt, Human
acaugacccuaaaucuugacu

SEQ ID NO: 1416541 - RNA, 19 nt, Human
acaugacccuaaaucuuga

SEQ ID NO: 1416542 - RNA, 22 nt, Human
acaugaauuuuagcuuuugugg

SEQ ID NO: 1416543 - RNA, 19 nt, Human
acaugaauuuuagcuuuug

SEQ ID NO: 1416544 - RNA, 13 nt, Human
acaugaagaagcu

SEQ ID NO: 1416545 - RNA, 22 nt, Human
acaugaacuuagauuuuacaug

SEQ ID NO: 1416546 - RNA, 20 nt, Human
acaugaacuuagauuuuaca

SEQ ID NO: 1416547 - RNA, 15 nt, Human
acaugagaacaaaca

SEQ ID NO: 1416548 - RNA, 19 nt, Human
acaugaacuuagauuuuac

SEQ ID NO: 1416549 - RNA, 14 nt, Human
acaugaacuuagau

SEQ ID NO: 1416550 - RNA, 17 nt, Human
acaugaaaggacccugu

SEQ ID NO: 1416551 - RNA, 15 nt, Human
acaugaaacagaaac

SEQ ID NO: 1416552 - RNA, 13 nt, Human
acaugaaacagaa

SEQ ID NO: 1416553 - RNA, 21 nt, Human
ucaaauauauucagccuggcu

SEQ ID NO: 1416554 - RNA, 23 nt, Human
acaugaaaacacauuuuucuuag

SEQ ID NO: 1416555 - RNA, 19 nt, Human
ucaaaguguuuucucugaa

SEQ ID NO: 1416556 - RNA, 18 nt, Human
ucaaagguuuggaaggag

SEQ ID NO: 1416557 - RNA, 23 nt, Human
ucaaagguucuagguuucaaaga

SEQ ID NO: 1416558 - RNA, 21 nt, Human
ucaaagguucuagguuucaaa

SEQ ID NO: 1416559 - RNA, 20 nt, Human
ucaaagguucuagguuucaa

SEQ ID NO: 1416560 - RNA, 16 nt, Human
ucaaagguucuagguu

SEQ ID NO: 1416561 - RNA, 12 nt, Human
ucaaagguucua

SEQ ID NO: 1416562 - RNA, 18 nt, Human
ucaaaguguuuucucuga

SEQ ID NO: 1416563 - RNA, 23 nt, Human
ucaaauacgugggcauucaaaug

SEQ ID NO: 1416564 - RNA, 13 nt, Human
ucaaauauauuca

SEQ ID NO: 1416565 - RNA, 22 nt, Human
ucaaauacgugggcauucaaau

SEQ ID NO: 1416566 - RNA, 21 nt, Human
ucaaauacgugggcauucaaa

SEQ ID NO: 1416567 - RNA, 21 nt, Human
uauuuuguuuugugcagagau

SEQ ID NO: 1416568 - RNA, 20 nt, Human
uauuuuuggcagucugaauu

SEQ ID NO: 1416569 - RNA, 19 nt, Human
uauuuuuggcagucugaau

SEQ ID NO: 1416570 - RNA, 12 nt, Human
uauuuuuggagg

SEQ ID NO: 1416571 - RNA, 16 nt, Human
uauuuuuggagguuua

SEQ ID NO: 1416572 - RNA, 21 nt, Human
uauuuuguaaacucaaaauau

SEQ ID NO: 1416573 - RNA, 20 nt, Human
uauuuuguaaacucaaaaua

SEQ ID NO: 1416574 - RNA, 13 nt, Human
uauuuuguaaacu

SEQ ID NO: 1416575 - RNA, 17 nt, Human
uauuuuguguuuaggaa

SEQ ID NO: 1416576 - RNA, 20 nt, Human
uauuuuguguuuaggaacua

SEQ ID NO: 1416577 - RNA, 14 nt, Human
uauuuugcuggaau

SEQ ID NO: 1416578 - RNA, 23 nt, Human
uauuuugccaagggcauaaauua

SEQ ID NO: 1416579 - RNA, 22 nt, Human
uauuuugccaagggcauaaauu

SEQ ID NO: 1416580 - RNA, 21 nt, Human
uauuuugcaguucccacauua

SEQ ID NO: 1416581 - RNA, 17 nt, Human
uauuuugauguaaagau

SEQ ID NO: 1416582 - RNA, 23 nt, Human
uauuuuggauuguauauuguguu

SEQ ID NO: 1416583 - RNA, 20 nt, Human
uauuuuggauuguauauugu

SEQ ID NO: 1416584 - RNA, 20 nt, Human
uauuuugcuuugugauuuuu

SEQ ID NO: 1416585 - RNA, 13 nt, Human
uauuuugcuuugu

SEQ ID NO: 1416586 - RNA, 15 nt, Human
uauuuugcuuuguga

SEQ ID NO: 1416587 - RNA, 23 nt, Human
uauuuuacaauuuuuuaucaugc

SEQ ID NO: 1416588 - RNA, 14 nt, Human
uauuuuacaauuuu

SEQ ID NO: 1416589 - RNA, 13 nt, Human
uauuuuacauaaa

SEQ ID NO: 1416590 - RNA, 22 nt, Human
uauuuuaauaauguuucaaaca

SEQ ID NO: 1416591 - RNA, 19 nt, Human
uauuuuaauaauguuucaa

SEQ ID NO: 1416592 - RNA, 17 nt, Human
uauuuuaauaaacacuc

SEQ ID NO: 1416593 - RNA, 14 nt, Human
uauuuuaaagaauu

SEQ ID NO: 1416594 - RNA, 16 nt, Human
uauuuuaaagaauugu

SEQ ID NO: 1416595 - RNA, 13 nt, Human
uauuuuaaagaau

SEQ ID NO: 1416596 - RNA, 12 nt, Human
uauuuuaaagaa

SEQ ID NO: 1416597 - RNA, 14 nt, Human
uauuuuaauaaaca

SEQ ID NO: 1416598 - RNA, 19 nt, Human
uauuuguuaauaguuccug

SEQ ID NO: 1416599 - RNA, 21 nt, Human
uauuuguguuuuaauuuaaac

SEQ ID NO: 1416600 - RNA, 19 nt, Human
uauuuguguuuuaauuuaa

SEQ ID NO: 1416601 - RNA, 12 nt, Human
uauuuguguuuu

SEQ ID NO: 1416602 - RNA, 20 nt, Human
uauuugucaugcugggauuu

SEQ ID NO: 1416603 - RNA, 22 nt, Human
uauuuguauaaaagugugaaau

SEQ ID NO: 1416604 - RNA, 18 nt, Human
uauuuguauaaaagugug

SEQ ID NO: 1416605 - RNA, 12 nt, Human
uauuuguacaua

SEQ ID NO: 1416606 - RNA, 15 nt, Human
uauuuguaauuaaaa

SEQ ID NO: 1416607 - RNA, 14 nt, Human
uauuuguaauuaaa

SEQ ID NO: 1416608 - RNA, 13 nt, Human
uauuuguaauuaa

SEQ ID NO: 1416609 - RNA, 12 nt, Human
uauuuguaauua

SEQ ID NO: 1416610 - RNA, 20 nt, Human
uauuuguaauagauguuuga

SEQ ID NO: 1416611 - RNA, 15 nt, Human
uauuuguaauagaug

SEQ ID NO: 1416612 - RNA, 14 nt, Human
uauuuguaauagau

SEQ ID NO: 1416613 - RNA, 16 nt, Human
acaugaaaacacauuu

SEQ ID NO: 1416614 - RNA, 15 nt, Human
acaugaaaacacauu

SEQ ID NO: 1416615 - RNA, 18 nt, Human
uauuuuaaaagaaugauu

SEQ ID NO: 1416616 - RNA, 21 nt, Human
uauuuguuuaugguaaaaaau

SEQ ID NO: 1416617 - RNA, 17 nt, Human
uauuuguucccaagagc

SEQ ID NO: 1416618 - RNA, 14 nt, Human
uauuuuaaaagaau

SEQ ID NO: 1416619 - RNA, 17 nt, Human
uauuuuaaaauuuguuc

SEQ ID NO: 1416620 - RNA, 14 nt, Human
uauuuuaaaauuug

SEQ ID NO: 1416621 - RNA, 13 nt, Human
uauuuuaaaauuu

SEQ ID NO: 1416622 - RNA, 18 nt, Human
uauuuuaaaaucugucac

SEQ ID NO: 1416623 - RNA, 23 nt, Human
uauuuuaaaauagcguucuugua

SEQ ID NO: 1416624 - RNA, 22 nt, Human
uauuuuaaaauagcguucuugu

SEQ ID NO: 1416625 - RNA, 14 nt, Human
uauuuuaagacgaa

SEQ ID NO: 1416626 - RNA, 22 nt, Human
uauuuuaagacgaaacauuugu

SEQ ID NO: 1416627 - RNA, 23 nt, Human
acaucuugucauuuuuuuucuuu

SEQ ID NO: 1416628 - RNA, 23 nt, Human
acaucuuugaaauuauguaaauu

SEQ ID NO: 1416629 - RNA, 22 nt, Human
acaucuuugaaauuauguaaau

SEQ ID NO: 1416630 - RNA, 17 nt, Human
acaucuuugaaauuaug

SEQ ID NO: 1416631 - RNA, 14 nt, Human
acaucuuugaaauu

SEQ ID NO: 1416632 - RNA, 13 nt, Human
acaucuuuauccg

SEQ ID NO: 1416633 - RNA, 11 nt, Human
acaucuuuaag

SEQ ID NO: 1416634 - RNA, 20 nt, Human
acaucuuuaaggggaggaac

SEQ ID NO: 1416635 - RNA, 19 nt, Human
uaugugguuuuagauuuuc

SEQ ID NO: 1416636 - RNA, 18 nt, Human
uaugugguuuuagauuuu

SEQ ID NO: 1416637 - RNA, 16 nt, Human
uaugugguuuuagauu

SEQ ID NO: 1416638 - RNA, 23 nt, Human
uaugugccagauuuaugcauauu

SEQ ID NO: 1416639 - RNA, 14 nt, Human
uaugugccagauuu

SEQ ID NO: 1416640 - RNA, 19 nt, Human
uaugugccagauuuaugca

SEQ ID NO: 1416641 - RNA, 24 nt, Human
ucuaagaugugauauucuaagacu

SEQ ID NO: 1416642 - RNA, 22 nt, Human
ucuaagaugugauauucuaaga

SEQ ID NO: 1416643 - RNA, 21 nt, Human
ucuaagaugugauauucuaag

SEQ ID NO: 1416644 - RNA, 20 nt, Human
ucuaagaugugauauucuaa

SEQ ID NO: 1416645 - RNA, 19 nt, Human
ucuaagaugugauauucua

SEQ ID NO: 1416646 - RNA, 18 nt, Human
ucuaagaugugauauucu

SEQ ID NO: 1416647 - RNA, 13 nt, Human
ucuaagaugugau

SEQ ID NO: 1416648 - RNA, 12 nt, Human
ucuaagauguga

SEQ ID NO: 1416649 - RNA, 21 nt, Human
ucuaagaucuuagauucucug

SEQ ID NO: 1416650 - RNA, 19 nt, Human
ucuaagaucuuagauucuc

SEQ ID NO: 1416651 - RNA, 17 nt, Human
ucuaagaucuuagauuc

SEQ ID NO: 1416652 - RNA, 15 nt, Human
ucuaagaucuuagau

SEQ ID NO: 1416653 - RNA, 12 nt, Human
ucuaagaucuua

SEQ ID NO: 1416654 - RNA, 23 nt, Human
ucuaagacuuacucuaagaucuu

SEQ ID NO: 1416655 - RNA, 20 nt, Human
ucuaagagaacaaugugcua

SEQ ID NO: 1416656 - RNA, 20 nt, Human
ucuaagacuuacucuaagau

SEQ ID NO: 1416657 - RNA, 19 nt, Human
ucuaagacuuacucuaaga

SEQ ID NO: 1416658 - RNA, 22 nt, Human
ucuaagacucaaauguucuaag

SEQ ID NO: 1416659 - RNA, 21 nt, Human
ucuaagacucaaauguucuaa

SEQ ID NO: 1416660 - RNA, 19 nt, Human
ucuaagacucaaauguucu

SEQ ID NO: 1416661 - RNA, 18 nt, Human
ucuaagacucaaauguuc

SEQ ID NO: 1416662 - RNA, 16 nt, Human
ucuaagacucaaaugu

SEQ ID NO: 1416663 - RNA, 19 nt, Human
ucuaagaaauugaauacuu

SEQ ID NO: 1416664 - RNA, 24 nt, Human
ucuaagaaauugaauacuuugaau

SEQ ID NO: 1416665 - RNA, 16 nt, Human
ucuaagaaauugaaua

SEQ ID NO: 1416666 - RNA, 12 nt, Human
ucuaagaaauug

SEQ ID NO: 1416667 - RNA, 12 nt, Human
ucuaagaaagaa

SEQ ID NO: 1416668 - RNA, 18 nt, Human
ucuaagaaacauuuauau

SEQ ID NO: 1416669 - RNA, 13 nt, Human
ucuaagaaagaac

SEQ ID NO: 1416670 - RNA, 22 nt, Human
ucuaagaaacauuuauauugau

SEQ ID NO: 1416671 - RNA, 17 nt, Human
ucuaagaaacauuuaua

SEQ ID NO: 1416672 - RNA, 15 nt, Human
ucuaagaaacauuua

SEQ ID NO: 1416673 - RNA, 19 nt, Human
ucuaacuuggcucacacuc

SEQ ID NO: 1416674 - RNA, 13 nt, Human
ucuaagaaacauu

SEQ ID NO: 1416675 - RNA, 18 nt, Human
ucuaaaggaguuuauguu

SEQ ID NO: 1416676 - RNA, 17 nt, Human
ucuaaaggaguuuaugu

SEQ ID NO: 1416677 - RNA, 19 nt, Human
ucuaaacuggagacugugu

SEQ ID NO: 1416678 - RNA, 17 nt, Human
ucuaaacuuccccaucu

SEQ ID NO: 1416679 - RNA, 15 nt, Human
ucuaaacuggagacu

SEQ ID NO: 1416680 - RNA, 14 nt, Human
ucuaaacuggagac

SEQ ID NO: 1416681 - RNA, 13 nt, Human
ucuaaacuggaga

SEQ ID NO: 1416682 - RNA, 13 nt, Human
ucuaaaggaguuu

SEQ ID NO: 1416683 - RNA, 21 nt, Human
ucuaaagcugguuuaauguuu

SEQ ID NO: 1416684 - RNA, 19 nt, Human
ucuaaagcugguuuaaugu

SEQ ID NO: 1416685 - RNA, 13 nt, Human
ucuaaaggcuacc

SEQ ID NO: 1416686 - RNA, 16 nt, Human
ucuaaaggcuaccuuu

SEQ ID NO: 1416687 - RNA, 12 nt, Human
ucuaaguuucua

SEQ ID NO: 1416688 - RNA, 22 nt, Human
ucuaaguuauaagacucucaca

SEQ ID NO: 1416689 - RNA, 20 nt, Human
ucuaaguuauaagacucuca

SEQ ID NO: 1416690 - RNA, 17 nt, Human
ucuaaguuauaagacuc

SEQ ID NO: 1416691 - RNA, 16 nt, Human
ucuaaguuauaagacu

SEQ ID NO: 1416692 - RNA, 14 nt, Human
ucuaaguuauaaga

SEQ ID NO: 1416693 - RNA, 21 nt, Human
ucuaaguuaauuuaaaguugu

SEQ ID NO: 1416694 - RNA, 20 nt, Human
ucuaaguuaauuuaaaguug

SEQ ID NO: 1416695 - RNA, 18 nt, Human
ucuaaguuaauuuaaagu

SEQ ID NO: 1416696 - RNA, 16 nt, Human
ucuaaguuaauuuaaa

SEQ ID NO: 1416697 - RNA, 14 nt, Human
ucuaaguuaauuua

SEQ ID NO: 1416698 - RNA, 18 nt, Human
ucuaaguguuucauaaau

SEQ ID NO: 1416699 - RNA, 13 nt, Human
ucuaagugauaua

SEQ ID NO: 1416700 - RNA, 14 nt, Human
ucuaagucuuucca

SEQ ID NO: 1416701 - RNA, 13 nt, Human
ucuaagucuuucc

SEQ ID NO: 1416702 - RNA, 19 nt, Human
ucuaaguaaauacaauuuu

SEQ ID NO: 1416703 - RNA, 20 nt, Human
ucuaaguaaauacaauuuuu

SEQ ID NO: 1416704 - RNA, 17 nt, Human
ucuaagcauaaaagaug

SEQ ID NO: 1416705 - RNA, 13 nt, Human
ucuaagauucuga

SEQ ID NO: 1416706 - RNA, 16 nt, Human
ucuaaguaaauacaau

SEQ ID NO: 1416707 - RNA, 19 nt, Human
ucuaagauucugauuuuag

SEQ ID NO: 1416708 - RNA, 12 nt, Human
ucuaagauucug

SEQ ID NO: 1416709 - RNA, 19 nt, Human
ucuaagauucuagaucaga

SEQ ID NO: 1416710 - RNA, 16 nt, Human
ucuaagauucuagauc

SEQ ID NO: 1416711 - RNA, 15 nt, Human
ucuaagauucuagau

SEQ ID NO: 1416712 - RNA, 14 nt, Human
ucuaagauucuaga

SEQ ID NO: 1416713 - RNA, 13 nt, Human
ucuaagauucuag

SEQ ID NO: 1416714 - RNA, 20 nt, Human
ucuaagauucuaaugaugau

SEQ ID NO: 1416715 - RNA, 19 nt, Human
ucuaagauucuaaugauga

SEQ ID NO: 1416716 - RNA, 17 nt, Human
ucuaagauucuaaugau

SEQ ID NO: 1416717 - RNA, 16 nt, Human
ucuaagauucuaauga

SEQ ID NO: 1416718 - RNA, 15 nt, Human
ucuaagauucuaaug

SEQ ID NO: 1416719 - RNA, 14 nt, Human
ucuaagauucuaau

SEQ ID NO: 1416720 - RNA, 19 nt, Human
ucuaagauucuaaaggucc

SEQ ID NO: 1416721 - RNA, 18 nt, Human
ucuaagauucuaaagguc

SEQ ID NO: 1416722 - RNA, 17 nt, Human
ucuaagauucuaaaggu

SEQ ID NO: 1416723 - RNA, 16 nt, Human
ucuaagauucuaaagg

SEQ ID NO: 1416724 - RNA, 15 nt, Human
ucuaagauucuaaag

SEQ ID NO: 1416725 - RNA, 14 nt, Human
ucuaagauucuaaa

SEQ ID NO: 1416726 - RNA, 13 nt, Human
ucuaagauucuaa

SEQ ID NO: 1416727 - RNA, 12 nt, Human
ucuaagauucua

SEQ ID NO: 1416728 - RNA, 23 nt, Human
ucuaccccagacuagauguagua

SEQ ID NO: 1416729 - RNA, 21 nt, Human
ucuaccccagacuagauguag

SEQ ID NO: 1416730 - RNA, 18 nt, Human
ucuaccccagacuagaug

SEQ ID NO: 1416731 - RNA, 16 nt, Human
ucuaccccagacuaga

SEQ ID NO: 1416732 - RNA, 16 nt, Human
ucuacauaugaucugu

SEQ ID NO: 1416733 - RNA, 17 nt, Human
ucuacaucuucugccuu

SEQ ID NO: 1416734 - RNA, 16 nt, Human
ucuacaucuucugccu

SEQ ID NO: 1416735 - RNA, 15 nt, Human
ucuacaucuucugcc

SEQ ID NO: 1416736 - RNA, 21 nt, Human
ucuacauaugaucugucugug

SEQ ID NO: 1416737 - RNA, 15 nt, Human
ucuacccauauuaca

SEQ ID NO: 1416738 - RNA, 17 nt, Human
ucuaccaaaaaucucaa

SEQ ID NO: 1416739 - RNA, 21 nt, Human
ucgggagacagcaucaggguu

SEQ ID NO: 1416740 - RNA, 16 nt, Human
ucgggagacagcauca

SEQ ID NO: 1416741 - RNA, 12 nt, Human
acuguguuccuu

SEQ ID NO: 1416742 - RNA, 14 nt, Human
acuguguuccuucc

SEQ ID NO: 1416743 - RNA, 16 nt, Human
acuguguuaugcaaaa

SEQ ID NO: 1416744 - RNA, 21 nt, Human
acuguguuaugcaaaagcaag

SEQ ID NO: 1416745 - RNA, 15 nt, Human
acuguggauauuguu

SEQ ID NO: 1416746 - RNA, 16 nt, Human
acuguccugggccugc

SEQ ID NO: 1416747 - RNA, 14 nt, Human
acuguccugggccu

SEQ ID NO: 1416748 - RNA, 22 nt, Human
acugugugugugaaugaacacu

SEQ ID NO: 1416749 - RNA, 18 nt, Human
acugugugugugaaugaa

SEQ ID NO: 1416750 - RNA, 16 nt, Human
acugugugugugaaug

SEQ ID NO: 1416751 - RNA, 15 nt, Human
acugugugugugaau

SEQ ID NO: 1416752 - RNA, 23 nt, Human
acugugugugcccucugggcucu

SEQ ID NO: 1416753 - RNA, 22 nt, Human
acugugugugcccucugggcuc

SEQ ID NO: 1416754 - RNA, 21 nt, Human
acugugugugcccucugggcu

SEQ ID NO: 1416755 - RNA, 20 nt, Human
acugugugugcccucugggc

SEQ ID NO: 1416756 - RNA, 19 nt, Human
acugugugugcccucuggg

SEQ ID NO: 1416757 - RNA, 18 nt, Human
acugugugugcccucugg

SEQ ID NO: 1416758 - RNA, 17 nt, Human
acugugugugcccucug

SEQ ID NO: 1416759 - RNA, 14 nt, Human
acugugugugcccu

SEQ ID NO: 1416760 - RNA, 13 nt, Human
acuguggguagac

SEQ ID NO: 1416761 - RNA, 18 nt, Human
ucguaugauacuucgaca

SEQ ID NO: 1416762 - RNA, 16 nt, Human
ucguacagaaagcugc

SEQ ID NO: 1416763 - RNA, 15 nt, Human
ucguacagaaagcug

SEQ ID NO: 1416764 - RNA, 20 nt, Human
ucguaagauuuccuucuuuu

SEQ ID NO: 1416765 - RNA, 16 nt, Human
ucggggcugggaaguc

SEQ ID NO: 1416766 - RNA, 15 nt, Human
ucggggcaucuggcc

SEQ ID NO: 1416767 - RNA, 17 nt, Human
ucggggauguguccuga

SEQ ID NO: 1416768 - RNA, 13 nt, Human
ucgggcugugccc

SEQ ID NO: 1416769 - RNA, 20 nt, Human
ucggggagccgggagccuga

SEQ ID NO: 1416770 - RNA, 12 nt, Human
ucgggcugugcc

SEQ ID NO: 1416771 - RNA, 19 nt, Human
ucuaaacccaauccaaaug

SEQ ID NO: 1416772 - RNA, 16 nt, Human
ucuaaacccaauccaa

SEQ ID NO: 1416773 - RNA, 18 nt, Human
ucuaaaauuauaaaugac

SEQ ID NO: 1416774 - RNA, 22 nt, Human
ucuaaaaugugauguucuaagg

SEQ ID NO: 1416775 - RNA, 21 nt, Human
ucuaaaaugugauguucuaag

SEQ ID NO: 1416776 - RNA, 20 nt, Human
ucuaaaaugugauguucuaa

SEQ ID NO: 1416777 - RNA, 19 nt, Human
ucuaaaaugugauguucua

SEQ ID NO: 1416778 - RNA, 18 nt, Human
ucuaaaaugugauguucu

SEQ ID NO: 1416779 - RNA, 19 nt, Human
ucguuuauuuucaagaaua

SEQ ID NO: 1416780 - RNA, 11 nt, Human
ucguucugugg

SEQ ID NO: 1416781 - RNA, 21 nt, Human
ucguaugauacuucgacacug

SEQ ID NO: 1416782 - RNA, 22 nt, Human
ucguaugauacuucgacacugu

SEQ ID NO: 1416783 - RNA, 23 nt, Human
ucgucacugcuuaacuucacaua

SEQ ID NO: 1416784 - RNA, 15 nt, Human
ucguucaaagcauga

SEQ ID NO: 1416785 - RNA, 14 nt, Human
ucguuaucuaauag

SEQ ID NO: 1416786 - RNA, 22 nt, Human
acugucauccucaaagaaagug

SEQ ID NO: 1416787 - RNA, 21 nt, Human
acugucauccucaaagaaagu

SEQ ID NO: 1416788 - RNA, 13 nt, Human
acugucauagaaa

SEQ ID NO: 1416789 - RNA, 15 nt, Human
acuguccccuugaag

SEQ ID NO: 1416790 - RNA, 18 nt, Human
acuguccccuugaaggag

SEQ ID NO: 1416791 - RNA, 21 nt, Human
acuguauuuuguauuguuuca

SEQ ID NO: 1416792 - RNA, 23 nt, Human
acuguauuugaaauaagaauuca

SEQ ID NO: 1416793 - RNA, 12 nt, Human
acuguauuugaa

SEQ ID NO: 1416794 - RNA, 23 nt, Human
acuguaucuaggcaacauaguau

SEQ ID NO: 1416795 - RNA, 22 nt, Human
acuguaucuaggcaacauagua

SEQ ID NO: 1416796 - RNA, 15 nt, Human
acuguaucuaggcaa

SEQ ID NO: 1416797 - RNA, 16 nt, Human
acuguauauuacagau

SEQ ID NO: 1416798 - RNA, 16 nt, Human
acuguaucaugacaaa

SEQ ID NO: 1416799 - RNA, 20 nt, Human
acuguaucaugacaaagacu

SEQ ID NO: 1416800 - RNA, 15 nt, Human
acuguacuugcucuu

SEQ ID NO: 1416801 - RNA, 20 nt, Human
acuguacaugaaaacacauu

SEQ ID NO: 1416802 - RNA, 21 nt, Human
acuguacaugaaaacacauuu

SEQ ID NO: 1416803 - RNA, 14 nt, Human
acuguauauucagg

SEQ ID NO: 1416804 - RNA, 14 nt, Human
acuguaucaugaca

SEQ ID NO: 1416805 - RNA, 23 nt, Human
acuguacuugcucuugaugccug

SEQ ID NO: 1416806 - RNA, 19 nt, Human
acuguacaugaaaacacau

SEQ ID NO: 1416807 - RNA, 20 nt, Human
acuggguaaugaaacaaaga

SEQ ID NO: 1416808 - RNA, 14 nt, Human
acuggguaaugaaa

SEQ ID NO: 1416809 - RNA, 18 nt, Human
acuguacagacagaaaaa

SEQ ID NO: 1416810 - RNA, 16 nt, Human
acuggggcaggggccg

SEQ ID NO: 1416811 - RNA, 17 nt, Human
acugggcugagggagcc

SEQ ID NO: 1416812 - RNA, 14 nt, Human
acugggcugaggga

SEQ ID NO: 1416813 - RNA, 13 nt, Human
acugggcugaggg

SEQ ID NO: 1416814 - RNA, 15 nt, Human
acugggggaaaagau

SEQ ID NO: 1416815 - RNA, 16 nt, Human
acuggggcucagagcc

SEQ ID NO: 1416816 - RNA, 18 nt, Human
acuggggcucagagccgg

SEQ ID NO: 1416817 - RNA, 15 nt, Human
acuggggcucagagc

SEQ ID NO: 1416818 - RNA, 13 nt, Human
acuggggcucaga

SEQ ID NO: 1416819 - RNA, 22 nt, Human
ucgcuggacucucagucucuga

SEQ ID NO: 1416820 - RNA, 20 nt, Human
ucgcuggacucucagucucu

SEQ ID NO: 1416821 - RNA, 16 nt, Human
ucgcugcuucguggga

SEQ ID NO: 1416822 - RNA, 20 nt, Human
ucgcugccagcucuguauca

SEQ ID NO: 1416823 - RNA, 19 nt, Human
ucgcugccagcucuguauc

SEQ ID NO: 1416824 - RNA, 15 nt, Human
ucgcucuuugagaaa

SEQ ID NO: 1416825 - RNA, 13 nt, Human
ucgcucuuugaga

SEQ ID NO: 1416826 - RNA, 11 nt, Human
ucgcuguccuu

SEQ ID NO: 1416827 - RNA, 17 nt, Human
ucgcuguccuuucuaga

SEQ ID NO: 1416828 - RNA, 16 nt, Human
ucgcugucacaggcgg

SEQ ID NO: 1416829 - RNA, 23 nt, Human
ucgcuggacucucagucucugag

SEQ ID NO: 1416830 - RNA, 14 nt, Human
ucgccccuggcaga

SEQ ID NO: 1416831 - RNA, 20 nt, Human
ucgccccagcaggugcugac

SEQ ID NO: 1416832 - RNA, 14 nt, Human
ucgccccagcaggu

SEQ ID NO: 1416833 - RNA, 19 nt, Human
ucgcccaugcuggagugca

SEQ ID NO: 1416834 - RNA, 21 nt, Human
acugaagcagccucuccccag

SEQ ID NO: 1416835 - RNA, 14 nt, Human
acugaagcagccuc

SEQ ID NO: 1416836 - RNA, 13 nt, Human
acugaagcagccu

SEQ ID NO: 1416837 - RNA, 19 nt, Human
acugaacaccauugaaggc

SEQ ID NO: 1416838 - RNA, 12 nt, Human
acugaagaguaa

SEQ ID NO: 1416839 - RNA, 22 nt, Human
acugaagaagcaccaaucauga

SEQ ID NO: 1416840 - RNA, 18 nt, Human
ucgcccuggacugugugc

SEQ ID NO: 1416841 - RNA, 16 nt, Human
ucgcccuuugcugcau

SEQ ID NO: 1416842 - RNA, 16 nt, Human
ucgccggaucugaggg

SEQ ID NO: 1416843 - RNA, 17 nt, Human
ucgccggaucugaggga

SEQ ID NO: 1416844 - RNA, 14 nt, Human
ucgcucucaguucu

SEQ ID NO: 1416845 - RNA, 12 nt, Human
ucgccuguaauc

SEQ ID NO: 1416846 - RNA, 22 nt, Human
ucgccugacaaccacuggucug

SEQ ID NO: 1416847 - RNA, 21 nt, Human
ucgccugacaaccacuggucu

SEQ ID NO: 1416848 - RNA, 20 nt, Human
ucgccugacaaccacugguc

SEQ ID NO: 1416849 - RNA, 11 nt, Human
ucgccugacaa

SEQ ID NO: 1416850 - RNA, 12 nt, Human
ucgccucagccu

SEQ ID NO: 1416851 - RNA, 22 nt, Human
acuuccucucgcggcccucagu

SEQ ID NO: 1416852 - RNA, 18 nt, Human
acuuccuccuccccacuu

SEQ ID NO: 1416853 - RNA, 17 nt, Human
acuuccuccuccccacu

SEQ ID NO: 1416854 - RNA, 15 nt, Human
acuuccuccucccca

SEQ ID NO: 1416855 - RNA, 20 nt, Human
acuuccuaaauauuaugaga

SEQ ID NO: 1416856 - RNA, 18 nt, Human
acuuccucucgcggcccu

SEQ ID NO: 1416857 - RNA, 14 nt, Human
ucuauaguucuaga

SEQ ID NO: 1416858 - RNA, 12 nt, Human
ucuauaguucua

SEQ ID NO: 1416859 - RNA, 19 nt, Human
ucuauagccaaaaauagcu

SEQ ID NO: 1416860 - RNA, 15 nt, Human
ucuauaguucuagac

SEQ ID NO: 1416861 - RNA, 19 nt, Human
ucuauuuuuggagguuuau

SEQ ID NO: 1416862 - RNA, 18 nt, Human
ucuauuuuuggagguuua

SEQ ID NO: 1416863 - RNA, 15 nt, Human
ucuauuuuuggaggu

SEQ ID NO: 1416864 - RNA, 15 nt, Human
ucuauuuuuaucuga

SEQ ID NO: 1416865 - RNA, 17 nt, Human
ucucaccaggcagccuc

SEQ ID NO: 1416866 - RNA, 16 nt, Human
ucucaccaggcagccu

SEQ ID NO: 1416867 - RNA, 14 nt, Human
ucucaccaggcagc

SEQ ID NO: 1416868 - RNA, 13 nt, Human
ucucaccaggcag

SEQ ID NO: 1416869 - RNA, 21 nt, Human
ucucaccaggcagccucuggg

SEQ ID NO: 1416870 - RNA, 22 nt, Human
ucucaccaggcagccucugggg

SEQ ID NO: 1416871 - RNA, 19 nt, Human
ucucaccaggcagccucug

SEQ ID NO: 1416872 - RNA, 18 nt, Human
ucucaccaggcagccucu

SEQ ID NO: 1416873 - RNA, 22 nt, Human
ucucacagugggagccagggcu

SEQ ID NO: 1416874 - RNA, 23 nt, Human
ucucacagugggagccagggcug

SEQ ID NO: 1416875 - RNA, 12 nt, Human
ucucacaguggg

SEQ ID NO: 1416876 - RNA, 19 nt, Human
ucucacagugggagccagg

SEQ ID NO: 1416877 - RNA, 21 nt, Human
ucucacagugggagccagggc

SEQ ID NO: 1416878 - RNA, 21 nt, Human
ucuauuuuuggagguuuauua

SEQ ID NO: 1416879 - RNA, 22 nt, Human
ucuauuuuuggagguuuauuac

SEQ ID NO: 1416880 - RNA, 20 nt, Human
ucuauuuuuugaaaagcaga

SEQ ID NO: 1416881 - RNA, 19 nt, Human
acuugccaaauuuagauuu

SEQ ID NO: 1416882 - RNA, 14 nt, Human
acuugccaaauuua

SEQ ID NO: 1416883 - RNA, 23 nt, Human
acuuggaacugaagggggcggcc

SEQ ID NO: 1416884 - RNA, 12 nt, Human
acuugccucuuc

SEQ ID NO: 1416885 - RNA, 16 nt, Human
acuugucuauuaccug

SEQ ID NO: 1416886 - RNA, 20 nt, Human
acuuguccuuagccuggacc

SEQ ID NO: 1416887 - RNA, 21 nt, Human
acuuguccuuagccuggaccu

SEQ ID NO: 1416888 - RNA, 18 nt, Human
acuuguccuagcacagau

SEQ ID NO: 1416889 - RNA, 17 nt, Human
acuuguccuagcacaga

SEQ ID NO: 1416890 - RNA, 15 nt, Human
acuuguauuaugugu

SEQ ID NO: 1416891 - RNA, 14 nt, Human
acuuguauauuuua

SEQ ID NO: 1416892 - RNA, 20 nt, Human
acuuguauauuuuaagaaau

SEQ ID NO: 1416893 - RNA, 13 nt, Human
acuuguauuaugu

SEQ ID NO: 1416894 - RNA, 14 nt, Human
acuuguauuaugug

SEQ ID NO: 1416895 - RNA, 18 nt, Human
acuugacccugagcugac

SEQ ID NO: 1416896 - RNA, 15 nt, Human
acuugacccugagcu

SEQ ID NO: 1416897 - RNA, 14 nt, Human
acuugacccugagc

SEQ ID NO: 1416898 - RNA, 13 nt, Human
acuugacagugga

SEQ ID NO: 1416899 - RNA, 14 nt, Human
acuugacaguggaa

SEQ ID NO: 1416900 - RNA, 12 nt, Human
acuugacagugg

SEQ ID NO: 1416901 - RNA, 14 nt, Human
acuugaagggccag

SEQ ID NO: 1416902 - RNA, 13 nt, Human
acuugaacugauu

SEQ ID NO: 1416903 - RNA, 21 nt, Human
acuugaacugauucacaucuc

SEQ ID NO: 1416904 - RNA, 17 nt, Human
acuugaggacacauguc

SEQ ID NO: 1416905 - RNA, 18 nt, Human
acuugaggacacaugucc

SEQ ID NO: 1416906 - RNA, 19 nt, Human
acuugaggacacaugucca

SEQ ID NO: 1416907 - RNA, 22 nt, Human
acuugaacguuuucuaauugcu

SEQ ID NO: 1416908 - RNA, 21 nt, Human
acuugaacguuuucuaauugc

SEQ ID NO: 1416909 - RNA, 20 nt, Human
acuugaacguuuucuaauug

SEQ ID NO: 1416910 - RNA, 19 nt, Human
acuugaacguuuucuaauu

SEQ ID NO: 1416911 - RNA, 18 nt, Human
acuugaacguuuucuaau

SEQ ID NO: 1416912 - RNA, 17 nt, Human
acuugaacguuuucuaa

SEQ ID NO: 1416913 - RNA, 20 nt, Human
acuugaaauauccugcuuga

SEQ ID NO: 1416914 - RNA, 14 nt, Human
acuucugacagccu

SEQ ID NO: 1416915 - RNA, 21 nt, Human
acuucucuuugccucaaauaa

SEQ ID NO: 1416916 - RNA, 17 nt, Human
acuucucuuugccucaa

SEQ ID NO: 1416917 - RNA, 16 nt, Human
acuucucuuugccuca

SEQ ID NO: 1416918 - RNA, 15 nt, Human
acuucucuuugccuc

SEQ ID NO: 1416919 - RNA, 14 nt, Human
acuucucuuugccu

SEQ ID NO: 1416920 - RNA, 21 nt, Human
acuucucuuguuagguaauuu

SEQ ID NO: 1416921 - RNA, 17 nt, Human
acuugaaaauuaacaug

SEQ ID NO: 1416922 - RNA, 12 nt, Human
acuugaaagaaa

SEQ ID NO: 1416923 - RNA, 16 nt, Human
acuucugacagccuca

SEQ ID NO: 1416924 - RNA, 15 nt, Human
acuucugacagccuc

SEQ ID NO: 1416925 - RNA, 18 nt, Human
acuugaaaauuaacauga

SEQ ID NO: 1416926 - RNA, 23 nt, Human
ucuagcgcaguuuuuuuuuucuu

SEQ ID NO: 1416927 - RNA, 13 nt, Human
ucuagccuggcua

SEQ ID NO: 1416928 - RNA, 12 nt, Human
ucuagcaugaag

SEQ ID NO: 1416929 - RNA, 21 nt, Human
ucuagauucucuggcuguaag

SEQ ID NO: 1416930 - RNA, 15 nt, Human
ucuagauugagagaa

SEQ ID NO: 1416931 - RNA, 14 nt, Human
ucuagauucucugg

SEQ ID NO: 1416932 - RNA, 11 nt, Human
ucuagauucuc

SEQ ID NO: 1416933 - RNA, 23 nt, Human
ucuagauuccauugguccaagau

SEQ ID NO: 1416934 - RNA, 22 nt, Human
ucuagauuccauugguccaaga

SEQ ID NO: 1416935 - RNA, 21 nt, Human
ucuagauuccauugguccaag

SEQ ID NO: 1416936 - RNA, 19 nt, Human
ucuagauuccauuggucca

SEQ ID NO: 1416937 - RNA, 23 nt, Human
ucuagauucaaagguucuagguu

SEQ ID NO: 1416938 - RNA, 22 nt, Human
ucuagauucaaagguucuaggu

SEQ ID NO: 1416939 - RNA, 20 nt, Human
ucuagauucaaagguucuag

SEQ ID NO: 1416940 - RNA, 19 nt, Human
ucuagauucaaagguucua

SEQ ID NO: 1416941 - RNA, 18 nt, Human
ucuagauucaaagguucu

SEQ ID NO: 1416942 - RNA, 17 nt, Human
ucuagauucaaagguuc

SEQ ID NO: 1416943 - RNA, 13 nt, Human
ucuagauucaaag

SEQ ID NO: 1416944 - RNA, 22 nt, Human
ucuagauguuuauucuucuaga

SEQ ID NO: 1416945 - RNA, 23 nt, Human
ucuagauguuuauucuucuagag

SEQ ID NO: 1416946 - RNA, 21 nt, Human
ucuagauguuuauucuucuag

SEQ ID NO: 1416947 - RNA, 22 nt, Human
ucuagaugauuaaauaagauuc

SEQ ID NO: 1416948 - RNA, 23 nt, Human
ucuagaugaaguuuuacauuguu

SEQ ID NO: 1416949 - RNA, 22 nt, Human
ucuagaugaaguuuuacauugu

SEQ ID NO: 1416950 - RNA, 21 nt, Human
ucuagaugaaguuuuacauug

SEQ ID NO: 1416951 - RNA, 20 nt, Human
ucuagaugaaguuuuacauu

SEQ ID NO: 1416952 - RNA, 19 nt, Human
ucuagaugaaguuuuacau

SEQ ID NO: 1416953 - RNA, 14 nt, Human
ucuagaucauaagg

SEQ ID NO: 1416954 - RNA, 22 nt, Human
ucuagaucagaugcuccaagau

SEQ ID NO: 1416955 - RNA, 21 nt, Human
ucuagaucagaugcuccaaga

SEQ ID NO: 1416956 - RNA, 20 nt, Human
ucuagaucagaugcuccaag

SEQ ID NO: 1416957 - RNA, 18 nt, Human
ucuagaucagaugcucca

SEQ ID NO: 1416958 - RNA, 16 nt, Human
ucuagaucagaugcuc

SEQ ID NO: 1416959 - RNA, 15 nt, Human
ucuagauaucgacuu

SEQ ID NO: 1416960 - RNA, 23 nt, Human
acuucccagcuaggaagagcagg

SEQ ID NO: 1416961 - RNA, 20 nt, Human
acuuccccauggcccugagc

SEQ ID NO: 1416962 - RNA, 24 nt, Human
ucuagauacuguaucaugacaaag

SEQ ID NO: 1416963 - RNA, 23 nt, Human
ucuaguuugauuaaauucuugca

SEQ ID NO: 1416964 - RNA, 14 nt, Human
ucuaguucauugaa

SEQ ID NO: 1416965 - RNA, 14 nt, Human
ucuaguucugccag

SEQ ID NO: 1416966 - RNA, 15 nt, Human
ucuaggaaauauacu

SEQ ID NO: 1416967 - RNA, 14 nt, Human
ucuagcuuaucuac

SEQ ID NO: 1416968 - RNA, 22 nt, Human
ucuaggaaauauacuuuuacaa

SEQ ID NO: 1416969 - RNA, 20 nt, Human
ucuauagccaaaaauagcua

SEQ ID NO: 1416970 - RNA, 17 nt, Human
ucuauagccaaaaauag

SEQ ID NO: 1416971 - RNA, 16 nt, Human
ucuauaauuuaccuaa

SEQ ID NO: 1416972 - RNA, 12 nt, Human
ucuauaauuuac

SEQ ID NO: 1416973 - RNA, 13 nt, Human
ucuauaaaccgaa

SEQ ID NO: 1416974 - RNA, 22 nt, Human
ucuaguuuuuuacuuuuguuua

SEQ ID NO: 1416975 - RNA, 13 nt, Human
ucuauaauuuaaa

SEQ ID NO: 1416976 - RNA, 14 nt, Human
acuuacucuaagau

SEQ ID NO: 1416977 - RNA, 13 nt, Human
acuuacucuaaga

SEQ ID NO: 1416978 - RNA, 21 nt, Human
ucuaccuggucucuccuuguu

SEQ ID NO: 1416979 - RNA, 19 nt, Human
ucuaccucaggcagcucaa

SEQ ID NO: 1416980 - RNA, 21 nt, Human
ucuacccugcauggcugagcu

SEQ ID NO: 1416981 - RNA, 13 nt, Human
acuuacuguacau

SEQ ID NO: 1416982 - RNA, 14 nt, Human
acuuacuguacaug

SEQ ID NO: 1416983 - RNA, 15 nt, Human
acuuacuguacauga

SEQ ID NO: 1416984 - RNA, 21 nt, Human
acuuagauuuuacaugaagua

SEQ ID NO: 1416985 - RNA, 24 nt, Human
acuuagauuuuacaugaaguauuu

SEQ ID NO: 1416986 - RNA, 16 nt, Human
acuuagcuaguuuuau

SEQ ID NO: 1416987 - RNA, 20 nt, Human
acuuagauuuuacaugaagu

SEQ ID NO: 1416988 - RNA, 19 nt, Human
acuuagauuuuacaugaag

SEQ ID NO: 1416989 - RNA, 18 nt, Human
acuuagauuuuacaugaa

SEQ ID NO: 1416990 - RNA, 17 nt, Human
acuuagauuuuacauga

SEQ ID NO: 1416991 - RNA, 16 nt, Human
acuuagauuuuacaug

SEQ ID NO: 1416992 - RNA, 15 nt, Human
acuuagauuuuacau

SEQ ID NO: 1416993 - RNA, 16 nt, Human
acuuacucuaagaucu

SEQ ID NO: 1416994 - RNA, 16 nt, Human
acuuacuguacaugaa

SEQ ID NO: 1416995 - RNA, 18 nt, Human
acuuccaaacuaauuuuu

SEQ ID NO: 1416996 - RNA, 17 nt, Human
acuuccaaacuaauuuu

SEQ ID NO: 1416997 - RNA, 16 nt, Human
acuuccaaacuaauuu

SEQ ID NO: 1416998 - RNA, 14 nt, Human
acuuccaaacuaau

SEQ ID NO: 1416999 - RNA, 13 nt, Human
acuucauuucaga

SEQ ID NO: 1417000 - RNA, 16 nt, Human
acuuaucugaucagaa

SEQ ID NO: 1417001 - RNA, 21 nt, Human
acuuccacagggucccacagc

SEQ ID NO: 1417002 - RNA, 20 nt, Human
acuuccacagggucccacag

SEQ ID NO: 1417003 - RNA, 16 nt, Human
acuuccacaggguccc

SEQ ID NO: 1417004 - RNA, 21 nt, Human
acuuccaaauccccuaagcag

SEQ ID NO: 1417005 - RNA, 19 nt, Human
acuuccaaauccccuaagc

SEQ ID NO: 1417006 - RNA, 19 nt, Human
acuuccaaacuaauuuuua

SEQ ID NO: 1417007 - RNA, 21 nt, Human
acuuccagguguuacuguaau

SEQ ID NO: 1417008 - RNA, 20 nt, Human
acuuccagguguuacuguaa

SEQ ID NO: 1417009 - RNA, 20 nt, Human
acuuccagauccuggaaauc

SEQ ID NO: 1417010 - RNA, 13 nt, Human
agaaaacaaaacu

SEQ ID NO: 1417011 - RNA, 21 nt, Human
agaaaacaaaacugcauuuca

SEQ ID NO: 1417012 - RNA, 14 nt, Human
agaaaaacaggcac

SEQ ID NO: 1417013 - RNA, 13 nt, Human
agaaaaacaggca

SEQ ID NO: 1417014 - RNA, 22 nt, Human
ucucuuguauaagauccuagau

SEQ ID NO: 1417015 - RNA, 23 nt, Human
agaaaaacaaacucguuuuuuac

SEQ ID NO: 1417016 - RNA, 22 nt, Human
ucucugcaggucccuaauaaag

SEQ ID NO: 1417017 - RNA, 19 nt, Human
ucucugcaggucccuaaua

SEQ ID NO: 1417018 - RNA, 20 nt, Human
ucucugcaggucccuaauaa

SEQ ID NO: 1417019 - RNA, 21 nt, Human
ucucugcaggucccuaauaaa

SEQ ID NO: 1417020 - RNA, 15 nt, Human
agaaacauuugguaa

SEQ ID NO: 1417021 - RNA, 17 nt, Human
agaaacuuaaauguuau

SEQ ID NO: 1417022 - RNA, 20 nt, Human
agaaacuuaaauguuauuau

SEQ ID NO: 1417023 - RNA, 18 nt, Human
agaaacuuaaauguuauu

SEQ ID NO: 1417024 - RNA, 21 nt, Human
agaaacuuaaauuuuaguucu

SEQ ID NO: 1417025 - RNA, 19 nt, Human
agaaacauuuauauugaua

SEQ ID NO: 1417026 - RNA, 15 nt, Human
agaaacauuuauauu

SEQ ID NO: 1417027 - RNA, 12 nt, Human
agaaacauuuau

SEQ ID NO: 1417028 - RNA, 22 nt, Human
agaaacaguugguaacuuuugu

SEQ ID NO: 1417029 - RNA, 21 nt, Human
agaaacaguugguaacuuuug

SEQ ID NO: 1417030 - RNA, 17 nt, Human
agaaacacccucacacu

SEQ ID NO: 1417031 - RNA, 18 nt, Human
agaaacaagguuuucagu

SEQ ID NO: 1417032 - RNA, 20 nt, Human
agaaacaacucuuugagaaa

SEQ ID NO: 1417033 - RNA, 14 nt, Human
agaaaagcuuugaa

SEQ ID NO: 1417034 - RNA, 21 nt, Human
agaaaagcuauaaaaugaaua

SEQ ID NO: 1417035 - RNA, 13 nt, Human
agaaaagcuauaa

SEQ ID NO: 1417036 - RNA, 16 nt, Human
agaaacacaacuauau

SEQ ID NO: 1417037 - RNA, 16 nt, Human
agaaaagaugcacuuu

SEQ ID NO: 1417038 - RNA, 19 nt, Human
agaaaagaugcacuuugcu

SEQ ID NO: 1417039 - RNA, 15 nt, Human
agaaaagaugcacuu

SEQ ID NO: 1417040 - RNA, 13 nt, Human
agaaaagaugcac

SEQ ID NO: 1417041 - RNA, 12 nt, Human
agaaaagaugca

SEQ ID NO: 1417042 - RNA, 16 nt, Human
agaaaacaaggaugaa

SEQ ID NO: 1417043 - RNA, 17 nt, Human
agaaagagaaacaguug

SEQ ID NO: 1417044 - RNA, 22 nt, Human
agaaagacuugguugguagggu

SEQ ID NO: 1417045 - RNA, 12 nt, Human
agaaagacuugg

SEQ ID NO: 1417046 - RNA, 19 nt, Human
agaaagaggugaccccagg

SEQ ID NO: 1417047 - RNA, 22 nt, Human
agaaagaggcaccaggaagccg

SEQ ID NO: 1417048 - RNA, 23 nt, Human
agaaacuuaaauguuauuaucug

SEQ ID NO: 1417049 - RNA, 22 nt, Human
agaaagaggugaccccagggca

SEQ ID NO: 1417050 - RNA, 23 nt, Human
agaaagaggugaccccagggcac

SEQ ID NO: 1417051 - RNA, 21 nt, Human
agaaagaggugaccccagggc

SEQ ID NO: 1417052 - RNA, 20 nt, Human
agaaagaggugaccccaggg

SEQ ID NO: 1417053 - RNA, 14 nt, Human
agaaauacaaaaau

SEQ ID NO: 1417054 - RNA, 14 nt, Human
agaaagcauuugaa

SEQ ID NO: 1417055 - RNA, 23 nt, Human
agaaauacaaaaauacucagaua

SEQ ID NO: 1417056 - RNA, 17 nt, Human
agaaagcaucccucacc

SEQ ID NO: 1417057 - RNA, 19 nt, Human
agaaagcaucccucaccca

SEQ ID NO: 1417058 - RNA, 22 nt, Human
agaaagcaucccucacccaucc

SEQ ID NO: 1417059 - RNA, 13 nt, Human
agaaagcauuuga

SEQ ID NO: 1417060 - RNA, 15 nt, Human
agaaaugcuuagaaa

SEQ ID NO: 1417061 - RNA, 17 nt, Human
agaaaucuggcuucugg

SEQ ID NO: 1417062 - RNA, 15 nt, Human
agaaaugccuuaccc

SEQ ID NO: 1417063 - RNA, 21 nt, Human
ucugaaggagccccauuccug

SEQ ID NO: 1417064 - RNA, 20 nt, Human
ucugaaggagccccauuccu

SEQ ID NO: 1417065 - RNA, 15 nt, Human
agaaaugguuguauu

SEQ ID NO: 1417066 - RNA, 16 nt, Human
agaaaugguuguauua

SEQ ID NO: 1417067 - RNA, 17 nt, Human
agaaaugguuguauuag

SEQ ID NO: 1417068 - RNA, 20 nt, Human
ucugaaggguaauuauauag

SEQ ID NO: 1417069 - RNA, 20 nt, Human
agaaauagcuuaugaaaaga

SEQ ID NO: 1417070 - RNA, 15 nt, Human
agaaauagucgguga

SEQ ID NO: 1417071 - RNA, 19 nt, Human
agaaauagcuuaugaaaag

SEQ ID NO: 1417072 - RNA, 13 nt, Human
agaaauagaacaa

SEQ ID NO: 1417073 - RNA, 16 nt, Human
agaaauagaauuauaa

SEQ ID NO: 1417074 - RNA, 23 nt, Human
agaaauacuacuguguaagggcc

SEQ ID NO: 1417075 - RNA, 16 nt, Human
agaaauacagauuuug

SEQ ID NO: 1417076 - RNA, 21 nt, Human
agaaauacagauuuugauagc

SEQ ID NO: 1417077 - RNA, 16 nt, Human
agaaaugaaaaaauau

SEQ ID NO: 1417078 - RNA, 13 nt, Human
agaaaugaaaaaa

SEQ ID NO: 1417079 - RNA, 22 nt, Human
agaaaucuauagaacugaauga

SEQ ID NO: 1417080 - RNA, 12 nt, Human
agaaaugaaaaa

SEQ ID NO: 1417081 - RNA, 15 nt, Human
acuuugcuugcuuug

SEQ ID NO: 1417082 - RNA, 14 nt, Human
acuuugcuugcuuu

SEQ ID NO: 1417083 - RNA, 13 nt, Human
acuuugcuugcuu

SEQ ID NO: 1417084 - RNA, 11 nt, Human
acuuugcuugc

SEQ ID NO: 1417085 - RNA, 21 nt, Human
acuuugcuaaagacaugaagc

SEQ ID NO: 1417086 - RNA, 20 nt, Human
acuuugcuaaagacaugaag

SEQ ID NO: 1417087 - RNA, 17 nt, Human
acuuugcuaaagacaug

SEQ ID NO: 1417088 - RNA, 16 nt, Human
acuuugcaucucagua

SEQ ID NO: 1417089 - RNA, 23 nt, Human
acuuugcagccggcacagggucu

SEQ ID NO: 1417090 - RNA, 22 nt, Human
acuuugcagcacagcugagagg

SEQ ID NO: 1417091 - RNA, 21 nt, Human
acuuugcacugauauaucaug

SEQ ID NO: 1417092 - RNA, 19 nt, Human
acuuugcacugauauauca

SEQ ID NO: 1417093 - RNA, 18 nt, Human
acuuugcacugauauauc

SEQ ID NO: 1417094 - RNA, 17 nt, Human
acuuugcacugauauau

SEQ ID NO: 1417095 - RNA, 14 nt, Human
acuuugaaguuagc

SEQ ID NO: 1417096 - RNA, 20 nt, Human
acuuugaaaggagaugucuu

SEQ ID NO: 1417097 - RNA, 19 nt, Human
acuuuguauaaaagggacu

SEQ ID NO: 1417098 - RNA, 22 nt, Human
acuuugcuuuaauauaaaugca

SEQ ID NO: 1417099 - RNA, 21 nt, Human
acuuugcuuuaauauaaaugc

SEQ ID NO: 1417100 - RNA, 19 nt, Human
acuuugcuuuaauauaaau

SEQ ID NO: 1417101 - RNA, 18 nt, Human
acuuugcuuuaauauaaa

SEQ ID NO: 1417102 - RNA, 17 nt, Human
acuuugcuuuaauauaa

SEQ ID NO: 1417103 - RNA, 16 nt, Human
acuuugcuuuaauaua

SEQ ID NO: 1417104 - RNA, 15 nt, Human
acuuugcuuuaauau

SEQ ID NO: 1417105 - RNA, 20 nt, Human
acuuugcuugcuuugaagua

SEQ ID NO: 1417106 - RNA, 13 nt, Human
acuuguuuuggau

SEQ ID NO: 1417107 - RNA, 16 nt, Human
acuuguuuuggaugcc

SEQ ID NO: 1417108 - RNA, 20 nt, Human
acuugugcccucccuguccu

SEQ ID NO: 1417109 - RNA, 21 nt, Human
acuugugcccucccuguccuu

SEQ ID NO: 1417110 - RNA, 22 nt, Human
acuuguuuuauuuaaccucuaa

SEQ ID NO: 1417111 - RNA, 16 nt, Human
acuuuagaagccugca

SEQ ID NO: 1417112 - RNA, 15 nt, Human
acuuuagaagccugc

SEQ ID NO: 1417113 - RNA, 17 nt, Human
acuuuagaauaugccuu

SEQ ID NO: 1417114 - RNA, 18 nt, Human
acuuugaaaggagauguc

SEQ ID NO: 1417115 - RNA, 23 nt, Human
acuuucuuuuuuuucuauuucac

SEQ ID NO: 1417116 - RNA, 22 nt, Human
acuuucuuuuuuuucuauuuca

SEQ ID NO: 1417117 - RNA, 23 nt, Human
acuuucuuuuuugauauagaagu

SEQ ID NO: 1417118 - RNA, 17 nt, Human
acuuucuuuuuugauau

SEQ ID NO: 1417119 - RNA, 23 nt, Human
acuuucuuuuuguagcuggggcu

SEQ ID NO: 1417120 - RNA, 18 nt, Human
acuuucuuuuuguagcug

SEQ ID NO: 1417121 - RNA, 16 nt, Human
acuuucuuucucacua

SEQ ID NO: 1417122 - RNA, 19 nt, Human
acuuucuuuucuggaaugu

SEQ ID NO: 1417123 - RNA, 15 nt, Human
acuuucuuuucugga

SEQ ID NO: 1417124 - RNA, 22 nt, Human
acuuucuuucucacuaaaucuu

SEQ ID NO: 1417125 - RNA, 13 nt, Human
acuuucuuucuca

SEQ ID NO: 1417126 - RNA, 13 nt, Human
acuuuagggaagu

SEQ ID NO: 1417127 - RNA, 17 nt, Human
agaaaaaaauugaaaug

SEQ ID NO: 1417128 - RNA, 16 nt, Human
agaaaaaaauugaaau

SEQ ID NO: 1417129 - RNA, 14 nt, Human
agaaaaaaauugaa

SEQ ID NO: 1417130 - RNA, 18 nt, Human
agaaaaaaauugaaaugu

SEQ ID NO: 1417131 - RNA, 22 nt, Human
agaaaaaaauguauuuuauguu

SEQ ID NO: 1417132 - RNA, 23 nt, Human
agaaaaaaauguauuuuauguua

SEQ ID NO: 1417133 - RNA, 18 nt, Human
agaaaaaaauguauuuua

SEQ ID NO: 1417134 - RNA, 16 nt, Human
agaaaaaaauguauuu

SEQ ID NO: 1417135 - RNA, 13 nt, Human
ucuccuucuuagc

SEQ ID NO: 1417136 - RNA, 14 nt, Human
agaaaaaaauguau

SEQ ID NO: 1417137 - RNA, 19 nt, Human
agaaaaaaaaauucacaug

SEQ ID NO: 1417138 - RNA, 14 nt, Human
acuuugugaauaga

SEQ ID NO: 1417139 - RNA, 20 nt, Human
acuuugucgcccaggcugga

SEQ ID NO: 1417140 - RNA, 18 nt, Human
acuuugugcauucuggau

SEQ ID NO: 1417141 - RNA, 14 nt, Human
ucucgcacaccucu

SEQ ID NO: 1417142 - RNA, 23 nt, Human
ucucgcauaggaccuuuccacca

SEQ ID NO: 1417143 - RNA, 16 nt, Human
ucucgcauaggaccuu

SEQ ID NO: 1417144 - RNA, 13 nt, Human
ucucgaucuccug

SEQ ID NO: 1417145 - RNA, 17 nt, Human
ucucgaugcaaugaaca

SEQ ID NO: 1417146 - RNA, 14 nt, Human
ucucgaugcaauga

SEQ ID NO: 1417147 - RNA, 22 nt, Human
ucucgagcgcccugcagacccu

SEQ ID NO: 1417148 - RNA, 19 nt, Human
ucucgagcgcccugcagac

SEQ ID NO: 1417149 - RNA, 18 nt, Human
ucucgagcgcccugcaga

SEQ ID NO: 1417150 - RNA, 17 nt, Human
ucucgagcgcccugcag

SEQ ID NO: 1417151 - RNA, 16 nt, Human
ucucgagcgcccugca

SEQ ID NO: 1417152 - RNA, 14 nt, Human
ucucgagcgcccug

SEQ ID NO: 1417153 - RNA, 14 nt, Human
ucuccuucuuagcu

SEQ ID NO: 1417154 - RNA, 19 nt, Human
ucuccuuuuccucucuccc

SEQ ID NO: 1417155 - RNA, 13 nt, Human
ucucuccagugca

SEQ ID NO: 1417156 - RNA, 19 nt, Human
ucucuccagcugacuaaac

SEQ ID NO: 1417157 - RNA, 18 nt, Human
ucucuccagcugacuaaa

SEQ ID NO: 1417158 - RNA, 18 nt, Human
ucucggccuucacaaucu

SEQ ID NO: 1417159 - RNA, 22 nt, Human
ucucucacuuguuuuauuuaac

SEQ ID NO: 1417160 - RNA, 22 nt, Human
agaagccaucaccucagauggc

SEQ ID NO: 1417161 - RNA, 20 nt, Human
agaagccaucaccucagaug

SEQ ID NO: 1417162 - RNA, 18 nt, Human
agaagccaucaccucaga

SEQ ID NO: 1417163 - RNA, 16 nt, Human
agaagccaucaccuca

SEQ ID NO: 1417164 - RNA, 22 nt, Human
agaagccaggaauuucccagga

SEQ ID NO: 1417165 - RNA, 13 nt, Human
agaagccaggaau

SEQ ID NO: 1417166 - RNA, 12 nt, Human
agaagccaggaa

SEQ ID NO: 1417167 - RNA, 21 nt, Human
agaagccagcuuguuuacaug

SEQ ID NO: 1417168 - RNA, 20 nt, Human
agaagccagcuuguuuacau

SEQ ID NO: 1417169 - RNA, 19 nt, Human
agaagccagcuuguuuaca

SEQ ID NO: 1417170 - RNA, 15 nt, Human
agaagccagcuuguu

SEQ ID NO: 1417171 - RNA, 14 nt, Human
agaagccagcuugu

SEQ ID NO: 1417172 - RNA, 13 nt, Human
agaagccagcuug

SEQ ID NO: 1417173 - RNA, 15 nt, Human
agaagcaguggccuu

SEQ ID NO: 1417174 - RNA, 20 nt, Human
agaacuuugagcuacugccg

SEQ ID NO: 1417175 - RNA, 15 nt, Human
agaacuuugagcuac

SEQ ID NO: 1417176 - RNA, 23 nt, Human
agaacuuggauguaccugccccc

SEQ ID NO: 1417177 - RNA, 18 nt, Human
agaacuuggauguaccug

SEQ ID NO: 1417178 - RNA, 15 nt, Human
agaacuugacccuga

SEQ ID NO: 1417179 - RNA, 19 nt, Human
agaagcaccaaucaugaau

SEQ ID NO: 1417180 - RNA, 21 nt, Human
agaagcaaccucaguaauuua

SEQ ID NO: 1417181 - RNA, 23 nt, Human
agaagcaaccucaguaauuuaga

SEQ ID NO: 1417182 - RNA, 13 nt, Human
agaagcaaguaaa

SEQ ID NO: 1417183 - RNA, 15 nt, Human
ucugcccccugcaga

SEQ ID NO: 1417184 - RNA, 16 nt, Human
ucugcccccugcagaa

SEQ ID NO: 1417185 - RNA, 14 nt, Human
ucugcccccugcag

SEQ ID NO: 1417186 - RNA, 20 nt, Human
agaagcccggcuccugguca

SEQ ID NO: 1417187 - RNA, 20 nt, Human
agaagcccgugugagaagug

SEQ ID NO: 1417188 - RNA, 13 nt, Human
ucugcccaggcac

SEQ ID NO: 1417189 - RNA, 22 nt, Human
ucugcccaggcacugcuaggcu

SEQ ID NO: 1417190 - RNA, 18 nt, Human
agaagcccggcuccuggu

SEQ ID NO: 1417191 - RNA, 17 nt, Human
agaagcccggcuccugg

SEQ ID NO: 1417192 - RNA, 16 nt, Human
agaagcccggcuccug

SEQ ID NO: 1417193 - RNA, 15 nt, Human
agaagcccggcuccu

SEQ ID NO: 1417194 - RNA, 14 nt, Human
agaagcccggcucc

SEQ ID NO: 1417195 - RNA, 13 nt, Human
agaagcccggcuc

SEQ ID NO: 1417196 - RNA, 24 nt, Human
agaagcccccagcuaagaaccugg

SEQ ID NO: 1417197 - RNA, 23 nt, Human
agaagcccccagcuaagaaccug

SEQ ID NO: 1417198 - RNA, 17 nt, Human
agaagcccccagcuaag

SEQ ID NO: 1417199 - RNA, 14 nt, Human
agaagcccccagcu

SEQ ID NO: 1417200 - RNA, 12 nt, Human
agaagcccccag

SEQ ID NO: 1417201 - RNA, 20 nt, Human
agaacugcaggcccuggccu

SEQ ID NO: 1417202 - RNA, 18 nt, Human
agaacugcaggcccuggc

SEQ ID NO: 1417203 - RNA, 16 nt, Human
agaacugcaggcccug

SEQ ID NO: 1417204 - RNA, 15 nt, Human
agaacugcaggcccu

SEQ ID NO: 1417205 - RNA, 12 nt, Human
agaacugcaggc

SEQ ID NO: 1417206 - RNA, 20 nt, Human
agaacucaaauggggccaga

SEQ ID NO: 1417207 - RNA, 18 nt, Human
agaaccuucucuaugggg

SEQ ID NO: 1417208 - RNA, 14 nt, Human
agaaccuucucuau

SEQ ID NO: 1417209 - RNA, 12 nt, Human
agaaccuucucu

SEQ ID NO: 1417210 - RNA, 19 nt, Human
agaacucaaauggggccag

SEQ ID NO: 1417211 - RNA, 17 nt, Human
agaacuagaauuugauu

SEQ ID NO: 1417212 - RNA, 16 nt, Human
agaacgcugauuuaaa

SEQ ID NO: 1417213 - RNA, 12 nt, Human
agaacggaagaa
